United States Patent Application Publication US 2005/0255487 A1 - sequence listing, part 34

SEQ ID NO: 924311 - RNA, 19 nt, Homo sapiens
  misc_RNA (1)...(19): siRNA sense strand
gaccucaagucaagaaacg

SEQ ID NO: 924312 - RNA, 19 nt, Homo sapiens
  misc_RNA (1)...(19): siRNA sense strand
aagaaacguuguuauagcu

SEQ ID NO: 924313 - RNA, 19 nt, Homo sapiens
  misc_RNA (1)...(19): siRNA sense strand
ggauggcuccagaaguuau

SEQ ID NO: 924314 - RNA, 19 nt, Homo sapiens
  misc_RNA (1)...(19): siRNA sense strand
aaauugaggcaacucuuga

SEQ ID NO: 924315 - RNA, 19 nt, Homo sapiens
  misc_RNA (1)...(19): siRNA sense strand
agcgugaucucagcuuuaa

SEQ ID NO: 924316 - RNA, 19 nt, Homo sapiens
  misc_RNA (1)...(19): siRNA sense strand
acuauggcauugucacaga

SEQ ID NO: 924317 - RNA, 19 nt, Homo sapiens
  misc_RNA (1)...(19): siRNA sense strand
agagcgugaucucagcuuu

SEQ ID NO: 924318 - RNA, 19 nt, Homo sapiens
  misc_RNA (1)...(19): siRNA sense strand
uuuggaaggauuacaagua

SEQ ID NO: 924319 - RNA, 19 nt, Homo sapiens
  misc_RNA (1)...(19): siRNA sense strand
cuuuaaagguuuggaagga

SEQ ID NO: 924320 - RNA, 19 nt, Homo sapiens
  misc_RNA (1)...(19): siRNA sense strand
gacaaggagguggcuguaa

SEQ ID NO: 924321 - RNA, 19 nt, Homo sapiens
  misc_RNA (1)...(19): siRNA sense strand
gagucucccugugucagaa

SEQ ID NO: 924322 - RNA, 19 nt, Homo sapiens
  misc_RNA (1)...(19): siRNA sense strand
acucauuccuacacaacaa

SEQ ID NO: 924323 - RNA, 19 nt, Homo sapiens
  misc_RNA (1)...(19): siRNA sense strand
agaaacggccaucauucaa

SEQ ID NO: 924324 - RNA, 19 nt, Homo sapiens
  misc_RNA (1)...(19): siRNA sense strand
ggaaggauuacaaguagcu

SEQ ID NO: 924325 - RNA, 19 nt, Homo sapiens
  misc_RNA (1)...(19): siRNA sense strand
caacuauggcauugucaca

SEQ ID NO: 924326 - RNA, 19 nt, Homo sapiens
  misc_RNA (1)...(19): siRNA sense strand
gagaaagaggcagaaauac

SEQ ID NO: 924327 - RNA, 19 nt, Homo sapiens
  misc_RNA (1)...(19): siRNA sense strand
ccaguuuuauggaguaauu

SEQ ID NO: 924328 - RNA, 19 nt, Homo sapiens
  misc_RNA (1)...(19): siRNA sense strand
agaaagaggcagaaauacu

SEQ ID NO: 924329 - RNA, 19 nt, Homo sapiens
  misc_RNA (1)...(19): siRNA sense strand
gugccucucgguuccauaa

SEQ ID NO: 924330 - RNA, 19 nt, Homo sapiens
  misc_RNA (1)...(19): siRNA sense strand
cauuaacaguaacagaagu

SEQ ID NO: 924331 - RNA, 19 nt, Homo sapiens
  misc_RNA (1)...(19): siRNA sense strand
aaagaagcuccucaaaaua

SEQ ID NO: 924332 - RNA, 19 nt, Homo sapiens
  misc_RNA (1)...(19): siRNA sense strand
guccuugguuggaacuuuc

SEQ ID NO: 924333 - RNA, 19 nt, Homo sapiens
  misc_RNA (1)...(19): siRNA sense strand
uguaaagaagcuccucaaa

SEQ ID NO: 924334 - RNA, 19 nt, Homo sapiens
  misc_RNA (1)...(19): siRNA sense strand
ggagauggauauggaucac

SEQ ID NO: 924335 - RNA, 19 nt, Homo sapiens
  misc_RNA (1)...(19): siRNA sense strand
agauggauauggaucacau

SEQ ID NO: 924336 - RNA, 19 nt, Homo sapiens
  misc_RNA (1)...(19): siRNA sense strand
aaagacguuuaaagaugug

SEQ ID NO: 924337 - RNA, 19 nt, Homo sapiens
  misc_RNA (1)...(19): siRNA sense strand
uugagaggcuaaagaaacu

SEQ ID NO: 924338 - RNA, 19 nt, Homo sapiens
  misc_RNA (1)...(19): siRNA sense strand
gagaggcuaaagaaacuag

SEQ ID NO: 924339 - RNA, 19 nt, Homo sapiens
  misc_RNA (1)...(19): siRNA sense strand
ggaaagauaccauaagaaa

SEQ ID NO: 924340 - RNA, 19 nt, Homo sapiens
  misc_RNA (1)...(19): siRNA sense strand
gaaauugucccuauugauu

SEQ ID NO: 924341 - RNA, 19 nt, Homo sapiens
  misc_RNA (1)...(19): siRNA sense strand
gcaaagcccuggaugauag

SEQ ID NO: 924342 - RNA, 19 nt, Homo sapiens
  misc_RNA (1)...(19): siRNA sense strand
gaagagacguggcgauugu

SEQ ID NO: 924343 - RNA, 19 nt, Homo sapiens
  misc_RNA (1)...(19): siRNA sense strand
gaaauacagagaaagcuua

SEQ ID NO: 924344 - RNA, 19 nt, Homo sapiens
  misc_RNA (1)...(19): siRNA sense strand
ccaaacggcuggugugauu

SEQ ID NO: 924345 - RNA, 19 nt, Homo sapiens
  misc_RNA (1)...(19): siRNA sense strand
acaaacagcuuaugcaaau

SEQ ID NO: 924346 - RNA, 19 nt, Homo sapiens
  misc_RNA (1)...(19): siRNA sense strand
gcagauaauugcccaagga

SEQ ID NO: 924347 - RNA, 19 nt, Homo sapiens
  misc_RNA (1)...(19): siRNA sense strand
gaaaucggcucaaacuucu

SEQ ID NO: 924348 - RNA, 19 nt, Homo sapiens
  misc_RNA (1)...(19): siRNA sense strand
gagaacagcugauagaaaa

SEQ ID NO: 924349 - RNA, 19 nt, Homo sapiens
  misc_RNA (1)...(19): siRNA sense strand
ggagugggaucacgacuau

SEQ ID NO: 924350 - RNA, 19 nt, Homo sapiens
  misc_RNA (1)...(19): siRNA sense strand
ggaaauugcuauugcucaa

SEQ ID NO: 924351 - RNA, 19 nt, Homo sapiens
  misc_RNA (1)...(19): siRNA sense strand
ggagaaacauuugugcuau

SEQ ID NO: 924352 - RNA, 19 nt, Homo sapiens
  misc_RNA (1)...(19): siRNA sense strand
ggaaaucggcucaaacuuc

SEQ ID NO: 924353 - RNA, 19 nt, Homo sapiens
  misc_RNA (1)...(19): siRNA sense strand
gaucugcagcucacuaaua

SEQ ID NO: 924354 - RNA, 19 nt, Homo sapiens
  misc_RNA (1)...(19): siRNA sense strand
gcaaggaguugaggaugaa

SEQ ID NO: 924355 - RNA, 19 nt, Homo sapiens
  misc_RNA (1)...(19): siRNA sense strand
uaaccuugaugcagagaua

SEQ ID NO: 924356 - RNA, 19 nt, Homo sapiens
  misc_RNA (1)...(19): siRNA sense strand
aaauacagcuccaacaaau

SEQ ID NO: 924357 - RNA, 19 nt, Homo sapiens
  misc_RNA (1)...(19): siRNA sense strand
cuacaaaggcuacaugaaa

SEQ ID NO: 924358 - RNA, 19 nt, Homo sapiens
  misc_RNA (1)...(19): siRNA sense strand
gcauguagccucaaacaga

SEQ ID NO: 924359 - RNA, 19 nt, Homo sapiens
  misc_RNA (1)...(19): siRNA sense strand
guggaaagauaccauaaga

SEQ ID NO: 924360 - RNA, 19 nt, Homo sapiens
  misc_RNA (1)...(19): siRNA sense strand
caaggaagaacuaaagaaa

SEQ ID NO: 924361 - RNA, 19 nt, Homo sapiens
  misc_RNA (1)...(19): siRNA sense strand
gauaauugcccaaggagaa

SEQ ID NO: 924362 - RNA, 19 nt, Homo sapiens
  misc_RNA (1)...(19): siRNA sense strand
gaacauugacagaaggaaa

SEQ ID NO: 924363 - RNA, 19 nt, Homo sapiens
  misc_RNA (1)...(19): siRNA sense strand
ggagaacagcugauagaaa

SEQ ID NO: 924364 - RNA, 19 nt, Homo sapiens
  misc_RNA (1)...(19): siRNA sense strand
gcacugacauccagaccau

SEQ ID NO: 924365 - RNA, 19 nt, Homo sapiens
  misc_RNA (1)...(19): siRNA sense strand
gcagcucacuaauauugaa

SEQ ID NO: 924366 - RNA, 19 nt, Homo sapiens
  misc_RNA (1)...(19): siRNA sense strand
cggaagaaauacagagaaa

SEQ ID NO: 924367 - RNA, 19 nt, Homo sapiens
  misc_RNA (1)...(19): siRNA sense strand
ucaaggagcuccagaaagc

SEQ ID NO: 924368 - RNA, 19 nt, Homo sapiens
  misc_RNA (1)...(19): siRNA sense strand
cgaaugcaguagcaguaua

SEQ ID NO: 924369 - RNA, 19 nt, Homo sapiens
  misc_RNA (1)...(19): siRNA sense strand
gagaaacauuugugcuaug

SEQ ID NO: 924370 - RNA, 19 nt, Homo sapiens
  misc_RNA (1)...(19): siRNA sense strand
ccacauagcagguccacaa

SEQ ID NO: 924371 - RNA, 19 nt, Homo sapiens
  misc_RNA (1)...(19): siRNA sense strand
gaaagcaaagcaucugaga

SEQ ID NO: 924372 - RNA, 19 nt, Homo sapiens
  misc_RNA (1)...(19): siRNA sense strand
ggaccuggcucgcucacau

SEQ ID NO: 924373 - RNA, 19 nt, Homo sapiens
  misc_RNA (1)...(19): siRNA sense strand
caaguagucagcaggauuu

SEQ ID NO: 924374 - RNA, 19 nt, Homo sapiens
  misc_RNA (1)...(19): siRNA sense strand
ucacugaaccacaauaaga

SEQ ID NO: 924375 - RNA, 19 nt, Homo sapiens
  misc_RNA (1)...(19): siRNA sense strand
ugaagagacuggagcacaa

SEQ ID NO: 924376 - RNA, 19 nt, Homo sapiens
  misc_RNA (1)...(19): siRNA sense strand
gagaacgacuugcuaaagc

SEQ ID NO: 924377 - RNA, 19 nt, Homo sapiens
  misc_RNA (1)...(19): siRNA sense strand
ggugaaugcugaaggaaca

SEQ ID NO: 924378 - RNA, 19 nt, Homo sapiens
  misc_RNA (1)...(19): siRNA sense strand
caaacagcuuaugcaaaua

SEQ ID NO: 924379 - RNA, 19 nt, Homo sapiens
  misc_RNA (1)...(19): siRNA sense strand
gaccaucacaaacagcuua

SEQ ID NO: 924380 - RNA, 19 nt, Homo sapiens
  misc_RNA (1)...(19): siRNA sense strand
ggaggucagucgucauauc

SEQ ID NO: 924381 - RNA, 19 nt, Homo sapiens
  misc_RNA (1)...(19): siRNA sense strand
gcuaaagccagccaugaaa

SEQ ID NO: 924382 - RNA, 19 nt, Homo sapiens
  misc_RNA (1)...(19): siRNA sense strand
agaaguggcagcaguuuaa

SEQ ID NO: 924383 - RNA, 19 nt, Homo sapiens
  misc_RNA (1)...(19): siRNA sense strand
ugcagcagcuugauaagaa

SEQ ID NO: 924384 - RNA, 19 nt, Homo sapiens
  misc_RNA (1)...(19): siRNA sense strand
ccaaggagaacagcugaua

SEQ ID NO: 924385 - RNA, 19 nt, Homo sapiens
  misc_RNA (1)...(19): siRNA sense strand
gcugugcccucuccaacaa

SEQ ID NO: 924386 - RNA, 19 nt, Homo sapiens
  misc_RNA (1)...(19): siRNA sense strand
agccaugguuugcuucuua

SEQ ID NO: 924387 - RNA, 19 nt, Homo sapiens
  misc_RNA (1)...(19): siRNA sense strand
gaagaaauacagagaaagc

SEQ ID NO: 924388 - RNA, 19 nt, Homo sapiens
  misc_RNA (1)...(19): siRNA sense strand
gaaguuauuagacguguca

SEQ ID NO: 924389 - RNA, 19 nt, Homo sapiens
  misc_RNA (1)...(19): siRNA sense strand
gaaaugagccaugguuugc

SEQ ID NO: 924390 - RNA, 19 nt, Homo sapiens
  misc_RNA (1)...(19): siRNA sense strand
ugacgcagcuggaacugau

SEQ ID NO: 924391 - RNA, 19 nt, Homo sapiens
  misc_RNA (1)...(19): siRNA sense strand
ccaucgagcuccagaucaa

SEQ ID NO: 924392 - RNA, 19 nt, Homo sapiens
  misc_RNA (1)...(19): siRNA sense strand
gaucaucgaggaggaacua

SEQ ID NO: 924393 - RNA, 19 nt, Homo sapiens
  misc_RNA (1)...(19): siRNA sense strand
ccacagugcccuagaguca

SEQ ID NO: 924394 - RNA, 19 nt, Homo sapiens
  misc_RNA (1)...(19): siRNA sense strand
gaagagacuggagcacaaa

SEQ ID NO: 924395 - RNA, 19 nt, Homo sapiens
  misc_RNA (1)...(19): siRNA sense strand
aaauaaagcaugagcuguu

SEQ ID NO: 924396 - RNA, 19 nt, Homo sapiens
  misc_RNA (1)...(19): siRNA sense strand
gggcuugccugccuuguac

SEQ ID NO: 924397 - RNA, 19 nt, Homo sapiens
  misc_RNA (1)...(19): siRNA sense strand
gaagcacaguacagguguu

SEQ ID NO: 924398 - RNA, 19 nt, Homo sapiens
  misc_RNA (1)...(19): siRNA sense strand
gaucgcuugucgcagauga

SEQ ID NO: 924399 - RNA, 19 nt, Homo sapiens
  misc_RNA (1)...(19): siRNA sense strand
agcaggagcuucagagaga

SEQ ID NO: 924400 - RNA, 19 nt, Homo sapiens
  misc_RNA (1)...(19): siRNA sense strand
caaaugggagaacgacuug

SEQ ID NO: 924401 - RNA, 19 nt, Homo sapiens
  misc_RNA (1)...(19): siRNA sense strand
ggagaacgacuugcuaaag

SEQ ID NO: 924402 - RNA, 19 nt, Homo sapiens
  misc_RNA (1)...(19): siRNA sense strand
ggcaaagcccuggaugaua

SEQ ID NO: 924403 - RNA, 19 nt, Homo sapiens
  misc_RNA (1)...(19): siRNA sense strand
aaauugcuauugcucaaga

SEQ ID NO: 924404 - RNA, 19 nt, Homo sapiens
  misc_RNA (1)...(19): siRNA sense strand
gaaauuucuggaugacuau

SEQ ID NO: 924405 - RNA, 19 nt, Homo sapiens
  misc_RNA (1)...(19): siRNA sense strand
cauguagccucaaacagau

SEQ ID NO: 924406 - RNA, 19 nt, Homo sapiens
  misc_RNA (1)...(19): siRNA sense strand
uauuagacgugucaaguag

SEQ ID NO: 924407 - RNA, 19 nt, Homo sapiens
  misc_RNA (1)...(19): siRNA sense strand
gcuagacaccagcuacaaa

SEQ ID NO: 924408 - RNA, 19 nt, Homo sapiens
  misc_RNA (1)...(19): siRNA sense strand
aaauaucauucgcagcaaa

SEQ ID NO: 924409 - RNA, 19 nt, Homo sapiens
  misc_RNA (1)...(19): siRNA sense strand
ggaccacagugcccuagag

SEQ ID NO: 924410 - RNA, 19 nt, Homo sapiens
  misc_RNA (1)...(19): siRNA sense strand
ccacagccuuccuccaauc

SEQ ID NO: 924411 - RNA, 19 nt, Homo sapiens
  misc_RNA (1)...(19): siRNA sense strand
ccaaggaagaacuaaagaa

SEQ ID NO: 924412 - RNA, 19 nt, Homo sapiens
  misc_RNA (1)...(19): siRNA sense strand
ugaaaugagccaugguuug

SEQ ID NO: 924413 - RNA, 19 nt, Homo sapiens
  misc_RNA (1)...(19): siRNA sense strand
caagaggaaauugcuauug

SEQ ID NO: 924414 - RNA, 19 nt, Homo sapiens
  misc_RNA (1)...(19): siRNA sense strand
gaaagauaccauaagaaac

SEQ ID NO: 924415 - RNA, 19 nt, Homo sapiens
  misc_RNA (1)...(19): siRNA sense strand
agugugauguucaagcuaa

SEQ ID NO: 924416 - RNA, 19 nt, Homo sapiens
  misc_RNA (1)...(19): siRNA sense strand
gggagaaccgcacugauuc

SEQ ID NO: 924417 - RNA, 19 nt, Homo sapiens
  misc_RNA (1)...(19): siRNA sense strand
uuuguuaaccugcauagua

SEQ ID NO: 924418 - RNA, 19 nt, Homo sapiens
  misc_RNA (1)...(19): siRNA sense strand
aauaaagcaugagcuguug

SEQ ID NO: 924419 - RNA, 19 nt, Homo sapiens
  misc_RNA (1)...(19): siRNA sense strand
ucacaaacagcuuaugcaa

SEQ ID NO: 924420 - RNA, 19 nt, Homo sapiens
  misc_RNA (1)...(19): siRNA sense strand
cuauacaguugccaaggaa

SEQ ID NO: 924421 - RNA, 19 nt, Homo sapiens
  misc_RNA (1)...(19): siRNA sense strand
ggucagucgucauaucaag

SEQ ID NO: 924422 - RNA, 19 nt, Homo sapiens
  misc_RNA (1)...(19): siRNA sense strand
gaggucagucgucauauca

SEQ ID NO: 924423 - RNA, 19 nt, Homo sapiens
  misc_RNA (1)...(19): siRNA sense strand
cagaaguggcagcaguuua

SEQ ID NO: 924424 - RNA, 19 nt, Homo sapiens
  misc_RNA (1)...(19): siRNA sense strand
gaaugcaguagcaguauag

SEQ ID NO: 924425 - RNA, 19 nt, Homo sapiens
  misc_RNA (1)...(19): siRNA sense strand
ucacgacuaugaccucagu

SEQ ID NO: 924426 - RNA, 19 nt, Homo sapiens
  misc_RNA (1)...(19): siRNA sense strand
agagagacauagagaagca

SEQ ID NO: 924427 - RNA, 19 nt, Homo sapiens
  misc_RNA (1)...(19): siRNA sense strand
agcaugagcuguuggaauc

SEQ ID NO: 924428 - RNA, 19 nt, Homo sapiens
  misc_RNA (1)...(19): siRNA sense strand
gugccaggguuuccaugaa

SEQ ID NO: 924429 - RNA, 19 nt, Homo sapiens
  misc_RNA (1)...(19): siRNA sense strand
ugaaacugcugggcgaaug

SEQ ID NO: 924430 - RNA, 19 nt, Homo sapiens
  misc_RNA (1)...(19): siRNA sense strand
gaaaggaggcugaaaaucg

SEQ ID NO: 924431 - RNA, 19 nt, Homo sapiens
  misc_RNA (1)...(19): siRNA sense strand
gaccuggagucugcaaugu

SEQ ID NO: 924432 - RNA, 19 nt, Homo sapiens
  misc_RNA (1)...(19): siRNA sense strand
ggaccuggagucugcaaug

SEQ ID NO: 924433 - RNA, 19 nt, Homo sapiens
  misc_RNA (1)...(19): siRNA sense strand
gagcacgaccucucagaca

SEQ ID NO: 924434 - RNA, 19 nt, Homo sapiens
  misc_RNA (1)...(19): siRNA sense strand
cagcaggaaauuucacuga

SEQ ID NO: 924435 - RNA, 19 nt, Homo sapiens
  misc_RNA (1)...(19): siRNA sense strand
ucacgaaggcaaccagaga

SEQ ID NO: 924436 - RNA, 19 nt, Homo sapiens
  misc_RNA (1)...(19): siRNA sense strand
ggagaaccgcacugauuca

SEQ ID NO: 924437 - RNA, 19 nt, Homo sapiens
  misc_RNA (1)...(19): siRNA sense strand
gcaaguguagucucucaca

SEQ ID NO: 924438 - RNA, 19 nt, Homo sapiens
  misc_RNA (1)...(19): siRNA sense strand
caacuuugcccggucauuc

SEQ ID NO: 924439 - RNA, 19 nt, Homo sapiens
  misc_RNA (1)...(19): siRNA sense strand
ggaaagauaccauaagaaa

SEQ ID NO: 924440 - RNA, 19 nt, Homo sapiens
  misc_RNA (1)...(19): siRNA sense strand
gaaauugucccuauugauu

SEQ ID NO: 924441 - RNA, 19 nt, Homo sapiens
  misc_RNA (1)...(19): siRNA sense strand
gcaaagcccuggaugauag

SEQ ID NO: 924442 - RNA, 19 nt, Homo sapiens
  misc_RNA (1)...(19): siRNA sense strand
gaagagacguggcgauugu

SEQ ID NO: 924443 - RNA, 19 nt, Homo sapiens
  misc_RNA (1)...(19): siRNA sense strand
gaaauacagagaaagcuua

SEQ ID NO: 924444 - RNA, 19 nt, Homo sapiens
  misc_RNA (1)...(19): siRNA sense strand
ccaaacggcuggugugauu

SEQ ID NO: 924445 - RNA, 19 nt, Homo sapiens
  misc_RNA (1)...(19): siRNA sense strand
acaaacagcuuaugcaaau

SEQ ID NO: 924446 - RNA, 19 nt, Homo sapiens
  misc_RNA (1)...(19): siRNA sense strand
gcagauaauugcccaagga

SEQ ID NO: 924447 - RNA, 19 nt, Homo sapiens
  misc_RNA (1)...(19): siRNA sense strand
gaaaucggcucaaacuucu

SEQ ID NO: 924448 - RNA, 19 nt, Homo sapiens
  misc_RNA (1)...(19): siRNA sense strand
gagaacagcugauagaaaa

SEQ ID NO: 924449 - RNA, 19 nt, Homo sapiens
  misc_RNA (1)...(19): siRNA sense strand
ggagugggaucacgacuau

SEQ ID NO: 924450 - RNA, 19 nt, Homo sapiens
  misc_RNA (1)...(19): siRNA sense strand
ggaaauugcuauugcucaa

SEQ ID NO: 924451 - RNA, 19 nt, Homo sapiens
  misc_RNA (1)...(19): siRNA sense strand
ggagaaacauuugugcuau

SEQ ID NO: 924452 - RNA, 19 nt, Homo sapiens
  misc_RNA (1)...(19): siRNA sense strand
ggaaaucggcucaaacuuc

SEQ ID NO: 924453 - RNA, 19 nt, Homo sapiens
  misc_RNA (1)...(19): siRNA sense strand
gaucugcagcucacuaaua

SEQ ID NO: 924454 - RNA, 19 nt, Homo sapiens
  misc_RNA (1)...(19): siRNA sense strand
gcaaggaguugaggaugaa

SEQ ID NO: 924455 - RNA, 19 nt, Homo sapiens
  misc_RNA (1)...(19): siRNA sense strand
uaaccuugaugcagagaua

SEQ ID NO: 924456 - RNA, 19 nt, Homo sapiens
  misc_RNA (1)...(19): siRNA sense strand
aaauacagcuccaacaaau

SEQ ID NO: 924457 - RNA, 19 nt, Homo sapiens
  misc_RNA (1)...(19): siRNA sense strand
cuacaaaggcuacaugaaa

SEQ ID NO: 924458 - RNA, 19 nt, Homo sapiens
  misc_RNA (1)...(19): siRNA sense strand
gcauguagccucaaacaga

SEQ ID NO: 924459 - RNA, 19 nt, Homo sapiens
  misc_RNA (1)...(19): siRNA sense strand
guggaaagauaccauaaga

SEQ ID NO: 924460 - RNA, 19 nt, Homo sapiens
  misc_RNA (1)...(19): siRNA sense strand
caaggaagaacuaaagaaa

SEQ ID NO: 924461 - RNA, 19 nt, Homo sapiens
  misc_RNA (1)...(19): siRNA sense strand
gauaauugcccaaggagaa

SEQ ID NO: 924462 - RNA, 19 nt, Homo sapiens
  misc_RNA (1)...(19): siRNA sense strand
gaacauugacagaaggaaa

SEQ ID NO: 924463 - RNA, 19 nt, Homo sapiens
  misc_RNA (1)...(19): siRNA sense strand
ggagaacagcugauagaaa

SEQ ID NO: 924464 - RNA, 19 nt, Homo sapiens
  misc_RNA (1)...(19): siRNA sense strand
gcacugacauccagaccau

SEQ ID NO: 924465 - RNA, 19 nt, Homo sapiens
  misc_RNA (1)...(19): siRNA sense strand
gcagcucacuaauauugaa

SEQ ID NO: 924466 - RNA, 19 nt, Homo sapiens
  misc_RNA (1)...(19): siRNA sense strand
cggaagaaauacagagaaa

SEQ ID NO: 924467 - RNA, 19 nt, Homo sapiens
  misc_RNA (1)...(19): siRNA sense strand
ucaaggagcuccagaaagc

SEQ ID NO: 924468 - RNA, 19 nt, Homo sapiens
  misc_RNA (1)...(19): siRNA sense strand
cgaaugcaguagcaguaua

SEQ ID NO: 924469 - RNA, 19 nt, Homo sapiens
  misc_RNA (1)...(19): siRNA sense strand
gagaaacauuugugcuaug

SEQ ID NO: 924470 - RNA, 19 nt, Homo sapiens
  misc_RNA (1)...(19): siRNA sense strand
ccacauagcagguccacaa

SEQ ID NO: 924471 - RNA, 19 nt, Homo sapiens
  misc_RNA (1)...(19): siRNA sense strand
gaaagcaaagcaucugaga

SEQ ID NO: 924472 - RNA, 19 nt, Homo sapiens
  misc_RNA (1)...(19): siRNA sense strand
ggaccuggcucgcucacau

SEQ ID NO: 924473 - RNA, 19 nt, Homo sapiens
  misc_RNA (1)...(19): siRNA sense strand
caaguagucagcaggauuu

SEQ ID NO: 924474 - RNA, 19 nt, Homo sapiens
  misc_RNA (1)...(19): siRNA sense strand
ucacugaaccacaauaaga

SEQ ID NO: 924475 - RNA, 19 nt, Homo sapiens
  misc_RNA (1)...(19): siRNA sense strand
ugaagagacuggagcacaa

SEQ ID NO: 924476 - RNA, 19 nt, Homo sapiens
  misc_RNA (1)...(19): siRNA sense strand
gagaacgacuugcuaaagc

SEQ ID NO: 924477 - RNA, 19 nt, Homo sapiens
  misc_RNA (1)...(19): siRNA sense strand
ggugaaugcugaaggaaca

SEQ ID NO: 924478 - RNA, 19 nt, Homo sapiens
  misc_RNA (1)...(19): siRNA sense strand
caaacagcuuaugcaaaua

SEQ ID NO: 924479 - RNA, 19 nt, Homo sapiens
  misc_RNA (1)...(19): siRNA sense strand
gaccaucacaaacagcuua

SEQ ID NO: 924480 - RNA, 19 nt, Homo sapiens
  misc_RNA (1)...(19): siRNA sense strand
ggaggucagucgucauauc

SEQ ID NO: 924481 - RNA, 19 nt, Homo sapiens
  misc_RNA (1)...(19): siRNA sense strand
gcuaaagccagccaugaaa

SEQ ID NO: 924482 - RNA, 19 nt, Homo sapiens
  misc_RNA (1)...(19): siRNA sense strand
agaaguggcagcaguuuaa

SEQ ID NO: 924483 - RNA, 19 nt, Homo sapiens
  misc_RNA (1)...(19): siRNA sense strand
ugcagcagcuugauaagaa

SEQ ID NO: 924484 - RNA, 19 nt, Homo sapiens
  misc_RNA (1)...(19): siRNA sense strand
ccaaggagaacagcugaua

SEQ ID NO: 924485 - RNA, 19 nt, Homo sapiens
  misc_RNA (1)...(19): siRNA sense strand
gcugugcccucuccaacaa

SEQ ID NO: 924486 - RNA, 19 nt, Homo sapiens
  misc_RNA (1)...(19): siRNA sense strand
agccaugguuugcuucuua

SEQ ID NO: 924487 - RNA, 19 nt, Homo sapiens
  misc_RNA (1)...(19): siRNA sense strand
gaagaaauacagagaaagc

SEQ ID NO: 924488 - RNA, 19 nt, Homo sapiens
  misc_RNA (1)...(19): siRNA sense strand
gaaguuauuagacguguca

SEQ ID NO: 924489 - RNA, 19 nt, Homo sapiens
  misc_RNA (1)...(19): siRNA sense strand
gaaaugagccaugguuugc

SEQ ID NO: 924490 - RNA, 19 nt, Homo sapiens
  misc_RNA (1)...(19): siRNA sense strand
ugacgcagcuggaacugau

SEQ ID NO: 924491 - RNA, 19 nt, Homo sapiens
  misc_RNA (1)...(19): siRNA sense strand
ccaucgagcuccagaucaa

SEQ ID NO: 924492 - RNA, 19 nt, Homo sapiens
  misc_RNA (1)...(19): siRNA sense strand
gaucaucgaggaggaacua

SEQ ID NO: 924493 - RNA, 19 nt, Homo sapiens
  misc_RNA (1)...(19): siRNA sense strand
ccacagugcccuagaguca

SEQ ID NO: 924494 - RNA, 19 nt, Homo sapiens
  misc_RNA (1)...(19): siRNA sense strand
gaagagacuggagcacaaa

SEQ ID NO: 924495 - RNA, 19 nt, Homo sapiens
  misc_RNA (1)...(19): siRNA sense strand
aaauaaagcaugagcuguu

SEQ ID NO: 924496 - RNA, 19 nt, Homo sapiens
  misc_RNA (1)...(19): siRNA sense strand
gggcuugccugccuuguac

SEQ ID NO: 924497 - RNA, 19 nt, Homo sapiens
  misc_RNA (1)...(19): siRNA sense strand
gaagcacaguacagguguu

SEQ ID NO: 924498 - RNA, 19 nt, Homo sapiens
  misc_RNA (1)...(19): siRNA sense strand
gaucgcuugucgcagauga

SEQ ID NO: 924499 - RNA, 19 nt, Homo sapiens
  misc_RNA (1)...(19): siRNA sense strand
agcaggagcuucagagaga

SEQ ID NO: 924500 - RNA, 19 nt, Homo sapiens
  misc_RNA (1)...(19): siRNA sense strand
caaaugggagaacgacuug

SEQ ID NO: 924501 - RNA, 19 nt, Homo sapiens
  misc_RNA (1)...(19): siRNA sense strand
ggagaacgacuugcuaaag

SEQ ID NO: 924502 - RNA, 19 nt, Homo sapiens
  misc_RNA (1)...(19): siRNA sense strand
ggcaaagcccuggaugaua

SEQ ID NO: 924503 - RNA, 19 nt, Homo sapiens
  misc_RNA (1)...(19): siRNA sense strand
aaauugcuauugcucaaga

SEQ ID NO: 924504 - RNA, 19 nt, Homo sapiens
  misc_RNA (1)...(19): siRNA sense strand
gaaauuucuggaugacuau

SEQ ID NO: 924505 - RNA, 19 nt, Homo sapiens
  misc_RNA (1)...(19): siRNA sense strand
cauguagccucaaacagau

SEQ ID NO: 924506 - RNA, 19 nt, Homo sapiens
  misc_RNA (1)...(19): siRNA sense strand
uauuagacgugucaaguag

SEQ ID NO: 924507 - RNA, 19 nt, Homo sapiens
  misc_RNA (1)...(19): siRNA sense strand
gcuagacaccagcuacaaa

SEQ ID NO: 924508 - RNA, 19 nt, Homo sapiens
  misc_RNA (1)...(19): siRNA sense strand
aaauaucauucgcagcaaa

SEQ ID NO: 924509 - RNA, 19 nt, Homo sapiens
  misc_RNA (1)...(19): siRNA sense strand
ggaccacagugcccuagag

SEQ ID NO: 924510 - RNA, 19 nt, Homo sapiens
  misc_RNA (1)...(19): siRNA sense strand
ccacagccuuccuccaauc

SEQ ID NO: 924511 - RNA, 19 nt, Homo sapiens
  misc_RNA (1)...(19): siRNA sense strand
ccaaggaagaacuaaagaa

SEQ ID NO: 924512 - RNA, 19 nt, Homo sapiens
  misc_RNA (1)...(19): siRNA sense strand
ugaaaugagccaugguuug

SEQ ID NO: 924513 - RNA, 19 nt, Homo sapiens
  misc_RNA (1)...(19): siRNA sense strand
caagaggaaauugcuauug

SEQ ID NO: 924514 - RNA, 19 nt, Homo sapiens
  misc_RNA (1)...(19): siRNA sense strand
gaaagauaccauaagaaac

SEQ ID NO: 924515 - RNA, 19 nt, Homo sapiens
  misc_RNA (1)...(19): siRNA sense strand
agugugauguucaagcuaa

SEQ ID NO: 924516 - RNA, 19 nt, Homo sapiens
  misc_RNA (1)...(19): siRNA sense strand
gggagaaccgcacugauuc

SEQ ID NO: 924517 - RNA, 19 nt, Homo sapiens
  misc_RNA (1)...(19): siRNA sense strand
uuuguuaaccugcauagua

SEQ ID NO: 924518 - RNA, 19 nt, Homo sapiens
  misc_RNA (1)...(19): siRNA sense strand
aauaaagcaugagcuguug

SEQ ID NO: 924519 - RNA, 19 nt, Homo sapiens
  misc_RNA (1)...(19): siRNA sense strand
ucacaaacagcuuaugcaa

SEQ ID NO: 924520 - RNA, 19 nt, Homo sapiens
  misc_RNA (1)...(19): siRNA sense strand
cuauacaguugccaaggaa

SEQ ID NO: 924521 - RNA, 19 nt, Homo sapiens
  misc_RNA (1)...(19): siRNA sense strand
ggucagucgucauaucaag

SEQ ID NO: 924522 - RNA, 19 nt, Homo sapiens
  misc_RNA (1)...(19): siRNA sense strand
gaggucagucgucauauca

SEQ ID NO: 924523 - RNA, 19 nt, Homo sapiens
  misc_RNA (1)...(19): siRNA sense strand
cagaaguggcagcaguuua

SEQ ID NO: 924524 - RNA, 19 nt, Homo sapiens
  misc_RNA (1)...(19): siRNA sense strand
gaaugcaguagcaguauag

SEQ ID NO: 924525 - RNA, 19 nt, Homo sapiens
  misc_RNA (1)...(19): siRNA sense strand
ucacgacuaugaccucagu

SEQ ID NO: 924526 - RNA, 19 nt, Homo sapiens
  misc_RNA (1)...(19): siRNA sense strand
agagagacauagagaagca

SEQ ID NO: 924527 - RNA, 19 nt, Homo sapiens
  misc_RNA (1)...(19): siRNA sense strand
agcaugagcuguuggaauc

SEQ ID NO: 924528 - RNA, 19 nt, Homo sapiens
  misc_RNA (1)...(19): siRNA sense strand
gugccaggguuuccaugaa

SEQ ID NO: 924529 - RNA, 19 nt, Homo sapiens
  misc_RNA (1)...(19): siRNA sense strand
ugaaacugcugggcgaaug

SEQ ID NO: 924530 - RNA, 19 nt, Homo sapiens
  misc_RNA (1)...(19): siRNA sense strand
gaaaggaggcugaaaaucg

SEQ ID NO: 924531 - RNA, 19 nt, Homo sapiens
  misc_RNA (1)...(19): siRNA sense strand
gaccuggagucugcaaugu

SEQ ID NO: 924532 - RNA, 19 nt, Homo sapiens
  misc_RNA (1)...(19): siRNA sense strand
ggaccuggagucugcaaug

SEQ ID NO: 924533 - RNA, 19 nt, Homo sapiens
  misc_RNA (1)...(19): siRNA sense strand
gagcacgaccucucagaca

SEQ ID NO: 924534 - RNA, 19 nt, Homo sapiens
  misc_RNA (1)...(19): siRNA sense strand
cagcaggaaauuucacuga

SEQ ID NO: 924535 - RNA, 19 nt, Homo sapiens
  misc_RNA (1)...(19): siRNA sense strand
ucacgaaggcaaccagaga

SEQ ID NO: 924536 - RNA, 19 nt, Homo sapiens
  misc_RNA (1)...(19): siRNA sense strand
ggagaaccgcacugauuca

SEQ ID NO: 924537 - RNA, 19 nt, Homo sapiens
  misc_RNA (1)...(19): siRNA sense strand
gcaaguguagucucucaca

SEQ ID NO: 924538 - RNA, 19 nt, Homo sapiens
  misc_RNA (1)...(19): siRNA sense strand
caacuuugcccggucauuc

SEQ ID NO: 924539 - RNA, 19 nt, Homo sapiens
  misc_RNA (1)...(19): siRNA sense strand
ggaaagauaccauaagaaa

SEQ ID NO: 924540 - RNA, 19 nt, Homo sapiens
  misc_RNA (1)...(19): siRNA sense strand
gaaauugucccuauugauu

SEQ ID NO: 924541 - RNA, 19 nt, Homo sapiens
  misc_RNA (1)...(19): siRNA sense strand
gcaaagcccuggaugauag

SEQ ID NO: 924542 - RNA, 19 nt, Homo sapiens
  misc_RNA (1)...(19): siRNA sense strand
gaagagacguggcgauugu

SEQ ID NO: 924543 - RNA, 19 nt, Homo sapiens
  misc_RNA (1)...(19): siRNA sense strand
gaaauacagagaaagcuua

SEQ ID NO: 924544 - RNA, 19 nt, Homo sapiens
  misc_RNA (1)...(19): siRNA sense strand
ccaaacggcuggugugauu

SEQ ID NO: 924545 - RNA, 19 nt, Homo sapiens
  misc_RNA (1)...(19): siRNA sense strand
acaaacagcuuaugcaaau

SEQ ID NO: 924546 - RNA, 19 nt, Homo sapiens
  misc_RNA (1)...(19): siRNA sense strand
gcagauaauugcccaagga

SEQ ID NO: 924547 - RNA, 19 nt, Homo sapiens
  misc_RNA (1)...(19): siRNA sense strand
gaaaucggcucaaacuucu

SEQ ID NO: 924548 - RNA, 19 nt, Homo sapiens
  misc_RNA (1)...(19): siRNA sense strand
gagaacagcugauagaaaa

SEQ ID NO: 924549 - RNA, 19 nt, Homo sapiens
  misc_RNA (1)...(19): siRNA sense strand
ggagugggaucacgacuau

SEQ ID NO: 924550 - RNA, 19 nt, Homo sapiens
  misc_RNA (1)...(19): siRNA sense strand
ggagaaacauuugugcuau

SEQ ID NO: 924551 - RNA, 19 nt, Homo sapiens
  misc_RNA (1)...(19): siRNA sense strand
ggaaaucggcucaaacuuc

SEQ ID NO: 924552 - RNA, 19 nt, Homo sapiens
  misc_RNA (1)...(19): siRNA sense strand
gaucugcagcucacuaaua

SEQ ID NO: 924553 - RNA, 19 nt, Homo sapiens
  misc_RNA (1)...(19): siRNA sense strand
gcaaggaguugaggaugaa

SEQ ID NO: 924554 - RNA, 19 nt, Homo sapiens
  misc_RNA (1)...(19): siRNA sense strand
uaaccuugaugcagagaua

SEQ ID NO: 924555 - RNA, 19 nt, Homo sapiens
  misc_RNA (1)...(19): siRNA sense strand
cuacaaaggcuacaugaaa

SEQ ID NO: 924556 - RNA, 19 nt, Homo sapiens
  misc_RNA (1)...(19): siRNA sense strand
gcauguagccucaaacaga

SEQ ID NO: 924557 - RNA, 19 nt, Homo sapiens
  misc_RNA (1)...(19): siRNA sense strand
guggaaagauaccauaaga

SEQ ID NO: 924558 - RNA, 19 nt, Homo sapiens
  misc_RNA (1)...(19): siRNA sense strand
caaggaagaacuaaagaaa

SEQ ID NO: 924559 - RNA, 19 nt, Homo sapiens
  misc_RNA (1)...(19): siRNA sense strand
gauaauugcccaaggagaa

SEQ ID NO: 924560 - RNA, 19 nt, Homo sapiens
  misc_RNA (1)...(19): siRNA sense strand
gaacauugacagaaggaaa

SEQ ID NO: 924561 - RNA, 19 nt, Homo sapiens
  misc_RNA (1)...(19): siRNA sense strand
ggagaacagcugauagaaa

SEQ ID NO: 924562 - RNA, 19 nt, Homo sapiens
  misc_RNA (1)...(19): siRNA sense strand
gcacugacauccagaccau

SEQ ID NO: 924563 - RNA, 19 nt, Homo sapiens
  misc_RNA (1)...(19): siRNA sense strand
gcagcucacuaauauugaa

SEQ ID NO: 924564 - RNA, 19 nt, Homo sapiens
  misc_RNA (1)...(19): siRNA sense strand
cggaagaaauacagagaaa

SEQ ID NO: 924565 - RNA, 19 nt, Homo sapiens
  misc_RNA (1)...(19): siRNA sense strand
ucaaggagcuccagaaagc

SEQ ID NO: 924566 - RNA, 19 nt, Homo sapiens
  misc_RNA (1)...(19): siRNA sense strand
cgaaugcaguagcaguaua

SEQ ID NO: 924567 - RNA, 19 nt, Homo sapiens
  misc_RNA (1)...(19): siRNA sense strand
gagaaacauuugugcuaug

SEQ ID NO: 924568 - RNA, 19 nt, Homo sapiens
  misc_RNA (1)...(19): siRNA sense strand
ccacauagcagguccacaa

SEQ ID NO: 924569 - RNA, 19 nt, Homo sapiens
  misc_RNA (1)...(19): siRNA sense strand
gaaagcaaagcaucugaga

SEQ ID NO: 924570 - RNA, 19 nt, Homo sapiens
  misc_RNA (1)...(19): siRNA sense strand
ggaccuggcucgcucacau

SEQ ID NO: 924571 - RNA, 19 nt, Homo sapiens
  misc_RNA (1)...(19): siRNA sense strand
caaguagucagcaggauuu

SEQ ID NO: 924572 - RNA, 19 nt, Homo sapiens
  misc_RNA (1)...(19): siRNA sense strand
ucacugaaccacaauaaga

SEQ ID NO: 924573 - RNA, 19 nt, Homo sapiens
  misc_RNA (1)...(19): siRNA sense strand
ugaagagacuggagcacaa

SEQ ID NO: 924574 - RNA, 19 nt, Homo sapiens
  misc_RNA (1)...(19): siRNA sense strand
gagaacgacuugcuaaagc

SEQ ID NO: 924575 - RNA, 19 nt, Homo sapiens
  misc_RNA (1)...(19): siRNA sense strand
ggugaaugcugaaggaaca

SEQ ID NO: 924576 - RNA, 19 nt, Homo sapiens
  misc_RNA (1)...(19): siRNA sense strand
caaacagcuuaugcaaaua

SEQ ID NO: 924577 - RNA, 19 nt, Homo sapiens
  misc_RNA (1)...(19): siRNA sense strand
gaccaucacaaacagcuua

SEQ ID NO: 924578 - RNA, 19 nt, Homo sapiens
  misc_RNA (1)...(19): siRNA sense strand
ggaggucagucgucauauc

SEQ ID NO: 924579 - RNA, 19 nt, Homo sapiens
  misc_RNA (1)...(19): siRNA sense strand
ugcagcagcuugauaagaa

SEQ ID NO: 924580 - RNA, 19 nt, Homo sapiens
  misc_RNA (1)...(19): siRNA sense strand
agaaguggcagcaguuuaa

SEQ ID NO: 924581 - RNA, 19 nt, Homo sapiens
  misc_RNA (1)...(19): siRNA sense strand
gcuaaagccagccaugaaa

SEQ ID NO: 924582 - RNA, 19 nt, Homo sapiens
  misc_RNA (1)...(19): siRNA sense strand
ccaaggagaacagcugaua

SEQ ID NO: 924583 - RNA, 19 nt, Homo sapiens
  misc_RNA (1)...(19): siRNA sense strand
gcugugcccucuccaacaa

SEQ ID NO: 924584 - RNA, 19 nt, Homo sapiens
  misc_RNA (1)...(19): siRNA sense strand
agccaugguuugcuucuua

SEQ ID NO: 924585 - RNA, 19 nt, Homo sapiens
  misc_RNA (1)...(19): siRNA sense strand
gaagaaauacagagaaagc

SEQ ID NO: 924586 - RNA, 19 nt, Homo sapiens
  misc_RNA (1)...(19): siRNA sense strand
gaaguuauuagacguguca

SEQ ID NO: 924587 - RNA, 19 nt, Homo sapiens
  misc_RNA (1)...(19): siRNA sense strand
gaaaugagccaugguuugc

SEQ ID NO: 924588 - RNA, 19 nt, Homo sapiens
  misc_RNA (1)...(19): siRNA sense strand
ugacgcagcuggaacugau

SEQ ID NO: 924589 - RNA, 19 nt, Homo sapiens
  misc_RNA (1)...(19): siRNA sense strand
ccaucgagcuccagaucaa

SEQ ID NO: 924590 - RNA, 19 nt, Homo sapiens
  misc_RNA (1)...(19): siRNA sense strand
gaucaucgaggaggaacua

SEQ ID NO: 924591 - RNA, 19 nt, Homo sapiens
  misc_RNA (1)...(19): siRNA sense strand
ccacagugcccuagaguca

SEQ ID NO: 924592 - RNA, 19 nt, Homo sapiens
  misc_RNA (1)...(19): siRNA sense strand
gaagagacuggagcacaaa

SEQ ID NO: 924593 - RNA, 19 nt, Homo sapiens
  misc_RNA (1)...(19): siRNA sense strand
aaauaaagcaugagcuguu

SEQ ID NO: 924594 - RNA, 19 nt, Homo sapiens
  misc_RNA (1)...(19): siRNA sense strand
gggcuugccugccuuguac

SEQ ID NO: 924595 - RNA, 19 nt, Homo sapiens
  misc_RNA (1)...(19): siRNA sense strand
gaagcacaguacagguguu

SEQ ID NO: 924596 - RNA, 19 nt, Homo sapiens
  misc_RNA (1)...(19): siRNA sense strand
gaucgcuugucgcagauga

SEQ ID NO: 924597 - RNA, 19 nt, Homo sapiens
  misc_RNA (1)...(19): siRNA sense strand
agcaggagcuucagagaga

SEQ ID NO: 924598 - RNA, 19 nt, Homo sapiens
  misc_RNA (1)...(19): siRNA sense strand
ggcaaagcccuggaugaua

SEQ ID NO: 924599 - RNA, 19 nt, Homo sapiens
  misc_RNA (1)...(19): siRNA sense strand
ggagaacgacuugcuaaag

SEQ ID NO: 924600 - RNA, 19 nt, Homo sapiens
  misc_RNA (1)...(19): siRNA sense strand
gaaauuucuggaugacuau

SEQ ID NO: 924601 - RNA, 19 nt, Homo sapiens
  misc_RNA (1)...(19): siRNA sense strand
cauguagccucaaacagau

SEQ ID NO: 924602 - RNA, 19 nt, Homo sapiens
  misc_RNA (1)...(19): siRNA sense strand
uauuagacgugucaaguag

SEQ ID NO: 924603 - RNA, 19 nt, Homo sapiens
  misc_RNA (1)...(19): siRNA sense strand
gcuagacaccagcuacaaa

SEQ ID NO: 924604 - RNA, 19 nt, Homo sapiens
  misc_RNA (1)...(19): siRNA sense strand
aaauaucauucgcagcaaa

SEQ ID NO: 924605 - RNA, 19 nt, Homo sapiens
  misc_RNA (1)...(19): siRNA sense strand
ggaccacagugcccuagag

SEQ ID NO: 924606 - RNA, 19 nt, Homo sapiens
  misc_RNA (1)...(19): siRNA sense strand
ccacagccuuccuccaauc

SEQ ID NO: 924607 - RNA, 19 nt, Homo sapiens
  misc_RNA (1)...(19): siRNA sense strand
ccaaggaagaacuaaagaa

SEQ ID NO: 924608 - RNA, 19 nt, Homo sapiens
  misc_RNA (1)...(19): siRNA sense strand
ugaaaugagccaugguuug

SEQ ID NO: 924609 - RNA, 19 nt, Homo sapiens
  misc_RNA (1)...(19): siRNA sense strand
gaaagauaccauaagaaac

SEQ ID NO: 924610 - RNA, 19 nt, Homo sapiens
  misc_RNA (1)...(19): siRNA sense strand
agugugauguucaagcuaa

SEQ ID NO: 924611 - RNA, 19 nt, Homo sapiens
  misc_RNA (1)...(19): siRNA sense strand
gggagaaccgcacugauuc

SEQ ID NO: 924612 - RNA, 19 nt, Homo sapiens
  misc_RNA (1)...(19): siRNA sense strand
uuuguuaaccugcauagua

SEQ ID NO: 924613 - RNA, 19 nt, Homo sapiens
  misc_RNA (1)...(19): siRNA sense strand
aauaaagcaugagcuguug

SEQ ID NO: 924614 - RNA, 19 nt, Homo sapiens
  misc_RNA (1)...(19): siRNA sense strand
ucacaaacagcuuaugcaa

SEQ ID NO: 924615 - RNA, 19 nt, Homo sapiens
  misc_RNA (1)...(19): siRNA sense strand
cuauacaguugccaaggaa

SEQ ID NO: 924616 - RNA, 19 nt, Homo sapiens
  misc_RNA (1)...(19): siRNA sense strand
ggucagucgucauaucaag

SEQ ID NO: 924617 - RNA, 19 nt, Homo sapiens
  misc_RNA (1)...(19): siRNA sense strand
gaggucagucgucauauca

SEQ ID NO: 924618 - RNA, 19 nt, Homo sapiens
  misc_RNA (1)...(19): siRNA sense strand
cagaaguggcagcaguuua

SEQ ID NO: 924619 - RNA, 19 nt, Homo sapiens
  misc_RNA (1)...(19): siRNA sense strand
gaaugcaguagcaguauag

SEQ ID NO: 924620 - RNA, 19 nt, Homo sapiens
  misc_RNA (1)...(19): siRNA sense strand
ucacgacuaugaccucagu

SEQ ID NO: 924621 - RNA, 19 nt, Homo sapiens
  misc_RNA (1)...(19): siRNA sense strand
agagagacauagagaagca

SEQ ID NO: 924622 - RNA, 19 nt, Homo sapiens
  misc_RNA (1)...(19): siRNA sense strand
agcaugagcuguuggaauc

SEQ ID NO: 924623 - RNA, 19 nt, Homo sapiens
  misc_RNA (1)...(19): siRNA sense strand
gugccaggguuuccaugaa

SEQ ID NO: 924624 - RNA, 19 nt, Homo sapiens
  misc_RNA (1)...(19): siRNA sense strand
ugaaacugcugggcgaaug

SEQ ID NO: 924625 - RNA, 19 nt, Homo sapiens
  misc_RNA (1)...(19): siRNA sense strand
gaaaggaggcugaaaaucg

SEQ ID NO: 924626 - RNA, 19 nt, Homo sapiens
  misc_RNA (1)...(19): siRNA sense strand
gaccuggagucugcaaugu

SEQ ID NO: 924627 - RNA, 19 nt, Homo sapiens
  misc_RNA (1)...(19): siRNA sense strand
ggaccuggagucugcaaug

SEQ ID NO: 924628 - RNA, 19 nt, Homo sapiens
  misc_RNA (1)...(19): siRNA sense strand
gagcacgaccucucagaca

SEQ ID NO: 924629 - RNA, 19 nt, Homo sapiens
  misc_RNA (1)...(19): siRNA sense strand
cagcaggaaauuucacuga

SEQ ID NO: 924630 - RNA, 19 nt, Homo sapiens
  misc_RNA (1)...(19): siRNA sense strand
ucacgaaggcaaccagaga

SEQ ID NO: 924631 - RNA, 19 nt, Homo sapiens
  misc_RNA (1)...(19): siRNA sense strand
ggagaaccgcacugauuca

SEQ ID NO: 924632 - RNA, 19 nt, Homo sapiens
  misc_RNA (1)...(19): siRNA sense strand
auacagagaaagcuuaaug

SEQ ID NO: 924633 - RNA, 19 nt, Homo sapiens
  misc_RNA (1)...(19): siRNA sense strand
caacuuugcccggucauuc

SEQ ID NO: 924634 - RNA, 19 nt, Homo sapiens
  misc_RNA (1)...(19): siRNA sense strand
gcaaguguagucucucaca

SEQ ID NO: 924635 - RNA, 19 nt, Homo sapiens
  misc_RNA (1)...(19): siRNA sense strand
uacaaaggcuacaugaaac

SEQ ID NO: 924636 - RNA, 19 nt, Homo sapiens
  misc_RNA (1)...(19): siRNA sense strand
ggacacggaggaggaguug

SEQ ID NO: 924637 - RNA, 19 nt, Homo sapiens
  misc_RNA (1)...(19): siRNA sense strand
ggaaggagcaccccaaaca

SEQ ID NO: 924638 - RNA, 19 nt, Homo sapiens
  misc_RNA (1)...(19): siRNA sense strand
gggagaacgacuugcuaaa

SEQ ID NO: 924639 - RNA, 19 nt, Homo sapiens
  misc_RNA (1)...(19): siRNA sense strand
gaaagaacuugaccaauua

SEQ ID NO: 924640 - RNA, 19 nt, Homo sapiens
  misc_RNA (1)...(19): siRNA sense strand
caagagagauccaagauua

SEQ ID NO: 924641 - RNA, 19 nt, Homo sapiens
  misc_RNA (1)...(19): siRNA sense strand
ccaaagacaugaacaaaua

SEQ ID NO: 924642 - RNA, 19 nt, Homo sapiens
  misc_RNA (1)...(19): siRNA sense strand
gaaaaccccuugaauauua

SEQ ID NO: 924643 - RNA, 19 nt, Homo sapiens
  misc_RNA (1)...(19): siRNA sense strand
gcagagaucuccauucaau

SEQ ID NO: 924644 - RNA, 19 nt, Homo sapiens
  misc_RNA (1)...(19): siRNA sense strand
gcaacacccucugaaauua

SEQ ID NO: 924645 - RNA, 19 nt, Homo sapiens
  misc_RNA (1)...(19): siRNA sense strand
gaugaaauauucccuuuga

SEQ ID NO: 924646 - RNA, 19 nt, Homo sapiens
  misc_RNA (1)...(19): siRNA sense strand
agaaagaacuugaccaauu

SEQ ID NO: 924647 - RNA, 19 nt, Homo sapiens
  misc_RNA (1)...(19): siRNA sense strand
gagcagagaucuccauuca

SEQ ID NO: 924648 - RNA, 19 nt, Homo sapiens
  misc_RNA (1)...(19): siRNA sense strand
gcaggaaacauccaauuua

SEQ ID NO: 924649 - RNA, 19 nt, Homo sapiens
  misc_RNA (1)...(19): siRNA sense strand
ggaaugagguuuacaacau

SEQ ID NO: 924650 - RNA, 19 nt, Homo sapiens
  misc_RNA (1)...(19): siRNA sense strand
gccaagauuugauggauua

SEQ ID NO: 924651 - RNA, 19 nt, Homo sapiens
  misc_RNA (1)...(19): siRNA sense strand
ugaaggacccaauaaauua

SEQ ID NO: 924652 - RNA, 19 nt, Homo sapiens
  misc_RNA (1)...(19): siRNA sense strand
ucaagaggcugcuaaagaa

SEQ ID NO: 924653 - RNA, 19 nt, Homo sapiens
  misc_RNA (1)...(19): siRNA sense strand
gaagacagaccguuauuug

SEQ ID NO: 924654 - RNA, 19 nt, Homo sapiens
  misc_RNA (1)...(19): siRNA sense strand
caauauaccugcuccaaug

SEQ ID NO: 924655 - RNA, 19 nt, Homo sapiens
  misc_RNA (1)...(19): siRNA sense strand
caaagaugaugaugugaaa

SEQ ID NO: 924656 - RNA, 19 nt, Homo sapiens
  misc_RNA (1)...(19): siRNA sense strand
gaacuugaccaauuagauu

SEQ ID NO: 924657 - RNA, 19 nt, Homo sapiens
  misc_RNA (1)...(19): siRNA sense strand
cagagaagcuuccuguuau

SEQ ID NO: 924658 - RNA, 19 nt, Homo sapiens
  misc_RNA (1)...(19): siRNA sense strand
gaaacaacguuaugacagu

SEQ ID NO: 924659 - RNA, 19 nt, Homo sapiens
  misc_RNA (1)...(19): siRNA sense strand
ccagggagaucgaguacua

SEQ ID NO: 924660 - RNA, 19 nt, Homo sapiens
  misc_RNA (1)...(19): siRNA sense strand
gauagaauuugaggagaua

SEQ ID NO: 924661 - RNA, 19 nt, Homo sapiens
  misc_RNA (1)...(19): siRNA sense strand
ggagguggguguccuuuga

SEQ ID NO: 924662 - RNA, 19 nt, Homo sapiens
  misc_RNA (1)...(19): siRNA sense strand
uagaguagauggaaagauu

SEQ ID NO: 924663 - RNA, 19 nt, Homo sapiens
  misc_RNA (1)...(19): siRNA sense strand
gauccugcuuggccuauua

SEQ ID NO: 924664 - RNA, 19 nt, Homo sapiens
  misc_RNA (1)...(19): siRNA sense strand
caaaucagcauucuacaaa

SEQ ID NO: 924665 - RNA, 19 nt, Homo sapiens
  misc_RNA (1)...(19): siRNA sense strand
gaaaucacccucaccuuug

SEQ ID NO: 924666 - RNA, 19 nt, Homo sapiens
  misc_RNA (1)...(19): siRNA sense strand
ggagguggccugagaauug

SEQ ID NO: 924667 - RNA, 19 nt, Homo sapiens
  misc_RNA (1)...(19): siRNA sense strand
ucagauuccuaaagaguua

SEQ ID NO: 924668 - RNA, 19 nt, Homo sapiens
  misc_RNA (1)...(19): siRNA sense strand
gaaauauucccuuugaaga

SEQ ID NO: 924669 - RNA, 19 nt, Homo sapiens
  misc_RNA (1)...(19): siRNA sense strand
gagcuaagcagucacauau

SEQ ID NO: 924670 - RNA, 19 nt, Homo sapiens
  misc_RNA (1)...(19): siRNA sense strand
ggauaaagaugagcacaug

SEQ ID NO: 924671 - RNA, 19 nt, Homo sapiens
  misc_RNA (1)...(19): siRNA sense strand
ggaccauccuuacaaauuc

SEQ ID NO: 924672 - RNA, 19 nt, Homo sapiens
  misc_RNA (1)...(19): siRNA sense strand
agacagaaaugcuaagaga

SEQ ID NO: 924673 - RNA, 19 nt, Homo sapiens
  misc_RNA (1)...(19): siRNA sense strand
ucagagaagcuuccuguua

SEQ ID NO: 924674 - RNA, 19 nt, Homo sapiens
  misc_RNA (1)...(19): siRNA sense strand
ggacaccucugcgguuuga

SEQ ID NO: 924675 - RNA, 19 nt, Homo sapiens
  misc_RNA (1)...(19): siRNA sense strand
aguaugagguugucugaua

SEQ ID NO: 924676 - RNA, 19 nt, Homo sapiens
  misc_RNA (1)...(19): siRNA sense strand
ccaugugaauccuaaauuu

SEQ ID NO: 924677 - RNA, 19 nt, Homo sapiens
  misc_RNA (1)...(19): siRNA sense strand
ugaaaucugucaagaacaa

SEQ ID NO: 924678 - RNA, 19 nt, Homo sapiens
  misc_RNA (1)...(19): siRNA sense strand
gaaggacccaauaaauuaa

SEQ ID NO: 924679 - RNA, 19 nt, Homo sapiens
  misc_RNA (1)...(19): siRNA sense strand
gaacaauacugggaugaag

SEQ ID NO: 924680 - RNA, 19 nt, Homo sapiens
  misc_RNA (1)...(19): siRNA sense strand
gaccugaccuucaauagca

SEQ ID NO: 924681 - RNA, 19 nt, Homo sapiens
  misc_RNA (1)...(19): siRNA sense strand
aaagacgagugaacguuua

SEQ ID NO: 924682 - RNA, 19 nt, Homo sapiens
  misc_RNA (1)...(19): siRNA sense strand
gcacugaaccaaaggagaa

SEQ ID NO: 924683 - RNA, 19 nt, Homo sapiens
  misc_RNA (1)...(19): siRNA sense strand
aaacgaaggcaaagaagua

SEQ ID NO: 924684 - RNA, 19 nt, Homo sapiens
  misc_RNA (1)...(19): siRNA sense strand
gaagucauccgaacacaga

SEQ ID NO: 924685 - RNA, 19 nt, Homo sapiens
  misc_RNA (1)...(19): siRNA sense strand
cgaaaucacccucaccuuu

SEQ ID NO: 924686 - RNA, 19 nt, Homo sapiens
  misc_RNA (1)...(19): siRNA sense strand
uaagcgaccucgauaugaa

SEQ ID NO: 924687 - RNA, 19 nt, Homo sapiens
  misc_RNA (1)...(19): siRNA sense strand
cagcaucgauuaaguguag

SEQ ID NO: 924688 - RNA, 19 nt, Homo sapiens
  misc_RNA (1)...(19): siRNA sense strand
ggagaucgaguacuagaaa

SEQ ID NO: 924689 - RNA, 19 nt, Homo sapiens
  misc_RNA (1)...(19): siRNA sense strand
gaacaagagagauccaaga

SEQ ID NO: 924690 - RNA, 19 nt, Homo sapiens
  misc_RNA (1)...(19): siRNA sense strand
gcaagccgcacaucaauau

SEQ ID NO: 924691 - RNA, 19 nt, Homo sapiens
  misc_RNA (1)...(19): siRNA sense strand
ggaaagauuuaucauccau

SEQ ID NO: 924692 - RNA, 19 nt, Homo sapiens
  misc_RNA (1)...(19): siRNA sense strand
ucaaggugguccaagauuu

SEQ ID NO: 924693 - RNA, 19 nt, Homo sapiens
  misc_RNA (1)...(19): siRNA sense strand
gaaaucugguugggaagaa

SEQ ID NO: 924694 - RNA, 19 nt, Homo sapiens
  misc_RNA (1)...(19): siRNA sense strand
gcaaagaugaugaugugaa

SEQ ID NO: 924695 - RNA, 19 nt, Homo sapiens
  misc_RNA (1)...(19): siRNA sense strand
gaacacagacuggcuggaa

SEQ ID NO: 924696 - RNA, 19 nt, Homo sapiens
  misc_RNA (1)...(19): siRNA sense strand
aagucuaggucaccaauua

SEQ ID NO: 924697 - RNA, 19 nt, Homo sapiens
  misc_RNA (1)...(19): siRNA sense strand
gaaugagguuuacaacauc

SEQ ID NO: 924698 - RNA, 19 nt, Homo sapiens
  misc_RNA (1)...(19): siRNA sense strand
ugaagguugucaugcuuua

SEQ ID NO: 924699 - RNA, 19 nt, Homo sapiens
  misc_RNA (1)...(19): siRNA sense strand
gcaacagcaucgauuaagu

SEQ ID NO: 924700 - RNA, 19 nt, Homo sapiens
  misc_RNA (1)...(19): siRNA sense strand
gcagcaacagcaucgauua

SEQ ID NO: 924701 - RNA, 19 nt, Homo sapiens
  misc_RNA (1)...(19): siRNA sense strand
acaaaggcuugaaucagua

SEQ ID NO: 924702 - RNA, 19 nt, Homo sapiens
  misc_RNA (1)...(19): siRNA sense strand
caggaaacauccaauuuag

SEQ ID NO: 924703 - RNA, 19 nt, Homo sapiens
  misc_RNA (1)...(19): siRNA sense strand
ugaagaaguugugcucaaa

SEQ ID NO: 924704 - RNA, 19 nt, Homo sapiens
  misc_RNA (1)...(19): siRNA sense strand
ggauagaauuugaggagau

SEQ ID NO: 924705 - RNA, 19 nt, Homo sapiens
  misc_RNA (1)...(19): siRNA sense strand
ggaggaagaucaaaaugaa

SEQ ID NO: 924706 - RNA, 19 nt, Homo sapiens
  misc_RNA (1)...(19): siRNA sense strand
gcuaagcagucacauaugg

SEQ ID NO: 924707 - RNA, 19 nt, Homo sapiens
  misc_RNA (1)...(19): siRNA sense strand
gaucugcaccauccaaauu

SEQ ID NO: 924708 - RNA, 19 nt, Homo sapiens
  misc_RNA (1)...(19): siRNA sense strand
ggaaacauccaauuuaggu

SEQ ID NO: 924709 - RNA, 19 nt, Homo sapiens
  misc_RNA (1)...(19): siRNA sense strand
cuucagaguucucaauuug

SEQ ID NO: 924710 - RNA, 19 nt, Homo sapiens
  misc_RNA (1)...(19): siRNA sense strand
cacaaaggcuugaaucagu

SEQ ID NO: 924711 - RNA, 19 nt, Homo sapiens
  misc_RNA (1)...(19): siRNA sense strand
cgguguaccucaaagauuu

SEQ ID NO: 924712 - RNA, 19 nt, Homo sapiens
  misc_RNA (1)...(19): siRNA sense strand
gccaggagguggaaucaga

SEQ ID NO: 924713 - RNA, 19 nt, Homo sapiens
  misc_RNA (1)...(19): siRNA sense strand
ggucaccaauuauacauuc

SEQ ID NO: 924714 - RNA, 19 nt, Homo sapiens
  misc_RNA (1)...(19): siRNA sense strand
caauuuagguccuggaucu

SEQ ID NO: 924715 - RNA, 19 nt, Homo sapiens
  misc_RNA (1)...(19): siRNA sense strand
gaguagauggaaagauuua

SEQ ID NO: 924716 - RNA, 19 nt, Homo sapiens
  misc_RNA (1)...(19): siRNA sense strand
ucagguggauguaaaugaa

SEQ ID NO: 924717 - RNA, 19 nt, Homo sapiens
  misc_RNA (1)...(19): siRNA sense strand
gaggaggcccuuugagauu

SEQ ID NO: 924718 - RNA, 19 nt, Homo sapiens
  misc_RNA (1)...(19): siRNA sense strand
uaagaccgauggcaaagau

SEQ ID NO: 924719 - RNA, 19 nt, Homo sapiens
  misc_RNA (1)...(19): siRNA sense strand
uaucauccaucauguuaug

SEQ ID NO: 924720 - RNA, 19 nt, Homo sapiens
  misc_RNA (1)...(19): siRNA sense strand
aaaggugcaugaagaaguu

SEQ ID NO: 924721 - RNA, 19 nt, Homo sapiens
  misc_RNA (1)...(19): siRNA sense strand
gaaauauucaggcaucuca

SEQ ID NO: 924722 - RNA, 19 nt, Homo sapiens
  misc_RNA (1)...(19): siRNA sense strand
uggaaacuuuggcaauaua

SEQ ID NO: 924723 - RNA, 19 nt, Homo sapiens
  misc_RNA (1)...(19): siRNA sense strand
caacuuggugggaaccuua

SEQ ID NO: 924724 - RNA, 19 nt, Homo sapiens
  misc_RNA (1)...(19): siRNA sense strand
ucaagaaggugugcgagaa

SEQ ID NO: 924725 - RNA, 19 nt, Homo sapiens
  misc_RNA (1)...(19): siRNA sense strand
gaggagcgaccacaagaaa

SEQ ID NO: 924726 - RNA, 19 nt, Homo sapiens
  misc_RNA (1)...(19): siRNA sense strand
gcauccaugugaauccuaa

SEQ ID NO: 924727 - RNA, 19 nt, Homo sapiens
  misc_RNA (1)...(19): siRNA sense strand
uaacagacuggauagaauu

SEQ ID NO: 924728 - RNA, 19 nt, Homo sapiens
  misc_RNA (1)...(19): siRNA sense strand
ccaaugacaguaggaaaua

SEQ ID NO: 924729 - RNA, 19 nt, Homo sapiens
  misc_RNA (1)...(19): siRNA sense strand
ggacuacaguuccaaagac

SEQ ID NO: 924730 - RNA, 19 nt, Homo sapiens
  misc_RNA (1)...(19): siRNA sense strand
cagcaagcaucaagguuug

SEQ ID NO: 924731 - RNA, 19 nt, Homo sapiens
  misc_RNA (1)...(19): siRNA sense strand
gagguggccugagaauuga

SEQ ID NO: 924732 - RNA, 19 nt, Homo sapiens
  misc_RNA (1)...(19): siRNA sense strand
caacaaggagguggaauga

SEQ ID NO: 924733 - RNA, 19 nt, Homo sapiens
  misc_RNA (1)...(19): siRNA sense strand
ccaggugguuugagauuug

SEQ ID NO: 924734 - RNA, 19 nt, Homo sapiens
  misc_RNA (1)...(19): siRNA sense strand
gacagaccguuauuugaug

SEQ ID NO: 924735 - RNA, 19 nt, Homo sapiens
  misc_RNA (1)...(19): siRNA sense strand
gagaaguacuaaacaggau

SEQ ID NO: 924736 - RNA, 19 nt, Homo sapiens
  misc_RNA (1)...(19): siRNA sense strand
uggcaaagaugaugaugug

SEQ ID NO: 924737 - RNA, 19 nt, Homo sapiens
  misc_RNA (1)...(19): siRNA sense strand
ggauaagaccgauggcaaa

SEQ ID NO: 924738 - RNA, 19 nt, Homo sapiens
  misc_RNA (1)...(19): siRNA sense strand
caacacccucugaaauuaa

SEQ ID NO: 924739 - RNA, 19 nt, Homo sapiens
  misc_RNA (1)...(19): siRNA sense strand
ggacggcacuuuacauaua

SEQ ID NO: 924740 - RNA, 19 nt, Homo sapiens
  misc_RNA (1)...(19): siRNA sense strand
caacagaguccaugaguuu

SEQ ID NO: 924741 - RNA, 19 nt, Homo sapiens
  misc_RNA (1)...(19): siRNA sense strand
gaguacagcuggccugaaa

SEQ ID NO: 924742 - RNA, 19 nt, Homo sapiens
  misc_RNA (1)...(19): siRNA sense strand
gaguugaccuuucgucuga

SEQ ID NO: 924743 - RNA, 19 nt, Homo sapiens
  misc_RNA (1)...(19): siRNA sense strand
ggagaggacucgagaucaa

SEQ ID NO: 924744 - RNA, 19 nt, Homo sapiens
  misc_RNA (1)...(19): siRNA sense strand
ggagagaccauauuugaga

SEQ ID NO: 924745 - RNA, 19 nt, Homo sapiens
  misc_RNA (1)...(19): siRNA sense strand
gagcguacaucugaaauuc

SEQ ID NO: 924746 - RNA, 19 nt, Homo sapiens
  misc_RNA (1)...(19): siRNA sense strand
gacggcacuuuacauauaa

SEQ ID NO: 924747 - RNA, 19 nt, Homo sapiens
  misc_RNA (1)...(19): siRNA sense strand
cgaagaguuuguagagaaa

SEQ ID NO: 924748 - RNA, 19 nt, Homo sapiens
  misc_RNA (1)...(19): siRNA sense strand
ccgaagaguuuguagagaa

SEQ ID NO: 924749 - RNA, 19 nt, Homo sapiens
  misc_RNA (1)...(19): siRNA sense strand
ccagaggaauucaaacuuc

SEQ ID NO: 924750 - RNA, 19 nt, Homo sapiens
  misc_RNA (1)...(19): siRNA sense strand
ggccuucgcuucgcucuuu

SEQ ID NO: 924751 - RNA, 19 nt, Homo sapiens
  misc_RNA (1)...(19): siRNA sense strand
cauggacccugguuacaaa

SEQ ID NO: 924752 - RNA, 19 nt, Homo sapiens
  misc_RNA (1)...(19): siRNA sense strand
gcacagcccuuuggauaac

SEQ ID NO: 924753 - RNA, 19 nt, Homo sapiens
  misc_RNA (1)...(19): siRNA sense strand
ugacauggccaucacguuu

SEQ ID NO: 924754 - RNA, 19 nt, Homo sapiens
  misc_RNA (1)...(19): siRNA sense strand
ggacccugguuacaaauuc

SEQ ID NO: 924755 - RNA, 19 nt, Homo sapiens
  misc_RNA (1)...(19): siRNA sense strand
gcaagagagaguugacaaa

SEQ ID NO: 924756 - RNA, 19 nt, Homo sapiens
  misc_RNA (1)...(19): siRNA sense strand
acaaaggcaucgagacaga

SEQ ID NO: 924757 - RNA, 19 nt, Homo sapiens
  misc_RNA (1)...(19): siRNA sense strand
ggauaacagugagucaaga

SEQ ID NO: 924758 - RNA, 19 nt, Homo sapiens
  misc_RNA (1)...(19): siRNA sense strand
uaacagugagucaagaauu

SEQ ID NO: 924759 - RNA, 19 nt, Homo sapiens
  misc_RNA (1)...(19): siRNA sense strand
cagcaaaccuguccuucca

SEQ ID NO: 924760 - RNA, 19 nt, Homo sapiens
  misc_RNA (1)...(19): siRNA sense strand
gcaaagacacagagcagau

SEQ ID NO: 924761 - RNA, 19 nt, Homo sapiens
  misc_RNA (1)...(19): siRNA sense strand
gcaaagacagccuggaaag

SEQ ID NO: 924762 - RNA, 19 nt, Homo sapiens
  misc_RNA (1)...(19): siRNA sense strand
uggcacagcccuuuggaua

SEQ ID NO: 924763 - RNA, 19 nt, Homo sapiens
  misc_RNA (1)...(19): siRNA sense strand
uuaccgcuaucgucaagua

SEQ ID NO: 924764 - RNA, 19 nt, Homo sapiens
  misc_RNA (1)...(19): siRNA sense strand
gagagaccauauuugagau

SEQ ID NO: 924765 - RNA, 19 nt, Homo sapiens
  misc_RNA (1)...(19): siRNA sense strand
ugucugcacugaagagcua

SEQ ID NO: 924766 - RNA, 19 nt, Homo sapiens
  misc_RNA (1)...(19): siRNA sense strand
gauaacagugagucaagaa

SEQ ID NO: 924767 - RNA, 19 nt, Homo sapiens
  misc_RNA (1)...(19): siRNA sense strand
guuggaggauuuagaagau

SEQ ID NO: 924768 - RNA, 19 nt, Homo sapiens
  misc_RNA (1)...(19): siRNA sense strand
guccaugaguuuacaggaa

SEQ ID NO: 924769 - RNA, 19 nt, Homo sapiens
  misc_RNA (1)...(19): siRNA sense strand
ucaaacuucccaaagagua

SEQ ID NO: 924770 - RNA, 19 nt, Homo sapiens
  misc_RNA (1)...(19): siRNA sense strand
uggaggauuuagaagauuu

SEQ ID NO: 924771 - RNA, 19 nt, Homo sapiens
  misc_RNA (1)...(19): siRNA sense strand
ggacuauguuagcauguac

SEQ ID NO: 924772 - RNA, 19 nt, Homo sapiens
  misc_RNA (1)...(19): siRNA sense strand
aauucaaacuucccaaaga

SEQ ID NO: 924773 - RNA, 19 nt, Homo sapiens
  misc_RNA (1)...(19): siRNA sense strand
aagacagccuggaaaguga

SEQ ID NO: 924774 - RNA, 19 nt, Homo sapiens
  misc_RNA (1)...(19): siRNA sense strand
gaccauauuugagaucgau

SEQ ID NO: 924775 - RNA, 19 nt, Homo sapiens
  misc_RNA (1)...(19): siRNA sense strand
gauccacaccugcaagaga

SEQ ID NO: 924776 - RNA, 19 nt, Homo sapiens
  misc_RNA (1)...(19): siRNA sense strand
gagaaaauguuggaggauu

SEQ ID NO: 924777 - RNA, 19 nt, Homo sapiens
  misc_RNA (1)...(19): siRNA sense strand
gaggacagccggagcaucu

SEQ ID NO: 924778 - RNA, 19 nt, Homo sapiens
  misc_RNA (1)...(19): siRNA sense strand
gauacguguuccagucaga

SEQ ID NO: 924779 - RNA, 19 nt, Homo sapiens
  misc_RNA (1)...(19): siRNA sense strand
ugacuucuccagaggaauu

SEQ ID NO: 924780 - RNA, 19 nt, Homo sapiens
  misc_RNA (1)...(19): siRNA sense strand
ugacaaaggcaucgagaca

SEQ ID NO: 924781 - RNA, 19 nt, Homo sapiens
  misc_RNA (1)...(19): siRNA sense strand
cugcauggacggcacuuua

SEQ ID NO: 924782 - RNA, 19 nt, Homo sapiens
  misc_RNA (1)...(19): siRNA sense strand
gaggagaggacucgagauc

SEQ ID NO: 924783 - RNA, 19 nt, Homo sapiens
  misc_RNA (1)...(19): siRNA sense strand
aaagacagccuggaaagug

SEQ ID NO: 924784 - RNA, 19 nt, Homo sapiens
  misc_RNA (1)...(19): siRNA sense strand
gaauucaaacuucccaaag

SEQ ID NO: 924785 - RNA, 19 nt, Homo sapiens
  misc_RNA (1)...(19): siRNA sense strand
cuugagagcguacaucuga

SEQ ID NO: 924786 - RNA, 19 nt, Homo sapiens
  misc_RNA (1)...(19): siRNA sense strand
acaacagaguccaugaguu

SEQ ID NO: 924787 - RNA, 19 nt, Homo sapiens
  misc_RNA (1)...(19): siRNA sense strand
gacucgagaucaacagcaa

SEQ ID NO: 924788 - RNA, 19 nt, Homo sapiens
  misc_RNA (1)...(19): siRNA sense strand
ggcacagcccuuuggauaa

SEQ ID NO: 924789 - RNA, 19 nt, Homo sapiens
  misc_RNA (1)...(19): siRNA sense strand
aacagugagucaagaauuc

SEQ ID NO: 924790 - RNA, 19 nt, Homo sapiens
  misc_RNA (1)...(19): siRNA sense strand
guuagcauguacaggaaug

SEQ ID NO: 924791 - RNA, 19 nt, Homo sapiens
  misc_RNA (1)...(19): siRNA sense strand
caagagagaguugacaaag

SEQ ID NO: 924792 - RNA, 19 nt, Homo sapiens
  misc_RNA (1)...(19): siRNA sense strand
gacagaggacccacagaug

SEQ ID NO: 924793 - RNA, 19 nt, Homo sapiens
  misc_RNA (1)...(19): siRNA sense strand
ugacagaggacccacagau

SEQ ID NO: 924794 - RNA, 19 nt, Homo sapiens
  misc_RNA (1)...(19): siRNA sense strand
ggauuuagaagauuugacu

SEQ ID NO: 924795 - RNA, 19 nt, Homo sapiens
  misc_RNA (1)...(19): siRNA sense strand
acagauggaccuagugguu

SEQ ID NO: 924796 - RNA, 19 nt, Homo sapiens
  misc_RNA (1)...(19): siRNA sense strand
uggacuauguuagcaugua

SEQ ID NO: 924797 - RNA, 19 nt, Homo sapiens
  misc_RNA (1)...(19): siRNA sense strand
gaccgaagaguuuguagag

SEQ ID NO: 924798 - RNA, 19 nt, Homo sapiens
  misc_RNA (1)...(19): siRNA sense strand
ucucuauggugacaacaga

SEQ ID NO: 924799 - RNA, 19 nt, Homo sapiens
  misc_RNA (1)...(19): siRNA sense strand
guuggugucugcacugaag

SEQ ID NO: 924800 - RNA, 19 nt, Homo sapiens
  misc_RNA (1)...(19): siRNA sense strand
gacaacagaguccaugagu

SEQ ID NO: 924801 - RNA, 19 nt, Homo sapiens
  misc_RNA (1)...(19): siRNA sense strand
ucuguugaccgaagaguuu

SEQ ID NO: 924802 - RNA, 19 nt, Homo sapiens
  misc_RNA (1)...(19): siRNA sense strand
gacauggccaucacguuug

SEQ ID NO: 924803 - RNA, 19 nt, Homo sapiens
  misc_RNA (1)...(19): siRNA sense strand
ggaguccggagcccucauu

SEQ ID NO: 924804 - RNA, 19 nt, Homo sapiens
  misc_RNA (1)...(19): siRNA sense strand
ugagagcguacaucugaaa

SEQ ID NO: 924805 - RNA, 19 nt, Homo sapiens
  misc_RNA (1)...(19): siRNA sense strand
ccgcaaagacagccuggaa

SEQ ID NO: 924806 - RNA, 19 nt, Homo sapiens
  misc_RNA (1)...(19): siRNA sense strand
gcgacucucuggcaaagac

SEQ ID NO: 924807 - RNA, 19 nt, Homo sapiens
  misc_RNA (1)...(19): siRNA sense strand
cagauggaccuagugguuu

SEQ ID NO: 924808 - RNA, 19 nt, Homo sapiens
  misc_RNA (1)...(19): siRNA sense strand
gguuaccgcuaucgucaag

SEQ ID NO: 924809 - RNA, 19 nt, Homo sapiens
  misc_RNA (1)...(19): siRNA sense strand
gagcccuucugcuaacauc

SEQ ID NO: 924810 - RNA, 19 nt, Homo sapiens
  misc_RNA (1)...(19): siRNA sense strand
ggggagagaccauauuuga

SEQ ID NO: 924811 - RNA, 19 nt, Homo sapiens
  misc_RNA (1)...(19): siRNA sense strand
gucaagaauucagcacaug

SEQ ID NO: 924812 - RNA, 19 nt, Homo sapiens
  misc_RNA (1)...(19): siRNA sense strand
gaguuuacaggaacagaug

SEQ ID NO: 924813 - RNA, 19 nt, Homo sapiens
  misc_RNA (1)...(19): siRNA sense strand
cggccugagugaucucuau

SEQ ID NO: 924814 - RNA, 19 nt, Homo sapiens
  misc_RNA (1)...(19): siRNA sense strand
gcucauggacccugguuac

SEQ ID NO: 924815 - RNA, 19 nt, Homo sapiens
  misc_RNA (1)...(19): siRNA sense strand
aaaccuguccuuccaccaa

SEQ ID NO: 924816 - RNA, 19 nt, Homo sapiens
  misc_RNA (1)...(19): siRNA sense strand
cgacaguccgcuacacuag

SEQ ID NO: 924817 - RNA, 19 nt, Homo sapiens
  misc_RNA (1)...(19): siRNA sense strand
caaagacagccuggaaagu

SEQ ID NO: 924818 - RNA, 19 nt, Homo sapiens
  misc_RNA (1)...(19): siRNA sense strand
gcuuugaguugaccuuucg

SEQ ID NO: 924819 - RNA, 19 nt, Homo sapiens
  misc_RNA (1)...(19): siRNA sense strand
ggaggauuuagaagauuug

SEQ ID NO: 924820 - RNA, 19 nt, Homo sapiens
  misc_RNA (1)...(19): siRNA sense strand
cagaguccaugaguuuaca

SEQ ID NO: 924821 - RNA, 19 nt, Homo sapiens
  misc_RNA (1)...(19): siRNA sense strand
caaagacacagagcagauc

SEQ ID NO: 924822 - RNA, 19 nt, Homo sapiens
  misc_RNA (1)...(19): siRNA sense strand
aagagagaguugacaaagg

SEQ ID NO: 924823 - RNA, 19 nt, Homo sapiens
  misc_RNA (1)...(19): siRNA sense strand
gaccuuucgucugaagaga

SEQ ID NO: 924824 - RNA, 19 nt, Homo sapiens
  misc_RNA (1)...(19): siRNA sense strand
aggaacagauggaccuagu

SEQ ID NO: 924825 - RNA, 19 nt, Homo sapiens
  misc_RNA (1)...(19): siRNA sense strand
gguuacaaauucuguugac

SEQ ID NO: 924826 - RNA, 19 nt, Homo sapiens
  misc_RNA (1)...(19): siRNA sense strand
ccaagugugccugggauga

SEQ ID NO: 924827 - RNA, 19 nt, Homo sapiens
  misc_RNA (1)...(19): siRNA sense strand
gccccuggcugauaacuga

SEQ ID NO: 924828 - RNA, 19 nt, Homo sapiens
  misc_RNA (1)...(19): siRNA sense strand
gaggggagagaccauauuu

SEQ ID NO: 924829 - RNA, 19 nt, Homo sapiens
  misc_RNA (1)...(19): siRNA sense strand
gcauggacggcacuuuaca

SEQ ID NO: 924830 - RNA, 19 nt, Homo sapiens
  misc_RNA (1)...(19): siRNA sense strand
gagagaaacuggggagucu

SEQ ID NO: 924831 - RNA, 19 nt, Homo sapiens
  misc_RNA (1)...(19): siRNA sense strand
aauguuggaggauuuagaa

SEQ ID NO: 924832 - RNA, 19 nt, Homo sapiens
  misc_RNA (1)...(19): siRNA sense strand
gagcacuggcacuacauca

SEQ ID NO: 924833 - RNA, 19 nt, Homo sapiens
  misc_RNA (1)...(19): siRNA sense strand
gaucgauccacaccugcaa

SEQ ID NO: 924834 - RNA, 19 nt, Homo sapiens
  misc_RNA (1)...(19): siRNA sense strand
ccuuucgucugaagagaga

SEQ ID NO: 924835 - RNA, 19 nt, Homo sapiens
  misc_RNA (1)...(19): siRNA sense strand
ggaacagauggaccuagug

SEQ ID NO: 924836 - RNA, 19 nt, Homo sapiens
  misc_RNA (1)...(19): siRNA sense strand
agucaagaauucagcacau

SEQ ID NO: 924837 - RNA, 19 nt, Homo sapiens
  misc_RNA (1)...(19): siRNA sense strand
acauggccaucacguuugu

SEQ ID NO: 924838 - RNA, 19 nt, Homo sapiens
  misc_RNA (1)...(19): siRNA sense strand
gacccugguuacaaauucu

SEQ ID NO: 924839 - RNA, 19 nt, Homo sapiens
  misc_RNA (1)...(19): siRNA sense strand
caacuacucuuacaucuuu

SEQ ID NO: 924840 - RNA, 19 nt, Homo sapiens
  misc_RNA (1)...(19): siRNA sense strand
gauggaagcuuggaucuga

SEQ ID NO: 924841 - RNA, 19 nt, Homo sapiens
  misc_RNA (1)...(19): siRNA sense strand
caacugcaccauacaacua

SEQ ID NO: 924842 - RNA, 19 nt, Homo sapiens
  misc_RNA (1)...(19): siRNA sense strand
gcucuuauggucuaugaua

SEQ ID NO: 924843 - RNA, 19 nt, Homo sapiens
  misc_RNA (1)...(19): siRNA sense strand
caaggaaucucaccaaucc

SEQ ID NO: 924844 - RNA, 19 nt, Homo sapiens
  misc_RNA (1)...(19): siRNA sense strand
guacaagaauaaucgaagu

SEQ ID NO: 924845 - RNA, 19 nt, Homo sapiens
  misc_RNA (1)...(19): siRNA sense strand
caccauacaacuacucuua

SEQ ID NO: 924846 - RNA, 19 nt, Homo sapiens
  misc_RNA (1)...(19): siRNA sense strand
gagcucuuauggucuauga

SEQ ID NO: 924847 - RNA, 19 nt, Homo sapiens
  misc_RNA (1)...(19): siRNA sense strand
gggagagaauguagaagau

SEQ ID NO: 924848 - RNA, 19 nt, Homo sapiens
  misc_RNA (1)...(19): siRNA sense strand
caagaauaaucgaaguuag

SEQ ID NO: 924849 - RNA, 19 nt, Homo sapiens
  misc_RNA (1)...(19): siRNA sense strand
ugaagaaaauggcuuauug

SEQ ID NO: 924850 - RNA, 19 nt, Homo sapiens
  misc_RNA (1)...(19): siRNA sense strand
gauaucacuagaagaagua

SEQ ID NO: 924851 - RNA, 19 nt, Homo sapiens
  misc_RNA (1)...(19): siRNA sense strand
guacauauaaccacuuaag

SEQ ID NO: 924852 - RNA, 19 nt, Homo sapiens
  misc_RNA (1)...(19): siRNA sense strand
gcaggacaggagcgauuua

SEQ ID NO: 924853 - RNA, 19 nt, Homo sapiens
  misc_RNA (1)...(19): siRNA sense strand
ccaagaaaaucuaucagaa

SEQ ID NO: 924854 - RNA, 19 nt, Homo sapiens
  misc_RNA (1)...(19): siRNA sense strand
gcaaggaaucucaccaauc

SEQ ID NO: 924855 - RNA, 19 nt, Homo sapiens
  misc_RNA (1)...(19): siRNA sense strand
cauaggaaauaaagcagau

SEQ ID NO: 924856 - RNA, 19 nt, Homo sapiens
  misc_RNA (1)...(19): siRNA sense strand
ccauacaacuacucuuaca

SEQ ID NO: 924857 - RNA, 19 nt, Homo sapiens
  misc_RNA (1)...(19): siRNA sense strand
guugacagaugcaaggaau

SEQ ID NO: 924858 - RNA, 19 nt, Homo sapiens
  misc_RNA (1)...(19): siRNA sense strand
gaagaaguacauauaacca

SEQ ID NO: 924859 - RNA, 19 nt, Homo sapiens
  misc_RNA (1)...(19): siRNA sense strand
cgggagcucuuauggucua

SEQ ID NO: 924860 - RNA, 19 nt, Homo sapiens
  misc_RNA (1)...(19): siRNA sense strand
aaacugcagauuugggaua

SEQ ID NO: 924861 - RNA, 19 nt, Homo sapiens
  misc_RNA (1)...(19): siRNA sense strand
uugcuugcuucaucaauuu

SEQ ID NO: 924862 - RNA, 19 nt, Homo sapiens
  misc_RNA (1)...(19): siRNA sense strand
ugauaucacuagaagaagu

SEQ ID NO: 924863 - RNA, 19 nt, Homo sapiens
  misc_RNA (1)...(19): siRNA sense strand
aaucucaccaauccaaaua

SEQ ID NO: 924864 - RNA, 19 nt, Homo sapiens
  misc_RNA (1)...(19): siRNA sense strand
gguguugaauuugguacaa

SEQ ID NO: 924865 - RNA, 19 nt, Homo sapiens
  misc_RNA (1)...(19): siRNA sense strand
ggacaugggaguaggaaaa

SEQ ID NO: 924866 - RNA, 19 nt, Homo sapiens
  misc_RNA (1)...(19): siRNA sense strand
gaaucucaccaauccaaau

SEQ ID NO: 924867 - RNA, 19 nt, Homo sapiens
  misc_RNA (1)...(19): siRNA sense strand
ggaaucucaccaauccaaa

SEQ ID NO: 924868 - RNA, 19 nt, Homo sapiens
  misc_RNA (1)...(19): siRNA sense strand
ggagagaauguagaagaug

SEQ ID NO: 924869 - RNA, 19 nt, Homo sapiens
  misc_RNA (1)...(19): siRNA sense strand
ucaccaauccaaauacugu

SEQ ID NO: 924870 - RNA, 19 nt, Homo sapiens
  misc_RNA (1)...(19): siRNA sense strand
aaaucuugcuugcuucauc

SEQ ID NO: 924871 - RNA, 19 nt, Homo sapiens
  misc_RNA (1)...(19): siRNA sense strand
cgggagagaauguagaaga

SEQ ID NO: 924872 - RNA, 19 nt, Homo sapiens
  misc_RNA (1)...(19): siRNA sense strand
aaucuugcuugcuucauca

SEQ ID NO: 924873 - RNA, 19 nt, Homo sapiens
  misc_RNA (1)...(19): siRNA sense strand
cuugcuugcuucaucaauu

SEQ ID NO: 924874 - RNA, 19 nt, Homo sapiens
  misc_RNA (1)...(19): siRNA sense strand
cuuauggucuaugauauca

SEQ ID NO: 924875 - RNA, 19 nt, Homo sapiens
  misc_RNA (1)...(19): siRNA sense strand
gaagaaaauggcuuauugu

SEQ ID NO: 924876 - RNA, 19 nt, Homo sapiens
  misc_RNA (1)...(19): siRNA sense strand
ucugaaugcugcugagucu

SEQ ID NO: 924877 - RNA, 19 nt, Homo sapiens
  misc_RNA (1)...(19): siRNA sense strand
acauauaaccacuuaagca

SEQ ID NO: 924878 - RNA, 19 nt, Homo sapiens
  misc_RNA (1)...(19): siRNA sense strand
gaggcacagagagauguua

SEQ ID NO: 924879 - RNA, 19 nt, Homo sapiens
  misc_RNA (1)...(19): siRNA sense strand
uguugaauuugguacaaga

SEQ ID NO: 924880 - RNA, 19 nt, Homo sapiens
  misc_RNA (1)...(19): siRNA sense strand
acaguuugcugaagaaaau

SEQ ID NO: 924881 - RNA, 19 nt, Homo sapiens
  misc_RNA (1)...(19): siRNA sense strand
ucacuagaagaaguacaua

SEQ ID NO: 924882 - RNA, 19 nt, Homo sapiens
  misc_RNA (1)...(19): siRNA sense strand
auacaacuacucuuacauc

SEQ ID NO: 924883 - RNA, 19 nt, Homo sapiens
  misc_RNA (1)...(19): siRNA sense strand
gcaacugcaccauacaacu

SEQ ID NO: 924884 - RNA, 19 nt, Homo sapiens
  misc_RNA (1)...(19): siRNA sense strand
ucagaacauucaggaugga

SEQ ID NO: 924885 - RNA, 19 nt, Homo sapiens
  misc_RNA (1)...(19): siRNA sense strand
uacaacuacucuuacaucu

SEQ ID NO: 924886 - RNA, 19 nt, Homo sapiens
  misc_RNA (1)...(19): siRNA sense strand
aggaaaaucuugcuugcuu

SEQ ID NO: 924887 - RNA, 19 nt, Homo sapiens
  misc_RNA (1)...(19): siRNA sense strand
agaauaaucgaaguuagug

SEQ ID NO: 924888 - RNA, 19 nt, Homo sapiens
  misc_RNA (1)...(19): siRNA sense strand
cauaugaagaagccaaaca

SEQ ID NO: 924889 - RNA, 19 nt, Homo sapiens
  misc_RNA (1)...(19): siRNA sense strand
ggaggcacagagagauguu

SEQ ID NO: 924890 - RNA, 19 nt, Homo sapiens
  misc_RNA (1)...(19): siRNA sense strand
ugcaaggaaucucaccaau

SEQ ID NO: 924891 - RNA, 19 nt, Homo sapiens
  misc_RNA (1)...(19): siRNA sense strand
gagcgauuuagggcuguua

SEQ ID NO: 924892 - RNA, 19 nt, Homo sapiens
  misc_RNA (1)...(19): siRNA sense strand
uauggucuaugauaucacu

SEQ ID NO: 924893 - RNA, 19 nt, Homo sapiens
  misc_RNA (1)...(19): siRNA sense strand
ucucauaggaaauaaagca

SEQ ID NO: 924894 - RNA, 19 nt, Homo sapiens
  misc_RNA (1)...(19): siRNA sense strand
cacuuaagcagcugguuga

SEQ ID NO: 924895 - RNA, 19 nt, Homo sapiens
  misc_RNA (1)...(19): siRNA sense strand
cggcaggacaggagcgauu

SEQ ID NO: 924896 - RNA, 19 nt, Homo sapiens
  misc_RNA (1)...(19): siRNA sense strand
guacaacacaaaccuucag

SEQ ID NO: 924897 - RNA, 19 nt, Homo sapiens
  misc_RNA (1)...(19): siRNA sense strand
gaagcuuggaucugaaugc

SEQ ID NO: 924898 - RNA, 19 nt, Homo sapiens
  misc_RNA (1)...(19): siRNA sense strand
aaacgggagagaauguaga

SEQ ID NO: 924899 - RNA, 19 nt, Homo sapiens
  misc_RNA (1)...(19): siRNA sense strand
ggagcgauuuagggcuguu

SEQ ID NO: 924900 - RNA, 19 nt, Homo sapiens
  misc_RNA (1)...(19): siRNA sense strand
gcaacagauugaagaauua

SEQ ID NO: 924901 - RNA, 19 nt, Homo sapiens
  misc_RNA (1)...(19): siRNA sense strand
gaagagcucucguuucaug

SEQ ID NO: 924902 - RNA, 19 nt, Homo sapiens
  misc_RNA (1)...(19): siRNA sense strand
gaaagaaggcggagcagaa

SEQ ID NO: 924903 - RNA, 19 nt, Homo sapiens
  misc_RNA (1)...(19): siRNA sense strand
gugaagacauuaaaucuga

SEQ ID NO: 924904 - RNA, 19 nt, Homo sapiens
  misc_RNA (1)...(19): siRNA sense strand
ggacagagaacaagauaga

SEQ ID NO: 924905 - RNA, 19 nt, Homo sapiens
  misc_RNA (1)...(19): siRNA sense strand
gaagagagagaacugcuaa

SEQ ID NO: 924906 - RNA, 19 nt, Homo sapiens
  misc_RNA (1)...(19): siRNA sense strand
cgagagcguuuguaaauau

SEQ ID NO: 924907 - RNA, 19 nt, Homo sapiens
  misc_RNA (1)...(19): siRNA sense strand
ggaaagugauacuaagaau

SEQ ID NO: 924908 - RNA, 19 nt, Homo sapiens
  misc_RNA (1)...(19): siRNA sense strand
gaaaguuggcuaugaaaga

SEQ ID NO: 924909 - RNA, 19 nt, Homo sapiens
  misc_RNA (1)...(19): siRNA sense strand
gaaggaaagugauacuaag

SEQ ID NO: 924910 - RNA, 19 nt, Homo sapiens
  misc_RNA (1)...(19): siRNA sense strand
ugaaguauguggagccuuu

SEQ ID NO: 924911 - RNA, 19 nt, Homo sapiens
  misc_RNA (1)...(19): siRNA sense strand
agaaagggcucgugacaga

SEQ ID NO: 924912 - RNA, 19 nt, Homo sapiens
  misc_RNA (1)...(19): siRNA sense strand
ggaaguuugugaaguaugu

SEQ ID NO: 924913 - RNA, 19 nt, Homo sapiens
  misc_RNA (1)...(19): siRNA sense strand
gcaagaaagagaagaaaga

SEQ ID NO: 924914 - RNA, 19 nt, Homo sapiens
  misc_RNA (1)...(19): siRNA sense strand
aaacacagaucucgaaguc

SEQ ID NO: 924915 - RNA, 19 nt, Homo sapiens
  misc_RNA (1)...(19): siRNA sense strand
caugaaaguuggcuaugaa

SEQ ID NO: 924916 - RNA, 19 nt, Homo sapiens
  misc_RNA (1)...(19): siRNA sense strand
aauggaaguuugugaagua

SEQ ID NO: 924917 - RNA, 19 nt, Homo sapiens
  misc_RNA (1)...(19): siRNA sense strand
gaauuagggucugaaggaa

SEQ ID NO: 924918 - RNA, 19 nt, Homo sapiens
  misc_RNA (1)...(19): siRNA sense strand
gaucgaaagucauauaagc

SEQ ID NO: 924919 - RNA, 19 nt, Homo sapiens
  misc_RNA (1)...(19): siRNA sense strand
ggaagaaagagaaaggaaa

SEQ ID NO: 924920 - RNA, 19 nt, Homo sapiens
  misc_RNA (1)...(19): siRNA sense strand
cgaagaaccugaucgugau

SEQ ID NO: 924921 - RNA, 19 nt, Homo sapiens
  misc_RNA (1)...(19): siRNA sense strand
gaaagaagaaagagaaguc

SEQ ID NO: 924922 - RNA, 19 nt, Homo sapiens
  misc_RNA (1)...(19): siRNA sense strand
cgaaggaaagugauacuaa

SEQ ID NO: 924923 - RNA, 19 nt, Homo sapiens
  misc_RNA (1)...(19): siRNA sense strand
gaaagagaagaaagagaaa

SEQ ID NO: 924924 - RNA, 19 nt, Homo sapiens
  misc_RNA (1)...(19): siRNA sense strand
gaaguccgguagucgagaa

SEQ ID NO: 924925 - RNA, 19 nt, Homo sapiens
  misc_RNA (1)...(19): siRNA sense strand
gagagcguuuguaaauauu

SEQ ID NO: 924926 - RNA, 19 nt, Homo sapiens
  misc_RNA (1)...(19): siRNA sense strand
gagcagaaguagagaucga

SEQ ID NO: 924927 - RNA, 19 nt, Homo sapiens
  misc_RNA (1)...(19): siRNA sense strand
ggaagaggaagaaagagaa

SEQ ID NO: 924928 - RNA, 19 nt, Homo sapiens
  misc_RNA (1)...(19): siRNA sense strand
gaagcaagaaagagaagaa

SEQ ID NO: 924929 - RNA, 19 nt, Homo sapiens
  misc_RNA (1)...(19): siRNA sense strand
gaagaggaagaaagagaaa

SEQ ID NO: 924930 - RNA, 19 nt, Homo sapiens
  misc_RNA (1)...(19): siRNA sense strand
gaaagggaagaaagagaaa

SEQ ID NO: 924931 - RNA, 19 nt, Homo sapiens
  misc_RNA (1)...(19): siRNA sense strand
gaaguagaacguaggauca

SEQ ID NO: 924932 - RNA, 19 nt, Homo sapiens
  misc_RNA (1)...(19): siRNA sense strand
gcaguuguuggaugaguua

SEQ ID NO: 924933 - RNA, 19 nt, Homo sapiens
  misc_RNA (1)...(19): siRNA sense strand
gagagaaagggaagaaaga

SEQ ID NO: 924934 - RNA, 19 nt, Homo sapiens
  misc_RNA (1)...(19): siRNA sense strand
ugcaacagauugaagaauu

SEQ ID NO: 924935 - RNA, 19 nt, Homo sapiens
  misc_RNA (1)...(19): siRNA sense strand
gaggggaucugaugauaaa

SEQ ID NO: 924936 - RNA, 19 nt, Homo sapiens
  misc_RNA (1)...(19): siRNA sense strand
cacaaaaggucacgaagua

SEQ ID NO: 924937 - RNA, 19 nt, Homo sapiens
  misc_RNA (1)...(19): siRNA sense strand
aaauucagguucuaacaga

SEQ ID NO: 924938 - RNA, 19 nt, Homo sapiens
  misc_RNA (1)...(19): siRNA sense strand
agaaagagaagaaagagaa

SEQ ID NO: 924939 - RNA, 19 nt, Homo sapiens
  misc_RNA (1)...(19): siRNA sense strand
ccggguagaugaccauuug

SEQ ID NO: 924940 - RNA, 19 nt, Homo sapiens
  misc_RNA (1)...(19): siRNA sense strand
ccacaacgucgacaauuga

SEQ ID NO: 924941 - RNA, 19 nt, Homo sapiens
  misc_RNA (1)...(19): siRNA sense strand
aagcuuugcugcacaagaa

SEQ ID NO: 924942 - RNA, 19 nt, Homo sapiens
  misc_RNA (1)...(19): siRNA sense strand
gaaagugauacuaagaaug

SEQ ID NO: 924943 - RNA, 19 nt, Homo sapiens
  misc_RNA (1)...(19): siRNA sense strand
gaucuugguccgugugaaa

SEQ ID NO: 924944 - RNA, 19 nt, Homo sapiens
  misc_RNA (1)...(19): siRNA sense strand
acacaaacacugaaucgaa

SEQ ID NO: 924945 - RNA, 19 nt, Homo sapiens
  misc_RNA (1)...(19): siRNA sense strand
gaaaagaggggaucugaug

SEQ ID NO: 924946 - RNA, 19 nt, Homo sapiens
  misc_RNA (1)...(19): siRNA sense strand
gugacacucaguccaauua

SEQ ID NO: 924947 - RNA, 19 nt, Homo sapiens
  misc_RNA (1)...(19): siRNA sense strand
ggagaagcaagaaagagaa

SEQ ID NO: 924948 - RNA, 19 nt, Homo sapiens
  misc_RNA (1)...(19): siRNA sense strand
gaaucgaaggaaagugaua

SEQ ID NO: 924949 - RNA, 19 nt, Homo sapiens
  misc_RNA (1)...(19): siRNA sense strand
gaagaaagagaaaggaaaa

SEQ ID NO: 924950 - RNA, 19 nt, Homo sapiens
  misc_RNA (1)...(19): siRNA sense strand
aaguagagaucgacgaaga

SEQ ID NO: 924951 - RNA, 19 nt, Homo sapiens
  misc_RNA (1)...(19): siRNA sense strand
gaacugcuaagguccacaa

SEQ ID NO: 924952 - RNA, 19 nt, Homo sapiens
  misc_RNA (1)...(19): siRNA sense strand
ggagagagaaagggaagaa

SEQ ID NO: 924953 - RNA, 19 nt, Homo sapiens
  misc_RNA (1)...(19): siRNA sense strand
ugaaagcuuugcugcacaa

SEQ ID NO: 924954 - RNA, 19 nt, Homo sapiens
  misc_RNA (1)...(19): siRNA sense strand
gagaaagggaagaaagaga

SEQ ID NO: 924955 - RNA, 19 nt, Homo sapiens
  misc_RNA (1)...(19): siRNA sense strand
cacgagagcguuuguaaau

SEQ ID NO: 924956 - RNA, 19 nt, Homo sapiens
  misc_RNA (1)...(19): siRNA sense strand
agagaaagaagaaagagaa

SEQ ID NO: 924957 - RNA, 19 nt, Homo sapiens
  misc_RNA (1)...(19): siRNA sense strand
gaagggaagaggaagaaag

SEQ ID NO: 924958 - RNA, 19 nt, Homo sapiens
  misc_RNA (1)...(19): siRNA sense strand
gaagacacaaacacugaau

SEQ ID NO: 924959 - RNA, 19 nt, Homo sapiens
  misc_RNA (1)...(19): siRNA sense strand
gaucgacgaagaagcagaa

SEQ ID NO: 924960 - RNA, 19 nt, Homo sapiens
  misc_RNA (1)...(19): siRNA sense strand
gggaagaggaagaaagaga

SEQ ID NO: 924961 - RNA, 19 nt, Homo sapiens
  misc_RNA (1)...(19): siRNA sense strand
aaauacacguucugaucuu

SEQ ID NO: 924962 - RNA, 19 nt, Homo sapiens
  misc_RNA (1)...(19): siRNA sense strand
gugaagacacaaacacuga

SEQ ID NO: 924963 - RNA, 19 nt, Homo sapiens
  misc_RNA (1)...(19): siRNA sense strand
gaaaauccaaggagaaaga

SEQ ID NO: 924964 - RNA, 19 nt, Homo sapiens
  misc_RNA (1)...(19): siRNA sense strand
acagagaacaagauagaaa

SEQ ID NO: 924965 - RNA, 19 nt, Homo sapiens
  misc_RNA (1)...(19): siRNA sense strand
caaauacacguucugaucu

SEQ ID NO: 924966 - RNA, 19 nt, Homo sapiens
  misc_RNA (1)...(19): siRNA sense strand
acacaugggcuaugccaaa

SEQ ID NO: 924967 - RNA, 19 nt, Homo sapiens
  misc_RNA (1)...(19): siRNA sense strand
guuguuggaugaguuaaug

SEQ ID NO: 924968 - RNA, 19 nt, Homo sapiens
  misc_RNA (1)...(19): siRNA sense strand
acaaauacacguucugauc

SEQ ID NO: 924969 - RNA, 19 nt, Homo sapiens
  misc_RNA (1)...(19): siRNA sense strand
gggaucgaaagucauauaa

SEQ ID NO: 924970 - RNA, 19 nt, Homo sapiens
  misc_RNA (1)...(19): siRNA sense strand
ccgcgcaguuguuggauga

SEQ ID NO: 924971 - RNA, 19 nt, Homo sapiens
  misc_RNA (1)...(19): siRNA sense strand
gaccagugaagacauuaaa

SEQ ID NO: 924972 - RNA, 19 nt, Homo sapiens
  misc_RNA (1)...(19): siRNA sense strand
acgagagcguuuguaaaua

SEQ ID NO: 924973 - RNA, 19 nt, Homo sapiens
  misc_RNA (1)...(19): siRNA sense strand
agaauuagggucugaagga

SEQ ID NO: 924974 - RNA, 19 nt, Homo sapiens
  misc_RNA (1)...(19): siRNA sense strand
ggaccagugaagacauuaa

SEQ ID NO: 924975 - RNA, 19 nt, Homo sapiens
  misc_RNA (1)...(19): siRNA sense strand
agaaagggaagaaagagaa

SEQ ID NO: 924976 - RNA, 19 nt, Homo sapiens
  misc_RNA (1)...(19): siRNA sense strand
gggaugaugaaauuaguug

SEQ ID NO: 924977 - RNA, 19 nt, Homo sapiens
  misc_RNA (1)...(19): siRNA sense strand
agaaggcggagcagaagua

SEQ ID NO: 924978 - RNA, 19 nt, Homo sapiens
  misc_RNA (1)...(19): siRNA sense strand
gggaagaaagagaaaggaa

SEQ ID NO: 924979 - RNA, 19 nt, Homo sapiens
  misc_RNA (1)...(19): siRNA sense strand
ucacaaauacacguucuga

SEQ ID NO: 924980 - RNA, 19 nt, Homo sapiens
  misc_RNA (1)...(19): siRNA sense strand
gaugaaauuaguugagcaa

SEQ ID NO: 924981 - RNA, 19 nt, Homo sapiens
  misc_RNA (1)...(19): siRNA sense strand
gaaaaucuacgaaaacagu

SEQ ID NO: 924982 - RNA, 19 nt, Homo sapiens
  misc_RNA (1)...(19): siRNA sense strand
ccacgagagcguuuguaaa

SEQ ID NO: 924983 - RNA, 19 nt, Homo sapiens
  misc_RNA (1)...(19): siRNA sense strand
caacgucgacaauugaaag

SEQ ID NO: 924984 - RNA, 19 nt, Homo sapiens
  misc_RNA (1)...(19): siRNA sense strand
gucgacaauugaaagcuuu

SEQ ID NO: 924985 - RNA, 19 nt, Homo sapiens
  misc_RNA (1)...(19): siRNA sense strand
gaagaagcagaagccauga

SEQ ID NO: 924986 - RNA, 19 nt, Homo sapiens
  misc_RNA (1)...(19): siRNA sense strand
gacagagaaagaagaaaga

SEQ ID NO: 924987 - RNA, 19 nt, Homo sapiens
  misc_RNA (1)...(19): siRNA sense strand
gaaaagaaccgaagaaccu

SEQ ID NO: 924988 - RNA, 19 nt, Homo sapiens
  misc_RNA (1)...(19): siRNA sense strand
gcagaaguagaacguagga

SEQ ID NO: 924989 - RNA, 19 nt, Homo sapiens
  misc_RNA (1)...(19): siRNA sense strand
ccagugaagacauuaaauc

SEQ ID NO: 924990 - RNA, 19 nt, Homo sapiens
  misc_RNA (1)...(19): siRNA sense strand
aaaguuggcuaugaaagag

SEQ ID NO: 924991 - RNA, 19 nt, Homo sapiens
  misc_RNA (1)...(19): siRNA sense strand
aaagaaagggcucgugaca

SEQ ID NO: 924992 - RNA, 19 nt, Homo sapiens
  misc_RNA (1)...(19): siRNA sense strand
caaaauugauguacuucug

SEQ ID NO: 924993 - RNA, 19 nt, Homo sapiens
  misc_RNA (1)...(19): siRNA sense strand
ugacagagaaagaagaaag

SEQ ID NO: 924994 - RNA, 19 nt, Homo sapiens
  misc_RNA (1)...(19): siRNA sense strand
gguagaugaccauuugaug

SEQ ID NO: 924995 - RNA, 19 nt, Homo sapiens
  misc_RNA (1)...(19): siRNA sense strand
cgucgacaauugaaagcuu

SEQ ID NO: 924996 - RNA, 19 nt, Homo sapiens
  misc_RNA (1)...(19): siRNA sense strand
uccacaacgucgacaauug

SEQ ID NO: 924997 - RNA, 19 nt, Homo sapiens
  misc_RNA (1)...(19): siRNA sense strand
aaagaacgggagagagaaa

SEQ ID NO: 924998 - RNA, 19 nt, Homo sapiens
  misc_RNA (1)...(19): siRNA sense strand
gagcaaaagucgggacaga

SEQ ID NO: 924999 - RNA, 19 nt, Homo sapiens
  misc_RNA (1)...(19): siRNA sense strand
gccgggaucgaaagucaua

SEQ ID NO: 925000 - RNA, 19 nt, Homo sapiens
  misc_RNA (1)...(19): siRNA sense strand
caacauugcuccaggauau

SEQ ID NO: 925001 - RNA, 19 nt, Homo sapiens
  misc_RNA (1)...(19): siRNA sense strand
ccacagcugucccuaagua

SEQ ID NO: 925002 - RNA, 19 nt, Homo sapiens
  misc_RNA (1)...(19): siRNA sense strand
gcuaacagaucccagguuu

SEQ ID NO: 925003 - RNA, 19 nt, Homo sapiens
  misc_RNA (1)...(19): siRNA sense strand
ggcagacgguccuuuaaua

SEQ ID NO: 925004 - RNA, 19 nt, Homo sapiens
  misc_RNA (1)...(19): siRNA sense strand
caaagaagaucugacaaau

SEQ ID NO: 925005 - RNA, 19 nt, Homo sapiens
  misc_RNA (1)...(19): siRNA sense strand
caacagccaucaugaagga

SEQ ID NO: 925006 - RNA, 19 nt, Homo sapiens
  misc_RNA (1)...(19): siRNA sense strand
gaagaauuaucccaucuca

SEQ ID NO: 925007 - RNA, 19 nt, Homo sapiens
  misc_RNA (1)...(19): siRNA sense strand
ggauggauaucugagaaua

SEQ ID NO: 925008 - RNA, 19 nt, Homo sapiens
  misc_RNA (1)...(19): siRNA sense strand
gcacaaauaaaucacagua

SEQ ID NO: 925009 - RNA, 19 nt, Homo sapiens
  misc_RNA (1)...(19): siRNA sense strand
gagaauauuccuauaguga

SEQ ID NO: 925010 - RNA, 19 nt, Homo sapiens
  misc_RNA (1)...(19): siRNA sense strand
aagaagaucugacaaauac

SEQ ID NO: 925011 - RNA, 19 nt, Homo sapiens
  misc_RNA (1)...(19): siRNA sense strand
gaaaguggauggaaguaac

SEQ ID NO: 925012 - RNA, 19 nt, Homo sapiens
  misc_RNA (1)...(19): siRNA sense strand
uaagaugcgucaaagaaga

SEQ ID NO: 925013 - RNA, 19 nt, Homo sapiens
  misc_RNA (1)...(19): siRNA sense strand
caaccgaaccuacagauga

SEQ ID NO: 925014 - RNA, 19 nt, Homo sapiens
  misc_RNA (1)...(19): siRNA sense strand
ugaaggaaguccauggaaa

SEQ ID NO: 925015 - RNA, 19 nt, Homo sapiens
  misc_RNA (1)...(19): siRNA sense strand
ggaaguccauggaaaugau

SEQ ID NO: 925016 - RNA, 19 nt, Homo sapiens
  misc_RNA (1)...(19): siRNA sense strand
gaaggaaguccauggaaau

SEQ ID NO: 925017 - RNA, 19 nt, Homo sapiens
  misc_RNA (1)...(19): siRNA sense strand
uaacagaucccagguuuau

SEQ ID NO: 925018 - RNA, 19 nt, Homo sapiens
  misc_RNA (1)...(19): siRNA sense strand
ccacgaagcccuccaaauc

SEQ ID NO: 925019 - RNA, 19 nt, Homo sapiens
  misc_RNA (1)...(19): siRNA sense strand
caucauguuggaagaauua

SEQ ID NO: 925020 - RNA, 19 nt, Homo sapiens
  misc_RNA (1)...(19): siRNA sense strand
caaucuagagcacaaauaa

SEQ ID NO: 925021 - RNA, 19 nt, Homo sapiens
  misc_RNA (1)...(19): siRNA sense strand
ucaaagaagaucugacaaa

SEQ ID NO: 925022 - RNA, 19 nt, Homo sapiens
  misc_RNA (1)...(19): siRNA sense strand
gcaagcaacagccaucaug

SEQ ID NO: 925023 - RNA, 19 nt, Homo sapiens
  misc_RNA (1)...(19): siRNA sense strand
ggaaaguggauggaaguaa

SEQ ID NO: 925024 - RNA, 19 nt, Homo sapiens
  misc_RNA (1)...(19): siRNA sense strand
gcaaugauccggagcuuuu

SEQ ID NO: 925025 - RNA, 19 nt, Homo sapiens
  misc_RNA (1)...(19): siRNA sense strand
gauaacaaccgaaccuaca

SEQ ID NO: 925026 - RNA, 19 nt, Homo sapiens
  misc_RNA (1)...(19): siRNA sense strand
gaauuaucccaucucagua

SEQ ID NO: 925027 - RNA, 19 nt, Homo sapiens
  misc_RNA (1)...(19): siRNA sense strand
gaucugacaaauacacauu

SEQ ID NO: 925028 - RNA, 19 nt, Homo sapiens
  misc_RNA (1)...(19): siRNA sense strand
gagcuacuauugcuaacag

SEQ ID NO: 925029 - RNA, 19 nt, Homo sapiens
  misc_RNA (1)...(19): siRNA sense strand
gcagacgguccuuuaauag

SEQ ID NO: 925030 - RNA, 19 nt, Homo sapiens
  misc_RNA (1)...(19): siRNA sense strand
ggagcaagccauuagcaau

SEQ ID NO: 925031 - RNA, 19 nt, Homo sapiens
  misc_RNA (1)...(19): siRNA sense strand
agaaucagaagaccuauga

SEQ ID NO: 925032 - RNA, 19 nt, Homo sapiens
  misc_RNA (1)...(19): siRNA sense strand
ugauaccacuguaccagaa

SEQ ID NO: 925033 - RNA, 19 nt, Homo sapiens
  misc_RNA (1)...(19): siRNA sense strand
ccauggaaaugauguugau

SEQ ID NO: 925034 - RNA, 19 nt, Homo sapiens
  misc_RNA (1)...(19): siRNA sense strand
guaucaaucuagagcacaa

SEQ ID NO: 925035 - RNA, 19 nt, Homo sapiens
  misc_RNA (1)...(19): siRNA sense strand
guauugcuaugcagaaugg

SEQ ID NO: 925036 - RNA, 19 nt, Homo sapiens
  misc_RNA (1)...(19): siRNA sense strand
uuagaggcuuuauauccua

SEQ ID NO: 925037 - RNA, 19 nt, Homo sapiens
  misc_RNA (1)...(19): siRNA sense strand
ggaaggugguucgcagcaa

SEQ ID NO: 925038 - RNA, 19 nt, Homo sapiens
  misc_RNA (1)...(19): siRNA sense strand
agaauuaucccaucucagu

SEQ ID NO: 925039 - RNA, 19 nt, Homo sapiens
  misc_RNA (1)...(19): siRNA sense strand
ccuaagggauggauaucug

SEQ ID NO: 925040 - RNA, 19 nt, Homo sapiens
  misc_RNA (1)...(19): siRNA sense strand
caccacagcugucccuaag

SEQ ID NO: 925041 - RNA, 19 nt, Homo sapiens
  misc_RNA (1)...(19): siRNA sense strand
gugccaggcuauuuaagau

SEQ ID NO: 925042 - RNA, 19 nt, Homo sapiens
  misc_RNA (1)...(19): siRNA sense strand
ccacaccauuuggagguuu

SEQ ID NO: 925043 - RNA, 19 nt, Homo sapiens
  misc_RNA (1)...(19): siRNA sense strand
ccaaauccagacaacauug

SEQ ID NO: 925044 - RNA, 19 nt, Homo sapiens
  misc_RNA (1)...(19): siRNA sense strand
caagcaacagccaucauga

SEQ ID NO: 925045 - RNA, 19 nt, Homo sapiens
  misc_RNA (1)...(19): siRNA sense strand
ugagaauauuccuauagug

SEQ ID NO: 925046 - RNA, 19 nt, Homo sapiens
  misc_RNA (1)...(19): siRNA sense strand
uagaggcuuuauauccuaa

SEQ ID NO: 925047 - RNA, 19 nt, Homo sapiens
  misc_RNA (1)...(19): siRNA sense strand
cagcugucccuaaguacua

SEQ ID NO: 925048 - RNA, 19 nt, Homo sapiens
  misc_RNA (1)...(19): siRNA sense strand
gauuacaggagcuuuaaca

SEQ ID NO: 925049 - RNA, 19 nt, Homo sapiens
  misc_RNA (1)...(19): siRNA sense strand
uuuaagaugcgucaaagaa

SEQ ID NO: 925050 - RNA, 19 nt, Homo sapiens
  misc_RNA (1)...(19): siRNA sense strand
cugagaauauuccuauagu

SEQ ID NO: 925051 - RNA, 19 nt, Homo sapiens
  misc_RNA (1)...(19): siRNA sense strand
ccagguuuauguccuuugu

SEQ ID NO: 925052 - RNA, 19 nt, Homo sapiens
  misc_RNA (1)...(19): siRNA sense strand
cguggugccaggcuauuua

SEQ ID NO: 925053 - RNA, 19 nt, Homo sapiens
  misc_RNA (1)...(19): siRNA sense strand
gaagaucugacaaauacac

SEQ ID NO: 925054 - RNA, 19 nt, Homo sapiens
  misc_RNA (1)...(19): siRNA sense strand
ggugccaggcuauuuaaga

SEQ ID NO: 925055 - RNA, 19 nt, Homo sapiens
  misc_RNA (1)...(19): siRNA sense strand
acagaucccagguuuaugu

SEQ ID NO: 925056 - RNA, 19 nt, Homo sapiens
  misc_RNA (1)...(19): siRNA sense strand
cuagagcacaaauaaauca

SEQ ID NO: 925057 - RNA, 19 nt, Homo sapiens
  misc_RNA (1)...(19): siRNA sense strand
ucaaucuagagcacaaaua

SEQ ID NO: 925058 - RNA, 19 nt, Homo sapiens
  misc_RNA (1)...(19): siRNA sense strand
uaacaaccgaaccuacaga

SEQ ID NO: 925059 - RNA, 19 nt, Homo sapiens
  misc_RNA (1)...(19): siRNA sense strand
gcaucaagaaugguuaaau

SEQ ID NO: 925060 - RNA, 19 nt, Homo sapiens
  misc_RNA (1)...(19): siRNA sense strand
aauuaucccaucucaguaa

SEQ ID NO: 925061 - RNA, 19 nt, Homo sapiens
  misc_RNA (1)...(19): siRNA sense strand
guuuauguccuuugucaau

SEQ ID NO: 925062 - RNA, 19 nt, Homo sapiens
  misc_RNA (1)...(19): siRNA sense strand
gaaguccauggaaaugaug

SEQ ID NO: 925063 - RNA, 19 nt, Homo sapiens
  misc_RNA (1)...(19): siRNA sense strand
agggauggauaucugagaa

SEQ ID NO: 925064 - RNA, 19 nt, Homo sapiens
  misc_RNA (1)...(19): siRNA sense strand
gggaaaguggauggaagua

SEQ ID NO: 925065 - RNA, 19 nt, Homo sapiens
  misc_RNA (1)...(19): siRNA sense strand
ccacuguaccagaaucaga

SEQ ID NO: 925066 - RNA, 19 nt, Homo sapiens
  misc_RNA (1)...(19): siRNA sense strand
cuaacagaucccagguuua

SEQ ID NO: 925067 - RNA, 19 nt, Homo sapiens
  misc_RNA (1)...(19): siRNA sense strand
caggguugccacaccauuu

SEQ ID NO: 925068 - RNA, 19 nt, Homo sapiens
  misc_RNA (1)...(19): siRNA sense strand
ggaagaauuaucccaucuc

SEQ ID NO: 925069 - RNA, 19 nt, Homo sapiens
  misc_RNA (1)...(19): siRNA sense strand
aaccgaaccuacagaugau

SEQ ID NO: 925070 - RNA, 19 nt, Homo sapiens
  misc_RNA (1)...(19): siRNA sense strand
cuauuuaagaugcgucaaa

SEQ ID NO: 925071 - RNA, 19 nt, Homo sapiens
  misc_RNA (1)...(19): siRNA sense strand
uauuuaagaugcgucaaag

SEQ ID NO: 925072 - RNA, 19 nt, Homo sapiens
  misc_RNA (1)...(19): siRNA sense strand
aagcaacagccaucaugaa

SEQ ID NO: 925073 - RNA, 19 nt, Homo sapiens
  misc_RNA (1)...(19): siRNA sense strand
ugaaggaaaggcagaacug

SEQ ID NO: 925074 - RNA, 19 nt, Homo sapiens
  misc_RNA (1)...(19): siRNA sense strand
gggagcaagccauuagcaa

SEQ ID NO: 925075 - RNA, 19 nt, Homo sapiens
  misc_RNA (1)...(19): siRNA sense strand
cuggaccacugaaggaaau

SEQ ID NO: 925076 - RNA, 19 nt, Homo sapiens
  misc_RNA (1)...(19): siRNA sense strand
uggaagaauuaucccaucu

SEQ ID NO: 925077 - RNA, 19 nt, Homo sapiens
  misc_RNA (1)...(19): siRNA sense strand
gucccuaaguacuaucaau

SEQ ID NO: 925078 - RNA, 19 nt, Homo sapiens
  misc_RNA (1)...(19): siRNA sense strand
uagcaaugauccggagcuu

SEQ ID NO: 925079 - RNA, 19 nt, Homo sapiens
  misc_RNA (1)...(19): siRNA sense strand
caguauugcuaugcagaau

SEQ ID NO: 925080 - RNA, 19 nt, Homo sapiens
  misc_RNA (1)...(19): siRNA sense strand
agguuuauguccuuuguca

SEQ ID NO: 925081 - RNA, 19 nt, Homo sapiens
  misc_RNA (1)...(19): siRNA sense strand
gcagaaugggaaaguggau

SEQ ID NO: 925082 - RNA, 19 nt, Homo sapiens
  misc_RNA (1)...(19): siRNA sense strand
gauauucuggaccacugaa

SEQ ID NO: 925083 - RNA, 19 nt, Homo sapiens
  misc_RNA (1)...(19): siRNA sense strand
ggauauucuggaccacuga

SEQ ID NO: 925084 - RNA, 19 nt, Homo sapiens
  misc_RNA (1)...(19): siRNA sense strand
gauccacgaagcccuccaa

SEQ ID NO: 925085 - RNA, 19 nt, Homo sapiens
  misc_RNA (1)...(19): siRNA sense strand
cuaagggauggauaucuga

SEQ ID NO: 925086 - RNA, 19 nt, Homo sapiens
  misc_RNA (1)...(19): siRNA sense strand
guggugccaggcuauuuaa

SEQ ID NO: 925087 - RNA, 19 nt, Homo sapiens
  misc_RNA (1)...(19): siRNA sense strand
aagcaucaagaaugguuaa

SEQ ID NO: 925088 - RNA, 19 nt, Homo sapiens
  misc_RNA (1)...(19): siRNA sense strand
aaagcaucaagaaugguua

SEQ ID NO: 925089 - RNA, 19 nt, Homo sapiens
  misc_RNA (1)...(19): siRNA sense strand
ccuaaguacuaucaaucuc

SEQ ID NO: 925090 - RNA, 19 nt, Homo sapiens
  misc_RNA (1)...(19): siRNA sense strand
gaaaguaucugcaguguaa

SEQ ID NO: 925091 - RNA, 19 nt, Homo sapiens
  misc_RNA (1)...(19): siRNA sense strand
ggaaagaggucaaauucaa

SEQ ID NO: 925092 - RNA, 19 nt, Homo sapiens
  misc_RNA (1)...(19): siRNA sense strand
acaaagcccuucaaauuua

SEQ ID NO: 925093 - RNA, 19 nt, Homo sapiens
  misc_RNA (1)...(19): siRNA sense strand
gcaaagagguacuacagaa

SEQ ID NO: 925094 - RNA, 19 nt, Homo sapiens
  misc_RNA (1)...(19): siRNA sense strand
gaaauggaguuguggauga

SEQ ID NO: 925095 - RNA, 19 nt, Homo sapiens
  misc_RNA (1)...(19): siRNA sense strand
gagaggagaugugacaaua

SEQ ID NO: 925096 - RNA, 19 nt, Homo sapiens
  misc_RNA (1)...(19): siRNA sense strand
ggacaguacuggcaugaaa

SEQ ID NO: 925097 - RNA, 19 nt, Homo sapiens
  misc_RNA (1)...(19): siRNA sense strand
gaaaggaaauggaguugug

SEQ ID NO: 925098 - RNA, 19 nt, Homo sapiens
  misc_RNA (1)...(19): siRNA sense strand
auacagaccugaagaagua

SEQ ID NO: 925099 - RNA, 19 nt, Homo sapiens
  misc_RNA (1)...(19): siRNA sense strand
gauaauccauuuaggacua

SEQ ID NO: 925100 - RNA, 19 nt, Homo sapiens
  misc_RNA (1)...(19): siRNA sense strand
uaacgugacuucagauuau

SEQ ID NO: 925101 - RNA, 19 nt, Homo sapiens
  misc_RNA (1)...(19): siRNA sense strand
caagaaauaugccaaguca

SEQ ID NO: 925102 - RNA, 19 nt, Homo sapiens
  misc_RNA (1)...(19): siRNA sense strand
uuacaaagcccuucaaauu

SEQ ID NO: 925103 - RNA, 19 nt, Homo sapiens
  misc_RNA (1)...(19): siRNA sense strand
gagguuggcuuuauaaaca

SEQ ID NO: 925104 - RNA, 19 nt, Homo sapiens
  misc_RNA (1)...(19): siRNA sense strand
gaacgagcauggagagaau

SEQ ID NO: 925105 - RNA, 19 nt, Homo sapiens
  misc_RNA (1)...(19): siRNA sense strand
gaggagaugugacaauaga

SEQ ID NO: 925106 - RNA, 19 nt, Homo sapiens
  misc_RNA (1)...(19): siRNA sense strand
ggugcaagauacuauauaa

SEQ ID NO: 925107 - RNA, 19 nt, Homo sapiens
  misc_RNA (1)...(19): siRNA sense strand
gaacuggacacugccauua

SEQ ID NO: 925108 - RNA, 19 nt, Homo sapiens
  misc_RNA (1)...(19): siRNA sense strand
gaaggauggucaagauaga

SEQ ID NO: 925109 - RNA, 19 nt, Homo sapiens
  misc_RNA (1)...(19): siRNA sense strand
gagcaaauggaaagaauaa

SEQ ID NO: 925110 - RNA, 19 nt, Homo sapiens
  misc_RNA (1)...(19): siRNA sense strand
ugaauucucugccaucuga

SEQ ID NO: 925111 - RNA, 19 nt, Homo sapiens
  misc_RNA (1)...(19): siRNA sense strand
caagauagacccuuaacaa

SEQ ID NO: 925112 - RNA, 19 nt, Homo sapiens
  misc_RNA (1)...(19): siRNA sense strand
ggaaaacgcugucacaaga

SEQ ID NO: 925113 - RNA, 19 nt, Homo sapiens
  misc_RNA (1)...(19): siRNA sense strand
caaauucaaugcagcaguu

SEQ ID NO: 925114 - RNA, 19 nt, Homo sapiens
  misc_RNA (1)...(19): siRNA sense strand
acaaagggaugauuuacaa

SEQ ID NO: 925115 - RNA, 19 nt, Homo sapiens
  misc_RNA (1)...(19): siRNA sense strand
ggacuucagcaaagaguua

SEQ ID NO: 925116 - RNA, 19 nt, Homo sapiens
  misc_RNA (1)...(19): siRNA sense strand
gugcacagauucagaaaga

SEQ ID NO: 925117 - RNA, 19 nt, Homo sapiens
  misc_RNA (1)...(19): siRNA sense strand
gaacggccaauaaguauga

SEQ ID NO: 925118 - RNA, 19 nt, Homo sapiens
  misc_RNA (1)...(19): siRNA sense strand
gaagguagaggcacauuau

SEQ ID NO: 925119 - RNA, 19 nt, Homo sapiens
  misc_RNA (1)...(19): siRNA sense strand
caugagagaugacacaaug

SEQ ID NO: 925120 - RNA, 19 nt, Homo sapiens
  misc_RNA (1)...(19): siRNA sense strand
caaacaugcggaccuauua

SEQ ID NO: 925121 - RNA, 19 nt, Homo sapiens
  misc_RNA (1)...(19): siRNA sense strand
guuagaugcugcccuagua

SEQ ID NO: 925122 - RNA, 19 nt, Homo sapiens
  misc_RNA (1)...(19): siRNA sense strand
cgaaucaacuccugagguu

SEQ ID NO: 925123 - RNA, 19 nt, Homo sapiens
  misc_RNA (1)...(19): siRNA sense strand
caaagcccuucaaauuuaa

SEQ ID NO: 925124 - RNA, 19 nt, Homo sapiens
  misc_RNA (1)...(19): siRNA sense strand
ccacuuuccuguuggagua

SEQ ID NO: 925125 - RNA, 19 nt, Homo sapiens
  misc_RNA (1)...(19): siRNA sense strand
gcaaauggaaagaauaaga

SEQ ID NO: 925126 - RNA, 19 nt, Homo sapiens
  misc_RNA (1)...(19): siRNA sense strand
acacagaccgcaaaucaua

SEQ ID NO: 925127 - RNA, 19 nt, Homo sapiens
  misc_RNA (1)...(19): siRNA sense strand
gaaagugaccugcaaacau

SEQ ID NO: 925128 - RNA, 19 nt, Homo sapiens
  misc_RNA (1)...(19): siRNA sense strand
gaaagaauaagaagacauc

SEQ ID NO: 925129 - RNA, 19 nt, Homo sapiens
  misc_RNA (1)...(19): siRNA sense strand
gaagggcugaguaaacaua

SEQ ID NO: 925130 - RNA, 19 nt, Homo sapiens
  misc_RNA (1)...(19): siRNA sense strand
agauauugaugccaaguua

SEQ ID NO: 925131 - RNA, 19 nt, Homo sapiens
  misc_RNA (1)...(19): siRNA sense strand
uaccaaacauuaccaagaa

SEQ ID NO: 925132 - RNA, 19 nt, Homo sapiens
  misc_RNA (1)...(19): siRNA sense strand
gaacuucacgagcuucaaa

SEQ ID NO: 925133 - RNA, 19 nt, Homo sapiens
  misc_RNA (1)...(19): siRNA sense strand
agacgagguuggcuuuaua

SEQ ID NO: 925134 - RNA, 19 nt, Homo sapiens
  misc_RNA (1)...(19): siRNA sense strand
gaaaguacucgaccaagga

SEQ ID NO: 925135 - RNA, 19 nt, Homo sapiens
  misc_RNA (1)...(19): siRNA sense strand
aaccauagagugcuaauua

SEQ ID NO: 925136 - RNA, 19 nt, Homo sapiens
  misc_RNA (1)...(19): siRNA sense strand
gggaagaagcauauacuuu

SEQ ID NO: 925137 - RNA, 19 nt, Homo sapiens
  misc_RNA (1)...(19): siRNA sense strand
aaagugaccugcaaacauc

SEQ ID NO: 925138 - RNA, 19 nt, Homo sapiens
  misc_RNA (1)...(19): siRNA sense strand
caaauggaguaaauucugu

SEQ ID NO: 925139 - RNA, 19 nt, Homo sapiens
  misc_RNA (1)...(19): siRNA sense strand
caagagugaaccagaguua

SEQ ID NO: 925140 - RNA, 19 nt, Homo sapiens
  misc_RNA (1)...(19): siRNA sense strand
gaaauacacgcuugagcaa

SEQ ID NO: 925141 - RNA, 19 nt, Homo sapiens
  misc_RNA (1)...(19): siRNA sense strand
gaaggugcaagauacuaua

SEQ ID NO: 925142 - RNA, 19 nt, Homo sapiens
  misc_RNA (1)...(19): siRNA sense strand
ggaaaugauggauaaagaa

SEQ ID NO: 925143 - RNA, 19 nt, Homo sapiens
  misc_RNA (1)...(19): siRNA sense strand
ggagagaauaugauaaguu

SEQ ID NO: 925144 - RNA, 19 nt, Homo sapiens
  misc_RNA (1)...(19): siRNA sense strand
ggaagcauacuguuaccua

SEQ ID NO: 925145 - RNA, 19 nt, Homo sapiens
  misc_RNA (1)...(19): siRNA sense strand
ucacaggacaauuguauuu

SEQ ID NO: 925146 - RNA, 19 nt, Homo sapiens
  misc_RNA (1)...(19): siRNA sense strand
uagaggaaaucaaacaaug

SEQ ID NO: 925147 - RNA, 19 nt, Homo sapiens
  misc_RNA (1)...(19): siRNA sense strand
uaacaacaguggcagaagu

SEQ ID NO: 925148 - RNA, 19 nt, Homo sapiens
  misc_RNA (1)...(19): siRNA sense strand
gcauggagagaauaugaua

SEQ ID NO: 925149 - RNA, 19 nt, Homo sapiens
  misc_RNA (1)...(19): siRNA sense strand
gagcauggagagaauauga

SEQ ID NO: 925150 - RNA, 19 nt, Homo sapiens
  misc_RNA (1)...(19): siRNA sense strand
agacaaggccugaaaguau

SEQ ID NO: 925151 - RNA, 19 nt, Homo sapiens
  misc_RNA (1)...(19): siRNA sense strand
ggaagaagcauauacuuuu

SEQ ID NO: 925152 - RNA, 19 nt, Homo sapiens
  misc_RNA (1)...(19): siRNA sense strand
uagcuuugcuuaccucuga

SEQ ID NO: 925153 - RNA, 19 nt, Homo sapiens
  misc_RNA (1)...(19): siRNA sense strand
ggcaugaaauuguggaaga

SEQ ID NO: 925154 - RNA, 19 nt, Homo sapiens
  misc_RNA (1)...(19): siRNA sense strand
cagaagagcauccugaaga

SEQ ID NO: 925155 - RNA, 19 nt, Homo sapiens
  misc_RNA (1)...(19): siRNA sense strand
aaacacagaccgcaaauca

SEQ ID NO: 925156 - RNA, 19 nt, Homo sapiens
  misc_RNA (1)...(19): siRNA sense strand
ggaguaaauucuguggaaa

SEQ ID NO: 925157 - RNA, 19 nt, Homo sapiens
  misc_RNA (1)...(19): siRNA sense strand
uacaaagcccuucaaauuu

SEQ ID NO: 925158 - RNA, 19 nt, Homo sapiens
  misc_RNA (1)...(19): siRNA sense strand
ucagaaggauggucaagau

SEQ ID NO: 925159 - RNA, 19 nt, Homo sapiens
  misc_RNA (1)...(19): siRNA sense strand
guacuggcaugaaauugug

SEQ ID NO: 925160 - RNA, 19 nt, Homo sapiens
  misc_RNA (1)...(19): siRNA sense strand
acagaaggaucacauuuca

SEQ ID NO: 925161 - RNA, 19 nt, Homo sapiens
  misc_RNA (1)...(19): siRNA sense strand
agaaauagguaugauagga

SEQ ID NO: 925162 - RNA, 19 nt, Homo sapiens
  misc_RNA (1)...(19): siRNA sense strand
caaguuaagccgauuaugu

SEQ ID NO: 925163 - RNA, 19 nt, Homo sapiens
  misc_RNA (1)...(19): siRNA sense strand
gaggcacauuauacaaaua

SEQ ID NO: 925164 - RNA, 19 nt, Homo sapiens
  misc_RNA (1)...(19): siRNA sense strand
gacaaggccugaaaguauc

SEQ ID NO: 925165 - RNA, 19 nt, Homo sapiens
  misc_RNA (1)...(19): siRNA sense strand
auagaacacucccaagaaa

SEQ ID NO: 925166 - RNA, 19 nt, Homo sapiens
  misc_RNA (1)...(19): siRNA sense strand
guguaaagcugaauucucu

SEQ ID NO: 925167 - RNA, 19 nt, Homo sapiens
  misc_RNA (1)...(19): siRNA sense strand
gaaagaggucaaauucaau

SEQ ID NO: 925168 - RNA, 19 nt, Homo sapiens
  misc_RNA (1)...(19): siRNA sense strand
gaaccagaguuaacaacag

SEQ ID NO: 925169 - RNA, 19 nt, Homo sapiens
  misc_RNA (1)...(19): siRNA sense strand
caaaauggacugcuuagua

SEQ ID NO: 925170 - RNA, 19 nt, Homo sapiens
  misc_RNA (1)...(19): siRNA sense strand
gagaaacggagguccauga

SEQ ID NO: 925171 - RNA, 19 nt, Homo sapiens
  misc_RNA (1)...(19): siRNA sense strand
gaagaagcauauacuuuug

SEQ ID NO: 925172 - RNA, 19 nt, Homo sapiens
  misc_RNA (1)...(19): siRNA sense strand
aagagguacuacagaaaua

SEQ ID NO: 925173 - RNA, 19 nt, Homo sapiens
  misc_RNA (1)...(19): siRNA sense strand
agaauacgauguaacuguu

SEQ ID NO: 925174 - RNA, 19 nt, Homo sapiens
  misc_RNA (1)...(19): siRNA sense strand
ggagguccaugagagauga

SEQ ID NO: 925175 - RNA, 19 nt, Homo sapiens
  misc_RNA (1)...(19): siRNA sense strand
ccaauaacauucccaacca

SEQ ID NO: 925176 - RNA, 19 nt, Homo sapiens
  misc_RNA (1)...(19): siRNA sense strand
gcaugaaauuguggaagaa

SEQ ID NO: 925177 - RNA, 19 nt, Homo sapiens
  misc_RNA (1)...(19): siRNA sense strand
agaagagcauccugaagaa

SEQ ID NO: 925178 - RNA, 19 nt, Homo sapiens
  misc_RNA (1)...(19): siRNA sense strand
gaaggagggaugauaagga

SEQ ID NO: 925179 - RNA, 19 nt, Homo sapiens
  misc_RNA (1)...(19): siRNA sense strand
ucacagagcccagauuaug

SEQ ID NO: 925180 - RNA, 19 nt, Homo sapiens
  misc_RNA (1)...(19): siRNA sense strand
gaaaagaguggacaagauu

SEQ ID NO: 925181 - RNA, 19 nt, Homo sapiens
  misc_RNA (1)...(19): siRNA sense strand
uggaaaugauggauaaaga

SEQ ID NO: 925182 - RNA, 19 nt, Homo sapiens
  misc_RNA (1)...(19): siRNA sense strand
ugaugaaucuaauggagaa

SEQ ID NO: 925183 - RNA, 19 nt, Homo sapiens
  misc_RNA (1)...(19): siRNA sense strand
aagccuuucucaacaguua

SEQ ID NO: 925184 - RNA, 19 nt, Homo sapiens
  misc_RNA (1)...(19): siRNA sense strand
ccaaaaccaugguaaauau

SEQ ID NO: 925185 - RNA, 19 nt, Homo sapiens
  misc_RNA (1)...(19): siRNA sense strand
cugaagaaguagauauuga

SEQ ID NO: 925186 - RNA, 19 nt, Homo sapiens
  misc_RNA (1)...(19): siRNA sense strand
ccaugaaacuccugcaaca

SEQ ID NO: 925187 - RNA, 19 nt, Homo sapiens
  misc_RNA (1)...(19): siRNA sense strand
gaagaaguagauauugaug

SEQ ID NO: 925188 - RNA, 19 nt, Homo sapiens
  misc_RNA (1)...(19): siRNA sense strand
ugaaacuccugcaacagaa

SEQ ID NO: 925189 - RNA, 19 nt, Homo sapiens
  misc_RNA (1)...(19): siRNA sense strand
aaaggaaagugaccugcaa

SEQ ID NO: 925190 - RNA, 19 nt, Homo sapiens
  misc_RNA (1)...(19): siRNA sense strand
ggucacagaucacagaaua

SEQ ID NO: 925191 - RNA, 19 nt, Homo sapiens
  misc_RNA (1)...(19): siRNA sense strand
uaacucagcugaagcauca

SEQ ID NO: 925192 - RNA, 19 nt, Homo sapiens
  misc_RNA (1)...(19): siRNA sense strand
uaaggaaacuugcagagaa

SEQ ID NO: 925193 - RNA, 19 nt, Homo sapiens
  misc_RNA (1)...(19): siRNA sense strand
caccaugacuguagcaaua

SEQ ID NO: 925194 - RNA, 19 nt, Homo sapiens
  misc_RNA (1)...(19): siRNA sense strand
guacaaagagugccaaaga

SEQ ID NO: 925195 - RNA, 19 nt, Homo sapiens
  misc_RNA (1)...(19): siRNA sense strand
uugaaacccuggaauauuu

SEQ ID NO: 925196 - RNA, 19 nt, Homo sapiens
  misc_RNA (1)...(19): siRNA sense strand
cgaaagauuugagaauuga

SEQ ID NO: 925197 - RNA, 19 nt, Homo sapiens
  misc_RNA (1)...(19): siRNA sense strand
gcaucuagaagaagaaaua

SEQ ID NO: 925198 - RNA, 19 nt, Homo sapiens
  misc_RNA (1)...(19): siRNA sense strand
cagcaugcaucuagaagaa

SEQ ID NO: 925199 - RNA, 19 nt, Homo sapiens
  misc_RNA (1)...(19): siRNA sense strand
ugcaugaucuugaaacuuu

SEQ ID NO: 925200 - RNA, 19 nt, Homo sapiens
  misc_RNA (1)...(19): siRNA sense strand
gaacuuguacagucauuga

SEQ ID NO: 925201 - RNA, 19 nt, Homo sapiens
  misc_RNA (1)...(19): siRNA sense strand
gaucacagaauaaacaaga

SEQ ID NO: 925202 - RNA, 19 nt, Homo sapiens
  misc_RNA (1)...(19): siRNA sense strand
ucaaacugcugaacgagaa

SEQ ID NO: 925203 - RNA, 19 nt, Homo sapiens
  misc_RNA (1)...(19): siRNA sense strand
gcacaugaaauuugaagga

SEQ ID NO: 925204 - RNA, 19 nt, Homo sapiens
  misc_RNA (1)...(19): siRNA sense strand
uaaacaagacgcugcauga

SEQ ID NO: 925205 - RNA, 19 nt, Homo sapiens
  misc_RNA (1)...(19): siRNA sense strand
gcaugcaucuagaagaaga

SEQ ID NO: 925206 - RNA, 19 nt, Homo sapiens
  misc_RNA (1)...(19): siRNA sense strand
ccgaaagauuugagaauug

SEQ ID NO: 925207 - RNA, 19 nt, Homo sapiens
  misc_RNA (1)...(19): siRNA sense strand
ggaugaacuuguacaguca

SEQ ID NO: 925208 - RNA, 19 nt, Homo sapiens
  misc_RNA (1)...(19): siRNA sense strand
agaaugaaaucacuuugug

SEQ ID NO: 925209 - RNA, 19 nt, Homo sapiens
  misc_RNA (1)...(19): siRNA sense strand
uaaaggaagaucagagaaa

SEQ ID NO: 925210 - RNA, 19 nt, Homo sapiens
  misc_RNA (1)...(19): siRNA sense strand
agaaauaacucagcugaag

SEQ ID NO: 925211 - RNA, 19 nt, Homo sapiens
  misc_RNA (1)...(19): siRNA sense strand
guacagucauugaaggaau

SEQ ID NO: 925212 - RNA, 19 nt, Homo sapiens
  misc_RNA (1)...(19): siRNA sense strand
gauuugauccuggaaguaa

SEQ ID NO: 925213 - RNA, 19 nt, Homo sapiens
  misc_RNA (1)...(19): siRNA sense strand
acaagacgcugcaugaucu

SEQ ID NO: 925214 - RNA, 19 nt, Homo sapiens
  misc_RNA (1)...(19): siRNA sense strand
ucacagaucacagaauaaa

SEQ ID NO: 925215 - RNA, 19 nt, Homo sapiens
  misc_RNA (1)...(19): siRNA sense strand
ugaaaucacuuugugucaa

SEQ ID NO: 925216 - RNA, 19 nt, Homo sapiens
  misc_RNA (1)...(19): siRNA sense strand
gauuggaaguaaaggaaga

SEQ ID NO: 925217 - RNA, 19 nt, Homo sapiens
  misc_RNA (1)...(19): siRNA sense strand
ugacaaaguuacgugcaaa

SEQ ID NO: 925218 - RNA, 19 nt, Homo sapiens
  misc_RNA (1)...(19): siRNA sense strand
auaaagagcuggcuaugac

SEQ ID NO: 925219 - RNA, 19 nt, Homo sapiens
  misc_RNA (1)...(19): siRNA sense strand
ccuauaggcacaugaaauu

SEQ ID NO: 925220 - RNA, 19 nt, Homo sapiens
  misc_RNA (1)...(19): siRNA sense strand
aaagacagaaugcuagaaa

SEQ ID NO: 925221 - RNA, 19 nt, Homo sapiens
  misc_RNA (1)...(19): siRNA sense strand
gaaauuugaaggagguguu

SEQ ID NO: 925222 - RNA, 19 nt, Homo sapiens
  misc_RNA (1)...(19): siRNA sense strand
gauaguucaucuuccaaca

SEQ ID NO: 925223 - RNA, 19 nt, Homo sapiens
  misc_RNA (1)...(19): siRNA sense strand
gagaaugaaaucacuuugu

SEQ ID NO: 925224 - RNA, 19 nt, Homo sapiens
  misc_RNA (1)...(19): siRNA sense strand
uacagucauugaaggaaua

SEQ ID NO: 925225 - RNA, 19 nt, Homo sapiens
  misc_RNA (1)...(19): siRNA sense strand
ucuacuggaugaacuugua

SEQ ID NO: 925226 - RNA, 19 nt, Homo sapiens
  misc_RNA (1)...(19): siRNA sense strand
ggaaacuugcagagaauga

SEQ ID NO: 925227 - RNA, 19 nt, Homo sapiens
  misc_RNA (1)...(19): siRNA sense strand
ggucugaagcccauuugaa

SEQ ID NO: 925228 - RNA, 19 nt, Homo sapiens
  misc_RNA (1)...(19): siRNA sense strand
guacagcaugcaucuagaa

SEQ ID NO: 925229 - RNA, 19 nt, Homo sapiens
  misc_RNA (1)...(19): siRNA sense strand
gaaacuugcagagaaugaa

SEQ ID NO: 925230 - RNA, 19 nt, Homo sapiens
  misc_RNA (1)...(19): siRNA sense strand
uccgaaagauuugagaauu

SEQ ID NO: 925231 - RNA, 19 nt, Homo sapiens
  misc_RNA (1)...(19): siRNA sense strand
cagagaaugaaaucacuuu

SEQ ID NO: 925232 - RNA, 19 nt, Homo sapiens
  misc_RNA (1)...(19): siRNA sense strand
gcgggagacugagcacuug

SEQ ID NO: 925233 - RNA, 19 nt, Homo sapiens
  misc_RNA (1)...(19): siRNA sense strand
auaggcacaugaaauuuga

SEQ ID NO: 925234 - RNA, 19 nt, Homo sapiens
  misc_RNA (1)...(19): siRNA sense strand
ugaucaaacugcugaacga

SEQ ID NO: 925235 - RNA, 19 nt, Homo sapiens
  misc_RNA (1)...(19): siRNA sense strand
ccaugacuguagcaauauu

SEQ ID NO: 925236 - RNA, 19 nt, Homo sapiens
  misc_RNA (1)...(19): siRNA sense strand
gaaugaaaucacuuugugu

SEQ ID NO: 925237 - RNA, 19 nt, Homo sapiens
  misc_RNA (1)...(19): siRNA sense strand
caggaggcaauguuguuua

SEQ ID NO: 925238 - RNA, 19 nt, Homo sapiens
  misc_RNA (1)...(19): siRNA sense strand
guaaaggaagaucagagaa

SEQ ID NO: 925239 - RNA, 19 nt, Homo sapiens
  misc_RNA (1)...(19): siRNA sense strand
uauaggcacaugaaauuug

SEQ ID NO: 925240 - RNA, 19 nt, Homo sapiens
  misc_RNA (1)...(19): siRNA sense strand
gaaguaaaggaagaucaga

SEQ ID NO: 925241 - RNA, 19 nt, Homo sapiens
  misc_RNA (1)...(19): siRNA sense strand
aaggaaacuugcagagaau

SEQ ID NO: 925242 - RNA, 19 nt, Homo sapiens
  misc_RNA (1)...(19): siRNA sense strand
caugacuguagcaauauua

SEQ ID NO: 925243 - RNA, 19 nt, Homo sapiens
  misc_RNA (1)...(19): siRNA sense strand
gcagagaaugaaaucacuu

SEQ ID NO: 925244 - RNA, 19 nt, Homo sapiens
  misc_RNA (1)...(19): siRNA sense strand
aaaggaagaucagagaaaa

SEQ ID NO: 925245 - RNA, 19 nt, Homo sapiens
  misc_RNA (1)...(19): siRNA sense strand
cagauuggaaguaaaggaa

SEQ ID NO: 925246 - RNA, 19 nt, Homo sapiens
  misc_RNA (1)...(19): siRNA sense strand
aaagagugccaaagacaga

SEQ ID NO: 925247 - RNA, 19 nt, Homo sapiens
  misc_RNA (1)...(19): siRNA sense strand
gauuugagaauugacacua

SEQ ID NO: 925248 - RNA, 19 nt, Homo sapiens
  misc_RNA (1)...(19): siRNA sense strand
gacgcugcaugaucuugaa

SEQ ID NO: 925249 - RNA, 19 nt, Homo sapiens
  misc_RNA (1)...(19): siRNA sense strand
acagaucacagaauaaaca

SEQ ID NO: 925250 - RNA, 19 nt, Homo sapiens
  misc_RNA (1)...(19): siRNA sense strand
ggaaguaaaggaagaucag

SEQ ID NO: 925251 - RNA, 19 nt, Homo sapiens
  misc_RNA (1)...(19): siRNA sense strand
guuguuuacaucagagaua

SEQ ID NO: 925252 - RNA, 19 nt, Homo sapiens
  misc_RNA (1)...(19): siRNA sense strand
gaggucaggaggcaauguu

SEQ ID NO: 925253 - RNA, 19 nt, Homo sapiens
  misc_RNA (1)...(19): siRNA sense strand
aaacuugcagagaaugaaa

SEQ ID NO: 925254 - RNA, 19 nt, Homo sapiens
  misc_RNA (1)...(19): siRNA sense strand
gcugcacgaugagaaugaa

SEQ ID NO: 925255 - RNA, 19 nt, Homo sapiens
  misc_RNA (1)...(19): siRNA sense strand
ccucagaagaaacagauga

SEQ ID NO: 925256 - RNA, 19 nt, Homo sapiens
  misc_RNA (1)...(19): siRNA sense strand
cagguguuguuucugaaug

SEQ ID NO: 925257 - RNA, 19 nt, Homo sapiens
  misc_RNA (1)...(19): siRNA sense strand
ggugauuaauccgaaagau

SEQ ID NO: 925258 - RNA, 19 nt, Homo sapiens
  misc_RNA (1)...(19): siRNA sense strand
gcaccaugacuguagcaau

SEQ ID NO: 925259 - RNA, 19 nt, Homo sapiens
  misc_RNA (1)...(19): siRNA sense strand
acaaagagugccaaagaca

SEQ ID NO: 925260 - RNA, 19 nt, Homo sapiens
  misc_RNA (1)...(19): siRNA sense strand
aauaaagagcuggcuauga

SEQ ID NO: 925261 - RNA, 19 nt, Homo sapiens
  misc_RNA (1)...(19): siRNA sense strand
agaaccgggucacagauca

SEQ ID NO: 925262 - RNA, 19 nt, Homo sapiens
  misc_RNA (1)...(19): siRNA sense strand
gugcaaaacuguacagcau

SEQ ID NO: 925263 - RNA, 19 nt, Homo sapiens
  misc_RNA (1)...(19): siRNA sense strand
ccggauaguucaucuucca

SEQ ID NO: 925264 - RNA, 19 nt, Homo sapiens
  misc_RNA (1)...(19): siRNA sense strand
ucaggaggcaauguuguuu

SEQ ID NO: 925265 - RNA, 19 nt, Homo sapiens
  misc_RNA (1)...(19): siRNA sense strand
cacagaaccgggucacaga

SEQ ID NO: 925266 - RNA, 19 nt, Homo sapiens
  misc_RNA (1)...(19): siRNA sense strand
guucacagaguacaaagag

SEQ ID NO: 925267 - RNA, 19 nt, Homo sapiens
  misc_RNA (1)...(19): siRNA sense strand
aggagguguucacagagua

SEQ ID NO: 925268 - RNA, 19 nt, Homo sapiens
  misc_RNA (1)...(19): siRNA sense strand
gguguucacagaguacaaa

SEQ ID NO: 925269 - RNA, 19 nt, Homo sapiens
  misc_RNA (1)...(19): siRNA sense strand
aaggagguguucacagagu

SEQ ID NO: 925270 - RNA, 19 nt, Homo sapiens
  misc_RNA (1)...(19): siRNA sense strand
ucagaagaaacagaugaaa

SEQ ID NO: 925271 - RNA, 19 nt, Homo sapiens
  misc_RNA (1)...(19): siRNA sense strand
uacaaagagugccaaagac

SEQ ID NO: 925272 - RNA, 19 nt, Homo sapiens
  misc_RNA (1)...(19): siRNA sense strand
gaagaaacagaugaaaaug

SEQ ID NO: 925273 - RNA, 19 nt, Homo sapiens
  misc_RNA (1)...(19): siRNA sense strand
uuugaaacccuggaauauu

SEQ ID NO: 925274 - RNA, 19 nt, Homo sapiens
  misc_RNA (1)...(19): siRNA sense strand
uuaaggaaacuugcagaga

SEQ ID NO: 925275 - RNA, 19 nt, Homo sapiens
  misc_RNA (1)...(19): siRNA sense strand
gcugcaugaucuugaaacu

SEQ ID NO: 925276 - RNA, 19 nt, Homo sapiens
  misc_RNA (1)...(19): siRNA sense strand
aaauaacucagcugaagca

SEQ ID NO: 925277 - RNA, 19 nt, Homo sapiens
  misc_RNA (1)...(19): siRNA sense strand
aaagagcuggcuaugacaa

SEQ ID NO: 925278 - RNA, 19 nt, Homo sapiens
  misc_RNA (1)...(19): siRNA sense strand
aaacaagacgcugcaugau

SEQ ID NO: 925279 - RNA, 19 nt, Homo sapiens
  misc_RNA (1)...(19): siRNA sense strand
ggucaggaggcaauguugu

SEQ ID NO: 925280 - RNA, 19 nt, Homo sapiens
  misc_RNA (1)...(19): siRNA sense strand
gucaggaggcaauguuguu

SEQ ID NO: 925281 - RNA, 19 nt, Homo sapiens
  misc_RNA (1)...(19): siRNA sense strand
cagaagaaacagaugaaaa

SEQ ID NO: 925282 - RNA, 19 nt, Homo sapiens
  misc_RNA (1)...(19): siRNA sense strand
ggaagaucagagaaaauaa

SEQ ID NO: 925283 - RNA, 19 nt, Homo sapiens
  misc_RNA (1)...(19): siRNA sense strand
aguaaaggaagaucagaga

SEQ ID NO: 925284 - RNA, 19 nt, Homo sapiens
  misc_RNA (1)...(19): siRNA sense strand
cuauaggcacaugaaauuu

SEQ ID NO: 925285 - RNA, 19 nt, Homo sapiens
  misc_RNA (1)...(19): siRNA sense strand
ccgaguugcuggcggugau

SEQ ID NO: 925286 - RNA, 19 nt, Homo sapiens
  misc_RNA (1)...(19): siRNA sense strand
gagcuggcuaugacaaagu

SEQ ID NO: 925287 - RNA, 19 nt, Homo sapiens
  misc_RNA (1)...(19): siRNA sense strand
gaaggaaacuuacaugguu

SEQ ID NO: 925288 - RNA, 19 nt, Homo sapiens
  misc_RNA (1)...(19): siRNA sense strand
gcgcugaucucaacaauaa

SEQ ID NO: 925289 - RNA, 19 nt, Homo sapiens
  misc_RNA (1)...(19): siRNA sense strand
ggaagugcaugguaaauuu

SEQ ID NO: 925290 - RNA, 19 nt, Homo sapiens
  misc_RNA (1)...(19): siRNA sense strand
cgaaagggaugacagagaa

SEQ ID NO: 925291 - RNA, 19 nt, Homo sapiens
  misc_RNA (1)...(19): siRNA sense strand
ggacagcacucagaugaau

SEQ ID NO: 925292 - RNA, 19 nt, Homo sapiens
  misc_RNA (1)...(19): siRNA sense strand
gaaagacacaccacaagaa

SEQ ID NO: 925293 - RNA, 19 nt, Homo sapiens
  misc_RNA (1)...(19): siRNA sense strand
ggaggaaauugaugguuga

SEQ ID NO: 925294 - RNA, 19 nt, Homo sapiens
  misc_RNA (1)...(19): siRNA sense strand
auacuaaggugauucauga

SEQ ID NO: 925295 - RNA, 19 nt, Homo sapiens
  misc_RNA (1)...(19): siRNA sense strand
ggaaugaccguuucucaga

SEQ ID NO: 925296 - RNA, 19 nt, Homo sapiens
  misc_RNA (1)...(19): siRNA sense strand
cuacaucaaugcagaaaga

SEQ ID NO: 925297 - RNA, 19 nt, Homo sapiens
  misc_RNA (1)...(19): siRNA sense strand
ucucagauaucuaugcuuu

SEQ ID NO: 925298 - RNA, 19 nt, Homo sapiens
  misc_RNA (1)...(19): siRNA sense strand
caccugaacugcuugcuaa

SEQ ID NO: 925299 - RNA, 19 nt, Homo sapiens
  misc_RNA (1)...(19): siRNA sense strand
cauccaaguucauauacua

SEQ ID NO: 925300 - RNA, 19 nt, Homo sapiens
  misc_RNA (1)...(19): siRNA sense strand
ggagucagaagaacaagua

SEQ ID NO: 925301 - RNA, 19 nt, Homo sapiens
  misc_RNA (1)...(19): siRNA sense strand
gcacaaugcccuuauucaa

SEQ ID NO: 925302 - RNA, 19 nt, Homo sapiens
  misc_RNA (1)...(19): siRNA sense strand
caacauggaaugaccguuu

SEQ ID NO: 925303 - RNA, 19 nt, Homo sapiens
  misc_RNA (1)...(19): siRNA sense strand
gcacucagaugaaugaaaa

SEQ ID NO: 925304 - RNA, 19 nt, Homo sapiens
  misc_RNA (1)...(19): siRNA sense strand
aaaccaagacacaguaaua

SEQ ID NO: 925305 - RNA, 19 nt, Homo sapiens
  misc_RNA (1)...(19): siRNA sense strand
cagcaagggugcagacuau

SEQ ID NO: 925306 - RNA, 19 nt, Homo sapiens
  misc_RNA (1)...(19): siRNA sense strand
gagaagacccaaaccagaa

SEQ ID NO: 925307 - RNA, 19 nt, Homo sapiens
  misc_RNA (1)...(19): siRNA sense strand
gaaugaaccacuuauggaa

SEQ ID NO: 925308 - RNA, 19 nt, Homo sapiens
  misc_RNA (1)...(19): siRNA sense strand
guauugaaguucugauaga

SEQ ID NO: 925309 - RNA, 19 nt, Homo sapiens
  misc_RNA (1)...(19): siRNA sense strand
acaaugcccuuauucaaga

SEQ ID NO: 925310 - RNA, 19 nt, Homo sapiens
  misc_RNA (1)...(19): siRNA sense strand
gauuaaccaugauucagaa

SEQ ID NO: 925311 - RNA, 19 nt, Homo sapiens
  misc_RNA (1)...(19): siRNA sense strand
caugcagaaugucauaaua

SEQ ID NO: 925312 - RNA, 19 nt, Homo sapiens
  misc_RNA (1)...(19): siRNA sense strand
ucuccaagcugcuauaguu

SEQ ID NO: 925313 - RNA, 19 nt, Homo sapiens
  misc_RNA (1)...(19): siRNA sense strand
gaaauggagcagacuagaa

SEQ ID NO: 925314 - RNA, 19 nt, Homo sapiens
  misc_RNA (1)...(19): siRNA sense strand
gcuggugcguggccucuua

SEQ ID NO: 925315 - RNA, 19 nt, Homo sapiens
  misc_RNA (1)...(19): siRNA sense strand
gaugaaacauggaacaaac

SEQ ID NO: 925316 - RNA, 19 nt, Homo sapiens
  misc_RNA (1)...(19): siRNA sense strand
aaacaugccaacacuauuu

SEQ ID NO: 925317 - RNA, 19 nt, Homo sapiens
  misc_RNA (1)...(19): siRNA sense strand
gauaugaaugaaccacuua

SEQ ID NO: 925318 - RNA, 19 nt, Homo sapiens
  misc_RNA (1)...(19): siRNA sense strand
gcaaaacguuuaauucaug

SEQ ID NO: 925319 - RNA, 19 nt, Homo sapiens
  misc_RNA (1)...(19): siRNA sense strand
gaagaagccaugaucaaca

SEQ ID NO: 925320 - RNA, 19 nt, Homo sapiens
  misc_RNA (1)...(19): siRNA sense strand
ggaagauauugaugcagaa

SEQ ID NO: 925321 - RNA, 19 nt, Homo sapiens
  misc_RNA (1)...(19): siRNA sense strand
guguacagauguuugaauu

SEQ ID NO: 925322 - RNA, 19 nt, Homo sapiens
  misc_RNA (1)...(19): siRNA sense strand
ggagagcuagcauuggaua

SEQ ID NO: 925323 - RNA, 19 nt, Homo sapiens
  misc_RNA (1)...(19): siRNA sense strand
gcagaaagacacaccacaa

SEQ ID NO: 925324 - RNA, 19 nt, Homo sapiens
  misc_RNA (1)...(19): siRNA sense strand
gacagagaaugaaguggaa

SEQ ID NO: 925325 - RNA, 19 nt, Homo sapiens
  misc_RNA (1)...(19): siRNA sense strand
gaaagagcaacauggaaug

SEQ ID NO: 925326 - RNA, 19 nt, Homo sapiens
  misc_RNA (1)...(19): siRNA sense strand
caaauacauugaugacaag

SEQ ID NO: 925327 - RNA, 19 nt, Homo sapiens
  misc_RNA (1)...(19): siRNA sense strand
gcaaauauguacgucuuac

SEQ ID NO: 925328 - RNA, 19 nt, Homo sapiens
  misc_RNA (1)...(19): siRNA sense strand
gaaugaccguuucucagau

SEQ ID NO: 925329 - RNA, 19 nt, Homo sapiens
  misc_RNA (1)...(19): siRNA sense strand
uaggagagcuagcauugga

SEQ ID NO: 925330 - RNA, 19 nt, Homo sapiens
  misc_RNA (1)...(19): siRNA sense strand
guguacaggugaaguuaaa

SEQ ID NO: 925331 - RNA, 19 nt, Homo sapiens
  misc_RNA (1)...(19): siRNA sense strand
gacaaggacgucuuucaaa

SEQ ID NO: 925332 - RNA, 19 nt, Homo sapiens
  misc_RNA (1)...(19): siRNA sense strand
ucaucacaguguucaaaua

SEQ ID NO: 925333 - RNA, 19 nt, Homo sapiens
  misc_RNA (1)...(19): siRNA sense strand
cugaacugcuugcuaagua

SEQ ID NO: 925334 - RNA, 19 nt, Homo sapiens
  misc_RNA (1)...(19): siRNA sense strand
gaaccuaagucuguuugca

SEQ ID NO: 925335 - RNA, 19 nt, Homo sapiens
  misc_RNA (1)...(19): siRNA sense strand
gagcuagcauuggauaugu

SEQ ID NO: 925336 - RNA, 19 nt, Homo sapiens
  misc_RNA (1)...(19): siRNA sense strand
guuaugaguuuaccagcaa

SEQ ID NO: 925337 - RNA, 19 nt, Homo sapiens
  misc_RNA (1)...(19): siRNA sense strand
caagacacaguaauagauu

SEQ ID NO: 925338 - RNA, 19 nt, Homo sapiens
  misc_RNA (1)...(19): siRNA sense strand
gcaagggugcagacuauau

SEQ ID NO: 925339 - RNA, 19 nt, Homo sapiens
  misc_RNA (1)...(19): siRNA sense strand
ccaaauggcaguucuucuu

SEQ ID NO: 925340 - RNA, 19 nt, Homo sapiens
  misc_RNA (1)...(19): siRNA sense strand
aaggaaacuuacaugguua

SEQ ID NO: 925341 - RNA, 19 nt, Homo sapiens
  misc_RNA (1)...(19): siRNA sense strand
gcagaccacuuacaguuuu

SEQ ID NO: 925342 - RNA, 19 nt, Homo sapiens
  misc_RNA (1)...(19): siRNA sense strand
gaaacauggaacaaacuuu

SEQ ID NO: 925343 - RNA, 19 nt, Homo sapiens
  misc_RNA (1)...(19): siRNA sense strand
gaugagggccuucgagcaa

SEQ ID NO: 925344 - RNA, 19 nt, Homo sapiens
  misc_RNA (1)...(19): siRNA sense strand
cuacauccaaguucauaua

SEQ ID NO: 925345 - RNA, 19 nt, Homo sapiens
  misc_RNA (1)...(19): siRNA sense strand
caaacaagaagcuucaaau

SEQ ID NO: 925346 - RNA, 19 nt, Homo sapiens
  misc_RNA (1)...(19): siRNA sense strand
gacccaaaccagaaaguaa

SEQ ID NO: 925347 - RNA, 19 nt, Homo sapiens
  misc_RNA (1)...(19): siRNA sense strand
ugguuuaccucauaugauu

SEQ ID NO: 925348 - RNA, 19 nt, Homo sapiens
  misc_RNA (1)...(19): siRNA sense strand
uagccaugguuacaacaua

SEQ ID NO: 925349 - RNA, 19 nt, Homo sapiens
  misc_RNA (1)...(19): siRNA sense strand
cgaaagagcaacauggaau

SEQ ID NO: 925350 - RNA, 19 nt, Homo sapiens
  misc_RNA (1)...(19): siRNA sense strand
ugugacaacuuacugaaga

SEQ ID NO: 925351 - RNA, 19 nt, Homo sapiens
  misc_RNA (1)...(19): siRNA sense strand
aagcggaccuucaguaugg

SEQ ID NO: 925352 - RNA, 19 nt, Homo sapiens
  misc_RNA (1)...(19): siRNA sense strand
ggaaggaaacuuacauggu

SEQ ID NO: 925353 - RNA, 19 nt, Homo sapiens
  misc_RNA (1)...(19): siRNA sense strand
gccaugaucaacaaauuaa

SEQ ID NO: 925354 - RNA, 19 nt, Homo sapiens
  misc_RNA (1)...(19): siRNA sense strand
ggaaauaggagagcuagca

SEQ ID NO: 925355 - RNA, 19 nt, Homo sapiens
  misc_RNA (1)...(19): siRNA sense strand
gaaaacaugccaacacuau

SEQ ID NO: 925356 - RNA, 19 nt, Homo sapiens
  misc_RNA (1)...(19): siRNA sense strand
gucaagagcuagguuuaau

SEQ ID NO: 925357 - RNA, 19 nt, Homo sapiens
  misc_RNA (1)...(19): siRNA sense strand
caaauggcaguucuucuug

SEQ ID NO: 925358 - RNA, 19 nt, Homo sapiens
  misc_RNA (1)...(19): siRNA sense strand
aagaagccaugaucaacaa

SEQ ID NO: 925359 - RNA, 19 nt, Homo sapiens
  misc_RNA (1)...(19): siRNA sense strand
gaagugcaugguaaauuug

SEQ ID NO: 925360 - RNA, 19 nt, Homo sapiens
  misc_RNA (1)...(19): siRNA sense strand
aaugaccguuucucagaua

SEQ ID NO: 925361 - RNA, 19 nt, Homo sapiens
  misc_RNA (1)...(19): siRNA sense strand
aaaggaagauauugaugca

SEQ ID NO: 925362 - RNA, 19 nt, Homo sapiens
  misc_RNA (1)...(19): siRNA sense strand
cgagcaaccagcaaccuua

SEQ ID NO: 925363 - RNA, 19 nt, Homo sapiens
  misc_RNA (1)...(19): siRNA sense strand
uaacuccuuuguucauguu

SEQ ID NO: 925364 - RNA, 19 nt, Homo sapiens
  misc_RNA (1)...(19): siRNA sense strand
guauggcuaugguggugua

SEQ ID NO: 925365 - RNA, 19 nt, Homo sapiens
  misc_RNA (1)...(19): siRNA sense strand
uaaagcaagccugugguua

SEQ ID NO: 925366 - RNA, 19 nt, Homo sapiens
  misc_RNA (1)...(19): siRNA sense strand
aaagacacaccacaagaaa

SEQ ID NO: 925367 - RNA, 19 nt, Homo sapiens
  misc_RNA (1)...(19): siRNA sense strand
ccacuucaggccauccuua

SEQ ID NO: 925368 - RNA, 19 nt, Homo sapiens
  misc_RNA (1)...(19): siRNA sense strand
gaaaauguaucuccaagcu

SEQ ID NO: 925369 - RNA, 19 nt, Homo sapiens
  misc_RNA (1)...(19): siRNA sense strand
caagaaauggagcagacua

SEQ ID NO: 925370 - RNA, 19 nt, Homo sapiens
  misc_RNA (1)...(19): siRNA sense strand
gagaguauuacaaacaaga

SEQ ID NO: 925371 - RNA, 19 nt, Homo sapiens
  misc_RNA (1)...(19): siRNA sense strand
gauauguggaggaaauuga

SEQ ID NO: 925372 - RNA, 19 nt, Homo sapiens
  misc_RNA (1)...(19): siRNA sense strand
gacuagaagugcaguugau

SEQ ID NO: 925373 - RNA, 19 nt, Homo sapiens
  misc_RNA (1)...(19): siRNA sense strand
agacacaccacaagaaaug

SEQ ID NO: 925374 - RNA, 19 nt, Homo sapiens
  misc_RNA (1)...(19): siRNA sense strand
gaaaccaagaguaguagau

SEQ ID NO: 925375 - RNA, 19 nt, Homo sapiens
  misc_RNA (1)...(19): siRNA sense strand
caggacagcacucagauga

SEQ ID NO: 925376 - RNA, 19 nt, Homo sapiens
  misc_RNA (1)...(19): siRNA sense strand
aaagcaagccugugguuau

SEQ ID NO: 925377 - RNA, 19 nt, Homo sapiens
  misc_RNA (1)...(19): siRNA sense strand
ugacaaggacgucuuucaa

SEQ ID NO: 925378 - RNA, 19 nt, Homo sapiens
  misc_RNA (1)...(19): siRNA sense strand
guucggcauuugcauaaga

SEQ ID NO: 925379 - RNA, 19 nt, Homo sapiens
  misc_RNA (1)...(19): siRNA sense strand
ucacaguguucaaauacau

SEQ ID NO: 925380 - RNA, 19 nt, Homo sapiens
  misc_RNA (1)...(19): siRNA sense strand
gcaccugaacugcuugcua

SEQ ID NO: 925381 - RNA, 19 nt, Homo sapiens
  misc_RNA (1)...(19): siRNA sense strand
ccacugguuuaccucauau

SEQ ID NO: 925382 - RNA, 19 nt, Homo sapiens
  misc_RNA (1)...(19): siRNA sense strand
uagcagaccacuuacaguu

SEQ ID NO: 925383 - RNA, 19 nt, Homo sapiens
  misc_RNA (1)...(19): siRNA sense strand
aaccaagaguaguagauuu

SEQ ID NO: 925384 - RNA, 19 nt, Homo sapiens
  misc_RNA (1)...(19): siRNA sense strand
cagacuauauggacugcuu

SEQ ID NO: 925385 - RNA, 19 nt, Homo sapiens
  misc_RNA (1)...(19): siRNA sense strand
gaaguguauugaaguucug

SEQ ID NO: 925386 - RNA, 19 nt, Homo sapiens
  misc_RNA (1)...(19): siRNA sense strand
gacaaacaauacauagaac

SEQ ID NO: 925387 - RNA, 19 nt, Homo sapiens
  misc_RNA (1)...(19): siRNA sense strand
gacgguaucuucuguauga

SEQ ID NO: 925388 - RNA, 19 nt, Homo sapiens
  misc_RNA (1)...(19): siRNA sense strand
gaagggaccugggaagaga

SEQ ID NO: 925389 - RNA, 19 nt, Homo sapiens
  misc_RNA (1)...(19): siRNA sense strand
aaaggaauaugaagagcua

SEQ ID NO: 925390 - RNA, 19 nt, Homo sapiens
  misc_RNA (1)...(19): siRNA sense strand
gggaaagaauacugggaua

SEQ ID NO: 925391 - RNA, 19 nt, Homo sapiens
  misc_RNA (1)...(19): siRNA sense strand
ggaugaagaugaaggucaa

SEQ ID NO: 925392 - RNA, 19 nt, Homo sapiens
  misc_RNA (1)...(19): siRNA sense strand
ggacggaggcguugcgauu

SEQ ID NO: 925393 - RNA, 19 nt, Homo sapiens
  misc_RNA (1)...(19): siRNA sense strand
gcgcagggaugucuauauc

SEQ ID NO: 925394 - RNA, 19 nt, Homo sapiens
  misc_RNA (1)...(19): siRNA sense strand
ccacagaugccgucagaaa

SEQ ID NO: 925395 - RNA, 19 nt, Homo sapiens
  misc_RNA (1)...(19): siRNA sense strand
gaucuuccaagucucaaua

SEQ ID NO: 925396 - RNA, 19 nt, Homo sapiens
  misc_RNA (1)...(19): siRNA sense strand
caggaggacuggaugaaga

SEQ ID NO: 925397 - RNA, 19 nt, Homo sapiens
  misc_RNA (1)...(19): siRNA sense strand
ggccacagaugccgucaga

SEQ ID NO: 925398 - RNA, 19 nt, Homo sapiens
  misc_RNA (1)...(19): siRNA sense strand
cuaaacgucuccugucugu

SEQ ID NO: 925399 - RNA, 19 nt, Homo sapiens
  misc_RNA (1)...(19): siRNA sense strand
agacagagccgagaaccua

SEQ ID NO: 925400 - RNA, 19 nt, Homo sapiens
  misc_RNA (1)...(19): siRNA sense strand
ggaguccaccugagaagaa

SEQ ID NO: 925401 - RNA, 19 nt, Homo sapiens
  misc_RNA (1)...(19): siRNA sense strand
cgaccacuauggagggaaa

SEQ ID NO: 925402 - RNA, 19 nt, Homo sapiens
  misc_RNA (1)...(19): siRNA sense strand
gaagauccgcagccucaug

SEQ ID NO: 925403 - RNA, 19 nt, Homo sapiens
  misc_RNA (1)...(19): siRNA sense strand
ugaagacucugcugaagac

SEQ ID NO: 925404 - RNA, 19 nt, Homo sapiens
  misc_RNA (1)...(19): siRNA sense strand
guauugaucagcuccugua

SEQ ID NO: 925405 - RNA, 19 nt, Homo sapiens
  misc_RNA (1)...(19): siRNA sense strand
guacuacagaggaugguuu

SEQ ID NO: 925406 - RNA, 19 nt, Homo sapiens
  misc_RNA (1)...(19): siRNA sense strand
ucagaaaggaauaugaaga

SEQ ID NO: 925407 - RNA, 19 nt, Homo sapiens
  misc_RNA (1)...(19): siRNA sense strand
gacggaggcguugcgauua

SEQ ID NO: 925408 - RNA, 19 nt, Homo sapiens
  misc_RNA (1)...(19): siRNA sense strand
uuuacguccugcaaaguua

SEQ ID NO: 925409 - RNA, 19 nt, Homo sapiens
  misc_RNA (1)...(19): siRNA sense strand
gaaucuggugggcccuuua

SEQ ID NO: 925410 - RNA, 19 nt, Homo sapiens
  misc_RNA (1)...(19): siRNA sense strand
gaguccaccugagaagaaa

SEQ ID NO: 925411 - RNA, 19 nt, Homo sapiens
  misc_RNA (1)...(19): siRNA sense strand
gacaggauguacccagucu

SEQ ID NO: 925412 - RNA, 19 nt, Homo sapiens
  misc_RNA (1)...(19): siRNA sense strand
gaggaugguuuugggguua

SEQ ID NO: 925413 - RNA, 19 nt, Homo sapiens
  misc_RNA (1)...(19): siRNA sense strand
uacccgagauggugagguu

SEQ ID NO: 925414 - RNA, 19 nt, Homo sapiens
  misc_RNA (1)...(19): siRNA sense strand
cgucagaaaggaauaugaa

SEQ ID NO: 925415 - RNA, 19 nt, Homo sapiens
  misc_RNA (1)...(19): siRNA sense strand
ggaggugggagacgaguuc

SEQ ID NO: 925416 - RNA, 19 nt, Homo sapiens
  misc_RNA (1)...(19): siRNA sense strand
gcagagggguggaaagaag

SEQ ID NO: 925417 - RNA, 19 nt, Homo sapiens
  misc_RNA (1)...(19): siRNA sense strand
cggauucccuggucugagu

SEQ ID NO: 925418 - RNA, 19 nt, Homo sapiens
  misc_RNA (1)...(19): siRNA sense strand
ggacaagcacgaguacuac

SEQ ID NO: 925419 - RNA, 19 nt, Homo sapiens
  misc_RNA (1)...(19): siRNA sense strand
caucgaguaugagcaguuc

SEQ ID NO: 925420 - RNA, 19 nt, Homo sapiens
  misc_RNA (1)...(19): siRNA sense strand
gagccgagaaccuacuuca

SEQ ID NO: 925421 - RNA, 19 nt, Homo sapiens
  misc_RNA (1)...(19): siRNA sense strand
cagaaaggaauaugaagag

SEQ ID NO: 925422 - RNA, 19 nt, Homo sapiens
  misc_RNA (1)...(19): siRNA sense strand
ggaaagaauacugggauac

SEQ ID NO: 925423 - RNA, 19 nt, Homo sapiens
  misc_RNA (1)...(19): siRNA sense strand
cagaugccgucagaaagga

SEQ ID NO: 925424 - RNA, 19 nt, Homo sapiens
  misc_RNA (1)...(19): siRNA sense strand
gcaguucaucgcagaaucu

SEQ ID NO: 925425 - RNA, 19 nt, Homo sapiens
  misc_RNA (1)...(19): siRNA sense strand
caagcacgaguacuacaga

SEQ ID NO: 925426 - RNA, 19 nt, Homo sapiens
  misc_RNA (1)...(19): siRNA sense strand
gaggacuggaugaagauga

SEQ ID NO: 925427 - RNA, 19 nt, Homo sapiens
  misc_RNA (1)...(19): siRNA sense strand
aggacaagcacgaguacua

SEQ ID NO: 925428 - RNA, 19 nt, Homo sapiens
  misc_RNA (1)...(19): siRNA sense strand
ggaggcguugcgauuauug

SEQ ID NO: 925429 - RNA, 19 nt, Homo sapiens
  misc_RNA (1)...(19): siRNA sense strand
aggacuggaugaagaugaa

SEQ ID NO: 925430 - RNA, 19 nt, Homo sapiens
  misc_RNA (1)...(19): siRNA sense strand
uugaucagcuccuguacuc

SEQ ID NO: 925431 - RNA, 19 nt, Homo sapiens
  misc_RNA (1)...(19): siRNA sense strand
cggaggcguugcgauuauu

SEQ ID NO: 925432 - RNA, 19 nt, Homo sapiens
  misc_RNA (1)...(19): siRNA sense strand
gaaagaauacugggauacc

SEQ ID NO: 925433 - RNA, 19 nt, Homo sapiens
  misc_RNA (1)...(19): siRNA sense strand
ccgagauggugagguuuga

SEQ ID NO: 925434 - RNA, 19 nt, Homo sapiens
  misc_RNA (1)...(19): siRNA sense strand
cuggugggcccuuuauuga

SEQ ID NO: 925435 - RNA, 19 nt, Homo sapiens
  misc_RNA (1)...(19): siRNA sense strand
acggaggcguugcgauuau

SEQ ID NO: 925436 - RNA, 19 nt, Homo sapiens
  misc_RNA (1)...(19): siRNA sense strand
ucuggugggcccuuuauug

SEQ ID NO: 925437 - RNA, 19 nt, Homo sapiens
  misc_RNA (1)...(19): siRNA sense strand
guuuacguccugcaaaguu

SEQ ID NO: 925438 - RNA, 19 nt, Homo sapiens
  misc_RNA (1)...(19): siRNA sense strand
gagcaguucaucgcagaau

SEQ ID NO: 925439 - RNA, 19 nt, Homo sapiens
  misc_RNA (1)...(19): siRNA sense strand
ccugaagacucugcugaag

SEQ ID NO: 925440 - RNA, 19 nt, Homo sapiens
  misc_RNA (1)...(19): siRNA sense strand
gcccuuuauugaccagguu

SEQ ID NO: 925441 - RNA, 19 nt, Homo sapiens
  misc_RNA (1)...(19): siRNA sense strand
acuauggagggaaagaaua

SEQ ID NO: 925442 - RNA, 19 nt, Homo sapiens
  misc_RNA (1)...(19): siRNA sense strand
aaucgccucucuccugaag

SEQ ID NO: 925443 - RNA, 19 nt, Homo sapiens
  misc_RNA (1)...(19): siRNA sense strand
agaaucuggugggcccuuu

SEQ ID NO: 925444 - RNA, 19 nt, Homo sapiens
  misc_RNA (1)...(19): siRNA sense strand
aagauccgcagccucauga

SEQ ID NO: 925445 - RNA, 19 nt, Homo sapiens
  misc_RNA (1)...(19): siRNA sense strand
gucuaaacgucuccugucu

SEQ ID NO: 925446 - RNA, 19 nt, Homo sapiens
  misc_RNA (1)...(19): siRNA sense strand
gacgguaucuucuguauga

SEQ ID NO: 925447 - RNA, 19 nt, Homo sapiens
  misc_RNA (1)...(19): siRNA sense strand
gaagggaccugggaagaga

SEQ ID NO: 925448 - RNA, 19 nt, Homo sapiens
  misc_RNA (1)...(19): siRNA sense strand
aaaggaauaugaagagcua

SEQ ID NO: 925449 - RNA, 19 nt, Homo sapiens
  misc_RNA (1)...(19): siRNA sense strand
gggaaagaauacugggaua

SEQ ID NO: 925450 - RNA, 19 nt, Homo sapiens
  misc_RNA (1)...(19): siRNA sense strand
ggaugaagaugaaggucaa

SEQ ID NO: 925451 - RNA, 19 nt, Homo sapiens
  misc_RNA (1)...(19): siRNA sense strand
ggacggaggcguugcgauu

SEQ ID NO: 925452 - RNA, 19 nt, Homo sapiens
  misc_RNA (1)...(19): siRNA sense strand
gcgcagggaugucuauauc

SEQ ID NO: 925453 - RNA, 19 nt, Homo sapiens
  misc_RNA (1)...(19): siRNA sense strand
ccacagaugccgucagaaa

SEQ ID NO: 925454 - RNA, 19 nt, Homo sapiens
  misc_RNA (1)...(19): siRNA sense strand
gaucuuccaagucucaaua

SEQ ID NO: 925455 - RNA, 19 nt, Homo sapiens
  misc_RNA (1)...(19): siRNA sense strand
caggaggacuggaugaaga

SEQ ID NO: 925456 - RNA, 19 nt, Homo sapiens
  misc_RNA (1)...(19): siRNA sense strand
ggccacagaugccgucaga

SEQ ID NO: 925457 - RNA, 19 nt, Homo sapiens
  misc_RNA (1)...(19): siRNA sense strand
cuaaacgucuccugucugu

SEQ ID NO: 925458 - RNA, 19 nt, Homo sapiens
  misc_RNA (1)...(19): siRNA sense strand
agacagagccgagaaccua

SEQ ID NO: 925459 - RNA, 19 nt, Homo sapiens
  misc_RNA (1)...(19): siRNA sense strand
ggaguccaccugagaagaa

SEQ ID NO: 925460 - RNA, 19 nt, Homo sapiens
  misc_RNA (1)...(19): siRNA sense strand
cgaccacuauggagggaaa

SEQ ID NO: 925461 - RNA, 19 nt, Homo sapiens
  misc_RNA (1)...(19): siRNA sense strand
gaagauccgcagccucaug

SEQ ID NO: 925462 - RNA, 19 nt, Homo sapiens
  misc_RNA (1)...(19): siRNA sense strand
ugaagacucugcugaagac

SEQ ID NO: 925463 - RNA, 19 nt, Homo sapiens
  misc_RNA (1)...(19): siRNA sense strand
guauugaucagcuccugua

SEQ ID NO: 925464 - RNA, 19 nt, Homo sapiens
  misc_RNA (1)...(19): siRNA sense strand
guacuacagaggaugguuu

SEQ ID NO: 925465 - RNA, 19 nt, Homo sapiens
  misc_RNA (1)...(19): siRNA sense strand
ucagaaaggaauaugaaga

SEQ ID NO: 925466 - RNA, 19 nt, Homo sapiens
  misc_RNA (1)...(19): siRNA sense strand
gacggaggcguugcgauua

SEQ ID NO: 925467 - RNA, 19 nt, Homo sapiens
  misc_RNA (1)...(19): siRNA sense strand
uuuacguccugcaaaguua

SEQ ID NO: 925468 - RNA, 19 nt, Homo sapiens
  misc_RNA (1)...(19): siRNA sense strand
gaaucuggugggcccuuua

SEQ ID NO: 925469 - RNA, 19 nt, Homo sapiens
  misc_RNA (1)...(19): siRNA sense strand
gaguccaccugagaagaaa

SEQ ID NO: 925470 - RNA, 19 nt, Homo sapiens
  misc_RNA (1)...(19): siRNA sense strand
gacaggauguacccagucu

SEQ ID NO: 925471 - RNA, 19 nt, Homo sapiens
  misc_RNA (1)...(19): siRNA sense strand
gaggaugguuuugggguua

SEQ ID NO: 925472 - RNA, 19 nt, Homo sapiens
  misc_RNA (1)...(19): siRNA sense strand
uacccgagauggugagguu

SEQ ID NO: 925473 - RNA, 19 nt, Homo sapiens
  misc_RNA (1)...(19): siRNA sense strand
cgucagaaaggaauaugaa

SEQ ID NO: 925474 - RNA, 19 nt, Homo sapiens
  misc_RNA (1)...(19): siRNA sense strand
ggaggugggagacgaguuc

SEQ ID NO: 925475 - RNA, 19 nt, Homo sapiens
  misc_RNA (1)...(19): siRNA sense strand
gcagagggguggaaagaag

SEQ ID NO: 925476 - RNA, 19 nt, Homo sapiens
  misc_RNA (1)...(19): siRNA sense strand
cggauucccuggucugagu

SEQ ID NO: 925477 - RNA, 19 nt, Homo sapiens
  misc_RNA (1)...(19): siRNA sense strand
ggacaagcacgaguacuac

SEQ ID NO: 925478 - RNA, 19 nt, Homo sapiens
  misc_RNA (1)...(19): siRNA sense strand
caucgaguaugagcaguuc

SEQ ID NO: 925479 - RNA, 19 nt, Homo sapiens
  misc_RNA (1)...(19): siRNA sense strand
gagccgagaaccuacuuca

SEQ ID NO: 925480 - RNA, 19 nt, Homo sapiens
  misc_RNA (1)...(19): siRNA sense strand
cagaaaggaauaugaagag

SEQ ID NO: 925481 - RNA, 19 nt, Homo sapiens
  misc_RNA (1)...(19): siRNA sense strand
ggaaagaauacugggauac

SEQ ID NO: 925482 - RNA, 19 nt, Homo sapiens
  misc_RNA (1)...(19): siRNA sense strand
cagaugccgucagaaagga

SEQ ID NO: 925483 - RNA, 19 nt, Homo sapiens
  misc_RNA (1)...(19): siRNA sense strand
gcaguucaucgcagaaucu

SEQ ID NO: 925484 - RNA, 19 nt, Homo sapiens
  misc_RNA (1)...(19): siRNA sense strand
caagcacgaguacuacaga

SEQ ID NO: 925485 - RNA, 19 nt, Homo sapiens
  misc_RNA (1)...(19): siRNA sense strand
gaggacuggaugaagauga

SEQ ID NO: 925486 - RNA, 19 nt, Homo sapiens
  misc_RNA (1)...(19): siRNA sense strand
aggacaagcacgaguacua

SEQ ID NO: 925487 - RNA, 19 nt, Homo sapiens
  misc_RNA (1)...(19): siRNA sense strand
ggaggcguugcgauuauug

SEQ ID NO: 925488 - RNA, 19 nt, Homo sapiens
  misc_RNA (1)...(19): siRNA sense strand
aggacuggaugaagaugaa

SEQ ID NO: 925489 - RNA, 19 nt, Homo sapiens
  misc_RNA (1)...(19): siRNA sense strand
uugaucagcuccuguacuc

SEQ ID NO: 925490 - RNA, 19 nt, Homo sapiens
  misc_RNA (1)...(19): siRNA sense strand
cggaggcguugcgauuauu

SEQ ID NO: 925491 - RNA, 19 nt, Homo sapiens
  misc_RNA (1)...(19): siRNA sense strand
gaaagaauacugggauacc

SEQ ID NO: 925492 - RNA, 19 nt, Homo sapiens
  misc_RNA (1)...(19): siRNA sense strand
ccgagauggugagguuuga

SEQ ID NO: 925493 - RNA, 19 nt, Homo sapiens
  misc_RNA (1)...(19): siRNA sense strand
cuggugggcccuuuauuga

SEQ ID NO: 925494 - RNA, 19 nt, Homo sapiens
  misc_RNA (1)...(19): siRNA sense strand
acggaggcguugcgauuau

SEQ ID NO: 925495 - RNA, 19 nt, Homo sapiens
  misc_RNA (1)...(19): siRNA sense strand
ucuggugggcccuuuauug

SEQ ID NO: 925496 - RNA, 19 nt, Homo sapiens
  misc_RNA (1)...(19): siRNA sense strand
guuuacguccugcaaaguu

SEQ ID NO: 925497 - RNA, 19 nt, Homo sapiens
  misc_RNA (1)...(19): siRNA sense strand
gagcaguucaucgcagaau

SEQ ID NO: 925498 - RNA, 19 nt, Homo sapiens
  misc_RNA (1)...(19): siRNA sense strand
ccugaagacucugcugaag

SEQ ID NO: 925499 - RNA, 19 nt, Homo sapiens
  misc_RNA (1)...(19): siRNA sense strand
gcccuuuauugaccagguu

SEQ ID NO: 925500 - RNA, 19 nt, Homo sapiens
  misc_RNA (1)...(19): siRNA sense strand
acuauggagggaaagaaua

SEQ ID NO: 925501 - RNA, 19 nt, Homo sapiens
  misc_RNA (1)...(19): siRNA sense strand
aaucgccucucuccugaag

SEQ ID NO: 925502 - RNA, 19 nt, Homo sapiens
  misc_RNA (1)...(19): siRNA sense strand
agaaucuggugggcccuuu

SEQ ID NO: 925503 - RNA, 19 nt, Homo sapiens
  misc_RNA (1)...(19): siRNA sense strand
aagauccgcagccucauga

SEQ ID NO: 925504 - RNA, 19 nt, Homo sapiens
  misc_RNA (1)...(19): siRNA sense strand
gucuaaacgucuccugucu

SEQ ID NO: 925505 - RNA, 19 nt, Homo sapiens
  misc_RNA (1)...(19): siRNA sense strand
gacgguaucuucuguauga

SEQ ID NO: 925506 - RNA, 19 nt, Homo sapiens
  misc_RNA (1)...(19): siRNA sense strand
gaagggaccugggaagaga

SEQ ID NO: 925507 - RNA, 19 nt, Homo sapiens
  misc_RNA (1)...(19): siRNA sense strand
gcaccucagucucaacauu

SEQ ID NO: 925508 - RNA, 19 nt, Homo sapiens
  misc_RNA (1)...(19): siRNA sense strand
aaaggaauaugaagagcua

SEQ ID NO: 925509 - RNA, 19 nt, Homo sapiens
  misc_RNA (1)...(19): siRNA sense strand
gggaaagaauacugggaua

SEQ ID NO: 925510 - RNA, 19 nt, Homo sapiens
  misc_RNA (1)...(19): siRNA sense strand
ggaugaagaugaaggucaa

SEQ ID NO: 925511 - RNA, 19 nt, Homo sapiens
  misc_RNA (1)...(19): siRNA sense strand
ggacggaggcguugcgauu

SEQ ID NO: 925512 - RNA, 19 nt, Homo sapiens
  misc_RNA (1)...(19): siRNA sense strand
gcgcagggaugucuauauc

SEQ ID NO: 925513 - RNA, 19 nt, Homo sapiens
  misc_RNA (1)...(19): siRNA sense strand
ccacagaugccgucagaaa

SEQ ID NO: 925514 - RNA, 19 nt, Homo sapiens
  misc_RNA (1)...(19): siRNA sense strand
gaucuuccaagucucaaua

SEQ ID NO: 925515 - RNA, 19 nt, Homo sapiens
  misc_RNA (1)...(19): siRNA sense strand
caggaggacuggaugaaga

SEQ ID NO: 925516 - RNA, 19 nt, Homo sapiens
  misc_RNA (1)...(19): siRNA sense strand
ggccacagaugccgucaga

SEQ ID NO: 925517 - RNA, 19 nt, Homo sapiens
  misc_RNA (1)...(19): siRNA sense strand
cuaaacgucuccugucugu

SEQ ID NO: 925518 - RNA, 19 nt, Homo sapiens
  misc_RNA (1)...(19): siRNA sense strand
agacagagccgagaaccua

SEQ ID NO: 925519 - RNA, 19 nt, Homo sapiens
  misc_RNA (1)...(19): siRNA sense strand
ggaguccaccugagaagaa

SEQ ID NO: 925520 - RNA, 19 nt, Homo sapiens
  misc_RNA (1)...(19): siRNA sense strand
cgaccacuauggagggaaa

SEQ ID NO: 925521 - RNA, 19 nt, Homo sapiens
  misc_RNA (1)...(19): siRNA sense strand
gaagauccgcagccucaug

SEQ ID NO: 925522 - RNA, 19 nt, Homo sapiens
  misc_RNA (1)...(19): siRNA sense strand
ugaagacucugcugaagac

SEQ ID NO: 925523 - RNA, 19 nt, Homo sapiens
  misc_RNA (1)...(19): siRNA sense strand
guauugaucagcuccugua

SEQ ID NO: 925524 - RNA, 19 nt, Homo sapiens
  misc_RNA (1)...(19): siRNA sense strand
guacuacagaggaugguuu

SEQ ID NO: 925525 - RNA, 19 nt, Homo sapiens
  misc_RNA (1)...(19): siRNA sense strand
ucagaaaggaauaugaaga

SEQ ID NO: 925526 - RNA, 19 nt, Homo sapiens
  misc_RNA (1)...(19): siRNA sense strand
gacggaggcguugcgauua

SEQ ID NO: 925527 - RNA, 19 nt, Homo sapiens
  misc_RNA (1)...(19): siRNA sense strand
uuuacguccugcaaaguua

SEQ ID NO: 925528 - RNA, 19 nt, Homo sapiens
  misc_RNA (1)...(19): siRNA sense strand
gaaucuggugggcccuuua

SEQ ID NO: 925529 - RNA, 19 nt, Homo sapiens
  misc_RNA (1)...(19): siRNA sense strand
gaguccaccugagaagaaa

SEQ ID NO: 925530 - RNA, 19 nt, Homo sapiens
  misc_RNA (1)...(19): siRNA sense strand
gacaggauguacccagucu

SEQ ID NO: 925531 - RNA, 19 nt, Homo sapiens
  misc_RNA (1)...(19): siRNA sense strand
gaggaugguuuugggguua

SEQ ID NO: 925532 - RNA, 19 nt, Homo sapiens
  misc_RNA (1)...(19): siRNA sense strand
uacccgagauggugagguu

SEQ ID NO: 925533 - RNA, 19 nt, Homo sapiens
  misc_RNA (1)...(19): siRNA sense strand
cgucagaaaggaauaugaa

SEQ ID NO: 925534 - RNA, 19 nt, Homo sapiens
  misc_RNA (1)...(19): siRNA sense strand
ggaggugggagacgaguuc

SEQ ID NO: 925535 - RNA, 19 nt, Homo sapiens
  misc_RNA (1)...(19): siRNA sense strand
gcagagggguggaaagaag

SEQ ID NO: 925536 - RNA, 19 nt, Homo sapiens
  misc_RNA (1)...(19): siRNA sense strand
cggauucccuggucugagu

SEQ ID NO: 925537 - RNA, 19 nt, Homo sapiens
  misc_RNA (1)...(19): siRNA sense strand
caccucagucucaacauuu

SEQ ID NO: 925538 - RNA, 19 nt, Homo sapiens
  misc_RNA (1)...(19): siRNA sense strand
ggacaagcacgaguacuac

SEQ ID NO: 925539 - RNA, 19 nt, Homo sapiens
  misc_RNA (1)...(19): siRNA sense strand
caucgaguaugagcaguuc

SEQ ID NO: 925540 - RNA, 19 nt, Homo sapiens
  misc_RNA (1)...(19): siRNA sense strand
gagccgagaaccuacuuca

SEQ ID NO: 925541 - RNA, 19 nt, Homo sapiens
  misc_RNA (1)...(19): siRNA sense strand
caacccacccacuggaaga

SEQ ID NO: 925542 - RNA, 19 nt, Homo sapiens
  misc_RNA (1)...(19): siRNA sense strand
cagaaaggaauaugaagag

SEQ ID NO: 925543 - RNA, 19 nt, Homo sapiens
  misc_RNA (1)...(19): siRNA sense strand
ggaaagaauacugggauac

SEQ ID NO: 925544 - RNA, 19 nt, Homo sapiens
  misc_RNA (1)...(19): siRNA sense strand
cagaugccgucagaaagga

SEQ ID NO: 925545 - RNA, 19 nt, Homo sapiens
  misc_RNA (1)...(19): siRNA sense strand
gcaguucaucgcagaaucu

SEQ ID NO: 925546 - RNA, 19 nt, Homo sapiens
  misc_RNA (1)...(19): siRNA sense strand
acuggaagaucaccuacug

SEQ ID NO: 925547 - RNA, 19 nt, Homo sapiens
  misc_RNA (1)...(19): siRNA sense strand
ggauucaugaggaaagaga

SEQ ID NO: 925548 - RNA, 19 nt, Homo sapiens
  misc_RNA (1)...(19): siRNA sense strand
caagcacgaguacuacaga

SEQ ID NO: 925549 - RNA, 19 nt, Homo sapiens
  misc_RNA (1)...(19): siRNA sense strand
gaggacuggaugaagauga

SEQ ID NO: 925550 - RNA, 19 nt, Homo sapiens
  misc_RNA (1)...(19): siRNA sense strand
aggacaagcacgaguacua

SEQ ID NO: 925551 - RNA, 19 nt, Homo sapiens
  misc_RNA (1)...(19): siRNA sense strand
agagaaggcgugugagcaa

SEQ ID NO: 925552 - RNA, 19 nt, Homo sapiens
  misc_RNA (1)...(19): siRNA sense strand
ggaggcguugcgauuauug

SEQ ID NO: 925553 - RNA, 19 nt, Homo sapiens
  misc_RNA (1)...(19): siRNA sense strand
aggacuggaugaagaugaa

SEQ ID NO: 925554 - RNA, 19 nt, Homo sapiens
  misc_RNA (1)...(19): siRNA sense strand
uugaucagcuccuguacuc

SEQ ID NO: 925555 - RNA, 19 nt, Homo sapiens
  misc_RNA (1)...(19): siRNA sense strand
ccaagacgacguacaacag

SEQ ID NO: 925556 - RNA, 19 nt, Homo sapiens
  misc_RNA (1)...(19): siRNA sense strand
cggaggcguugcgauuauu

SEQ ID NO: 925557 - RNA, 19 nt, Homo sapiens
  misc_RNA (1)...(19): siRNA sense strand
gaaagaauacugggauacc

SEQ ID NO: 925558 - RNA, 19 nt, Homo sapiens
  misc_RNA (1)...(19): siRNA sense strand
ccgagauggugagguuuga

SEQ ID NO: 925559 - RNA, 19 nt, Homo sapiens
  misc_RNA (1)...(19): siRNA sense strand
cuggugggcccuuuauuga

SEQ ID NO: 925560 - RNA, 19 nt, Homo sapiens
  misc_RNA (1)...(19): siRNA sense strand
acggaggcguugcgauuau

SEQ ID NO: 925561 - RNA, 19 nt, Homo sapiens
  misc_RNA (1)...(19): siRNA sense strand
ucuggugggcccuuuauug

SEQ ID NO: 925562 - RNA, 19 nt, Homo sapiens
  misc_RNA (1)...(19): siRNA sense strand
guuuacguccugcaaaguu

SEQ ID NO: 925563 - RNA, 19 nt, Homo sapiens
  misc_RNA (1)...(19): siRNA sense strand
gcccuuuauugaccagguu

SEQ ID NO: 925564 - RNA, 19 nt, Homo sapiens
  misc_RNA (1)...(19): siRNA sense strand
ccugaagacucugcugaag

SEQ ID NO: 925565 - RNA, 19 nt, Homo sapiens
  misc_RNA (1)...(19): siRNA sense strand
gagcaguucaucgcagaau

SEQ ID NO: 925566 - RNA, 19 nt, Homo sapiens
  misc_RNA (1)...(19): siRNA sense strand
acuauggagggaaagaaua

SEQ ID NO: 925567 - RNA, 19 nt, Homo sapiens
  misc_RNA (1)...(19): siRNA sense strand
aaucgccucucuccugaag

SEQ ID NO: 925568 - RNA, 19 nt, Homo sapiens
  misc_RNA (1)...(19): siRNA sense strand
agaaucuggugggcccuuu

SEQ ID NO: 925569 - RNA, 19 nt, Homo sapiens
  misc_RNA (1)...(19): siRNA sense strand
aagauccgcagccucauga

SEQ ID NO: 925570 - RNA, 19 nt, Homo sapiens
  misc_RNA (1)...(19): siRNA sense strand
gucuaaacgucuccugucu

SEQ ID NO: 925571 - RNA, 19 nt, Homo sapiens
  misc_RNA (1)...(19): siRNA sense strand
gacgguaucuucuguauga

SEQ ID NO: 925572 - RNA, 19 nt, Homo sapiens
  misc_RNA (1)...(19): siRNA sense strand
gaagggaccugggaagaga

SEQ ID NO: 925573 - RNA, 19 nt, Homo sapiens
  misc_RNA (1)...(19): siRNA sense strand
aaaggaauaugaagagcua

SEQ ID NO: 925574 - RNA, 19 nt, Homo sapiens
  misc_RNA (1)...(19): siRNA sense strand
gggaaagaauacugggaua

SEQ ID NO: 925575 - RNA, 19 nt, Homo sapiens
  misc_RNA (1)...(19): siRNA sense strand
ggaugaagaugaaggucaa

SEQ ID NO: 925576 - RNA, 19 nt, Homo sapiens
  misc_RNA (1)...(19): siRNA sense strand
ggacggaggcguugcgauu

SEQ ID NO: 925577 - RNA, 19 nt, Homo sapiens
  misc_RNA (1)...(19): siRNA sense strand
gcgcagggaugucuauauc

SEQ ID NO: 925578 - RNA, 19 nt, Homo sapiens
  misc_RNA (1)...(19): siRNA sense strand
ccacagaugccgucagaaa

SEQ ID NO: 925579 - RNA, 19 nt, Homo sapiens
  misc_RNA (1)...(19): siRNA sense strand
gaucuuccaagucucaaua

SEQ ID NO: 925580 - RNA, 19 nt, Homo sapiens
  misc_RNA (1)...(19): siRNA sense strand
caggaggacuggaugaaga

SEQ ID NO: 925581 - RNA, 19 nt, Homo sapiens
  misc_RNA (1)...(19): siRNA sense strand
ggccacagaugccgucaga

SEQ ID NO: 925582 - RNA, 19 nt, Homo sapiens
  misc_RNA (1)...(19): siRNA sense strand
cuaaacgucuccugucugu

SEQ ID NO: 925583 - RNA, 19 nt, Homo sapiens
  misc_RNA (1)...(19): siRNA sense strand
agacagagccgagaaccua

SEQ ID NO: 925584 - RNA, 19 nt, Homo sapiens
  misc_RNA (1)...(19): siRNA sense strand
ggaguccaccugagaagaa

SEQ ID NO: 925585 - RNA, 19 nt, Homo sapiens
  misc_RNA (1)...(19): siRNA sense strand
cgaccacuauggagggaaa

SEQ ID NO: 925586 - RNA, 19 nt, Homo sapiens
  misc_RNA (1)...(19): siRNA sense strand
gaagauccgcagccucaug

SEQ ID NO: 925587 - RNA, 19 nt, Homo sapiens
  misc_RNA (1)...(19): siRNA sense strand
ugaagacucugcugaagac

SEQ ID NO: 925588 - RNA, 19 nt, Homo sapiens
  misc_RNA (1)...(19): siRNA sense strand
guauugaucagcuccugua

SEQ ID NO: 925589 - RNA, 19 nt, Homo sapiens
  misc_RNA (1)...(19): siRNA sense strand
guacuacagaggaugguuu

SEQ ID NO: 925590 - RNA, 19 nt, Homo sapiens
  misc_RNA (1)...(19): siRNA sense strand
ucagaaaggaauaugaaga

SEQ ID NO: 925591 - RNA, 19 nt, Homo sapiens
  misc_RNA (1)...(19): siRNA sense strand
gacggaggcguugcgauua

SEQ ID NO: 925592 - RNA, 19 nt, Homo sapiens
  misc_RNA (1)...(19): siRNA sense strand
uuuacguccugcaaaguua

SEQ ID NO: 925593 - RNA, 19 nt, Homo sapiens
  misc_RNA (1)...(19): siRNA sense strand
gaaucuggugggcccuuua

SEQ ID NO: 925594 - RNA, 19 nt, Homo sapiens
  misc_RNA (1)...(19): siRNA sense strand
gaguccaccugagaagaaa

SEQ ID NO: 925595 - RNA, 19 nt, Homo sapiens
  misc_RNA (1)...(19): siRNA sense strand
gacaggauguacccagucu

SEQ ID NO: 925596 - RNA, 19 nt, Homo sapiens
  misc_RNA (1)...(19): siRNA sense strand
gaggaugguuuugggguua

SEQ ID NO: 925597 - RNA, 19 nt, Homo sapiens
  misc_RNA (1)...(19): siRNA sense strand
uacccgagauggugagguu

SEQ ID NO: 925598 - RNA, 19 nt, Homo sapiens
  misc_RNA (1)...(19): siRNA sense strand
cgucagaaaggaauaugaa

SEQ ID NO: 925599 - RNA, 19 nt, Homo sapiens
  misc_RNA (1)...(19): siRNA sense strand
ggaggugggagacgaguuc

SEQ ID NO: 925600 - RNA, 19 nt, Homo sapiens
  misc_RNA (1)...(19): siRNA sense strand
gcagagggguggaaagaag

SEQ ID NO: 925601 - RNA, 19 nt, Homo sapiens
  misc_RNA (1)...(19): siRNA sense strand
cggauucccuggucugagu

SEQ ID NO: 925602 - RNA, 19 nt, Homo sapiens
  misc_RNA (1)...(19): siRNA sense strand
ggacaagcacgaguacuac

SEQ ID NO: 925603 - RNA, 19 nt, Homo sapiens
  misc_RNA (1)...(19): siRNA sense strand
caucgaguaugagcaguuc

SEQ ID NO: 925604 - RNA, 19 nt, Homo sapiens
  misc_RNA (1)...(19): siRNA sense strand
gagccgagaaccuacuuca

SEQ ID NO: 925605 - RNA, 19 nt, Homo sapiens
  misc_RNA (1)...(19): siRNA sense strand
cagaaaggaauaugaagag

SEQ ID NO: 925606 - RNA, 19 nt, Homo sapiens
  misc_RNA (1)...(19): siRNA sense strand
ggaaagaauacugggauac

SEQ ID NO: 925607 - RNA, 19 nt, Homo sapiens
  misc_RNA (1)...(19): siRNA sense strand
cagaugccgucagaaagga

SEQ ID NO: 925608 - RNA, 19 nt, Homo sapiens
  misc_RNA (1)...(19): siRNA sense strand
gcaguucaucgcagaaucu

SEQ ID NO: 925609 - RNA, 19 nt, Homo sapiens
  misc_RNA (1)...(19): siRNA sense strand
caagcacgaguacuacaga

SEQ ID NO: 925610 - RNA, 19 nt, Homo sapiens
  misc_RNA (1)...(19): siRNA sense strand
gaggacuggaugaagauga

SEQ ID NO: 925611 - RNA, 19 nt, Homo sapiens
  misc_RNA (1)...(19): siRNA sense strand
aggacaagcacgaguacua

SEQ ID NO: 925612 - RNA, 19 nt, Homo sapiens
  misc_RNA (1)...(19): siRNA sense strand
ggaggcguugcgauuauug

SEQ ID NO: 925613 - RNA, 19 nt, Homo sapiens
  misc_RNA (1)...(19): siRNA sense strand
aggacuggaugaagaugaa

SEQ ID NO: 925614 - RNA, 19 nt, Homo sapiens
  misc_RNA (1)...(19): siRNA sense strand
uugaucagcuccuguacuc

SEQ ID NO: 925615 - RNA, 19 nt, Homo sapiens
  misc_RNA (1)...(19): siRNA sense strand
cggaggcguugcgauuauu

SEQ ID NO: 925616 - RNA, 19 nt, Homo sapiens
  misc_RNA (1)...(19): siRNA sense strand
gaaagaauacugggauacc

SEQ ID NO: 925617 - RNA, 19 nt, Homo sapiens
  misc_RNA (1)...(19): siRNA sense strand
ccgagauggugagguuuga

SEQ ID NO: 925618 - RNA, 19 nt, Homo sapiens
  misc_RNA (1)...(19): siRNA sense strand
cuggugggcccuuuauuga

SEQ ID NO: 925619 - RNA, 19 nt, Homo sapiens
  misc_RNA (1)...(19): siRNA sense strand
acggaggcguugcgauuau

SEQ ID NO: 925620 - RNA, 19 nt, Homo sapiens
  misc_RNA (1)...(19): siRNA sense strand
ucuggugggcccuuuauug

SEQ ID NO: 925621 - RNA, 19 nt, Homo sapiens
  misc_RNA (1)...(19): siRNA sense strand
guuuacguccugcaaaguu

SEQ ID NO: 925622 - RNA, 19 nt, Homo sapiens
  misc_RNA (1)...(19): siRNA sense strand
gagcaguucaucgcagaau

SEQ ID NO: 925623 - RNA, 19 nt, Homo sapiens
  misc_RNA (1)...(19): siRNA sense strand
ccugaagacucugcugaag

SEQ ID NO: 925624 - RNA, 19 nt, Homo sapiens
  misc_RNA (1)...(19): siRNA sense strand
gcccuuuauugaccagguu

SEQ ID NO: 925625 - RNA, 19 nt, Homo sapiens
  misc_RNA (1)...(19): siRNA sense strand
acuauggagggaaagaaua

SEQ ID NO: 925626 - RNA, 19 nt, Homo sapiens
  misc_RNA (1)...(19): siRNA sense strand
aaucgccucucuccugaag

SEQ ID NO: 925627 - RNA, 19 nt, Homo sapiens
  misc_RNA (1)...(19): siRNA sense strand
agaaucuggugggcccuuu

SEQ ID NO: 925628 - RNA, 19 nt, Homo sapiens
  misc_RNA (1)...(19): siRNA sense strand
aagauccgcagccucauga

SEQ ID NO: 925629 - RNA, 19 nt, Homo sapiens
  misc_RNA (1)...(19): siRNA sense strand
gucuaaacgucuccugucu

SEQ ID NO: 925630 - RNA, 19 nt, Homo sapiens
  misc_RNA (1)...(19): siRNA sense strand
gacgguaucuucuguauga

SEQ ID NO: 925631 - RNA, 19 nt, Homo sapiens
  misc_RNA (1)...(19): siRNA sense strand
gaagggaccugggaagaga

SEQ ID NO: 925632 - RNA, 19 nt, Homo sapiens
  misc_RNA (1)...(19): siRNA sense strand
aaaggaauaugaagagcua

SEQ ID NO: 925633 - RNA, 19 nt, Homo sapiens
  misc_RNA (1)...(19): siRNA sense strand
gggaaagaauacugggaua

SEQ ID NO: 925634 - RNA, 19 nt, Homo sapiens
  misc_RNA (1)...(19): siRNA sense strand
ggaugaagaugaaggucaa

SEQ ID NO: 925635 - RNA, 19 nt, Homo sapiens
  misc_RNA (1)...(19): siRNA sense strand
ggacggaggcguugcgauu

SEQ ID NO: 925636 - RNA, 19 nt, Homo sapiens
  misc_RNA (1)...(19): siRNA sense strand
gcgcagggaugucuauauc

SEQ ID NO: 925637 - RNA, 19 nt, Homo sapiens
  misc_RNA (1)...(19): siRNA sense strand
ccacagaugccgucagaaa

SEQ ID NO: 925638 - RNA, 19 nt, Homo sapiens
  misc_RNA (1)...(19): siRNA sense strand
gaucuuccaagucucaaua

SEQ ID NO: 925639 - RNA, 19 nt, Homo sapiens
  misc_RNA (1)...(19): siRNA sense strand
caggaggacuggaugaaga

SEQ ID NO: 925640 - RNA, 19 nt, Homo sapiens
  misc_RNA (1)...(19): siRNA sense strand
ggccacagaugccgucaga

SEQ ID NO: 925641 - RNA, 19 nt, Homo sapiens
  misc_RNA (1)...(19): siRNA sense strand
cuaaacgucuccugucugu

SEQ ID NO: 925642 - RNA, 19 nt, Homo sapiens
  misc_RNA (1)...(19): siRNA sense strand
agacagagccgagaaccua

SEQ ID NO: 925643 - RNA, 19 nt, Homo sapiens
  misc_RNA (1)...(19): siRNA sense strand
ggaguccaccugagaagaa

SEQ ID NO: 925644 - RNA, 19 nt, Homo sapiens
  misc_RNA (1)...(19): siRNA sense strand
cgaccacuauggagggaaa

SEQ ID NO: 925645 - RNA, 19 nt, Homo sapiens
  misc_RNA (1)...(19): siRNA sense strand
gaagauccgcagccucaug

SEQ ID NO: 925646 - RNA, 19 nt, Homo sapiens
  misc_RNA (1)...(19): siRNA sense strand
ugaagacucugcugaagac

SEQ ID NO: 925647 - RNA, 19 nt, Homo sapiens
  misc_RNA (1)...(19): siRNA sense strand
guauugaucagcuccugua

SEQ ID NO: 925648 - RNA, 19 nt, Homo sapiens
  misc_RNA (1)...(19): siRNA sense strand
guacuacagaggaugguuu

SEQ ID NO: 925649 - RNA, 19 nt, Homo sapiens
  misc_RNA (1)...(19): siRNA sense strand
ucagaaaggaauaugaaga

SEQ ID NO: 925650 - RNA, 19 nt, Homo sapiens
  misc_RNA (1)...(19): siRNA sense strand
gacggaggcguugcgauua

SEQ ID NO: 925651 - RNA, 19 nt, Homo sapiens
  misc_RNA (1)...(19): siRNA sense strand
uuuacguccugcaaaguua

SEQ ID NO: 925652 - RNA, 19 nt, Homo sapiens
  misc_RNA (1)...(19): siRNA sense strand
gaaucuggugggcccuuua

SEQ ID NO: 925653 - RNA, 19 nt, Homo sapiens
  misc_RNA (1)...(19): siRNA sense strand
gaguccaccugagaagaaa

SEQ ID NO: 925654 - RNA, 19 nt, Homo sapiens
  misc_RNA (1)...(19): siRNA sense strand
gacaggauguacccagucu

SEQ ID NO: 925655 - RNA, 19 nt, Homo sapiens
  misc_RNA (1)...(19): siRNA sense strand
gaggaugguuuugggguua

SEQ ID NO: 925656 - RNA, 19 nt, Homo sapiens
  misc_RNA (1)...(19): siRNA sense strand
uacccgagauggugagguu

SEQ ID NO: 925657 - RNA, 19 nt, Homo sapiens
  misc_RNA (1)...(19): siRNA sense strand
cgucagaaaggaauaugaa

SEQ ID NO: 925658 - RNA, 19 nt, Homo sapiens
  misc_RNA (1)...(19): siRNA sense strand
ggaggugggagacgaguuc

SEQ ID NO: 925659 - RNA, 19 nt, Homo sapiens
  misc_RNA (1)...(19): siRNA sense strand
gcagagggguggaaagaag

SEQ ID NO: 925660 - RNA, 19 nt, Homo sapiens
  misc_RNA (1)...(19): siRNA sense strand
cggauucccuggucugagu

SEQ ID NO: 925661 - RNA, 19 nt, Homo sapiens
  misc_RNA (1)...(19): siRNA sense strand
ggacaagcacgaguacuac

SEQ ID NO: 925662 - RNA, 19 nt, Homo sapiens
  misc_RNA (1)...(19): siRNA sense strand
caucgaguaugagcaguuc

SEQ ID NO: 925663 - RNA, 19 nt, Homo sapiens
  misc_RNA (1)...(19): siRNA sense strand
gagccgagaaccuacuuca

SEQ ID NO: 925664 - RNA, 19 nt, Homo sapiens
  misc_RNA (1)...(19): siRNA sense strand
cagaaaggaauaugaagag

SEQ ID NO: 925665 - RNA, 19 nt, Homo sapiens
  misc_RNA (1)...(19): siRNA sense strand
ggaaagaauacugggauac

SEQ ID NO: 925666 - RNA, 19 nt, Homo sapiens
  misc_RNA (1)...(19): siRNA sense strand
cagaugccgucagaaagga

SEQ ID NO: 925667 - RNA, 19 nt, Homo sapiens
  misc_RNA (1)...(19): siRNA sense strand
gcaguucaucgcagaaucu

SEQ ID NO: 925668 - RNA, 19 nt, Homo sapiens
  misc_RNA (1)...(19): siRNA sense strand
caagcacgaguacuacaga

SEQ ID NO: 925669 - RNA, 19 nt, Homo sapiens
  misc_RNA (1)...(19): siRNA sense strand
gaggacuggaugaagauga

SEQ ID NO: 925670 - RNA, 19 nt, Homo sapiens
  misc_RNA (1)...(19): siRNA sense strand
aggacaagcacgaguacua

SEQ ID NO: 925671 - RNA, 19 nt, Homo sapiens
  misc_RNA (1)...(19): siRNA sense strand
ggaggcguugcgauuauug

SEQ ID NO: 925672 - RNA, 19 nt, Homo sapiens
  misc_RNA (1)...(19): siRNA sense strand
aggacuggaugaagaugaa

SEQ ID NO: 925673 - RNA, 19 nt, Homo sapiens
  misc_RNA (1)...(19): siRNA sense strand
uugaucagcuccuguacuc

SEQ ID NO: 925674 - RNA, 19 nt, Homo sapiens
  misc_RNA (1)...(19): siRNA sense strand
cggaggcguugcgauuauu

SEQ ID NO: 925675 - RNA, 19 nt, Homo sapiens
  misc_RNA (1)...(19): siRNA sense strand
gaaagaauacugggauacc

SEQ ID NO: 925676 - RNA, 19 nt, Homo sapiens
  misc_RNA (1)...(19): siRNA sense strand
ccgagauggugagguuuga

SEQ ID NO: 925677 - RNA, 19 nt, Homo sapiens
  misc_RNA (1)...(19): siRNA sense strand
cuggugggcccuuuauuga

SEQ ID NO: 925678 - RNA, 19 nt, Homo sapiens
  misc_RNA (1)...(19): siRNA sense strand
acggaggcguugcgauuau

SEQ ID NO: 925679 - RNA, 19 nt, Homo sapiens
  misc_RNA (1)...(19): siRNA sense strand
ucuggugggcccuuuauug

SEQ ID NO: 925680 - RNA, 19 nt, Homo sapiens
  misc_RNA (1)...(19): siRNA sense strand
guuuacguccugcaaaguu

SEQ ID NO: 925681 - RNA, 19 nt, Homo sapiens
  misc_RNA (1)...(19): siRNA sense strand
gagcaguucaucgcagaau

SEQ ID NO: 925682 - RNA, 19 nt, Homo sapiens
  misc_RNA (1)...(19): siRNA sense strand
ccugaagacucugcugaag

SEQ ID NO: 925683 - RNA, 19 nt, Homo sapiens
  misc_RNA (1)...(19): siRNA sense strand
gcccuuuauugaccagguu

SEQ ID NO: 925684 - RNA, 19 nt, Homo sapiens
  misc_RNA (1)...(19): siRNA sense strand
acuauggagggaaagaaua

SEQ ID NO: 925685 - RNA, 19 nt, Homo sapiens
  misc_RNA (1)...(19): siRNA sense strand
aaucgccucucuccugaag

SEQ ID NO: 925686 - RNA, 19 nt, Homo sapiens
  misc_RNA (1)...(19): siRNA sense strand
agaaucuggugggcccuuu

SEQ ID NO: 925687 - RNA, 19 nt, Homo sapiens
  misc_RNA (1)...(19): siRNA sense strand
aagauccgcagccucauga

SEQ ID NO: 925688 - RNA, 19 nt, Homo sapiens
  misc_RNA (1)...(19): siRNA sense strand
gucuaaacgucuccugucu

SEQ ID NO: 925689 - RNA, 19 nt, Homo sapiens
  misc_RNA (1)...(19): siRNA sense strand
gacgguaucuucuguauga

SEQ ID NO: 925690 - RNA, 19 nt, Homo sapiens
  misc_RNA (1)...(19): siRNA sense strand
gaagggaccugggaagaga

SEQ ID NO: 925691 - RNA, 19 nt, Homo sapiens
  misc_RNA (1)...(19): siRNA sense strand
gcaccucagucucaacauu

SEQ ID NO: 925692 - RNA, 19 nt, Homo sapiens
  misc_RNA (1)...(19): siRNA sense strand
aaaggaauaugaagagcua

SEQ ID NO: 925693 - RNA, 19 nt, Homo sapiens
  misc_RNA (1)...(19): siRNA sense strand
gggaaagaauacugggaua

SEQ ID NO: 925694 - RNA, 19 nt, Homo sapiens
  misc_RNA (1)...(19): siRNA sense strand
ggaugaagaugaaggucaa

SEQ ID NO: 925695 - RNA, 19 nt, Homo sapiens
  misc_RNA (1)...(19): siRNA sense strand
ggacggaggcguugcgauu

SEQ ID NO: 925696 - RNA, 19 nt, Homo sapiens
  misc_RNA (1)...(19): siRNA sense strand
gcgcagggaugucuauauc

SEQ ID NO: 925697 - RNA, 19 nt, Homo sapiens
  misc_RNA (1)...(19): siRNA sense strand
ccacagaugccgucagaaa

SEQ ID NO: 925698 - RNA, 19 nt, Homo sapiens
  misc_RNA (1)...(19): siRNA sense strand
gaucuuccaagucucaaua

SEQ ID NO: 925699 - RNA, 19 nt, Homo sapiens
  misc_RNA (1)...(19): siRNA sense strand
caggaggacuggaugaaga

SEQ ID NO: 925700 - RNA, 19 nt, Homo sapiens
  misc_RNA (1)...(19): siRNA sense strand
ggccacagaugccgucaga

SEQ ID NO: 925701 - RNA, 19 nt, Homo sapiens
  misc_RNA (1)...(19): siRNA sense strand
cuaaacgucuccugucugu

SEQ ID NO: 925702 - RNA, 19 nt, Homo sapiens
  misc_RNA (1)...(19): siRNA sense strand
agacagagccgagaaccua

SEQ ID NO: 925703 - RNA, 19 nt, Homo sapiens
  misc_RNA (1)...(19): siRNA sense strand
ggaguccaccugagaagaa

SEQ ID NO: 925704 - RNA, 19 nt, Homo sapiens
  misc_RNA (1)...(19): siRNA sense strand
cgaccacuauggagggaaa

SEQ ID NO: 925705 - RNA, 19 nt, Homo sapiens
  misc_RNA (1)...(19): siRNA sense strand
gaagauccgcagccucaug

SEQ ID NO: 925706 - RNA, 19 nt, Homo sapiens
  misc_RNA (1)...(19): siRNA sense strand
ugaagacucugcugaagac

SEQ ID NO: 925707 - RNA, 19 nt, Homo sapiens
  misc_RNA (1)...(19): siRNA sense strand
guauugaucagcuccugua

SEQ ID NO: 925708 - RNA, 19 nt, Homo sapiens
  misc_RNA (1)...(19): siRNA sense strand
guacuacagaggaugguuu

SEQ ID NO: 925709 - RNA, 19 nt, Homo sapiens
  misc_RNA (1)...(19): siRNA sense strand
ucagaaaggaauaugaaga

SEQ ID NO: 925710 - RNA, 19 nt, Homo sapiens
  misc_RNA (1)...(19): siRNA sense strand
gacggaggcguugcgauua

SEQ ID NO: 925711 - RNA, 19 nt, Homo sapiens
  misc_RNA (1)...(19): siRNA sense strand
uuuacguccugcaaaguua

SEQ ID NO: 925712 - RNA, 19 nt, Homo sapiens
  misc_RNA (1)...(19): siRNA sense strand
gaaucuggugggcccuuua

SEQ ID NO: 925713 - RNA, 19 nt, Homo sapiens
  misc_RNA (1)...(19): siRNA sense strand
gaguccaccugagaagaaa

SEQ ID NO: 925714 - RNA, 19 nt, Homo sapiens
  misc_RNA (1)...(19): siRNA sense strand
gacaggauguacccagucu

SEQ ID NO: 925715 - RNA, 19 nt, Homo sapiens
  misc_RNA (1)...(19): siRNA sense strand
gaggaugguuuugggguua

SEQ ID NO: 925716 - RNA, 19 nt, Homo sapiens
  misc_RNA (1)...(19): siRNA sense strand
uacccgagauggugagguu

SEQ ID NO: 925717 - RNA, 19 nt, Homo sapiens
  misc_RNA (1)...(19): siRNA sense strand
cgucagaaaggaauaugaa

SEQ ID NO: 925718 - RNA, 19 nt, Homo sapiens
  misc_RNA (1)...(19): siRNA sense strand
ggaggugggagacgaguuc

SEQ ID NO: 925719 - RNA, 19 nt, Homo sapiens
  misc_RNA (1)...(19): siRNA sense strand
gcagagggguggaaagaag

SEQ ID NO: 925720 - RNA, 19 nt, Homo sapiens
  misc_RNA (1)...(19): siRNA sense strand
cggauucccuggucugagu

SEQ ID NO: 925721 - RNA, 19 nt, Homo sapiens
  misc_RNA (1)...(19): siRNA sense strand
caccucagucucaacauuu

SEQ ID NO: 925722 - RNA, 19 nt, Homo sapiens
  misc_RNA (1)...(19): siRNA sense strand
ggacaagcacgaguacuac

SEQ ID NO: 925723 - RNA, 19 nt, Homo sapiens
  misc_RNA (1)...(19): siRNA sense strand
caucgaguaugagcaguuc

SEQ ID NO: 925724 - RNA, 19 nt, Homo sapiens
  misc_RNA (1)...(19): siRNA sense strand
gagccgagaaccuacuuca

SEQ ID NO: 925725 - RNA, 19 nt, Homo sapiens
  misc_RNA (1)...(19): siRNA sense strand
caacccacccacuggaaga

SEQ ID NO: 925726 - RNA, 19 nt, Homo sapiens
  misc_RNA (1)...(19): siRNA sense strand
cagaaaggaauaugaagag

SEQ ID NO: 925727 - RNA, 19 nt, Homo sapiens
  misc_RNA (1)...(19): siRNA sense strand
ggaaagaauacugggauac

SEQ ID NO: 925728 - RNA, 19 nt, Homo sapiens
  misc_RNA (1)...(19): siRNA sense strand
cagaugccgucagaaagga

SEQ ID NO: 925729 - RNA, 19 nt, Homo sapiens
  misc_RNA (1)...(19): siRNA sense strand
gcaguucaucgcagaaucu

SEQ ID NO: 925730 - RNA, 19 nt, Homo sapiens
  misc_RNA (1)...(19): siRNA sense strand
acuggaagaucaccuacug

SEQ ID NO: 925731 - RNA, 19 nt, Homo sapiens
  misc_RNA (1)...(19): siRNA sense strand
ggauucaugaggaaagaga

SEQ ID NO: 925732 - RNA, 19 nt, Homo sapiens
  misc_RNA (1)...(19): siRNA sense strand
caagcacgaguacuacaga

SEQ ID NO: 925733 - RNA, 19 nt, Homo sapiens
  misc_RNA (1)...(19): siRNA sense strand
gaggacuggaugaagauga

SEQ ID NO: 925734 - RNA, 19 nt, Homo sapiens
  misc_RNA (1)...(19): siRNA sense strand
aggacaagcacgaguacua

SEQ ID NO: 925735 - RNA, 19 nt, Homo sapiens
  misc_RNA (1)...(19): siRNA sense strand
agagaaggcgugugagcaa

SEQ ID NO: 925736 - RNA, 19 nt, Homo sapiens
  misc_RNA (1)...(19): siRNA sense strand
ggaggcguugcgauuauug

SEQ ID NO: 925737 - RNA, 19 nt, Homo sapiens
  misc_RNA (1)...(19): siRNA sense strand
aggacuggaugaagaugaa

SEQ ID NO: 925738 - RNA, 19 nt, Homo sapiens
  misc_RNA (1)...(19): siRNA sense strand
uugaucagcuccuguacuc

SEQ ID NO: 925739 - RNA, 19 nt, Homo sapiens
  misc_RNA (1)...(19): siRNA sense strand
ccaagacgacguacaacag

SEQ ID NO: 925740 - RNA, 19 nt, Homo sapiens
  misc_RNA (1)...(19): siRNA sense strand
cggaggcguugcgauuauu

SEQ ID NO: 925741 - RNA, 19 nt, Homo sapiens
  misc_RNA (1)...(19): siRNA sense strand
gaaagaauacugggauacc

SEQ ID NO: 925742 - RNA, 19 nt, Homo sapiens
  misc_RNA (1)...(19): siRNA sense strand
ccgagauggugagguuuga

SEQ ID NO: 925743 - RNA, 19 nt, Homo sapiens
  misc_RNA (1)...(19): siRNA sense strand
cuggugggcccuuuauuga

SEQ ID NO: 925744 - RNA, 19 nt, Homo sapiens
  misc_RNA (1)...(19): siRNA sense strand
acggaggcguugcgauuau

SEQ ID NO: 925745 - RNA, 19 nt, Homo sapiens
  misc_RNA (1)...(19): siRNA sense strand
ucuggugggcccuuuauug

SEQ ID NO: 925746 - RNA, 19 nt, Homo sapiens
  misc_RNA (1)...(19): siRNA sense strand
guuuacguccugcaaaguu

SEQ ID NO: 925747 - RNA, 19 nt, Homo sapiens
  misc_RNA (1)...(19): siRNA sense strand
gcccuuuauugaccagguu

SEQ ID NO: 925748 - RNA, 19 nt, Homo sapiens
  misc_RNA (1)...(19): siRNA sense strand
ccugaagacucugcugaag

SEQ ID NO: 925749 - RNA, 19 nt, Homo sapiens
  misc_RNA (1)...(19): siRNA sense strand
gagcaguucaucgcagaau

SEQ ID NO: 925750 - RNA, 19 nt, Homo sapiens
  misc_RNA (1)...(19): siRNA sense strand
acuauggagggaaagaaua

SEQ ID NO: 925751 - RNA, 19 nt, Homo sapiens
  misc_RNA (1)...(19): siRNA sense strand
aaucgccucucuccugaag

SEQ ID NO: 925752 - RNA, 19 nt, Homo sapiens
  misc_RNA (1)...(19): siRNA sense strand
agaaucuggugggcccuuu

SEQ ID NO: 925753 - RNA, 19 nt, Homo sapiens
  misc_RNA (1)...(19): siRNA sense strand
aagauccgcagccucauga

SEQ ID NO: 925754 - RNA, 19 nt, Homo sapiens
  misc_RNA (1)...(19): siRNA sense strand
gucuaaacgucuccugucu

SEQ ID NO: 925755 - RNA, 19 nt, Homo sapiens
  misc_RNA (1)...(19): siRNA sense strand
gagaucauguggaagcaua

SEQ ID NO: 925756 - RNA, 19 nt, Homo sapiens
  misc_RNA (1)...(19): siRNA sense strand
acagaaagauuguugaaga

SEQ ID NO: 925757 - RNA, 19 nt, Homo sapiens
  misc_RNA (1)...(19): siRNA sense strand
caacaccgcugugcaaguu

SEQ ID NO: 925758 - RNA, 19 nt, Homo sapiens
  misc_RNA (1)...(19): siRNA sense strand
gcucagugcuucagacaga

SEQ ID NO: 925759 - RNA, 19 nt, Homo sapiens
  misc_RNA (1)...(19): siRNA sense strand
caacauaguacaccaaaga

SEQ ID NO: 925760 - RNA, 19 nt, Homo sapiens
  misc_RNA (1)...(19): siRNA sense strand
gaugggagguucuauucuu

SEQ ID NO: 925761 - RNA, 19 nt, Homo sapiens
  misc_RNA (1)...(19): siRNA sense strand
caagaaacccgauugucua

SEQ ID NO: 925762 - RNA, 19 nt, Homo sapiens
  misc_RNA (1)...(19): siRNA sense strand
gacaacggcucgggaauga

SEQ ID NO: 925763 - RNA, 19 nt, Homo sapiens
  misc_RNA (1)...(19): siRNA sense strand
gaaagauuguugaagacau

SEQ ID NO: 925764 - RNA, 19 nt, Homo sapiens
  misc_RNA (1)...(19): siRNA sense strand
gauacaggccugaggaauu

SEQ ID NO: 925765 - RNA, 19 nt, Homo sapiens
  misc_RNA (1)...(19): siRNA sense strand
caacagaucacggaaaugu

SEQ ID NO: 925766 - RNA, 19 nt, Homo sapiens
  misc_RNA (1)...(19): siRNA sense strand
ggcaacagaucacggaaau

SEQ ID NO: 925767 - RNA, 19 nt, Homo sapiens
  misc_RNA (1)...(19): siRNA sense strand
gcucgcuguucaucaguua

SEQ ID NO: 925768 - RNA, 19 nt, Homo sapiens
  misc_RNA (1)...(19): siRNA sense strand
gaacuacgaagaggaaaug

SEQ ID NO: 925769 - RNA, 19 nt, Homo sapiens
  misc_RNA (1)...(19): siRNA sense strand
gccuugaccucaccaacua

SEQ ID NO: 925770 - RNA, 19 nt, Homo sapiens
  misc_RNA (1)...(19): siRNA sense strand
gcgguuaguuaaggauaua

SEQ ID NO: 925771 - RNA, 19 nt, Homo sapiens
  misc_RNA (1)...(19): siRNA sense strand
aagaggaaauggccaagaa

SEQ ID NO: 925772 - RNA, 19 nt, Homo sapiens
  misc_RNA (1)...(19): siRNA sense strand
guuccugccuucuauaugu

SEQ ID NO: 925773 - RNA, 19 nt, Homo sapiens
  misc_RNA (1)...(19): siRNA sense strand
aguuauagcuccuccagaa

SEQ ID NO: 925774 - RNA, 19 nt, Homo sapiens
  misc_RNA (1)...(19): siRNA sense strand
uuagacaagcgguuaguua

SEQ ID NO: 925775 - RNA, 19 nt, Homo sapiens
  misc_RNA (1)...(19): siRNA sense strand
uggaggagcucgcuguuca

SEQ ID NO: 925776 - RNA, 19 nt, Homo sapiens
  misc_RNA (1)...(19): siRNA sense strand
cuacuggccuugugcugaa

SEQ ID NO: 925777 - RNA, 19 nt, Homo sapiens
  misc_RNA (1)...(19): siRNA sense strand
acagaucacggaaauguuu

SEQ ID NO: 925778 - RNA, 19 nt, Homo sapiens
  misc_RNA (1)...(19): siRNA sense strand
ccaagaaacccgauugucu

SEQ ID NO: 925779 - RNA, 19 nt, Homo sapiens
  misc_RNA (1)...(19): siRNA sense strand
uagacaagcgguuaguuaa

SEQ ID NO: 925780 - RNA, 19 nt, Homo sapiens
  misc_RNA (1)...(19): siRNA sense strand
gacaagcgguuaguuaagg

SEQ ID NO: 925781 - RNA, 19 nt, Homo sapiens
  misc_RNA (1)...(19): siRNA sense strand
ggagcucgcuguucaucag

SEQ ID NO: 925782 - RNA, 19 nt, Homo sapiens
  misc_RNA (1)...(19): siRNA sense strand
auacaggccugaggaauuc

SEQ ID NO: 925783 - RNA, 19 nt, Homo sapiens
  misc_RNA (1)...(19): siRNA sense strand
gggaggacauggagaucau

SEQ ID NO: 925784 - RNA, 19 nt, Homo sapiens
  misc_RNA (1)...(19): siRNA sense strand
gcugcuggcuucacuacug

SEQ ID NO: 925785 - RNA, 19 nt, Homo sapiens
  misc_RNA (1)...(19): siRNA sense strand
gagcguggucucauuacuu

SEQ ID NO: 925786 - RNA, 19 nt, Homo sapiens
  misc_RNA (1)...(19): siRNA sense strand
ucaaggagagcuuuuguua

SEQ ID NO: 925787 - RNA, 19 nt, Homo sapiens
  misc_RNA (1)...(19): siRNA sense strand
aaagauuguugaagacauc

SEQ ID NO: 925788 - RNA, 19 nt, Homo sapiens
  misc_RNA (1)...(19): siRNA sense strand
gauggcccagucuugauua

SEQ ID NO: 925789 - RNA, 19 nt, Homo sapiens
  misc_RNA (1)...(19): siRNA sense strand
guucuauucuugcauccuu

SEQ ID NO: 925790 - RNA, 19 nt, Homo sapiens
  misc_RNA (1)...(19): siRNA sense strand
acuauaaccuaaagcugaa

SEQ ID NO: 925791 - RNA, 19 nt, Homo sapiens
  misc_RNA (1)...(19): siRNA sense strand
aaggagagcuuuuguuaug

SEQ ID NO: 925792 - RNA, 19 nt, Homo sapiens
  misc_RNA (1)...(19): siRNA sense strand
gaagaggaaauggccaaga

SEQ ID NO: 925793 - RNA, 19 nt, Homo sapiens
  misc_RNA (1)...(19): siRNA sense strand
uuaaggauauagcaaaggu

SEQ ID NO: 925794 - RNA, 19 nt, Homo sapiens
  misc_RNA (1)...(19): siRNA sense strand
gaaaggaaaauaucagugu

SEQ ID NO: 925795 - RNA, 19 nt, Homo sapiens
  misc_RNA (1)...(19): siRNA sense strand
guggagcguggucucauua

SEQ ID NO: 925796 - RNA, 19 nt, Homo sapiens
  misc_RNA (1)...(19): siRNA sense strand
uaaugaagaaccaugguau

SEQ ID NO: 925797 - RNA, 19 nt, Homo sapiens
  misc_RNA (1)...(19): siRNA sense strand
caacggcucgggaaugauc

SEQ ID NO: 925798 - RNA, 19 nt, Homo sapiens
  misc_RNA (1)...(19): siRNA sense strand
cugcagaauuuaaagaagu

SEQ ID NO: 925799 - RNA, 19 nt, Homo sapiens
  misc_RNA (1)...(19): siRNA sense strand
ggguguuccugccuucuau

SEQ ID NO: 925800 - RNA, 19 nt, Homo sapiens
  misc_RNA (1)...(19): siRNA sense strand
cgugucauaugaaccuuga

SEQ ID NO: 925801 - RNA, 19 nt, Homo sapiens
  misc_RNA (1)...(19): siRNA sense strand
cagaaagauuguugaagac

SEQ ID NO: 925802 - RNA, 19 nt, Homo sapiens
  misc_RNA (1)...(19): siRNA sense strand
cuaaugaagaaccauggua

SEQ ID NO: 925803 - RNA, 19 nt, Homo sapiens
  misc_RNA (1)...(19): siRNA sense strand
caguuuaucuacccgaaca

SEQ ID NO: 925804 - RNA, 19 nt, Homo sapiens
  misc_RNA (1)...(19): siRNA sense strand
ucagacagaaagauuguug

SEQ ID NO: 925805 - RNA, 19 nt, Homo sapiens
  misc_RNA (1)...(19): siRNA sense strand
agacagaaagauuguugaa

SEQ ID NO: 925806 - RNA, 19 nt, Homo sapiens
  misc_RNA (1)...(19): siRNA sense strand
agagugugcccaucuuuga

SEQ ID NO: 925807 - RNA, 19 nt, Homo sapiens
  misc_RNA (1)...(19): siRNA sense strand
gcugcagaauuuaaagaag

SEQ ID NO: 925808 - RNA, 19 nt, Homo sapiens
  misc_RNA (1)...(19): siRNA sense strand
cgacaacggcucgggaaug

SEQ ID NO: 925809 - RNA, 19 nt, Homo sapiens
  misc_RNA (1)...(19): siRNA sense strand
uuuguuauguggcaaugaa

SEQ ID NO: 925810 - RNA, 19 nt, Homo sapiens
  misc_RNA (1)...(19): siRNA sense strand
uuacugagccagcgcugaa

SEQ ID NO: 925811 - RNA, 19 nt, Homo sapiens
  misc_RNA (1)...(19): siRNA sense strand
acaccgcugugcaaguuau

SEQ ID NO: 925812 - RNA, 19 nt, Homo sapiens
  misc_RNA (1)...(19): siRNA sense strand
ggagagcuuuuguuaugug

SEQ ID NO: 925813 - RNA, 19 nt, Homo sapiens
  misc_RNA (1)...(19): siRNA sense strand
ccagagugugcccaucuuu

SEQ ID NO: 925814 - RNA, 19 nt, Homo sapiens
  misc_RNA (1)...(19): siRNA sense strand
gggagguucuauucuugca

SEQ ID NO: 925815 - RNA, 19 nt, Homo sapiens
  misc_RNA (1)...(19): siRNA sense strand
acaagcgguuaguuaagga

SEQ ID NO: 925816 - RNA, 19 nt, Homo sapiens
  misc_RNA (1)...(19): siRNA sense strand
ggagcguggucucauuacu

SEQ ID NO: 925817 - RNA, 19 nt, Homo sapiens
  misc_RNA (1)...(19): siRNA sense strand
gaggaaauggccaagaaac

SEQ ID NO: 925818 - RNA, 19 nt, Homo sapiens
  misc_RNA (1)...(19): siRNA sense strand
guuauguggcaaugaacua

SEQ ID NO: 925819 - RNA, 19 nt, Homo sapiens
  misc_RNA (1)...(19): siRNA sense strand
acaccaaagaugcuucuga

SEQ ID NO: 925820 - RNA, 19 nt, Homo sapiens
  misc_RNA (1)...(19): siRNA sense strand
cauaaugaaacgugauaca

SEQ ID NO: 925821 - RNA, 19 nt, Homo sapiens
  misc_RNA (1)...(19): siRNA sense strand
gaccagcucuuuucuuguc

SEQ ID NO: 925822 - RNA, 19 nt, Homo sapiens
  misc_RNA (1)...(19): siRNA sense strand
cagagugugcccaucuuug

SEQ ID NO: 925823 - RNA, 19 nt, Homo sapiens
  misc_RNA (1)...(19): siRNA sense strand
guuauagcuccuccagaaa

SEQ ID NO: 925824 - RNA, 19 nt, Homo sapiens
  misc_RNA (1)...(19): siRNA sense strand
uaaagcugaagccguguga

SEQ ID NO: 925825 - RNA, 19 nt, Homo sapiens
  misc_RNA (1)...(19): siRNA sense strand
uuaucuacccgaacauuau

SEQ ID NO: 925826 - RNA, 19 nt, Homo sapiens
  misc_RNA (1)...(19): siRNA sense strand
uuuaucuacccgaacauua

SEQ ID NO: 925827 - RNA, 19 nt, Homo sapiens
  misc_RNA (1)...(19): siRNA sense strand
cuaugacuauaaccuaaag

SEQ ID NO: 925828 - RNA, 19 nt, Homo sapiens
  misc_RNA (1)...(19): siRNA sense strand
guggaugggagguucuauu

SEQ ID NO: 925829 - RNA, 19 nt, Homo sapiens
  misc_RNA (1)...(19): siRNA sense strand
ggcaaugaacuacgaagag

SEQ ID NO: 925830 - RNA, 19 nt, Homo sapiens
  misc_RNA (1)...(19): siRNA sense strand
aagcugaagccgugugaug

SEQ ID NO: 925831 - RNA, 19 nt, Homo sapiens
  misc_RNA (1)...(19): siRNA sense strand
cccuggcauugauaagaua

SEQ ID NO: 925832 - RNA, 19 nt, Homo sapiens
  misc_RNA (1)...(19): siRNA sense strand
ucauguggaagcauaucua

SEQ ID NO: 925833 - RNA, 19 nt, Homo sapiens
  misc_RNA (1)...(19): siRNA sense strand
aaugaacuacgaagaggaa

SEQ ID NO: 925834 - RNA, 19 nt, Homo sapiens
  misc_RNA (1)...(19): siRNA sense strand
agacaucaaggagagcuuu

SEQ ID NO: 925835 - RNA, 19 nt, Homo sapiens
  misc_RNA (1)...(19): siRNA sense strand
aguggagcguggucucauu

SEQ ID NO: 925836 - RNA, 19 nt, Homo sapiens
  misc_RNA (1)...(19): siRNA sense strand
ugauggcccagucuugauu

SEQ ID NO: 925837 - RNA, 19 nt, Homo sapiens
  misc_RNA (1)...(19): siRNA sense strand
cauguggaagcauaucuau

SEQ ID NO: 925838 - RNA, 19 nt, Homo sapiens
  misc_RNA (1)...(19): siRNA sense strand
gaucauggguggaguauuu

SEQ ID NO: 925839 - RNA, 19 nt, Homo sapiens
  misc_RNA (1)...(19): siRNA sense strand
ggaagaauuugaugaagaa

SEQ ID NO: 925840 - RNA, 19 nt, Homo sapiens
  misc_RNA (1)...(19): siRNA sense strand
uaacagaugucauaggaaa

SEQ ID NO: 925841 - RNA, 19 nt, Homo sapiens
  misc_RNA (1)...(19): siRNA sense strand
gaaauaccuugguuccuuu

SEQ ID NO: 925842 - RNA, 19 nt, Homo sapiens
  misc_RNA (1)...(19): siRNA sense strand
ggaagaaucucccauggau

SEQ ID NO: 925843 - RNA, 19 nt, Homo sapiens
  misc_RNA (1)...(19): siRNA sense strand
gcagauggauggacgaaug

SEQ ID NO: 925844 - RNA, 19 nt, Homo sapiens
  misc_RNA (1)...(19): siRNA sense strand
ccaugaacccgaagaaaua

SEQ ID NO: 925845 - RNA, 19 nt, Homo sapiens
  misc_RNA (1)...(19): siRNA sense strand
guuaacagaugucauagga

SEQ ID NO: 925846 - RNA, 19 nt, Homo sapiens
  misc_RNA (1)...(19): siRNA sense strand
ccgaaaggcugaaguguuc

SEQ ID NO: 925847 - RNA, 19 nt, Homo sapiens
  misc_RNA (1)...(19): siRNA sense strand
uuacacagaugcuuugguu

SEQ ID NO: 925848 - RNA, 19 nt, Homo sapiens
  misc_RNA (1)...(19): siRNA sense strand
gauccagaaguucguauua

SEQ ID NO: 925849 - RNA, 19 nt, Homo sapiens
  misc_RNA (1)...(19): siRNA sense strand
gaaguucguauuagagaaa

SEQ ID NO: 925850 - RNA, 19 nt, Homo sapiens
  misc_RNA (1)...(19): siRNA sense strand
gcuggaaccugggaaacua

SEQ ID NO: 925851 - RNA, 19 nt, Homo sapiens
  misc_RNA (1)...(19): siRNA sense strand
agaaauaccuugguuccuu

SEQ ID NO: 925852 - RNA, 19 nt, Homo sapiens
  misc_RNA (1)...(19): siRNA sense strand
uagaguccauggaagaauu

SEQ ID NO: 925853 - RNA, 19 nt, Homo sapiens
  misc_RNA (1)...(19): siRNA sense strand
gcugaaguguucccuguuc

SEQ ID NO: 925854 - RNA, 19 nt, Homo sapiens
  misc_RNA (1)...(19): siRNA sense strand
uggaagaauuugaugaaga

SEQ ID NO: 925855 - RNA, 19 nt, Homo sapiens
  misc_RNA (1)...(19): siRNA sense strand
gccauuugcuccaugauca

SEQ ID NO: 925856 - RNA, 19 nt, Homo sapiens
  misc_RNA (1)...(19): siRNA sense strand
ccgaagaaauaccuugguu

SEQ ID NO: 925857 - RNA, 19 nt, Homo sapiens
  misc_RNA (1)...(19): siRNA sense strand
cagaugcuuugguucauga

SEQ ID NO: 925858 - RNA, 19 nt, Homo sapiens
  misc_RNA (1)...(19): siRNA sense strand
ggagcucuuuccugucuau

SEQ ID NO: 925859 - RNA, 19 nt, Homo sapiens
  misc_RNA (1)...(19): siRNA sense strand
aggaaaggauaaagucauu

SEQ ID NO: 925860 - RNA, 19 nt, Homo sapiens
  misc_RNA (1)...(19): siRNA sense strand
uuaaaccugugccagcuuu

SEQ ID NO: 925861 - RNA, 19 nt, Homo sapiens
  misc_RNA (1)...(19): siRNA sense strand
gaaccugggaaacuaauag

SEQ ID NO: 925862 - RNA, 19 nt, Homo sapiens
  misc_RNA (1)...(19): siRNA sense strand
uaauagaguccauggaaga

SEQ ID NO: 925863 - RNA, 19 nt, Homo sapiens
  misc_RNA (1)...(19): siRNA sense strand
gagauggagcgcuguguga

SEQ ID NO: 925864 - RNA, 19 nt, Homo sapiens
  misc_RNA (1)...(19): siRNA sense strand
gaugucauaggaaaggaua

SEQ ID NO: 925865 - RNA, 19 nt, Homo sapiens
  misc_RNA (1)...(19): siRNA sense strand
uggaguauuugagaaguuu

SEQ ID NO: 925866 - RNA, 19 nt, Homo sapiens
  misc_RNA (1)...(19): siRNA sense strand
ggaaaggauaaagucauuu

SEQ ID NO: 925867 - RNA, 19 nt, Homo sapiens
  misc_RNA (1)...(19): siRNA sense strand
ccaaaccugaggacacuuu

SEQ ID NO: 925868 - RNA, 19 nt, Homo sapiens
  misc_RNA (1)...(19): siRNA sense strand
gauggagcgcugugugaaa

SEQ ID NO: 925869 - RNA, 19 nt, Homo sapiens
  misc_RNA (1)...(19): siRNA sense strand
cauggaagaauuugaugaa

SEQ ID NO: 925870 - RNA, 19 nt, Homo sapiens
  misc_RNA (1)...(19): siRNA sense strand
uccagaaguucguauuaga

SEQ ID NO: 925871 - RNA, 19 nt, Homo sapiens
  misc_RNA (1)...(19): siRNA sense strand
ggaaccugggaaacuaaua

SEQ ID NO: 925872 - RNA, 19 nt, Homo sapiens
  misc_RNA (1)...(19): siRNA sense strand
acacagaugcuuugguuca

SEQ ID NO: 925873 - RNA, 19 nt, Homo sapiens
  misc_RNA (1)...(19): siRNA sense strand
ccagcaccguugugagcua

SEQ ID NO: 925874 - RNA, 19 nt, Homo sapiens
  misc_RNA (1)...(19): siRNA sense strand
ggaaacuaauagaguccau

SEQ ID NO: 925875 - RNA, 19 nt, Homo sapiens
  misc_RNA (1)...(19): siRNA sense strand
gaacgcgcaggagcucuuu

SEQ ID NO: 925876 - RNA, 19 nt, Homo sapiens
  misc_RNA (1)...(19): siRNA sense strand
ggacgaauggccaaauacu

SEQ ID NO: 925877 - RNA, 19 nt, Homo sapiens
  misc_RNA (1)...(19): siRNA sense strand
gggaaccgauuaccccuuu

SEQ ID NO: 925878 - RNA, 19 nt, Homo sapiens
  misc_RNA (1)...(19): siRNA sense strand
caaaccugaggacacuuua

SEQ ID NO: 925879 - RNA, 19 nt, Homo sapiens
  misc_RNA (1)...(19): siRNA sense strand
uuagagaaauggaccaaaa

SEQ ID NO: 925880 - RNA, 19 nt, Homo sapiens
  misc_RNA (1)...(19): siRNA sense strand
gccgaaaggcugaaguguu

SEQ ID NO: 925881 - RNA, 19 nt, Homo sapiens
  misc_RNA (1)...(19): siRNA sense strand
cagaaguucguauuagaga

SEQ ID NO: 925882 - RNA, 19 nt, Homo sapiens
  misc_RNA (1)...(19): siRNA sense strand
ggccaaaccugaggacacu

SEQ ID NO: 925883 - RNA, 19 nt, Homo sapiens
  misc_RNA (1)...(19): siRNA sense strand
guggaguauuugagaaguu

SEQ ID NO: 925884 - RNA, 19 nt, Homo sapiens
  misc_RNA (1)...(19): siRNA sense strand
gagaccaccauagccauuu

SEQ ID NO: 925885 - RNA, 19 nt, Homo sapiens
  misc_RNA (1)...(19): siRNA sense strand
acuaauagaguccauggaa

SEQ ID NO: 925886 - RNA, 19 nt, Homo sapiens
  misc_RNA (1)...(19): siRNA sense strand
ucccuuggcuuguaggaau

SEQ ID NO: 925887 - RNA, 19 nt, Homo sapiens
  misc_RNA (1)...(19): siRNA sense strand
agaaguucguauuagagaa

SEQ ID NO: 925888 - RNA, 19 nt, Homo sapiens
  misc_RNA (1)...(19): siRNA sense strand
auggacgaauggccaaaua

SEQ ID NO: 925889 - RNA, 19 nt, Homo sapiens
  misc_RNA (1)...(19): siRNA sense strand
ucagaguggugcgagagaa

SEQ ID NO: 925890 - RNA, 19 nt, Homo sapiens
  misc_RNA (1)...(19): siRNA sense strand
agaccaccauagccauuug

SEQ ID NO: 925891 - RNA, 19 nt, Homo sapiens
  misc_RNA (1)...(19): siRNA sense strand
ccugggacaugcagaugga

SEQ ID NO: 925892 - RNA, 19 nt, Homo sapiens
  misc_RNA (1)...(19): siRNA sense strand
caaagaauaaacucaaagc

SEQ ID NO: 925893 - RNA, 19 nt, Homo sapiens
  misc_RNA (1)...(19): siRNA sense strand
cauaggaaaggauaaaguc

SEQ ID NO: 925894 - RNA, 19 nt, Homo sapiens
  misc_RNA (1)...(19): siRNA sense strand
guaggaaugccagcagaga

SEQ ID NO: 925895 - RNA, 19 nt, Homo sapiens
  misc_RNA (1)...(19): siRNA sense strand
cccaugaacccgaagaaau

SEQ ID NO: 925896 - RNA, 19 nt, Homo sapiens
  misc_RNA (1)...(19): siRNA sense strand
ggauccagaaguucguauu

SEQ ID NO: 925897 - RNA, 19 nt, Homo sapiens
  misc_RNA (1)...(19): siRNA sense strand
aaccugaggacacuuuaaa

SEQ ID NO: 925898 - RNA, 19 nt, Homo sapiens
  misc_RNA (1)...(19): siRNA sense strand
cagcagagaccaccauagc

SEQ ID NO: 925899 - RNA, 19 nt, Homo sapiens
  misc_RNA (1)...(19): siRNA sense strand
ccauggaagaauuugauga

SEQ ID NO: 925900 - RNA, 19 nt, Homo sapiens
  misc_RNA (1)...(19): siRNA sense strand
gaguggugcgagagaauug

SEQ ID NO: 925901 - RNA, 19 nt, Homo sapiens
  misc_RNA (1)...(19): siRNA sense strand
gguggaguauuugagaagu

SEQ ID NO: 925902 - RNA, 19 nt, Homo sapiens
  misc_RNA (1)...(19): siRNA sense strand
ggagcgcugugugaaagag

SEQ ID NO: 925903 - RNA, 19 nt, Homo sapiens
  misc_RNA (1)...(19): siRNA sense strand
acagaugcuuugguucaug

SEQ ID NO: 925904 - RNA, 19 nt, Homo sapiens
  misc_RNA (1)...(19): siRNA sense strand
aaaccugaggacacuuuaa

SEQ ID NO: 925905 - RNA, 19 nt, Homo sapiens
  misc_RNA (1)...(19): siRNA sense strand
gacgaauggccaaauacug

SEQ ID NO: 925906 - RNA, 19 nt, Homo sapiens
  misc_RNA (1)...(19): siRNA sense strand
ugucauaggaaaggauaaa

SEQ ID NO: 925907 - RNA, 19 nt, Homo sapiens
  misc_RNA (1)...(19): siRNA sense strand
ccagaaguucguauuagag

SEQ ID NO: 925908 - RNA, 19 nt, Homo sapiens
  misc_RNA (1)...(19): siRNA sense strand
gccagcagagaccaccaua

SEQ ID NO: 925909 - RNA, 19 nt, Homo sapiens
  misc_RNA (1)...(19): siRNA sense strand
gcacagagcucaugacaca

SEQ ID NO: 925910 - RNA, 19 nt, Homo sapiens
  misc_RNA (1)...(19): siRNA sense strand
gcagcgugguuacuucuuu

SEQ ID NO: 925911 - RNA, 19 nt, Homo sapiens
  misc_RNA (1)...(19): siRNA sense strand
gcuccgagguguacaggau

SEQ ID NO: 925912 - RNA, 19 nt, Homo sapiens
  misc_RNA (1)...(19): siRNA sense strand
caagcagcgugguuacuuc

SEQ ID NO: 925913 - RNA, 19 nt, Homo sapiens
  misc_RNA (1)...(19): siRNA sense strand
caagguggaacucgucuga

SEQ ID NO: 925914 - RNA, 19 nt, Homo sapiens
  misc_RNA (1)...(19): siRNA sense strand
cagcgugguuacuucuuuc

SEQ ID NO: 925915 - RNA, 19 nt, Homo sapiens
  misc_RNA (1)...(19): siRNA sense strand
caucaagggcugccacgau

SEQ ID NO: 925916 - RNA, 19 nt, Homo sapiens
  misc_RNA (1)...(19): siRNA sense strand
ucaagcagcgugguuacuu

SEQ ID NO: 925917 - RNA, 19 nt, Homo sapiens
  misc_RNA (1)...(19): siRNA sense strand
gaugagcacccugcaugug

SEQ ID NO: 925918 - RNA, 19 nt, Homo sapiens
  misc_RNA (1)...(19): siRNA sense strand
cacgaucaccucacacugu

SEQ ID NO: 925919 - RNA, 19 nt, Homo sapiens
  misc_RNA (1)...(19): siRNA sense strand
gacggcagcccaacaacca

SEQ ID NO: 925920 - RNA, 19 nt, Homo sapiens
  misc_RNA (1)...(19): siRNA sense strand
caucccgagugcuucaugu

SEQ ID NO: 925921 - RNA, 19 nt, Homo sapiens
  misc_RNA (1)...(19): siRNA sense strand
agccugggaucuccauaug

SEQ ID NO: 925922 - RNA, 19 nt, Homo sapiens
  misc_RNA (1)...(19): siRNA sense strand
gcacaguacuccuggcuua

SEQ ID NO: 925923 - RNA, 19 nt, Homo sapiens
  misc_RNA (1)...(19): siRNA sense strand
agucagaucuugugaauga

SEQ ID NO: 925924 - RNA, 19 nt, Homo sapiens
  misc_RNA (1)...(19): siRNA sense strand
gcaaacagcggucgagaga

SEQ ID NO: 925925 - RNA, 19 nt, Homo sapiens
  misc_RNA (1)...(19): siRNA sense strand
ccuaacagccacagaaaua

SEQ ID NO: 925926 - RNA, 19 nt, Homo sapiens
  misc_RNA (1)...(19): siRNA sense strand
gcucacagccucacuucua

SEQ ID NO: 925927 - RNA, 19 nt, Homo sapiens
  misc_RNA (1)...(19): siRNA sense strand
caacaccacccucagcaua

SEQ ID NO: 925928 - RNA, 19 nt, Homo sapiens
  misc_RNA (1)...(19): siRNA sense strand
ugagcuaaguccaguagua

SEQ ID NO: 925929 - RNA, 19 nt, Homo sapiens
  misc_RNA (1)...(19): siRNA sense strand
gauggcaaccgucaaauug

SEQ ID NO: 925930 - RNA, 19 nt, Homo sapiens
  misc_RNA (1)...(19): siRNA sense strand
ccagucaccuugaauguca

SEQ ID NO: 925931 - RNA, 19 nt, Homo sapiens
  misc_RNA (1)...(19): siRNA sense strand
caacaggacccucacucua

SEQ ID NO: 925932 - RNA, 19 nt, Homo sapiens
  misc_RNA (1)...(19): siRNA sense strand
aaacagcggucgagagaca

SEQ ID NO: 925933 - RNA, 19 nt, Homo sapiens
  misc_RNA (1)...(19): siRNA sense strand
caguagcccuggcauguuu

SEQ ID NO: 925934 - RNA, 19 nt, Homo sapiens
  misc_RNA (1)...(19): siRNA sense strand
gaucauagucacugagcua

SEQ ID NO: 925935 - RNA, 19 nt, Homo sapiens
  misc_RNA (1)...(19): siRNA sense strand
aaagucagaucuugugaau

SEQ ID NO: 925936 - RNA, 19 nt, Homo sapiens
  misc_RNA (1)...(19): siRNA sense strand
gcauaaacccugucaagag

SEQ ID NO: 925937 - RNA, 19 nt, Homo sapiens
  misc_RNA (1)...(19): siRNA sense strand
caagaugaaugaaguuacu

SEQ ID NO: 925938 - RNA, 19 nt, Homo sapiens
  misc_RNA (1)...(19): siRNA sense strand
cuaacaagaugaaugaagu

SEQ ID NO: 925939 - RNA, 19 nt, Homo sapiens
  misc_RNA (1)...(19): siRNA sense strand
gaacguaaacuauaaugcu

SEQ ID NO: 925940 - RNA, 19 nt, Homo sapiens
  misc_RNA (1)...(19): siRNA sense strand
uggcaaccgucaaauugua

SEQ ID NO: 925941 - RNA, 19 nt, Homo sapiens
  misc_RNA (1)...(19): siRNA sense strand
ggagauaaggacucuguga

SEQ ID NO: 925942 - RNA, 19 nt, Homo sapiens
  misc_RNA (1)...(19): siRNA sense strand
gaaauacagaacccaguga

SEQ ID NO: 925943 - RNA, 19 nt, Homo sapiens
  misc_RNA (1)...(19): siRNA sense strand
gagauaaggacucugugaa

SEQ ID NO: 925944 - RNA, 19 nt, Homo sapiens
  misc_RNA (1)...(19): siRNA sense strand
uguaggauaugcaauagga

SEQ ID NO: 925945 - RNA, 19 nt, Homo sapiens
  misc_RNA (1)...(19): siRNA sense strand
ccaaugacccaccuaacaa

SEQ ID NO: 925946 - RNA, 19 nt, Homo sapiens
  misc_RNA (1)...(19): siRNA sense strand
ggaggaugcugggacguau

SEQ ID NO: 925947 - RNA, 19 nt, Homo sapiens
  misc_RNA (1)...(19): siRNA sense strand
ggaccacagucaagacgau

SEQ ID NO: 925948 - RNA, 19 nt, Homo sapiens
  misc_RNA (1)...(19): siRNA sense strand
caaccuaccugugguggau

SEQ ID NO: 925949 - RNA, 19 nt, Homo sapiens
  misc_RNA (1)...(19): siRNA sense strand
ggauggcaaccgucaaauu

SEQ ID NO: 925950 - RNA, 19 nt, Homo sapiens
  misc_RNA (1)...(19): siRNA sense strand
gcaauaggaacucaacaag

SEQ ID NO: 925951 - RNA, 19 nt, Homo sapiens
  misc_RNA (1)...(19): siRNA sense strand
uaacccaccugcacaguac

SEQ ID NO: 925952 - RNA, 19 nt, Homo sapiens
  misc_RNA (1)...(19): siRNA sense strand
ggcccugguugcucugaua

SEQ ID NO: 925953 - RNA, 19 nt, Homo sapiens
  misc_RNA (1)...(19): siRNA sense strand
cuauaaugcucuaccacaa

SEQ ID NO: 925954 - RNA, 19 nt, Homo sapiens
  misc_RNA (1)...(19): siRNA sense strand
gauaugcaauaggaacuca

SEQ ID NO: 925955 - RNA, 19 nt, Homo sapiens
  misc_RNA (1)...(19): siRNA sense strand
gaacuuugaagcccagcaa

SEQ ID NO: 925956 - RNA, 19 nt, Homo sapiens
  misc_RNA (1)...(19): siRNA sense strand
cguaaacuauaaugcucua

SEQ ID NO: 925957 - RNA, 19 nt, Homo sapiens
  misc_RNA (1)...(19): siRNA sense strand
cauagucacugagcuaagu

SEQ ID NO: 925958 - RNA, 19 nt, Homo sapiens
  misc_RNA (1)...(19): siRNA sense strand
aauaggaacucaacaagcu

SEQ ID NO: 925959 - RNA, 19 nt, Homo sapiens
  misc_RNA (1)...(19): siRNA sense strand
caaaucaaagccagcaaga

SEQ ID NO: 925960 - RNA, 19 nt, Homo sapiens
  misc_RNA (1)...(19): siRNA sense strand
caacaggaccacagucaag

SEQ ID NO: 925961 - RNA, 19 nt, Homo sapiens
  misc_RNA (1)...(19): siRNA sense strand
gaaugacacaggacccuau

SEQ ID NO: 925962 - RNA, 19 nt, Homo sapiens
  misc_RNA (1)...(19): siRNA sense strand
gucauaaagucagaucuug

SEQ ID NO: 925963 - RNA, 19 nt, Homo sapiens
  misc_RNA (1)...(19): siRNA sense strand
ggcuacagcugguacaaag

SEQ ID NO: 925964 - RNA, 19 nt, Homo sapiens
  misc_RNA (1)...(19): siRNA sense strand
uaacagccacagaaauaau

SEQ ID NO: 925965 - RNA, 19 nt, Homo sapiens
  misc_RNA (1)...(19): siRNA sense strand
ugacccaccuaacaagaug

SEQ ID NO: 925966 - RNA, 19 nt, Homo sapiens
  misc_RNA (1)...(19): siRNA sense strand
auaaugcucuaccacaaga

SEQ ID NO: 925967 - RNA, 19 nt, Homo sapiens
  misc_RNA (1)...(19): siRNA sense strand
cagccucacuucuaaccuu

SEQ ID NO: 925968 - RNA, 19 nt, Homo sapiens
  misc_RNA (1)...(19): siRNA sense strand
caaauuguaggauaugcaa

SEQ ID NO: 925969 - RNA, 19 nt, Homo sapiens
  misc_RNA (1)...(19): siRNA sense strand
cugcccagcucacuacuga

SEQ ID NO: 925970 - RNA, 19 nt, Homo sapiens
  misc_RNA (1)...(19): siRNA sense strand
ccaucaugcugaacguaaa

SEQ ID NO: 925971 - RNA, 19 nt, Homo sapiens
  misc_RNA (1)...(19): siRNA sense strand
ccacaaaugacacuggaau

SEQ ID NO: 925972 - RNA, 19 nt, Homo sapiens
  misc_RNA (1)...(19): siRNA sense strand
gacccucacucuacucagu

SEQ ID NO: 925973 - RNA, 19 nt, Homo sapiens
  misc_RNA (1)...(19): siRNA sense strand
caccuaacaagaugaauga

SEQ ID NO: 925974 - RNA, 19 nt, Homo sapiens
  misc_RNA (1)...(19): siRNA sense strand
auucuacccugaacuuuga

SEQ ID NO: 925975 - RNA, 19 nt, Homo sapiens
  misc_RNA (1)...(19): siRNA sense strand
gaaucuccauccguugguu

SEQ ID NO: 925976 - RNA, 19 nt, Homo sapiens
  misc_RNA (1)...(19): siRNA sense strand
cauaaagucagaucuugug

SEQ ID NO: 925977 - RNA, 19 nt, Homo sapiens
  misc_RNA (1)...(19): siRNA sense strand
acaccacccucagcauaaa

SEQ ID NO: 925978 - RNA, 19 nt, Homo sapiens
  misc_RNA (1)...(19): siRNA sense strand
uaaguccaguaguagcaaa

SEQ ID NO: 925979 - RNA, 19 nt, Homo sapiens
  misc_RNA (1)...(19): siRNA sense strand
caccuugaaugucaccuau

SEQ ID NO: 925980 - RNA, 19 nt, Homo sapiens
  misc_RNA (1)...(19): siRNA sense strand
gcaacaggaccacagucaa

SEQ ID NO: 925981 - RNA, 19 nt, Homo sapiens
  misc_RNA (1)...(19): siRNA sense strand
gagcacaaacccucagucu

SEQ ID NO: 925982 - RNA, 19 nt, Homo sapiens
  misc_RNA (1)...(19): siRNA sense strand
cagcauaaacccugucaag

SEQ ID NO: 925983 - RNA, 19 nt, Homo sapiens
  misc_RNA (1)...(19): siRNA sense strand
aaccugaccugcuccacaa

SEQ ID NO: 925984 - RNA, 19 nt, Homo sapiens
  misc_RNA (1)...(19): siRNA sense strand
gagcuaaguccaguaguag

SEQ ID NO: 925985 - RNA, 19 nt, Homo sapiens
  misc_RNA (1)...(19): siRNA sense strand
gcaguagcccuggcauguu

SEQ ID NO: 925986 - RNA, 19 nt, Homo sapiens
  misc_RNA (1)...(19): siRNA sense strand
ugugguggauaaacaauca

SEQ ID NO: 925987 - RNA, 19 nt, Homo sapiens
  misc_RNA (1)...(19): siRNA sense strand
aaacuauaaugcucuacca

SEQ ID NO: 925988 - RNA, 19 nt, Homo sapiens
  misc_RNA (1)...(19): siRNA sense strand
gcaacaggacccucacucu

SEQ ID NO: 925989 - RNA, 19 nt, Homo sapiens
  misc_RNA (1)...(19): siRNA sense strand
ggcugcagcuguccaaugg

SEQ ID NO: 925990 - RNA, 19 nt, Homo sapiens
  misc_RNA (1)...(19): siRNA sense strand
caucccugcugauccagaa

SEQ ID NO: 925991 - RNA, 19 nt, Homo sapiens
  misc_RNA (1)...(19): siRNA sense strand
cucacagccucacuucuaa

SEQ ID NO: 925992 - RNA, 19 nt, Homo sapiens
  misc_RNA (1)...(19): siRNA sense strand
ccaccuaacaagaugaaug

SEQ ID NO: 925993 - RNA, 19 nt, Homo sapiens
  misc_RNA (1)...(19): siRNA sense strand
ugcugaacguaaacuauaa

SEQ ID NO: 925994 - RNA, 19 nt, Homo sapiens
  misc_RNA (1)...(19): siRNA sense strand
gggaggaugcugggacgua

SEQ ID NO: 925995 - RNA, 19 nt, Homo sapiens
  misc_RNA (1)...(19): siRNA sense strand
agacgaucauagucacuga

SEQ ID NO: 925996 - RNA, 19 nt, Homo sapiens
  misc_RNA (1)...(19): siRNA sense strand
acuccuggcuuaucaaugg

SEQ ID NO: 925997 - RNA, 19 nt, Homo sapiens
  misc_RNA (1)...(19): siRNA sense strand
cacaggacccuaugagugu

SEQ ID NO: 925998 - RNA, 19 nt, Homo sapiens
  misc_RNA (1)...(19): siRNA sense strand
uaaagucagaucuugugaa

SEQ ID NO: 925999 - RNA, 19 nt, Homo sapiens
  misc_RNA (1)...(19): siRNA sense strand
ugaauaauaguggauccua

SEQ ID NO: 926000 - RNA, 19 nt, Homo sapiens
  misc_RNA (1)...(19): siRNA sense strand
caguacuccuggcuuauca

SEQ ID NO: 926001 - RNA, 19 nt, Homo sapiens
  misc_RNA (1)...(19): siRNA sense strand
cuaacagccacagaaauaa

SEQ ID NO: 926002 - RNA, 19 nt, Homo sapiens
  misc_RNA (1)...(19): siRNA sense strand
cuacugaauccaugccauu

SEQ ID NO: 926003 - RNA, 19 nt, Homo sapiens
  misc_RNA (1)...(19): siRNA sense strand
uccagaacgucacccagaa

SEQ ID NO: 926004 - RNA, 19 nt, Homo sapiens
  misc_RNA (1)...(19): siRNA sense strand
agacucaggacacaaccua

SEQ ID NO: 926005 - RNA, 19 nt, Homo sapiens
  misc_RNA (1)...(19): siRNA sense strand
cagcaacccacacaaccaa

SEQ ID NO: 926006 - RNA, 19 nt, Homo sapiens
  misc_RNA (1)...(19): siRNA sense strand
ucaacccaaucaguaagaa

SEQ ID NO: 926007 - RNA, 19 nt, Homo sapiens
  misc_RNA (1)...(19): siRNA sense strand
guauuggugugaggucuuc

SEQ ID NO: 926008 - RNA, 19 nt, Homo sapiens
  misc_RNA (1)...(19): siRNA sense strand
guggauggcaaccgucaaa

SEQ ID NO: 926009 - RNA, 19 nt, Homo sapiens
  misc_RNA (1)...(19): siRNA sense strand
gcccagcucacuacugaau

SEQ ID NO: 926010 - RNA, 19 nt, Homo sapiens
  misc_RNA (1)...(19): siRNA sense strand
augcugaacguaaacuaua

SEQ ID NO: 926011 - RNA, 19 nt, Homo sapiens
  misc_RNA (1)...(19): siRNA sense strand
ccuugaaugucaccuaugg

SEQ ID NO: 926012 - RNA, 19 nt, Homo sapiens
  misc_RNA (1)...(19): siRNA sense strand
uaccugugguggauaaaca

SEQ ID NO: 926013 - RNA, 19 nt, Homo sapiens
  misc_RNA (1)...(19): siRNA sense strand
cuacacccuacaagucaua

SEQ ID NO: 926014 - RNA, 19 nt, Homo sapiens
  misc_RNA (1)...(19): siRNA sense strand
uacaagucauaaagucaga

SEQ ID NO: 926015 - RNA, 19 nt, Homo sapiens
  misc_RNA (1)...(19): siRNA sense strand
acaagaaaauggccucuca

SEQ ID NO: 926016 - RNA, 19 nt, Homo sapiens
  misc_RNA (1)...(19): siRNA sense strand
ccaaucaguaagaaccaaa

SEQ ID NO: 926017 - RNA, 19 nt, Homo sapiens
  misc_RNA (1)...(19): siRNA sense strand
ugaccugcuccacaaauga

SEQ ID NO: 926018 - RNA, 19 nt, Homo sapiens
  misc_RNA (1)...(19): siRNA sense strand
caggagauaaggacucugu

SEQ ID NO: 926019 - RNA, 19 nt, Homo sapiens
  misc_RNA (1)...(19): siRNA sense strand
cagcaagaccacagucaca

SEQ ID NO: 926020 - RNA, 19 nt, Homo sapiens
  misc_RNA (1)...(19): siRNA sense strand
auaccugccacgccaauaa

SEQ ID NO: 926021 - RNA, 19 nt, Homo sapiens
  misc_RNA (1)...(19): siRNA sense strand
cuaacccaccugcacagua

SEQ ID NO: 926022 - RNA, 19 nt, Homo sapiens
  misc_RNA (1)...(19): siRNA sense strand
gaaugaauccuucuagaga

SEQ ID NO: 926023 - RNA, 19 nt, Homo sapiens
  misc_RNA (1)...(19): siRNA sense strand
gggaaaagcuucacucuga

SEQ ID NO: 926024 - RNA, 19 nt, Homo sapiens
  misc_RNA (1)...(19): siRNA sense strand
cagcauauuugagucauuu

SEQ ID NO: 926025 - RNA, 19 nt, Homo sapiens
  misc_RNA (1)...(19): siRNA sense strand
gaccaucacugucuucaca

SEQ ID NO: 926026 - RNA, 19 nt, Homo sapiens
  misc_RNA (1)...(19): siRNA sense strand
ggcagaaacuagaugauca

SEQ ID NO: 926027 - RNA, 19 nt, Homo sapiens
  misc_RNA (1)...(19): siRNA sense strand
gagaaugcauacuuggaau

SEQ ID NO: 926028 - RNA, 19 nt, Homo sapiens
  misc_RNA (1)...(19): siRNA sense strand
gaaccacuccacugccuuu

SEQ ID NO: 926029 - RNA, 19 nt, Homo sapiens
  misc_RNA (1)...(19): siRNA sense strand
gaagacaucggcagaaacu

SEQ ID NO: 926030 - RNA, 19 nt, Homo sapiens
  misc_RNA (1)...(19): siRNA sense strand
gaaugcauacuuggaauga

SEQ ID NO: 926031 - RNA, 19 nt, Homo sapiens
  misc_RNA (1)...(19): siRNA sense strand
ggaaugaauccuucuagag

SEQ ID NO: 926032 - RNA, 19 nt, Homo sapiens
  misc_RNA (1)...(19): siRNA sense strand
caugagagaaugcauacuu

SEQ ID NO: 926033 - RNA, 19 nt, Homo sapiens
  misc_RNA (1)...(19): siRNA sense strand
ucgaagacaucggcagaaa

SEQ ID NO: 926034 - RNA, 19 nt, Homo sapiens
  misc_RNA (1)...(19): siRNA sense strand
ugugauggcuggcaaugau

SEQ ID NO: 926035 - RNA, 19 nt, Homo sapiens
  misc_RNA (1)...(19): siRNA sense strand
gagagaaugcauacuugga

SEQ ID NO: 926036 - RNA, 19 nt, Homo sapiens
  misc_RNA (1)...(19): siRNA sense strand
uggaaugaauccuucuaga

SEQ ID NO: 926037 - RNA, 19 nt, Homo sapiens
  misc_RNA (1)...(19): siRNA sense strand
cggcugagcugagaaaugc

SEQ ID NO: 926038 - RNA, 19 nt, Homo sapiens
  misc_RNA (1)...(19): siRNA sense strand
gaacuuuccagucgacucu

SEQ ID NO: 926039 - RNA, 19 nt, Homo sapiens
  misc_RNA (1)...(19): siRNA sense strand
ccaucacugucuucacaaa

SEQ ID NO: 926040 - RNA, 19 nt, Homo sapiens
  misc_RNA (1)...(19): siRNA sense strand
ucagacagcauauuugagu

SEQ ID NO: 926041 - RNA, 19 nt, Homo sapiens
  misc_RNA (1)...(19): siRNA sense strand
cuacucggcugagcugaga

SEQ ID NO: 926042 - RNA, 19 nt, Homo sapiens
  misc_RNA (1)...(19): siRNA sense strand
ccacuccacugccuuuaac

SEQ ID NO: 926043 - RNA, 19 nt, Homo sapiens
  misc_RNA (1)...(19): siRNA sense strand
ucacaaacccaccgcaagu

SEQ ID NO: 926044 - RNA, 19 nt, Homo sapiens
  misc_RNA (1)...(19): siRNA sense strand
ccacagagccaucaaaauc

SEQ ID NO: 926045 - RNA, 19 nt, Homo sapiens
  misc_RNA (1)...(19): siRNA sense strand
agagucagaugcaggauac

SEQ ID NO: 926046 - RNA, 19 nt, Homo sapiens
  misc_RNA (1)...(19): siRNA sense strand
gcacuggcgcugcaacaag

SEQ ID NO: 926047 - RNA, 19 nt, Homo sapiens
  misc_RNA (1)...(19): siRNA sense strand
cacuggcgcugcaacaaga

SEQ ID NO: 926048 - RNA, 19 nt, Homo sapiens
  misc_RNA (1)...(19): siRNA sense strand
cuucagacagcauauuuga

SEQ ID NO: 926049 - RNA, 19 nt, Homo sapiens
  misc_RNA (1)...(19): siRNA sense strand
caccgcaagucgccaccua

SEQ ID NO: 926050 - RNA, 19 nt, Homo sapiens
  misc_RNA (1)...(19): siRNA sense strand
agagaaugcauacuuggaa

SEQ ID NO: 926051 - RNA, 19 nt, Homo sapiens
  misc_RNA (1)...(19): siRNA sense strand
gcugagcugagaaaugcua

SEQ ID NO: 926052 - RNA, 19 nt, Homo sapiens
  misc_RNA (1)...(19): siRNA sense strand
cagagucagaugcaggaua

SEQ ID NO: 926053 - RNA, 19 nt, Homo sapiens
  misc_RNA (1)...(19): siRNA sense strand
augcauacuuggaaugaau

SEQ ID NO: 926054 - RNA, 19 nt, Homo sapiens
  misc_RNA (1)...(19): siRNA sense strand
ccuccuaccaccuguacua

SEQ ID NO: 926055 - RNA, 19 nt, Homo sapiens
  misc_RNA (1)...(19): siRNA sense strand
cacagugcuucaugagaga

SEQ ID NO: 926056 - RNA, 19 nt, Homo sapiens
  misc_RNA (1)...(19): siRNA sense strand
agacaucggcagaaacuag

SEQ ID NO: 926057 - RNA, 19 nt, Homo sapiens
  misc_RNA (1)...(19): siRNA sense strand
uugagucauuuccuucgua

SEQ ID NO: 926058 - RNA, 19 nt, Homo sapiens
  misc_RNA (1)...(19): siRNA sense strand
ggcuucagacagcauauuu

SEQ ID NO: 926059 - RNA, 19 nt, Homo sapiens
  misc_RNA (1)...(19): siRNA sense strand
uacccacagugcuucauga

SEQ ID NO: 926060 - RNA, 19 nt, Homo sapiens
  misc_RNA (1)...(19): siRNA sense strand
gacaucggcagaaacuaga

SEQ ID NO: 926061 - RNA, 19 nt, Homo sapiens
  misc_RNA (1)...(19): siRNA sense strand
augagagaaugcauacuug

SEQ ID NO: 926062 - RNA, 19 nt, Homo sapiens
  misc_RNA (1)...(19): siRNA sense strand
gcugagcccaggcaagaug

SEQ ID NO: 926063 - RNA, 19 nt, Homo sapiens
  misc_RNA (1)...(19): siRNA sense strand
gguccuacgaucaguccua

SEQ ID NO: 926064 - RNA, 19 nt, Homo sapiens
  misc_RNA (1)...(19): siRNA sense strand
acgaucaguccuaccaaua

SEQ ID NO: 926065 - RNA, 19 nt, Homo sapiens
  misc_RNA (1)...(19): siRNA sense strand
ccgcagccaugaagaacca

SEQ ID NO: 926066 - RNA, 19 nt, Homo sapiens
  misc_RNA (1)...(19): siRNA sense strand
gaucaguccuaccaauacc

SEQ ID NO: 926067 - RNA, 19 nt, Homo sapiens
  misc_RNA (1)...(19): siRNA sense strand
cuucaugagagaaugcaua

SEQ ID NO: 926068 - RNA, 19 nt, Homo sapiens
  misc_RNA (1)...(19): siRNA sense strand
gcagaaacuagaugaucag

SEQ ID NO: 926069 - RNA, 19 nt, Homo sapiens
  misc_RNA (1)...(19): siRNA sense strand
aacccucucugcagaacuu

SEQ ID NO: 926070 - RNA, 19 nt, Homo sapiens
  misc_RNA (1)...(19): siRNA sense strand
cagguugcaagauuuaaug

SEQ ID NO: 926071 - RNA, 19 nt, Homo sapiens
  misc_RNA (1)...(19): siRNA sense strand
uacgaucaguccuaccaau

SEQ ID NO: 926072 - RNA, 19 nt, Homo sapiens
  misc_RNA (1)...(19): siRNA sense strand
cuaccgcagccaugaagaa

SEQ ID NO: 926073 - RNA, 19 nt, Homo sapiens
  misc_RNA (1)...(19): siRNA sense strand
gcacccagcaacgcccauu

SEQ ID NO: 926074 - RNA, 19 nt, Homo sapiens
  misc_RNA (1)...(19): siRNA sense strand
ccaauaccugggauccauu

SEQ ID NO: 926075 - RNA, 19 nt, Homo sapiens
  misc_RNA (1)...(19): siRNA sense strand
cccgggagcuuguccuuuu

SEQ ID NO: 926076 - RNA, 19 nt, Homo sapiens
  misc_RNA (1)...(19): siRNA sense strand
guacccacagugcuucaug

SEQ ID NO: 926077 - RNA, 19 nt, Homo sapiens
  misc_RNA (1)...(19): siRNA sense strand
gaacacaguugcauugguu

SEQ ID NO: 926078 - RNA, 19 nt, Homo sapiens
  misc_RNA (1)...(19): siRNA sense strand
gaaaguccauggugaagaa

SEQ ID NO: 926079 - RNA, 19 nt, Homo sapiens
  misc_RNA (1)...(19): siRNA sense strand
caaagaagaucugccagua

SEQ ID NO: 926080 - RNA, 19 nt, Homo sapiens
  misc_RNA (1)...(19): siRNA sense strand
gcaaggugguuuccuguaa

SEQ ID NO: 926081 - RNA, 19 nt, Homo sapiens
  misc_RNA (1)...(19): siRNA sense strand
ggagagguaucgagaacua

SEQ ID NO: 926082 - RNA, 19 nt, Homo sapiens
  misc_RNA (1)...(19): siRNA sense strand
gcaagcaggucuuucaguu

SEQ ID NO: 926083 - RNA, 19 nt, Homo sapiens
  misc_RNA (1)...(19): siRNA sense strand
gagaugaagugaaagaaga

SEQ ID NO: 926084 - RNA, 19 nt, Homo sapiens
  misc_RNA (1)...(19): siRNA sense strand
agaaacaguucccaaauga

SEQ ID NO: 926085 - RNA, 19 nt, Homo sapiens
  misc_RNA (1)...(19): siRNA sense strand
gacaugaucuucagugcaa

SEQ ID NO: 926086 - RNA, 19 nt, Homo sapiens
  misc_RNA (1)...(19): siRNA sense strand
ggaaaggucuaugacaaau

SEQ ID NO: 926087 - RNA, 19 nt, Homo sapiens
  misc_RNA (1)...(19): siRNA sense strand
aaacccagauccucaauga

SEQ ID NO: 926088 - RNA, 19 nt, Homo sapiens
  misc_RNA (1)...(19): siRNA sense strand
caugggagaugaagugaaa

SEQ ID NO: 926089 - RNA, 19 nt, Homo sapiens
  misc_RNA (1)...(19): siRNA sense strand
gcggaaaggucuaugacaa

SEQ ID NO: 926090 - RNA, 19 nt, Homo sapiens
  misc_RNA (1)...(19): siRNA sense strand
caauaacuaugaugggaaa

SEQ ID NO: 926091 - RNA, 19 nt, Homo sapiens
  misc_RNA (1)...(19): siRNA sense strand
gcagaagaacgaauucauu

SEQ ID NO: 926092 - RNA, 19 nt, Homo sapiens
  misc_RNA (1)...(19): siRNA sense strand
gcaccuacuucaacaacuu

SEQ ID NO: 926093 - RNA, 19 nt, Homo sapiens
  misc_RNA (1)...(19): siRNA sense strand
ccaaauguaucacuuacug

SEQ ID NO: 926094 - RNA, 19 nt, Homo sapiens
  misc_RNA (1)...(19): siRNA sense strand
gaaagcgacaugcuauuga

SEQ ID NO: 926095 - RNA, 19 nt, Homo sapiens
  misc_RNA (1)...(19): siRNA sense strand
gaaaggucuaugacaaaua

SEQ ID NO: 926096 - RNA, 19 nt, Homo sapiens
  misc_RNA (1)...(19): siRNA sense strand
gauccguucugauuaguga

SEQ ID NO: 926097 - RNA, 19 nt, Homo sapiens
  misc_RNA (1)...(19): siRNA sense strand
uuaaacggcuucaggcaaa

SEQ ID NO: 926098 - RNA, 19 nt, Homo sapiens
  misc_RNA (1)...(19): siRNA sense strand
acaaauacauguccagcuu

SEQ ID NO: 926099 - RNA, 19 nt, Homo sapiens
  misc_RNA (1)...(19): siRNA sense strand
cagaagaacgaauucauuu

SEQ ID NO: 926100 - RNA, 19 nt, Homo sapiens
  misc_RNA (1)...(19): siRNA sense strand
caaggugguuuccuguaaa

SEQ ID NO: 926101 - RNA, 19 nt, Homo sapiens
  misc_RNA (1)...(19): siRNA sense strand
gaaagaagaagaugagacu

SEQ ID NO: 926102 - RNA, 19 nt, Homo sapiens
  misc_RNA (1)...(19): siRNA sense strand
caaaugacaugaucuucag

SEQ ID NO: 926103 - RNA, 19 nt, Homo sapiens
  misc_RNA (1)...(19): siRNA sense strand
caucaugacucagaauuuc

SEQ ID NO: 926104 - RNA, 19 nt, Homo sapiens
  misc_RNA (1)...(19): siRNA sense strand
gcagucaaagaaucacuua

SEQ ID NO: 926105 - RNA, 19 nt, Homo sapiens
  misc_RNA (1)...(19): siRNA sense strand
uuaaugaggucacugaaca

SEQ ID NO: 926106 - RNA, 19 nt, Homo sapiens
  misc_RNA (1)...(19): siRNA sense strand
ccaaaguggucauggugaa

SEQ ID NO: 926107 - RNA, 19 nt, Homo sapiens
  misc_RNA (1)...(19): siRNA sense strand
caacuguuaugccaaagug

SEQ ID NO: 926108 - RNA, 19 nt, Homo sapiens
  misc_RNA (1)...(19): siRNA sense strand
agugaaaucugaauacaug

SEQ ID NO: 926109 - RNA, 19 nt, Homo sapiens
  misc_RNA (1)...(19): siRNA sense strand
aagaaucacuuauccugaa

SEQ ID NO: 926110 - RNA, 19 nt, Homo sapiens
  misc_RNA (1)...(19): siRNA sense strand
aagcaggucuuucaguuug

SEQ ID NO: 926111 - RNA, 19 nt, Homo sapiens
  misc_RNA (1)...(19): siRNA sense strand
gaaagcaggaugacagcaa

SEQ ID NO: 926112 - RNA, 19 nt, Homo sapiens
  misc_RNA (1)...(19): siRNA sense strand
ccaagaaacaguucccaaa

SEQ ID NO: 926113 - RNA, 19 nt, Homo sapiens
  misc_RNA (1)...(19): siRNA sense strand
gaaaagaaagcacagauug

SEQ ID NO: 926114 - RNA, 19 nt, Homo sapiens
  misc_RNA (1)...(19): siRNA sense strand
aagaaacaguucccaaaug

SEQ ID NO: 926115 - RNA, 19 nt, Homo sapiens
  misc_RNA (1)...(19): siRNA sense strand
ggaaggagcaaaggaguau

SEQ ID NO: 926116 - RNA, 19 nt, Homo sapiens
  misc_RNA (1)...(19): siRNA sense strand
gauccucaaugaagaaugg

SEQ ID NO: 926117 - RNA, 19 nt, Homo sapiens
  misc_RNA (1)...(19): siRNA sense strand
uguaagacccagugcaaua

SEQ ID NO: 926118 - RNA, 19 nt, Homo sapiens
  misc_RNA (1)...(19): siRNA sense strand
agaauggugucccagauga

SEQ ID NO: 926119 - RNA, 19 nt, Homo sapiens
  misc_RNA (1)...(19): siRNA sense strand
gaagaucugccaguaacaa

SEQ ID NO: 926120 - RNA, 19 nt, Homo sapiens
  misc_RNA (1)...(19): siRNA sense strand
ggagaaggcaccacauagu

SEQ ID NO: 926121 - RNA, 19 nt, Homo sapiens
  misc_RNA (1)...(19): siRNA sense strand
caagaaacaguucccaaau

SEQ ID NO: 926122 - RNA, 19 nt, Homo sapiens
  misc_RNA (1)...(19): siRNA sense strand
aaagcgacaugcuauugaa

SEQ ID NO: 926123 - RNA, 19 nt, Homo sapiens
  misc_RNA (1)...(19): siRNA sense strand
ggcacagacugcuuccuuu

SEQ ID NO: 926124 - RNA, 19 nt, Homo sapiens
  misc_RNA (1)...(19): siRNA sense strand
aaaggucuaugacaaauac

SEQ ID NO: 926125 - RNA, 19 nt, Homo sapiens
  misc_RNA (1)...(19): siRNA sense strand
ucuucaaccucaauaauga

SEQ ID NO: 926126 - RNA, 19 nt, Homo sapiens
  misc_RNA (1)...(19): siRNA sense strand
aaagcaggaugacagcaaa

SEQ ID NO: 926127 - RNA, 19 nt, Homo sapiens
  misc_RNA (1)...(19): siRNA sense strand
gcaucaugacucagaauuu

SEQ ID NO: 926128 - RNA, 19 nt, Homo sapiens
  misc_RNA (1)...(19): siRNA sense strand
gcacacugcaggaagauuc

SEQ ID NO: 926129 - RNA, 19 nt, Homo sapiens
  misc_RNA (1)...(19): siRNA sense strand
uaaauacgacugcuuccuu

SEQ ID NO: 926130 - RNA, 19 nt, Homo sapiens
  misc_RNA (1)...(19): siRNA sense strand
ggauuugcaagccaacaua

SEQ ID NO: 926131 - RNA, 19 nt, Homo sapiens
  misc_RNA (1)...(19): siRNA sense strand
gaaggagagguaucgagaa

SEQ ID NO: 926132 - RNA, 19 nt, Homo sapiens
  misc_RNA (1)...(19): siRNA sense strand
ccaaaugacaugaucuuca

SEQ ID NO: 926133 - RNA, 19 nt, Homo sapiens
  misc_RNA (1)...(19): siRNA sense strand
aagaagaagaugagacuuu

SEQ ID NO: 926134 - RNA, 19 nt, Homo sapiens
  misc_RNA (1)...(19): siRNA sense strand
ccaacagaacuuuauggua

SEQ ID NO: 926135 - RNA, 19 nt, Homo sapiens
  misc_RNA (1)...(19): siRNA sense strand
aagcugaugcucucaagua

SEQ ID NO: 926136 - RNA, 19 nt, Homo sapiens
  misc_RNA (1)...(19): siRNA sense strand
agauaacucuuccacacaa

SEQ ID NO: 926137 - RNA, 19 nt, Homo sapiens
  misc_RNA (1)...(19): siRNA sense strand
gaucugccaguaacaagaa

SEQ ID NO: 926138 - RNA, 19 nt, Homo sapiens
  misc_RNA (1)...(19): siRNA sense strand
gaagaugagacuuuuauug

SEQ ID NO: 926139 - RNA, 19 nt, Homo sapiens
  misc_RNA (1)...(19): siRNA sense strand
caagcaggucuuucaguuu

SEQ ID NO: 926140 - RNA, 19 nt, Homo sapiens
  misc_RNA (1)...(19): siRNA sense strand
gagaaagcgacaugcuauu

SEQ ID NO: 926141 - RNA, 19 nt, Homo sapiens
  misc_RNA (1)...(19): siRNA sense strand
aaagaagaucugccaguaa

SEQ ID NO: 926142 - RNA, 19 nt, Homo sapiens
  misc_RNA (1)...(19): siRNA sense strand
gagcugaucaauaacuaug

SEQ ID NO: 926143 - RNA, 19 nt, Homo sapiens
  misc_RNA (1)...(19): siRNA sense strand
uguccaaccuguucaguca

SEQ ID NO: 926144 - RNA, 19 nt, Homo sapiens
  misc_RNA (1)...(19): siRNA sense strand
ggagaccgacguccuuuag

SEQ ID NO: 926145 - RNA, 19 nt, Homo sapiens
  misc_RNA (1)...(19): siRNA sense strand
aagaagaucugccaguaac

SEQ ID NO: 926146 - RNA, 19 nt, Homo sapiens
  misc_RNA (1)...(19): siRNA sense strand
gagaaggcaccacauaguc

SEQ ID NO: 926147 - RNA, 19 nt, Homo sapiens
  misc_RNA (1)...(19): siRNA sense strand
caacccagacugucagaau

SEQ ID NO: 926148 - RNA, 19 nt, Homo sapiens
  misc_RNA (1)...(19): siRNA sense strand
ccucggagccuguggaaug

SEQ ID NO: 926149 - RNA, 19 nt, Homo sapiens
  misc_RNA (1)...(19): siRNA sense strand
uaacuaugaugggaaaguc

SEQ ID NO: 926150 - RNA, 19 nt, Homo sapiens
  misc_RNA (1)...(19): siRNA sense strand
gcugucagacucccacaaa

SEQ ID NO: 926151 - RNA, 19 nt, Homo sapiens
  misc_RNA (1)...(19): siRNA sense strand
gagaauggugucccagaug

SEQ ID NO: 926152 - RNA, 19 nt, Homo sapiens
  misc_RNA (1)...(19): siRNA sense strand
gcaggaugacagcaaagaa

SEQ ID NO: 926153 - RNA, 19 nt, Homo sapiens
  misc_RNA (1)...(19): siRNA sense strand
gcaaauaugggugcaaagg

SEQ ID NO: 926154 - RNA, 19 nt, Homo sapiens
  misc_RNA (1)...(19): siRNA sense strand
caacaucgauggccccaau

SEQ ID NO: 926155 - RNA, 19 nt, Homo sapiens
  misc_RNA (1)...(19): siRNA sense strand
ggagaugaagugaaagaag

SEQ ID NO: 926156 - RNA, 19 nt, Homo sapiens
  misc_RNA (1)...(19): siRNA sense strand
cggaaaggucuaugacaaa

SEQ ID NO: 926157 - RNA, 19 nt, Homo sapiens
  misc_RNA (1)...(19): siRNA sense strand
cuaaagaaggagacaguga

SEQ ID NO: 926158 - RNA, 19 nt, Homo sapiens
  misc_RNA (1)...(19): siRNA sense strand
aaacaguucccaaaugaca

SEQ ID NO: 926159 - RNA, 19 nt, Homo sapiens
  misc_RNA (1)...(19): siRNA sense strand
ccaguaacaagaaagagaa

SEQ ID NO: 926160 - RNA, 19 nt, Homo sapiens
  misc_RNA (1)...(19): siRNA sense strand
gcacaaugacaccucagau

SEQ ID NO: 926161 - RNA, 19 nt, Homo sapiens
  misc_RNA (1)...(19): siRNA sense strand
ggaaaguccauggugaaga

SEQ ID NO: 926162 - RNA, 19 nt, Homo sapiens
  misc_RNA (1)...(19): siRNA sense strand
gaacuuuaugguagaagau

SEQ ID NO: 926163 - RNA, 19 nt, Homo sapiens
  misc_RNA (1)...(19): siRNA sense strand
gggagaccgacguccuuua

SEQ ID NO: 926164 - RNA, 19 nt, Homo sapiens
  misc_RNA (1)...(19): siRNA sense strand
gcuguaagacccagugcaa

SEQ ID NO: 926165 - RNA, 19 nt, Homo sapiens
  misc_RNA (1)...(19): siRNA sense strand
gauugaaccagaaccaugu

SEQ ID NO: 926166 - RNA, 19 nt, Homo sapiens
  misc_RNA (1)...(19): siRNA sense strand
ugagaauggugucccagau

SEQ ID NO: 926167 - RNA, 19 nt, Homo sapiens
  misc_RNA (1)...(19): siRNA sense strand
agagaaagcgacaugcuau

SEQ ID NO: 926168 - RNA, 19 nt, Homo sapiens
  misc_RNA (1)...(19): siRNA sense strand
guuggucgaugcccugaau

SEQ ID NO: 926169 - RNA, 19 nt, Homo sapiens
  misc_RNA (1)...(19): siRNA sense strand
gaagugaaagaagaagaug

SEQ ID NO: 926170 - RNA, 19 nt, Homo sapiens
  misc_RNA (1)...(19): siRNA sense strand
gaagaagaugagacuuuua

SEQ ID NO: 926171 - RNA, 19 nt, Homo sapiens
  misc_RNA (1)...(19): siRNA sense strand
agaaagagaaagcgacaug

SEQ ID NO: 926172 - RNA, 19 nt, Homo sapiens
  misc_RNA (1)...(19): siRNA sense strand
ugaaucaguacucagauga

SEQ ID NO: 926173 - RNA, 19 nt, Homo sapiens
  misc_RNA (1)...(19): siRNA sense strand
cuacaugggagaugaagug

SEQ ID NO: 926174 - RNA, 19 nt, Homo sapiens
  misc_RNA (1)...(19): siRNA sense strand
aaugacaccucagauggaa

SEQ ID NO: 926175 - RNA, 19 nt, Homo sapiens
  misc_RNA (1)...(19): siRNA sense strand
ucccaacuguuaugccaaa

SEQ ID NO: 926176 - RNA, 19 nt, Homo sapiens
  misc_RNA (1)...(19): siRNA sense strand
gagcucuucuuugauuaca

SEQ ID NO: 926177 - RNA, 19 nt, Homo sapiens
  misc_RNA (1)...(19): siRNA sense strand
gggaaguacucauuaauaa

SEQ ID NO: 926178 - RNA, 19 nt, Homo sapiens
  misc_RNA (1)...(19): siRNA sense strand
gaacgggaaguacucauua

SEQ ID NO: 926179 - RNA, 19 nt, Homo sapiens
  misc_RNA (1)...(19): siRNA sense strand
agccaaagcugaagauuaa

SEQ ID NO: 926180 - RNA, 19 nt, Homo sapiens
  misc_RNA (1)...(19): siRNA sense strand
caagagaccuggauauggu

SEQ ID NO: 926181 - RNA, 19 nt, Homo sapiens
  misc_RNA (1)...(19): siRNA sense strand
gcaugauucuucuuaguga

SEQ ID NO: 926182 - RNA, 19 nt, Homo sapiens
  misc_RNA (1)...(19): siRNA sense strand
gaaguggcuuguuaugguu

SEQ ID NO: 926183 - RNA, 19 nt, Homo sapiens
  misc_RNA (1)...(19): siRNA sense strand
gguggaagauguagugaug

SEQ ID NO: 926184 - RNA, 19 nt, Homo sapiens
  misc_RNA (1)...(19): siRNA sense strand
gagcagguuugaauuguuc

SEQ ID NO: 926185 - RNA, 19 nt, Homo sapiens
  misc_RNA (1)...(19): siRNA sense strand
ggagaggcuugaaagagaa

SEQ ID NO: 926186 - RNA, 19 nt, Homo sapiens
  misc_RNA (1)...(19): siRNA sense strand
uugcugagguguuagaaua

SEQ ID NO: 926187 - RNA, 19 nt, Homo sapiens
  misc_RNA (1)...(19): siRNA sense strand
auauugaaguggcuuguua

SEQ ID NO: 926188 - RNA, 19 nt, Homo sapiens
  misc_RNA (1)...(19): siRNA sense strand
ggauggagaugaugaugca

SEQ ID NO: 926189 - RNA, 19 nt, Homo sapiens
  misc_RNA (1)...(19): siRNA sense strand
ucaacaaacucauccgaau

SEQ ID NO: 926190 - RNA, 19 nt, Homo sapiens
  misc_RNA (1)...(19): siRNA sense strand
aaacaugcccauuaagauu

SEQ ID NO: 926191 - RNA, 19 nt, Homo sapiens
  misc_RNA (1)...(19): siRNA sense strand
caacaaacucauccgaauu

SEQ ID NO: 926192 - RNA, 19 nt, Homo sapiens
  misc_RNA (1)...(19): siRNA sense strand
gcaaucaaaugugaagaca

SEQ ID NO: 926193 - RNA, 19 nt, Homo sapiens
  misc_RNA (1)...(19): siRNA sense strand
ugaaguggcuuguuauggu

SEQ ID NO: 926194 - RNA, 19 nt, Homo sapiens
  misc_RNA (1)...(19): siRNA sense strand
cgaaguggauggagaugau

SEQ ID NO: 926195 - RNA, 19 nt, Homo sapiens
  misc_RNA (1)...(19): siRNA sense strand
caacauugaaggcaugauu

SEQ ID NO: 926196 - RNA, 19 nt, Homo sapiens
  misc_RNA (1)...(19): siRNA sense strand
cagaaaacaugcccauuaa

SEQ ID NO: 926197 - RNA, 19 nt, Homo sapiens
  misc_RNA (1)...(19): siRNA sense strand
ucauguugcugagguguua

SEQ ID NO: 926198 - RNA, 19 nt, Homo sapiens
  misc_RNA (1)...(19): siRNA sense strand
uggagaggcuugaaagaga

SEQ ID NO: 926199 - RNA, 19 nt, Homo sapiens
  misc_RNA (1)...(19): siRNA sense strand
uagaauacaccaaggauga

SEQ ID NO: 926200 - RNA, 19 nt, Homo sapiens
  misc_RNA (1)...(19): siRNA sense strand
ggaauacaacaacauugaa

SEQ ID NO: 926201 - RNA, 19 nt, Homo sapiens
  misc_RNA (1)...(19): siRNA sense strand
ccaaaguggucacagauac

SEQ ID NO: 926202 - RNA, 19 nt, Homo sapiens
  misc_RNA (1)...(19): siRNA sense strand
gaaaacaugcccauuaaga

SEQ ID NO: 926203 - RNA, 19 nt, Homo sapiens
  misc_RNA (1)...(19): siRNA sense strand
gaaggcguauccguucuau

SEQ ID NO: 926204 - RNA, 19 nt, Homo sapiens
  misc_RNA (1)...(19): siRNA sense strand
ucauuaggguggacaaaga

SEQ ID NO: 926205 - RNA, 19 nt, Homo sapiens
  misc_RNA (1)...(19): siRNA sense strand
uaagagcagguuugaauug

SEQ ID NO: 926206 - RNA, 19 nt, Homo sapiens
  misc_RNA (1)...(19): siRNA sense strand
caaaugugaagacaaauuc

SEQ ID NO: 926207 - RNA, 19 nt, Homo sapiens
  misc_RNA (1)...(19): siRNA sense strand
cgggaaguacucauuaaua

SEQ ID NO: 926208 - RNA, 19 nt, Homo sapiens
  misc_RNA (1)...(19): siRNA sense strand
aggaagcaaucaaauguga

SEQ ID NO: 926209 - RNA, 19 nt, Homo sapiens
  misc_RNA (1)...(19): siRNA sense strand
gagaugaugaugcagaaga

SEQ ID NO: 926210 - RNA, 19 nt, Homo sapiens
  misc_RNA (1)...(19): siRNA sense strand
ccuaagagcagguuugaau

SEQ ID NO: 926211 - RNA, 19 nt, Homo sapiens
  misc_RNA (1)...(19): siRNA sense strand
guacaagagaccuggauau

SEQ ID NO: 926212 - RNA, 19 nt, Homo sapiens
  misc_RNA (1)...(19): siRNA sense strand
ggaaugagugugugguugu

SEQ ID NO: 926213 - RNA, 19 nt, Homo sapiens
  misc_RNA (1)...(19): siRNA sense strand
aagccaaagcugaagauua

SEQ ID NO: 926214 - RNA, 19 nt, Homo sapiens
  misc_RNA (1)...(19): siRNA sense strand
ggucuuugaugacaaguac

SEQ ID NO: 926215 - RNA, 19 nt, Homo sapiens
  misc_RNA (1)...(19): siRNA sense strand
ggucacagauacagaugag

SEQ ID NO: 926216 - RNA, 19 nt, Homo sapiens
  misc_RNA (1)...(19): siRNA sense strand
gaauacaacaacauugaag

SEQ ID NO: 926217 - RNA, 19 nt, Homo sapiens
  misc_RNA (1)...(19): siRNA sense strand
gaagcaaucaaaugugaag

SEQ ID NO: 926218 - RNA, 19 nt, Homo sapiens
  misc_RNA (1)...(19): siRNA sense strand
cuauggcuguuaucaaaga

SEQ ID NO: 926219 - RNA, 19 nt, Homo sapiens
  misc_RNA (1)...(19): siRNA sense strand
aacaugcccauuaagauua

SEQ ID NO: 926220 - RNA, 19 nt, Homo sapiens
  misc_RNA (1)...(19): siRNA sense strand
ucaaauggagcccaaagug

SEQ ID NO: 926221 - RNA, 19 nt, Homo sapiens
  misc_RNA (1)...(19): siRNA sense strand
gucaagcuauggcuguuau

SEQ ID NO: 926222 - RNA, 19 nt, Homo sapiens
  misc_RNA (1)...(19): siRNA sense strand
cgaauuggcaggaaugagu

SEQ ID NO: 926223 - RNA, 19 nt, Homo sapiens
  misc_RNA (1)...(19): siRNA sense strand
uguguucaauguucaaaug

SEQ ID NO: 926224 - RNA, 19 nt, Homo sapiens
  misc_RNA (1)...(19): siRNA sense strand
aagagaagauugaggaaaa

SEQ ID NO: 926225 - RNA, 19 nt, Homo sapiens
  misc_RNA (1)...(19): siRNA sense strand
agcuauggcuguuaucaaa

SEQ ID NO: 926226 - RNA, 19 nt, Homo sapiens
  misc_RNA (1)...(19): siRNA sense strand
gcuggaauacaacaacauu

SEQ ID NO: 926227 - RNA, 19 nt, Homo sapiens
  misc_RNA (1)...(19): siRNA sense strand
guagugauggugaauguca

SEQ ID NO: 926228 - RNA, 19 nt, Homo sapiens
  misc_RNA (1)...(19): siRNA sense strand
cuuagugaauuauccagaa

SEQ ID NO: 926229 - RNA, 19 nt, Homo sapiens
  misc_RNA (1)...(19): siRNA sense strand
uggaauacaacaacauuga

SEQ ID NO: 926230 - RNA, 19 nt, Homo sapiens
  misc_RNA (1)...(19): siRNA sense strand
aagaguuucuccagaggaa

SEQ ID NO: 926231 - RNA, 19 nt, Homo sapiens
  misc_RNA (1)...(19): siRNA sense strand
acagaaaacaugcccauua

SEQ ID NO: 926232 - RNA, 19 nt, Homo sapiens
  misc_RNA (1)...(19): siRNA sense strand
gaagaugaacgggaaguac

SEQ ID NO: 926233 - RNA, 19 nt, Homo sapiens
  misc_RNA (1)...(19): siRNA sense strand
ggacugccugggucuuuga

SEQ ID NO: 926234 - RNA, 19 nt, Homo sapiens
  misc_RNA (1)...(19): siRNA sense strand
agaggaagcaaucaaaugu

SEQ ID NO: 926235 - RNA, 19 nt, Homo sapiens
  misc_RNA (1)...(19): siRNA sense strand
cagaggaagcaaucaaaug

SEQ ID NO: 926236 - RNA, 19 nt, Homo sapiens
  misc_RNA (1)...(19): siRNA sense strand
agaugaugaugcagaagaa

SEQ ID NO: 926237 - RNA, 19 nt, Homo sapiens
  misc_RNA (1)...(19): siRNA sense strand
uauccguucuaucaacaaa

SEQ ID NO: 926238 - RNA, 19 nt, Homo sapiens
  misc_RNA (1)...(19): siRNA sense strand
caaagagaagauugaggaa

SEQ ID NO: 926239 - RNA, 19 nt, Homo sapiens
  misc_RNA (1)...(19): siRNA sense strand
aacgggaaguacucauuaa

SEQ ID NO: 926240 - RNA, 19 nt, Homo sapiens
  misc_RNA (1)...(19): siRNA sense strand
ggauauggugccuaugaug

SEQ ID NO: 926241 - RNA, 19 nt, Homo sapiens
  misc_RNA (1)...(19): siRNA sense strand
gaaugagugugugguuguc

SEQ ID NO: 926242 - RNA, 19 nt, Homo sapiens
  misc_RNA (1)...(19): siRNA sense strand
gauggagaggcuugaaaga

SEQ ID NO: 926243 - RNA, 19 nt, Homo sapiens
  misc_RNA (1)...(19): siRNA sense strand
aacaaacucauccgaauug

SEQ ID NO: 926244 - RNA, 19 nt, Homo sapiens
  misc_RNA (1)...(19): siRNA sense strand
ucgagcagauauugaagug

SEQ ID NO: 926245 - RNA, 19 nt, Homo sapiens
  misc_RNA (1)...(19): siRNA sense strand
gugccuaugaugcauuuaa

SEQ ID NO: 926246 - RNA, 19 nt, Homo sapiens
  misc_RNA (1)...(19): siRNA sense strand
gaggacugccugggucuuu

SEQ ID NO: 926247 - RNA, 19 nt, Homo sapiens
  misc_RNA (1)...(19): siRNA sense strand
gcugagguguuagaauaca

SEQ ID NO: 926248 - RNA, 19 nt, Homo sapiens
  misc_RNA (1)...(19): siRNA sense strand
ggaagcaaucaaaugugaa

SEQ ID NO: 926249 - RNA, 19 nt, Homo sapiens
  misc_RNA (1)...(19): siRNA sense strand
aggcguauccguucuauca

SEQ ID NO: 926250 - RNA, 19 nt, Homo sapiens
  misc_RNA (1)...(19): siRNA sense strand
uggagaugaugaugcagaa

SEQ ID NO: 926251 - RNA, 19 nt, Homo sapiens
  misc_RNA (1)...(19): siRNA sense strand
uagcauucuucgucauguu

SEQ ID NO: 926252 - RNA, 19 nt, Homo sapiens
  misc_RNA (1)...(19): siRNA sense strand
gaagaaauggaagccaaag

SEQ ID NO: 926253 - RNA, 19 nt, Homo sapiens
  misc_RNA (1)...(19): siRNA sense strand
cugccugggucuuugauga

SEQ ID NO: 926254 - RNA, 19 nt, Homo sapiens
  misc_RNA (1)...(19): siRNA sense strand
cuaagagcagguuugaauu

SEQ ID NO: 926255 - RNA, 19 nt, Homo sapiens
  misc_RNA (1)...(19): siRNA sense strand
agagcagguuugaauuguu

SEQ ID NO: 926256 - RNA, 19 nt, Homo sapiens
  misc_RNA (1)...(19): siRNA sense strand
aagagcagguuugaauugu

SEQ ID NO: 926257 - RNA, 19 nt, Homo sapiens
  misc_RNA (1)...(19): siRNA sense strand
gaggaagcaaucaaaugug

SEQ ID NO: 926258 - RNA, 19 nt, Homo sapiens
  misc_RNA (1)...(19): siRNA sense strand
gaagccaaagcugaagauu

SEQ ID NO: 926259 - RNA, 19 nt, Homo sapiens
  misc_RNA (1)...(19): siRNA sense strand
ggaagccaaagcugaagau

SEQ ID NO: 926260 - RNA, 19 nt, Homo sapiens
  misc_RNA (1)...(19): siRNA sense strand
cagauacagaugagacuga

SEQ ID NO: 926261 - RNA, 19 nt, Homo sapiens
  misc_RNA (1)...(19): siRNA sense strand
caaaguggucacagauaca

SEQ ID NO: 926262 - RNA, 19 nt, Homo sapiens
  misc_RNA (1)...(19): siRNA sense strand
aaagagaagauugaggaaa

SEQ ID NO: 926263 - RNA, 19 nt, Homo sapiens
  misc_RNA (1)...(19): siRNA sense strand
gagugugugguugucauua

SEQ ID NO: 926264 - RNA, 19 nt, Homo sapiens
  misc_RNA (1)...(19): siRNA sense strand
ugaacgggaaguacucauu

SEQ ID NO: 926265 - RNA, 19 nt, Homo sapiens
  misc_RNA (1)...(19): siRNA sense strand
ccagaggaagcaaucaaau

SEQ ID NO: 926266 - RNA, 19 nt, Homo sapiens
  misc_RNA (1)...(19): siRNA sense strand
agauacagaugagacugaa

SEQ ID NO: 926267 - RNA, 19 nt, Homo sapiens
  misc_RNA (1)...(19): siRNA sense strand
caugauucuucuuagugaa

SEQ ID NO: 926268 - RNA, 19 nt, Homo sapiens
  misc_RNA (1)...(19): siRNA sense strand
ggcaugauucuucuuagug

SEQ ID NO: 926269 - RNA, 19 nt, Homo sapiens
  misc_RNA (1)...(19): siRNA sense strand
gcagcuggaaagccuauuc

SEQ ID NO: 926270 - RNA, 19 nt, Homo sapiens
  misc_RNA (1)...(19): siRNA sense strand
gaaaagagggguguguuca

SEQ ID NO: 926271 - RNA, 19 nt, Homo sapiens
  misc_RNA (1)...(19): siRNA sense strand
gagagaacagaaggccuuu

SEQ ID NO: 926272 - RNA, 19 nt, Homo sapiens
  misc_RNA (1)...(19): siRNA sense strand
ccuccucgguauguaauga

SEQ ID NO: 926273 - RNA, 19 nt, Homo sapiens
  misc_RNA (1)...(19): siRNA sense strand
cauccgaauuggcaggaau

SEQ ID NO: 926274 - RNA, 19 nt, Homo sapiens
  misc_RNA (1)...(19): siRNA sense strand
uggcuguuaucaaagagaa

SEQ ID NO: 926275 - RNA, 19 nt, Homo sapiens
  misc_RNA (1)...(19): siRNA sense strand
gcagauggagaggcuugaa

SEQ ID NO: 926276 - RNA, 19 nt, Homo sapiens
  misc_RNA (1)...(19): siRNA sense strand
cccaaaguggucacagaua

SEQ ID NO: 926277 - RNA, 19 nt, Homo sapiens
  misc_RNA (1)...(19): siRNA sense strand
gaaaguugcugaaguuugu

SEQ ID NO: 926278 - RNA, 19 nt, Homo sapiens
  misc_RNA (1)...(19): siRNA sense strand
ggacuuggccagcguggua

SEQ ID NO: 926279 - RNA, 19 nt, Homo sapiens
  misc_RNA (1)...(19): siRNA sense strand
gacaggagcacguucagaa

SEQ ID NO: 926280 - RNA, 19 nt, Homo sapiens
  misc_RNA (1)...(19): siRNA sense strand
uggcagaucuggagaagag

SEQ ID NO: 926281 - RNA, 19 nt, Homo sapiens
  misc_RNA (1)...(19): siRNA sense strand
ggagcacguucagaaaguu

SEQ ID NO: 926282 - RNA, 19 nt, Homo sapiens
  misc_RNA (1)...(19): siRNA sense strand
gcguggcccugguccuaaa

SEQ ID NO: 926283 - RNA, 19 nt, Homo sapiens
  misc_RNA (1)...(19): siRNA sense strand
gauggcagaucuggagaag

SEQ ID NO: 926284 - RNA, 19 nt, Homo sapiens
  misc_RNA (1)...(19): siRNA sense strand
gagcacguucagaaaguug

SEQ ID NO: 926285 - RNA, 19 nt, Homo sapiens
  misc_RNA (1)...(19): siRNA sense strand
agaaaguugcugaaguuug

SEQ ID NO: 926286 - RNA, 19 nt, Homo sapiens
  misc_RNA (1)...(19): siRNA sense strand
uuucagaugggucagcaua

SEQ ID NO: 926287 - RNA, 19 nt, Homo sapiens
  misc_RNA (1)...(19): siRNA sense strand
acaggagcacguucagaaa

SEQ ID NO: 926288 - RNA, 19 nt, Homo sapiens
  misc_RNA (1)...(19): siRNA sense strand
gccgcauguugcugacuuu

SEQ ID NO: 926289 - RNA, 19 nt, Homo sapiens
  misc_RNA (1)...(19): siRNA sense strand
gccugaagccugacaccuu

SEQ ID NO: 926290 - RNA, 19 nt, Homo sapiens
  misc_RNA (1)...(19): siRNA sense strand
cagaaaguugcugaaguuu

SEQ ID NO: 926291 - RNA, 19 nt, Homo sapiens
  misc_RNA (1)...(19): siRNA sense strand
aggagcacguucagaaagu

SEQ ID NO: 926292 - RNA, 19 nt, Homo sapiens
  misc_RNA (1)...(19): siRNA sense strand
gaaaagagcuacuugaaaa

SEQ ID NO: 926293 - RNA, 19 nt, Homo sapiens
  misc_RNA (1)...(19): siRNA sense strand
ggaagcagcuggccgaguu

SEQ ID NO: 926294 - RNA, 19 nt, Homo sapiens
  misc_RNA (1)...(19): siRNA sense strand
gaaauucgauggagugaag

SEQ ID NO: 926295 - RNA, 19 nt, Homo sapiens
  misc_RNA (1)...(19): siRNA sense strand
ggacaugaaggaugacuua

SEQ ID NO: 926296 - RNA, 19 nt, Homo sapiens
  misc_RNA (1)...(19): siRNA sense strand
uagcagagauguccuuaaa

SEQ ID NO: 926297 - RNA, 19 nt, Homo sapiens
  misc_RNA (1)...(19): siRNA sense strand
ggagugaaguuucgagaga

SEQ ID NO: 926298 - RNA, 19 nt, Homo sapiens
  misc_RNA (1)...(19): siRNA sense strand
ucagcgaccuccacgauua

SEQ ID NO: 926299 - RNA, 19 nt, Homo sapiens
  misc_RNA (1)...(19): siRNA sense strand
gggauaauaugaaggagaa

SEQ ID NO: 926300 - RNA, 19 nt, Homo sapiens
  misc_RNA (1)...(19): siRNA sense strand
agacugagauguuugagaa

SEQ ID NO: 926301 - RNA, 19 nt, Homo sapiens
  misc_RNA (1)...(19): siRNA sense strand
ccacgauuaucagaaauua

SEQ ID NO: 926302 - RNA, 19 nt, Homo sapiens
  misc_RNA (1)...(19): siRNA sense strand
acaaggcaauggaaauaua

SEQ ID NO: 926303 - RNA, 19 nt, Homo sapiens
  misc_RNA (1)...(19): siRNA sense strand
gauagagaacgcucaauuu

SEQ ID NO: 926304 - RNA, 19 nt, Homo sapiens
  misc_RNA (1)...(19): siRNA sense strand
cgagagaagugcaugaguu

SEQ ID NO: 926305 - RNA, 19 nt, Homo sapiens
  misc_RNA (1)...(19): siRNA sense strand
gggagaagaucuuaaaugc

SEQ ID NO: 926306 - RNA, 19 nt, Homo sapiens
  misc_RNA (1)...(19): siRNA sense strand
uguaaacucugcucucaaa

SEQ ID NO: 926307 - RNA, 19 nt, Homo sapiens
  misc_RNA (1)...(19): siRNA sense strand
gaaauacauugaggacaug

SEQ ID NO: 926308 - RNA, 19 nt, Homo sapiens
  misc_RNA (1)...(19): siRNA sense strand
ggaaauauaccucaaucug

SEQ ID NO: 926309 - RNA, 19 nt, Homo sapiens
  misc_RNA (1)...(19): siRNA sense strand
gaaacacucugcagguucu

SEQ ID NO: 926310 - RNA, 19 nt, Homo sapiens
  misc_RNA (1)...(19): siRNA sense strand
gagagaagugcaugaguuu

SEQ ID NO: 926311 - RNA, 19 nt, Homo sapiens
  misc_RNA (1)...(19): siRNA sense strand
ggagaaauuacguuugaaa

SEQ ID NO: 926312 - RNA, 19 nt, Homo sapiens
  misc_RNA (1)...(19): siRNA sense strand
gagaagugcaugaguuuga

SEQ ID NO: 926313 - RNA, 19 nt, Homo sapiens
  misc_RNA (1)...(19): siRNA sense strand
aaggagaaauuacguuuga

SEQ ID NO: 926314 - RNA, 19 nt, Homo sapiens
  misc_RNA (1)...(19): siRNA sense strand
ugaaauacauugaggacau

SEQ ID NO: 926315 - RNA, 19 nt, Homo sapiens
  misc_RNA (1)...(19): siRNA sense strand
cucagaaagugaugaaaua

SEQ ID NO: 926316 - RNA, 19 nt, Homo sapiens
  misc_RNA (1)...(19): siRNA sense strand
aaggagaucuugcugagaa

SEQ ID NO: 926317 - RNA, 19 nt, Homo sapiens
  misc_RNA (1)...(19): siRNA sense strand
cuaaagcugucaucuggaa

SEQ ID NO: 926318 - RNA, 19 nt, Homo sapiens
  misc_RNA (1)...(19): siRNA sense strand
ggaaaggaaaguggagaua

SEQ ID NO: 926319 - RNA, 19 nt, Homo sapiens
  misc_RNA (1)...(19): siRNA sense strand
aaacugagacugagauguu

SEQ ID NO: 926320 - RNA, 19 nt, Homo sapiens
  misc_RNA (1)...(19): siRNA sense strand
ucacaaggcaauggaaaua

SEQ ID NO: 926321 - RNA, 19 nt, Homo sapiens
  misc_RNA (1)...(19): siRNA sense strand
caugaaggaugacuuacga

SEQ ID NO: 926322 - RNA, 19 nt, Homo sapiens
  misc_RNA (1)...(19): siRNA sense strand
aagaagaaagggaguauuu

SEQ ID NO: 926323 - RNA, 19 nt, Homo sapiens
  misc_RNA (1)...(19): siRNA sense strand
gcucagcuauguaaacucu

SEQ ID NO: 926324 - RNA, 19 nt, Homo sapiens
  misc_RNA (1)...(19): siRNA sense strand
gaagauagagaacgcucaa

SEQ ID NO: 926325 - RNA, 19 nt, Homo sapiens
  misc_RNA (1)...(19): siRNA sense strand
gaacugacccagcuaaagc

SEQ ID NO: 926326 - RNA, 19 nt, Homo sapiens
  misc_RNA (1)...(19): siRNA sense strand
gaaauauuacgcuaaacug

SEQ ID NO: 926327 - RNA, 19 nt, Homo sapiens
  misc_RNA (1)...(19): siRNA sense strand
gcagagauguccuuaaaag

SEQ ID NO: 926328 - RNA, 19 nt, Homo sapiens
  misc_RNA (1)...(19): siRNA sense strand
ggagggauaauaugaagga

SEQ ID NO: 926329 - RNA, 19 nt, Homo sapiens
  misc_RNA (1)...(19): siRNA sense strand
gaaggagaaauuacguuug

SEQ ID NO: 926330 - RNA, 19 nt, Homo sapiens
  misc_RNA (1)...(19): siRNA sense strand
ugaggaggcugaaauucga

SEQ ID NO: 926331 - RNA, 19 nt, Homo sapiens
  misc_RNA (1)...(19): siRNA sense strand
gaaaggaaaguggagauag

SEQ ID NO: 926332 - RNA, 19 nt, Homo sapiens
  misc_RNA (1)...(19): siRNA sense strand
cugagauguuugagaaaua

SEQ ID NO: 926333 - RNA, 19 nt, Homo sapiens
  misc_RNA (1)...(19): siRNA sense strand
ccuccacgauuaucagaaa

SEQ ID NO: 926334 - RNA, 19 nt, Homo sapiens
  misc_RNA (1)...(19): siRNA sense strand
ugaaggagaaauuacguuu

SEQ ID NO: 926335 - RNA, 19 nt, Homo sapiens
  misc_RNA (1)...(19): siRNA sense strand
aaauaucagcagcagauua

SEQ ID NO: 926336 - RNA, 19 nt, Homo sapiens
  misc_RNA (1)...(19): siRNA sense strand
caagaacugacccagcuaa

SEQ ID NO: 926337 - RNA, 19 nt, Homo sapiens
  misc_RNA (1)...(19): siRNA sense strand
uauguaaacucugcucuca

SEQ ID NO: 926338 - RNA, 19 nt, Homo sapiens
  misc_RNA (1)...(19): siRNA sense strand
gcaggcagauuaccuugcu

SEQ ID NO: 926339 - RNA, 19 nt, Homo sapiens
  misc_RNA (1)...(19): siRNA sense strand
ugacuuacguccgggagaa

SEQ ID NO: 926340 - RNA, 19 nt, Homo sapiens
  misc_RNA (1)...(19): siRNA sense strand
gaagaaagggaguauuuug

SEQ ID NO: 926341 - RNA, 19 nt, Homo sapiens
  misc_RNA (1)...(19): siRNA sense strand
gaucagcgaccuccacgau

SEQ ID NO: 926342 - RNA, 19 nt, Homo sapiens
  misc_RNA (1)...(19): siRNA sense strand
gagugaaguuucgagagaa

SEQ ID NO: 926343 - RNA, 19 nt, Homo sapiens
  misc_RNA (1)...(19): siRNA sense strand
ccaaaucccggacagguau

SEQ ID NO: 926344 - RNA, 19 nt, Homo sapiens
  misc_RNA (1)...(19): siRNA sense strand
caauggaaauauaccucaa

SEQ ID NO: 926345 - RNA, 19 nt, Homo sapiens
  misc_RNA (1)...(19): siRNA sense strand
ucucaaaguucagaggaaa

SEQ ID NO: 926346 - RNA, 19 nt, Homo sapiens
  misc_RNA (1)...(19): siRNA sense strand
uaaaagccauauccaagaa

SEQ ID NO: 926347 - RNA, 19 nt, Homo sapiens
  misc_RNA (1)...(19): siRNA sense strand
aaagccauauccaagaaga

SEQ ID NO: 926348 - RNA, 19 nt, Homo sapiens
  misc_RNA (1)...(19): siRNA sense strand
gauagcagagauguccuua

SEQ ID NO: 926349 - RNA, 19 nt, Homo sapiens
  misc_RNA (1)...(19): siRNA sense strand
gcaaggaaucaagaacuga

SEQ ID NO: 926350 - RNA, 19 nt, Homo sapiens
  misc_RNA (1)...(19): siRNA sense strand
aaggaugacuuacgacaca

SEQ ID NO: 926351 - RNA, 19 nt, Homo sapiens
  misc_RNA (1)...(19): siRNA sense strand
uaaaugcggaccuggagaa

SEQ ID NO: 926352 - RNA, 19 nt, Homo sapiens
  misc_RNA (1)...(19): siRNA sense strand
uugcggacaugaaggauga

SEQ ID NO: 926353 - RNA, 19 nt, Homo sapiens
  misc_RNA (1)...(19): siRNA sense strand
cguaaggcuuggaaucgaa

SEQ ID NO: 926354 - RNA, 19 nt, Homo sapiens
  misc_RNA (1)...(19): siRNA sense strand
gaagugcaugaguuugaaa

SEQ ID NO: 926355 - RNA, 19 nt, Homo sapiens
  misc_RNA (1)...(19): siRNA sense strand
gcugucaucuggaaacacu

SEQ ID NO: 926356 - RNA, 19 nt, Homo sapiens
  misc_RNA (1)...(19): siRNA sense strand
gagaaaagagcuacuugaa

SEQ ID NO: 926357 - RNA, 19 nt, Homo sapiens
  misc_RNA (1)...(19): siRNA sense strand
agauagagaacgcucaauu

SEQ ID NO: 926358 - RNA, 19 nt, Homo sapiens
  misc_RNA (1)...(19): siRNA sense strand
aauaucagcagcagauuau

SEQ ID NO: 926359 - RNA, 19 nt, Homo sapiens
  misc_RNA (1)...(19): siRNA sense strand
uggaaacacucugcagguu

SEQ ID NO: 926360 - RNA, 19 nt, Homo sapiens
  misc_RNA (1)...(19): siRNA sense strand
agaagugcaugaguuugaa

SEQ ID NO: 926361 - RNA, 19 nt, Homo sapiens
  misc_RNA (1)...(19): siRNA sense strand
ggcuuggaaucgaaugaaa

SEQ ID NO: 926362 - RNA, 19 nt, Homo sapiens
  misc_RNA (1)...(19): siRNA sense strand
gguucucaaugccuacaaa

SEQ ID NO: 926363 - RNA, 19 nt, Homo sapiens
  misc_RNA (1)...(19): siRNA sense strand
agaaggaagaggugaguga

SEQ ID NO: 926364 - RNA, 19 nt, Homo sapiens
  misc_RNA (1)...(19): siRNA sense strand
aagccgaggcagugaauaa

SEQ ID NO: 926365 - RNA, 19 nt, Homo sapiens
  misc_RNA (1)...(19): siRNA sense strand
aaaggaaaguggagauagc

SEQ ID NO: 926366 - RNA, 19 nt, Homo sapiens
  misc_RNA (1)...(19): siRNA sense strand
auagagaacgcucaauuuc

SEQ ID NO: 926367 - RNA, 19 nt, Homo sapiens
  misc_RNA (1)...(19): siRNA sense strand
aaacuugagcugguacaaa

SEQ ID NO: 926368 - RNA, 19 nt, Homo sapiens
  misc_RNA (1)...(19): siRNA sense strand
cagcagauuaugcacaguu

SEQ ID NO: 926369 - RNA, 19 nt, Homo sapiens
  misc_RNA (1)...(19): siRNA sense strand
aauaaccaaugagcaguug

SEQ ID NO: 926370 - RNA, 19 nt, Homo sapiens
  misc_RNA (1)...(19): siRNA sense strand
ccaagaagaaagggaguau

SEQ ID NO: 926371 - RNA, 19 nt, Homo sapiens
  misc_RNA (1)...(19): siRNA sense strand
cgggagaagaucuuaaaug

SEQ ID NO: 926372 - RNA, 19 nt, Homo sapiens
  misc_RNA (1)...(19): siRNA sense strand
caaagccgaggcagugaau

SEQ ID NO: 926373 - RNA, 19 nt, Homo sapiens
  misc_RNA (1)...(19): siRNA sense strand
gaagcaaggaaucaagaac

SEQ ID NO: 926374 - RNA, 19 nt, Homo sapiens
  misc_RNA (1)...(19): siRNA sense strand
caagaagaaagggaguauu

SEQ ID NO: 926375 - RNA, 19 nt, Homo sapiens
  misc_RNA (1)...(19): siRNA sense strand
auaagaggcuccggaagca

SEQ ID NO: 926376 - RNA, 19 nt, Homo sapiens
  misc_RNA (1)...(19): siRNA sense strand
uaaaauaucagcagcagau

SEQ ID NO: 926377 - RNA, 19 nt, Homo sapiens
  misc_RNA (1)...(19): siRNA sense strand
ccggagggauaauaugaag

SEQ ID NO: 926378 - RNA, 19 nt, Homo sapiens
  misc_RNA (1)...(19): siRNA sense strand
gagacugagauguuugaga

SEQ ID NO: 926379 - RNA, 19 nt, Homo sapiens
  misc_RNA (1)...(19): siRNA sense strand
cagaaagugaugaaauaca

SEQ ID NO: 926380 - RNA, 19 nt, Homo sapiens
  misc_RNA (1)...(19): siRNA sense strand
acugagauguuugagaaau

SEQ ID NO: 926381 - RNA, 19 nt, Homo sapiens
  misc_RNA (1)...(19): siRNA sense strand
cgacacacaagggcaaaug

SEQ ID NO: 926382 - RNA, 19 nt, Homo sapiens
  misc_RNA (1)...(19): siRNA sense strand
ccgaggcagugaauaagag

SEQ ID NO: 926383 - RNA, 19 nt, Homo sapiens
  misc_RNA (1)...(19): siRNA sense strand
ugaagcaaggaaucaagaa

SEQ ID NO: 926384 - RNA, 19 nt, Homo sapiens
  misc_RNA (1)...(19): siRNA sense strand
gcagaaggaagaggugagu

SEQ ID NO: 926385 - RNA, 19 nt, Homo sapiens
  misc_RNA (1)...(19): siRNA sense strand
cauugaggaggcugaaauu

SEQ ID NO: 926386 - RNA, 19 nt, Homo sapiens
  misc_RNA (1)...(19): siRNA sense strand
gacaauugaagcaaggaau

SEQ ID NO: 926387 - RNA, 19 nt, Homo sapiens
  misc_RNA (1)...(19): siRNA sense strand
ccaaagccgaggcagugaa

SEQ ID NO: 926388 - RNA, 19 nt, Homo sapiens
  misc_RNA (1)...(19): siRNA sense strand
caauugaagcaaggaauca

SEQ ID NO: 926389 - RNA, 19 nt, Homo sapiens
  misc_RNA (1)...(19): siRNA sense strand
ggaaucgaaugaaaauaac

SEQ ID NO: 926390 - RNA, 19 nt, Homo sapiens
  misc_RNA (1)...(19): siRNA sense strand
gcaguugcaggcagauuac

SEQ ID NO: 926391 - RNA, 19 nt, Homo sapiens
  misc_RNA (1)...(19): siRNA sense strand
aaauaaccaaugagcaguu

SEQ ID NO: 926392 - RNA, 19 nt, Homo sapiens
  misc_RNA (1)...(19): siRNA sense strand
gaacauagguggaguaaug

SEQ ID NO: 926393 - RNA, 19 nt, Homo sapiens
  misc_RNA (1)...(19): siRNA sense strand
gaagagaaaucugacuuaa

SEQ ID NO: 926394 - RNA, 19 nt, Homo sapiens
  misc_RNA (1)...(19): siRNA sense strand
ggaagaagcuaaaggaagu

SEQ ID NO: 926395 - RNA, 19 nt, Homo sapiens
  misc_RNA (1)...(19): siRNA sense strand
gggcagauauuaaagaaga

SEQ ID NO: 926396 - RNA, 19 nt, Homo sapiens
  misc_RNA (1)...(19): siRNA sense strand
uaacauggguccaguagga

SEQ ID NO: 926397 - RNA, 19 nt, Homo sapiens
  misc_RNA (1)...(19): siRNA sense strand
ccaauagauuucauccuua

SEQ ID NO: 926398 - RNA, 19 nt, Homo sapiens
  misc_RNA (1)...(19): siRNA sense strand
guaagaaggccaauagauu

SEQ ID NO: 926399 - RNA, 19 nt, Homo sapiens
  misc_RNA (1)...(19): siRNA sense strand
gaauuuaccaccuuccaua

SEQ ID NO: 926400 - RNA, 19 nt, Homo sapiens
  misc_RNA (1)...(19): siRNA sense strand
uaagaaggccaauagauuu

SEQ ID NO: 926401 - RNA, 19 nt, Homo sapiens
  misc_RNA (1)...(19): siRNA sense strand
gauguucgcuuggaucgua

SEQ ID NO: 926402 - RNA, 19 nt, Homo sapiens
  misc_RNA (1)...(19): siRNA sense strand
agagaaaucugacuuaaag

SEQ ID NO: 926403 - RNA, 19 nt, Homo sapiens
  misc_RNA (1)...(19): siRNA sense strand
ggaagaccccuuaauauua

SEQ ID NO: 926404 - RNA, 19 nt, Homo sapiens
  misc_RNA (1)...(19): siRNA sense strand
gccaauagauuucauccuu

SEQ ID NO: 926405 - RNA, 19 nt, Homo sapiens
  misc_RNA (1)...(19): siRNA sense strand
gaaguaagaaggccaauag

SEQ ID NO: 926406 - RNA, 19 nt, Homo sapiens
  misc_RNA (1)...(19): siRNA sense strand
agacuugguuccacaauuu

SEQ ID NO: 926407 - RNA, 19 nt, Homo sapiens
  misc_RNA (1)...(19): siRNA sense strand
gacaugaaauggcaagcua

SEQ ID NO: 926408 - RNA, 19 nt, Homo sapiens
  misc_RNA (1)...(19): siRNA sense strand
gaaauggcaagcuauuaaa

SEQ ID NO: 926409 - RNA, 19 nt, Homo sapiens
  misc_RNA (1)...(19): siRNA sense strand
gcaagcaauugaagcaguu

SEQ ID NO: 926410 - RNA, 19 nt, Homo sapiens
  misc_RNA (1)...(19): siRNA sense strand
guaaagaaagcccuagaaa

SEQ ID NO: 926411 - RNA, 19 nt, Homo sapiens
  misc_RNA (1)...(19): siRNA sense strand
gaaaggagcaucgauaugg

SEQ ID NO: 926412 - RNA, 19 nt, Homo sapiens
  misc_RNA (1)...(19): siRNA sense strand
uaaagaggauccugaugga

SEQ ID NO: 926413 - RNA, 19 nt, Homo sapiens
  misc_RNA (1)...(19): siRNA sense strand
aauaggaucuucuaacaug

SEQ ID NO: 926414 - RNA, 19 nt, Homo sapiens
  misc_RNA (1)...(19): siRNA sense strand
gaagcgggcagauauuaaa

SEQ ID NO: 926415 - RNA, 19 nt, Homo sapiens
  misc_RNA (1)...(19): siRNA sense strand
uggaauaaaucgaggcuuu

SEQ ID NO: 926416 - RNA, 19 nt, Homo sapiens
  misc_RNA (1)...(19): siRNA sense strand
ugaaauggcaagcuauuaa

SEQ ID NO: 926417 - RNA, 19 nt, Homo sapiens
  misc_RNA (1)...(19): siRNA sense strand
agaaagcccuagaaacuau

SEQ ID NO: 926418 - RNA, 19 nt, Homo sapiens
  misc_RNA (1)...(19): siRNA sense strand
gaaaauggaugacaagucu

SEQ ID NO: 926419 - RNA, 19 nt, Homo sapiens
  misc_RNA (1)...(19): siRNA sense strand
aaagagaaauucagucagu

SEQ ID NO: 926420 - RNA, 19 nt, Homo sapiens
  misc_RNA (1)...(19): siRNA sense strand
gaagaguaccguucacaug

SEQ ID NO: 926421 - RNA, 19 nt, Homo sapiens
  misc_RNA (1)...(19): siRNA sense strand
ggaaugagagagagaauag

SEQ ID NO: 926422 - RNA, 19 nt, Homo sapiens
  misc_RNA (1)...(19): siRNA sense strand
caacaucccauaugacaug

SEQ ID NO: 926423 - RNA, 19 nt, Homo sapiens
  misc_RNA (1)...(19): siRNA sense strand
gaaaucugacuuaaaggaa

SEQ ID NO: 926424 - RNA, 19 nt, Homo sapiens
  misc_RNA (1)...(19): siRNA sense strand
ggacuggaccggaugaguu

SEQ ID NO: 926425 - RNA, 19 nt, Homo sapiens
  misc_RNA (1)...(19): siRNA sense strand
gauaugggaucaggguuga

SEQ ID NO: 926426 - RNA, 19 nt, Homo sapiens
  misc_RNA (1)...(19): siRNA sense strand
agagaaaguuggugagguu

SEQ ID NO: 926427 - RNA, 19 nt, Homo sapiens
  misc_RNA (1)...(19): siRNA sense strand
ugacuugacuuggcagaaa

SEQ ID NO: 926428 - RNA, 19 nt, Homo sapiens
  misc_RNA (1)...(19): siRNA sense strand
caaaggcaaccagauauuu

SEQ ID NO: 926429 - RNA, 19 nt, Homo sapiens
  misc_RNA (1)...(19): siRNA sense strand
uaaaggaaguguucagcau

SEQ ID NO: 926430 - RNA, 19 nt, Homo sapiens
  misc_RNA (1)...(19): siRNA sense strand
gaaaguuggugagguuaca

SEQ ID NO: 926431 - RNA, 19 nt, Homo sapiens
  misc_RNA (1)...(19): siRNA sense strand
aaagaaagcccuagaaacu

SEQ ID NO: 926432 - RNA, 19 nt, Homo sapiens
  misc_RNA (1)...(19): siRNA sense strand
gauagaaugggaccaggua

SEQ ID NO: 926433 - RNA, 19 nt, Homo sapiens
  misc_RNA (1)...(19): siRNA sense strand
gaaugggcacugucacuuu

SEQ ID NO: 926434 - RNA, 19 nt, Homo sapiens
  misc_RNA (1)...(19): siRNA sense strand
gcgaacaggaggaucauuu

SEQ ID NO: 926435 - RNA, 19 nt, Homo sapiens
  misc_RNA (1)...(19): siRNA sense strand
aaacauuccuccugaaguc

SEQ ID NO: 926436 - RNA, 19 nt, Homo sapiens
  misc_RNA (1)...(19): siRNA sense strand
ggaggaaugaauagaauug

SEQ ID NO: 926437 - RNA, 19 nt, Homo sapiens
  misc_RNA (1)...(19): siRNA sense strand
acaagucuguuccucauga

SEQ ID NO: 926438 - RNA, 19 nt, Homo sapiens
  misc_RNA (1)...(19): siRNA sense strand
gcgggcagauauuaaagaa

SEQ ID NO: 926439 - RNA, 19 nt, Homo sapiens
  misc_RNA (1)...(19): siRNA sense strand
caccuuccauacucaauaa

SEQ ID NO: 926440 - RNA, 19 nt, Homo sapiens
  misc_RNA (1)...(19): siRNA sense strand
uggaauaagugguggaaug

SEQ ID NO: 926441 - RNA, 19 nt, Homo sapiens
  misc_RNA (1)...(19): siRNA sense strand
caauuucuauguucaaugg

SEQ ID NO: 926442 - RNA, 19 nt, Homo sapiens
  misc_RNA (1)...(19): siRNA sense strand
ccuagaaacuaugaacaaa

SEQ ID NO: 926443 - RNA, 19 nt, Homo sapiens
  misc_RNA (1)...(19): siRNA sense strand
gggaggauuuggaggaguu

SEQ ID NO: 926444 - RNA, 19 nt, Homo sapiens
  misc_RNA (1)...(19): siRNA sense strand
uuagcaacaucccauauga

SEQ ID NO: 926445 - RNA, 19 nt, Homo sapiens
  misc_RNA (1)...(19): siRNA sense strand
cauguaauguuugcagaaa

SEQ ID NO: 926446 - RNA, 19 nt, Homo sapiens
  misc_RNA (1)...(19): siRNA sense strand
caucccauaugacaugaaa

SEQ ID NO: 926447 - RNA, 19 nt, Homo sapiens
  misc_RNA (1)...(19): siRNA sense strand
ggaaaggagcaucgauaug

SEQ ID NO: 926448 - RNA, 19 nt, Homo sapiens
  misc_RNA (1)...(19): siRNA sense strand
gaauagcaugggaggauuu

SEQ ID NO: 926449 - RNA, 19 nt, Homo sapiens
  misc_RNA (1)...(19): siRNA sense strand
ggaaguaagaaggccaaua

SEQ ID NO: 926450 - RNA, 19 nt, Homo sapiens
  misc_RNA (1)...(19): siRNA sense strand
ucaagcaauuucuauguuc

SEQ ID NO: 926451 - RNA, 19 nt, Homo sapiens
  misc_RNA (1)...(19): siRNA sense strand
agaagagaaaucugacuua

SEQ ID NO: 926452 - RNA, 19 nt, Homo sapiens
  misc_RNA (1)...(19): siRNA sense strand
aguaggaucuggaauaagu

SEQ ID NO: 926453 - RNA, 19 nt, Homo sapiens
  misc_RNA (1)...(19): siRNA sense strand
ggaguaaugggaaauuuag

SEQ ID NO: 926454 - RNA, 19 nt, Homo sapiens
  misc_RNA (1)...(19): siRNA sense strand
caagcaauuucuauguuca

SEQ ID NO: 926455 - RNA, 19 nt, Homo sapiens
  misc_RNA (1)...(19): siRNA sense strand
gcagaggaaugggcacugu

SEQ ID NO: 926456 - RNA, 19 nt, Homo sapiens
  misc_RNA (1)...(19): siRNA sense strand
gugaagcgggcagauauua

SEQ ID NO: 926457 - RNA, 19 nt, Homo sapiens
  misc_RNA (1)...(19): siRNA sense strand
gaagcuaaaggaaguguuc

SEQ ID NO: 926458 - RNA, 19 nt, Homo sapiens
  misc_RNA (1)...(19): siRNA sense strand
ucaguguggucauguaaug

SEQ ID NO: 926459 - RNA, 19 nt, Homo sapiens
  misc_RNA (1)...(19): siRNA sense strand
ugacuuggcagaaacuaaa

SEQ ID NO: 926460 - RNA, 19 nt, Homo sapiens
  misc_RNA (1)...(19): siRNA sense strand
ugacaagucuguuccucau

SEQ ID NO: 926461 - RNA, 19 nt, Homo sapiens
  misc_RNA (1)...(19): siRNA sense strand
ggucuggaagcaaugaaua

SEQ ID NO: 926462 - RNA, 19 nt, Homo sapiens
  misc_RNA (1)...(19): siRNA sense strand
ucagaaaucuaccuuuuga

SEQ ID NO: 926463 - RNA, 19 nt, Homo sapiens
  misc_RNA (1)...(19): siRNA sense strand
ccaaaucguaacagaguuu

SEQ ID NO: 926464 - RNA, 19 nt, Homo sapiens
  misc_RNA (1)...(19): siRNA sense strand
cggaugaguuccagcuuug

SEQ ID NO: 926465 - RNA, 19 nt, Homo sapiens
  misc_RNA (1)...(19): siRNA sense strand
gcaguucaagcaauuucua

SEQ ID NO: 926466 - RNA, 19 nt, Homo sapiens
  misc_RNA (1)...(19): siRNA sense strand
uuacauacguggagcucuu

SEQ ID NO: 926467 - RNA, 19 nt, Homo sapiens
  misc_RNA (1)...(19): siRNA sense strand
ggcaagcuauuaaagaucu

SEQ ID NO: 926468 - RNA, 19 nt, Homo sapiens
  misc_RNA (1)...(19): siRNA sense strand
ccaaaggcaaccagauauu

SEQ ID NO: 926469 - RNA, 19 nt, Homo sapiens
  misc_RNA (1)...(19): siRNA sense strand
guuguggugugguugaauu

SEQ ID NO: 926470 - RNA, 19 nt, Homo sapiens
  misc_RNA (1)...(19): siRNA sense strand
gcuuggaucguaaugcaua

SEQ ID NO: 926471 - RNA, 19 nt, Homo sapiens
  misc_RNA (1)...(19): siRNA sense strand
aaaggaaguguucagcaua

SEQ ID NO: 926472 - RNA, 19 nt, Homo sapiens
  misc_RNA (1)...(19): siRNA sense strand
gaagucaucaguaauuugc

SEQ ID NO: 926473 - RNA, 19 nt, Homo sapiens
  misc_RNA (1)...(19): siRNA sense strand
gcaagcuauuaaagaucua

SEQ ID NO: 926474 - RNA, 19 nt, Homo sapiens
  misc_RNA (1)...(19): siRNA sense strand
gaaaagaaggguccaaauc

SEQ ID NO: 926475 - RNA, 19 nt, Homo sapiens
  misc_RNA (1)...(19): siRNA sense strand
ccggaugaguuccagcuuu

SEQ ID NO: 926476 - RNA, 19 nt, Homo sapiens
  misc_RNA (1)...(19): siRNA sense strand
cagcuccaauggcguuaaa

SEQ ID NO: 926477 - RNA, 19 nt, Homo sapiens
  misc_RNA (1)...(19): siRNA sense strand
ggaauaaaucgaggcuuug

SEQ ID NO: 926478 - RNA, 19 nt, Homo sapiens
  misc_RNA (1)...(19): siRNA sense strand
caaaagaagagaaaucuga

SEQ ID NO: 926479 - RNA, 19 nt, Homo sapiens
  misc_RNA (1)...(19): siRNA sense strand
uagaaugggaccagguaua

SEQ ID NO: 926480 - RNA, 19 nt, Homo sapiens
  misc_RNA (1)...(19): siRNA sense strand
guggaguaaugggaaauuu

SEQ ID NO: 926481 - RNA, 19 nt, Homo sapiens
  misc_RNA (1)...(19): siRNA sense strand
gaguaccguucacaugaug

SEQ ID NO: 926482 - RNA, 19 nt, Homo sapiens
  misc_RNA (1)...(19): siRNA sense strand
cuaaugagagagaaaguug

SEQ ID NO: 926483 - RNA, 19 nt, Homo sapiens
  misc_RNA (1)...(19): siRNA sense strand
ggaagcggaaugagagaga

SEQ ID NO: 926484 - RNA, 19 nt, Homo sapiens
  misc_RNA (1)...(19): siRNA sense strand
aaaggagcaucgauaugga

SEQ ID NO: 926485 - RNA, 19 nt, Homo sapiens
  misc_RNA (1)...(19): siRNA sense strand
caaaguugguuggaagaag

SEQ ID NO: 926486 - RNA, 19 nt, Homo sapiens
  misc_RNA (1)...(19): siRNA sense strand
gagaaaguuggugagguua

SEQ ID NO: 926487 - RNA, 19 nt, Homo sapiens
  misc_RNA (1)...(19): siRNA sense strand
gcagcgaacaggaggauca

SEQ ID NO: 926488 - RNA, 19 nt, Homo sapiens
  misc_RNA (1)...(19): siRNA sense strand
gaauaggaucuucuaacau

SEQ ID NO: 926489 - RNA, 19 nt, Homo sapiens
  misc_RNA (1)...(19): siRNA sense strand
ggagauuccuuugguagac

SEQ ID NO: 926490 - RNA, 19 nt, Homo sapiens
  misc_RNA (1)...(19): siRNA sense strand
uagaauuggaggaggaaua

SEQ ID NO: 926491 - RNA, 19 nt, Homo sapiens
  misc_RNA (1)...(19): siRNA sense strand
ggaaugggcacugucacuu

SEQ ID NO: 926492 - RNA, 19 nt, Homo sapiens
  misc_RNA (1)...(19): siRNA sense strand
gaacagaaaccaacaagau

SEQ ID NO: 926493 - RNA, 19 nt, Homo sapiens
  misc_RNA (1)...(19): siRNA sense strand
ucaagagacuaaaggcuua

SEQ ID NO: 926494 - RNA, 19 nt, Homo sapiens
  misc_RNA (1)...(19): siRNA sense strand
ccagaaagcuucaguuacu

SEQ ID NO: 926495 - RNA, 19 nt, Homo sapiens
  misc_RNA (1)...(19): siRNA sense strand
gcacagaaauuggcguguu

SEQ ID NO: 926496 - RNA, 19 nt, Homo sapiens
  misc_RNA (1)...(19): siRNA sense strand
cacagaaauuggcguguua

SEQ ID NO: 926497 - RNA, 19 nt, Homo sapiens
  misc_RNA (1)...(19): siRNA sense strand
gcgcaucacuacacacuuc

SEQ ID NO: 926498 - RNA, 19 nt, Homo sapiens
  misc_RNA (1)...(19): siRNA sense strand
guauaugcuuuccuacaaa

SEQ ID NO: 926499 - RNA, 19 nt, Homo sapiens
  misc_RNA (1)...(19): siRNA sense strand
ggcagaagcccuagauaga

SEQ ID NO: 926500 - RNA, 19 nt, Homo sapiens
  misc_RNA (1)...(19): siRNA sense strand
ggccgagucuauaacauug

SEQ ID NO: 926501 - RNA, 19 nt, Homo sapiens
  misc_RNA (1)...(19): siRNA sense strand
gauuuggcccuauguauau

SEQ ID NO: 926502 - RNA, 19 nt, Homo sapiens
  misc_RNA (1)...(19): siRNA sense strand
cuauguauaugcuuuccua

SEQ ID NO: 926503 - RNA, 19 nt, Homo sapiens
  misc_RNA (1)...(19): siRNA sense strand
caacaagauuuggcccuau

SEQ ID NO: 926504 - RNA, 19 nt, Homo sapiens
  misc_RNA (1)...(19): siRNA sense strand
acacagugauuaaccugaa

SEQ ID NO: 926505 - RNA, 19 nt, Homo sapiens
  misc_RNA (1)...(19): siRNA sense strand
acagaaaccaacaagauuu

SEQ ID NO: 926506 - RNA, 19 nt, Homo sapiens
  misc_RNA (1)...(19): siRNA sense strand
gacuaaaggcuuaugaaga

SEQ ID NO: 926507 - RNA, 19 nt, Homo sapiens
  misc_RNA (1)...(19): siRNA sense strand
cagagacgguuaucaagag

SEQ ID NO: 926508 - RNA, 19 nt, Homo sapiens
  misc_RNA (1)...(19): siRNA sense strand
ccacaaagaagccagaaag

SEQ ID NO: 926509 - RNA, 19 nt, Homo sapiens
  misc_RNA (1)...(19): siRNA sense strand
uaaccugaaugugcccuuu

SEQ ID NO: 926510 - RNA, 19 nt, Homo sapiens
  misc_RNA (1)...(19): siRNA sense strand
ggcccuauguauaugcuuu

SEQ ID NO: 926511 - RNA, 19 nt, Homo sapiens
  misc_RNA (1)...(19): siRNA sense strand
ggaaacauucuccggaaca

SEQ ID NO: 926512 - RNA, 19 nt, Homo sapiens
  misc_RNA (1)...(19): siRNA sense strand
ccuuugaggucauuaaaca

SEQ ID NO: 926513 - RNA, 19 nt, Homo sapiens
  misc_RNA (1)...(19): siRNA sense strand
ugacucggcuggcccuuca

SEQ ID NO: 926514 - RNA, 19 nt, Homo sapiens
  misc_RNA (1)...(19): siRNA sense strand
agauuuggcccuauguaua

SEQ ID NO: 926515 - RNA, 19 nt, Homo sapiens
  misc_RNA (1)...(19): siRNA sense strand
acuaaaggcuuaugaagac

SEQ ID NO: 926516 - RNA, 19 nt, Homo sapiens
  misc_RNA (1)...(19): siRNA sense strand
uaucagaucgacacaguga

SEQ ID NO: 926517 - RNA, 19 nt, Homo sapiens
  misc_RNA (1)...(19): siRNA sense strand
ccagagacgguuaucaaga

SEQ ID NO: 926518 - RNA, 19 nt, Homo sapiens
  misc_RNA (1)...(19): siRNA sense strand
gagacuaaaggcuuaugaa

SEQ ID NO: 926519 - RNA, 19 nt, Homo sapiens
  misc_RNA (1)...(19): siRNA sense strand
ccaguggccgagucuauaa

SEQ ID NO: 926520 - RNA, 19 nt, Homo sapiens
  misc_RNA (1)...(19): siRNA sense strand
ucagaucgacacagugauu

SEQ ID NO: 926521 - RNA, 19 nt, Homo sapiens
  misc_RNA (1)...(19): siRNA sense strand
caagauuuggcccuaugua

SEQ ID NO: 926522 - RNA, 19 nt, Homo sapiens
  misc_RNA (1)...(19): siRNA sense strand
cagaaaccaacaagauuug

SEQ ID NO: 926523 - RNA, 19 nt, Homo sapiens
  misc_RNA (1)...(19): siRNA sense strand
cuacacacuucgagcugaa

SEQ ID NO: 926524 - RNA, 19 nt, Homo sapiens
  misc_RNA (1)...(19): siRNA sense strand
gucauuaaacaacgccuua

SEQ ID NO: 926525 - RNA, 19 nt, Homo sapiens
  misc_RNA (1)...(19): siRNA sense strand
ggaacagaaaccaacaaga

SEQ ID NO: 926526 - RNA, 19 nt, Homo sapiens
  misc_RNA (1)...(19): siRNA sense strand
gaaacauucuccggaacag

SEQ ID NO: 926527 - RNA, 19 nt, Homo sapiens
  misc_RNA (1)...(19): siRNA sense strand
gcagaagcccuagauagag

SEQ ID NO: 926528 - RNA, 19 nt, Homo sapiens
  misc_RNA (1)...(19): siRNA sense strand
gggcauugaugaccugacu

SEQ ID NO: 926529 - RNA, 19 nt, Homo sapiens
  misc_RNA (1)...(19): siRNA sense strand
ccgagucuauaacauugaa

SEQ ID NO: 926530 - RNA, 19 nt, Homo sapiens
  misc_RNA (1)...(19): siRNA sense strand
ugaauucaacccucccaaa

SEQ ID NO: 926531 - RNA, 19 nt, Homo sapiens
  misc_RNA (1)...(19): siRNA sense strand
gaauucaacccucccaaaa

SEQ ID NO: 926532 - RNA, 19 nt, Homo sapiens
  misc_RNA (1)...(19): siRNA sense strand
agccagaaagcuucaguua

SEQ ID NO: 926533 - RNA, 19 nt, Homo sapiens
  misc_RNA (1)...(19): siRNA sense strand
cagaucgacacagugauua

SEQ ID NO: 926534 - RNA, 19 nt, Homo sapiens
  misc_RNA (1)...(19): siRNA sense strand
aaacugugggcauugauga

SEQ ID NO: 926535 - RNA, 19 nt, Homo sapiens
  misc_RNA (1)...(19): siRNA sense strand
aacagaaaccaacaagauu

SEQ ID NO: 926536 - RNA, 19 nt, Homo sapiens
  misc_RNA (1)...(19): siRNA sense strand
cuuaucagaucgacacagu

SEQ ID NO: 926537 - RNA, 19 nt, Homo sapiens
  misc_RNA (1)...(19): siRNA sense strand
gcgugaggaugauaaacca

SEQ ID NO: 926538 - RNA, 19 nt, Homo sapiens
  misc_RNA (1)...(19): siRNA sense strand
aacaagauuuggcccuaug

SEQ ID NO: 926539 - RNA, 19 nt, Homo sapiens
  misc_RNA (1)...(19): siRNA sense strand
gcuggcuguuggaugguuu

SEQ ID NO: 926540 - RNA, 19 nt, Homo sapiens
  misc_RNA (1)...(19): siRNA sense strand
agagacgguuaucaagaga

SEQ ID NO: 926541 - RNA, 19 nt, Homo sapiens
  misc_RNA (1)...(19): siRNA sense strand
ccaaaacugugggcauuga

SEQ ID NO: 926542 - RNA, 19 nt, Homo sapiens
  misc_RNA (1)...(19): siRNA sense strand
augcuuuccuacaaacuaa

SEQ ID NO: 926543 - RNA, 19 nt, Homo sapiens
  misc_RNA (1)...(19): siRNA sense strand
cuuaugaagaccaaacaaa

SEQ ID NO: 926544 - RNA, 19 nt, Homo sapiens
  misc_RNA (1)...(19): siRNA sense strand
ccuuacugcucgcuggauu

SEQ ID NO: 926545 - RNA, 19 nt, Homo sapiens
  misc_RNA (1)...(19): siRNA sense strand
gcccuuugaggucauuaaa

SEQ ID NO: 926546 - RNA, 19 nt, Homo sapiens
  misc_RNA (1)...(19): siRNA sense strand
uauaugcuuuccuacaaac

SEQ ID NO: 926547 - RNA, 19 nt, Homo sapiens
  misc_RNA (1)...(19): siRNA sense strand
agacuaaaggcuuaugaag

SEQ ID NO: 926548 - RNA, 19 nt, Homo sapiens
  misc_RNA (1)...(19): siRNA sense strand
uggccgagucuauaacauu

SEQ ID NO: 926549 - RNA, 19 nt, Homo sapiens
  misc_RNA (1)...(19): siRNA sense strand
acuaaaguuccacaaagaa

SEQ ID NO: 926550 - RNA, 19 nt, Homo sapiens
  misc_RNA (1)...(19): siRNA sense strand
aaaggcuuaugaagaccaa

SEQ ID NO: 926551 - RNA, 19 nt, Homo sapiens
  misc_RNA (1)...(19): siRNA sense strand
acgguuaucaagagacuaa

SEQ ID NO: 926552 - RNA, 19 nt, Homo sapiens
  misc_RNA (1)...(19): siRNA sense strand
cagaaagcuucaguuacuc

SEQ ID NO: 926553 - RNA, 19 nt, Homo sapiens
  misc_RNA (1)...(19): siRNA sense strand
uaugcuuuccuacaaacua

SEQ ID NO: 926554 - RNA, 19 nt, Homo sapiens
  misc_RNA (1)...(19): siRNA sense strand
aagauuuggcccuauguau

SEQ ID NO: 926555 - RNA, 19 nt, Homo sapiens
  misc_RNA (1)...(19): siRNA sense strand
ucaaagauaucuccaauga

SEQ ID NO: 926556 - RNA, 19 nt, Homo sapiens
  misc_RNA (1)...(19): siRNA sense strand
gcacagagaacucaaauga

SEQ ID NO: 926557 - RNA, 19 nt, Homo sapiens
  misc_RNA (1)...(19): siRNA sense strand
caacuggaguggauugaua

SEQ ID NO: 926558 - RNA, 19 nt, Homo sapiens
  misc_RNA (1)...(19): siRNA sense strand
gaacaggaccuacgaugaa

SEQ ID NO: 926559 - RNA, 19 nt, Homo sapiens
  misc_RNA (1)...(19): siRNA sense strand
gaauagcaaccaccaaaua

SEQ ID NO: 926560 - RNA, 19 nt, Homo sapiens
  misc_RNA (1)...(19): siRNA sense strand
gagugaaucugccucagua

SEQ ID NO: 926561 - RNA, 19 nt, Homo sapiens
  misc_RNA (1)...(19): siRNA sense strand
uggaguggcucaaguguua

SEQ ID NO: 926562 - RNA, 19 nt, Homo sapiens
  misc_RNA (1)...(19): siRNA sense strand
caacaggccuuccagugaa

SEQ ID NO: 926563 - RNA, 19 nt, Homo sapiens
  misc_RNA (1)...(19): siRNA sense strand
gcugaccgcugcucucuuu

SEQ ID NO: 926564 - RNA, 19 nt, Homo sapiens
  misc_RNA (1)...(19): siRNA sense strand
gaacugaauucuuugaacu

SEQ ID NO: 926565 - RNA, 19 nt, Homo sapiens
  misc_RNA (1)...(19): siRNA sense strand
cagaguuguuugaagauua

SEQ ID NO: 926566 - RNA, 19 nt, Homo sapiens
  misc_RNA (1)...(19): siRNA sense strand
aaacagacuugaugggaaa

SEQ ID NO: 926567 - RNA, 19 nt, Homo sapiens
  misc_RNA (1)...(19): siRNA sense strand
ggucaaagauaucuccaau

SEQ ID NO: 926568 - RNA, 19 nt, Homo sapiens
  misc_RNA (1)...(19): siRNA sense strand
ugagaacaguuucaaagaa

SEQ ID NO: 926569 - RNA, 19 nt, Homo sapiens
  misc_RNA (1)...(19): siRNA sense strand
caacaucccucugguguca

SEQ ID NO: 926570 - RNA, 19 nt, Homo sapiens
  misc_RNA (1)...(19): siRNA sense strand
ccgacuggcuaauaaauaa

SEQ ID NO: 926571 - RNA, 19 nt, Homo sapiens
  misc_RNA (1)...(19): siRNA sense strand
ggaauauagugaccuuaug

SEQ ID NO: 926572 - RNA, 19 nt, Homo sapiens
  misc_RNA (1)...(19): siRNA sense strand
aaacucugcugaaauguga

SEQ ID NO: 926573 - RNA, 19 nt, Homo sapiens
  misc_RNA (1)...(19): siRNA sense strand
ugaaggagcuccauuuacu

SEQ ID NO: 926574 - RNA, 19 nt, Homo sapiens
  misc_RNA (1)...(19): siRNA sense strand
caagcuaacuggauacaag

SEQ ID NO: 926575 - RNA, 19 nt, Homo sapiens
  misc_RNA (1)...(19): siRNA sense strand
gaugaaaucgacaagcuaa

SEQ ID NO: 926576 - RNA, 19 nt, Homo sapiens
  misc_RNA (1)...(19): siRNA sense strand
ggagaaaauugucaagaaa

SEQ ID NO: 926577 - RNA, 19 nt, Homo sapiens
  misc_RNA (1)...(19): siRNA sense strand
gggaagagcuacaccaaaa

SEQ ID NO: 926578 - RNA, 19 nt, Homo sapiens
  misc_RNA (1)...(19): siRNA sense strand
ggacaggcacccagaguug

SEQ ID NO: 926579 - RNA, 19 nt, Homo sapiens
  misc_RNA (1)...(19): siRNA sense strand
gcauggagaaaucaucaua

SEQ ID NO: 926580 - RNA, 19 nt, Homo sapiens
  misc_RNA (1)...(19): siRNA sense strand
ucuuugaacuugucaguaa

SEQ ID NO: 926581 - RNA, 19 nt, Homo sapiens
  misc_RNA (1)...(19): siRNA sense strand
ucgacaagcuaacuggaua

SEQ ID NO: 926582 - RNA, 19 nt, Homo sapiens
  misc_RNA (1)...(19): siRNA sense strand
gaauacgauuggaacauca

SEQ ID NO: 926583 - RNA, 19 nt, Homo sapiens
  misc_RNA (1)...(19): siRNA sense strand
aagcugaaguugacaaguu

SEQ ID NO: 926584 - RNA, 19 nt, Homo sapiens
  misc_RNA (1)...(19): siRNA sense strand
ggacuuggcaucaacaaca

SEQ ID NO: 926585 - RNA, 19 nt, Homo sapiens
  misc_RNA (1)...(19): siRNA sense strand
ggagaaacggucaacauuc

SEQ ID NO: 926586 - RNA, 19 nt, Homo sapiens
  misc_RNA (1)...(19): siRNA sense strand
cuacagccaucgacuacaa

SEQ ID NO: 926587 - RNA, 19 nt, Homo sapiens
  misc_RNA (1)...(19): siRNA sense strand
gggaugguacagaaauuua

SEQ ID NO: 926588 - RNA, 19 nt, Homo sapiens
  misc_RNA (1)...(19): siRNA sense strand
cccaaacucugcugaaaug

SEQ ID NO: 926589 - RNA, 19 nt, Homo sapiens
  misc_RNA (1)...(19): siRNA sense strand
gagaaacggucaacauucc

SEQ ID NO: 926590 - RNA, 19 nt, Homo sapiens
  misc_RNA (1)...(19): siRNA sense strand
ggcaucaacaacacaauua

SEQ ID NO: 926591 - RNA, 19 nt, Homo sapiens
  misc_RNA (1)...(19): siRNA sense strand
guuugaagauuacuugaug

SEQ ID NO: 926592 - RNA, 19 nt, Homo sapiens
  misc_RNA (1)...(19): siRNA sense strand
gcagugauggugagauuau

SEQ ID NO: 926593 - RNA, 19 nt, Homo sapiens
  misc_RNA (1)...(19): siRNA sense strand
ggaaagaauaugaaagaag

SEQ ID NO: 926594 - RNA, 19 nt, Homo sapiens
  misc_RNA (1)...(19): siRNA sense strand
agaaagagcuaaggaagag

SEQ ID NO: 926595 - RNA, 19 nt, Homo sapiens
  misc_RNA (1)...(19): siRNA sense strand
ggaagcaggagaugguuga

SEQ ID NO: 926596 - RNA, 19 nt, Homo sapiens
  misc_RNA (1)...(19): siRNA sense strand
gacuacaagugccaucuga

SEQ ID NO: 926597 - RNA, 19 nt, Homo sapiens
  misc_RNA (1)...(19): siRNA sense strand
caaggaagacaggaacuaa

SEQ ID NO: 926598 - RNA, 19 nt, Homo sapiens
  misc_RNA (1)...(19): siRNA sense strand
gucacaauaucuuugcuaa

SEQ ID NO: 926599 - RNA, 19 nt, Homo sapiens
  misc_RNA (1)...(19): siRNA sense strand
aacaaugccuuccaagcua

SEQ ID NO: 926600 - RNA, 19 nt, Homo sapiens
  misc_RNA (1)...(19): siRNA sense strand
uagcaaccaccaaauaauu

SEQ ID NO: 926601 - RNA, 19 nt, Homo sapiens
  misc_RNA (1)...(19): siRNA sense strand
ggugguuaaugaccucuuu

SEQ ID NO: 926602 - RNA, 19 nt, Homo sapiens
  misc_RNA (1)...(19): siRNA sense strand
ucagugcgcugcuggaauc

SEQ ID NO: 926603 - RNA, 19 nt, Homo sapiens
  misc_RNA (1)...(19): siRNA sense strand
ugaagccgaugcuagauuc

SEQ ID NO: 926604 - RNA, 19 nt, Homo sapiens
  misc_RNA (1)...(19): siRNA sense strand
uaccacaacuggagacaug

SEQ ID NO: 926605 - RNA, 19 nt, Homo sapiens
  misc_RNA (1)...(19): siRNA sense strand
uggaauuggucaaagauau

SEQ ID NO: 926606 - RNA, 19 nt, Homo sapiens
  misc_RNA (1)...(19): siRNA sense strand
aagcagugauggugagauu

SEQ ID NO: 926607 - RNA, 19 nt, Homo sapiens
  misc_RNA (1)...(19): siRNA sense strand
gugaugauccuucaaagug

SEQ ID NO: 926608 - RNA, 19 nt, Homo sapiens
  misc_RNA (1)...(19): siRNA sense strand
caacgugugucagcugaug

SEQ ID NO: 926609 - RNA, 19 nt, Homo sapiens
  misc_RNA (1)...(19): siRNA sense strand
ugucagaacuugccaucga

SEQ ID NO: 926610 - RNA, 19 nt, Homo sapiens
  misc_RNA (1)...(19): siRNA sense strand
ucaaagaaagcauggagaa

SEQ ID NO: 926611 - RNA, 19 nt, Homo sapiens
  misc_RNA (1)...(19): siRNA sense strand
ugcuagaggugguuaauga

SEQ ID NO: 926612 - RNA, 19 nt, Homo sapiens
  misc_RNA (1)...(19): siRNA sense strand
gagcuccauuuacugaaga

SEQ ID NO: 926613 - RNA, 19 nt, Homo sapiens
  misc_RNA (1)...(19): siRNA sense strand
acaaggagaucgggagaga

SEQ ID NO: 926614 - RNA, 19 nt, Homo sapiens
  misc_RNA (1)...(19): siRNA sense strand
ggaugguacagaaauuuaa

SEQ ID NO: 926615 - RNA, 19 nt, Homo sapiens
  misc_RNA (1)...(19): siRNA sense strand
aagaaagcauggagaaauc

SEQ ID NO: 926616 - RNA, 19 nt, Homo sapiens
  misc_RNA (1)...(19): siRNA sense strand
ucaacaggccuuccaguga

SEQ ID NO: 926617 - RNA, 19 nt, Homo sapiens
  misc_RNA (1)...(19): siRNA sense strand
uagauucaguagcuacaaa

SEQ ID NO: 926618 - RNA, 19 nt, Homo sapiens
  misc_RNA (1)...(19): siRNA sense strand
acaaugccuuccaagcuaa

SEQ ID NO: 926619 - RNA, 19 nt, Homo sapiens
  misc_RNA (1)...(19): siRNA sense strand
cuacaagugccaucugaaa

SEQ ID NO: 926620 - RNA, 19 nt, Homo sapiens
  misc_RNA (1)...(19): siRNA sense strand
gaacuuguaaccagugagu

SEQ ID NO: 926621 - RNA, 19 nt, Homo sapiens
  misc_RNA (1)...(19): siRNA sense strand
uaaaggagaauacgauugg

SEQ ID NO: 926622 - RNA, 19 nt, Homo sapiens
  misc_RNA (1)...(19): siRNA sense strand
ugaugauccuucaaaguga

SEQ ID NO: 926623 - RNA, 19 nt, Homo sapiens
  misc_RNA (1)...(19): siRNA sense strand
aauagcaaccaccaaauaa

SEQ ID NO: 926624 - RNA, 19 nt, Homo sapiens
  misc_RNA (1)...(19): siRNA sense strand
gauaucugguuuucacaua

SEQ ID NO: 926625 - RNA, 19 nt, Homo sapiens
  misc_RNA (1)...(19): siRNA sense strand
ccaaggccauccacgugaa

SEQ ID NO: 926626 - RNA, 19 nt, Homo sapiens
  misc_RNA (1)...(19): siRNA sense strand
aaagaaagcauggagaaau

SEQ ID NO: 926627 - RNA, 19 nt, Homo sapiens
  misc_RNA (1)...(19): siRNA sense strand
caaagaaagcauggagaaa

SEQ ID NO: 926628 - RNA, 19 nt, Homo sapiens
  misc_RNA (1)...(19): siRNA sense strand
ggcccaaacucugcugaaa

SEQ ID NO: 926629 - RNA, 19 nt, Homo sapiens
  misc_RNA (1)...(19): siRNA sense strand
uaaugagcgucaguucuuu

SEQ ID NO: 926630 - RNA, 19 nt, Homo sapiens
  misc_RNA (1)...(19): siRNA sense strand
ccugaaggagcuccauuua

SEQ ID NO: 926631 - RNA, 19 nt, Homo sapiens
  misc_RNA (1)...(19): siRNA sense strand
guaaaggagaauacgauug

SEQ ID NO: 926632 - RNA, 19 nt, Homo sapiens
  misc_RNA (1)...(19): siRNA sense strand
ugaccgagguggaaauuuu

SEQ ID NO: 926633 - RNA, 19 nt, Homo sapiens
  misc_RNA (1)...(19): siRNA sense strand
cgacguugaugccaugauc

SEQ ID NO: 926634 - RNA, 19 nt, Homo sapiens
  misc_RNA (1)...(19): siRNA sense strand
ggagcuccauuuacugaag

SEQ ID NO: 926635 - RNA, 19 nt, Homo sapiens
  misc_RNA (1)...(19): siRNA sense strand
ccagaguuguuugaagauu

SEQ ID NO: 926636 - RNA, 19 nt, Homo sapiens
  misc_RNA (1)...(19): siRNA sense strand
gagauuagagcucaaacuc

SEQ ID NO: 926637 - RNA, 19 nt, Homo sapiens
  misc_RNA (1)...(19): siRNA sense strand
caacaaugccuuccaagcu

SEQ ID NO: 926638 - RNA, 19 nt, Homo sapiens
  misc_RNA (1)...(19): siRNA sense strand
ggaauagcaaccaccaaau

SEQ ID NO: 926639 - RNA, 19 nt, Homo sapiens
  misc_RNA (1)...(19): siRNA sense strand
gaaccucugcuaccuugga

SEQ ID NO: 926640 - RNA, 19 nt, Homo sapiens
  misc_RNA (1)...(19): siRNA sense strand
ggaauuggucaaagauauc

SEQ ID NO: 926641 - RNA, 19 nt, Homo sapiens
  misc_RNA (1)...(19): siRNA sense strand
ggagagauuagagcucaaa

SEQ ID NO: 926642 - RNA, 19 nt, Homo sapiens
  misc_RNA (1)...(19): siRNA sense strand
ccagacagguggcagaacu

SEQ ID NO: 926643 - RNA, 19 nt, Homo sapiens
  misc_RNA (1)...(19): siRNA sense strand
acuaucggaugguucuaua

SEQ ID NO: 926644 - RNA, 19 nt, Homo sapiens
  misc_RNA (1)...(19): siRNA sense strand
gaacuugccaucgaugaca

SEQ ID NO: 926645 - RNA, 19 nt, Homo sapiens
  misc_RNA (1)...(19): siRNA sense strand
gaaguugacaaguuuaagg

SEQ ID NO: 926646 - RNA, 19 nt, Homo sapiens
  misc_RNA (1)...(19): siRNA sense strand
gaauugauguccccaaagu

SEQ ID NO: 926647 - RNA, 19 nt, Homo sapiens
  misc_RNA (1)...(19): siRNA sense strand
agacugaccuggagaaaau

SEQ ID NO: 926648 - RNA, 19 nt, Homo sapiens
  misc_RNA (1)...(19): siRNA sense strand
cagaaagagcuaaggaaga

SEQ ID NO: 926649 - RNA, 19 nt, Homo sapiens
  misc_RNA (1)...(19): siRNA sense strand
gcugagaacaguuucaaag

SEQ ID NO: 926650 - RNA, 19 nt, Homo sapiens
  misc_RNA (1)...(19): siRNA sense strand
cgucaguucuuucuggaau

SEQ ID NO: 926651 - RNA, 19 nt, Homo sapiens
  misc_RNA (1)...(19): siRNA sense strand
gcuacaaacagaaguaagu

SEQ ID NO: 926652 - RNA, 19 nt, Homo sapiens
  misc_RNA (1)...(19): siRNA sense strand
gaauauagugaccuuaugc

SEQ ID NO: 926653 - RNA, 19 nt, Homo sapiens
  misc_RNA (1)...(19): siRNA sense strand
guuaaugaccucuuugaag

SEQ ID NO: 926654 - RNA, 19 nt, Homo sapiens
  misc_RNA (1)...(19): siRNA sense strand
gaaaucgacaagcuaacug

SEQ ID NO: 926655 - RNA, 19 nt, Homo sapiens
  misc_RNA (1)...(19): siRNA sense strand
gauagcgacuucaccuuua

SEQ ID NO: 926656 - RNA, 19 nt, Homo sapiens
  misc_RNA (1)...(19): siRNA sense strand
gaucgaaacauacaagaaa

SEQ ID NO: 926657 - RNA, 19 nt, Homo sapiens
  misc_RNA (1)...(19): siRNA sense strand
agacugaaguuggugauua

SEQ ID NO: 926658 - RNA, 19 nt, Homo sapiens
  misc_RNA (1)...(19): siRNA sense strand
gauauugauuuccaucuug

SEQ ID NO: 926659 - RNA, 19 nt, Homo sapiens
  misc_RNA (1)...(19): siRNA sense strand
ugaagagucuguuugaaga

SEQ ID NO: 926660 - RNA, 19 nt, Homo sapiens
  misc_RNA (1)...(19): siRNA sense strand
ggagcaggauuagauauug

SEQ ID NO: 926661 - RNA, 19 nt, Homo sapiens
  misc_RNA (1)...(19): siRNA sense strand
acaagaagauuggaagaaa

SEQ ID NO: 926662 - RNA, 19 nt, Homo sapiens
  misc_RNA (1)...(19): siRNA sense strand
gagcaggauuagauauuga

SEQ ID NO: 926663 - RNA, 19 nt, Homo sapiens
  misc_RNA (1)...(19): siRNA sense strand
ugucagccauucaaguuua

SEQ ID NO: 926664 - RNA, 19 nt, Homo sapiens
  misc_RNA (1)...(19): siRNA sense strand
caagaagauuggaagaaau

SEQ ID NO: 926665 - RNA, 19 nt, Homo sapiens
  misc_RNA (1)...(19): siRNA sense strand
ggagaucgaguaccaaguu

SEQ ID NO: 926666 - RNA, 19 nt, Homo sapiens
  misc_RNA (1)...(19): siRNA sense strand
gagaucgaguaccaaguuu

SEQ ID NO: 926667 - RNA, 19 nt, Homo sapiens
  misc_RNA (1)...(19): siRNA sense strand
gaagauaagaggaaaagua

SEQ ID NO: 926668 - RNA, 19 nt, Homo sapiens
  misc_RNA (1)...(19): siRNA sense strand
gaacaagaagauuggaaga

SEQ ID NO: 926669 - RNA, 19 nt, Homo sapiens
  misc_RNA (1)...(19): siRNA sense strand
gauuacauguucugcuuug

SEQ ID NO: 926670 - RNA, 19 nt, Homo sapiens
  misc_RNA (1)...(19): siRNA sense strand
ugaaguuggugauuacaug

SEQ ID NO: 926671 - RNA, 19 nt, Homo sapiens
  misc_RNA (1)...(19): siRNA sense strand
gugauuacauguucugcuu

SEQ ID NO: 926672 - RNA, 19 nt, Homo sapiens
  misc_RNA (1)...(19): siRNA sense strand
ucuggucuaugguuaauuu

SEQ ID NO: 926673 - RNA, 19 nt, Homo sapiens
  misc_RNA (1)...(19): siRNA sense strand
gcacauacaaauucugcuu

SEQ ID NO: 926674 - RNA, 19 nt, Homo sapiens
  misc_RNA (1)...(19): siRNA sense strand
gcacaagaacaagaagauu

SEQ ID NO: 926675 - RNA, 19 nt, Homo sapiens
  misc_RNA (1)...(19): siRNA sense strand
ggucuaugguuaauuuagu

SEQ ID NO: 926676 - RNA, 19 nt, Homo sapiens
  misc_RNA (1)...(19): siRNA sense strand
gaacaaagaaaaucagaug

SEQ ID NO: 926677 - RNA, 19 nt, Homo sapiens
  misc_RNA (1)...(19): siRNA sense strand
gauggagcaggauuagaua

SEQ ID NO: 926678 - RNA, 19 nt, Homo sapiens
  misc_RNA (1)...(19): siRNA sense strand
aagagucuguuugaagaua

SEQ ID NO: 926679 - RNA, 19 nt, Homo sapiens
  misc_RNA (1)...(19): siRNA sense strand
caucuugccucuccagaag

SEQ ID NO: 926680 - RNA, 19 nt, Homo sapiens
  misc_RNA (1)...(19): siRNA sense strand
cagauggaguucacacugu

SEQ ID NO: 926681 - RNA, 19 nt, Homo sapiens
  misc_RNA (1)...(19): siRNA sense strand
cgauagcgacuucaccuuu

SEQ ID NO: 926682 - RNA, 19 nt, Homo sapiens
  misc_RNA (1)...(19): siRNA sense strand
agauggaguucacacugua

SEQ ID NO: 926683 - RNA, 19 nt, Homo sapiens
  misc_RNA (1)...(19): siRNA sense strand
gcugaagagucuguuugaa

SEQ ID NO: 926684 - RNA, 19 nt, Homo sapiens
  misc_RNA (1)...(19): siRNA sense strand
ggugucagccauucaaguu

SEQ ID NO: 926685 - RNA, 19 nt, Homo sapiens
  misc_RNA (1)...(19): siRNA sense strand
uggaagacauccuggaauc

SEQ ID NO: 926686 - RNA, 19 nt, Homo sapiens
  misc_RNA (1)...(19): siRNA sense strand
gaucgaguaccaaguuuua

SEQ ID NO: 926687 - RNA, 19 nt, Homo sapiens
  misc_RNA (1)...(19): siRNA sense strand
gagaacaggcacaagaaca

SEQ ID NO: 926688 - RNA, 19 nt, Homo sapiens
  misc_RNA (1)...(19): siRNA sense strand
gaaggugauuuucuuugaa

SEQ ID NO: 926689 - RNA, 19 nt, Homo sapiens
  misc_RNA (1)...(19): siRNA sense strand
gggagaacaggcacaagaa

SEQ ID NO: 926690 - RNA, 19 nt, Homo sapiens
  misc_RNA (1)...(19): siRNA sense strand
cacaagaacaagaagauug

SEQ ID NO: 926691 - RNA, 19 nt, Homo sapiens
  misc_RNA (1)...(19): siRNA sense strand
uauauuacuggcacagaua

SEQ ID NO: 926692 - RNA, 19 nt, Homo sapiens
  misc_RNA (1)...(19): siRNA sense strand
gucaauuucuggucuaugg

SEQ ID NO: 926693 - RNA, 19 nt, Homo sapiens
  misc_RNA (1)...(19): siRNA sense strand
gaaguuggugauuacaugu

SEQ ID NO: 926694 - RNA, 19 nt, Homo sapiens
  misc_RNA (1)...(19): siRNA sense strand
aaagugggcacauacaaau

SEQ ID NO: 926695 - RNA, 19 nt, Homo sapiens
  misc_RNA (1)...(19): siRNA sense strand
gauaugaaacuggaagaca

SEQ ID NO: 926696 - RNA, 19 nt, Homo sapiens
  misc_RNA (1)...(19): siRNA sense strand
gauaagaggaaaaguagaa

SEQ ID NO: 926697 - RNA, 19 nt, Homo sapiens
  misc_RNA (1)...(19): siRNA sense strand
agagucuguuugaagauaa

SEQ ID NO: 926698 - RNA, 19 nt, Homo sapiens
  misc_RNA (1)...(19): siRNA sense strand
gacugaaguuggugauuac

SEQ ID NO: 926699 - RNA, 19 nt, Homo sapiens
  misc_RNA (1)...(19): siRNA sense strand
cacauacaaauucugcuua

SEQ ID NO: 926700 - RNA, 19 nt, Homo sapiens
  misc_RNA (1)...(19): siRNA sense strand
gaacaggcacaagaacaag

SEQ ID NO: 926701 - RNA, 19 nt, Homo sapiens
  misc_RNA (1)...(19): siRNA sense strand
uggcacagauauauuggau

SEQ ID NO: 926702 - RNA, 19 nt, Homo sapiens
  misc_RNA (1)...(19): siRNA sense strand
ggaguucacacuguagaga

SEQ ID NO: 926703 - RNA, 19 nt, Homo sapiens
  misc_RNA (1)...(19): siRNA sense strand
gaagagucuguuugaagau

SEQ ID NO: 926704 - RNA, 19 nt, Homo sapiens
  misc_RNA (1)...(19): siRNA sense strand
gaaacauacaagaaagcaa

SEQ ID NO: 926705 - RNA, 19 nt, Homo sapiens
  misc_RNA (1)...(19): siRNA sense strand
cuucacaccuucccucgau

SEQ ID NO: 926706 - RNA, 19 nt, Homo sapiens
  misc_RNA (1)...(19): siRNA sense strand
acauacaaauucugcuuag

SEQ ID NO: 926707 - RNA, 19 nt, Homo sapiens
  misc_RNA (1)...(19): siRNA sense strand
cauacaaauucugcuuaga

SEQ ID NO: 926708 - RNA, 19 nt, Homo sapiens
  misc_RNA (1)...(19): siRNA sense strand
guucugcuuugacaauaca

SEQ ID NO: 926709 - RNA, 19 nt, Homo sapiens
  misc_RNA (1)...(19): siRNA sense strand
guaccaaguuuuagaugga

SEQ ID NO: 926710 - RNA, 19 nt, Homo sapiens
  misc_RNA (1)...(19): siRNA sense strand
gcaggauuagauauugauu

SEQ ID NO: 926711 - RNA, 19 nt, Homo sapiens
  misc_RNA (1)...(19): siRNA sense strand
guuugaagauaagaggaaa

SEQ ID NO: 926712 - RNA, 19 nt, Homo sapiens
  misc_RNA (1)...(19): siRNA sense strand
aauuucuggucuaugguua

SEQ ID NO: 926713 - RNA, 19 nt, Homo sapiens
  misc_RNA (1)...(19): siRNA sense strand
gagucaauuucuggucuau

SEQ ID NO: 926714 - RNA, 19 nt, Homo sapiens
  misc_RNA (1)...(19): siRNA sense strand
agagucaauuucuggucua

SEQ ID NO: 926715 - RNA, 19 nt, Homo sapiens
  misc_RNA (1)...(19): siRNA sense strand
uguagagacugaaguuggu

SEQ ID NO: 926716 - RNA, 19 nt, Homo sapiens
  misc_RNA (1)...(19): siRNA sense strand
agaacaggcacaagaacaa

SEQ ID NO: 926717 - RNA, 19 nt, Homo sapiens
  misc_RNA (1)...(19): siRNA sense strand
auaugaaacuggaagacau

SEQ ID NO: 926718 - RNA, 19 nt, Homo sapiens
  misc_RNA (1)...(19): siRNA sense strand
aagcaaaagugggcacaua

SEQ ID NO: 926719 - RNA, 19 nt, Homo sapiens
  misc_RNA (1)...(19): siRNA sense strand
uacauguucugcuuugaca

SEQ ID NO: 926720 - RNA, 19 nt, Homo sapiens
  misc_RNA (1)...(19): siRNA sense strand
gaauccaucaacagcauca

SEQ ID NO: 926721 - RNA, 19 nt, Homo sapiens
  misc_RNA (1)...(19): siRNA sense strand
agauggagcaggauuagau

SEQ ID NO: 926722 - RNA, 19 nt, Homo sapiens
  misc_RNA (1)...(19): siRNA sense strand
uggauaauaugggagaaca

SEQ ID NO: 926723 - RNA, 19 nt, Homo sapiens
  misc_RNA (1)...(19): siRNA sense strand
uuuauaugcugaagagucu

SEQ ID NO: 926724 - RNA, 19 nt, Homo sapiens
  misc_RNA (1)...(19): siRNA sense strand
caauuucuggucuaugguu

SEQ ID NO: 926725 - RNA, 19 nt, Homo sapiens
  misc_RNA (1)...(19): siRNA sense strand
ggagaacaggcacaagaac

SEQ ID NO: 926726 - RNA, 19 nt, Homo sapiens
  misc_RNA (1)...(19): siRNA sense strand
aaguuuauaugcugaagag

SEQ ID NO: 926727 - RNA, 19 nt, Homo sapiens
  misc_RNA (1)...(19): siRNA sense strand
ggcacaagaacaagaagau

SEQ ID NO: 926728 - RNA, 19 nt, Homo sapiens
  misc_RNA (1)...(19): siRNA sense strand
uggagcaggauuagauauu

SEQ ID NO: 926729 - RNA, 19 nt, Homo sapiens
  misc_RNA (1)...(19): siRNA sense strand
uuacuggcacagauauauu

SEQ ID NO: 926730 - RNA, 19 nt, Homo sapiens
  misc_RNA (1)...(19): siRNA sense strand
caauacauucagcaccauu

SEQ ID NO: 926731 - RNA, 19 nt, Homo sapiens
  misc_RNA (1)...(19): siRNA sense strand
gaagcucgugaucgaaaca

SEQ ID NO: 926732 - RNA, 19 nt, Homo sapiens
  misc_RNA (1)...(19): siRNA sense strand
ugggagaacaggcacaaga

SEQ ID NO: 926733 - RNA, 19 nt, Homo sapiens
  misc_RNA (1)...(19): siRNA sense strand
cauguucugcuuugacaau

SEQ ID NO: 926734 - RNA, 19 nt, Homo sapiens
  misc_RNA (1)...(19): siRNA sense strand
ccauucaaguuuauaugcu

SEQ ID NO: 926735 - RNA, 19 nt, Homo sapiens
  misc_RNA (1)...(19): siRNA sense strand
gucagccauucaaguuuau

SEQ ID NO: 926736 - RNA, 19 nt, Homo sapiens
  misc_RNA (1)...(19): siRNA sense strand
gucuaugguuaauuuagug

SEQ ID NO: 926737 - RNA, 19 nt, Homo sapiens
  misc_RNA (1)...(19): siRNA sense strand
auacaaauucugcuuagag

SEQ ID NO: 926738 - RNA, 19 nt, Homo sapiens
  misc_RNA (1)...(19): siRNA sense strand
acaagaacaagaagauugg

SEQ ID NO: 926739 - RNA, 19 nt, Homo sapiens
  misc_RNA (1)...(19): siRNA sense strand
auauauuacuggcacagau

SEQ ID NO: 926740 - RNA, 19 nt, Homo sapiens
  misc_RNA (1)...(19): siRNA sense strand
ggaauuagaucauuuguag

SEQ ID NO: 926741 - RNA, 19 nt, Homo sapiens
  misc_RNA (1)...(19): siRNA sense strand
ggcaugaucuucgaaauuu

SEQ ID NO: 926742 - RNA, 19 nt, Homo sapiens
  misc_RNA (1)...(19): siRNA sense strand
ggaaugggauuaacaggau

SEQ ID NO: 926743 - RNA, 19 nt, Homo sapiens
  misc_RNA (1)...(19): siRNA sense strand
guuguuggcuuuauuagaa

SEQ ID NO: 926744 - RNA, 19 nt, Homo sapiens
  misc_RNA (1)...(19): siRNA sense strand
gcaugaucuucgaaauuua

SEQ ID NO: 926745 - RNA, 19 nt, Homo sapiens
  misc_RNA (1)...(19): siRNA sense strand
ggagaaagcaacaauaugg

SEQ ID NO: 926746 - RNA, 19 nt, Homo sapiens
  misc_RNA (1)...(19): siRNA sense strand
gaaagcaacaauaugguau

SEQ ID NO: 926747 - RNA, 19 nt, Homo sapiens
  misc_RNA (1)...(19): siRNA sense strand
uuggaucccuccuaaauuu

SEQ ID NO: 926748 - RNA, 19 nt, Homo sapiens
  misc_RNA (1)...(19): siRNA sense strand
agaaagaacauucagauuc

SEQ ID NO: 926749 - RNA, 19 nt, Homo sapiens
  misc_RNA (1)...(19): siRNA sense strand
acaaagcacuacuggcuau

SEQ ID NO: 926750 - RNA, 19 nt, Homo sapiens
  misc_RNA (1)...(19): siRNA sense strand
gaaugggauuaacaggauu

SEQ ID NO: 926751 - RNA, 19 nt, Homo sapiens
  misc_RNA (1)...(19): siRNA sense strand
guccuuggaucccuccuaa

SEQ ID NO: 926752 - RNA, 19 nt, Homo sapiens
  misc_RNA (1)...(19): siRNA sense strand
gcacuacuggcuauuggaa

SEQ ID NO: 926753 - RNA, 19 nt, Homo sapiens
  misc_RNA (1)...(19): siRNA sense strand
guagauaaaguuggagaaa

SEQ ID NO: 926754 - RNA, 19 nt, Homo sapiens
  misc_RNA (1)...(19): siRNA sense strand
gggauuaacaggauuugga

SEQ ID NO: 926755 - RNA, 19 nt, Homo sapiens
  misc_RNA (1)...(19): siRNA sense strand
cggcuuggcuuuuguaauu

SEQ ID NO: 926756 - RNA, 19 nt, Homo sapiens
  misc_RNA (1)...(19): siRNA sense strand
agaaagcaacaauauggua

SEQ ID NO: 926757 - RNA, 19 nt, Homo sapiens
  misc_RNA (1)...(19): siRNA sense strand
gggcuucuuuccugucguu

SEQ ID NO: 926758 - RNA, 19 nt, Homo sapiens
  misc_RNA (1)...(19): siRNA sense strand
aaaugaaagcuacagguuu

SEQ ID NO: 926759 - RNA, 19 nt, Homo sapiens
  misc_RNA (1)...(19): siRNA sense strand
gaacauucagauucuucuu

SEQ ID NO: 926760 - RNA, 19 nt, Homo sapiens
  misc_RNA (1)...(19): siRNA sense strand
aaugaaagcuacagguuuu

SEQ ID NO: 926761 - RNA, 19 nt, Homo sapiens
  misc_RNA (1)...(19): siRNA sense strand
guauuuguaguccuuauug

SEQ ID NO: 926762 - RNA, 19 nt, Homo sapiens
  misc_RNA (1)...(19): siRNA sense strand
cuuauugguuggccuuuga

SEQ ID NO: 926763 - RNA, 19 nt, Homo sapiens
  misc_RNA (1)...(19): siRNA sense strand
gaaaauuggaaugggauua

SEQ ID NO: 926764 - RNA, 19 nt, Homo sapiens
  misc_RNA (1)...(19): siRNA sense strand
gaucuucgaaauuuaugga

SEQ ID NO: 926765 - RNA, 19 nt, Homo sapiens
  misc_RNA (1)...(19): siRNA sense strand
uagauaaaguuggagaaag

SEQ ID NO: 926766 - RNA, 19 nt, Homo sapiens
  misc_RNA (1)...(19): siRNA sense strand
ccuguucuuuggaaugauu

SEQ ID NO: 926767 - RNA, 19 nt, Homo sapiens
  misc_RNA (1)...(19): siRNA sense strand
ucugggugguguauuugua

SEQ ID NO: 926768 - RNA, 19 nt, Homo sapiens
  misc_RNA (1)...(19): siRNA sense strand
agauaaaguuggagaaagc

SEQ ID NO: 926769 - RNA, 19 nt, Homo sapiens
  misc_RNA (1)...(19): siRNA sense strand
ugucguuguuggcuuuauu

SEQ ID NO: 926770 - RNA, 19 nt, Homo sapiens
  misc_RNA (1)...(19): siRNA sense strand
gagaaagcaacaauauggu

SEQ ID NO: 926771 - RNA, 19 nt, Homo sapiens
  misc_RNA (1)...(19): siRNA sense strand
uaccuggaauuagaucauu

SEQ ID NO: 926772 - RNA, 19 nt, Homo sapiens
  misc_RNA (1)...(19): siRNA sense strand
ugauaggcaugaucuucga

SEQ ID NO: 926773 - RNA, 19 nt, Homo sapiens
  misc_RNA (1)...(19): siRNA sense strand
cuucuuuccugucguuguu

SEQ ID NO: 926774 - RNA, 19 nt, Homo sapiens
  misc_RNA (1)...(19): siRNA sense strand
acuacuggcuauuggaaau

SEQ ID NO: 926775 - RNA, 19 nt, Homo sapiens
  misc_RNA (1)...(19): siRNA sense strand
uuaacaggauuuggagugu

SEQ ID NO: 926776 - RNA, 19 nt, Homo sapiens
  misc_RNA (1)...(19): siRNA sense strand
cuccuaaauuuaccuggaa

SEQ ID NO: 926777 - RNA, 19 nt, Homo sapiens
  misc_RNA (1)...(19): siRNA sense strand
gucguuguuggcuuuauua

SEQ ID NO: 926778 - RNA, 19 nt, Homo sapiens
  misc_RNA (1)...(19): siRNA sense strand
ccuuggaucccuccuaaau

SEQ ID NO: 926779 - RNA, 19 nt, Homo sapiens
  misc_RNA (1)...(19): siRNA sense strand
aggcaugaucuucgaaauu

SEQ ID NO: 926780 - RNA, 19 nt, Homo sapiens
  misc_RNA (1)...(19): siRNA sense strand
uagaagagugccaguccuu

SEQ ID NO: 926781 - RNA, 19 nt, Homo sapiens
  misc_RNA (1)...(19): siRNA sense strand
uaacggacacgcagaaaau

SEQ ID NO: 926782 - RNA, 19 nt, Homo sapiens
  misc_RNA (1)...(19): siRNA sense strand
uggaucccuccuaaauuua

SEQ ID NO: 926783 - RNA, 19 nt, Homo sapiens
  misc_RNA (1)...(19): siRNA sense strand
uuggagaaagcaacaauau

SEQ ID NO: 926784 - RNA, 19 nt, Homo sapiens
  misc_RNA (1)...(19): siRNA sense strand
uaggcaugaucuucgaaau

SEQ ID NO: 926785 - RNA, 19 nt, Homo sapiens
  misc_RNA (1)...(19): siRNA sense strand
aagcacuacuggcuauugg

SEQ ID NO: 926786 - RNA, 19 nt, Homo sapiens
  misc_RNA (1)...(19): siRNA sense strand
gaacacagaucuucuuaaa

SEQ ID NO: 926787 - RNA, 19 nt, Homo sapiens
  misc_RNA (1)...(19): siRNA sense strand
ccacagacuucuugauuua

SEQ ID NO: 926788 - RNA, 19 nt, Homo sapiens
  misc_RNA (1)...(19): siRNA sense strand
ggaagaggcucaauguuug

SEQ ID NO: 926789 - RNA, 19 nt, Homo sapiens
  misc_RNA (1)...(19): siRNA sense strand
gagaaaccaucagaaauuu

SEQ ID NO: 926790 - RNA, 19 nt, Homo sapiens
  misc_RNA (1)...(19): siRNA sense strand
ggagaaaccaucagaaauu

SEQ ID NO: 926791 - RNA, 19 nt, Homo sapiens
  misc_RNA (1)...(19): siRNA sense strand
acacagaucuucuuaaaca

SEQ ID NO: 926792 - RNA, 19 nt, Homo sapiens
  misc_RNA (1)...(19): siRNA sense strand
ggaugacgcugucuuuguu

SEQ ID NO: 926793 - RNA, 19 nt, Homo sapiens
  misc_RNA (1)...(19): siRNA sense strand
ggacagaacugggaagaac

SEQ ID NO: 926794 - RNA, 19 nt, Homo sapiens
  misc_RNA (1)...(19): siRNA sense strand
gaacugggaagaacaagug

SEQ ID NO: 926795 - RNA, 19 nt, Homo sapiens
  misc_RNA (1)...(19): siRNA sense strand
ugaauagucugccugaagu

SEQ ID NO: 926796 - RNA, 19 nt, Homo sapiens
  misc_RNA (1)...(19): siRNA sense strand
gaaggcgacauguauaaug

SEQ ID NO: 926797 - RNA, 19 nt, Homo sapiens
  misc_RNA (1)...(19): siRNA sense strand
agagagaaauuaugcgaau

SEQ ID NO: 926798 - RNA, 19 nt, Homo sapiens
  misc_RNA (1)...(19): siRNA sense strand
gaagaacaagugaauaguc

SEQ ID NO: 926799 - RNA, 19 nt, Homo sapiens
  misc_RNA (1)...(19): siRNA sense strand
gggaagaacaagugaauag

SEQ ID NO: 926800 - RNA, 19 nt, Homo sapiens
  misc_RNA (1)...(19): siRNA sense strand
cgacauguauaaugacuac

SEQ ID NO: 926801 - RNA, 19 nt, Homo sapiens
  misc_RNA (1)...(19): siRNA sense strand
caacagagagaaauuaugc

SEQ ID NO: 926802 - RNA, 19 nt, Homo sapiens
  misc_RNA (1)...(19): siRNA sense strand
aggaagaggcucaauguuu

SEQ ID NO: 926803 - RNA, 19 nt, Homo sapiens
  misc_RNA (1)...(19): siRNA sense strand
guucagaguuaccuugauc

SEQ ID NO: 926804 - RNA, 19 nt, Homo sapiens
  misc_RNA (1)...(19): siRNA sense strand
aaacaacagcauugagaaa

SEQ ID NO: 926805 - RNA, 19 nt, Homo sapiens
  misc_RNA (1)...(19): siRNA sense strand
ggaacacagaucuucuuaa

SEQ ID NO: 926806 - RNA, 19 nt, Homo sapiens
  misc_RNA (1)...(19): siRNA sense strand
cccacagacuucuugauuu

SEQ ID NO: 926807 - RNA, 19 nt, Homo sapiens
  misc_RNA (1)...(19): siRNA sense strand
aaggcgacauguauaauga

SEQ ID NO: 926808 - RNA, 19 nt, Homo sapiens
  misc_RNA (1)...(19): siRNA sense strand
gugaaggcgacauguauaa

SEQ ID NO: 926809 - RNA, 19 nt, Homo sapiens
  misc_RNA (1)...(19): siRNA sense strand
cagaguccuugguauaaau

SEQ ID NO: 926810 - RNA, 19 nt, Homo sapiens
  misc_RNA (1)...(19): siRNA sense strand
gauauggcagcuucagaaa

SEQ ID NO: 926811 - RNA, 19 nt, Homo sapiens
  misc_RNA (1)...(19): siRNA sense strand
gugcaacagagagaaauua

SEQ ID NO: 926812 - RNA, 19 nt, Homo sapiens
  misc_RNA (1)...(19): siRNA sense strand
gggagaaaccaucagaaau

SEQ ID NO: 926813 - RNA, 19 nt, Homo sapiens
  misc_RNA (1)...(19): siRNA sense strand
ugauuuaggugcuggagau

SEQ ID NO: 926814 - RNA, 19 nt, Homo sapiens
  misc_RNA (1)...(19): siRNA sense strand
aaagauaucagaagugucu

SEQ ID NO: 926815 - RNA, 19 nt, Homo sapiens
  misc_RNA (1)...(19): siRNA sense strand
uaaacaacagcauugagaa

SEQ ID NO: 926816 - RNA, 19 nt, Homo sapiens
  misc_RNA (1)...(19): siRNA sense strand
acagaguccuugguauaaa

SEQ ID NO: 926817 - RNA, 19 nt, Homo sapiens
  misc_RNA (1)...(19): siRNA sense strand
aaauacagaguccuuggua

SEQ ID NO: 926818 - RNA, 19 nt, Homo sapiens
  misc_RNA (1)...(19): siRNA sense strand
gaagaggcucaauguuugu

SEQ ID NO: 926819 - RNA, 19 nt, Homo sapiens
  misc_RNA (1)...(19): siRNA sense strand
caacagcauugagaaaucg

SEQ ID NO: 926820 - RNA, 19 nt, Homo sapiens
  misc_RNA (1)...(19): siRNA sense strand
uuaaacaacagcauugaga

SEQ ID NO: 926821 - RNA, 19 nt, Homo sapiens
  misc_RNA (1)...(19): siRNA sense strand
gaaaucaaaggacagaacu

SEQ ID NO: 926822 - RNA, 19 nt, Homo sapiens
  misc_RNA (1)...(19): siRNA sense strand
gaggcucaauguuuguguu

SEQ ID NO: 926823 - RNA, 19 nt, Homo sapiens
  misc_RNA (1)...(19): siRNA sense strand
cuggcuauuuauccaauua

SEQ ID NO: 926824 - RNA, 19 nt, Homo sapiens
  misc_RNA (1)...(19): siRNA sense strand
acaacagcauugagaaauc

SEQ ID NO: 926825 - RNA, 19 nt, Homo sapiens
  misc_RNA (1)...(19): siRNA sense strand
aagaacaagugaauagucu

SEQ ID NO: 926826 - RNA, 19 nt, Homo sapiens
  misc_RNA (1)...(19): siRNA sense strand
gcaacagagagaaauuaug

SEQ ID NO: 926827 - RNA, 19 nt, Homo sapiens
  misc_RNA (1)...(19): siRNA sense strand
gaaauacagaguccuuggu

SEQ ID NO: 926828 - RNA, 19 nt, Homo sapiens
  misc_RNA (1)...(19): siRNA sense strand
guauaaugacuacuacguu

SEQ ID NO: 926829 - RNA, 19 nt, Homo sapiens
  misc_RNA (1)...(19): siRNA sense strand
gagagaaauuaugcgaauc

SEQ ID NO: 926830 - RNA, 19 nt, Homo sapiens
  misc_RNA (1)...(19): siRNA sense strand
ggaaaucaaaggacagaac

SEQ ID NO: 926831 - RNA, 19 nt, Homo sapiens
  misc_RNA (1)...(19): siRNA sense strand
gaaaccaucagaaauuuug

SEQ ID NO: 926832 - RNA, 19 nt, Homo sapiens
  misc_RNA (1)...(19): siRNA sense strand
cagaucuucuuaaacaaca

SEQ ID NO: 926833 - RNA, 19 nt, Homo sapiens
  misc_RNA (1)...(19): siRNA sense strand
acuacuacguucuggauga

SEQ ID NO: 926834 - RNA, 19 nt, Homo sapiens
  misc_RNA (1)...(19): siRNA sense strand
uaaaugaauggcagaauac

SEQ ID NO: 926835 - RNA, 19 nt, Homo sapiens
  misc_RNA (1)...(19): siRNA sense strand
cagagacugcuuaaaauua

SEQ ID NO: 926836 - RNA, 19 nt, Homo sapiens
  misc_RNA (1)...(19): siRNA sense strand
ugauauggcagcuucagaa

SEQ ID NO: 926837 - RNA, 19 nt, Homo sapiens
  misc_RNA (1)...(19): siRNA sense strand
aaagaaauacagaguccuu

SEQ ID NO: 926838 - RNA, 19 nt, Homo sapiens
  misc_RNA (1)...(19): siRNA sense strand
acuccaggcugucuuuguu

SEQ ID NO: 926839 - RNA, 19 nt, Homo sapiens
  misc_RNA (1)...(19): siRNA sense strand
ggaagaacaagugaauagu

SEQ ID NO: 926840 - RNA, 19 nt, Homo sapiens
  misc_RNA (1)...(19): siRNA sense strand
gagauggagaagucacaaa

SEQ ID NO: 926841 - RNA, 19 nt, Homo sapiens
  misc_RNA (1)...(19): siRNA sense strand
uacagaguccuugguauaa

SEQ ID NO: 926842 - RNA, 19 nt, Homo sapiens
  misc_RNA (1)...(19): siRNA sense strand
gcuaggaagaggcucaaug

SEQ ID NO: 926843 - RNA, 19 nt, Homo sapiens
  misc_RNA (1)...(19): siRNA sense strand
ugggagaaaccaucagaaa

SEQ ID NO: 926844 - RNA, 19 nt, Homo sapiens
  misc_RNA (1)...(19): siRNA sense strand
ggucauccuugcccuuguc

SEQ ID NO: 926845 - RNA, 19 nt, Homo sapiens
  misc_RNA (1)...(19): siRNA sense strand
cuaggaagaggcucaaugu

SEQ ID NO: 926846 - RNA, 19 nt, Homo sapiens
  misc_RNA (1)...(19): siRNA sense strand
ucaaggaacacagaucuuc

SEQ ID NO: 926847 - RNA, 19 nt, Homo sapiens
  misc_RNA (1)...(19): siRNA sense strand
gugaauagucugccugaag

SEQ ID NO: 926848 - RNA, 19 nt, Homo sapiens
  misc_RNA (1)...(19): siRNA sense strand
agagaaauuaugcgaauca

SEQ ID NO: 926849 - RNA, 19 nt, Homo sapiens
  misc_RNA (1)...(19): siRNA sense strand
gaauagucugccugaaguu

SEQ ID NO: 926850 - RNA, 19 nt, Homo sapiens
  misc_RNA (1)...(19): siRNA sense strand
cagaucaguuucagagacu

SEQ ID NO: 926851 - RNA, 19 nt, Homo sapiens
  misc_RNA (1)...(19): siRNA sense strand
gacgcugucuuuguucuca

SEQ ID NO: 926852 - RNA, 19 nt, Homo sapiens
  misc_RNA (1)...(19): siRNA sense strand
caagugggagaaaccauca

SEQ ID NO: 926853 - RNA, 19 nt, Homo sapiens
  misc_RNA (1)...(19): siRNA sense strand
ugugaaggcgacauguaua

SEQ ID NO: 926854 - RNA, 19 nt, Homo sapiens
  misc_RNA (1)...(19): siRNA sense strand
gugugaaggcgacauguau

SEQ ID NO: 926855 - RNA, 19 nt, Homo sapiens
  misc_RNA (1)...(19): siRNA sense strand
gcuggcuauuuauccaauu

SEQ ID NO: 926856 - RNA, 19 nt, Homo sapiens
  misc_RNA (1)...(19): siRNA sense strand
aggaacacagaucuucuua

SEQ ID NO: 926857 - RNA, 19 nt, Homo sapiens
  misc_RNA (1)...(19): siRNA sense strand
cagacuaccauaccugugu

SEQ ID NO: 926858 - RNA, 19 nt, Homo sapiens
  misc_RNA (1)...(19): siRNA sense strand
caggcugucuuuguucaga

SEQ ID NO: 926859 - RNA, 19 nt, Homo sapiens
  misc_RNA (1)...(19): siRNA sense strand
aucaauggguugcuaggaa

SEQ ID NO: 926860 - RNA, 19 nt, Homo sapiens
  misc_RNA (1)...(19): siRNA sense strand
cauguauaaugacuacuac

SEQ ID NO: 926861 - RNA, 19 nt, Homo sapiens
  misc_RNA (1)...(19): siRNA sense strand
gcucaauguuuguguuuuc

SEQ ID NO: 926862 - RNA, 19 nt, Homo sapiens
  misc_RNA (1)...(19): siRNA sense strand
gagaaaucgggcuggcuau

SEQ ID NO: 926863 - RNA, 19 nt, Homo sapiens
  misc_RNA (1)...(19): siRNA sense strand
cacagaucuucuuaaacaa

SEQ ID NO: 926864 - RNA, 19 nt, Homo sapiens
  misc_RNA (1)...(19): siRNA sense strand
ggagauggagaagucacaa

SEQ ID NO: 926865 - RNA, 19 nt, Homo sapiens
  misc_RNA (1)...(19): siRNA sense strand
ugacuacuacguucuggau

SEQ ID NO: 926866 - RNA, 19 nt, Homo sapiens
  misc_RNA (1)...(19): siRNA sense strand
acccacagacuucuugauu

SEQ ID NO: 926867 - RNA, 19 nt, Homo sapiens
  misc_RNA (1)...(19): siRNA sense strand
gaagcuuucaccagacuac

SEQ ID NO: 926868 - RNA, 19 nt, Homo sapiens
  misc_RNA (1)...(19): siRNA sense strand
uuuaggugcuggagaugga

SEQ ID NO: 926869 - RNA, 19 nt, Homo sapiens
  misc_RNA (1)...(19): siRNA sense strand
acagacuucuugauuuagg

SEQ ID NO: 926870 - RNA, 19 nt, Homo sapiens
  misc_RNA (1)...(19): siRNA sense strand
caaggaacacagaucuucu

SEQ ID NO: 926871 - RNA, 19 nt, Homo sapiens
  misc_RNA (1)...(19): siRNA sense strand
uuucagagacugcuuaaaa

SEQ ID NO: 926872 - RNA, 19 nt, Homo sapiens
  misc_RNA (1)...(19): siRNA sense strand
ccacacagcuuccagauga

SEQ ID NO: 926873 - RNA, 19 nt, Homo sapiens
  misc_RNA (1)...(19): siRNA sense strand
ggacgauccugacauuaua

SEQ ID NO: 926874 - RNA, 19 nt, Homo sapiens
  misc_RNA (1)...(19): siRNA sense strand
ggacaaauauggucuugga

SEQ ID NO: 926875 - RNA, 19 nt, Homo sapiens
  misc_RNA (1)...(19): siRNA sense strand
gaauagaugugccaauugu

SEQ ID NO: 926876 - RNA, 19 nt, Homo sapiens
  misc_RNA (1)...(19): siRNA sense strand
ggcagaaccucaagacuuu

SEQ ID NO: 926877 - RNA, 19 nt, Homo sapiens
  misc_RNA (1)...(19): siRNA sense strand
gaacugcggucgcuggaau

SEQ ID NO: 926878 - RNA, 19 nt, Homo sapiens
  misc_RNA (1)...(19): siRNA sense strand
ccacaaacaucuucugauc

SEQ ID NO: 926879 - RNA, 19 nt, Homo sapiens
  misc_RNA (1)...(19): siRNA sense strand
gagguggacucccauuauu

SEQ ID NO: 926880 - RNA, 19 nt, Homo sapiens
  misc_RNA (1)...(19): siRNA sense strand
gcuggucgcugucaauuau

SEQ ID NO: 926881 - RNA, 19 nt, Homo sapiens
  misc_RNA (1)...(19): siRNA sense strand
caacgucaaucaaauucaa

SEQ ID NO: 926882 - RNA, 19 nt, Homo sapiens
  misc_RNA (1)...(19): siRNA sense strand
acaaacaucuucugaucaa

SEQ ID NO: 926883 - RNA, 19 nt, Homo sapiens
  misc_RNA (1)...(19): siRNA sense strand
aagaauagaugugccaauu

SEQ ID NO: 926884 - RNA, 19 nt, Homo sapiens
  misc_RNA (1)...(19): siRNA sense strand
ggaccggguucucuaucua

SEQ ID NO: 926885 - RNA, 19 nt, Homo sapiens
  misc_RNA (1)...(19): siRNA sense strand
cacaacggaugaacaaauu

SEQ ID NO: 926886 - RNA, 19 nt, Homo sapiens
  misc_RNA (1)...(19): siRNA sense strand
agacaaaucuguagcuagu

SEQ ID NO: 926887 - RNA, 19 nt, Homo sapiens
  misc_RNA (1)...(19): siRNA sense strand
gaucagaaagagauaaaga

SEQ ID NO: 926888 - RNA, 19 nt, Homo sapiens
  misc_RNA (1)...(19): siRNA sense strand
gcacgacguagaaacuaua

SEQ ID NO: 926889 - RNA, 19 nt, Homo sapiens
  misc_RNA (1)...(19): siRNA sense strand
gaauuuaacccaacgucaa

SEQ ID NO: 926890 - RNA, 19 nt, Homo sapiens
  misc_RNA (1)...(19): siRNA sense strand
gcucuauccucgccacaaa

SEQ ID NO: 926891 - RNA, 19 nt, Homo sapiens
  misc_RNA (1)...(19): siRNA sense strand
ccaugaagaaagccuauua

SEQ ID NO: 926892 - RNA, 19 nt, Homo sapiens
  misc_RNA (1)...(19): siRNA sense strand
gaagugagaaucaugucaa

SEQ ID NO: 926893 - RNA, 19 nt, Homo sapiens
  misc_RNA (1)...(19): siRNA sense strand
gcuggugcauccaucagua

SEQ ID NO: 926894 - RNA, 19 nt, Homo sapiens
  misc_RNA (1)...(19): siRNA sense strand
gaaacuggcacgacguaga

SEQ ID NO: 926895 - RNA, 19 nt, Homo sapiens
  misc_RNA (1)...(19): siRNA sense strand
ugagcaagccagaauuuaa

SEQ ID NO: 926896 - RNA, 19 nt, Homo sapiens
  misc_RNA (1)...(19): siRNA sense strand
caacggaugaacaaauuga

SEQ ID NO: 926897 - RNA, 19 nt, Homo sapiens
  misc_RNA (1)...(19): siRNA sense strand
ccugaagacuauuauacaa

SEQ ID NO: 926898 - RNA, 19 nt, Homo sapiens
  misc_RNA (1)...(19): siRNA sense strand
ucagaaaggccaacaaagu

SEQ ID NO: 926899 - RNA, 19 nt, Homo sapiens
  misc_RNA (1)...(19): siRNA sense strand
uuacaaauccaguugagaa

SEQ ID NO: 926900 - RNA, 19 nt, Homo sapiens
  misc_RNA (1)...(19): siRNA sense strand
gagaggaucagaaagagau

SEQ ID NO: 926901 - RNA, 19 nt, Homo sapiens
  misc_RNA (1)...(19): siRNA sense strand
agaaggagaggaucagaaa

SEQ ID NO: 926902 - RNA, 19 nt, Homo sapiens
  misc_RNA (1)...(19): siRNA sense strand
cagaaaggccaacaaagug

SEQ ID NO: 926903 - RNA, 19 nt, Homo sapiens
  misc_RNA (1)...(19): siRNA sense strand
ccaagaccaccaugaagaa

SEQ ID NO: 926904 - RNA, 19 nt, Homo sapiens
  misc_RNA (1)...(19): siRNA sense strand
uaacccaacgucaaucaaa

SEQ ID NO: 926905 - RNA, 19 nt, Homo sapiens
  misc_RNA (1)...(19): siRNA sense strand
gggcauggcagacaaaucu

SEQ ID NO: 926906 - RNA, 19 nt, Homo sapiens
  misc_RNA (1)...(19): siRNA sense strand
cauuauagccuucagaaag

SEQ ID NO: 926907 - RNA, 19 nt, Homo sapiens
  misc_RNA (1)...(19): siRNA sense strand
ccacgagcaucuccacaca

SEQ ID NO: 926908 - RNA, 19 nt, Homo sapiens
  misc_RNA (1)...(19): siRNA sense strand
cagaaagagauaaagauug

SEQ ID NO: 926909 - RNA, 19 nt, Homo sapiens
  misc_RNA (1)...(19): siRNA sense strand
gccaagaccaccaugaaga

SEQ ID NO: 926910 - RNA, 19 nt, Homo sapiens
  misc_RNA (1)...(19): siRNA sense strand
gagcaucuccacacagcuu

SEQ ID NO: 926911 - RNA, 19 nt, Homo sapiens
  misc_RNA (1)...(19): siRNA sense strand
gacauuauagccuucagaa

SEQ ID NO: 926912 - RNA, 19 nt, Homo sapiens
  misc_RNA (1)...(19): siRNA sense strand
ggaugaacaaauugauuga

SEQ ID NO: 926913 - RNA, 19 nt, Homo sapiens
  misc_RNA (1)...(19): siRNA sense strand
ccaaagagcucguuuuagc

SEQ ID NO: 926914 - RNA, 19 nt, Homo sapiens
  misc_RNA (1)...(19): siRNA sense strand
ucaagaugaagcaugauuu

SEQ ID NO: 926915 - RNA, 19 nt, Homo sapiens
  misc_RNA (1)...(19): siRNA sense strand
aaacuggcacgacguagaa

SEQ ID NO: 926916 - RNA, 19 nt, Homo sapiens
  misc_RNA (1)...(19): siRNA sense strand
acacacaacggaugaacaa

SEQ ID NO: 926917 - RNA, 19 nt, Homo sapiens
  misc_RNA (1)...(19): siRNA sense strand
gggcccacuucuuccuuaa

SEQ ID NO: 926918 - RNA, 19 nt, Homo sapiens
  misc_RNA (1)...(19): siRNA sense strand
ccuccugacucuuacaaau

SEQ ID NO: 926919 - RNA, 19 nt, Homo sapiens
  misc_RNA (1)...(19): siRNA sense strand
cgagguggacucccauuau

SEQ ID NO: 926920 - RNA, 19 nt, Homo sapiens
  misc_RNA (1)...(19): siRNA sense strand
gguggugccucccaaagag

SEQ ID NO: 926921 - RNA, 19 nt, Homo sapiens
  misc_RNA (1)...(19): siRNA sense strand
gagcaagccagaauuuaac

SEQ ID NO: 926922 - RNA, 19 nt, Homo sapiens
  misc_RNA (1)...(19): siRNA sense strand
ucccugcgcugccguaaau

SEQ ID NO: 926923 - RNA, 19 nt, Homo sapiens
  misc_RNA (1)...(19): siRNA sense strand
uuaccuggcauguggauuu

SEQ ID NO: 926924 - RNA, 19 nt, Homo sapiens
  misc_RNA (1)...(19): siRNA sense strand
cagcagaguacgaugaguu

SEQ ID NO: 926925 - RNA, 19 nt, Homo sapiens
  misc_RNA (1)...(19): siRNA sense strand
ggcacgacguagaaacuau

SEQ ID NO: 926926 - RNA, 19 nt, Homo sapiens
  misc_RNA (1)...(19): siRNA sense strand
auagaugugccaauuguuu

SEQ ID NO: 926927 - RNA, 19 nt, Homo sapiens
  misc_RNA (1)...(19): siRNA sense strand
caaacaucuucugaucaaa

SEQ ID NO: 926928 - RNA, 19 nt, Homo sapiens
  misc_RNA (1)...(19): siRNA sense strand
caagaccaguaaauuuaac

SEQ ID NO: 926929 - RNA, 19 nt, Homo sapiens
  misc_RNA (1)...(19): siRNA sense strand
acacaacggaugaacaaau

SEQ ID NO: 926930 - RNA, 19 nt, Homo sapiens
  misc_RNA (1)...(19): siRNA sense strand
uggcagaaccucaagacuu

SEQ ID NO: 926931 - RNA, 19 nt, Homo sapiens
  misc_RNA (1)...(19): siRNA sense strand
ugucccaguuguuuagaaa

SEQ ID NO: 926932 - RNA, 19 nt, Homo sapiens
  misc_RNA (1)...(19): siRNA sense strand
caauuauauuccagaagug

SEQ ID NO: 926933 - RNA, 19 nt, Homo sapiens
  misc_RNA (1)...(19): siRNA sense strand
gcgcugccguaaaugugaa

SEQ ID NO: 926934 - RNA, 19 nt, Homo sapiens
  misc_RNA (1)...(19): siRNA sense strand
ggagaggaucagaaagaga

SEQ ID NO: 926935 - RNA, 19 nt, Homo sapiens
  misc_RNA (1)...(19): siRNA sense strand
aaggagaggaucagaaaga

SEQ ID NO: 926936 - RNA, 19 nt, Homo sapiens
  misc_RNA (1)...(19): siRNA sense strand
gcagcuugcucagaaagag

SEQ ID NO: 926937 - RNA, 19 nt, Homo sapiens
  misc_RNA (1)...(19): siRNA sense strand
cggaugaacaaauugauug

SEQ ID NO: 926938 - RNA, 19 nt, Homo sapiens
  misc_RNA (1)...(19): siRNA sense strand
cagccaagaccaccaugaa

SEQ ID NO: 926939 - RNA, 19 nt, Homo sapiens
  misc_RNA (1)...(19): siRNA sense strand
ggaugaaguggaaccucua

SEQ ID NO: 926940 - RNA, 19 nt, Homo sapiens
  misc_RNA (1)...(19): siRNA sense strand
gguggacucccauuauugu

SEQ ID NO: 926941 - RNA, 19 nt, Homo sapiens
  misc_RNA (1)...(19): siRNA sense strand
caagaccaccaugaagaaa

SEQ ID NO: 926942 - RNA, 19 nt, Homo sapiens
  misc_RNA (1)...(19): siRNA sense strand
caaaguggguauuuucauc

SEQ ID NO: 926943 - RNA, 19 nt, Homo sapiens
  misc_RNA (1)...(19): siRNA sense strand
gccaacaaaguggguauuu

SEQ ID NO: 926944 - RNA, 19 nt, Homo sapiens
  misc_RNA (1)...(19): siRNA sense strand
aguggaaccucuaccugaa

SEQ ID NO: 926945 - RNA, 19 nt, Homo sapiens
  misc_RNA (1)...(19): siRNA sense strand
ggcuguggaugaaguggaa

SEQ ID NO: 926946 - RNA, 19 nt, Homo sapiens
  misc_RNA (1)...(19): siRNA sense strand
uggaaccucuaccugaaga

SEQ ID NO: 926947 - RNA, 19 nt, Homo sapiens
  misc_RNA (1)...(19): siRNA sense strand
ccagggaacagaagucauc

SEQ ID NO: 926948 - RNA, 19 nt, Homo sapiens
  misc_RNA (1)...(19): siRNA sense strand
cagcagcagaguacgauga

SEQ ID NO: 926949 - RNA, 19 nt, Homo sapiens
  misc_RNA (1)...(19): siRNA sense strand
caaauccaguugagaaccu

SEQ ID NO: 926950 - RNA, 19 nt, Homo sapiens
  misc_RNA (1)...(19): siRNA sense strand
cgacguagaaacuauaugc

SEQ ID NO: 926951 - RNA, 19 nt, Homo sapiens
  misc_RNA (1)...(19): siRNA sense strand
caacaaaguggguauuuuc

SEQ ID NO: 926952 - RNA, 19 nt, Homo sapiens
  misc_RNA (1)...(19): siRNA sense strand
ccaacaaaguggguauuuu

SEQ ID NO: 926953 - RNA, 19 nt, Homo sapiens
  misc_RNA (1)...(19): siRNA sense strand
gaagacuauuauacaagac

SEQ ID NO: 926954 - RNA, 19 nt, Homo sapiens
  misc_RNA (1)...(19): siRNA sense strand
ccagaugacccagccaaga

SEQ ID NO: 926955 - RNA, 19 nt, Homo sapiens
  misc_RNA (1)...(19): siRNA sense strand
ugggcccacuucuuccuua

SEQ ID NO: 926956 - RNA, 19 nt, Homo sapiens
  misc_RNA (1)...(19): siRNA sense strand
gaccgugugcuucaagaug

SEQ ID NO: 926957 - RNA, 19 nt, Homo sapiens
  misc_RNA (1)...(19): siRNA sense strand
ggaugcagcagcagaguac

SEQ ID NO: 926958 - RNA, 19 nt, Homo sapiens
  misc_RNA (1)...(19): siRNA sense strand
gaccaguaaauuuaacaga

SEQ ID NO: 926959 - RNA, 19 nt, Homo sapiens
  misc_RNA (1)...(19): siRNA sense strand
gaggaucagaaagagauaa

SEQ ID NO: 926960 - RNA, 19 nt, Homo sapiens
  misc_RNA (1)...(19): siRNA sense strand
uugccggacuuucccuuaa

SEQ ID NO: 926961 - RNA, 19 nt, Homo sapiens
  misc_RNA (1)...(19): siRNA sense strand
caagaugaagcaugauuuu

SEQ ID NO: 926962 - RNA, 19 nt, Homo sapiens
  misc_RNA (1)...(19): siRNA sense strand
ucucgcaacucuacuucug

SEQ ID NO: 926963 - RNA, 19 nt, Homo sapiens
  misc_RNA (1)...(19): siRNA sense strand
cuucagaaaggccaacaaa

SEQ ID NO: 926964 - RNA, 19 nt, Homo sapiens
  misc_RNA (1)...(19): siRNA sense strand
ccagaagugagaaucaugu

SEQ ID NO: 926965 - RNA, 19 nt, Homo sapiens
  misc_RNA (1)...(19): siRNA sense strand
ugccggacuuucccuuaaa

SEQ ID NO: 926966 - RNA, 19 nt, Homo sapiens
  misc_RNA (1)...(19): siRNA sense strand
ugaaaauccucacacacaa

SEQ ID NO: 926967 - RNA, 19 nt, Homo sapiens
  misc_RNA (1)...(19): siRNA sense strand
agaauagaugugccaauug

SEQ ID NO: 926968 - RNA, 19 nt, Homo sapiens
  misc_RNA (1)...(19): siRNA sense strand
aagaaacuggcacgacgua

SEQ ID NO: 926969 - RNA, 19 nt, Homo sapiens
  misc_RNA (1)...(19): siRNA sense strand
caugucaauucccaaccuu

SEQ ID NO: 926970 - RNA, 19 nt, Homo sapiens
  misc_RNA (1)...(19): siRNA sense strand
aacccaacgucaaucaaau

SEQ ID NO: 926971 - RNA, 19 nt, Homo sapiens
  misc_RNA (1)...(19): siRNA sense strand
gugaacauaauuugagcaa

SEQ ID NO: 926972 - RNA, 19 nt, Homo sapiens
  misc_RNA (1)...(19): siRNA sense strand
gaacgagucugaaaucauc

SEQ ID NO: 926973 - RNA, 19 nt, Homo sapiens
  misc_RNA (1)...(19): siRNA sense strand
gaaaggagcaggagccaaa

SEQ ID NO: 926974 - RNA, 19 nt, Homo sapiens
  misc_RNA (1)...(19): siRNA sense strand
gugaagagcaggcuaaaua

SEQ ID NO: 926975 - RNA, 19 nt, Homo sapiens
  misc_RNA (1)...(19): siRNA sense strand
gagagaaacuacaggaauc

SEQ ID NO: 926976 - RNA, 19 nt, Homo sapiens
  misc_RNA (1)...(19): siRNA sense strand
aaagaaagacagcuacaua

SEQ ID NO: 926977 - RNA, 19 nt, Homo sapiens
  misc_RNA (1)...(19): siRNA sense strand
gaagagcaggcuaaauauu

SEQ ID NO: 926978 - RNA, 19 nt, Homo sapiens
  misc_RNA (1)...(19): siRNA sense strand
caagagacaauuaugguaa

SEQ ID NO: 926979 - RNA, 19 nt, Homo sapiens
  misc_RNA (1)...(19): siRNA sense strand
gaauaacgacccauacaug

SEQ ID NO: 926980 - RNA, 19 nt, Homo sapiens
  misc_RNA (1)...(19): siRNA sense strand
aagagcaggcuaaauauua

SEQ ID NO: 926981 - RNA, 19 nt, Homo sapiens
  misc_RNA (1)...(19): siRNA sense strand
cgauuuagcugacaucaag

SEQ ID NO: 926982 - RNA, 19 nt, Homo sapiens
  misc_RNA (1)...(19): siRNA sense strand
gcaagagacaauuauggua

SEQ ID NO: 926983 - RNA, 19 nt, Homo sapiens
  misc_RNA (1)...(19): siRNA sense strand
cgaagaggaaggcgauuua

SEQ ID NO: 926984 - RNA, 19 nt, Homo sapiens
  misc_RNA (1)...(19): siRNA sense strand
gaaugucguugcugagugu

SEQ ID NO: 926985 - RNA, 19 nt, Homo sapiens
  misc_RNA (1)...(19): siRNA sense strand
gaugucaacuccaaacaag

SEQ ID NO: 926986 - RNA, 19 nt, Homo sapiens
  misc_RNA (1)...(19): siRNA sense strand
gaauuagcacggaaagaaa

SEQ ID NO: 926987 - RNA, 19 nt, Homo sapiens
  misc_RNA (1)...(19): siRNA sense strand
gaaagacagcuacauaugc

SEQ ID NO: 926988 - RNA, 19 nt, Homo sapiens
  misc_RNA (1)...(19): siRNA sense strand
uagcugacaucaagucuuc

SEQ ID NO: 926989 - RNA, 19 nt, Homo sapiens
  misc_RNA (1)...(19): siRNA sense strand
gaagaggaagagagagaaa

SEQ ID NO: 926990 - RNA, 19 nt, Homo sapiens
  misc_RNA (1)...(19): siRNA sense strand
aaagacagcuacauaugca

SEQ ID NO: 926991 - RNA, 19 nt, Homo sapiens
  misc_RNA (1)...(19): siRNA sense strand
ucaaauggaucucuuucuc

SEQ ID NO: 926992 - RNA, 19 nt, Homo sapiens
  misc_RNA (1)...(19): siRNA sense strand
gagaacaucaaauaaagug

SEQ ID NO: 926993 - RNA, 19 nt, Homo sapiens
  misc_RNA (1)...(19): siRNA sense strand
ccgagaacaucaaauaaag

SEQ ID NO: 926994 - RNA, 19 nt, Homo sapiens
  misc_RNA (1)...(19): siRNA sense strand
ugaauuagcacggaaagaa

SEQ ID NO: 926995 - RNA, 19 nt, Homo sapiens
  misc_RNA (1)...(19): siRNA sense strand
gaagagagagaaacuacag

SEQ ID NO: 926996 - RNA, 19 nt, Homo sapiens
  misc_RNA (1)...(19): siRNA sense strand
agagcaggcuaaauauuau

SEQ ID NO: 926997 - RNA, 19 nt, Homo sapiens
  misc_RNA (1)...(19): siRNA sense strand
aaugacagcugccuacauc

SEQ ID NO: 926998 - RNA, 19 nt, Homo sapiens
  misc_RNA (1)...(19): siRNA sense strand
gcuaucaaccagauucuug

SEQ ID NO: 926999 - RNA, 19 nt, Homo sapiens
  misc_RNA (1)...(19): siRNA sense strand
cgucacacaucccaucaga

SEQ ID NO: 927000 - RNA, 19 nt, Homo sapiens
  misc_RNA (1)...(19): siRNA sense strand
gaucagucaucccgaagag

SEQ ID NO: 927001 - RNA, 19 nt, Homo sapiens
  misc_RNA (1)...(19): siRNA sense strand
gacacgagguggccagaca

SEQ ID NO: 927002 - RNA, 19 nt, Homo sapiens
  misc_RNA (1)...(19): siRNA sense strand
acacuuccauguccagguu

SEQ ID NO: 927003 - RNA, 19 nt, Homo sapiens
  misc_RNA (1)...(19): siRNA sense strand
cuccugauaucccuacuuu

SEQ ID NO: 927004 - RNA, 19 nt, Homo sapiens
  misc_RNA (1)...(19): siRNA sense strand
gauggaggccucuacaaca

SEQ ID NO: 927005 - RNA, 19 nt, Homo sapiens
  misc_RNA (1)...(19): siRNA sense strand
ugccaaauaugaauaacga

SEQ ID NO: 927006 - RNA, 19 nt, Homo sapiens
  misc_RNA (1)...(19): siRNA sense strand
gaaagaaagacagcuacau

SEQ ID NO: 927007 - RNA, 19 nt, Homo sapiens
  misc_RNA (1)...(19): siRNA sense strand
uuaagaagccucugaaugc

SEQ ID NO: 927008 - RNA, 19 nt, Homo sapiens
  misc_RNA (1)...(19): siRNA sense strand
uaacgacccauacauguca

SEQ ID NO: 927009 - RNA, 19 nt, Homo sapiens
  misc_RNA (1)...(19): siRNA sense strand
gaucacacccgucacacau

SEQ ID NO: 927010 - RNA, 19 nt, Homo sapiens
  misc_RNA (1)...(19): siRNA sense strand
gcaaggucagccuguauau

SEQ ID NO: 927011 - RNA, 19 nt, Homo sapiens
  misc_RNA (1)...(19): siRNA sense strand
ggcaaggucagccuguaua

SEQ ID NO: 927012 - RNA, 19 nt, Homo sapiens
  misc_RNA (1)...(19): siRNA sense strand
aaagaccucacauuaagaa

SEQ ID NO: 927013 - RNA, 19 nt, Homo sapiens
  misc_RNA (1)...(19): siRNA sense strand
ggaaagaaagacagcuaca

SEQ ID NO: 927014 - RNA, 19 nt, Homo sapiens
  misc_RNA (1)...(19): siRNA sense strand
gugcagcuaucaaccagau

SEQ ID NO: 927015 - RNA, 19 nt, Homo sapiens
  misc_RNA (1)...(19): siRNA sense strand
gcacuuuucuccaggauca

SEQ ID NO: 927016 - RNA, 19 nt, Homo sapiens
  misc_RNA (1)...(19): siRNA sense strand
agaaagacagcuacauaug

SEQ ID NO: 927017 - RNA, 19 nt, Homo sapiens
  misc_RNA (1)...(19): siRNA sense strand
gaaagaaaugagagcgaau

SEQ ID NO: 927018 - RNA, 19 nt, Homo sapiens
  misc_RNA (1)...(19): siRNA sense strand
gguacauaaugaugccaaa

SEQ ID NO: 927019 - RNA, 19 nt, Homo sapiens
  misc_RNA (1)...(19): siRNA sense strand
gguacagguccaagaauga

SEQ ID NO: 927020 - RNA, 19 nt, Homo sapiens
  misc_RNA (1)...(19): siRNA sense strand
ugaagagcaggcuaaauau

SEQ ID NO: 927021 - RNA, 19 nt, Homo sapiens
  misc_RNA (1)...(19): siRNA sense strand
gagagagaaacuacaggaa

SEQ ID NO: 927022 - RNA, 19 nt, Homo sapiens
  misc_RNA (1)...(19): siRNA sense strand
ccucauccagcuauuguaa

SEQ ID NO: 927023 - RNA, 19 nt, Homo sapiens
  misc_RNA (1)...(19): siRNA sense strand
aagaaagacagcuacauau

SEQ ID NO: 927024 - RNA, 19 nt, Homo sapiens
  misc_RNA (1)...(19): siRNA sense strand
gcagcuaucaaccagauuc

SEQ ID NO: 927025 - RNA, 19 nt, Homo sapiens
  misc_RNA (1)...(19): siRNA sense strand
ucauccagcuauuguaaca

SEQ ID NO: 927026 - RNA, 19 nt, Homo sapiens
  misc_RNA (1)...(19): siRNA sense strand
gacagcugccuacaucuga

SEQ ID NO: 927027 - RNA, 19 nt, Homo sapiens
  misc_RNA (1)...(19): siRNA sense strand
gaagaggaaggcgauuuag

SEQ ID NO: 927028 - RNA, 19 nt, Homo sapiens
  misc_RNA (1)...(19): siRNA sense strand
ggugaacgagucugaaauc

SEQ ID NO: 927029 - RNA, 19 nt, Homo sapiens
  misc_RNA (1)...(19): siRNA sense strand
gugaacgagucugaaauca

SEQ ID NO: 927030 - RNA, 19 nt, Homo sapiens
  misc_RNA (1)...(19): siRNA sense strand
ggacccuccuacucgaguu

SEQ ID NO: 927031 - RNA, 19 nt, Homo sapiens
  misc_RNA (1)...(19): siRNA sense strand
cccgagaacaucaaauaaa

SEQ ID NO: 927032 - RNA, 19 nt, Homo sapiens
  misc_RNA (1)...(19): siRNA sense strand
cgugaagccucagcaugaa

SEQ ID NO: 927033 - RNA, 19 nt, Homo sapiens
  misc_RNA (1)...(19): siRNA sense strand
gaggaagagagagaaacua

SEQ ID NO: 927034 - RNA, 19 nt, Homo sapiens
  misc_RNA (1)...(19): siRNA sense strand
cuacauaugcagcuuuauc

SEQ ID NO: 927035 - RNA, 19 nt, Homo sapiens
  misc_RNA (1)...(19): siRNA sense strand
uaagaagccucugaaugcu

SEQ ID NO: 927036 - RNA, 19 nt, Homo sapiens
  misc_RNA (1)...(19): siRNA sense strand
gacaagcacaaaccucuca

SEQ ID NO: 927037 - RNA, 19 nt, Homo sapiens
  misc_RNA (1)...(19): siRNA sense strand
gaaugacagcugccuacau

SEQ ID NO: 927038 - RNA, 19 nt, Homo sapiens
  misc_RNA (1)...(19): siRNA sense strand
ucagguacagguccaagaa

SEQ ID NO: 927039 - RNA, 19 nt, Homo sapiens
  misc_RNA (1)...(19): siRNA sense strand
ggaagagagagaaacuaca

SEQ ID NO: 927040 - RNA, 19 nt, Homo sapiens
  misc_RNA (1)...(19): siRNA sense strand
aaagaaagugcagcuauca

SEQ ID NO: 927041 - RNA, 19 nt, Homo sapiens
  misc_RNA (1)...(19): siRNA sense strand
caugucaaauggaucucuu

SEQ ID NO: 927042 - RNA, 19 nt, Homo sapiens
  misc_RNA (1)...(19): siRNA sense strand
agagagaaacuacaggaau

SEQ ID NO: 927043 - RNA, 19 nt, Homo sapiens
  misc_RNA (1)...(19): siRNA sense strand
gaaggcgauuuagcugaca

SEQ ID NO: 927044 - RNA, 19 nt, Homo sapiens
  misc_RNA (1)...(19): siRNA sense strand
gaguuauuccggguacaua

SEQ ID NO: 927045 - RNA, 19 nt, Homo sapiens
  misc_RNA (1)...(19): siRNA sense strand
aaugagagcgaaugucguu

SEQ ID NO: 927046 - RNA, 19 nt, Homo sapiens
  misc_RNA (1)...(19): siRNA sense strand
gaacauccccacacugaca

SEQ ID NO: 927047 - RNA, 19 nt, Homo sapiens
  misc_RNA (1)...(19): siRNA sense strand
gagcaggcuaaauauuaug

SEQ ID NO: 927048 - RNA, 19 nt, Homo sapiens
  misc_RNA (1)...(19): siRNA sense strand
ugaauaacgacccauacau

SEQ ID NO: 927049 - RNA, 19 nt, Homo sapiens
  misc_RNA (1)...(19): siRNA sense strand
ggaaucugcaucagguaca

SEQ ID NO: 927050 - RNA, 19 nt, Homo sapiens
  misc_RNA (1)...(19): siRNA sense strand
aagaagaggaagagagaga

SEQ ID NO: 927051 - RNA, 19 nt, Homo sapiens
  misc_RNA (1)...(19): siRNA sense strand
gagacaauuaugguaagaa

SEQ ID NO: 927052 - RNA, 19 nt, Homo sapiens
  misc_RNA (1)...(19): siRNA sense strand
agagacaauuaugguaaga

SEQ ID NO: 927053 - RNA, 19 nt, Homo sapiens
  misc_RNA (1)...(19): siRNA sense strand
aauaacgacccauacaugu

SEQ ID NO: 927054 - RNA, 19 nt, Homo sapiens
  misc_RNA (1)...(19): siRNA sense strand
cagccuguauaucccauca

SEQ ID NO: 927055 - RNA, 19 nt, Homo sapiens
  misc_RNA (1)...(19): siRNA sense strand
gacccuccuacucgaguua

SEQ ID NO: 927056 - RNA, 19 nt, Homo sapiens
  misc_RNA (1)...(19): siRNA sense strand
aagagacaauuaugguaag

SEQ ID NO: 927057 - RNA, 19 nt, Homo sapiens
  misc_RNA (1)...(19): siRNA sense strand
cgacaaggccagagaacac

SEQ ID NO: 927058 - RNA, 19 nt, Homo sapiens
  misc_RNA (1)...(19): siRNA sense strand
aaagaaaugagagcgaaug

SEQ ID NO: 927059 - RNA, 19 nt, Homo sapiens
  misc_RNA (1)...(19): siRNA sense strand
auggaggccucuacaacaa

SEQ ID NO: 927060 - RNA, 19 nt, Homo sapiens
  misc_RNA (1)...(19): siRNA sense strand
uaaaagaaagugcagcuau

SEQ ID NO: 927061 - RNA, 19 nt, Homo sapiens
  misc_RNA (1)...(19): siRNA sense strand
agguacagguccaagaaug

SEQ ID NO: 927062 - RNA, 19 nt, Homo sapiens
  misc_RNA (1)...(19): siRNA sense strand
ccacgacaaggccagagaa

SEQ ID NO: 927063 - RNA, 19 nt, Homo sapiens
  misc_RNA (1)...(19): siRNA sense strand
cgagaacaucaaauaaagu

SEQ ID NO: 927064 - RNA, 19 nt, Homo sapiens
  misc_RNA (1)...(19): siRNA sense strand
ccgaagaggaaggcgauuu

SEQ ID NO: 927065 - RNA, 19 nt, Homo sapiens
  misc_RNA (1)...(19): siRNA sense strand
guacauaaugaugccaaau

SEQ ID NO: 927066 - RNA, 19 nt, Homo sapiens
  misc_RNA (1)...(19): siRNA sense strand
aaaagaaagugcagcuauc

SEQ ID NO: 927067 - RNA, 19 nt, Homo sapiens
  misc_RNA (1)...(19): siRNA sense strand
acgugaagccucagcauga

SEQ ID NO: 927068 - RNA, 19 nt, Homo sapiens
  misc_RNA (1)...(19): siRNA sense strand
cuacccauccucacuguca

SEQ ID NO: 927069 - RNA, 19 nt, Homo sapiens
  misc_RNA (1)...(19): siRNA sense strand
cauccuccagcuccugaua

SEQ ID NO: 927070 - RNA, 19 nt, Homo sapiens
  misc_RNA (1)...(19): siRNA sense strand
ugacggaaagcauccagau

SEQ ID NO: 927071 - RNA, 19 nt, Homo sapiens
  misc_RNA (1)...(19): siRNA sense strand
cgagguggccagacaagca

SEQ ID NO: 927072 - RNA, 19 nt, Homo sapiens
  misc_RNA (1)...(19): siRNA sense strand
ggaagaugguuuagaauua

SEQ ID NO: 927073 - RNA, 19 nt, Homo sapiens
  misc_RNA (1)...(19): siRNA sense strand
gaagauuagucucucauua

SEQ ID NO: 927074 - RNA, 19 nt, Homo sapiens
  misc_RNA (1)...(19): siRNA sense strand
gcaagaaccuguacccuuu

SEQ ID NO: 927075 - RNA, 19 nt, Homo sapiens
  misc_RNA (1)...(19): siRNA sense strand
gauaauguguguagagaua

SEQ ID NO: 927076 - RNA, 19 nt, Homo sapiens
  misc_RNA (1)...(19): siRNA sense strand
gaacuaauucccacucuua

SEQ ID NO: 927077 - RNA, 19 nt, Homo sapiens
  misc_RNA (1)...(19): siRNA sense strand
gaaguuaacuguugaugau

SEQ ID NO: 927078 - RNA, 19 nt, Homo sapiens
  misc_RNA (1)...(19): siRNA sense strand
gaagauagcagcccugaaa

SEQ ID NO: 927079 - RNA, 19 nt, Homo sapiens
  misc_RNA (1)...(19): siRNA sense strand
gccaugcacugaaguauua

SEQ ID NO: 927080 - RNA, 19 nt, Homo sapiens
  misc_RNA (1)...(19): siRNA sense strand
gauaaauucugugggauua

SEQ ID NO: 927081 - RNA, 19 nt, Homo sapiens
  misc_RNA (1)...(19): siRNA sense strand
ccaagacacuggcaucuaa

SEQ ID NO: 927082 - RNA, 19 nt, Homo sapiens
  misc_RNA (1)...(19): siRNA sense strand
gaacacugcuaucauugaa

SEQ ID NO: 927083 - RNA, 19 nt, Homo sapiens
  misc_RNA (1)...(19): siRNA sense strand
gagcauuacuuaccuucua

SEQ ID NO: 927084 - RNA, 19 nt, Homo sapiens
  misc_RNA (1)...(19): siRNA sense strand
gaaaacaguccauguauua

SEQ ID NO: 927085 - RNA, 19 nt, Homo sapiens
  misc_RNA (1)...(19): siRNA sense strand
ucaaagaugcuguguauaa

SEQ ID NO: 927086 - RNA, 19 nt, Homo sapiens
  misc_RNA (1)...(19): siRNA sense strand
ggaaugcaguagaaguaua

SEQ ID NO: 927087 - RNA, 19 nt, Homo sapiens
  misc_RNA (1)...(19): siRNA sense strand
ugauuuagcuucuggaauu

SEQ ID NO: 927088 - RNA, 19 nt, Homo sapiens
  misc_RNA (1)...(19): siRNA sense strand
gcuucaagaucaagauuua

SEQ ID NO: 927089 - RNA, 19 nt, Homo sapiens
  misc_RNA (1)...(19): siRNA sense strand
ccuauuaacugaagaagaa

SEQ ID NO: 927090 - RNA, 19 nt, Homo sapiens
  misc_RNA (1)...(19): siRNA sense strand
ggagauucuuggaaauaua

SEQ ID NO: 927091 - RNA, 19 nt, Homo sapiens
  misc_RNA (1)...(19): siRNA sense strand
caaccacacuuuggauaua

SEQ ID NO: 927092 - RNA, 19 nt, Homo sapiens
  misc_RNA (1)...(19): siRNA sense strand
gaaggacccuguucauaca

SEQ ID NO: 927093 - RNA, 19 nt, Homo sapiens
  misc_RNA (1)...(19): siRNA sense strand
ugaaacagcuacaacuuug

SEQ ID NO: 927094 - RNA, 19 nt, Homo sapiens
  misc_RNA (1)...(19): siRNA sense strand
aaucaaagaugcuguguau

SEQ ID NO: 927095 - RNA, 19 nt, Homo sapiens
  misc_RNA (1)...(19): siRNA sense strand
gaccauaugugggauguuu

SEQ ID NO: 927096 - RNA, 19 nt, Homo sapiens
  misc_RNA (1)...(19): siRNA sense strand
gaaagugcugcguaaguua

SEQ ID NO: 927097 - RNA, 19 nt, Homo sapiens
  misc_RNA (1)...(19): siRNA sense strand
gaucaucaaugguuauauc

SEQ ID NO: 927098 - RNA, 19 nt, Homo sapiens
  misc_RNA (1)...(19): siRNA sense strand
gaagaagaacugacaaugu

SEQ ID NO: 927099 - RNA, 19 nt, Homo sapiens
  misc_RNA (1)...(19): siRNA sense strand
uuacuuaccuucuaucaug

SEQ ID NO: 927100 - RNA, 19 nt, Homo sapiens
  misc_RNA (1)...(19): siRNA sense strand
ggagagguauccuguagug

SEQ ID NO: 927101 - RNA, 19 nt, Homo sapiens
  misc_RNA (1)...(19): siRNA sense strand
uaagacccaugcuuuauga

SEQ ID NO: 927102 - RNA, 19 nt, Homo sapiens
  misc_RNA (1)...(19): siRNA sense strand
cagaauaugucaccacuuc

SEQ ID NO: 927103 - RNA, 19 nt, Homo sapiens
  misc_RNA (1)...(19): siRNA sense strand
ucaggauacugcuguguua

SEQ ID NO: 927104 - RNA, 19 nt, Homo sapiens
  misc_RNA (1)...(19): siRNA sense strand
gaaaugaugcaaacacuuc

SEQ ID NO: 927105 - RNA, 19 nt, Homo sapiens
  misc_RNA (1)...(19): siRNA sense strand
agauaugaaugcacuguua

SEQ ID NO: 927106 - RNA, 19 nt, Homo sapiens
  misc_RNA (1)...(19): siRNA sense strand
ugacaacacuuauucaucu

SEQ ID NO: 927107 - RNA, 19 nt, Homo sapiens
  misc_RNA (1)...(19): siRNA sense strand
ggaaauuacuacagaaggu

SEQ ID NO: 927108 - RNA, 19 nt, Homo sapiens
  misc_RNA (1)...(19): siRNA sense strand
cagcacagagcauuacuua

SEQ ID NO: 927109 - RNA, 19 nt, Homo sapiens
  misc_RNA (1)...(19): siRNA sense strand
gaaaaugcccuuaaaguga

SEQ ID NO: 927110 - RNA, 19 nt, Homo sapiens
  misc_RNA (1)...(19): siRNA sense strand
ugaaugcacuguuaaucaa

SEQ ID NO: 927111 - RNA, 19 nt, Homo sapiens
  misc_RNA (1)...(19): siRNA sense strand
ccacguaucuuggaguuau

SEQ ID NO: 927112 - RNA, 19 nt, Homo sapiens
  misc_RNA (1)...(19): siRNA sense strand
gaaaccauguucacacuac

SEQ ID NO: 927113 - RNA, 19 nt, Homo sapiens
  misc_RNA (1)...(19): siRNA sense strand
caaagaugcuguguauaau

SEQ ID NO: 927114 - RNA, 19 nt, Homo sapiens
  misc_RNA (1)...(19): siRNA sense strand
uaaaccagauugcaacuca

SEQ ID NO: 927115 - RNA, 19 nt, Homo sapiens
  misc_RNA (1)...(19): siRNA sense strand
gaacuugcuuuaagaucau

SEQ ID NO: 927116 - RNA, 19 nt, Homo sapiens
  misc_RNA (1)...(19): siRNA sense strand
aagaagaacugacaaugug

SEQ ID NO: 927117 - RNA, 19 nt, Homo sapiens
  misc_RNA (1)...(19): siRNA sense strand
acaguggccugaacuaauu

SEQ ID NO: 927118 - RNA, 19 nt, Homo sapiens
  misc_RNA (1)...(19): siRNA sense strand
ugaaagugcugcguaaguu

SEQ ID NO: 927119 - RNA, 19 nt, Homo sapiens
  misc_RNA (1)...(19): siRNA sense strand
gacggaagauccugaaaca

SEQ ID NO: 927120 - RNA, 19 nt, Homo sapiens
  misc_RNA (1)...(19): siRNA sense strand
gugaaggcguuacauuuga

SEQ ID NO: 927121 - RNA, 19 nt, Homo sapiens
  misc_RNA (1)...(19): siRNA sense strand
gcagcaaguuacagaaugu

SEQ ID NO: 927122 - RNA, 19 nt, Homo sapiens
  misc_RNA (1)...(19): siRNA sense strand
gugcagggcucaucaccaa

SEQ ID NO: 927123 - RNA, 19 nt, Homo sapiens
  misc_RNA (1)...(19): siRNA sense strand
guagaaggccugcaugaug

SEQ ID NO: 927124 - RNA, 19 nt, Homo sapiens
  misc_RNA (1)...(19): siRNA sense strand
gaggagauucuuggaaaua

SEQ ID NO: 927125 - RNA, 19 nt, Homo sapiens
  misc_RNA (1)...(19): siRNA sense strand
acagagauauguagaagau

SEQ ID NO: 927126 - RNA, 19 nt, Homo sapiens
  misc_RNA (1)...(19): siRNA sense strand
caaugaagcugcaauuuug

SEQ ID NO: 927127 - RNA, 19 nt, Homo sapiens
  misc_RNA (1)...(19): siRNA sense strand
gaagaaacaggaggagauu

SEQ ID NO: 927128 - RNA, 19 nt, Homo sapiens
  misc_RNA (1)...(19): siRNA sense strand
uaaagugaacccaauacua

SEQ ID NO: 927129 - RNA, 19 nt, Homo sapiens
  misc_RNA (1)...(19): siRNA sense strand
gcuuuaagaucaucaaugg

SEQ ID NO: 927130 - RNA, 19 nt, Homo sapiens
  misc_RNA (1)...(19): siRNA sense strand
gaacgaacacugcuaucau

SEQ ID NO: 927131 - RNA, 19 nt, Homo sapiens
  misc_RNA (1)...(19): siRNA sense strand
gaaacaggaacuuauaaag

SEQ ID NO: 927132 - RNA, 19 nt, Homo sapiens
  misc_RNA (1)...(19): siRNA sense strand
uagaaggccugcaugaugu

SEQ ID NO: 927133 - RNA, 19 nt, Homo sapiens
  misc_RNA (1)...(19): siRNA sense strand
ucuggaagaugguuuagaa

SEQ ID NO: 927134 - RNA, 19 nt, Homo sapiens
  misc_RNA (1)...(19): siRNA sense strand
acacaaagaugcauguuuu

SEQ ID NO: 927135 - RNA, 19 nt, Homo sapiens
  misc_RNA (1)...(19): siRNA sense strand
gaaguauagguacagauaa

SEQ ID NO: 927136 - RNA, 19 nt, Homo sapiens
  misc_RNA (1)...(19): siRNA sense strand
ggaagaaacaggaggagau

SEQ ID NO: 927137 - RNA, 19 nt, Homo sapiens
  misc_RNA (1)...(19): siRNA sense strand
aauacuagguccacaaaug

SEQ ID NO: 927138 - RNA, 19 nt, Homo sapiens
  misc_RNA (1)...(19): siRNA sense strand
agaguugcuucguauauuu

SEQ ID NO: 927139 - RNA, 19 nt, Homo sapiens
  misc_RNA (1)...(19): siRNA sense strand
ggaaaacaguccauguauu

SEQ ID NO: 927140 - RNA, 19 nt, Homo sapiens
  misc_RNA (1)...(19): siRNA sense strand
ucagagaucacuggaauuu

SEQ ID NO: 927141 - RNA, 19 nt, Homo sapiens
  misc_RNA (1)...(19): siRNA sense strand
gcucaucggucaguggauu

SEQ ID NO: 927142 - RNA, 19 nt, Homo sapiens
  misc_RNA (1)...(19): siRNA sense strand
ggaggagauucuuggaaau

SEQ ID NO: 927143 - RNA, 19 nt, Homo sapiens
  misc_RNA (1)...(19): siRNA sense strand
uauagagucuguuaaaguc

SEQ ID NO: 927144 - RNA, 19 nt, Homo sapiens
  misc_RNA (1)...(19): siRNA sense strand
gagguauccuguagugaug

SEQ ID NO: 927145 - RNA, 19 nt, Homo sapiens
  misc_RNA (1)...(19): siRNA sense strand
ggugaaggcguuacauuug

SEQ ID NO: 927146 - RNA, 19 nt, Homo sapiens
  misc_RNA (1)...(19): siRNA sense strand
agaaguauagguacagaua

SEQ ID NO: 927147 - RNA, 19 nt, Homo sapiens
  misc_RNA (1)...(19): siRNA sense strand
uaacacaggccaccaguca

SEQ ID NO: 927148 - RNA, 19 nt, Homo sapiens
  misc_RNA (1)...(19): siRNA sense strand
acaaauguuucaaccgauu

SEQ ID NO: 927149 - RNA, 19 nt, Homo sapiens
  misc_RNA (1)...(19): siRNA sense strand
cagaguugcuucguauauu

SEQ ID NO: 927150 - RNA, 19 nt, Homo sapiens
  misc_RNA (1)...(19): siRNA sense strand
caccagaguugcuucguau

SEQ ID NO: 927151 - RNA, 19 nt, Homo sapiens
  misc_RNA (1)...(19): siRNA sense strand
caacugaguacagauguuu

SEQ ID NO: 927152 - RNA, 19 nt, Homo sapiens
  misc_RNA (1)...(19): siRNA sense strand
gauaugaaugcacuguuaa

SEQ ID NO: 927153 - RNA, 19 nt, Homo sapiens
  misc_RNA (1)...(19): siRNA sense strand
gcaaugaagcugcaauuuu

SEQ ID NO: 927154 - RNA, 19 nt, Homo sapiens
  misc_RNA (1)...(19): siRNA sense strand
gaauaugucaccacuucuu

SEQ ID NO: 927155 - RNA, 19 nt, Homo sapiens
  misc_RNA (1)...(19): siRNA sense strand
cauugaaagugcugcguaa

SEQ ID NO: 927156 - RNA, 19 nt, Homo sapiens
  misc_RNA (1)...(19): siRNA sense strand
agaacuugcuuuaagauca

SEQ ID NO: 927157 - RNA, 19 nt, Homo sapiens
  misc_RNA (1)...(19): siRNA sense strand
caacacuuauucaucuugu

SEQ ID NO: 927158 - RNA, 19 nt, Homo sapiens
  misc_RNA (1)...(19): siRNA sense strand
cagauaauguguguagaga

SEQ ID NO: 927159 - RNA, 19 nt, Homo sapiens
  misc_RNA (1)...(19): siRNA sense strand
gcacagagcauuacuuacc

SEQ ID NO: 927160 - RNA, 19 nt, Homo sapiens
  misc_RNA (1)...(19): siRNA sense strand
guagugauguccacguauc

SEQ ID NO: 927161 - RNA, 19 nt, Homo sapiens
  misc_RNA (1)...(19): siRNA sense strand
aaagugaacccaauacuag

SEQ ID NO: 927162 - RNA, 19 nt, Homo sapiens
  misc_RNA (1)...(19): siRNA sense strand
aggaggagauucuuggaaa

SEQ ID NO: 927163 - RNA, 19 nt, Homo sapiens
  misc_RNA (1)...(19): siRNA sense strand
ugacagagauauguagaag

SEQ ID NO: 927164 - RNA, 19 nt, Homo sapiens
  misc_RNA (1)...(19): siRNA sense strand
gauuuagcuucuggaauuu

SEQ ID NO: 927165 - RNA, 19 nt, Homo sapiens
  misc_RNA (1)...(19): siRNA sense strand
uggauuagcugcuuaugag

SEQ ID NO: 927166 - RNA, 19 nt, Homo sapiens
  misc_RNA (1)...(19): siRNA sense strand
cagaaaaucuuagaacuug

SEQ ID NO: 927167 - RNA, 19 nt, Homo sapiens
  misc_RNA (1)...(19): siRNA sense strand
ggaauuuucuguaagcuau

SEQ ID NO: 927168 - RNA, 19 nt, Homo sapiens
  misc_RNA (1)...(19): siRNA sense strand
ucacccagcuacaggaguu

SEQ ID NO: 927169 - RNA, 19 nt, Homo sapiens
  misc_RNA (1)...(19): siRNA sense strand
gcagauacgaccauaugug

SEQ ID NO: 927170 - RNA, 19 nt, Homo sapiens
  misc_RNA (1)...(19): siRNA sense strand
gaucgaaagagucaacaug

SEQ ID NO: 927171 - RNA, 19 nt, Homo sapiens
  misc_RNA (1)...(19): siRNA sense strand
guagaagauuagucucuca

SEQ ID NO: 927172 - RNA, 19 nt, Homo sapiens
  misc_RNA (1)...(19): siRNA sense strand
gcugaggccuguuauauug

SEQ ID NO: 927173 - RNA, 19 nt, Homo sapiens
  misc_RNA (1)...(19): siRNA sense strand
gcaagaagcccaagagugu

SEQ ID NO: 927174 - RNA, 19 nt, Homo sapiens
  misc_RNA (1)...(19): siRNA sense strand
gaaauuuguugguaguguu

SEQ ID NO: 927175 - RNA, 19 nt, Homo sapiens
  misc_RNA (1)...(19): siRNA sense strand
gggagaaguucagaagaua

SEQ ID NO: 927176 - RNA, 19 nt, Homo sapiens
  misc_RNA (1)...(19): siRNA sense strand
caagaaagccaaagccauu

SEQ ID NO: 927177 - RNA, 19 nt, Homo sapiens
  misc_RNA (1)...(19): siRNA sense strand
caaaggagcaggcauggaa

SEQ ID NO: 927178 - RNA, 19 nt, Homo sapiens
  misc_RNA (1)...(19): siRNA sense strand
uaagcucuaugacuucuuu

SEQ ID NO: 927179 - RNA, 19 nt, Homo sapiens
  misc_RNA (1)...(19): siRNA sense strand
gagcaggcauggaaguguu

SEQ ID NO: 927180 - RNA, 19 nt, Homo sapiens
  misc_RNA (1)...(19): siRNA sense strand
gcaauguggaaacaaauuu

SEQ ID NO: 927181 - RNA, 19 nt, Homo sapiens
  misc_RNA (1)...(19): siRNA sense strand
ggaaauuuguugguagugu

SEQ ID NO: 927182 - RNA, 19 nt, Homo sapiens
  misc_RNA (1)...(19): siRNA sense strand
ggugggaaauuuguuggua

SEQ ID NO: 927183 - RNA, 19 nt, Homo sapiens
  misc_RNA (1)...(19): siRNA sense strand
gaaaagggccuccacaaug

SEQ ID NO: 927184 - RNA, 19 nt, Homo sapiens
  misc_RNA (1)...(19): siRNA sense strand
gaaagccaaagccauuaaa

SEQ ID NO: 927185 - RNA, 19 nt, Homo sapiens
  misc_RNA (1)...(19): siRNA sense strand
ccaaagccauuaaacugau

SEQ ID NO: 927186 - RNA, 19 nt, Homo sapiens
  misc_RNA (1)...(19): siRNA sense strand
ugucugaucugcuguuugu

SEQ ID NO: 927187 - RNA, 19 nt, Homo sapiens
  misc_RNA (1)...(19): siRNA sense strand
gaaguguucugagcagcaa

SEQ ID NO: 927188 - RNA, 19 nt, Homo sapiens
  misc_RNA (1)...(19): siRNA sense strand
ggacucacuauuugauaaa

SEQ ID NO: 927189 - RNA, 19 nt, Homo sapiens
  misc_RNA (1)...(19): siRNA sense strand
ugacugagacgguugcauu

SEQ ID NO: 927190 - RNA, 19 nt, Homo sapiens
  misc_RNA (1)...(19): siRNA sense strand
uggagacgcuuaagcucua

SEQ ID NO: 927191 - RNA, 19 nt, Homo sapiens
  misc_RNA (1)...(19): siRNA sense strand
cuucuggacucacuauuug

SEQ ID NO: 927192 - RNA, 19 nt, Homo sapiens
  misc_RNA (1)...(19): siRNA sense strand
gcaagaaccacaagaaagc

SEQ ID NO: 927193 - RNA, 19 nt, Homo sapiens
  misc_RNA (1)...(19): siRNA sense strand
acaaugccaugugcaaauu

SEQ ID NO: 927194 - RNA, 19 nt, Homo sapiens
  misc_RNA (1)...(19): siRNA sense strand
ccauuaaacugauccuucu

SEQ ID NO: 927195 - RNA, 19 nt, Homo sapiens
  misc_RNA (1)...(19): siRNA sense strand
uggacucacuauuugauaa

SEQ ID NO: 927196 - RNA, 19 nt, Homo sapiens
  misc_RNA (1)...(19): siRNA sense strand
gcucaguccacguugauuu

SEQ ID NO: 927197 - RNA, 19 nt, Homo sapiens
  misc_RNA (1)...(19): siRNA sense strand
gccaaagccauuaaacuga

SEQ ID NO: 927198 - RNA, 19 nt, Homo sapiens
  misc_RNA (1)...(19): siRNA sense strand
ucacaaagcagaaagaaaa

SEQ ID NO: 927199 - RNA, 19 nt, Homo sapiens
  misc_RNA (1)...(19): siRNA sense strand
ccauuggccuggugggaaa

SEQ ID NO: 927200 - RNA, 19 nt, Homo sapiens
  misc_RNA (1)...(19): siRNA sense strand
ccugaauccucucaucuau

SEQ ID NO: 927201 - RNA, 19 nt, Homo sapiens
  misc_RNA (1)...(19): siRNA sense strand
guucugagcagcaauuuua

SEQ ID NO: 927202 - RNA, 19 nt, Homo sapiens
  misc_RNA (1)...(19): siRNA sense strand
ugaauccucucaucuaugc

SEQ ID NO: 927203 - RNA, 19 nt, Homo sapiens
  misc_RNA (1)...(19): siRNA sense strand
uuacuuaccacacgaguga

SEQ ID NO: 927204 - RNA, 19 nt, Homo sapiens
  misc_RNA (1)...(19): siRNA sense strand
ccacacgagugauggagau

SEQ ID NO: 927205 - RNA, 19 nt, Homo sapiens
  misc_RNA (1)...(19): siRNA sense strand
uggacacccuacaacguua

SEQ ID NO: 927206 - RNA, 19 nt, Homo sapiens
  misc_RNA (1)...(19): siRNA sense strand
gaaccuggccuugucugau

SEQ ID NO: 927207 - RNA, 19 nt, Homo sapiens
  misc_RNA (1)...(19): siRNA sense strand
cgcuuaagcucuaugacuu

SEQ ID NO: 927208 - RNA, 19 nt, Homo sapiens
  misc_RNA (1)...(19): siRNA sense strand
gaaccacaagaaagccaaa

SEQ ID NO: 927209 - RNA, 19 nt, Homo sapiens
  misc_RNA (1)...(19): siRNA sense strand
uaugaguuauugcuacuuc

SEQ ID NO: 927210 - RNA, 19 nt, Homo sapiens
  misc_RNA (1)...(19): siRNA sense strand
caaagccauuaaacugauc

SEQ ID NO: 927211 - RNA, 19 nt, Homo sapiens
  misc_RNA (1)...(19): siRNA sense strand
gauuucuccucaucugaau

SEQ ID NO: 927212 - RNA, 19 nt, Homo sapiens
  misc_RNA (1)...(19): siRNA sense strand
ccucucaucuaugcauuug

SEQ ID NO: 927213 - RNA, 19 nt, Homo sapiens
  misc_RNA (1)...(19): siRNA sense strand
uaugacuucuuucccaguu

SEQ ID NO: 927214 - RNA, 19 nt, Homo sapiens
  misc_RNA (1)...(19): siRNA sense strand
ugacuucuuucccaguugu

SEQ ID NO: 927215 - RNA, 19 nt, Homo sapiens
  misc_RNA (1)...(19): siRNA sense strand
gagaugcauugcuccuucu

SEQ ID NO: 927216 - RNA, 19 nt, Homo sapiens
  misc_RNA (1)...(19): siRNA sense strand
agaaagccaaagccauuaa

SEQ ID NO: 927217 - RNA, 19 nt, Homo sapiens
  misc_RNA (1)...(19): siRNA sense strand
gaaguucagaagauaccuu

SEQ ID NO: 927218 - RNA, 19 nt, Homo sapiens
  misc_RNA (1)...(19): siRNA sense strand
cugagacgguugcauuuag

SEQ ID NO: 927219 - RNA, 19 nt, Homo sapiens
  misc_RNA (1)...(19): siRNA sense strand
ggagacgcuuaagcucuau

SEQ ID NO: 927220 - RNA, 19 nt, Homo sapiens
  misc_RNA (1)...(19): siRNA sense strand
ggcugaggccuguuauauu

SEQ ID NO: 927221 - RNA, 19 nt, Homo sapiens
  misc_RNA (1)...(19): siRNA sense strand
guugugacaugaggaagga

SEQ ID NO: 927222 - RNA, 19 nt, Homo sapiens
  misc_RNA (1)...(19): siRNA sense strand
ugaaugccuuggugacuac

SEQ ID NO: 927223 - RNA, 19 nt, Homo sapiens
  misc_RNA (1)...(19): siRNA sense strand
guugauuucuccucaucug

SEQ ID NO: 927224 - RNA, 19 nt, Homo sapiens
  misc_RNA (1)...(19): siRNA sense strand
gccugaauccucucaucua

SEQ ID NO: 927225 - RNA, 19 nt, Homo sapiens
  misc_RNA (1)...(19): siRNA sense strand
gacugagacgguugcauuu

SEQ ID NO: 927226 - RNA, 19 nt, Homo sapiens
  misc_RNA (1)...(19): siRNA sense strand
aagaaagccaaagccauua

SEQ ID NO: 927227 - RNA, 19 nt, Homo sapiens
  misc_RNA (1)...(19): siRNA sense strand
ugacagaaaacuuugagua

SEQ ID NO: 927228 - RNA, 19 nt, Homo sapiens
  misc_RNA (1)...(19): siRNA sense strand
ggggagaaguucagaagau

SEQ ID NO: 927229 - RNA, 19 nt, Homo sapiens
  misc_RNA (1)...(19): siRNA sense strand
ccuacaacguuaugauuuu

SEQ ID NO: 927230 - RNA, 19 nt, Homo sapiens
  misc_RNA (1)...(19): siRNA sense strand
caaagcagaaagaaaauga

SEQ ID NO: 927231 - RNA, 19 nt, Homo sapiens
  misc_RNA (1)...(19): siRNA sense strand
gagcagcaauuuuacuuac

SEQ ID NO: 927232 - RNA, 19 nt, Homo sapiens
  misc_RNA (1)...(19): siRNA sense strand
ucaucugaaucacaaagga

SEQ ID NO: 927233 - RNA, 19 nt, Homo sapiens
  misc_RNA (1)...(19): siRNA sense strand
ggacacccuacaacguuau

SEQ ID NO: 927234 - RNA, 19 nt, Homo sapiens
  misc_RNA (1)...(19): siRNA sense strand
guucagaagauaccuuuac

SEQ ID NO: 927235 - RNA, 19 nt, Homo sapiens
  misc_RNA (1)...(19): siRNA sense strand
cccaguucauguucacaaa

SEQ ID NO: 927236 - RNA, 19 nt, Homo sapiens
  misc_RNA (1)...(19): siRNA sense strand
ggagaaguucagaagauac

SEQ ID NO: 927237 - RNA, 19 nt, Homo sapiens
  misc_RNA (1)...(19): siRNA sense strand
gacaugaggaaggaucuga

SEQ ID NO: 927238 - RNA, 19 nt, Homo sapiens
  misc_RNA (1)...(19): siRNA sense strand
uggcugaggccuguuauau

SEQ ID NO: 927239 - RNA, 19 nt, Homo sapiens
  misc_RNA (1)...(19): siRNA sense strand
cugcaagaaccacaagaaa

SEQ ID NO: 927240 - RNA, 19 nt, Homo sapiens
  misc_RNA (1)...(19): siRNA sense strand
augaaugccuuggugacua

SEQ ID NO: 927241 - RNA, 19 nt, Homo sapiens
  misc_RNA (1)...(19): siRNA sense strand
cagaaaacuuugaguacga

SEQ ID NO: 927242 - RNA, 19 nt, Homo sapiens
  misc_RNA (1)...(19): siRNA sense strand
cuccucaucugaaucacaa

SEQ ID NO: 927243 - RNA, 19 nt, Homo sapiens
  misc_RNA (1)...(19): siRNA sense strand
auucuacuccgucaucuuu

SEQ ID NO: 927244 - RNA, 19 nt, Homo sapiens
  misc_RNA (1)...(19): siRNA sense strand
aaccuggccuugucugauc

SEQ ID NO: 927245 - RNA, 19 nt, Homo sapiens
  misc_RNA (1)...(19): siRNA sense strand
uauugcuacuucagaauca

SEQ ID NO: 927246 - RNA, 19 nt, Homo sapiens
  misc_RNA (1)...(19): siRNA sense strand
gcuccgcaauguggaaaca

SEQ ID NO: 927247 - RNA, 19 nt, Homo sapiens
  misc_RNA (1)...(19): siRNA sense strand
acauuuaccuccugaaccu

SEQ ID NO: 927248 - RNA, 19 nt, Homo sapiens
  misc_RNA (1)...(19): siRNA sense strand
ugauuucuccucaucugaa

SEQ ID NO: 927249 - RNA, 19 nt, Homo sapiens
  misc_RNA (1)...(19): siRNA sense strand
cauauucuacuccgucauc

SEQ ID NO: 927250 - RNA, 19 nt, Homo sapiens
  misc_RNA (1)...(19): siRNA sense strand
aguuauugcuacuucagaa

SEQ ID NO: 927251 - RNA, 19 nt, Homo sapiens
  misc_RNA (1)...(19): siRNA sense strand
uccgcaauguggaaacaaa

SEQ ID NO: 927252 - RNA, 19 nt, Homo sapiens
  misc_RNA (1)...(19): siRNA sense strand
ccuucuggacucacuauuu

SEQ ID NO: 927253 - RNA, 19 nt, Homo sapiens
  misc_RNA (1)...(19): siRNA sense strand
ggagcaggcauggaagugu

SEQ ID NO: 927254 - RNA, 19 nt, Homo sapiens
  misc_RNA (1)...(19): siRNA sense strand
guucacaaagcagaaagaa

SEQ ID NO: 927255 - RNA, 19 nt, Homo sapiens
  misc_RNA (1)...(19): siRNA sense strand
gccgccaacuccaugaaca

SEQ ID NO: 927256 - RNA, 19 nt, Homo sapiens
  misc_RNA (1)...(19): siRNA sense strand
ucacuaccgccuucuucuu

SEQ ID NO: 927257 - RNA, 19 nt, Homo sapiens
  misc_RNA (1)...(19): siRNA sense strand
cgucugggcagcagccauu

SEQ ID NO: 927258 - RNA, 19 nt, Homo sapiens
  misc_RNA (1)...(19): siRNA sense strand
cgagugauggagaugcauu

SEQ ID NO: 927259 - RNA, 19 nt, Homo sapiens
  misc_RNA (1)...(19): siRNA sense strand
ccaguugugacaugaggaa

SEQ ID NO: 927260 - RNA, 19 nt, Homo sapiens
  misc_RNA (1)...(19): siRNA sense strand
cccuacaacguuaugauuu

SEQ ID NO: 927261 - RNA, 19 nt, Homo sapiens
  misc_RNA (1)...(19): siRNA sense strand
ugggaaauuuguugguagu

SEQ ID NO: 927262 - RNA, 19 nt, Homo sapiens
  misc_RNA (1)...(19): siRNA sense strand
gccaugugcaaauucacua

SEQ ID NO: 927263 - RNA, 19 nt, Homo sapiens
  misc_RNA (1)...(19): siRNA sense strand
acgguugcauuuagccauu

SEQ ID NO: 927264 - RNA, 19 nt, Homo sapiens
  misc_RNA (1)...(19): siRNA sense strand
acugagacgguugcauuua

SEQ ID NO: 927265 - RNA, 19 nt, Homo sapiens
  misc_RNA (1)...(19): siRNA sense strand
agccaaagccauuaaacug

SEQ ID NO: 927266 - RNA, 19 nt, Homo sapiens
  misc_RNA (1)...(19): siRNA sense strand
ucaccgucaucagcauuga

SEQ ID NO: 927267 - RNA, 19 nt, Homo sapiens
  misc_RNA (1)...(19): siRNA sense strand
gauaugaacgacugcuaua

SEQ ID NO: 927268 - RNA, 19 nt, Homo sapiens
  misc_RNA (1)...(19): siRNA sense strand
caacaagaaagucagcaaa

SEQ ID NO: 927269 - RNA, 19 nt, Homo sapiens
  misc_RNA (1)...(19): siRNA sense strand
caagaaagucagcaaagug

SEQ ID NO: 927270 - RNA, 19 nt, Homo sapiens
  misc_RNA (1)...(19): siRNA sense strand
acaagaaagucagcaaagu

SEQ ID NO: 927271 - RNA, 19 nt, Homo sapiens
  misc_RNA (1)...(19): siRNA sense strand
gagauccugcagcacguua

SEQ ID NO: 927272 - RNA, 19 nt, Homo sapiens
  misc_RNA (1)...(19): siRNA sense strand
gcagcacguuaucgacuac

SEQ ID NO: 927273 - RNA, 19 nt, Homo sapiens
  misc_RNA (1)...(19): siRNA sense strand
caagcagggcgacagcauu

SEQ ID NO: 927274 - RNA, 19 nt, Homo sapiens
  misc_RNA (1)...(19): siRNA sense strand
cgauaugaacgacugcuau

SEQ ID NO: 927275 - RNA, 19 nt, Homo sapiens
  misc_RNA (1)...(19): siRNA sense strand
gcgauaugaacgacugcua

SEQ ID NO: 927276 - RNA, 19 nt, Homo sapiens
  misc_RNA (1)...(19): siRNA sense strand
ugcagcacguuaucgacua

SEQ ID NO: 927277 - RNA, 19 nt, Homo sapiens
  misc_RNA (1)...(19): siRNA sense strand
ccaacaagaaagucagcaa

SEQ ID NO: 927278 - RNA, 19 nt, Homo sapiens
  misc_RNA (1)...(19): siRNA sense strand
gcacguuaucgacuacauc

SEQ ID NO: 927279 - RNA, 19 nt, Homo sapiens
  misc_RNA (1)...(19): siRNA sense strand
gcagggcgacagcauucug

SEQ ID NO: 927280 - RNA, 19 nt, Homo sapiens
  misc_RNA (1)...(19): siRNA sense strand
cgacugaaguugugugugu

SEQ ID NO: 927281 - RNA, 19 nt, Homo sapiens
  misc_RNA (1)...(19): siRNA sense strand
cggaggagauggacuuuga

SEQ ID NO: 927282 - RNA, 19 nt, Homo sapiens
  misc_RNA (1)...(19): siRNA sense strand
cagacaaacuaucgacuga

SEQ ID NO: 927283 - RNA, 19 nt, Homo sapiens
  misc_RNA (1)...(19): siRNA sense strand
acaaggcaaugaagaaaga

SEQ ID NO: 927284 - RNA, 19 nt, Homo sapiens
  misc_RNA (1)...(19): siRNA sense strand
gacaaacuaucgacugaag

SEQ ID NO: 927285 - RNA, 19 nt, Homo sapiens
  misc_RNA (1)...(19): siRNA sense strand
ggagauggacuuugaguac

SEQ ID NO: 927286 - RNA, 19 nt, Homo sapiens
  misc_RNA (1)...(19): siRNA sense strand
gagcaaggaaugugacuuc

SEQ ID NO: 927287 - RNA, 19 nt, Homo sapiens
  misc_RNA (1)...(19): siRNA sense strand
guacaaggcaaugaagaaa

SEQ ID NO: 927288 - RNA, 19 nt, Homo sapiens
  misc_RNA (1)...(19): siRNA sense strand
gcauaugccugagcguuuc

SEQ ID NO: 927289 - RNA, 19 nt, Homo sapiens
  misc_RNA (1)...(19): siRNA sense strand
gcaccugugucuggucuau

SEQ ID NO: 927290 - RNA, 19 nt, Homo sapiens
  misc_RNA (1)...(19): siRNA sense strand
cuagugagcucaucgaaaa

SEQ ID NO: 927291 - RNA, 19 nt, Homo sapiens
  misc_RNA (1)...(19): siRNA sense strand
cgacugcucgagcugcuua

SEQ ID NO: 927292 - RNA, 19 nt, Homo sapiens
  misc_RNA (1)...(19): siRNA sense strand
ccagcgacauccaguuugu

SEQ ID NO: 927293 - RNA, 19 nt, Homo sapiens
  misc_RNA (1)...(19): siRNA sense strand
gauggacuuugaguacuug

SEQ ID NO: 927294 - RNA, 19 nt, Homo sapiens
  misc_RNA (1)...(19): siRNA sense strand
gugguugucucugaugauu

SEQ ID NO: 927295 - RNA, 19 nt, Homo sapiens
  misc_RNA (1)...(19): siRNA sense strand
gguugucucugaugauuac

SEQ ID NO: 927296 - RNA, 19 nt, Homo sapiens
  misc_RNA (1)...(19): siRNA sense strand
ugacuuccagaccaaauuu

SEQ ID NO: 927297 - RNA, 19 nt, Homo sapiens
  misc_RNA (1)...(19): siRNA sense strand
ucaaguacaaggcaaugaa

SEQ ID NO: 927298 - RNA, 19 nt, Homo sapiens
  misc_RNA (1)...(19): siRNA sense strand
gccugucucuguucuugaa

SEQ ID NO: 927299 - RNA, 19 nt, Homo sapiens
  misc_RNA (1)...(19): siRNA sense strand
gagauggacuuugaguacu

SEQ ID NO: 927300 - RNA, 19 nt, Homo sapiens
  misc_RNA (1)...(19): siRNA sense strand
gcuagugagcucaucgaaa

SEQ ID NO: 927301 - RNA, 19 nt, Homo sapiens
  misc_RNA (1)...(19): siRNA sense strand
ucuggucuauugcuaguga

SEQ ID NO: 927302 - RNA, 19 nt, Homo sapiens
  misc_RNA (1)...(19): siRNA sense strand
gaugauccggcaacuggaa

SEQ ID NO: 927303 - RNA, 19 nt, Homo sapiens
  misc_RNA (1)...(19): siRNA sense strand
augauuaccugcagagcaa

SEQ ID NO: 927304 - RNA, 19 nt, Homo sapiens
  misc_RNA (1)...(19): siRNA sense strand
agauggacuuugaguacuu

SEQ ID NO: 927305 - RNA, 19 nt, Homo sapiens
  misc_RNA (1)...(19): siRNA sense strand
gaggauugccaaaaguaua

SEQ ID NO: 927306 - RNA, 19 nt, Homo sapiens
  misc_RNA (1)...(19): siRNA sense strand
ccgccugucucuguucuug

SEQ ID NO: 927307 - RNA, 19 nt, Homo sapiens
  misc_RNA (1)...(19): siRNA sense strand
gcgggcaucaccacacuug

SEQ ID NO: 927308 - RNA, 19 nt, Homo sapiens
  misc_RNA (1)...(19): siRNA sense strand
gcaggaggaggcugagaag

SEQ ID NO: 927309 - RNA, 19 nt, Homo sapiens
  misc_RNA (1)...(19): siRNA sense strand
caacuggaacagacaaacu

SEQ ID NO: 927310 - RNA, 19 nt, Homo sapiens
  misc_RNA (1)...(19): siRNA sense strand
gguggugguugucucugau

SEQ ID NO: 927311 - RNA, 19 nt, Homo sapiens
  misc_RNA (1)...(19): siRNA sense strand
ggaacagacaaacuaucga

SEQ ID NO: 927312 - RNA, 19 nt, Homo sapiens
  misc_RNA (1)...(19): siRNA sense strand
cagaccaaauuugcacuca

SEQ ID NO: 927313 - RNA, 19 nt, Homo sapiens
  misc_RNA (1)...(19): siRNA sense strand
gaggagauggacuuugagu

SEQ ID NO: 927314 - RNA, 19 nt, Homo sapiens
  misc_RNA (1)...(19): siRNA sense strand
ccaaaaguauaucuugaag

SEQ ID NO: 927315 - RNA, 19 nt, Homo sapiens
  misc_RNA (1)...(19): siRNA sense strand
aaugugacuuccagaccaa

SEQ ID NO: 927316 - RNA, 19 nt, Homo sapiens
  misc_RNA (1)...(19): siRNA sense strand
acuaucgacugaaguugug

SEQ ID NO: 927317 - RNA, 19 nt, Homo sapiens
  misc_RNA (1)...(19): siRNA sense strand
caaguacaaggcaaugaag

SEQ ID NO: 927318 - RNA, 19 nt, Homo sapiens
  misc_RNA (1)...(19): siRNA sense strand
ccuggcugcucucaacaug

SEQ ID NO: 927319 - RNA, 19 nt, Homo sapiens
  misc_RNA (1)...(19): siRNA sense strand
ugaaguugugugugucuga

SEQ ID NO: 927320 - RNA, 19 nt, Homo sapiens
  misc_RNA (1)...(19): siRNA sense strand
accugugucuggucuauug

SEQ ID NO: 927321 - RNA, 19 nt, Homo sapiens
  misc_RNA (1)...(19): siRNA sense strand
ggacgaaaccucuaacaaa

SEQ ID NO: 927322 - RNA, 19 nt, Homo sapiens
  misc_RNA (1)...(19): siRNA sense strand
gugaggaacuaucgcauuu

SEQ ID NO: 927323 - RNA, 19 nt, Homo sapiens
  misc_RNA (1)...(19): siRNA sense strand
gacgaaaccucuaacaaag

SEQ ID NO: 927324 - RNA, 19 nt, Homo sapiens
  misc_RNA (1)...(19): siRNA sense strand
agaaagaccugcccuugga

SEQ ID NO: 927325 - RNA, 19 nt, Homo sapiens
  misc_RNA (1)...(19): siRNA sense strand
cgaaaccucuaacaaagug

SEQ ID NO: 927326 - RNA, 19 nt, Homo sapiens
  misc_RNA (1)...(19): siRNA sense strand
gcagggagauuggccacuu

SEQ ID NO: 927327 - RNA, 19 nt, Homo sapiens
  misc_RNA (1)...(19): siRNA sense strand
gcauuggccugucccuaug

SEQ ID NO: 927328 - RNA, 19 nt, Homo sapiens
  misc_RNA (1)...(19): siRNA sense strand
gaaggacucuaaguucuac

SEQ ID NO: 927329 - RNA, 19 nt, Homo sapiens
  misc_RNA (1)...(19): siRNA sense strand
gugacaaacucaaguccuu

SEQ ID NO: 927330 - RNA, 19 nt, Homo sapiens
  misc_RNA (1)...(19): siRNA sense strand
ggagggcgagguccuguuu

SEQ ID NO: 927331 - RNA, 19 nt, Homo sapiens
  misc_RNA (1)...(19): siRNA sense strand
ggacgaggacuaugagaag

SEQ ID NO: 927332 - RNA, 19 nt, Homo sapiens
  misc_RNA (1)...(19): siRNA sense strand
gcagcaugguggagcacua

SEQ ID NO: 927333 - RNA, 19 nt, Homo sapiens
  misc_RNA (1)...(19): siRNA sense strand
cuaacaaagugaggaacua

SEQ ID NO: 927334 - RNA, 19 nt, Homo sapiens
  misc_RNA (1)...(19): siRNA sense strand
ggacacagacagcuucuac

SEQ ID NO: 927335 - RNA, 19 nt, Homo sapiens
  misc_RNA (1)...(19): siRNA sense strand
gaggaccacccacaucuga

SEQ ID NO: 927336 - RNA, 19 nt, Homo sapiens
  misc_RNA (1)...(19): siRNA sense strand
cagaaacugugacaaacuc

SEQ ID NO: 927337 - RNA, 19 nt, Homo sapiens
  misc_RNA (1)...(19): siRNA sense strand
ccacggacaaugaagacua

SEQ ID NO: 927338 - RNA, 19 nt, Homo sapiens
  misc_RNA (1)...(19): siRNA sense strand
ugagaaggacucuaaguuc

SEQ ID NO: 927339 - RNA, 19 nt, Homo sapiens
  misc_RNA (1)...(19): siRNA sense strand
gaggagaccacguccaaca

SEQ ID NO: 927340 - RNA, 19 nt, Homo sapiens
  misc_RNA (1)...(19): siRNA sense strand
ccaacucggucuucgucaa

SEQ ID NO: 927341 - RNA, 19 nt, Homo sapiens
  misc_RNA (1)...(19): siRNA sense strand
gcuugaggaugcccugaug

SEQ ID NO: 927342 - RNA, 19 nt, Homo sapiens
  misc_RNA (1)...(19): siRNA sense strand
gaaguggaaagguuguuca

SEQ ID NO: 927343 - RNA, 19 nt, Homo sapiens
  misc_RNA (1)...(19): siRNA sense strand
ccacugccaccuccagaaa

SEQ ID NO: 927344 - RNA, 19 nt, Homo sapiens
  misc_RNA (1)...(19): siRNA sense strand
ggcgagguccuguuuguga

SEQ ID NO: 927345 - RNA, 19 nt, Homo sapiens
  misc_RNA (1)...(19): siRNA sense strand
gcacgacgaugaggaugac

SEQ ID NO: 927346 - RNA, 19 nt, Homo sapiens
  misc_RNA (1)...(19): siRNA sense strand
uaacaaagugaggaacuau

SEQ ID NO: 927347 - RNA, 19 nt, Homo sapiens
  misc_RNA (1)...(19): siRNA sense strand
acuaugagcacgacgauga

SEQ ID NO: 927348 - RNA, 19 nt, Homo sapiens
  misc_RNA (1)...(19): siRNA sense strand
cacggacaaugaagacuau

SEQ ID NO: 927349 - RNA, 19 nt, Homo sapiens
  misc_RNA (1)...(19): siRNA sense strand
gggacgaaaccucuaacaa

SEQ ID NO: 927350 - RNA, 19 nt, Homo sapiens
  misc_RNA (1)...(19): siRNA sense strand
gaaacugugacaaacucaa

SEQ ID NO: 927351 - RNA, 19 nt, Homo sapiens
  misc_RNA (1)...(19): siRNA sense strand
cuggcuaccugcacaagaa

SEQ ID NO: 927352 - RNA, 19 nt, Homo sapiens
  misc_RNA (1)...(19): siRNA sense strand
ggacaaugaagacuaugag

SEQ ID NO: 927353 - RNA, 19 nt, Homo sapiens
  misc_RNA (1)...(19): siRNA sense strand
gcacggccucccagauguu

SEQ ID NO: 927354 - RNA, 19 nt, Homo sapiens
  misc_RNA (1)...(19): siRNA sense strand
gcccagaaccugcuaacca

SEQ ID NO: 927355 - RNA, 19 nt, Homo sapiens
  misc_RNA (1)...(19): siRNA sense strand
ccaaguuccugaagauagc

SEQ ID NO: 927356 - RNA, 19 nt, Homo sapiens
  misc_RNA (1)...(19): siRNA sense strand
gggaagguccugguugugu

SEQ ID NO: 927357 - RNA, 19 nt, Homo sapiens
  misc_RNA (1)...(19): siRNA sense strand
cccagaaccugcuaaccau

SEQ ID NO: 927358 - RNA, 19 nt, Homo sapiens
  misc_RNA (1)...(19): siRNA sense strand
ggaguccugcgaaguggaa

SEQ ID NO: 927359 - RNA, 19 nt, Homo sapiens
  misc_RNA (1)...(19): siRNA sense strand
gaaauggccccugcgcuuu

SEQ ID NO: 927360 - RNA, 19 nt, Homo sapiens
  misc_RNA (1)...(19): siRNA sense strand
ccugcgaaguggaaagguu

SEQ ID NO: 927361 - RNA, 19 nt, Homo sapiens
  misc_RNA (1)...(19): siRNA sense strand
cuccagaaacugugacaaa

SEQ ID NO: 927362 - RNA, 19 nt, Homo sapiens
  misc_RNA (1)...(19): siRNA sense strand
gcccaaguuccugaagaua

SEQ ID NO: 927363 - RNA, 19 nt, Homo sapiens
  misc_RNA (1)...(19): siRNA sense strand
ugaugcacccaccggcuua

SEQ ID NO: 927364 - RNA, 19 nt, Homo sapiens
  misc_RNA (1)...(19): siRNA sense strand
aagcccaaguuccugaaga

SEQ ID NO: 927365 - RNA, 19 nt, Homo sapiens
  misc_RNA (1)...(19): siRNA sense strand
cggcugaagagaugcauug

SEQ ID NO: 927366 - RNA, 19 nt, Homo sapiens
  misc_RNA (1)...(19): siRNA sense strand
cagggagauuggccacuuc

SEQ ID NO: 927367 - RNA, 19 nt, Homo sapiens
  misc_RNA (1)...(19): siRNA sense strand
uugagaaggacucuaaguu

SEQ ID NO: 927368 - RNA, 19 nt, Homo sapiens
  misc_RNA (1)...(19): siRNA sense strand
ggaacuccucuaccaaguc

SEQ ID NO: 927369 - RNA, 19 nt, Homo sapiens
  misc_RNA (1)...(19): siRNA sense strand
uuccagugcugccaucaug

SEQ ID NO: 927370 - RNA, 19 nt, Homo sapiens
  misc_RNA (1)...(19): siRNA sense strand
aagcacggccucccagaug

SEQ ID NO: 927371 - RNA, 19 nt, Homo sapiens
  misc_RNA (1)...(19): siRNA sense strand
aagccagccuucucugaca

SEQ ID NO: 927372 - RNA, 19 nt, Homo sapiens
  misc_RNA (1)...(19): siRNA sense strand
guugagcggccuguggaua

SEQ ID NO: 927373 - RNA, 19 nt, Homo sapiens
  misc_RNA (1)...(19): siRNA sense strand
gcaccgcacgugguucuuc

SEQ ID NO: 927374 - RNA, 19 nt, Homo sapiens
  misc_RNA (1)...(19): siRNA sense strand
cggaacuccucuaccaagu

SEQ ID NO: 927375 - RNA, 19 nt, Homo sapiens
  misc_RNA (1)...(19): siRNA sense strand
agccaugcccggacucuuu

SEQ ID NO: 927376 - RNA, 19 nt, Homo sapiens
  misc_RNA (1)...(19): siRNA sense strand
ggccauuggugcccagaac

SEQ ID NO: 927377 - RNA, 19 nt, Homo sapiens
  misc_RNA (1)...(19): siRNA sense strand
ggagaccacguccaacaac

SEQ ID NO: 927378 - RNA, 19 nt, Homo sapiens
  misc_RNA (1)...(19): siRNA sense strand
gauuggccacuuccacgaa

SEQ ID NO: 927379 - RNA, 19 nt, Homo sapiens
  misc_RNA (1)...(19): siRNA sense strand
agaagcaccgcacgugguu

SEQ ID NO: 927380 - RNA, 19 nt, Homo sapiens
  misc_RNA (1)...(19): siRNA sense strand
ccaacaagcccaaguuccu

SEQ ID NO: 927381 - RNA, 19 nt, Homo sapiens
  misc_RNA (1)...(19): siRNA sense strand
cagccaacaagcccaaguu

SEQ ID NO: 927382 - RNA, 19 nt, Homo sapiens
  misc_RNA (1)...(19): siRNA sense strand
cagcuucuacggcgcaguu

SEQ ID NO: 927383 - RNA, 19 nt, Homo sapiens
  misc_RNA (1)...(19): siRNA sense strand
gcucggacacagacagcuu

SEQ ID NO: 927384 - RNA, 19 nt, Homo sapiens
  misc_RNA (1)...(19): siRNA sense strand
ccagaaacugugacaaacu

SEQ ID NO: 927385 - RNA, 19 nt, Homo sapiens
  misc_RNA (1)...(19): siRNA sense strand
gaacagugccaccagcuuu

SEQ ID NO: 927386 - RNA, 19 nt, Homo sapiens
  misc_RNA (1)...(19): siRNA sense strand
caggcaaggugguuuauuu

SEQ ID NO: 927387 - RNA, 19 nt, Homo sapiens
  misc_RNA (1)...(19): siRNA sense strand
gaaguggucugcauaagcu

SEQ ID NO: 927388 - RNA, 19 nt, Homo sapiens
  misc_RNA (1)...(19): siRNA sense strand
caacaaguaucacaacaac

SEQ ID NO: 927389 - RNA, 19 nt, Homo sapiens
  misc_RNA (1)...(19): siRNA sense strand
gaaggagacccauuuguag

SEQ ID NO: 927390 - RNA, 19 nt, Homo sapiens
  misc_RNA (1)...(19): siRNA sense strand
gcauuggucuggcaucugu

SEQ ID NO: 927391 - RNA, 19 nt, Homo sapiens
  misc_RNA (1)...(19): siRNA sense strand
gguccugccuguucuuuau

SEQ ID NO: 927392 - RNA, 19 nt, Homo sapiens
  misc_RNA (1)...(19): siRNA sense strand
agaaggagacccauuugua

SEQ ID NO: 927393 - RNA, 19 nt, Homo sapiens
  misc_RNA (1)...(19): siRNA sense strand
gggcggaccguuucuauga

SEQ ID NO: 927394 - RNA, 19 nt, Homo sapiens
  misc_RNA (1)...(19): siRNA sense strand
gcacggacuuucugaacca

SEQ ID NO: 927395 - RNA, 19 nt, Homo sapiens
  misc_RNA (1)...(19): siRNA sense strand
gggagaaggagacccauuu

SEQ ID NO: 927396 - RNA, 19 nt, Homo sapiens
  misc_RNA (1)...(19): siRNA sense strand
gacuuugccuggccacuuu

SEQ ID NO: 927397 - RNA, 19 nt, Homo sapiens
  misc_RNA (1)...(19): siRNA sense strand
caacauugaggacaugauu

SEQ ID NO: 927398 - RNA, 19 nt, Homo sapiens
  misc_RNA (1)...(19): siRNA sense strand
caaggugguuuauuucaca

SEQ ID NO: 927399 - RNA, 19 nt, Homo sapiens
  misc_RNA (1)...(19): siRNA sense strand
acaacaacgucuaugugua

SEQ ID NO: 927400 - RNA, 19 nt, Homo sapiens
  misc_RNA (1)...(19): siRNA sense strand
ggcaaugucuggagguuuc

SEQ ID NO: 927401 - RNA, 19 nt, Homo sapiens
  misc_RNA (1)...(19): siRNA sense strand
ggucaucgagucauauuug

SEQ ID NO: 927402 - RNA, 19 nt, Homo sapiens
  misc_RNA (1)...(19): siRNA sense strand
ggcaucaucuacuacuuga

SEQ ID NO: 927403 - RNA, 19 nt, Homo sapiens
  misc_RNA (1)...(19): siRNA sense strand
ccacuuuccucuucuccuu

SEQ ID NO: 927404 - RNA, 19 nt, Homo sapiens
  misc_RNA (1)...(19): siRNA sense strand
gcacccagaucuucuucuc

SEQ ID NO: 927405 - RNA, 19 nt, Homo sapiens
  misc_RNA (1)...(19): siRNA sense strand
ggagaaggagacccauuug

SEQ ID NO: 927406 - RNA, 19 nt, Homo sapiens
  misc_RNA (1)...(19): siRNA sense strand
caacaacgucuauguguac

SEQ ID NO: 927407 - RNA, 19 nt, Homo sapiens
  misc_RNA (1)...(19): siRNA sense strand
ccaaggcugugacuaugau

SEQ ID NO: 927408 - RNA, 19 nt, Homo sapiens
  misc_RNA (1)...(19): siRNA sense strand
guacaacaacgucuaugug

SEQ ID NO: 927409 - RNA, 19 nt, Homo sapiens
  misc_RNA (1)...(19): siRNA sense strand
cgucaugugcuaccugaua

SEQ ID NO: 927410 - RNA, 19 nt, Homo sapiens
  misc_RNA (1)...(19): siRNA sense strand
gcagcuacaacaaguauca

SEQ ID NO: 927411 - RNA, 19 nt, Homo sapiens
  misc_RNA (1)...(19): siRNA sense strand
ggaccaacaagauggaguu

SEQ ID NO: 927412 - RNA, 19 nt, Homo sapiens
  misc_RNA (1)...(19): siRNA sense strand
ccucaccugucauggaauu

SEQ ID NO: 927413 - RNA, 19 nt, Homo sapiens
  misc_RNA (1)...(19): siRNA sense strand
guacaucuuccagcuguuu

SEQ ID NO: 927414 - RNA, 19 nt, Homo sapiens
  misc_RNA (1)...(19): siRNA sense strand
uaccucaccugucauggaa

SEQ ID NO: 927415 - RNA, 19 nt, Homo sapiens
  misc_RNA (1)...(19): siRNA sense strand
ugacuaugaugcccuuauc

SEQ ID NO: 927416 - RNA, 19 nt, Homo sapiens
  misc_RNA (1)...(19): siRNA sense strand
gcaaggugguuuauuucac

SEQ ID NO: 927417 - RNA, 19 nt, Homo sapiens
  misc_RNA (1)...(19): siRNA sense strand
gggcaucaucuacuacuug

SEQ ID NO: 927418 - RNA, 19 nt, Homo sapiens
  misc_RNA (1)...(19): siRNA sense strand
ccaauggaccaacaagaug

SEQ ID NO: 927419 - RNA, 19 nt, Homo sapiens
  misc_RNA (1)...(19): siRNA sense strand
cagaucuucuucuccuuug

SEQ ID NO: 927420 - RNA, 19 nt, Homo sapiens
  misc_RNA (1)...(19): siRNA sense strand
ccagaucuucuucuccuuu

SEQ ID NO: 927421 - RNA, 19 nt, Homo sapiens
  misc_RNA (1)...(19): siRNA sense strand
ugacaacauugaggacaug

SEQ ID NO: 927422 - RNA, 19 nt, Homo sapiens
  misc_RNA (1)...(19): siRNA sense strand
gagaaggagacccauuugu

SEQ ID NO: 927423 - RNA, 19 nt, Homo sapiens
  misc_RNA (1)...(19): siRNA sense strand
gauacuccauuggcugguu

SEQ ID NO: 927424 - RNA, 19 nt, Homo sapiens
  misc_RNA (1)...(19): siRNA sense strand
gccaauggaccaacaagau

SEQ ID NO: 927425 - RNA, 19 nt, Homo sapiens
  misc_RNA (1)...(19): siRNA sense strand
gcauaugccugcuguuccu

SEQ ID NO: 927426 - RNA, 19 nt, Homo sapiens
  misc_RNA (1)...(19): siRNA sense strand
caaguacaacaacgucuau

SEQ ID NO: 927427 - RNA, 19 nt, Homo sapiens
  misc_RNA (1)...(19): siRNA sense strand
gucaucgagucauauuuga

SEQ ID NO: 927428 - RNA, 19 nt, Homo sapiens
  misc_RNA (1)...(19): siRNA sense strand
ccagcuguuugacuacuau

SEQ ID NO: 927429 - RNA, 19 nt, Homo sapiens
  misc_RNA (1)...(19): siRNA sense strand
acaaguaucacaacaacug

SEQ ID NO: 927430 - RNA, 19 nt, Homo sapiens
  misc_RNA (1)...(19): siRNA sense strand
gggcagcuacaacaaguau

SEQ ID NO: 927431 - RNA, 19 nt, Homo sapiens
  misc_RNA (1)...(19): siRNA sense strand
caucgagucauauuugaau

SEQ ID NO: 927432 - RNA, 19 nt, Homo sapiens
  misc_RNA (1)...(19): siRNA sense strand
ucaaguacaacaacgucua

SEQ ID NO: 927433 - RNA, 19 nt, Homo sapiens
  misc_RNA (1)...(19): siRNA sense strand
ggaagguggcagugcaaga

SEQ ID NO: 927434 - RNA, 19 nt, Homo sapiens
  misc_RNA (1)...(19): siRNA sense strand
gaagguggcagugcaagag

SEQ ID NO: 927435 - RNA, 19 nt, Homo sapiens
  misc_RNA (1)...(19): siRNA sense strand
ggacuuugccuggccacuu

SEQ ID NO: 927436 - RNA, 19 nt, Homo sapiens
  misc_RNA (1)...(19): siRNA sense strand
gugacagccuccauagaca

SEQ ID NO: 927437 - RNA, 19 nt, Homo sapiens
  misc_RNA (1)...(19): siRNA sense strand
aacaagggaaggacugaua

SEQ ID NO: 927438 - RNA, 19 nt, Homo sapiens
  misc_RNA (1)...(19): siRNA sense strand
ccguuucuaugacaacauu

SEQ ID NO: 927439 - RNA, 19 nt, Homo sapiens
  misc_RNA (1)...(19): siRNA sense strand
gcggaccguuucuaugaca

SEQ ID NO: 927440 - RNA, 19 nt, Homo sapiens
  misc_RNA (1)...(19): siRNA sense strand
ggacgaccugcaacaacuu

SEQ ID NO: 927441 - RNA, 19 nt, Homo sapiens
  misc_RNA (1)...(19): siRNA sense strand
ggagguggagccuucuuca

SEQ ID NO: 927442 - RNA, 19 nt, Homo sapiens
  misc_RNA (1)...(19): siRNA sense strand
ggugacagccuccauagac

SEQ ID NO: 927443 - RNA, 19 nt, Homo sapiens
  misc_RNA (1)...(19): siRNA sense strand
ucacaacaacugcuacaag

SEQ ID NO: 927444 - RNA, 19 nt, Homo sapiens
  misc_RNA (1)...(19): siRNA sense strand
caucaucuacuacuugaag

SEQ ID NO: 927445 - RNA, 19 nt, Homo sapiens
  misc_RNA (1)...(19): siRNA sense strand
gcacagugaccccauuuga

SEQ ID NO: 927446 - RNA, 19 nt, Homo sapiens
  misc_RNA (1)...(19): siRNA sense strand
ucuuccagcuguuugacua

SEQ ID NO: 927447 - RNA, 19 nt, Homo sapiens
  misc_RNA (1)...(19): siRNA sense strand
gauggaguuugugcuguca

SEQ ID NO: 927448 - RNA, 19 nt, Homo sapiens
  misc_RNA (1)...(19): siRNA sense strand
ucgccugggucaucugcua

SEQ ID NO: 927449 - RNA, 19 nt, Homo sapiens
  misc_RNA (1)...(19): siRNA sense strand
gcugugguccugccuguuc

SEQ ID NO: 927450 - RNA, 19 nt, Homo sapiens
  misc_RNA (1)...(19): siRNA sense strand
gagcaaggggugcccauuu

SEQ ID NO: 927451 - RNA, 19 nt, Homo sapiens
  misc_RNA (1)...(19): siRNA sense strand
uacaacaaguaucacaaca

SEQ ID NO: 927452 - RNA, 19 nt, Homo sapiens
  misc_RNA (1)...(19): siRNA sense strand
gucacagccuggaggaaga

SEQ ID NO: 927453 - RNA, 19 nt, Homo sapiens
  misc_RNA (1)...(19): siRNA sense strand
cuacuugaagccagauuug

SEQ ID NO: 927454 - RNA, 19 nt, Homo sapiens
  misc_RNA (1)...(19): siRNA sense strand
gaaguuggaccaggaagac

SEQ ID NO: 927455 - RNA, 19 nt, Homo sapiens
  misc_RNA (1)...(19): siRNA sense strand
gucaugugcuaccugauag

SEQ ID NO: 927456 - RNA, 19 nt, Homo sapiens
  misc_RNA (1)...(19): siRNA sense strand
gcccucugcuuccugaaca

SEQ ID NO: 927457 - RNA, 19 nt, Homo sapiens
  misc_RNA (1)...(19): siRNA sense strand
cgagucauauuugaauguc

SEQ ID NO: 927458 - RNA, 19 nt, Homo sapiens
  misc_RNA (1)...(19): siRNA sense strand
ccaucgccgucaugugcua

SEQ ID NO: 927459 - RNA, 19 nt, Homo sapiens
  misc_RNA (1)...(19): siRNA sense strand
gggcauuggucuggcaucu

SEQ ID NO: 927460 - RNA, 19 nt, Homo sapiens
  misc_RNA (1)...(19): siRNA sense strand
ugccugggcucucuucuac

SEQ ID NO: 927461 - RNA, 19 nt, Homo sapiens
  misc_RNA (1)...(19): siRNA sense strand
ccuggccacuuuccucuuc

SEQ ID NO: 927462 - RNA, 19 nt, Homo sapiens
  misc_RNA (1)...(19): siRNA sense strand
gcuguuccugucauuguuu

SEQ ID NO: 927463 - RNA, 19 nt, Homo sapiens
  misc_RNA (1)...(19): siRNA sense strand
cagccuccauagacauguu

SEQ ID NO: 927464 - RNA, 19 nt, Homo sapiens
  misc_RNA (1)...(19): siRNA sense strand
guccugggcuggccuucau

SEQ ID NO: 927465 - RNA, 19 nt, Homo sapiens
  misc_RNA (1)...(19): siRNA sense strand
gcuacaacaaguaucacaa

SEQ ID NO: 927466 - RNA, 19 nt, Homo sapiens
  misc_RNA (1)...(19): siRNA sense strand
accagggcaucaucuacua

SEQ ID NO: 927467 - RNA, 19 nt, Homo sapiens
  misc_RNA (1)...(19): siRNA sense strand
uaccugaugcuugucauuu

SEQ ID NO: 927468 - RNA, 19 nt, Homo sapiens
  misc_RNA (1)...(19): siRNA sense strand
ggcaaggugguuuauuuca

SEQ ID NO: 927469 - RNA, 19 nt, Homo sapiens
  misc_RNA (1)...(19): siRNA sense strand
gagcauugcacggacuuuc

SEQ ID NO: 927470 - RNA, 19 nt, Homo sapiens
  misc_RNA (1)...(19): siRNA sense strand
gacgaccugcaacaacuuu

SEQ ID NO: 927471 - RNA, 19 nt, Homo sapiens
  misc_RNA (1)...(19): siRNA sense strand
gcucucuucuaccuguuca

SEQ ID NO: 927472 - RNA, 19 nt, Homo sapiens
  misc_RNA (1)...(19): siRNA sense strand
ccacagcccaagcaacauc

SEQ ID NO: 927473 - RNA, 19 nt, Homo sapiens
  misc_RNA (1)...(19): siRNA sense strand
uacaacaacgucuaugugu

SEQ ID NO: 927474 - RNA, 19 nt, Homo sapiens
  misc_RNA (1)...(19): siRNA sense strand
acaacaaguaucacaacaa

SEQ ID NO: 927475 - RNA, 19 nt, Homo sapiens
  misc_RNA (1)...(19): siRNA sense strand
gaccaacaagauggaguuu

SEQ ID NO: 927476 - RNA, 19 nt, Homo sapiens
  misc_RNA (1)...(19): siRNA sense strand
ugggucaucugcuauuucu

SEQ ID NO: 927477 - RNA, 19 nt, Homo sapiens
  misc_RNA (1)...(19): siRNA sense strand
ucaggagccggcacaguga

SEQ ID NO: 927478 - RNA, 19 nt, Homo sapiens
  misc_RNA (1)...(19): siRNA sense strand
ucaccucgggcauccauga

SEQ ID NO: 927479 - RNA, 19 nt, Homo sapiens
  misc_RNA (1)...(19): siRNA sense strand
uggcaucuguggucaucga

SEQ ID NO: 927480 - RNA, 19 nt, Homo sapiens
  misc_RNA (1)...(19): siRNA sense strand
guaccugaugcuugucauu

SEQ ID NO: 927481 - RNA, 19 nt, Homo sapiens
  misc_RNA (1)...(19): siRNA sense strand
ccugggucaucugcuauuu

SEQ ID NO: 927482 - RNA, 19 nt, Homo sapiens
  misc_RNA (1)...(19): siRNA sense strand
uaucaugcucauauuccua

SEQ ID NO: 927483 - RNA, 19 nt, Homo sapiens
  misc_RNA (1)...(19): siRNA sense strand
gucaucacccuccugaaga

SEQ ID NO: 927484 - RNA, 19 nt, Homo sapiens
  misc_RNA (1)...(19): siRNA sense strand
cgucaucacccuccugaag

SEQ ID NO: 927485 - RNA, 19 nt, Homo sapiens
  misc_RNA (1)...(19): siRNA sense strand
ggaaggaaauucacaagaa

SEQ ID NO: 927486 - RNA, 19 nt, Homo sapiens
  misc_RNA (1)...(19): siRNA sense strand
gaaggaaauucacaagaaa

SEQ ID NO: 927487 - RNA, 19 nt, Homo sapiens
  misc_RNA (1)...(19): siRNA sense strand
gaaagaauccauccuuaaa

SEQ ID NO: 927488 - RNA, 19 nt, Homo sapiens
  misc_RNA (1)...(19): siRNA sense strand
ccaaauugcugucauauag

SEQ ID NO: 927489 - RNA, 19 nt, Homo sapiens
  misc_RNA (1)...(19): siRNA sense strand
gaucagaguuggugcuuug

SEQ ID NO: 927490 - RNA, 19 nt, Homo sapiens
  misc_RNA (1)...(19): siRNA sense strand
ugaaagggcagaaucauua

SEQ ID NO: 927491 - RNA, 19 nt, Homo sapiens
  misc_RNA (1)...(19): siRNA sense strand
cagaaagaauccauccuua

SEQ ID NO: 927492 - RNA, 19 nt, Homo sapiens
  misc_RNA (1)...(19): siRNA sense strand
gaagaugucucucagaaac

SEQ ID NO: 927493 - RNA, 19 nt, Homo sapiens
  misc_RNA (1)...(19): siRNA sense strand
gagcugaaguuacagaaga

SEQ ID NO: 927494 - RNA, 19 nt, Homo sapiens
  misc_RNA (1)...(19): siRNA sense strand
gacagagcauuucacuuua

SEQ ID NO: 927495 - RNA, 19 nt, Homo sapiens
  misc_RNA (1)...(19): siRNA sense strand
agacagagcauuucacuuu

SEQ ID NO: 927496 - RNA, 19 nt, Homo sapiens
  misc_RNA (1)...(19): siRNA sense strand
gcacaaagacagaaagaau

SEQ ID NO: 927497 - RNA, 19 nt, Homo sapiens
  misc_RNA (1)...(19): siRNA sense strand
ucacggagcucuggagaaa

SEQ ID NO: 927498 - RNA, 19 nt, Homo sapiens
  misc_RNA (1)...(19): siRNA sense strand
gcauuucacuuuacagcaa

SEQ ID NO: 927499 - RNA, 19 nt, Homo sapiens
  misc_RNA (1)...(19): siRNA sense strand
uuacagcaaugcccaaauu

SEQ ID NO: 927500 - RNA, 19 nt, Homo sapiens
  misc_RNA (1)...(19): siRNA sense strand
gaucgugugaugaaacuua

SEQ ID NO: 927501 - RNA, 19 nt, Homo sapiens
  misc_RNA (1)...(19): siRNA sense strand
ggauugggaugaaguuuua

SEQ ID NO: 927502 - RNA, 19 nt, Homo sapiens
  misc_RNA (1)...(19): siRNA sense strand
ucaccgagcugaaguuaca

SEQ ID NO: 927503 - RNA, 19 nt, Homo sapiens
  misc_RNA (1)...(19): siRNA sense strand
gaagagaaugaaaguuuga

SEQ ID NO: 927504 - RNA, 19 nt, Homo sapiens
  misc_RNA (1)...(19): siRNA sense strand
gaguugcccugaaggauug

SEQ ID NO: 927505 - RNA, 19 nt, Homo sapiens
  misc_RNA (1)...(19): siRNA sense strand
gaagaagaagagaaugaaa

SEQ ID NO: 927506 - RNA, 19 nt, Homo sapiens
  misc_RNA (1)...(19): siRNA sense strand
gagaagaaagaaagauuga

SEQ ID NO: 927507 - RNA, 19 nt, Homo sapiens
  misc_RNA (1)...(19): siRNA sense strand
uagaggaaaugcugaaugu

SEQ ID NO: 927508 - RNA, 19 nt, Homo sapiens
  misc_RNA (1)...(19): siRNA sense strand
ccauacaccuuccagauca

SEQ ID NO: 927509 - RNA, 19 nt, Homo sapiens
  misc_RNA (1)...(19): siRNA sense strand
gaggaaaugcugaauguuc

SEQ ID NO: 927510 - RNA, 19 nt, Homo sapiens
  misc_RNA (1)...(19): siRNA sense strand
caagugaucgugugaugaa

SEQ ID NO: 927511 - RNA, 19 nt, Homo sapiens
  misc_RNA (1)...(19): siRNA sense strand
aaugaaaguuugaguggaa

SEQ ID NO: 927512 - RNA, 19 nt, Homo sapiens
  misc_RNA (1)...(19): siRNA sense strand
ugaaacuuaucacuucuga

SEQ ID NO: 927513 - RNA, 19 nt, Homo sapiens
  misc_RNA (1)...(19): siRNA sense strand
agaagagaaugaaaguuug

SEQ ID NO: 927514 - RNA, 19 nt, Homo sapiens
  misc_RNA (1)...(19): siRNA sense strand
ggaaggaagaugucucuca

SEQ ID NO: 927515 - RNA, 19 nt, Homo sapiens
  misc_RNA (1)...(19): siRNA sense strand
gaaacggagagaugugaaa

SEQ ID NO: 927516 - RNA, 19 nt, Homo sapiens
  misc_RNA (1)...(19): siRNA sense strand
gauaaguccaagccagaua

SEQ ID NO: 927517 - RNA, 19 nt, Homo sapiens
  misc_RNA (1)...(19): siRNA sense strand
ggaagaugucucucagaaa

SEQ ID NO: 927518 - RNA, 19 nt, Homo sapiens
  misc_RNA (1)...(19): siRNA sense strand
gcccucagcuugauaaagg

SEQ ID NO: 927519 - RNA, 19 nt, Homo sapiens
  misc_RNA (1)...(19): siRNA sense strand
cagaguuggugcuuuguau

SEQ ID NO: 927520 - RNA, 19 nt, Homo sapiens
  misc_RNA (1)...(19): siRNA sense strand
caaaggcaaugugcagaau

SEQ ID NO: 927521 - RNA, 19 nt, Homo sapiens
  misc_RNA (1)...(19): siRNA sense strand
agaaagaauccauccuuaa

SEQ ID NO: 927522 - RNA, 19 nt, Homo sapiens
  misc_RNA (1)...(19): siRNA sense strand
gaauccauccuuaaaguca

SEQ ID NO: 927523 - RNA, 19 nt, Homo sapiens
  misc_RNA (1)...(19): siRNA sense strand
gcaaugugcagaauauaca

SEQ ID NO: 927524 - RNA, 19 nt, Homo sapiens
  misc_RNA (1)...(19): siRNA sense strand
aggaagaugucucucagaa

SEQ ID NO: 927525 - RNA, 19 nt, Homo sapiens
  misc_RNA (1)...(19): siRNA sense strand
aagaauccauccuuaaagu

SEQ ID NO: 927526 - RNA, 19 nt, Homo sapiens
  misc_RNA (1)...(19): siRNA sense strand
cagaagaagaagagaauga

SEQ ID NO: 927527 - RNA, 19 nt, Homo sapiens
  misc_RNA (1)...(19): siRNA sense strand
gaagcuacgacuagacaga

SEQ ID NO: 927528 - RNA, 19 nt, Homo sapiens
  misc_RNA (1)...(19): siRNA sense strand
aaauugcugucauauagga

SEQ ID NO: 927529 - RNA, 19 nt, Homo sapiens
  misc_RNA (1)...(19): siRNA sense strand
gaugaaacuuaucacuucu

SEQ ID NO: 927530 - RNA, 19 nt, Homo sapiens
  misc_RNA (1)...(19): siRNA sense strand
gaagaagagaaugaaaguu

SEQ ID NO: 927531 - RNA, 19 nt, Homo sapiens
  misc_RNA (1)...(19): siRNA sense strand
gaaggcaucgucaagucaa

SEQ ID NO: 927532 - RNA, 19 nt, Homo sapiens
  misc_RNA (1)...(19): siRNA sense strand
gaacauaguuuuggagcau

SEQ ID NO: 927533 - RNA, 19 nt, Homo sapiens
  misc_RNA (1)...(19): siRNA sense strand
gaaggauugggaugaaguu

SEQ ID NO: 927534 - RNA, 19 nt, Homo sapiens
  misc_RNA (1)...(19): siRNA sense strand
gaauauacacaaggaagau

SEQ ID NO: 927535 - RNA, 19 nt, Homo sapiens
  misc_RNA (1)...(19): siRNA sense strand
gaaagaaagauugaaacca

SEQ ID NO: 927536 - RNA, 19 nt, Homo sapiens
  misc_RNA (1)...(19): siRNA sense strand
gaaagggcagaaucauuag

SEQ ID NO: 927537 - RNA, 19 nt, Homo sapiens
  misc_RNA (1)...(19): siRNA sense strand
caucagcaguggcacaaag

SEQ ID NO: 927538 - RNA, 19 nt, Homo sapiens
  misc_RNA (1)...(19): siRNA sense strand
ggcagaaucauuagcgaaa

SEQ ID NO: 927539 - RNA, 19 nt, Homo sapiens
  misc_RNA (1)...(19): siRNA sense strand
cugaguaugccuguaauua

SEQ ID NO: 927540 - RNA, 19 nt, Homo sapiens
  misc_RNA (1)...(19): siRNA sense strand
aaggcaaugugcagaauau

SEQ ID NO: 927541 - RNA, 19 nt, Homo sapiens
  misc_RNA (1)...(19): siRNA sense strand
gcagaaugagaaauuuaga

SEQ ID NO: 927542 - RNA, 19 nt, Homo sapiens
  misc_RNA (1)...(19): siRNA sense strand
guucgggacuaucuucugu

SEQ ID NO: 927543 - RNA, 19 nt, Homo sapiens
  misc_RNA (1)...(19): siRNA sense strand
gugaaagggcagaaucauu

SEQ ID NO: 927544 - RNA, 19 nt, Homo sapiens
  misc_RNA (1)...(19): siRNA sense strand
auacaggcauccaaaucaa

SEQ ID NO: 927545 - RNA, 19 nt, Homo sapiens
  misc_RNA (1)...(19): siRNA sense strand
gaauuuaaggacccaagug

SEQ ID NO: 927546 - RNA, 19 nt, Homo sapiens
  misc_RNA (1)...(19): siRNA sense strand
cauacaggcauccaaauca

SEQ ID NO: 927547 - RNA, 19 nt, Homo sapiens
  misc_RNA (1)...(19): siRNA sense strand
aaacucgacucuucugacu

SEQ ID NO: 927548 - RNA, 19 nt, Homo sapiens
  misc_RNA (1)...(19): siRNA sense strand
uggcagaaugagaaauuua

SEQ ID NO: 927549 - RNA, 19 nt, Homo sapiens
  misc_RNA (1)...(19): siRNA sense strand
guggcagaaugagaaauuu

SEQ ID NO: 927550 - RNA, 19 nt, Homo sapiens
  misc_RNA (1)...(19): siRNA sense strand
cacaagaaacggagagaug

SEQ ID NO: 927551 - RNA, 19 nt, Homo sapiens
  misc_RNA (1)...(19): siRNA sense strand
cagagcauuucacuuuaca

SEQ ID NO: 927552 - RNA, 19 nt, Homo sapiens
  misc_RNA (1)...(19): siRNA sense strand
aagaaggcaucgucaaguc

SEQ ID NO: 927553 - RNA, 19 nt, Homo sapiens
  misc_RNA (1)...(19): siRNA sense strand
ccugaaggauugggaugaa

SEQ ID NO: 927554 - RNA, 19 nt, Homo sapiens
  misc_RNA (1)...(19): siRNA sense strand
caagucaaagcaacuagga

SEQ ID NO: 927555 - RNA, 19 nt, Homo sapiens
  misc_RNA (1)...(19): siRNA sense strand
cuuuguaucugcuauaugg

SEQ ID NO: 927556 - RNA, 19 nt, Homo sapiens
  misc_RNA (1)...(19): siRNA sense strand
acagaaagaauccauccuu

SEQ ID NO: 927557 - RNA, 19 nt, Homo sapiens
  misc_RNA (1)...(19): siRNA sense strand
uuaggaagcuacgacuaga

SEQ ID NO: 927558 - RNA, 19 nt, Homo sapiens
  misc_RNA (1)...(19): siRNA sense strand
ugcccaaauugcugucaua

SEQ ID NO: 927559 - RNA, 19 nt, Homo sapiens
  misc_RNA (1)...(19): siRNA sense strand
agucaaagcaacuaggaaa

SEQ ID NO: 927560 - RNA, 19 nt, Homo sapiens
  misc_RNA (1)...(19): siRNA sense strand
caagaaggcaucgucaagu

SEQ ID NO: 927561 - RNA, 19 nt, Homo sapiens
  misc_RNA (1)...(19): siRNA sense strand
gcaguggcacaaagacaga

SEQ ID NO: 927562 - RNA, 19 nt, Homo sapiens
  misc_RNA (1)...(19): siRNA sense strand
ucagcuugauaaaggauga

SEQ ID NO: 927563 - RNA, 19 nt, Homo sapiens
  misc_RNA (1)...(19): siRNA sense strand
acggagcucuggagaaaca

SEQ ID NO: 927564 - RNA, 19 nt, Homo sapiens
  misc_RNA (1)...(19): siRNA sense strand
agagaagaaagaaagauug

SEQ ID NO: 927565 - RNA, 19 nt, Homo sapiens
  misc_RNA (1)...(19): siRNA sense strand
gcuuuggcuuggcgauauu

SEQ ID NO: 927566 - RNA, 19 nt, Homo sapiens
  misc_RNA (1)...(19): siRNA sense strand
cccaagugaucgugugaug

SEQ ID NO: 927567 - RNA, 19 nt, Homo sapiens
  misc_RNA (1)...(19): siRNA sense strand
agaagaagagaaugaaagu

SEQ ID NO: 927568 - RNA, 19 nt, Homo sapiens
  misc_RNA (1)...(19): siRNA sense strand
aaaggcaaugugcagaaua

SEQ ID NO: 927569 - RNA, 19 nt, Homo sapiens
  misc_RNA (1)...(19): siRNA sense strand
gggcaagucaaagcaacua

SEQ ID NO: 927570 - RNA, 19 nt, Homo sapiens
  misc_RNA (1)...(19): siRNA sense strand
caagaaacggagagaugug

SEQ ID NO: 927571 - RNA, 19 nt, Homo sapiens
  misc_RNA (1)...(19): siRNA sense strand
ccaggagacggacagugua

SEQ ID NO: 927572 - RNA, 19 nt, Homo sapiens
  misc_RNA (1)...(19): siRNA sense strand
ucacuucugauguauuaga

SEQ ID NO: 927573 - RNA, 19 nt, Homo sapiens
  misc_RNA (1)...(19): siRNA sense strand
acagagcauuucacuuuac

SEQ ID NO: 927574 - RNA, 19 nt, Homo sapiens
  misc_RNA (1)...(19): siRNA sense strand
agaagaagaagagaaugaa

SEQ ID NO: 927575 - RNA, 19 nt, Homo sapiens
  misc_RNA (1)...(19): siRNA sense strand
gcagaauauacacaaggaa

SEQ ID NO: 927576 - RNA, 19 nt, Homo sapiens
  misc_RNA (1)...(19): siRNA sense strand
ucaagaaggcaucgucaag

SEQ ID NO: 927577 - RNA, 19 nt, Homo sapiens
  misc_RNA (1)...(19): siRNA sense strand
gaugugaaagggcagaauc

SEQ ID NO: 927578 - RNA, 19 nt, Homo sapiens
  misc_RNA (1)...(19): siRNA sense strand
aaacuaaugauggagaaga

SEQ ID NO: 927579 - RNA, 19 nt, Homo sapiens
  misc_RNA (1)...(19): siRNA sense strand
gcagaaucauuagcgaaaa

SEQ ID NO: 927580 - RNA, 19 nt, Homo sapiens
  misc_RNA (1)...(19): siRNA sense strand
uuacagaagaagaagagaa

SEQ ID NO: 927581 - RNA, 19 nt, Homo sapiens
  misc_RNA (1)...(19): siRNA sense strand
ugcagaauauacacaagga

SEQ ID NO: 927582 - RNA, 19 nt, Homo sapiens
  misc_RNA (1)...(19): siRNA sense strand
agaugucucucagaaacaa

SEQ ID NO: 927583 - RNA, 19 nt, Homo sapiens
  misc_RNA (1)...(19): siRNA sense strand
cgacucuucugacucugau

SEQ ID NO: 927584 - RNA, 19 nt, Homo sapiens
  misc_RNA (1)...(19): siRNA sense strand
uguaucugcuauauggauu

SEQ ID NO: 927585 - RNA, 19 nt, Homo sapiens
  misc_RNA (1)...(19): siRNA sense strand
ggaaaugcccuuuaaaaua

SEQ ID NO: 927586 - RNA, 19 nt, Homo sapiens
  misc_RNA (1)...(19): siRNA sense strand
uaucagagcugcagaagag

SEQ ID NO: 927587 - RNA, 19 nt, Homo sapiens
  misc_RNA (1)...(19): siRNA sense strand
gaagaguacugagguugaa

SEQ ID NO: 927588 - RNA, 19 nt, Homo sapiens
  misc_RNA (1)...(19): siRNA sense strand
guacugagguugaaguucu

SEQ ID NO: 927589 - RNA, 19 nt, Homo sapiens
  misc_RNA (1)...(19): siRNA sense strand
ggaccaagccagacuguau

SEQ ID NO: 927590 - RNA, 19 nt, Homo sapiens
  misc_RNA (1)...(19): siRNA sense strand
aagauacugugucaagaua

SEQ ID NO: 927591 - RNA, 19 nt, Homo sapiens
  misc_RNA (1)...(19): siRNA sense strand
gaaugaaccguuugacgaa

SEQ ID NO: 927592 - RNA, 19 nt, Homo sapiens
  misc_RNA (1)...(19): siRNA sense strand
acaagaggauuaugacaug

SEQ ID NO: 927593 - RNA, 19 nt, Homo sapiens
  misc_RNA (1)...(19): siRNA sense strand
ccggguagcucaauugaug

SEQ ID NO: 927594 - RNA, 19 nt, Homo sapiens
  misc_RNA (1)...(19): siRNA sense strand
aaaguggaaugaaccguuu

SEQ ID NO: 927595 - RNA, 19 nt, Homo sapiens
  misc_RNA (1)...(19): siRNA sense strand
aaacacagaggaagacauu

SEQ ID NO: 927596 - RNA, 19 nt, Homo sapiens
  misc_RNA (1)...(19): siRNA sense strand
uaaagauacugugucaaga

SEQ ID NO: 927597 - RNA, 19 nt, Homo sapiens
  misc_RNA (1)...(19): siRNA sense strand
gcagaagaguccaggaaac

SEQ ID NO: 927598 - RNA, 19 nt, Homo sapiens
  misc_RNA (1)...(19): siRNA sense strand
caguuccucucaacguuua

SEQ ID NO: 927599 - RNA, 19 nt, Homo sapiens
  misc_RNA (1)...(19): siRNA sense strand
ucaaugccaucuacuucaa

SEQ ID NO: 927600 - RNA, 19 nt, Homo sapiens
  misc_RNA (1)...(19): siRNA sense strand
gaaacauacacaagggaaa

SEQ ID NO: 927601 - RNA, 19 nt, Homo sapiens
  misc_RNA (1)...(19): siRNA sense strand
aauccugucuucaauucua

SEQ ID NO: 927602 - RNA, 19 nt, Homo sapiens
  misc_RNA (1)...(19): siRNA sense strand
gcgucgagcugcuuuguag

SEQ ID NO: 927603 - RNA, 19 nt, Homo sapiens
  misc_RNA (1)...(19): siRNA sense strand
cccaggcacugucuuuaaa

SEQ ID NO: 927604 - RNA, 19 nt, Homo sapiens
  misc_RNA (1)...(19): siRNA sense strand
aaucugugcuucggcauuu

SEQ ID NO: 927605 - RNA, 19 nt, Homo sapiens
  misc_RNA (1)...(19): siRNA sense strand
gcccaggcacugucuuuaa

SEQ ID NO: 927606 - RNA, 19 nt, Homo sapiens
  misc_RNA (1)...(19): siRNA sense strand
caaaggccagugcagauga

SEQ ID NO: 927607 - RNA, 19 nt, Homo sapiens
  misc_RNA (1)...(19): siRNA sense strand
gcaaaggccagugcagaug

SEQ ID NO: 927608 - RNA, 19 nt, Homo sapiens
  misc_RNA (1)...(19): siRNA sense strand
aaaggaaaguggaaugaac

SEQ ID NO: 927609 - RNA, 19 nt, Homo sapiens
  misc_RNA (1)...(19): siRNA sense strand
gaagaguccaggaaacaca

SEQ ID NO: 927610 - RNA, 19 nt, Homo sapiens
  misc_RNA (1)...(19): siRNA sense strand
ggcacugucuuuaaacaca

SEQ ID NO: 927611 - RNA, 19 nt, Homo sapiens
  misc_RNA (1)...(19): siRNA sense strand
gcugaccacccuuuccuuu

SEQ ID NO: 927612 - RNA, 19 nt, Homo sapiens
  misc_RNA (1)...(19): siRNA sense strand
gauacugugucaagauaac

SEQ ID NO: 927613 - RNA, 19 nt, Homo sapiens
  misc_RNA (1)...(19): siRNA sense strand
caaaggaaaguggaaugaa

SEQ ID NO: 927614 - RNA, 19 nt, Homo sapiens
  misc_RNA (1)...(19): siRNA sense strand
ucucaacguuuaaggaauc

SEQ ID NO: 927615 - RNA, 19 nt, Homo sapiens
  misc_RNA (1)...(19): siRNA sense strand
aagccagacuguaugaaga

SEQ ID NO: 927616 - RNA, 19 nt, Homo sapiens
  misc_RNA (1)...(19): siRNA sense strand
ggccagugcagaugaugua

SEQ ID NO: 927617 - RNA, 19 nt, Homo sapiens
  misc_RNA (1)...(19): siRNA sense strand
cacaguaccugcugagaac

SEQ ID NO: 927618 - RNA, 19 nt, Homo sapiens
  misc_RNA (1)...(19): siRNA sense strand
gagcugcuuuguaguugca

SEQ ID NO: 927619 - RNA, 19 nt, Homo sapiens
  misc_RNA (1)...(19): siRNA sense strand
uaucaggaggccacguuua

SEQ ID NO: 927620 - RNA, 19 nt, Homo sapiens
  misc_RNA (1)...(19): siRNA sense strand
uagcucaauugaugcagaa

SEQ ID NO: 927621 - RNA, 19 nt, Homo sapiens
  misc_RNA (1)...(19): siRNA sense strand
ggagcuuuccuuuaucaga

SEQ ID NO: 927622 - RNA, 19 nt, Homo sapiens
  misc_RNA (1)...(19): siRNA sense strand
uuaaagauacugugucaag

SEQ ID NO: 927623 - RNA, 19 nt, Homo sapiens
  misc_RNA (1)...(19): siRNA sense strand
ccaucuacuucaaaggaaa

SEQ ID NO: 927624 - RNA, 19 nt, Homo sapiens
  misc_RNA (1)...(19): siRNA sense strand
gccaucuacuucaaaggaa

SEQ ID NO: 927625 - RNA, 19 nt, Homo sapiens
  misc_RNA (1)...(19): siRNA sense strand
gaccgaagguaaaauugaa

SEQ ID NO: 927626 - RNA, 19 nt, Homo sapiens
  misc_RNA (1)...(19): siRNA sense strand
ucaaaggaaaguggaauga

SEQ ID NO: 927627 - RNA, 19 nt, Homo sapiens
  misc_RNA (1)...(19): siRNA sense strand
uaugaagaguacugagguu

SEQ ID NO: 927628 - RNA, 19 nt, Homo sapiens
  misc_RNA (1)...(19): siRNA sense strand
gagcucagcacgguggaaa

SEQ ID NO: 927629 - RNA, 19 nt, Homo sapiens
  misc_RNA (1)...(19): siRNA sense strand
ugacauggaaucugugcuu

SEQ ID NO: 927630 - RNA, 19 nt, Homo sapiens
  misc_RNA (1)...(19): siRNA sense strand
ugaagaguacugagguuga

SEQ ID NO: 927631 - RNA, 19 nt, Homo sapiens
  misc_RNA (1)...(19): siRNA sense strand
gcacaacguguucuguucu

SEQ ID NO: 927632 - RNA, 19 nt, Homo sapiens
  misc_RNA (1)...(19): siRNA sense strand
acacagaggaagacauuca

SEQ ID NO: 927633 - RNA, 19 nt, Homo sapiens
  misc_RNA (1)...(19): siRNA sense strand
aagauaacccuucgcacaa

SEQ ID NO: 927634 - RNA, 19 nt, Homo sapiens
  misc_RNA (1)...(19): siRNA sense strand
gaaucugugcuucggcauu

SEQ ID NO: 927635 - RNA, 19 nt, Homo sapiens
  misc_RNA (1)...(19): siRNA sense strand
gaccaagccagacuguaug

SEQ ID NO: 927636 - RNA, 19 nt, Homo sapiens
  misc_RNA (1)...(19): siRNA sense strand
acacaguaccugcugagaa

SEQ ID NO: 927637 - RNA, 19 nt, Homo sapiens
  misc_RNA (1)...(19): siRNA sense strand
gucaguuccucucaacguu

SEQ ID NO: 927638 - RNA, 19 nt, Homo sapiens
  misc_RNA (1)...(19): siRNA sense strand
ccaaguucgugcacaagag

SEQ ID NO: 927639 - RNA, 19 nt, Homo sapiens
  misc_RNA (1)...(19): siRNA sense strand
aaacauacacaagggaaau

SEQ ID NO: 927640 - RNA, 19 nt, Homo sapiens
  misc_RNA (1)...(19): siRNA sense strand
aaagauacugugucaagau

SEQ ID NO: 927641 - RNA, 19 nt, Homo sapiens
  misc_RNA (1)...(19): siRNA sense strand
auuaugacauggaaucugu

SEQ ID NO: 927642 - RNA, 19 nt, Homo sapiens
  misc_RNA (1)...(19): siRNA sense strand
agaggauuaugacauggaa

SEQ ID NO: 927643 - RNA, 19 nt, Homo sapiens
  misc_RNA (1)...(19): siRNA sense strand
cagaagaguccaggaaaca

SEQ ID NO: 927644 - RNA, 19 nt, Homo sapiens
  misc_RNA (1)...(19): siRNA sense strand
caggcacugucuuuaaaca

SEQ ID NO: 927645 - RNA, 19 nt, Homo sapiens
  misc_RNA (1)...(19): siRNA sense strand
cagacuguaugaagaguac

SEQ ID NO: 927646 - RNA, 19 nt, Homo sapiens
  misc_RNA (1)...(19): siRNA sense strand
aaacaccgcaacccagaug

SEQ ID NO: 927647 - RNA, 19 nt, Homo sapiens
  misc_RNA (1)...(19): siRNA sense strand
gggaaaugcccuuuaaaau

SEQ ID NO: 927648 - RNA, 19 nt, Homo sapiens
  misc_RNA (1)...(19): siRNA sense strand
caucaacaccugggucuca

SEQ ID NO: 927649 - RNA, 19 nt, Homo sapiens
  misc_RNA (1)...(19): siRNA sense strand
gaaacaccgcaacccagau

SEQ ID NO: 927650 - RNA, 19 nt, Homo sapiens
  misc_RNA (1)...(19): siRNA sense strand
ccucucaacguuuaaggaa

SEQ ID NO: 927651 - RNA, 19 nt, Homo sapiens
  misc_RNA (1)...(19): siRNA sense strand
caagccagacuguaugaag

SEQ ID NO: 927652 - RNA, 19 nt, Homo sapiens
  misc_RNA (1)...(19): siRNA sense strand
aaugaaccguuugacgaaa

SEQ ID NO: 927653 - RNA, 19 nt, Homo sapiens
  misc_RNA (1)...(19): siRNA sense strand
cgcacaacguguucuguuc

SEQ ID NO: 927654 - RNA, 19 nt, Homo sapiens
  misc_RNA (1)...(19): siRNA sense strand
uuguggaggugaaugaaga

SEQ ID NO: 927655 - RNA, 19 nt, Homo sapiens
  misc_RNA (1)...(19): siRNA sense strand
uguccaaguucgugcacaa

SEQ ID NO: 927656 - RNA, 19 nt, Homo sapiens
  misc_RNA (1)...(19): siRNA sense strand
caaugucagcggagagaga

SEQ ID NO: 927657 - RNA, 19 nt, Homo sapiens
  misc_RNA (1)...(19): siRNA sense strand
acaaggcuggcacacagua

SEQ ID NO: 927658 - RNA, 19 nt, Homo sapiens
  misc_RNA (1)...(19): siRNA sense strand
caggcugguucuugucaau

SEQ ID NO: 927659 - RNA, 19 nt, Homo sapiens
  misc_RNA (1)...(19): siRNA sense strand
ucaguuccucucaacguuu

SEQ ID NO: 927660 - RNA, 19 nt, Homo sapiens
  misc_RNA (1)...(19): siRNA sense strand
ggcccaggcacugucuuua

SEQ ID NO: 927661 - RNA, 19 nt, Homo sapiens
  misc_RNA (1)...(19): siRNA sense strand
ucgagcugcuuuguaguug

SEQ ID NO: 927662 - RNA, 19 nt, Homo sapiens
  misc_RNA (1)...(19): siRNA sense strand
aaaggccagugcagaugau

SEQ ID NO: 927663 - RNA, 19 nt, Homo sapiens
  misc_RNA (1)...(19): siRNA sense strand
gcuuuccagucgcuucuca

SEQ ID NO: 927664 - RNA, 19 nt, Homo sapiens
  misc_RNA (1)...(19): siRNA sense strand
cagguucucaucgccauaa

SEQ ID NO: 927665 - RNA, 19 nt, Homo sapiens
  misc_RNA (1)...(19): siRNA sense strand
gcagguucucaucgccaua

SEQ ID NO: 927666 - RNA, 19 nt, Homo sapiens
  misc_RNA (1)...(19): siRNA sense strand
caaugccaucuacuucaaa

SEQ ID NO: 927667 - RNA, 19 nt, Homo sapiens
  misc_RNA (1)...(19): siRNA sense strand
ugucaaugccaucuacuuc

SEQ ID NO: 927668 - RNA, 19 nt, Homo sapiens
  misc_RNA (1)...(19): siRNA sense strand
ccagacuguaugaagagua

SEQ ID NO: 927669 - RNA, 19 nt, Homo sapiens
  misc_RNA (1)...(19): siRNA sense strand
uacaagaggauuaugacau

SEQ ID NO: 927670 - RNA, 19 nt, Homo sapiens
  misc_RNA (1)...(19): siRNA sense strand
gaguacugagguugaaguu

SEQ ID NO: 927671 - RNA, 19 nt, Homo sapiens
  misc_RNA (1)...(19): siRNA sense strand
gaaagaaugggcucaggua

SEQ ID NO: 927672 - RNA, 19 nt, Homo sapiens
  misc_RNA (1)...(19): siRNA sense strand
ggaugcagaucgugaaguu

SEQ ID NO: 927673 - RNA, 19 nt, Homo sapiens
  misc_RNA (1)...(19): siRNA sense strand
ggauacagcaggacaagaa

SEQ ID NO: 927674 - RNA, 19 nt, Homo sapiens
  misc_RNA (1)...(19): siRNA sense strand
guuaacagaugcccgaaug

SEQ ID NO: 927675 - RNA, 19 nt, Homo sapiens
  misc_RNA (1)...(19): siRNA sense strand
uuagaagccuccagauuug

SEQ ID NO: 927676 - RNA, 19 nt, Homo sapiens
  misc_RNA (1)...(19): siRNA sense strand
cuuagaagccuccagauuu

SEQ ID NO: 927677 - RNA, 19 nt, Homo sapiens
  misc_RNA (1)...(19): siRNA sense strand
ggaaacaagugcgcucaca

SEQ ID NO: 927678 - RNA, 19 nt, Homo sapiens
  misc_RNA (1)...(19): siRNA sense strand
ucaaagaugacucaaauca

SEQ ID NO: 927679 - RNA, 19 nt, Homo sapiens
  misc_RNA (1)...(19): siRNA sense strand
gauaucaccagccgagaaa

SEQ ID NO: 927680 - RNA, 19 nt, Homo sapiens
  misc_RNA (1)...(19): siRNA sense strand
gggcucuccucgucuauga

SEQ ID NO: 927681 - RNA, 19 nt, Homo sapiens
  misc_RNA (1)...(19): siRNA sense strand
caauaggaguggaauuugg

SEQ ID NO: 927682 - RNA, 19 nt, Homo sapiens
  misc_RNA (1)...(19): siRNA sense strand
gaucauccuuuguggaaac

SEQ ID NO: 927683 - RNA, 19 nt, Homo sapiens
  misc_RNA (1)...(19): siRNA sense strand
ggaguggaauuugguucaa

SEQ ID NO: 927684 - RNA, 19 nt, Homo sapiens
  misc_RNA (1)...(19): siRNA sense strand
gcucuccucgucuaugaua

SEQ ID NO: 927685 - RNA, 19 nt, Homo sapiens
  misc_RNA (1)...(19): siRNA sense strand
uugcuuacuucaucaguuu

SEQ ID NO: 927686 - RNA, 19 nt, Homo sapiens
  misc_RNA (1)...(19): siRNA sense strand
gcucaggagugugguuguu

SEQ ID NO: 927687 - RNA, 19 nt, Homo sapiens
  misc_RNA (1)...(19): siRNA sense strand
uacaauaggaguggaauuu

SEQ ID NO: 927688 - RNA, 19 nt, Homo sapiens
  misc_RNA (1)...(19): siRNA sense strand
cggagaugcugccuugaga

SEQ ID NO: 927689 - RNA, 19 nt, Homo sapiens
  misc_RNA (1)...(19): siRNA sense strand
ggaccuggaugcagaucgu

SEQ ID NO: 927690 - RNA, 19 nt, Homo sapiens
  misc_RNA (1)...(19): siRNA sense strand
uacaaugcgcuuacuaauu

SEQ ID NO: 927691 - RNA, 19 nt, Homo sapiens
  misc_RNA (1)...(19): siRNA sense strand
gggcucagguauucaguac

SEQ ID NO: 927692 - RNA, 19 nt, Homo sapiens
  misc_RNA (1)...(19): siRNA sense strand
acuaauugguuaacagaug

SEQ ID NO: 927693 - RNA, 19 nt, Homo sapiens
  misc_RNA (1)...(19): siRNA sense strand
gccagaacauugugaucau

SEQ ID NO: 927694 - RNA, 19 nt, Homo sapiens
  misc_RNA (1)...(19): siRNA sense strand
gugaucauccuuuguggaa

SEQ ID NO: 927695 - RNA, 19 nt, Homo sapiens
  misc_RNA (1)...(19): siRNA sense strand
gaacauugugaucauccuu

SEQ ID NO: 927696 - RNA, 19 nt, Homo sapiens
  misc_RNA (1)...(19): siRNA sense strand
guucuugguuauuggaaau

SEQ ID NO: 927697 - RNA, 19 nt, Homo sapiens
  misc_RNA (1)...(19): siRNA sense strand
ggugguaaauauguaaagu

SEQ ID NO: 927698 - RNA, 19 nt, Homo sapiens
  misc_RNA (1)...(19): siRNA sense strand
ugcaggaacuggcaaaucu

SEQ ID NO: 927699 - RNA, 19 nt, Homo sapiens
  misc_RNA (1)...(19): siRNA sense strand
cuccagauuugcucaagaa

SEQ ID NO: 927700 - RNA, 19 nt, Homo sapiens
  misc_RNA (1)...(19): siRNA sense strand
ccuacaaugcgcuuacuaa

SEQ ID NO: 927701 - RNA, 19 nt, Homo sapiens
  misc_RNA (1)...(19): siRNA sense strand
uuacaaauaugggauacag

SEQ ID NO: 927702 - RNA, 19 nt, Homo sapiens
  misc_RNA (1)...(19): siRNA sense strand
aaaucuugcuuacuucauc

SEQ ID NO: 927703 - RNA, 19 nt, Homo sapiens
  misc_RNA (1)...(19): siRNA sense strand
aagaaugggcucagguauu

SEQ ID NO: 927704 - RNA, 19 nt, Homo sapiens
  misc_RNA (1)...(19): siRNA sense strand
cuagcgagccagaacauug

SEQ ID NO: 927705 - RNA, 19 nt, Homo sapiens
  misc_RNA (1)...(19): siRNA sense strand
gagaugcugccuugagaca

SEQ ID NO: 927706 - RNA, 19 nt, Homo sapiens
  misc_RNA (1)...(19): siRNA sense strand
ucaggagugugguuguuag

SEQ ID NO: 927707 - RNA, 19 nt, Homo sapiens
  misc_RNA (1)...(19): siRNA sense strand
cuacaaugcgcuuacuaau

SEQ ID NO: 927708 - RNA, 19 nt, Homo sapiens
  misc_RNA (1)...(19): siRNA sense strand
gguauucaguacggagaug

SEQ ID NO: 927709 - RNA, 19 nt, Homo sapiens
  misc_RNA (1)...(19): siRNA sense strand
gcaggaacuggcaaaucuu

SEQ ID NO: 927710 - RNA, 19 nt, Homo sapiens
  misc_RNA (1)...(19): siRNA sense strand
ccagaacauugugaucauc

SEQ ID NO: 927711 - RNA, 19 nt, Homo sapiens
  misc_RNA (1)...(19): siRNA sense strand
gcgcuuacuaauugguuaa

SEQ ID NO: 927712 - RNA, 19 nt, Homo sapiens
  misc_RNA (1)...(19): siRNA sense strand
gguccgugacgagaaguua

SEQ ID NO: 927713 - RNA, 19 nt, Homo sapiens
  misc_RNA (1)...(19): siRNA sense strand
gaugcagaucgugaaguua

SEQ ID NO: 927714 - RNA, 19 nt, Homo sapiens
  misc_RNA (1)...(19): siRNA sense strand
acauugugaucauccuuug

SEQ ID NO: 927715 - RNA, 19 nt, Homo sapiens
  misc_RNA (1)...(19): siRNA sense strand
uguccgaaaccuacgauuu

SEQ ID NO: 927716 - RNA, 19 nt, Homo sapiens
  misc_RNA (1)...(19): siRNA sense strand
cagcaggacaagaacgauu

SEQ ID NO: 927717 - RNA, 19 nt, Homo sapiens
  misc_RNA (1)...(19): siRNA sense strand
gaaaccuacaaugcgcuua

SEQ ID NO: 927718 - RNA, 19 nt, Homo sapiens
  misc_RNA (1)...(19): siRNA sense strand
caggaacuggcaaaucuug

SEQ ID NO: 927719 - RNA, 19 nt, Homo sapiens
  misc_RNA (1)...(19): siRNA sense strand
ucagguccgugacgagaag

SEQ ID NO: 927720 - RNA, 19 nt, Homo sapiens
  misc_RNA (1)...(19): siRNA sense strand
aaacaagaaggaccuggau

SEQ ID NO: 927721 - RNA, 19 nt, Homo sapiens
  misc_RNA (1)...(19): siRNA sense strand
gcaggacaagaacgauuca

SEQ ID NO: 927722 - RNA, 19 nt, Homo sapiens
  misc_RNA (1)...(19): siRNA sense strand
acaauaggaguggaauuug

SEQ ID NO: 927723 - RNA, 19 nt, Homo sapiens
  misc_RNA (1)...(19): siRNA sense strand
aaucuugcuuacuucauca

SEQ ID NO: 927724 - RNA, 19 nt, Homo sapiens
  misc_RNA (1)...(19): siRNA sense strand
cccgaacgcucaggagugu

SEQ ID NO: 927725 - RNA, 19 nt, Homo sapiens
  misc_RNA (1)...(19): siRNA sense strand
gaaggaccuggaugcagau

SEQ ID NO: 927726 - RNA, 19 nt, Homo sapiens
  misc_RNA (1)...(19): siRNA sense strand
caagaaggaccuggaugca

SEQ ID NO: 927727 - RNA, 19 nt, Homo sapiens
  misc_RNA (1)...(19): siRNA sense strand
ugauaucaccagccgagaa

SEQ ID NO: 927728 - RNA, 19 nt, Homo sapiens
  misc_RNA (1)...(19): siRNA sense strand
gccgagaaaccuacaaugc

SEQ ID NO: 927729 - RNA, 19 nt, Homo sapiens
  misc_RNA (1)...(19): siRNA sense strand
aaagaaugggcucagguau

SEQ ID NO: 927730 - RNA, 19 nt, Homo sapiens
  misc_RNA (1)...(19): siRNA sense strand
ucaagaaaaugagcugaug

SEQ ID NO: 927731 - RNA, 19 nt, Homo sapiens
  misc_RNA (1)...(19): siRNA sense strand
ucuuagaagccuccagauu

SEQ ID NO: 927732 - RNA, 19 nt, Homo sapiens
  misc_RNA (1)...(19): siRNA sense strand
agacggccauguccgaaac

SEQ ID NO: 927733 - RNA, 19 nt, Homo sapiens
  misc_RNA (1)...(19): siRNA sense strand
gaauguagaagaggcuuuu

SEQ ID NO: 927734 - RNA, 19 nt, Homo sapiens
  misc_RNA (1)...(19): siRNA sense strand
ccuccagauuugcucaaga

SEQ ID NO: 927735 - RNA, 19 nt, Homo sapiens
  misc_RNA (1)...(19): siRNA sense strand
cuaagaaacucuacaguau

SEQ ID NO: 927736 - RNA, 19 nt, Homo sapiens
  misc_RNA (1)...(19): siRNA sense strand
aaacucggcuuaacauuga

SEQ ID NO: 927737 - RNA, 19 nt, Homo sapiens
  misc_RNA (1)...(19): siRNA sense strand
ggagaagcauauugaagaa

SEQ ID NO: 927738 - RNA, 19 nt, Homo sapiens
  misc_RNA (1)...(19): siRNA sense strand
gaaucagggugagauguua

SEQ ID NO: 927739 - RNA, 19 nt, Homo sapiens
  misc_RNA (1)...(19): siRNA sense strand
gaaacucggcuuaacauug

SEQ ID NO: 927740 - RNA, 19 nt, Homo sapiens
  misc_RNA (1)...(19): siRNA sense strand
gcuaagaaacucuacagua

SEQ ID NO: 927741 - RNA, 19 nt, Homo sapiens
  misc_RNA (1)...(19): siRNA sense strand
gacaagaucucagaacaug

SEQ ID NO: 927742 - RNA, 19 nt, Homo sapiens
  misc_RNA (1)...(19): siRNA sense strand
caagaucucagaacaugua

SEQ ID NO: 927743 - RNA, 19 nt, Homo sapiens
  misc_RNA (1)...(19): siRNA sense strand
ucaaggagcuucacgacau

SEQ ID NO: 927744 - RNA, 19 nt, Homo sapiens
  misc_RNA (1)...(19): siRNA sense strand
caaauacaaugaagcucaa

SEQ ID NO: 927745 - RNA, 19 nt, Homo sapiens
  misc_RNA (1)...(19): siRNA sense strand
ggagaaggcacgagaugaa

SEQ ID NO: 927746 - RNA, 19 nt, Homo sapiens
  misc_RNA (1)...(19): siRNA sense strand
gaucauugacucacagauu

SEQ ID NO: 927747 - RNA, 19 nt, Homo sapiens
  misc_RNA (1)...(19): siRNA sense strand
aagaaacucuacaguauca

SEQ ID NO: 927748 - RNA, 19 nt, Homo sapiens
  misc_RNA (1)...(19): siRNA sense strand
agggugagauguuagauaa

SEQ ID NO: 927749 - RNA, 19 nt, Homo sapiens
  misc_RNA (1)...(19): siRNA sense strand
ggaaaucccagcacucugu

SEQ ID NO: 927750 - RNA, 19 nt, Homo sapiens
  misc_RNA (1)...(19): siRNA sense strand
gaaacucuacaguaucauu

SEQ ID NO: 927751 - RNA, 19 nt, Homo sapiens
  misc_RNA (1)...(19): siRNA sense strand
gagcuucacgacauguuua

SEQ ID NO: 927752 - RNA, 19 nt, Homo sapiens
  misc_RNA (1)...(19): siRNA sense strand
gcauggagaagcauauuga

SEQ ID NO: 927753 - RNA, 19 nt, Homo sapiens
  misc_RNA (1)...(19): siRNA sense strand
uggaggugaugaccaaaua

SEQ ID NO: 927754 - RNA, 19 nt, Homo sapiens
  misc_RNA (1)...(19): siRNA sense strand
agaagcauauugaagaaga

SEQ ID NO: 927755 - RNA, 19 nt, Homo sapiens
  misc_RNA (1)...(19): siRNA sense strand
ggcacgagaugaaacgaaa

SEQ ID NO: 927756 - RNA, 19 nt, Homo sapiens
  misc_RNA (1)...(19): siRNA sense strand
gcucgaaauuacuggcaaa

SEQ ID NO: 927757 - RNA, 19 nt, Homo sapiens
  misc_RNA (1)...(19): siRNA sense strand
cgacugagauuaagaaaag

SEQ ID NO: 927758 - RNA, 19 nt, Homo sapiens
  misc_RNA (1)...(19): siRNA sense strand
gaagcauauugaagaagau

SEQ ID NO: 927759 - RNA, 19 nt, Homo sapiens
  misc_RNA (1)...(19): siRNA sense strand
caaggagcuucacgacaug

SEQ ID NO: 927760 - RNA, 19 nt, Homo sapiens
  misc_RNA (1)...(19): siRNA sense strand
gagaaggcacgagaugaaa

SEQ ID NO: 927761 - RNA, 19 nt, Homo sapiens
  misc_RNA (1)...(19): siRNA sense strand
ggaaguuuguggaggugau

SEQ ID NO: 927762 - RNA, 19 nt, Homo sapiens
  misc_RNA (1)...(19): siRNA sense strand
gaggaaacucggcuuaaca

SEQ ID NO: 927763 - RNA, 19 nt, Homo sapiens
  misc_RNA (1)...(19): siRNA sense strand
gauaacauagaguugaaug

SEQ ID NO: 927764 - RNA, 19 nt, Homo sapiens
  misc_RNA (1)...(19): siRNA sense strand
ugaagagcauggagaagca

SEQ ID NO: 927765 - RNA, 19 nt, Homo sapiens
  misc_RNA (1)...(19): siRNA sense strand
uggagaagcauauugaaga

SEQ ID NO: 927766 - RNA, 19 nt, Homo sapiens
  misc_RNA (1)...(19): siRNA sense strand
cagcggcagcucgaaauua

SEQ ID NO: 927767 - RNA, 19 nt, Homo sapiens
  misc_RNA (1)...(19): siRNA sense strand
ggaaacucggcuuaacauu

SEQ ID NO: 927768 - RNA, 19 nt, Homo sapiens
  misc_RNA (1)...(19): siRNA sense strand
ccaagcaagcccucaguga

SEQ ID NO: 927769 - RNA, 19 nt, Homo sapiens
  misc_RNA (1)...(19): siRNA sense strand
ggcuuaacauugacaagau

SEQ ID NO: 927770 - RNA, 19 nt, Homo sapiens
  misc_RNA (1)...(19): siRNA sense strand
acucacagauuuccaagca

SEQ ID NO: 927771 - RNA, 19 nt, Homo sapiens
  misc_RNA (1)...(19): siRNA sense strand
aucauugacucacagauuu

SEQ ID NO: 927772 - RNA, 19 nt, Homo sapiens
  misc_RNA (1)...(19): siRNA sense strand
ggugaugaccaaauacaau

SEQ ID NO: 927773 - RNA, 19 nt, Homo sapiens
  misc_RNA (1)...(19): siRNA sense strand
gaucucagaacauguagag

SEQ ID NO: 927774 - RNA, 19 nt, Homo sapiens
  misc_RNA (1)...(19): siRNA sense strand
ggagcuucacgacauguuu

SEQ ID NO: 927775 - RNA, 19 nt, Homo sapiens
  misc_RNA (1)...(19): siRNA sense strand
gagcauggagaagcauauu

SEQ ID NO: 927776 - RNA, 19 nt, Homo sapiens
  misc_RNA (1)...(19): siRNA sense strand
uaagaaacucuacaguauc

SEQ ID NO: 927777 - RNA, 19 nt, Homo sapiens
  misc_RNA (1)...(19): siRNA sense strand
gcauugauuauuggacuuu

SEQ ID NO: 927778 - RNA, 19 nt, Homo sapiens
  misc_RNA (1)...(19): siRNA sense strand
ggacgacacaaggacauug

SEQ ID NO: 927779 - RNA, 19 nt, Homo sapiens
  misc_RNA (1)...(19): siRNA sense strand
ucacgacugagauuaagaa

SEQ ID NO: 927780 - RNA, 19 nt, Homo sapiens
  misc_RNA (1)...(19): siRNA sense strand
gcuuaacauugacaagauc

SEQ ID NO: 927781 - RNA, 19 nt, Homo sapiens
  misc_RNA (1)...(19): siRNA sense strand
ccagcacucuguccuuucu

SEQ ID NO: 927782 - RNA, 19 nt, Homo sapiens
  misc_RNA (1)...(19): siRNA sense strand
ugagauugcuaucgacaac

SEQ ID NO: 927783 - RNA, 19 nt, Homo sapiens
  misc_RNA (1)...(19): siRNA sense strand
gaugaccaaauacaaugaa

SEQ ID NO: 927784 - RNA, 19 nt, Homo sapiens
  misc_RNA (1)...(19): siRNA sense strand
gcccggaagaaauugauaa

SEQ ID NO: 927785 - RNA, 19 nt, Homo sapiens
  misc_RNA (1)...(19): siRNA sense strand
ucacuucugggaucauuga

SEQ ID NO: 927786 - RNA, 19 nt, Homo sapiens
  misc_RNA (1)...(19): siRNA sense strand
gugaugaccaaauacaaug

SEQ ID NO: 927787 - RNA, 19 nt, Homo sapiens
  misc_RNA (1)...(19): siRNA sense strand
augaggagcuggaggagau

SEQ ID NO: 927788 - RNA, 19 nt, Homo sapiens
  misc_RNA (1)...(19): siRNA sense strand
aaccaaggaugaccuagag

SEQ ID NO: 927789 - RNA, 19 nt, Homo sapiens
  misc_RNA (1)...(19): siRNA sense strand
ugaaugucaugcacacagu

SEQ ID NO: 927790 - RNA, 19 nt, Homo sapiens
  misc_RNA (1)...(19): siRNA sense strand
cagggugagauguuagaua

SEQ ID NO: 927791 - RNA, 19 nt, Homo sapiens
  misc_RNA (1)...(19): siRNA sense strand
ugaggaaacucggcuuaac

SEQ ID NO: 927792 - RNA, 19 nt, Homo sapiens
  misc_RNA (1)...(19): siRNA sense strand
ucccagcacucuguccuuu

SEQ ID NO: 927793 - RNA, 19 nt, Homo sapiens
  misc_RNA (1)...(19): siRNA sense strand
uagaggaggcuaagaaacu

SEQ ID NO: 927794 - RNA, 19 nt, Homo sapiens
  misc_RNA (1)...(19): siRNA sense strand
ggagaaucagggugagaug

SEQ ID NO: 927795 - RNA, 19 nt, Homo sapiens
  misc_RNA (1)...(19): siRNA sense strand
gaggugaugaccaaauaca

SEQ ID NO: 927796 - RNA, 19 nt, Homo sapiens
  misc_RNA (1)...(19): siRNA sense strand
aaaccaaggaugaccuaga

SEQ ID NO: 927797 - RNA, 19 nt, Homo sapiens
  misc_RNA (1)...(19): siRNA sense strand
cauucucucugcaccgauu

SEQ ID NO: 927798 - RNA, 19 nt, Homo sapiens
  misc_RNA (1)...(19): siRNA sense strand
gaccuucggauucggaaau

SEQ ID NO: 927799 - RNA, 19 nt, Homo sapiens
  misc_RNA (1)...(19): siRNA sense strand
uugacaagaucucagaaca

SEQ ID NO: 927800 - RNA, 19 nt, Homo sapiens
  misc_RNA (1)...(19): siRNA sense strand
agaaucagggugagauguu

SEQ ID NO: 927801 - RNA, 19 nt, Homo sapiens
  misc_RNA (1)...(19): siRNA sense strand
uaacauugacaagaucuca

SEQ ID NO: 927802 - RNA, 19 nt, Homo sapiens
  misc_RNA (1)...(19): siRNA sense strand
ccaugcugguggagaauca

SEQ ID NO: 927803 - RNA, 19 nt, Homo sapiens
  misc_RNA (1)...(19): siRNA sense strand
gaccaaauacaaugaagcu

SEQ ID NO: 927804 - RNA, 19 nt, Homo sapiens
  misc_RNA (1)...(19): siRNA sense strand
cgguugagauugcuaucga

SEQ ID NO: 927805 - RNA, 19 nt, Homo sapiens
  misc_RNA (1)...(19): siRNA sense strand
cggcagaccuucggauucg

SEQ ID NO: 927806 - RNA, 19 nt, Homo sapiens
  misc_RNA (1)...(19): siRNA sense strand
ucauugugcuaguaguugu

SEQ ID NO: 927807 - RNA, 19 nt, Homo sapiens
  misc_RNA (1)...(19): siRNA sense strand
gagaaucagggugagaugu

SEQ ID NO: 927808 - RNA, 19 nt, Homo sapiens
  misc_RNA (1)...(19): siRNA sense strand
ugacaagaucucagaacau

SEQ ID NO: 927809 - RNA, 19 nt, Homo sapiens
  misc_RNA (1)...(19): siRNA sense strand
ucgccaugcugguggagaa

SEQ ID NO: 927810 - RNA, 19 nt, Homo sapiens
  misc_RNA (1)...(19): siRNA sense strand
gacgaguucuuuucugaga

SEQ ID NO: 927811 - RNA, 19 nt, Homo sapiens
  misc_RNA (1)...(19): siRNA sense strand
uguagaggaggcuaagaaa

SEQ ID NO: 927812 - RNA, 19 nt, Homo sapiens
  misc_RNA (1)...(19): siRNA sense strand
uaucauugugcuaguaguu

SEQ ID NO: 927813 - RNA, 19 nt, Homo sapiens
  misc_RNA (1)...(19): siRNA sense strand
gagauugagggacgacaca

SEQ ID NO: 927814 - RNA, 19 nt, Homo sapiens
  misc_RNA (1)...(19): siRNA sense strand
uguccuuucucggaaguuu

SEQ ID NO: 927815 - RNA, 19 nt, Homo sapiens
  misc_RNA (1)...(19): siRNA sense strand
ggagcuggaggagauguug

SEQ ID NO: 927816 - RNA, 19 nt, Homo sapiens
  misc_RNA (1)...(19): siRNA sense strand
cgaguucuuuucugagauu

SEQ ID NO: 927817 - RNA, 19 nt, Homo sapiens
  misc_RNA (1)...(19): siRNA sense strand
gaaggcacgagaugaaacg

SEQ ID NO: 927818 - RNA, 19 nt, Homo sapiens
  misc_RNA (1)...(19): siRNA sense strand
cggcuuaacauugacaaga

SEQ ID NO: 927819 - RNA, 19 nt, Homo sapiens
  misc_RNA (1)...(19): siRNA sense strand
aaacucuacaguaucauuc

SEQ ID NO: 927820 - RNA, 19 nt, Homo sapiens
  misc_RNA (1)...(19): siRNA sense strand
gggaguaucuguugcauua

SEQ ID NO: 927821 - RNA, 19 nt, Homo sapiens
  misc_RNA (1)...(19): siRNA sense strand
gaaagcgucuuaaagcaua

SEQ ID NO: 927822 - RNA, 19 nt, Homo sapiens
  misc_RNA (1)...(19): siRNA sense strand
guaaagaacugaaggaaau

SEQ ID NO: 927823 - RNA, 19 nt, Homo sapiens
  misc_RNA (1)...(19): siRNA sense strand
caaccaaacuugauauuca

SEQ ID NO: 927824 - RNA, 19 nt, Homo sapiens
  misc_RNA (1)...(19): siRNA sense strand
ggacaguucuucgagauaa

SEQ ID NO: 927825 - RNA, 19 nt, Homo sapiens
  misc_RNA (1)...(19): siRNA sense strand
gagcagacuuagaagauaa

SEQ ID NO: 927826 - RNA, 19 nt, Homo sapiens
  misc_RNA (1)...(19): siRNA sense strand
gcaaaccucugaugucuuc

SEQ ID NO: 927827 - RNA, 19 nt, Homo sapiens
  misc_RNA (1)...(19): siRNA sense strand
ggacaacucaaauucaaua

SEQ ID NO: 927828 - RNA, 19 nt, Homo sapiens
  misc_RNA (1)...(19): siRNA sense strand
gcagugcagugucagauuu

SEQ ID NO: 927829 - RNA, 19 nt, Homo sapiens
  misc_RNA (1)...(19): siRNA sense strand
caacagcaguuaacacguu

SEQ ID NO: 927830 - RNA, 19 nt, Homo sapiens
  misc_RNA (1)...(19): siRNA sense strand
ugaugaagguugagaauga

SEQ ID NO: 927831 - RNA, 19 nt, Homo sapiens
  misc_RNA (1)...(19): siRNA sense strand
ccucaaagcucuuaaaugc

SEQ ID NO: 927832 - RNA, 19 nt, Homo sapiens
  misc_RNA (1)...(19): siRNA sense strand
gaucuuaccagucauuuga

SEQ ID NO: 927833 - RNA, 19 nt, Homo sapiens
  misc_RNA (1)...(19): siRNA sense strand
gaaaguuguugcuucuaga

SEQ ID NO: 927834 - RNA, 19 nt, Homo sapiens
  misc_RNA (1)...(19): siRNA sense strand
gaacaacccacauaguaga

SEQ ID NO: 927835 - RNA, 19 nt, Homo sapiens
  misc_RNA (1)...(19): siRNA sense strand
gaacuugacaacguaauuu

SEQ ID NO: 927836 - RNA, 19 nt, Homo sapiens
  misc_RNA (1)...(19): siRNA sense strand
caacguaauuucuguucuu

SEQ ID NO: 927837 - RNA, 19 nt, Homo sapiens
  misc_RNA (1)...(19): siRNA sense strand
gaagagcaccuaccugugu

SEQ ID NO: 927838 - RNA, 19 nt, Homo sapiens
  misc_RNA (1)...(19): siRNA sense strand
gauaaauucuggugaagag

SEQ ID NO: 927839 - RNA, 19 nt, Homo sapiens
  misc_RNA (1)...(19): siRNA sense strand
agucagagcuuccuacaga

SEQ ID NO: 927840 - RNA, 19 nt, Homo sapiens
  misc_RNA (1)...(19): siRNA sense strand
ggacacauauauuaaacuc

SEQ ID NO: 927841 - RNA, 19 nt, Homo sapiens
  misc_RNA (1)...(19): siRNA sense strand
aaacauaccucuggaugga

SEQ ID NO: 927842 - RNA, 19 nt, Homo sapiens
  misc_RNA (1)...(19): siRNA sense strand
ccuaagagaggaauuuaua

SEQ ID NO: 927843 - RNA, 19 nt, Homo sapiens
  misc_RNA (1)...(19): siRNA sense strand
gagaaugagcgguaugaaa

SEQ ID NO: 927844 - RNA, 19 nt, Homo sapiens
  misc_RNA (1)...(19): siRNA sense strand
uaaaacaccugaucagcua

SEQ ID NO: 927845 - RNA, 19 nt, Homo sapiens
  misc_RNA (1)...(19): siRNA sense strand
gagcuucauuguuggagaa

SEQ ID NO: 927846 - RNA, 19 nt, Homo sapiens
  misc_RNA (1)...(19): siRNA sense strand
caacucaaauucaauacgu

SEQ ID NO: 927847 - RNA, 19 nt, Homo sapiens
  misc_RNA (1)...(19): siRNA sense strand
gcagagcucaccaggguaa

SEQ ID NO: 927848 - RNA, 19 nt, Homo sapiens
  misc_RNA (1)...(19): siRNA sense strand
caccugaucagcuaaauaa

SEQ ID NO: 927849 - RNA, 19 nt, Homo sapiens
  misc_RNA (1)...(19): siRNA sense strand
uggcuuugcuuaacauaaa

SEQ ID NO: 927850 - RNA, 19 nt, Homo sapiens
  misc_RNA (1)...(19): siRNA sense strand
gaacaauugaggaaguuug

SEQ ID NO: 927851 - RNA, 19 nt, Homo sapiens
  misc_RNA (1)...(19): siRNA sense strand
gggcaaaccucugaugucu

SEQ ID NO: 927852 - RNA, 19 nt, Homo sapiens
  misc_RNA (1)...(19): siRNA sense strand
uaaaagaacugagugaaga

SEQ ID NO: 927853 - RNA, 19 nt, Homo sapiens
  misc_RNA (1)...(19): siRNA sense strand
uacaagagccuuugggaaa

SEQ ID NO: 927854 - RNA, 19 nt, Homo sapiens
  misc_RNA (1)...(19): siRNA sense strand
gaaagcgguuugagacaac

SEQ ID NO: 927855 - RNA, 19 nt, Homo sapiens
  misc_RNA (1)...(19): siRNA sense strand
gaacugagugaagaugaaa

SEQ ID NO: 927856 - RNA, 19 nt, Homo sapiens
  misc_RNA (1)...(19): siRNA sense strand
uaacuuggcuuugcuuaac

SEQ ID NO: 927857 - RNA, 19 nt, Homo sapiens
  misc_RNA (1)...(19): siRNA sense strand
uaggagagcagacuuagaa

SEQ ID NO: 927858 - RNA, 19 nt, Homo sapiens
  misc_RNA (1)...(19): siRNA sense strand
ugaggaagccacaaauuug

SEQ ID NO: 927859 - RNA, 19 nt, Homo sapiens
  misc_RNA (1)...(19): siRNA sense strand
gggauuaaauauggaguau

SEQ ID NO: 927860 - RNA, 19 nt, Homo sapiens
  misc_RNA (1)...(19): siRNA sense strand
gauaaugcaauaccaacaa

SEQ ID NO: 927861 - RNA, 19 nt, Homo sapiens
  misc_RNA (1)...(19): siRNA sense strand
gagagcagacuuagaagau

SEQ ID NO: 927862 - RNA, 19 nt, Homo sapiens
  misc_RNA (1)...(19): siRNA sense strand
gagcuguauucgagaagaa

SEQ ID NO: 927863 - RNA, 19 nt, Homo sapiens
  misc_RNA (1)...(19): siRNA sense strand
gacaugaggcugaugaaau

SEQ ID NO: 927864 - RNA, 19 nt, Homo sapiens
  misc_RNA (1)...(19): siRNA sense strand
ccacauaguagacacagaa

SEQ ID NO: 927865 - RNA, 19 nt, Homo sapiens
  misc_RNA (1)...(19): siRNA sense strand
uauuugaucuuaccaguca

SEQ ID NO: 927866 - RNA, 19 nt, Homo sapiens
  misc_RNA (1)...(19): siRNA sense strand
gguaaagaacugaaggaaa

SEQ ID NO: 927867 - RNA, 19 nt, Homo sapiens
  misc_RNA (1)...(19): siRNA sense strand
gcacauuauucaggaacuu

SEQ ID NO: 927868 - RNA, 19 nt, Homo sapiens
  misc_RNA (1)...(19): siRNA sense strand
gaaaccaacaauagcaaug

SEQ ID NO: 927869 - RNA, 19 nt, Homo sapiens
  misc_RNA (1)...(19): siRNA sense strand
gcucuuaaaugcuuaucuc

SEQ ID NO: 927870 - RNA, 19 nt, Homo sapiens
  misc_RNA (1)...(19): siRNA sense strand
uaacuuggaaucucagcua

SEQ ID NO: 927871 - RNA, 19 nt, Homo sapiens
  misc_RNA (1)...(19): siRNA sense strand
ugaaggaaaucugccauuc

SEQ ID NO: 927872 - RNA, 19 nt, Homo sapiens
  misc_RNA (1)...(19): siRNA sense strand
caagcuaucuacacacucu

SEQ ID NO: 927873 - RNA, 19 nt, Homo sapiens
  misc_RNA (1)...(19): siRNA sense strand
ugaaaguuguugcuucuag

SEQ ID NO: 927874 - RNA, 19 nt, Homo sapiens
  misc_RNA (1)...(19): siRNA sense strand
cauugucucuaguggauuu

SEQ ID NO: 927875 - RNA, 19 nt, Homo sapiens
  misc_RNA (1)...(19): siRNA sense strand
acaugaggcugaugaaauc

SEQ ID NO: 927876 - RNA, 19 nt, Homo sapiens
  misc_RNA (1)...(19): siRNA sense strand
ggugagguuuguugaugaa

SEQ ID NO: 927877 - RNA, 19 nt, Homo sapiens
  misc_RNA (1)...(19): siRNA sense strand
gaaacucucagggaaguga

SEQ ID NO: 927878 - RNA, 19 nt, Homo sapiens
  misc_RNA (1)...(19): siRNA sense strand
aaacacgaccuggauuuaa

SEQ ID NO: 927879 - RNA, 19 nt, Homo sapiens
  misc_RNA (1)...(19): siRNA sense strand
gcugacauguauagaagug

SEQ ID NO: 927880 - RNA, 19 nt, Homo sapiens
  misc_RNA (1)...(19): siRNA sense strand
caacaguggagcacauuau

SEQ ID NO: 927881 - RNA, 19 nt, Homo sapiens
  misc_RNA (1)...(19): siRNA sense strand
ggacaugaggcugaugaaa

SEQ ID NO: 927882 - RNA, 19 nt, Homo sapiens
  misc_RNA (1)...(19): siRNA sense strand
agagcagacuuagaagaua

SEQ ID NO: 927883 - RNA, 19 nt, Homo sapiens
  misc_RNA (1)...(19): siRNA sense strand
cugaucagcuaaauaaaca

SEQ ID NO: 927884 - RNA, 19 nt, Homo sapiens
  misc_RNA (1)...(19): siRNA sense strand
agaaucaaauggaaacaca

SEQ ID NO: 927885 - RNA, 19 nt, Homo sapiens
  misc_RNA (1)...(19): siRNA sense strand
ggagagcagacuuagaaga

SEQ ID NO: 927886 - RNA, 19 nt, Homo sapiens
  misc_RNA (1)...(19): siRNA sense strand
guuguugcuucuagacuuu

SEQ ID NO: 927887 - RNA, 19 nt, Homo sapiens
  misc_RNA (1)...(19): siRNA sense strand
uugaacaacccacauagua

SEQ ID NO: 927888 - RNA, 19 nt, Homo sapiens
  misc_RNA (1)...(19): siRNA sense strand
gguggacacauauauuaaa

SEQ ID NO: 927889 - RNA, 19 nt, Homo sapiens
  misc_RNA (1)...(19): siRNA sense strand
gagcuuccguccaccaucu

SEQ ID NO: 927890 - RNA, 19 nt, Homo sapiens
  misc_RNA (1)...(19): siRNA sense strand
uagcuugacugcaguacug

SEQ ID NO: 927891 - RNA, 19 nt, Homo sapiens
  misc_RNA (1)...(19): siRNA sense strand
gaaggaaaucugccauucu

SEQ ID NO: 927892 - RNA, 19 nt, Homo sapiens
  misc_RNA (1)...(19): siRNA sense strand
uaaccuaagagaggaauuu

SEQ ID NO: 927893 - RNA, 19 nt, Homo sapiens
  misc_RNA (1)...(19): siRNA sense strand
ugagagcuguauucgagaa

SEQ ID NO: 927894 - RNA, 19 nt, Homo sapiens
  misc_RNA (1)...(19): siRNA sense strand
agaaagcgguuugagacaa

SEQ ID NO: 927895 - RNA, 19 nt, Homo sapiens
  misc_RNA (1)...(19): siRNA sense strand
agaaguggguggagaacug

SEQ ID NO: 927896 - RNA, 19 nt, Homo sapiens
  misc_RNA (1)...(19): siRNA sense strand
guagaacuaguccuuauag

SEQ ID NO: 927897 - RNA, 19 nt, Homo sapiens
  misc_RNA (1)...(19): siRNA sense strand
gcaccucaaagcucuuaaa

SEQ ID NO: 927898 - RNA, 19 nt, Homo sapiens
  misc_RNA (1)...(19): siRNA sense strand
ucggauaaauucuggugaa

SEQ ID NO: 927899 - RNA, 19 nt, Homo sapiens
  misc_RNA (1)...(19): siRNA sense strand
ucagagcuuccuacagaua

SEQ ID NO: 927900 - RNA, 19 nt, Homo sapiens
  misc_RNA (1)...(19): siRNA sense strand
guaacuuggcuuugcuuaa

SEQ ID NO: 927901 - RNA, 19 nt, Homo sapiens
  misc_RNA (1)...(19): siRNA sense strand
ccaccugccugacaucaag

SEQ ID NO: 927902 - RNA, 19 nt, Homo sapiens
  misc_RNA (1)...(19): siRNA sense strand
guuggagaaucaaauggaa

SEQ ID NO: 927903 - RNA, 19 nt, Homo sapiens
  misc_RNA (1)...(19): siRNA sense strand
ugggacaacucaaauucaa

SEQ ID NO: 927904 - RNA, 19 nt, Homo sapiens
  misc_RNA (1)...(19): siRNA sense strand
gaaaucugccauucucagu

SEQ ID NO: 927905 - RNA, 19 nt, Homo sapiens
  misc_RNA (1)...(19): siRNA sense strand
uuuagaacuugacaacgua

SEQ ID NO: 927906 - RNA, 19 nt, Homo sapiens
  misc_RNA (1)...(19): siRNA sense strand
gagguuuguugaugaaucu

SEQ ID NO: 927907 - RNA, 19 nt, Homo sapiens
  misc_RNA (1)...(19): siRNA sense strand
gcaagaugaggacauuuua

SEQ ID NO: 927908 - RNA, 19 nt, Homo sapiens
  misc_RNA (1)...(19): siRNA sense strand
uaaaugcuuaucucuggua

SEQ ID NO: 927909 - RNA, 19 nt, Homo sapiens
  misc_RNA (1)...(19): siRNA sense strand
gcaaccaaacuugauauuc

SEQ ID NO: 927910 - RNA, 19 nt, Homo sapiens
  misc_RNA (1)...(19): siRNA sense strand
gcaaaaucaguaccuguua

SEQ ID NO: 927911 - RNA, 19 nt, Homo sapiens
  misc_RNA (1)...(19): siRNA sense strand
acacuaugauaacugagaa

SEQ ID NO: 927912 - RNA, 19 nt, Homo sapiens
  misc_RNA (1)...(19): siRNA sense strand
agaacugagugaagaugaa

SEQ ID NO: 927913 - RNA, 19 nt, Homo sapiens
  misc_RNA (1)...(19): siRNA sense strand
ucaccaggguaacuuggaa

SEQ ID NO: 927914 - RNA, 19 nt, Homo sapiens
  misc_RNA (1)...(19): siRNA sense strand
gcagaaauuuuggcuguga

SEQ ID NO: 927915 - RNA, 19 nt, Homo sapiens
  misc_RNA (1)...(19): siRNA sense strand
gagaaguggggauuaaaua

SEQ ID NO: 927916 - RNA, 19 nt, Homo sapiens
  misc_RNA (1)...(19): siRNA sense strand
cauauuugaggaacacuuu

SEQ ID NO: 927917 - RNA, 19 nt, Homo sapiens
  misc_RNA (1)...(19): siRNA sense strand
ucuucgagauaaugcaaua

SEQ ID NO: 927918 - RNA, 19 nt, Homo sapiens
  misc_RNA (1)...(19): siRNA sense strand
ggagcacauuauucaggaa

SEQ ID NO: 927919 - RNA, 19 nt, Homo sapiens
  misc_RNA (1)...(19): siRNA sense strand
uugaggaaguuuguucuuu

SEQ ID NO: 927920 - RNA, 19 nt, Homo sapiens
  misc_RNA (1)...(19): siRNA sense strand
guacucaucuuugaacuua

SEQ ID NO: 927921 - RNA, 19 nt, Homo sapiens
  misc_RNA (1)...(19): siRNA sense strand
cuacuacugugccauaaua

SEQ ID NO: 927922 - RNA, 19 nt, Homo sapiens
  misc_RNA (1)...(19): siRNA sense strand
ucaaggauaugcuguauuc

SEQ ID NO: 927923 - RNA, 19 nt, Homo sapiens
  misc_RNA (1)...(19): siRNA sense strand
caucauugcuacugucuuu

SEQ ID NO: 927924 - RNA, 19 nt, Homo sapiens
  misc_RNA (1)...(19): siRNA sense strand
gaacguguccaacauagaa

SEQ ID NO: 927925 - RNA, 19 nt, Homo sapiens
  misc_RNA (1)...(19): siRNA sense strand
ucaaccagcuuaucucuga

SEQ ID NO: 927926 - RNA, 19 nt, Homo sapiens
  misc_RNA (1)...(19): siRNA sense strand
uuacagcacucacaaagaa

SEQ ID NO: 927927 - RNA, 19 nt, Homo sapiens
  misc_RNA (1)...(19): siRNA sense strand
aaagaaagcacugguguua

SEQ ID NO: 927928 - RNA, 19 nt, Homo sapiens
  misc_RNA (1)...(19): siRNA sense strand
gaacgcagaugaucagacu

SEQ ID NO: 927929 - RNA, 19 nt, Homo sapiens
  misc_RNA (1)...(19): siRNA sense strand
guaagggccuguugccaaa

SEQ ID NO: 927930 - RNA, 19 nt, Homo sapiens
  misc_RNA (1)...(19): siRNA sense strand
gaagcaauuugucucauca

SEQ ID NO: 927931 - RNA, 19 nt, Homo sapiens
  misc_RNA (1)...(19): siRNA sense strand
ugauggaccuggaauauau

SEQ ID NO: 927932 - RNA, 19 nt, Homo sapiens
  misc_RNA (1)...(19): siRNA sense strand
gagaaugaacaucugaaua

SEQ ID NO: 927933 - RNA, 19 nt, Homo sapiens
  misc_RNA (1)...(19): siRNA sense strand
ucagaagaaucaggaauuu

SEQ ID NO: 927934 - RNA, 19 nt, Homo sapiens
  misc_RNA (1)...(19): siRNA sense strand
gaaagccagucuuccacuu

SEQ ID NO: 927935 - RNA, 19 nt, Homo sapiens
  misc_RNA (1)...(19): siRNA sense strand
caaaugggaugaaaguaag

SEQ ID NO: 927936 - RNA, 19 nt, Homo sapiens
  misc_RNA (1)...(19): siRNA sense strand
ucaaaugggaugaaaguaa

SEQ ID NO: 927937 - RNA, 19 nt, Homo sapiens
  misc_RNA (1)...(19): siRNA sense strand
acacuaagguauugauaga

SEQ ID NO: 927938 - RNA, 19 nt, Homo sapiens
  misc_RNA (1)...(19): siRNA sense strand
cauaauagaggaugugauu

SEQ ID NO: 927939 - RNA, 19 nt, Homo sapiens
  misc_RNA (1)...(19): siRNA sense strand
guacgaaaccgccagaaga

SEQ ID NO: 927940 - RNA, 19 nt, Homo sapiens
  misc_RNA (1)...(19): siRNA sense strand
ugaugaagcuaacacuuga

SEQ ID NO: 927941 - RNA, 19 nt, Homo sapiens
  misc_RNA (1)...(19): siRNA sense strand
gcaccagcauggacuacuu

SEQ ID NO: 927942 - RNA, 19 nt, Homo sapiens
  misc_RNA (1)...(19): siRNA sense strand
ucgauuaccucuacaacuu

SEQ ID NO: 927943 - RNA, 19 nt, Homo sapiens
  misc_RNA (1)...(19): siRNA sense strand
gagcucaaaugggaugaaa

SEQ ID NO: 927944 - RNA, 19 nt, Homo sapiens
  misc_RNA (1)...(19): siRNA sense strand
gagacaggcuggaguaaac

SEQ ID NO: 927945 - RNA, 19 nt, Homo sapiens
  misc_RNA (1)...(19): siRNA sense strand
agaaguauauggcccuuga

SEQ ID NO: 927946 - RNA, 19 nt, Homo sapiens
  misc_RNA (1)...(19): siRNA sense strand
gaaagaaagcacugguguu

SEQ ID NO: 927947 - RNA, 19 nt, Homo sapiens
  misc_RNA (1)...(19): siRNA sense strand
gaacuuaauccgagaagca

SEQ ID NO: 927948 - RNA, 19 nt, Homo sapiens
  misc_RNA (1)...(19): siRNA sense strand
caauuugucucaucaacau

SEQ ID NO: 927949 - RNA, 19 nt, Homo sapiens
  misc_RNA (1)...(19): siRNA sense strand
guaugaggcuuucaaggau

SEQ ID NO: 927950 - RNA, 19 nt, Homo sapiens
  misc_RNA (1)...(19): siRNA sense strand
gccaaauaauucagaagaa

SEQ ID NO: 927951 - RNA, 19 nt, Homo sapiens
  misc_RNA (1)...(19): siRNA sense strand
ccaggcaccuucuguggaa

SEQ ID NO: 927952 - RNA, 19 nt, Homo sapiens
  misc_RNA (1)...(19): siRNA sense strand
uauaugaucugcuucuaca

SEQ ID NO: 927953 - RNA, 19 nt, Homo sapiens
  misc_RNA (1)...(19): siRNA sense strand
gcuugccgcuguauuuaaa

SEQ ID NO: 927954 - RNA, 19 nt, Homo sapiens
  misc_RNA (1)...(19): siRNA sense strand
gcgaguggcucacguagag

SEQ ID NO: 927955 - RNA, 19 nt, Homo sapiens
  misc_RNA (1)...(19): siRNA sense strand
gaagauggugacagacaaa

SEQ ID NO: 927956 - RNA, 19 nt, Homo sapiens
  misc_RNA (1)...(19): siRNA sense strand
gaaguacaaccagagcaua

SEQ ID NO: 927957 - RNA, 19 nt, Homo sapiens
  misc_RNA (1)...(19): siRNA sense strand
uguauccacuugcccuuua

SEQ ID NO: 927958 - RNA, 19 nt, Homo sapiens
  misc_RNA (1)...(19): siRNA sense strand
gcucagcgcagguuugcua

SEQ ID NO: 927959 - RNA, 19 nt, Homo sapiens
  misc_RNA (1)...(19): siRNA sense strand
ccaaggcucgugacacuaa

SEQ ID NO: 927960 - RNA, 19 nt, Homo sapiens
  misc_RNA (1)...(19): siRNA sense strand
ggccuuuccucauuuaguu

SEQ ID NO: 927961 - RNA, 19 nt, Homo sapiens
  misc_RNA (1)...(19): siRNA sense strand
uggaauauaugaucugcuu

SEQ ID NO: 927962 - RNA, 19 nt, Homo sapiens
  misc_RNA (1)...(19): siRNA sense strand
gaggaacguguccaacaua

SEQ ID NO: 927963 - RNA, 19 nt, Homo sapiens
  misc_RNA (1)...(19): siRNA sense strand
uugcuacacuucagaauga

SEQ ID NO: 927964 - RNA, 19 nt, Homo sapiens
  misc_RNA (1)...(19): siRNA sense strand
uaucaucaguuccugcuau

SEQ ID NO: 927965 - RNA, 19 nt, Homo sapiens
  misc_RNA (1)...(19): siRNA sense strand
cagcuuaucucugaaacug

SEQ ID NO: 927966 - RNA, 19 nt, Homo sapiens
  misc_RNA (1)...(19): siRNA sense strand
gaauauuacccuugugcuu

SEQ ID NO: 927967 - RNA, 19 nt, Homo sapiens
  misc_RNA (1)...(19): siRNA sense strand
gaaugaacaucugaauaac

SEQ ID NO: 927968 - RNA, 19 nt, Homo sapiens
  misc_RNA (1)...(19): siRNA sense strand
ggaagcaauacauccagua

SEQ ID NO: 927969 - RNA, 19 nt, Homo sapiens
  misc_RNA (1)...(19): siRNA sense strand
gauuaccucuacaacuuug

SEQ ID NO: 927970 - RNA, 19 nt, Homo sapiens
  misc_RNA (1)...(19): siRNA sense strand
gcagaaagccagucuucca

SEQ ID NO: 927971 - RNA, 19 nt, Homo sapiens
  misc_RNA (1)...(19): siRNA sense strand
uaugaggcuuucaaggaua

SEQ ID NO: 927972 - RNA, 19 nt, Homo sapiens
  misc_RNA (1)...(19): siRNA sense strand
acacagaugaugaagcuaa

SEQ ID NO: 927973 - RNA, 19 nt, Homo sapiens
  misc_RNA (1)...(19): siRNA sense strand
caccaaaacuuucuacuau

SEQ ID NO: 927974 - RNA, 19 nt, Homo sapiens
  misc_RNA (1)...(19): siRNA sense strand
ccacuugucccaugaggaa

SEQ ID NO: 927975 - RNA, 19 nt, Homo sapiens
  misc_RNA (1)...(19): siRNA sense strand
gauagaagacacagaugau

SEQ ID NO: 927976 - RNA, 19 nt, Homo sapiens
  misc_RNA (1)...(19): siRNA sense strand
agaaagcacugguguuacu

SEQ ID NO: 927977 - RNA, 19 nt, Homo sapiens
  misc_RNA (1)...(19): siRNA sense strand
ggaauauucauuguacuga

SEQ ID NO: 927978 - RNA, 19 nt, Homo sapiens
  misc_RNA (1)...(19): siRNA sense strand
ggagacaggcuggaguaaa

SEQ ID NO: 927979 - RNA, 19 nt, Homo sapiens
  misc_RNA (1)...(19): siRNA sense strand
agacacagaugaugaagcu

SEQ ID NO: 927980 - RNA, 19 nt, Homo sapiens
  misc_RNA (1)...(19): siRNA sense strand
cugaauaacuguggugaau

SEQ ID NO: 927981 - RNA, 19 nt, Homo sapiens
  misc_RNA (1)...(19): siRNA sense strand
ugaagauggugacagacaa

SEQ ID NO: 927982 - RNA, 19 nt, Homo sapiens
  misc_RNA (1)...(19): siRNA sense strand
aagaaucggucauggaagu

SEQ ID NO: 927983 - RNA, 19 nt, Homo sapiens
  misc_RNA (1)...(19): siRNA sense strand
gcucaaaugggaugaaagu

SEQ ID NO: 927984 - RNA, 19 nt, Homo sapiens
  misc_RNA (1)...(19): siRNA sense strand
gguaggcuuugcugauuuc

SEQ ID NO: 927985 - RNA, 19 nt, Homo sapiens
  misc_RNA (1)...(19): siRNA sense strand
guauauggcccuugauaag

SEQ ID NO: 927986 - RNA, 19 nt, Homo sapiens
  misc_RNA (1)...(19): siRNA sense strand
gcgcagguuugcuacacuu

SEQ ID NO: 927987 - RNA, 19 nt, Homo sapiens
  misc_RNA (1)...(19): siRNA sense strand
uagaagacacagaugauga

SEQ ID NO: 927988 - RNA, 19 nt, Homo sapiens
  misc_RNA (1)...(19): siRNA sense strand
ugaucagacucuccuagaa

SEQ ID NO: 927989 - RNA, 19 nt, Homo sapiens
  misc_RNA (1)...(19): siRNA sense strand
ggagaaugaacaucugaau

SEQ ID NO: 927990 - RNA, 19 nt, Homo sapiens
  misc_RNA (1)...(19): siRNA sense strand
cugcagaacuaucagaauc

SEQ ID NO: 927991 - RNA, 19 nt, Homo sapiens
  misc_RNA (1)...(19): siRNA sense strand
gaaagcacugguguuacua

SEQ ID NO: 927992 - RNA, 19 nt, Homo sapiens
  misc_RNA (1)...(19): siRNA sense strand
gaauauaugaucugcuucu

SEQ ID NO: 927993 - RNA, 19 nt, Homo sapiens
  misc_RNA (1)...(19): siRNA sense strand
agaagaaucggucauggaa

SEQ ID NO: 927994 - RNA, 19 nt, Homo sapiens
  misc_RNA (1)...(19): siRNA sense strand
ccacaacuuucuucauggu

SEQ ID NO: 927995 - RNA, 19 nt, Homo sapiens
  misc_RNA (1)...(19): siRNA sense strand
gaugaggacacaguaaaga

SEQ ID NO: 927996 - RNA, 19 nt, Homo sapiens
  misc_RNA (1)...(19): siRNA sense strand
cuacuacuacugugccaua

SEQ ID NO: 927997 - RNA, 19 nt, Homo sapiens
  misc_RNA (1)...(19): siRNA sense strand
aagguaggcuuugcugauu

SEQ ID NO: 927998 - RNA, 19 nt, Homo sapiens
  misc_RNA (1)...(19): siRNA sense strand
cagaugaggacacaguaaa

SEQ ID NO: 927999 - RNA, 19 nt, Homo sapiens
  misc_RNA (1)...(19): siRNA sense strand
ugaggaacguguccaacau

SEQ ID NO: 928000 - RNA, 19 nt, Homo sapiens
  misc_RNA (1)...(19): siRNA sense strand
gacaagauccuggaaacau

SEQ ID NO: 928001 - RNA, 19 nt, Homo sapiens
  misc_RNA (1)...(19): siRNA sense strand
cuccacaacuuucuucaug

SEQ ID NO: 928002 - RNA, 19 nt, Homo sapiens
  misc_RNA (1)...(19): siRNA sense strand
gcgccgauaucgagacaca

SEQ ID NO: 928003 - RNA, 19 nt, Homo sapiens
  misc_RNA (1)...(19): siRNA sense strand
gcuuucuucugauugaauu

SEQ ID NO: 928004 - RNA, 19 nt, Homo sapiens
  misc_RNA (1)...(19): siRNA sense strand
acaagauccuggaaacauc

SEQ ID NO: 928005 - RNA, 19 nt, Homo sapiens
  misc_RNA (1)...(19): siRNA sense strand
aagggccuguugccaaaua

SEQ ID NO: 928006 - RNA, 19 nt, Homo sapiens
  misc_RNA (1)...(19): siRNA sense strand
ggaccuggaauauaugauc

SEQ ID NO: 928007 - RNA, 19 nt, Homo sapiens
  misc_RNA (1)...(19): siRNA sense strand
ccacuugcccuuuauggau

SEQ ID NO: 928008 - RNA, 19 nt, Homo sapiens
  misc_RNA (1)...(19): siRNA sense strand
ucuuugagauugcuggauu

SEQ ID NO: 928009 - RNA, 19 nt, Homo sapiens
  misc_RNA (1)...(19): siRNA sense strand
gcaauuugucucaucaaca

SEQ ID NO: 928010 - RNA, 19 nt, Homo sapiens
  misc_RNA (1)...(19): siRNA sense strand
uaaaccauguacucaucuu

SEQ ID NO: 928011 - RNA, 19 nt, Homo sapiens
  misc_RNA (1)...(19): siRNA sense strand
auauggcccuugauaagaa

SEQ ID NO: 928012 - RNA, 19 nt, Homo sapiens
  misc_RNA (1)...(19): siRNA sense strand
ggaugugauucugcgcuuu

SEQ ID NO: 928013 - RNA, 19 nt, Homo sapiens
  misc_RNA (1)...(19): siRNA sense strand
gaaacugaggcuguaguga

SEQ ID NO: 928014 - RNA, 19 nt, Homo sapiens
  misc_RNA (1)...(19): siRNA sense strand
ggaaguacaaccagagcau

SEQ ID NO: 928015 - RNA, 19 nt, Homo sapiens
  misc_RNA (1)...(19): siRNA sense strand
gaucugcuucuacaguuug

SEQ ID NO: 928016 - RNA, 19 nt, Homo sapiens
  misc_RNA (1)...(19): siRNA sense strand
acauauguguauccacuug

SEQ ID NO: 928017 - RNA, 19 nt, Homo sapiens
  misc_RNA (1)...(19): siRNA sense strand
caaugaacuugaagauggu

SEQ ID NO: 928018 - RNA, 19 nt, Homo sapiens
  misc_RNA (1)...(19): siRNA sense strand
cgaaaccgccagaagaauc

SEQ ID NO: 928019 - RNA, 19 nt, Homo sapiens
  misc_RNA (1)...(19): siRNA sense strand
ugauagaagacacagauga

SEQ ID NO: 928020 - RNA, 19 nt, Homo sapiens
  misc_RNA (1)...(19): siRNA sense strand
ggaagauacucccucauua

SEQ ID NO: 928021 - RNA, 19 nt, Homo sapiens
  misc_RNA (1)...(19): siRNA sense strand
gaaguuagccuuucucaga

SEQ ID NO: 928022 - RNA, 19 nt, Homo sapiens
  misc_RNA (1)...(19): siRNA sense strand
ugacugugcuaaagaauaa

SEQ ID NO: 928023 - RNA, 19 nt, Homo sapiens
  misc_RNA (1)...(19): siRNA sense strand
gauacucccucauuacuug

SEQ ID NO: 928024 - RNA, 19 nt, Homo sapiens
  misc_RNA (1)...(19): siRNA sense strand
ugaaguauauccaaaguuc

SEQ ID NO: 928025 - RNA, 19 nt, Homo sapiens
  misc_RNA (1)...(19): siRNA sense strand
aaagagauuucccaaaguu

SEQ ID NO: 928026 - RNA, 19 nt, Homo sapiens
  misc_RNA (1)...(19): siRNA sense strand
ggagaaggaacaauuagaa

SEQ ID NO: 928027 - RNA, 19 nt, Homo sapiens
  misc_RNA (1)...(19): siRNA sense strand
cagaguggcuugccggaaa

SEQ ID NO: 928028 - RNA, 19 nt, Homo sapiens
  misc_RNA (1)...(19): siRNA sense strand
gcaauugucuugggugaag

SEQ ID NO: 928029 - RNA, 19 nt, Homo sapiens
  misc_RNA (1)...(19): siRNA sense strand
gauuuaagaucgagacaag

SEQ ID NO: 928030 - RNA, 19 nt, Homo sapiens
  misc_RNA (1)...(19): siRNA sense strand
gauuucaguuucugccuaa

SEQ ID NO: 928031 - RNA, 19 nt, Homo sapiens
  misc_RNA (1)...(19): siRNA sense strand
gagagaaccaacuaucuga

SEQ ID NO: 928032 - RNA, 19 nt, Homo sapiens
  misc_RNA (1)...(19): siRNA sense strand
uuaugaagauggagcaauu

SEQ ID NO: 928033 - RNA, 19 nt, Homo sapiens
  misc_RNA (1)...(19): siRNA sense strand
caacaaguguaagagaguu

SEQ ID NO: 928034 - RNA, 19 nt, Homo sapiens
  misc_RNA (1)...(19): siRNA sense strand
uaaaagagauuucccaaag

SEQ ID NO: 928035 - RNA, 19 nt, Homo sapiens
  misc_RNA (1)...(19): siRNA sense strand
gaagauacucccucauuac

SEQ ID NO: 928036 - RNA, 19 nt, Homo sapiens
  misc_RNA (1)...(19): siRNA sense strand
gaaaaugucaguucuucua

SEQ ID NO: 928037 - RNA, 19 nt, Homo sapiens
  misc_RNA (1)...(19): siRNA sense strand
gcaaguuacaagucucuaa

SEQ ID NO: 928038 - RNA, 19 nt, Homo sapiens
  misc_RNA (1)...(19): siRNA sense strand
gaaagcaguacuccagaga

SEQ ID NO: 928039 - RNA, 19 nt, Homo sapiens
  misc_RNA (1)...(19): siRNA sense strand
gaagauggagcaauugucu

SEQ ID NO: 928040 - RNA, 19 nt, Homo sapiens
  misc_RNA (1)...(19): siRNA sense strand
aauaaacagugguaugaga

SEQ ID NO: 928041 - RNA, 19 nt, Homo sapiens
  misc_RNA (1)...(19): siRNA sense strand
ccaguuaucagcagaaguu

SEQ ID NO: 928042 - RNA, 19 nt, Homo sapiens
  misc_RNA (1)...(19): siRNA sense strand
aauuguaucugcagcauug

SEQ ID NO: 928043 - RNA, 19 nt, Homo sapiens
  misc_RNA (1)...(19): siRNA sense strand
gacuauacaccauauuuga

SEQ ID NO: 928044 - RNA, 19 nt, Homo sapiens
  misc_RNA (1)...(19): siRNA sense strand
gcaguacuccagagaaugu

SEQ ID NO: 928045 - RNA, 19 nt, Homo sapiens
  misc_RNA (1)...(19): siRNA sense strand
auacguugcuuuaccgaaa

SEQ ID NO: 928046 - RNA, 19 nt, Homo sapiens
  misc_RNA (1)...(19): siRNA sense strand
gacaauugaugauucuucu

SEQ ID NO: 928047 - RNA, 19 nt, Homo sapiens
  misc_RNA (1)...(19): siRNA sense strand
gcuggcucaucuccaaaua

SEQ ID NO: 928048 - RNA, 19 nt, Homo sapiens
  misc_RNA (1)...(19): siRNA sense strand
gugaagacccugauugauc

SEQ ID NO: 928049 - RNA, 19 nt, Homo sapiens
  misc_RNA (1)...(19): siRNA sense strand
acaauaaacagugguauga

SEQ ID NO: 928050 - RNA, 19 nt, Homo sapiens
  misc_RNA (1)...(19): siRNA sense strand
gagaaggaacaauuagaau

SEQ ID NO: 928051 - RNA, 19 nt, Homo sapiens
  misc_RNA (1)...(19): siRNA sense strand
aggaggagcuaaggacuuu

SEQ ID NO: 928052 - RNA, 19 nt, Homo sapiens
  misc_RNA (1)...(19): siRNA sense strand
gagaaugucggaccuccuu

SEQ ID NO: 928053 - RNA, 19 nt, Homo sapiens
  misc_RNA (1)...(19): siRNA sense strand
acaagucucuaacaagcuu

SEQ ID NO: 928054 - RNA, 19 nt, Homo sapiens
  misc_RNA (1)...(19): siRNA sense strand
cagcagaaguuagccuuuc

SEQ ID NO: 928055 - RNA, 19 nt, Homo sapiens
  misc_RNA (1)...(19): siRNA sense strand
ucaaugcuguugccuugga

SEQ ID NO: 928056 - RNA, 19 nt, Homo sapiens
  misc_RNA (1)...(19): siRNA sense strand
ggaagcagugguagcgaaa

SEQ ID NO: 928057 - RNA, 19 nt, Homo sapiens
  misc_RNA (1)...(19): siRNA sense strand
cucauaaacuggagaagga

SEQ ID NO: 928058 - RNA, 19 nt, Homo sapiens
  misc_RNA (1)...(19): siRNA sense strand
auuccgaucuggcucauaa

SEQ ID NO: 928059 - RNA, 19 nt, Homo sapiens
  misc_RNA (1)...(19): siRNA sense strand
gaaccaacuaucugaaucu

SEQ ID NO: 928060 - RNA, 19 nt, Homo sapiens
  misc_RNA (1)...(19): siRNA sense strand
gagaaccaacuaucugaau

SEQ ID NO: 928061 - RNA, 19 nt, Homo sapiens
  misc_RNA (1)...(19): siRNA sense strand
gaucggucuugcuuugaga

SEQ ID NO: 928062 - RNA, 19 nt, Homo sapiens
  misc_RNA (1)...(19): siRNA sense strand
gagaaaaguuaucaaaguc

SEQ ID NO: 928063 - RNA, 19 nt, Homo sapiens
  misc_RNA (1)...(19): siRNA sense strand
caggagcucuggaugucaa

SEQ ID NO: 928064 - RNA, 19 nt, Homo sapiens
  misc_RNA (1)...(19): siRNA sense strand
cgaucuggcucauaaacug

SEQ ID NO: 928065 - RNA, 19 nt, Homo sapiens
  misc_RNA (1)...(19): siRNA sense strand
gcuauugauuucaguuucu

SEQ ID NO: 928066 - RNA, 19 nt, Homo sapiens
  misc_RNA (1)...(19): siRNA sense strand
ucuaaugacuaccuugcaa

SEQ ID NO: 928067 - RNA, 19 nt, Homo sapiens
  misc_RNA (1)...(19): siRNA sense strand
gcuuugagacaauugauga

SEQ ID NO: 928068 - RNA, 19 nt, Homo sapiens
  misc_RNA (1)...(19): siRNA sense strand
aagcaguacuccagagaau

SEQ ID NO: 928069 - RNA, 19 nt, Homo sapiens
  misc_RNA (1)...(19): siRNA sense strand
gagaggaggaaccugauca

SEQ ID NO: 928070 - RNA, 19 nt, Homo sapiens
  misc_RNA (1)...(19): siRNA sense strand
agaaggagauggaaaacaa

SEQ ID NO: 928071 - RNA, 19 nt, Homo sapiens
  misc_RNA (1)...(19): siRNA sense strand
gagugaagguaaggaagau

SEQ ID NO: 928072 - RNA, 19 nt, Homo sapiens
  misc_RNA (1)...(19): siRNA sense strand
aaaugucaguucuucuaga

SEQ ID NO: 928073 - RNA, 19 nt, Homo sapiens
  misc_RNA (1)...(19): siRNA sense strand
ucucagacuucacuagauc

SEQ ID NO: 928074 - RNA, 19 nt, Homo sapiens
  misc_RNA (1)...(19): siRNA sense strand
uaaacagugguaugagaaa

SEQ ID NO: 928075 - RNA, 19 nt, Homo sapiens
  misc_RNA (1)...(19): siRNA sense strand
ugagacaauugaugauucu

SEQ ID NO: 928076 - RNA, 19 nt, Homo sapiens
  misc_RNA (1)...(19): siRNA sense strand
gaucaccgugugcagguuu

SEQ ID NO: 928077 - RNA, 19 nt, Homo sapiens
  misc_RNA (1)...(19): siRNA sense strand
ggguagagccuggaucaga

SEQ ID NO: 928078 - RNA, 19 nt, Homo sapiens
  misc_RNA (1)...(19): siRNA sense strand
gcaaguccuacaacagaga

SEQ ID NO: 928079 - RNA, 19 nt, Homo sapiens
  misc_RNA (1)...(19): siRNA sense strand
agaguuaacugcccaucuc

SEQ ID NO: 928080 - RNA, 19 nt, Homo sapiens
  misc_RNA (1)...(19): siRNA sense strand
uaagaucgagacaagaguu

SEQ ID NO: 928081 - RNA, 19 nt, Homo sapiens
  misc_RNA (1)...(19): siRNA sense strand
gaucagcugacugugcuaa

SEQ ID NO: 928082 - RNA, 19 nt, Homo sapiens
  misc_RNA (1)...(19): siRNA sense strand
auccaaaguucugauagua

SEQ ID NO: 928083 - RNA, 19 nt, Homo sapiens
  misc_RNA (1)...(19): siRNA sense strand
ggaaaacaagacacauuaa

SEQ ID NO: 928084 - RNA, 19 nt, Homo sapiens
  misc_RNA (1)...(19): siRNA sense strand
uaacugcccaucucaccaa

SEQ ID NO: 928085 - RNA, 19 nt, Homo sapiens
  misc_RNA (1)...(19): siRNA sense strand
uuguggagcuucaagauca

SEQ ID NO: 928086 - RNA, 19 nt, Homo sapiens
  misc_RNA (1)...(19): siRNA sense strand
cgagagaaccaacuaucug

SEQ ID NO: 928087 - RNA, 19 nt, Homo sapiens
  misc_RNA (1)...(19): siRNA sense strand
agaaccaacuaucugaauc

SEQ ID NO: 928088 - RNA, 19 nt, Homo sapiens
  misc_RNA (1)...(19): siRNA sense strand
guggaucucuaacgucagu

SEQ ID NO: 928089 - RNA, 19 nt, Homo sapiens
  misc_RNA (1)...(19): siRNA sense strand
aggaagauacucccucauu

SEQ ID NO: 928090 - RNA, 19 nt, Homo sapiens
  misc_RNA (1)...(19): siRNA sense strand
gaaaguccucguagcuucu

SEQ ID NO: 928091 - RNA, 19 nt, Homo sapiens
  misc_RNA (1)...(19): siRNA sense strand
cagcuuacccuggaacaga

SEQ ID NO: 928092 - RNA, 19 nt, Homo sapiens
  misc_RNA (1)...(19): siRNA sense strand
gaaugucggaccuccuuuc

SEQ ID NO: 928093 - RNA, 19 nt, Homo sapiens
  misc_RNA (1)...(19): siRNA sense strand
gaggaggagcuaaggacuu

SEQ ID NO: 928094 - RNA, 19 nt, Homo sapiens
  misc_RNA (1)...(19): siRNA sense strand
ccuuggauacguugcuuua

SEQ ID NO: 928095 - RNA, 19 nt, Homo sapiens
  misc_RNA (1)...(19): siRNA sense strand
ugaugauucuucuccugaa

SEQ ID NO: 928096 - RNA, 19 nt, Homo sapiens
  misc_RNA (1)...(19): siRNA sense strand
guucaacaaguguaagaga

SEQ ID NO: 928097 - RNA, 19 nt, Homo sapiens
  misc_RNA (1)...(19): siRNA sense strand
gguuaugaaaguccucgua

SEQ ID NO: 928098 - RNA, 19 nt, Homo sapiens
  misc_RNA (1)...(19): siRNA sense strand
uuacuuggccucuguggau

SEQ ID NO: 928099 - RNA, 19 nt, Homo sapiens
  misc_RNA (1)...(19): siRNA sense strand
uugagacaauugaugauuc

SEQ ID NO: 928100 - RNA, 19 nt, Homo sapiens
  misc_RNA (1)...(19): siRNA sense strand
agacuauacaccauauuug

SEQ ID NO: 928101 - RNA, 19 nt, Homo sapiens
  misc_RNA (1)...(19): siRNA sense strand
caaaacaaccaggagauuu

SEQ ID NO: 928102 - RNA, 19 nt, Homo sapiens
  misc_RNA (1)...(19): siRNA sense strand
ccucuucaaggucaaguaa

SEQ ID NO: 928103 - RNA, 19 nt, Homo sapiens
  misc_RNA (1)...(19): siRNA sense strand
ugagugaagguaaggaaga

SEQ ID NO: 928104 - RNA, 19 nt, Homo sapiens
  misc_RNA (1)...(19): siRNA sense strand
uguaaugagugaagguaag

SEQ ID NO: 928105 - RNA, 19 nt, Homo sapiens
  misc_RNA (1)...(19): siRNA sense strand
gggugaagaagcaaauaug

SEQ ID NO: 928106 - RNA, 19 nt, Homo sapiens
  misc_RNA (1)...(19): siRNA sense strand
gaauuguaucugcagcauu

SEQ ID NO: 928107 - RNA, 19 nt, Homo sapiens
  misc_RNA (1)...(19): siRNA sense strand
cagcugacugugcuaaaga

SEQ ID NO: 928108 - RNA, 19 nt, Homo sapiens
  misc_RNA (1)...(19): siRNA sense strand
agauggagcaauugucuug

SEQ ID NO: 928109 - RNA, 19 nt, Homo sapiens
  misc_RNA (1)...(19): siRNA sense strand
caguuuuccugcuguaaua

SEQ ID NO: 928110 - RNA, 19 nt, Homo sapiens
  misc_RNA (1)...(19): siRNA sense strand
auugaucggucuugcuuug

SEQ ID NO: 928111 - RNA, 19 nt, Homo sapiens
  misc_RNA (1)...(19): siRNA sense strand
gauccaggccagucacaag

SEQ ID NO: 928112 - RNA, 19 nt, Homo sapiens
  misc_RNA (1)...(19): siRNA sense strand
acuggagaaggaacaauua

SEQ ID NO: 928113 - RNA, 19 nt, Homo sapiens
  misc_RNA (1)...(19): siRNA sense strand
aagaucgagacaagaguua

SEQ ID NO: 928114 - RNA, 19 nt, Homo sapiens
  misc_RNA (1)...(19): siRNA sense strand
cuucuaggacucaaugcua

SEQ ID NO: 928115 - RNA, 19 nt, Homo sapiens
  misc_RNA (1)...(19): siRNA sense strand
uugcaaguccuacaacaga

SEQ ID NO: 928116 - RNA, 19 nt, Homo sapiens
  misc_RNA (1)...(19): siRNA sense strand
uggaaaacaagacacauua

SEQ ID NO: 928117 - RNA, 19 nt, Homo sapiens
  misc_RNA (1)...(19): siRNA sense strand
cacaauaaacagugguaug

SEQ ID NO: 928118 - RNA, 19 nt, Homo sapiens
  misc_RNA (1)...(19): siRNA sense strand
ucagcugacugugcuaaag

SEQ ID NO: 928119 - RNA, 19 nt, Homo sapiens
  misc_RNA (1)...(19): siRNA sense strand
cuaaggacuuugggaagca

SEQ ID NO: 928120 - RNA, 19 nt, Homo sapiens
  misc_RNA (1)...(19): siRNA sense strand
gaacaauuguaacgaauga

SEQ ID NO: 928121 - RNA, 19 nt, Homo sapiens
  misc_RNA (1)...(19): siRNA sense strand
gaaugaaccuuaugagaag

SEQ ID NO: 928122 - RNA, 19 nt, Homo sapiens
  misc_RNA (1)...(19): siRNA sense strand
agaaggaauugaagucuua

SEQ ID NO: 928123 - RNA, 19 nt, Homo sapiens
  misc_RNA (1)...(19): siRNA sense strand
gcagauagaagucaaguug

SEQ ID NO: 928124 - RNA, 19 nt, Homo sapiens
  misc_RNA (1)...(19): siRNA sense strand
guagaacaauuguaacgaa

SEQ ID NO: 928125 - RNA, 19 nt, Homo sapiens
  misc_RNA (1)...(19): siRNA sense strand
cuacaaagcugaugaagac

SEQ ID NO: 928126 - RNA, 19 nt, Homo sapiens
  misc_RNA (1)...(19): siRNA sense strand
gcacaaaauuuaucaccua

SEQ ID NO: 928127 - RNA, 19 nt, Homo sapiens
  misc_RNA (1)...(19): siRNA sense strand
gagaaggaauugaagucuu

SEQ ID NO: 928128 - RNA, 19 nt, Homo sapiens
  misc_RNA (1)...(19): siRNA sense strand
gaaagaacuagaaacaaug

SEQ ID NO: 928129 - RNA, 19 nt, Homo sapiens
  misc_RNA (1)...(19): siRNA sense strand
ggaagaaggagcuggcaaa

SEQ ID NO: 928130 - RNA, 19 nt, Homo sapiens
  misc_RNA (1)...(19): siRNA sense strand
ugaugaagacccagcauua

SEQ ID NO: 928131 - RNA, 19 nt, Homo sapiens
  misc_RNA (1)...(19): siRNA sense strand
agaaugaaccuuaugagaa

SEQ ID NO: 928132 - RNA, 19 nt, Homo sapiens
  misc_RNA (1)...(19): siRNA sense strand
guacaugguuuagauccaa

SEQ ID NO: 928133 - RNA, 19 nt, Homo sapiens
  misc_RNA (1)...(19): siRNA sense strand
ggaaaacuguugaaauugu

SEQ ID NO: 928134 - RNA, 19 nt, Homo sapiens
  misc_RNA (1)...(19): siRNA sense strand
agaaggagcuggcaaacag

SEQ ID NO: 928135 - RNA, 19 nt, Homo sapiens
  misc_RNA (1)...(19): siRNA sense strand
cauguucuguucaggagua

SEQ ID NO: 928136 - RNA, 19 nt, Homo sapiens
  misc_RNA (1)...(19): siRNA sense strand
ggaagacgagacucagaaa

SEQ ID NO: 928137 - RNA, 19 nt, Homo sapiens
  misc_RNA (1)...(19): siRNA sense strand
agacgagacucagaaagaa

SEQ ID NO: 928138 - RNA, 19 nt, Homo sapiens
  misc_RNA (1)...(19): siRNA sense strand
gagcaaagugccugcauuc

SEQ ID NO: 928139 - RNA, 19 nt, Homo sapiens
  misc_RNA (1)...(19): siRNA sense strand
gcacgucggcugcugaugu

SEQ ID NO: 928140 - RNA, 19 nt, Homo sapiens
  misc_RNA (1)...(19): siRNA sense strand
gcuccuugguguuucauga

SEQ ID NO: 928141 - RNA, 19 nt, Homo sapiens
  misc_RNA (1)...(19): siRNA sense strand
cagaagcuaguaagaauga

SEQ ID NO: 928142 - RNA, 19 nt, Homo sapiens
  misc_RNA (1)...(19): siRNA sense strand
ucagaaagaacuagaaaca

SEQ ID NO: 928143 - RNA, 19 nt, Homo sapiens
  misc_RNA (1)...(19): siRNA sense strand
gggcagcuuuacucuguug

SEQ ID NO: 928144 - RNA, 19 nt, Homo sapiens
  misc_RNA (1)...(19): siRNA sense strand
ccagaugugugccuauaag

SEQ ID NO: 928145 - RNA, 19 nt, Homo sapiens
  misc_RNA (1)...(19): siRNA sense strand
gaugaagacccagcauuau

SEQ ID NO: 928146 - RNA, 19 nt, Homo sapiens
  misc_RNA (1)...(19): siRNA sense strand
aaacuuccaucgccagcuu

SEQ ID NO: 928147 - RNA, 19 nt, Homo sapiens
  misc_RNA (1)...(19): siRNA sense strand
ugcagaagcuaguaagaau

SEQ ID NO: 928148 - RNA, 19 nt, Homo sapiens
  misc_RNA (1)...(19): siRNA sense strand
gaauggaagacgagacuca

SEQ ID NO: 928149 - RNA, 19 nt, Homo sapiens
  misc_RNA (1)...(19): siRNA sense strand
ugaaccagcagacuacaaa

SEQ ID NO: 928150 - RNA, 19 nt, Homo sapiens
  misc_RNA (1)...(19): siRNA sense strand
ugaagacccagcauuauuc

SEQ ID NO: 928151 - RNA, 19 nt, Homo sapiens
  misc_RNA (1)...(19): siRNA sense strand
gaagcuaguaagaaugaga

SEQ ID NO: 928152 - RNA, 19 nt, Homo sapiens
  misc_RNA (1)...(19): siRNA sense strand
cuagaaacaaugcguaaga

SEQ ID NO: 928153 - RNA, 19 nt, Homo sapiens
  misc_RNA (1)...(19): siRNA sense strand
ggacugcaaagcaaaguag

SEQ ID NO: 928154 - RNA, 19 nt, Homo sapiens
  misc_RNA (1)...(19): siRNA sense strand
caaggaauuccgugugguu

SEQ ID NO: 928155 - RNA, 19 nt, Homo sapiens
  misc_RNA (1)...(19): siRNA sense strand
gcagaagcuaguaagaaug

SEQ ID NO: 928156 - RNA, 19 nt, Homo sapiens
  misc_RNA (1)...(19): siRNA sense strand
uggaagacauuaggagaau

SEQ ID NO: 928157 - RNA, 19 nt, Homo sapiens
  misc_RNA (1)...(19): siRNA sense strand
ggagaaaagggacaguaua

SEQ ID NO: 928158 - RNA, 19 nt, Homo sapiens
  misc_RNA (1)...(19): siRNA sense strand
gaaggaauugaagucuuaa

SEQ ID NO: 928159 - RNA, 19 nt, Homo sapiens
  misc_RNA (1)...(19): siRNA sense strand
agagcaaagugccugcauu

SEQ ID NO: 928160 - RNA, 19 nt, Homo sapiens
  misc_RNA (1)...(19): siRNA sense strand
ugagacuggugguggagaa

SEQ ID NO: 928161 - RNA, 19 nt, Homo sapiens
  misc_RNA (1)...(19): siRNA sense strand
cgagggcuccuugguguuu

SEQ ID NO: 928162 - RNA, 19 nt, Homo sapiens
  misc_RNA (1)...(19): siRNA sense strand
aagacgagacucagaaaga

SEQ ID NO: 928163 - RNA, 19 nt, Homo sapiens
  misc_RNA (1)...(19): siRNA sense strand
ggaauuccgugugguuuug

SEQ ID NO: 928164 - RNA, 19 nt, Homo sapiens
  misc_RNA (1)...(19): siRNA sense strand
aagaaugaaccuuaugaga

SEQ ID NO: 928165 - RNA, 19 nt, Homo sapiens
  misc_RNA (1)...(19): siRNA sense strand
cuguugaaauuguccauau

SEQ ID NO: 928166 - RNA, 19 nt, Homo sapiens
  misc_RNA (1)...(19): siRNA sense strand
gaagacgagacucagaaag

SEQ ID NO: 928167 - RNA, 19 nt, Homo sapiens
  misc_RNA (1)...(19): siRNA sense strand
gagaauggaagacgagacu

SEQ ID NO: 928168 - RNA, 19 nt, Homo sapiens
  misc_RNA (1)...(19): siRNA sense strand
aaaccagacuugggaacau

SEQ ID NO: 928169 - RNA, 19 nt, Homo sapiens
  misc_RNA (1)...(19): siRNA sense strand
cagaaagaacuagaaacaa

SEQ ID NO: 928170 - RNA, 19 nt, Homo sapiens
  misc_RNA (1)...(19): siRNA sense strand
gaaaacuguugaaauuguc

SEQ ID NO: 928171 - RNA, 19 nt, Homo sapiens
  misc_RNA (1)...(19): siRNA sense strand
ccaaacacauggaaaacug

SEQ ID NO: 928172 - RNA, 19 nt, Homo sapiens
  misc_RNA (1)...(19): siRNA sense strand
ggagaaggaauugaagucu

SEQ ID NO: 928173 - RNA, 19 nt, Homo sapiens
  misc_RNA (1)...(19): siRNA sense strand
uagaaacaaugcguaagag

SEQ ID NO: 928174 - RNA, 19 nt, Homo sapiens
  misc_RNA (1)...(19): siRNA sense strand
uugggcagcuuuacucugu

SEQ ID NO: 928175 - RNA, 19 nt, Homo sapiens
  misc_RNA (1)...(19): siRNA sense strand
caugagaaagccuggaaug

SEQ ID NO: 928176 - RNA, 19 nt, Homo sapiens
  misc_RNA (1)...(19): siRNA sense strand
guugaaauuguccauauag

SEQ ID NO: 928177 - RNA, 19 nt, Homo sapiens
  misc_RNA (1)...(19): siRNA sense strand
ugagaaggauggagaaaag

SEQ ID NO: 928178 - RNA, 19 nt, Homo sapiens
  misc_RNA (1)...(19): siRNA sense strand
gaagaaggagcuggcaaac

SEQ ID NO: 928179 - RNA, 19 nt, Homo sapiens
  misc_RNA (1)...(19): siRNA sense strand
gacuugggaacauuagaaa

SEQ ID NO: 928180 - RNA, 19 nt, Homo sapiens
  misc_RNA (1)...(19): siRNA sense strand
agacuugggaacauuagaa

SEQ ID NO: 928181 - RNA, 19 nt, Homo sapiens
  misc_RNA (1)...(19): siRNA sense strand
aaccagacuugggaacauu

SEQ ID NO: 928182 - RNA, 19 nt, Homo sapiens
  misc_RNA (1)...(19): siRNA sense strand
gggacaguauacgcacaaa

SEQ ID NO: 928183 - RNA, 19 nt, Homo sapiens
  misc_RNA (1)...(19): siRNA sense strand
cugcaaagcaaaguagaaa

SEQ ID NO: 928184 - RNA, 19 nt, Homo sapiens
  misc_RNA (1)...(19): siRNA sense strand
cagcauuauuccagucagu

SEQ ID NO: 928185 - RNA, 19 nt, Homo sapiens
  misc_RNA (1)...(19): siRNA sense strand
aaucgaaacauggcacaaa

SEQ ID NO: 928186 - RNA, 19 nt, Homo sapiens
  misc_RNA (1)...(19): siRNA sense strand
gacuggugguggagaagga

SEQ ID NO: 928187 - RNA, 19 nt, Homo sapiens
  misc_RNA (1)...(19): siRNA sense strand
acggauauuuacaaacuuc

SEQ ID NO: 928188 - RNA, 19 nt, Homo sapiens
  misc_RNA (1)...(19): siRNA sense strand
gaccaagagaggcccuuug

SEQ ID NO: 928189 - RNA, 19 nt, Homo sapiens
  misc_RNA (1)...(19): siRNA sense strand
gcauuauuccagucaguca

SEQ ID NO: 928190 - RNA, 19 nt, Homo sapiens
  misc_RNA (1)...(19): siRNA sense strand
augaagacccagcauuauu

SEQ ID NO: 928191 - RNA, 19 nt, Homo sapiens
  misc_RNA (1)...(19): siRNA sense strand
gauauugcagauagaaguc

SEQ ID NO: 928192 - RNA, 19 nt, Homo sapiens
  misc_RNA (1)...(19): siRNA sense strand
cgaaacauggcacaaacca

SEQ ID NO: 928193 - RNA, 19 nt, Homo sapiens
  misc_RNA (1)...(19): siRNA sense strand
acucagaaagaacuagaaa

SEQ ID NO: 928194 - RNA, 19 nt, Homo sapiens
  misc_RNA (1)...(19): siRNA sense strand
uggaagacgagacucagaa

SEQ ID NO: 928195 - RNA, 19 nt, Homo sapiens
  misc_RNA (1)...(19): siRNA sense strand
gggacugcaaagcaaagua

SEQ ID NO: 928196 - RNA, 19 nt, Homo sapiens
  misc_RNA (1)...(19): siRNA sense strand
gaaccagcagacuacaaag

SEQ ID NO: 928197 - RNA, 19 nt, Homo sapiens
  misc_RNA (1)...(19): siRNA sense strand
caaaccagacuugggaaca

SEQ ID NO: 928198 - RNA, 19 nt, Homo sapiens
  misc_RNA (1)...(19): siRNA sense strand
guucuguucaggaguauca

SEQ ID NO: 928199 - RNA, 19 nt, Homo sapiens
  misc_RNA (1)...(19): siRNA sense strand
agacuacaaagcugaugaa

SEQ ID NO: 928200 - RNA, 19 nt, Homo sapiens
  misc_RNA (1)...(19): siRNA sense strand
gacaguauacgcacaaaau

SEQ ID NO: 928201 - RNA, 19 nt, Homo sapiens
  misc_RNA (1)...(19): siRNA sense strand
uaagagggguuccguucga

SEQ ID NO: 928202 - RNA, 19 nt, Homo sapiens
  misc_RNA (1)...(19): siRNA sense strand
gagaaaagggacaguauac

SEQ ID NO: 928203 - RNA, 19 nt, Homo sapiens
  misc_RNA (1)...(19): siRNA sense strand
uacaugguuuagauccaaa

SEQ ID NO: 928204 - RNA, 19 nt, Homo sapiens
  misc_RNA (1)...(19): siRNA sense strand
caacugaaccacccaaaua

SEQ ID NO: 928205 - RNA, 19 nt, Homo sapiens
  misc_RNA (1)...(19): siRNA sense strand
gcacuacuccgagaaguua

SEQ ID NO: 928206 - RNA, 19 nt, Homo sapiens
  misc_RNA (1)...(19): siRNA sense strand
ggaagacaguggcucugaa

SEQ ID NO: 928207 - RNA, 19 nt, Homo sapiens
  misc_RNA (1)...(19): siRNA sense strand
gagaacggcuacaacuuca

SEQ ID NO: 928208 - RNA, 19 nt, Homo sapiens
  misc_RNA (1)...(19): siRNA sense strand
ucucgcagaugaucaagua

SEQ ID NO: 928209 - RNA, 19 nt, Homo sapiens
  misc_RNA (1)...(19): siRNA sense strand
acccaaauaucaucaagua

SEQ ID NO: 928210 - RNA, 19 nt, Homo sapiens
  misc_RNA (1)...(19): siRNA sense strand
ucaaguauuuggacucguu

SEQ ID NO: 928211 - RNA, 19 nt, Homo sapiens
  misc_RNA (1)...(19): siRNA sense strand
cagaugaucaaguacuuua

SEQ ID NO: 928212 - RNA, 19 nt, Homo sapiens
  misc_RNA (1)...(19): siRNA sense strand
ucaaguacuuuaagaagca

SEQ ID NO: 928213 - RNA, 19 nt, Homo sapiens
  misc_RNA (1)...(19): siRNA sense strand
gaucaaguacuuuaagaag

SEQ ID NO: 928214 - RNA, 19 nt, Homo sapiens
  misc_RNA (1)...(19): siRNA sense strand
gaagcucggugaccuuggu

SEQ ID NO: 928215 - RNA, 19 nt, Homo sapiens
  misc_RNA (1)...(19): siRNA sense strand
ggagaucggccucuugaag

SEQ ID NO: 928216 - RNA, 19 nt, Homo sapiens
  misc_RNA (1)...(19): siRNA sense strand
cggagaggauccaugagaa

SEQ ID NO: 928217 - RNA, 19 nt, Homo sapiens
  misc_RNA (1)...(19): siRNA sense strand
gaagacaacgagcugaaca

SEQ ID NO: 928218 - RNA, 19 nt, Homo sapiens
  misc_RNA (1)...(19): siRNA sense strand
gacaguggcucugaagaag

SEQ ID NO: 928219 - RNA, 19 nt, Homo sapiens
  misc_RNA (1)...(19): siRNA sense strand
gaacauugugcuggaguug

SEQ ID NO: 928220 - RNA, 19 nt, Homo sapiens
  misc_RNA (1)...(19): siRNA sense strand
ccacagaggcaucccaaca

SEQ ID NO: 928221 - RNA, 19 nt, Homo sapiens
  misc_RNA (1)...(19): siRNA sense strand
gaacggcuacaacuucaag

SEQ ID NO: 928222 - RNA, 19 nt, Homo sapiens
  misc_RNA (1)...(19): siRNA sense strand
gaagacaguggcucugaag

SEQ ID NO: 928223 - RNA, 19 nt, Homo sapiens
  misc_RNA (1)...(19): siRNA sense strand
ugagaacggcuacaacuuc

SEQ ID NO: 928224 - RNA, 19 nt, Homo sapiens
  misc_RNA (1)...(19): siRNA sense strand
gcaacugaaccacccaaau

SEQ ID NO: 928225 - RNA, 19 nt, Homo sapiens
  misc_RNA (1)...(19): siRNA sense strand
gcagaugaucaaguacuuu

SEQ ID NO: 928226 - RNA, 19 nt, Homo sapiens
  misc_RNA (1)...(19): siRNA sense strand
gaaccacccaaauaucauc

SEQ ID NO: 928227 - RNA, 19 nt, Homo sapiens
  misc_RNA (1)...(19): siRNA sense strand
ucaaggagaucggccucuu

SEQ ID NO: 928228 - RNA, 19 nt, Homo sapiens
  misc_RNA (1)...(19): siRNA sense strand
gacaacgagcugaacauug

SEQ ID NO: 928229 - RNA, 19 nt, Homo sapiens
  misc_RNA (1)...(19): siRNA sense strand
agacaguggcucugaagaa

SEQ ID NO: 928230 - RNA, 19 nt, Homo sapiens
  misc_RNA (1)...(19): siRNA sense strand
gggacgcccuacuacaugu

SEQ ID NO: 928231 - RNA, 19 nt, Homo sapiens
  misc_RNA (1)...(19): siRNA sense strand
gagaggacaguauggaagu

SEQ ID NO: 928232 - RNA, 19 nt, Homo sapiens
  misc_RNA (1)...(19): siRNA sense strand
agaaggugcagaucuuuga

SEQ ID NO: 928233 - RNA, 19 nt, Homo sapiens
  misc_RNA (1)...(19): siRNA sense strand
uacgagaacuggucagcau

SEQ ID NO: 928234 - RNA, 19 nt, Homo sapiens
  misc_RNA (1)...(19): siRNA sense strand
gaugaucaaguacuuuaag

SEQ ID NO: 928235 - RNA, 19 nt, Homo sapiens
  misc_RNA (1)...(19): siRNA sense strand
gagaacuggucagcaugug

SEQ ID NO: 928236 - RNA, 19 nt, Homo sapiens
  misc_RNA (1)...(19): siRNA sense strand
agaggacaguauggaagua

SEQ ID NO: 928237 - RNA, 19 nt, Homo sapiens
  misc_RNA (1)...(19): siRNA sense strand
gagcacuacuccgagaagu

SEQ ID NO: 928238 - RNA, 19 nt, Homo sapiens
  misc_RNA (1)...(19): siRNA sense strand
ugaacauugugcuggaguu

SEQ ID NO: 928239 - RNA, 19 nt, Homo sapiens
  misc_RNA (1)...(19): siRNA sense strand
gcugucugcuguacgagau

SEQ ID NO: 928240 - RNA, 19 nt, Homo sapiens
  misc_RNA (1)...(19): siRNA sense strand
caccggagaggauccauga

SEQ ID NO: 928241 - RNA, 19 nt, Homo sapiens
  misc_RNA (1)...(19): siRNA sense strand
ccacccaaauaucaucaag

SEQ ID NO: 928242 - RNA, 19 nt, Homo sapiens
  misc_RNA (1)...(19): siRNA sense strand
agacaacgagcugaacauu

SEQ ID NO: 928243 - RNA, 19 nt, Homo sapiens
  misc_RNA (1)...(19): siRNA sense strand
cgcagaugaucaaguacuu

SEQ ID NO: 928244 - RNA, 19 nt, Homo sapiens
  misc_RNA (1)...(19): siRNA sense strand
gaccugacaucggauacgu

SEQ ID NO: 928245 - RNA, 19 nt, Homo sapiens
  misc_RNA (1)...(19): siRNA sense strand
cuauggagauaagaugaau

SEQ ID NO: 928246 - RNA, 19 nt, Homo sapiens
  misc_RNA (1)...(19): siRNA sense strand
gauaggccgaggacaguuc

SEQ ID NO: 928247 - RNA, 19 nt, Homo sapiens
  misc_RNA (1)...(19): siRNA sense strand
uauuuggacucguuuaucg

SEQ ID NO: 928248 - RNA, 19 nt, Homo sapiens
  misc_RNA (1)...(19): siRNA sense strand
caguggcucugaagaaggu

SEQ ID NO: 928249 - RNA, 19 nt, Homo sapiens
  misc_RNA (1)...(19): siRNA sense strand
aaggagaucggccucuuga

SEQ ID NO: 928250 - RNA, 19 nt, Homo sapiens
  misc_RNA (1)...(19): siRNA sense strand
ggacucguuuaucgaagac

SEQ ID NO: 928251 - RNA, 19 nt, Homo sapiens
  misc_RNA (1)...(19): siRNA sense strand
uggacucguuuaucgaaga

SEQ ID NO: 928252 - RNA, 19 nt, Homo sapiens
  misc_RNA (1)...(19): siRNA sense strand
cugaaccacccaaauauca

SEQ ID NO: 928253 - RNA, 19 nt, Homo sapiens
  misc_RNA (1)...(19): siRNA sense strand
ccggagaggauccaugaga

SEQ ID NO: 928254 - RNA, 19 nt, Homo sapiens
  misc_RNA (1)...(19): siRNA sense strand
ggggaccucucgcagauga

SEQ ID NO: 928255 - RNA, 19 nt, Homo sapiens
  misc_RNA (1)...(19): siRNA sense strand
cgagaacuggucagcaugu

SEQ ID NO: 928256 - RNA, 19 nt, Homo sapiens
  misc_RNA (1)...(19): siRNA sense strand
ggagaggauccaugagaac

SEQ ID NO: 928257 - RNA, 19 nt, Homo sapiens
  misc_RNA (1)...(19): siRNA sense strand
caaguauuuggacucguuu

SEQ ID NO: 928258 - RNA, 19 nt, Homo sapiens
  misc_RNA (1)...(19): siRNA sense strand
gaucgagcagugugacuac

SEQ ID NO: 928259 - RNA, 19 nt, Homo sapiens
  misc_RNA (1)...(19): siRNA sense strand
caugagaacggcuacaacu

SEQ ID NO: 928260 - RNA, 19 nt, Homo sapiens
  misc_RNA (1)...(19): siRNA sense strand
gccaagaccucgagaaaug

SEQ ID NO: 928261 - RNA, 19 nt, Homo sapiens
  misc_RNA (1)...(19): siRNA sense strand
guuauuggcucucuucauu

SEQ ID NO: 928262 - RNA, 19 nt, Homo sapiens
  misc_RNA (1)...(19): siRNA sense strand
gaagagaaggcgucuguag

SEQ ID NO: 928263 - RNA, 19 nt, Homo sapiens
  misc_RNA (1)...(19): siRNA sense strand
guaggacccugguuauugg

SEQ ID NO: 928264 - RNA, 19 nt, Homo sapiens
  misc_RNA (1)...(19): siRNA sense strand
gagaagcacagcaagaaca

SEQ ID NO: 928265 - RNA, 19 nt, Homo sapiens
  misc_RNA (1)...(19): siRNA sense strand
ugucugugguucugcaauu

SEQ ID NO: 928266 - RNA, 19 nt, Homo sapiens
  misc_RNA (1)...(19): siRNA sense strand
agagaaggcgucuguagga

SEQ ID NO: 928267 - RNA, 19 nt, Homo sapiens
  misc_RNA (1)...(19): siRNA sense strand
uguaggacccugguuauug

SEQ ID NO: 928268 - RNA, 19 nt, Homo sapiens
  misc_RNA (1)...(19): siRNA sense strand
ccagauuauucaaaguauc

SEQ ID NO: 928269 - RNA, 19 nt, Homo sapiens
  misc_RNA (1)...(19): siRNA sense strand
aagcaaaggauccguaugg

SEQ ID NO: 928270 - RNA, 19 nt, Homo sapiens
  misc_RNA (1)...(19): siRNA sense strand
ccgaagagaaggcgucugu

SEQ ID NO: 928271 - RNA, 19 nt, Homo sapiens
  misc_RNA (1)...(19): siRNA sense strand
ccaacgagaagcacagcaa

SEQ ID NO: 928272 - RNA, 19 nt, Homo sapiens
  misc_RNA (1)...(19): siRNA sense strand
ccaagcaaaggauccguau

SEQ ID NO: 928273 - RNA, 19 nt, Homo sapiens
  misc_RNA (1)...(19): siRNA sense strand
gcaauuuuccagauuauuc

SEQ ID NO: 928274 - RNA, 19 nt, Homo sapiens
  misc_RNA (1)...(19): siRNA sense strand
aagcacagcaagaacauca

SEQ ID NO: 928275 - RNA, 19 nt, Homo sapiens
  misc_RNA (1)...(19): siRNA sense strand
ucgccaagaccucgagaaa

SEQ ID NO: 928276 - RNA, 19 nt, Homo sapiens
  misc_RNA (1)...(19): siRNA sense strand
uauuggcucucuucauuuu

SEQ ID NO: 928277 - RNA, 19 nt, Homo sapiens
  misc_RNA (1)...(19): siRNA sense strand
gucugugguucugcaauuu

SEQ ID NO: 928278 - RNA, 19 nt, Homo sapiens
  misc_RNA (1)...(19): siRNA sense strand
ggauccguauggccaacga

SEQ ID NO: 928279 - RNA, 19 nt, Homo sapiens
  misc_RNA (1)...(19): siRNA sense strand
acgagaagcacagcaagaa

SEQ ID NO: 928280 - RNA, 19 nt, Homo sapiens
  misc_RNA (1)...(19): siRNA sense strand
gucuguaggacccugguua

SEQ ID NO: 928281 - RNA, 19 nt, Homo sapiens
  misc_RNA (1)...(19): siRNA sense strand
ucaagagacugaaagauua

SEQ ID NO: 928282 - RNA, 19 nt, Homo sapiens
  misc_RNA (1)...(19): siRNA sense strand
gaaaguugcucaagccaaa

SEQ ID NO: 928283 - RNA, 19 nt, Homo sapiens
  misc_RNA (1)...(19): siRNA sense strand
gcacagaaacagagaaaua

SEQ ID NO: 928284 - RNA, 19 nt, Homo sapiens
  misc_RNA (1)...(19): siRNA sense strand
gauaaaaccugaagaagua

SEQ ID NO: 928285 - RNA, 19 nt, Homo sapiens
  misc_RNA (1)...(19): siRNA sense strand
gcagauggaugaaguacaa

SEQ ID NO: 928286 - RNA, 19 nt, Homo sapiens
  misc_RNA (1)...(19): siRNA sense strand
gaaagcagauggaugaagu

SEQ ID NO: 928287 - RNA, 19 nt, Homo sapiens
  misc_RNA (1)...(19): siRNA sense strand
ugaaaggugucacaacaua

SEQ ID NO: 928288 - RNA, 19 nt, Homo sapiens
  misc_RNA (1)...(19): siRNA sense strand
ggagacaacuuacuaccaa

SEQ ID NO: 928289 - RNA, 19 nt, Homo sapiens
  misc_RNA (1)...(19): siRNA sense strand
gagcugagguaucuauuug

SEQ ID NO: 928290 - RNA, 19 nt, Homo sapiens
  misc_RNA (1)...(19): siRNA sense strand
ccuagaagcugcaaugauu

SEQ ID NO: 928291 - RNA, 19 nt, Homo sapiens
  misc_RNA (1)...(19): siRNA sense strand
ggcaauacuuguugguuua

SEQ ID NO: 928292 - RNA, 19 nt, Homo sapiens
  misc_RNA (1)...(19): siRNA sense strand
gaugaaaggugucacaaca

SEQ ID NO: 928293 - RNA, 19 nt, Homo sapiens
  misc_RNA (1)...(19): siRNA sense strand
gcaauuaaguuggaauaug

SEQ ID NO: 928294 - RNA, 19 nt, Homo sapiens
  misc_RNA (1)...(19): siRNA sense strand
acaaguuccuuaucgauua

SEQ ID NO: 928295 - RNA, 19 nt, Homo sapiens
  misc_RNA (1)...(19): siRNA sense strand
gcauugguuuacugaauua

SEQ ID NO: 928296 - RNA, 19 nt, Homo sapiens
  misc_RNA (1)...(19): siRNA sense strand
ccagaaagcuuugcaggaa

SEQ ID NO: 928297 - RNA, 19 nt, Homo sapiens
  misc_RNA (1)...(19): siRNA sense strand
gaagagaucaagagacuga

SEQ ID NO: 928298 - RNA, 19 nt, Homo sapiens
  misc_RNA (1)...(19): siRNA sense strand
gcaauugccuugaguuugg

SEQ ID NO: 928299 - RNA, 19 nt, Homo sapiens
  misc_RNA (1)...(19): siRNA sense strand
ggacagaaauagaaaauga

SEQ ID NO: 928300 - RNA, 19 nt, Homo sapiens
  misc_RNA (1)...(19): siRNA sense strand
ugaauuaccaccuguguua

SEQ ID NO: 928301 - RNA, 19 nt, Homo sapiens
  misc_RNA (1)...(19): siRNA sense strand
uaaggaugcuuucaaauca

SEQ ID NO: 928302 - RNA, 19 nt, Homo sapiens
  misc_RNA (1)...(19): siRNA sense strand
gaauaaagcauguuugaag

SEQ ID NO: 928303 - RNA, 19 nt, Homo sapiens
  misc_RNA (1)...(19): siRNA sense strand
gaagugauuucucaaagca

SEQ ID NO: 928304 - RNA, 19 nt, Homo sapiens
  misc_RNA (1)...(19): siRNA sense strand
gaagacaaccaacgauuug

SEQ ID NO: 928305 - RNA, 19 nt, Homo sapiens
  misc_RNA (1)...(19): siRNA sense strand
gagaauaaagcauguuuga

SEQ ID NO: 928306 - RNA, 19 nt, Homo sapiens
  misc_RNA (1)...(19): siRNA sense strand
gaaccacaccuccaagaaa

SEQ ID NO: 928307 - RNA, 19 nt, Homo sapiens
  misc_RNA (1)...(19): siRNA sense strand
gaaccaggcaccaaagaaa

SEQ ID NO: 928308 - RNA, 19 nt, Homo sapiens
  misc_RNA (1)...(19): siRNA sense strand
ggaagacaaccaacgauuu

SEQ ID NO: 928309 - RNA, 19 nt, Homo sapiens
  misc_RNA (1)...(19): siRNA sense strand
gagcauugguuuacugaau

SEQ ID NO: 928310 - RNA, 19 nt, Homo sapiens
  misc_RNA (1)...(19): siRNA sense strand
gaggacaccuacagaaguu

SEQ ID NO: 928311 - RNA, 19 nt, Homo sapiens
  misc_RNA (1)...(19): siRNA sense strand
uggaauaacugaugaggaa

SEQ ID NO: 928312 - RNA, 19 nt, Homo sapiens
  misc_RNA (1)...(19): siRNA sense strand
gaauuugccucaaguaaac

SEQ ID NO: 928313 - RNA, 19 nt, Homo sapiens
  misc_RNA (1)...(19): siRNA sense strand
aacaaaggcuagaaagaua

SEQ ID NO: 928314 - RNA, 19 nt, Homo sapiens
  misc_RNA (1)...(19): siRNA sense strand
acagauacaugcacagaaa

SEQ ID NO: 928315 - RNA, 19 nt, Homo sapiens
  misc_RNA (1)...(19): siRNA sense strand
cagaggacaugaugaagaa

SEQ ID NO: 928316 - RNA, 19 nt, Homo sapiens
  misc_RNA (1)...(19): siRNA sense strand
gagcagccaucaagaagug

SEQ ID NO: 928317 - RNA, 19 nt, Homo sapiens
  misc_RNA (1)...(19): siRNA sense strand
cagaauccaucgaacaauu

SEQ ID NO: 928318 - RNA, 19 nt, Homo sapiens
  misc_RNA (1)...(19): siRNA sense strand
ggaauuugccucaaguaaa

SEQ ID NO: 928319 - RNA, 19 nt, Homo sapiens
  misc_RNA (1)...(19): siRNA sense strand
aaggagaaauugagucuuu

SEQ ID NO: 928320 - RNA, 19 nt, Homo sapiens
  misc_RNA (1)...(19): siRNA sense strand
gaauaugcaagguugguua

SEQ ID NO: 928321 - RNA, 19 nt, Homo sapiens
  misc_RNA (1)...(19): siRNA sense strand
uauacuagcuguagaagau

SEQ ID NO: 928322 - RNA, 19 nt, Homo sapiens
  misc_RNA (1)...(19): siRNA sense strand
gaagaggacaccuacagaa

SEQ ID NO: 928323 - RNA, 19 nt, Homo sapiens
  misc_RNA (1)...(19): siRNA sense strand
aagaaaagcugacagauuu

SEQ ID NO: 928324 - RNA, 19 nt, Homo sapiens
  misc_RNA (1)...(19): siRNA sense strand
gaaagcauauccagaaucc

SEQ ID NO: 928325 - RNA, 19 nt, Homo sapiens
  misc_RNA (1)...(19): siRNA sense strand
ucacagacauuaccaagca

SEQ ID NO: 928326 - RNA, 19 nt, Homo sapiens
  misc_RNA (1)...(19): siRNA sense strand
gaagagaauguuugcuaaa

SEQ ID NO: 928327 - RNA, 19 nt, Homo sapiens
  misc_RNA (1)...(19): siRNA sense strand
ggauaguaauggaaacuug

SEQ ID NO: 928328 - RNA, 19 nt, Homo sapiens
  misc_RNA (1)...(19): siRNA sense strand
caaagcacuugaaagaaga

SEQ ID NO: 928329 - RNA, 19 nt, Homo sapiens
  misc_RNA (1)...(19): siRNA sense strand
gaauuaauguacucugaca

SEQ ID NO: 928330 - RNA, 19 nt, Homo sapiens
  misc_RNA (1)...(19): siRNA sense strand
ccggauaccuccagauuug

SEQ ID NO: 928331 - RNA, 19 nt, Homo sapiens
  misc_RNA (1)...(19): siRNA sense strand
gggaagagaucaagagacu

SEQ ID NO: 928332 - RNA, 19 nt, Homo sapiens
  misc_RNA (1)...(19): siRNA sense strand
ggagauagaaauuugaguu

SEQ ID NO: 928333 - RNA, 19 nt, Homo sapiens
  misc_RNA (1)...(19): siRNA sense strand
gcacaucaccuucaucagu

SEQ ID NO: 928334 - RNA, 19 nt, Homo sapiens
  misc_RNA (1)...(19): siRNA sense strand
caacaaaggcuagaaagau

SEQ ID NO: 928335 - RNA, 19 nt, Homo sapiens
  misc_RNA (1)...(19): siRNA sense strand
gaagauaugagaaaucgau

SEQ ID NO: 928336 - RNA, 19 nt, Homo sapiens
  misc_RNA (1)...(19): siRNA sense strand
agaagagaauguuugcuaa

SEQ ID NO: 928337 - RNA, 19 nt, Homo sapiens
  misc_RNA (1)...(19): siRNA sense strand
gauuaucguuuacaucaug

SEQ ID NO: 928338 - RNA, 19 nt, Homo sapiens
  misc_RNA (1)...(19): siRNA sense strand
gaagcaggguucuuuaagg

SEQ ID NO: 928339 - RNA, 19 nt, Homo sapiens
  misc_RNA (1)...(19): siRNA sense strand
uuacaagccuccaucaaau

SEQ ID NO: 928340 - RNA, 19 nt, Homo sapiens
  misc_RNA (1)...(19): siRNA sense strand
uauaggaaauucagggaaa

SEQ ID NO: 928341 - RNA, 19 nt, Homo sapiens
  misc_RNA (1)...(19): siRNA sense strand
gcaucaggauuauaggaaa

SEQ ID NO: 928342 - RNA, 19 nt, Homo sapiens
  misc_RNA (1)...(19): siRNA sense strand
uaaagaauguuggcaauac

SEQ ID NO: 928343 - RNA, 19 nt, Homo sapiens
  misc_RNA (1)...(19): siRNA sense strand
gaaaggugucacaacauaa

SEQ ID NO: 928344 - RNA, 19 nt, Homo sapiens
  misc_RNA (1)...(19): siRNA sense strand
gcuaaagaauguuggcaau

SEQ ID NO: 928345 - RNA, 19 nt, Homo sapiens
  misc_RNA (1)...(19): siRNA sense strand
uggagaggaucgagaagua

SEQ ID NO: 928346 - RNA, 19 nt, Homo sapiens
  misc_RNA (1)...(19): siRNA sense strand
ccgcagaacucuucgaauc

SEQ ID NO: 928347 - RNA, 19 nt, Homo sapiens
  misc_RNA (1)...(19): siRNA sense strand
cuagaacaauuuggagaua

SEQ ID NO: 928348 - RNA, 19 nt, Homo sapiens
  misc_RNA (1)...(19): siRNA sense strand
gaacaugcaagguauuauc

SEQ ID NO: 928349 - RNA, 19 nt, Homo sapiens
  misc_RNA (1)...(19): siRNA sense strand
uggaugaaguacaaugaua

SEQ ID NO: 928350 - RNA, 19 nt, Homo sapiens
  misc_RNA (1)...(19): siRNA sense strand
gggaguacuugaagguaaa

SEQ ID NO: 928351 - RNA, 19 nt, Homo sapiens
  misc_RNA (1)...(19): siRNA sense strand
ggagacggaugaagagaag

SEQ ID NO: 928352 - RNA, 19 nt, Homo sapiens
  misc_RNA (1)...(19): siRNA sense strand
caagagcaguugaaauucu

SEQ ID NO: 928353 - RNA, 19 nt, Homo sapiens
  misc_RNA (1)...(19): siRNA sense strand
ucucgaaacccuuaugaua

SEQ ID NO: 928354 - RNA, 19 nt, Homo sapiens
  misc_RNA (1)...(19): siRNA sense strand
ucgaaacccuuaugauaga

SEQ ID NO: 928355 - RNA, 19 nt, Homo sapiens
  misc_RNA (1)...(19): siRNA sense strand
ccaccuguguuaacauuug

SEQ ID NO: 928356 - RNA, 19 nt, Homo sapiens
  misc_RNA (1)...(19): siRNA sense strand
caauuaaguuggaauaugc

SEQ ID NO: 928357 - RNA, 19 nt, Homo sapiens
  misc_RNA (1)...(19): siRNA sense strand
gagcaauugccuugaguuu

SEQ ID NO: 928358 - RNA, 19 nt, Homo sapiens
  misc_RNA (1)...(19): siRNA sense strand
agaaugggaugcacaacuu

SEQ ID NO: 928359 - RNA, 19 nt, Homo sapiens
  misc_RNA (1)...(19): siRNA sense strand
cagcauagcagagaauaaa

SEQ ID NO: 928360 - RNA, 19 nt, Homo sapiens
  misc_RNA (1)...(19): siRNA sense strand
gcacuuccuggcaaugaua

SEQ ID NO: 928361 - RNA, 19 nt, Homo sapiens
  misc_RNA (1)...(19): siRNA sense strand
ggaauuagcaguggcuuuc

SEQ ID NO: 928362 - RNA, 19 nt, Homo sapiens
  misc_RNA (1)...(19): siRNA sense strand
gcacaguuccuaauacaag

SEQ ID NO: 928363 - RNA, 19 nt, Homo sapiens
  misc_RNA (1)...(19): siRNA sense strand
gcacuacugggcauauauu

SEQ ID NO: 928364 - RNA, 19 nt, Homo sapiens
  misc_RNA (1)...(19): siRNA sense strand
caggaaagcauauccagaa

SEQ ID NO: 928365 - RNA, 19 nt, Homo sapiens
  misc_RNA (1)...(19): siRNA sense strand
gaaaaugacaccagagauu

SEQ ID NO: 928366 - RNA, 19 nt, Homo sapiens
  misc_RNA (1)...(19): siRNA sense strand
uggcaauacuuguugguuu

SEQ ID NO: 928367 - RNA, 19 nt, Homo sapiens
  misc_RNA (1)...(19): siRNA sense strand
uagaagagaauguuugcua

SEQ ID NO: 928368 - RNA, 19 nt, Homo sapiens
  misc_RNA (1)...(19): siRNA sense strand
ggaaacaacuauguaucuc

SEQ ID NO: 928369 - RNA, 19 nt, Homo sapiens
  misc_RNA (1)...(19): siRNA sense strand
ggaguggcaucaggauuau

SEQ ID NO: 928370 - RNA, 19 nt, Homo sapiens
  misc_RNA (1)...(19): siRNA sense strand
ugaaucaacugagagaaau

SEQ ID NO: 928371 - RNA, 19 nt, Homo sapiens
  misc_RNA (1)...(19): siRNA sense strand
uaaggcacaguuccuaaua

SEQ ID NO: 928372 - RNA, 19 nt, Homo sapiens
  misc_RNA (1)...(19): siRNA sense strand
gauaaggcacaguuccuaa

SEQ ID NO: 928373 - RNA, 19 nt, Homo sapiens
  misc_RNA (1)...(19): siRNA sense strand
caagagcauugguuuacug

SEQ ID NO: 928374 - RNA, 19 nt, Homo sapiens
  misc_RNA (1)...(19): siRNA sense strand
ugagugaguuuacacacaa

SEQ ID NO: 928375 - RNA, 19 nt, Homo sapiens
  misc_RNA (1)...(19): siRNA sense strand
ccaagcagauacaaaugug

SEQ ID NO: 928376 - RNA, 19 nt, Homo sapiens
  misc_RNA (1)...(19): siRNA sense strand
aaaggaacaucggaauuug

SEQ ID NO: 928377 - RNA, 19 nt, Homo sapiens
  misc_RNA (1)...(19): siRNA sense strand
gcuggaaaguuguuuacau

SEQ ID NO: 928378 - RNA, 19 nt, Homo sapiens
  misc_RNA (1)...(19): siRNA sense strand
acucuugucuaaaggcuua

SEQ ID NO: 928379 - RNA, 19 nt, Homo sapiens
  misc_RNA (1)...(19): siRNA sense strand
gaaacaacuauguaucuca

SEQ ID NO: 928380 - RNA, 19 nt, Homo sapiens
  misc_RNA (1)...(19): siRNA sense strand
caccagagauuugcaggaa

SEQ ID NO: 928381 - RNA, 19 nt, Homo sapiens
  misc_RNA (1)...(19): siRNA sense strand
gcagagggaucauagagaa

SEQ ID NO: 928382 - RNA, 19 nt, Homo sapiens
  misc_RNA (1)...(19): siRNA sense strand
ggagaaagccgaggucuug

SEQ ID NO: 928383 - RNA, 19 nt, Homo sapiens
  misc_RNA (1)...(19): siRNA sense strand
gacgguggaucacuugaaa

SEQ ID NO: 928384 - RNA, 19 nt, Homo sapiens
  misc_RNA (1)...(19): siRNA sense strand
acaguagccuuucugaauu

SEQ ID NO: 928385 - RNA, 19 nt, Homo sapiens
  misc_RNA (1)...(19): siRNA sense strand
gccgaggucuugcagauga

SEQ ID NO: 928386 - RNA, 19 nt, Homo sapiens
  misc_RNA (1)...(19): siRNA sense strand
gggacaggauucuuugaug

SEQ ID NO: 928387 - RNA, 19 nt, Homo sapiens
  misc_RNA (1)...(19): siRNA sense strand
cgagaccgcaucaacagua

SEQ ID NO: 928388 - RNA, 19 nt, Homo sapiens
  misc_RNA (1)...(19): siRNA sense strand
ucucugaaaucacugaaau

SEQ ID NO: 928389 - RNA, 19 nt, Homo sapiens
  misc_RNA (1)...(19): siRNA sense strand
cuacagggucggcugcuua

SEQ ID NO: 928390 - RNA, 19 nt, Homo sapiens
  misc_RNA (1)...(19): siRNA sense strand
ccacugccuuugagaaaca

SEQ ID NO: 928391 - RNA, 19 nt, Homo sapiens
  misc_RNA (1)...(19): siRNA sense strand
gaaacgcagagggaucaua

SEQ ID NO: 928392 - RNA, 19 nt, Homo sapiens
  misc_RNA (1)...(19): siRNA sense strand
caguagccuuucugaauug

SEQ ID NO: 928393 - RNA, 19 nt, Homo sapiens
  misc_RNA (1)...(19): siRNA sense strand
gcaaccagcucgccauccu

SEQ ID NO: 928394 - RNA, 19 nt, Homo sapiens
  misc_RNA (1)...(19): siRNA sense strand
caacaguagccuuucugaa

SEQ ID NO: 928395 - RNA, 19 nt, Homo sapiens
  misc_RNA (1)...(19): siRNA sense strand
gaugcaagccaggaagaaa

SEQ ID NO: 928396 - RNA, 19 nt, Homo sapiens
  misc_RNA (1)...(19): siRNA sense strand
aacaguagccuuucugaau

SEQ ID NO: 928397 - RNA, 19 nt, Homo sapiens
  misc_RNA (1)...(19): siRNA sense strand
gagaccgcaucaacaguag

SEQ ID NO: 928398 - RNA, 19 nt, Homo sapiens
  misc_RNA (1)...(19): siRNA sense strand
caucaacaguagccuuucu

SEQ ID NO: 928399 - RNA, 19 nt, Homo sapiens
  misc_RNA (1)...(19): siRNA sense strand
ucucccaccucaacagcua

SEQ ID NO: 928400 - RNA, 19 nt, Homo sapiens
  misc_RNA (1)...(19): siRNA sense strand
aaacgcagagggaucauag

SEQ ID NO: 928401 - RNA, 19 nt, Homo sapiens
  misc_RNA (1)...(19): siRNA sense strand
aagccgaggucuugcagau

SEQ ID NO: 928402 - RNA, 19 nt, Homo sapiens
  misc_RNA (1)...(19): siRNA sense strand
cagcuacgcagccgagaug

SEQ ID NO: 928403 - RNA, 19 nt, Homo sapiens
  misc_RNA (1)...(19): siRNA sense strand
gaugacgguggaucacuug

SEQ ID NO: 928404 - RNA, 19 nt, Homo sapiens
  misc_RNA (1)...(19): siRNA sense strand
agaaacagggcucuuccaa

SEQ ID NO: 928405 - RNA, 19 nt, Homo sapiens
  misc_RNA (1)...(19): siRNA sense strand
agaugacgguggaucacuu

SEQ ID NO: 928406 - RNA, 19 nt, Homo sapiens
  misc_RNA (1)...(19): siRNA sense strand
ggugggacaggauucuuug

SEQ ID NO: 928407 - RNA, 19 nt, Homo sapiens
  misc_RNA (1)...(19): siRNA sense strand
ucaacaguagccuuucuga

SEQ ID NO: 928408 - RNA, 19 nt, Homo sapiens
  misc_RNA (1)...(19): siRNA sense strand
ucacugaaaucggggcuuu

SEQ ID NO: 928409 - RNA, 19 nt, Homo sapiens
  misc_RNA (1)...(19): siRNA sense strand
ggugucuccucuccugcuu

SEQ ID NO: 928410 - RNA, 19 nt, Homo sapiens
  misc_RNA (1)...(19): siRNA sense strand
acuccugggucucugaaau

SEQ ID NO: 928411 - RNA, 19 nt, Homo sapiens
  misc_RNA (1)...(19): siRNA sense strand
ucacaaugcugaaaucuua

SEQ ID NO: 928412 - RNA, 19 nt, Homo sapiens
  misc_RNA (1)...(19): siRNA sense strand
gaaagagacugaaacagaa

SEQ ID NO: 928413 - RNA, 19 nt, Homo sapiens
  misc_RNA (1)...(19): siRNA sense strand
gaacaacuguguaucuuug

SEQ ID NO: 928414 - RNA, 19 nt, Homo sapiens
  misc_RNA (1)...(19): siRNA sense strand
guaaagagccuaacugcua

SEQ ID NO: 928415 - RNA, 19 nt, Homo sapiens
  misc_RNA (1)...(19): siRNA sense strand
gcaaaggaauaguaaguga

SEQ ID NO: 928416 - RNA, 19 nt, Homo sapiens
  misc_RNA (1)...(19): siRNA sense strand
gaacuuagggaaacaaauu

SEQ ID NO: 928417 - RNA, 19 nt, Homo sapiens
  misc_RNA (1)...(19): siRNA sense strand
cagacaggcuuccacauua

SEQ ID NO: 928418 - RNA, 19 nt, Homo sapiens
  misc_RNA (1)...(19): siRNA sense strand
cagcaaacaugaaugauga

SEQ ID NO: 928419 - RNA, 19 nt, Homo sapiens
  misc_RNA (1)...(19): siRNA sense strand
caaggaacauuuagagcua

SEQ ID NO: 928420 - RNA, 19 nt, Homo sapiens
  misc_RNA (1)...(19): siRNA sense strand
caucuaaucuucaacauca

SEQ ID NO: 928421 - RNA, 19 nt, Homo sapiens
  misc_RNA (1)...(19): siRNA sense strand
uaaagagccuaacugcuaa

SEQ ID NO: 928422 - RNA, 19 nt, Homo sapiens
  misc_RNA (1)...(19): siRNA sense strand
ccaccaggauguacugaua

SEQ ID NO: 928423 - RNA, 19 nt, Homo sapiens
  misc_RNA (1)...(19): siRNA sense strand
ggacggagaauuauuguug

SEQ ID NO: 928424 - RNA, 19 nt, Homo sapiens
  misc_RNA (1)...(19): siRNA sense strand
caaauuccaugguugaaga

SEQ ID NO: 928425 - RNA, 19 nt, Homo sapiens
  misc_RNA (1)...(19): siRNA sense strand
gaaggacggagaauuauug

SEQ ID NO: 928426 - RNA, 19 nt, Homo sapiens
  misc_RNA (1)...(19): siRNA sense strand
ggagguugguguucauauu

SEQ ID NO: 928427 - RNA, 19 nt, Homo sapiens
  misc_RNA (1)...(19): siRNA sense strand
gcuaaugacaggaaugaua

SEQ ID NO: 928428 - RNA, 19 nt, Homo sapiens
  misc_RNA (1)...(19): siRNA sense strand
gcccagaaauuccagauau

SEQ ID NO: 928429 - RNA, 19 nt, Homo sapiens
  misc_RNA (1)...(19): siRNA sense strand
ugaagaagauguggagaaa

SEQ ID NO: 928430 - RNA, 19 nt, Homo sapiens
  misc_RNA (1)...(19): siRNA sense strand
ggagaauuauuguugcuau

SEQ ID NO: 928431 - RNA, 19 nt, Homo sapiens
  misc_RNA (1)...(19): siRNA sense strand
gcagccaggucaaggaauu

SEQ ID NO: 928432 - RNA, 19 nt, Homo sapiens
  misc_RNA (1)...(19): siRNA sense strand
aagaagauguggagaaaga

SEQ ID NO: 928433 - RNA, 19 nt, Homo sapiens
  misc_RNA (1)...(19): siRNA sense strand
ccacagauaccaggaauaa

SEQ ID NO: 928434 - RNA, 19 nt, Homo sapiens
  misc_RNA (1)...(19): siRNA sense strand
aaaccaaacccacagcuua

SEQ ID NO: 928435 - RNA, 19 nt, Homo sapiens
  misc_RNA (1)...(19): siRNA sense strand
acacaagcuugcagauaua

SEQ ID NO: 928436 - RNA, 19 nt, Homo sapiens
  misc_RNA (1)...(19): siRNA sense strand
ugacaugguuccagaguug

SEQ ID NO: 928437 - RNA, 19 nt, Homo sapiens
  misc_RNA (1)...(19): siRNA sense strand
uuagaaggacggagaauua

SEQ ID NO: 928438 - RNA, 19 nt, Homo sapiens
  misc_RNA (1)...(19): siRNA sense strand
gauaagagaaucccucgaa

SEQ ID NO: 928439 - RNA, 19 nt, Homo sapiens
  misc_RNA (1)...(19): siRNA sense strand
ugaagaagggaaugaaaua

SEQ ID NO: 928440 - RNA, 19 nt, Homo sapiens
  misc_RNA (1)...(19): siRNA sense strand
acccacagcuuauuuauga

SEQ ID NO: 928441 - RNA, 19 nt, Homo sapiens
  misc_RNA (1)...(19): siRNA sense strand
guacuucuguucuggaaug

SEQ ID NO: 928442 - RNA, 19 nt, Homo sapiens
  misc_RNA (1)...(19): siRNA sense strand
gaugugagccauuuuauua

SEQ ID NO: 928443 - RNA, 19 nt, Homo sapiens
  misc_RNA (1)...(19): siRNA sense strand
gaaagaagaagagacagaa

SEQ ID NO: 928444 - RNA, 19 nt, Homo sapiens
  misc_RNA (1)...(19): siRNA sense strand
uacagggacuuaaacauuu

SEQ ID NO: 928445 - RNA, 19 nt, Homo sapiens
  misc_RNA (1)...(19): siRNA sense strand
guucuggaauggauaauga

SEQ ID NO: 928446 - RNA, 19 nt, Homo sapiens
  misc_RNA (1)...(19): siRNA sense strand
aaacaaagagaaagccaua

SEQ ID NO: 928447 - RNA, 19 nt, Homo sapiens
  misc_RNA (1)...(19): siRNA sense strand
gagauacccucacuuaaaa

SEQ ID NO: 928448 - RNA, 19 nt, Homo sapiens
  misc_RNA (1)...(19): siRNA sense strand
gagaagaccugaggcaucu

SEQ ID NO: 928449 - RNA, 19 nt, Homo sapiens
  misc_RNA (1)...(19): siRNA sense strand
gagcaucuucccuuaagua

SEQ ID NO: 928450 - RNA, 19 nt, Homo sapiens
  misc_RNA (1)...(19): siRNA sense strand
gaacaugcucugcuucgaa

SEQ ID NO: 928451 - RNA, 19 nt, Homo sapiens
  misc_RNA (1)...(19): siRNA sense strand
uagaucgucuugcuuguuu

SEQ ID NO: 928452 - RNA, 19 nt, Homo sapiens
  misc_RNA (1)...(19): siRNA sense strand
gaugcaagcuguguacuuc

SEQ ID NO: 928453 - RNA, 19 nt, Homo sapiens
  misc_RNA (1)...(19): siRNA sense strand
ggaaaugaaucacaaugcu

SEQ ID NO: 928454 - RNA, 19 nt, Homo sapiens
  misc_RNA (1)...(19): siRNA sense strand
gaucaagaaucagccagaa

SEQ ID NO: 928455 - RNA, 19 nt, Homo sapiens
  misc_RNA (1)...(19): siRNA sense strand
ggaauuggagaccauauug

SEQ ID NO: 928456 - RNA, 19 nt, Homo sapiens
  misc_RNA (1)...(19): siRNA sense strand
agaagggaaugaaauagaa

SEQ ID NO: 928457 - RNA, 19 nt, Homo sapiens
  misc_RNA (1)...(19): siRNA sense strand
gcugcaaguuaucuucaua

SEQ ID NO: 928458 - RNA, 19 nt, Homo sapiens
  misc_RNA (1)...(19): siRNA sense strand
cuucaaacauggaccuuaa

SEQ ID NO: 928459 - RNA, 19 nt, Homo sapiens
  misc_RNA (1)...(19): siRNA sense strand
agaaagagacugaaacaga

SEQ ID NO: 928460 - RNA, 19 nt, Homo sapiens
  misc_RNA (1)...(19): siRNA sense strand
uagagaaaccuauguagaa

SEQ ID NO: 928461 - RNA, 19 nt, Homo sapiens
  misc_RNA (1)...(19): siRNA sense strand
gaagaggaacaacugugua

SEQ ID NO: 928462 - RNA, 19 nt, Homo sapiens
  misc_RNA (1)...(19): siRNA sense strand
ggagaaagaagaagagaca

SEQ ID NO: 928463 - RNA, 19 nt, Homo sapiens
  misc_RNA (1)...(19): siRNA sense strand
uccgagaugugacuaauaa

SEQ ID NO: 928464 - RNA, 19 nt, Homo sapiens
  misc_RNA (1)...(19): siRNA sense strand
agagaaagccauagaagaa

SEQ ID NO: 928465 - RNA, 19 nt, Homo sapiens
  misc_RNA (1)...(19): siRNA sense strand
gaagaaggaauaccagcuu

SEQ ID NO: 928466 - RNA, 19 nt, Homo sapiens
  misc_RNA (1)...(19): siRNA sense strand
caaacccacagcuuauuua

SEQ ID NO: 928467 - RNA, 19 nt, Homo sapiens
  misc_RNA (1)...(19): siRNA sense strand
caaaggcaucucugacaua

SEQ ID NO: 928468 - RNA, 19 nt, Homo sapiens
  misc_RNA (1)...(19): siRNA sense strand
gaaucacaaugcugaaauc

SEQ ID NO: 928469 - RNA, 19 nt, Homo sapiens
  misc_RNA (1)...(19): siRNA sense strand
gaaaauuacuuggaagcua

SEQ ID NO: 928470 - RNA, 19 nt, Homo sapiens
  misc_RNA (1)...(19): siRNA sense strand
aaauuuaggugauguugga

SEQ ID NO: 928471 - RNA, 19 nt, Homo sapiens
  misc_RNA (1)...(19): siRNA sense strand
gaacaagaacagggagaaa

SEQ ID NO: 928472 - RNA, 19 nt, Homo sapiens
  misc_RNA (1)...(19): siRNA sense strand
ggaacaacuguguaucuuu

SEQ ID NO: 928473 - RNA, 19 nt, Homo sapiens
  misc_RNA (1)...(19): siRNA sense strand
ggagagaaagagacugaaa

SEQ ID NO: 928474 - RNA, 19 nt, Homo sapiens
  misc_RNA (1)...(19): siRNA sense strand
gacaaccagcugcaaguua

SEQ ID NO: 928475 - RNA, 19 nt, Homo sapiens
  misc_RNA (1)...(19): siRNA sense strand
gagacagaacgaaugcuua

SEQ ID NO: 928476 - RNA, 19 nt, Homo sapiens
  misc_RNA (1)...(19): siRNA sense strand
caucaggaauguaauugug

SEQ ID NO: 928477 - RNA, 19 nt, Homo sapiens
  misc_RNA (1)...(19): siRNA sense strand
cuauagaucugcagaccaa

SEQ ID NO: 928478 - RNA, 19 nt, Homo sapiens
  misc_RNA (1)...(19): siRNA sense strand
gcaaacaugaaugaugaua

SEQ ID NO: 928479 - RNA, 19 nt, Homo sapiens
  misc_RNA (1)...(19): siRNA sense strand
acaaccagcugcaaguuau

SEQ ID NO: 928480 - RNA, 19 nt, Homo sapiens
  misc_RNA (1)...(19): siRNA sense strand
aacacaagcuugcagauau

SEQ ID NO: 928481 - RNA, 19 nt, Homo sapiens
  misc_RNA (1)...(19): siRNA sense strand
gaaauuccagauauccaaa

SEQ ID NO: 928482 - RNA, 19 nt, Homo sapiens
  misc_RNA (1)...(19): siRNA sense strand
gaacucauagaucgucuug

SEQ ID NO: 928483 - RNA, 19 nt, Homo sapiens
  misc_RNA (1)...(19): siRNA sense strand
aaaccuauguagaacaaga

SEQ ID NO: 928484 - RNA, 19 nt, Homo sapiens
  misc_RNA (1)...(19): siRNA sense strand
aauagaagauacaguguuc

SEQ ID NO: 928485 - RNA, 19 nt, Homo sapiens
  misc_RNA (1)...(19): siRNA sense strand
uggcuuagcgucuccaaua

SEQ ID NO: 928486 - RNA, 19 nt, Homo sapiens
  misc_RNA (1)...(19): siRNA sense strand
aaacaaauuccaugguuga

SEQ ID NO: 928487 - RNA, 19 nt, Homo sapiens
  misc_RNA (1)...(19): siRNA sense strand
cuaaugagcaccauagaga

SEQ ID NO: 928488 - RNA, 19 nt, Homo sapiens
  misc_RNA (1)...(19): siRNA sense strand
uaagagaaucccucgaauu

SEQ ID NO: 928489 - RNA, 19 nt, Homo sapiens
  misc_RNA (1)...(19): siRNA sense strand
uuacagggacuuaaacauu

SEQ ID NO: 928490 - RNA, 19 nt, Homo sapiens
  misc_RNA (1)...(19): siRNA sense strand
gaagggaaugaaauagaaa

SEQ ID NO: 928491 - RNA, 19 nt, Homo sapiens
  misc_RNA (1)...(19): siRNA sense strand
agaaaccuauguagaacaa

SEQ ID NO: 928492 - RNA, 19 nt, Homo sapiens
  misc_RNA (1)...(19): siRNA sense strand
agacgaugcucuacauugu

SEQ ID NO: 928493 - RNA, 19 nt, Homo sapiens
  misc_RNA (1)...(19): siRNA sense strand
gaauaccagcuuucacuug

SEQ ID NO: 928494 - RNA, 19 nt, Homo sapiens
  misc_RNA (1)...(19): siRNA sense strand
uaacaaaugacaggagaaa

SEQ ID NO: 928495 - RNA, 19 nt, Homo sapiens
  misc_RNA (1)...(19): siRNA sense strand
aaacauggaccuuaaugga

SEQ ID NO: 928496 - RNA, 19 nt, Homo sapiens
  misc_RNA (1)...(19): siRNA sense strand
aaacacaagcuugcagaua

SEQ ID NO: 928497 - RNA, 19 nt, Homo sapiens
  misc_RNA (1)...(19): siRNA sense strand
gaaacucacgauccuauag

SEQ ID NO: 928498 - RNA, 19 nt, Homo sapiens
  misc_RNA (1)...(19): siRNA sense strand
aaaggcaucucugacauau

SEQ ID NO: 928499 - RNA, 19 nt, Homo sapiens
  misc_RNA (1)...(19): siRNA sense strand
aggcaucuguguauuugua

SEQ ID NO: 928500 - RNA, 19 nt, Homo sapiens
  misc_RNA (1)...(19): siRNA sense strand
ccagacaggcuuccacauu

SEQ ID NO: 928501 - RNA, 19 nt, Homo sapiens
  misc_RNA (1)...(19): siRNA sense strand
gaaggaauaccagcuuuca

SEQ ID NO: 928502 - RNA, 19 nt, Homo sapiens
  misc_RNA (1)...(19): siRNA sense strand
caaagagaaagccauagaa

SEQ ID NO: 928503 - RNA, 19 nt, Homo sapiens
  misc_RNA (1)...(19): siRNA sense strand
gaauauguaaagagccuaa

SEQ ID NO: 928504 - RNA, 19 nt, Homo sapiens
  misc_RNA (1)...(19): siRNA sense strand
ccaccuccaucaaauuaug

SEQ ID NO: 928505 - RNA, 19 nt, Homo sapiens
  misc_RNA (1)...(19): siRNA sense strand
aaagaggauugacaugguu

SEQ ID NO: 928506 - RNA, 19 nt, Homo sapiens
  misc_RNA (1)...(19): siRNA sense strand
agguagaguuguaggaaua

SEQ ID NO: 928507 - RNA, 19 nt, Homo sapiens
  misc_RNA (1)...(19): siRNA sense strand
agacagaacgaaugcuuaa

SEQ ID NO: 928508 - RNA, 19 nt, Homo sapiens
  misc_RNA (1)...(19): siRNA sense strand
gcaccagauugauguucuu

SEQ ID NO: 928509 - RNA, 19 nt, Homo sapiens
  misc_RNA (1)...(19): siRNA sense strand
ccaaacccacagcuuauuu

SEQ ID NO: 928510 - RNA, 19 nt, Homo sapiens
  misc_RNA (1)...(19): siRNA sense strand
ugaggcaucuguguauuug

SEQ ID NO: 928511 - RNA, 19 nt, Homo sapiens
  misc_RNA (1)...(19): siRNA sense strand
caaauaaccuccagcauuc

SEQ ID NO: 928512 - RNA, 19 nt, Homo sapiens
  misc_RNA (1)...(19): siRNA sense strand
gaagaaaguugaggaagaa

SEQ ID NO: 928513 - RNA, 19 nt, Homo sapiens
  misc_RNA (1)...(19): siRNA sense strand
gaagaagucgcauuagaua

SEQ ID NO: 928514 - RNA, 19 nt, Homo sapiens
  misc_RNA (1)...(19): siRNA sense strand
ggaggagucugcaggauuu

SEQ ID NO: 928515 - RNA, 19 nt, Homo sapiens
  misc_RNA (1)...(19): siRNA sense strand
ggacacugcugcaaacuug

SEQ ID NO: 928516 - RNA, 19 nt, Homo sapiens
  misc_RNA (1)...(19): siRNA sense strand
ggaggaagaagucgcauua

SEQ ID NO: 928517 - RNA, 19 nt, Homo sapiens
  misc_RNA (1)...(19): siRNA sense strand
caaagaggaugaacagaug

SEQ ID NO: 928518 - RNA, 19 nt, Homo sapiens
  misc_RNA (1)...(19): siRNA sense strand
gguccuaccucgagcauaa

SEQ ID NO: 928519 - RNA, 19 nt, Homo sapiens
  misc_RNA (1)...(19): siRNA sense strand
guucgugaauggaauaaua

SEQ ID NO: 928520 - RNA, 19 nt, Homo sapiens
  misc_RNA (1)...(19): siRNA sense strand
cagcugaaaugaauguuaa

SEQ ID NO: 928521 - RNA, 19 nt, Homo sapiens
  misc_RNA (1)...(19): siRNA sense strand
gagcuagagccuaaauuua

SEQ ID NO: 928522 - RNA, 19 nt, Homo sapiens
  misc_RNA (1)...(19): siRNA sense strand
gagcauaagaccucaauga

SEQ ID NO: 928523 - RNA, 19 nt, Homo sapiens
  misc_RNA (1)...(19): siRNA sense strand
ggagcuagagccuaaauuu

SEQ ID NO: 928524 - RNA, 19 nt, Homo sapiens
  misc_RNA (1)...(19): siRNA sense strand
cuaccuaacuccaauuuau

SEQ ID NO: 928525 - RNA, 19 nt, Homo sapiens
  misc_RNA (1)...(19): siRNA sense strand
uagagagucugaauucaaa

SEQ ID NO: 928526 - RNA, 19 nt, Homo sapiens
  misc_RNA (1)...(19): siRNA sense strand
ccaaccagcugaaaugaau

SEQ ID NO: 928527 - RNA, 19 nt, Homo sapiens
  misc_RNA (1)...(19): siRNA sense strand
gcaggaucgugcuaucuaa

SEQ ID NO: 928528 - RNA, 19 nt, Homo sapiens
  misc_RNA (1)...(19): siRNA sense strand
ucaaauaaccuccagcauu

SEQ ID NO: 928529 - RNA, 19 nt, Homo sapiens
  misc_RNA (1)...(19): siRNA sense strand
gaaaauacacccaaagaaa

SEQ ID NO: 928530 - RNA, 19 nt, Homo sapiens
  misc_RNA (1)...(19): siRNA sense strand
gaagauagagagucugaau

SEQ ID NO: 928531 - RNA, 19 nt, Homo sapiens
  misc_RNA (1)...(19): siRNA sense strand
uggaggagguguugacuuu

SEQ ID NO: 928532 - RNA, 19 nt, Homo sapiens
  misc_RNA (1)...(19): siRNA sense strand
gaaaguucgugaauggaau

SEQ ID NO: 928533 - RNA, 19 nt, Homo sapiens
  misc_RNA (1)...(19): siRNA sense strand
cauaagaccucaaugaacu

SEQ ID NO: 928534 - RNA, 19 nt, Homo sapiens
  misc_RNA (1)...(19): siRNA sense strand
aaacguagacgacggagua

SEQ ID NO: 928535 - RNA, 19 nt, Homo sapiens
  misc_RNA (1)...(19): siRNA sense strand
ggaagaagucgcauuagau

SEQ ID NO: 928536 - RNA, 19 nt, Homo sapiens
  misc_RNA (1)...(19): siRNA sense strand
caaggaaacagaacaaaug

SEQ ID NO: 928537 - RNA, 19 nt, Homo sapiens
  misc_RNA (1)...(19): siRNA sense strand
ccaagaagaagcuuauuga

SEQ ID NO: 928538 - RNA, 19 nt, Homo sapiens
  misc_RNA (1)...(19): siRNA sense strand
agaagaaaguugaggaaga

SEQ ID NO: 928539 - RNA, 19 nt, Homo sapiens
  misc_RNA (1)...(19): siRNA sense strand
gcuaucagcuucaauuugc

SEQ ID NO: 928540 - RNA, 19 nt, Homo sapiens
  misc_RNA (1)...(19): siRNA sense strand
gaauaauggugcagguugu

SEQ ID NO: 928541 - RNA, 19 nt, Homo sapiens
  misc_RNA (1)...(19): siRNA sense strand
caaauucgccugaugaaag

SEQ ID NO: 928542 - RNA, 19 nt, Homo sapiens
  misc_RNA (1)...(19): siRNA sense strand
ccaaauauacacccucauu

SEQ ID NO: 928543 - RNA, 19 nt, Homo sapiens
  misc_RNA (1)...(19): siRNA sense strand
ggugcagguuguagaauuu

SEQ ID NO: 928544 - RNA, 19 nt, Homo sapiens
  misc_RNA (1)...(19): siRNA sense strand
gcagcaacuugaacaacaa

SEQ ID NO: 928545 - RNA, 19 nt, Homo sapiens
  misc_RNA (1)...(19): siRNA sense strand
acaaauggcugaaaagaaa

SEQ ID NO: 928546 - RNA, 19 nt, Homo sapiens
  misc_RNA (1)...(19): siRNA sense strand
caugaaaguucgugaaugg

SEQ ID NO: 928547 - RNA, 19 nt, Homo sapiens
  misc_RNA (1)...(19): siRNA sense strand
gcauauuuccuacaucuga

SEQ ID NO: 928548 - RNA, 19 nt, Homo sapiens
  misc_RNA (1)...(19): siRNA sense strand
gagaaaaucaagccaaaua

SEQ ID NO: 928549 - RNA, 19 nt, Homo sapiens
  misc_RNA (1)...(19): siRNA sense strand
gcaacuggcaucauaaaca

SEQ ID NO: 928550 - RNA, 19 nt, Homo sapiens
  misc_RNA (1)...(19): siRNA sense strand
acacaucuauagccagaaa

SEQ ID NO: 928551 - RNA, 19 nt, Homo sapiens
  misc_RNA (1)...(19): siRNA sense strand
ccagaaagcuuccaauacc

SEQ ID NO: 928552 - RNA, 19 nt, Homo sapiens
  misc_RNA (1)...(19): siRNA sense strand
aaacugagacagagaguga

SEQ ID NO: 928553 - RNA, 19 nt, Homo sapiens
  misc_RNA (1)...(19): siRNA sense strand
agaccucaaugaacuauau

SEQ ID NO: 928554 - RNA, 19 nt, Homo sapiens
  misc_RNA (1)...(19): siRNA sense strand
gacauggucuacacaguca

SEQ ID NO: 928555 - RNA, 19 nt, Homo sapiens
  misc_RNA (1)...(19): siRNA sense strand
gauagagagucugaauuca

SEQ ID NO: 928556 - RNA, 19 nt, Homo sapiens
  misc_RNA (1)...(19): siRNA sense strand
uaaugaagaugaagaacag

SEQ ID NO: 928557 - RNA, 19 nt, Homo sapiens
  misc_RNA (1)...(19): siRNA sense strand
caacuggcaucauaaacag

SEQ ID NO: 928558 - RNA, 19 nt, Homo sapiens
  misc_RNA (1)...(19): siRNA sense strand
gcaacagacgacagaaauu

SEQ ID NO: 928559 - RNA, 19 nt, Homo sapiens
  misc_RNA (1)...(19): siRNA sense strand
gaucggcgagguggauuua

SEQ ID NO: 928560 - RNA, 19 nt, Homo sapiens
  misc_RNA (1)...(19): siRNA sense strand
caacagacgacagaaauuc

SEQ ID NO: 928561 - RNA, 19 nt, Homo sapiens
  misc_RNA (1)...(19): siRNA sense strand
aaauaaagccaccuaaaca

SEQ ID NO: 928562 - RNA, 19 nt, Homo sapiens
  misc_RNA (1)...(19): siRNA sense strand
gaaaauaaagccaccuaaa

SEQ ID NO: 928563 - RNA, 19 nt, Homo sapiens
  misc_RNA (1)...(19): siRNA sense strand
gggacucacucuaaaauuu

SEQ ID NO: 928564 - RNA, 19 nt, Homo sapiens
  misc_RNA (1)...(19): siRNA sense strand
caacaaggaaacagaacaa

SEQ ID NO: 928565 - RNA, 19 nt, Homo sapiens
  misc_RNA (1)...(19): siRNA sense strand
uaauggcaaucuuagcaaa

SEQ ID NO: 928566 - RNA, 19 nt, Homo sapiens
  misc_RNA (1)...(19): siRNA sense strand
gauaauggcaaucuuagca

SEQ ID NO: 928567 - RNA, 19 nt, Homo sapiens
  misc_RNA (1)...(19): siRNA sense strand
caaauauacacccucauug

SEQ ID NO: 928568 - RNA, 19 nt, Homo sapiens
  misc_RNA (1)...(19): siRNA sense strand
ucaaauuccuucagcuauc

SEQ ID NO: 928569 - RNA, 19 nt, Homo sapiens
  misc_RNA (1)...(19): siRNA sense strand
ccaaagaggaugaacagau

SEQ ID NO: 928570 - RNA, 19 nt, Homo sapiens
  misc_RNA (1)...(19): siRNA sense strand
aaauauacacccucauuga

SEQ ID NO: 928571 - RNA, 19 nt, Homo sapiens
  misc_RNA (1)...(19): siRNA sense strand
aaauucgccugaugaaaga

SEQ ID NO: 928572 - RNA, 19 nt, Homo sapiens
  misc_RNA (1)...(19): siRNA sense strand
aggaagaagucgcauuaga

SEQ ID NO: 928573 - RNA, 19 nt, Homo sapiens
  misc_RNA (1)...(19): siRNA sense strand
ccaccauucuucuuuaucu

SEQ ID NO: 928574 - RNA, 19 nt, Homo sapiens
  misc_RNA (1)...(19): siRNA sense strand
gacacuaccuaacuccaau

SEQ ID NO: 928575 - RNA, 19 nt, Homo sapiens
  misc_RNA (1)...(19): siRNA sense strand
ugauggagcgccagaauug

SEQ ID NO: 928576 - RNA, 19 nt, Homo sapiens
  misc_RNA (1)...(19): siRNA sense strand
caagucugcuagugucuuc

SEQ ID NO: 928577 - RNA, 19 nt, Homo sapiens
  misc_RNA (1)...(19): siRNA sense strand
acaggaagaacacgaauga

SEQ ID NO: 928578 - RNA, 19 nt, Homo sapiens
  misc_RNA (1)...(19): siRNA sense strand
uuuggcaacuggcaucaua

SEQ ID NO: 928579 - RNA, 19 nt, Homo sapiens
  misc_RNA (1)...(19): siRNA sense strand
gcaggcagcgagacaguau

SEQ ID NO: 928580 - RNA, 19 nt, Homo sapiens
  misc_RNA (1)...(19): siRNA sense strand
ggagcugguuguucguuuc

SEQ ID NO: 928581 - RNA, 19 nt, Homo sapiens
  misc_RNA (1)...(19): siRNA sense strand
guucaaauucgccugauga

SEQ ID NO: 928582 - RNA, 19 nt, Homo sapiens
  misc_RNA (1)...(19): siRNA sense strand
ggauuuauucgcauauuuc

SEQ ID NO: 928583 - RNA, 19 nt, Homo sapiens
  misc_RNA (1)...(19): siRNA sense strand
cgacggaguagcagauuga

SEQ ID NO: 928584 - RNA, 19 nt, Homo sapiens
  misc_RNA (1)...(19): siRNA sense strand
ucugagacaugggaaauau

SEQ ID NO: 928585 - RNA, 19 nt, Homo sapiens
  misc_RNA (1)...(19): siRNA sense strand
caaccacucugccacaaaa

SEQ ID NO: 928586 - RNA, 19 nt, Homo sapiens
  misc_RNA (1)...(19): siRNA sense strand
ggaucgugcuaucuaaaca

SEQ ID NO: 928587 - RNA, 19 nt, Homo sapiens
  misc_RNA (1)...(19): siRNA sense strand
gaaaguugaggaagaagag

SEQ ID NO: 928588 - RNA, 19 nt, Homo sapiens
  misc_RNA (1)...(19): siRNA sense strand
gcuagagccuaaauuuaac

SEQ ID NO: 928589 - RNA, 19 nt, Homo sapiens
  misc_RNA (1)...(19): siRNA sense strand
cucaggagcuagagccuaa

SEQ ID NO: 928590 - RNA, 19 nt, Homo sapiens
  misc_RNA (1)...(19): siRNA sense strand
acccauuugucaucuguua

SEQ ID NO: 928591 - RNA, 19 nt, Homo sapiens
  misc_RNA (1)...(19): siRNA sense strand
gcgccagaauugaagauag

SEQ ID NO: 928592 - RNA, 19 nt, Homo sapiens
  misc_RNA (1)...(19): siRNA sense strand
gaagggcaacaucccagaa

SEQ ID NO: 928593 - RNA, 19 nt, Homo sapiens
  misc_RNA (1)...(19): siRNA sense strand
ugagacaugggaaauauau

SEQ ID NO: 928594 - RNA, 19 nt, Homo sapiens
  misc_RNA (1)...(19): siRNA sense strand
cugggugacuuuaucauug

SEQ ID NO: 928595 - RNA, 19 nt, Homo sapiens
  misc_RNA (1)...(19): siRNA sense strand
ccagcugaaaugaauguua

SEQ ID NO: 928596 - RNA, 19 nt, Homo sapiens
  misc_RNA (1)...(19): siRNA sense strand
cgccagaauugaagauaga

SEQ ID NO: 928597 - RNA, 19 nt, Homo sapiens
  misc_RNA (1)...(19): siRNA sense strand
gcauaagaccucaaugaac

SEQ ID NO: 928598 - RNA, 19 nt, Homo sapiens
  misc_RNA (1)...(19): siRNA sense strand
caacacccauuugucaucu

SEQ ID NO: 928599 - RNA, 19 nt, Homo sapiens
  misc_RNA (1)...(19): siRNA sense strand
gaacaaauggcugaaaaga

SEQ ID NO: 928600 - RNA, 19 nt, Homo sapiens
  misc_RNA (1)...(19): siRNA sense strand
ucuccagcauguucaaauu

SEQ ID NO: 928601 - RNA, 19 nt, Homo sapiens
  misc_RNA (1)...(19): siRNA sense strand
acgaaugacugcugaugga

SEQ ID NO: 928602 - RNA, 19 nt, Homo sapiens
  misc_RNA (1)...(19): siRNA sense strand
gcagccagacacuaccuaa

SEQ ID NO: 928603 - RNA, 19 nt, Homo sapiens
  misc_RNA (1)...(19): siRNA sense strand
agcuagagccuaaauuuaa

SEQ ID NO: 928604 - RNA, 19 nt, Homo sapiens
  misc_RNA (1)...(19): siRNA sense strand
gaagggugaaggaggagaa

SEQ ID NO: 928605 - RNA, 19 nt, Homo sapiens
  misc_RNA (1)...(19): siRNA sense strand
cagaacaaauggcugaaaa

SEQ ID NO: 928606 - RNA, 19 nt, Homo sapiens
  misc_RNA (1)...(19): siRNA sense strand
uauggacaaugaauaaugg

SEQ ID NO: 928607 - RNA, 19 nt, Homo sapiens
  misc_RNA (1)...(19): siRNA sense strand
ggcaggaucgugcuaucua

SEQ ID NO: 928608 - RNA, 19 nt, Homo sapiens
  misc_RNA (1)...(19): siRNA sense strand
gggugaaggaggagaauga

SEQ ID NO: 928609 - RNA, 19 nt, Homo sapiens
  misc_RNA (1)...(19): siRNA sense strand
gugaucacccugagacuau

SEQ ID NO: 928610 - RNA, 19 nt, Homo sapiens
  misc_RNA (1)...(19): siRNA sense strand
ucggcgagguggauuuauu

SEQ ID NO: 928611 - RNA, 19 nt, Homo sapiens
  misc_RNA (1)...(19): siRNA sense strand
gagaagaccuauuuaguua

SEQ ID NO: 928612 - RNA, 19 nt, Homo sapiens
  misc_RNA (1)...(19): siRNA sense strand
agacacaacuucacaauua

SEQ ID NO: 928613 - RNA, 19 nt, Homo sapiens
  misc_RNA (1)...(19): siRNA sense strand
guaugaaucuccagaaaua

SEQ ID NO: 928614 - RNA, 19 nt, Homo sapiens
  misc_RNA (1)...(19): siRNA sense strand
gagcauggcuguucuggaa

SEQ ID NO: 928615 - RNA, 19 nt, Homo sapiens
  misc_RNA (1)...(19): siRNA sense strand
gcaagacauuucugauaaa

SEQ ID NO: 928616 - RNA, 19 nt, Homo sapiens
  misc_RNA (1)...(19): siRNA sense strand
gaaccaggccaaacucaua

SEQ ID NO: 928617 - RNA, 19 nt, Homo sapiens
  misc_RNA (1)...(19): siRNA sense strand
ugacauagcuucagaugca

SEQ ID NO: 928618 - RNA, 19 nt, Homo sapiens
  misc_RNA (1)...(19): siRNA sense strand
cagcagacauugugaagaa

SEQ ID NO: 928619 - RNA, 19 nt, Homo sapiens
  misc_RNA (1)...(19): siRNA sense strand
gcucaagaacucuauaaua

SEQ ID NO: 928620 - RNA, 19 nt, Homo sapiens
  misc_RNA (1)...(19): siRNA sense strand
gaacuccuacuguugaaua

SEQ ID NO: 928621 - RNA, 19 nt, Homo sapiens
  misc_RNA (1)...(19): siRNA sense strand
gcucuaaauuguggaauaa

SEQ ID NO: 928622 - RNA, 19 nt, Homo sapiens
  misc_RNA (1)...(19): siRNA sense strand
gaucagggauuugaagaga

SEQ ID NO: 928623 - RNA, 19 nt, Homo sapiens
  misc_RNA (1)...(19): siRNA sense strand
ggaacagcauuaugauaga

SEQ ID NO: 928624 - RNA, 19 nt, Homo sapiens
  misc_RNA (1)...(19): siRNA sense strand
gagaaugcaucagacauga

SEQ ID NO: 928625 - RNA, 19 nt, Homo sapiens
  misc_RNA (1)...(19): siRNA sense strand
uuaaacagaucagggauuu

SEQ ID NO: 928626 - RNA, 19 nt, Homo sapiens
  misc_RNA (1)...(19): siRNA sense strand
gaagagaccagcucagcaa

SEQ ID NO: 928627 - RNA, 19 nt, Homo sapiens
  misc_RNA (1)...(19): siRNA sense strand
gagaccagcucagcaagaa

SEQ ID NO: 928628 - RNA, 19 nt, Homo sapiens
  misc_RNA (1)...(19): siRNA sense strand
ccagaaauagcucuaaauu

SEQ ID NO: 928629 - RNA, 19 nt, Homo sapiens
  misc_RNA (1)...(19): siRNA sense strand
cgagaagaccuauuuaguu

SEQ ID NO: 928630 - RNA, 19 nt, Homo sapiens
  misc_RNA (1)...(19): siRNA sense strand
caucagacaugaaccacuu

SEQ ID NO: 928631 - RNA, 19 nt, Homo sapiens
  misc_RNA (1)...(19): siRNA sense strand
gaacagcauuaugauagau

SEQ ID NO: 928632 - RNA, 19 nt, Homo sapiens
  misc_RNA (1)...(19): siRNA sense strand
cuucagauaugucgaaaug

SEQ ID NO: 928633 - RNA, 19 nt, Homo sapiens
  misc_RNA (1)...(19): siRNA sense strand
ggugaacuacuacuagaua

SEQ ID NO: 928634 - RNA, 19 nt, Homo sapiens
  misc_RNA (1)...(19): siRNA sense strand
cagugaauaugagaaguua

SEQ ID NO: 928635 - RNA, 19 nt, Homo sapiens
  misc_RNA (1)...(19): siRNA sense strand
agcaagacauuucugauaa

SEQ ID NO: 928636 - RNA, 19 nt, Homo sapiens
  misc_RNA (1)...(19): siRNA sense strand
ggacggaggaugagcaguu

SEQ ID NO: 928637 - RNA, 19 nt, Homo sapiens
  misc_RNA (1)...(19): siRNA sense strand
gaaauucuguauggcacaa

SEQ ID NO: 928638 - RNA, 19 nt, Homo sapiens
  misc_RNA (1)...(19): siRNA sense strand
gagaaccucaaauuaauga

SEQ ID NO: 928639 - RNA, 19 nt, Homo sapiens
  misc_RNA (1)...(19): siRNA sense strand
uauaauagugggcuccuua

SEQ ID NO: 928640 - RNA, 19 nt, Homo sapiens
  misc_RNA (1)...(19): siRNA sense strand
ggguaugaaucuccagaaa

SEQ ID NO: 928641 - RNA, 19 nt, Homo sapiens
  misc_RNA (1)...(19): siRNA sense strand
gacacaacuucacaauuau

SEQ ID NO: 928642 - RNA, 19 nt, Homo sapiens
  misc_RNA (1)...(19): siRNA sense strand
gaaauagcucuaaauugug

SEQ ID NO: 928643 - RNA, 19 nt, Homo sapiens
  misc_RNA (1)...(19): siRNA sense strand
gagaacuccuacuguugaa

SEQ ID NO: 928644 - RNA, 19 nt, Homo sapiens
  misc_RNA (1)...(19): siRNA sense strand
aaacagaucagggauuuga

SEQ ID NO: 928645 - RNA, 19 nt, Homo sapiens
  misc_RNA (1)...(19): siRNA sense strand
ucagauaugucgaaauguc

SEQ ID NO: 928646 - RNA, 19 nt, Homo sapiens
  misc_RNA (1)...(19): siRNA sense strand
aagcaagacauuucugaua

SEQ ID NO: 928647 - RNA, 19 nt, Homo sapiens
  misc_RNA (1)...(19): siRNA sense strand
gaaccucaaauuaaugaug

SEQ ID NO: 928648 - RNA, 19 nt, Homo sapiens
  misc_RNA (1)...(19): siRNA sense strand
cgagaacuccuacuguuga

SEQ ID NO: 928649 - RNA, 19 nt, Homo sapiens
  misc_RNA (1)...(19): siRNA sense strand
gcacccugguagcugauuu

SEQ ID NO: 928650 - RNA, 19 nt, Homo sapiens
  misc_RNA (1)...(19): siRNA sense strand
gacggaggaugagcaguuu

SEQ ID NO: 928651 - RNA, 19 nt, Homo sapiens
  misc_RNA (1)...(19): siRNA sense strand
guuaagagaaugcaucaga

SEQ ID NO: 928652 - RNA, 19 nt, Homo sapiens
  misc_RNA (1)...(19): siRNA sense strand
gacaugaaccacuugcaaa

SEQ ID NO: 928653 - RNA, 19 nt, Homo sapiens
  misc_RNA (1)...(19): siRNA sense strand
uacgagaacuccuacuguu

SEQ ID NO: 928654 - RNA, 19 nt, Homo sapiens
  misc_RNA (1)...(19): siRNA sense strand
ucauagaguuccucagcaa

SEQ ID NO: 928655 - RNA, 19 nt, Homo sapiens
  misc_RNA (1)...(19): siRNA sense strand
cagaugcauuugccacauu

SEQ ID NO: 928656 - RNA, 19 nt, Homo sapiens
  misc_RNA (1)...(19): siRNA sense strand
cagaaauagcucuaaauug

SEQ ID NO: 928657 - RNA, 19 nt, Homo sapiens
  misc_RNA (1)...(19): siRNA sense strand
cgacgagaagaccuauuua

SEQ ID NO: 928658 - RNA, 19 nt, Homo sapiens
  misc_RNA (1)...(19): siRNA sense strand
agaaaaggcuacagaagaa

SEQ ID NO: 928659 - RNA, 19 nt, Homo sapiens
  misc_RNA (1)...(19): siRNA sense strand
gcuucucggugaacuacua

SEQ ID NO: 928660 - RNA, 19 nt, Homo sapiens
  misc_RNA (1)...(19): siRNA sense strand
ccugguagcugauuuacag

SEQ ID NO: 928661 - RNA, 19 nt, Homo sapiens
  misc_RNA (1)...(19): siRNA sense strand
gaagcaguagcucaacuug

SEQ ID NO: 928662 - RNA, 19 nt, Homo sapiens
  misc_RNA (1)...(19): siRNA sense strand
uuugaggccuuucacguuu

SEQ ID NO: 928663 - RNA, 19 nt, Homo sapiens
  misc_RNA (1)...(19): siRNA sense strand
gacagaagcaguagcucaa

SEQ ID NO: 928664 - RNA, 19 nt, Homo sapiens
  misc_RNA (1)...(19): siRNA sense strand
guggaauaauguuaagaga

SEQ ID NO: 928665 - RNA, 19 nt, Homo sapiens
  misc_RNA (1)...(19): siRNA sense strand
aaagacguggcucaaauuu

SEQ ID NO: 928666 - RNA, 19 nt, Homo sapiens
  misc_RNA (1)...(19): siRNA sense strand
ugggaagucucacaaaucu

SEQ ID NO: 928667 - RNA, 19 nt, Homo sapiens
  misc_RNA (1)...(19): siRNA sense strand
ucaaggauuuacuuacaag

SEQ ID NO: 928668 - RNA, 19 nt, Homo sapiens
  misc_RNA (1)...(19): siRNA sense strand
guacgagaacuccuacugu

SEQ ID NO: 928669 - RNA, 19 nt, Homo sapiens
  misc_RNA (1)...(19): siRNA sense strand
ucagcaaguuucagaacga

SEQ ID NO: 928670 - RNA, 19 nt, Homo sapiens
  misc_RNA (1)...(19): siRNA sense strand
uagacauccuccucaagaa

SEQ ID NO: 928671 - RNA, 19 nt, Homo sapiens
  misc_RNA (1)...(19): siRNA sense strand
cuagacauccuccucaaga

SEQ ID NO: 928672 - RNA, 19 nt, Homo sapiens
  misc_RNA (1)...(19): siRNA sense strand
caacuucacaauuaugaca

SEQ ID NO: 928673 - RNA, 19 nt, Homo sapiens
  misc_RNA (1)...(19): siRNA sense strand
cggaacaguuuuaugauuu

SEQ ID NO: 928674 - RNA, 19 nt, Homo sapiens
  misc_RNA (1)...(19): siRNA sense strand
gguaugaaucuccagaaau

SEQ ID NO: 928675 - RNA, 19 nt, Homo sapiens
  misc_RNA (1)...(19): siRNA sense strand
gaaccugcugcgagacaaa

SEQ ID NO: 928676 - RNA, 19 nt, Homo sapiens
  misc_RNA (1)...(19): siRNA sense strand
ggauuuacuuacaagacau

SEQ ID NO: 928677 - RNA, 19 nt, Homo sapiens
  misc_RNA (1)...(19): siRNA sense strand
uaagguguuuguagccaau

SEQ ID NO: 928678 - RNA, 19 nt, Homo sapiens
  misc_RNA (1)...(19): siRNA sense strand
aaaucugguugccaugaaa

SEQ ID NO: 928679 - RNA, 19 nt, Homo sapiens
  misc_RNA (1)...(19): siRNA sense strand
agacguggcucaaauuuuc

SEQ ID NO: 928680 - RNA, 19 nt, Homo sapiens
  misc_RNA (1)...(19): siRNA sense strand
gaacuacuacuagauagac

SEQ ID NO: 928681 - RNA, 19 nt, Homo sapiens
  misc_RNA (1)...(19): siRNA sense strand
cauuugacauagcuucaga

SEQ ID NO: 928682 - RNA, 19 nt, Homo sapiens
  misc_RNA (1)...(19): siRNA sense strand
caaaucuccagcagacauu

SEQ ID NO: 928683 - RNA, 19 nt, Homo sapiens
  misc_RNA (1)...(19): siRNA sense strand
gauagacacaacuucacaa

SEQ ID NO: 928684 - RNA, 19 nt, Homo sapiens
  misc_RNA (1)...(19): siRNA sense strand
uggaacagcauuaugauag

SEQ ID NO: 928685 - RNA, 19 nt, Homo sapiens
  misc_RNA (1)...(19): siRNA sense strand
ggucggaacaguuuuauga

SEQ ID NO: 928686 - RNA, 19 nt, Homo sapiens
  misc_RNA (1)...(19): siRNA sense strand
cggaggaugagcaguuuaa

SEQ ID NO: 928687 - RNA, 19 nt, Homo sapiens
  misc_RNA (1)...(19): siRNA sense strand
uagaguuccucagcaaguu

SEQ ID NO: 928688 - RNA, 19 nt, Homo sapiens
  misc_RNA (1)...(19): siRNA sense strand
cuagauagacacaacuuca

SEQ ID NO: 928689 - RNA, 19 nt, Homo sapiens
  misc_RNA (1)...(19): siRNA sense strand
agacaaauugguacgagaa

SEQ ID NO: 928690 - RNA, 19 nt, Homo sapiens
  misc_RNA (1)...(19): siRNA sense strand
gacgagaagaccuauuuag

SEQ ID NO: 928691 - RNA, 19 nt, Homo sapiens
  misc_RNA (1)...(19): siRNA sense strand
agacgcagcccauccuaga

SEQ ID NO: 928692 - RNA, 19 nt, Homo sapiens
  misc_RNA (1)...(19): siRNA sense strand
gugaacuacuacuagauag

SEQ ID NO: 928693 - RNA, 19 nt, Homo sapiens
  misc_RNA (1)...(19): siRNA sense strand
gcacccaacagaauauuuu

SEQ ID NO: 928694 - RNA, 19 nt, Homo sapiens
  misc_RNA (1)...(19): siRNA sense strand
cuccagaaauagcucuaaa

SEQ ID NO: 928695 - RNA, 19 nt, Homo sapiens
  misc_RNA (1)...(19): siRNA sense strand
gcagacauugugaagaauc

SEQ ID NO: 928696 - RNA, 19 nt, Homo sapiens
  misc_RNA (1)...(19): siRNA sense strand
gucgcaacauccaguuuga

SEQ ID NO: 928697 - RNA, 19 nt, Homo sapiens
  misc_RNA (1)...(19): siRNA sense strand
ucggugaacuacuacuaga

SEQ ID NO: 928698 - RNA, 19 nt, Homo sapiens
  misc_RNA (1)...(19): siRNA sense strand
gaagcuucucggugaacua

SEQ ID NO: 928699 - RNA, 19 nt, Homo sapiens
  misc_RNA (1)...(19): siRNA sense strand
uacagaagaaguuuccaaa

SEQ ID NO: 928700 - RNA, 19 nt, Homo sapiens
  misc_RNA (1)...(19): siRNA sense strand
ggaacaguuuuaugauuuc

SEQ ID NO: 928701 - RNA, 19 nt, Homo sapiens
  misc_RNA (1)...(19): siRNA sense strand
gaaugcaucagacaugaac

SEQ ID NO: 928702 - RNA, 19 nt, Homo sapiens
  misc_RNA (1)...(19): siRNA sense strand
gcauggcuguucuggaaaa

SEQ ID NO: 928703 - RNA, 19 nt, Homo sapiens
  misc_RNA (1)...(19): siRNA sense strand
uaagagaaugcaucagaca

SEQ ID NO: 928704 - RNA, 19 nt, Homo sapiens
  misc_RNA (1)...(19): siRNA sense strand
ucaagaaccaggccaaacu

SEQ ID NO: 928705 - RNA, 19 nt, Homo sapiens
  misc_RNA (1)...(19): siRNA sense strand
ucagugaauaugagaaguu

SEQ ID NO: 928706 - RNA, 19 nt, Homo sapiens
  misc_RNA (1)...(19): siRNA sense strand
agacaugaaccacuugcaa

SEQ ID NO: 928707 - RNA, 19 nt, Homo sapiens
  misc_RNA (1)...(19): siRNA sense strand
cagaaaaggcuacagaaga

SEQ ID NO: 928708 - RNA, 19 nt, Homo sapiens
  misc_RNA (1)...(19): siRNA sense strand
guuaaacagaucagggauu

SEQ ID NO: 928709 - RNA, 19 nt, Homo sapiens
  misc_RNA (1)...(19): siRNA sense strand
acgacgagaagaccuauuu

SEQ ID NO: 928710 - RNA, 19 nt, Homo sapiens
  misc_RNA (1)...(19): siRNA sense strand
cacaacuucacaauuauga

SEQ ID NO: 928711 - RNA, 19 nt, Homo sapiens
  misc_RNA (1)...(19): siRNA sense strand
gagaguaaccgcagauaca

SEQ ID NO: 928712 - RNA, 19 nt, Homo sapiens
  misc_RNA (1)...(19): siRNA sense strand
gcacaacucgucgcucuuc

SEQ ID NO: 928713 - RNA, 19 nt, Homo sapiens
  misc_RNA (1)...(19): siRNA sense strand
ucacacgccugcagaucug

SEQ ID NO: 928714 - RNA, 19 nt, Homo sapiens
  misc_RNA (1)...(19): siRNA sense strand
acgcagagcccauuagcuu

SEQ ID NO: 928715 - RNA, 19 nt, Homo sapiens
  misc_RNA (1)...(19): siRNA sense strand
ggucacgcagagcccauua

SEQ ID NO: 928716 - RNA, 19 nt, Homo sapiens
  misc_RNA (1)...(19): siRNA sense strand
ucggaggcgccuacacuua

SEQ ID NO: 928717 - RNA, 19 nt, Homo sapiens
  misc_RNA (1)...(19): siRNA sense strand
gcucuucgcccugcagaau

SEQ ID NO: 928718 - RNA, 19 nt, Homo sapiens
  misc_RNA (1)...(19): siRNA sense strand
ggagaguaaccgcagauac

SEQ ID NO: 928719 - RNA, 19 nt, Homo sapiens
  misc_RNA (1)...(19): siRNA sense strand
gauacacaaaggacagguu

SEQ ID NO: 928720 - RNA, 19 nt, Homo sapiens
  misc_RNA (1)...(19): siRNA sense strand
guucacaggucaccccuau

SEQ ID NO: 928721 - RNA, 19 nt, Homo sapiens
  misc_RNA (1)...(19): siRNA sense strand
gcaucgaccagauccucaa

SEQ ID NO: 928722 - RNA, 19 nt, Homo sapiens
  misc_RNA (1)...(19): siRNA sense strand
gaaaugggcuuaauaguga

SEQ ID NO: 928723 - RNA, 19 nt, Homo sapiens
  misc_RNA (1)...(19): siRNA sense strand
gaaacaaguuccugccuua

SEQ ID NO: 928724 - RNA, 19 nt, Homo sapiens
  misc_RNA (1)...(19): siRNA sense strand
gauaucaacuuacgaguga

SEQ ID NO: 928725 - RNA, 19 nt, Homo sapiens
  misc_RNA (1)...(19): siRNA sense strand
gaaaucagggauccucuua

SEQ ID NO: 928726 - RNA, 19 nt, Homo sapiens
  misc_RNA (1)...(19): siRNA sense strand
ggaaaugggcuuaauagug

SEQ ID NO: 928727 - RNA, 19 nt, Homo sapiens
  misc_RNA (1)...(19): siRNA sense strand
gaacagcaccauugaguca

SEQ ID NO: 928728 - RNA, 19 nt, Homo sapiens
  misc_RNA (1)...(19): siRNA sense strand
gaaauaaccccaucuugua

SEQ ID NO: 928729 - RNA, 19 nt, Homo sapiens
  misc_RNA (1)...(19): siRNA sense strand
ucaaagaguuucaggacaa

SEQ ID NO: 928730 - RNA, 19 nt, Homo sapiens
  misc_RNA (1)...(19): siRNA sense strand
ccgaagaccuguaccagaa

SEQ ID NO: 928731 - RNA, 19 nt, Homo sapiens
  misc_RNA (1)...(19): siRNA sense strand
uggagaaacugaucaaaga

SEQ ID NO: 928732 - RNA, 19 nt, Homo sapiens
  misc_RNA (1)...(19): siRNA sense strand
ccagcucucucuuagauuu

SEQ ID NO: 928733 - RNA, 19 nt, Homo sapiens
  misc_RNA (1)...(19): siRNA sense strand
gauacgaaguccuuagaga

SEQ ID NO: 928734 - RNA, 19 nt, Homo sapiens
  misc_RNA (1)...(19): siRNA sense strand
ugaaggaaguuaaggauca

SEQ ID NO: 928735 - RNA, 19 nt, Homo sapiens
  misc_RNA (1)...(19): siRNA sense strand
ggacagaggaucccguuug

SEQ ID NO: 928736 - RNA, 19 nt, Homo sapiens
  misc_RNA (1)...(19): siRNA sense strand
gcaggaaaugggcuuaaua

SEQ ID NO: 928737 - RNA, 19 nt, Homo sapiens
  misc_RNA (1)...(19): siRNA sense strand
cuuauuggcuguggauuua

SEQ ID NO: 928738 - RNA, 19 nt, Homo sapiens
  misc_RNA (1)...(19): siRNA sense strand
guguggacauugacaguua

SEQ ID NO: 928739 - RNA, 19 nt, Homo sapiens
  misc_RNA (1)...(19): siRNA sense strand
ucaacgaccucaucacaga

SEQ ID NO: 928740 - RNA, 19 nt, Homo sapiens
  misc_RNA (1)...(19): siRNA sense strand
ggacauugacaguuauauu

SEQ ID NO: 928741 - RNA, 19 nt, Homo sapiens
  misc_RNA (1)...(19): siRNA sense strand
gaacugaagcccuuaagag

SEQ ID NO: 928742 - RNA, 19 nt, Homo sapiens
  misc_RNA (1)...(19): siRNA sense strand
ggaggacagugcucucaga

SEQ ID NO: 928743 - RNA, 19 nt, Homo sapiens
  misc_RNA (1)...(19): siRNA sense strand
gaaguggcccaacgauauu

SEQ ID NO: 928744 - RNA, 19 nt, Homo sapiens
  misc_RNA (1)...(19): siRNA sense strand
ugagguccauucccaagua

SEQ ID NO: 928745 - RNA, 19 nt, Homo sapiens
  misc_RNA (1)...(19): siRNA sense strand
gaacauuucaacuuagaga

SEQ ID NO: 928746 - RNA, 19 nt, Homo sapiens
  misc_RNA (1)...(19): siRNA sense strand
gaccuucccuacgauuaua

SEQ ID NO: 928747 - RNA, 19 nt, Homo sapiens
  misc_RNA (1)...(19): siRNA sense strand
gaagaacccaaacaaagga

SEQ ID NO: 928748 - RNA, 19 nt, Homo sapiens
  misc_RNA (1)...(19): siRNA sense strand
ggacuccacucugaaggaa

SEQ ID NO: 928749 - RNA, 19 nt, Homo sapiens
  misc_RNA (1)...(19): siRNA sense strand
ggccagcucucucuuagau

SEQ ID NO: 928750 - RNA, 19 nt, Homo sapiens
  misc_RNA (1)...(19): siRNA sense strand
acagugaccucaugaagau

SEQ ID NO: 928751 - RNA, 19 nt, Homo sapiens
  misc_RNA (1)...(19): siRNA sense strand
gaugugcucuuucuacucu

SEQ ID NO: 928752 - RNA, 19 nt, Homo sapiens
  misc_RNA (1)...(19): siRNA sense strand
caucagaacauuucaacuu

SEQ ID NO: 928753 - RNA, 19 nt, Homo sapiens
  misc_RNA (1)...(19): siRNA sense strand
cagaacauuucaacuuaga

SEQ ID NO: 928754 - RNA, 19 nt, Homo sapiens
  misc_RNA (1)...(19): siRNA sense strand
caaagaguuucaggacaaa

SEQ ID NO: 928755 - RNA, 19 nt, Homo sapiens
  misc_RNA (1)...(19): siRNA sense strand
ccucagcugugacaugaaa

SEQ ID NO: 928756 - RNA, 19 nt, Homo sapiens
  misc_RNA (1)...(19): siRNA sense strand
ugaaguggcccaacgauau

SEQ ID NO: 928757 - RNA, 19 nt, Homo sapiens
  misc_RNA (1)...(19): siRNA sense strand
gacagaggaucccguuugu

SEQ ID NO: 928758 - RNA, 19 nt, Homo sapiens
  misc_RNA (1)...(19): siRNA sense strand
gagucaaccucacgggaaa

SEQ ID NO: 928759 - RNA, 19 nt, Homo sapiens
  misc_RNA (1)...(19): siRNA sense strand
aaucagggauccucuuaug

SEQ ID NO: 928760 - RNA, 19 nt, Homo sapiens
  misc_RNA (1)...(19): siRNA sense strand
gagaacagcaccauugagu

SEQ ID NO: 928761 - RNA, 19 nt, Homo sapiens
  misc_RNA (1)...(19): siRNA sense strand
gaccaaagguguccaucgu

SEQ ID NO: 928762 - RNA, 19 nt, Homo sapiens
  misc_RNA (1)...(19): siRNA sense strand
ggcccaacgauauuuauua

SEQ ID NO: 928763 - RNA, 19 nt, Homo sapiens
  misc_RNA (1)...(19): siRNA sense strand
ggccucagcugugacauga

SEQ ID NO: 928764 - RNA, 19 nt, Homo sapiens
  misc_RNA (1)...(19): siRNA sense strand
ggacaaggacaggaugauu

SEQ ID NO: 928765 - RNA, 19 nt, Homo sapiens
  misc_RNA (1)...(19): siRNA sense strand
caacauggaggccuucuca

SEQ ID NO: 928766 - RNA, 19 nt, Homo sapiens
  misc_RNA (1)...(19): siRNA sense strand
gacauugacaguuauauuc

SEQ ID NO: 928767 - RNA, 19 nt, Homo sapiens
  misc_RNA (1)...(19): siRNA sense strand
gaagaucggcggaguucug

SEQ ID NO: 928768 - RNA, 19 nt, Homo sapiens
  misc_RNA (1)...(19): siRNA sense strand
uggaugggcugauguuuca

SEQ ID NO: 928769 - RNA, 19 nt, Homo sapiens
  misc_RNA (1)...(19): siRNA sense strand
gacaaggacaggaugauug

SEQ ID NO: 928770 - RNA, 19 nt, Homo sapiens
  misc_RNA (1)...(19): siRNA sense strand
gaagaccuguaccagaagu

SEQ ID NO: 928771 - RNA, 19 nt, Homo sapiens
  misc_RNA (1)...(19): siRNA sense strand
gcugugacaugaaacaagu

SEQ ID NO: 928772 - RNA, 19 nt, Homo sapiens
  misc_RNA (1)...(19): siRNA sense strand
ccaacgauauuuauuacag

SEQ ID NO: 928773 - RNA, 19 nt, Homo sapiens
  misc_RNA (1)...(19): siRNA sense strand
gauuauagcagcaguuugg

SEQ ID NO: 928774 - RNA, 19 nt, Homo sapiens
  misc_RNA (1)...(19): siRNA sense strand
uuagagagauucugacaac

SEQ ID NO: 928775 - RNA, 19 nt, Homo sapiens
  misc_RNA (1)...(19): siRNA sense strand
cgaaguccuuagagagauu

SEQ ID NO: 928776 - RNA, 19 nt, Homo sapiens
  misc_RNA (1)...(19): siRNA sense strand
uggcagagaugacccaaag

SEQ ID NO: 928777 - RNA, 19 nt, Homo sapiens
  misc_RNA (1)...(19): siRNA sense strand
gauuuaaugugacuaacag

SEQ ID NO: 928778 - RNA, 19 nt, Homo sapiens
  misc_RNA (1)...(19): siRNA sense strand
ggcuguggauuuaauguga

SEQ ID NO: 928779 - RNA, 19 nt, Homo sapiens
  misc_RNA (1)...(19): siRNA sense strand
gcccaacgauauuuauuac

SEQ ID NO: 928780 - RNA, 19 nt, Homo sapiens
  misc_RNA (1)...(19): siRNA sense strand
acaagacaguccagaacuu

SEQ ID NO: 928781 - RNA, 19 nt, Homo sapiens
  misc_RNA (1)...(19): siRNA sense strand
gugaagaacccaaacaaag

SEQ ID NO: 928782 - RNA, 19 nt, Homo sapiens
  misc_RNA (1)...(19): siRNA sense strand
ggugaagaacccaaacaaa

SEQ ID NO: 928783 - RNA, 19 nt, Homo sapiens
  misc_RNA (1)...(19): siRNA sense strand
ugacugugcuggagaaacu

SEQ ID NO: 928784 - RNA, 19 nt, Homo sapiens
  misc_RNA (1)...(19): siRNA sense strand
uugcaggacuccacucuga

SEQ ID NO: 928785 - RNA, 19 nt, Homo sapiens
  misc_RNA (1)...(19): siRNA sense strand
guccguggcugucguggaa

SEQ ID NO: 928786 - RNA, 19 nt, Homo sapiens
  misc_RNA (1)...(19): siRNA sense strand
uuaaggaucaggucucaaa

SEQ ID NO: 928787 - RNA, 19 nt, Homo sapiens
  misc_RNA (1)...(19): siRNA sense strand
gaagauacgaaguccuuag

SEQ ID NO: 928788 - RNA, 19 nt, Homo sapiens
  misc_RNA (1)...(19): siRNA sense strand
caagcaagcccagauccua

SEQ ID NO: 928789 - RNA, 19 nt, Homo sapiens
  misc_RNA (1)...(19): siRNA sense strand
gcacaagacaguccagaac

SEQ ID NO: 928790 - RNA, 19 nt, Homo sapiens
  misc_RNA (1)...(19): siRNA sense strand
gcggcgagguugugacugu

SEQ ID NO: 928791 - RNA, 19 nt, Homo sapiens
  misc_RNA (1)...(19): siRNA sense strand
cugguuaacucaacacuca

SEQ ID NO: 928792 - RNA, 19 nt, Homo sapiens
  misc_RNA (1)...(19): siRNA sense strand
guucauggccuaucuuucu

SEQ ID NO: 928793 - RNA, 19 nt, Homo sapiens
  misc_RNA (1)...(19): siRNA sense strand
cgagaacauuccagaccuu

SEQ ID NO: 928794 - RNA, 19 nt, Homo sapiens
  misc_RNA (1)...(19): siRNA sense strand
gcagaacugaagcccuuaa

SEQ ID NO: 928795 - RNA, 19 nt, Homo sapiens
  misc_RNA (1)...(19): siRNA sense strand
cauggauaauggacuggua

SEQ ID NO: 928796 - RNA, 19 nt, Homo sapiens
  misc_RNA (1)...(19): siRNA sense strand
gggaaaggcacccaacauc

SEQ ID NO: 928797 - RNA, 19 nt, Homo sapiens
  misc_RNA (1)...(19): siRNA sense strand
uggagaguguugcugauga

SEQ ID NO: 928798 - RNA, 19 nt, Homo sapiens
  misc_RNA (1)...(19): siRNA sense strand
caacacaaggcagaacuga

SEQ ID NO: 928799 - RNA, 19 nt, Homo sapiens
  misc_RNA (1)...(19): siRNA sense strand
ucagaacauuucaacuuag

SEQ ID NO: 928800 - RNA, 19 nt, Homo sapiens
  misc_RNA (1)...(19): siRNA sense strand
ccucccagcuccaacauag

SEQ ID NO: 928801 - RNA, 19 nt, Homo sapiens
  misc_RNA (1)...(19): siRNA sense strand
ccaggugcacuuagaacua

SEQ ID NO: 928802 - RNA, 19 nt, Homo sapiens
  misc_RNA (1)...(19): siRNA sense strand
acaguuauauucucuacca

SEQ ID NO: 928803 - RNA, 19 nt, Homo sapiens
  misc_RNA (1)...(19): siRNA sense strand
ggagaguguugcugaugag

SEQ ID NO: 928804 - RNA, 19 nt, Homo sapiens
  misc_RNA (1)...(19): siRNA sense strand
ccacgagugucuggaacuu

SEQ ID NO: 928805 - RNA, 19 nt, Homo sapiens
  misc_RNA (1)...(19): siRNA sense strand
gcugagcccugugggaugu

SEQ ID NO: 928806 - RNA, 19 nt, Homo sapiens
  misc_RNA (1)...(19): siRNA sense strand
ggaaaucagggauccucuu

SEQ ID NO: 928807 - RNA, 19 nt, Homo sapiens
  misc_RNA (1)...(19): siRNA sense strand
uaacuccucuuuacuugcu

SEQ ID NO: 928808 - RNA, 19 nt, Homo sapiens
  misc_RNA (1)...(19): siRNA sense strand
gcagcaguuuggagagugu

SEQ ID NO: 928809 - RNA, 19 nt, Homo sapiens
  misc_RNA (1)...(19): siRNA sense strand
acgagugucuggaacuuga

SEQ ID NO: 928810 - RNA, 19 nt, Homo sapiens
  misc_RNA (1)...(19): siRNA sense strand
gagaaacugaucaaagagu

SEQ ID NO: 928811 - RNA, 19 nt, Homo sapiens
  misc_RNA (1)...(19): siRNA sense strand
gagguccauucccaaguau

SEQ ID NO: 928812 - RNA, 19 nt, Homo sapiens
  misc_RNA (1)...(19): siRNA sense strand
cuuaacuccucuuuacuug

SEQ ID NO: 928813 - RNA, 19 nt, Homo sapiens
  misc_RNA (1)...(19): siRNA sense strand
aggaucaggucucaaacaa

SEQ ID NO: 928814 - RNA, 19 nt, Homo sapiens
  misc_RNA (1)...(19): siRNA sense strand
uagaagauacgaaguccuu

SEQ ID NO: 928815 - RNA, 19 nt, Homo sapiens
  misc_RNA (1)...(19): siRNA sense strand
cauccuacgugucugaagu

SEQ ID NO: 928816 - RNA, 19 nt, Homo sapiens
  misc_RNA (1)...(19): siRNA sense strand
caucaacgaccucaucaca

SEQ ID NO: 928817 - RNA, 19 nt, Homo sapiens
  misc_RNA (1)...(19): siRNA sense strand
gaucggcggaguucugguu

SEQ ID NO: 928818 - RNA, 19 nt, Homo sapiens
  misc_RNA (1)...(19): siRNA sense strand
caaacaagcaagcccagau

SEQ ID NO: 928819 - RNA, 19 nt, Homo sapiens
  misc_RNA (1)...(19): siRNA sense strand
gugaaguggcccaacgaua

SEQ ID NO: 928820 - RNA, 19 nt, Homo sapiens
  misc_RNA (1)...(19): siRNA sense strand
gccaaaaucugcagaccaa

SEQ ID NO: 928821 - RNA, 19 nt, Homo sapiens
  misc_RNA (1)...(19): siRNA sense strand
gaaggaaguuaaggaucag

SEQ ID NO: 928822 - RNA, 19 nt, Homo sapiens
  misc_RNA (1)...(19): siRNA sense strand
caagaccucugccaguaua

SEQ ID NO: 928823 - RNA, 19 nt, Homo sapiens
  misc_RNA (1)...(19): siRNA sense strand
caacuuugccguccuuaaa

SEQ ID NO: 928824 - RNA, 19 nt, Homo sapiens
  misc_RNA (1)...(19): siRNA sense strand
gagcgggugugucauuguu

SEQ ID NO: 928825 - RNA, 19 nt, Homo sapiens
  misc_RNA (1)...(19): siRNA sense strand
ggaacugccucuuucuucu

SEQ ID NO: 928826 - RNA, 19 nt, Homo sapiens
  misc_RNA (1)...(19): siRNA sense strand
acaucaagcucauucuuug

SEQ ID NO: 928827 - RNA, 19 nt, Homo sapiens
  misc_RNA (1)...(19): siRNA sense strand
ggacaucccgacaaguuug

SEQ ID NO: 928828 - RNA, 19 nt, Homo sapiens
  misc_RNA (1)...(19): siRNA sense strand
gcagaucuuuggcgacuac

SEQ ID NO: 928829 - RNA, 19 nt, Homo sapiens
  misc_RNA (1)...(19): siRNA sense strand
gaguaucucaucaauguga

SEQ ID NO: 928830 - RNA, 19 nt, Homo sapiens
  misc_RNA (1)...(19): siRNA sense strand
gcucugcugugcccgugua

SEQ ID NO: 928831 - RNA, 19 nt, Homo sapiens
  misc_RNA (1)...(19): siRNA sense strand
gcuaggacaucccgacaag

SEQ ID NO: 928832 - RNA, 19 nt, Homo sapiens
  misc_RNA (1)...(19): siRNA sense strand
gaacugccucuuucuucuu

SEQ ID NO: 928833 - RNA, 19 nt, Homo sapiens
  misc_RNA (1)...(19): siRNA sense strand
ggccugagcgcaacgguaa

SEQ ID NO: 928834 - RNA, 19 nt, Homo sapiens
  misc_RNA (1)...(19): siRNA sense strand
cugcucaccuucaugauug

SEQ ID NO: 928835 - RNA, 19 nt, Homo sapiens
  misc_RNA (1)...(19): siRNA sense strand
caaaacagcugaguuccaa

SEQ ID NO: 928836 - RNA, 19 nt, Homo sapiens
  misc_RNA (1)...(19): siRNA sense strand
gcacagaaaagcuaauuga

SEQ ID NO: 928837 - RNA, 19 nt, Homo sapiens
  misc_RNA (1)...(19): siRNA sense strand
gcuccaaccuucuguccau

SEQ ID NO: 928838 - RNA, 19 nt, Homo sapiens
  misc_RNA (1)...(19): siRNA sense strand
cuaccaagacuaugaguau

SEQ ID NO: 928839 - RNA, 19 nt, Homo sapiens
  misc_RNA (1)...(19): siRNA sense strand
gauccaugccuuccaguau

SEQ ID NO: 928840 - RNA, 19 nt, Homo sapiens
  misc_RNA (1)...(19): siRNA sense strand
gcaagaccucugccaguau

SEQ ID NO: 928841 - RNA, 19 nt, Homo sapiens
  misc_RNA (1)...(19): siRNA sense strand
caacaucaagcucauucuu

SEQ ID NO: 928842 - RNA, 19 nt, Homo sapiens
  misc_RNA (1)...(19): siRNA sense strand
gcgggugugucauuguuug

SEQ ID NO: 928843 - RNA, 19 nt, Homo sapiens
  misc_RNA (1)...(19): siRNA sense strand
acagcugaguuccaaauga

SEQ ID NO: 928844 - RNA, 19 nt, Homo sapiens
  misc_RNA (1)...(19): siRNA sense strand
cuauggaacugccucuuuc

SEQ ID NO: 928845 - RNA, 19 nt, Homo sapiens
  misc_RNA (1)...(19): siRNA sense strand
gguguucucccauggauug

SEQ ID NO: 928846 - RNA, 19 nt, Homo sapiens
  misc_RNA (1)...(19): siRNA sense strand
ccucuuucuucuuccuuua

SEQ ID NO: 928847 - RNA, 19 nt, Homo sapiens
  misc_RNA (1)...(19): siRNA sense strand
gcagucaggcagaucuuug

SEQ ID NO: 928848 - RNA, 19 nt, Homo sapiens
  misc_RNA (1)...(19): siRNA sense strand
gcugugcccguguacauuu

SEQ ID NO: 928849 - RNA, 19 nt, Homo sapiens
  misc_RNA (1)...(19): siRNA sense strand
guuuauugcugcauuugug

SEQ ID NO: 928850 - RNA, 19 nt, Homo sapiens
  misc_RNA (1)...(19): siRNA sense strand
agcaagaccucugccagua

SEQ ID NO: 928851 - RNA, 19 nt, Homo sapiens
  misc_RNA (1)...(19): siRNA sense strand
gguggccacuggauugugu

SEQ ID NO: 928852 - RNA, 19 nt, Homo sapiens
  misc_RNA (1)...(19): siRNA sense strand
caugauugcugccacuuac

SEQ ID NO: 928853 - RNA, 19 nt, Homo sapiens
  misc_RNA (1)...(19): siRNA sense strand
uaggacaucccgacaaguu

SEQ ID NO: 928854 - RNA, 19 nt, Homo sapiens
  misc_RNA (1)...(19): siRNA sense strand
ccuaugcccugaccguugu

SEQ ID NO: 928855 - RNA, 19 nt, Homo sapiens
  misc_RNA (1)...(19): siRNA sense strand
uuacaacuuugccguccuu

SEQ ID NO: 928856 - RNA, 19 nt, Homo sapiens
  misc_RNA (1)...(19): siRNA sense strand
aaacagcugaguuccaaau

SEQ ID NO: 928857 - RNA, 19 nt, Homo sapiens
  misc_RNA (1)...(19): siRNA sense strand
agagugcugugcaagaugu

SEQ ID NO: 928858 - RNA, 19 nt, Homo sapiens
  misc_RNA (1)...(19): siRNA sense strand
cagcugaguuccaaaugac

SEQ ID NO: 928859 - RNA, 19 nt, Homo sapiens
  misc_RNA (1)...(19): siRNA sense strand
uccaguaugucaucuaugg

SEQ ID NO: 928860 - RNA, 19 nt, Homo sapiens
  misc_RNA (1)...(19): siRNA sense strand
uuagagugcugugcaagau

SEQ ID NO: 928861 - RNA, 19 nt, Homo sapiens
  misc_RNA (1)...(19): siRNA sense strand
gaucuuuggcgacuacaag

SEQ ID NO: 928862 - RNA, 19 nt, Homo sapiens
  misc_RNA (1)...(19): siRNA sense strand
ggcugcagcuacacugguu

SEQ ID NO: 928863 - RNA, 19 nt, Homo sapiens
  misc_RNA (1)...(19): siRNA sense strand
gccagaauguaugguguuc

SEQ ID NO: 928864 - RNA, 19 nt, Homo sapiens
  misc_RNA (1)...(19): siRNA sense strand
gccacuggauuguguuucu

SEQ ID NO: 928865 - RNA, 19 nt, Homo sapiens
  misc_RNA (1)...(19): siRNA sense strand
ccguguacauuuacuucaa

SEQ ID NO: 928866 - RNA, 19 nt, Homo sapiens
  misc_RNA (1)...(19): siRNA sense strand
ucuauggaacugccucuuu

SEQ ID NO: 928867 - RNA, 19 nt, Homo sapiens
  misc_RNA (1)...(19): siRNA sense strand
ccuguuuauugcugcauuu

SEQ ID NO: 928868 - RNA, 19 nt, Homo sapiens
  misc_RNA (1)...(19): siRNA sense strand
ccacuggauuguguuucuu

SEQ ID NO: 928869 - RNA, 19 nt, Homo sapiens
  misc_RNA (1)...(19): siRNA sense strand
ucaugauugcugccacuua

SEQ ID NO: 928870 - RNA, 19 nt, Homo sapiens
  misc_RNA (1)...(19): siRNA sense strand
gcuaauugagaccuauuuc

SEQ ID NO: 928871 - RNA, 19 nt, Homo sapiens
  misc_RNA (1)...(19): siRNA sense strand
gaccuuccaccuguuuauu

SEQ ID NO: 928872 - RNA, 19 nt, Homo sapiens
  misc_RNA (1)...(19): siRNA sense strand
gaccaccugcgacucuauu

SEQ ID NO: 928873 - RNA, 19 nt, Homo sapiens
  misc_RNA (1)...(19): siRNA sense strand
aacaucaagcucauucuuu

SEQ ID NO: 928874 - RNA, 19 nt, Homo sapiens
  misc_RNA (1)...(19): siRNA sense strand
aaagcuaauugagaccuau

SEQ ID NO: 928875 - RNA, 19 nt, Homo sapiens
  misc_RNA (1)...(19): siRNA sense strand
caguaugucaucuauggaa

SEQ ID NO: 928876 - RNA, 19 nt, Homo sapiens
  misc_RNA (1)...(19): siRNA sense strand
cuuccaguaugucaucuau

SEQ ID NO: 928877 - RNA, 19 nt, Homo sapiens
  misc_RNA (1)...(19): siRNA sense strand
guucucccauggauugcuu

SEQ ID NO: 928878 - RNA, 19 nt, Homo sapiens
  misc_RNA (1)...(19): siRNA sense strand
ccaagacuaugaguaucuc

SEQ ID NO: 928879 - RNA, 19 nt, Homo sapiens
  misc_RNA (1)...(19): siRNA sense strand
guuagagugcugugcaaga

SEQ ID NO: 928880 - RNA, 19 nt, Homo sapiens
  misc_RNA (1)...(19): siRNA sense strand
gccaacaucaagcucauuc

SEQ ID NO: 928881 - RNA, 19 nt, Homo sapiens
  misc_RNA (1)...(19): siRNA sense strand
gccucuuucuucuuccuuu

SEQ ID NO: 928882 - RNA, 19 nt, Homo sapiens
  misc_RNA (1)...(19): siRNA sense strand
caguauaggcagucucugu

SEQ ID NO: 928883 - RNA, 19 nt, Homo sapiens
  misc_RNA (1)...(19): siRNA sense strand
cugugcccguguacauuua

SEQ ID NO: 928884 - RNA, 19 nt, Homo sapiens
  misc_RNA (1)...(19): siRNA sense strand
ggaccaccugcgacucuau

SEQ ID NO: 928885 - RNA, 19 nt, Homo sapiens
  misc_RNA (1)...(19): siRNA sense strand
aaaugaccuuccaccuguu

SEQ ID NO: 928886 - RNA, 19 nt, Homo sapiens
  misc_RNA (1)...(19): siRNA sense strand
ugcugccacuuacaacuuu

SEQ ID NO: 928887 - RNA, 19 nt, Homo sapiens
  misc_RNA (1)...(19): siRNA sense strand
ucaaagagcuggagaaccu

SEQ ID NO: 928888 - RNA, 19 nt, Homo sapiens
  misc_RNA (1)...(19): siRNA sense strand
gcccacaggugaugagcua

SEQ ID NO: 928889 - RNA, 19 nt, Homo sapiens
  misc_RNA (1)...(19): siRNA sense strand
ugacagcacugcacagcuu

SEQ ID NO: 928890 - RNA, 19 nt, Homo sapiens
  misc_RNA (1)...(19): siRNA sense strand
cgaagauggucaaguccua

SEQ ID NO: 928891 - RNA, 19 nt, Homo sapiens
  misc_RNA (1)...(19): siRNA sense strand
gugaugagcuaccaaccaa

SEQ ID NO: 928892 - RNA, 19 nt, Homo sapiens
  misc_RNA (1)...(19): siRNA sense strand
ggaggaaccguuucaagug

SEQ ID NO: 928893 - RNA, 19 nt, Homo sapiens
  misc_RNA (1)...(19): siRNA sense strand
caagggcacucccaugaag

SEQ ID NO: 928894 - RNA, 19 nt, Homo sapiens
  misc_RNA (1)...(19): siRNA sense strand
gagcaaagaggcacugauc

SEQ ID NO: 928895 - RNA, 19 nt, Homo sapiens
  misc_RNA (1)...(19): siRNA sense strand
uggcugagcugcccaaugg

SEQ ID NO: 928896 - RNA, 19 nt, Homo sapiens
  misc_RNA (1)...(19): siRNA sense strand
ggcacaagcuggccaugga

SEQ ID NO: 928897 - RNA, 19 nt, Homo sapiens
  misc_RNA (1)...(19): siRNA sense strand
ccacccagauggccucuuc

SEQ ID NO: 928898 - RNA, 19 nt, Homo sapiens
  misc_RNA (1)...(19): siRNA sense strand
gcaaagaggcacugaucca

SEQ ID NO: 928899 - RNA, 19 nt, Homo sapiens
  misc_RNA (1)...(19): siRNA sense strand
agggagggcugauugaaga

SEQ ID NO: 928900 - RNA, 19 nt, Homo sapiens
  misc_RNA (1)...(19): siRNA sense strand
gaugagcuaccaaccaaga

SEQ ID NO: 928901 - RNA, 19 nt, Homo sapiens
  misc_RNA (1)...(19): siRNA sense strand
gaagagcccacaggugaug

SEQ ID NO: 928902 - RNA, 19 nt, Homo sapiens
  misc_RNA (1)...(19): siRNA sense strand
gguccuacguucaccaaca

SEQ ID NO: 928903 - RNA, 19 nt, Homo sapiens
  misc_RNA (1)...(19): siRNA sense strand
gcaauagggcggaaugcau

SEQ ID NO: 928904 - RNA, 19 nt, Homo sapiens
  misc_RNA (1)...(19): siRNA sense strand
gcagaaguacccucaagca

SEQ ID NO: 928905 - RNA, 19 nt, Homo sapiens
  misc_RNA (1)...(19): siRNA sense strand
uggcgaagauggucaaguc

SEQ ID NO: 928906 - RNA, 19 nt, Homo sapiens
  misc_RNA (1)...(19): siRNA sense strand
ggaggugcgugucuacaac

SEQ ID NO: 928907 - RNA, 19 nt, Homo sapiens
  misc_RNA (1)...(19): siRNA sense strand
gagcucagacuccagcaau

SEQ ID NO: 928908 - RNA, 19 nt, Homo sapiens
  misc_RNA (1)...(19): siRNA sense strand
ccuaugagaggcagaagaa

SEQ ID NO: 928909 - RNA, 19 nt, Homo sapiens
  misc_RNA (1)...(19): siRNA sense strand
ggacgagacggacgacgau

SEQ ID NO: 928910 - RNA, 19 nt, Homo sapiens
  misc_RNA (1)...(19): siRNA sense strand
gcagggagggcugauugaa

SEQ ID NO: 928911 - RNA, 19 nt, Homo sapiens
  misc_RNA (1)...(19): siRNA sense strand
agaagaacccuagcaagga

SEQ ID NO: 928912 - RNA, 19 nt, Homo sapiens
  misc_RNA (1)...(19): siRNA sense strand
gagagguggcgcagcaguu

SEQ ID NO: 928913 - RNA, 19 nt, Homo sapiens
  misc_RNA (1)...(19): siRNA sense strand
aacaagggcacucccauga

SEQ ID NO: 928914 - RNA, 19 nt, Homo sapiens
  misc_RNA (1)...(19): siRNA sense strand
cggaggaaccguuucaagu

SEQ ID NO: 928915 - RNA, 19 nt, Homo sapiens
  misc_RNA (1)...(19): siRNA sense strand
cgccacccauccucaaaga

SEQ ID NO: 928916 - RNA, 19 nt, Homo sapiens
  misc_RNA (1)...(19): siRNA sense strand
gguccacggugugcgcuau

SEQ ID NO: 928917 - RNA, 19 nt, Homo sapiens
  misc_RNA (1)...(19): siRNA sense strand
ggcagaagaacccuagcaa

SEQ ID NO: 928918 - RNA, 19 nt, Homo sapiens
  misc_RNA (1)...(19): siRNA sense strand
cgauaccacuggccucaac

SEQ ID NO: 928919 - RNA, 19 nt, Homo sapiens
  misc_RNA (1)...(19): siRNA sense strand
ccacgcaggcacagagugu

SEQ ID NO: 928920 - RNA, 19 nt, Homo sapiens
  misc_RNA (1)...(19): siRNA sense strand
gggcggaggaaccguuuca

SEQ ID NO: 928921 - RNA, 19 nt, Homo sapiens
  misc_RNA (1)...(19): siRNA sense strand
cugcagaaguacccucaag

SEQ ID NO: 928922 - RNA, 19 nt, Homo sapiens
  misc_RNA (1)...(19): siRNA sense strand
acaagggcacucccaugaa

SEQ ID NO: 928923 - RNA, 19 nt, Homo sapiens
  misc_RNA (1)...(19): siRNA sense strand
ggccucuuccucccaguaa

SEQ ID NO: 928924 - RNA, 19 nt, Homo sapiens
  misc_RNA (1)...(19): siRNA sense strand
gacagccugcgaccaguga

SEQ ID NO: 928925 - RNA, 19 nt, Homo sapiens
  misc_RNA (1)...(19): siRNA sense strand
gcucagacuccagcaaugg

SEQ ID NO: 928926 - RNA, 19 nt, Homo sapiens
  misc_RNA (1)...(19): siRNA sense strand
gcaaacacaucaucauuga

SEQ ID NO: 928927 - RNA, 19 nt, Homo sapiens
  misc_RNA (1)...(19): siRNA sense strand
gcagaaagcuuuauuugac

SEQ ID NO: 928928 - RNA, 19 nt, Homo sapiens
  misc_RNA (1)...(19): siRNA sense strand
ggacaaauguuggcuacaa

SEQ ID NO: 928929 - RNA, 19 nt, Homo sapiens
  misc_RNA (1)...(19): siRNA sense strand
ggaagaagacuaugaggaa

SEQ ID NO: 928930 - RNA, 19 nt, Homo sapiens
  misc_RNA (1)...(19): siRNA sense strand
gcaaauacagcaagaggaa

SEQ ID NO: 928931 - RNA, 19 nt, Homo sapiens
  misc_RNA (1)...(19): siRNA sense strand
gcgagcaucuggcggagua

SEQ ID NO: 928932 - RNA, 19 nt, Homo sapiens
  misc_RNA (1)...(19): siRNA sense strand
uuacagacaugaugcagaa

SEQ ID NO: 928933 - RNA, 19 nt, Homo sapiens
  misc_RNA (1)...(19): siRNA sense strand
gaaagucucaguccaaaca

SEQ ID NO: 928934 - RNA, 19 nt, Homo sapiens
  misc_RNA (1)...(19): siRNA sense strand
gcuaagcgcucaguucuca

SEQ ID NO: 928935 - RNA, 19 nt, Homo sapiens
  misc_RNA (1)...(19): siRNA sense strand
acaccucaauguccaaaua

SEQ ID NO: 928936 - RNA, 19 nt, Homo sapiens
  misc_RNA (1)...(19): siRNA sense strand
gaggaaagggcgauucaaa

SEQ ID NO: 928937 - RNA, 19 nt, Homo sapiens
  misc_RNA (1)...(19): siRNA sense strand
gggagcacguccucggaua

SEQ ID NO: 928938 - RNA, 19 nt, Homo sapiens
  misc_RNA (1)...(19): siRNA sense strand
ggacgaggaagaagacuau

SEQ ID NO: 928939 - RNA, 19 nt, Homo sapiens
  misc_RNA (1)...(19): siRNA sense strand
gaaggagggcugugagguu

SEQ ID NO: 928940 - RNA, 19 nt, Homo sapiens
  misc_RNA (1)...(19): siRNA sense strand
aggaagagcugaccgacaa

SEQ ID NO: 928941 - RNA, 19 nt, Homo sapiens
  misc_RNA (1)...(19): siRNA sense strand
uggcugaggugcagaguga

SEQ ID NO: 928942 - RNA, 19 nt, Homo sapiens
  misc_RNA (1)...(19): siRNA sense strand
gacaaauguuggcuacaau

SEQ ID NO: 928943 - RNA, 19 nt, Homo sapiens
  misc_RNA (1)...(19): siRNA sense strand
ccaaagacuuccugcacau

SEQ ID NO: 928944 - RNA, 19 nt, Homo sapiens
  misc_RNA (1)...(19): siRNA sense strand
cagcaaacacaucaucauu

SEQ ID NO: 928945 - RNA, 19 nt, Homo sapiens
  misc_RNA (1)...(19): siRNA sense strand
gaggaaagucucaguccaa

SEQ ID NO: 928946 - RNA, 19 nt, Homo sapiens
  misc_RNA (1)...(19): siRNA sense strand
ggaggaccgggaagccuua

SEQ ID NO: 928947 - RNA, 19 nt, Homo sapiens
  misc_RNA (1)...(19): siRNA sense strand
gcuacgagguuacagacau

SEQ ID NO: 928948 - RNA, 19 nt, Homo sapiens
  misc_RNA (1)...(19): siRNA sense strand
gcucaagggcuacgagguu

SEQ ID NO: 928949 - RNA, 19 nt, Homo sapiens
  misc_RNA (1)...(19): siRNA sense strand
gaugcagaaagcuuuauuu

SEQ ID NO: 928950 - RNA, 19 nt, Homo sapiens
  misc_RNA (1)...(19): siRNA sense strand
ugaaaucgagcgaaucuuc

SEQ ID NO: 928951 - RNA, 19 nt, Homo sapiens
  misc_RNA (1)...(19): siRNA sense strand
caucauuguuuacaucaag

SEQ ID NO: 928952 - RNA, 19 nt, Homo sapiens
  misc_RNA (1)...(19): siRNA sense strand
ggaaagggcgauucaaacg

SEQ ID NO: 928953 - RNA, 19 nt, Homo sapiens
  misc_RNA (1)...(19): siRNA sense strand
guguggacauggagacuga

SEQ ID NO: 928954 - RNA, 19 nt, Homo sapiens
  misc_RNA (1)...(19): siRNA sense strand
aagcagagcgccaggcauu

SEQ ID NO: 928955 - RNA, 19 nt, Homo sapiens
  misc_RNA (1)...(19): siRNA sense strand
agagugaaaucgagcgaau

SEQ ID NO: 928956 - RNA, 19 nt, Homo sapiens
  misc_RNA (1)...(19): siRNA sense strand
gcaaaucaggcgauaacuc

SEQ ID NO: 928957 - RNA, 19 nt, Homo sapiens
  misc_RNA (1)...(19): siRNA sense strand
gcacaucaaggagaaauac

SEQ ID NO: 928958 - RNA, 19 nt, Homo sapiens
  misc_RNA (1)...(19): siRNA sense strand
aacagaagcugcgccagaa

SEQ ID NO: 928959 - RNA, 19 nt, Homo sapiens
  misc_RNA (1)...(19): siRNA sense strand
ggagaaauacaauaaugac

SEQ ID NO: 928960 - RNA, 19 nt, Homo sapiens
  misc_RNA (1)...(19): siRNA sense strand
cucaagggcuacgagguua

SEQ ID NO: 928961 - RNA, 19 nt, Homo sapiens
  misc_RNA (1)...(19): siRNA sense strand
gcagagcgccaggcauuag

SEQ ID NO: 928962 - RNA, 19 nt, Homo sapiens
  misc_RNA (1)...(19): siRNA sense strand
caaauagcggccucggaaa

SEQ ID NO: 928963 - RNA, 19 nt, Homo sapiens
  misc_RNA (1)...(19): siRNA sense strand
cagaaagcuuuauuugacu

SEQ ID NO: 928964 - RNA, 19 nt, Homo sapiens
  misc_RNA (1)...(19): siRNA sense strand
cuacgagguuacagacaug

SEQ ID NO: 928965 - RNA, 19 nt, Homo sapiens
  misc_RNA (1)...(19): siRNA sense strand
guacuucaaaggcucauca

SEQ ID NO: 928966 - RNA, 19 nt, Homo sapiens
  misc_RNA (1)...(19): siRNA sense strand
aggaaagucucaguccaaa

SEQ ID NO: 928967 - RNA, 19 nt, Homo sapiens
  misc_RNA (1)...(19): siRNA sense strand
uucaaaggcucaucaaguc

SEQ ID NO: 928968 - RNA, 19 nt, Homo sapiens
  misc_RNA (1)...(19): siRNA sense strand
gcgcucaguucucaacaac

SEQ ID NO: 928969 - RNA, 19 nt, Homo sapiens
  misc_RNA (1)...(19): siRNA sense strand
caucaagucccgaggaaag

SEQ ID NO: 928970 - RNA, 19 nt, Homo sapiens
  misc_RNA (1)...(19): siRNA sense strand
caugaugcagaaagcuuua

SEQ ID NO: 928971 - RNA, 19 nt, Homo sapiens
  misc_RNA (1)...(19): siRNA sense strand
caucaaggagaaauacaau

SEQ ID NO: 928972 - RNA, 19 nt, Homo sapiens
  misc_RNA (1)...(19): siRNA sense strand
guacuuggaagccuauugg

SEQ ID NO: 928973 - RNA, 19 nt, Homo sapiens
  misc_RNA (1)...(19): siRNA sense strand
gcugugcggacaaauguug

SEQ ID NO: 928974 - RNA, 19 nt, Homo sapiens
  misc_RNA (1)...(19): siRNA sense strand
gggaggacgaggaagaaga

SEQ ID NO: 928975 - RNA, 19 nt, Homo sapiens
  misc_RNA (1)...(19): siRNA sense strand
gcugugagguuggcuucau

SEQ ID NO: 928976 - RNA, 19 nt, Homo sapiens
  misc_RNA (1)...(19): siRNA sense strand
cagggcaaauacagcaaga

SEQ ID NO: 928977 - RNA, 19 nt, Homo sapiens
  misc_RNA (1)...(19): siRNA sense strand
uaccacauccaacagcuuu

SEQ ID NO: 928978 - RNA, 19 nt, Homo sapiens
  misc_RNA (1)...(19): siRNA sense strand
gaaagcuuuauuugacuuc

SEQ ID NO: 928979 - RNA, 19 nt, Homo sapiens
  misc_RNA (1)...(19): siRNA sense strand
cagcaaaucaggcgauaac

SEQ ID NO: 928980 - RNA, 19 nt, Homo sapiens
  misc_RNA (1)...(19): siRNA sense strand
caaauacagcaagaggaaa

SEQ ID NO: 928981 - RNA, 19 nt, Homo sapiens
  misc_RNA (1)...(19): siRNA sense strand
cuucaaaggcucaucaagu

SEQ ID NO: 928982 - RNA, 19 nt, Homo sapiens
  misc_RNA (1)...(19): siRNA sense strand
gcugaggugcagagugaaa

SEQ ID NO: 928983 - RNA, 19 nt, Homo sapiens
  misc_RNA (1)...(19): siRNA sense strand
ugcagaaagcuuuauuuga

SEQ ID NO: 928984 - RNA, 19 nt, Homo sapiens
  misc_RNA (1)...(19): siRNA sense strand
gacaugaugcagaaagcuu

SEQ ID NO: 928985 - RNA, 19 nt, Homo sapiens
  misc_RNA (1)...(19): siRNA sense strand
cauuagcgcagcucgagaa

SEQ ID NO: 928986 - RNA, 19 nt, Homo sapiens
  misc_RNA (1)...(19): siRNA sense strand
gacguggugccuuccauga

SEQ ID NO: 928987 - RNA, 19 nt, Homo sapiens
  misc_RNA (1)...(19): siRNA sense strand
cgccucggcuccagcaaau

SEQ ID NO: 928988 - RNA, 19 nt, Homo sapiens
  misc_RNA (1)...(19): siRNA sense strand
ggagcugggagacucaugu

SEQ ID NO: 928989 - RNA, 19 nt, Homo sapiens
  misc_RNA (1)...(19): siRNA sense strand
gcaagaggaaagggcgauu

SEQ ID NO: 928990 - RNA, 19 nt, Homo sapiens
  misc_RNA (1)...(19): siRNA sense strand
gcagaagucgacagagcau

SEQ ID NO: 928991 - RNA, 19 nt, Homo sapiens
  misc_RNA (1)...(19): siRNA sense strand
gaguggccaucaccuucga

SEQ ID NO: 928992 - RNA, 19 nt, Homo sapiens
  misc_RNA (1)...(19): siRNA sense strand
ggaguacuuggaagccuau

SEQ ID NO: 928993 - RNA, 19 nt, Homo sapiens
  misc_RNA (1)...(19): siRNA sense strand
aaagacuuccugcacauca

SEQ ID NO: 928994 - RNA, 19 nt, Homo sapiens
  misc_RNA (1)...(19): siRNA sense strand
gcaucuggcggaguacuug

SEQ ID NO: 928995 - RNA, 19 nt, Homo sapiens
  misc_RNA (1)...(19): siRNA sense strand
ggaccgggaagccuuaagg

SEQ ID NO: 928996 - RNA, 19 nt, Homo sapiens
  misc_RNA (1)...(19): siRNA sense strand
ucgagaaggccaagaccaa

SEQ ID NO: 928997 - RNA, 19 nt, Homo sapiens
  misc_RNA (1)...(19): siRNA sense strand
agaagacuaugaggaagag

SEQ ID NO: 928998 - RNA, 19 nt, Homo sapiens
  misc_RNA (1)...(19): siRNA sense strand
cgaggaagaagacuaugag

SEQ ID NO: 928999 - RNA, 19 nt, Homo sapiens
  misc_RNA (1)...(19): siRNA sense strand
ggaggacgaggaagaagac

SEQ ID NO: 929000 - RNA, 19 nt, Homo sapiens
  misc_RNA (1)...(19): siRNA sense strand
aagaagacuaugaggaaga

SEQ ID NO: 929001 - RNA, 19 nt, Homo sapiens
  misc_RNA (1)...(19): siRNA sense strand
agaagucgacagagcaugu

SEQ ID NO: 929002 - RNA, 19 nt, Homo sapiens
  misc_RNA (1)...(19): siRNA sense strand
gagcugggagacucaugug

SEQ ID NO: 929003 - RNA, 19 nt, Homo sapiens
  misc_RNA (1)...(19): siRNA sense strand
acgccagcaugcacgagua

SEQ ID NO: 929004 - RNA, 19 nt, Homo sapiens
  misc_RNA (1)...(19): siRNA sense strand
augcagaaagcuuuauuug

SEQ ID NO: 929005 - RNA, 19 nt, Homo sapiens
  misc_RNA (1)...(19): siRNA sense strand
gaagucgacagagcaugug

SEQ ID NO: 929006 - RNA, 19 nt, Homo sapiens
  misc_RNA (1)...(19): siRNA sense strand
gaagagagccugcaacacu

SEQ ID NO: 929007 - RNA, 19 nt, Homo sapiens
  misc_RNA (1)...(19): siRNA sense strand
gcaggacuaugugcagaug

SEQ ID NO: 929008 - RNA, 19 nt, Homo sapiens
  misc_RNA (1)...(19): siRNA sense strand
gcaacuucgugcccaccaa

SEQ ID NO: 929009 - RNA, 19 nt, Homo sapiens
  misc_RNA (1)...(19): siRNA sense strand
cagaagagagccugcaaca

SEQ ID NO: 929010 - RNA, 19 nt, Homo sapiens
  misc_RNA (1)...(19): siRNA sense strand
gaaggccagugagcugaag

SEQ ID NO: 929011 - RNA, 19 nt, Homo sapiens
  misc_RNA (1)...(19): siRNA sense strand
cggccacacucaguaaaga

SEQ ID NO: 929012 - RNA, 19 nt, Homo sapiens
  misc_RNA (1)...(19): siRNA sense strand
aggacuaugugcagaugaa

SEQ ID NO: 929013 - RNA, 19 nt, Homo sapiens
  misc_RNA (1)...(19): siRNA sense strand
ucaguaucuugguccugua

SEQ ID NO: 929014 - RNA, 19 nt, Homo sapiens
  misc_RNA (1)...(19): siRNA sense strand
caacuucgugcccaccaau

SEQ ID NO: 929015 - RNA, 19 nt, Homo sapiens
  misc_RNA (1)...(19): siRNA sense strand
cuuccuggcucucaguauc

SEQ ID NO: 929016 - RNA, 19 nt, Homo sapiens
  misc_RNA (1)...(19): siRNA sense strand
gaagagagccugcaacacu

SEQ ID NO: 929017 - RNA, 19 nt, Homo sapiens
  misc_RNA (1)...(19): siRNA sense strand
gcaggacuaugugcagaug

SEQ ID NO: 929018 - RNA, 19 nt, Homo sapiens
  misc_RNA (1)...(19): siRNA sense strand
gcaacuucgugcccaccaa

SEQ ID NO: 929019 - RNA, 19 nt, Homo sapiens
  misc_RNA (1)...(19): siRNA sense strand
cagaagagagccugcaaca

SEQ ID NO: 929020 - RNA, 19 nt, Homo sapiens
  misc_RNA (1)...(19): siRNA sense strand
gaaggccagugagcugaag

SEQ ID NO: 929021 - RNA, 19 nt, Homo sapiens
  misc_RNA (1)...(19): siRNA sense strand
cggccacacucaguaaaga

SEQ ID NO: 929022 - RNA, 19 nt, Homo sapiens
  misc_RNA (1)...(19): siRNA sense strand
aggacuaugugcagaugaa

SEQ ID NO: 929023 - RNA, 19 nt, Homo sapiens
  misc_RNA (1)...(19): siRNA sense strand
ucaguaucuugguccugua

SEQ ID NO: 929024 - RNA, 19 nt, Homo sapiens
  misc_RNA (1)...(19): siRNA sense strand
caacuucgugcccaccaau

SEQ ID NO: 929025 - RNA, 19 nt, Homo sapiens
  misc_RNA (1)...(19): siRNA sense strand
cuuccuggcucucaguauc

SEQ ID NO: 929026 - RNA, 19 nt, Homo sapiens
  misc_RNA (1)...(19): siRNA sense strand
ccaaagagauucaagauga

SEQ ID NO: 929027 - RNA, 19 nt, Homo sapiens
  misc_RNA (1)...(19): siRNA sense strand
gaagguggaugaaguaaac

SEQ ID NO: 929028 - RNA, 19 nt, Homo sapiens
  misc_RNA (1)...(19): siRNA sense strand
cgacaagaccaaagccuua

SEQ ID NO: 929029 - RNA, 19 nt, Homo sapiens
  misc_RNA (1)...(19): siRNA sense strand
ggaaguauguugccauggu

SEQ ID NO: 929030 - RNA, 19 nt, Homo sapiens
  misc_RNA (1)...(19): siRNA sense strand
caaagaagccauccaaagu

SEQ ID NO: 929031 - RNA, 19 nt, Homo sapiens
  misc_RNA (1)...(19): siRNA sense strand
ccaugaaccucaaggacua

SEQ ID NO: 929032 - RNA, 19 nt, Homo sapiens
  misc_RNA (1)...(19): siRNA sense strand
ucucaaaucugaauugcuu

SEQ ID NO: 929033 - RNA, 19 nt, Homo sapiens
  misc_RNA (1)...(19): siRNA sense strand
gaccaaagccuuacucaag

SEQ ID NO: 929034 - RNA, 19 nt, Homo sapiens
  misc_RNA (1)...(19): siRNA sense strand
ucacugugcucgucuucua

SEQ ID NO: 929035 - RNA, 19 nt, Homo sapiens
  misc_RNA (1)...(19): siRNA sense strand
gccgagcucucaaaucuga

SEQ ID NO: 929036 - RNA, 19 nt, Homo sapiens
  misc_RNA (1)...(19): siRNA sense strand
caaagugucaaguauauug

SEQ ID NO: 929037 - RNA, 19 nt, Homo sapiens
  misc_RNA (1)...(19): siRNA sense strand
ucaagcaaaucuggaauga

SEQ ID NO: 929038 - RNA, 19 nt, Homo sapiens
  misc_RNA (1)...(19): siRNA sense strand
cauccaaagugucaaguau

SEQ ID NO: 929039 - RNA, 19 nt, Homo sapiens
  misc_RNA (1)...(19): siRNA sense strand
caagaugauuggaaguaug

SEQ ID NO: 929040 - RNA, 19 nt, Homo sapiens
  misc_RNA (1)...(19): siRNA sense strand
gagcggcuguuugaagauu

SEQ ID NO: 929041 - RNA, 19 nt, Homo sapiens
  misc_RNA (1)...(19): siRNA sense strand
caaagagauucaagaugau

SEQ ID NO: 929042 - RNA, 19 nt, Homo sapiens
  misc_RNA (1)...(19): siRNA sense strand
gugccgagcucucaaaucu

SEQ ID NO: 929043 - RNA, 19 nt, Homo sapiens
  misc_RNA (1)...(19): siRNA sense strand
gaucggcucuuccaugaac

SEQ ID NO: 929044 - RNA, 19 nt, Homo sapiens
  misc_RNA (1)...(19): siRNA sense strand
cagacauugugcuguauaa

SEQ ID NO: 929045 - RNA, 19 nt, Homo sapiens
  misc_RNA (1)...(19): siRNA sense strand
gugcuaaccucacgagaag

SEQ ID NO: 929046 - RNA, 19 nt, Homo sapiens
  misc_RNA (1)...(19): siRNA sense strand
aagcaaaucuggaaugacu

SEQ ID NO: 929047 - RNA, 19 nt, Homo sapiens
  misc_RNA (1)...(19): siRNA sense strand
aaaugaagccaaagagauu

SEQ ID NO: 929048 - RNA, 19 nt, Homo sapiens
  misc_RNA (1)...(19): siRNA sense strand
ccucaugggugaagacugu

SEQ ID NO: 929049 - RNA, 19 nt, Homo sapiens
  misc_RNA (1)...(19): siRNA sense strand
acuacaagcugaaguggaa

SEQ ID NO: 929050 - RNA, 19 nt, Homo sapiens
  misc_RNA (1)...(19): siRNA sense strand
gagaguaccuccuguucac

SEQ ID NO: 929051 - RNA, 19 nt, Homo sapiens
  misc_RNA (1)...(19): siRNA sense strand
gcugagcaccgucuauuug

SEQ ID NO: 929052 - RNA, 19 nt, Homo sapiens
  misc_RNA (1)...(19): siRNA sense strand
ugaccuacuucccguuuga

SEQ ID NO: 929053 - RNA, 19 nt, Homo sapiens
  misc_RNA (1)...(19): siRNA sense strand
uccaaagugucaaguauau

SEQ ID NO: 929054 - RNA, 19 nt, Homo sapiens
  misc_RNA (1)...(19): siRNA sense strand
gaaggugacccugugcauu

SEQ ID NO: 929055 - RNA, 19 nt, Homo sapiens
  misc_RNA (1)...(19): siRNA sense strand
gagaucauccggccuguag

SEQ ID NO: 929056 - RNA, 19 nt, Homo sapiens
  misc_RNA (1)...(19): siRNA sense strand
ucaagaugauuggaaguau

SEQ ID NO: 929057 - RNA, 19 nt, Homo sapiens
  misc_RNA (1)...(19): siRNA sense strand
ggugaagguggaugaagua

SEQ ID NO: 929058 - RNA, 19 nt, Homo sapiens
  misc_RNA (1)...(19): siRNA sense strand
ggccagggaagaugcauaa

SEQ ID NO: 929059 - RNA, 19 nt, Homo sapiens
  misc_RNA (1)...(19): siRNA sense strand
cgagugggccaucaucaaa

SEQ ID NO: 929060 - RNA, 19 nt, Homo sapiens
  misc_RNA (1)...(19): siRNA sense strand
uaccaaaacuguaccauga

SEQ ID NO: 929061 - RNA, 19 nt, Homo sapiens
  misc_RNA (1)...(19): siRNA sense strand
gaagccauccaaaguguca

SEQ ID NO: 929062 - RNA, 19 nt, Homo sapiens
  misc_RNA (1)...(19): siRNA sense strand
cugaucggcucuuccauga

SEQ ID NO: 929063 - RNA, 19 nt, Homo sapiens
  misc_RNA (1)...(19): siRNA sense strand
ggaaugacuacaagcugaa

SEQ ID NO: 929064 - RNA, 19 nt, Homo sapiens
  misc_RNA (1)...(19): siRNA sense strand
aagaagccauccaaagugu

SEQ ID NO: 929065 - RNA, 19 nt, Homo sapiens
  misc_RNA (1)...(19): siRNA sense strand
ucaaagaagccauccaaag

SEQ ID NO: 929066 - RNA, 19 nt, Homo sapiens
  misc_RNA (1)...(19): siRNA sense strand
gcucuuccaugaaccucaa

SEQ ID NO: 929067 - RNA, 19 nt, Homo sapiens
  misc_RNA (1)...(19): siRNA sense strand
aaggugacccugugcauuu

SEQ ID NO: 929068 - RNA, 19 nt, Homo sapiens
  misc_RNA (1)...(19): siRNA sense strand
ugucucagcuggugaaggu

SEQ ID NO: 929069 - RNA, 19 nt, Homo sapiens
  misc_RNA (1)...(19): siRNA sense strand
agccagacauugugcugua

SEQ ID NO: 929070 - RNA, 19 nt, Homo sapiens
  misc_RNA (1)...(19): siRNA sense strand
aaagaagccauccaaagug

SEQ ID NO: 929071 - RNA, 19 nt, Homo sapiens
  misc_RNA (1)...(19): siRNA sense strand
gacauugugcuguauaaca

SEQ ID NO: 929072 - RNA, 19 nt, Homo sapiens
  misc_RNA (1)...(19): siRNA sense strand
gcaaaucuggaaugacuac

SEQ ID NO: 929073 - RNA, 19 nt, Homo sapiens
  misc_RNA (1)...(19): siRNA sense strand
ccauggugauugaucguau

SEQ ID NO: 929074 - RNA, 19 nt, Homo sapiens
  misc_RNA (1)...(19): siRNA sense strand
guuugaagauuacaaugag

SEQ ID NO: 929075 - RNA, 19 nt, Homo sapiens
  misc_RNA (1)...(19): siRNA sense strand
ccuacuucccguuugauua

SEQ ID NO: 929076 - RNA, 19 nt, Homo sapiens
  misc_RNA (1)...(19): siRNA sense strand
aaaucgacgugaccuacuu

SEQ ID NO: 929077 - RNA, 19 nt, Homo sapiens
  misc_RNA (1)...(19): siRNA sense strand
uauuugagcggcuguuuga

SEQ ID NO: 929078 - RNA, 19 nt, Homo sapiens
  misc_RNA (1)...(19): siRNA sense strand
cauggugauugaucguauu

SEQ ID NO: 929079 - RNA, 19 nt, Homo sapiens
  misc_RNA (1)...(19): siRNA sense strand
gaagauuacaaugagauca

SEQ ID NO: 929080 - RNA, 19 nt, Homo sapiens
  misc_RNA (1)...(19): siRNA sense strand
ccagacauugugcuguaua

SEQ ID NO: 929081 - RNA, 19 nt, Homo sapiens
  misc_RNA (1)...(19): siRNA sense strand
gaugauuggaaguauguug

SEQ ID NO: 929082 - RNA, 19 nt, Homo sapiens
  misc_RNA (1)...(19): siRNA sense strand
ugaaguaaaccagaucaug

SEQ ID NO: 929083 - RNA, 19 nt, Homo sapiens
  misc_RNA (1)...(19): siRNA sense strand
ugucaaguauauugcugaa

SEQ ID NO: 929084 - RNA, 19 nt, Homo sapiens
  misc_RNA (1)...(19): siRNA sense strand
aaucaaagaagccauccaa

SEQ ID NO: 929085 - RNA, 19 nt, Homo sapiens
  misc_RNA (1)...(19): siRNA sense strand
gcucaacgugcacuacaga

SEQ ID NO: 929086 - RNA, 19 nt, Homo sapiens
  misc_RNA (1)...(19): siRNA sense strand
gaaccucaaggacuauugg

SEQ ID NO: 929087 - RNA, 19 nt, Homo sapiens
  misc_RNA (1)...(19): siRNA sense strand
ucacauacucgcuguacau

SEQ ID NO: 929088 - RNA, 19 nt, Homo sapiens
  misc_RNA (1)...(19): siRNA sense strand
uugagcggcuguuugaaga

SEQ ID NO: 929089 - RNA, 19 nt, Homo sapiens
  misc_RNA (1)...(19): siRNA sense strand
gcucaucuccuuccucacu

SEQ ID NO: 929090 - RNA, 19 nt, Homo sapiens
  misc_RNA (1)...(19): siRNA sense strand
aaaucgaucugguccugau

SEQ ID NO: 929091 - RNA, 19 nt, Homo sapiens
  misc_RNA (1)...(19): siRNA sense strand
agggacagcaggauuguuu

SEQ ID NO: 929092 - RNA, 19 nt, Homo sapiens
  misc_RNA (1)...(19): siRNA sense strand
gaagcucuaguucugaauc

SEQ ID NO: 929093 - RNA, 19 nt, Homo sapiens
  misc_RNA (1)...(19): siRNA sense strand
gcgagugggccaucaucaa

SEQ ID NO: 929094 - RNA, 19 nt, Homo sapiens
  misc_RNA (1)...(19): siRNA sense strand
aaucuggaaugacuacaag

SEQ ID NO: 929095 - RNA, 19 nt, Homo sapiens
  misc_RNA (1)...(19): siRNA sense strand
ggacagcaggauuguuucu

SEQ ID NO: 929096 - RNA, 19 nt, Homo sapiens
  misc_RNA (1)...(19): siRNA sense strand
gucccucucugcuuuguca

SEQ ID NO: 929097 - RNA, 19 nt, Homo sapiens
  misc_RNA (1)...(19): siRNA sense strand
aacacgacaucaaguacaa

SEQ ID NO: 929098 - RNA, 19 nt, Homo sapiens
  misc_RNA (1)...(19): siRNA sense strand
ggauaccuccggccaucuu

SEQ ID NO: 929099 - RNA, 19 nt, Homo sapiens
  misc_RNA (1)...(19): siRNA sense strand
gaugaaguaaaccagauca

SEQ ID NO: 929100 - RNA, 19 nt, Homo sapiens
  misc_RNA (1)...(19): siRNA sense strand
acccagucaucauccauuu

SEQ ID NO: 929101 - RNA, 19 nt, Homo sapiens
  misc_RNA (1)...(19): siRNA sense strand
uggaugaaguaaaccagau

SEQ ID NO: 929102 - RNA, 19 nt, Homo sapiens
  misc_RNA (1)...(19): siRNA sense strand
uaccuccuguucaccauga

SEQ ID NO: 929103 - RNA, 19 nt, Homo sapiens
  misc_RNA (1)...(19): siRNA sense strand
guuccugguccuacgauaa

SEQ ID NO: 929104 - RNA, 19 nt, Homo sapiens
  misc_RNA (1)...(19): siRNA sense strand
accaaagccuuacucaagu

SEQ ID NO: 929105 - RNA, 19 nt, Homo sapiens
  misc_RNA (1)...(19): siRNA sense strand
gcgugucccugcacagaag

SEQ ID NO: 929106 - RNA, 19 nt, Homo sapiens
  misc_RNA (1)...(19): siRNA sense strand
gccaaagagauucaagaug

SEQ ID NO: 929107 - RNA, 19 nt, Homo sapiens
  misc_RNA (1)...(19): siRNA sense strand
gcucucaaaucugaauugc

SEQ ID NO: 929108 - RNA, 19 nt, Homo sapiens
  misc_RNA (1)...(19): siRNA sense strand
gcucuaguucugaaucugu

SEQ ID NO: 929109 - RNA, 19 nt, Homo sapiens
  misc_RNA (1)...(19): siRNA sense strand
aggacgggaugugugguua

SEQ ID NO: 929110 - RNA, 19 nt, Homo sapiens
  misc_RNA (1)...(19): siRNA sense strand
uaagagcuccuguaaaauc

SEQ ID NO: 929111 - RNA, 19 nt, Homo sapiens
  misc_RNA (1)...(19): siRNA sense strand
ugaagguggaugaaguaaa

SEQ ID NO: 929112 - RNA, 19 nt, Homo sapiens
  misc_RNA (1)...(19): siRNA sense strand
agaccaaccuguggcucaa

SEQ ID NO: 929113 - RNA, 19 nt, Homo sapiens
  misc_RNA (1)...(19): siRNA sense strand
gacccagucaucauccauu

SEQ ID NO: 929114 - RNA, 19 nt, Homo sapiens
  misc_RNA (1)...(19): siRNA sense strand
gccagacauugugcuguau

SEQ ID NO: 929115 - RNA, 19 nt, Homo sapiens
  misc_RNA (1)...(19): siRNA sense strand
ccaaagugucaaguauauu

SEQ ID NO: 929116 - RNA, 19 nt, Homo sapiens
  misc_RNA (1)...(19): siRNA sense strand
cacacacaaugcccucaug

SEQ ID NO: 929117 - RNA, 19 nt, Homo sapiens
  misc_RNA (1)...(19): siRNA sense strand
aaacacgacaucaaguaca

SEQ ID NO: 929118 - RNA, 19 nt, Homo sapiens
  misc_RNA (1)...(19): siRNA sense strand
gauaccuccggccaucuuu

SEQ ID NO: 929119 - RNA, 19 nt, Homo sapiens
  misc_RNA (1)...(19): siRNA sense strand
uaccuccggccaucuuuaa

SEQ ID NO: 929120 - RNA, 19 nt, Homo sapiens
  misc_RNA (1)...(19): siRNA sense strand
caaaaugaagccaaagaga

SEQ ID NO: 929121 - RNA, 19 nt, Homo sapiens
  misc_RNA (1)...(19): siRNA sense strand
ucacgagaagcucuaguuc

SEQ ID NO: 929122 - RNA, 19 nt, Homo sapiens
  misc_RNA (1)...(19): siRNA sense strand
ucuccaauuucagugcuaa

SEQ ID NO: 929123 - RNA, 19 nt, Homo sapiens
  misc_RNA (1)...(19): siRNA sense strand
ggcugagcaccgucuauuu

SEQ ID NO: 929124 - RNA, 19 nt, Homo sapiens
  misc_RNA (1)...(19): siRNA sense strand
uggugaagguggaugaagu

SEQ ID NO: 929125 - RNA, 19 nt, Homo sapiens
  misc_RNA (1)...(19): siRNA sense strand
ccauccaaagugucaagua

SEQ ID NO: 929126 - RNA, 19 nt, Homo sapiens
  misc_RNA (1)...(19): siRNA sense strand
gaaaggagcucuggaaagu

SEQ ID NO: 929127 - RNA, 19 nt, Homo sapiens
  misc_RNA (1)...(19): siRNA sense strand
uggaaagucugauugaaga

SEQ ID NO: 929128 - RNA, 19 nt, Homo sapiens
  misc_RNA (1)...(19): siRNA sense strand
uccaagagauagucaaaga

SEQ ID NO: 929129 - RNA, 19 nt, Homo sapiens
  misc_RNA (1)...(19): siRNA sense strand
acuccuagcuggccuuauu

SEQ ID NO: 929130 - RNA, 19 nt, Homo sapiens
  misc_RNA (1)...(19): siRNA sense strand
gaaacugggcagaagaaga

SEQ ID NO: 929131 - RNA, 19 nt, Homo sapiens
  misc_RNA (1)...(19): siRNA sense strand
ggaaagagagaugccgaaa

SEQ ID NO: 929132 - RNA, 19 nt, Homo sapiens
  misc_RNA (1)...(19): siRNA sense strand
aaagagagaugccgaaaau

SEQ ID NO: 929133 - RNA, 19 nt, Homo sapiens
  misc_RNA (1)...(19): siRNA sense strand
aaacugggcagaagaagau

SEQ ID NO: 929134 - RNA, 19 nt, Homo sapiens
  misc_RNA (1)...(19): siRNA sense strand
gaggaaacugggcagaaga

SEQ ID NO: 929135 - RNA, 19 nt, Homo sapiens
  misc_RNA (1)...(19): siRNA sense strand
aaggagcucuggaaagucu

SEQ ID NO: 929136 - RNA, 19 nt, Homo sapiens
  misc_RNA (1)...(19): siRNA sense strand
gcucuggaaagucugauug

SEQ ID NO: 929137 - RNA, 19 nt, Homo sapiens
  misc_RNA (1)...(19): siRNA sense strand
gaaagagagaugccgaaaa

SEQ ID NO: 929138 - RNA, 19 nt, Homo sapiens
  misc_RNA (1)...(19): siRNA sense strand
agagauagucaaagagguu

SEQ ID NO: 929139 - RNA, 19 nt, Homo sapiens
  misc_RNA (1)...(19): siRNA sense strand
agagagaugccgaaaauuu

SEQ ID NO: 929140 - RNA, 19 nt, Homo sapiens
  misc_RNA (1)...(19): siRNA sense strand
agaggaaacugggcagaag

SEQ ID NO: 929141 - RNA, 19 nt, Homo sapiens
  misc_RNA (1)...(19): siRNA sense strand
gccgaaaauuugauugauu

SEQ ID NO: 929142 - RNA, 19 nt, Homo sapiens
  misc_RNA (1)...(19): siRNA sense strand
gagagaugccgaaaauuug

SEQ ID NO: 929143 - RNA, 19 nt, Homo sapiens
  misc_RNA (1)...(19): siRNA sense strand
ugaaaggagcucuggaaag

SEQ ID NO: 929144 - RNA, 19 nt, Homo sapiens
  misc_RNA (1)...(19): siRNA sense strand
ccugaaaggagcucuggaa

SEQ ID NO: 929145 - RNA, 19 nt, Homo sapiens
  misc_RNA (1)...(19): siRNA sense strand
uagcuggccuuauucuacu

SEQ ID NO: 929146 - RNA, 19 nt, Homo sapiens
  misc_RNA (1)...(19): siRNA sense strand
ccgaaaauuugauugauuc

SEQ ID NO: 929147 - RNA, 19 nt, Homo sapiens
  misc_RNA (1)...(19): siRNA sense strand
cugggcagaagaagauuua

SEQ ID NO: 929148 - RNA, 19 nt, Homo sapiens
  misc_RNA (1)...(19): siRNA sense strand
ucuggaaagucugauugaa

SEQ ID NO: 929149 - RNA, 19 nt, Homo sapiens
  misc_RNA (1)...(19): siRNA sense strand
ggccuuauucuacugacuu

SEQ ID NO: 929150 - RNA, 19 nt, Homo sapiens
  misc_RNA (1)...(19): siRNA sense strand
ggagcucuggaaagucuga

SEQ ID NO: 929151 - RNA, 19 nt, Homo sapiens
  misc_RNA (1)...(19): siRNA sense strand
gugaacaccucucagauuu

SEQ ID NO: 929152 - RNA, 19 nt, Homo sapiens
  misc_RNA (1)...(19): siRNA sense strand
ucacagaugcccuggaaua

SEQ ID NO: 929153 - RNA, 19 nt, Homo sapiens
  misc_RNA (1)...(19): siRNA sense strand
ggccaaaucuugugugaca

SEQ ID NO: 929154 - RNA, 19 nt, Homo sapiens
  misc_RNA (1)...(19): siRNA sense strand
gagaaaggaaagccacuaa

SEQ ID NO: 929155 - RNA, 19 nt, Homo sapiens
  misc_RNA (1)...(19): siRNA sense strand
ccaccgaccucuugguuuc

SEQ ID NO: 929156 - RNA, 19 nt, Homo sapiens
  misc_RNA (1)...(19): siRNA sense strand
ucaccuggcuaggcuauuu

SEQ ID NO: 929157 - RNA, 19 nt, Homo sapiens
  misc_RNA (1)...(19): siRNA sense strand
ucauugcucuggacaggua

SEQ ID NO: 929158 - RNA, 19 nt, Homo sapiens
  misc_RNA (1)...(19): siRNA sense strand
aaucacagaugcccuggaa

SEQ ID NO: 929159 - RNA, 19 nt, Homo sapiens
  misc_RNA (1)...(19): siRNA sense strand
ccucaucaauccaauaauc

SEQ ID NO: 929160 - RNA, 19 nt, Homo sapiens
  misc_RNA (1)...(19): siRNA sense strand
gaaaggaaagccacuaaaa

SEQ ID NO: 929161 - RNA, 19 nt, Homo sapiens
  misc_RNA (1)...(19): siRNA sense strand
uauuuaaacucccucauca

SEQ ID NO: 929162 - RNA, 19 nt, Homo sapiens
  misc_RNA (1)...(19): siRNA sense strand
gaacaccucucagauuucc

SEQ ID NO: 929163 - RNA, 19 nt, Homo sapiens
  misc_RNA (1)...(19): siRNA sense strand
ccacaguccucuccaaugc

SEQ ID NO: 929164 - RNA, 19 nt, Homo sapiens
  misc_RNA (1)...(19): siRNA sense strand
gaauccacccucacucuau

SEQ ID NO: 929165 - RNA, 19 nt, Homo sapiens
  misc_RNA (1)...(19): siRNA sense strand
ccucuugguuuccaucuug

SEQ ID NO: 929166 - RNA, 19 nt, Homo sapiens
  misc_RNA (1)...(19): siRNA sense strand
uaaacucccucaucaaucc

SEQ ID NO: 929167 - RNA, 19 nt, Homo sapiens
  misc_RNA (1)...(19): siRNA sense strand
acaucuggcuguccucuga

SEQ ID NO: 929168 - RNA, 19 nt, Homo sapiens
  misc_RNA (1)...(19): siRNA sense strand
cugcaucucugugucauug

SEQ ID NO: 929169 - RNA, 19 nt, Homo sapiens
  misc_RNA (1)...(19): siRNA sense strand
ccucuccaaugccuuugua

SEQ ID NO: 929170 - RNA, 19 nt, Homo sapiens
  misc_RNA (1)...(19): siRNA sense strand
gacagguacugggcaauca

SEQ ID NO: 929171 - RNA, 19 nt, Homo sapiens
  misc_RNA (1)...(19): siRNA sense strand
uccaacagaucccugaaug

SEQ ID NO: 929172 - RNA, 19 nt, Homo sapiens
  misc_RNA (1)...(19): siRNA sense strand
cagaugcccuggaauacag

SEQ ID NO: 929173 - RNA, 19 nt, Homo sapiens
  misc_RNA (1)...(19): siRNA sense strand
gaacgcaagaggauuucug

SEQ ID NO: 929174 - RNA, 19 nt, Homo sapiens
  misc_RNA (1)...(19): siRNA sense strand
ccaccaugaucgccauugu

SEQ ID NO: 929175 - RNA, 19 nt, Homo sapiens
  misc_RNA (1)...(19): siRNA sense strand
uggcuaggcuauuuaaacu

SEQ ID NO: 929176 - RNA, 19 nt, Homo sapiens
  misc_RNA (1)...(19): siRNA sense strand
ggacagguacugggcaauc

SEQ ID NO: 929177 - RNA, 19 nt, Homo sapiens
  misc_RNA (1)...(19): siRNA sense strand
guacugggcaaucacagau

SEQ ID NO: 929178 - RNA, 19 nt, Homo sapiens
  misc_RNA (1)...(19): siRNA sense strand
gaagaguuucggcaagcuu

SEQ ID NO: 929179 - RNA, 19 nt, Homo sapiens
  misc_RNA (1)...(19): siRNA sense strand
acccacaccuggaacuuug

SEQ ID NO: 929180 - RNA, 19 nt, Homo sapiens
  misc_RNA (1)...(19): siRNA sense strand
uguacucaccaccaucuua

SEQ ID NO: 929181 - RNA, 19 nt, Homo sapiens
  misc_RNA (1)...(19): siRNA sense strand
agaaaggaaagccacuaaa

SEQ ID NO: 929182 - RNA, 19 nt, Homo sapiens
  misc_RNA (1)...(19): siRNA sense strand
uccaaugccuuuguacuca

SEQ ID NO: 929183 - RNA, 19 nt, Homo sapiens
  misc_RNA (1)...(19): siRNA sense strand
ugaauccacccucacucua

SEQ ID NO: 929184 - RNA, 19 nt, Homo sapiens
  misc_RNA (1)...(19): siRNA sense strand
ccaucuuacucaccaggaa

SEQ ID NO: 929185 - RNA, 19 nt, Homo sapiens
  misc_RNA (1)...(19): siRNA sense strand
aauccacccucacucuaug

SEQ ID NO: 929186 - RNA, 19 nt, Homo sapiens
  misc_RNA (1)...(19): siRNA sense strand
cgagaaaggaaagccacua

SEQ ID NO: 929187 - RNA, 19 nt, Homo sapiens
  misc_RNA (1)...(19): siRNA sense strand
guacucaccaccaucuuac

SEQ ID NO: 929188 - RNA, 19 nt, Homo sapiens
  misc_RNA (1)...(19): siRNA sense strand
ggaaccgcauccugaaucc

SEQ ID NO: 929189 - RNA, 19 nt, Homo sapiens
  misc_RNA (1)...(19): siRNA sense strand
ccugccaacuaccugauug

SEQ ID NO: 929190 - RNA, 19 nt, Homo sapiens
  misc_RNA (1)...(19): siRNA sense strand
uuuaaacucccucaucaau

SEQ ID NO: 929191 - RNA, 19 nt, Homo sapiens
  misc_RNA (1)...(19): siRNA sense strand
aaucaagcuugcugacagu

SEQ ID NO: 929192 - RNA, 19 nt, Homo sapiens
  misc_RNA (1)...(19): siRNA sense strand
ccaaaucuugugugacauc

SEQ ID NO: 929193 - RNA, 19 nt, Homo sapiens
  misc_RNA (1)...(19): siRNA sense strand
acaccucucagauuuccua

SEQ ID NO: 929194 - RNA, 19 nt, Homo sapiens
  misc_RNA (1)...(19): siRNA sense strand
cuacauucccucgguguug

SEQ ID NO: 929195 - RNA, 19 nt, Homo sapiens
  misc_RNA (1)...(19): siRNA sense strand
ccucucagauuuccuacac

SEQ ID NO: 929196 - RNA, 19 nt, Homo sapiens
  misc_RNA (1)...(19): siRNA sense strand
caaaucuugugugacaucu

SEQ ID NO: 929197 - RNA, 19 nt, Homo sapiens
  misc_RNA (1)...(19): siRNA sense strand
caccuggcuaggcuauuua

SEQ ID NO: 929198 - RNA, 19 nt, Homo sapiens
  misc_RNA (1)...(19): siRNA sense strand
cuggaacgcaagaggauuu

SEQ ID NO: 929199 - RNA, 19 nt, Homo sapiens
  misc_RNA (1)...(19): siRNA sense strand
gccauugucugggccaucu

SEQ ID NO: 929200 - RNA, 19 nt, Homo sapiens
  misc_RNA (1)...(19): siRNA sense strand
gcccuggaauacaguaaac

SEQ ID NO: 929201 - RNA, 19 nt, Homo sapiens
  misc_RNA (1)...(19): siRNA sense strand
ccaucagcaucgccuauac

SEQ ID NO: 929202 - RNA, 19 nt, Homo sapiens
  misc_RNA (1)...(19): siRNA sense strand
gguacugggcaaucacaga

SEQ ID NO: 929203 - RNA, 19 nt, Homo sapiens
  misc_RNA (1)...(19): siRNA sense strand
ccaaggcccaggaggagau

SEQ ID NO: 929204 - RNA, 19 nt, Homo sapiens
  misc_RNA (1)...(19): siRNA sense strand
ucccucaucaauccaauaa

SEQ ID NO: 929205 - RNA, 19 nt, Homo sapiens
  misc_RNA (1)...(19): siRNA sense strand
gcucaacuccagccuccau

SEQ ID NO: 929206 - RNA, 19 nt, Homo sapiens
  misc_RNA (1)...(19): siRNA sense strand
guuaagaacugugcaaaua

SEQ ID NO: 929207 - RNA, 19 nt, Homo sapiens
  misc_RNA (1)...(19): siRNA sense strand
guaauaaagucucccuuaa

SEQ ID NO: 929208 - RNA, 19 nt, Homo sapiens
  misc_RNA (1)...(19): siRNA sense strand
gaacuacuguguaucuguu

SEQ ID NO: 929209 - RNA, 19 nt, Homo sapiens
  misc_RNA (1)...(19): siRNA sense strand
gaggaagaauuacaguuug

SEQ ID NO: 929210 - RNA, 19 nt, Homo sapiens
  misc_RNA (1)...(19): siRNA sense strand
aaacaugaguggaaauuuc

SEQ ID NO: 929211 - RNA, 19 nt, Homo sapiens
  misc_RNA (1)...(19): siRNA sense strand
ugauuuaucucucgucauu

SEQ ID NO: 929212 - RNA, 19 nt, Homo sapiens
  misc_RNA (1)...(19): siRNA sense strand
caucuuaucaugggaauua

SEQ ID NO: 929213 - RNA, 19 nt, Homo sapiens
  misc_RNA (1)...(19): siRNA sense strand
ggaaauuucaccuauauca

SEQ ID NO: 929214 - RNA, 19 nt, Homo sapiens
  misc_RNA (1)...(19): siRNA sense strand
ggugaaauuuccaucuauu

SEQ ID NO: 929215 - RNA, 19 nt, Homo sapiens
  misc_RNA (1)...(19): siRNA sense strand
guggaaauuucaccuauau

SEQ ID NO: 929216 - RNA, 19 nt, Homo sapiens
  misc_RNA (1)...(19): siRNA sense strand
gcaaauaccacaagaucau

SEQ ID NO: 929217 - RNA, 19 nt, Homo sapiens
  misc_RNA (1)...(19): siRNA sense strand
cagagggaauuguuaagaa

SEQ ID NO: 929218 - RNA, 19 nt, Homo sapiens
  misc_RNA (1)...(19): siRNA sense strand
acacugaaauggauugguu

SEQ ID NO: 929219 - RNA, 19 nt, Homo sapiens
  misc_RNA (1)...(19): siRNA sense strand
cauaugauucgccugauua

SEQ ID NO: 929220 - RNA, 19 nt, Homo sapiens
  misc_RNA (1)...(19): siRNA sense strand
gaguaaaccagaagauuug

SEQ ID NO: 929221 - RNA, 19 nt, Homo sapiens
  misc_RNA (1)...(19): siRNA sense strand
gaaauagccuccccaaagu

SEQ ID NO: 929222 - RNA, 19 nt, Homo sapiens
  misc_RNA (1)...(19): siRNA sense strand
ggaaucagaaucagcagaa

SEQ ID NO: 929223 - RNA, 19 nt, Homo sapiens
  misc_RNA (1)...(19): siRNA sense strand
gaguggaaauuucaccuau

SEQ ID NO: 929224 - RNA, 19 nt, Homo sapiens
  misc_RNA (1)...(19): siRNA sense strand
ugaguaaaccagaagauuu

SEQ ID NO: 929225 - RNA, 19 nt, Homo sapiens
  misc_RNA (1)...(19): siRNA sense strand
aaacagucguccugccuaa

SEQ ID NO: 929226 - RNA, 19 nt, Homo sapiens
  misc_RNA (1)...(19): siRNA sense strand
ggaaacaugaguggaaauu

SEQ ID NO: 929227 - RNA, 19 nt, Homo sapiens
  misc_RNA (1)...(19): siRNA sense strand
gcauaaacccgaaauaaaa

SEQ ID NO: 929228 - RNA, 19 nt, Homo sapiens
  misc_RNA (1)...(19): siRNA sense strand
ugaggaagaauuacaguuu

SEQ ID NO: 929229 - RNA, 19 nt, Homo sapiens
  misc_RNA (1)...(19): siRNA sense strand
caccagaguuugagauugu

SEQ ID NO: 929230 - RNA, 19 nt, Homo sapiens
  misc_RNA (1)...(19): siRNA sense strand
gaaacaugaguggaaauuu

SEQ ID NO: 929231 - RNA, 19 nt, Homo sapiens
  misc_RNA (1)...(19): siRNA sense strand
ucagaucacuuaauuuggu

SEQ ID NO: 929232 - RNA, 19 nt, Homo sapiens
  misc_RNA (1)...(19): siRNA sense strand
ucaccuauaucauugacaa

SEQ ID NO: 929233 - RNA, 19 nt, Homo sapiens
  misc_RNA (1)...(19): siRNA sense strand
gcacagugaugagcaagca

SEQ ID NO: 929234 - RNA, 19 nt, Homo sapiens
  misc_RNA (1)...(19): siRNA sense strand
auucacaggugcagucaua

SEQ ID NO: 929235 - RNA, 19 nt, Homo sapiens
  misc_RNA (1)...(19): siRNA sense strand
gaggaauaauuacuguguu

SEQ ID NO: 929236 - RNA, 19 nt, Homo sapiens
  misc_RNA (1)...(19): siRNA sense strand
gaagcauaaacccgaaaua

SEQ ID NO: 929237 - RNA, 19 nt, Homo sapiens
  misc_RNA (1)...(19): siRNA sense strand
caagauaucauugcgaaau

SEQ ID NO: 929238 - RNA, 19 nt, Homo sapiens
  misc_RNA (1)...(19): siRNA sense strand
ggaggaauaauuacugugu

SEQ ID NO: 929239 - RNA, 19 nt, Homo sapiens
  misc_RNA (1)...(19): siRNA sense strand
gcacacacgaggccuaugu

SEQ ID NO: 929240 - RNA, 19 nt, Homo sapiens
  misc_RNA (1)...(19): siRNA sense strand
gaaggugguuaagaacugu

SEQ ID NO: 929241 - RNA, 19 nt, Homo sapiens
  misc_RNA (1)...(19): siRNA sense strand
guauaucagccucguguuu

SEQ ID NO: 929242 - RNA, 19 nt, Homo sapiens
  misc_RNA (1)...(19): siRNA sense strand
aagcauaaacccgaaauaa

SEQ ID NO: 929243 - RNA, 19 nt, Homo sapiens
  misc_RNA (1)...(19): siRNA sense strand
gcacuuucaagauaucauu

SEQ ID NO: 929244 - RNA, 19 nt, Homo sapiens
  misc_RNA (1)...(19): siRNA sense strand
gaugagcaagcaguaauaa

SEQ ID NO: 929245 - RNA, 19 nt, Homo sapiens
  misc_RNA (1)...(19): siRNA sense strand
gaaauuuccgguccaucuu

SEQ ID NO: 929246 - RNA, 19 nt, Homo sapiens
  misc_RNA (1)...(19): siRNA sense strand
ucacuuaauuugguucuca

SEQ ID NO: 929247 - RNA, 19 nt, Homo sapiens
  misc_RNA (1)...(19): siRNA sense strand
gagcaagcaguaauaaagu

SEQ ID NO: 929248 - RNA, 19 nt, Homo sapiens
  misc_RNA (1)...(19): siRNA sense strand
ggaauuguuaagaagcaua

SEQ ID NO: 929249 - RNA, 19 nt, Homo sapiens
  misc_RNA (1)...(19): siRNA sense strand
aaaggaaacaugaguggaa

SEQ ID NO: 929250 - RNA, 19 nt, Homo sapiens
  misc_RNA (1)...(19): siRNA sense strand
aguaauaaagucucccuua

SEQ ID NO: 929251 - RNA, 19 nt, Homo sapiens
  misc_RNA (1)...(19): siRNA sense strand
ugaaggugguuaagaacug

SEQ ID NO: 929252 - RNA, 19 nt, Homo sapiens
  misc_RNA (1)...(19): siRNA sense strand
ugaaacuccugagcucaaa

SEQ ID NO: 929253 - RNA, 19 nt, Homo sapiens
  misc_RNA (1)...(19): siRNA sense strand
aguuugagauuguugguuu

SEQ ID NO: 929254 - RNA, 19 nt, Homo sapiens
  misc_RNA (1)...(19): siRNA sense strand
ucauaugauucgccugauu

SEQ ID NO: 929255 - RNA, 19 nt, Homo sapiens
  misc_RNA (1)...(19): siRNA sense strand
aaucaugaguaaaccagaa

SEQ ID NO: 929256 - RNA, 19 nt, Homo sapiens
  misc_RNA (1)...(19): siRNA sense strand
ccuauaucauugacaaguu

SEQ ID NO: 929257 - RNA, 19 nt, Homo sapiens
  misc_RNA (1)...(19): siRNA sense strand
caucuauuguugaggaaga

SEQ ID NO: 929258 - RNA, 19 nt, Homo sapiens
  misc_RNA (1)...(19): siRNA sense strand
aggaagaauuacaguuuga

SEQ ID NO: 929259 - RNA, 19 nt, Homo sapiens
  misc_RNA (1)...(19): siRNA sense strand
gaagauuugaaggugguua

SEQ ID NO: 929260 - RNA, 19 nt, Homo sapiens
  misc_RNA (1)...(19): siRNA sense strand
gaaucagaaucagcagaau

SEQ ID NO: 929261 - RNA, 19 nt, Homo sapiens
  misc_RNA (1)...(19): siRNA sense strand
ccaccagaguuugagauug

SEQ ID NO: 929262 - RNA, 19 nt, Homo sapiens
  misc_RNA (1)...(19): siRNA sense strand
gugcaaauaccacaagauc

SEQ ID NO: 929263 - RNA, 19 nt, Homo sapiens
  misc_RNA (1)...(19): siRNA sense strand
aguggaaauuucaccuaua

SEQ ID NO: 929264 - RNA, 19 nt, Homo sapiens
  misc_RNA (1)...(19): siRNA sense strand
gaacagucagagggaauug

SEQ ID NO: 929265 - RNA, 19 nt, Homo sapiens
  misc_RNA (1)...(19): siRNA sense strand
ggauucagcgggaacacaa

SEQ ID NO: 929266 - RNA, 19 nt, Homo sapiens
  misc_RNA (1)...(19): siRNA sense strand
caaauaccacaagaucauu

SEQ ID NO: 929267 - RNA, 19 nt, Homo sapiens
  misc_RNA (1)...(19): siRNA sense strand
cagaucacuuaauuugguu

SEQ ID NO: 929268 - RNA, 19 nt, Homo sapiens
  misc_RNA (1)...(19): siRNA sense strand
aaauuuccgguccaucuua

SEQ ID NO: 929269 - RNA, 19 nt, Homo sapiens
  misc_RNA (1)...(19): siRNA sense strand
aaggaaacaugaguggaaa

SEQ ID NO: 929270 - RNA, 19 nt, Homo sapiens
  misc_RNA (1)...(19): siRNA sense strand
uaccaacucacuauacauu

SEQ ID NO: 929271 - RNA, 19 nt, Homo sapiens
  misc_RNA (1)...(19): siRNA sense strand
uaggaggaauaauuacugu

SEQ ID NO: 929272 - RNA, 19 nt, Homo sapiens
  misc_RNA (1)...(19): siRNA sense strand
ugagcaagcaguaauaaag

SEQ ID NO: 929273 - RNA, 19 nt, Homo sapiens
  misc_RNA (1)...(19): siRNA sense strand
acagaugaguggagaagca

SEQ ID NO: 929274 - RNA, 19 nt, Homo sapiens
  misc_RNA (1)...(19): siRNA sense strand
uaaagucucccuuaaaaug

SEQ ID NO: 929275 - RNA, 19 nt, Homo sapiens
  misc_RNA (1)...(19): siRNA sense strand
ccaacucacuauacauugc

SEQ ID NO: 929276 - RNA, 19 nt, Homo sapiens
  misc_RNA (1)...(19): siRNA sense strand
gacaagcaccauagugaca

SEQ ID NO: 929277 - RNA, 19 nt, Homo sapiens
  misc_RNA (1)...(19): siRNA sense strand
gaaccaccagaguuugaga

SEQ ID NO: 929278 - RNA, 19 nt, Homo sapiens
  misc_RNA (1)...(19): siRNA sense strand
gauaucauugcgaaauuuc

SEQ ID NO: 929279 - RNA, 19 nt, Homo sapiens
  misc_RNA (1)...(19): siRNA sense strand
cgaaauuuccgguccaucu

SEQ ID NO: 929280 - RNA, 19 nt, Homo sapiens
  misc_RNA (1)...(19): siRNA sense strand
ugaugagcaagcaguaaua

SEQ ID NO: 929281 - RNA, 19 nt, Homo sapiens
  misc_RNA (1)...(19): siRNA sense strand
agcauaaacccgaaauaaa

SEQ ID NO: 929282 - RNA, 19 nt, Homo sapiens
  misc_RNA (1)...(19): siRNA sense strand
agagggaauuguuaagaag

SEQ ID NO: 929283 - RNA, 19 nt, Homo sapiens
  misc_RNA (1)...(19): siRNA sense strand
gugaaauuuccaucuauug

SEQ ID NO: 929284 - RNA, 19 nt, Homo sapiens
  misc_RNA (1)...(19): siRNA sense strand
auuugaaggugguuaagaa

SEQ ID NO: 929285 - RNA, 19 nt, Homo sapiens
  misc_RNA (1)...(19): siRNA sense strand
acuacuguguaucuguuua

SEQ ID NO: 929286 - RNA, 19 nt, Homo sapiens
  misc_RNA (1)...(19): siRNA sense strand
auuuaucucucgucauuga

SEQ ID NO: 929287 - RNA, 19 nt, Homo sapiens
  misc_RNA (1)...(19): siRNA sense strand
uaagaacugugcaaauacc

SEQ ID NO: 929288 - RNA, 19 nt, Homo sapiens
  misc_RNA (1)...(19): siRNA sense strand
ccucguguuugguauuuca

SEQ ID NO: 929289 - RNA, 19 nt, Homo sapiens
  misc_RNA (1)...(19): siRNA sense strand
uucaguugcucacacaauu

SEQ ID NO: 929290 - RNA, 19 nt, Homo sapiens
  misc_RNA (1)...(19): siRNA sense strand
uauaucagccucguguuug

SEQ ID NO: 929291 - RNA, 19 nt, Homo sapiens
  misc_RNA (1)...(19): siRNA sense strand
ugccuaagcuuccccagua

SEQ ID NO: 929292 - RNA, 19 nt, Homo sapiens
  misc_RNA (1)...(19): siRNA sense strand
cguguuugguauuucauau

SEQ ID NO: 929293 - RNA, 19 nt, Homo sapiens
  misc_RNA (1)...(19): siRNA sense strand
ucagagggaauuguuaaga

SEQ ID NO: 929294 - RNA, 19 nt, Homo sapiens
  misc_RNA (1)...(19): siRNA sense strand
guaaaccagaagauuugaa

SEQ ID NO: 929295 - RNA, 19 nt, Homo sapiens
  misc_RNA (1)...(19): siRNA sense strand
ucaguugcucacacaauuu

SEQ ID NO: 929296 - RNA, 19 nt, Homo sapiens
  misc_RNA (1)...(19): siRNA sense strand
agucagagggaauuguuaa

SEQ ID NO: 929297 - RNA, 19 nt, Homo sapiens
  misc_RNA (1)...(19): siRNA sense strand
ggaagaauuacaguuugau

SEQ ID NO: 929298 - RNA, 19 nt, Homo sapiens
  misc_RNA (1)...(19): siRNA sense strand
uuaauuugguucucauggu

SEQ ID NO: 929299 - RNA, 19 nt, Homo sapiens
  misc_RNA (1)...(19): siRNA sense strand
gcaagcaguaauaaagucu

SEQ ID NO: 929300 - RNA, 19 nt, Homo sapiens
  misc_RNA (1)...(19): siRNA sense strand
ugauucgccugauuacaca

SEQ ID NO: 929301 - RNA, 19 nt, Homo sapiens
  misc_RNA (1)...(19): siRNA sense strand
uaaaccagaagauuugaag

SEQ ID NO: 929302 - RNA, 19 nt, Homo sapiens
  misc_RNA (1)...(19): siRNA sense strand
guucucaugguguauauca

SEQ ID NO: 929303 - RNA, 19 nt, Homo sapiens
  misc_RNA (1)...(19): siRNA sense strand
ucacaggugcagucauaau

SEQ ID NO: 929304 - RNA, 19 nt, Homo sapiens
  misc_RNA (1)...(19): siRNA sense strand
gugaugagcaagcaguaau

SEQ ID NO: 929305 - RNA, 19 nt, Homo sapiens
  misc_RNA (1)...(19): siRNA sense strand
gacaaguuaauuccaaaca

SEQ ID NO: 929306 - RNA, 19 nt, Homo sapiens
  misc_RNA (1)...(19): siRNA sense strand
uaacaaagcugcaguauug

SEQ ID NO: 929307 - RNA, 19 nt, Homo sapiens
  misc_RNA (1)...(19): siRNA sense strand
ggaaagaggugauaaggaa

SEQ ID NO: 929308 - RNA, 19 nt, Homo sapiens
  misc_RNA (1)...(19): siRNA sense strand
ggugaaagcuguuccauuu

SEQ ID NO: 929309 - RNA, 19 nt, Homo sapiens
  misc_RNA (1)...(19): siRNA sense strand
guucauacuucuacaguua

SEQ ID NO: 929310 - RNA, 19 nt, Homo sapiens
  misc_RNA (1)...(19): siRNA sense strand
cauacuggcuuccaaauuu

SEQ ID NO: 929311 - RNA, 19 nt, Homo sapiens
  misc_RNA (1)...(19): siRNA sense strand
ggacaauucuuugauuuga

SEQ ID NO: 929312 - RNA, 19 nt, Homo sapiens
  misc_RNA (1)...(19): siRNA sense strand
gaacaagauccgagcaaua

SEQ ID NO: 929313 - RNA, 19 nt, Homo sapiens
  misc_RNA (1)...(19): siRNA sense strand
ggaagagaguguugcauug

SEQ ID NO: 929314 - RNA, 19 nt, Homo sapiens
  misc_RNA (1)...(19): siRNA sense strand
ggacauucauggacaauuc

SEQ ID NO: 929315 - RNA, 19 nt, Homo sapiens
  misc_RNA (1)...(19): siRNA sense strand
ugacugagaugcugguaaa

SEQ ID NO: 929316 - RNA, 19 nt, Homo sapiens
  misc_RNA (1)...(19): siRNA sense strand
gcaaagcgcuacuguugag

SEQ ID NO: 929317 - RNA, 19 nt, Homo sapiens
  misc_RNA (1)...(19): siRNA sense strand
ggacagcaauggcaguaau

SEQ ID NO: 929318 - RNA, 19 nt, Homo sapiens
  misc_RNA (1)...(19): siRNA sense strand
ggcuguaugugaauucuua

SEQ ID NO: 929319 - RNA, 19 nt, Homo sapiens
  misc_RNA (1)...(19): siRNA sense strand
gaacuagggucagaagaag

SEQ ID NO: 929320 - RNA, 19 nt, Homo sapiens
  misc_RNA (1)...(19): siRNA sense strand
cuccagagauuaacacuuu

SEQ ID NO: 929321 - RNA, 19 nt, Homo sapiens
  misc_RNA (1)...(19): siRNA sense strand
gagaugccaugcccucuga

SEQ ID NO: 929322 - RNA, 19 nt, Homo sapiens
  misc_RNA (1)...(19): siRNA sense strand
caaagaaccaccugcauau

SEQ ID NO: 929323 - RNA, 19 nt, Homo sapiens
  misc_RNA (1)...(19): siRNA sense strand
ucaaagaaccaccugcaua

SEQ ID NO: 929324 - RNA, 19 nt, Homo sapiens
  misc_RNA (1)...(19): siRNA sense strand
gagauuaacacuuuagaug

SEQ ID NO: 929325 - RNA, 19 nt, Homo sapiens
  misc_RNA (1)...(19): siRNA sense strand
agaagaagauggauuugau

SEQ ID NO: 929326 - RNA, 19 nt, Homo sapiens
  misc_RNA (1)...(19): siRNA sense strand
gaagagaguguugcauuga

SEQ ID NO: 929327 - RNA, 19 nt, Homo sapiens
  misc_RNA (1)...(19): siRNA sense strand
gagaagagagugagagugu

SEQ ID NO: 929328 - RNA, 19 nt, Homo sapiens
  misc_RNA (1)...(19): siRNA sense strand
gcaccaaauuacuuagaug

SEQ ID NO: 929329 - RNA, 19 nt, Homo sapiens
  misc_RNA (1)...(19): siRNA sense strand
ugaugaagcucuuugaagu

SEQ ID NO: 929330 - RNA, 19 nt, Homo sapiens
  misc_RNA (1)...(19): siRNA sense strand
uaacagagggugcaucaau

SEQ ID NO: 929331 - RNA, 19 nt, Homo sapiens
  misc_RNA (1)...(19): siRNA sense strand
ggaacaagauccgagcaau

SEQ ID NO: 929332 - RNA, 19 nt, Homo sapiens
  misc_RNA (1)...(19): siRNA sense strand
gaacauuucacucacaaca

SEQ ID NO: 929333 - RNA, 19 nt, Homo sapiens
  misc_RNA (1)...(19): siRNA sense strand
uugaaugugugcuguauuu

SEQ ID NO: 929334 - RNA, 19 nt, Homo sapiens
  misc_RNA (1)...(19): siRNA sense strand
uaaaggcgcaucuuaugaa

SEQ ID NO: 929335 - RNA, 19 nt, Homo sapiens
  misc_RNA (1)...(19): siRNA sense strand
ggcaauugaucccaaguug

SEQ ID NO: 929336 - RNA, 19 nt, Homo sapiens
  misc_RNA (1)...(19): siRNA sense strand
gagggugcaucaauucuuc

SEQ ID NO: 929337 - RNA, 19 nt, Homo sapiens
  misc_RNA (1)...(19): siRNA sense strand
cauggacaauucuuugauu

SEQ ID NO: 929338 - RNA, 19 nt, Homo sapiens
  misc_RNA (1)...(19): siRNA sense strand
acaaggcucucaccucaga

SEQ ID NO: 929339 - RNA, 19 nt, Homo sapiens
  misc_RNA (1)...(19): siRNA sense strand
aggcuucccuucucuaauu

SEQ ID NO: 929340 - RNA, 19 nt, Homo sapiens
  misc_RNA (1)...(19): siRNA sense strand
uagcagcaauauucaguga

SEQ ID NO: 929341 - RNA, 19 nt, Homo sapiens
  misc_RNA (1)...(19): siRNA sense strand
gggcuuagaccgaauuaau

SEQ ID NO: 929342 - RNA, 19 nt, Homo sapiens
  misc_RNA (1)...(19): siRNA sense strand
cugcucagaugaugaacua

SEQ ID NO: 929343 - RNA, 19 nt, Homo sapiens
  misc_RNA (1)...(19): siRNA sense strand
gaagaagauggauuugaug

SEQ ID NO: 929344 - RNA, 19 nt, Homo sapiens
  misc_RNA (1)...(19): siRNA sense strand
caacaggcuucccuucucu

SEQ ID NO: 929345 - RNA, 19 nt, Homo sapiens
  misc_RNA (1)...(19): siRNA sense strand
cacuuuagaugauaucaga

SEQ ID NO: 929346 - RNA, 19 nt, Homo sapiens
  misc_RNA (1)...(19): siRNA sense strand
gcaguaauagcagcaauau

SEQ ID NO: 929347 - RNA, 19 nt, Homo sapiens
  misc_RNA (1)...(19): siRNA sense strand
gcuuagaccgaauuaauga

SEQ ID NO: 929348 - RNA, 19 nt, Homo sapiens
  misc_RNA (1)...(19): siRNA sense strand
gcgcuacuguugaggcuau

SEQ ID NO: 929349 - RNA, 19 nt, Homo sapiens
  misc_RNA (1)...(19): siRNA sense strand
aguguugcauugagaauaa

SEQ ID NO: 929350 - RNA, 19 nt, Homo sapiens
  misc_RNA (1)...(19): siRNA sense strand
aagcugcaguauugaagua

SEQ ID NO: 929351 - RNA, 19 nt, Homo sapiens
  misc_RNA (1)...(19): siRNA sense strand
ccacgaagcccaagaugca

SEQ ID NO: 929352 - RNA, 19 nt, Homo sapiens
  misc_RNA (1)...(19): siRNA sense strand
ucagaacgcguauaugaug

SEQ ID NO: 929353 - RNA, 19 nt, Homo sapiens
  misc_RNA (1)...(19): siRNA sense strand
agaagacucaggaacauuu

SEQ ID NO: 929354 - RNA, 19 nt, Homo sapiens
  misc_RNA (1)...(19): siRNA sense strand
gaaugugugcuguauuugu

SEQ ID NO: 929355 - RNA, 19 nt, Homo sapiens
  misc_RNA (1)...(19): siRNA sense strand
aacauaagaucacuagcuu

SEQ ID NO: 929356 - RNA, 19 nt, Homo sapiens
  misc_RNA (1)...(19): siRNA sense strand
gauccgagcaauaggcaaa

SEQ ID NO: 929357 - RNA, 19 nt, Homo sapiens
  misc_RNA (1)...(19): siRNA sense strand
caauaacaaagcugcagua

SEQ ID NO: 929358 - RNA, 19 nt, Homo sapiens
  misc_RNA (1)...(19): siRNA sense strand
ccaaauuucauggauguuu

SEQ ID NO: 929359 - RNA, 19 nt, Homo sapiens
  misc_RNA (1)...(19): siRNA sense strand
ugaaguaugagaacaaugu

SEQ ID NO: 929360 - RNA, 19 nt, Homo sapiens
  misc_RNA (1)...(19): siRNA sense strand
gucagaagaagauggauuu

SEQ ID NO: 929361 - RNA, 19 nt, Homo sapiens
  misc_RNA (1)...(19): siRNA sense strand
aaccuuaacuccaucaaca

SEQ ID NO: 929362 - RNA, 19 nt, Homo sapiens
  misc_RNA (1)...(19): siRNA sense strand
cugcaaagcgcuacuguug

SEQ ID NO: 929363 - RNA, 19 nt, Homo sapiens
  misc_RNA (1)...(19): siRNA sense strand
aacagagggugcaucaauu

SEQ ID NO: 929364 - RNA, 19 nt, Homo sapiens
  misc_RNA (1)...(19): siRNA sense strand
gacagcaauggcaguaaua

SEQ ID NO: 929365 - RNA, 19 nt, Homo sapiens
  misc_RNA (1)...(19): siRNA sense strand
caacauaagaucacuagcu

SEQ ID NO: 929366 - RNA, 19 nt, Homo sapiens
  misc_RNA (1)...(19): siRNA sense strand
ugaacuagggucagaagaa

SEQ ID NO: 929367 - RNA, 19 nt, Homo sapiens
  misc_RNA (1)...(19): siRNA sense strand
cugagaugcugguaaaugu

SEQ ID NO: 929368 - RNA, 19 nt, Homo sapiens
  misc_RNA (1)...(19): siRNA sense strand
caacuguucuccucaucca

SEQ ID NO: 929369 - RNA, 19 nt, Homo sapiens
  misc_RNA (1)...(19): siRNA sense strand
ugacagaggguacuucagu

SEQ ID NO: 929370 - RNA, 19 nt, Homo sapiens
  misc_RNA (1)...(19): siRNA sense strand
ggaagcaaacccugcaaag

SEQ ID NO: 929371 - RNA, 19 nt, Homo sapiens
  misc_RNA (1)...(19): siRNA sense strand
gaggugauaaggaacaaga

SEQ ID NO: 929372 - RNA, 19 nt, Homo sapiens
  misc_RNA (1)...(19): siRNA sense strand
gcuguuccauuuccuccaa

SEQ ID NO: 929373 - RNA, 19 nt, Homo sapiens
  misc_RNA (1)...(19): siRNA sense strand
ggcuucccuucucuaauua

SEQ ID NO: 929374 - RNA, 19 nt, Homo sapiens
  misc_RNA (1)...(19): siRNA sense strand
aaaauucucuaccccaaaa

SEQ ID NO: 929375 - RNA, 19 nt, Homo sapiens
  misc_RNA (1)...(19): siRNA sense strand
gcugguaaauguccucaac

SEQ ID NO: 929376 - RNA, 19 nt, Homo sapiens
  misc_RNA (1)...(19): siRNA sense strand
ggaccuaugugugauaucc

SEQ ID NO: 929377 - RNA, 19 nt, Homo sapiens
  misc_RNA (1)...(19): siRNA sense strand
agaaccaccugcauaugga

SEQ ID NO: 929378 - RNA, 19 nt, Homo sapiens
  misc_RNA (1)...(19): siRNA sense strand
guauucagaacgcguauau

SEQ ID NO: 929379 - RNA, 19 nt, Homo sapiens
  misc_RNA (1)...(19): siRNA sense strand
guggaaaucaugaauguag

SEQ ID NO: 929380 - RNA, 19 nt, Homo sapiens
  misc_RNA (1)...(19): siRNA sense strand
uuaaaggcgcaucuuauga

SEQ ID NO: 929381 - RNA, 19 nt, Homo sapiens
  misc_RNA (1)...(19): siRNA sense strand
gaaaaccucguguggauau

SEQ ID NO: 929382 - RNA, 19 nt, Homo sapiens
  misc_RNA (1)...(19): siRNA sense strand
caauugaucccaaguuguc

SEQ ID NO: 929383 - RNA, 19 nt, Homo sapiens
  misc_RNA (1)...(19): siRNA sense strand
aggcgcaucuuaugaagga

SEQ ID NO: 929384 - RNA, 19 nt, Homo sapiens
  misc_RNA (1)...(19): siRNA sense strand
gcauugagaauaauaacag

SEQ ID NO: 929385 - RNA, 19 nt, Homo sapiens
  misc_RNA (1)...(19): siRNA sense strand
ggcaguaauagcagcaaua

SEQ ID NO: 929386 - RNA, 19 nt, Homo sapiens
  misc_RNA (1)...(19): siRNA sense strand
ggucagaagaagauggauu

SEQ ID NO: 929387 - RNA, 19 nt, Homo sapiens
  misc_RNA (1)...(19): siRNA sense strand
gaauucuuacagcacaaua

SEQ ID NO: 929388 - RNA, 19 nt, Homo sapiens
  misc_RNA (1)...(19): siRNA sense strand
gagaagacucaggaacauu

SEQ ID NO: 929389 - RNA, 19 nt, Homo sapiens
  misc_RNA (1)...(19): siRNA sense strand
auucagaacgcguauauga

SEQ ID NO: 929390 - RNA, 19 nt, Homo sapiens
  misc_RNA (1)...(19): siRNA sense strand
gcaauugaucccaaguugu

SEQ ID NO: 929391 - RNA, 19 nt, Homo sapiens
  misc_RNA (1)...(19): siRNA sense strand
agagaguguugcauugaga

SEQ ID NO: 929392 - RNA, 19 nt, Homo sapiens
  misc_RNA (1)...(19): siRNA sense strand
caaaggauuuucaccacaa

SEQ ID NO: 929393 - RNA, 19 nt, Homo sapiens
  misc_RNA (1)...(19): siRNA sense strand
cagaagaagauggauuuga

SEQ ID NO: 929394 - RNA, 19 nt, Homo sapiens
  misc_RNA (1)...(19): siRNA sense strand
ucaggcaauucaacuguuc

SEQ ID NO: 929395 - RNA, 19 nt, Homo sapiens
  misc_RNA (1)...(19): siRNA sense strand
gagggaaggcuggaagaga

SEQ ID NO: 929396 - RNA, 19 nt, Homo sapiens
  misc_RNA (1)...(19): siRNA sense strand
agagugugcugacgcugaa

SEQ ID NO: 929397 - RNA, 19 nt, Homo sapiens
  misc_RNA (1)...(19): siRNA sense strand
cugcaguauugaaguauga

SEQ ID NO: 929398 - RNA, 19 nt, Homo sapiens
  misc_RNA (1)...(19): siRNA sense strand
uggaagagaguguugcauu

SEQ ID NO: 929399 - RNA, 19 nt, Homo sapiens
  misc_RNA (1)...(19): siRNA sense strand
acauuucacucacaacaca

SEQ ID NO: 929400 - RNA, 19 nt, Homo sapiens
  misc_RNA (1)...(19): siRNA sense strand
caaaauggccagaguguuc

SEQ ID NO: 929401 - RNA, 19 nt, Homo sapiens
  misc_RNA (1)...(19): siRNA sense strand
ccucugacgccaaccuuaa

SEQ ID NO: 929402 - RNA, 19 nt, Homo sapiens
  misc_RNA (1)...(19): siRNA sense strand
ucguggaaaucaugaaugu

SEQ ID NO: 929403 - RNA, 19 nt, Homo sapiens
  misc_RNA (1)...(19): siRNA sense strand
uuacccggcuguaugugaa

SEQ ID NO: 929404 - RNA, 19 nt, Homo sapiens
  misc_RNA (1)...(19): siRNA sense strand
caggaacauuucacucaca

SEQ ID NO: 929405 - RNA, 19 nt, Homo sapiens
  misc_RNA (1)...(19): siRNA sense strand
gaagacucaggaacauuuc

SEQ ID NO: 929406 - RNA, 19 nt, Homo sapiens
  misc_RNA (1)...(19): siRNA sense strand
gaacugccuuggccauuua

SEQ ID NO: 929407 - RNA, 19 nt, Homo sapiens
  misc_RNA (1)...(19): siRNA sense strand
gaagaaggauccaaagugu

SEQ ID NO: 929408 - RNA, 19 nt, Homo sapiens
  misc_RNA (1)...(19): siRNA sense strand
gaaguggcccucaguaaua

SEQ ID NO: 929409 - RNA, 19 nt, Homo sapiens
  misc_RNA (1)...(19): siRNA sense strand
gaacagggcaauaguauga

SEQ ID NO: 929410 - RNA, 19 nt, Homo sapiens
  misc_RNA (1)...(19): siRNA sense strand
guacacauccuaaauauga

SEQ ID NO: 929411 - RNA, 19 nt, Homo sapiens
  misc_RNA (1)...(19): siRNA sense strand
gaagaacacuuugaucuca

SEQ ID NO: 929412 - RNA, 19 nt, Homo sapiens
  misc_RNA (1)...(19): siRNA sense strand
caaagaagcugacaauacu

SEQ ID NO: 929413 - RNA, 19 nt, Homo sapiens
  misc_RNA (1)...(19): siRNA sense strand
ccagauacuuucuuuacua

SEQ ID NO: 929414 - RNA, 19 nt, Homo sapiens
  misc_RNA (1)...(19): siRNA sense strand
ggaaagaaauggaagaaaa

SEQ ID NO: 929415 - RNA, 19 nt, Homo sapiens
  misc_RNA (1)...(19): siRNA sense strand
gcaauaguaugaugaaucu

SEQ ID NO: 929416 - RNA, 19 nt, Homo sapiens
  misc_RNA (1)...(19): siRNA sense strand
ccagagcucuuugagaaua

SEQ ID NO: 929417 - RNA, 19 nt, Homo sapiens
  misc_RNA (1)...(19): siRNA sense strand
gcacagagauggugaaaau

SEQ ID NO: 929418 - RNA, 19 nt, Homo sapiens
  misc_RNA (1)...(19): siRNA sense strand
gaaaccagccucucaaugu

SEQ ID NO: 929419 - RNA, 19 nt, Homo sapiens
  misc_RNA (1)...(19): siRNA sense strand
ggaguuagaggcugugaua

SEQ ID NO: 929420 - RNA, 19 nt, Homo sapiens
  misc_RNA (1)...(19): siRNA sense strand
gaagauaguacacauccua

SEQ ID NO: 929421 - RNA, 19 nt, Homo sapiens
  misc_RNA (1)...(19): siRNA sense strand
gaaauauggcaucuccuua

SEQ ID NO: 929422 - RNA, 19 nt, Homo sapiens
  misc_RNA (1)...(19): siRNA sense strand
ggucugggauucgauauuu

SEQ ID NO: 929423 - RNA, 19 nt, Homo sapiens
  misc_RNA (1)...(19): siRNA sense strand
acaaagggcagcaauguua

SEQ ID NO: 929424 - RNA, 19 nt, Homo sapiens
  misc_RNA (1)...(19): siRNA sense strand
gccaagauguuuuguauua

SEQ ID NO: 929425 - RNA, 19 nt, Homo sapiens
  misc_RNA (1)...(19): siRNA sense strand
cacaacaacugaaagcuaa

SEQ ID NO: 929426 - RNA, 19 nt, Homo sapiens
  misc_RNA (1)...(19): siRNA sense strand
aaacauaguucuucaggau

SEQ ID NO: 929427 - RNA, 19 nt, Homo sapiens
  misc_RNA (1)...(19): siRNA sense strand
ugugauagcuauaugguuu

SEQ ID NO: 929428 - RNA, 19 nt, Homo sapiens
  misc_RNA (1)...(19): siRNA sense strand
gcauucagcuugacuugga

SEQ ID NO: 929429 - RNA, 19 nt, Homo sapiens
  misc_RNA (1)...(19): siRNA sense strand
ggaagucuguguacaucuu

SEQ ID NO: 929430 - RNA, 19 nt, Homo sapiens
  misc_RNA (1)...(19): siRNA sense strand
gcagaugacguaugggaua

SEQ ID NO: 929431 - RNA, 19 nt, Homo sapiens
  misc_RNA (1)...(19): siRNA sense strand
gcagcaauguuaagucuuc

SEQ ID NO: 929432 - RNA, 19 nt, Homo sapiens
  misc_RNA (1)...(19): siRNA sense strand
guaaaggccugugauguuc

SEQ ID NO: 929433 - RNA, 19 nt, Homo sapiens
  misc_RNA (1)...(19): siRNA sense strand
ucacuacagucucguauug

SEQ ID NO: 929434 - RNA, 19 nt, Homo sapiens
  misc_RNA (1)...(19): siRNA sense strand
gaagagaugucaggagaag

SEQ ID NO: 929435 - RNA, 19 nt, Homo sapiens
  misc_RNA (1)...(19): siRNA sense strand
gaaaauuguuguggacuua

SEQ ID NO: 929436 - RNA, 19 nt, Homo sapiens
  misc_RNA (1)...(19): siRNA sense strand
gcgugaaacuggaauaaau

SEQ ID NO: 929437 - RNA, 19 nt, Homo sapiens
  misc_RNA (1)...(19): siRNA sense strand
ggagaaguucgguuuagua

SEQ ID NO: 929438 - RNA, 19 nt, Homo sapiens
  misc_RNA (1)...(19): siRNA sense strand
gcacaaaugauagaagaaa

SEQ ID NO: 929439 - RNA, 19 nt, Homo sapiens
  misc_RNA (1)...(19): siRNA sense strand
gaaccaugccaauguugua

SEQ ID NO: 929440 - RNA, 19 nt, Homo sapiens
  misc_RNA (1)...(19): siRNA sense strand
cagcacaaaugauagaaga

SEQ ID NO: 929441 - RNA, 19 nt, Homo sapiens
  misc_RNA (1)...(19): siRNA sense strand
ccauuuaccuggcaugaga

SEQ ID NO: 929442 - RNA, 19 nt, Homo sapiens
  misc_RNA (1)...(19): siRNA sense strand
caaagauguugaucaagga

SEQ ID NO: 929443 - RNA, 19 nt, Homo sapiens
  misc_RNA (1)...(19): siRNA sense strand
gcaaguuguugggcuguaa

SEQ ID NO: 929444 - RNA, 19 nt, Homo sapiens
  misc_RNA (1)...(19): siRNA sense strand
ggaaguggcccucaguaau

SEQ ID NO: 929445 - RNA, 19 nt, Homo sapiens
  misc_RNA (1)...(19): siRNA sense strand
gaucaaggaagucugugua

SEQ ID NO: 929446 - RNA, 19 nt, Homo sapiens
  misc_RNA (1)...(19): siRNA sense strand
guaagcagaagauuauuga

SEQ ID NO: 929447 - RNA, 19 nt, Homo sapiens
  misc_RNA (1)...(19): siRNA sense strand
uaugggauaucuucagaaa

SEQ ID NO: 929448 - RNA, 19 nt, Homo sapiens
  misc_RNA (1)...(19): siRNA sense strand
ggacaaagggcagcaaugu

SEQ ID NO: 929449 - RNA, 19 nt, Homo sapiens
  misc_RNA (1)...(19): siRNA sense strand
gauauagggucugggauuc

SEQ ID NO: 929450 - RNA, 19 nt, Homo sapiens
  misc_RNA (1)...(19): siRNA sense strand
ggaguugguuaacagaaug

SEQ ID NO: 929451 - RNA, 19 nt, Homo sapiens
  misc_RNA (1)...(19): siRNA sense strand
aggaucagauuaugucuuu

SEQ ID NO: 929452 - RNA, 19 nt, Homo sapiens
  misc_RNA (1)...(19): siRNA sense strand
gaucucagcaucacaacaa

SEQ ID NO: 929453 - RNA, 19 nt, Homo sapiens
  misc_RNA (1)...(19): siRNA sense strand
gcuguaagcagaagauuau

SEQ ID NO: 929454 - RNA, 19 nt, Homo sapiens
  misc_RNA (1)...(19): siRNA sense strand
uaugacuucugcaaagaua

SEQ ID NO: 929455 - RNA, 19 nt, Homo sapiens
  misc_RNA (1)...(19): siRNA sense strand
gaauaaauacugguucuca

SEQ ID NO: 929456 - RNA, 19 nt, Homo sapiens
  misc_RNA (1)...(19): siRNA sense strand
gguggaaagauaauacaua

SEQ ID NO: 929457 - RNA, 19 nt, Homo sapiens
  misc_RNA (1)...(19): siRNA sense strand
gcgagcagaugacguaugg

SEQ ID NO: 929458 - RNA, 19 nt, Homo sapiens
  misc_RNA (1)...(19): siRNA sense strand
gauaguacacauccuaaau

SEQ ID NO: 929459 - RNA, 19 nt, Homo sapiens
  misc_RNA (1)...(19): siRNA sense strand
cagccacuguugauuauug

SEQ ID NO: 929460 - RNA, 19 nt, Homo sapiens
  misc_RNA (1)...(19): siRNA sense strand
gaacaugaucauucucugu

SEQ ID NO: 929461 - RNA, 19 nt, Homo sapiens
  misc_RNA (1)...(19): siRNA sense strand
gaaacuggaauaaauacug

SEQ ID NO: 929462 - RNA, 19 nt, Homo sapiens
  misc_RNA (1)...(19): siRNA sense strand
uccgaaagcugcucaacaa

SEQ ID NO: 929463 - RNA, 19 nt, Homo sapiens
  misc_RNA (1)...(19): siRNA sense strand
gaggaacagggcaauagua

SEQ ID NO: 929464 - RNA, 19 nt, Homo sapiens
  misc_RNA (1)...(19): siRNA sense strand
aaauaugacuucugcaaag

SEQ ID NO: 929465 - RNA, 19 nt, Homo sapiens
  misc_RNA (1)...(19): siRNA sense strand
caucaucugcagccauuua

SEQ ID NO: 929466 - RNA, 19 nt, Homo sapiens
  misc_RNA (1)...(19): siRNA sense strand
ggaccaugguauuugaaug

SEQ ID NO: 929467 - RNA, 19 nt, Homo sapiens
  misc_RNA (1)...(19): siRNA sense strand
gaaagcugcucaacaaacc

SEQ ID NO: 929468 - RNA, 19 nt, Homo sapiens
  misc_RNA (1)...(19): siRNA sense strand
gcaauggaauacuguucug

SEQ ID NO: 929469 - RNA, 19 nt, Homo sapiens
  misc_RNA (1)...(19): siRNA sense strand
cagcagaacaugaucauuc

SEQ ID NO: 929470 - RNA, 19 nt, Homo sapiens
  misc_RNA (1)...(19): siRNA sense strand
ucaaagaagcugacaauac

SEQ ID NO: 929471 - RNA, 19 nt, Homo sapiens
  misc_RNA (1)...(19): siRNA sense strand
ggagcuguuuggucauuug

SEQ ID NO: 929472 - RNA, 19 nt, Homo sapiens
  misc_RNA (1)...(19): siRNA sense strand
ccauugaucuauauaagca

SEQ ID NO: 929473 - RNA, 19 nt, Homo sapiens
  misc_RNA (1)...(19): siRNA sense strand
gaacagcgugccauugauc

SEQ ID NO: 929474 - RNA, 19 nt, Homo sapiens
  misc_RNA (1)...(19): siRNA sense strand
ugauguuccugaagaauug

SEQ ID NO: 929475 - RNA, 19 nt, Homo sapiens
  misc_RNA (1)...(19): siRNA sense strand
ugaacugccuuggccauuu

SEQ ID NO: 929476 - RNA, 19 nt, Homo sapiens
  misc_RNA (1)...(19): siRNA sense strand
aaauauggcaucuccuuaa

SEQ ID NO: 929477 - RNA, 19 nt, Homo sapiens
  misc_RNA (1)...(19): siRNA sense strand
gggcagcaauguuaagucu

SEQ ID NO: 929478 - RNA, 19 nt, Homo sapiens
  misc_RNA (1)...(19): siRNA sense strand
gcagagaggaggaccuguu

SEQ ID NO: 929479 - RNA, 19 nt, Homo sapiens
  misc_RNA (1)...(19): siRNA sense strand
uugaauguauugcuggaua

SEQ ID NO: 929480 - RNA, 19 nt, Homo sapiens
  misc_RNA (1)...(19): siRNA sense strand
gacuucagcacaaaugaua

SEQ ID NO: 929481 - RNA, 19 nt, Homo sapiens
  misc_RNA (1)...(19): siRNA sense strand
aauauggcaucuccuuaaa

SEQ ID NO: 929482 - RNA, 19 nt, Homo sapiens
  misc_RNA (1)...(19): siRNA sense strand
uuauugaucuacucccuaa

SEQ ID NO: 929483 - RNA, 19 nt, Homo sapiens
  misc_RNA (1)...(19): siRNA sense strand
ucacaacaacugaaagcua

SEQ ID NO: 929484 - RNA, 19 nt, Homo sapiens
  misc_RNA (1)...(19): siRNA sense strand
uacaguugauguugaauug

SEQ ID NO: 929485 - RNA, 19 nt, Homo sapiens
  misc_RNA (1)...(19): siRNA sense strand
ugccaaagauguugaucaa

SEQ ID NO: 929486 - RNA, 19 nt, Homo sapiens
  misc_RNA (1)...(19): siRNA sense strand
ggccauuuaagcacuauua

SEQ ID NO: 929487 - RNA, 19 nt, Homo sapiens
  misc_RNA (1)...(19): siRNA sense strand
ggaacagcgugccauugau

SEQ ID NO: 929488 - RNA, 19 nt, Homo sapiens
  misc_RNA (1)...(19): siRNA sense strand
caaagggcagcaauguuaa

SEQ ID NO: 929489 - RNA, 19 nt, Homo sapiens
  misc_RNA (1)...(19): siRNA sense strand
ggaaaccagccucucaaug

SEQ ID NO: 929490 - RNA, 19 nt, Homo sapiens
  misc_RNA (1)...(19): siRNA sense strand
ggcaugagaagauuaagaa

SEQ ID NO: 929491 - RNA, 19 nt, Homo sapiens
  misc_RNA (1)...(19): siRNA sense strand
gaauguauugcuggauaua

SEQ ID NO: 929492 - RNA, 19 nt, Homo sapiens
  misc_RNA (1)...(19): siRNA sense strand
gaaaucauggagcuacaga

SEQ ID NO: 929493 - RNA, 19 nt, Homo sapiens
  misc_RNA (1)...(19): siRNA sense strand
gaaguugaaccaugccaau

SEQ ID NO: 929494 - RNA, 19 nt, Homo sapiens
  misc_RNA (1)...(19): siRNA sense strand
aaacacagaccuucagauc

SEQ ID NO: 929495 - RNA, 19 nt, Homo sapiens
  misc_RNA (1)...(19): siRNA sense strand
aaaccagccucucaaugug

SEQ ID NO: 929496 - RNA, 19 nt, Homo sapiens
  misc_RNA (1)...(19): siRNA sense strand
gacaggaauuucucuggau

SEQ ID NO: 929497 - RNA, 19 nt, Homo sapiens
  misc_RNA (1)...(19): siRNA sense strand
agaaggauccaaaguguau

SEQ ID NO: 929498 - RNA, 19 nt, Homo sapiens
  misc_RNA (1)...(19): siRNA sense strand
guugaaccaugccaauguu

SEQ ID NO: 929499 - RNA, 19 nt, Homo sapiens
  misc_RNA (1)...(19): siRNA sense strand
cgugaaacuggaauaaaua

SEQ ID NO: 929500 - RNA, 19 nt, Homo sapiens
  misc_RNA (1)...(19): siRNA sense strand
ggauccaaaguguauauuu

SEQ ID NO: 929501 - RNA, 19 nt, Homo sapiens
  misc_RNA (1)...(19): siRNA sense strand
caacugaaagcuaaauugg

SEQ ID NO: 929502 - RNA, 19 nt, Homo sapiens
  misc_RNA (1)...(19): siRNA sense strand
ugugguaacuccucaagau

SEQ ID NO: 929503 - RNA, 19 nt, Homo sapiens
  misc_RNA (1)...(19): siRNA sense strand
uaucaaagaagcugacaau

SEQ ID NO: 929504 - RNA, 19 nt, Homo sapiens
  misc_RNA (1)...(19): siRNA sense strand
gauggaaucucuggaacag

SEQ ID NO: 929505 - RNA, 19 nt, Homo sapiens
  misc_RNA (1)...(19): siRNA sense strand
gagcgugaaacuggaauaa

SEQ ID NO: 929506 - RNA, 19 nt, Homo sapiens
  misc_RNA (1)...(19): siRNA sense strand
gaaauuccaugccgaagaa

SEQ ID NO: 929507 - RNA, 19 nt, Homo sapiens
  misc_RNA (1)...(19): siRNA sense strand
ggaagaaggaccacuuuaa

SEQ ID NO: 929508 - RNA, 19 nt, Homo sapiens
  misc_RNA (1)...(19): siRNA sense strand
caucuugcauuacaacaua

SEQ ID NO: 929509 - RNA, 19 nt, Homo sapiens
  misc_RNA (1)...(19): siRNA sense strand
gaacuaccacgaaaccuuu

SEQ ID NO: 929510 - RNA, 19 nt, Homo sapiens
  misc_RNA (1)...(19): siRNA sense strand
gagaauaaagcacccagua

SEQ ID NO: 929511 - RNA, 19 nt, Homo sapiens
  misc_RNA (1)...(19): siRNA sense strand
gaaggaccacuuuaagaaa

SEQ ID NO: 929512 - RNA, 19 nt, Homo sapiens
  misc_RNA (1)...(19): siRNA sense strand
gcagcacggugucaucuug

SEQ ID NO: 929513 - RNA, 19 nt, Homo sapiens
  misc_RNA (1)...(19): siRNA sense strand
gaagaaggaccacuuuaag

SEQ ID NO: 929514 - RNA, 19 nt, Homo sapiens
  misc_RNA (1)...(19): siRNA sense strand
gaagaaaaccugaauccua

SEQ ID NO: 929515 - RNA, 19 nt, Homo sapiens
  misc_RNA (1)...(19): siRNA sense strand
caaccuggauggugacaug

SEQ ID NO: 929516 - RNA, 19 nt, Homo sapiens
  misc_RNA (1)...(19): siRNA sense strand
ucagagaacugugugaaga

SEQ ID NO: 929517 - RNA, 19 nt, Homo sapiens
  misc_RNA (1)...(19): siRNA sense strand
ccgaagacauucuaggaaa

SEQ ID NO: 929518 - RNA, 19 nt, Homo sapiens
  misc_RNA (1)...(19): siRNA sense strand
ggacuuccaugauaaucug

SEQ ID NO: 929519 - RNA, 19 nt, Homo sapiens
  misc_RNA (1)...(19): siRNA sense strand
gcaauaacacugccacugu

SEQ ID NO: 929520 - RNA, 19 nt, Homo sapiens
  misc_RNA (1)...(19): siRNA sense strand
gaauaaagcacccaguaag

SEQ ID NO: 929521 - RNA, 19 nt, Homo sapiens
  misc_RNA (1)...(19): siRNA sense strand
gcaaguagaagaagagaag

SEQ ID NO: 929522 - RNA, 19 nt, Homo sapiens
  misc_RNA (1)...(19): siRNA sense strand
gaaauucuaccaguucaga

SEQ ID NO: 929523 - RNA, 19 nt, Homo sapiens
  misc_RNA (1)...(19): siRNA sense strand
uuacagaacucaccacacu

SEQ ID NO: 929524 - RNA, 19 nt, Homo sapiens
  misc_RNA (1)...(19): siRNA sense strand
ggugucaucuugcauuaca

SEQ ID NO: 929525 - RNA, 19 nt, Homo sapiens
  misc_RNA (1)...(19): siRNA sense strand
gucaacacaugggcaauaa

SEQ ID NO: 929526 - RNA, 19 nt, Homo sapiens
  misc_RNA (1)...(19): siRNA sense strand
aagaaaaccugaauccuaa

SEQ ID NO: 929527 - RNA, 19 nt, Homo sapiens
  misc_RNA (1)...(19): siRNA sense strand
caaccugcccgaagacauu

SEQ ID NO: 929528 - RNA, 19 nt, Homo sapiens
  misc_RNA (1)...(19): siRNA sense strand
gguggaugaugcugaagaa

SEQ ID NO: 929529 - RNA, 19 nt, Homo sapiens
  misc_RNA (1)...(19): siRNA sense strand
agaaggaccacuuuaagaa

SEQ ID NO: 929530 - RNA, 19 nt, Homo sapiens
  misc_RNA (1)...(19): siRNA sense strand
ugaagacaguggagacuca

SEQ ID NO: 929531 - RNA, 19 nt, Homo sapiens
  misc_RNA (1)...(19): siRNA sense strand
ugagugaagucuccaucaa

SEQ ID NO: 929532 - RNA, 19 nt, Homo sapiens
  misc_RNA (1)...(19): siRNA sense strand
ggccagcgaggagauauua

SEQ ID NO: 929533 - RNA, 19 nt, Homo sapiens
  misc_RNA (1)...(19): siRNA sense strand
ggauugacucuaucacuga

SEQ ID NO: 929534 - RNA, 19 nt, Homo sapiens
  misc_RNA (1)...(19): siRNA sense strand
caacacaugggcaauaaca

SEQ ID NO: 929535 - RNA, 19 nt, Homo sapiens
  misc_RNA (1)...(19): siRNA sense strand
ccgagagccuggacaguau

SEQ ID NO: 929536 - RNA, 19 nt, Homo sapiens
  misc_RNA (1)...(19): siRNA sense strand
guccuaagccuucuccaaa

SEQ ID NO: 929537 - RNA, 19 nt, Homo sapiens
  misc_RNA (1)...(19): siRNA sense strand
gauugacucuaucacugaa

SEQ ID NO: 929538 - RNA, 19 nt, Homo sapiens
  misc_RNA (1)...(19): siRNA sense strand
gccagcaccuccacaguca

SEQ ID NO: 929539 - RNA, 19 nt, Homo sapiens
  misc_RNA (1)...(19): siRNA sense strand
agaauaaagcacccaguaa

SEQ ID NO: 929540 - RNA, 19 nt, Homo sapiens
  misc_RNA (1)...(19): siRNA sense strand
ugaagaaccugacaaaaca

SEQ ID NO: 929541 - RNA, 19 nt, Homo sapiens
  misc_RNA (1)...(19): siRNA sense strand
ugagcgagauggaagugaa

SEQ ID NO: 929542 - RNA, 19 nt, Homo sapiens
  misc_RNA (1)...(19): siRNA sense strand
gcucacaucaccaaaguuc

SEQ ID NO: 929543 - RNA, 19 nt, Homo sapiens
  misc_RNA (1)...(19): siRNA sense strand
ccgcagaccacccauacua

SEQ ID NO: 929544 - RNA, 19 nt, Homo sapiens
  misc_RNA (1)...(19): siRNA sense strand
gaacucaccacacucaaaa

SEQ ID NO: 929545 - RNA, 19 nt, Homo sapiens
  misc_RNA (1)...(19): siRNA sense strand
aaacagauggauccucuug

SEQ ID NO: 929546 - RNA, 19 nt, Homo sapiens
  misc_RNA (1)...(19): siRNA sense strand
agagaacugugugaagaaa

SEQ ID NO: 929547 - RNA, 19 nt, Homo sapiens
  misc_RNA (1)...(19): siRNA sense strand
uaaagcacccaguaaguuc

SEQ ID NO: 929548 - RNA, 19 nt, Homo sapiens
  misc_RNA (1)...(19): siRNA sense strand
gcuaucacacccugcagua

SEQ ID NO: 929549 - RNA, 19 nt, Homo sapiens
  misc_RNA (1)...(19): siRNA sense strand
caaugaacacucacccaaa

SEQ ID NO: 929550 - RNA, 19 nt, Homo sapiens
  misc_RNA (1)...(19): siRNA sense strand
gcaacaacgacgucaagug

SEQ ID NO: 929551 - RNA, 19 nt, Homo sapiens
  misc_RNA (1)...(19): siRNA sense strand
gaaugcggaguggcaguua

SEQ ID NO: 929552 - RNA, 19 nt, Homo sapiens
  misc_RNA (1)...(19): siRNA sense strand
gagguaaagaugaugaaau

SEQ ID NO: 929553 - RNA, 19 nt, Homo sapiens
  misc_RNA (1)...(19): siRNA sense strand
gcuacucagccaucccuua

SEQ ID NO: 929554 - RNA, 19 nt, Homo sapiens
  misc_RNA (1)...(19): siRNA sense strand
acagguggaugaugcugaa

SEQ ID NO: 929555 - RNA, 19 nt, Homo sapiens
  misc_RNA (1)...(19): siRNA sense strand
ccgagagcaucgagaucua

SEQ ID NO: 929556 - RNA, 19 nt, Homo sapiens
  misc_RNA (1)...(19): siRNA sense strand
agacccaccucccaggauu

SEQ ID NO: 929557 - RNA, 19 nt, Homo sapiens
  misc_RNA (1)...(19): siRNA sense strand
gagcaacaacgacgucaag

SEQ ID NO: 929558 - RNA, 19 nt, Homo sapiens
  misc_RNA (1)...(19): siRNA sense strand
gcacuacaccucgcagcaa

SEQ ID NO: 929559 - RNA, 19 nt, Homo sapiens
  misc_RNA (1)...(19): siRNA sense strand
gagugcaaguagaagaaga

SEQ ID NO: 929560 - RNA, 19 nt, Homo sapiens
  misc_RNA (1)...(19): siRNA sense strand
cagaaggccucggugaaca

SEQ ID NO: 929561 - RNA, 19 nt, Homo sapiens
  misc_RNA (1)...(19): siRNA sense strand
gaguggcaguuauaucaag

SEQ ID NO: 929562 - RNA, 19 nt, Homo sapiens
  misc_RNA (1)...(19): siRNA sense strand
aagaaggaccacuuuaaga

SEQ ID NO: 929563 - RNA, 19 nt, Homo sapiens
  misc_RNA (1)...(19): siRNA sense strand
cggaguggcaguuauauca

SEQ ID NO: 929564 - RNA, 19 nt, Homo sapiens
  misc_RNA (1)...(19): siRNA sense strand
ggaugaugcugaagaaccu

SEQ ID NO: 929565 - RNA, 19 nt, Homo sapiens
  misc_RNA (1)...(19): siRNA sense strand
gcagaccacccauacuaca

SEQ ID NO: 929566 - RNA, 19 nt, Homo sapiens
  misc_RNA (1)...(19): siRNA sense strand
acccagaacuaccacgaaa

SEQ ID NO: 929567 - RNA, 19 nt, Homo sapiens
  misc_RNA (1)...(19): siRNA sense strand
cccgggagguuuaccagaa

SEQ ID NO: 929568 - RNA, 19 nt, Homo sapiens
  misc_RNA (1)...(19): siRNA sense strand
gagcaucgagaucuacauc

SEQ ID NO: 929569 - RNA, 19 nt, Homo sapiens
  misc_RNA (1)...(19): siRNA sense strand
ccacggaggacaggaagaa

SEQ ID NO: 929570 - RNA, 19 nt, Homo sapiens
  misc_RNA (1)...(19): siRNA sense strand
gauccggagucauaguuac

SEQ ID NO: 929571 - RNA, 19 nt, Homo sapiens
  misc_RNA (1)...(19): siRNA sense strand
gcagguuccacaagaugaa

SEQ ID NO: 929572 - RNA, 19 nt, Homo sapiens
  misc_RNA (1)...(19): siRNA sense strand
guaaagaugaugaaauucc

SEQ ID NO: 929573 - RNA, 19 nt, Homo sapiens
  misc_RNA (1)...(19): siRNA sense strand
cugcaguuguccauagaaa

SEQ ID NO: 929574 - RNA, 19 nt, Homo sapiens
  misc_RNA (1)...(19): siRNA sense strand
aaaacaaccugcccgaaga

SEQ ID NO: 929575 - RNA, 19 nt, Homo sapiens
  misc_RNA (1)...(19): siRNA sense strand
gcauucagggcucaggaaa

SEQ ID NO: 929576 - RNA, 19 nt, Homo sapiens
  misc_RNA (1)...(19): siRNA sense strand
gcaaacgcagcaagagcaa

SEQ ID NO: 929577 - RNA, 19 nt, Homo sapiens
  misc_RNA (1)...(19): siRNA sense strand
ugaaauuccaugccgaaga

SEQ ID NO: 929578 - RNA, 19 nt, Homo sapiens
  misc_RNA (1)...(19): siRNA sense strand
caguuaaaggccaauaauu

SEQ ID NO: 929579 - RNA, 19 nt, Homo sapiens
  misc_RNA (1)...(19): siRNA sense strand
ucucauggcccagaaauuc

SEQ ID NO: 929580 - RNA, 19 nt, Homo sapiens
  misc_RNA (1)...(19): siRNA sense strand
gggagugcaaguagaagaa

SEQ ID NO: 929581 - RNA, 19 nt, Homo sapiens
  misc_RNA (1)...(19): siRNA sense strand
caggaagaaggaccacuuu

SEQ ID NO: 929582 - RNA, 19 nt, Homo sapiens
  misc_RNA (1)...(19): siRNA sense strand
acggugucaucuugcauua

SEQ ID NO: 929583 - RNA, 19 nt, Homo sapiens
  misc_RNA (1)...(19): siRNA sense strand
ggaguggcaguuauaucaa

SEQ ID NO: 929584 - RNA, 19 nt, Homo sapiens
  misc_RNA (1)...(19): siRNA sense strand
gcccgaagacauucuagga

SEQ ID NO: 929585 - RNA, 19 nt, Homo sapiens
  misc_RNA (1)...(19): siRNA sense strand
aaugaacacucacccaaac

SEQ ID NO: 929586 - RNA, 19 nt, Homo sapiens
  misc_RNA (1)...(19): siRNA sense strand
cagagaacugugugaagaa

SEQ ID NO: 929587 - RNA, 19 nt, Homo sapiens
  misc_RNA (1)...(19): siRNA sense strand
cgaagacauucuaggaaaa

SEQ ID NO: 929588 - RNA, 19 nt, Homo sapiens
  misc_RNA (1)...(19): siRNA sense strand
auaaagcacccaguaaguu

SEQ ID NO: 929589 - RNA, 19 nt, Homo sapiens
  misc_RNA (1)...(19): siRNA sense strand
uggaaucuauagaggacaa

SEQ ID NO: 929590 - RNA, 19 nt, Homo sapiens
  misc_RNA (1)...(19): siRNA sense strand
aaucuccaaugaacacuca

SEQ ID NO: 929591 - RNA, 19 nt, Homo sapiens
  misc_RNA (1)...(19): siRNA sense strand
acagauggauccucuugac

SEQ ID NO: 929592 - RNA, 19 nt, Homo sapiens
  misc_RNA (1)...(19): siRNA sense strand
ucaguuaaaggccaauaau

SEQ ID NO: 929593 - RNA, 19 nt, Homo sapiens
  misc_RNA (1)...(19): siRNA sense strand
cgagucgugucagcaagaa

SEQ ID NO: 929594 - RNA, 19 nt, Homo sapiens
  misc_RNA (1)...(19): siRNA sense strand
ucugacagccgccaucgaa

SEQ ID NO: 929595 - RNA, 19 nt, Homo sapiens
  misc_RNA (1)...(19): siRNA sense strand
aggaagaaggaccacuuua

SEQ ID NO: 929596 - RNA, 19 nt, Homo sapiens
  misc_RNA (1)...(19): siRNA sense strand
acagaacucaccacacuca

SEQ ID NO: 929597 - RNA, 19 nt, Homo sapiens
  misc_RNA (1)...(19): siRNA sense strand
gggaagaacgggaaaacaa

SEQ ID NO: 929598 - RNA, 19 nt, Homo sapiens
  misc_RNA (1)...(19): siRNA sense strand
gaaucuauagaggacaauu

SEQ ID NO: 929599 - RNA, 19 nt, Homo sapiens
  misc_RNA (1)...(19): siRNA sense strand
gagagccuggacaguauga

SEQ ID NO: 929600 - RNA, 19 nt, Homo sapiens
  misc_RNA (1)...(19): siRNA sense strand
gaaggccucggugaacaug

SEQ ID NO: 929601 - RNA, 19 nt, Homo sapiens
  misc_RNA (1)...(19): siRNA sense strand
agaacucaccacacucaaa

SEQ ID NO: 929602 - RNA, 19 nt, Homo sapiens
  misc_RNA (1)...(19): siRNA sense strand
ucagccaucccuuacagaa

SEQ ID NO: 929603 - RNA, 19 nt, Homo sapiens
  misc_RNA (1)...(19): siRNA sense strand
agauggauccucuugacaa

SEQ ID NO: 929604 - RNA, 19 nt, Homo sapiens
  misc_RNA (1)...(19): siRNA sense strand
uaucacacccugcaguaca

SEQ ID NO: 929605 - RNA, 19 nt, Homo sapiens
  misc_RNA (1)...(19): siRNA sense strand
aauaaagcacccaguaagu

SEQ ID NO: 929606 - RNA, 19 nt, Homo sapiens
  misc_RNA (1)...(19): siRNA sense strand
gaaagaagcugaugugguu

SEQ ID NO: 929607 - RNA, 19 nt, Homo sapiens
  misc_RNA (1)...(19): siRNA sense strand
gcacagacauucuacuuug

SEQ ID NO: 929608 - RNA, 19 nt, Homo sapiens
  misc_RNA (1)...(19): siRNA sense strand
ggucagaucuggaggcaua

SEQ ID NO: 929609 - RNA, 19 nt, Homo sapiens
  misc_RNA (1)...(19): siRNA sense strand
gaugauaacuucaacauag

SEQ ID NO: 929610 - RNA, 19 nt, Homo sapiens
  misc_RNA (1)...(19): siRNA sense strand
gaacuuaguccaccaaauu

SEQ ID NO: 929611 - RNA, 19 nt, Homo sapiens
  misc_RNA (1)...(19): siRNA sense strand
gaucugggcugaagaauuc

SEQ ID NO: 929612 - RNA, 19 nt, Homo sapiens
  misc_RNA (1)...(19): siRNA sense strand
ggaagacgcugcagugaau

SEQ ID NO: 929613 - RNA, 19 nt, Homo sapiens
  misc_RNA (1)...(19): siRNA sense strand
gcagugaauugcacagaua

SEQ ID NO: 929614 - RNA, 19 nt, Homo sapiens
  misc_RNA (1)...(19): siRNA sense strand
ggacacaucuggcuugaca

SEQ ID NO: 929615 - RNA, 19 nt, Homo sapiens
  misc_RNA (1)...(19): siRNA sense strand
gaaaugaaacuucucuuug

SEQ ID NO: 929616 - RNA, 19 nt, Homo sapiens
  misc_RNA (1)...(19): siRNA sense strand
ggagugaccugcucagaug

SEQ ID NO: 929617 - RNA, 19 nt, Homo sapiens
  misc_RNA (1)...(19): siRNA sense strand
gagaugaaaugcaauggaa

SEQ ID NO: 929618 - RNA, 19 nt, Homo sapiens
  misc_RNA (1)...(19): siRNA sense strand
gaauauguguucuggaaga

SEQ ID NO: 929619 - RNA, 19 nt, Homo sapiens
  misc_RNA (1)...(19): siRNA sense strand
gggaauauguguucuggaa

SEQ ID NO: 929620 - RNA, 19 nt, Homo sapiens
  misc_RNA (1)...(19): siRNA sense strand
aaucaacccugcaucuuua

SEQ ID NO: 929621 - RNA, 19 nt, Homo sapiens
  misc_RNA (1)...(19): siRNA sense strand
gaucaugcaucugucauuu

SEQ ID NO: 929622 - RNA, 19 nt, Homo sapiens
  misc_RNA (1)...(19): siRNA sense strand
ggaaaugaaacuucucuuu

SEQ ID NO: 929623 - RNA, 19 nt, Homo sapiens
  misc_RNA (1)...(19): siRNA sense strand
gaagcggucucugugauuu

SEQ ID NO: 929624 - RNA, 19 nt, Homo sapiens
  misc_RNA (1)...(19): siRNA sense strand
cagcagggauguuggagua

SEQ ID NO: 929625 - RNA, 19 nt, Homo sapiens
  misc_RNA (1)...(19): siRNA sense strand
ggaacgguguguaauaaug

SEQ ID NO: 929626 - RNA, 19 nt, Homo sapiens
  misc_RNA (1)...(19): siRNA sense strand
ggaguagucugcucaagau

SEQ ID NO: 929627 - RNA, 19 nt, Homo sapiens
  misc_RNA (1)...(19): siRNA sense strand
ggacagaucugggcugaag

SEQ ID NO: 929628 - RNA, 19 nt, Homo sapiens
  misc_RNA (1)...(19): siRNA sense strand
gaacagugugugaugauaa

SEQ ID NO: 929629 - RNA, 19 nt, Homo sapiens
  misc_RNA (1)...(19): siRNA sense strand
ggaccgauauggcucaaug

SEQ ID NO: 929630 - RNA, 19 nt, Homo sapiens
  misc_RNA (1)...(19): siRNA sense strand
gcaaguggccucuguaauc

SEQ ID NO: 929631 - RNA, 19 nt, Homo sapiens
  misc_RNA (1)...(19): siRNA sense strand
ggaacagugugugaugaua

SEQ ID NO: 929632 - RNA, 19 nt, Homo sapiens
  misc_RNA (1)...(19): siRNA sense strand
cauagaagaugcccauguu

SEQ ID NO: 929633 - RNA, 19 nt, Homo sapiens
  misc_RNA (1)...(19): siRNA sense strand
ggagaaggcucuggaccaa

SEQ ID NO: 929634 - RNA, 19 nt, Homo sapiens
  misc_RNA (1)...(19): siRNA sense strand
gaucuggaccuaaugaauu

SEQ ID NO: 929635 - RNA, 19 nt, Homo sapiens
  misc_RNA (1)...(19): siRNA sense strand
gcauuauucuucuugacua

SEQ ID NO: 929636 - RNA, 19 nt, Homo sapiens
  misc_RNA (1)...(19): siRNA sense strand
ggaaaagaaucccgcauuu

SEQ ID NO: 929637 - RNA, 19 nt, Homo sapiens
  misc_RNA (1)...(19): siRNA sense strand
gaaaugcaauggaaaagaa

SEQ ID NO: 929638 - RNA, 19 nt, Homo sapiens
  misc_RNA (1)...(19): siRNA sense strand
caacugggauguccaacug

SEQ ID NO: 929639 - RNA, 19 nt, Homo sapiens
  misc_RNA (1)...(19): siRNA sense strand
gcauuuggauggaucaugu

SEQ ID NO: 929640 - RNA, 19 nt, Homo sapiens
  misc_RNA (1)...(19): siRNA sense strand
gaggagaccuggaucacau

SEQ ID NO: 929641 - RNA, 19 nt, Homo sapiens
  misc_RNA (1)...(19): siRNA sense strand
caaaacaucuuaucaagug

SEQ ID NO: 929642 - RNA, 19 nt, Homo sapiens
  misc_RNA (1)...(19): siRNA sense strand
uaacuguacucaccaacaa

SEQ ID NO: 929643 - RNA, 19 nt, Homo sapiens
  misc_RNA (1)...(19): siRNA sense strand
caugggagauuguccugua

SEQ ID NO: 929644 - RNA, 19 nt, Homo sapiens
  misc_RNA (1)...(19): siRNA sense strand
gggaaugagucagcucuuu

SEQ ID NO: 929645 - RNA, 19 nt, Homo sapiens
  misc_RNA (1)...(19): siRNA sense strand
gcaaagggaaugagucuuc

SEQ ID NO: 929646 - RNA, 19 nt, Homo sapiens
  misc_RNA (1)...(19): siRNA sense strand
ucaggaagauuagaaguga

SEQ ID NO: 929647 - RNA, 19 nt, Homo sapiens
  misc_RNA (1)...(19): siRNA sense strand
ggaaagcauuauugcaauc

SEQ ID NO: 929648 - RNA, 19 nt, Homo sapiens
  misc_RNA (1)...(19): siRNA sense strand
ucaaugaagugaagugcaa

SEQ ID NO: 929649 - RNA, 19 nt, Homo sapiens
  misc_RNA (1)...(19): siRNA sense strand
cgauauggcucaaugaagu

SEQ ID NO: 929650 - RNA, 19 nt, Homo sapiens
  misc_RNA (1)...(19): siRNA sense strand
ggacuuaccugugaucacu

SEQ ID NO: 929651 - RNA, 19 nt, Homo sapiens
  misc_RNA (1)...(19): siRNA sense strand
gggaaagcauuauugcaau

SEQ ID NO: 929652 - RNA, 19 nt, Homo sapiens
  misc_RNA (1)...(19): siRNA sense strand
caacuucgccugguaaaug

SEQ ID NO: 929653 - RNA, 19 nt, Homo sapiens
  misc_RNA (1)...(19): siRNA sense strand
uaacggaaaugaaacuucu

SEQ ID NO: 929654 - RNA, 19 nt, Homo sapiens
  misc_RNA (1)...(19): siRNA sense strand
acacauggcuguuucuaag

SEQ ID NO: 929655 - RNA, 19 nt, Homo sapiens
  misc_RNA (1)...(19): siRNA sense strand
ggauggaucauguuucuug

SEQ ID NO: 929656 - RNA, 19 nt, Homo sapiens
  misc_RNA (1)...(19): siRNA sense strand
gcucagauggauccaauuu

SEQ ID NO: 929657 - RNA, 19 nt, Homo sapiens
  misc_RNA (1)...(19): siRNA sense strand
gaacugcaaacaucaagga

SEQ ID NO: 929658 - RNA, 19 nt, Homo sapiens
  misc_RNA (1)...(19): siRNA sense strand
ugaggaugcuggagugauu

SEQ ID NO: 929659 - RNA, 19 nt, Homo sapiens
  misc_RNA (1)...(19): siRNA sense strand
aagcauaacugugaucaug

SEQ ID NO: 929660 - RNA, 19 nt, Homo sapiens
  misc_RNA (1)...(19): siRNA sense strand
ggaaaugagucagcucucu

SEQ ID NO: 929661 - RNA, 19 nt, Homo sapiens
  misc_RNA (1)...(19): siRNA sense strand
caagauaagacuucaggaa

SEQ ID NO: 929662 - RNA, 19 nt, Homo sapiens
  misc_RNA (1)...(19): siRNA sense strand
gcucagaauucaugucucu

SEQ ID NO: 929663 - RNA, 19 nt, Homo sapiens
  misc_RNA (1)...(19): siRNA sense strand
gagcaaguggccucuguaa

SEQ ID NO: 929664 - RNA, 19 nt, Homo sapiens
  misc_RNA (1)...(19): siRNA sense strand
aaaugaaacuucucuuugg

SEQ ID NO: 929665 - RNA, 19 nt, Homo sapiens
  misc_RNA (1)...(19): siRNA sense strand
ggaaugagucagcucuuug

SEQ ID NO: 929666 - RNA, 19 nt, Homo sapiens
  misc_RNA (1)...(19): siRNA sense strand
gcaagaguagcaugucuga

SEQ ID NO: 929667 - RNA, 19 nt, Homo sapiens
  misc_RNA (1)...(19): siRNA sense strand
cagcuuaaauguggaguug

SEQ ID NO: 929668 - RNA, 19 nt, Homo sapiens
  misc_RNA (1)...(19): siRNA sense strand
ggaaagcauaguaacugua

SEQ ID NO: 929669 - RNA, 19 nt, Homo sapiens
  misc_RNA (1)...(19): siRNA sense strand
gggaaagcauaguaacugu

SEQ ID NO: 929670 - RNA, 19 nt, Homo sapiens
  misc_RNA (1)...(19): siRNA sense strand
cagacauucuacuuugaua

SEQ ID NO: 929671 - RNA, 19 nt, Homo sapiens
  misc_RNA (1)...(19): siRNA sense strand
gaauugcacagauauuuca

SEQ ID NO: 929672 - RNA, 19 nt, Homo sapiens
  misc_RNA (1)...(19): siRNA sense strand
gcuguggccugcauagaga

SEQ ID NO: 929673 - RNA, 19 nt, Homo sapiens
  misc_RNA (1)...(19): siRNA sense strand
gaugacggcugggacaguu

SEQ ID NO: 929674 - RNA, 19 nt, Homo sapiens
  misc_RNA (1)...(19): siRNA sense strand
gaucuggaggcauauguuu

SEQ ID NO: 929675 - RNA, 19 nt, Homo sapiens
  misc_RNA (1)...(19): siRNA sense strand
gaagcuuagaugcauauaa

SEQ ID NO: 929676 - RNA, 19 nt, Homo sapiens
  misc_RNA (1)...(19): siRNA sense strand
cgucagucauccuuuauug

SEQ ID NO: 929677 - RNA, 19 nt, Homo sapiens
  misc_RNA (1)...(19): siRNA sense strand
uggaugagaugaaaugcaa

SEQ ID NO: 929678 - RNA, 19 nt, Homo sapiens
  misc_RNA (1)...(19): siRNA sense strand
ggaagaauagagaucaaau

SEQ ID NO: 929679 - RNA, 19 nt, Homo sapiens
  misc_RNA (1)...(19): siRNA sense strand
ggagauucagagacuguua

SEQ ID NO: 929680 - RNA, 19 nt, Homo sapiens
  misc_RNA (1)...(19): siRNA sense strand
gaaagcauaguaacuguac

SEQ ID NO: 929681 - RNA, 19 nt, Homo sapiens
  misc_RNA (1)...(19): siRNA sense strand
gacagcggcuugcaguuuc

SEQ ID NO: 929682 - RNA, 19 nt, Homo sapiens
  misc_RNA (1)...(19): siRNA sense strand
aagaguagcaugucugaaa

SEQ ID NO: 929683 - RNA, 19 nt, Homo sapiens
  misc_RNA (1)...(19): siRNA sense strand
cauagagaguggucaacuu

SEQ ID NO: 929684 - RNA, 19 nt, Homo sapiens
  misc_RNA (1)...(19): siRNA sense strand
acacuguccucgugcaauu

SEQ ID NO: 929685 - RNA, 19 nt, Homo sapiens
  misc_RNA (1)...(19): siRNA sense strand
ucuguaaucugcucaggaa

SEQ ID NO: 929686 - RNA, 19 nt, Homo sapiens
  misc_RNA (1)...(19): siRNA sense strand
ucuaggugcuucauuaugu

SEQ ID NO: 929687 - RNA, 19 nt, Homo sapiens
  misc_RNA (1)...(19): siRNA sense strand
acauggcuguuucuaagua

SEQ ID NO: 929688 - RNA, 19 nt, Homo sapiens
  misc_RNA (1)...(19): siRNA sense strand
cugaagaauuccaguguga

SEQ ID NO: 929689 - RNA, 19 nt, Homo sapiens
  misc_RNA (1)...(19): siRNA sense strand
guaauaggaagcuuagaug

SEQ ID NO: 929690 - RNA, 19 nt, Homo sapiens
  misc_RNA (1)...(19): siRNA sense strand
ccauguggguggacaaugu

SEQ ID NO: 929691 - RNA, 19 nt, Homo sapiens
  misc_RNA (1)...(19): siRNA sense strand
caaguggccucuguaaucu

SEQ ID NO: 929692 - RNA, 19 nt, Homo sapiens
  misc_RNA (1)...(19): siRNA sense strand
uaagggauuuggacacauc

SEQ ID NO: 929693 - RNA, 19 nt, Homo sapiens
  misc_RNA (1)...(19): siRNA sense strand
gcugggcugugcagacaaa

SEQ ID NO: 929694 - RNA, 19 nt, Homo sapiens
  misc_RNA (1)...(19): siRNA sense strand
ugaagaugcuggcgugaca

SEQ ID NO: 929695 - RNA, 19 nt, Homo sapiens
  misc_RNA (1)...(19): siRNA sense strand
gcugucaguuucucugguu

SEQ ID NO: 929696 - RNA, 19 nt, Homo sapiens
  misc_RNA (1)...(19): siRNA sense strand
gaucaguggcugcaguuga

SEQ ID NO: 929697 - RNA, 19 nt, Homo sapiens
  misc_RNA (1)...(19): siRNA sense strand
caaggaggaugcgggaguu

SEQ ID NO: 929698 - RNA, 19 nt, Homo sapiens
  misc_RNA (1)...(19): siRNA sense strand
ggaagcggucucugugauu

SEQ ID NO: 929699 - RNA, 19 nt, Homo sapiens
  misc_RNA (1)...(19): siRNA sense strand
caguugagguggagauuca

SEQ ID NO: 929700 - RNA, 19 nt, Homo sapiens
  misc_RNA (1)...(19): siRNA sense strand
ggauguggaucugcacuca

SEQ ID NO: 929701 - RNA, 19 nt, Homo sapiens
  misc_RNA (1)...(19): siRNA sense strand
gugaauugcacagauauuu

SEQ ID NO: 929702 - RNA, 19 nt, Homo sapiens
  misc_RNA (1)...(19): siRNA sense strand
gguggugugucaacaacuu

SEQ ID NO: 929703 - RNA, 19 nt, Homo sapiens
  misc_RNA (1)...(19): siRNA sense strand
aaaucaacccugcaucuuu

SEQ ID NO: 929704 - RNA, 19 nt, Homo sapiens
  misc_RNA (1)...(19): siRNA sense strand
caacaaggccuaccauucc

SEQ ID NO: 929705 - RNA, 19 nt, Homo sapiens
  misc_RNA (1)...(19): siRNA sense strand
guagucugcucaagauaca

SEQ ID NO: 929706 - RNA, 19 nt, Homo sapiens
  misc_RNA (1)...(19): siRNA sense strand
gcagaugucuccucuuugu

SEQ ID NO: 929707 - RNA, 19 nt, Homo sapiens
  misc_RNA (1)...(19): siRNA sense strand
cagcagaugucuccucuuu

SEQ ID NO: 929708 - RNA, 19 nt, Homo sapiens
  misc_RNA (1)...(19): siRNA sense strand
ggacgaaugucacaauuuu

SEQ ID NO: 929709 - RNA, 19 nt, Homo sapiens
  misc_RNA (1)...(19): siRNA sense strand
guacugaggugacacaagu

SEQ ID NO: 929710 - RNA, 19 nt, Homo sapiens
  misc_RNA (1)...(19): siRNA sense strand
cgaaaucuacuucuucuuu

SEQ ID NO: 929711 - RNA, 19 nt, Homo sapiens
  misc_RNA (1)...(19): siRNA sense strand
gaaccucgcuuccaaucuc

SEQ ID NO: 929712 - RNA, 19 nt, Homo sapiens
  misc_RNA (1)...(19): siRNA sense strand
ggaagaaaggcaagaaaga

SEQ ID NO: 929713 - RNA, 19 nt, Homo sapiens
  misc_RNA (1)...(19): siRNA sense strand
caagaaagaggacgaaugu

SEQ ID NO: 929714 - RNA, 19 nt, Homo sapiens
  misc_RNA (1)...(19): siRNA sense strand
gagagugcaucaccaacaa

SEQ ID NO: 929715 - RNA, 19 nt, Homo sapiens
  misc_RNA (1)...(19): siRNA sense strand
gaggacgaaugucacaauu

SEQ ID NO: 929716 - RNA, 19 nt, Homo sapiens
  misc_RNA (1)...(19): siRNA sense strand
uugaagaucuggccuuauu

SEQ ID NO: 929717 - RNA, 19 nt, Homo sapiens
  misc_RNA (1)...(19): siRNA sense strand
ggacaccaucuucgcuuua

SEQ ID NO: 929718 - RNA, 19 nt, Homo sapiens
  misc_RNA (1)...(19): siRNA sense strand
caauuacucuguucuccuu

SEQ ID NO: 929719 - RNA, 19 nt, Homo sapiens
  misc_RNA (1)...(19): siRNA sense strand
gggacuggcuggcuucuuc

SEQ ID NO: 929720 - RNA, 19 nt, Homo sapiens
  misc_RNA (1)...(19): siRNA sense strand
gcaagaaagaggacgaaug

SEQ ID NO: 929721 - RNA, 19 nt, Homo sapiens
  misc_RNA (1)...(19): siRNA sense strand
ggagacuucccgagcauuu

SEQ ID NO: 929722 - RNA, 19 nt, Homo sapiens
  misc_RNA (1)...(19): siRNA sense strand
uaaagagccuggagaacgu

SEQ ID NO: 929723 - RNA, 19 nt, Homo sapiens
  misc_RNA (1)...(19): siRNA sense strand
ccucucaccuccucacuug

SEQ ID NO: 929724 - RNA, 19 nt, Homo sapiens
  misc_RNA (1)...(19): siRNA sense strand
gacgaaaucuacuucuucu

SEQ ID NO: 929725 - RNA, 19 nt, Homo sapiens
  misc_RNA (1)...(19): siRNA sense strand
gaagaaaggcaagaaagag

SEQ ID NO: 929726 - RNA, 19 nt, Homo sapiens
  misc_RNA (1)...(19): siRNA sense strand
gggaacuucuggcuagaga

SEQ ID NO: 929727 - RNA, 19 nt, Homo sapiens
  misc_RNA (1)...(19): siRNA sense strand
gggacaccaucuucgcuuu

SEQ ID NO: 929728 - RNA, 19 nt, Homo sapiens
  misc_RNA (1)...(19): siRNA sense strand
ucagagaacuaaaacauga

SEQ ID NO: 929729 - RNA, 19 nt, Homo sapiens
  misc_RNA (1)...(19): siRNA sense strand
gaggcugacuccugucuca

SEQ ID NO: 929730 - RNA, 19 nt, Homo sapiens
  misc_RNA (1)...(19): siRNA sense strand
ugacacaagugaauacaac

SEQ ID NO: 929731 - RNA, 19 nt, Homo sapiens
  misc_RNA (1)...(19): siRNA sense strand
agaaagaggacgaauguca

SEQ ID NO: 929732 - RNA, 19 nt, Homo sapiens
  misc_RNA (1)...(19): siRNA sense strand
gaacuucuggcuagagaca

SEQ ID NO: 929733 - RNA, 19 nt, Homo sapiens
  misc_RNA (1)...(19): siRNA sense strand
gcaugggcauccugugugu

SEQ ID NO: 929734 - RNA, 19 nt, Homo sapiens
  misc_RNA (1)...(19): siRNA sense strand
gacaccaucuucgcuuuau

SEQ ID NO: 929735 - RNA, 19 nt, Homo sapiens
  misc_RNA (1)...(19): siRNA sense strand
gaauggucccuucagagaa

SEQ ID NO: 929736 - RNA, 19 nt, Homo sapiens
  misc_RNA (1)...(19): siRNA sense strand
cgacgaaaucuacuucuuc

SEQ ID NO: 929737 - RNA, 19 nt, Homo sapiens
  misc_RNA (1)...(19): siRNA sense strand
gcaggauguugcugugcuu

SEQ ID NO: 929738 - RNA, 19 nt, Homo sapiens
  misc_RNA (1)...(19): siRNA sense strand
ggagagugcaucaccaaca

SEQ ID NO: 929739 - RNA, 19 nt, Homo sapiens
  misc_RNA (1)...(19): siRNA sense strand
gaggugacacaagugaaua

SEQ ID NO: 929740 - RNA, 19 nt, Homo sapiens
  misc_RNA (1)...(19): siRNA sense strand
guugagaacaugaaauugu

SEQ ID NO: 929741 - RNA, 19 nt, Homo sapiens
  misc_RNA (1)...(19): siRNA sense strand
caguugagaacaugaaauu

SEQ ID NO: 929742 - RNA, 19 nt, Homo sapiens
  misc_RNA (1)...(19): siRNA sense strand
acacauacaauuacucugu

SEQ ID NO: 929743 - RNA, 19 nt, Homo sapiens
  misc_RNA (1)...(19): siRNA sense strand
ggacggagccaauuaucac

SEQ ID NO: 929744 - RNA, 19 nt, Homo sapiens
  misc_RNA (1)...(19): siRNA sense strand
cagcaucccugacucucau

SEQ ID NO: 929745 - RNA, 19 nt, Homo sapiens
  misc_RNA (1)...(19): siRNA sense strand
cacauacaauuacucuguu

SEQ ID NO: 929746 - RNA, 19 nt, Homo sapiens
  misc_RNA (1)...(19): siRNA sense strand
gaacguccaguaguguuug

SEQ ID NO: 929747 - RNA, 19 nt, Homo sapiens
  misc_RNA (1)...(19): siRNA sense strand
gcuacuaucucugcugucu

SEQ ID NO: 929748 - RNA, 19 nt, Homo sapiens
  misc_RNA (1)...(19): siRNA sense strand
cauacgagcgcauuaaagu

SEQ ID NO: 929749 - RNA, 19 nt, Homo sapiens
  misc_RNA (1)...(19): siRNA sense strand
gaagauggagacgacgaaa

SEQ ID NO: 929750 - RNA, 19 nt, Homo sapiens
  misc_RNA (1)...(19): siRNA sense strand
gcuggucacuacagauaca

SEQ ID NO: 929751 - RNA, 19 nt, Homo sapiens
  misc_RNA (1)...(19): siRNA sense strand
gcaguggcuuugguggauu

SEQ ID NO: 929752 - RNA, 19 nt, Homo sapiens
  misc_RNA (1)...(19): siRNA sense strand
ccaguaguguuugaaguuc

SEQ ID NO: 929753 - RNA, 19 nt, Homo sapiens
  misc_RNA (1)...(19): siRNA sense strand
cccagaaccucgcuuccaa

SEQ ID NO: 929754 - RNA, 19 nt, Homo sapiens
  misc_RNA (1)...(19): siRNA sense strand
gacauagagucagcagaug

SEQ ID NO: 929755 - RNA, 19 nt, Homo sapiens
  misc_RNA (1)...(19): siRNA sense strand
uuauugauguguccagguu

SEQ ID NO: 929756 - RNA, 19 nt, Homo sapiens
  misc_RNA (1)...(19): siRNA sense strand
agacauagagucagcagau

SEQ ID NO: 929757 - RNA, 19 nt, Homo sapiens
  misc_RNA (1)...(19): siRNA sense strand
cccgagcauuugacucaua

SEQ ID NO: 929758 - RNA, 19 nt, Homo sapiens
  misc_RNA (1)...(19): siRNA sense strand
ggacuggauucggacagau

SEQ ID NO: 929759 - RNA, 19 nt, Homo sapiens
  misc_RNA (1)...(19): siRNA sense strand
gcagagauggacgacguuu

SEQ ID NO: 929760 - RNA, 19 nt, Homo sapiens
  misc_RNA (1)...(19): siRNA sense strand
gagaacguccaguaguguu

SEQ ID NO: 929761 - RNA, 19 nt, Homo sapiens
  misc_RNA (1)...(19): siRNA sense strand
ggagagaccccgcaggauu

SEQ ID NO: 929762 - RNA, 19 nt, Homo sapiens
  misc_RNA (1)...(19): siRNA sense strand
ucgcagucccucacacaua

SEQ ID NO: 929763 - RNA, 19 nt, Homo sapiens
  misc_RNA (1)...(19): siRNA sense strand
ggcaguggcuuugguggau

SEQ ID NO: 929764 - RNA, 19 nt, Homo sapiens
  misc_RNA (1)...(19): siRNA sense strand
gacuggauucggacagaua

SEQ ID NO: 929765 - RNA, 19 nt, Homo sapiens
  misc_RNA (1)...(19): siRNA sense strand
ggagaacguccaguagugu

SEQ ID NO: 929766 - RNA, 19 nt, Homo sapiens
  misc_RNA (1)...(19): siRNA sense strand
gguccaagacauagaguca

SEQ ID NO: 929767 - RNA, 19 nt, Homo sapiens
  misc_RNA (1)...(19): siRNA sense strand
gugcaucaccaacaacaug

SEQ ID NO: 929768 - RNA, 19 nt, Homo sapiens
  misc_RNA (1)...(19): siRNA sense strand
ccagcagguugaaagacuu

SEQ ID NO: 929769 - RNA, 19 nt, Homo sapiens
  misc_RNA (1)...(19): siRNA sense strand
gagggaacuucuggcuaga

SEQ ID NO: 929770 - RNA, 19 nt, Homo sapiens
  misc_RNA (1)...(19): siRNA sense strand
gcucagcucagcguucuug

SEQ ID NO: 929771 - RNA, 19 nt, Homo sapiens
  misc_RNA (1)...(19): siRNA sense strand
acaugaagcuccggcacuu

SEQ ID NO: 929772 - RNA, 19 nt, Homo sapiens
  misc_RNA (1)...(19): siRNA sense strand
ggauguugcugugcuucga

SEQ ID NO: 929773 - RNA, 19 nt, Homo sapiens
  misc_RNA (1)...(19): siRNA sense strand
acagauaccuugccuuccu

SEQ ID NO: 929774 - RNA, 19 nt, Homo sapiens
  misc_RNA (1)...(19): siRNA sense strand
uacuaucucugcugucugu

SEQ ID NO: 929775 - RNA, 19 nt, Homo sapiens
  misc_RNA (1)...(19): siRNA sense strand
cccaugugguagcagcuua

SEQ ID NO: 929776 - RNA, 19 nt, Homo sapiens
  misc_RNA (1)...(19): siRNA sense strand
cacaagacauucggacagu

SEQ ID NO: 929777 - RNA, 19 nt, Homo sapiens
  misc_RNA (1)...(19): siRNA sense strand
gauccgaagugcgggguua

SEQ ID NO: 929778 - RNA, 19 nt, Homo sapiens
  misc_RNA (1)...(19): siRNA sense strand
guaggaagaaaggcaagaa

SEQ ID NO: 929779 - RNA, 19 nt, Homo sapiens
  misc_RNA (1)...(19): siRNA sense strand
ucccucacacauacaauua

SEQ ID NO: 929780 - RNA, 19 nt, Homo sapiens
  misc_RNA (1)...(19): siRNA sense strand
ccacagcuggcuccugguu

SEQ ID NO: 929781 - RNA, 19 nt, Homo sapiens
  misc_RNA (1)...(19): siRNA sense strand
gaaagcugaccugcucugu

SEQ ID NO: 929782 - RNA, 19 nt, Homo sapiens
  misc_RNA (1)...(19): siRNA sense strand
uggcuuugguggauucuca

SEQ ID NO: 929783 - RNA, 19 nt, Homo sapiens
  misc_RNA (1)...(19): siRNA sense strand
gcgcuuaugccugugaaug

SEQ ID NO: 929784 - RNA, 19 nt, Homo sapiens
  misc_RNA (1)...(19): siRNA sense strand
ucucagggaaagaguauga

SEQ ID NO: 929785 - RNA, 19 nt, Homo sapiens
  misc_RNA (1)...(19): siRNA sense strand
cugcuggucacuacagaua

SEQ ID NO: 929786 - RNA, 19 nt, Homo sapiens
  misc_RNA (1)...(19): siRNA sense strand
gggacggagccaauuauca

SEQ ID NO: 929787 - RNA, 19 nt, Homo sapiens
  misc_RNA (1)...(19): siRNA sense strand
gcagcaucccugacucuca

SEQ ID NO: 929788 - RNA, 19 nt, Homo sapiens
  misc_RNA (1)...(19): siRNA sense strand
gcuuaugccugugaauguc

SEQ ID NO: 929789 - RNA, 19 nt, Homo sapiens
  misc_RNA (1)...(19): siRNA sense strand
gaagaucuggccuuauucc

SEQ ID NO: 929790 - RNA, 19 nt, Homo sapiens
  misc_RNA (1)...(19): siRNA sense strand
cagcucagcguucuugaag

SEQ ID NO: 929791 - RNA, 19 nt, Homo sapiens
  misc_RNA (1)...(19): siRNA sense strand
gaccagccucucagggaaa

SEQ ID NO: 929792 - RNA, 19 nt, Homo sapiens
  misc_RNA (1)...(19): siRNA sense strand
caucuuuuauggcaucuuu

SEQ ID NO: 929793 - RNA, 19 nt, Homo sapiens
  misc_RNA (1)...(19): siRNA sense strand
gagcauuugacucauacga

SEQ ID NO: 929794 - RNA, 19 nt, Homo sapiens
  misc_RNA (1)...(19): siRNA sense strand
gagacgacgaaaucuacuu

SEQ ID NO: 929795 - RNA, 19 nt, Homo sapiens
  misc_RNA (1)...(19): siRNA sense strand
cagcaugggcauccugugu

SEQ ID NO: 929796 - RNA, 19 nt, Homo sapiens
  misc_RNA (1)...(19): siRNA sense strand
ucacacauacaauuacucu

SEQ ID NO: 929797 - RNA, 19 nt, Homo sapiens
  misc_RNA (1)...(19): siRNA sense strand
ccagagccacagccaguug

SEQ ID NO: 929798 - RNA, 19 nt, Homo sapiens
  misc_RNA (1)...(19): siRNA sense strand
cacuacagauacagccuau

SEQ ID NO: 929799 - RNA, 19 nt, Homo sapiens
  misc_RNA (1)...(19): siRNA sense strand
agauggagacgacgaaauc

SEQ ID NO: 929800 - RNA, 19 nt, Homo sapiens
  misc_RNA (1)...(19): siRNA sense strand
agccacaugugaugaaaca

SEQ ID NO: 929801 - RNA, 19 nt, Homo sapiens
  misc_RNA (1)...(19): siRNA sense strand
uaggaagaaaggcaagaaa

SEQ ID NO: 929802 - RNA, 19 nt, Homo sapiens
  misc_RNA (1)...(19): siRNA sense strand
agacuucccgagcauuuga

SEQ ID NO: 929803 - RNA, 19 nt, Homo sapiens
  misc_RNA (1)...(19): siRNA sense strand
cgcagucccucacacauac

SEQ ID NO: 929804 - RNA, 19 nt, Homo sapiens
  misc_RNA (1)...(19): siRNA sense strand
cuagccacaugugaugaaa

SEQ ID NO: 929805 - RNA, 19 nt, Homo sapiens
  misc_RNA (1)...(19): siRNA sense strand
ggcuacagcugcgcaugug

SEQ ID NO: 929806 - RNA, 19 nt, Homo sapiens
  misc_RNA (1)...(19): siRNA sense strand
uauaagaccuggaagaagu

SEQ ID NO: 929807 - RNA, 19 nt, Homo sapiens
  misc_RNA (1)...(19): siRNA sense strand
gcaaguauaagaccuggaa

SEQ ID NO: 929808 - RNA, 19 nt, Homo sapiens
  misc_RNA (1)...(19): siRNA sense strand
gugcacagccugaagauga

SEQ ID NO: 929809 - RNA, 19 nt, Homo sapiens
  misc_RNA (1)...(19): siRNA sense strand
cagacaagcugaagcagau

SEQ ID NO: 929810 - RNA, 19 nt, Homo sapiens
  misc_RNA (1)...(19): siRNA sense strand
cgacccagcccugaucuua

SEQ ID NO: 929811 - RNA, 19 nt, Homo sapiens
  misc_RNA (1)...(19): siRNA sense strand
gcccugaucuuagcugaga

SEQ ID NO: 929812 - RNA, 19 nt, Homo sapiens
  misc_RNA (1)...(19): siRNA sense strand
caacaucuucuaccucuuc

SEQ ID NO: 929813 - RNA, 19 nt, Homo sapiens
  misc_RNA (1)...(19): siRNA sense strand
caaauacgcccuuuucuug

SEQ ID NO: 929814 - RNA, 19 nt, Homo sapiens
  misc_RNA (1)...(19): siRNA sense strand
guacgcccuucgucaagaa

SEQ ID NO: 929815 - RNA, 19 nt, Homo sapiens
  misc_RNA (1)...(19): siRNA sense strand
gaagaugagaagcaaauac

SEQ ID NO: 929816 - RNA, 19 nt, Homo sapiens
  misc_RNA (1)...(19): siRNA sense strand
gaagaggaagagcagagaa

SEQ ID NO: 929817 - RNA, 19 nt, Homo sapiens
  misc_RNA (1)...(19): siRNA sense strand
gagaaguaccacugcaaga

SEQ ID NO: 929818 - RNA, 19 nt, Homo sapiens
  misc_RNA (1)...(19): siRNA sense strand
ggaagaggaagagcagaga

SEQ ID NO: 929819 - RNA, 19 nt, Homo sapiens
  misc_RNA (1)...(19): siRNA sense strand
gcaaauacgcccuuuucuu

SEQ ID NO: 929820 - RNA, 19 nt, Homo sapiens
  misc_RNA (1)...(19): siRNA sense strand
gaaguaccacugcaagaac

SEQ ID NO: 929821 - RNA, 19 nt, Homo sapiens
  misc_RNA (1)...(19): siRNA sense strand
agaaguaccacugcaagaa

SEQ ID NO: 929822 - RNA, 19 nt, Homo sapiens
  misc_RNA (1)...(19): siRNA sense strand
cggagcaguucgagaagug

SEQ ID NO: 929823 - RNA, 19 nt, Homo sapiens
  misc_RNA (1)...(19): siRNA sense strand
agaagcaaauacgcccuuu

SEQ ID NO: 929824 - RNA, 19 nt, Homo sapiens
  misc_RNA (1)...(19): siRNA sense strand
gcaacaucuucuaccucuu

SEQ ID NO: 929825 - RNA, 19 nt, Homo sapiens
  misc_RNA (1)...(19): siRNA sense strand
ggacugccgggacuuugug

SEQ ID NO: 929826 - RNA, 19 nt, Homo sapiens
  misc_RNA (1)...(19): siRNA sense strand
ugaagaugagaagcaaaua

SEQ ID NO: 929827 - RNA, 19 nt, Homo sapiens
  misc_RNA (1)...(19): siRNA sense strand
aagaggaagagcagagaaa

SEQ ID NO: 929828 - RNA, 19 nt, Homo sapiens
  misc_RNA (1)...(19): siRNA sense strand
aguauaagaccuggaagaa

SEQ ID NO: 929829 - RNA, 19 nt, Homo sapiens
  misc_RNA (1)...(19): siRNA sense strand
gccugaagaugagaagcaa

SEQ ID NO: 929830 - RNA, 19 nt, Homo sapiens
  misc_RNA (1)...(19): siRNA sense strand
gcaucuacuccacgcagaa

SEQ ID NO: 929831 - RNA, 19 nt, Homo sapiens
  misc_RNA (1)...(19): siRNA sense strand
aggaagagcagagaaagga

SEQ ID NO: 929832 - RNA, 19 nt, Homo sapiens
  misc_RNA (1)...(19): siRNA sense strand
gacaagcugaagcagauuc

SEQ ID NO: 929833 - RNA, 19 nt, Homo sapiens
  misc_RNA (1)...(19): siRNA sense strand
guauaagaccuggaagaag

SEQ ID NO: 929834 - RNA, 19 nt, Homo sapiens
  misc_RNA (1)...(19): siRNA sense strand
ccgaggaccaccugacuca

SEQ ID NO: 929835 - RNA, 19 nt, Homo sapiens
  misc_RNA (1)...(19): siRNA sense strand
gcagggcaacaucuucuac

SEQ ID NO: 929836 - RNA, 19 nt, Homo sapiens
  misc_RNA (1)...(19): siRNA sense strand
gcacgcugcuggucaucaa

SEQ ID NO: 929837 - RNA, 19 nt, Homo sapiens
  misc_RNA (1)...(19): siRNA sense strand
caagugaggcugcggaaga

SEQ ID NO: 929838 - RNA, 19 nt, Homo sapiens
  misc_RNA (1)...(19): siRNA sense strand
gggcuucgucuacuccuuu

SEQ ID NO: 929839 - RNA, 19 nt, Homo sapiens
  misc_RNA (1)...(19): siRNA sense strand
gcccacagccuggugauga

SEQ ID NO: 929840 - RNA, 19 nt, Homo sapiens
  misc_RNA (1)...(19): siRNA sense strand
caucaucacgggccaagug

SEQ ID NO: 929841 - RNA, 19 nt, Homo sapiens
  misc_RNA (1)...(19): siRNA sense strand
ggaugcacuuccuggucuu

SEQ ID NO: 929842 - RNA, 19 nt, Homo sapiens
  misc_RNA (1)...(19): siRNA sense strand
aagugaggcugcggaagaa

SEQ ID NO: 929843 - RNA, 19 nt, Homo sapiens
  misc_RNA (1)...(19): siRNA sense strand
guacgugguggccaucauc

SEQ ID NO: 929844 - RNA, 19 nt, Homo sapiens
  misc_RNA (1)...(19): siRNA sense strand
gcacgcugcuggucaucaa

SEQ ID NO: 929845 - RNA, 19 nt, Homo sapiens
  misc_RNA (1)...(19): siRNA sense strand
caagugaggcugcggaaga

SEQ ID NO: 929846 - RNA, 19 nt, Homo sapiens
  misc_RNA (1)...(19): siRNA sense strand
gcccacagccuggugauga

SEQ ID NO: 929847 - RNA, 19 nt, Homo sapiens
  misc_RNA (1)...(19): siRNA sense strand
caucaucacgggccaagug

SEQ ID NO: 929848 - RNA, 19 nt, Homo sapiens
  misc_RNA (1)...(19): siRNA sense strand
aagugaggcugcggaagaa

SEQ ID NO: 929849 - RNA, 19 nt, Homo sapiens
  misc_RNA (1)...(19): siRNA sense strand
guacgugguggccaucauc

SEQ ID NO: 929850 - RNA, 19 nt, Homo sapiens
  misc_RNA (1)...(19): siRNA sense strand
cagcauaucuccaaaguua

SEQ ID NO: 929851 - RNA, 19 nt, Homo sapiens
  misc_RNA (1)...(19): siRNA sense strand
ggaagaaacuggcagauau

SEQ ID NO: 929852 - RNA, 19 nt, Homo sapiens
  misc_RNA (1)...(19): siRNA sense strand
gaacaagguuuacggacua

SEQ ID NO: 929853 - RNA, 19 nt, Homo sapiens
  misc_RNA (1)...(19): siRNA sense strand
caucaacacuuuccacaua

SEQ ID NO: 929854 - RNA, 19 nt, Homo sapiens
  misc_RNA (1)...(19): siRNA sense strand
gaggugagcuugccaguga

SEQ ID NO: 929855 - RNA, 19 nt, Homo sapiens
  misc_RNA (1)...(19): siRNA sense strand
gaaaagaaguccaaguuaa

SEQ ID NO: 929856 - RNA, 19 nt, Homo sapiens
  misc_RNA (1)...(19): siRNA sense strand
caaagacccugccaaagaa

SEQ ID NO: 929857 - RNA, 19 nt, Homo sapiens
  misc_RNA (1)...(19): siRNA sense strand
ggcgugagcuuacaaauga

SEQ ID NO: 929858 - RNA, 19 nt, Homo sapiens
  misc_RNA (1)...(19): siRNA sense strand
ccaaagagcacccuaguuu

SEQ ID NO: 929859 - RNA, 19 nt, Homo sapiens
  misc_RNA (1)...(19): siRNA sense strand
ggacaaagacagugagaaa

SEQ ID NO: 929860 - RNA, 19 nt, Homo sapiens
  misc_RNA (1)...(19): siRNA sense strand
gagagugacuuggaagaua

SEQ ID NO: 929861 - RNA, 19 nt, Homo sapiens
  misc_RNA (1)...(19): siRNA sense strand
aaacuaagcuggacaacga

SEQ ID NO: 929862 - RNA, 19 nt, Homo sapiens
  misc_RNA (1)...(19): siRNA sense strand
ggaagggauugaagacuuu

SEQ ID NO: 929863 - RNA, 19 nt, Homo sapiens
  misc_RNA (1)...(19): siRNA sense strand
gaagaaacgugugguacaa

SEQ ID NO: 929864 - RNA, 19 nt, Homo sapiens
  misc_RNA (1)...(19): siRNA sense strand
gagaagagccucagagaga

SEQ ID NO: 929865 - RNA, 19 nt, Homo sapiens
  misc_RNA (1)...(19): siRNA sense strand
gaacaaauuggucaucaaa

SEQ ID NO: 929866 - RNA, 19 nt, Homo sapiens
  misc_RNA (1)...(19): siRNA sense strand
ucaaacagcucgagagguu

SEQ ID NO: 929867 - RNA, 19 nt, Homo sapiens
  misc_RNA (1)...(19): siRNA sense strand
gaagccagcuggacaagga

SEQ ID NO: 929868 - RNA, 19 nt, Homo sapiens
  misc_RNA (1)...(19): siRNA sense strand
gaacggacaccuucagauu

SEQ ID NO: 929869 - RNA, 19 nt, Homo sapiens
  misc_RNA (1)...(19): siRNA sense strand
gcaccaggaucacagauga

SEQ ID NO: 929870 - RNA, 19 nt, Homo sapiens
  misc_RNA (1)...(19): siRNA sense strand
caaggaauaugacaaugaa

SEQ ID NO: 929871 - RNA, 19 nt, Homo sapiens
  misc_RNA (1)...(19): siRNA sense strand
gagcaacucucuaauuuac

SEQ ID NO: 929872 - RNA, 19 nt, Homo sapiens
  misc_RNA (1)...(19): siRNA sense strand
cagaggagcuugcuaagga

SEQ ID NO: 929873 - RNA, 19 nt, Homo sapiens
  misc_RNA (1)...(19): siRNA sense strand
caagagagcuggcuacaac

SEQ ID NO: 929874 - RNA, 19 nt, Homo sapiens
  misc_RNA (1)...(19): siRNA sense strand
gcaacuggcacuauaagua

SEQ ID NO: 929875 - RNA, 19 nt, Homo sapiens
  misc_RNA (1)...(19): siRNA sense strand
caaagacagugagaaagua

SEQ ID NO: 929876 - RNA, 19 nt, Homo sapiens
  misc_RNA (1)...(19): siRNA sense strand
gaaacuggcagauaugauu

SEQ ID NO: 929877 - RNA, 19 nt, Homo sapiens
  misc_RNA (1)...(19): siRNA sense strand
agaaggagcugacagauuc

SEQ ID NO: 929878 - RNA, 19 nt, Homo sapiens
  misc_RNA (1)...(19): siRNA sense strand
gaacaucuccgcuaucauc

SEQ ID NO: 929879 - RNA, 19 nt, Homo sapiens
  misc_RNA (1)...(19): siRNA sense strand
aaagagagcccuucaagaa

SEQ ID NO: 929880 - RNA, 19 nt, Homo sapiens
  misc_RNA (1)...(19): siRNA sense strand
ggaagagagugacuuggaa

SEQ ID NO: 929881 - RNA, 19 nt, Homo sapiens
  misc_RNA (1)...(19): siRNA sense strand
ugacgaaagugccaauaaa

SEQ ID NO: 929882 - RNA, 19 nt, Homo sapiens
  misc_RNA (1)...(19): siRNA sense strand
gaacaggaggaaucguuua

SEQ ID NO: 929883 - RNA, 19 nt, Homo sapiens
  misc_RNA (1)...(19): siRNA sense strand
cccaaaggaugaugaauuu

SEQ ID NO: 929884 - RNA, 19 nt, Homo sapiens
  misc_RNA (1)...(19): siRNA sense strand
gauaaacuguacccacuga

SEQ ID NO: 929885 - RNA, 19 nt, Homo sapiens
  misc_RNA (1)...(19): siRNA sense strand
caaggaaucuuucacucaa

SEQ ID NO: 929886 - RNA, 19 nt, Homo sapiens
  misc_RNA (1)...(19): siRNA sense strand
caacaaaccuuuuaagugu

SEQ ID NO: 929887 - RNA, 19 nt, Homo sapiens
  misc_RNA (1)...(19): siRNA sense strand
gaacuggccaccuucaauu

SEQ ID NO: 929888 - RNA, 19 nt, Homo sapiens
  misc_RNA (1)...(19): siRNA sense strand
gcacucaaaugaccaaucu

SEQ ID NO: 929889 - RNA, 19 nt, Homo sapiens
  misc_RNA (1)...(19): siRNA sense strand
caacaaggauuaccugaac

SEQ ID NO: 929890 - RNA, 19 nt, Homo sapiens
  misc_RNA (1)...(19): siRNA sense strand
caggaacacucucuucaaa

SEQ ID NO: 929891 - RNA, 19 nt, Homo sapiens
  misc_RNA (1)...(19): siRNA sense strand
aaaccuaccuccucagcua

SEQ ID NO: 929892 - RNA, 19 nt, Homo sapiens
  misc_RNA (1)...(19): siRNA sense strand
guauaaaccaaacgaguua

SEQ ID NO: 929893 - RNA, 19 nt, Homo sapiens
  misc_RNA (1)...(19): siRNA sense strand
gaccauaccauaauuguug

SEQ ID NO: 929894 - RNA, 19 nt, Homo sapiens
  misc_RNA (1)...(19): siRNA sense strand
caaagagcacccuaguuua

SEQ ID NO: 929895 - RNA, 19 nt, Homo sapiens
  misc_RNA (1)...(19): siRNA sense strand
ccacuaugcuagaauguga

SEQ ID NO: 929896 - RNA, 19 nt, Homo sapiens
  misc_RNA (1)...(19): siRNA sense strand
gcaauggacugaacucaac

SEQ ID NO: 929897 - RNA, 19 nt, Homo sapiens
  misc_RNA (1)...(19): siRNA sense strand
agaagaagcuguguuacaa

SEQ ID NO: 929898 - RNA, 19 nt, Homo sapiens
  misc_RNA (1)...(19): siRNA sense strand
gaccaggcuuucccgaaua

SEQ ID NO: 929899 - RNA, 19 nt, Homo sapiens
  misc_RNA (1)...(19): siRNA sense strand
caagccaguuccuuccuua

SEQ ID NO: 929900 - RNA, 19 nt, Homo sapiens
  misc_RNA (1)...(19): siRNA sense strand
gcaaggaauaugacaauga

SEQ ID NO: 929901 - RNA, 19 nt, Homo sapiens
  misc_RNA (1)...(19): siRNA sense strand
acaaauuggucaucaaaga

SEQ ID NO: 929902 - RNA, 19 nt, Homo sapiens
  misc_RNA (1)...(19): siRNA sense strand
ggacggcuccgcauacauu

SEQ ID NO: 929903 - RNA, 19 nt, Homo sapiens
  misc_RNA (1)...(19): siRNA sense strand
ggaggaagcucugagucaa

SEQ ID NO: 929904 - RNA, 19 nt, Homo sapiens
  misc_RNA (1)...(19): siRNA sense strand
gaggaaucguuuaagcuuu

SEQ ID NO: 929905 - RNA, 19 nt, Homo sapiens
  misc_RNA (1)...(19): siRNA sense strand
agagcacccuaguuuauua

SEQ ID NO: 929906 - RNA, 19 nt, Homo sapiens
  misc_RNA (1)...(19): siRNA sense strand
gaguggaucugcaggcaaa

SEQ ID NO: 929907 - RNA, 19 nt, Homo sapiens
  misc_RNA (1)...(19): siRNA sense strand
caacgggaauagcaacuga

SEQ ID NO: 929908 - RNA, 19 nt, Homo sapiens
  misc_RNA (1)...(19): siRNA sense strand
gacaagcguuugagaacaa

SEQ ID NO: 929909 - RNA, 19 nt, Homo sapiens
  misc_RNA (1)...(19): siRNA sense strand
ucucguaacucguguaaga

SEQ ID NO: 929910 - RNA, 19 nt, Homo sapiens
  misc_RNA (1)...(19): siRNA sense strand
gggcacagcuucuacuagu

SEQ ID NO: 929911 - RNA, 19 nt, Homo sapiens
  misc_RNA (1)...(19): siRNA sense strand
gggcauuccuccuguguug

SEQ ID NO: 929912 - RNA, 19 nt, Homo sapiens
  misc_RNA (1)...(19): siRNA sense strand
gcaacucucuaauuuacug

SEQ ID NO: 929913 - RNA, 19 nt, Homo sapiens
  misc_RNA (1)...(19): siRNA sense strand
ccaaagagaagaaagaguu

SEQ ID NO: 929914 - RNA, 19 nt, Homo sapiens
  misc_RNA (1)...(19): siRNA sense strand
gauccagucucagcuguuu

SEQ ID NO: 929915 - RNA, 19 nt, Homo sapiens
  misc_RNA (1)...(19): siRNA sense strand
gugagaagcacaugcauaa

SEQ ID NO: 929916 - RNA, 19 nt, Homo sapiens
  misc_RNA (1)...(19): siRNA sense strand
ggugcgaggugugugauua

SEQ ID NO: 929917 - RNA, 19 nt, Homo sapiens
  misc_RNA (1)...(19): siRNA sense strand
acaagcacgugcagaagua

SEQ ID NO: 929918 - RNA, 19 nt, Homo sapiens
  misc_RNA (1)...(19): siRNA sense strand
acaaagacccugccaaaga

SEQ ID NO: 929919 - RNA, 19 nt, Homo sapiens
  misc_RNA (1)...(19): siRNA sense strand
cagaauuacuuuccuuuca

SEQ ID NO: 929920 - RNA, 19 nt, Homo sapiens
  misc_RNA (1)...(19): siRNA sense strand
gcaugagagugguguagaa

SEQ ID NO: 929921 - RNA, 19 nt, Homo sapiens
  misc_RNA (1)...(19): siRNA sense strand
aggaaucguuuaagcuuua

SEQ ID NO: 929922 - RNA, 19 nt, Homo sapiens
  misc_RNA (1)...(19): siRNA sense strand
uugagcaacucucuaauuu

SEQ ID NO: 929923 - RNA, 19 nt, Homo sapiens
  misc_RNA (1)...(19): siRNA sense strand
ccaaggcccugcuggagaa

SEQ ID NO: 929924 - RNA, 19 nt, Homo sapiens
  misc_RNA (1)...(19): siRNA sense strand
aggccgagcucuaccaaua

SEQ ID NO: 929925 - RNA, 19 nt, Homo sapiens
  misc_RNA (1)...(19): siRNA sense strand
gaacaugacccagauccaa

SEQ ID NO: 929926 - RNA, 19 nt, Homo sapiens
  misc_RNA (1)...(19): siRNA sense strand
gcacagcuuccgcguguuu

SEQ ID NO: 929927 - RNA, 19 nt, Homo sapiens
  misc_RNA (1)...(19): siRNA sense strand
gcauaucuccaaaguuaaa

SEQ ID NO: 929928 - RNA, 19 nt, Homo sapiens
  misc_RNA (1)...(19): siRNA sense strand
gaaaccaaauccucuucug

SEQ ID NO: 929929 - RNA, 19 nt, Homo sapiens
  misc_RNA (1)...(19): siRNA sense strand
ggaagaauuaugagaauca

SEQ ID NO: 929930 - RNA, 19 nt, Homo sapiens
  misc_RNA (1)...(19): siRNA sense strand
guacagagaccacuacgau

SEQ ID NO: 929931 - RNA, 19 nt, Homo sapiens
  misc_RNA (1)...(19): siRNA sense strand
gcacccaccucccugacaa

SEQ ID NO: 929932 - RNA, 19 nt, Homo sapiens
  misc_RNA (1)...(19): siRNA sense strand
ucaaagagaggcagcguaa

SEQ ID NO: 929933 - RNA, 19 nt, Homo sapiens
  misc_RNA (1)...(19): siRNA sense strand
gcaaguggcagcagcaaug

SEQ ID NO: 929934 - RNA, 19 nt, Homo sapiens
  misc_RNA (1)...(19): siRNA sense strand
gaaugacccugagcgaaga

SEQ ID NO: 929935 - RNA, 19 nt, Homo sapiens
  misc_RNA (1)...(19): siRNA sense strand
gcacaaacacagaacaauc

SEQ ID NO: 929936 - RNA, 19 nt, Homo sapiens
  misc_RNA (1)...(19): siRNA sense strand
gaccaaagcggccaugaug

SEQ ID NO: 929937 - RNA, 19 nt, Homo sapiens
  misc_RNA (1)...(19): siRNA sense strand
ggagagcggcgugagcuua

SEQ ID NO: 929938 - RNA, 19 nt, Homo sapiens
  misc_RNA (1)...(19): siRNA sense strand
aaagaaagccagagagaga

SEQ ID NO: 929939 - RNA, 19 nt, Homo sapiens
  misc_RNA (1)...(19): siRNA sense strand
gcagaaccaacucucuaua

SEQ ID NO: 929940 - RNA, 19 nt, Homo sapiens
  misc_RNA (1)...(19): siRNA sense strand
gcuccaagcucuaacuuac

SEQ ID NO: 929941 - RNA, 19 nt, Homo sapiens
  misc_RNA (1)...(19): siRNA sense strand
agagugacuuggaagauaa

SEQ ID NO: 929942 - RNA, 19 nt, Homo sapiens
  misc_RNA (1)...(19): siRNA sense strand
gagaaggagcugacagauu

SEQ ID NO: 929943 - RNA, 19 nt, Homo sapiens
  misc_RNA (1)...(19): siRNA sense strand
guauucauaugcagucuga

SEQ ID NO: 929944 - RNA, 19 nt, Homo sapiens
  misc_RNA (1)...(19): siRNA sense strand
gcaaggaaucuuucacuca

SEQ ID NO: 929945 - RNA, 19 nt, Homo sapiens
  misc_RNA (1)...(19): siRNA sense strand
ccaguuccuuccuuacuuu

SEQ ID NO: 929946 - RNA, 19 nt, Homo sapiens
  misc_RNA (1)...(19): siRNA sense strand
gaaaguaaaggagaaggaa

SEQ ID NO: 929947 - RNA, 19 nt, Homo sapiens
  misc_RNA (1)...(19): siRNA sense strand
cgaaagauguuggaucaca

SEQ ID NO: 929948 - RNA, 19 nt, Homo sapiens
  misc_RNA (1)...(19): siRNA sense strand
gaagaaacuggcagauaug

SEQ ID NO: 929949 - RNA, 19 nt, Homo sapiens
  misc_RNA (1)...(19): siRNA sense strand
gcggguaccugcagccuau

SEQ ID NO: 929950 - RNA, 19 nt, Homo sapiens
  misc_RNA (1)...(19): siRNA sense strand
ggaacugcaucucuucuua

SEQ ID NO: 929951 - RNA, 19 nt, Homo sapiens
  misc_RNA (1)...(19): siRNA sense strand
ucaaggaggugaugucaga

SEQ ID NO: 929952 - RNA, 19 nt, Homo sapiens
  misc_RNA (1)...(19): siRNA sense strand
guacuuugcucacaucauc

SEQ ID NO: 929953 - RNA, 19 nt, Homo sapiens
  misc_RNA (1)...(19): siRNA sense strand
caagcaagauuuccugaag

SEQ ID NO: 929954 - RNA, 19 nt, Homo sapiens
  misc_RNA (1)...(19): siRNA sense strand
gaaguacuuugcucacauc

SEQ ID NO: 929955 - RNA, 19 nt, Homo sapiens
  misc_RNA (1)...(19): siRNA sense strand
ggaaguacuuugcucacau

SEQ ID NO: 929956 - RNA, 19 nt, Homo sapiens
  misc_RNA (1)...(19): siRNA sense strand
gagagcaaauaccagaaug

SEQ ID NO: 929957 - RNA, 19 nt, Homo sapiens
  misc_RNA (1)...(19): siRNA sense strand
ccaaggagccgcugaugga

SEQ ID NO: 929958 - RNA, 19 nt, Homo sapiens
  misc_RNA (1)...(19): siRNA sense strand
gaaagugccacaccgagau

SEQ ID NO: 929959 - RNA, 19 nt, Homo sapiens
  misc_RNA (1)...(19): siRNA sense strand
caaguuuaaugccaaauac

SEQ ID NO: 929960 - RNA, 19 nt, Homo sapiens
  misc_RNA (1)...(19): siRNA sense strand
gagcagggccgugaacaga

SEQ ID NO: 929961 - RNA, 19 nt, Homo sapiens
  misc_RNA (1)...(19): siRNA sense strand
ugacaaguuuaaugccaaa

SEQ ID NO: 929962 - RNA, 19 nt, Homo sapiens
  misc_RNA (1)...(19): siRNA sense strand
gaacacuuuccaucgcuuu

SEQ ID NO: 929963 - RNA, 19 nt, Homo sapiens
  misc_RNA (1)...(19): siRNA sense strand
gugcugauggcccugauua

SEQ ID NO: 929964 - RNA, 19 nt, Homo sapiens
  misc_RNA (1)...(19): siRNA sense strand
gcucagcuccugcgauaug

SEQ ID NO: 929965 - RNA, 19 nt, Homo sapiens
  misc_RNA (1)...(19): siRNA sense strand
uagagcacguggaugguuu

SEQ ID NO: 929966 - RNA, 19 nt, Homo sapiens
  misc_RNA (1)...(19): siRNA sense strand
gaacugcaucucuucuuag

SEQ ID NO: 929967 - RNA, 19 nt, Homo sapiens
  misc_RNA (1)...(19): siRNA sense strand
ggagagcaaauaccagaau

SEQ ID NO: 929968 - RNA, 19 nt, Homo sapiens
  misc_RNA (1)...(19): siRNA sense strand
ggacagugacucggaccua

SEQ ID NO: 929969 - RNA, 19 nt, Homo sapiens
  misc_RNA (1)...(19): siRNA sense strand
gaggacaacccacccuaug

SEQ ID NO: 929970 - RNA, 19 nt, Homo sapiens
  misc_RNA (1)...(19): siRNA sense strand
caugcuggcugagaacauu

SEQ ID NO: 929971 - RNA, 19 nt, Homo sapiens
  misc_RNA (1)...(19): siRNA sense strand
aagcaagauuuccugaaga

SEQ ID NO: 929972 - RNA, 19 nt, Homo sapiens
  misc_RNA (1)...(19): siRNA sense strand
acaccgagauuucuacaac

SEQ ID NO: 929973 - RNA, 19 nt, Homo sapiens
  misc_RNA (1)...(19): siRNA sense strand
gcaacagcgugcucaugag

SEQ ID NO: 929974 - RNA, 19 nt, Homo sapiens
  misc_RNA (1)...(19): siRNA sense strand
gggaaguacuuugcucaca

SEQ ID NO: 929975 - RNA, 19 nt, Homo sapiens
  misc_RNA (1)...(19): siRNA sense strand
ccauaaagucauucugcua

SEQ ID NO: 929976 - RNA, 19 nt, Homo sapiens
  misc_RNA (1)...(19): siRNA sense strand
ugcaugugcuacucaauga

SEQ ID NO: 929977 - RNA, 19 nt, Homo sapiens
  misc_RNA (1)...(19): siRNA sense strand
uccgagagaucuucaucaa

SEQ ID NO: 929978 - RNA, 19 nt, Homo sapiens
  misc_RNA (1)...(19): siRNA sense strand
ugacgucaaugugcugaug

SEQ ID NO: 929979 - RNA, 19 nt, Homo sapiens
  misc_RNA (1)...(19): siRNA sense strand
ggaggacaacccacccuau

SEQ ID NO: 929980 - RNA, 19 nt, Homo sapiens
  misc_RNA (1)...(19): siRNA sense strand
ccaucgcuuugacaaguuu

SEQ ID NO: 929981 - RNA, 19 nt, Homo sapiens
  misc_RNA (1)...(19): siRNA sense strand
gcuccaaguuccagaugca

SEQ ID NO: 929982 - RNA, 19 nt, Homo sapiens
  misc_RNA (1)...(19): siRNA sense strand
gcaugaaccagaagcaucu

SEQ ID NO: 929983 - RNA, 19 nt, Homo sapiens
  misc_RNA (1)...(19): siRNA sense strand
cuacaccuuugccaacaug

SEQ ID NO: 929984 - RNA, 19 nt, Homo sapiens
  misc_RNA (1)...(19): siRNA sense strand
gagcaaauaccagaaugca

SEQ ID NO: 929985 - RNA, 19 nt, Homo sapiens
  misc_RNA (1)...(19): siRNA sense strand
ccucagcuaucaccggaau

SEQ ID NO: 929986 - RNA, 19 nt, Homo sapiens
  misc_RNA (1)...(19): siRNA sense strand
caggguaucugggaaguac

SEQ ID NO: 929987 - RNA, 19 nt, Homo sapiens
  misc_RNA (1)...(19): siRNA sense strand
ggaccuacagcucuacaag

SEQ ID NO: 929988 - RNA, 19 nt, Homo sapiens
  misc_RNA (1)...(19): siRNA sense strand
cgcaacagcgugcucauga

SEQ ID NO: 929989 - RNA, 19 nt, Homo sapiens
  misc_RNA (1)...(19): siRNA sense strand
gaccugcgcacgucuaugg

SEQ ID NO: 929990 - RNA, 19 nt, Homo sapiens
  misc_RNA (1)...(19): siRNA sense strand
uggagcagcacccguauga

SEQ ID NO: 929991 - RNA, 19 nt, Homo sapiens
  misc_RNA (1)...(19): siRNA sense strand
ggagcgugaugugcuggaa

SEQ ID NO: 929992 - RNA, 19 nt, Homo sapiens
  misc_RNA (1)...(19): siRNA sense strand
acucggaccuacagcucua

SEQ ID NO: 929993 - RNA, 19 nt, Homo sapiens
  misc_RNA (1)...(19): siRNA sense strand
gugagaugcuggagaccau

SEQ ID NO: 929994 - RNA, 19 nt, Homo sapiens
  misc_RNA (1)...(19): siRNA sense strand
gcugauggcccugauuauc

SEQ ID NO: 929995 - RNA, 19 nt, Homo sapiens
  misc_RNA (1)...(19): siRNA sense strand
cugaugaucccuugcaguu

SEQ ID NO: 929996 - RNA, 19 nt, Homo sapiens
  misc_RNA (1)...(19): siRNA sense strand
gaugaguccaagccugaaa

SEQ ID NO: 929997 - RNA, 19 nt, Homo sapiens
  misc_RNA (1)...(19): siRNA sense strand
gaucagccaggaugucaag

SEQ ID NO: 929998 - RNA, 19 nt, Homo sapiens
  misc_RNA (1)...(19): siRNA sense strand
gcacccguaugagcacugu

SEQ ID NO: 929999 - RNA, 19 nt, Homo sapiens
  misc_RNA (1)...(19): siRNA sense strand
guaccugagcuccaaguuc

SEQ ID NO: 930000 - RNA, 19 nt, Homo sapiens
  misc_RNA (1)...(19): siRNA sense strand
agcugcggcucuccauuua

SEQ ID NO: 930001 - RNA, 19 nt, Homo sapiens
  misc_RNA (1)...(19): siRNA sense strand
cgcaggcaguccagaguga

SEQ ID NO: 930002 - RNA, 19 nt, Homo sapiens
  misc_RNA (1)...(19): siRNA sense strand
cggcuucucgcacaaggua

SEQ ID NO: 930003 - RNA, 19 nt, Homo sapiens
  misc_RNA (1)...(19): siRNA sense strand
accuacagcucuacaagga

SEQ ID NO: 930004 - RNA, 19 nt, Homo sapiens
  misc_RNA (1)...(19): siRNA sense strand
cguccugcaugaaccagaa

SEQ ID NO: 930005 - RNA, 19 nt, Homo sapiens
  misc_RNA (1)...(19): siRNA sense strand
ccagaugcaugugcuacuc

SEQ ID NO: 930006 - RNA, 19 nt, Homo sapiens
  misc_RNA (1)...(19): siRNA sense strand
ccaagcaagauuuccugaa

SEQ ID NO: 930007 - RNA, 19 nt, Homo sapiens
  misc_RNA (1)...(19): siRNA sense strand
ccaaguuccagaugcaugu

SEQ ID NO: 930008 - RNA, 19 nt, Homo sapiens
  misc_RNA (1)...(19): siRNA sense strand
ugucuccgcucagcaacaa

SEQ ID NO: 930009 - RNA, 19 nt, Homo sapiens
  misc_RNA (1)...(19): siRNA sense strand
uugcucacaucaucaagga

SEQ ID NO: 930010 - RNA, 19 nt, Homo sapiens
  misc_RNA (1)...(19): siRNA sense strand
uggagacccggaccuauga

SEQ ID NO: 930011 - RNA, 19 nt, Homo sapiens
  misc_RNA (1)...(19): siRNA sense strand
gcacguggaugguuuugac

SEQ ID NO: 930012 - RNA, 19 nt, Homo sapiens
  misc_RNA (1)...(19): siRNA sense strand
caucugcugcgcuucauca

SEQ ID NO: 930013 - RNA, 19 nt, Homo sapiens
  misc_RNA (1)...(19): siRNA sense strand
caccgagauuucuacaaca

SEQ ID NO: 930014 - RNA, 19 nt, Homo sapiens
  misc_RNA (1)...(19): siRNA sense strand
cagcaacaacagccucuuc

SEQ ID NO: 930015 - RNA, 19 nt, Homo sapiens
  misc_RNA (1)...(19): siRNA sense strand
aacugcaucucuucuuaga

SEQ ID NO: 930016 - RNA, 19 nt, Homo sapiens
  misc_RNA (1)...(19): siRNA sense strand
aggagaugcuggagaacau

SEQ ID NO: 930017 - RNA, 19 nt, Homo sapiens
  misc_RNA (1)...(19): siRNA sense strand
gggaacccgacgagcauug

SEQ ID NO: 930018 - RNA, 19 nt, Homo sapiens
  misc_RNA (1)...(19): siRNA sense strand
gagaugcuggagaccauuc

SEQ ID NO: 930019 - RNA, 19 nt, Homo sapiens
  misc_RNA (1)...(19): siRNA sense strand
gucuauggauggcaaaugc

SEQ ID NO: 930020 - RNA, 19 nt, Homo sapiens
  misc_RNA (1)...(19): siRNA sense strand
gagcuccaaguuccagaug

SEQ ID NO: 930021 - RNA, 19 nt, Homo sapiens
  misc_RNA (1)...(19): siRNA sense strand
cagagguggagcugccaua

SEQ ID NO: 930022 - RNA, 19 nt, Homo sapiens
  misc_RNA (1)...(19): siRNA sense strand
gcuccugcgauauguguga

SEQ ID NO: 930023 - RNA, 19 nt, Homo sapiens
  misc_RNA (1)...(19): siRNA sense strand
ccacugaugaucccuugca

SEQ ID NO: 930024 - RNA, 19 nt, Homo sapiens
  misc_RNA (1)...(19): siRNA sense strand
ggagccagacauccugcuu

SEQ ID NO: 930025 - RNA, 19 nt, Homo sapiens
  misc_RNA (1)...(19): siRNA sense strand
aaagugccacaccgagauu

SEQ ID NO: 930026 - RNA, 19 nt, Homo sapiens
  misc_RNA (1)...(19): siRNA sense strand
ggaacugcaucucuucuua

SEQ ID NO: 930027 - RNA, 19 nt, Homo sapiens
  misc_RNA (1)...(19): siRNA sense strand
ucaaggaggugaugucaga

SEQ ID NO: 930028 - RNA, 19 nt, Homo sapiens
  misc_RNA (1)...(19): siRNA sense strand
guacuuugcucacaucauc

SEQ ID NO: 930029 - RNA, 19 nt, Homo sapiens
  misc_RNA (1)...(19): siRNA sense strand
caagcaagauuuccugaag

SEQ ID NO: 930030 - RNA, 19 nt, Homo sapiens
  misc_RNA (1)...(19): siRNA sense strand
gaaguacuuugcucacauc

SEQ ID NO: 930031 - RNA, 19 nt, Homo sapiens
  misc_RNA (1)...(19): siRNA sense strand
ggaaguacuuugcucacau

SEQ ID NO: 930032 - RNA, 19 nt, Homo sapiens
  misc_RNA (1)...(19): siRNA sense strand
gagagcaaauaccagaaug

SEQ ID NO: 930033 - RNA, 19 nt, Homo sapiens
  misc_RNA (1)...(19): siRNA sense strand
ccaaggagccgcugaugga

SEQ ID NO: 930034 - RNA, 19 nt, Homo sapiens
  misc_RNA (1)...(19): siRNA sense strand
gaaagugccacaccgagau

SEQ ID NO: 930035 - RNA, 19 nt, Homo sapiens
  misc_RNA (1)...(19): siRNA sense strand
caaguuuaaugccaaauac

SEQ ID NO: 930036 - RNA, 19 nt, Homo sapiens
  misc_RNA (1)...(19): siRNA sense strand
gagcagggccgugaacaga

SEQ ID NO: 930037 - RNA, 19 nt, Homo sapiens
  misc_RNA (1)...(19): siRNA sense strand
ugacaaguuuaaugccaaa

SEQ ID NO: 930038 - RNA, 19 nt, Homo sapiens
  misc_RNA (1)...(19): siRNA sense strand
gaacacuuuccaucgcuuu

SEQ ID NO: 930039 - RNA, 19 nt, Homo sapiens
  misc_RNA (1)...(19): siRNA sense strand
gugcugauggcccugauua

SEQ ID NO: 930040 - RNA, 19 nt, Homo sapiens
  misc_RNA (1)...(19): siRNA sense strand
gcucagcuccugcgauaug

SEQ ID NO: 930041 - RNA, 19 nt, Homo sapiens
  misc_RNA (1)...(19): siRNA sense strand
uagagcacguggaugguuu

SEQ ID NO: 930042 - RNA, 19 nt, Homo sapiens
  misc_RNA (1)...(19): siRNA sense strand
gaacugcaucucuucuuag

SEQ ID NO: 930043 - RNA, 19 nt, Homo sapiens
  misc_RNA (1)...(19): siRNA sense strand
ggagagcaaauaccagaau

SEQ ID NO: 930044 - RNA, 19 nt, Homo sapiens
  misc_RNA (1)...(19): siRNA sense strand
ggacagugacucggaccua

SEQ ID NO: 930045 - RNA, 19 nt, Homo sapiens
  misc_RNA (1)...(19): siRNA sense strand
gaggacaacccacccuaug

SEQ ID NO: 930046 - RNA, 19 nt, Homo sapiens
  misc_RNA (1)...(19): siRNA sense strand
caugcuggcugagaacauu

SEQ ID NO: 930047 - RNA, 19 nt, Homo sapiens
  misc_RNA (1)...(19): siRNA sense strand
aagcaagauuuccugaaga

SEQ ID NO: 930048 - RNA, 19 nt, Homo sapiens
  misc_RNA (1)...(19): siRNA sense strand
acaccgagauuucuacaac

SEQ ID NO: 930049 - RNA, 19 nt, Homo sapiens
  misc_RNA (1)...(19): siRNA sense strand
gcaacagcgugcucaugag

SEQ ID NO: 930050 - RNA, 19 nt, Homo sapiens
  misc_RNA (1)...(19): siRNA sense strand
gggaaguacuuugcucaca

SEQ ID NO: 930051 - RNA, 19 nt, Homo sapiens
  misc_RNA (1)...(19): siRNA sense strand
ccauaaagucauucugcua

SEQ ID NO: 930052 - RNA, 19 nt, Homo sapiens
  misc_RNA (1)...(19): siRNA sense strand
ugcaugugcuacucaauga

SEQ ID NO: 930053 - RNA, 19 nt, Homo sapiens
  misc_RNA (1)...(19): siRNA sense strand
uccgagagaucuucaucaa

SEQ ID NO: 930054 - RNA, 19 nt, Homo sapiens
  misc_RNA (1)...(19): siRNA sense strand
ugacgucaaugugcugaug

SEQ ID NO: 930055 - RNA, 19 nt, Homo sapiens
  misc_RNA (1)...(19): siRNA sense strand
ggaggacaacccacccuau

SEQ ID NO: 930056 - RNA, 19 nt, Homo sapiens
  misc_RNA (1)...(19): siRNA sense strand
ccaucgcuuugacaaguuu

SEQ ID NO: 930057 - RNA, 19 nt, Homo sapiens
  misc_RNA (1)...(19): siRNA sense strand
gcuccaaguuccagaugca

SEQ ID NO: 930058 - RNA, 19 nt, Homo sapiens
  misc_RNA (1)...(19): siRNA sense strand
gcaugaaccagaagcaucu

SEQ ID NO: 930059 - RNA, 19 nt, Homo sapiens
  misc_RNA (1)...(19): siRNA sense strand
cuacaccuuugccaacaug

SEQ ID NO: 930060 - RNA, 19 nt, Homo sapiens
  misc_RNA (1)...(19): siRNA sense strand
gagcaaauaccagaaugca

SEQ ID NO: 930061 - RNA, 19 nt, Homo sapiens
  misc_RNA (1)...(19): siRNA sense strand
ccucagcuaucaccggaau

SEQ ID NO: 930062 - RNA, 19 nt, Homo sapiens
  misc_RNA (1)...(19): siRNA sense strand
caggguaucugggaaguac

SEQ ID NO: 930063 - RNA, 19 nt, Homo sapiens
  misc_RNA (1)...(19): siRNA sense strand
ggaccuacagcucuacaag

SEQ ID NO: 930064 - RNA, 19 nt, Homo sapiens
  misc_RNA (1)...(19): siRNA sense strand
cgcaacagcgugcucauga

SEQ ID NO: 930065 - RNA, 19 nt, Homo sapiens
  misc_RNA (1)...(19): siRNA sense strand
gaccugcgcacgucuaugg

SEQ ID NO: 930066 - RNA, 19 nt, Homo sapiens
  misc_RNA (1)...(19): siRNA sense strand
uggagcagcacccguauga

SEQ ID NO: 930067 - RNA, 19 nt, Homo sapiens
  misc_RNA (1)...(19): siRNA sense strand
ggagcgugaugugcuggaa

SEQ ID NO: 930068 - RNA, 19 nt, Homo sapiens
  misc_RNA (1)...(19): siRNA sense strand
acucggaccuacagcucua

SEQ ID NO: 930069 - RNA, 19 nt, Homo sapiens
  misc_RNA (1)...(19): siRNA sense strand
gugagaugcuggagaccau

SEQ ID NO: 930070 - RNA, 19 nt, Homo sapiens
  misc_RNA (1)...(19): siRNA sense strand
gcugauggcccugauuauc

SEQ ID NO: 930071 - RNA, 19 nt, Homo sapiens
  misc_RNA (1)...(19): siRNA sense strand
cugaugaucccuugcaguu

SEQ ID NO: 930072 - RNA, 19 nt, Homo sapiens
  misc_RNA (1)...(19): siRNA sense strand
gaugaguccaagccugaaa

SEQ ID NO: 930073 - RNA, 19 nt, Homo sapiens
  misc_RNA (1)...(19): siRNA sense strand
gaucagccaggaugucaag

SEQ ID NO: 930074 - RNA, 19 nt, Homo sapiens
  misc_RNA (1)...(19): siRNA sense strand
gcacccguaugagcacugu

SEQ ID NO: 930075 - RNA, 19 nt, Homo sapiens
  misc_RNA (1)...(19): siRNA sense strand
guaccugagcuccaaguuc

SEQ ID NO: 930076 - RNA, 19 nt, Homo sapiens
  misc_RNA (1)...(19): siRNA sense strand
agcugcggcucuccauuua

SEQ ID NO: 930077 - RNA, 19 nt, Homo sapiens
  misc_RNA (1)...(19): siRNA sense strand
cgcaggcaguccagaguga

SEQ ID NO: 930078 - RNA, 19 nt, Homo sapiens
  misc_RNA (1)...(19): siRNA sense strand
cggcuucucgcacaaggua

SEQ ID NO: 930079 - RNA, 19 nt, Homo sapiens
  misc_RNA (1)...(19): siRNA sense strand
accuacagcucuacaagga

SEQ ID NO: 930080 - RNA, 19 nt, Homo sapiens
  misc_RNA (1)...(19): siRNA sense strand
cguccugcaugaaccagaa

SEQ ID NO: 930081 - RNA, 19 nt, Homo sapiens
  misc_RNA (1)...(19): siRNA sense strand
ccagaugcaugugcuacuc

SEQ ID NO: 930082 - RNA, 19 nt, Homo sapiens
  misc_RNA (1)...(19): siRNA sense strand
ccaagcaagauuuccugaa

SEQ ID NO: 930083 - RNA, 19 nt, Homo sapiens
  misc_RNA (1)...(19): siRNA sense strand
ccaaguuccagaugcaugu

SEQ ID NO: 930084 - RNA, 19 nt, Homo sapiens
  misc_RNA (1)...(19): siRNA sense strand
ugucuccgcucagcaacaa

SEQ ID NO: 930085 - RNA, 19 nt, Homo sapiens
  misc_RNA (1)...(19): siRNA sense strand
uugcucacaucaucaagga

SEQ ID NO: 930086 - RNA, 19 nt, Homo sapiens
  misc_RNA (1)...(19): siRNA sense strand
uggagacccggaccuauga

SEQ ID NO: 930087 - RNA, 19 nt, Homo sapiens
  misc_RNA (1)...(19): siRNA sense strand
gcacguggaugguuuugac

SEQ ID NO: 930088 - RNA, 19 nt, Homo sapiens
  misc_RNA (1)...(19): siRNA sense strand
caucugcugcgcuucauca

SEQ ID NO: 930089 - RNA, 19 nt, Homo sapiens
  misc_RNA (1)...(19): siRNA sense strand
caccgagauuucuacaaca

SEQ ID NO: 930090 - RNA, 19 nt, Homo sapiens
  misc_RNA (1)...(19): siRNA sense strand
cagcaacaacagccucuuc

SEQ ID NO: 930091 - RNA, 19 nt, Homo sapiens
  misc_RNA (1)...(19): siRNA sense strand
aacugcaucucuucuuaga

SEQ ID NO: 930092 - RNA, 19 nt, Homo sapiens
  misc_RNA (1)...(19): siRNA sense strand
aggagaugcuggagaacau

SEQ ID NO: 930093 - RNA, 19 nt, Homo sapiens
  misc_RNA (1)...(19): siRNA sense strand
gggaacccgacgagcauug

SEQ ID NO: 930094 - RNA, 19 nt, Homo sapiens
  misc_RNA (1)...(19): siRNA sense strand
gagaugcuggagaccauuc

SEQ ID NO: 930095 - RNA, 19 nt, Homo sapiens
  misc_RNA (1)...(19): siRNA sense strand
gucuauggauggcaaaugc

SEQ ID NO: 930096 - RNA, 19 nt, Homo sapiens
  misc_RNA (1)...(19): siRNA sense strand
gagcuccaaguuccagaug

SEQ ID NO: 930097 - RNA, 19 nt, Homo sapiens
  misc_RNA (1)...(19): siRNA sense strand
cagagguggagcugccaua

SEQ ID NO: 930098 - RNA, 19 nt, Homo sapiens
  misc_RNA (1)...(19): siRNA sense strand
gcuccugcgauauguguga

SEQ ID NO: 930099 - RNA, 19 nt, Homo sapiens
  misc_RNA (1)...(19): siRNA sense strand
ccacugaugaucccuugca

SEQ ID NO: 930100 - RNA, 19 nt, Homo sapiens
  misc_RNA (1)...(19): siRNA sense strand
ggagccagacauccugcuu

SEQ ID NO: 930101 - RNA, 19 nt, Homo sapiens
  misc_RNA (1)...(19): siRNA sense strand
aaagugccacaccgagauu

SEQ ID NO: 930102 - RNA, 19 nt, Homo sapiens
  misc_RNA (1)...(19): siRNA sense strand
caacaaugcugacuucaua

SEQ ID NO: 930103 - RNA, 19 nt, Homo sapiens
  misc_RNA (1)...(19): siRNA sense strand
gaacacggcuccaucauca

SEQ ID NO: 930104 - RNA, 19 nt, Homo sapiens
  misc_RNA (1)...(19): siRNA sense strand
caagaggccuuauguggau

SEQ ID NO: 930105 - RNA, 19 nt, Homo sapiens
  misc_RNA (1)...(19): siRNA sense strand
gaugaaacccuugugcaua

SEQ ID NO: 930106 - RNA, 19 nt, Homo sapiens
  misc_RNA (1)...(19): siRNA sense strand
gugcauagcuccuuuaagc

SEQ ID NO: 930107 - RNA, 19 nt, Homo sapiens
  misc_RNA (1)...(19): siRNA sense strand
acaacucgccugcuucuua

SEQ ID NO: 930108 - RNA, 19 nt, Homo sapiens
  misc_RNA (1)...(19): siRNA sense strand
gaaccugaucccaaucuuu

SEQ ID NO: 930109 - RNA, 19 nt, Homo sapiens
  misc_RNA (1)...(19): siRNA sense strand
ggaggaagcaaacaccauu

SEQ ID NO: 930110 - RNA, 19 nt, Homo sapiens
  misc_RNA (1)...(19): siRNA sense strand
ggccuuauguggaugaguu

SEQ ID NO: 930111 - RNA, 19 nt, Homo sapiens
  misc_RNA (1)...(19): siRNA sense strand
ggaacucuuugaauguguu

SEQ ID NO: 930112 - RNA, 19 nt, Homo sapiens
  misc_RNA (1)...(19): siRNA sense strand
caaacaccauugcuaaguc

SEQ ID NO: 930113 - RNA, 19 nt, Homo sapiens
  misc_RNA (1)...(19): siRNA sense strand
ggaucuguguggucauuga

SEQ ID NO: 930114 - RNA, 19 nt, Homo sapiens
  misc_RNA (1)...(19): siRNA sense strand
caaguccucuccuaagaag

SEQ ID NO: 930115 - RNA, 19 nt, Homo sapiens
  misc_RNA (1)...(19): siRNA sense strand
ggagggaccugagaaagac

SEQ ID NO: 930116 - RNA, 19 nt, Homo sapiens
  misc_RNA (1)...(19): siRNA sense strand
aaucaacaaugcugacuuc

SEQ ID NO: 930117 - RNA, 19 nt, Homo sapiens
  misc_RNA (1)...(19): siRNA sense strand
gggagggaccugagaaaga

SEQ ID NO: 930118 - RNA, 19 nt, Homo sapiens
  misc_RNA (1)...(19): siRNA sense strand
gugcaguccugguuugaug

SEQ ID NO: 930119 - RNA, 19 nt, Homo sapiens
  misc_RNA (1)...(19): siRNA sense strand
caacucgccugcuucuuac

SEQ ID NO: 930120 - RNA, 19 nt, Homo sapiens
  misc_RNA (1)...(19): siRNA sense strand
ggaacacggcuccaucauc

SEQ ID NO: 930121 - RNA, 19 nt, Homo sapiens
  misc_RNA (1)...(19): siRNA sense strand
ggacaacucgccugcuucu

SEQ ID NO: 930122 - RNA, 19 nt, Homo sapiens
  misc_RNA (1)...(19): siRNA sense strand
cauguuggccagucaaguu

SEQ ID NO: 930123 - RNA, 19 nt, Homo sapiens
  misc_RNA (1)...(19): siRNA sense strand
uccaaguccucuccuaaga

SEQ ID NO: 930124 - RNA, 19 nt, Homo sapiens
  misc_RNA (1)...(19): siRNA sense strand
ccaaguccucuccuaagaa

SEQ ID NO: 930125 - RNA, 19 nt, Homo sapiens
  misc_RNA (1)...(19): siRNA sense strand
cguauaaggaggaagcaaa

SEQ ID NO: 930126 - RNA, 19 nt, Homo sapiens
  misc_RNA (1)...(19): siRNA sense strand
augaaacccuugugcauag

SEQ ID NO: 930127 - RNA, 19 nt, Homo sapiens
  misc_RNA (1)...(19): siRNA sense strand
gacagaggaagaucaagga

SEQ ID NO: 930128 - RNA, 19 nt, Homo sapiens
  misc_RNA (1)...(19): siRNA sense strand
gaggaagcaaacaccauug

SEQ ID NO: 930129 - RNA, 19 nt, Homo sapiens
  misc_RNA (1)...(19): siRNA sense strand
gagcagaggacgucuacac

SEQ ID NO: 930130 - RNA, 19 nt, Homo sapiens
  misc_RNA (1)...(19): siRNA sense strand
gggaacucuuugaaugugu

SEQ ID NO: 930131 - RNA, 19 nt, Homo sapiens
  misc_RNA (1)...(19): siRNA sense strand
ggugacagaggaagaucaa

SEQ ID NO: 930132 - RNA, 19 nt, Homo sapiens
  misc_RNA (1)...(19): siRNA sense strand
aaccugaucccaaucuuug

SEQ ID NO: 930133 - RNA, 19 nt, Homo sapiens
  misc_RNA (1)...(19): siRNA sense strand
aaggaucuguguggucauu

SEQ ID NO: 930134 - RNA, 19 nt, Homo sapiens
  misc_RNA (1)...(19): siRNA sense strand
gcuccagugucuccaguac

SEQ ID NO: 930135 - RNA, 19 nt, Homo sapiens
  misc_RNA (1)...(19): siRNA sense strand
acacugaguugcugaaccu

SEQ ID NO: 930136 - RNA, 19 nt, Homo sapiens
  misc_RNA (1)...(19): siRNA sense strand
ccuuuaagccaaucaacaa

SEQ ID NO: 930137 - RNA, 19 nt, Homo sapiens
  misc_RNA (1)...(19): siRNA sense strand
cuuugaauguguucucuuc

SEQ ID NO: 930138 - RNA, 19 nt, Homo sapiens
  misc_RNA (1)...(19): siRNA sense strand
cuggacaacucgccugcuu

SEQ ID NO: 930139 - RNA, 19 nt, Homo sapiens
  misc_RNA (1)...(19): siRNA sense strand
ccgugagucuugcguguuc

SEQ ID NO: 930140 - RNA, 19 nt, Homo sapiens
  misc_RNA (1)...(19): siRNA sense strand
uuaagccaaucaacaaugc

SEQ ID NO: 930141 - RNA, 19 nt, Homo sapiens
  misc_RNA (1)...(19): siRNA sense strand
ccugugcaguccugguuug

SEQ ID NO: 930142 - RNA, 19 nt, Homo sapiens
  misc_RNA (1)...(19): siRNA sense strand
gcucaagaggccuuaugug

SEQ ID NO: 930143 - RNA, 19 nt, Homo sapiens
  misc_RNA (1)...(19): siRNA sense strand
cgaugaaacccuugugcau

SEQ ID NO: 930144 - RNA, 19 nt, Homo sapiens
  misc_RNA (1)...(19): siRNA sense strand
guccugguuugaugacaug

SEQ ID NO: 930145 - RNA, 19 nt, Homo sapiens
  misc_RNA (1)...(19): siRNA sense strand
gccugcuucuuacauauuc

SEQ ID NO: 930146 - RNA, 19 nt, Homo sapiens
  misc_RNA (1)...(19): siRNA sense strand
ugagcucgcugcguauaag

SEQ ID NO: 930147 - RNA, 19 nt, Homo sapiens
  misc_RNA (1)...(19): siRNA sense strand
agcaaggccuggucuccaa

SEQ ID NO: 930148 - RNA, 19 nt, Homo sapiens
  misc_RNA (1)...(19): siRNA sense strand
cauggcagacacugaguug

SEQ ID NO: 930149 - RNA, 19 nt, Homo sapiens
  misc_RNA (1)...(19): siRNA sense strand
ccagguguaugugcucaag

SEQ ID NO: 930150 - RNA, 19 nt, Homo sapiens
  misc_RNA (1)...(19): siRNA sense strand
ugaaccugaucccaaucuu

SEQ ID NO: 930151 - RNA, 19 nt, Homo sapiens
  misc_RNA (1)...(19): siRNA sense strand
ucuccaaguccucuccuaa

SEQ ID NO: 930152 - RNA, 19 nt, Homo sapiens
  misc_RNA (1)...(19): siRNA sense strand
gauaaaggcuccaguguau

SEQ ID NO: 930153 - RNA, 19 nt, Homo sapiens
  misc_RNA (1)...(19): siRNA sense strand
ggugagagcugaccuaauu

SEQ ID NO: 930154 - RNA, 19 nt, Homo sapiens
  misc_RNA (1)...(19): siRNA sense strand
gcuaaucaauuuccucuua

SEQ ID NO: 930155 - RNA, 19 nt, Homo sapiens
  misc_RNA (1)...(19): siRNA sense strand
caccauagcuaaucaauuu

SEQ ID NO: 930156 - RNA, 19 nt, Homo sapiens
  misc_RNA (1)...(19): siRNA sense strand
acaaucaccugaaacauua

SEQ ID NO: 930157 - RNA, 19 nt, Homo sapiens
  misc_RNA (1)...(19): siRNA sense strand
ugaaaucucugacauugua

SEQ ID NO: 930158 - RNA, 19 nt, Homo sapiens
  misc_RNA (1)...(19): siRNA sense strand
caacaagaauccuggguuu

SEQ ID NO: 930159 - RNA, 19 nt, Homo sapiens
  misc_RNA (1)...(19): siRNA sense strand
gcaguucuccguaauauaa

SEQ ID NO: 930160 - RNA, 19 nt, Homo sapiens
  misc_RNA (1)...(19): siRNA sense strand
ucacauaccuuuccagaau

SEQ ID NO: 930161 - RNA, 19 nt, Homo sapiens
  misc_RNA (1)...(19): siRNA sense strand
gagcugaccuaauuaacaa

SEQ ID NO: 930162 - RNA, 19 nt, Homo sapiens
  misc_RNA (1)...(19): siRNA sense strand
gcaaagcguccuucagaua

SEQ ID NO: 930163 - RNA, 19 nt, Homo sapiens
  misc_RNA (1)...(19): siRNA sense strand
ggucgaagcugcugaagug

SEQ ID NO: 930164 - RNA, 19 nt, Homo sapiens
  misc_RNA (1)...(19): siRNA sense strand
uaaauaagaccaaggagua

SEQ ID NO: 930165 - RNA, 19 nt, Homo sapiens
  misc_RNA (1)...(19): siRNA sense strand
cgaagaauuugaugaacua

SEQ ID NO: 930166 - RNA, 19 nt, Homo sapiens
  misc_RNA (1)...(19): siRNA sense strand
gauaugaucuccugugucu

SEQ ID NO: 930167 - RNA, 19 nt, Homo sapiens
  misc_RNA (1)...(19): siRNA sense strand
ccacauaaguaauccuaaa

SEQ ID NO: 930168 - RNA, 19 nt, Homo sapiens
  misc_RNA (1)...(19): siRNA sense strand
ccucugauguuguucuuua

SEQ ID NO: 930169 - RNA, 19 nt, Homo sapiens
  misc_RNA (1)...(19): siRNA sense strand
agaauuagcuuaccgaaag

SEQ ID NO: 930170 - RNA, 19 nt, Homo sapiens
  misc_RNA (1)...(19): siRNA sense strand
ggacagaauuaugcaguug

SEQ ID NO: 930171 - RNA, 19 nt, Homo sapiens
  misc_RNA (1)...(19): siRNA sense strand
ggauaaaggcuccagugua

SEQ ID NO: 930172 - RNA, 19 nt, Homo sapiens
  misc_RNA (1)...(19): siRNA sense strand
ggauaucucugcaacaaag

SEQ ID NO: 930173 - RNA, 19 nt, Homo sapiens
  misc_RNA (1)...(19): siRNA sense strand
ggaacugacuuuacuaagg

SEQ ID NO: 930174 - RNA, 19 nt, Homo sapiens
  misc_RNA (1)...(19): siRNA sense strand
uaaaggcuccaguguauaa

SEQ ID NO: 930175 - RNA, 19 nt, Homo sapiens
  misc_RNA (1)...(19): siRNA sense strand
agacaucucugugcuguuu

SEQ ID NO: 930176 - RNA, 19 nt, Homo sapiens
  misc_RNA (1)...(19): siRNA sense strand
caggagaaauuacaucaga

SEQ ID NO: 930177 - RNA, 19 nt, Homo sapiens
  misc_RNA (1)...(19): siRNA sense strand
gaacuucuccgacaugaca

SEQ ID NO: 930178 - RNA, 19 nt, Homo sapiens
  misc_RNA (1)...(19): siRNA sense strand
ugaccaggauguauuuaaa

SEQ ID NO: 930179 - RNA, 19 nt, Homo sapiens
  misc_RNA (1)...(19): siRNA sense strand
gacaaucaccugaaacauu

SEQ ID NO: 930180 - RNA, 19 nt, Homo sapiens
  misc_RNA (1)...(19): siRNA sense strand
gugaacugaugaacauaua

SEQ ID NO: 930181 - RNA, 19 nt, Homo sapiens
  misc_RNA (1)...(19): siRNA sense strand
gcaggagccucugauguug

SEQ ID NO: 930182 - RNA, 19 nt, Homo sapiens
  misc_RNA (1)...(19): siRNA sense strand
ucagaugacucucccgaaa

SEQ ID NO: 930183 - RNA, 19 nt, Homo sapiens
  misc_RNA (1)...(19): siRNA sense strand
gcaauggugucguccuuuc

SEQ ID NO: 930184 - RNA, 19 nt, Homo sapiens
  misc_RNA (1)...(19): siRNA sense strand
aaacuuacaccauagcuaa

SEQ ID NO: 930185 - RNA, 19 nt, Homo sapiens
  misc_RNA (1)...(19): siRNA sense strand
caugugauauuguagaaga

SEQ ID NO: 930186 - RNA, 19 nt, Homo sapiens
  misc_RNA (1)...(19): siRNA sense strand
uuaauaagcucacugaacu

SEQ ID NO: 930187 - RNA, 19 nt, Homo sapiens
  misc_RNA (1)...(19): siRNA sense strand
ugacgucccugccaauaga

SEQ ID NO: 930188 - RNA, 19 nt, Homo sapiens
  misc_RNA (1)...(19): siRNA sense strand
aaccagagcugacauuauc

SEQ ID NO: 930189 - RNA, 19 nt, Homo sapiens
  misc_RNA (1)...(19): siRNA sense strand
gaagagacagcuaagauac

SEQ ID NO: 930190 - RNA, 19 nt, Homo sapiens
  misc_RNA (1)...(19): siRNA sense strand
uguagaagaugcagcuauu

SEQ ID NO: 930191 - RNA, 19 nt, Homo sapiens
  misc_RNA (1)...(19): siRNA sense strand
uagcagcaguucuccguaa

SEQ ID NO: 930192 - RNA, 19 nt, Homo sapiens
  misc_RNA (1)...(19): siRNA sense strand
caccuacacugacgaagaa

SEQ ID NO: 930193 - RNA, 19 nt, Homo sapiens
  misc_RNA (1)...(19): siRNA sense strand
ccaagaagauauugcugau

SEQ ID NO: 930194 - RNA, 19 nt, Homo sapiens
  misc_RNA (1)...(19): siRNA sense strand
ggauauaacaacauucaga

SEQ ID NO: 930195 - RNA, 19 nt, Homo sapiens
  misc_RNA (1)...(19): siRNA sense strand
ccaugcaugugauauugua

SEQ ID NO: 930196 - RNA, 19 nt, Homo sapiens
  misc_RNA (1)...(19): siRNA sense strand
acauaccuuuccagaauua

SEQ ID NO: 930197 - RNA, 19 nt, Homo sapiens
  misc_RNA (1)...(19): siRNA sense strand
caaaggcaguccacauaag

SEQ ID NO: 930198 - RNA, 19 nt, Homo sapiens
  misc_RNA (1)...(19): siRNA sense strand
gguaaugccugauggaaaa

SEQ ID NO: 930199 - RNA, 19 nt, Homo sapiens
  misc_RNA (1)...(19): siRNA sense strand
guggauaucucugcaacaa

SEQ ID NO: 930200 - RNA, 19 nt, Homo sapiens
  misc_RNA (1)...(19): siRNA sense strand
caaagcguccuucagauau

SEQ ID NO: 930201 - RNA, 19 nt, Homo sapiens
  misc_RNA (1)...(19): siRNA sense strand
cagcuaagauacguccuuu

SEQ ID NO: 930202 - RNA, 19 nt, Homo sapiens
  misc_RNA (1)...(19): siRNA sense strand
cgaagcugcugaagugguu

SEQ ID NO: 930203 - RNA, 19 nt, Homo sapiens
  misc_RNA (1)...(19): siRNA sense strand
gaacugaugaacauauaca

SEQ ID NO: 930204 - RNA, 19 nt, Homo sapiens
  misc_RNA (1)...(19): siRNA sense strand
cagcaguucuccguaauau

SEQ ID NO: 930205 - RNA, 19 nt, Homo sapiens
  misc_RNA (1)...(19): siRNA sense strand
ucacagaagagacagcuaa

SEQ ID NO: 930206 - RNA, 19 nt, Homo sapiens
  misc_RNA (1)...(19): siRNA sense strand
uaaacuagguguggauauc

SEQ ID NO: 930207 - RNA, 19 nt, Homo sapiens
  misc_RNA (1)...(19): siRNA sense strand
gcaccuacacugacgaaga

SEQ ID NO: 930208 - RNA, 19 nt, Homo sapiens
  misc_RNA (1)...(19): siRNA sense strand
agaagagacagcuaagaua

SEQ ID NO: 930209 - RNA, 19 nt, Homo sapiens
  misc_RNA (1)...(19): siRNA sense strand
ugacgaagaauuugaugaa

SEQ ID NO: 930210 - RNA, 19 nt, Homo sapiens
  misc_RNA (1)...(19): siRNA sense strand
guaaagaacaagguaaugu

SEQ ID NO: 930211 - RNA, 19 nt, Homo sapiens
  misc_RNA (1)...(19): siRNA sense strand
ggagaaauuacaucagaau

SEQ ID NO: 930212 - RNA, 19 nt, Homo sapiens
  misc_RNA (1)...(19): siRNA sense strand
gcagcaguucuccguaaua

SEQ ID NO: 930213 - RNA, 19 nt, Homo sapiens
  misc_RNA (1)...(19): siRNA sense strand
gacguuaucaccaaauuug

SEQ ID NO: 930214 - RNA, 19 nt, Homo sapiens
  misc_RNA (1)...(19): siRNA sense strand
gaagaugcagcuauugcuu

SEQ ID NO: 930215 - RNA, 19 nt, Homo sapiens
  misc_RNA (1)...(19): siRNA sense strand
caaauucaagccucuaaau

SEQ ID NO: 930216 - RNA, 19 nt, Homo sapiens
  misc_RNA (1)...(19): siRNA sense strand
agaacaagguaauguaaag

SEQ ID NO: 930217 - RNA, 19 nt, Homo sapiens
  misc_RNA (1)...(19): siRNA sense strand
ggagcuugaugaaauuaca

SEQ ID NO: 930218 - RNA, 19 nt, Homo sapiens
  misc_RNA (1)...(19): siRNA sense strand
cuacacugacgaagaauuu

SEQ ID NO: 930219 - RNA, 19 nt, Homo sapiens
  misc_RNA (1)...(19): siRNA sense strand
cccaugauuuggacacuuu

SEQ ID NO: 930220 - RNA, 19 nt, Homo sapiens
  misc_RNA (1)...(19): siRNA sense strand
caacaaaggcaguccacau

SEQ ID NO: 930221 - RNA, 19 nt, Homo sapiens
  misc_RNA (1)...(19): siRNA sense strand
gauaaacuagguguggaua

SEQ ID NO: 930222 - RNA, 19 nt, Homo sapiens
  misc_RNA (1)...(19): siRNA sense strand
gcuauugcuuauggauaua

SEQ ID NO: 930223 - RNA, 19 nt, Homo sapiens
  misc_RNA (1)...(19): siRNA sense strand
agucauaggugaugggaau

SEQ ID NO: 930224 - RNA, 19 nt, Homo sapiens
  misc_RNA (1)...(19): siRNA sense strand
cagagaaacuccagaaaau

SEQ ID NO: 930225 - RNA, 19 nt, Homo sapiens
  misc_RNA (1)...(19): siRNA sense strand
uguauccaguuaucuauga

SEQ ID NO: 930226 - RNA, 19 nt, Homo sapiens
  misc_RNA (1)...(19): siRNA sense strand
cagaagagacagcuaagau

SEQ ID NO: 930227 - RNA, 19 nt, Homo sapiens
  misc_RNA (1)...(19): siRNA sense strand
gggcugcuggacagaauua

SEQ ID NO: 930228 - RNA, 19 nt, Homo sapiens
  misc_RNA (1)...(19): siRNA sense strand
uuugaaaucucugacauug

SEQ ID NO: 930229 - RNA, 19 nt, Homo sapiens
  misc_RNA (1)...(19): siRNA sense strand
ugaagaccauagcagcaaa

SEQ ID NO: 930230 - RNA, 19 nt, Homo sapiens
  misc_RNA (1)...(19): siRNA sense strand
aacaaaggcaguccacaua

SEQ ID NO: 930231 - RNA, 19 nt, Homo sapiens
  misc_RNA (1)...(19): siRNA sense strand
ccaaacuucugaccaggau

SEQ ID NO: 930232 - RNA, 19 nt, Homo sapiens
  misc_RNA (1)...(19): siRNA sense strand
cagugaauauugugagaau

SEQ ID NO: 930233 - RNA, 19 nt, Homo sapiens
  misc_RNA (1)...(19): siRNA sense strand
gucuggagcuugaugaaau

SEQ ID NO: 930234 - RNA, 19 nt, Homo sapiens
  misc_RNA (1)...(19): siRNA sense strand
gacugacaaucaccugaaa

SEQ ID NO: 930235 - RNA, 19 nt, Homo sapiens
  misc_RNA (1)...(19): siRNA sense strand
uauacaagacugacaauca

SEQ ID NO: 930236 - RNA, 19 nt, Homo sapiens
  misc_RNA (1)...(19): siRNA sense strand
ccugugaacugaugaacau

SEQ ID NO: 930237 - RNA, 19 nt, Homo sapiens
  misc_RNA (1)...(19): siRNA sense strand
gcacugguugccauuggua

SEQ ID NO: 930238 - RNA, 19 nt, Homo sapiens
  misc_RNA (1)...(19): siRNA sense strand
cagaauauuugcaggaaaa

SEQ ID NO: 930239 - RNA, 19 nt, Homo sapiens
  misc_RNA (1)...(19): siRNA sense strand
caucagaagggccugcuuu

SEQ ID NO: 930240 - RNA, 19 nt, Homo sapiens
  misc_RNA (1)...(19): siRNA sense strand
acaagaauccuggguuuga

SEQ ID NO: 930241 - RNA, 19 nt, Homo sapiens
  misc_RNA (1)...(19): siRNA sense strand
acaaaggcaguccacauaa

SEQ ID NO: 930242 - RNA, 19 nt, Homo sapiens
  misc_RNA (1)...(19): siRNA sense strand
caucugagaaggaaauaau

SEQ ID NO: 930243 - RNA, 19 nt, Homo sapiens
  misc_RNA (1)...(19): siRNA sense strand
gauauuauugucaccaugu

SEQ ID NO: 930244 - RNA, 19 nt, Homo sapiens
  misc_RNA (1)...(19): siRNA sense strand
gagcacugguugccauugg

SEQ ID NO: 930245 - RNA, 19 nt, Homo sapiens
  misc_RNA (1)...(19): siRNA sense strand
caaccagagcugacauuau

SEQ ID NO: 930246 - RNA, 19 nt, Homo sapiens
  misc_RNA (1)...(19): siRNA sense strand
aaaguuggaaucagagaaa

SEQ ID NO: 930247 - RNA, 19 nt, Homo sapiens
  misc_RNA (1)...(19): siRNA sense strand
ugagagcugaccuaauuaa

SEQ ID NO: 930248 - RNA, 19 nt, Homo sapiens
  misc_RNA (1)...(19): siRNA sense strand
cacauaccuuuccagaauu

SEQ ID NO: 930249 - RNA, 19 nt, Homo sapiens
  misc_RNA (1)...(19): siRNA sense strand
caagaagauauugcugaua

SEQ ID NO: 930250 - RNA, 19 nt, Homo sapiens
  misc_RNA (1)...(19): siRNA sense strand
aagaugcagcuauugcuua

SEQ ID NO: 930251 - RNA, 19 nt, Homo sapiens
  misc_RNA (1)...(19): siRNA sense strand
gcaguccacauaaguaauc

SEQ ID NO: 930252 - RNA, 19 nt, Homo sapiens
  misc_RNA (1)...(19): siRNA sense strand
cuacagaccuggagcauuc

SEQ ID NO: 930253 - RNA, 19 nt, Homo sapiens
  misc_RNA (1)...(19): siRNA sense strand
acaaggagguggacaagaa

SEQ ID NO: 930254 - RNA, 19 nt, Homo sapiens
  misc_RNA (1)...(19): siRNA sense strand
caucuucccugcuaauuau

SEQ ID NO: 930255 - RNA, 19 nt, Homo sapiens
  misc_RNA (1)...(19): siRNA sense strand
ggacgacccuggugagaag

SEQ ID NO: 930256 - RNA, 19 nt, Homo sapiens
  misc_RNA (1)...(19): siRNA sense strand
gagaggcuguggcccagua

SEQ ID NO: 930257 - RNA, 19 nt, Homo sapiens
  misc_RNA (1)...(19): siRNA sense strand
gggaagagaagaagagaaa

SEQ ID NO: 930258 - RNA, 19 nt, Homo sapiens
  misc_RNA (1)...(19): siRNA sense strand
gcuccaacacccuuaauuu

SEQ ID NO: 930259 - RNA, 19 nt, Homo sapiens
  misc_RNA (1)...(19): siRNA sense strand
gcaucuucccugcuaauua

SEQ ID NO: 930260 - RNA, 19 nt, Homo sapiens
  misc_RNA (1)...(19): siRNA sense strand
gacaagcgcugggucaagu

SEQ ID NO: 930261 - RNA, 19 nt, Homo sapiens
  misc_RNA (1)...(19): siRNA sense strand
ggagaauguuccagcagau

SEQ ID NO: 930262 - RNA, 19 nt, Homo sapiens
  misc_RNA (1)...(19): siRNA sense strand
gaaccaguuucugcaggaa

SEQ ID NO: 930263 - RNA, 19 nt, Homo sapiens
  misc_RNA (1)...(19): siRNA sense strand
ccuaacaccucucagauac

SEQ ID NO: 930264 - RNA, 19 nt, Homo sapiens
  misc_RNA (1)...(19): siRNA sense strand
gaagcugggaccacucuga

SEQ ID NO: 930265 - RNA, 19 nt, Homo sapiens
  misc_RNA (1)...(19): siRNA sense strand
gaagagaagaagagaaagg

SEQ ID NO: 930266 - RNA, 19 nt, Homo sapiens
  misc_RNA (1)...(19): siRNA sense strand
ucugaagaguuaccuagaa

SEQ ID NO: 930267 - RNA, 19 nt, Homo sapiens
  misc_RNA (1)...(19): siRNA sense strand
gaagaguuaccuagaagca

SEQ ID NO: 930268 - RNA, 19 nt, Homo sapiens
  misc_RNA (1)...(19): siRNA sense strand
gcauauucccugccagcua

SEQ ID NO: 930269 - RNA, 19 nt, Homo sapiens
  misc_RNA (1)...(19): siRNA sense strand
gagagcggcaugcccauug

SEQ ID NO: 930270 - RNA, 19 nt, Homo sapiens
  misc_RNA (1)...(19): siRNA sense strand
ccaacacccuuaauuucca

SEQ ID NO: 930271 - RNA, 19 nt, Homo sapiens
  misc_RNA (1)...(19): siRNA sense strand
gugugacgauggcugguuu

SEQ ID NO: 930272 - RNA, 19 nt, Homo sapiens
  misc_RNA (1)...(19): siRNA sense strand
gacccugcgugguaucaga

SEQ ID NO: 930273 - RNA, 19 nt, Homo sapiens
  misc_RNA (1)...(19): siRNA sense strand
gagaauguuccagcagauu

SEQ ID NO: 930274 - RNA, 19 nt, Homo sapiens
  misc_RNA (1)...(19): siRNA sense strand
acaaggaccugcgggcaau

SEQ ID NO: 930275 - RNA, 19 nt, Homo sapiens
  misc_RNA (1)...(19): siRNA sense strand
ggagcugacucugcagaag

SEQ ID NO: 930276 - RNA, 19 nt, Homo sapiens
  misc_RNA (1)...(19): siRNA sense strand
gcugggaccacucugaaga

SEQ ID NO: 930277 - RNA, 19 nt, Homo sapiens
  misc_RNA (1)...(19): siRNA sense strand
ccgcagaugagaucccuaa

SEQ ID NO: 930278 - RNA, 19 nt, Homo sapiens
  misc_RNA (1)...(19): siRNA sense strand
gcccaggacugugugcaau

SEQ ID NO: 930279 - RNA, 19 nt, Homo sapiens
  misc_RNA (1)...(19): siRNA sense strand
ggagggaagagaagaagag

SEQ ID NO: 930280 - RNA, 19 nt, Homo sapiens
  misc_RNA (1)...(19): siRNA sense strand
ucuaggagcccagcaaaga

SEQ ID NO: 930281 - RNA, 19 nt, Homo sapiens
  misc_RNA (1)...(19): siRNA sense strand
gcuacccacaugcaccuua

SEQ ID NO: 930282 - RNA, 19 nt, Homo sapiens
  misc_RNA (1)...(19): siRNA sense strand
uaacaccucucagauacac

SEQ ID NO: 930283 - RNA, 19 nt, Homo sapiens
  misc_RNA (1)...(19): siRNA sense strand
ccaccuccagucccacaua

SEQ ID NO: 930284 - RNA, 19 nt, Homo sapiens
  misc_RNA (1)...(19): siRNA sense strand
gcaaggugaacgagaacug

SEQ ID NO: 930285 - RNA, 19 nt, Homo sapiens
  misc_RNA (1)...(19): siRNA sense strand
cugaagaguuaccuagaag

SEQ ID NO: 930286 - RNA, 19 nt, Homo sapiens
  misc_RNA (1)...(19): siRNA sense strand
cugggcaucuucccugcua

SEQ ID NO: 930287 - RNA, 19 nt, Homo sapiens
  misc_RNA (1)...(19): siRNA sense strand
gaccugcgggcaauugaga

SEQ ID NO: 930288 - RNA, 19 nt, Homo sapiens
  misc_RNA (1)...(19): siRNA sense strand
ggacaagcgcugggucaag

SEQ ID NO: 930289 - RNA, 19 nt, Homo sapiens
  misc_RNA (1)...(19): siRNA sense strand
gugcaggugucucgugaac

SEQ ID NO: 930290 - RNA, 19 nt, Homo sapiens
  misc_RNA (1)...(19): siRNA sense strand
gagagcacaucugccugau

SEQ ID NO: 930291 - RNA, 19 nt, Homo sapiens
  misc_RNA (1)...(19): siRNA sense strand
ccagcagauucaccggaaa

SEQ ID NO: 930292 - RNA, 19 nt, Homo sapiens
  misc_RNA (1)...(19): siRNA sense strand
caucuaggagcccagcaaa

SEQ ID NO: 930293 - RNA, 19 nt, Homo sapiens
  misc_RNA (1)...(19): siRNA sense strand
gagacccuagugccucuaa

SEQ ID NO: 930294 - RNA, 19 nt, Homo sapiens
  misc_RNA (1)...(19): siRNA sense strand
ccaggacugugugcaaugg

SEQ ID NO: 930295 - RNA, 19 nt, Homo sapiens
  misc_RNA (1)...(19): siRNA sense strand
ucgaggagccacccagaga

SEQ ID NO: 930296 - RNA, 19 nt, Homo sapiens
  misc_RNA (1)...(19): siRNA sense strand
gggaccuccucuccuaaca

SEQ ID NO: 930297 - RNA, 19 nt, Homo sapiens
  misc_RNA (1)...(19): siRNA sense strand
ccaggagggaagagaagaa

SEQ ID NO: 930298 - RNA, 19 nt, Homo sapiens
  misc_RNA (1)...(19): siRNA sense strand
uccuaacaccucucagaua

SEQ ID NO: 930299 - RNA, 19 nt, Homo sapiens
  misc_RNA (1)...(19): siRNA sense strand
gcaagggagagcacaucug

SEQ ID NO: 930300 - RNA, 19 nt, Homo sapiens
  misc_RNA (1)...(19): siRNA sense strand
gcagaugagaucccuaagc

SEQ ID NO: 930301 - RNA, 19 nt, Homo sapiens
  misc_RNA (1)...(19): siRNA sense strand
gcaucuaggagcccagcaa

SEQ ID NO: 930302 - RNA, 19 nt, Homo sapiens
  misc_RNA (1)...(19): siRNA sense strand
gagggaagagaagaagaga

SEQ ID NO: 930303 - RNA, 19 nt, Homo sapiens
  misc_RNA (1)...(19): siRNA sense strand
cagcaagcgucgggacaag

SEQ ID NO: 930304 - RNA, 19 nt, Homo sapiens
  misc_RNA (1)...(19): siRNA sense strand
gaagcccucccagcccauu

SEQ ID NO: 930305 - RNA, 19 nt, Homo sapiens
  misc_RNA (1)...(19): siRNA sense strand
uccgcaaggugaacgagaa

SEQ ID NO: 930306 - RNA, 19 nt, Homo sapiens
  misc_RNA (1)...(19): siRNA sense strand
caagagggccuucgauaug

SEQ ID NO: 930307 - RNA, 19 nt, Homo sapiens
  misc_RNA (1)...(19): siRNA sense strand
ggaguuugcacgcuguuua

SEQ ID NO: 930308 - RNA, 19 nt, Homo sapiens
  misc_RNA (1)...(19): siRNA sense strand
cagcaaauguccaguagag

SEQ ID NO: 930309 - RNA, 19 nt, Homo sapiens
  misc_RNA (1)...(19): siRNA sense strand
ggaggcaucucggaagguu

SEQ ID NO: 930310 - RNA, 19 nt, Homo sapiens
  misc_RNA (1)...(19): siRNA sense strand
ggaagcgcccagugaguuu

SEQ ID NO: 930311 - RNA, 19 nt, Homo sapiens
  misc_RNA (1)...(19): siRNA sense strand
agaagucgguccagcaaau

SEQ ID NO: 930312 - RNA, 19 nt, Homo sapiens
  misc_RNA (1)...(19): siRNA sense strand
ccaagagggccuucgauau

SEQ ID NO: 930313 - RNA, 19 nt, Homo sapiens
  misc_RNA (1)...(19): siRNA sense strand
ggaaggcaguaucaucaac

SEQ ID NO: 930314 - RNA, 19 nt, Homo sapiens
  misc_RNA (1)...(19): siRNA sense strand
aagagggccuucgauauga

SEQ ID NO: 930315 - RNA, 19 nt, Homo sapiens
  misc_RNA (1)...(19): siRNA sense strand
caucaacgaccacuccauu

SEQ ID NO: 930316 - RNA, 19 nt, Homo sapiens
  misc_RNA (1)...(19): siRNA sense strand
caaggaaggcaguaucauc

SEQ ID NO: 930317 - RNA, 19 nt, Homo sapiens
  misc_RNA (1)...(19): siRNA sense strand
gauaugauuggccagagaa

SEQ ID NO: 930318 - RNA, 19 nt, Homo sapiens
  misc_RNA (1)...(19): siRNA sense strand
cuggaggacuucaucuuug

SEQ ID NO: 930319 - RNA, 19 nt, Homo sapiens
  misc_RNA (1)...(19): siRNA sense strand
cgauaugauuggccagaga

SEQ ID NO: 930320 - RNA, 19 nt, Homo sapiens
  misc_RNA (1)...(19): siRNA sense strand
ggaaagcuacaugggcauu

SEQ ID NO: 930321 - RNA, 19 nt, Homo sapiens
  misc_RNA (1)...(19): siRNA sense strand
caacgaccacuccauugug

SEQ ID NO: 930322 - RNA, 19 nt, Homo sapiens
  misc_RNA (1)...(19): siRNA sense strand
guugaugaccugcuggaaa

SEQ ID NO: 930323 - RNA, 19 nt, Homo sapiens
  misc_RNA (1)...(19): siRNA sense strand
agauaggccuggaggacuu

SEQ ID NO: 930324 - RNA, 19 nt, Homo sapiens
  misc_RNA (1)...(19): siRNA sense strand
ccuggaggacuucaucuuu

SEQ ID NO: 930325 - RNA, 19 nt, Homo sapiens
  misc_RNA (1)...(19): siRNA sense strand
cccaagagggccuucgaua

SEQ ID NO: 930326 - RNA, 19 nt, Homo sapiens
  misc_RNA (1)...(19): siRNA sense strand
ggcuacgccuucaucaaga

SEQ ID NO: 930327 - RNA, 19 nt, Homo sapiens
  misc_RNA (1)...(19): siRNA sense strand
gaagucgguccagcaaaug

SEQ ID NO: 930328 - RNA, 19 nt, Homo sapiens
  misc_RNA (1)...(19): siRNA sense strand
cgacgaguuugugguggaa

SEQ ID NO: 930329 - RNA, 19 nt, Homo sapiens
  misc_RNA (1)...(19): siRNA sense strand
uugaugaccugcuggaaag

SEQ ID NO: 930330 - RNA, 19 nt, Homo sapiens
  misc_RNA (1)...(19): siRNA sense strand
gagguggaggucacuaaga

SEQ ID NO: 930331 - RNA, 19 nt, Homo sapiens
  misc_RNA (1)...(19): siRNA sense strand
ucaacgaccacuccauugu

SEQ ID NO: 930332 - RNA, 19 nt, Homo sapiens
  misc_RNA (1)...(19): siRNA sense strand
gagaagucgguccagcaaa

SEQ ID NO: 930333 - RNA, 19 nt, Homo sapiens
  misc_RNA (1)...(19): siRNA sense strand
aaggaaggcaguaucauca

SEQ ID NO: 930334 - RNA, 19 nt, Homo sapiens
  misc_RNA (1)...(19): siRNA sense strand
acuacgagguggccaagau

SEQ ID NO: 930335 - RNA, 19 nt, Homo sapiens
  misc_RNA (1)...(19): siRNA sense strand
ccaguagaggcgaaaguga

SEQ ID NO: 930336 - RNA, 19 nt, Homo sapiens
  misc_RNA (1)...(19): siRNA sense strand
gaaagcuacaugggcauuc

SEQ ID NO: 930337 - RNA, 19 nt, Homo sapiens
  misc_RNA (1)...(19): siRNA sense strand
gcaucgaagccaucaacga

SEQ ID NO: 930338 - RNA, 19 nt, Homo sapiens
  misc_RNA (1)...(19): siRNA sense strand
gaaucaaggaaggcaguau

SEQ ID NO: 930339 - RNA, 19 nt, Homo sapiens
  misc_RNA (1)...(19): siRNA sense strand
ccucaacagccacaaagug

SEQ ID NO: 930340 - RNA, 19 nt, Homo sapiens
  misc_RNA (1)...(19): siRNA sense strand
gaagcgcccagugaguuug

SEQ ID NO: 930341 - RNA, 19 nt, Homo sapiens
  misc_RNA (1)...(19): siRNA sense strand
acaaaguggacaugcagaa

SEQ ID NO: 930342 - RNA, 19 nt, Homo sapiens
  misc_RNA (1)...(19): siRNA sense strand
ccaccgagauuuuauucug

SEQ ID NO: 930343 - RNA, 19 nt, Homo sapiens
  misc_RNA (1)...(19): siRNA sense strand
caucaagagaaucaaggaa

SEQ ID NO: 930344 - RNA, 19 nt, Homo sapiens
  misc_RNA (1)...(19): siRNA sense strand
gaggaagcgcccagugagu

SEQ ID NO: 930345 - RNA, 19 nt, Homo sapiens
  misc_RNA (1)...(19): siRNA sense strand
guccagcaaauguccagua

SEQ ID NO: 930346 - RNA, 19 nt, Homo sapiens
  misc_RNA (1)...(19): siRNA sense strand
ggagguggaggucacuaag

SEQ ID NO: 930347 - RNA, 19 nt, Homo sapiens
  misc_RNA (1)...(19): siRNA sense strand
gcuacgccuucaucaagag

SEQ ID NO: 930348 - RNA, 19 nt, Homo sapiens
  misc_RNA (1)...(19): siRNA sense strand
uggaggaagcgcccaguga

SEQ ID NO: 930349 - RNA, 19 nt, Homo sapiens
  misc_RNA (1)...(19): siRNA sense strand
gagggccuucgauaugauu

SEQ ID NO: 930350 - RNA, 19 nt, Homo sapiens
  misc_RNA (1)...(19): siRNA sense strand
caaaguggacaugcagaag

SEQ ID NO: 930351 - RNA, 19 nt, Homo sapiens
  misc_RNA (1)...(19): siRNA sense strand
gaguuugcacgcuguuuag

SEQ ID NO: 930352 - RNA, 19 nt, Homo sapiens
  misc_RNA (1)...(19): siRNA sense strand
gaacuggaaucccugagaa

SEQ ID NO: 930353 - RNA, 19 nt, Homo sapiens
  misc_RNA (1)...(19): siRNA sense strand
ccaauacucuggaaagaaa

SEQ ID NO: 930354 - RNA, 19 nt, Homo sapiens
  misc_RNA (1)...(19): siRNA sense strand
ccaccaacguuucagaaua

SEQ ID NO: 930355 - RNA, 19 nt, Homo sapiens
  misc_RNA (1)...(19): siRNA sense strand
gguggaauaucucaucuaa

SEQ ID NO: 930356 - RNA, 19 nt, Homo sapiens
  misc_RNA (1)...(19): siRNA sense strand
caaagugggagcagaaaua

SEQ ID NO: 930357 - RNA, 19 nt, Homo sapiens
  misc_RNA (1)...(19): siRNA sense strand
gaaagaggaggaagaaauc

SEQ ID NO: 930358 - RNA, 19 nt, Homo sapiens
  misc_RNA (1)...(19): siRNA sense strand
ccacaucguuugucuauac

SEQ ID NO: 930359 - RNA, 19 nt, Homo sapiens
  misc_RNA (1)...(19): siRNA sense strand
agaaauauuuggaggagaa

SEQ ID NO: 930360 - RNA, 19 nt, Homo sapiens
  misc_RNA (1)...(19): siRNA sense strand
gagacuaccgugcugaaua

SEQ ID NO: 930361 - RNA, 19 nt, Homo sapiens
  misc_RNA (1)...(19): siRNA sense strand
augcagagaugguggaaua

SEQ ID NO: 930362 - RNA, 19 nt, Homo sapiens
  misc_RNA (1)...(19): siRNA sense strand
gaccugcaauccagacaaa

SEQ ID NO: 930363 - RNA, 19 nt, Homo sapiens
  misc_RNA (1)...(19): siRNA sense strand
ggucagaggacaccagaaa

SEQ ID NO: 930364 - RNA, 19 nt, Homo sapiens
  misc_RNA (1)...(19): siRNA sense strand
ugguaaagcuggaagaaga

SEQ ID NO: 930365 - RNA, 19 nt, Homo sapiens
  misc_RNA (1)...(19): siRNA sense strand
agacuaccgugcugaauau

SEQ ID NO: 930366 - RNA, 19 nt, Homo sapiens
  misc_RNA (1)...(19): siRNA sense strand
gagaaagccaugagaaaca

SEQ ID NO: 930367 - RNA, 19 nt, Homo sapiens
  misc_RNA (1)...(19): siRNA sense strand
acacaacagucaucaguca

SEQ ID NO: 930368 - RNA, 19 nt, Homo sapiens
  misc_RNA (1)...(19): siRNA sense strand
aaagaaagccagcgugaga

SEQ ID NO: 930369 - RNA, 19 nt, Homo sapiens
  misc_RNA (1)...(19): siRNA sense strand
ggaaggaugcuaugagaag

SEQ ID NO: 930370 - RNA, 19 nt, Homo sapiens
  misc_RNA (1)...(19): siRNA sense strand
ggacacaacagucaucagu

SEQ ID NO: 930371 - RNA, 19 nt, Homo sapiens
  misc_RNA (1)...(19): siRNA sense strand
ucucgcagcucuuugcaaa

SEQ ID NO: 930372 - RNA, 19 nt, Homo sapiens
  misc_RNA (1)...(19): siRNA sense strand
aaagagaggcccuagagaa

SEQ ID NO: 930373 - RNA, 19 nt, Homo sapiens
  misc_RNA (1)...(19): siRNA sense strand
gacgagaaccggaacuuga

SEQ ID NO: 930374 - RNA, 19 nt, Homo sapiens
  misc_RNA (1)...(19): siRNA sense strand
ugagaaggaugccaugauc

SEQ ID NO: 930375 - RNA, 19 nt, Homo sapiens
  misc_RNA (1)...(19): siRNA sense strand
ggaggagaaugugaugaga

SEQ ID NO: 930376 - RNA, 19 nt, Homo sapiens
  misc_RNA (1)...(19): siRNA sense strand
cgaagucucugauguccau

SEQ ID NO: 930377 - RNA, 19 nt, Homo sapiens
  misc_RNA (1)...(19): siRNA sense strand
ggagaaagaggagaggauu

SEQ ID NO: 930378 - RNA, 19 nt, Homo sapiens
  misc_RNA (1)...(19): siRNA sense strand
gaccacaucguuugucuau

SEQ ID NO: 930379 - RNA, 19 nt, Homo sapiens
  misc_RNA (1)...(19): siRNA sense strand
aaaucuugauggccaauaa

SEQ ID NO: 930380 - RNA, 19 nt, Homo sapiens
  misc_RNA (1)...(19): siRNA sense strand
aagcugauaugacaaagug

SEQ ID NO: 930381 - RNA, 19 nt, Homo sapiens
  misc_RNA (1)...(19): siRNA sense strand
caaagacgacacaucgaaa

SEQ ID NO: 930382 - RNA, 19 nt, Homo sapiens
  misc_RNA (1)...(19): siRNA sense strand
gcucagccauccucugcuu

SEQ ID NO: 930383 - RNA, 19 nt, Homo sapiens
  misc_RNA (1)...(19): siRNA sense strand
ucuggaagcugauaugaca

SEQ ID NO: 930384 - RNA, 19 nt, Homo sapiens
  misc_RNA (1)...(19): siRNA sense strand
gaggaugcaugauuucaac

SEQ ID NO: 930385 - RNA, 19 nt, Homo sapiens
  misc_RNA (1)...(19): siRNA sense strand
agaagcaaguguacguuga

SEQ ID NO: 930386 - RNA, 19 nt, Homo sapiens
  misc_RNA (1)...(19): siRNA sense strand
ccaaagacgacacaucgaa

SEQ ID NO: 930387 - RNA, 19 nt, Homo sapiens
  misc_RNA (1)...(19): siRNA sense strand
ccaauaagcguugccuuga

SEQ ID NO: 930388 - RNA, 19 nt, Homo sapiens
  misc_RNA (1)...(19): siRNA sense strand
gaaggaugccaugaucaaa

SEQ ID NO: 930389 - RNA, 19 nt, Homo sapiens
  misc_RNA (1)...(19): siRNA sense strand
gacauggagggcaggauua

SEQ ID NO: 930390 - RNA, 19 nt, Homo sapiens
  misc_RNA (1)...(19): siRNA sense strand
gguagcugcugcuccaguu

SEQ ID NO: 930391 - RNA, 19 nt, Homo sapiens
  misc_RNA (1)...(19): siRNA sense strand
agugggagcagaaauauuu

SEQ ID NO: 930392 - RNA, 19 nt, Homo sapiens
  misc_RNA (1)...(19): siRNA sense strand
agaaagaggaggaagaaau

SEQ ID NO: 930393 - RNA, 19 nt, Homo sapiens
  misc_RNA (1)...(19): siRNA sense strand
gaagucauccuccaaaaga

SEQ ID NO: 930394 - RNA, 19 nt, Homo sapiens
  misc_RNA (1)...(19): siRNA sense strand
cagagcagcugucgugcau

SEQ ID NO: 930395 - RNA, 19 nt, Homo sapiens
  misc_RNA (1)...(19): siRNA sense strand
caccaacguuucagaauac

SEQ ID NO: 930396 - RNA, 19 nt, Homo sapiens
  misc_RNA (1)...(19): siRNA sense strand
agaaagccaugagaaacaa

SEQ ID NO: 930397 - RNA, 19 nt, Homo sapiens
  misc_RNA (1)...(19): siRNA sense strand
uagagaaagccaugagaaa

SEQ ID NO: 930398 - RNA, 19 nt, Homo sapiens
  misc_RNA (1)...(19): siRNA sense strand
gaagguggagacagaaauc

SEQ ID NO: 930399 - RNA, 19 nt, Homo sapiens
  misc_RNA (1)...(19): siRNA sense strand
ccagcgaagucucugaugu

SEQ ID NO: 930400 - RNA, 19 nt, Homo sapiens
  misc_RNA (1)...(19): siRNA sense strand
ggaaggagccgagcaagac

SEQ ID NO: 930401 - RNA, 19 nt, Homo sapiens
  misc_RNA (1)...(19): siRNA sense strand
gcaaguguacguugacaag

SEQ ID NO: 930402 - RNA, 19 nt, Homo sapiens
  misc_RNA (1)...(19): siRNA sense strand
aagagaggcccuagagaaa

SEQ ID NO: 930403 - RNA, 19 nt, Homo sapiens
  misc_RNA (1)...(19): siRNA sense strand
gacccuccaugcccagauu

SEQ ID NO: 930404 - RNA, 19 nt, Homo sapiens
  misc_RNA (1)...(19): siRNA sense strand
ccagaaagaggaggaagaa

SEQ ID NO: 930405 - RNA, 19 nt, Homo sapiens
  misc_RNA (1)...(19): siRNA sense strand
ugacaaagugggagcagaa

SEQ ID NO: 930406 - RNA, 19 nt, Homo sapiens
  misc_RNA (1)...(19): siRNA sense strand
caagcuagagggcgagauu

SEQ ID NO: 930407 - RNA, 19 nt, Homo sapiens
  misc_RNA (1)...(19): siRNA sense strand
ggaacuggaaucccugaga

SEQ ID NO: 930408 - RNA, 19 nt, Homo sapiens
  misc_RNA (1)...(19): siRNA sense strand
gaagcucgcauccagaaag

SEQ ID NO: 930409 - RNA, 19 nt, Homo sapiens
  misc_RNA (1)...(19): siRNA sense strand
gccauccucugcuucuuau

SEQ ID NO: 930410 - RNA, 19 nt, Homo sapiens
  misc_RNA (1)...(19): siRNA sense strand
caacguuucagaauacaau

SEQ ID NO: 930411 - RNA, 19 nt, Homo sapiens
  misc_RNA (1)...(19): siRNA sense strand
gagaggcccuagagaaagc

SEQ ID NO: 930412 - RNA, 19 nt, Homo sapiens
  misc_RNA (1)...(19): siRNA sense strand
uugcagagaaggaauauga

SEQ ID NO: 930413 - RNA, 19 nt, Homo sapiens
  misc_RNA (1)...(19): siRNA sense strand
ggaggaugcaugauuucaa

SEQ ID NO: 930414 - RNA, 19 nt, Homo sapiens
  misc_RNA (1)...(19): siRNA sense strand
ugcagaagguggagacaga

SEQ ID NO: 930415 - RNA, 19 nt, Homo sapiens
  misc_RNA (1)...(19): siRNA sense strand
gaaaucuugauggccaaua

SEQ ID NO: 930416 - RNA, 19 nt, Homo sapiens
  misc_RNA (1)...(19): siRNA sense strand
gagcccagcagaugguuga

SEQ ID NO: 930417 - RNA, 19 nt, Homo sapiens
  misc_RNA (1)...(19): siRNA sense strand
gaucugagagagcgucuag

SEQ ID NO: 930418 - RNA, 19 nt, Homo sapiens
  misc_RNA (1)...(19): siRNA sense strand
uggcaagacugcagaaggu

SEQ ID NO: 930419 - RNA, 19 nt, Homo sapiens
  misc_RNA (1)...(19): siRNA sense strand
aauaagcguugccuugaca

SEQ ID NO: 930420 - RNA, 19 nt, Homo sapiens
  misc_RNA (1)...(19): siRNA sense strand
guuugucuauaccaaguuu

SEQ ID NO: 930421 - RNA, 19 nt, Homo sapiens
  misc_RNA (1)...(19): siRNA sense strand
ugacauggagggcaggauu

SEQ ID NO: 930422 - RNA, 19 nt, Homo sapiens
  misc_RNA (1)...(19): siRNA sense strand
caucguuugucuauaccaa

SEQ ID NO: 930423 - RNA, 19 nt, Homo sapiens
  misc_RNA (1)...(19): siRNA sense strand
cauaugagaaccucgugaa

SEQ ID NO: 930424 - RNA, 19 nt, Homo sapiens
  misc_RNA (1)...(19): siRNA sense strand
uuggaaggaugcuaugaga

SEQ ID NO: 930425 - RNA, 19 nt, Homo sapiens
  misc_RNA (1)...(19): siRNA sense strand
ggaccaaagacgacacauc

SEQ ID NO: 930426 - RNA, 19 nt, Homo sapiens
  misc_RNA (1)...(19): siRNA sense strand
cuagagaaagccaugagaa

SEQ ID NO: 930427 - RNA, 19 nt, Homo sapiens
  misc_RNA (1)...(19): siRNA sense strand
gcagagaugguggaauauc

SEQ ID NO: 930428 - RNA, 19 nt, Homo sapiens
  misc_RNA (1)...(19): siRNA sense strand
gagaaggaugccaugauca

SEQ ID NO: 930429 - RNA, 19 nt, Homo sapiens
  misc_RNA (1)...(19): siRNA sense strand
uagaagcucgcauccagaa

SEQ ID NO: 930430 - RNA, 19 nt, Homo sapiens
  misc_RNA (1)...(19): siRNA sense strand
gagaaagaggagaggauuc

SEQ ID NO: 930431 - RNA, 19 nt, Homo sapiens
  misc_RNA (1)...(19): siRNA sense strand
gcaacugucagcccaccaa

SEQ ID NO: 930432 - RNA, 19 nt, Homo sapiens
  misc_RNA (1)...(19): siRNA sense strand
ucuagagacugccaacaag

SEQ ID NO: 930433 - RNA, 19 nt, Homo sapiens
  misc_RNA (1)...(19): siRNA sense strand
uaacaccagcuaugacaca

SEQ ID NO: 930434 - RNA, 19 nt, Homo sapiens
  misc_RNA (1)...(19): siRNA sense strand
gaaggagccgagcaagaca

SEQ ID NO: 930435 - RNA, 19 nt, Homo sapiens
  misc_RNA (1)...(19): siRNA sense strand
aggagaaugugaugagaca

SEQ ID NO: 930436 - RNA, 19 nt, Homo sapiens
  misc_RNA (1)...(19): siRNA sense strand
ggaccacaucguuugucua

SEQ ID NO: 930437 - RNA, 19 nt, Homo sapiens
  misc_RNA (1)...(19): siRNA sense strand
agaaggaugccaugaucaa

SEQ ID NO: 930438 - RNA, 19 nt, Homo sapiens
  misc_RNA (1)...(19): siRNA sense strand
caauaagcguugccuugac

SEQ ID NO: 930439 - RNA, 19 nt, Homo sapiens
  misc_RNA (1)...(19): siRNA sense strand
aagcucgcauccagaaaga

SEQ ID NO: 930440 - RNA, 19 nt, Homo sapiens
  misc_RNA (1)...(19): siRNA sense strand
gcuggaagaagagcugaaa

SEQ ID NO: 930441 - RNA, 19 nt, Homo sapiens
  misc_RNA (1)...(19): siRNA sense strand
cuaccgugcugaauauguc

SEQ ID NO: 930442 - RNA, 19 nt, Homo sapiens
  misc_RNA (1)...(19): siRNA sense strand
ccacugcccguucuaccaa

SEQ ID NO: 930443 - RNA, 19 nt, Homo sapiens
  misc_RNA (1)...(19): siRNA sense strand
augagaaccucgugaaguc

SEQ ID NO: 930444 - RNA, 19 nt, Homo sapiens
  misc_RNA (1)...(19): siRNA sense strand
gcagaagguggagacagaa

SEQ ID NO: 930445 - RNA, 19 nt, Homo sapiens
  misc_RNA (1)...(19): siRNA sense strand
gcuaugacacagcucuaga

SEQ ID NO: 930446 - RNA, 19 nt, Homo sapiens
  misc_RNA (1)...(19): siRNA sense strand
gcagcaggcccuuguacag

SEQ ID NO: 930447 - RNA, 19 nt, Homo sapiens
  misc_RNA (1)...(19): siRNA sense strand
uugacaagguggagaagau

SEQ ID NO: 930448 - RNA, 19 nt, Homo sapiens
  misc_RNA (1)...(19): siRNA sense strand
uucggaggaugcaugauuu

SEQ ID NO: 930449 - RNA, 19 nt, Homo sapiens
  misc_RNA (1)...(19): siRNA sense strand
gaacgugggacggaaucga

SEQ ID NO: 930450 - RNA, 19 nt, Homo sapiens
  misc_RNA (1)...(19): siRNA sense strand
ggaagcugauaugacaaag

SEQ ID NO: 930451 - RNA, 19 nt, Homo sapiens
  misc_RNA (1)...(19): siRNA sense strand
guaaugcccaggccaaggu

SEQ ID NO: 930452 - RNA, 19 nt, Homo sapiens
  misc_RNA (1)...(19): siRNA sense strand
agaauucucuuccaacaug

SEQ ID NO: 930453 - RNA, 19 nt, Homo sapiens
  misc_RNA (1)...(19): siRNA sense strand
gcacugccucugcuuaaga

SEQ ID NO: 930454 - RNA, 19 nt, Homo sapiens
  misc_RNA (1)...(19): siRNA sense strand
gagugaagcacaagaagga

SEQ ID NO: 930455 - RNA, 19 nt, Homo sapiens
  misc_RNA (1)...(19): siRNA sense strand
gcacgcagaggaacaguca

SEQ ID NO: 930456 - RNA, 19 nt, Homo sapiens
  misc_RNA (1)...(19): siRNA sense strand
ggaagggcacgcagaggaa

SEQ ID NO: 930457 - RNA, 19 nt, Homo sapiens
  misc_RNA (1)...(19): siRNA sense strand
uuucagaaccgccgaguga

SEQ ID NO: 930458 - RNA, 19 nt, Homo sapiens
  misc_RNA (1)...(19): siRNA sense strand
ucgacucgcucaucaucaa

SEQ ID NO: 930459 - RNA, 19 nt, Homo sapiens
  misc_RNA (1)...(19): siRNA sense strand
gcaccgccaccaccuacaa

SEQ ID NO: 930460 - RNA, 19 nt, Homo sapiens
  misc_RNA (1)...(19): siRNA sense strand
gaauucucuuccaacaugu

SEQ ID NO: 930461 - RNA, 19 nt, Homo sapiens
  misc_RNA (1)...(19): siRNA sense strand
cgacuccggaggauugaaa

SEQ ID NO: 930462 - RNA, 19 nt, Homo sapiens
  misc_RNA (1)...(19): siRNA sense strand
uaugucgacucgcucauca

SEQ ID NO: 930463 - RNA, 19 nt, Homo sapiens
  misc_RNA (1)...(19): siRNA sense strand
uccuggagcuggagagaga

SEQ ID NO: 930464 - RNA, 19 nt, Homo sapiens
  misc_RNA (1)...(19): siRNA sense strand
ggagcuggagagagaauuc

SEQ ID NO: 930465 - RNA, 19 nt, Homo sapiens
  misc_RNA (1)...(19): siRNA sense strand
caacgaugacaaggagauu

SEQ ID NO: 930466 - RNA, 19 nt, Homo sapiens
  misc_RNA (1)...(19): siRNA sense strand
ccagccagguacccaaugg

SEQ ID NO: 930467 - RNA, 19 nt, Homo sapiens
  misc_RNA (1)...(19): siRNA sense strand
ucucgacuccggaggauug

SEQ ID NO: 930468 - RNA, 19 nt, Homo sapiens
  misc_RNA (1)...(19): siRNA sense strand
cccaauggcaagaggauga

SEQ ID NO: 930469 - RNA, 19 nt, Homo sapiens
  misc_RNA (1)...(19): siRNA sense strand
ugaggacggcguucacuag

SEQ ID NO: 930470 - RNA, 19 nt, Homo sapiens
  misc_RNA (1)...(19): siRNA sense strand
gggugaaccaugcgcauca

SEQ ID NO: 930471 - RNA, 19 nt, Homo sapiens
  misc_RNA (1)...(19): siRNA sense strand
gaaauucgguguuauguua

SEQ ID NO: 930472 - RNA, 19 nt, Homo sapiens
  misc_RNA (1)...(19): siRNA sense strand
gauaagagcuucagaguuu

SEQ ID NO: 930473 - RNA, 19 nt, Homo sapiens
  misc_RNA (1)...(19): siRNA sense strand
caagagagcuuaacugaaa

SEQ ID NO: 930474 - RNA, 19 nt, Homo sapiens
  misc_RNA (1)...(19): siRNA sense strand
gaaccaauauccaguguuu

SEQ ID NO: 930475 - RNA, 19 nt, Homo sapiens
  misc_RNA (1)...(19): siRNA sense strand
gaaauugacucagauugua

SEQ ID NO: 930476 - RNA, 19 nt, Homo sapiens
  misc_RNA (1)...(19): siRNA sense strand
gcugaaagcugcaauagaa

SEQ ID NO: 930477 - RNA, 19 nt, Homo sapiens
  misc_RNA (1)...(19): siRNA sense strand
gaaacugagucuucuagua

SEQ ID NO: 930478 - RNA, 19 nt, Homo sapiens
  misc_RNA (1)...(19): siRNA sense strand
ucaagcaacuguacauuua

SEQ ID NO: 930479 - RNA, 19 nt, Homo sapiens
  misc_RNA (1)...(19): siRNA sense strand
ggaagaagauguaguaaag

SEQ ID NO: 930480 - RNA, 19 nt, Homo sapiens
  misc_RNA (1)...(19): siRNA sense strand
gaacagcgacgccaguuua

SEQ ID NO: 930481 - RNA, 19 nt, Homo sapiens
  misc_RNA (1)...(19): siRNA sense strand
gaaccucaguuauguuuaa

SEQ ID NO: 930482 - RNA, 19 nt, Homo sapiens
  misc_RNA (1)...(19): siRNA sense strand
caaaucagcugaaacagaa

SEQ ID NO: 930483 - RNA, 19 nt, Homo sapiens
  misc_RNA (1)...(19): siRNA sense strand
gaagggaaauuucaaacuu

SEQ ID NO: 930484 - RNA, 19 nt, Homo sapiens
  misc_RNA (1)...(19): siRNA sense strand
gcacagauauuugcaauuc

SEQ ID NO: 930485 - RNA, 19 nt, Homo sapiens
  misc_RNA (1)...(19): siRNA sense strand
ugaaacagcugauacuaaa

SEQ ID NO: 930486 - RNA, 19 nt, Homo sapiens
  misc_RNA (1)...(19): siRNA sense strand
cagaauggcuucaccuuaa

SEQ ID NO: 930487 - RNA, 19 nt, Homo sapiens
  misc_RNA (1)...(19): siRNA sense strand
ggaaguucgucguuuauuu

SEQ ID NO: 930488 - RNA, 19 nt, Homo sapiens
  misc_RNA (1)...(19): siRNA sense strand
gaauaagggugaucuacaa

SEQ ID NO: 930489 - RNA, 19 nt, Homo sapiens
  misc_RNA (1)...(19): siRNA sense strand
gauggaaguucgucguuua

SEQ ID NO: 930490 - RNA, 19 nt, Homo sapiens
  misc_RNA (1)...(19): siRNA sense strand
caaguaucgugacauauua

SEQ ID NO: 930491 - RNA, 19 nt, Homo sapiens
  misc_RNA (1)...(19): siRNA sense strand
ggaaguacaugaucuuuua

SEQ ID NO: 930492 - RNA, 19 nt, Homo sapiens
  misc_RNA (1)...(19): siRNA sense strand
gauagaagaucuuucacaa

SEQ ID NO: 930493 - RNA, 19 nt, Homo sapiens
  misc_RNA (1)...(19): siRNA sense strand
gaaauggucuacaauaucu

SEQ ID NO: 930494 - RNA, 19 nt, Homo sapiens
  misc_RNA (1)...(19): siRNA sense strand
gauagcagaucuucuaguu

SEQ ID NO: 930495 - RNA, 19 nt, Homo sapiens
  misc_RNA (1)...(19): siRNA sense strand
gaaagaaauugacaaccuu

SEQ ID NO: 930496 - RNA, 19 nt, Homo sapiens
  misc_RNA (1)...(19): siRNA sense strand
gcagaaauauggagcaugu

SEQ ID NO: 930497 - RNA, 19 nt, Homo sapiens
  misc_RNA (1)...(19): siRNA sense strand
gcaaucacauuauuccaaa

SEQ ID NO: 930498 - RNA, 19 nt, Homo sapiens
  misc_RNA (1)...(19): siRNA sense strand
aagaguaccuucaaguuua

SEQ ID NO: 930499 - RNA, 19 nt, Homo sapiens
  misc_RNA (1)...(19): siRNA sense strand
gauauggcuuggcauguua

SEQ ID NO: 930500 - RNA, 19 nt, Homo sapiens
  misc_RNA (1)...(19): siRNA sense strand
ggcaguaccucuaauauau

SEQ ID NO: 930501 - RNA, 19 nt, Homo sapiens
  misc_RNA (1)...(19): siRNA sense strand
caaaauaccuugaugguuu

SEQ ID NO: 930502 - RNA, 19 nt, Homo sapiens
  misc_RNA (1)...(19): siRNA sense strand
gguaaccuuucuccuauua

SEQ ID NO: 930503 - RNA, 19 nt, Homo sapiens
  misc_RNA (1)...(19): siRNA sense strand
gaaggccacuguaucauau

SEQ ID NO: 930504 - RNA, 19 nt, Homo sapiens
  misc_RNA (1)...(19): siRNA sense strand
agaaacaccugcugcauuu

SEQ ID NO: 930505 - RNA, 19 nt, Homo sapiens
  misc_RNA (1)...(19): siRNA sense strand
gaacgagggcgauucagua

SEQ ID NO: 930506 - RNA, 19 nt, Homo sapiens
  misc_RNA (1)...(19): siRNA sense strand
gcauuuaggucacaagaga

SEQ ID NO: 930507 - RNA, 19 nt, Homo sapiens
  misc_RNA (1)...(19): siRNA sense strand
gagagauacuucugaugua

SEQ ID NO: 930508 - RNA, 19 nt, Homo sapiens
  misc_RNA (1)...(19): siRNA sense strand
caaagucuguaauggauuu

SEQ ID NO: 930509 - RNA, 19 nt, Homo sapiens
  misc_RNA (1)...(19): siRNA sense strand
gaacagaagauuaccgaaa

SEQ ID NO: 930510 - RNA, 19 nt, Homo sapiens
  misc_RNA (1)...(19): siRNA sense strand
uagcagaucuucuaguuga

SEQ ID NO: 930511 - RNA, 19 nt, Homo sapiens
  misc_RNA (1)...(19): siRNA sense strand
cuacaacucuggaaacuga

SEQ ID NO: 930512 - RNA, 19 nt, Homo sapiens
  misc_RNA (1)...(19): siRNA sense strand
guacaucauuucucuuuga

SEQ ID NO: 930513 - RNA, 19 nt, Homo sapiens
  misc_RNA (1)...(19): siRNA sense strand
ggaacaguauuacagcuaa

SEQ ID NO: 930514 - RNA, 19 nt, Homo sapiens
  misc_RNA (1)...(19): siRNA sense strand
gaaauauggagcauguuua

SEQ ID NO: 930515 - RNA, 19 nt, Homo sapiens
  misc_RNA (1)...(19): siRNA sense strand
gcaaaccgaaccucaguua

SEQ ID NO: 930516 - RNA, 19 nt, Homo sapiens
  misc_RNA (1)...(19): siRNA sense strand
ggacuacaauguuucguau

SEQ ID NO: 930517 - RNA, 19 nt, Homo sapiens
  misc_RNA (1)...(19): siRNA sense strand
gagaaaggcugauguugca

SEQ ID NO: 930518 - RNA, 19 nt, Homo sapiens
  misc_RNA (1)...(19): siRNA sense strand
ggaccuggauauaagagua

SEQ ID NO: 930519 - RNA, 19 nt, Homo sapiens
  misc_RNA (1)...(19): siRNA sense strand
gaacaaguauugcugaaaa

SEQ ID NO: 930520 - RNA, 19 nt, Homo sapiens
  misc_RNA (1)...(19): siRNA sense strand
ggaaagaaagggaauguga

SEQ ID NO: 930521 - RNA, 19 nt, Homo sapiens
  misc_RNA (1)...(19): siRNA sense strand
gcauugccuuuacauauaa

SEQ ID NO: 930522 - RNA, 19 nt, Homo sapiens
  misc_RNA (1)...(19): siRNA sense strand
gagaugaacuuuauuaucc

SEQ ID NO: 930523 - RNA, 19 nt, Homo sapiens
  misc_RNA (1)...(19): siRNA sense strand
ucaagaagaucgacacgaa

SEQ ID NO: 930524 - RNA, 19 nt, Homo sapiens
  misc_RNA (1)...(19): siRNA sense strand
caaacaagcacaguucuua

SEQ ID NO: 930525 - RNA, 19 nt, Homo sapiens
  misc_RNA (1)...(19): siRNA sense strand
gaauuugacuuggagauga

SEQ ID NO: 930526 - RNA, 19 nt, Homo sapiens
  misc_RNA (1)...(19): siRNA sense strand
gauacuuucugaagcauuu

SEQ ID NO: 930527 - RNA, 19 nt, Homo sapiens
  misc_RNA (1)...(19): siRNA sense strand
gaaguaaagcucgaugaua

SEQ ID NO: 930528 - RNA, 19 nt, Homo sapiens
  misc_RNA (1)...(19): siRNA sense strand
uaacacaauucaccucauu

SEQ ID NO: 930529 - RNA, 19 nt, Homo sapiens
  misc_RNA (1)...(19): siRNA sense strand
cauuacaccuaaaggauua

SEQ ID NO: 930530 - RNA, 19 nt, Homo sapiens
  misc_RNA (1)...(19): siRNA sense strand
acacgaaaguucuugcaua

SEQ ID NO: 930531 - RNA, 19 nt, Homo sapiens
  misc_RNA (1)...(19): siRNA sense strand
gcauuuggcuccacucaug

SEQ ID NO: 930532 - RNA, 19 nt, Homo sapiens
  misc_RNA (1)...(19): siRNA sense strand
caaaguggccuuaucagaa

SEQ ID NO: 930533 - RNA, 19 nt, Homo sapiens
  misc_RNA (1)...(19): siRNA sense strand
cgagggcgauucaguaauu

SEQ ID NO: 930534 - RNA, 19 nt, Homo sapiens
  misc_RNA (1)...(19): siRNA sense strand
gaaauucgcaguguugauu

SEQ ID NO: 930535 - RNA, 19 nt, Homo sapiens
  misc_RNA (1)...(19): siRNA sense strand
ccacauacaacacacuuua

SEQ ID NO: 930536 - RNA, 19 nt, Homo sapiens
  misc_RNA (1)...(19): siRNA sense strand
gaucagcauuguccacauu

SEQ ID NO: 930537 - RNA, 19 nt, Homo sapiens
  misc_RNA (1)...(19): siRNA sense strand
cagagaagaugaaguagug

SEQ ID NO: 930538 - RNA, 19 nt, Homo sapiens
  misc_RNA (1)...(19): siRNA sense strand
uaagggugaucuacaaauu

SEQ ID NO: 930539 - RNA, 19 nt, Homo sapiens
  misc_RNA (1)...(19): siRNA sense strand
ggacggacauauaaugauc

SEQ ID NO: 930540 - RNA, 19 nt, Homo sapiens
  misc_RNA (1)...(19): siRNA sense strand
ccaauaugcugcugauaga

SEQ ID NO: 930541 - RNA, 19 nt, Homo sapiens
  misc_RNA (1)...(19): siRNA sense strand
uagaaggccuuguuuguau

SEQ ID NO: 930542 - RNA, 19 nt, Homo sapiens
  misc_RNA (1)...(19): siRNA sense strand
gugcagagcugauggaagu

SEQ ID NO: 930543 - RNA, 19 nt, Homo sapiens
  misc_RNA (1)...(19): siRNA sense strand
ucaaagaaauggaauaagg

SEQ ID NO: 930544 - RNA, 19 nt, Homo sapiens
  misc_RNA (1)...(19): siRNA sense strand
gagaguauaacauguauga

SEQ ID NO: 930545 - RNA, 19 nt, Homo sapiens
  misc_RNA (1)...(19): siRNA sense strand
gcaaagaagggaaauuuca

SEQ ID NO: 930546 - RNA, 19 nt, Homo sapiens
  misc_RNA (1)...(19): siRNA sense strand
aaacacugcuuuggaagua

SEQ ID NO: 930547 - RNA, 19 nt, Homo sapiens
  misc_RNA (1)...(19): siRNA sense strand
caaaugaagcugaguuuau

SEQ ID NO: 930548 - RNA, 19 nt, Homo sapiens
  misc_RNA (1)...(19): siRNA sense strand
ggauguggaugauagcaaa

SEQ ID NO: 930549 - RNA, 19 nt, Homo sapiens
  misc_RNA (1)...(19): siRNA sense strand
cagaugauauucuuggaaa

SEQ ID NO: 930550 - RNA, 19 nt, Homo sapiens
  misc_RNA (1)...(19): siRNA sense strand
caacaaaagugucagauga

SEQ ID NO: 930551 - RNA, 19 nt, Homo sapiens
  misc_RNA (1)...(19): siRNA sense strand
gaaaggcugauguugcaua

SEQ ID NO: 930552 - RNA, 19 nt, Homo sapiens
  misc_RNA (1)...(19): siRNA sense strand
gcagauaaucgcuauauuc

SEQ ID NO: 930553 - RNA, 19 nt, Homo sapiens
  misc_RNA (1)...(19): siRNA sense strand
gcaacaggaugugauaaug

SEQ ID NO: 930554 - RNA, 19 nt, Homo sapiens
  misc_RNA (1)...(19): siRNA sense strand
aaauaaaucuucccaugga

SEQ ID NO: 930555 - RNA, 19 nt, Homo sapiens
  misc_RNA (1)...(19): siRNA sense strand
ggaaguguugguaucauua

SEQ ID NO: 930556 - RNA, 19 nt, Homo sapiens
  misc_RNA (1)...(19): siRNA sense strand
aaguaaagcucgaugauau

SEQ ID NO: 930557 - RNA, 19 nt, Homo sapiens
  misc_RNA (1)...(19): siRNA sense strand
gcacagaaguugggcuaau

SEQ ID NO: 930558 - RNA, 19 nt, Homo sapiens
  misc_RNA (1)...(19): siRNA sense strand
gugaauagauggcacaaca

SEQ ID NO: 930559 - RNA, 19 nt, Homo sapiens
  misc_RNA (1)...(19): siRNA sense strand
ggacauauaaugaucugaa

SEQ ID NO: 930560 - RNA, 19 nt, Homo sapiens
  misc_RNA (1)...(19): siRNA sense strand
cgacagaaaucuacuucga

SEQ ID NO: 930561 - RNA, 19 nt, Homo sapiens
  misc_RNA (1)...(19): siRNA sense strand
gcaaaucagcugaaacaga

SEQ ID NO: 930562 - RNA, 19 nt, Homo sapiens
  misc_RNA (1)...(19): siRNA sense strand
aaacaucaggcaagaaaua

SEQ ID NO: 930563 - RNA, 19 nt, Homo sapiens
  misc_RNA (1)...(19): siRNA sense strand
gaaaguggaagcaacagaa

SEQ ID NO: 930564 - RNA, 19 nt, Homo sapiens
  misc_RNA (1)...(19): siRNA sense strand
uacaauaucuuccggauuc

SEQ ID NO: 930565 - RNA, 19 nt, Homo sapiens
  misc_RNA (1)...(19): siRNA sense strand
guauuuggguucaagcuuu

SEQ ID NO: 930566 - RNA, 19 nt, Homo sapiens
  misc_RNA (1)...(19): siRNA sense strand
gagcuguccuggagcaauu

SEQ ID NO: 930567 - RNA, 19 nt, Homo sapiens
  misc_RNA (1)...(19): siRNA sense strand
gaacuugggcuuguuauca

SEQ ID NO: 930568 - RNA, 19 nt, Homo sapiens
  misc_RNA (1)...(19): siRNA sense strand
gcacagauacagaacuuug

SEQ ID NO: 930569 - RNA, 19 nt, Homo sapiens
  misc_RNA (1)...(19): siRNA sense strand
guaguggcauuacaccuaa

SEQ ID NO: 930570 - RNA, 19 nt, Homo sapiens
  misc_RNA (1)...(19): siRNA sense strand
cagaguaggaacaguauua

SEQ ID NO: 930571 - RNA, 19 nt, Homo sapiens
  misc_RNA (1)...(19): siRNA sense strand
gcacugguccggucaucaa

SEQ ID NO: 930572 - RNA, 19 nt, Homo sapiens
  misc_RNA (1)...(19): siRNA sense strand
caaggacugcgucuucugu

SEQ ID NO: 930573 - RNA, 19 nt, Homo sapiens
  misc_RNA (1)...(19): siRNA sense strand
cgucaaggacugcgucuuc

SEQ ID NO: 930574 - RNA, 19 nt, Homo sapiens
  misc_RNA (1)...(19): siRNA sense strand
uccaugcaguguccuggua

SEQ ID NO: 930575 - RNA, 19 nt, Homo sapiens
  misc_RNA (1)...(19): siRNA sense strand
ugacgaggacugcuucaca

SEQ ID NO: 930576 - RNA, 19 nt, Homo sapiens
  misc_RNA (1)...(19): siRNA sense strand
gcugcuuccuccacguuug

SEQ ID NO: 930577 - RNA, 19 nt, Homo sapiens
  misc_RNA (1)...(19): siRNA sense strand
cagcugcggccuugaggaa

SEQ ID NO: 930578 - RNA, 19 nt, Homo sapiens
  misc_RNA (1)...(19): siRNA sense strand
ccuacagccucaccaccaa

SEQ ID NO: 930579 - RNA, 19 nt, Homo sapiens
  misc_RNA (1)...(19): siRNA sense strand
gaggaacccgucagcuaca

SEQ ID NO: 930580 - RNA, 19 nt, Homo sapiens
  misc_RNA (1)...(19): siRNA sense strand
uugaggaacccgucagcua

SEQ ID NO: 930581 - RNA, 19 nt, Homo sapiens
  misc_RNA (1)...(19): siRNA sense strand
gcgaugacgaggacugcuu

SEQ ID NO: 930582 - RNA, 19 nt, Homo sapiens
  misc_RNA (1)...(19): siRNA sense strand
aggacugcgucuucuguga

SEQ ID NO: 930583 - RNA, 19 nt, Homo sapiens
  misc_RNA (1)...(19): siRNA sense strand
ugaaagaccucgaaugaau

SEQ ID NO: 930584 - RNA, 19 nt, Homo sapiens
  misc_RNA (1)...(19): siRNA sense strand
gaaugaagguauuugaaga

SEQ ID NO: 930585 - RNA, 19 nt, Homo sapiens
  misc_RNA (1)...(19): siRNA sense strand
gcacaacuccucugucuga

SEQ ID NO: 930586 - RNA, 19 nt, Homo sapiens
  misc_RNA (1)...(19): siRNA sense strand
gaagaauuauugcuugaug

SEQ ID NO: 930587 - RNA, 19 nt, Homo sapiens
  misc_RNA (1)...(19): siRNA sense strand
ggaaaggcauuuggaaaga

SEQ ID NO: 930588 - RNA, 19 nt, Homo sapiens
  misc_RNA (1)...(19): siRNA sense strand
gacaaccgccucuaacuua

SEQ ID NO: 930589 - RNA, 19 nt, Homo sapiens
  misc_RNA (1)...(19): siRNA sense strand
caacuccucugucugauga

SEQ ID NO: 930590 - RNA, 19 nt, Homo sapiens
  misc_RNA (1)...(19): siRNA sense strand
gaagaggacacacagagua

SEQ ID NO: 930591 - RNA, 19 nt, Homo sapiens
  misc_RNA (1)...(19): siRNA sense strand
gagaacagaucccaaugga

SEQ ID NO: 930592 - RNA, 19 nt, Homo sapiens
  misc_RNA (1)...(19): siRNA sense strand
gaggcaagccguuugaaua

SEQ ID NO: 930593 - RNA, 19 nt, Homo sapiens
  misc_RNA (1)...(19): siRNA sense strand
uuaagaaacuggcgacuga

SEQ ID NO: 930594 - RNA, 19 nt, Homo sapiens
  misc_RNA (1)...(19): siRNA sense strand
gacugaagcuggaguagaa

SEQ ID NO: 930595 - RNA, 19 nt, Homo sapiens
  misc_RNA (1)...(19): siRNA sense strand
gaaaggcauuuggaaagaa

SEQ ID NO: 930596 - RNA, 19 nt, Homo sapiens
  misc_RNA (1)...(19): siRNA sense strand
gagacuauaucaggcguua

SEQ ID NO: 930597 - RNA, 19 nt, Homo sapiens
  misc_RNA (1)...(19): siRNA sense strand
ggauguggcugucuuguag

SEQ ID NO: 930598 - RNA, 19 nt, Homo sapiens
  misc_RNA (1)...(19): siRNA sense strand
aagcuuggguggcaaauuu

SEQ ID NO: 930599 - RNA, 19 nt, Homo sapiens
  misc_RNA (1)...(19): siRNA sense strand
cagcagcuuucacgauaua

SEQ ID NO: 930600 - RNA, 19 nt, Homo sapiens
  misc_RNA (1)...(19): siRNA sense strand
gaagaaggaaugaagguau

SEQ ID NO: 930601 - RNA, 19 nt, Homo sapiens
  misc_RNA (1)...(19): siRNA sense strand
gaaaauaucccagguugua

SEQ ID NO: 930602 - RNA, 19 nt, Homo sapiens
  misc_RNA (1)...(19): siRNA sense strand
agagacagagcacuaauua

SEQ ID NO: 930603 - RNA, 19 nt, Homo sapiens
  misc_RNA (1)...(19): siRNA sense strand
ggaaggaaacccuaucugu

SEQ ID NO: 930604 - RNA, 19 nt, Homo sapiens
  misc_RNA (1)...(19): siRNA sense strand
acuaacagaucucuacaaa

SEQ ID NO: 930605 - RNA, 19 nt, Homo sapiens
  misc_RNA (1)...(19): siRNA sense strand
aaauuaaacucccgucugu

SEQ ID NO: 930606 - RNA, 19 nt, Homo sapiens
  misc_RNA (1)...(19): siRNA sense strand
ggaugaaacagaucuauca

SEQ ID NO: 930607 - RNA, 19 nt, Homo sapiens
  misc_RNA (1)...(19): siRNA sense strand
ggacaggcuuuccauggau

SEQ ID NO: 930608 - RNA, 19 nt, Homo sapiens
  misc_RNA (1)...(19): siRNA sense strand
gcacuuacucguuuggaaa

SEQ ID NO: 930609 - RNA, 19 nt, Homo sapiens
  misc_RNA (1)...(19): siRNA sense strand
ggaguagaagucauuguaa

SEQ ID NO: 930610 - RNA, 19 nt, Homo sapiens
  misc_RNA (1)...(19): siRNA sense strand
cuaagaggcuucccugcaa

SEQ ID NO: 930611 - RNA, 19 nt, Homo sapiens
  misc_RNA (1)...(19): siRNA sense strand
cugaagcacuuacucguuu

SEQ ID NO: 930612 - RNA, 19 nt, Homo sapiens
  misc_RNA (1)...(19): siRNA sense strand
ggacaaccgccucuaacuu

SEQ ID NO: 930613 - RNA, 19 nt, Homo sapiens
  misc_RNA (1)...(19): siRNA sense strand
uauaugaccuagacaagau

SEQ ID NO: 930614 - RNA, 19 nt, Homo sapiens
  misc_RNA (1)...(19): siRNA sense strand
gaaagaccucgaaugaaug

SEQ ID NO: 930615 - RNA, 19 nt, Homo sapiens
  misc_RNA (1)...(19): siRNA sense strand
cggagaaacugaagcacuu

SEQ ID NO: 930616 - RNA, 19 nt, Homo sapiens
  misc_RNA (1)...(19): siRNA sense strand
ggaguuaauuauccuaaac

SEQ ID NO: 930617 - RNA, 19 nt, Homo sapiens
  misc_RNA (1)...(19): siRNA sense strand
gcuauugcccuguugguuu

SEQ ID NO: 930618 - RNA, 19 nt, Homo sapiens
  misc_RNA (1)...(19): siRNA sense strand
ggaagaaggaaugaaggua

SEQ ID NO: 930619 - RNA, 19 nt, Homo sapiens
  misc_RNA (1)...(19): siRNA sense strand
caacuguuauggcgugaau

SEQ ID NO: 930620 - RNA, 19 nt, Homo sapiens
  misc_RNA (1)...(19): siRNA sense strand
gaguagaagucauuguaag

SEQ ID NO: 930621 - RNA, 19 nt, Homo sapiens
  misc_RNA (1)...(19): siRNA sense strand
ggaaugcaccagaagguau

SEQ ID NO: 930622 - RNA, 19 nt, Homo sapiens
  misc_RNA (1)...(19): siRNA sense strand
ggaaugaagguauuugaag

SEQ ID NO: 930623 - RNA, 19 nt, Homo sapiens
  misc_RNA (1)...(19): siRNA sense strand
aaaggcauuuggaaagaaa

SEQ ID NO: 930624 - RNA, 19 nt, Homo sapiens
  misc_RNA (1)...(19): siRNA sense strand
gaucauagaacucaauggu

SEQ ID NO: 930625 - RNA, 19 nt, Homo sapiens
  misc_RNA (1)...(19): siRNA sense strand
gcaagccguuugaauaucg

SEQ ID NO: 930626 - RNA, 19 nt, Homo sapiens
  misc_RNA (1)...(19): siRNA sense strand
uaagaggcuucccugcaaa

SEQ ID NO: 930627 - RNA, 19 nt, Homo sapiens
  misc_RNA (1)...(19): siRNA sense strand
gcagauuggagcauaaaug

SEQ ID NO: 930628 - RNA, 19 nt, Homo sapiens
  misc_RNA (1)...(19): siRNA sense strand
aagaaggaaugaagguauu

SEQ ID NO: 930629 - RNA, 19 nt, Homo sapiens
  misc_RNA (1)...(19): siRNA sense strand
uagagacaauuacuucaga

SEQ ID NO: 930630 - RNA, 19 nt, Homo sapiens
  misc_RNA (1)...(19): siRNA sense strand
ggagaaacugaagcacuua

SEQ ID NO: 930631 - RNA, 19 nt, Homo sapiens
  misc_RNA (1)...(19): siRNA sense strand
ucaagggagugguauuuua

SEQ ID NO: 930632 - RNA, 19 nt, Homo sapiens
  misc_RNA (1)...(19): siRNA sense strand
aauaauccacgcuuugaua

SEQ ID NO: 930633 - RNA, 19 nt, Homo sapiens
  misc_RNA (1)...(19): siRNA sense strand
gugcacaacuccucugucu

SEQ ID NO: 930634 - RNA, 19 nt, Homo sapiens
  misc_RNA (1)...(19): siRNA sense strand
uggcaucaguaccuucuaa

SEQ ID NO: 930635 - RNA, 19 nt, Homo sapiens
  misc_RNA (1)...(19): siRNA sense strand
ggaucuugaugccaaucua

SEQ ID NO: 930636 - RNA, 19 nt, Homo sapiens
  misc_RNA (1)...(19): siRNA sense strand
ucagauuccuugggauaaa

SEQ ID NO: 930637 - RNA, 19 nt, Homo sapiens
  misc_RNA (1)...(19): siRNA sense strand
guucagauuccuugggaua

SEQ ID NO: 930638 - RNA, 19 nt, Homo sapiens
  misc_RNA (1)...(19): siRNA sense strand
caauugaguaugauucuga

SEQ ID NO: 930639 - RNA, 19 nt, Homo sapiens
  misc_RNA (1)...(19): siRNA sense strand
gaggacacacagaguauug

SEQ ID NO: 930640 - RNA, 19 nt, Homo sapiens
  misc_RNA (1)...(19): siRNA sense strand
gaaaggaugaaacagaucu

SEQ ID NO: 930641 - RNA, 19 nt, Homo sapiens
  misc_RNA (1)...(19): siRNA sense strand
gacuauaucaggcguuauu

SEQ ID NO: 930642 - RNA, 19 nt, Homo sapiens
  misc_RNA (1)...(19): siRNA sense strand
gaagagcuagguuuugaua

SEQ ID NO: 930643 - RNA, 19 nt, Homo sapiens
  misc_RNA (1)...(19): siRNA sense strand
caaccgccucuaacuuaua

SEQ ID NO: 930644 - RNA, 19 nt, Homo sapiens
  misc_RNA (1)...(19): siRNA sense strand
guagaagucauuguaagaa

SEQ ID NO: 930645 - RNA, 19 nt, Homo sapiens
  misc_RNA (1)...(19): siRNA sense strand
ugaugaccaugaugagaaa

SEQ ID NO: 930646 - RNA, 19 nt, Homo sapiens
  misc_RNA (1)...(19): siRNA sense strand
gaguauugguccuaaaguc

SEQ ID NO: 930647 - RNA, 19 nt, Homo sapiens
  misc_RNA (1)...(19): siRNA sense strand
ucgaaaggaugaaacagau

SEQ ID NO: 930648 - RNA, 19 nt, Homo sapiens
  misc_RNA (1)...(19): siRNA sense strand
uuauuugccuguccuaaga

SEQ ID NO: 930649 - RNA, 19 nt, Homo sapiens
  misc_RNA (1)...(19): siRNA sense strand
gacaagaucauagaacuca

SEQ ID NO: 930650 - RNA, 19 nt, Homo sapiens
  misc_RNA (1)...(19): siRNA sense strand
caaacuaacagaucucuac

SEQ ID NO: 930651 - RNA, 19 nt, Homo sapiens
  misc_RNA (1)...(19): siRNA sense strand
gaaauauggagucccuuca

SEQ ID NO: 930652 - RNA, 19 nt, Homo sapiens
  misc_RNA (1)...(19): siRNA sense strand
gacaggcuuuccauggauu

SEQ ID NO: 930653 - RNA, 19 nt, Homo sapiens
  misc_RNA (1)...(19): siRNA sense strand
ucaguaccuucuaauccua

SEQ ID NO: 930654 - RNA, 19 nt, Homo sapiens
  misc_RNA (1)...(19): siRNA sense strand
gaauaucgaaaggaugaaa

SEQ ID NO: 930655 - RNA, 19 nt, Homo sapiens
  misc_RNA (1)...(19): siRNA sense strand
ucacugcuauugcccuguu

SEQ ID NO: 930656 - RNA, 19 nt, Homo sapiens
  misc_RNA (1)...(19): siRNA sense strand
aauggaaccacuagagaua

SEQ ID NO: 930657 - RNA, 19 nt, Homo sapiens
  misc_RNA (1)...(19): siRNA sense strand
gaaggaaugaagguauuug

SEQ ID NO: 930658 - RNA, 19 nt, Homo sapiens
  misc_RNA (1)...(19): siRNA sense strand
aaccgccucuaacuuauaa

SEQ ID NO: 930659 - RNA, 19 nt, Homo sapiens
  misc_RNA (1)...(19): siRNA sense strand
gaaacccuaucuguguuca

SEQ ID NO: 930660 - RNA, 19 nt, Homo sapiens
  misc_RNA (1)...(19): siRNA sense strand
auacagcagcaacaaauaa

SEQ ID NO: 930661 - RNA, 19 nt, Homo sapiens
  misc_RNA (1)...(19): siRNA sense strand
uuugaaagaccucgaauga

SEQ ID NO: 930662 - RNA, 19 nt, Homo sapiens
  misc_RNA (1)...(19): siRNA sense strand
uggagucccuucacuggaa

SEQ ID NO: 930663 - RNA, 19 nt, Homo sapiens
  misc_RNA (1)...(19): siRNA sense strand
ugaccaugaugagaaauau

SEQ ID NO: 930664 - RNA, 19 nt, Homo sapiens
  misc_RNA (1)...(19): siRNA sense strand
uggaguagaagucauugua

SEQ ID NO: 930665 - RNA, 19 nt, Homo sapiens
  misc_RNA (1)...(19): siRNA sense strand
ggaagaggacacacagagu

SEQ ID NO: 930666 - RNA, 19 nt, Homo sapiens
  misc_RNA (1)...(19): siRNA sense strand
aucagcagcuuucacgaua

SEQ ID NO: 930667 - RNA, 19 nt, Homo sapiens
  misc_RNA (1)...(19): siRNA sense strand
uagacaagaucauagaacu

SEQ ID NO: 930668 - RNA, 19 nt, Homo sapiens
  misc_RNA (1)...(19): siRNA sense strand
ugaccuagacaagaucaua

SEQ ID NO: 930669 - RNA, 19 nt, Homo sapiens
  misc_RNA (1)...(19): siRNA sense strand
guaugauucugagcccuuu

SEQ ID NO: 930670 - RNA, 19 nt, Homo sapiens
  misc_RNA (1)...(19): siRNA sense strand
ggagaacagaucccaaugg

SEQ ID NO: 930671 - RNA, 19 nt, Homo sapiens
  misc_RNA (1)...(19): siRNA sense strand
ccgauuugguuguuuguca

SEQ ID NO: 930672 - RNA, 19 nt, Homo sapiens
  misc_RNA (1)...(19): siRNA sense strand
cggacaggcuuuccaugga

SEQ ID NO: 930673 - RNA, 19 nt, Homo sapiens
  misc_RNA (1)...(19): siRNA sense strand
caggaggguuggauucauc

SEQ ID NO: 930674 - RNA, 19 nt, Homo sapiens
  misc_RNA (1)...(19): siRNA sense strand
aacaaauaauccacgcuuu

SEQ ID NO: 930675 - RNA, 19 nt, Homo sapiens
  misc_RNA (1)...(19): siRNA sense strand
gguuguagcagcaguggaa

SEQ ID NO: 930676 - RNA, 19 nt, Homo sapiens
  misc_RNA (1)...(19): siRNA sense strand
gcaccagaagguauccaaa

SEQ ID NO: 930677 - RNA, 19 nt, Homo sapiens
  misc_RNA (1)...(19): siRNA sense strand
aaggaaacccuaucugugu

SEQ ID NO: 930678 - RNA, 19 nt, Homo sapiens
  misc_RNA (1)...(19): siRNA sense strand
gguggacaaccgccucuaa

SEQ ID NO: 930679 - RNA, 19 nt, Homo sapiens
  misc_RNA (1)...(19): siRNA sense strand
guccuaaaguccagagaca

SEQ ID NO: 930680 - RNA, 19 nt, Homo sapiens
  misc_RNA (1)...(19): siRNA sense strand
uauacagcagcaacaaaua

SEQ ID NO: 930681 - RNA, 19 nt, Homo sapiens
  misc_RNA (1)...(19): siRNA sense strand
agagacaauuacuucagaa

SEQ ID NO: 930682 - RNA, 19 nt, Homo sapiens
  misc_RNA (1)...(19): siRNA sense strand
cagagacagagcacuaauu

SEQ ID NO: 930683 - RNA, 19 nt, Homo sapiens
  misc_RNA (1)...(19): siRNA sense strand
gaacagacgcuauaagacu

SEQ ID NO: 930684 - RNA, 19 nt, Homo sapiens
  misc_RNA (1)...(19): siRNA sense strand
uaacagcuauccuuacuac

SEQ ID NO: 930685 - RNA, 19 nt, Homo sapiens
  misc_RNA (1)...(19): siRNA sense strand
gcuauaagacuaagcgaaa

SEQ ID NO: 930686 - RNA, 19 nt, Homo sapiens
  misc_RNA (1)...(19): siRNA sense strand
gagaagcacuccucuuugc

SEQ ID NO: 930687 - RNA, 19 nt, Homo sapiens
  misc_RNA (1)...(19): siRNA sense strand
gcagagaccgagccagaaa

SEQ ID NO: 930688 - RNA, 19 nt, Homo sapiens
  misc_RNA (1)...(19): siRNA sense strand
cagaacagacgcuauaaga

SEQ ID NO: 930689 - RNA, 19 nt, Homo sapiens
  misc_RNA (1)...(19): siRNA sense strand
ccaagccgcucacguccuu

SEQ ID NO: 930690 - RNA, 19 nt, Homo sapiens
  misc_RNA (1)...(19): siRNA sense strand
uauaacagcuauccuuacu

SEQ ID NO: 930691 - RNA, 19 nt, Homo sapiens
  misc_RNA (1)...(19): siRNA sense strand
aacagacgcuauaagacua

SEQ ID NO: 930692 - RNA, 19 nt, Homo sapiens
  misc_RNA (1)...(19): siRNA sense strand
gaaguucagccaucagaag

SEQ ID NO: 930693 - RNA, 19 nt, Homo sapiens
  misc_RNA (1)...(19): siRNA sense strand
uguauaacagcuauccuua

SEQ ID NO: 930694 - RNA, 19 nt, Homo sapiens
  misc_RNA (1)...(19): siRNA sense strand
ccucggagcugggagacuu

SEQ ID NO: 930695 - RNA, 19 nt, Homo sapiens
  misc_RNA (1)...(19): siRNA sense strand
ggagacccaagugaagaua

SEQ ID NO: 930696 - RNA, 19 nt, Homo sapiens
  misc_RNA (1)...(19): siRNA sense strand
agacccaagugaagauaug

SEQ ID NO: 930697 - RNA, 19 nt, Homo sapiens
  misc_RNA (1)...(19): siRNA sense strand
ggaaguucagccaucagaa

SEQ ID NO: 930698 - RNA, 19 nt, Homo sapiens
  misc_RNA (1)...(19): siRNA sense strand
ugaucgaguuggagaggaa

SEQ ID NO: 930699 - RNA, 19 nt, Homo sapiens
  misc_RNA (1)...(19): siRNA sense strand
agaggaaguucagccauca

SEQ ID NO: 930700 - RNA, 19 nt, Homo sapiens
  misc_RNA (1)...(19): siRNA sense strand
gcucacguccuuccucauc

SEQ ID NO: 930701 - RNA, 19 nt, Homo sapiens
  misc_RNA (1)...(19): siRNA sense strand
gaaaggcacuuggggucuu

SEQ ID NO: 930702 - RNA, 19 nt, Homo sapiens
  misc_RNA (1)...(19): siRNA sense strand
gcacgagcagccagagaca

SEQ ID NO: 930703 - RNA, 19 nt, Homo sapiens
  misc_RNA (1)...(19): siRNA sense strand
guucagccaucagaaguac

SEQ ID NO: 930704 - RNA, 19 nt, Homo sapiens
  misc_RNA (1)...(19): siRNA sense strand
ucccuggucuccguguaua

SEQ ID NO: 930705 - RNA, 19 nt, Homo sapiens
  misc_RNA (1)...(19): siRNA sense strand
uuccagaacagacgcuaua

SEQ ID NO: 930706 - RNA, 19 nt, Homo sapiens
  misc_RNA (1)...(19): siRNA sense strand
guguauaacagcuauccuu

SEQ ID NO: 930707 - RNA, 19 nt, Homo sapiens
  misc_RNA (1)...(19): siRNA sense strand
ugaaagaggaggccuucuc

SEQ ID NO: 930708 - RNA, 19 nt, Homo sapiens
  misc_RNA (1)...(19): siRNA sense strand
ugggagacuuggagaagca

SEQ ID NO: 930709 - RNA, 19 nt, Homo sapiens
  misc_RNA (1)...(19): siRNA sense strand
gagacccaagugaagauau

SEQ ID NO: 930710 - RNA, 19 nt, Homo sapiens
  misc_RNA (1)...(19): siRNA sense strand
gcuauccuuacuacccaua

SEQ ID NO: 930711 - RNA, 19 nt, Homo sapiens
  misc_RNA (1)...(19): siRNA sense strand
guauaacagcuauccuuac

SEQ ID NO: 930712 - RNA, 19 nt, Homo sapiens
  misc_RNA (1)...(19): siRNA sense strand
gaagagaaauggucccuua

SEQ ID NO: 930713 - RNA, 19 nt, Homo sapiens
  misc_RNA (1)...(19): siRNA sense strand
gaaauucccugaccaaaga

SEQ ID NO: 930714 - RNA, 19 nt, Homo sapiens
  misc_RNA (1)...(19): siRNA sense strand
gcauauaccuguaaacuga

SEQ ID NO: 930715 - RNA, 19 nt, Homo sapiens
  misc_RNA (1)...(19): siRNA sense strand
gcaaaaggcucaucaguua

SEQ ID NO: 930716 - RNA, 19 nt, Homo sapiens
  misc_RNA (1)...(19): siRNA sense strand
gcaaggagcugaucgaucu

SEQ ID NO: 930717 - RNA, 19 nt, Homo sapiens
  misc_RNA (1)...(19): siRNA sense strand
gagaaaagcuggugacuaa

SEQ ID NO: 930718 - RNA, 19 nt, Homo sapiens
  misc_RNA (1)...(19): siRNA sense strand
ggacuucccugauaauugu

SEQ ID NO: 930719 - RNA, 19 nt, Homo sapiens
  misc_RNA (1)...(19): siRNA sense strand
ggagaacacugcacuuaug

SEQ ID NO: 930720 - RNA, 19 nt, Homo sapiens
  misc_RNA (1)...(19): siRNA sense strand
gaagggcaguauuucauuu

SEQ ID NO: 930721 - RNA, 19 nt, Homo sapiens
  misc_RNA (1)...(19): siRNA sense strand
gaggagaucaugcaaauuu

SEQ ID NO: 930722 - RNA, 19 nt, Homo sapiens
  misc_RNA (1)...(19): siRNA sense strand
gcaacaacauauugagaaa

SEQ ID NO: 930723 - RNA, 19 nt, Homo sapiens
  misc_RNA (1)...(19): siRNA sense strand
gcaaggaccugaaggaucu

SEQ ID NO: 930724 - RNA, 19 nt, Homo sapiens
  misc_RNA (1)...(19): siRNA sense strand
gcuggugacuaaauucuua

SEQ ID NO: 930725 - RNA, 19 nt, Homo sapiens
  misc_RNA (1)...(19): siRNA sense strand
ggacuucaauaucgcagua

SEQ ID NO: 930726 - RNA, 19 nt, Homo sapiens
  misc_RNA (1)...(19): siRNA sense strand
ggagauuucuaguuuauuc

SEQ ID NO: 930727 - RNA, 19 nt, Homo sapiens
  misc_RNA (1)...(19): siRNA sense strand
ugagaaagaugaggaaauu

SEQ ID NO: 930728 - RNA, 19 nt, Homo sapiens
  misc_RNA (1)...(19): siRNA sense strand
cgacuaccuuugcuucuua

SEQ ID NO: 930729 - RNA, 19 nt, Homo sapiens
  misc_RNA (1)...(19): siRNA sense strand
cuucgaagaucuuguauuu

SEQ ID NO: 930730 - RNA, 19 nt, Homo sapiens
  misc_RNA (1)...(19): siRNA sense strand
gaagacuuguguuuagaaa

SEQ ID NO: 930731 - RNA, 19 nt, Homo sapiens
  misc_RNA (1)...(19): siRNA sense strand
gaaagacacuaccaacaag

SEQ ID NO: 930732 - RNA, 19 nt, Homo sapiens
  misc_RNA (1)...(19): siRNA sense strand
guggauaucuuaaagcaaa

SEQ ID NO: 930733 - RNA, 19 nt, Homo sapiens
  misc_RNA (1)...(19): siRNA sense strand
ugaaggaucuguuugaugu

SEQ ID NO: 930734 - RNA, 19 nt, Homo sapiens
  misc_RNA (1)...(19): siRNA sense strand
gaauacgacucucaugguu

SEQ ID NO: 930735 - RNA, 19 nt, Homo sapiens
  misc_RNA (1)...(19): siRNA sense strand
gaauucaacuggaacuaga

SEQ ID NO: 930736 - RNA, 19 nt, Homo sapiens
  misc_RNA (1)...(19): siRNA sense strand
ucaagaagcucaccaaguc

SEQ ID NO: 930737 - RNA, 19 nt, Homo sapiens
  misc_RNA (1)...(19): siRNA sense strand
gcaaggcugucgaagugua

SEQ ID NO: 930738 - RNA, 19 nt, Homo sapiens
  misc_RNA (1)...(19): siRNA sense strand
gaggaagacuuguguuuag

SEQ ID NO: 930739 - RNA, 19 nt, Homo sapiens
  misc_RNA (1)...(19): siRNA sense strand
ccagagcccuuuaccguuu

SEQ ID NO: 930740 - RNA, 19 nt, Homo sapiens
  misc_RNA (1)...(19): siRNA sense strand
ggaagugguugaagccauu

SEQ ID NO: 930741 - RNA, 19 nt, Homo sapiens
  misc_RNA (1)...(19): siRNA sense strand
uuucagagcuucaugguuu

SEQ ID NO: 930742 - RNA, 19 nt, Homo sapiens
  misc_RNA (1)...(19): siRNA sense strand
gaugagaacaguaaugaaa

SEQ ID NO: 930743 - RNA, 19 nt, Homo sapiens
  misc_RNA (1)...(19): siRNA sense strand
gaucuuguauuucuucguu

SEQ ID NO: 930744 - RNA, 19 nt, Homo sapiens
  misc_RNA (1)...(19): siRNA sense strand
ggaguuacauagaucagaa

SEQ ID NO: 930745 - RNA, 19 nt, Homo sapiens
  misc_RNA (1)...(19): siRNA sense strand
ggagcgauccacuuuguua

SEQ ID NO: 930746 - RNA, 19 nt, Homo sapiens
  misc_RNA (1)...(19): siRNA sense strand
cauaagcacuaccaagaaa

SEQ ID NO: 930747 - RNA, 19 nt, Homo sapiens
  misc_RNA (1)...(19): siRNA sense strand
uaacucugcuugcaacaaa

SEQ ID NO: 930748 - RNA, 19 nt, Homo sapiens
  misc_RNA (1)...(19): siRNA sense strand
gagaagagaagaaacagaa

SEQ ID NO: 930749 - RNA, 19 nt, Homo sapiens
  misc_RNA (1)...(19): siRNA sense strand
caagacaucaaaccuguua

SEQ ID NO: 930750 - RNA, 19 nt, Homo sapiens
  misc_RNA (1)...(19): siRNA sense strand
gcacaucccuggcuguaag

SEQ ID NO: 930751 - RNA, 19 nt, Homo sapiens
  misc_RNA (1)...(19): siRNA sense strand
ccaaaggacuucaauaucg

SEQ ID NO: 930752 - RNA, 19 nt, Homo sapiens
  misc_RNA (1)...(19): siRNA sense strand
gaaacaaccauuccagaga

SEQ ID NO: 930753 - RNA, 19 nt, Homo sapiens
  misc_RNA (1)...(19): siRNA sense strand
gaccacagacaacagauua

SEQ ID NO: 930754 - RNA, 19 nt, Homo sapiens
  misc_RNA (1)...(19): siRNA sense strand
gccaaagauucucucaaua

SEQ ID NO: 930755 - RNA, 19 nt, Homo sapiens
  misc_RNA (1)...(19): siRNA sense strand
uggaagagguggugaaaga

SEQ ID NO: 930756 - RNA, 19 nt, Homo sapiens
  misc_RNA (1)...(19): siRNA sense strand
cagcagaccuuaugcaaag

SEQ ID NO: 930757 - RNA, 19 nt, Homo sapiens
  misc_RNA (1)...(19): siRNA sense strand
gaaaauuccucuggcaaua

SEQ ID NO: 930758 - RNA, 19 nt, Homo sapiens
  misc_RNA (1)...(19): siRNA sense strand
gaugaucucccuuuacauu

SEQ ID NO: 930759 - RNA, 19 nt, Homo sapiens
  misc_RNA (1)...(19): siRNA sense strand
ggauaaagaaagcagauaa

SEQ ID NO: 930760 - RNA, 19 nt, Homo sapiens
  misc_RNA (1)...(19): siRNA sense strand
gagaaggaguccacuguca

SEQ ID NO: 930761 - RNA, 19 nt, Homo sapiens
  misc_RNA (1)...(19): siRNA sense strand
ugugacaccuugaaugaua

SEQ ID NO: 930762 - RNA, 19 nt, Homo sapiens
  misc_RNA (1)...(19): siRNA sense strand
ugacagagaaguuaagaaa

SEQ ID NO: 930763 - RNA, 19 nt, Homo sapiens
  misc_RNA (1)...(19): siRNA sense strand
gaucucccuuuacauuuaa

SEQ ID NO: 930764 - RNA, 19 nt, Homo sapiens
  misc_RNA (1)...(19): siRNA sense strand
ugaucucccuuuacauuua

SEQ ID NO: 930765 - RNA, 19 nt, Homo sapiens
  misc_RNA (1)...(19): siRNA sense strand
ggaacugggagaagaauuu

SEQ ID NO: 930766 - RNA, 19 nt, Homo sapiens
  misc_RNA (1)...(19): siRNA sense strand
ccagguuucugauggauaa

SEQ ID NO: 930767 - RNA, 19 nt, Homo sapiens
  misc_RNA (1)...(19): siRNA sense strand
acaccaaccugacaauuga

SEQ ID NO: 930768 - RNA, 19 nt, Homo sapiens
  misc_RNA (1)...(19): siRNA sense strand
gcuguaaggugguuccauu

SEQ ID NO: 930769 - RNA, 19 nt, Homo sapiens
  misc_RNA (1)...(19): siRNA sense strand
gcacaaugcccuugaagau

SEQ ID NO: 930770 - RNA, 19 nt, Homo sapiens
  misc_RNA (1)...(19): siRNA sense strand
gaaguugacagaagaaugu

SEQ ID NO: 930771 - RNA, 19 nt, Homo sapiens
  misc_RNA (1)...(19): siRNA sense strand
uuagaacucccaaauguua

SEQ ID NO: 930772 - RNA, 19 nt, Homo sapiens
  misc_RNA (1)...(19): siRNA sense strand
ggacgaauaugauuaugac

SEQ ID NO: 930773 - RNA, 19 nt, Homo sapiens
  misc_RNA (1)...(19): siRNA sense strand
gagcacaucucugggcauu

SEQ ID NO: 930774 - RNA, 19 nt, Homo sapiens
  misc_RNA (1)...(19): siRNA sense strand
ugagaagguugacauggua

SEQ ID NO: 930775 - RNA, 19 nt, Homo sapiens
  misc_RNA (1)...(19): siRNA sense strand
ccuguaaacugauggaauu

SEQ ID NO: 930776 - RNA, 19 nt, Homo sapiens
  misc_RNA (1)...(19): siRNA sense strand
gagcaagagcagacuauuu

SEQ ID NO: 930777 - RNA, 19 nt, Homo sapiens
  misc_RNA (1)...(19): siRNA sense strand
gcucagaggaggagaguuu

SEQ ID NO: 930778 - RNA, 19 nt, Homo sapiens
  misc_RNA (1)...(19): siRNA sense strand
ccaggacugucaacucuaa

SEQ ID NO: 930779 - RNA, 19 nt, Homo sapiens
  misc_RNA (1)...(19): siRNA sense strand
acagagaaguuaagaaauc

SEQ ID NO: 930780 - RNA, 19 nt, Homo sapiens
  misc_RNA (1)...(19): siRNA sense strand
caagugaacucaagaagcu

SEQ ID NO: 930781 - RNA, 19 nt, Homo sapiens
  misc_RNA (1)...(19): siRNA sense strand
guacaauucccaagaagaa

SEQ ID NO: 930782 - RNA, 19 nt, Homo sapiens
  misc_RNA (1)...(19): siRNA sense strand
uuacauagaucagaagaga

SEQ ID NO: 930783 - RNA, 19 nt, Homo sapiens
  misc_RNA (1)...(19): siRNA sense strand
gaacacugcacuuaugaug

SEQ ID NO: 930784 - RNA, 19 nt, Homo sapiens
  misc_RNA (1)...(19): siRNA sense strand
ggacuuacaucaccuucuc

SEQ ID NO: 930785 - RNA, 19 nt, Homo sapiens
  misc_RNA (1)...(19): siRNA sense strand
gcagaaggauggaagaaaa

SEQ ID NO: 930786 - RNA, 19 nt, Homo sapiens
  misc_RNA (1)...(19): siRNA sense strand
acacugcacuuaugaugaa

SEQ ID NO: 930787 - RNA, 19 nt, Homo sapiens
  misc_RNA (1)...(19): siRNA sense strand
gagaaauggucccuuacug

SEQ ID NO: 930788 - RNA, 19 nt, Homo sapiens
  misc_RNA (1)...(19): siRNA sense strand
ugcgaaaccuucacaauga

SEQ ID NO: 930789 - RNA, 19 nt, Homo sapiens
  misc_RNA (1)...(19): siRNA sense strand
gacgaaugaugcugaaaga

SEQ ID NO: 930790 - RNA, 19 nt, Homo sapiens
  misc_RNA (1)...(19): siRNA sense strand
aaagagaucuggacagcau

SEQ ID NO: 930791 - RNA, 19 nt, Homo sapiens
  misc_RNA (1)...(19): siRNA sense strand
cauaccaucucacaacuga

SEQ ID NO: 930792 - RNA, 19 nt, Homo sapiens
  misc_RNA (1)...(19): siRNA sense strand
gcacaucucugggcauuuu

SEQ ID NO: 930793 - RNA, 19 nt, Homo sapiens
  misc_RNA (1)...(19): siRNA sense strand
ggugauagcuuuuguagga

SEQ ID NO: 930794 - RNA, 19 nt, Homo sapiens
  misc_RNA (1)...(19): siRNA sense strand
gcaacaaaggaaagguuua

SEQ ID NO: 930795 - RNA, 19 nt, Homo sapiens
  misc_RNA (1)...(19): siRNA sense strand
agacagaccugaaaauaaa

SEQ ID NO: 930796 - RNA, 19 nt, Homo sapiens
  misc_RNA (1)...(19): siRNA sense strand
ucucagacaucaauauuuc

SEQ ID NO: 930797 - RNA, 19 nt, Homo sapiens
  misc_RNA (1)...(19): siRNA sense strand
cgauggcaguuuauaauug

SEQ ID NO: 930798 - RNA, 19 nt, Homo sapiens
  misc_RNA (1)...(19): siRNA sense strand
cagcagaagggcaguauuu

SEQ ID NO: 930799 - RNA, 19 nt, Homo sapiens
  misc_RNA (1)...(19): siRNA sense strand
ccagugacacaauggauua

SEQ ID NO: 930800 - RNA, 19 nt, Homo sapiens
  misc_RNA (1)...(19): siRNA sense strand
gaaugaauguaggaaacaa

SEQ ID NO: 930801 - RNA, 19 nt, Homo sapiens
  misc_RNA (1)...(19): siRNA sense strand
ucgaagaucuuguauuucu

SEQ ID NO: 930802 - RNA, 19 nt, Homo sapiens
  misc_RNA (1)...(19): siRNA sense strand
ggaacgagcaguuucuguu

SEQ ID NO: 930803 - RNA, 19 nt, Homo sapiens
  misc_RNA (1)...(19): siRNA sense strand
gagccuagcaucaguaugu

SEQ ID NO: 930804 - RNA, 19 nt, Homo sapiens
  misc_RNA (1)...(19): siRNA sense strand
gcagaugaaaguagugaaa

SEQ ID NO: 930805 - RNA, 19 nt, Homo sapiens
  misc_RNA (1)...(19): siRNA sense strand
gaucaaaggcggcaugaag

SEQ ID NO: 930806 - RNA, 19 nt, Homo sapiens
  misc_RNA (1)...(19): siRNA sense strand
gcauugauauacacacugu

SEQ ID NO: 930807 - RNA, 19 nt, Homo sapiens
  misc_RNA (1)...(19): siRNA sense strand
gagauuuguuggauucaga

SEQ ID NO: 930808 - RNA, 19 nt, Homo sapiens
  misc_RNA (1)...(19): siRNA sense strand
ggagaagcgagaagucuuu

SEQ ID NO: 930809 - RNA, 19 nt, Homo sapiens
  misc_RNA (1)...(19): siRNA sense strand
ccaaagauucucucaauag

SEQ ID NO: 930810 - RNA, 19 nt, Homo sapiens
  misc_RNA (1)...(19): siRNA sense strand
gcauuucuuucgcaaguga

SEQ ID NO: 930811 - RNA, 19 nt, Homo sapiens
  misc_RNA (1)...(19): siRNA sense strand
gaagaggagaucaugcaaa

SEQ ID NO: 930812 - RNA, 19 nt, Homo sapiens
  misc_RNA (1)...(19): siRNA sense strand
gaaagaagccuaaggaaua

SEQ ID NO: 930813 - RNA, 19 nt, Homo sapiens
  misc_RNA (1)...(19): siRNA sense strand
gaagaugacucaacaauau

SEQ ID NO: 930814 - RNA, 19 nt, Homo sapiens
  misc_RNA (1)...(19): siRNA sense strand
gagaacauuuccaguauua

SEQ ID NO: 930815 - RNA, 19 nt, Homo sapiens
  misc_RNA (1)...(19): siRNA sense strand
gaaaggauacccagaguua

SEQ ID NO: 930816 - RNA, 19 nt, Homo sapiens
  misc_RNA (1)...(19): siRNA sense strand
gaaacacaguucagaauuu

SEQ ID NO: 930817 - RNA, 19 nt, Homo sapiens
  misc_RNA (1)...(19): siRNA sense strand
gaucucagcugaaccaauu

SEQ ID NO: 930818 - RNA, 19 nt, Homo sapiens
  misc_RNA (1)...(19): siRNA sense strand
cacaagagcuguuauuuau

SEQ ID NO: 930819 - RNA, 19 nt, Homo sapiens
  misc_RNA (1)...(19): siRNA sense strand
gagggaaguuugagugaua

SEQ ID NO: 930820 - RNA, 19 nt, Homo sapiens
  misc_RNA (1)...(19): siRNA sense strand
gaaggagaguuucuuaaug

SEQ ID NO: 930821 - RNA, 19 nt, Homo sapiens
  misc_RNA (1)...(19): siRNA sense strand
gcagaggauucccaaagua

SEQ ID NO: 930822 - RNA, 19 nt, Homo sapiens
  misc_RNA (1)...(19): siRNA sense strand
agagaaggcuuagaaauaa

SEQ ID NO: 930823 - RNA, 19 nt, Homo sapiens
  misc_RNA (1)...(19): siRNA sense strand
gaauugaagcugaaagaua

SEQ ID NO: 930824 - RNA, 19 nt, Homo sapiens
  misc_RNA (1)...(19): siRNA sense strand
gaacuaccauugauuacau

SEQ ID NO: 930825 - RNA, 19 nt, Homo sapiens
  misc_RNA (1)...(19): siRNA sense strand
ggaauaaagucaucucucu

SEQ ID NO: 930826 - RNA, 19 nt, Homo sapiens
  misc_RNA (1)...(19): siRNA sense strand
gagcucaucuugaaacuuc

SEQ ID NO: 930827 - RNA, 19 nt, Homo sapiens
  misc_RNA (1)...(19): siRNA sense strand
gaaguaagacaguagauga

SEQ ID NO: 930828 - RNA, 19 nt, Homo sapiens
  misc_RNA (1)...(19): siRNA sense strand
gaacggaguuaggaagaaa

SEQ ID NO: 930829 - RNA, 19 nt, Homo sapiens
  misc_RNA (1)...(19): siRNA sense strand
gaugauggcauuucucuuu

SEQ ID NO: 930830 - RNA, 19 nt, Homo sapiens
  misc_RNA (1)...(19): siRNA sense strand
guucagaaguugauuguau

SEQ ID NO: 930831 - RNA, 19 nt, Homo sapiens
  misc_RNA (1)...(19): siRNA sense strand
gaagggaaccaaucacuga

SEQ ID NO: 930832 - RNA, 19 nt, Homo sapiens
  misc_RNA (1)...(19): siRNA sense strand
gaacuacacaauccuguuu

SEQ ID NO: 930833 - RNA, 19 nt, Homo sapiens
  misc_RNA (1)...(19): siRNA sense strand
ucacaagagcuguuauuua

SEQ ID NO: 930834 - RNA, 19 nt, Homo sapiens
  misc_RNA (1)...(19): siRNA sense strand
gagaagaauugaagcugaa

SEQ ID NO: 930835 - RNA, 19 nt, Homo sapiens
  misc_RNA (1)...(19): siRNA sense strand
caaaguaccgagucgaaua

SEQ ID NO: 930836 - RNA, 19 nt, Homo sapiens
  misc_RNA (1)...(19): siRNA sense strand
aaagaagccuaaggaauaa

SEQ ID NO: 930837 - RNA, 19 nt, Homo sapiens
  misc_RNA (1)...(19): siRNA sense strand
ggagaacauuuccaguauu

SEQ ID NO: 930838 - RNA, 19 nt, Homo sapiens
  misc_RNA (1)...(19): siRNA sense strand
gaaaggggcucacaacgaa

SEQ ID NO: 930839 - RNA, 19 nt, Homo sapiens
  misc_RNA (1)...(19): siRNA sense strand
caagagcuguuauuuaucu

SEQ ID NO: 930840 - RNA, 19 nt, Homo sapiens
  misc_RNA (1)...(19): siRNA sense strand
gggaguaacuaaugaagau

SEQ ID NO: 930841 - RNA, 19 nt, Homo sapiens
  misc_RNA (1)...(19): siRNA sense strand
gagaguuucuuaaugaugu

SEQ ID NO: 930842 - RNA, 19 nt, Homo sapiens
  misc_RNA (1)...(19): siRNA sense strand
aaggagaguuucuuaauga

SEQ ID NO: 930843 - RNA, 19 nt, Homo sapiens
  misc_RNA (1)...(19): siRNA sense strand
aagagaaggcuuagaaaua

SEQ ID NO: 930844 - RNA, 19 nt, Homo sapiens
  misc_RNA (1)...(19): siRNA sense strand
agaagaagcuguguaugaa

SEQ ID NO: 930845 - RNA, 19 nt, Homo sapiens
  misc_RNA (1)...(19): siRNA sense strand
gaacauuuccaguauuaug

SEQ ID NO: 930846 - RNA, 19 nt, Homo sapiens
  misc_RNA (1)...(19): siRNA sense strand
ggaaagaagccuaaggaau

SEQ ID NO: 930847 - RNA, 19 nt, Homo sapiens
  misc_RNA (1)...(19): siRNA sense strand
caacagaagggcagcagua

SEQ ID NO: 930848 - RNA, 19 nt, Homo sapiens
  misc_RNA (1)...(19): siRNA sense strand
aaacaaacaugguggaucu

SEQ ID NO: 930849 - RNA, 19 nt, Homo sapiens
  misc_RNA (1)...(19): siRNA sense strand
gagguagagugggaaguua

SEQ ID NO: 930850 - RNA, 19 nt, Homo sapiens
  misc_RNA (1)...(19): siRNA sense strand
gacaguagaugacaauucu

SEQ ID NO: 930851 - RNA, 19 nt, Homo sapiens
  misc_RNA (1)...(19): siRNA sense strand
ggagauaagaaagauguua

SEQ ID NO: 930852 - RNA, 19 nt, Homo sapiens
  misc_RNA (1)...(19): siRNA sense strand
augaagaucuggaguguuu

SEQ ID NO: 930853 - RNA, 19 nt, Homo sapiens
  misc_RNA (1)...(19): siRNA sense strand
ggauguccauguucaauca

SEQ ID NO: 930854 - RNA, 19 nt, Homo sapiens
  misc_RNA (1)...(19): siRNA sense strand
gaacaggaaagcagaaaca

SEQ ID NO: 930855 - RNA, 19 nt, Homo sapiens
  misc_RNA (1)...(19): siRNA sense strand
gaaacuucauuuacagcaa

SEQ ID NO: 930856 - RNA, 19 nt, Homo sapiens
  misc_RNA (1)...(19): siRNA sense strand
gauaaugaucuacguacua

SEQ ID NO: 930857 - RNA, 19 nt, Homo sapiens
  misc_RNA (1)...(19): siRNA sense strand
gagaaugaguugaauacca

SEQ ID NO: 930858 - RNA, 19 nt, Homo sapiens
  misc_RNA (1)...(19): siRNA sense strand
aaucaccacuguccaaauu

SEQ ID NO: 930859 - RNA, 19 nt, Homo sapiens
  misc_RNA (1)...(19): siRNA sense strand
acaagaagaugacucaaca

SEQ ID NO: 930860 - RNA, 19 nt, Homo sapiens
  misc_RNA (1)...(19): siRNA sense strand
ugagaguacuucugaauca

SEQ ID NO: 930861 - RNA, 19 nt, Homo sapiens
  misc_RNA (1)...(19): siRNA sense strand
gagaagacauaaaagagua

SEQ ID NO: 930862 - RNA, 19 nt, Homo sapiens
  misc_RNA (1)...(19): siRNA sense strand
gcacagagaagacauaaaa

SEQ ID NO: 930863 - RNA, 19 nt, Homo sapiens
  misc_RNA (1)...(19): siRNA sense strand
ccacugaaaccguugagua

SEQ ID NO: 930864 - RNA, 19 nt, Homo sapiens
  misc_RNA (1)...(19): siRNA sense strand
uagcagugauuguggagua

SEQ ID NO: 930865 - RNA, 19 nt, Homo sapiens
  misc_RNA (1)...(19): siRNA sense strand
uagaagaagcuguguauga

SEQ ID NO: 930866 - RNA, 19 nt, Homo sapiens
  misc_RNA (1)...(19): siRNA sense strand
acacuggacuuguucagaa

SEQ ID NO: 930867 - RNA, 19 nt, Homo sapiens
  misc_RNA (1)...(19): siRNA sense strand
ccaauuagaacacucugua

SEQ ID NO: 930868 - RNA, 19 nt, Homo sapiens
  misc_RNA (1)...(19): siRNA sense strand
gaauaaagucaucucucua

SEQ ID NO: 930869 - RNA, 19 nt, Homo sapiens
  misc_RNA (1)...(19): siRNA sense strand
gaagaaaugaagcugaaau

SEQ ID NO: 930870 - RNA, 19 nt, Homo sapiens
  misc_RNA (1)...(19): siRNA sense strand
ccaguauuaugccuaguaa

SEQ ID NO: 930871 - RNA, 19 nt, Homo sapiens
  misc_RNA (1)...(19): siRNA sense strand
gaguugacuuugaguaaug

SEQ ID NO: 930872 - RNA, 19 nt, Homo sapiens
  misc_RNA (1)...(19): siRNA sense strand
ggaaguagagguugugauc

SEQ ID NO: 930873 - RNA, 19 nt, Homo sapiens
  misc_RNA (1)...(19): siRNA sense strand
aagaaaggaugauggcauu

SEQ ID NO: 930874 - RNA, 19 nt, Homo sapiens
  misc_RNA (1)...(19): siRNA sense strand
gaaaucaucacagaaggaa

SEQ ID NO: 930875 - RNA, 19 nt, Homo sapiens
  misc_RNA (1)...(19): siRNA sense strand
gcucagcagucccaaagug

SEQ ID NO: 930876 - RNA, 19 nt, Homo sapiens
  misc_RNA (1)...(19): siRNA sense strand
ggaguugacuuugaguaau

SEQ ID NO: 930877 - RNA, 19 nt, Homo sapiens
  misc_RNA (1)...(19): siRNA sense strand
acaaagagaaggcuuagaa

SEQ ID NO: 930878 - RNA, 19 nt, Homo sapiens
  misc_RNA (1)...(19): siRNA sense strand
agaguuauauugacgaaug

SEQ ID NO: 930879 - RNA, 19 nt, Homo sapiens
  misc_RNA (1)...(19): siRNA sense strand
gcccuaaaguuccuaaaca

SEQ ID NO: 930880 - RNA, 19 nt, Homo sapiens
  misc_RNA (1)...(19): siRNA sense strand
aaaaggccauguauucuua

SEQ ID NO: 930881 - RNA, 19 nt, Homo sapiens
  misc_RNA (1)...(19): siRNA sense strand
aacauggacucgucacaua

SEQ ID NO: 930882 - RNA, 19 nt, Homo sapiens
  misc_RNA (1)...(19): siRNA sense strand
gaucuggaguguuuagaag

SEQ ID NO: 930883 - RNA, 19 nt, Homo sapiens
  misc_RNA (1)...(19): siRNA sense strand
gagaaggcuuagaaauaau

SEQ ID NO: 930884 - RNA, 19 nt, Homo sapiens
  misc_RNA (1)...(19): siRNA sense strand
gcaacuuucuucaucaucu

SEQ ID NO: 930885 - RNA, 19 nt, Homo sapiens
  misc_RNA (1)...(19): siRNA sense strand
ggaacggaguuaggaagaa

SEQ ID NO: 930886 - RNA, 19 nt, Homo sapiens
  misc_RNA (1)...(19): siRNA sense strand
cagagcaacuuucuucauc

SEQ ID NO: 930887 - RNA, 19 nt, Homo sapiens
  misc_RNA (1)...(19): siRNA sense strand
gaucuaugcccuaaaguuc

SEQ ID NO: 930888 - RNA, 19 nt, Homo sapiens
  misc_RNA (1)...(19): siRNA sense strand
gauugggaguaacuaauga

SEQ ID NO: 930889 - RNA, 19 nt, Homo sapiens
  misc_RNA (1)...(19): siRNA sense strand
gagcuguuauuuaucugaa

SEQ ID NO: 930890 - RNA, 19 nt, Homo sapiens
  misc_RNA (1)...(19): siRNA sense strand
gagaguauuuagagguaga

SEQ ID NO: 930891 - RNA, 19 nt, Homo sapiens
  misc_RNA (1)...(19): siRNA sense strand
ggaagaaaauacauaagga

SEQ ID NO: 930892 - RNA, 19 nt, Homo sapiens
  misc_RNA (1)...(19): siRNA sense strand
gcauuuccuuuguuucaga

SEQ ID NO: 930893 - RNA, 19 nt, Homo sapiens
  misc_RNA (1)...(19): siRNA sense strand
ucaggcauuuccuuuguuu

SEQ ID NO: 930894 - RNA, 19 nt, Homo sapiens
  misc_RNA (1)...(19): siRNA sense strand
uaccauugauuacauguga

SEQ ID NO: 930895 - RNA, 19 nt, Homo sapiens
  misc_RNA (1)...(19): siRNA sense strand
gaugagaaugaguugaaua

SEQ ID NO: 930896 - RNA, 19 nt, Homo sapiens
  misc_RNA (1)...(19): siRNA sense strand
ugaguacucuaauuccauu

SEQ ID NO: 930897 - RNA, 19 nt, Homo sapiens
  misc_RNA (1)...(19): siRNA sense strand
guaagacaguagaugacaa

SEQ ID NO: 930898 - RNA, 19 nt, Homo sapiens
  misc_RNA (1)...(19): siRNA sense strand
gaccaaacgggaagauauu

SEQ ID NO: 930899 - RNA, 19 nt, Homo sapiens
  misc_RNA (1)...(19): siRNA sense strand
cauccgaaaucaucacaga

SEQ ID NO: 930900 - RNA, 19 nt, Homo sapiens
  misc_RNA (1)...(19): siRNA sense strand
caaagagaaggcuuagaaa

SEQ ID NO: 930901 - RNA, 19 nt, Homo sapiens
  misc_RNA (1)...(19): siRNA sense strand
gaccuuaacaguggaagua

SEQ ID NO: 930902 - RNA, 19 nt, Homo sapiens
  misc_RNA (1)...(19): siRNA sense strand
guucaggcauuuccuuugu

SEQ ID NO: 930903 - RNA, 19 nt, Homo sapiens
  misc_RNA (1)...(19): siRNA sense strand
cgaaacacaguucagaauu

SEQ ID NO: 930904 - RNA, 19 nt, Homo sapiens
  misc_RNA (1)...(19): siRNA sense strand
gaagcuguguaugaagauu

SEQ ID NO: 930905 - RNA, 19 nt, Homo sapiens
  misc_RNA (1)...(19): siRNA sense strand
gagcaacuuucuucaucau

SEQ ID NO: 930906 - RNA, 19 nt, Homo sapiens
  misc_RNA (1)...(19): siRNA sense strand
cagaggauguccauguuca

SEQ ID NO: 930907 - RNA, 19 nt, Homo sapiens
  misc_RNA (1)...(19): siRNA sense strand
gaauaugucaguaccaaag

SEQ ID NO: 930908 - RNA, 19 nt, Homo sapiens
  misc_RNA (1)...(19): siRNA sense strand
aagaagcuguguaugaaga

SEQ ID NO: 930909 - RNA, 19 nt, Homo sapiens
  misc_RNA (1)...(19): siRNA sense strand
cauauaauccugucaugga

SEQ ID NO: 930910 - RNA, 19 nt, Homo sapiens
  misc_RNA (1)...(19): siRNA sense strand
caauuguuguuuccaguga

SEQ ID NO: 930911 - RNA, 19 nt, Homo sapiens
  misc_RNA (1)...(19): siRNA sense strand
caauauccacugaguuuga

SEQ ID NO: 930912 - RNA, 19 nt, Homo sapiens
  misc_RNA (1)...(19): siRNA sense strand
gcagaaagauuuguuauug

SEQ ID NO: 930913 - RNA, 19 nt, Homo sapiens
  misc_RNA (1)...(19): siRNA sense strand
gagaauaccugggcaaguu

SEQ ID NO: 930914 - RNA, 19 nt, Homo sapiens
  misc_RNA (1)...(19): siRNA sense strand
gaaagacuccuaccuuauu

SEQ ID NO: 930915 - RNA, 19 nt, Homo sapiens
  misc_RNA (1)...(19): siRNA sense strand
uagagucgcuuucaagaua

SEQ ID NO: 930916 - RNA, 19 nt, Homo sapiens
  misc_RNA (1)...(19): siRNA sense strand
ggaagucaauguccuuauu

SEQ ID NO: 930917 - RNA, 19 nt, Homo sapiens
  misc_RNA (1)...(19): siRNA sense strand
gaacagaucaaagcacuaa

SEQ ID NO: 930918 - RNA, 19 nt, Homo sapiens
  misc_RNA (1)...(19): siRNA sense strand
gaauauaugcgcuuucuga

SEQ ID NO: 930919 - RNA, 19 nt, Homo sapiens
  misc_RNA (1)...(19): siRNA sense strand
agaggugguuccagaauua

SEQ ID NO: 930920 - RNA, 19 nt, Homo sapiens
  misc_RNA (1)...(19): siRNA sense strand
gggaagcucuugagugugu

SEQ ID NO: 930921 - RNA, 19 nt, Homo sapiens
  misc_RNA (1)...(19): siRNA sense strand
gaagcagaaagauuuguua

SEQ ID NO: 930922 - RNA, 19 nt, Homo sapiens
  misc_RNA (1)...(19): siRNA sense strand
gagaggugguuccagaauu

SEQ ID NO: 930923 - RNA, 19 nt, Homo sapiens
  misc_RNA (1)...(19): siRNA sense strand
ggagagccauuucuucaag

SEQ ID NO: 930924 - RNA, 19 nt, Homo sapiens
  misc_RNA (1)...(19): siRNA sense strand
gaguaaggcugaucugaag

SEQ ID NO: 930925 - RNA, 19 nt, Homo sapiens
  misc_RNA (1)...(19): siRNA sense strand
uggagaagaugcucuaaga

SEQ ID NO: 930926 - RNA, 19 nt, Homo sapiens
  misc_RNA (1)...(19): siRNA sense strand
ggauguugguguagaagaa

SEQ ID NO: 930927 - RNA, 19 nt, Homo sapiens
  misc_RNA (1)...(19): siRNA sense strand
caaccagcgucaacuauca

SEQ ID NO: 930928 - RNA, 19 nt, Homo sapiens
  misc_RNA (1)...(19): siRNA sense strand
gaauuauggugaguauuug

SEQ ID NO: 930929 - RNA, 19 nt, Homo sapiens
  misc_RNA (1)...(19): siRNA sense strand
aagagaagcagaaagauuu

SEQ ID NO: 930930 - RNA, 19 nt, Homo sapiens
  misc_RNA (1)...(19): siRNA sense strand
ggaguaaggcugaucugaa

SEQ ID NO: 930931 - RNA, 19 nt, Homo sapiens
  misc_RNA (1)...(19): siRNA sense strand
augaaagacuccuaccuua

SEQ ID NO: 930932 - RNA, 19 nt, Homo sapiens
  misc_RNA (1)...(19): siRNA sense strand
gaugaaagacuccuaccuu

SEQ ID NO: 930933 - RNA, 19 nt, Homo sapiens
  misc_RNA (1)...(19): siRNA sense strand
acaaagaaguguccugcuu

SEQ ID NO: 930934 - RNA, 19 nt, Homo sapiens
  misc_RNA (1)...(19): siRNA sense strand
ccagaauuauggugaguau

SEQ ID NO: 930935 - RNA, 19 nt, Homo sapiens
  misc_RNA (1)...(19): siRNA sense strand
uaagagaagcagaaagauu

SEQ ID NO: 930936 - RNA, 19 nt, Homo sapiens
  misc_RNA (1)...(19): siRNA sense strand
ggacaugacggaacagauc

SEQ ID NO: 930937 - RNA, 19 nt, Homo sapiens
  misc_RNA (1)...(19): siRNA sense strand
gaggauugcuuuugcuuaa

SEQ ID NO: 930938 - RNA, 19 nt, Homo sapiens
  misc_RNA (1)...(19): siRNA sense strand
ggaugaauauaugcgcuuu

SEQ ID NO: 930939 - RNA, 19 nt, Homo sapiens
  misc_RNA (1)...(19): siRNA sense strand
ugacagcuuugacgaggaa

SEQ ID NO: 930940 - RNA, 19 nt, Homo sapiens
  misc_RNA (1)...(19): siRNA sense strand
caaaugcggcuucuguuuc

SEQ ID NO: 930941 - RNA, 19 nt, Homo sapiens
  misc_RNA (1)...(19): siRNA sense strand
uauaugcgcuuucugaacu

SEQ ID NO: 930942 - RNA, 19 nt, Homo sapiens
  misc_RNA (1)...(19): siRNA sense strand
cagaaagauuuguuauugg

SEQ ID NO: 930943 - RNA, 19 nt, Homo sapiens
  misc_RNA (1)...(19): siRNA sense strand
ggaggugguguagggauua

SEQ ID NO: 930944 - RNA, 19 nt, Homo sapiens
  misc_RNA (1)...(19): siRNA sense strand
cugggaagcucuugagugu

SEQ ID NO: 930945 - RNA, 19 nt, Homo sapiens
  misc_RNA (1)...(19): siRNA sense strand
ucuaagagaagcagaaaga

SEQ ID NO: 930946 - RNA, 19 nt, Homo sapiens
  misc_RNA (1)...(19): siRNA sense strand
ggugagguucugcaaagua

SEQ ID NO: 930947 - RNA, 19 nt, Homo sapiens
  misc_RNA (1)...(19): siRNA sense strand
aaagacuccuaccuuauuc

SEQ ID NO: 930948 - RNA, 19 nt, Homo sapiens
  misc_RNA (1)...(19): siRNA sense strand
uccagugccucuuaauuga

SEQ ID NO: 930949 - RNA, 19 nt, Homo sapiens
  misc_RNA (1)...(19): siRNA sense strand
cuacaaaugcggcuucugu

SEQ ID NO: 930950 - RNA, 19 nt, Homo sapiens
  misc_RNA (1)...(19): siRNA sense strand
ugaaagacuccuaccuuau

SEQ ID NO: 930951 - RNA, 19 nt, Homo sapiens
  misc_RNA (1)...(19): siRNA sense strand
ggaagcaaagagaggauug

SEQ ID NO: 930952 - RNA, 19 nt, Homo sapiens
  misc_RNA (1)...(19): siRNA sense strand
acaaaugcggcuucuguuu

SEQ ID NO: 930953 - RNA, 19 nt, Homo sapiens
  misc_RNA (1)...(19): siRNA sense strand
aaauacauauggaguaagg

SEQ ID NO: 930954 - RNA, 19 nt, Homo sapiens
  misc_RNA (1)...(19): siRNA sense strand
ggaaaauacauauggagua

SEQ ID NO: 930955 - RNA, 19 nt, Homo sapiens
  misc_RNA (1)...(19): siRNA sense strand
aaagaagaaccauguggaa

SEQ ID NO: 930956 - RNA, 19 nt, Homo sapiens
  misc_RNA (1)...(19): siRNA sense strand
ugagaauuguggagaagau

SEQ ID NO: 930957 - RNA, 19 nt, Homo sapiens
  misc_RNA (1)...(19): siRNA sense strand
guauggagaagaucaacuu

SEQ ID NO: 930958 - RNA, 19 nt, Homo sapiens
  misc_RNA (1)...(19): siRNA sense strand
gcuuggugccugaaucuaa

SEQ ID NO: 930959 - RNA, 19 nt, Homo sapiens
  misc_RNA (1)...(19): siRNA sense strand
gugagguucugcaaaguag

SEQ ID NO: 930960 - RNA, 19 nt, Homo sapiens
  misc_RNA (1)...(19): siRNA sense strand
ggccagaugagaccaaaga

SEQ ID NO: 930961 - RNA, 19 nt, Homo sapiens
  misc_RNA (1)...(19): siRNA sense strand
ggagaggugguuccagaau

SEQ ID NO: 930962 - RNA, 19 nt, Homo sapiens
  misc_RNA (1)...(19): siRNA sense strand
gcaaguuggugagguucug

SEQ ID NO: 930963 - RNA, 19 nt, Homo sapiens
  misc_RNA (1)...(19): siRNA sense strand
gugaguauuuggacauucu

SEQ ID NO: 930964 - RNA, 19 nt, Homo sapiens
  misc_RNA (1)...(19): siRNA sense strand
gggugagaauuguggagaa

SEQ ID NO: 930965 - RNA, 19 nt, Homo sapiens
  misc_RNA (1)...(19): siRNA sense strand
gagucgcuuucaagauaaa

SEQ ID NO: 930966 - RNA, 19 nt, Homo sapiens
  misc_RNA (1)...(19): siRNA sense strand
agagucgcuuucaagauaa

SEQ ID NO: 930967 - RNA, 19 nt, Homo sapiens
  misc_RNA (1)...(19): siRNA sense strand
gggauuauagagucgcuuu

SEQ ID NO: 930968 - RNA, 19 nt, Homo sapiens
  misc_RNA (1)...(19): siRNA sense strand
guggagagccauuucuuca

SEQ ID NO: 930969 - RNA, 19 nt, Homo sapiens
  misc_RNA (1)...(19): siRNA sense strand
aagaggacaugacggaaca

SEQ ID NO: 930970 - RNA, 19 nt, Homo sapiens
  misc_RNA (1)...(19): siRNA sense strand
gauuuguuauuggugauga

SEQ ID NO: 930971 - RNA, 19 nt, Homo sapiens
  misc_RNA (1)...(19): siRNA sense strand
uguuauuggugaugaagaa

SEQ ID NO: 930972 - RNA, 19 nt, Homo sapiens
  misc_RNA (1)...(19): siRNA sense strand
gauuauagagucgcuuuca

SEQ ID NO: 930973 - RNA, 19 nt, Homo sapiens
  misc_RNA (1)...(19): siRNA sense strand
ggaggaaaauacauaugga

SEQ ID NO: 930974 - RNA, 19 nt, Homo sapiens
  misc_RNA (1)...(19): siRNA sense strand
aagcugguauggagaagau

SEQ ID NO: 930975 - RNA, 19 nt, Homo sapiens
  misc_RNA (1)...(19): siRNA sense strand
gcuauaaaauucaguggau

SEQ ID NO: 930976 - RNA, 19 nt, Homo sapiens
  misc_RNA (1)...(19): siRNA sense strand
ggugaugaagaauuugaaa

SEQ ID NO: 930977 - RNA, 19 nt, Homo sapiens
  misc_RNA (1)...(19): siRNA sense strand
gaggugguguagggauuau

SEQ ID NO: 930978 - RNA, 19 nt, Homo sapiens
  misc_RNA (1)...(19): siRNA sense strand
ccuguccgcuggaaagugu

SEQ ID NO: 930979 - RNA, 19 nt, Homo sapiens
  misc_RNA (1)...(19): siRNA sense strand
uauagagucgcuuucaaga

SEQ ID NO: 930980 - RNA, 19 nt, Homo sapiens
  misc_RNA (1)...(19): siRNA sense strand
aucugaagcuggauuggua

SEQ ID NO: 930981 - RNA, 19 nt, Homo sapiens
  misc_RNA (1)...(19): siRNA sense strand
cgucaacuaucacuucacu

SEQ ID NO: 930982 - RNA, 19 nt, Homo sapiens
  misc_RNA (1)...(19): siRNA sense strand
ggugagaauuguggagaag

SEQ ID NO: 930983 - RNA, 19 nt, Homo sapiens
  misc_RNA (1)...(19): siRNA sense strand
ggaacagaucaaagcacua

SEQ ID NO: 930984 - RNA, 19 nt, Homo sapiens
  misc_RNA (1)...(19): siRNA sense strand
gcuuacaccugcugcuuuu

SEQ ID NO: 930985 - RNA, 19 nt, Homo sapiens
  misc_RNA (1)...(19): siRNA sense strand
cuaaccagaagaugaaaga

SEQ ID NO: 930986 - RNA, 19 nt, Homo sapiens
  misc_RNA (1)...(19): siRNA sense strand
caacguggaagaggacaug

SEQ ID NO: 930987 - RNA, 19 nt, Homo sapiens
  misc_RNA (1)...(19): siRNA sense strand
guuccagugccucuuaauu

SEQ ID NO: 930988 - RNA, 19 nt, Homo sapiens
  misc_RNA (1)...(19): siRNA sense strand
cagcgucaacuaucacuuc

SEQ ID NO: 930989 - RNA, 19 nt, Homo sapiens
  misc_RNA (1)...(19): siRNA sense strand
cggcuucuguuuccacaca

SEQ ID NO: 930990 - RNA, 19 nt, Homo sapiens
  misc_RNA (1)...(19): siRNA sense strand
gaagaaccauguggaaaac

SEQ ID NO: 930991 - RNA, 19 nt, Homo sapiens
  misc_RNA (1)...(19): siRNA sense strand
aaggaaagaagaaccaugu

SEQ ID NO: 930992 - RNA, 19 nt, Homo sapiens
  misc_RNA (1)...(19): siRNA sense strand
aagaagaaccauguggaaa

SEQ ID NO: 930993 - RNA, 19 nt, Homo sapiens
  misc_RNA (1)...(19): siRNA sense strand
guagaaagggacggaagga

SEQ ID NO: 930994 - RNA, 19 nt, Homo sapiens
  misc_RNA (1)...(19): siRNA sense strand
gccugaaucuaaccagaag

SEQ ID NO: 930995 - RNA, 19 nt, Homo sapiens
  misc_RNA (1)...(19): siRNA sense strand
uggagaagaucaacuuuuc

SEQ ID NO: 930996 - RNA, 19 nt, Homo sapiens
  misc_RNA (1)...(19): siRNA sense strand
ccuggauguugguguagaa

SEQ ID NO: 930997 - RNA, 19 nt, Homo sapiens
  misc_RNA (1)...(19): siRNA sense strand
ugacggaacagaucaaagc

SEQ ID NO: 930998 - RNA, 19 nt, Homo sapiens
  misc_RNA (1)...(19): siRNA sense strand
aagcugaggagguggugua

SEQ ID NO: 930999 - RNA, 19 nt, Homo sapiens
  misc_RNA (1)...(19): siRNA sense strand
ggagaauaccugggcaagu

SEQ ID NO: 931000 - RNA, 19 nt, Homo sapiens
  misc_RNA (1)...(19): siRNA sense strand
gcgaggaggaaaauacaua

SEQ ID NO: 931001 - RNA, 19 nt, Homo sapiens
  misc_RNA (1)...(19): siRNA sense strand
guucugcaaaguagaguug

SEQ ID NO: 931002 - RNA, 19 nt, Homo sapiens
  misc_RNA (1)...(19): siRNA sense strand
gaccaaagaggaggaagag

SEQ ID NO: 931003 - RNA, 19 nt, Homo sapiens
  misc_RNA (1)...(19): siRNA sense strand
gguggagagccauuucuuc

SEQ ID NO: 931004 - RNA, 19 nt, Homo sapiens
  misc_RNA (1)...(19): siRNA sense strand
uuccagugccucuuaauug

SEQ ID NO: 931005 - RNA, 19 nt, Homo sapiens
  misc_RNA (1)...(19): siRNA sense strand
gacaugacggaacagauca

SEQ ID NO: 931006 - RNA, 19 nt, Homo sapiens
  misc_RNA (1)...(19): siRNA sense strand
gagcaucgugagcaaugga

SEQ ID NO: 931007 - RNA, 19 nt, Homo sapiens
  misc_RNA (1)...(19): siRNA sense strand
gugagcaucgugagcaaug

SEQ ID NO: 931008 - RNA, 19 nt, Homo sapiens
  misc_RNA (1)...(19): siRNA sense strand
gcgugagcaucgugagcaa

SEQ ID NO: 931009 - RNA, 19 nt, Homo sapiens
  misc_RNA (1)...(19): siRNA sense strand
ccaaccagcgucaacuauc

SEQ ID NO: 931010 - RNA, 19 nt, Homo sapiens
  misc_RNA (1)...(19): siRNA sense strand
agaagcagaaagauuuguu

SEQ ID NO: 931011 - RNA, 19 nt, Homo sapiens
  misc_RNA (1)...(19): siRNA sense strand
gaucugaagcuggauuggu

SEQ ID NO: 931012 - RNA, 19 nt, Homo sapiens
  misc_RNA (1)...(19): siRNA sense strand
gcaccaaagcugucaguga

SEQ ID NO: 931013 - RNA, 19 nt, Homo sapiens
  misc_RNA (1)...(19): siRNA sense strand
ccauuucgaucuuccacua

SEQ ID NO: 931014 - RNA, 19 nt, Homo sapiens
  misc_RNA (1)...(19): siRNA sense strand
gcagagaugccauuucgau

SEQ ID NO: 931015 - RNA, 19 nt, Homo sapiens
  misc_RNA (1)...(19): siRNA sense strand
ccaaagcugucagugagaa

SEQ ID NO: 931016 - RNA, 19 nt, Homo sapiens
  misc_RNA (1)...(19): siRNA sense strand
gggagucucgcaaggauaa

SEQ ID NO: 931017 - RNA, 19 nt, Homo sapiens
  misc_RNA (1)...(19): siRNA sense strand
gugcugcucuucucuucuu

SEQ ID NO: 931018 - RNA, 19 nt, Homo sapiens
  misc_RNA (1)...(19): siRNA sense strand
ccucucaggucacgcugua

SEQ ID NO: 931019 - RNA, 19 nt, Homo sapiens
  misc_RNA (1)...(19): siRNA sense strand
gacaauggcacguucacuu

SEQ ID NO: 931020 - RNA, 19 nt, Homo sapiens
  misc_RNA (1)...(19): siRNA sense strand
cagaggaggcucagugcua

SEQ ID NO: 931021 - RNA, 19 nt, Homo sapiens
  misc_RNA (1)...(19): siRNA sense strand
cccaggccaucgugguuua

SEQ ID NO: 931022 - RNA, 19 nt, Homo sapiens
  misc_RNA (1)...(19): siRNA sense strand
agaggaggcucagugcuau

SEQ ID NO: 931023 - RNA, 19 nt, Homo sapiens
  misc_RNA (1)...(19): siRNA sense strand
ucgcaaggauaagaaauag

SEQ ID NO: 931024 - RNA, 19 nt, Homo sapiens
  misc_RNA (1)...(19): siRNA sense strand
gcucagugcuauggagaag

SEQ ID NO: 931025 - RNA, 19 nt, Homo sapiens
  misc_RNA (1)...(19): siRNA sense strand
caggaaaggacgcgucgaa

SEQ ID NO: 931026 - RNA, 19 nt, Homo sapiens
  misc_RNA (1)...(19): siRNA sense strand
acaauggcacguucacuug

SEQ ID NO: 931027 - RNA, 19 nt, Homo sapiens
  misc_RNA (1)...(19): siRNA sense strand
cgccagugcuguaugcaau

SEQ ID NO: 931028 - RNA, 19 nt, Homo sapiens
  misc_RNA (1)...(19): siRNA sense strand
gagugggucucagaugaca

SEQ ID NO: 931029 - RNA, 19 nt, Homo sapiens
  misc_RNA (1)...(19): siRNA sense strand
ggcagacgccagugcugua

SEQ ID NO: 931030 - RNA, 19 nt, Homo sapiens
  misc_RNA (1)...(19): siRNA sense strand
ggucacgcuguaugucuuu

SEQ ID NO: 931031 - RNA, 19 nt, Homo sapiens
  misc_RNA (1)...(19): siRNA sense strand
gcagacgccagugcuguau

SEQ ID NO: 931032 - RNA, 19 nt, Homo sapiens
  misc_RNA (1)...(19): siRNA sense strand
ccacagcagaagcaccaaa

SEQ ID NO: 931033 - RNA, 19 nt, Homo sapiens
  misc_RNA (1)...(19): siRNA sense strand
ucauacacaaccuagacua

SEQ ID NO: 931034 - RNA, 19 nt, Homo sapiens
  misc_RNA (1)...(19): siRNA sense strand
cacgcuguaugucuuugaa

SEQ ID NO: 931035 - RNA, 19 nt, Homo sapiens
  misc_RNA (1)...(19): siRNA sense strand
caauggcacguucacuugu

SEQ ID NO: 931036 - RNA, 19 nt, Homo sapiens
  misc_RNA (1)...(19): siRNA sense strand
cgacagggagguccauggu

SEQ ID NO: 931037 - RNA, 19 nt, Homo sapiens
  misc_RNA (1)...(19): siRNA sense strand
ggaaggagcugcugaaauu

SEQ ID NO: 931038 - RNA, 19 nt, Homo sapiens
  misc_RNA (1)...(19): siRNA sense strand
gaagaucuguccuuauaaa

SEQ ID NO: 931039 - RNA, 19 nt, Homo sapiens
  misc_RNA (1)...(19): siRNA sense strand
ccgaagaucuguccuuaua

SEQ ID NO: 931040 - RNA, 19 nt, Homo sapiens
  misc_RNA (1)...(19): siRNA sense strand
ggaaguauguggaagaaga

SEQ ID NO: 931041 - RNA, 19 nt, Homo sapiens
  misc_RNA (1)...(19): siRNA sense strand
gaaaugaccuugcuuuuga

SEQ ID NO: 931042 - RNA, 19 nt, Homo sapiens
  misc_RNA (1)...(19): siRNA sense strand
caagagugauggccagaua

SEQ ID NO: 931043 - RNA, 19 nt, Homo sapiens
  misc_RNA (1)...(19): siRNA sense strand
ccagauaccugccaaugaa

SEQ ID NO: 931044 - RNA, 19 nt, Homo sapiens
  misc_RNA (1)...(19): siRNA sense strand
gaucuguccuuauaaacaa

SEQ ID NO: 931045 - RNA, 19 nt, Homo sapiens
  misc_RNA (1)...(19): siRNA sense strand
ucacauacuuuaagaggaa

SEQ ID NO: 931046 - RNA, 19 nt, Homo sapiens
  misc_RNA (1)...(19): siRNA sense strand
caacauccaagaucacaua

SEQ ID NO: 931047 - RNA, 19 nt, Homo sapiens
  misc_RNA (1)...(19): siRNA sense strand
gagaaauuaucaugcagaa

SEQ ID NO: 931048 - RNA, 19 nt, Homo sapiens
  misc_RNA (1)...(19): siRNA sense strand
gaacgagcccacauccuuu

SEQ ID NO: 931049 - RNA, 19 nt, Homo sapiens
  misc_RNA (1)...(19): siRNA sense strand
gaccggauauaaugaaaga

SEQ ID NO: 931050 - RNA, 19 nt, Homo sapiens
  misc_RNA (1)...(19): siRNA sense strand
gagcccacauccuuuauau

SEQ ID NO: 931051 - RNA, 19 nt, Homo sapiens
  misc_RNA (1)...(19): siRNA sense strand
cauccaagaucacauacuu

SEQ ID NO: 931052 - RNA, 19 nt, Homo sapiens
  misc_RNA (1)...(19): siRNA sense strand
guagguagugcaucuauuu

SEQ ID NO: 931053 - RNA, 19 nt, Homo sapiens
  misc_RNA (1)...(19): siRNA sense strand
ggaacgagcccacauccuu

SEQ ID NO: 931054 - RNA, 19 nt, Homo sapiens
  misc_RNA (1)...(19): siRNA sense strand
gaccacggauggccaaaga

SEQ ID NO: 931055 - RNA, 19 nt, Homo sapiens
  misc_RNA (1)...(19): siRNA sense strand
gaggaaguauguggaagaa

SEQ ID NO: 931056 - RNA, 19 nt, Homo sapiens
  misc_RNA (1)...(19): siRNA sense strand
gagaccggauauaaugaaa

SEQ ID NO: 931057 - RNA, 19 nt, Homo sapiens
  misc_RNA (1)...(19): siRNA sense strand
aaggauccauggagaaauu

SEQ ID NO: 931058 - RNA, 19 nt, Homo sapiens
  misc_RNA (1)...(19): siRNA sense strand
ggaaaaggccaaauuaaau

SEQ ID NO: 931059 - RNA, 19 nt, Homo sapiens
  misc_RNA (1)...(19): siRNA sense strand
gguagugcaucuauuuaca

SEQ ID NO: 931060 - RNA, 19 nt, Homo sapiens
  misc_RNA (1)...(19): siRNA sense strand
gaugagaaagcaaaugaug

SEQ ID NO: 931061 - RNA, 19 nt, Homo sapiens
  misc_RNA (1)...(19): siRNA sense strand
uccaagaucacauacuuua

SEQ ID NO: 931062 - RNA, 19 nt, Homo sapiens
  misc_RNA (1)...(19): siRNA sense strand
ugaaauugcuggguaccaa

SEQ ID NO: 931063 - RNA, 19 nt, Homo sapiens
  misc_RNA (1)...(19): siRNA sense strand
gguggccacuaccuaaauu

SEQ ID NO: 931064 - RNA, 19 nt, Homo sapiens
  misc_RNA (1)...(19): siRNA sense strand
gaaguguaccuccgaagau

SEQ ID NO: 931065 - RNA, 19 nt, Homo sapiens
  misc_RNA (1)...(19): siRNA sense strand
gaaauugcuggguaccaaa

SEQ ID NO: 931066 - RNA, 19 nt, Homo sapiens
  misc_RNA (1)...(19): siRNA sense strand
caaauccuauaacaacauc

SEQ ID NO: 931067 - RNA, 19 nt, Homo sapiens
  misc_RNA (1)...(19): siRNA sense strand
gugcaucuauuuacaagag

SEQ ID NO: 931068 - RNA, 19 nt, Homo sapiens
  misc_RNA (1)...(19): siRNA sense strand
caagaucacauacuuuaag

SEQ ID NO: 931069 - RNA, 19 nt, Homo sapiens
  misc_RNA (1)...(19): siRNA sense strand
gaaaaggccaaauuaaaug

SEQ ID NO: 931070 - RNA, 19 nt, Homo sapiens
  misc_RNA (1)...(19): siRNA sense strand
gcccaagagugguuuaugg

SEQ ID NO: 931071 - RNA, 19 nt, Homo sapiens
  misc_RNA (1)...(19): siRNA sense strand
gcaaaggccaauuuuauga

SEQ ID NO: 931072 - RNA, 19 nt, Homo sapiens
  misc_RNA (1)...(19): siRNA sense strand
guuuaucgaugauccugaa

SEQ ID NO: 931073 - RNA, 19 nt, Homo sapiens
  misc_RNA (1)...(19): siRNA sense strand
ucagaucacuugguguuca

SEQ ID NO: 931074 - RNA, 19 nt, Homo sapiens
  misc_RNA (1)...(19): siRNA sense strand
auaacaacauccaagauca

SEQ ID NO: 931075 - RNA, 19 nt, Homo sapiens
  misc_RNA (1)...(19): siRNA sense strand
ccagguggauuuugaugua

SEQ ID NO: 931076 - RNA, 19 nt, Homo sapiens
  misc_RNA (1)...(19): siRNA sense strand
cuccgaagaucuguccuua

SEQ ID NO: 931077 - RNA, 19 nt, Homo sapiens
  misc_RNA (1)...(19): siRNA sense strand
ucgaugauccugaagugua

SEQ ID NO: 931078 - RNA, 19 nt, Homo sapiens
  misc_RNA (1)...(19): siRNA sense strand
cugguucuguccaugaaua

SEQ ID NO: 931079 - RNA, 19 nt, Homo sapiens
  misc_RNA (1)...(19): siRNA sense strand
uaucgaugauccugaagug

SEQ ID NO: 931080 - RNA, 19 nt, Homo sapiens
  misc_RNA (1)...(19): siRNA sense strand
ccaagaucacauacuuuaa

SEQ ID NO: 931081 - RNA, 19 nt, Homo sapiens
  misc_RNA (1)...(19): siRNA sense strand
cagcaaaggaaguaaaaua

SEQ ID NO: 931082 - RNA, 19 nt, Homo sapiens
  misc_RNA (1)...(19): siRNA sense strand
ugucaaugcuaauguugga

SEQ ID NO: 931083 - RNA, 19 nt, Homo sapiens
  misc_RNA (1)...(19): siRNA sense strand
agaggaaugugaaaaguuu

SEQ ID NO: 931084 - RNA, 19 nt, Homo sapiens
  misc_RNA (1)...(19): siRNA sense strand
ggccaaagaggaaugugaa

SEQ ID NO: 931085 - RNA, 19 nt, Homo sapiens
  misc_RNA (1)...(19): siRNA sense strand
uaagaggaaguauguggaa

SEQ ID NO: 931086 - RNA, 19 nt, Homo sapiens
  misc_RNA (1)...(19): siRNA sense strand
gaaaucuuugucacuaaug

SEQ ID NO: 931087 - RNA, 19 nt, Homo sapiens
  misc_RNA (1)...(19): siRNA sense strand
ccggauauaaugaaagaaa

SEQ ID NO: 931088 - RNA, 19 nt, Homo sapiens
  misc_RNA (1)...(19): siRNA sense strand
ggaaaugaccuugcuuuug

SEQ ID NO: 931089 - RNA, 19 nt, Homo sapiens
  misc_RNA (1)...(19): siRNA sense strand
ugagugcaaaggccaauuu

SEQ ID NO: 931090 - RNA, 19 nt, Homo sapiens
  misc_RNA (1)...(19): siRNA sense strand
gaaggagcugcugaaauug

SEQ ID NO: 931091 - RNA, 19 nt, Homo sapiens
  misc_RNA (1)...(19): siRNA sense strand
gaugacaccaacagagaug

SEQ ID NO: 931092 - RNA, 19 nt, Homo sapiens
  misc_RNA (1)...(19): siRNA sense strand
gccagauaccugccaauga

SEQ ID NO: 931093 - RNA, 19 nt, Homo sapiens
  misc_RNA (1)...(19): siRNA sense strand
uagguagugcaucuauuua

SEQ ID NO: 931094 - RNA, 19 nt, Homo sapiens
  misc_RNA (1)...(19): siRNA sense strand
cgaagaucuguccuuauaa

SEQ ID NO: 931095 - RNA, 19 nt, Homo sapiens
  misc_RNA (1)...(19): siRNA sense strand
gaaaaggauccauggagaa

SEQ ID NO: 931096 - RNA, 19 nt, Homo sapiens
  misc_RNA (1)...(19): siRNA sense strand
guagugcaucuauuuacaa

SEQ ID NO: 931097 - RNA, 19 nt, Homo sapiens
  misc_RNA (1)...(19): siRNA sense strand
gcucaagacugcccuuacc

SEQ ID NO: 931098 - RNA, 19 nt, Homo sapiens
  misc_RNA (1)...(19): siRNA sense strand
uauaacaacauccaagauc

SEQ ID NO: 931099 - RNA, 19 nt, Homo sapiens
  misc_RNA (1)...(19): siRNA sense strand
caaaugaugacaccaacag

SEQ ID NO: 931100 - RNA, 19 nt, Homo sapiens
  misc_RNA (1)...(19): siRNA sense strand
ucacuaaugucagaucacu

SEQ ID NO: 931101 - RNA, 19 nt, Homo sapiens
  misc_RNA (1)...(19): siRNA sense strand
ccacuggcaggaucacauu

SEQ ID NO: 931102 - RNA, 19 nt, Homo sapiens
  misc_RNA (1)...(19): siRNA sense strand
ugaaguguaccuccgaaga

SEQ ID NO: 931103 - RNA, 19 nt, Homo sapiens
  misc_RNA (1)...(19): siRNA sense strand
uggccacuaccuaaauuua

SEQ ID NO: 931104 - RNA, 19 nt, Homo sapiens
  misc_RNA (1)...(19): siRNA sense strand
agacugcccuuaccgaaaa

SEQ ID NO: 931105 - RNA, 19 nt, Homo sapiens
  misc_RNA (1)...(19): siRNA sense strand
ucaggaaaaggccaaauua

SEQ ID NO: 931106 - RNA, 19 nt, Homo sapiens
  misc_RNA (1)...(19): siRNA sense strand
gcaaaggaaguaaaauaug

SEQ ID NO: 931107 - RNA, 19 nt, Homo sapiens
  misc_RNA (1)...(19): siRNA sense strand
acuaaugucagaucacuug

SEQ ID NO: 931108 - RNA, 19 nt, Homo sapiens
  misc_RNA (1)...(19): siRNA sense strand
gccaaugaaaucuuuguca

SEQ ID NO: 931109 - RNA, 19 nt, Homo sapiens
  misc_RNA (1)...(19): siRNA sense strand
gugcaaaggccaauuuuau

SEQ ID NO: 931110 - RNA, 19 nt, Homo sapiens
  misc_RNA (1)...(19): siRNA sense strand
gcaaaugaugacaccaaca

SEQ ID NO: 931111 - RNA, 19 nt, Homo sapiens
  misc_RNA (1)...(19): siRNA sense strand
ugucagaucacuugguguu

SEQ ID NO: 931112 - RNA, 19 nt, Homo sapiens
  misc_RNA (1)...(19): siRNA sense strand
cgagcccacauccuuuaua

SEQ ID NO: 931113 - RNA, 19 nt, Homo sapiens
  misc_RNA (1)...(19): siRNA sense strand
ccuauaacaacauccaaga

SEQ ID NO: 931114 - RNA, 19 nt, Homo sapiens
  misc_RNA (1)...(19): siRNA sense strand
cgaugauccugaaguguac

SEQ ID NO: 931115 - RNA, 19 nt, Homo sapiens
  misc_RNA (1)...(19): siRNA sense strand
cauccuuuauauguccuua

SEQ ID NO: 931116 - RNA, 19 nt, Homo sapiens
  misc_RNA (1)...(19): siRNA sense strand
ucacuugguguucaggaaa

SEQ ID NO: 931117 - RNA, 19 nt, Homo sapiens
  misc_RNA (1)...(19): siRNA sense strand
gaggcuucaccaccaagua

SEQ ID NO: 931118 - RNA, 19 nt, Homo sapiens
  misc_RNA (1)...(19): siRNA sense strand
ugagaccggauauaaugaa

SEQ ID NO: 931119 - RNA, 19 nt, Homo sapiens
  misc_RNA (1)...(19): siRNA sense strand
uuugagaccggauauaaug

SEQ ID NO: 931120 - RNA, 19 nt, Homo sapiens
  misc_RNA (1)...(19): siRNA sense strand
gaaguauguggaagaagag

SEQ ID NO: 931121 - RNA, 19 nt, Homo sapiens
  misc_RNA (1)...(19): siRNA sense strand
ggccagcacaagcuccuuu

SEQ ID NO: 931122 - RNA, 19 nt, Homo sapiens
  misc_RNA (1)...(19): siRNA sense strand
gccaaagaggaaugugaaa

SEQ ID NO: 931123 - RNA, 19 nt, Homo sapiens
  misc_RNA (1)...(19): siRNA sense strand
aaggccaaauuaaaugaug

SEQ ID NO: 931124 - RNA, 19 nt, Homo sapiens
  misc_RNA (1)...(19): siRNA sense strand
uguagguagugcaucuauu

SEQ ID NO: 931125 - RNA, 19 nt, Homo sapiens
  misc_RNA (1)...(19): siRNA sense strand
ccauaaaaccaucucaauu

SEQ ID NO: 931126 - RNA, 19 nt, Homo sapiens
  misc_RNA (1)...(19): siRNA sense strand
ugggaaaugaccuugcuuu

SEQ ID NO: 931127 - RNA, 19 nt, Homo sapiens
  misc_RNA (1)...(19): siRNA sense strand
acgaaccugugggaaauga

SEQ ID NO: 931128 - RNA, 19 nt, Homo sapiens
  misc_RNA (1)...(19): siRNA sense strand
aagcaaaugaugacaccaa

SEQ ID NO: 931129 - RNA, 19 nt, Homo sapiens
  misc_RNA (1)...(19): siRNA sense strand
ugagaaagcaaaugaugac

SEQ ID NO: 931130 - RNA, 19 nt, Homo sapiens
  misc_RNA (1)...(19): siRNA sense strand
aggccaaauuaaaugauga

SEQ ID NO: 931131 - RNA, 19 nt, Homo sapiens
  misc_RNA (1)...(19): siRNA sense strand
aacgagcccacauccuuua

SEQ ID NO: 931132 - RNA, 19 nt, Homo sapiens
  misc_RNA (1)...(19): siRNA sense strand
uccuuuauauguccuuaga

SEQ ID NO: 931133 - RNA, 19 nt, Homo sapiens
  misc_RNA (1)...(19): siRNA sense strand
ugucacuaaugucagauca

SEQ ID NO: 931134 - RNA, 19 nt, Homo sapiens
  misc_RNA (1)...(19): siRNA sense strand
gauaccugccaaugaaauc

SEQ ID NO: 931135 - RNA, 19 nt, Homo sapiens
  misc_RNA (1)...(19): siRNA sense strand
ggccagauaccugccaaug

SEQ ID NO: 931136 - RNA, 19 nt, Homo sapiens
  misc_RNA (1)...(19): siRNA sense strand
aggcuucaccaccaaguaa

SEQ ID NO: 931137 - RNA, 19 nt, Homo sapiens
  misc_RNA (1)...(19): siRNA sense strand
gagaagcccuaauuaguga

SEQ ID NO: 931138 - RNA, 19 nt, Homo sapiens
  misc_RNA (1)...(19): siRNA sense strand
gaagauggaccagcacuua

SEQ ID NO: 931139 - RNA, 19 nt, Homo sapiens
  misc_RNA (1)...(19): siRNA sense strand
aaagaagccuacucucaua

SEQ ID NO: 931140 - RNA, 19 nt, Homo sapiens
  misc_RNA (1)...(19): siRNA sense strand
aguaguagcugaucacuuu

SEQ ID NO: 931141 - RNA, 19 nt, Homo sapiens
  misc_RNA (1)...(19): siRNA sense strand
gcugaucacuuugucuuua

SEQ ID NO: 931142 - RNA, 19 nt, Homo sapiens
  misc_RNA (1)...(19): siRNA sense strand
gaagaaugcuguucaagcu

SEQ ID NO: 931143 - RNA, 19 nt, Homo sapiens
  misc_RNA (1)...(19): siRNA sense strand
gaaagaagccuacucucau

SEQ ID NO: 931144 - RNA, 19 nt, Homo sapiens
  misc_RNA (1)...(19): siRNA sense strand
cauuaugagugcuuuguua

SEQ ID NO: 931145 - RNA, 19 nt, Homo sapiens
  misc_RNA (1)...(19): siRNA sense strand
gaagccuacucucauaauu

SEQ ID NO: 931146 - RNA, 19 nt, Homo sapiens
  misc_RNA (1)...(19): siRNA sense strand
ggaccagcacuuauaauuu

SEQ ID NO: 931147 - RNA, 19 nt, Homo sapiens
  misc_RNA (1)...(19): siRNA sense strand
ucauggagcuauuccuaua

SEQ ID NO: 931148 - RNA, 19 nt, Homo sapiens
  misc_RNA (1)...(19): siRNA sense strand
gaccagcacuuauaauuuu

SEQ ID NO: 931149 - RNA, 19 nt, Homo sapiens
  misc_RNA (1)...(19): siRNA sense strand
gaaacauuaugagugcuuu

SEQ ID NO: 931150 - RNA, 19 nt, Homo sapiens
  misc_RNA (1)...(19): siRNA sense strand
agccuacucucauaauuua

SEQ ID NO: 931151 - RNA, 19 nt, Homo sapiens
  misc_RNA (1)...(19): siRNA sense strand
agaaugcuguucaagcuuu

SEQ ID NO: 931152 - RNA, 19 nt, Homo sapiens
  misc_RNA (1)...(19): siRNA sense strand
cuacauggaccaagagaaa

SEQ ID NO: 931153 - RNA, 19 nt, Homo sapiens
  misc_RNA (1)...(19): siRNA sense strand
gauaagcaccaaagaauac

SEQ ID NO: 931154 - RNA, 19 nt, Homo sapiens
  misc_RNA (1)...(19): siRNA sense strand
gcaguuggaggacuauuug

SEQ ID NO: 931155 - RNA, 19 nt, Homo sapiens
  misc_RNA (1)...(19): siRNA sense strand
ugaaagaagccuacucuca

SEQ ID NO: 931156 - RNA, 19 nt, Homo sapiens
  misc_RNA (1)...(19): siRNA sense strand
gauggaccagcacuuauaa

SEQ ID NO: 931157 - RNA, 19 nt, Homo sapiens
  misc_RNA (1)...(19): siRNA sense strand
uaugagugcuuuguuagaa

SEQ ID NO: 931158 - RNA, 19 nt, Homo sapiens
  misc_RNA (1)...(19): siRNA sense strand
agaauaccaggaaacauua

SEQ ID NO: 931159 - RNA, 19 nt, Homo sapiens
  misc_RNA (1)...(19): siRNA sense strand
aagaauaccaggaaacauu

SEQ ID NO: 931160 - RNA, 19 nt, Homo sapiens
  misc_RNA (1)...(19): siRNA sense strand
ucaaaccugugguguagga

SEQ ID NO: 931161 - RNA, 19 nt, Homo sapiens
  misc_RNA (1)...(19): siRNA sense strand
cgagaagcccuaauuagug

SEQ ID NO: 931162 - RNA, 19 nt, Homo sapiens
  misc_RNA (1)...(19): siRNA sense strand
guucgagaagcccuaauua

SEQ ID NO: 931163 - RNA, 19 nt, Homo sapiens
  misc_RNA (1)...(19): siRNA sense strand
aaucaaaccugugguguag

SEQ ID NO: 931164 - RNA, 19 nt, Homo sapiens
  misc_RNA (1)...(19): siRNA sense strand
gacgaagaaugcuguucaa

SEQ ID NO: 931165 - RNA, 19 nt, Homo sapiens
  misc_RNA (1)...(19): siRNA sense strand
ugauaagcaccaaagaaua

SEQ ID NO: 931166 - RNA, 19 nt, Homo sapiens
  misc_RNA (1)...(19): siRNA sense strand
caaagaauaccaggaaaca

SEQ ID NO: 931167 - RNA, 19 nt, Homo sapiens
  misc_RNA (1)...(19): siRNA sense strand
ucugugcccuauaugauuu

SEQ ID NO: 931168 - RNA, 19 nt, Homo sapiens
  misc_RNA (1)...(19): siRNA sense strand
gaaguucauggaauggaaa

SEQ ID NO: 931169 - RNA, 19 nt, Homo sapiens
  misc_RNA (1)...(19): siRNA sense strand
gaaugcuguucaagcuuug

SEQ ID NO: 931170 - RNA, 19 nt, Homo sapiens
  misc_RNA (1)...(19): siRNA sense strand
uccaggguuuaguuuauua

SEQ ID NO: 931171 - RNA, 19 nt, Homo sapiens
  misc_RNA (1)...(19): siRNA sense strand
ggaaacauuaugagugcuu

SEQ ID NO: 931172 - RNA, 19 nt, Homo sapiens
  misc_RNA (1)...(19): siRNA sense strand
ggaggacuauuugaauuuu

SEQ ID NO: 931173 - RNA, 19 nt, Homo sapiens
  misc_RNA (1)...(19): siRNA sense strand
cugaucacuuugucuuuaa

SEQ ID NO: 931174 - RNA, 19 nt, Homo sapiens
  misc_RNA (1)...(19): siRNA sense strand
uuucuucucuaccuuacua

SEQ ID NO: 931175 - RNA, 19 nt, Homo sapiens
  misc_RNA (1)...(19): siRNA sense strand
uaucauggagcuauuccua

SEQ ID NO: 931176 - RNA, 19 nt, Homo sapiens
  misc_RNA (1)...(19): siRNA sense strand
caccaaagaauaccaggaa

SEQ ID NO: 931177 - RNA, 19 nt, Homo sapiens
  misc_RNA (1)...(19): siRNA sense strand
ucacauacucgaagaaugg

SEQ ID NO: 931178 - RNA, 19 nt, Homo sapiens
  misc_RNA (1)...(19): siRNA sense strand
guuagaacguuuucauuga

SEQ ID NO: 931179 - RNA, 19 nt, Homo sapiens
  misc_RNA (1)...(19): siRNA sense strand
aacuaucucuuguggguuu

SEQ ID NO: 931180 - RNA, 19 nt, Homo sapiens
  misc_RNA (1)...(19): siRNA sense strand
agauggaccagcacuuaua

SEQ ID NO: 931181 - RNA, 19 nt, Homo sapiens
  misc_RNA (1)...(19): siRNA sense strand
ggaaaacaguggcaacucu

SEQ ID NO: 931182 - RNA, 19 nt, Homo sapiens
  misc_RNA (1)...(19): siRNA sense strand
aggauucugugcccuauau

SEQ ID NO: 931183 - RNA, 19 nt, Homo sapiens
  misc_RNA (1)...(19): siRNA sense strand
uuggaggacuauuugaauu

SEQ ID NO: 931184 - RNA, 19 nt, Homo sapiens
  misc_RNA (1)...(19): siRNA sense strand
cuucucuaccuuacuauua

SEQ ID NO: 931185 - RNA, 19 nt, Homo sapiens
  misc_RNA (1)...(19): siRNA sense strand
aaaucaaaccuguggugua

SEQ ID NO: 931186 - RNA, 19 nt, Homo sapiens
  misc_RNA (1)...(19): siRNA sense strand
ugacgaagaaugcuguuca

SEQ ID NO: 931187 - RNA, 19 nt, Homo sapiens
  misc_RNA (1)...(19): siRNA sense strand
ugauuugucugauucacau

SEQ ID NO: 931188 - RNA, 19 nt, Homo sapiens
  misc_RNA (1)...(19): siRNA sense strand
cagaggcuuugcucagguu

SEQ ID NO: 931189 - RNA, 19 nt, Homo sapiens
  misc_RNA (1)...(19): siRNA sense strand
ucgagaagcccuaauuagu

SEQ ID NO: 931190 - RNA, 19 nt, Homo sapiens
  misc_RNA (1)...(19): siRNA sense strand
aagccuacucucauaauuu

SEQ ID NO: 931191 - RNA, 19 nt, Homo sapiens
  misc_RNA (1)...(19): siRNA sense strand
gugcuuuguuagaacguuu

SEQ ID NO: 931192 - RNA, 19 nt, Homo sapiens
  misc_RNA (1)...(19): siRNA sense strand
gaauaccaggaaacauuau

SEQ ID NO: 931193 - RNA, 19 nt, Homo sapiens
  misc_RNA (1)...(19): siRNA sense strand
ggucaucgcagaggcuuug

SEQ ID NO: 931194 - RNA, 19 nt, Homo sapiens
  misc_RNA (1)...(19): siRNA sense strand
guuuauuacuggauguguu

SEQ ID NO: 931195 - RNA, 19 nt, Homo sapiens
  misc_RNA (1)...(19): siRNA sense strand
uggaggacuauuugaauuu

SEQ ID NO: 931196 - RNA, 19 nt, Homo sapiens
  misc_RNA (1)...(19): siRNA sense strand
uggagcaguuggaggacua

SEQ ID NO: 931197 - RNA, 19 nt, Homo sapiens
  misc_RNA (1)...(19): siRNA sense strand
gguuugguguggagcaguu

SEQ ID NO: 931198 - RNA, 19 nt, Homo sapiens
  misc_RNA (1)...(19): siRNA sense strand
uggaccagcacuuauaauu

SEQ ID NO: 931199 - RNA, 19 nt, Homo sapiens
  misc_RNA (1)...(19): siRNA sense strand
gauucugugcccuauauga

SEQ ID NO: 931200 - RNA, 19 nt, Homo sapiens
  misc_RNA (1)...(19): siRNA sense strand
cagaacuugccgaguagua

SEQ ID NO: 931201 - RNA, 19 nt, Homo sapiens
  misc_RNA (1)...(19): siRNA sense strand
ccuaauuagugaugaaacu

SEQ ID NO: 931202 - RNA, 19 nt, Homo sapiens
  misc_RNA (1)...(19): siRNA sense strand
cauacucgaagaaugguuu

SEQ ID NO: 931203 - RNA, 19 nt, Homo sapiens
  misc_RNA (1)...(19): siRNA sense strand
gcagccguuuggcaugguu

SEQ ID NO: 931204 - RNA, 19 nt, Homo sapiens
  misc_RNA (1)...(19): siRNA sense strand
ugauucacauacucgaaga

SEQ ID NO: 931205 - RNA, 19 nt, Homo sapiens
  misc_RNA (1)...(19): siRNA sense strand
uugauaagcaccaaagaau

SEQ ID NO: 931206 - RNA, 19 nt, Homo sapiens
  misc_RNA (1)...(19): siRNA sense strand
ggaguucgagaagcccuaa

SEQ ID NO: 931207 - RNA, 19 nt, Homo sapiens
  misc_RNA (1)...(19): siRNA sense strand
guuggaggacuauuugaau

SEQ ID NO: 931208 - RNA, 19 nt, Homo sapiens
  misc_RNA (1)...(19): siRNA sense strand
gaagcccuaauuagugaug

SEQ ID NO: 931209 - RNA, 19 nt, Homo sapiens
  misc_RNA (1)...(19): siRNA sense strand
gcucagguugcaauugaug

SEQ ID NO: 931210 - RNA, 19 nt, Homo sapiens
  misc_RNA (1)...(19): siRNA sense strand
aagaagccuacucucauaa

SEQ ID NO: 931211 - RNA, 19 nt, Homo sapiens
  misc_RNA (1)...(19): siRNA sense strand
gcaaaagugacgaagaaug

SEQ ID NO: 931212 - RNA, 19 nt, Homo sapiens
  misc_RNA (1)...(19): siRNA sense strand
auuccaggguuuaguuuau

SEQ ID NO: 931213 - RNA, 19 nt, Homo sapiens
  misc_RNA (1)...(19): siRNA sense strand
uagcugaucacuuugucuu

SEQ ID NO: 931214 - RNA, 19 nt, Homo sapiens
  misc_RNA (1)...(19): siRNA sense strand
cguuuggcaugguuaugaa

SEQ ID NO: 931215 - RNA, 19 nt, Homo sapiens
  misc_RNA (1)...(19): siRNA sense strand
ccaaagaauaccaggaaac

SEQ ID NO: 931216 - RNA, 19 nt, Homo sapiens
  misc_RNA (1)...(19): siRNA sense strand
ccacuuguuagcuaucuca

SEQ ID NO: 931217 - RNA, 19 nt, Homo sapiens
  misc_RNA (1)...(19): siRNA sense strand
uaucuuucuucucuaccuu

SEQ ID NO: 931218 - RNA, 19 nt, Homo sapiens
  misc_RNA (1)...(19): siRNA sense strand
accaaagaauaccaggaaa

SEQ ID NO: 931219 - RNA, 19 nt, Homo sapiens
  misc_RNA (1)...(19): siRNA sense strand
gaacagaugucaagaacaa

SEQ ID NO: 931220 - RNA, 19 nt, Homo sapiens
  misc_RNA (1)...(19): siRNA sense strand
caacagcccucucuaguga

SEQ ID NO: 931221 - RNA, 19 nt, Homo sapiens
  misc_RNA (1)...(19): siRNA sense strand
caacuacccuuucuuguuc

SEQ ID NO: 931222 - RNA, 19 nt, Homo sapiens
  misc_RNA (1)...(19): siRNA sense strand
ccauguggaucuacaauuu

SEQ ID NO: 931223 - RNA, 19 nt, Homo sapiens
  misc_RNA (1)...(19): siRNA sense strand
gaaacuagaagauccauuc

SEQ ID NO: 931224 - RNA, 19 nt, Homo sapiens
  misc_RNA (1)...(19): siRNA sense strand
gaagauccauuccagaaac

SEQ ID NO: 931225 - RNA, 19 nt, Homo sapiens
  misc_RNA (1)...(19): siRNA sense strand
gcaacuacccuuucuuguu

SEQ ID NO: 931226 - RNA, 19 nt, Homo sapiens
  misc_RNA (1)...(19): siRNA sense strand
gaacagcaccgaggaguau

SEQ ID NO: 931227 - RNA, 19 nt, Homo sapiens
  misc_RNA (1)...(19): siRNA sense strand
gaucuacaauuucaucauc

SEQ ID NO: 931228 - RNA, 19 nt, Homo sapiens
  misc_RNA (1)...(19): siRNA sense strand
gaucucuucuuuccacaaa

SEQ ID NO: 931229 - RNA, 19 nt, Homo sapiens
  misc_RNA (1)...(19): siRNA sense strand
ugaagggaaugcaaauauu

SEQ ID NO: 931230 - RNA, 19 nt, Homo sapiens
  misc_RNA (1)...(19): siRNA sense strand
gaaaaucagucaacaagau

SEQ ID NO: 931231 - RNA, 19 nt, Homo sapiens
  misc_RNA (1)...(19): siRNA sense strand
gaacaaacuaucaaagcuu

SEQ ID NO: 931232 - RNA, 19 nt, Homo sapiens
  misc_RNA (1)...(19): siRNA sense strand
ggagcugaccgaagauaua

SEQ ID NO: 931233 - RNA, 19 nt, Homo sapiens
  misc_RNA (1)...(19): siRNA sense strand
ugaagacgcccaccaacua

SEQ ID NO: 931234 - RNA, 19 nt, Homo sapiens
  misc_RNA (1)...(19): siRNA sense strand
gcacucagacuaaagaaag

SEQ ID NO: 931235 - RNA, 19 nt, Homo sapiens
  misc_RNA (1)...(19): siRNA sense strand
ggugucaggugucuucuuc

SEQ ID NO: 931236 - RNA, 19 nt, Homo sapiens
  misc_RNA (1)...(19): siRNA sense strand
caaagacccugcagaaaau

SEQ ID NO: 931237 - RNA, 19 nt, Homo sapiens
  misc_RNA (1)...(19): siRNA sense strand
gaacaucuuccugacagaa

SEQ ID NO: 931238 - RNA, 19 nt, Homo sapiens
  misc_RNA (1)...(19): siRNA sense strand
gaugaagggaaugcaaaua

SEQ ID NO: 931239 - RNA, 19 nt, Homo sapiens
  misc_RNA (1)...(19): siRNA sense strand
uagaagauccauuccagaa

SEQ ID NO: 931240 - RNA, 19 nt, Homo sapiens
  misc_RNA (1)...(19): siRNA sense strand
ggucaccuccuuccuauuc

SEQ ID NO: 931241 - RNA, 19 nt, Homo sapiens
  misc_RNA (1)...(19): siRNA sense strand
gcgcaacuacccuuucuug

SEQ ID NO: 931242 - RNA, 19 nt, Homo sapiens
  misc_RNA (1)...(19): siRNA sense strand
cgacucuucuucagcuuug

SEQ ID NO: 931243 - RNA, 19 nt, Homo sapiens
  misc_RNA (1)...(19): siRNA sense strand
gugaacagaugucaagaac

SEQ ID NO: 931244 - RNA, 19 nt, Homo sapiens
  misc_RNA (1)...(19): siRNA sense strand
ugucaggugucuucuucua

SEQ ID NO: 931245 - RNA, 19 nt, Homo sapiens
  misc_RNA (1)...(19): siRNA sense strand
cagcauccauggcaucaag

SEQ ID NO: 931246 - RNA, 19 nt, Homo sapiens
  misc_RNA (1)...(19): siRNA sense strand
ugaggcagaugaagggaau

SEQ ID NO: 931247 - RNA, 19 nt, Homo sapiens
  misc_RNA (1)...(19): siRNA sense strand
ccucauggcacucagacua

SEQ ID NO: 931248 - RNA, 19 nt, Homo sapiens
  misc_RNA (1)...(19): siRNA sense strand
ccacauugaccgacucuuc

SEQ ID NO: 931249 - RNA, 19 nt, Homo sapiens
  misc_RNA (1)...(19): siRNA sense strand
ucaaagacccugcagaaaa

SEQ ID NO: 931250 - RNA, 19 nt, Homo sapiens
  misc_RNA (1)...(19): siRNA sense strand
gcagaugaagggaaugcaa

SEQ ID NO: 931251 - RNA, 19 nt, Homo sapiens
  misc_RNA (1)...(19): siRNA sense strand
ccaauucccaugucaguca

SEQ ID NO: 931252 - RNA, 19 nt, Homo sapiens
  misc_RNA (1)...(19): siRNA sense strand
ucaccuccuuccuauucua

SEQ ID NO: 931253 - RNA, 19 nt, Homo sapiens
  misc_RNA (1)...(19): siRNA sense strand
gaagacgcccaccaacuac

SEQ ID NO: 931254 - RNA, 19 nt, Homo sapiens
  misc_RNA (1)...(19): siRNA sense strand
caagaacaaacuaucaaag

SEQ ID NO: 931255 - RNA, 19 nt, Homo sapiens
  misc_RNA (1)...(19): siRNA sense strand
gacagaaugccacuuugug

SEQ ID NO: 931256 - RNA, 19 nt, Homo sapiens
  misc_RNA (1)...(19): siRNA sense strand
guggaggaguggagugaau

SEQ ID NO: 931257 - RNA, 19 nt, Homo sapiens
  misc_RNA (1)...(19): siRNA sense strand
ucaucaguguccucuacua

SEQ ID NO: 931258 - RNA, 19 nt, Homo sapiens
  misc_RNA (1)...(19): siRNA sense strand
agaacaaacuaucaaagcu

SEQ ID NO: 931259 - RNA, 19 nt, Homo sapiens
  misc_RNA (1)...(19): siRNA sense strand
gagcugaccgaagauauag

SEQ ID NO: 931260 - RNA, 19 nt, Homo sapiens
  misc_RNA (1)...(19): siRNA sense strand
uccagaaugugaucucuuc

SEQ ID NO: 931261 - RNA, 19 nt, Homo sapiens
  misc_RNA (1)...(19): siRNA sense strand
cagaaugcuuccuggaucu

SEQ ID NO: 931262 - RNA, 19 nt, Homo sapiens
  misc_RNA (1)...(19): siRNA sense strand
gaucuaccagcagaaacua

SEQ ID NO: 931263 - RNA, 19 nt, Homo sapiens
  misc_RNA (1)...(19): siRNA sense strand
cagaugaagggaaugcaaa

SEQ ID NO: 931264 - RNA, 19 nt, Homo sapiens
  misc_RNA (1)...(19): siRNA sense strand
gaaugugaucucuucuuuc

SEQ ID NO: 931265 - RNA, 19 nt, Homo sapiens
  misc_RNA (1)...(19): siRNA sense strand
ccaacagcccucucuagug

SEQ ID NO: 931266 - RNA, 19 nt, Homo sapiens
  misc_RNA (1)...(19): siRNA sense strand
ccugacagaaugccacuuu

SEQ ID NO: 931267 - RNA, 19 nt, Homo sapiens
  misc_RNA (1)...(19): siRNA sense strand
ucauggcacucagacuaaa

SEQ ID NO: 931268 - RNA, 19 nt, Homo sapiens
  misc_RNA (1)...(19): siRNA sense strand
agauauagguccccaauuc

SEQ ID NO: 931269 - RNA, 19 nt, Homo sapiens
  misc_RNA (1)...(19): siRNA sense strand
ugucuuggucuuaguguuu

SEQ ID NO: 931270 - RNA, 19 nt, Homo sapiens
  misc_RNA (1)...(19): siRNA sense strand
uaugagauguggcgcaacu

SEQ ID NO: 931271 - RNA, 19 nt, Homo sapiens
  misc_RNA (1)...(19): siRNA sense strand
aagcuuccacuuuaacaaa

SEQ ID NO: 931272 - RNA, 19 nt, Homo sapiens
  misc_RNA (1)...(19): siRNA sense strand
uuguggagcugaccgaaga

SEQ ID NO: 931273 - RNA, 19 nt, Homo sapiens
  misc_RNA (1)...(19): siRNA sense strand
ugacagaaugccacuuugu

SEQ ID NO: 931274 - RNA, 19 nt, Homo sapiens
  misc_RNA (1)...(19): siRNA sense strand
gacuaaagaaagacaaauc

SEQ ID NO: 931275 - RNA, 19 nt, Homo sapiens
  misc_RNA (1)...(19): siRNA sense strand
ugucaucaguguccucuac

SEQ ID NO: 931276 - RNA, 19 nt, Homo sapiens
  misc_RNA (1)...(19): siRNA sense strand
ucaagcccauguggaucua

SEQ ID NO: 931277 - RNA, 19 nt, Homo sapiens
  misc_RNA (1)...(19): siRNA sense strand
ugaacagcaccgaggagua

SEQ ID NO: 931278 - RNA, 19 nt, Homo sapiens
  misc_RNA (1)...(19): siRNA sense strand
cagcagaaacuagaagauc

SEQ ID NO: 931279 - RNA, 19 nt, Homo sapiens
  misc_RNA (1)...(19): siRNA sense strand
gaugucaagaacaaacuau

SEQ ID NO: 931280 - RNA, 19 nt, Homo sapiens
  misc_RNA (1)...(19): siRNA sense strand
gcuguuugucuuggucuua

SEQ ID NO: 931281 - RNA, 19 nt, Homo sapiens
  misc_RNA (1)...(19): siRNA sense strand
agaagauccauuccagaaa

SEQ ID NO: 931282 - RNA, 19 nt, Homo sapiens
  misc_RNA (1)...(19): siRNA sense strand
auucaaagacccugcagaa

SEQ ID NO: 931283 - RNA, 19 nt, Homo sapiens
  misc_RNA (1)...(19): siRNA sense strand
ucucuucuuuccacaaaca

SEQ ID NO: 931284 - RNA, 19 nt, Homo sapiens
  misc_RNA (1)...(19): siRNA sense strand
aaugugaucucuucuuucc

SEQ ID NO: 931285 - RNA, 19 nt, Homo sapiens
  misc_RNA (1)...(19): siRNA sense strand
caccaacuacuaccucuuc

SEQ ID NO: 931286 - RNA, 19 nt, Homo sapiens
  misc_RNA (1)...(19): siRNA sense strand
gucaagaacaaacuaucaa

SEQ ID NO: 931287 - RNA, 19 nt, Homo sapiens
  misc_RNA (1)...(19): siRNA sense strand
gaagauauagguccccaau

SEQ ID NO: 931288 - RNA, 19 nt, Homo sapiens
  misc_RNA (1)...(19): siRNA sense strand
ggucuuaguguuugcuauc

SEQ ID NO: 931289 - RNA, 19 nt, Homo sapiens
  misc_RNA (1)...(19): siRNA sense strand
cagacuaaagaaagacaaa

SEQ ID NO: 931290 - RNA, 19 nt, Homo sapiens
  misc_RNA (1)...(19): siRNA sense strand
gcagaaacuagaagaucca

SEQ ID NO: 931291 - RNA, 19 nt, Homo sapiens
  misc_RNA (1)...(19): siRNA sense strand
ugucaagaacaaacuauca

SEQ ID NO: 931292 - RNA, 19 nt, Homo sapiens
  misc_RNA (1)...(19): siRNA sense strand
gaaugccccuggaggucua

SEQ ID NO: 931293 - RNA, 19 nt, Homo sapiens
  misc_RNA (1)...(19): siRNA sense strand
ggaucuaccagcagaaacu

SEQ ID NO: 931294 - RNA, 19 nt, Homo sapiens
  misc_RNA (1)...(19): siRNA sense strand
cuagugaacagaugucaag

SEQ ID NO: 931295 - RNA, 19 nt, Homo sapiens
  misc_RNA (1)...(19): siRNA sense strand
cccgugggcugcuacuuca

SEQ ID NO: 931296 - RNA, 19 nt, Homo sapiens
  misc_RNA (1)...(19): siRNA sense strand
gggcuucuccgugcucuuc

SEQ ID NO: 931297 - RNA, 19 nt, Homo sapiens
  misc_RNA (1)...(19): siRNA sense strand
cacucagacuaaagaaaga

SEQ ID NO: 931298 - RNA, 19 nt, Homo sapiens
  misc_RNA (1)...(19): siRNA sense strand
ucaucaagcccauguggau

SEQ ID NO: 931299 - RNA, 19 nt, Homo sapiens
  misc_RNA (1)...(19): siRNA sense strand
gcauccauggcaucaaguu

SEQ ID NO: 931300 - RNA, 19 nt, Homo sapiens
  misc_RNA (1)...(19): siRNA sense strand
gcgcuacguggccauccua

SEQ ID NO: 931301 - RNA, 19 nt, Homo sapiens
  misc_RNA (1)...(19): siRNA sense strand
agacgcccaccaacuacua

SEQ ID NO: 931302 - RNA, 19 nt, Homo sapiens
  misc_RNA (1)...(19): siRNA sense strand
uguucaaccucguccaugu

SEQ ID NO: 931303 - RNA, 19 nt, Homo sapiens
  misc_RNA (1)...(19): siRNA sense strand
cuuaguguuugcuaucugu

SEQ ID NO: 931304 - RNA, 19 nt, Homo sapiens
  misc_RNA (1)...(19): siRNA sense strand
augaagggaaugcaaauau

SEQ ID NO: 931305 - RNA, 19 nt, Homo sapiens
  misc_RNA (1)...(19): siRNA sense strand
gugggcugcuacuucaaga

SEQ ID NO: 931306 - RNA, 19 nt, Homo sapiens
  misc_RNA (1)...(19): siRNA sense strand
ccgugucugugguguaugu

SEQ ID NO: 931307 - RNA, 19 nt, Homo sapiens
  misc_RNA (1)...(19): siRNA sense strand
ugagggagcuguucgaguu

SEQ ID NO: 931308 - RNA, 19 nt, Homo sapiens
  misc_RNA (1)...(19): siRNA sense strand
ggaacgagaucugcuacaa

SEQ ID NO: 931309 - RNA, 19 nt, Homo sapiens
  misc_RNA (1)...(19): siRNA sense strand
gggcaacgcgggaauauga

SEQ ID NO: 931310 - RNA, 19 nt, Homo sapiens
  misc_RNA (1)...(19): siRNA sense strand
gguccaacuucuucuauga

SEQ ID NO: 931311 - RNA, 19 nt, Homo sapiens
  misc_RNA (1)...(19): siRNA sense strand
cgaaauccauagagaugaa

SEQ ID NO: 931312 - RNA, 19 nt, Homo sapiens
  misc_RNA (1)...(19): siRNA sense strand
gaagauccacaaccugauu

SEQ ID NO: 931313 - RNA, 19 nt, Homo sapiens
  misc_RNA (1)...(19): siRNA sense strand
ucaccgaccucuacauuca

SEQ ID NO: 931314 - RNA, 19 nt, Homo sapiens
  misc_RNA (1)...(19): siRNA sense strand
gcacuuggcccgaaugaag

SEQ ID NO: 931315 - RNA, 19 nt, Homo sapiens
  misc_RNA (1)...(19): siRNA sense strand
ggaagacgcccacuuggau

SEQ ID NO: 931316 - RNA, 19 nt, Homo sapiens
  misc_RNA (1)...(19): siRNA sense strand
gcagagcgcggacuucaug

SEQ ID NO: 931317 - RNA, 19 nt, Homo sapiens
  misc_RNA (1)...(19): siRNA sense strand
caacagugaugucaacaac

SEQ ID NO: 931318 - RNA, 19 nt, Homo sapiens
  misc_RNA (1)...(19): siRNA sense strand
gcagaggucgccaagaaga

SEQ ID NO: 931319 - RNA, 19 nt, Homo sapiens
  misc_RNA (1)...(19): siRNA sense strand
gaauaugacagauccuuca

SEQ ID NO: 931320 - RNA, 19 nt, Homo sapiens
  misc_RNA (1)...(19): siRNA sense strand
ugccugagauuguggauga

SEQ ID NO: 931321 - RNA, 19 nt, Homo sapiens
  misc_RNA (1)...(19): siRNA sense strand
gaguuccacuucaugcaaa

SEQ ID NO: 931322 - RNA, 19 nt, Homo sapiens
  misc_RNA (1)...(19): siRNA sense strand
caacugguccaacuucuuc

SEQ ID NO: 931323 - RNA, 19 nt, Homo sapiens
  misc_RNA (1)...(19): siRNA sense strand
ccacugaagcagaugauga

SEQ ID NO: 931324 - RNA, 19 nt, Homo sapiens
  misc_RNA (1)...(19): siRNA sense strand
gaacaagcagcacaaacag

SEQ ID NO: 931325 - RNA, 19 nt, Homo sapiens
  misc_RNA (1)...(19): siRNA sense strand
gagcggaaggugccuguga

SEQ ID NO: 931326 - RNA, 19 nt, Homo sapiens
  misc_RNA (1)...(19): siRNA sense strand
aaacccaccugcagcacuu

SEQ ID NO: 931327 - RNA, 19 nt, Homo sapiens
  misc_RNA (1)...(19): siRNA sense strand
ggagcagauuggcauguuc

SEQ ID NO: 931328 - RNA, 19 nt, Homo sapiens
  misc_RNA (1)...(19): siRNA sense strand
gaugaaaacucucaacaac

SEQ ID NO: 931329 - RNA, 19 nt, Homo sapiens
  misc_RNA (1)...(19): siRNA sense strand
ccaccuggcuaagaucuuc

SEQ ID NO: 931330 - RNA, 19 nt, Homo sapiens
  misc_RNA (1)...(19): siRNA sense strand
cauggaagacgcccacuug

SEQ ID NO: 931331 - RNA, 19 nt, Homo sapiens
  misc_RNA (1)...(19): siRNA sense strand
aacgagaucugcuacaaca

SEQ ID NO: 931332 - RNA, 19 nt, Homo sapiens
  misc_RNA (1)...(19): siRNA sense strand
ccaguggacccuuuagaga

SEQ ID NO: 931333 - RNA, 19 nt, Homo sapiens
  misc_RNA (1)...(19): siRNA sense strand
ugaaaacucucaacaacga

SEQ ID NO: 931334 - RNA, 19 nt, Homo sapiens
  misc_RNA (1)...(19): siRNA sense strand
ccaggaugaugccuuuauc

SEQ ID NO: 931335 - RNA, 19 nt, Homo sapiens
  misc_RNA (1)...(19): siRNA sense strand
gaggaggccuacagcaacu

SEQ ID NO: 931336 - RNA, 19 nt, Homo sapiens
  misc_RNA (1)...(19): siRNA sense strand
agaacaagcagcacaaaca

SEQ ID NO: 931337 - RNA, 19 nt, Homo sapiens
  misc_RNA (1)...(19): siRNA sense strand
caagguggcucuuuuggau

SEQ ID NO: 931338 - RNA, 19 nt, Homo sapiens
  misc_RNA (1)...(19): siRNA sense strand
gccaggagauucggaacga

SEQ ID NO: 931339 - RNA, 19 nt, Homo sapiens
  misc_RNA (1)...(19): siRNA sense strand
acgggaggcucuuugcaaa

SEQ ID NO: 931340 - RNA, 19 nt, Homo sapiens
  misc_RNA (1)...(19): siRNA sense strand
gcuacgaggucaaggucau

SEQ ID NO: 931341 - RNA, 19 nt, Homo sapiens
  misc_RNA (1)...(19): siRNA sense strand
ccauagagaugaaguuccu

SEQ ID NO: 931342 - RNA, 19 nt, Homo sapiens
  misc_RNA (1)...(19): siRNA sense strand
ggcgaaauccauagagaug

SEQ ID NO: 931343 - RNA, 19 nt, Homo sapiens
  misc_RNA (1)...(19): siRNA sense strand
gaacgagaucugcuacaac

SEQ ID NO: 931344 - RNA, 19 nt, Homo sapiens
  misc_RNA (1)...(19): siRNA sense strand
uacagcaacuacugcaaga

SEQ ID NO: 931345 - RNA, 19 nt, Homo sapiens
  misc_RNA (1)...(19): siRNA sense strand
gcuacaacauccugguucu

SEQ ID NO: 931346 - RNA, 19 nt, Homo sapiens
  misc_RNA (1)...(19): siRNA sense strand
ucacagccgaggacauuga

SEQ ID NO: 931347 - RNA, 19 nt, Homo sapiens
  misc_RNA (1)...(19): siRNA sense strand
ugaugagccuuuugauuuu

SEQ ID NO: 931348 - RNA, 19 nt, Homo sapiens
  misc_RNA (1)...(19): siRNA sense strand
ggugcagggucaggauaaa

SEQ ID NO: 931349 - RNA, 19 nt, Homo sapiens
  misc_RNA (1)...(19): siRNA sense strand
cccagagcaucaacaguga

SEQ ID NO: 931350 - RNA, 19 nt, Homo sapiens
  misc_RNA (1)...(19): siRNA sense strand
gcagauuggcauguucuug

SEQ ID NO: 931351 - RNA, 19 nt, Homo sapiens
  misc_RNA (1)...(19): siRNA sense strand
caguggacccuuuagagaa

SEQ ID NO: 931352 - RNA, 19 nt, Homo sapiens
  misc_RNA (1)...(19): siRNA sense strand
ggcgggacaaguuggaaua

SEQ ID NO: 931353 - RNA, 19 nt, Homo sapiens
  misc_RNA (1)...(19): siRNA sense strand
cgagaucugcuacaacauc

SEQ ID NO: 931354 - RNA, 19 nt, Homo sapiens
  misc_RNA (1)...(19): siRNA sense strand
gcgaaauccauagagauga

SEQ ID NO: 931355 - RNA, 19 nt, Homo sapiens
  misc_RNA (1)...(19): siRNA sense strand
gaaggugcagggucaggau

SEQ ID NO: 931356 - RNA, 19 nt, Homo sapiens
  misc_RNA (1)...(19): siRNA sense strand
ccgagaagauccacaaccu

SEQ ID NO: 931357 - RNA, 19 nt, Homo sapiens
  misc_RNA (1)...(19): siRNA sense strand
ccaccgagaagauccacaa

SEQ ID NO: 931358 - RNA, 19 nt, Homo sapiens
  misc_RNA (1)...(19): siRNA sense strand
cgggcgaaauccauagaga

SEQ ID NO: 931359 - RNA, 19 nt, Homo sapiens
  misc_RNA (1)...(19): siRNA sense strand
gggucaggauaaacaugaa

SEQ ID NO: 931360 - RNA, 19 nt, Homo sapiens
  misc_RNA (1)...(19): siRNA sense strand
agaggcaggcccagcagua

SEQ ID NO: 931361 - RNA, 19 nt, Homo sapiens
  misc_RNA (1)...(19): siRNA sense strand
cugaugagccuuuugauuu

SEQ ID NO: 931362 - RNA, 19 nt, Homo sapiens
  misc_RNA (1)...(19): siRNA sense strand
cagccgaggacauugagaa

SEQ ID NO: 931363 - RNA, 19 nt, Homo sapiens
  misc_RNA (1)...(19): siRNA sense strand
gggcgaaauccauagagau

SEQ ID NO: 931364 - RNA, 19 nt, Homo sapiens
  misc_RNA (1)...(19): siRNA sense strand
gggaauaugacagauccuu

SEQ ID NO: 931365 - RNA, 19 nt, Homo sapiens
  misc_RNA (1)...(19): siRNA sense strand
gcacaagguggcucuuuug

SEQ ID NO: 931366 - RNA, 19 nt, Homo sapiens
  misc_RNA (1)...(19): siRNA sense strand
uggagcagauuggcauguu

SEQ ID NO: 931367 - RNA, 19 nt, Homo sapiens
  misc_RNA (1)...(19): siRNA sense strand
gcuguucgaguuccacuuc

SEQ ID NO: 931368 - RNA, 19 nt, Homo sapiens
  misc_RNA (1)...(19): siRNA sense strand
gagcaccaccgagaagauc

SEQ ID NO: 931369 - RNA, 19 nt, Homo sapiens
  misc_RNA (1)...(19): siRNA sense strand
gagcagauuggcauguucu

SEQ ID NO: 931370 - RNA, 19 nt, Homo sapiens
  misc_RNA (1)...(19): siRNA sense strand
gaagaauauuuugcugaga

SEQ ID NO: 931371 - RNA, 19 nt, Homo sapiens
  misc_RNA (1)...(19): siRNA sense strand
gagaacaagcagcacaaac

SEQ ID NO: 931372 - RNA, 19 nt, Homo sapiens
  misc_RNA (1)...(19): siRNA sense strand
cagcacaagguggcucuuu

SEQ ID NO: 931373 - RNA, 19 nt, Homo sapiens
  misc_RNA (1)...(19): siRNA sense strand
cgaguuccacuucaugcaa

SEQ ID NO: 931374 - RNA, 19 nt, Homo sapiens
  misc_RNA (1)...(19): siRNA sense strand
ugaagcagaugaugaaaac

SEQ ID NO: 931375 - RNA, 19 nt, Homo sapiens
  misc_RNA (1)...(19): siRNA sense strand
cacugaagcagaugaugaa

SEQ ID NO: 931376 - RNA, 19 nt, Homo sapiens
  misc_RNA (1)...(19): siRNA sense strand
cgagaacaagcagcacaaa

SEQ ID NO: 931377 - RNA, 19 nt, Homo sapiens
  misc_RNA (1)...(19): siRNA sense strand
gcaacgcgggaauaugaca

SEQ ID NO: 931378 - RNA, 19 nt, Homo sapiens
  misc_RNA (1)...(19): siRNA sense strand
gagcucugcagcccacaug

SEQ ID NO: 931379 - RNA, 19 nt, Homo sapiens
  misc_RNA (1)...(19): siRNA sense strand
acagugaugucaacaaccu

SEQ ID NO: 931380 - RNA, 19 nt, Homo sapiens
  misc_RNA (1)...(19): siRNA sense strand
ucaugccacugaagcagau

SEQ ID NO: 931381 - RNA, 19 nt, Homo sapiens
  misc_RNA (1)...(19): siRNA sense strand
gcgagguggccaugaagau

SEQ ID NO: 931382 - RNA, 19 nt, Homo sapiens
  misc_RNA (1)...(19): siRNA sense strand
cuucaccgaccucuacauu

SEQ ID NO: 931383 - RNA, 19 nt, Homo sapiens
  misc_RNA (1)...(19): siRNA sense strand
gaugagccuuuugauuuug

SEQ ID NO: 931384 - RNA, 19 nt, Homo sapiens
  misc_RNA (1)...(19): siRNA sense strand
gcgagaaagaggaauauuu

SEQ ID NO: 931385 - RNA, 19 nt, Homo sapiens
  misc_RNA (1)...(19): siRNA sense strand
gcagcgagaaagaggaaua

SEQ ID NO: 931386 - RNA, 19 nt, Homo sapiens
  misc_RNA (1)...(19): siRNA sense strand
ccagauggagagugacuug

SEQ ID NO: 931387 - RNA, 19 nt, Homo sapiens
  misc_RNA (1)...(19): siRNA sense strand
ccagugccaucguccagau

SEQ ID NO: 931388 - RNA, 19 nt, Homo sapiens
  misc_RNA (1)...(19): siRNA sense strand
ccaagggcagcgagaaaga

SEQ ID NO: 931389 - RNA, 19 nt, Homo sapiens
  misc_RNA (1)...(19): siRNA sense strand
ggccaagggcagcgagaaa

SEQ ID NO: 931390 - RNA, 19 nt, Homo sapiens
  misc_RNA (1)...(19): siRNA sense strand
gggcagcgagaaagaggaa

SEQ ID NO: 931391 - RNA, 19 nt, Homo sapiens
  misc_RNA (1)...(19): siRNA sense strand
gcugagcacuggaaacaua

SEQ ID NO: 931392 - RNA, 19 nt, Homo sapiens
  misc_RNA (1)...(19): siRNA sense strand
gagcuggccucucugcuaa

SEQ ID NO: 931393 - RNA, 19 nt, Homo sapiens
  misc_RNA (1)...(19): siRNA sense strand
caagacagaugggaaagaa

SEQ ID NO: 931394 - RNA, 19 nt, Homo sapiens
  misc_RNA (1)...(19): siRNA sense strand
ccacagagccugccuucaa

SEQ ID NO: 931395 - RNA, 19 nt, Homo sapiens
  misc_RNA (1)...(19): siRNA sense strand
ccucucaccugcuuucuuu

SEQ ID NO: 931396 - RNA, 19 nt, Homo sapiens
  misc_RNA (1)...(19): siRNA sense strand
ggaguggaguggaaaggaa

SEQ ID NO: 931397 - RNA, 19 nt, Homo sapiens
  misc_RNA (1)...(19): siRNA sense strand
ggaaacauaagaaggaaga

SEQ ID NO: 931398 - RNA, 19 nt, Homo sapiens
  misc_RNA (1)...(19): siRNA sense strand
acaaagcacugaagaagag

SEQ ID NO: 931399 - RNA, 19 nt, Homo sapiens
  misc_RNA (1)...(19): siRNA sense strand
ggcauuaaggcaagaguua

SEQ ID NO: 931400 - RNA, 19 nt, Homo sapiens
  misc_RNA (1)...(19): siRNA sense strand
ggacuaaggacagccauga

SEQ ID NO: 931401 - RNA, 19 nt, Homo sapiens
  misc_RNA (1)...(19): siRNA sense strand
ggagcuggccucucugcua

SEQ ID NO: 931402 - RNA, 19 nt, Homo sapiens
  misc_RNA (1)...(19): siRNA sense strand
gacagaugggaaagaauua

SEQ ID NO: 931403 - RNA, 19 nt, Homo sapiens
  misc_RNA (1)...(19): siRNA sense strand
aagaagaggucagggaaga

SEQ ID NO: 931404 - RNA, 19 nt, Homo sapiens
  misc_RNA (1)...(19): siRNA sense strand
gggcaucucccucaacaug

SEQ ID NO: 931405 - RNA, 19 nt, Homo sapiens
  misc_RNA (1)...(19): siRNA sense strand
agacagaugggaaagaauu

SEQ ID NO: 931406 - RNA, 19 nt, Homo sapiens
  misc_RNA (1)...(19): siRNA sense strand
uggacaagcuggccaagga

SEQ ID NO: 931407 - RNA, 19 nt, Homo sapiens
  misc_RNA (1)...(19): siRNA sense strand
ccuggaaggugauguuugu

SEQ ID NO: 931408 - RNA, 19 nt, Homo sapiens
  misc_RNA (1)...(19): siRNA sense strand
ggagacaaagcacugaaga

SEQ ID NO: 931409 - RNA, 19 nt, Homo sapiens
  misc_RNA (1)...(19): siRNA sense strand
gcaucucccucaacaugug

SEQ ID NO: 931410 - RNA, 19 nt, Homo sapiens
  misc_RNA (1)...(19): siRNA sense strand
gaagaaggacaagcacuca

SEQ ID NO: 931411 - RNA, 19 nt, Homo sapiens
  misc_RNA (1)...(19): siRNA sense strand
gacaaagcacugaagaaga

SEQ ID NO: 931412 - RNA, 19 nt, Homo sapiens
  misc_RNA (1)...(19): siRNA sense strand
caucuucagccacuucuuu

SEQ ID NO: 931413 - RNA, 19 nt, Homo sapiens
  misc_RNA (1)...(19): siRNA sense strand
ggacgcucuuccagacuga

SEQ ID NO: 931414 - RNA, 19 nt, Homo sapiens
  misc_RNA (1)...(19): siRNA sense strand
gagacaaagcacugaagaa

SEQ ID NO: 931415 - RNA, 19 nt, Homo sapiens
  misc_RNA (1)...(19): siRNA sense strand
ccacagauuggcccagaaa

SEQ ID NO: 931416 - RNA, 19 nt, Homo sapiens
  misc_RNA (1)...(19): siRNA sense strand
ggagggaagggacuaagga

SEQ ID NO: 931417 - RNA, 19 nt, Homo sapiens
  misc_RNA (1)...(19): siRNA sense strand
caacagacaggugaugaug

SEQ ID NO: 931418 - RNA, 19 nt, Homo sapiens
  misc_RNA (1)...(19): siRNA sense strand
uagaugacuuugaggacuu

SEQ ID NO: 931419 - RNA, 19 nt, Homo sapiens
  misc_RNA (1)...(19): siRNA sense strand
ggaaggcugagcacuggaa

SEQ ID NO: 931420 - RNA, 19 nt, Homo sapiens
  misc_RNA (1)...(19): siRNA sense strand
gcacuggaaacauaagaag

SEQ ID NO: 931421 - RNA, 19 nt, Homo sapiens
  misc_RNA (1)...(19): siRNA sense strand
gggaaaggaagaagaacug

SEQ ID NO: 931422 - RNA, 19 nt, Homo sapiens
  misc_RNA (1)...(19): siRNA sense strand
gaagaggucagggaagaag

SEQ ID NO: 931423 - RNA, 19 nt, Homo sapiens
  misc_RNA (1)...(19): siRNA sense strand
aacaggagcuggccucucu

SEQ ID NO: 931424 - RNA, 19 nt, Homo sapiens
  misc_RNA (1)...(19): siRNA sense strand
gagcugggccacagauugg

SEQ ID NO: 931425 - RNA, 19 nt, Homo sapiens
  misc_RNA (1)...(19): siRNA sense strand
ggucagggaagaaggacaa

SEQ ID NO: 931426 - RNA, 19 nt, Homo sapiens
  misc_RNA (1)...(19): siRNA sense strand
gcaacagacaggugaugau

SEQ ID NO: 931427 - RNA, 19 nt, Homo sapiens
  misc_RNA (1)...(19): siRNA sense strand
gcuggccucucugcuaaga

SEQ ID NO: 931428 - RNA, 19 nt, Homo sapiens
  misc_RNA (1)...(19): siRNA sense strand
ccucucugcuaagaacaua

SEQ ID NO: 931429 - RNA, 19 nt, Homo sapiens
  misc_RNA (1)...(19): siRNA sense strand
agacaaagcacugaagaag

SEQ ID NO: 931430 - RNA, 19 nt, Homo sapiens
  misc_RNA (1)...(19): siRNA sense strand
acaccgacguggacaugga

SEQ ID NO: 931431 - RNA, 19 nt, Homo sapiens
  misc_RNA (1)...(19): siRNA sense strand
cugggcagcugaccaagga

SEQ ID NO: 931432 - RNA, 19 nt, Homo sapiens
  misc_RNA (1)...(19): siRNA sense strand
cagaggagacugaggucaa

SEQ ID NO: 931433 - RNA, 19 nt, Homo sapiens
  misc_RNA (1)...(19): siRNA sense strand
cuucucagguggccucuca

SEQ ID NO: 931434 - RNA, 19 nt, Homo sapiens
  misc_RNA (1)...(19): siRNA sense strand
gcacucacagagcccaaga

SEQ ID NO: 931435 - RNA, 19 nt, Homo sapiens
  misc_RNA (1)...(19): siRNA sense strand
uuugaggacuucaucuuca

SEQ ID NO: 931436 - RNA, 19 nt, Homo sapiens
  misc_RNA (1)...(19): siRNA sense strand
gaaggcugagcacuggaaa

SEQ ID NO: 931437 - RNA, 19 nt, Homo sapiens
  misc_RNA (1)...(19): siRNA sense strand
ucuagggaguggaguggaa

SEQ ID NO: 931438 - RNA, 19 nt, Homo sapiens
  misc_RNA (1)...(19): siRNA sense strand
gagcaggagccagaacuca

SEQ ID NO: 931439 - RNA, 19 nt, Homo sapiens
  misc_RNA (1)...(19): siRNA sense strand
gagcacuggaaacauaaga

SEQ ID NO: 931440 - RNA, 19 nt, Homo sapiens
  misc_RNA (1)...(19): siRNA sense strand
caggauggacccagaaucu

SEQ ID NO: 931441 - RNA, 19 nt, Homo sapiens
  misc_RNA (1)...(19): siRNA sense strand
ggagggccugacuuucuuu

SEQ ID NO: 931442 - RNA, 19 nt, Homo sapiens
  misc_RNA (1)...(19): siRNA sense strand
gaguggaguggaaaggaaa

SEQ ID NO: 931443 - RNA, 19 nt, Homo sapiens
  misc_RNA (1)...(19): siRNA sense strand
ccaaggagaaccaggacau

SEQ ID NO: 931444 - RNA, 19 nt, Homo sapiens
  misc_RNA (1)...(19): siRNA sense strand
aggagggccugacuuucuu

SEQ ID NO: 931445 - RNA, 19 nt, Homo sapiens
  misc_RNA (1)...(19): siRNA sense strand
cacagagccugccuucaac

SEQ ID NO: 931446 - RNA, 19 nt, Homo sapiens
  misc_RNA (1)...(19): siRNA sense strand
cagucuggcagcauucuaa

SEQ ID NO: 931447 - RNA, 19 nt, Homo sapiens
  misc_RNA (1)...(19): siRNA sense strand
cauuaaggcaagaguuaga

SEQ ID NO: 931448 - RNA, 19 nt, Homo sapiens
  misc_RNA (1)...(19): siRNA sense strand
cagauuggcccagaaacug

SEQ ID NO: 931449 - RNA, 19 nt, Homo sapiens
  misc_RNA (1)...(19): siRNA sense strand
gcauuaaggcaagaguuag

SEQ ID NO: 931450 - RNA, 19 nt, Homo sapiens
  misc_RNA (1)...(19): siRNA sense strand
gccgggaaaggaagaagaa

SEQ ID NO: 931451 - RNA, 19 nt, Homo sapiens
  misc_RNA (1)...(19): siRNA sense strand
gaaacauaagaaggaagaa

SEQ ID NO: 931452 - RNA, 19 nt, Homo sapiens
  misc_RNA (1)...(19): siRNA sense strand
ugagcugggccacagauug

SEQ ID NO: 931453 - RNA, 19 nt, Homo sapiens
  misc_RNA (1)...(19): siRNA sense strand
ggagaggagcuugcaggau

SEQ ID NO: 931454 - RNA, 19 nt, Homo sapiens
  misc_RNA (1)...(19): siRNA sense strand
ccaagacagaugggaaaga

SEQ ID NO: 931455 - RNA, 19 nt, Homo sapiens
  misc_RNA (1)...(19): siRNA sense strand
ggaggagguggcugugcaa

SEQ ID NO: 931456 - RNA, 19 nt, Homo sapiens
  misc_RNA (1)...(19): siRNA sense strand
guggugggaugggcagaga

SEQ ID NO: 931457 - RNA, 19 nt, Homo sapiens
  misc_RNA (1)...(19): siRNA sense strand
ggcugaggcacaggcauua

SEQ ID NO: 931458 - RNA, 19 nt, Homo sapiens
  misc_RNA (1)...(19): siRNA sense strand
cccagugccuccugacagu

SEQ ID NO: 931459 - RNA, 19 nt, Homo sapiens
  misc_RNA (1)...(19): siRNA sense strand
cuggaaacauaagaaggaa

SEQ ID NO: 931460 - RNA, 19 nt, Homo sapiens
  misc_RNA (1)...(19): siRNA sense strand
ggugggaugggcagagaga

SEQ ID NO: 931461 - RNA, 19 nt, Homo sapiens
  misc_RNA (1)...(19): siRNA sense strand
gcugaggcacaggcauuaa

SEQ ID NO: 931462 - RNA, 19 nt, Homo sapiens
  misc_RNA (1)...(19): siRNA sense strand
caaagaagccguacucugu

SEQ ID NO: 931463 - RNA, 19 nt, Homo sapiens
  misc_RNA (1)...(19): siRNA sense strand
ggcaagagguucacucguu

SEQ ID NO: 931464 - RNA, 19 nt, Homo sapiens
  misc_RNA (1)...(19): siRNA sense strand
gcaaagcaggcacaaagaa

SEQ ID NO: 931465 - RNA, 19 nt, Homo sapiens
  misc_RNA (1)...(19): siRNA sense strand
gggcacagcucuucugacu

SEQ ID NO: 931466 - RNA, 19 nt, Homo sapiens
  misc_RNA (1)...(19): siRNA sense strand
gcacaaagaagccguacuc

SEQ ID NO: 931467 - RNA, 19 nt, Homo sapiens
  misc_RNA (1)...(19): siRNA sense strand
caacaacucugggcaaagc

SEQ ID NO: 931468 - RNA, 19 nt, Homo sapiens
  misc_RNA (1)...(19): siRNA sense strand
gggcaaagcaggcacaaag

SEQ ID NO: 931469 - RNA, 19 nt, Homo sapiens
  misc_RNA (1)...(19): siRNA sense strand
gaagaggaggccagucaga

SEQ ID NO: 931470 - RNA, 19 nt, Homo sapiens
  misc_RNA (1)...(19): siRNA sense strand
gaaauagugggcagcuaga

SEQ ID NO: 931471 - RNA, 19 nt, Homo sapiens
  misc_RNA (1)...(19): siRNA sense strand
gcacuaaugggcuccuuuc

SEQ ID NO: 931472 - RNA, 19 nt, Homo sapiens
  misc_RNA (1)...(19): siRNA sense strand
gcacccaccucaggcuaug

SEQ ID NO: 931473 - RNA, 19 nt, Homo sapiens
  misc_RNA (1)...(19): siRNA sense strand
gggaagaggaggccaguca

SEQ ID NO: 931474 - RNA, 19 nt, Homo sapiens
  misc_RNA (1)...(19): siRNA sense strand
gaagcgaccaccugagcaa

SEQ ID NO: 931475 - RNA, 19 nt, Homo sapiens
  misc_RNA (1)...(19): siRNA sense strand
ccaaggcagugggaaauag

SEQ ID NO: 931476 - RNA, 19 nt, Homo sapiens
  misc_RNA (1)...(19): siRNA sense strand
guacaaggcaggcauccau

SEQ ID NO: 931477 - RNA, 19 nt, Homo sapiens
  misc_RNA (1)...(19): siRNA sense strand
cuacaccucucuggacaug

SEQ ID NO: 931478 - RNA, 19 nt, Homo sapiens
  misc_RNA (1)...(19): siRNA sense strand
gcagcgugcagcaaauuug

SEQ ID NO: 931479 - RNA, 19 nt, Homo sapiens
  misc_RNA (1)...(19): siRNA sense strand
gggaaauagugggcagcua

SEQ ID NO: 931480 - RNA, 19 nt, Homo sapiens
  misc_RNA (1)...(19): siRNA sense strand
ccuacuccauggugggaua

SEQ ID NO: 931481 - RNA, 19 nt, Homo sapiens
  misc_RNA (1)...(19): siRNA sense strand
caaagcaggcacaaagaag

SEQ ID NO: 931482 - RNA, 19 nt, Homo sapiens
  misc_RNA (1)...(19): siRNA sense strand
aggaggaaguucacuaugg

SEQ ID NO: 931483 - RNA, 19 nt, Homo sapiens
  misc_RNA (1)...(19): siRNA sense strand
gcgaccaccugagcaaaca

SEQ ID NO: 931484 - RNA, 19 nt, Homo sapiens
  misc_RNA (1)...(19): siRNA sense strand
gcaccugaaggcccacuug

SEQ ID NO: 931485 - RNA, 19 nt, Homo sapiens
  misc_RNA (1)...(19): siRNA sense strand
caccuacccaucugacuuu

SEQ ID NO: 931486 - RNA, 19 nt, Homo sapiens
  misc_RNA (1)...(19): siRNA sense strand
gccccaagaugucuauaaa

SEQ ID NO: 931487 - RNA, 19 nt, Homo sapiens
  misc_RNA (1)...(19): siRNA sense strand
gcaaggcuucgcaccugaa

SEQ ID NO: 931488 - RNA, 19 nt, Homo sapiens
  misc_RNA (1)...(19): siRNA sense strand
gcacucacacccgggagaa

SEQ ID NO: 931489 - RNA, 19 nt, Homo sapiens
  misc_RNA (1)...(19): siRNA sense strand
ugaggaggaaguucacuau

SEQ ID NO: 931490 - RNA, 19 nt, Homo sapiens
  misc_RNA (1)...(19): siRNA sense strand
gacggcagcgugcagcaaa

SEQ ID NO: 931491 - RNA, 19 nt, Homo sapiens
  misc_RNA (1)...(19): siRNA sense strand
ccaccuacccaucugacuu

SEQ ID NO: 931492 - RNA, 19 nt, Homo sapiens
  misc_RNA (1)...(19): siRNA sense strand
ggcaaagcaggcacaaaga

SEQ ID NO: 931493 - RNA, 19 nt, Homo sapiens
  misc_RNA (1)...(19): siRNA sense strand
gaggaggaaguucacuaug

SEQ ID NO: 931494 - RNA, 19 nt, Homo sapiens
  misc_RNA (1)...(19): siRNA sense strand
gcgcacccauggagaacca

SEQ ID NO: 931495 - RNA, 19 nt, Homo sapiens
  misc_RNA (1)...(19): siRNA sense strand
ggacaugacacaccccuau

SEQ ID NO: 931496 - RNA, 19 nt, Homo sapiens
  misc_RNA (1)...(19): siRNA sense strand
ugacuuugcuccccuuaau

SEQ ID NO: 931497 - RNA, 19 nt, Homo sapiens
  misc_RNA (1)...(19): siRNA sense strand
ccaccucaggcuaugcuaa

SEQ ID NO: 931498 - RNA, 19 nt, Homo sapiens
  misc_RNA (1)...(19): siRNA sense strand
gcccugagcagagcaacuu

SEQ ID NO: 931499 - RNA, 19 nt, Homo sapiens
  misc_RNA (1)...(19): siRNA sense strand
ccucaggcuaugcuaauga

SEQ ID NO: 931500 - RNA, 19 nt, Homo sapiens
  misc_RNA (1)...(19): siRNA sense strand
cccaagaugucuauaaacc

SEQ ID NO: 931501 - RNA, 19 nt, Homo sapiens
  misc_RNA (1)...(19): siRNA sense strand
gcaaauuugguggcucuag

SEQ ID NO: 931502 - RNA, 19 nt, Homo sapiens
  misc_RNA (1)...(19): siRNA sense strand
cucaacaacucugggcaaa

SEQ ID NO: 931503 - RNA, 19 nt, Homo sapiens
  misc_RNA (1)...(19): siRNA sense strand
cuaauugccaggagcuaga

SEQ ID NO: 931504 - RNA, 19 nt, Homo sapiens
  misc_RNA (1)...(19): siRNA sense strand
caacuugcuggagaucuga

SEQ ID NO: 931505 - RNA, 19 nt, Homo sapiens
  misc_RNA (1)...(19): siRNA sense strand
ccagcgcacccauggagaa

SEQ ID NO: 931506 - RNA, 19 nt, Homo sapiens
  misc_RNA (1)...(19): siRNA sense strand
gcucugcuccaagcgcuuu

SEQ ID NO: 931507 - RNA, 19 nt, Homo sapiens
  misc_RNA (1)...(19): siRNA sense strand
ggcagcgugcagcaaauuu

SEQ ID NO: 931508 - RNA, 19 nt, Homo sapiens
  misc_RNA (1)...(19): siRNA sense strand
cuacccaucugacuuugcu

SEQ ID NO: 931509 - RNA, 19 nt, Homo sapiens
  misc_RNA (1)...(19): siRNA sense strand
ggaagucgguggccucuua

SEQ ID NO: 931510 - RNA, 19 nt, Homo sapiens
  misc_RNA (1)...(19): siRNA sense strand
ggacagcuuugauuucauu

SEQ ID NO: 931511 - RNA, 19 nt, Homo sapiens
  misc_RNA (1)...(19): siRNA sense strand
gaagaggacagcuuugauu

SEQ ID NO: 931512 - RNA, 19 nt, Homo sapiens
  misc_RNA (1)...(19): siRNA sense strand
gaggacagcuuugauuuca

SEQ ID NO: 931513 - RNA, 19 nt, Homo sapiens
  misc_RNA (1)...(19): siRNA sense strand
ggaggaagaggacagcuuu

SEQ ID NO: 931514 - RNA, 19 nt, Homo sapiens
  misc_RNA (1)...(19): siRNA sense strand
gaaaagccauccagucucu

SEQ ID NO: 931515 - RNA, 19 nt, Homo sapiens
  misc_RNA (1)...(19): siRNA sense strand
ugauuucauugguggauuu

SEQ ID NO: 931516 - RNA, 19 nt, Homo sapiens
  misc_RNA (1)...(19): siRNA sense strand
cauccagucucuuguccaa

SEQ ID NO: 931517 - RNA, 19 nt, Homo sapiens
  misc_RNA (1)...(19): siRNA sense strand
ggaagaggacagcuuugau

SEQ ID NO: 931518 - RNA, 19 nt, Homo sapiens
  misc_RNA (1)...(19): siRNA sense strand
gaagucgguggccucuuaa

SEQ ID NO: 931519 - RNA, 19 nt, Homo sapiens
  misc_RNA (1)...(19): siRNA sense strand
agaggcagguguuugacuu

SEQ ID NO: 931520 - RNA, 19 nt, Homo sapiens
  misc_RNA (1)...(19): siRNA sense strand
ucucuaccaugucaaugaa

SEQ ID NO: 931521 - RNA, 19 nt, Homo sapiens
  misc_RNA (1)...(19): siRNA sense strand
acagcgagcuacugaccuu

SEQ ID NO: 931522 - RNA, 19 nt, Homo sapiens
  misc_RNA (1)...(19): siRNA sense strand
aagaggacagcuuugauuu

SEQ ID NO: 931523 - RNA, 19 nt, Homo sapiens
  misc_RNA (1)...(19): siRNA sense strand
uggaggcccuacacaguug

SEQ ID NO: 931524 - RNA, 19 nt, Homo sapiens
  misc_RNA (1)...(19): siRNA sense strand
ggccaacuuuguccacauc

SEQ ID NO: 931525 - RNA, 19 nt, Homo sapiens
  misc_RNA (1)...(19): siRNA sense strand
cagcuuugauuucauuggu

SEQ ID NO: 931526 - RNA, 19 nt, Homo sapiens
  misc_RNA (1)...(19): siRNA sense strand
ucgguggccucuuaaagga

SEQ ID NO: 931527 - RNA, 19 nt, Homo sapiens
  misc_RNA (1)...(19): siRNA sense strand
uggaacgucuucaucaucu

SEQ ID NO: 931528 - RNA, 19 nt, Homo sapiens
  misc_RNA (1)...(19): siRNA sense strand
caacuuuguccacaucauc

SEQ ID NO: 931529 - RNA, 19 nt, Homo sapiens
  misc_RNA (1)...(19): siRNA sense strand
cauuuccucucuaccaugu

SEQ ID NO: 931530 - RNA, 19 nt, Homo sapiens
  misc_RNA (1)...(19): siRNA sense strand
gaucgcgcuucugggcuuu

SEQ ID NO: 931531 - RNA, 19 nt, Homo sapiens
  misc_RNA (1)...(19): siRNA sense strand
guggaggcccuacacaguu

SEQ ID NO: 931532 - RNA, 19 nt, Homo sapiens
  misc_RNA (1)...(19): siRNA sense strand
uggagaggcagguguuuga

SEQ ID NO: 931533 - RNA, 19 nt, Homo sapiens
  misc_RNA (1)...(19): siRNA sense strand
ggaacgucuucaucaucug

SEQ ID NO: 931534 - RNA, 19 nt, Homo sapiens
  misc_RNA (1)...(19): siRNA sense strand
ccagguggucagcguguuu

SEQ ID NO: 931535 - RNA, 19 nt, Homo sapiens
  misc_RNA (1)...(19): siRNA sense strand
cggcugcgcuaugucaugu

SEQ ID NO: 931536 - RNA, 19 nt, Homo sapiens
  misc_RNA (1)...(19): siRNA sense strand
uuucauugguggauuugau

SEQ ID NO: 931537 - RNA, 19 nt, Homo sapiens
  misc_RNA (1)...(19): siRNA sense strand
gcugcgcuaugucauguac

SEQ ID NO: 931538 - RNA, 19 nt, Homo sapiens
  misc_RNA (1)...(19): siRNA sense strand
uguccaagcagguguacuu

SEQ ID NO: 931539 - RNA, 19 nt, Homo sapiens
  misc_RNA (1)...(19): siRNA sense strand
aaagccauccagucucuug

SEQ ID NO: 931540 - RNA, 19 nt, Homo sapiens
  misc_RNA (1)...(19): siRNA sense strand
gcccauccuggccaacuuu

SEQ ID NO: 931541 - RNA, 19 nt, Homo sapiens
  misc_RNA (1)...(19): siRNA sense strand
ccuggaacgucuucaucau

SEQ ID NO: 931542 - RNA, 19 nt, Homo sapiens
  misc_RNA (1)...(19): siRNA sense strand
aaggacagcgagcuacuga

SEQ ID NO: 931543 - RNA, 19 nt, Homo sapiens
  misc_RNA (1)...(19): siRNA sense strand
gaggaagaggacagcuuug

SEQ ID NO: 931544 - RNA, 19 nt, Homo sapiens
  misc_RNA (1)...(19): siRNA sense strand
cagguggucagcguguuua

SEQ ID NO: 931545 - RNA, 19 nt, Homo sapiens
  misc_RNA (1)...(19): siRNA sense strand
gaagaaguuuggagaauug

SEQ ID NO: 931546 - RNA, 19 nt, Homo sapiens
  misc_RNA (1)...(19): siRNA sense strand
gcaauaacaugaggauaaa

SEQ ID NO: 931547 - RNA, 19 nt, Homo sapiens
  misc_RNA (1)...(19): siRNA sense strand
ggaagaaguuuggagaauu

SEQ ID NO: 931548 - RNA, 19 nt, Homo sapiens
  misc_RNA (1)...(19): siRNA sense strand
ccagagagauugaaaauuu

SEQ ID NO: 931549 - RNA, 19 nt, Homo sapiens
  misc_RNA (1)...(19): siRNA sense strand
gaaacgagcuuuugaggaa

SEQ ID NO: 931550 - RNA, 19 nt, Homo sapiens
  misc_RNA (1)...(19): siRNA sense strand
ggaagaguacuacagauuu

SEQ ID NO: 931551 - RNA, 19 nt, Homo sapiens
  misc_RNA (1)...(19): siRNA sense strand
cagcuuggauuacuaaguu

SEQ ID NO: 931552 - RNA, 19 nt, Homo sapiens
  misc_RNA (1)...(19): siRNA sense strand
uggcauaaaugguaucaaa

SEQ ID NO: 931553 - RNA, 19 nt, Homo sapiens
  misc_RNA (1)...(19): siRNA sense strand
gucaaaggauuuaauguug

SEQ ID NO: 931554 - RNA, 19 nt, Homo sapiens
  misc_RNA (1)...(19): siRNA sense strand
gcagguucaugcaaauauu

SEQ ID NO: 931555 - RNA, 19 nt, Homo sapiens
  misc_RNA (1)...(19): siRNA sense strand
cauaaguacuuuccauguu

SEQ ID NO: 931556 - RNA, 19 nt, Homo sapiens
  misc_RNA (1)...(19): siRNA sense strand
gcauaaaugguaucaaaga

SEQ ID NO: 931557 - RNA, 19 nt, Homo sapiens
  misc_RNA (1)...(19): siRNA sense strand
ucagagagauauuuguuuc

SEQ ID NO: 931558 - RNA, 19 nt, Homo sapiens
  misc_RNA (1)...(19): siRNA sense strand
guauaucuccuuuggcaua

SEQ ID NO: 931559 - RNA, 19 nt, Homo sapiens
  misc_RNA (1)...(19): siRNA sense strand
gaagaguacuacagauuuu

SEQ ID NO: 931560 - RNA, 19 nt, Homo sapiens
  misc_RNA (1)...(19): siRNA sense strand
gaaguagaaauccuaaguu

SEQ ID NO: 931561 - RNA, 19 nt, Homo sapiens
  misc_RNA (1)...(19): siRNA sense strand
gcuuuaaacuggagagaau

SEQ ID NO: 931562 - RNA, 19 nt, Homo sapiens
  misc_RNA (1)...(19): siRNA sense strand
gacaucugcuuguggguaa

SEQ ID NO: 931563 - RNA, 19 nt, Homo sapiens
  misc_RNA (1)...(19): siRNA sense strand
uauaggagauuuccaccuu

SEQ ID NO: 931564 - RNA, 19 nt, Homo sapiens
  misc_RNA (1)...(19): siRNA sense strand
gaaguuuggagaauugaaa

SEQ ID NO: 931565 - RNA, 19 nt, Homo sapiens
  misc_RNA (1)...(19): siRNA sense strand
gacaacagguuauugaacu

SEQ ID NO: 931566 - RNA, 19 nt, Homo sapiens
  misc_RNA (1)...(19): siRNA sense strand
ccuaauggcauaaauggua

SEQ ID NO: 931567 - RNA, 19 nt, Homo sapiens
  misc_RNA (1)...(19): siRNA sense strand
ggaaugaggaagaaguuug

SEQ ID NO: 931568 - RNA, 19 nt, Homo sapiens
  misc_RNA (1)...(19): siRNA sense strand
ggaaguagaaauccuaagu

SEQ ID NO: 931569 - RNA, 19 nt, Homo sapiens
  misc_RNA (1)...(19): siRNA sense strand
gaaggucagagagauauuu

SEQ ID NO: 931570 - RNA, 19 nt, Homo sapiens
  misc_RNA (1)...(19): siRNA sense strand
gcuauaagcuuggccacau

SEQ ID NO: 931571 - RNA, 19 nt, Homo sapiens
  misc_RNA (1)...(19): siRNA sense strand
guagaaauccuaaguuugc

SEQ ID NO: 931572 - RNA, 19 nt, Homo sapiens
  misc_RNA (1)...(19): siRNA sense strand
agaauccaaugcugaauau

SEQ ID NO: 931573 - RNA, 19 nt, Homo sapiens
  misc_RNA (1)...(19): siRNA sense strand
gccaaauccuugaccauuc

SEQ ID NO: 931574 - RNA, 19 nt, Homo sapiens
  misc_RNA (1)...(19): siRNA sense strand
gcucauaaguacuuuccau

SEQ ID NO: 931575 - RNA, 19 nt, Homo sapiens
  misc_RNA (1)...(19): siRNA sense strand
gcagcugcuuaucaacuuu

SEQ ID NO: 931576 - RNA, 19 nt, Homo sapiens
  misc_RNA (1)...(19): siRNA sense strand
caaaggauuuaauguuguc

SEQ ID NO: 931577 - RNA, 19 nt, Homo sapiens
  misc_RNA (1)...(19): siRNA sense strand
cagaauccaaugcugaaua

SEQ ID NO: 931578 - RNA, 19 nt, Homo sapiens
  misc_RNA (1)...(19): siRNA sense strand
gaaaacagcuuggauuacu

SEQ ID NO: 931579 - RNA, 19 nt, Homo sapiens
  misc_RNA (1)...(19): siRNA sense strand
gcaaggaaggucacuguag

SEQ ID NO: 931580 - RNA, 19 nt, Homo sapiens
  misc_RNA (1)...(19): siRNA sense strand
ggucagagagauauuuguu

SEQ ID NO: 931581 - RNA, 19 nt, Homo sapiens
  misc_RNA (1)...(19): siRNA sense strand
cuacgacucuuuacucucu

SEQ ID NO: 931582 - RNA, 19 nt, Homo sapiens
  misc_RNA (1)...(19): siRNA sense strand
gauaaaccaguacccagaa

SEQ ID NO: 931583 - RNA, 19 nt, Homo sapiens
  misc_RNA (1)...(19): siRNA sense strand
aaacagcuuggauuacuaa

SEQ ID NO: 931584 - RNA, 19 nt, Homo sapiens
  misc_RNA (1)...(19): siRNA sense strand
ccauucgacuuauuagaug

SEQ ID NO: 931585 - RNA, 19 nt, Homo sapiens
  misc_RNA (1)...(19): siRNA sense strand
ggagagggucacaguaaug

SEQ ID NO: 931586 - RNA, 19 nt, Homo sapiens
  misc_RNA (1)...(19): siRNA sense strand
gaugagaaggucagagaga

SEQ ID NO: 931587 - RNA, 19 nt, Homo sapiens
  misc_RNA (1)...(19): siRNA sense strand
ucaugaagaugcucucaca

SEQ ID NO: 931588 - RNA, 19 nt, Homo sapiens
  misc_RNA (1)...(19): siRNA sense strand
ggucauaggaaguagaaau

SEQ ID NO: 931589 - RNA, 19 nt, Homo sapiens
  misc_RNA (1)...(19): siRNA sense strand
gaggaagaguacuacagau

SEQ ID NO: 931590 - RNA, 19 nt, Homo sapiens
  misc_RNA (1)...(19): siRNA sense strand
gagaaggucagagagauau

SEQ ID NO: 931591 - RNA, 19 nt, Homo sapiens
  misc_RNA (1)...(19): siRNA sense strand
gccggcagguuuauauaug

SEQ ID NO: 931592 - RNA, 19 nt, Homo sapiens
  misc_RNA (1)...(19): siRNA sense strand
guuuauauaugcagcaaca

SEQ ID NO: 931593 - RNA, 19 nt, Homo sapiens
  misc_RNA (1)...(19): siRNA sense strand
aaauguauaucuccuuugg

SEQ ID NO: 931594 - RNA, 19 nt, Homo sapiens
  misc_RNA (1)...(19): siRNA sense strand
ucacuucuaucccuucagu

SEQ ID NO: 931595 - RNA, 19 nt, Homo sapiens
  misc_RNA (1)...(19): siRNA sense strand
acaugaggauaaaccagua

SEQ ID NO: 931596 - RNA, 19 nt, Homo sapiens
  misc_RNA (1)...(19): siRNA sense strand
cuaauggcauaaaugguau

SEQ ID NO: 931597 - RNA, 19 nt, Homo sapiens
  misc_RNA (1)...(19): siRNA sense strand
ggagauuuccaccuugguu

SEQ ID NO: 931598 - RNA, 19 nt, Homo sapiens
  misc_RNA (1)...(19): siRNA sense strand
caagcgcgacaacagguua

SEQ ID NO: 931599 - RNA, 19 nt, Homo sapiens
  misc_RNA (1)...(19): siRNA sense strand
gauuggaaguggagauuuu

SEQ ID NO: 931600 - RNA, 19 nt, Homo sapiens
  misc_RNA (1)...(19): siRNA sense strand
ugaagaugcucucacaaaa

SEQ ID NO: 931601 - RNA, 19 nt, Homo sapiens
  misc_RNA (1)...(19): siRNA sense strand
ugagaaggucagagagaua

SEQ ID NO: 931602 - RNA, 19 nt, Homo sapiens
  misc_RNA (1)...(19): siRNA sense strand
ggcagcugcuuaucaacuu

SEQ ID NO: 931603 - RNA, 19 nt, Homo sapiens
  misc_RNA (1)...(19): siRNA sense strand
ccagauucuuugauuguca

SEQ ID NO: 931604 - RNA, 19 nt, Homo sapiens
  misc_RNA (1)...(19): siRNA sense strand
agcaauaacaugaggauaa

SEQ ID NO: 931605 - RNA, 19 nt, Homo sapiens
  misc_RNA (1)...(19): siRNA sense strand
ggagagaauucaguuuuau

SEQ ID NO: 931606 - RNA, 19 nt, Homo sapiens
  misc_RNA (1)...(19): siRNA sense strand
gaaauguauaucuccuuug

SEQ ID NO: 931607 - RNA, 19 nt, Homo sapiens
  misc_RNA (1)...(19): siRNA sense strand
caccaaguauaggagauuu

SEQ ID NO: 931608 - RNA, 19 nt, Homo sapiens
  misc_RNA (1)...(19): siRNA sense strand
cuagaaaccaacagaguga

SEQ ID NO: 931609 - RNA, 19 nt, Homo sapiens
  misc_RNA (1)...(19): siRNA sense strand
ggccaguggugguagcuau

SEQ ID NO: 931610 - RNA, 19 nt, Homo sapiens
  misc_RNA (1)...(19): siRNA sense strand
ugacuugggauccuuauca

SEQ ID NO: 931611 - RNA, 19 nt, Homo sapiens
  misc_RNA (1)...(19): siRNA sense strand
ccggagagggucacaguaa

SEQ ID NO: 931612 - RNA, 19 nt, Homo sapiens
  misc_RNA (1)...(19): siRNA sense strand
gcucugcucauaaguacuu

SEQ ID NO: 931613 - RNA, 19 nt, Homo sapiens
  misc_RNA (1)...(19): siRNA sense strand
gaggaagaaguuuggagaa

SEQ ID NO: 931614 - RNA, 19 nt, Homo sapiens
  misc_RNA (1)...(19): siRNA sense strand
gcaccaaguauaggagauu

SEQ ID NO: 931615 - RNA, 19 nt, Homo sapiens
  misc_RNA (1)...(19): siRNA sense strand
uauaucuccuuuggcauaa

SEQ ID NO: 931616 - RNA, 19 nt, Homo sapiens
  misc_RNA (1)...(19): siRNA sense strand
ugaggaagaguacuacaga

SEQ ID NO: 931617 - RNA, 19 nt, Homo sapiens
  misc_RNA (1)...(19): siRNA sense strand
ucuggcagcugcuuaucaa

SEQ ID NO: 931618 - RNA, 19 nt, Homo sapiens
  misc_RNA (1)...(19): siRNA sense strand
ccaaauccuugaccauucg

SEQ ID NO: 931619 - RNA, 19 nt, Homo sapiens
  misc_RNA (1)...(19): siRNA sense strand
uuuauucagucuacacuug

SEQ ID NO: 931620 - RNA, 19 nt, Homo sapiens
  misc_RNA (1)...(19): siRNA sense strand
auccaaugcugaauauuug

SEQ ID NO: 931621 - RNA, 19 nt, Homo sapiens
  misc_RNA (1)...(19): siRNA sense strand
gaaugaggaagaaguuugg

SEQ ID NO: 931622 - RNA, 19 nt, Homo sapiens
  misc_RNA (1)...(19): siRNA sense strand
cuauaagcuuggccacauu

SEQ ID NO: 931623 - RNA, 19 nt, Homo sapiens
  misc_RNA (1)...(19): siRNA sense strand
gcuauacacagagaacauu

SEQ ID NO: 931624 - RNA, 19 nt, Homo sapiens
  misc_RNA (1)...(19): siRNA sense strand
aaacuuuguucuugcucuu

SEQ ID NO: 931625 - RNA, 19 nt, Homo sapiens
  misc_RNA (1)...(19): siRNA sense strand
gaaaccaacagagugacuu

SEQ ID NO: 931626 - RNA, 19 nt, Homo sapiens
  misc_RNA (1)...(19): siRNA sense strand
caacagguuauugaacuug

SEQ ID NO: 931627 - RNA, 19 nt, Homo sapiens
  misc_RNA (1)...(19): siRNA sense strand
aaaccaacagagugacuuu

SEQ ID NO: 931628 - RNA, 19 nt, Homo sapiens
  misc_RNA (1)...(19): siRNA sense strand
gagagggucacaguaaugu

SEQ ID NO: 931629 - RNA, 19 nt, Homo sapiens
  misc_RNA (1)...(19): siRNA sense strand
cggagagggucacaguaau

SEQ ID NO: 931630 - RNA, 19 nt, Homo sapiens
  misc_RNA (1)...(19): siRNA sense strand
uuauacaccaccaaacuuu

SEQ ID NO: 931631 - RNA, 19 nt, Homo sapiens
  misc_RNA (1)...(19): siRNA sense strand
uggagagaauucaguuuua

SEQ ID NO: 931632 - RNA, 19 nt, Homo sapiens
  misc_RNA (1)...(19): siRNA sense strand
uagaaaacagcuuggauua

SEQ ID NO: 931633 - RNA, 19 nt, Homo sapiens
  misc_RNA (1)...(19): siRNA sense strand
gagagggccagugguggua

SEQ ID NO: 931634 - RNA, 19 nt, Homo sapiens
  misc_RNA (1)...(19): siRNA sense strand
uaucuccuuuggcauaaug

SEQ ID NO: 931635 - RNA, 19 nt, Homo sapiens
  misc_RNA (1)...(19): siRNA sense strand
cagcugcuuaucaacuuua

SEQ ID NO: 931636 - RNA, 19 nt, Homo sapiens
  misc_RNA (1)...(19): siRNA sense strand
uuacuuugcucucccuagu

SEQ ID NO: 931637 - RNA, 19 nt, Homo sapiens
  misc_RNA (1)...(19): siRNA sense strand
ugucagagaugugauucau

SEQ ID NO: 931638 - RNA, 19 nt, Homo sapiens
  misc_RNA (1)...(19): siRNA sense strand
cuauacacagagaacauua

SEQ ID NO: 931639 - RNA, 19 nt, Homo sapiens
  misc_RNA (1)...(19): siRNA sense strand
agucuacacuuggauaugu

SEQ ID NO: 931640 - RNA, 19 nt, Homo sapiens
  misc_RNA (1)...(19): siRNA sense strand
aggaagaaguuuggagaau

SEQ ID NO: 931641 - RNA, 19 nt, Homo sapiens
  misc_RNA (1)...(19): siRNA sense strand
acaacagguuauugaacuu

SEQ ID NO: 931642 - RNA, 19 nt, Homo sapiens
  misc_RNA (1)...(19): siRNA sense strand
gagcaauaacaugaggaua

SEQ ID NO: 931643 - RNA, 19 nt, Homo sapiens
  misc_RNA (1)...(19): siRNA sense strand
ucagcagguucaugcaaau

SEQ ID NO: 931644 - RNA, 19 nt, Homo sapiens
  misc_RNA (1)...(19): siRNA sense strand
aaagagccaauuucuggaa

SEQ ID NO: 931645 - RNA, 19 nt, Homo sapiens
  misc_RNA (1)...(19): siRNA sense strand
ggacacagaccuaauuaaa

SEQ ID NO: 931646 - RNA, 19 nt, Homo sapiens
  misc_RNA (1)...(19): siRNA sense strand
gaagacaccaucaaagaaa

SEQ ID NO: 931647 - RNA, 19 nt, Homo sapiens
  misc_RNA (1)...(19): siRNA sense strand
acacagaccuaauuaaaca

SEQ ID NO: 931648 - RNA, 19 nt, Homo sapiens
  misc_RNA (1)...(19): siRNA sense strand
gaaauuggacugcauuaca

SEQ ID NO: 931649 - RNA, 19 nt, Homo sapiens
  misc_RNA (1)...(19): siRNA sense strand
ggaagacaccaucaaagaa

SEQ ID NO: 931650 - RNA, 19 nt, Homo sapiens
  misc_RNA (1)...(19): siRNA sense strand
gagaaacugaggaaacuuu

SEQ ID NO: 931651 - RNA, 19 nt, Homo sapiens
  misc_RNA (1)...(19): siRNA sense strand
ggaaauggcaggcgacauc

SEQ ID NO: 931652 - RNA, 19 nt, Homo sapiens
  misc_RNA (1)...(19): siRNA sense strand
ggacugcauuacaagauuc

SEQ ID NO: 931653 - RNA, 19 nt, Homo sapiens
  misc_RNA (1)...(19): siRNA sense strand
aaauuggacugcauuacaa

SEQ ID NO: 931654 - RNA, 19 nt, Homo sapiens
  misc_RNA (1)...(19): siRNA sense strand
caauucaucugccuccaau

SEQ ID NO: 931655 - RNA, 19 nt, Homo sapiens
  misc_RNA (1)...(19): siRNA sense strand
ggacuucgaagccaagaga

SEQ ID NO: 931656 - RNA, 19 nt, Homo sapiens
  misc_RNA (1)...(19): siRNA sense strand
gcacagccaggauugaaau

SEQ ID NO: 931657 - RNA, 19 nt, Homo sapiens
  misc_RNA (1)...(19): siRNA sense strand
caagagaaacugaggaaac

SEQ ID NO: 931658 - RNA, 19 nt, Homo sapiens
  misc_RNA (1)...(19): siRNA sense strand
uggaagacaccaucaaaga

SEQ ID NO: 931659 - RNA, 19 nt, Homo sapiens
  misc_RNA (1)...(19): siRNA sense strand
gaaugcacagccaggauug

SEQ ID NO: 931660 - RNA, 19 nt, Homo sapiens
  misc_RNA (1)...(19): siRNA sense strand
cagccaggauugaaauugg

SEQ ID NO: 931661 - RNA, 19 nt, Homo sapiens
  misc_RNA (1)...(19): siRNA sense strand
gaaauggcaggcgacauca

SEQ ID NO: 931662 - RNA, 19 nt, Homo sapiens
  misc_RNA (1)...(19): siRNA sense strand
gauugaaauuggacugcau

SEQ ID NO: 931663 - RNA, 19 nt, Homo sapiens
  misc_RNA (1)...(19): siRNA sense strand
caaaccaguauaucucaga

SEQ ID NO: 931664 - RNA, 19 nt, Homo sapiens
  misc_RNA (1)...(19): siRNA sense strand
aagagaaacugaggaaacu

SEQ ID NO: 931665 - RNA, 19 nt, Homo sapiens
  misc_RNA (1)...(19): siRNA sense strand
gccaagagaaacugaggaa

SEQ ID NO: 931666 - RNA, 19 nt, Homo sapiens
  misc_RNA (1)...(19): siRNA sense strand
uggacugcauuacaagauu

SEQ ID NO: 931667 - RNA, 19 nt, Homo sapiens
  misc_RNA (1)...(19): siRNA sense strand
ugaaugcacagccaggauu

SEQ ID NO: 931668 - RNA, 19 nt, Homo sapiens
  misc_RNA (1)...(19): siRNA sense strand
agaccuaauuaaacagugu

SEQ ID NO: 931669 - RNA, 19 nt, Homo sapiens
  misc_RNA (1)...(19): siRNA sense strand
ugcauuacaagauuccuua

SEQ ID NO: 931670 - RNA, 19 nt, Homo sapiens
  misc_RNA (1)...(19): siRNA sense strand
gacacagaccuaauuaaac

SEQ ID NO: 931671 - RNA, 19 nt, Homo sapiens
  misc_RNA (1)...(19): siRNA sense strand
gaccuaauuaaacagugua

SEQ ID NO: 931672 - RNA, 19 nt, Homo sapiens
  misc_RNA (1)...(19): siRNA sense strand
aaacuuuccaaaccaguau

SEQ ID NO: 931673 - RNA, 19 nt, Homo sapiens
  misc_RNA (1)...(19): siRNA sense strand
cacggacacagaccuaauu

SEQ ID NO: 931674 - RNA, 19 nt, Homo sapiens
  misc_RNA (1)...(19): siRNA sense strand
aagaaguccuuggccucua

SEQ ID NO: 931675 - RNA, 19 nt, Homo sapiens
  misc_RNA (1)...(19): siRNA sense strand
gacaacggcaacacgacaa

SEQ ID NO: 931676 - RNA, 19 nt, Homo sapiens
  misc_RNA (1)...(19): siRNA sense strand
ccaauucaucugccuccaa

SEQ ID NO: 931677 - RNA, 19 nt, Homo sapiens
  misc_RNA (1)...(19): siRNA sense strand
aacaguguauagaugaaug

SEQ ID NO: 931678 - RNA, 19 nt, Homo sapiens
  misc_RNA (1)...(19): siRNA sense strand
acggacacagaccuaauua

SEQ ID NO: 931679 - RNA, 19 nt, Homo sapiens
  misc_RNA (1)...(19): siRNA sense strand
agaaguccuuggccucuac

SEQ ID NO: 931680 - RNA, 19 nt, Homo sapiens
  misc_RNA (1)...(19): siRNA sense strand
ggccucuaccgcagcauuu

SEQ ID NO: 931681 - RNA, 19 nt, Homo sapiens
  misc_RNA (1)...(19): siRNA sense strand
gcagucagcuaugaugaua

SEQ ID NO: 931682 - RNA, 19 nt, Homo sapiens
  misc_RNA (1)...(19): siRNA sense strand
ugaauucucugaucacaaa

SEQ ID NO: 931683 - RNA, 19 nt, Homo sapiens
  misc_RNA (1)...(19): siRNA sense strand
ggaccgagaucccuucaga

SEQ ID NO: 931684 - RNA, 19 nt, Homo sapiens
  misc_RNA (1)...(19): siRNA sense strand
gaaguacgauucuggaagu

SEQ ID NO: 931685 - RNA, 19 nt, Homo sapiens
  misc_RNA (1)...(19): siRNA sense strand
acagaaacuugucagauaa

SEQ ID NO: 931686 - RNA, 19 nt, Homo sapiens
  misc_RNA (1)...(19): siRNA sense strand
gaagcacuccacaaacuaa

SEQ ID NO: 931687 - RNA, 19 nt, Homo sapiens
  misc_RNA (1)...(19): siRNA sense strand
gagagaugcuggcuacaca

SEQ ID NO: 931688 - RNA, 19 nt, Homo sapiens
  misc_RNA (1)...(19): siRNA sense strand
ggaaggagaggccagucua

SEQ ID NO: 931689 - RNA, 19 nt, Homo sapiens
  misc_RNA (1)...(19): siRNA sense strand
aggaaagcauucagcauuu

SEQ ID NO: 931690 - RNA, 19 nt, Homo sapiens
  misc_RNA (1)...(19): siRNA sense strand
caucagccauugacagugu

SEQ ID NO: 931691 - RNA, 19 nt, Homo sapiens
  misc_RNA (1)...(19): siRNA sense strand
ggauaaggacagaaacuug

SEQ ID NO: 931692 - RNA, 19 nt, Homo sapiens
  misc_RNA (1)...(19): siRNA sense strand
caggaaagcauucagcauu

SEQ ID NO: 931693 - RNA, 19 nt, Homo sapiens
  misc_RNA (1)...(19): siRNA sense strand
ccagaagcccucuccauug

SEQ ID NO: 931694 - RNA, 19 nt, Homo sapiens
  misc_RNA (1)...(19): siRNA sense strand
cagaagcccucuccauugg

SEQ ID NO: 931695 - RNA, 19 nt, Homo sapiens
  misc_RNA (1)...(19): siRNA sense strand
ccaccgaggagaccaagua

SEQ ID NO: 931696 - RNA, 19 nt, Homo sapiens
  misc_RNA (1)...(19): siRNA sense strand
gauaaggacagaaacuugu

SEQ ID NO: 931697 - RNA, 19 nt, Homo sapiens
  misc_RNA (1)...(19): siRNA sense strand
ggccgaagcacuccacaaa

SEQ ID NO: 931698 - RNA, 19 nt, Homo sapiens
  misc_RNA (1)...(19): siRNA sense strand
ggaaagcauucagcauuuu

SEQ ID NO: 931699 - RNA, 19 nt, Homo sapiens
  misc_RNA (1)...(19): siRNA sense strand
gcaccacuccgcacucuuc

SEQ ID NO: 931700 - RNA, 19 nt, Homo sapiens
  misc_RNA (1)...(19): siRNA sense strand
guuacagaguggagaggua

SEQ ID NO: 931701 - RNA, 19 nt, Homo sapiens
  misc_RNA (1)...(19): siRNA sense strand
ccgaagcacuccacaaacu

SEQ ID NO: 931702 - RNA, 19 nt, Homo sapiens
  misc_RNA (1)...(19): siRNA sense strand
ccgaauggcugaagaucca

SEQ ID NO: 931703 - RNA, 19 nt, Homo sapiens
  misc_RNA (1)...(19): siRNA sense strand
guacgauucuggaaguuuu

SEQ ID NO: 931704 - RNA, 19 nt, Homo sapiens
  misc_RNA (1)...(19): siRNA sense strand
cagaagugccugcucuuga

SEQ ID NO: 931705 - RNA, 19 nt, Homo sapiens
  misc_RNA (1)...(19): siRNA sense strand
cgaagcacuccacaaacua

SEQ ID NO: 931706 - RNA, 19 nt, Homo sapiens
  misc_RNA (1)...(19): siRNA sense strand
gauaaguggagccucuuug

SEQ ID NO: 931707 - RNA, 19 nt, Homo sapiens
  misc_RNA (1)...(19): siRNA sense strand
ggcuaaagcuacccauguc

SEQ ID NO: 931708 - RNA, 19 nt, Homo sapiens
  misc_RNA (1)...(19): siRNA sense strand
gaagauccagcagccuuga

SEQ ID NO: 931709 - RNA, 19 nt, Homo sapiens
  misc_RNA (1)...(19): siRNA sense strand
agaagugccugcucuugag

SEQ ID NO: 931710 - RNA, 19 nt, Homo sapiens
  misc_RNA (1)...(19): siRNA sense strand
ccaaccgaauggcugaaga

SEQ ID NO: 931711 - RNA, 19 nt, Homo sapiens
  misc_RNA (1)...(19): siRNA sense strand
gcacuccacaaacuaaagu

SEQ ID NO: 931712 - RNA, 19 nt, Homo sapiens
  misc_RNA (1)...(19): siRNA sense strand
cccagaagcccucuccauu

SEQ ID NO: 931713 - RNA, 19 nt, Homo sapiens
  misc_RNA (1)...(19): siRNA sense strand
uuaccuggcccaaauccua

SEQ ID NO: 931714 - RNA, 19 nt, Homo sapiens
  misc_RNA (1)...(19): siRNA sense strand
gggauaaggacagaaacuu

SEQ ID NO: 931715 - RNA, 19 nt, Homo sapiens
  misc_RNA (1)...(19): siRNA sense strand
ucccaguggugaaggcuaa

SEQ ID NO: 931716 - RNA, 19 nt, Homo sapiens
  misc_RNA (1)...(19): siRNA sense strand
guggagagguaacaaaaga

SEQ ID NO: 931717 - RNA, 19 nt, Homo sapiens
  misc_RNA (1)...(19): siRNA sense strand
caugaauucucugaucaca

SEQ ID NO: 931718 - RNA, 19 nt, Homo sapiens
  misc_RNA (1)...(19): siRNA sense strand
agccuuaccuggcccaaau

SEQ ID NO: 931719 - RNA, 19 nt, Homo sapiens
  misc_RNA (1)...(19): siRNA sense strand
aaacagacccaggaaagca

SEQ ID NO: 931720 - RNA, 19 nt, Homo sapiens
  misc_RNA (1)...(19): siRNA sense strand
gaaggagaggccagucuac

SEQ ID NO: 931721 - RNA, 19 nt, Homo sapiens
  misc_RNA (1)...(19): siRNA sense strand
acuccgcacucuucaccua

SEQ ID NO: 931722 - RNA, 19 nt, Homo sapiens
  misc_RNA (1)...(19): siRNA sense strand
ucccagugauggaaggaaa

SEQ ID NO: 931723 - RNA, 19 nt, Homo sapiens
  misc_RNA (1)...(19): siRNA sense strand
gggcagucagcuaugauga

SEQ ID NO: 931724 - RNA, 19 nt, Homo sapiens
  misc_RNA (1)...(19): siRNA sense strand
uuccagagcgcaaguauca

SEQ ID NO: 931725 - RNA, 19 nt, Homo sapiens
  misc_RNA (1)...(19): siRNA sense strand
uaaguggagccucuuugga

SEQ ID NO: 931726 - RNA, 19 nt, Homo sapiens
  misc_RNA (1)...(19): siRNA sense strand
caaccgaauggcugaagau

SEQ ID NO: 931727 - RNA, 19 nt, Homo sapiens
  misc_RNA (1)...(19): siRNA sense strand
ccagaagugccugcucuug

SEQ ID NO: 931728 - RNA, 19 nt, Homo sapiens
  misc_RNA (1)...(19): siRNA sense strand
gcuaaagcuacccauguca

SEQ ID NO: 931729 - RNA, 19 nt, Homo sapiens
  misc_RNA (1)...(19): siRNA sense strand
gaaagcauucagcauuuug

SEQ ID NO: 931730 - RNA, 19 nt, Homo sapiens
  misc_RNA (1)...(19): siRNA sense strand
uaaagcuacccaugucauc

SEQ ID NO: 931731 - RNA, 19 nt, Homo sapiens
  misc_RNA (1)...(19): siRNA sense strand
caaaacagacccaggaaag

SEQ ID NO: 931732 - RNA, 19 nt, Homo sapiens
  misc_RNA (1)...(19): siRNA sense strand
gacccugucaucagccauu

SEQ ID NO: 931733 - RNA, 19 nt, Homo sapiens
  misc_RNA (1)...(19): siRNA sense strand
gaccgagaucccuucagaa

SEQ ID NO: 931734 - RNA, 19 nt, Homo sapiens
  misc_RNA (1)...(19): siRNA sense strand
caccauggacucuggaagu

SEQ ID NO: 931735 - RNA, 19 nt, Homo sapiens
  misc_RNA (1)...(19): siRNA sense strand
guggugaaggcuaaagcua

SEQ ID NO: 931736 - RNA, 19 nt, Homo sapiens
  misc_RNA (1)...(19): siRNA sense strand
caaauccuagcaccaugga

SEQ ID NO: 931737 - RNA, 19 nt, Homo sapiens
  misc_RNA (1)...(19): siRNA sense strand
caacacacauuguagauua

SEQ ID NO: 931738 - RNA, 19 nt, Homo sapiens
  misc_RNA (1)...(19): siRNA sense strand
gaacucaacuucuuucaga

SEQ ID NO: 931739 - RNA, 19 nt, Homo sapiens
  misc_RNA (1)...(19): siRNA sense strand
gaaccaguauacagaaaua

SEQ ID NO: 931740 - RNA, 19 nt, Homo sapiens
  misc_RNA (1)...(19): siRNA sense strand
gaacauaucagagcucuuu

SEQ ID NO: 931741 - RNA, 19 nt, Homo sapiens
  misc_RNA (1)...(19): siRNA sense strand
gaaaccagcuuguauaaaa

SEQ ID NO: 931742 - RNA, 19 nt, Homo sapiens
  misc_RNA (1)...(19): siRNA sense strand
cagaauaccuugcuuaauc

SEQ ID NO: 931743 - RNA, 19 nt, Homo sapiens
  misc_RNA (1)...(19): siRNA sense strand
cugaugagcuuaaagauuu

SEQ ID NO: 931744 - RNA, 19 nt, Homo sapiens
  misc_RNA (1)...(19): siRNA sense strand
aaucugaucugguggaaua

SEQ ID NO: 931745 - RNA, 19 nt, Homo sapiens
  misc_RNA (1)...(19): siRNA sense strand
gagaccauccuuccuauua

SEQ ID NO: 931746 - RNA, 19 nt, Homo sapiens
  misc_RNA (1)...(19): siRNA sense strand
gaaauguguucagauguaa

SEQ ID NO: 931747 - RNA, 19 nt, Homo sapiens
  misc_RNA (1)...(19): siRNA sense strand
gcaagagucucaagcuuca

SEQ ID NO: 931748 - RNA, 19 nt, Homo sapiens
  misc_RNA (1)...(19): siRNA sense strand
gaaagaggcuggauaaccu

SEQ ID NO: 931749 - RNA, 19 nt, Homo sapiens
  misc_RNA (1)...(19): siRNA sense strand
ugauugcacuacugaauua

SEQ ID NO: 931750 - RNA, 19 nt, Homo sapiens
  misc_RNA (1)...(19): siRNA sense strand
caacaagcauucuauugau

SEQ ID NO: 931751 - RNA, 19 nt, Homo sapiens
  misc_RNA (1)...(19): siRNA sense strand
ugacaacaauggccaugua

SEQ ID NO: 931752 - RNA, 19 nt, Homo sapiens
  misc_RNA (1)...(19): siRNA sense strand
agaaauguguucagaugua

SEQ ID NO: 931753 - RNA, 19 nt, Homo sapiens
  misc_RNA (1)...(19): siRNA sense strand
aaagaaauguguucagaug

SEQ ID NO: 931754 - RNA, 19 nt, Homo sapiens
  misc_RNA (1)...(19): siRNA sense strand
gaugaaaccagcuuguaua

SEQ ID NO: 931755 - RNA, 19 nt, Homo sapiens
  misc_RNA (1)...(19): siRNA sense strand
gcaugaaguuaaacaagaa

SEQ ID NO: 931756 - RNA, 19 nt, Homo sapiens
  misc_RNA (1)...(19): siRNA sense strand
gaacaacuucaucaagaaa

SEQ ID NO: 931757 - RNA, 19 nt, Homo sapiens
  misc_RNA (1)...(19): siRNA sense strand
aaucguagcugcaaaguca

SEQ ID NO: 931758 - RNA, 19 nt, Homo sapiens
  misc_RNA (1)...(19): siRNA sense strand
ucaagaauguagucagaaa

SEQ ID NO: 931759 - RNA, 19 nt, Homo sapiens
  misc_RNA (1)...(19): siRNA sense strand
gguaacaagucgauggauu

SEQ ID NO: 931760 - RNA, 19 nt, Homo sapiens
  misc_RNA (1)...(19): siRNA sense strand
gcucacgacuuauuuagau

SEQ ID NO: 931761 - RNA, 19 nt, Homo sapiens
  misc_RNA (1)...(19): siRNA sense strand
uaacacaguuuguaccaau

SEQ ID NO: 931762 - RNA, 19 nt, Homo sapiens
  misc_RNA (1)...(19): siRNA sense strand
gaaaauaccuccugauugc

SEQ ID NO: 931763 - RNA, 19 nt, Homo sapiens
  misc_RNA (1)...(19): siRNA sense strand
ucaaagaaauguguucaga

SEQ ID NO: 931764 - RNA, 19 nt, Homo sapiens
  misc_RNA (1)...(19): siRNA sense strand
ggacugugcuucgacgauu

SEQ ID NO: 931765 - RNA, 19 nt, Homo sapiens
  misc_RNA (1)...(19): siRNA sense strand
gagcaagagucucaagcuu

SEQ ID NO: 931766 - RNA, 19 nt, Homo sapiens
  misc_RNA (1)...(19): siRNA sense strand
ggauagagacugugcuuug

SEQ ID NO: 931767 - RNA, 19 nt, Homo sapiens
  misc_RNA (1)...(19): siRNA sense strand
guacagcggugccuggaau

SEQ ID NO: 931768 - RNA, 19 nt, Homo sapiens
  misc_RNA (1)...(19): siRNA sense strand
gugaagaauuuccagaaga

SEQ ID NO: 931769 - RNA, 19 nt, Homo sapiens
  misc_RNA (1)...(19): siRNA sense strand
aguggacgcucacgacuua

SEQ ID NO: 931770 - RNA, 19 nt, Homo sapiens
  misc_RNA (1)...(19): siRNA sense strand
cauuguagauuacucagaa

SEQ ID NO: 931771 - RNA, 19 nt, Homo sapiens
  misc_RNA (1)...(19): siRNA sense strand
gauagagacugugcuuugu

SEQ ID NO: 931772 - RNA, 19 nt, Homo sapiens
  misc_RNA (1)...(19): siRNA sense strand
agaaauaucucaggcuaau

SEQ ID NO: 931773 - RNA, 19 nt, Homo sapiens
  misc_RNA (1)...(19): siRNA sense strand
guauuucaccuacugauuu

SEQ ID NO: 931774 - RNA, 19 nt, Homo sapiens
  misc_RNA (1)...(19): siRNA sense strand
gugaagaucauaaauccua

SEQ ID NO: 931775 - RNA, 19 nt, Homo sapiens
  misc_RNA (1)...(19): siRNA sense strand
guguucagauguaauguaa

SEQ ID NO: 931776 - RNA, 19 nt, Homo sapiens
  misc_RNA (1)...(19): siRNA sense strand
gaagaaaauucgugaagau

SEQ ID NO: 931777 - RNA, 19 nt, Homo sapiens
  misc_RNA (1)...(19): siRNA sense strand
gcccuuacucguauauuua

SEQ ID NO: 931778 - RNA, 19 nt, Homo sapiens
  misc_RNA (1)...(19): siRNA sense strand
gcuaaugucaucuguauag

SEQ ID NO: 931779 - RNA, 19 nt, Homo sapiens
  misc_RNA (1)...(19): siRNA sense strand
gauguuguaugccugguau

SEQ ID NO: 931780 - RNA, 19 nt, Homo sapiens
  misc_RNA (1)...(19): siRNA sense strand
ugacaagcaugauuuggau

SEQ ID NO: 931781 - RNA, 19 nt, Homo sapiens
  misc_RNA (1)...(19): siRNA sense strand
gguugacccugaaagguuu

SEQ ID NO: 931782 - RNA, 19 nt, Homo sapiens
  misc_RNA (1)...(19): siRNA sense strand
gaccauccuuccuauuaug

SEQ ID NO: 931783 - RNA, 19 nt, Homo sapiens
  misc_RNA (1)...(19): siRNA sense strand
ugaauacugugccaggauu

SEQ ID NO: 931784 - RNA, 19 nt, Homo sapiens
  misc_RNA (1)...(19): siRNA sense strand
acaacaagcauucuauuga

SEQ ID NO: 931785 - RNA, 19 nt, Homo sapiens
  misc_RNA (1)...(19): siRNA sense strand
aaucggaauuucuaacuga

SEQ ID NO: 931786 - RNA, 19 nt, Homo sapiens
  misc_RNA (1)...(19): siRNA sense strand
ggauuugacaccugaauau

SEQ ID NO: 931787 - RNA, 19 nt, Homo sapiens
  misc_RNA (1)...(19): siRNA sense strand
gagaugaaaccagcuugua

SEQ ID NO: 931788 - RNA, 19 nt, Homo sapiens
  misc_RNA (1)...(19): siRNA sense strand
gaaagaacagacaaagaca

SEQ ID NO: 931789 - RNA, 19 nt, Homo sapiens
  misc_RNA (1)...(19): siRNA sense strand
aacugaagcugaaaucauu

SEQ ID NO: 931790 - RNA, 19 nt, Homo sapiens
  misc_RNA (1)...(19): siRNA sense strand
gaaucggaauuucuaacug

SEQ ID NO: 931791 - RNA, 19 nt, Homo sapiens
  misc_RNA (1)...(19): siRNA sense strand
gaaacuuaaugaggcagaa

SEQ ID NO: 931792 - RNA, 19 nt, Homo sapiens
  misc_RNA (1)...(19): siRNA sense strand
aaagauagaccugcagaaa

SEQ ID NO: 931793 - RNA, 19 nt, Homo sapiens
  misc_RNA (1)...(19): siRNA sense strand
uaaaagcccuuacucguau

SEQ ID NO: 931794 - RNA, 19 nt, Homo sapiens
  misc_RNA (1)...(19): siRNA sense strand
ggacgcucacgacuuauuu

SEQ ID NO: 931795 - RNA, 19 nt, Homo sapiens
  misc_RNA (1)...(19): siRNA sense strand
gaugaugaccuggauuuga

SEQ ID NO: 931796 - RNA, 19 nt, Homo sapiens
  misc_RNA (1)...(19): siRNA sense strand
gugaauaacacaguuugua

SEQ ID NO: 931797 - RNA, 19 nt, Homo sapiens
  misc_RNA (1)...(19): siRNA sense strand
gaaccuagaguugggaaga

SEQ ID NO: 931798 - RNA, 19 nt, Homo sapiens
  misc_RNA (1)...(19): siRNA sense strand
ucuggucagugaagaauuu

SEQ ID NO: 931799 - RNA, 19 nt, Homo sapiens
  misc_RNA (1)...(19): siRNA sense strand
gaucugguggaauauagua

SEQ ID NO: 931800 - RNA, 19 nt, Homo sapiens
  misc_RNA (1)...(19): siRNA sense strand
caaaaugccuccaccacaa

SEQ ID NO: 931801 - RNA, 19 nt, Homo sapiens
  misc_RNA (1)...(19): siRNA sense strand
gcacuacugaauuaaauca

SEQ ID NO: 931802 - RNA, 19 nt, Homo sapiens
  misc_RNA (1)...(19): siRNA sense strand
uggaggaugucaagaaugu

SEQ ID NO: 931803 - RNA, 19 nt, Homo sapiens
  misc_RNA (1)...(19): siRNA sense strand
caacuucuuucagaggauu

SEQ ID NO: 931804 - RNA, 19 nt, Homo sapiens
  misc_RNA (1)...(19): siRNA sense strand
ugaagaauuuccagaagag

SEQ ID NO: 931805 - RNA, 19 nt, Homo sapiens
  misc_RNA (1)...(19): siRNA sense strand
gguauaugaugucagcaau

SEQ ID NO: 931806 - RNA, 19 nt, Homo sapiens
  misc_RNA (1)...(19): siRNA sense strand
agaaauacuuguuguugca

SEQ ID NO: 931807 - RNA, 19 nt, Homo sapiens
  misc_RNA (1)...(19): siRNA sense strand
gcagaagaaaucaccauuc

SEQ ID NO: 931808 - RNA, 19 nt, Homo sapiens
  misc_RNA (1)...(19): siRNA sense strand
uuugacaccugaauauuug

SEQ ID NO: 931809 - RNA, 19 nt, Homo sapiens
  misc_RNA (1)...(19): siRNA sense strand
ugucaagaauguagucaga

SEQ ID NO: 931810 - RNA, 19 nt, Homo sapiens
  misc_RNA (1)...(19): siRNA sense strand
acagagugaugaacaacuu

SEQ ID NO: 931811 - RNA, 19 nt, Homo sapiens
  misc_RNA (1)...(19): siRNA sense strand
agaccugcaugaaguuaaa

SEQ ID NO: 931812 - RNA, 19 nt, Homo sapiens
  misc_RNA (1)...(19): siRNA sense strand
aaugaaagaggcuggauaa

SEQ ID NO: 931813 - RNA, 19 nt, Homo sapiens
  misc_RNA (1)...(19): siRNA sense strand
gauggauuccucucauaaa

SEQ ID NO: 931814 - RNA, 19 nt, Homo sapiens
  misc_RNA (1)...(19): siRNA sense strand
aggcuaaugucaucuguau

SEQ ID NO: 931815 - RNA, 19 nt, Homo sapiens
  misc_RNA (1)...(19): siRNA sense strand
agucagaccugcaugaagu

SEQ ID NO: 931816 - RNA, 19 nt, Homo sapiens
  misc_RNA (1)...(19): siRNA sense strand
caaagucagaccugcauga

SEQ ID NO: 931817 - RNA, 19 nt, Homo sapiens
  misc_RNA (1)...(19): siRNA sense strand
gguggaauauaguaguaug

SEQ ID NO: 931818 - RNA, 19 nt, Homo sapiens
  misc_RNA (1)...(19): siRNA sense strand
guaacaagucgauggauuc

SEQ ID NO: 931819 - RNA, 19 nt, Homo sapiens
  misc_RNA (1)...(19): siRNA sense strand
caguaaggauaucuuuguu

SEQ ID NO: 931820 - RNA, 19 nt, Homo sapiens
  misc_RNA (1)...(19): siRNA sense strand
aaugucaucuguauagugu

SEQ ID NO: 931821 - RNA, 19 nt, Homo sapiens
  misc_RNA (1)...(19): siRNA sense strand
caaugaaagaggcuggaua

SEQ ID NO: 931822 - RNA, 19 nt, Homo sapiens
  misc_RNA (1)...(19): siRNA sense strand
uuaugucucuggucaguga

SEQ ID NO: 931823 - RNA, 19 nt, Homo sapiens
  misc_RNA (1)...(19): siRNA sense strand
ucgauggauuccucucaua

SEQ ID NO: 931824 - RNA, 19 nt, Homo sapiens
  misc_RNA (1)...(19): siRNA sense strand
gcauucuauugauaaggua

SEQ ID NO: 931825 - RNA, 19 nt, Homo sapiens
  misc_RNA (1)...(19): siRNA sense strand
ugucaucuguauaguguau

SEQ ID NO: 931826 - RNA, 19 nt, Homo sapiens
  misc_RNA (1)...(19): siRNA sense strand
ccaguaaggauaucuuugu

SEQ ID NO: 931827 - RNA, 19 nt, Homo sapiens
  misc_RNA (1)...(19): siRNA sense strand
ugcaugaaguuaaacaaga

SEQ ID NO: 931828 - RNA, 19 nt, Homo sapiens
  misc_RNA (1)...(19): siRNA sense strand
gauuaugucucuggucagu

SEQ ID NO: 931829 - RNA, 19 nt, Homo sapiens
  misc_RNA (1)...(19): siRNA sense strand
uuguaugccugguauauga

SEQ ID NO: 931830 - RNA, 19 nt, Homo sapiens
  misc_RNA (1)...(19): siRNA sense strand
cgacuuauuuagauguaca

SEQ ID NO: 931831 - RNA, 19 nt, Homo sapiens
  misc_RNA (1)...(19): siRNA sense strand
uagagacugugcuuuguca

SEQ ID NO: 931832 - RNA, 19 nt, Homo sapiens
  misc_RNA (1)...(19): siRNA sense strand
cagaagaaaucaccauucc

SEQ ID NO: 931833 - RNA, 19 nt, Homo sapiens
  misc_RNA (1)...(19): siRNA sense strand
aaaccuguguggaguguuc

SEQ ID NO: 931834 - RNA, 19 nt, Homo sapiens
  misc_RNA (1)...(19): siRNA sense strand
caaaucugaucugguggaa

SEQ ID NO: 931835 - RNA, 19 nt, Homo sapiens
  misc_RNA (1)...(19): siRNA sense strand
caaugaugcugaacucaac

SEQ ID NO: 931836 - RNA, 19 nt, Homo sapiens
  misc_RNA (1)...(19): siRNA sense strand
ggagacacgaaacuacuug

SEQ ID NO: 931837 - RNA, 19 nt, Homo sapiens
  misc_RNA (1)...(19): siRNA sense strand
gaaauucacccgauacaua

SEQ ID NO: 931838 - RNA, 19 nt, Homo sapiens
  misc_RNA (1)...(19): siRNA sense strand
gaaagucucauccuaauuu

SEQ ID NO: 931839 - RNA, 19 nt, Homo sapiens
  misc_RNA (1)...(19): siRNA sense strand
ucaaacagcucaucaaaga

SEQ ID NO: 931840 - RNA, 19 nt, Homo sapiens
  misc_RNA (1)...(19): siRNA sense strand
gaagaaagucucauccuaa

SEQ ID NO: 931841 - RNA, 19 nt, Homo sapiens
  misc_RNA (1)...(19): siRNA sense strand
ggaggaagaugaugucaga

SEQ ID NO: 931842 - RNA, 19 nt, Homo sapiens
  misc_RNA (1)...(19): siRNA sense strand
gaaggcacauuccagauug

SEQ ID NO: 931843 - RNA, 19 nt, Homo sapiens
  misc_RNA (1)...(19): siRNA sense strand
ugaagaagauuaucgaaga

SEQ ID NO: 931844 - RNA, 19 nt, Homo sapiens
  misc_RNA (1)...(19): siRNA sense strand
cuaaagaauuggccaagua

SEQ ID NO: 931845 - RNA, 19 nt, Homo sapiens
  misc_RNA (1)...(19): siRNA sense strand
gaagaagauuaucgaagaa

SEQ ID NO: 931846 - RNA, 19 nt, Homo sapiens
  misc_RNA (1)...(19): siRNA sense strand
ggagugugauguuauuauu

SEQ ID NO: 931847 - RNA, 19 nt, Homo sapiens
  misc_RNA (1)...(19): siRNA sense strand
caaaagaccuguucaauca

SEQ ID NO: 931848 - RNA, 19 nt, Homo sapiens
  misc_RNA (1)...(19): siRNA sense strand
ugaaggaugucauuucuga

SEQ ID NO: 931849 - RNA, 19 nt, Homo sapiens
  misc_RNA (1)...(19): siRNA sense strand
gcagaauguuucccuuuga

SEQ ID NO: 931850 - RNA, 19 nt, Homo sapiens
  misc_RNA (1)...(19): siRNA sense strand
ggagauggcagagaagaua

SEQ ID NO: 931851 - RNA, 19 nt, Homo sapiens
  misc_RNA (1)...(19): siRNA sense strand
gggcgagauuccugcauua

SEQ ID NO: 931852 - RNA, 19 nt, Homo sapiens
  misc_RNA (1)...(19): siRNA sense strand
ggacuuaacgcaagauugu

SEQ ID NO: 931853 - RNA, 19 nt, Homo sapiens
  misc_RNA (1)...(19): siRNA sense strand
gaauguuucccuuugauaa

SEQ ID NO: 931854 - RNA, 19 nt, Homo sapiens
  misc_RNA (1)...(19): siRNA sense strand
agaagaaagucucauccua

SEQ ID NO: 931855 - RNA, 19 nt, Homo sapiens
  misc_RNA (1)...(19): siRNA sense strand
caacuagacgaucaauaua

SEQ ID NO: 931856 - RNA, 19 nt, Homo sapiens
  misc_RNA (1)...(19): siRNA sense strand
gaagacauagucaagugua

SEQ ID NO: 931857 - RNA, 19 nt, Homo sapiens
  misc_RNA (1)...(19): siRNA sense strand
gcagaaugcaggucaacua

SEQ ID NO: 931858 - RNA, 19 nt, Homo sapiens
  misc_RNA (1)...(19): siRNA sense strand
ccgaagacccuguugauuu

SEQ ID NO: 931859 - RNA, 19 nt, Homo sapiens
  misc_RNA (1)...(19): siRNA sense strand
ugaaggagcgugugauaaa

SEQ ID NO: 931860 - RNA, 19 nt, Homo sapiens
  misc_RNA (1)...(19): siRNA sense strand
gaaaagcgaaagcuauuua

SEQ ID NO: 931861 - RNA, 19 nt, Homo sapiens
  misc_RNA (1)...(19): siRNA sense strand
gaaaauacccagagaaaau

SEQ ID NO: 931862 - RNA, 19 nt, Homo sapiens
  misc_RNA (1)...(19): siRNA sense strand
caagaacaauccugaagca

SEQ ID NO: 931863 - RNA, 19 nt, Homo sapiens
  misc_RNA (1)...(19): siRNA sense strand
uuauaaaccuguuggauuc

SEQ ID NO: 931864 - RNA, 19 nt, Homo sapiens
  misc_RNA (1)...(19): siRNA sense strand
gaaaagagaagaaagagaa

SEQ ID NO: 931865 - RNA, 19 nt, Homo sapiens
  misc_RNA (1)...(19): siRNA sense strand
ucaacuagacgaucaauau

SEQ ID NO: 931866 - RNA, 19 nt, Homo sapiens
  misc_RNA (1)...(19): siRNA sense strand
caguauugcuaaagaauug

SEQ ID NO: 931867 - RNA, 19 nt, Homo sapiens
  misc_RNA (1)...(19): siRNA sense strand
gaagauuaucgaagaagaa

SEQ ID NO: 931868 - RNA, 19 nt, Homo sapiens
  misc_RNA (1)...(19): siRNA sense strand
ggaaggagaagaagaaguc

SEQ ID NO: 931869 - RNA, 19 nt, Homo sapiens
  misc_RNA (1)...(19): siRNA sense strand
ugucauuucugaagccaua

SEQ ID NO: 931870 - RNA, 19 nt, Homo sapiens
  misc_RNA (1)...(19): siRNA sense strand
gaaggaggcauguuacaca

SEQ ID NO: 931871 - RNA, 19 nt, Homo sapiens
  misc_RNA (1)...(19): siRNA sense strand
ccaaagaccuaugaucaag

SEQ ID NO: 931872 - RNA, 19 nt, Homo sapiens
  misc_RNA (1)...(19): siRNA sense strand
gcuggagugugauguuauu

SEQ ID NO: 931873 - RNA, 19 nt, Homo sapiens
  misc_RNA (1)...(19): siRNA sense strand
ggcagaauguuucccuuug

SEQ ID NO: 931874 - RNA, 19 nt, Homo sapiens
  misc_RNA (1)...(19): siRNA sense strand
gaaugcaggucaacuagac

SEQ ID NO: 931875 - RNA, 19 nt, Homo sapiens
  misc_RNA (1)...(19): siRNA sense strand
uggaagcgcucuuugugaa

SEQ ID NO: 931876 - RNA, 19 nt, Homo sapiens
  misc_RNA (1)...(19): siRNA sense strand
ucgggaaguuucuaucuaa

SEQ ID NO: 931877 - RNA, 19 nt, Homo sapiens
  misc_RNA (1)...(19): siRNA sense strand
gcggaaacaucgggaaguu

SEQ ID NO: 931878 - RNA, 19 nt, Homo sapiens
  misc_RNA (1)...(19): siRNA sense strand
cgaagacccuguugauuuu

SEQ ID NO: 931879 - RNA, 19 nt, Homo sapiens
  misc_RNA (1)...(19): siRNA sense strand
uaugugaugccaacucuua

SEQ ID NO: 931880 - RNA, 19 nt, Homo sapiens
  misc_RNA (1)...(19): siRNA sense strand
gcaaagcagaggauugaug

SEQ ID NO: 931881 - RNA, 19 nt, Homo sapiens
  misc_RNA (1)...(19): siRNA sense strand
caaacugcaucacauccaa

SEQ ID NO: 931882 - RNA, 19 nt, Homo sapiens
  misc_RNA (1)...(19): siRNA sense strand
gaagcuuccucaaccaaag

SEQ ID NO: 931883 - RNA, 19 nt, Homo sapiens
  misc_RNA (1)...(19): siRNA sense strand
cagggaggcugcugaggaa

SEQ ID NO: 931884 - RNA, 19 nt, Homo sapiens
  misc_RNA (1)...(19): siRNA sense strand
ugaagaaauuacagaggaa

SEQ ID NO: 931885 - RNA, 19 nt, Homo sapiens
  misc_RNA (1)...(19): siRNA sense strand
aagaaagucucauccuaau

SEQ ID NO: 931886 - RNA, 19 nt, Homo sapiens
  misc_RNA (1)...(19): siRNA sense strand
gaaaauaagucagcuaugc

SEQ ID NO: 931887 - RNA, 19 nt, Homo sapiens
  misc_RNA (1)...(19): siRNA sense strand
aaacagcucaucaaagaga

SEQ ID NO: 931888 - RNA, 19 nt, Homo sapiens
  misc_RNA (1)...(19): siRNA sense strand
ugaagaugcucagaauaga

SEQ ID NO: 931889 - RNA, 19 nt, Homo sapiens
  misc_RNA (1)...(19): siRNA sense strand
cggaugaguuucugaagga

SEQ ID NO: 931890 - RNA, 19 nt, Homo sapiens
  misc_RNA (1)...(19): siRNA sense strand
ccaaggacuuaacgcaaga

SEQ ID NO: 931891 - RNA, 19 nt, Homo sapiens
  misc_RNA (1)...(19): siRNA sense strand
gccucgaaauuaugguuua

SEQ ID NO: 931892 - RNA, 19 nt, Homo sapiens
  misc_RNA (1)...(19): siRNA sense strand
gugauaaaccuuccugaga

SEQ ID NO: 931893 - RNA, 19 nt, Homo sapiens
  misc_RNA (1)...(19): siRNA sense strand
gaauggaagcgcucuuugu

SEQ ID NO: 931894 - RNA, 19 nt, Homo sapiens
  misc_RNA (1)...(19): siRNA sense strand
gaaaauccaguauugcuaa

SEQ ID NO: 931895 - RNA, 19 nt, Homo sapiens
  misc_RNA (1)...(19): siRNA sense strand
gcaggaaucaagguuauau

SEQ ID NO: 931896 - RNA, 19 nt, Homo sapiens
  misc_RNA (1)...(19): siRNA sense strand
cccagaggguguuuauaaa

SEQ ID NO: 931897 - RNA, 19 nt, Homo sapiens
  misc_RNA (1)...(19): siRNA sense strand
ggcagaauaucucuucaag

SEQ ID NO: 931898 - RNA, 19 nt, Homo sapiens
  misc_RNA (1)...(19): siRNA sense strand
uaucaaacagcucaucaaa

SEQ ID NO: 931899 - RNA, 19 nt, Homo sapiens
  misc_RNA (1)...(19): siRNA sense strand
gaaggagcgugugauaaac

SEQ ID NO: 931900 - RNA, 19 nt, Homo sapiens
  misc_RNA (1)...(19): siRNA sense strand
gagaagaagaagucgaaga

SEQ ID NO: 931901 - RNA, 19 nt, Homo sapiens
  misc_RNA (1)...(19): siRNA sense strand
gcaacuaccgggacaucaa

SEQ ID NO: 931902 - RNA, 19 nt, Homo sapiens
  misc_RNA (1)...(19): siRNA sense strand
ugucagaggcagaauguuu

SEQ ID NO: 931903 - RNA, 19 nt, Homo sapiens
  misc_RNA (1)...(19): siRNA sense strand
ggaggagaauguggaagau

SEQ ID NO: 931904 - RNA, 19 nt, Homo sapiens
  misc_RNA (1)...(19): siRNA sense strand
ugucgacggugaugacuug

SEQ ID NO: 931905 - RNA, 19 nt, Homo sapiens
  misc_RNA (1)...(19): siRNA sense strand
ccugagaaacuauuuaaug

SEQ ID NO: 931906 - RNA, 19 nt, Homo sapiens
  misc_RNA (1)...(19): siRNA sense strand
uaucaacacuauccucaag

SEQ ID NO: 931907 - RNA, 19 nt, Homo sapiens
  misc_RNA (1)...(19): siRNA sense strand
auagucaaguguaucagua

SEQ ID NO: 931908 - RNA, 19 nt, Homo sapiens
  misc_RNA (1)...(19): siRNA sense strand
ccagaaaauuugcagcaua

SEQ ID NO: 931909 - RNA, 19 nt, Homo sapiens
  misc_RNA (1)...(19): siRNA sense strand
ugaucuagcaggagugaua

SEQ ID NO: 931910 - RNA, 19 nt, Homo sapiens
  misc_RNA (1)...(19): siRNA sense strand
cgauggaacaaauguaauu

SEQ ID NO: 931911 - RNA, 19 nt, Homo sapiens
  misc_RNA (1)...(19): siRNA sense strand
caacugaaggaugucauuu

SEQ ID NO: 931912 - RNA, 19 nt, Homo sapiens
  misc_RNA (1)...(19): siRNA sense strand
ccauuuacuggucaacuua

SEQ ID NO: 931913 - RNA, 19 nt, Homo sapiens
  misc_RNA (1)...(19): siRNA sense strand
uggaagacauagucaagug

SEQ ID NO: 931914 - RNA, 19 nt, Homo sapiens
  misc_RNA (1)...(19): siRNA sense strand
agaagauuaucgaagaaga

SEQ ID NO: 931915 - RNA, 19 nt, Homo sapiens
  misc_RNA (1)...(19): siRNA sense strand
gaauaaacgacuggaggaa

SEQ ID NO: 931916 - RNA, 19 nt, Homo sapiens
  misc_RNA (1)...(19): siRNA sense strand
gcucagaauagacuugcua

SEQ ID NO: 931917 - RNA, 19 nt, Homo sapiens
  misc_RNA (1)...(19): siRNA sense strand
ggcgauggaacaaauguaa

SEQ ID NO: 931918 - RNA, 19 nt, Homo sapiens
  misc_RNA (1)...(19): siRNA sense strand
gaagccaucugggcagucu

SEQ ID NO: 931919 - RNA, 19 nt, Homo sapiens
  misc_RNA (1)...(19): siRNA sense strand
cagaauguuucccuuugau

SEQ ID NO: 931920 - RNA, 19 nt, Homo sapiens
  misc_RNA (1)...(19): siRNA sense strand
gcuaaagaauuggccaagu

SEQ ID NO: 931921 - RNA, 19 nt, Homo sapiens
  misc_RNA (1)...(19): siRNA sense strand
cgagauuccugcauuacca

SEQ ID NO: 931922 - RNA, 19 nt, Homo sapiens
  misc_RNA (1)...(19): siRNA sense strand
aagcaaagcagaggauuga

SEQ ID NO: 931923 - RNA, 19 nt, Homo sapiens
  misc_RNA (1)...(19): siRNA sense strand
gcugggaggaguggaauaa

SEQ ID NO: 931924 - RNA, 19 nt, Homo sapiens
  misc_RNA (1)...(19): siRNA sense strand
aaagaccuaugaucaagca

SEQ ID NO: 931925 - RNA, 19 nt, Homo sapiens
  misc_RNA (1)...(19): siRNA sense strand
gacguacucugccaucucu

SEQ ID NO: 931926 - RNA, 19 nt, Homo sapiens
  misc_RNA (1)...(19): siRNA sense strand
aauccaguauugcuaaaga

SEQ ID NO: 931927 - RNA, 19 nt, Homo sapiens
  misc_RNA (1)...(19): siRNA sense strand
gaaaaugcauaccuaacca

SEQ ID NO: 931928 - RNA, 19 nt, Homo sapiens
  misc_RNA (1)...(19): siRNA sense strand
guuucuaucuaacugugua

SEQ ID NO: 931929 - RNA, 19 nt, Homo sapiens
  misc_RNA (1)...(19): siRNA sense strand
gaugucagaggcagaaugu

SEQ ID NO: 931930 - RNA, 19 nt, Homo sapiens
  misc_RNA (1)...(19): siRNA sense strand
caggucaacuagacgauca

SEQ ID NO: 931931 - RNA, 19 nt, Homo sapiens
  misc_RNA (1)...(19): siRNA sense strand
agaagaagucgaagaggaa

SEQ ID NO: 931932 - RNA, 19 nt, Homo sapiens
  misc_RNA (1)...(19): siRNA sense strand
cugcuggagugugauguua

SEQ ID NO: 931933 - RNA, 19 nt, Homo sapiens
  misc_RNA (1)...(19): siRNA sense strand
ccucgaaauuaugguuuaa

SEQ ID NO: 931934 - RNA, 19 nt, Homo sapiens
  misc_RNA (1)...(19): siRNA sense strand
aaauucacccgauacauau

SEQ ID NO: 931935 - RNA, 19 nt, Homo sapiens
  misc_RNA (1)...(19): siRNA sense strand
gcaaaagaccuguucaauc

SEQ ID NO: 931936 - RNA, 19 nt, Homo sapiens
  misc_RNA (1)...(19): siRNA sense strand
ggagcagaaugcaggucaa

SEQ ID NO: 931937 - RNA, 19 nt, Homo sapiens
  misc_RNA (1)...(19): siRNA sense strand
ccaaggagcugaagccaaa

SEQ ID NO: 931938 - RNA, 19 nt, Homo sapiens
  misc_RNA (1)...(19): siRNA sense strand
gaucggagcuggucaggau

SEQ ID NO: 931939 - RNA, 19 nt, Homo sapiens
  misc_RNA (1)...(19): siRNA sense strand
ggugaacuaucccaaagua

SEQ ID NO: 931940 - RNA, 19 nt, Homo sapiens
  misc_RNA (1)...(19): siRNA sense strand
ggacagcagcgaugccuua

SEQ ID NO: 931941 - RNA, 19 nt, Homo sapiens
  misc_RNA (1)...(19): siRNA sense strand
gcagauggacgaccuguuu

SEQ ID NO: 931942 - RNA, 19 nt, Homo sapiens
  misc_RNA (1)...(19): siRNA sense strand
ggagaaauuucagcagauu

SEQ ID NO: 931943 - RNA, 19 nt, Homo sapiens
  misc_RNA (1)...(19): siRNA sense strand
ugaagaagcucaaguacca

SEQ ID NO: 931944 - RNA, 19 nt, Homo sapiens
  misc_RNA (1)...(19): siRNA sense strand
gaaggaagccaucauugug

SEQ ID NO: 931945 - RNA, 19 nt, Homo sapiens
  misc_RNA (1)...(19): siRNA sense strand
ccauggagcugguggagaa

SEQ ID NO: 931946 - RNA, 19 nt, Homo sapiens
  misc_RNA (1)...(19): siRNA sense strand
guacgcagccucuccacua

SEQ ID NO: 931947 - RNA, 19 nt, Homo sapiens
  misc_RNA (1)...(19): siRNA sense strand
gcacagccaucaccuucug

SEQ ID NO: 931948 - RNA, 19 nt, Homo sapiens
  misc_RNA (1)...(19): siRNA sense strand
gaaggaaccaccuggcuau

SEQ ID NO: 931949 - RNA, 19 nt, Homo sapiens
  misc_RNA (1)...(19): siRNA sense strand
ggacagaggacuaucucaa

SEQ ID NO: 931950 - RNA, 19 nt, Homo sapiens
  misc_RNA (1)...(19): siRNA sense strand
gaacagcaccucacugacu

SEQ ID NO: 931951 - RNA, 19 nt, Homo sapiens
  misc_RNA (1)...(19): siRNA sense strand
gagccagacuagccgauga

SEQ ID NO: 931952 - RNA, 19 nt, Homo sapiens
  misc_RNA (1)...(19): siRNA sense strand
agacagcucuuccuucgau

SEQ ID NO: 931953 - RNA, 19 nt, Homo sapiens
  misc_RNA (1)...(19): siRNA sense strand
gacagaggacuaucucaaa

SEQ ID NO: 931954 - RNA, 19 nt, Homo sapiens
  misc_RNA (1)...(19): siRNA sense strand
cagaacagcaccucacuga

SEQ ID NO: 931955 - RNA, 19 nt, Homo sapiens
  misc_RNA (1)...(19): siRNA sense strand
ggaaccaccuggcuaugag

SEQ ID NO: 931956 - RNA, 19 nt, Homo sapiens
  misc_RNA (1)...(19): siRNA sense strand
ccacccagguugugucuca

SEQ ID NO: 931957 - RNA, 19 nt, Homo sapiens
  misc_RNA (1)...(19): siRNA sense strand
gaacuaucccaaaguagca

SEQ ID NO: 931958 - RNA, 19 nt, Homo sapiens
  misc_RNA (1)...(19): siRNA sense strand
gcagugggguggugaaguu

SEQ ID NO: 931959 - RNA, 19 nt, Homo sapiens
  misc_RNA (1)...(19): siRNA sense strand
gaaaaguccagccgcauuu

SEQ ID NO: 931960 - RNA, 19 nt, Homo sapiens
  misc_RNA (1)...(19): siRNA sense strand
ggacgaccuguuugacauu

SEQ ID NO: 931961 - RNA, 19 nt, Homo sapiens
  misc_RNA (1)...(19): siRNA sense strand
ggagaaagacaagcagauc

SEQ ID NO: 931962 - RNA, 19 nt, Homo sapiens
  misc_RNA (1)...(19): siRNA sense strand
ugaaggaagccaucauugu

SEQ ID NO: 931963 - RNA, 19 nt, Homo sapiens
  misc_RNA (1)...(19): siRNA sense strand
gcagcaagaaggccaagga

SEQ ID NO: 931964 - RNA, 19 nt, Homo sapiens
  misc_RNA (1)...(19): siRNA sense strand
caggugaacuaucccaaag

SEQ ID NO: 931965 - RNA, 19 nt, Homo sapiens
  misc_RNA (1)...(19): siRNA sense strand
cagcagcgaugccuuaucc

SEQ ID NO: 931966 - RNA, 19 nt, Homo sapiens
  misc_RNA (1)...(19): siRNA sense strand
gagcugaaguugcgaucac

SEQ ID NO: 931967 - RNA, 19 nt, Homo sapiens
  misc_RNA (1)...(19): siRNA sense strand
ccaccucuauccugcacaa

SEQ ID NO: 931968 - RNA, 19 nt, Homo sapiens
  misc_RNA (1)...(19): siRNA sense strand
gcaaagccaacccaagucu

SEQ ID NO: 931969 - RNA, 19 nt, Homo sapiens
  misc_RNA (1)...(19): siRNA sense strand
auucagagcggagaaauuu

SEQ ID NO: 931970 - RNA, 19 nt, Homo sapiens
  misc_RNA (1)...(19): siRNA sense strand
gcucagcacgggcgaugaa

SEQ ID NO: 931971 - RNA, 19 nt, Homo sapiens
  misc_RNA (1)...(19): siRNA sense strand
ugaagcaggagcugaaguu

SEQ ID NO: 931972 - RNA, 19 nt, Homo sapiens
  misc_RNA (1)...(19): siRNA sense strand
ccacacucauuaagcaaag

SEQ ID NO: 931973 - RNA, 19 nt, Homo sapiens
  misc_RNA (1)...(19): siRNA sense strand
ccucggaauugcacuuugu

SEQ ID NO: 931974 - RNA, 19 nt, Homo sapiens
  misc_RNA (1)...(19): siRNA sense strand
ccacagggacccaccuugu

SEQ ID NO: 931975 - RNA, 19 nt, Homo sapiens
  misc_RNA (1)...(19): siRNA sense strand
gcaccucccacccucauca

SEQ ID NO: 931976 - RNA, 19 nt, Homo sapiens
  misc_RNA (1)...(19): siRNA sense strand
gagaagccauccccgaaga

SEQ ID NO: 931977 - RNA, 19 nt, Homo sapiens
  misc_RNA (1)...(19): siRNA sense strand
gaagguggcagagcugaag

SEQ ID NO: 931978 - RNA, 19 nt, Homo sapiens
  misc_RNA (1)...(19): siRNA sense strand
gagccuaucaagaccaaau

SEQ ID NO: 931979 - RNA, 19 nt, Homo sapiens
  misc_RNA (1)...(19): siRNA sense strand
gaagcaggagcugaaguug

SEQ ID NO: 931980 - RNA, 19 nt, Homo sapiens
  misc_RNA (1)...(19): siRNA sense strand
aagcaaagccaacccaagu

SEQ ID NO: 931981 - RNA, 19 nt, Homo sapiens
  misc_RNA (1)...(19): siRNA sense strand
ccauggacaccucggaauu

SEQ ID NO: 931982 - RNA, 19 nt, Homo sapiens
  misc_RNA (1)...(19): siRNA sense strand
cggagaaauuucagcagau

SEQ ID NO: 931983 - RNA, 19 nt, Homo sapiens
  misc_RNA (1)...(19): siRNA sense strand
caaccuggacgacaugaag

SEQ ID NO: 931984 - RNA, 19 nt, Homo sapiens
  misc_RNA (1)...(19): siRNA sense strand
ucagagcggagaaauuuca

SEQ ID NO: 931985 - RNA, 19 nt, Homo sapiens
  misc_RNA (1)...(19): siRNA sense strand
ccaggugaacuaucccaaa

SEQ ID NO: 931986 - RNA, 19 nt, Homo sapiens
  misc_RNA (1)...(19): siRNA sense strand
cgaccuccauagccagaug

SEQ ID NO: 931987 - RNA, 19 nt, Homo sapiens
  misc_RNA (1)...(19): siRNA sense strand
uguuugacauucucauuca

SEQ ID NO: 931988 - RNA, 19 nt, Homo sapiens
  misc_RNA (1)...(19): siRNA sense strand
acagaggacuaucucaaac

SEQ ID NO: 931989 - RNA, 19 nt, Homo sapiens
  misc_RNA (1)...(19): siRNA sense strand
caccaaaacugagcugauu

SEQ ID NO: 931990 - RNA, 19 nt, Homo sapiens
  misc_RNA (1)...(19): siRNA sense strand
ggaugcacauuuuggaaga

SEQ ID NO: 931991 - RNA, 19 nt, Homo sapiens
  misc_RNA (1)...(19): siRNA sense strand
gacgaccuguuugacauuc

SEQ ID NO: 931992 - RNA, 19 nt, Homo sapiens
  misc_RNA (1)...(19): siRNA sense strand
gcugaagagagccagacua

SEQ ID NO: 931993 - RNA, 19 nt, Homo sapiens
  misc_RNA (1)...(19): siRNA sense strand
cauggacaccucggaauug

SEQ ID NO: 931994 - RNA, 19 nt, Homo sapiens
  misc_RNA (1)...(19): siRNA sense strand
ccugaaggaagccaucauu

SEQ ID NO: 931995 - RNA, 19 nt, Homo sapiens
  misc_RNA (1)...(19): siRNA sense strand
uagccgaugaccucaauga

SEQ ID NO: 931996 - RNA, 19 nt, Homo sapiens
  misc_RNA (1)...(19): siRNA sense strand
uggacgaccuguuugacau

SEQ ID NO: 931997 - RNA, 19 nt, Homo sapiens
  misc_RNA (1)...(19): siRNA sense strand
uagcagacagcucuuccuu

SEQ ID NO: 931998 - RNA, 19 nt, Homo sapiens
  misc_RNA (1)...(19): siRNA sense strand
ccaaacagcaggaaaaugg

SEQ ID NO: 931999 - RNA, 19 nt, Homo sapiens
  misc_RNA (1)...(19): siRNA sense strand
agaaagacaagcagaucga

SEQ ID NO: 932000 - RNA, 19 nt, Homo sapiens
  misc_RNA (1)...(19): siRNA sense strand
cggccaaccuggacgacau

SEQ ID NO: 932001 - RNA, 19 nt, Homo sapiens
  misc_RNA (1)...(19): siRNA sense strand
caaaggugaagaagcucaa

SEQ ID NO: 932002 - RNA, 19 nt, Homo sapiens
  misc_RNA (1)...(19): siRNA sense strand
agccaaaggugaagaagcu

SEQ ID NO: 932003 - RNA, 19 nt, Homo sapiens
  misc_RNA (1)...(19): siRNA sense strand
uggagcugguggagaagaa

SEQ ID NO: 932004 - RNA, 19 nt, Homo sapiens
  misc_RNA (1)...(19): siRNA sense strand
ccaagucugccagugagaa

SEQ ID NO: 932005 - RNA, 19 nt, Homo sapiens
  misc_RNA (1)...(19): siRNA sense strand
gcagcacagccaucaccuu

SEQ ID NO: 932006 - RNA, 19 nt, Homo sapiens
  misc_RNA (1)...(19): siRNA sense strand
cugaagagagccagacuag

SEQ ID NO: 932007 - RNA, 19 nt, Homo sapiens
  misc_RNA (1)...(19): siRNA sense strand
accagaugcugcaggagaa

SEQ ID NO: 932008 - RNA, 19 nt, Homo sapiens
  misc_RNA (1)...(19): siRNA sense strand
ugaagccaaaggugaagaa

SEQ ID NO: 932009 - RNA, 19 nt, Homo sapiens
  misc_RNA (1)...(19): siRNA sense strand
ccucccagccucaccaaug

SEQ ID NO: 932010 - RNA, 19 nt, Homo sapiens
  misc_RNA (1)...(19): siRNA sense strand
acuagccgaugaccucaau

SEQ ID NO: 932011 - RNA, 19 nt, Homo sapiens
  misc_RNA (1)...(19): siRNA sense strand
ggaaauuacuuaccugaua

SEQ ID NO: 932012 - RNA, 19 nt, Homo sapiens
  misc_RNA (1)...(19): siRNA sense strand
caagaacaaucuaucauuc

SEQ ID NO: 932013 - RNA, 19 nt, Homo sapiens
  misc_RNA (1)...(19): siRNA sense strand
gaaauuacuuaccugauac

SEQ ID NO: 932014 - RNA, 19 nt, Homo sapiens
  misc_RNA (1)...(19): siRNA sense strand
gcaagaacaaucuaucauu

SEQ ID NO: 932015 - RNA, 19 nt, Homo sapiens
  misc_RNA (1)...(19): siRNA sense strand
gauggaacguucuaugaau

SEQ ID NO: 932016 - RNA, 19 nt, Homo sapiens
  misc_RNA (1)...(19): siRNA sense strand
uaaugcccaugucaauuua

SEQ ID NO: 932017 - RNA, 19 nt, Homo sapiens
  misc_RNA (1)...(19): siRNA sense strand
gauaccaugguccaaauua

SEQ ID NO: 932018 - RNA, 19 nt, Homo sapiens
  misc_RNA (1)...(19): siRNA sense strand
ggaaugagagugcagauag

SEQ ID NO: 932019 - RNA, 19 nt, Homo sapiens
  misc_RNA (1)...(19): siRNA sense strand
gaacgaauaaaguguuuca

SEQ ID NO: 932020 - RNA, 19 nt, Homo sapiens
  misc_RNA (1)...(19): siRNA sense strand
gaaggagucuaugaacuag

SEQ ID NO: 932021 - RNA, 19 nt, Homo sapiens
  misc_RNA (1)...(19): siRNA sense strand
ccuuaaaccuucaaauaug

SEQ ID NO: 932022 - RNA, 19 nt, Homo sapiens
  misc_RNA (1)...(19): siRNA sense strand
cagaacgaauaaaguguuu

SEQ ID NO: 932023 - RNA, 19 nt, Homo sapiens
  misc_RNA (1)...(19): siRNA sense strand
aaacaagagacggaaauua

SEQ ID NO: 932024 - RNA, 19 nt, Homo sapiens
  misc_RNA (1)...(19): siRNA sense strand
gaaugagagugcagauagu

SEQ ID NO: 932025 - RNA, 19 nt, Homo sapiens
  misc_RNA (1)...(19): siRNA sense strand
gcagaacgaauaaaguguu

SEQ ID NO: 932026 - RNA, 19 nt, Homo sapiens
  misc_RNA (1)...(19): siRNA sense strand
ggagacauaagucccauga

SEQ ID NO: 932027 - RNA, 19 nt, Homo sapiens
  misc_RNA (1)...(19): siRNA sense strand
ggaaagccuuagccaacug

SEQ ID NO: 932028 - RNA, 19 nt, Homo sapiens
  misc_RNA (1)...(19): siRNA sense strand
gcauuugaaagagcaauua

SEQ ID NO: 932029 - RNA, 19 nt, Homo sapiens
  misc_RNA (1)...(19): siRNA sense strand
agaaggagucuaugaacua

SEQ ID NO: 932030 - RNA, 19 nt, Homo sapiens
  misc_RNA (1)...(19): siRNA sense strand
uuaaugcccaugucaauuu

SEQ ID NO: 932031 - RNA, 19 nt, Homo sapiens
  misc_RNA (1)...(19): siRNA sense strand
ccacacagaauauggagaa

SEQ ID NO: 932032 - RNA, 19 nt, Homo sapiens
  misc_RNA (1)...(19): siRNA sense strand
aaauuuggcucgcauugau

SEQ ID NO: 932033 - RNA, 19 nt, Homo sapiens
  misc_RNA (1)...(19): siRNA sense strand
gcaauuaaugcccauguca

SEQ ID NO: 932034 - RNA, 19 nt, Homo sapiens
  misc_RNA (1)...(19): siRNA sense strand
agaaaagccuccaaaagaa

SEQ ID NO: 932035 - RNA, 19 nt, Homo sapiens
  misc_RNA (1)...(19): siRNA sense strand
ggaaagugucaacuaccua

SEQ ID NO: 932036 - RNA, 19 nt, Homo sapiens
  misc_RNA (1)...(19): siRNA sense strand
ccaugaggaucccagaguu

SEQ ID NO: 932037 - RNA, 19 nt, Homo sapiens
  misc_RNA (1)...(19): siRNA sense strand
guucuuugguggaaugaga

SEQ ID NO: 932038 - RNA, 19 nt, Homo sapiens
  misc_RNA (1)...(19): siRNA sense strand
caagagacggaaauuacuu

SEQ ID NO: 932039 - RNA, 19 nt, Homo sapiens
  misc_RNA (1)...(19): siRNA sense strand
gaacaaucuaucauuccaa

SEQ ID NO: 932040 - RNA, 19 nt, Homo sapiens
  misc_RNA (1)...(19): siRNA sense strand
uagaaaagccuccaaaaga

SEQ ID NO: 932041 - RNA, 19 nt, Homo sapiens
  misc_RNA (1)...(19): siRNA sense strand
ggaacguucuaugaauuuc

SEQ ID NO: 932042 - RNA, 19 nt, Homo sapiens
  misc_RNA (1)...(19): siRNA sense strand
ggaggcagaacgaauaaag

SEQ ID NO: 932043 - RNA, 19 nt, Homo sapiens
  misc_RNA (1)...(19): siRNA sense strand
ggaauggcaagaacaaucu

SEQ ID NO: 932044 - RNA, 19 nt, Homo sapiens
  misc_RNA (1)...(19): siRNA sense strand
gauaaacaagagacggaaa

SEQ ID NO: 932045 - RNA, 19 nt, Homo sapiens
  misc_RNA (1)...(19): siRNA sense strand
gaauauggagaacucaaca

SEQ ID NO: 932046 - RNA, 19 nt, Homo sapiens
  misc_RNA (1)...(19): siRNA sense strand
uaaggaauggcaagaacaa

SEQ ID NO: 932047 - RNA, 19 nt, Homo sapiens
  misc_RNA (1)...(19): siRNA sense strand
ccucagguguguucaucuu

SEQ ID NO: 932048 - RNA, 19 nt, Homo sapiens
  misc_RNA (1)...(19): siRNA sense strand
caaauuuggcucgcauuga

SEQ ID NO: 932049 - RNA, 19 nt, Homo sapiens
  misc_RNA (1)...(19): siRNA sense strand
gaauuuggaggcagaacga

SEQ ID NO: 932050 - RNA, 19 nt, Homo sapiens
  misc_RNA (1)...(19): siRNA sense strand
aagagacggaaauuacuua

SEQ ID NO: 932051 - RNA, 19 nt, Homo sapiens
  misc_RNA (1)...(19): siRNA sense strand
gagcugaaguucggaaagc

SEQ ID NO: 932052 - RNA, 19 nt, Homo sapiens
  misc_RNA (1)...(19): siRNA sense strand
uaaacaagagacggaaauu

SEQ ID NO: 932053 - RNA, 19 nt, Homo sapiens
  misc_RNA (1)...(19): siRNA sense strand
caaaagaaggagucuauga

SEQ ID NO: 932054 - RNA, 19 nt, Homo sapiens
  misc_RNA (1)...(19): siRNA sense strand
cgauggaacguucuaugaa

SEQ ID NO: 932055 - RNA, 19 nt, Homo sapiens
  misc_RNA (1)...(19): siRNA sense strand
gggaaagugucaacuaccu

SEQ ID NO: 932056 - RNA, 19 nt, Homo sapiens
  misc_RNA (1)...(19): siRNA sense strand
cacagaauauggagaacuc

SEQ ID NO: 932057 - RNA, 19 nt, Homo sapiens
  misc_RNA (1)...(19): siRNA sense strand
ggaccucuuacucugaauu

SEQ ID NO: 932058 - RNA, 19 nt, Homo sapiens
  misc_RNA (1)...(19): siRNA sense strand
agacggaaauuacuuaccu

SEQ ID NO: 932059 - RNA, 19 nt, Homo sapiens
  misc_RNA (1)...(19): siRNA sense strand
gaauggcaagaacaaucua

SEQ ID NO: 932060 - RNA, 19 nt, Homo sapiens
  misc_RNA (1)...(19): siRNA sense strand
acucugaauugguuggauu

SEQ ID NO: 932061 - RNA, 19 nt, Homo sapiens
  misc_RNA (1)...(19): siRNA sense strand
cauguucuuugguggaaug

SEQ ID NO: 932062 - RNA, 19 nt, Homo sapiens
  misc_RNA (1)...(19): siRNA sense strand
caauuuaggcuacacaaaa

SEQ ID NO: 932063 - RNA, 19 nt, Homo sapiens
  misc_RNA (1)...(19): siRNA sense strand
ggugaugcauuugaaagag

SEQ ID NO: 932064 - RNA, 19 nt, Homo sapiens
  misc_RNA (1)...(19): siRNA sense strand
agaacaaucuaucauucca

SEQ ID NO: 932065 - RNA, 19 nt, Homo sapiens
  misc_RNA (1)...(19): siRNA sense strand
guuggauucuggaguguag

SEQ ID NO: 932066 - RNA, 19 nt, Homo sapiens
  misc_RNA (1)...(19): siRNA sense strand
caauuaaugcccaugucaa

SEQ ID NO: 932067 - RNA, 19 nt, Homo sapiens
  misc_RNA (1)...(19): siRNA sense strand
gacaauacgauggaacguu

SEQ ID NO: 932068 - RNA, 19 nt, Homo sapiens
  misc_RNA (1)...(19): siRNA sense strand
gaaagccuuagccaacugu

SEQ ID NO: 932069 - RNA, 19 nt, Homo sapiens
  misc_RNA (1)...(19): siRNA sense strand
auggaacguucuaugaauu

SEQ ID NO: 932070 - RNA, 19 nt, Homo sapiens
  misc_RNA (1)...(19): siRNA sense strand
uggaacguucuaugaauuu

SEQ ID NO: 932071 - RNA, 19 nt, Homo sapiens
  misc_RNA (1)...(19): siRNA sense strand
gagcaauuaaugcccaugu

SEQ ID NO: 932072 - RNA, 19 nt, Homo sapiens
  misc_RNA (1)...(19): siRNA sense strand
guaaggaauggcaagaaca

SEQ ID NO: 932073 - RNA, 19 nt, Homo sapiens
  misc_RNA (1)...(19): siRNA sense strand
aagaaggagucuaugaacu

SEQ ID NO: 932074 - RNA, 19 nt, Homo sapiens
  misc_RNA (1)...(19): siRNA sense strand
uuagccaacuguaaggaau

SEQ ID NO: 932075 - RNA, 19 nt, Homo sapiens
  misc_RNA (1)...(19): siRNA sense strand
gcagcugggagacauaagu

SEQ ID NO: 932076 - RNA, 19 nt, Homo sapiens
  misc_RNA (1)...(19): siRNA sense strand
cagaguucauguucuuugg

SEQ ID NO: 932077 - RNA, 19 nt, Homo sapiens
  misc_RNA (1)...(19): siRNA sense strand
ucuaugaacuagcuguuuu

SEQ ID NO: 932078 - RNA, 19 nt, Homo sapiens
  misc_RNA (1)...(19): siRNA sense strand
gaccucuuacucugaauug

SEQ ID NO: 932079 - RNA, 19 nt, Homo sapiens
  misc_RNA (1)...(19): siRNA sense strand
ucggaccucuuacucugaa

SEQ ID NO: 932080 - RNA, 19 nt, Homo sapiens
  misc_RNA (1)...(19): siRNA sense strand
ucaauuuaggcuacacaaa

SEQ ID NO: 932081 - RNA, 19 nt, Homo sapiens
  misc_RNA (1)...(19): siRNA sense strand
cugauaccaugguccaaau

SEQ ID NO: 932082 - RNA, 19 nt, Homo sapiens
  misc_RNA (1)...(19): siRNA sense strand
aacaagagacggaaauuac

SEQ ID NO: 932083 - RNA, 19 nt, Homo sapiens
  misc_RNA (1)...(19): siRNA sense strand
uguaaggaauggcaagaac

SEQ ID NO: 932084 - RNA, 19 nt, Homo sapiens
  misc_RNA (1)...(19): siRNA sense strand
gggugaugcauuugaaaga

SEQ ID NO: 932085 - RNA, 19 nt, Homo sapiens
  misc_RNA (1)...(19): siRNA sense strand
uuuggaggcagaacgaaua

SEQ ID NO: 932086 - RNA, 19 nt, Homo sapiens
  misc_RNA (1)...(19): siRNA sense strand
uaccaugguccaaauuaga

SEQ ID NO: 932087 - RNA, 19 nt, Homo sapiens
  misc_RNA (1)...(19): siRNA sense strand
gaggcagaacgaauaaagu

SEQ ID NO: 932088 - RNA, 19 nt, Homo sapiens
  misc_RNA (1)...(19): siRNA sense strand
ucgggaaagugucaacuac

SEQ ID NO: 932089 - RNA, 19 nt, Homo sapiens
  misc_RNA (1)...(19): siRNA sense strand
acgauggaacguucuauga

SEQ ID NO: 932090 - RNA, 19 nt, Homo sapiens
  misc_RNA (1)...(19): siRNA sense strand
ucagguguguucaucuuuu

SEQ ID NO: 932091 - RNA, 19 nt, Homo sapiens
  misc_RNA (1)...(19): siRNA sense strand
ggcaagaacaaucuaucau

SEQ ID NO: 932092 - RNA, 19 nt, Homo sapiens
  misc_RNA (1)...(19): siRNA sense strand
caugaggaucccagaguug

SEQ ID NO: 932093 - RNA, 19 nt, Homo sapiens
  misc_RNA (1)...(19): siRNA sense strand
aaagaaggagucuaugaac

SEQ ID NO: 932094 - RNA, 19 nt, Homo sapiens
  misc_RNA (1)...(19): siRNA sense strand
gaaaagccuccaaaagaag

SEQ ID NO: 932095 - RNA, 19 nt, Homo sapiens
  misc_RNA (1)...(19): siRNA sense strand
ucgcauugauaaacaagag

SEQ ID NO: 932096 - RNA, 19 nt, Homo sapiens
  misc_RNA (1)...(19): siRNA sense strand
uggcucgcauugauaaaca

SEQ ID NO: 932097 - RNA, 19 nt, Homo sapiens
  misc_RNA (1)...(19): siRNA sense strand
cggaaagccuuagccaacu

SEQ ID NO: 932098 - RNA, 19 nt, Homo sapiens
  misc_RNA (1)...(19): siRNA sense strand
aaaagaaggagucuaugaa

SEQ ID NO: 932099 - RNA, 19 nt, Homo sapiens
  misc_RNA (1)...(19): siRNA sense strand
auaccaugguccaaauuag

SEQ ID NO: 932100 - RNA, 19 nt, Homo sapiens
  misc_RNA (1)...(19): siRNA sense strand
uggcaagaacaaucuauca

SEQ ID NO: 932101 - RNA, 19 nt, Homo sapiens
  misc_RNA (1)...(19): siRNA sense strand
ugaaguucggaaagccuua

SEQ ID NO: 932102 - RNA, 19 nt, Homo sapiens
  misc_RNA (1)...(19): siRNA sense strand
cagaauauggagaacucaa

SEQ ID NO: 932103 - RNA, 19 nt, Homo sapiens
  misc_RNA (1)...(19): siRNA sense strand
aggcagaacgaauaaagug

SEQ ID NO: 932104 - RNA, 19 nt, Homo sapiens
  misc_RNA (1)...(19): siRNA sense strand
gugcagcugggagacauaa

SEQ ID NO: 932105 - RNA, 19 nt, Homo sapiens
  misc_RNA (1)...(19): siRNA sense strand
acagaguucauguucuuug

SEQ ID NO: 932106 - RNA, 19 nt, Homo sapiens
  misc_RNA (1)...(19): siRNA sense strand
ggacccagcucauauaaau

SEQ ID NO: 932107 - RNA, 19 nt, Homo sapiens
  misc_RNA (1)...(19): siRNA sense strand
ggacccagcucauauaaau

SEQ ID NO: 932108 - RNA, 19 nt, Homo sapiens
  misc_RNA (1)...(19): siRNA sense strand
ggaauucguuuauauggaa

SEQ ID NO: 932109 - RNA, 19 nt, Homo sapiens
  misc_RNA (1)...(19): siRNA sense strand
caaagugacuauaugcaaa

SEQ ID NO: 932110 - RNA, 19 nt, Homo sapiens
  misc_RNA (1)...(19): siRNA sense strand
gggaagagauucuguacga

SEQ ID NO: 932111 - RNA, 19 nt, Homo sapiens
  misc_RNA (1)...(19): siRNA sense strand
uaaauggacucaccaacaa

SEQ ID NO: 932112 - RNA, 19 nt, Homo sapiens
  misc_RNA (1)...(19): siRNA sense strand
ugagagcuguguuaagaua

SEQ ID NO: 932113 - RNA, 19 nt, Homo sapiens
  misc_RNA (1)...(19): siRNA sense strand
gcaaacaagugauagugau

SEQ ID NO: 932114 - RNA, 19 nt, Homo sapiens
  misc_RNA (1)...(19): siRNA sense strand
gaaagucuaagaagaagaa

SEQ ID NO: 932115 - RNA, 19 nt, Homo sapiens
  misc_RNA (1)...(19): siRNA sense strand
uaaccaaagugacuauaug

SEQ ID NO: 932116 - RNA, 19 nt, Homo sapiens
  misc_RNA (1)...(19): siRNA sense strand
caacagaggcaacgaaugu

SEQ ID NO: 932117 - RNA, 19 nt, Homo sapiens
  misc_RNA (1)...(19): siRNA sense strand
cuacaggaaugaagaaaug

SEQ ID NO: 932118 - RNA, 19 nt, Homo sapiens
  misc_RNA (1)...(19): siRNA sense strand
gaaaugacagcuccacuuc

SEQ ID NO: 932119 - RNA, 19 nt, Homo sapiens
  misc_RNA (1)...(19): siRNA sense strand
ucacacaacuacaggaaug

SEQ ID NO: 932120 - RNA, 19 nt, Homo sapiens
  misc_RNA (1)...(19): siRNA sense strand
ccaagugacucugaccuuu

SEQ ID NO: 932121 - RNA, 19 nt, Homo sapiens
  misc_RNA (1)...(19): siRNA sense strand
ccaagugacucugaccuuu

SEQ ID NO: 932122 - RNA, 19 nt, Homo sapiens
  misc_RNA (1)...(19): siRNA sense strand
ggauuugucugcuuuaaac

SEQ ID NO: 932123 - RNA, 19 nt, Homo sapiens
  misc_RNA (1)...(19): siRNA sense strand
caagugacucugaccuuua

SEQ ID NO: 932124 - RNA, 19 nt, Homo sapiens
  misc_RNA (1)...(19): siRNA sense strand
caagugacucugaccuuua

SEQ ID NO: 932125 - RNA, 19 nt, Homo sapiens
  misc_RNA (1)...(19): siRNA sense strand
gcaaagacagagaaggaaa

SEQ ID NO: 932126 - RNA, 19 nt, Homo sapiens
  misc_RNA (1)...(19): siRNA sense strand
gcagcuuccuuacuaugaa

SEQ ID NO: 932127 - RNA, 19 nt, Homo sapiens
  misc_RNA (1)...(19): siRNA sense strand
cagaaucggugucuuaugc

SEQ ID NO: 932128 - RNA, 19 nt, Homo sapiens
  misc_RNA (1)...(19): siRNA sense strand
caaacaagugauagugaua

SEQ ID NO: 932129 - RNA, 19 nt, Homo sapiens
  misc_RNA (1)...(19): siRNA sense strand
gaauuuagaggcccgaguu

SEQ ID NO: 932130 - RNA, 19 nt, Homo sapiens
  misc_RNA (1)...(19): siRNA sense strand
ggaguucucgcucuucuga

SEQ ID NO: 932131 - RNA, 19 nt, Homo sapiens
  misc_RNA (1)...(19): siRNA sense strand
gaaggaaagccaaagucuu

SEQ ID NO: 932132 - RNA, 19 nt, Homo sapiens
  misc_RNA (1)...(19): siRNA sense strand
cagcuccacuuccuaauag

SEQ ID NO: 932133 - RNA, 19 nt, Homo sapiens
  misc_RNA (1)...(19): siRNA sense strand
cagcuccacuuccuaauag

SEQ ID NO: 932134 - RNA, 19 nt, Homo sapiens
  misc_RNA (1)...(19): siRNA sense strand
uaacgugcaguaucgauuu

SEQ ID NO: 932135 - RNA, 19 nt, Homo sapiens
  misc_RNA (1)...(19): siRNA sense strand
gacaggaccguguuuguug

SEQ ID NO: 932136 - RNA, 19 nt, Homo sapiens
  misc_RNA (1)...(19): siRNA sense strand
uuugagagcuguguuaaga

SEQ ID NO: 932137 - RNA, 19 nt, Homo sapiens
  misc_RNA (1)...(19): siRNA sense strand
ugaaccagcuaaccaaagu

SEQ ID NO: 932138 - RNA, 19 nt, Homo sapiens
  misc_RNA (1)...(19): siRNA sense strand
caauuaacgugcaguaucg

SEQ ID NO: 932139 - RNA, 19 nt, Homo sapiens
  misc_RNA (1)...(19): siRNA sense strand
ugacagcuccacuuccuaa

SEQ ID NO: 932140 - RNA, 19 nt, Homo sapiens
  misc_RNA (1)...(19): siRNA sense strand
ugacagcuccacuuccuaa

SEQ ID NO: 932141 - RNA, 19 nt, Homo sapiens
  misc_RNA (1)...(19): siRNA sense strand
gcaguggcauguguauaau

SEQ ID NO: 932142 - RNA, 19 nt, Homo sapiens
  misc_RNA (1)...(19): siRNA sense strand
gaugacagcuccacuuccu

SEQ ID NO: 932143 - RNA, 19 nt, Homo sapiens
  misc_RNA (1)...(19): siRNA sense strand
caacaacagaggcaacgaa

SEQ ID NO: 932144 - RNA, 19 nt, Homo sapiens
  misc_RNA (1)...(19): siRNA sense strand
ugccauagcuuugcugaau

SEQ ID NO: 932145 - RNA, 19 nt, Homo sapiens
  misc_RNA (1)...(19): siRNA sense strand
gauaguagcacagacaaca

SEQ ID NO: 932146 - RNA, 19 nt, Homo sapiens
  misc_RNA (1)...(19): siRNA sense strand
uagcuuugcugaauggaau

SEQ ID NO: 932147 - RNA, 19 nt, Homo sapiens
  misc_RNA (1)...(19): siRNA sense strand
ugaaucauguuccagaucu

SEQ ID NO: 932148 - RNA, 19 nt, Homo sapiens
  misc_RNA (1)...(19): siRNA sense strand
uguacgagcuguuccuuca

SEQ ID NO: 932149 - RNA, 19 nt, Homo sapiens
  misc_RNA (1)...(19): siRNA sense strand
ugaaucauguuccagaucu

SEQ ID NO: 932150 - RNA, 19 nt, Homo sapiens
  misc_RNA (1)...(19): siRNA sense strand
ccaaagugacuauaugcaa

SEQ ID NO: 932151 - RNA, 19 nt, Homo sapiens
  misc_RNA (1)...(19): siRNA sense strand
ggcaacgaauguagccaaa

SEQ ID NO: 932152 - RNA, 19 nt, Homo sapiens
  misc_RNA (1)...(19): siRNA sense strand
caagugauagugauaguag

SEQ ID NO: 932153 - RNA, 19 nt, Homo sapiens
  misc_RNA (1)...(19): siRNA sense strand
agagcuguguuaagauaaa

SEQ ID NO: 932154 - RNA, 19 nt, Homo sapiens
  misc_RNA (1)...(19): siRNA sense strand
gugacuauaugcaaagaca

SEQ ID NO: 932155 - RNA, 19 nt, Homo sapiens
  misc_RNA (1)...(19): siRNA sense strand
caaaagcaaacaagugaua

SEQ ID NO: 932156 - RNA, 19 nt, Homo sapiens
  misc_RNA (1)...(19): siRNA sense strand
cagcuuccuuacuaugaaa

SEQ ID NO: 932157 - RNA, 19 nt, Homo sapiens
  misc_RNA (1)...(19): siRNA sense strand
caacuacaggaaugaagaa

SEQ ID NO: 932158 - RNA, 19 nt, Homo sapiens
  misc_RNA (1)...(19): siRNA sense strand
ccaauuaacgugcaguauc

SEQ ID NO: 932159 - RNA, 19 nt, Homo sapiens
  misc_RNA (1)...(19): siRNA sense strand
gauaaauucacacaacuac

SEQ ID NO: 932160 - RNA, 19 nt, Homo sapiens
  misc_RNA (1)...(19): siRNA sense strand
cgacaggaccguguuuguu

SEQ ID NO: 932161 - RNA, 19 nt, Homo sapiens
  misc_RNA (1)...(19): siRNA sense strand
ucagaugaauaaacgaaag

SEQ ID NO: 932162 - RNA, 19 nt, Homo sapiens
  misc_RNA (1)...(19): siRNA sense strand
gaucuuccuuucccaugca

SEQ ID NO: 932163 - RNA, 19 nt, Homo sapiens
  misc_RNA (1)...(19): siRNA sense strand
gaaucauguuccagaucuu

SEQ ID NO: 932164 - RNA, 19 nt, Homo sapiens
  misc_RNA (1)...(19): siRNA sense strand
gaaucauguuccagaucuu

SEQ ID NO: 932165 - RNA, 19 nt, Homo sapiens
  misc_RNA (1)...(19): siRNA sense strand
gagcuguguuaagauaaau

SEQ ID NO: 932166 - RNA, 19 nt, Homo sapiens
  misc_RNA (1)...(19): siRNA sense strand
ugaaaugacagcuccacuu

SEQ ID NO: 932167 - RNA, 19 nt, Homo sapiens
  misc_RNA (1)...(19): siRNA sense strand
ugcaguggcauguguauaa

SEQ ID NO: 932168 - RNA, 19 nt, Homo sapiens
  misc_RNA (1)...(19): siRNA sense strand
gacaaaagcaaacaaguga

SEQ ID NO: 932169 - RNA, 19 nt, Homo sapiens
  misc_RNA (1)...(19): siRNA sense strand
gccauagcuuugcugaaug

SEQ ID NO: 932170 - RNA, 19 nt, Homo sapiens
  misc_RNA (1)...(19): siRNA sense strand
ugaauaaacgaaagagaca

SEQ ID NO: 932171 - RNA, 19 nt, Homo sapiens
  misc_RNA (1)...(19): siRNA sense strand
aagugacucugaccuuuau

SEQ ID NO: 932172 - RNA, 19 nt, Homo sapiens
  misc_RNA (1)...(19): siRNA sense strand
aagugacucugaccuuuau

SEQ ID NO: 932173 - RNA, 19 nt, Homo sapiens
  misc_RNA (1)...(19): siRNA sense strand
gagaaggaaagccaaaguc

SEQ ID NO: 932174 - RNA, 19 nt, Homo sapiens
  misc_RNA (1)...(19): siRNA sense strand
caguaucgauuugggaguu

SEQ ID NO: 932175 - RNA, 19 nt, Homo sapiens
  misc_RNA (1)...(19): siRNA sense strand
gaccaauuaacgugcagua

SEQ ID NO: 932176 - RNA, 19 nt, Homo sapiens
  misc_RNA (1)...(19): siRNA sense strand
caacgaauguagccaaaag

SEQ ID NO: 932177 - RNA, 19 nt, Homo sapiens
  misc_RNA (1)...(19): siRNA sense strand
cguguuuguugggaauuua

SEQ ID NO: 932178 - RNA, 19 nt, Homo sapiens
  misc_RNA (1)...(19): siRNA sense strand
ugcugcagcuuccuuacua

SEQ ID NO: 932179 - RNA, 19 nt, Homo sapiens
  misc_RNA (1)...(19): siRNA sense strand
gugggcagaucuuccuuuc

SEQ ID NO: 932180 - RNA, 19 nt, Homo sapiens
  misc_RNA (1)...(19): siRNA sense strand
gaccguguuuguugggaau

SEQ ID NO: 932181 - RNA, 19 nt, Homo sapiens
  misc_RNA (1)...(19): siRNA sense strand
acagcuccacuuccuaaua

SEQ ID NO: 932182 - RNA, 19 nt, Homo sapiens
  misc_RNA (1)...(19): siRNA sense strand
acagcuccacuuccuaaua

SEQ ID NO: 932183 - RNA, 19 nt, Homo sapiens
  misc_RNA (1)...(19): siRNA sense strand
ccuuucccaugcaguauuu

SEQ ID NO: 932184 - RNA, 19 nt, Homo sapiens
  misc_RNA (1)...(19): siRNA sense strand
uaaauucacacaacuacag

SEQ ID NO: 932185 - RNA, 19 nt, Homo sapiens
  misc_RNA (1)...(19): siRNA sense strand
gagagcuguguuaagauaa

SEQ ID NO: 932186 - RNA, 19 nt, Homo sapiens
  misc_RNA (1)...(19): siRNA sense strand
gaaccagcuaaccaaaguu

SEQ ID NO: 932187 - RNA, 19 nt, Homo sapiens
  misc_RNA (1)...(19): siRNA sense strand
uagcacagacaacaacaga

SEQ ID NO: 932188 - RNA, 19 nt, Homo sapiens
  misc_RNA (1)...(19): siRNA sense strand
cgaaagagacaaaagcaaa

SEQ ID NO: 932189 - RNA, 19 nt, Homo sapiens
  misc_RNA (1)...(19): siRNA sense strand
gaugaauaaacgaaagaga

SEQ ID NO: 932190 - RNA, 19 nt, Homo sapiens
  misc_RNA (1)...(19): siRNA sense strand
uggaauucguuuauaugga

SEQ ID NO: 932191 - RNA, 19 nt, Homo sapiens
  misc_RNA (1)...(19): siRNA sense strand
gaauaaacgaaagagacaa

SEQ ID NO: 932192 - RNA, 19 nt, Homo sapiens
  misc_RNA (1)...(19): siRNA sense strand
acccagaaucggugucuua

SEQ ID NO: 932193 - RNA, 19 nt, Homo sapiens
  misc_RNA (1)...(19): siRNA sense strand
caaagacagagaaggaaag

SEQ ID NO: 932194 - RNA, 19 nt, Homo sapiens
  misc_RNA (1)...(19): siRNA sense strand
gcugcagcuuccuuacuau

SEQ ID NO: 932195 - RNA, 19 nt, Homo sapiens
  misc_RNA (1)...(19): siRNA sense strand
gacuauaugcaaagacaga

SEQ ID NO: 932196 - RNA, 19 nt, Homo sapiens
  misc_RNA (1)...(19): siRNA sense strand
cuuccucacugaaucaugu

SEQ ID NO: 932197 - RNA, 19 nt, Homo sapiens
  misc_RNA (1)...(19): siRNA sense strand
cuuccucacugaaucaugu

SEQ ID NO: 932198 - RNA, 19 nt, Homo sapiens
  misc_RNA (1)...(19): siRNA sense strand
auaaauggacucaccaaca

SEQ ID NO: 932199 - RNA, 19 nt, Homo sapiens
  misc_RNA (1)...(19): siRNA sense strand
gaccuuuaucagaugaaua

SEQ ID NO: 932200 - RNA, 19 nt, Homo sapiens
  misc_RNA (1)...(19): siRNA sense strand
uuccgaaagucuaagaaga

SEQ ID NO: 932201 - RNA, 19 nt, Homo sapiens
  misc_RNA (1)...(19): siRNA sense strand
cuaaccaaagugacuauau

SEQ ID NO: 932202 - RNA, 19 nt, Homo sapiens
  misc_RNA (1)...(19): siRNA sense strand
ccgaaagucuaagaagaag

SEQ ID NO: 932203 - RNA, 19 nt, Homo sapiens
  misc_RNA (1)...(19): siRNA sense strand
cagaugacagcuccacuuc

SEQ ID NO: 932204 - RNA, 19 nt, Homo sapiens
  misc_RNA (1)...(19): siRNA sense strand
caaaaguuccgaaagucua

SEQ ID NO: 932205 - RNA, 19 nt, Homo sapiens
  misc_RNA (1)...(19): siRNA sense strand
uccgaaagucuaagaagaa

SEQ ID NO: 932206 - RNA, 19 nt, Homo sapiens
  misc_RNA (1)...(19): siRNA sense strand
gccaaaggcuucucaauga

SEQ ID NO: 932207 - RNA, 19 nt, Homo sapiens
  misc_RNA (1)...(19): siRNA sense strand
gaaccagaaagaugaauua

SEQ ID NO: 932208 - RNA, 19 nt, Homo sapiens
  misc_RNA (1)...(19): siRNA sense strand
caagagaugcccugaauaa

SEQ ID NO: 932209 - RNA, 19 nt, Homo sapiens
  misc_RNA (1)...(19): siRNA sense strand
cggccaagaugcugaauua

SEQ ID NO: 932210 - RNA, 19 nt, Homo sapiens
  misc_RNA (1)...(19): siRNA sense strand
ccaagaugcugaauuauca

SEQ ID NO: 932211 - RNA, 19 nt, Homo sapiens
  misc_RNA (1)...(19): siRNA sense strand
gaaaagccauugauaagaa

SEQ ID NO: 932212 - RNA, 19 nt, Homo sapiens
  misc_RNA (1)...(19): siRNA sense strand
ggucuguggucauauuaua

SEQ ID NO: 932213 - RNA, 19 nt, Homo sapiens
  misc_RNA (1)...(19): siRNA sense strand
gcaaaccagugggcugaua

SEQ ID NO: 932214 - RNA, 19 nt, Homo sapiens
  misc_RNA (1)...(19): siRNA sense strand
ugaauuaccuauugaagug

SEQ ID NO: 932215 - RNA, 19 nt, Homo sapiens
  misc_RNA (1)...(19): siRNA sense strand
gcaaacaacagauaacaau

SEQ ID NO: 932216 - RNA, 19 nt, Homo sapiens
  misc_RNA (1)...(19): siRNA sense strand
ggaaucuggucuuucugua

SEQ ID NO: 932217 - RNA, 19 nt, Homo sapiens
  misc_RNA (1)...(19): siRNA sense strand
ggaaccauuuguggaguua

SEQ ID NO: 932218 - RNA, 19 nt, Homo sapiens
  misc_RNA (1)...(19): siRNA sense strand
gaacaaaguccaggagaug

SEQ ID NO: 932219 - RNA, 19 nt, Homo sapiens
  misc_RNA (1)...(19): siRNA sense strand
gcacuucuuucgacaagga

SEQ ID NO: 932220 - RNA, 19 nt, Homo sapiens
  misc_RNA (1)...(19): siRNA sense strand
uggaggagcucaucgacua

SEQ ID NO: 932221 - RNA, 19 nt, Homo sapiens
  misc_RNA (1)...(19): siRNA sense strand
ccagugggcugauaucugu

SEQ ID NO: 932222 - RNA, 19 nt, Homo sapiens
  misc_RNA (1)...(19): siRNA sense strand
aaacagcuccuuggaauuu

SEQ ID NO: 932223 - RNA, 19 nt, Homo sapiens
  misc_RNA (1)...(19): siRNA sense strand
gaauaaaggauacuguuca

SEQ ID NO: 932224 - RNA, 19 nt, Homo sapiens
  misc_RNA (1)...(19): siRNA sense strand
ggaacaaaguccaggagau

SEQ ID NO: 932225 - RNA, 19 nt, Homo sapiens
  misc_RNA (1)...(19): siRNA sense strand
ugauaucugugacaucuuu

SEQ ID NO: 932226 - RNA, 19 nt, Homo sapiens
  misc_RNA (1)...(19): siRNA sense strand
gaggagcucugucaggaau

SEQ ID NO: 932227 - RNA, 19 nt, Homo sapiens
  misc_RNA (1)...(19): siRNA sense strand
ccaaaggcuucucaaugaa

SEQ ID NO: 932228 - RNA, 19 nt, Homo sapiens
  misc_RNA (1)...(19): siRNA sense strand
cgagaggcauuacaauaug

SEQ ID NO: 932229 - RNA, 19 nt, Homo sapiens
  misc_RNA (1)...(19): siRNA sense strand
gcgagaggcauuacaauau

SEQ ID NO: 932230 - RNA, 19 nt, Homo sapiens
  misc_RNA (1)...(19): siRNA sense strand
gacaaggaaugcuggaugu

SEQ ID NO: 932231 - RNA, 19 nt, Homo sapiens
  misc_RNA (1)...(19): siRNA sense strand
caaaacagcuccuuggaau

SEQ ID NO: 932232 - RNA, 19 nt, Homo sapiens
  misc_RNA (1)...(19): siRNA sense strand
gugcugguaucacucuaua

SEQ ID NO: 932233 - RNA, 19 nt, Homo sapiens
  misc_RNA (1)...(19): siRNA sense strand
ccagaaagaugaauuaccu

SEQ ID NO: 932234 - RNA, 19 nt, Homo sapiens
  misc_RNA (1)...(19): siRNA sense strand
gacaagggauugagaacuc

SEQ ID NO: 932235 - RNA, 19 nt, Homo sapiens
  misc_RNA (1)...(19): siRNA sense strand
ggaaaugcuuauagcucaa

SEQ ID NO: 932236 - RNA, 19 nt, Homo sapiens
  misc_RNA (1)...(19): siRNA sense strand
aaauuggucuguggucaua

SEQ ID NO: 932237 - RNA, 19 nt, Homo sapiens
  misc_RNA (1)...(19): siRNA sense strand
ucaggaaucuggucuuucu

SEQ ID NO: 932238 - RNA, 19 nt, Homo sapiens
  misc_RNA (1)...(19): siRNA sense strand
gauaacaauccacccauga

SEQ ID NO: 932239 - RNA, 19 nt, Homo sapiens
  misc_RNA (1)...(19): siRNA sense strand
gcugauaucugugacaucu

SEQ ID NO: 932240 - RNA, 19 nt, Homo sapiens
  misc_RNA (1)...(19): siRNA sense strand
gggacacuuucacuuguuu

SEQ ID NO: 932241 - RNA, 19 nt, Homo sapiens
  misc_RNA (1)...(19): siRNA sense strand
ggagaugccaaacagauau

SEQ ID NO: 932242 - RNA, 19 nt, Homo sapiens
  misc_RNA (1)...(19): siRNA sense strand
gagaugcccugaauaaaau

SEQ ID NO: 932243 - RNA, 19 nt, Homo sapiens
  misc_RNA (1)...(19): siRNA sense strand
gcugguaucacucuauauu

SEQ ID NO: 932244 - RNA, 19 nt, Homo sapiens
  misc_RNA (1)...(19): siRNA sense strand
uaacaauccacccaugaaa

SEQ ID NO: 932245 - RNA, 19 nt, Homo sapiens
  misc_RNA (1)...(19): siRNA sense strand
gaugguggagcacuucuuu

SEQ ID NO: 932246 - RNA, 19 nt, Homo sapiens
  misc_RNA (1)...(19): siRNA sense strand
gagcacuucuuucgacaag

SEQ ID NO: 932247 - RNA, 19 nt, Homo sapiens
  misc_RNA (1)...(19): siRNA sense strand
caaaucagcgagaggcauu

SEQ ID NO: 932248 - RNA, 19 nt, Homo sapiens
  misc_RNA (1)...(19): siRNA sense strand
ugguaucacucuauauuug

SEQ ID NO: 932249 - RNA, 19 nt, Homo sapiens
  misc_RNA (1)...(19): siRNA sense strand
aaucuggucuuucuguaga

SEQ ID NO: 932250 - RNA, 19 nt, Homo sapiens
  misc_RNA (1)...(19): siRNA sense strand
ggaaccagaaagaugaauu

SEQ ID NO: 932251 - RNA, 19 nt, Homo sapiens
  misc_RNA (1)...(19): siRNA sense strand
gaaaugcuuauagcucaaa

SEQ ID NO: 932252 - RNA, 19 nt, Homo sapiens
  misc_RNA (1)...(19): siRNA sense strand
acaauccacccaugaaauu

SEQ ID NO: 932253 - RNA, 19 nt, Homo sapiens
  misc_RNA (1)...(19): siRNA sense strand
cauuagcagugugggaaua

SEQ ID NO: 932254 - RNA, 19 nt, Homo sapiens
  misc_RNA (1)...(19): siRNA sense strand
ugaaguggaccuugguaaa

SEQ ID NO: 932255 - RNA, 19 nt, Homo sapiens
  misc_RNA (1)...(19): siRNA sense strand
gaauuaucagggacacuuu

SEQ ID NO: 932256 - RNA, 19 nt, Homo sapiens
  misc_RNA (1)...(19): siRNA sense strand
ugucaggaaucuggucuuu

SEQ ID NO: 932257 - RNA, 19 nt, Homo sapiens
  misc_RNA (1)...(19): siRNA sense strand
caagucagaaggaaccauu

SEQ ID NO: 932258 - RNA, 19 nt, Homo sapiens
  misc_RNA (1)...(19): siRNA sense strand
ucaaaccgggaaaugcuua

SEQ ID NO: 932259 - RNA, 19 nt, Homo sapiens
  misc_RNA (1)...(19): siRNA sense strand
gcagagccacggccaagau

SEQ ID NO: 932260 - RNA, 19 nt, Homo sapiens
  misc_RNA (1)...(19): siRNA sense strand
cagggacacuuucacuugu

SEQ ID NO: 932261 - RNA, 19 nt, Homo sapiens
  misc_RNA (1)...(19): siRNA sense strand
gaaauuggucuguggucau

SEQ ID NO: 932262 - RNA, 19 nt, Homo sapiens
  misc_RNA (1)...(19): siRNA sense strand
ucagggacacuuucacuug

SEQ ID NO: 932263 - RNA, 19 nt, Homo sapiens
  misc_RNA (1)...(19): siRNA sense strand
ggaauuuaagcuacacaga

SEQ ID NO: 932264 - RNA, 19 nt, Homo sapiens
  misc_RNA (1)...(19): siRNA sense strand
gcauuaaaggucagaguuc

SEQ ID NO: 932265 - RNA, 19 nt, Homo sapiens
  misc_RNA (1)...(19): siRNA sense strand
cgucagcaaacaacagaua

SEQ ID NO: 932266 - RNA, 19 nt, Homo sapiens
  misc_RNA (1)...(19): siRNA sense strand
gccaagaugcugaauuauc

SEQ ID NO: 932267 - RNA, 19 nt, Homo sapiens
  misc_RNA (1)...(19): siRNA sense strand
gacauccacagcaguguuu

SEQ ID NO: 932268 - RNA, 19 nt, Homo sapiens
  misc_RNA (1)...(19): siRNA sense strand
acagcuccuuggaauuuaa

SEQ ID NO: 932269 - RNA, 19 nt, Homo sapiens
  misc_RNA (1)...(19): siRNA sense strand
gaaguggaccuugguaaaa

SEQ ID NO: 932270 - RNA, 19 nt, Homo sapiens
  misc_RNA (1)...(19): siRNA sense strand
aaccauuuguggaguuaaa

SEQ ID NO: 932271 - RNA, 19 nt, Homo sapiens
  misc_RNA (1)...(19): siRNA sense strand
gagaugccaaacagauauu

SEQ ID NO: 932272 - RNA, 19 nt, Homo sapiens
  misc_RNA (1)...(19): siRNA sense strand
gaguuuggaaccagaaaga

SEQ ID NO: 932273 - RNA, 19 nt, Homo sapiens
  misc_RNA (1)...(19): siRNA sense strand
ucaagagaugcccugaaua

SEQ ID NO: 932274 - RNA, 19 nt, Homo sapiens
  misc_RNA (1)...(19): siRNA sense strand
gaaucuggucuuucuguag

SEQ ID NO: 932275 - RNA, 19 nt, Homo sapiens
  misc_RNA (1)...(19): siRNA sense strand
gggcugauaucugugacau

SEQ ID NO: 932276 - RNA, 19 nt, Homo sapiens
  misc_RNA (1)...(19): siRNA sense strand
ggaaaagccauugauaaga

SEQ ID NO: 932277 - RNA, 19 nt, Homo sapiens
  misc_RNA (1)...(19): siRNA sense strand
aaaugucccuacuguccaa

SEQ ID NO: 932278 - RNA, 19 nt, Homo sapiens
  misc_RNA (1)...(19): siRNA sense strand
guacuggaguuuggaacca

SEQ ID NO: 932279 - RNA, 19 nt, Homo sapiens
  misc_RNA (1)...(19): siRNA sense strand
caccauauguucaccuacu

SEQ ID NO: 932280 - RNA, 19 nt, Homo sapiens
  misc_RNA (1)...(19): siRNA sense strand
gaugggaagccuuguguac

SEQ ID NO: 932281 - RNA, 19 nt, Homo sapiens
  misc_RNA (1)...(19): siRNA sense strand
ggagcucugucaggaaucu

SEQ ID NO: 932282 - RNA, 19 nt, Homo sapiens
  misc_RNA (1)...(19): siRNA sense strand
aucaagagaugcccugaau

SEQ ID NO: 932283 - RNA, 19 nt, Homo sapiens
  misc_RNA (1)...(19): siRNA sense strand
caaaccagugggcugauau

SEQ ID NO: 932284 - RNA, 19 nt, Homo sapiens
  misc_RNA (1)...(19): siRNA sense strand
ggcauuaaaggucagaguu

SEQ ID NO: 932285 - RNA, 19 nt, Homo sapiens
  misc_RNA (1)...(19): siRNA sense strand
caaacaacagauaacaauc

SEQ ID NO: 932286 - RNA, 19 nt, Homo sapiens
  misc_RNA (1)...(19): siRNA sense strand
gaugaauuaccuauugaag

SEQ ID NO: 932287 - RNA, 19 nt, Homo sapiens
  misc_RNA (1)...(19): siRNA sense strand
uauguucaccuacuugaug

SEQ ID NO: 932288 - RNA, 19 nt, Homo sapiens
  misc_RNA (1)...(19): siRNA sense strand
cauuaaaggucagaguucu

SEQ ID NO: 932289 - RNA, 19 nt, Homo sapiens
  misc_RNA (1)...(19): siRNA sense strand
gauaucugugacaucuuua

SEQ ID NO: 932290 - RNA, 19 nt, Homo sapiens
  misc_RNA (1)...(19): siRNA sense strand
gcucuggagugggcagugu

SEQ ID NO: 932291 - RNA, 19 nt, Homo sapiens
  misc_RNA (1)...(19): siRNA sense strand
caggagaugccaaacagau

SEQ ID NO: 932292 - RNA, 19 nt, Homo sapiens
  misc_RNA (1)...(19): siRNA sense strand
ugaauuaucagggacacuu

SEQ ID NO: 932293 - RNA, 19 nt, Homo sapiens
  misc_RNA (1)...(19): siRNA sense strand
aacagcuccuuggaauuua

SEQ ID NO: 932294 - RNA, 19 nt, Homo sapiens
  misc_RNA (1)...(19): siRNA sense strand
ucagaaggaaccauuugug

SEQ ID NO: 932295 - RNA, 19 nt, Homo sapiens
  misc_RNA (1)...(19): siRNA sense strand
cagcaaacaacagauaaca

SEQ ID NO: 932296 - RNA, 19 nt, Homo sapiens
  misc_RNA (1)...(19): siRNA sense strand
ucaccuacuugaugcaaac

SEQ ID NO: 932297 - RNA, 19 nt, Homo sapiens
  misc_RNA (1)...(19): siRNA sense strand
ugagacaagggauugagaa

SEQ ID NO: 932298 - RNA, 19 nt, Homo sapiens
  misc_RNA (1)...(19): siRNA sense strand
aauuuaagcuacacagacu

SEQ ID NO: 932299 - RNA, 19 nt, Homo sapiens
  misc_RNA (1)...(19): siRNA sense strand
agaauaaaggauacuguuc

SEQ ID NO: 932300 - RNA, 19 nt, Homo sapiens
  misc_RNA (1)...(19): siRNA sense strand
uuucagccauuugcccuaa

SEQ ID NO: 932301 - RNA, 19 nt, Homo sapiens
  misc_RNA (1)...(19): siRNA sense strand
agcgagaggcauuacaaua

SEQ ID NO: 932302 - RNA, 19 nt, Homo sapiens
  misc_RNA (1)...(19): siRNA sense strand
cauauguucaccuacuuga

SEQ ID NO: 932303 - RNA, 19 nt, Homo sapiens
  misc_RNA (1)...(19): siRNA sense strand
aggagaugccaaacagaua

SEQ ID NO: 932304 - RNA, 19 nt, Homo sapiens
  misc_RNA (1)...(19): siRNA sense strand
agagaugcccugaauaaaa

SEQ ID NO: 932305 - RNA, 19 nt, Homo sapiens
  misc_RNA (1)...(19): siRNA sense strand
gcaggcagacagccaaagg

SEQ ID NO: 932306 - RNA, 19 nt, Homo sapiens
  misc_RNA (1)...(19): siRNA sense strand
caaacaaacuggacaaaua

SEQ ID NO: 932307 - RNA, 19 nt, Homo sapiens
  misc_RNA (1)...(19): siRNA sense strand
caaacaaacuggacaaaua

SEQ ID NO: 932308 - RNA, 19 nt, Homo sapiens
  misc_RNA (1)...(19): siRNA sense strand
gaucaacgcuuuagaugaa

SEQ ID NO: 932309 - RNA, 19 nt, Homo sapiens
  misc_RNA (1)...(19): siRNA sense strand
gagcagaaaucucgaguug

SEQ ID NO: 932310 - RNA, 19 nt, Homo sapiens
  misc_RNA (1)...(19): siRNA sense strand
ggagaaauauggucaacuu

SEQ ID NO: 932311 - RNA, 19 nt, Homo sapiens
  misc_RNA (1)...(19): siRNA sense strand
gaaguaguaucucacaauu

SEQ ID NO: 932312 - RNA, 19 nt, Homo sapiens
  misc_RNA (1)...(19): siRNA sense strand
aaacaaagaucucgucaga

SEQ ID NO: 932313 - RNA, 19 nt, Homo sapiens
  misc_RNA (1)...(19): siRNA sense strand
gcagaaaucucgaguugau

SEQ ID NO: 932314 - RNA, 19 nt, Homo sapiens
  misc_RNA (1)...(19): siRNA sense strand
gcuaacaucucuucauuau

SEQ ID NO: 932315 - RNA, 19 nt, Homo sapiens
  misc_RNA (1)...(19): siRNA sense strand
ugaaagagagcucaacuua

SEQ ID NO: 932316 - RNA, 19 nt, Homo sapiens
  misc_RNA (1)...(19): siRNA sense strand
ggaaagagcaauauaagga

SEQ ID NO: 932317 - RNA, 19 nt, Homo sapiens
  misc_RNA (1)...(19): siRNA sense strand
cagaagaaguugaagauga

SEQ ID NO: 932318 - RNA, 19 nt, Homo sapiens
  misc_RNA (1)...(19): siRNA sense strand
aaagagagcucaacuuaag

SEQ ID NO: 932319 - RNA, 19 nt, Homo sapiens
  misc_RNA (1)...(19): siRNA sense strand
augaagagcuugauaguaa

SEQ ID NO: 932320 - RNA, 19 nt, Homo sapiens
  misc_RNA (1)...(19): siRNA sense strand
ggauaaugaucucaacaaa

SEQ ID NO: 932321 - RNA, 19 nt, Homo sapiens
  misc_RNA (1)...(19): siRNA sense strand
ggaagaagaggauaauuau

SEQ ID NO: 932322 - RNA, 19 nt, Homo sapiens
  misc_RNA (1)...(19): siRNA sense strand
ggauaaugaucucaacaaa

SEQ ID NO: 932323 - RNA, 19 nt, Homo sapiens
  misc_RNA (1)...(19): siRNA sense strand
gaaagagagcucaacuuaa

SEQ ID NO: 932324 - RNA, 19 nt, Homo sapiens
  misc_RNA (1)...(19): siRNA sense strand
gaagagaaguuugaguugu

SEQ ID NO: 932325 - RNA, 19 nt, Homo sapiens
  misc_RNA (1)...(19): siRNA sense strand
gaaaauggcuggauuaagg

SEQ ID NO: 932326 - RNA, 19 nt, Homo sapiens
  misc_RNA (1)...(19): siRNA sense strand
caagggaccugauuguaau

SEQ ID NO: 932327 - RNA, 19 nt, Homo sapiens
  misc_RNA (1)...(19): siRNA sense strand
gugaagaauuugauaguga

SEQ ID NO: 932328 - RNA, 19 nt, Homo sapiens
  misc_RNA (1)...(19): siRNA sense strand
guagagugguugaagauga

SEQ ID NO: 932329 - RNA, 19 nt, Homo sapiens
  misc_RNA (1)...(19): siRNA sense strand
augaagagcuugauaguga

SEQ ID NO: 932330 - RNA, 19 nt, Homo sapiens
  misc_RNA (1)...(19): siRNA sense strand
augaagagcuugauaguga

SEQ ID NO: 932331 - RNA, 19 nt, Homo sapiens
  misc_RNA (1)...(19): siRNA sense strand
ugacagcgauauccuaguu

SEQ ID NO: 932332 - RNA, 19 nt, Homo sapiens
  misc_RNA (1)...(19): siRNA sense strand
gagcucaacuuaaguaaaa

SEQ ID NO: 932333 - RNA, 19 nt, Homo sapiens
  misc_RNA (1)...(19): siRNA sense strand
guaagugucucauuaacuc

SEQ ID NO: 932334 - RNA, 19 nt, Homo sapiens
  misc_RNA (1)...(19): siRNA sense strand
caucacaacugaaauuagu

SEQ ID NO: 932335 - RNA, 19 nt, Homo sapiens
  misc_RNA (1)...(19): siRNA sense strand
gaagauggagaugauuaua

SEQ ID NO: 932336 - RNA, 19 nt, Homo sapiens
  misc_RNA (1)...(19): siRNA sense strand
aagagaaguuugaguugua

SEQ ID NO: 932337 - RNA, 19 nt, Homo sapiens
  misc_RNA (1)...(19): siRNA sense strand
agaagaaguugaagaugaa

SEQ ID NO: 932338 - RNA, 19 nt, Homo sapiens
  misc_RNA (1)...(19): siRNA sense strand
cacaauuacuugauaguga

SEQ ID NO: 932339 - RNA, 19 nt, Homo sapiens
  misc_RNA (1)...(19): siRNA sense strand
gaaacaguggaaagaauuu

SEQ ID NO: 932340 - RNA, 19 nt, Homo sapiens
  misc_RNA (1)...(19): siRNA sense strand
ggagggugaugaagagaau

SEQ ID NO: 932341 - RNA, 19 nt, Homo sapiens
  misc_RNA (1)...(19): siRNA sense strand
gcauuuaucaggagaguug

SEQ ID NO: 932342 - RNA, 19 nt, Homo sapiens
  misc_RNA (1)...(19): siRNA sense strand
gcgauauccuaguuagaaa

SEQ ID NO: 932343 - RNA, 19 nt, Homo sapiens
  misc_RNA (1)...(19): siRNA sense strand
ucaaagaacucucaaaaca

SEQ ID NO: 932344 - RNA, 19 nt, Homo sapiens
  misc_RNA (1)...(19): siRNA sense strand
uggcaacgguucaacauau

SEQ ID NO: 932345 - RNA, 19 nt, Homo sapiens
  misc_RNA (1)...(19): siRNA sense strand
caaaagauaugcuaacauc

SEQ ID NO: 932346 - RNA, 19 nt, Homo sapiens
  misc_RNA (1)...(19): siRNA sense strand
aggaagaagaggauaauua

SEQ ID NO: 932347 - RNA, 19 nt, Homo sapiens
  misc_RNA (1)...(19): siRNA sense strand
gacaaauaauagaggauga

SEQ ID NO: 932348 - RNA, 19 nt, Homo sapiens
  misc_RNA (1)...(19): siRNA sense strand
gacaaauaauagaggauga

SEQ ID NO: 932349 - RNA, 19 nt, Homo sapiens
  misc_RNA (1)...(19): siRNA sense strand
gaagacaucaagcgaggaa

SEQ ID NO: 932350 - RNA, 19 nt, Homo sapiens
  misc_RNA (1)...(19): siRNA sense strand
uaaagaaacaguggaaaga

SEQ ID NO: 932351 - RNA, 19 nt, Homo sapiens
  misc_RNA (1)...(19): siRNA sense strand
gcuugauagugaagaauuu

SEQ ID NO: 932352 - RNA, 19 nt, Homo sapiens
  misc_RNA (1)...(19): siRNA sense strand
ggaccaugcaaauagauaa

SEQ ID NO: 932353 - RNA, 19 nt, Homo sapiens
  misc_RNA (1)...(19): siRNA sense strand
gaagaauccugaaaacugu

SEQ ID NO: 932354 - RNA, 19 nt, Homo sapiens
  misc_RNA (1)...(19): siRNA sense strand
gaugaagagcuugauagua

SEQ ID NO: 932355 - RNA, 19 nt, Homo sapiens
  misc_RNA (1)...(19): siRNA sense strand
ucacgugccugagcagaaa

SEQ ID NO: 932356 - RNA, 19 nt, Homo sapiens
  misc_RNA (1)...(19): siRNA sense strand
cugcaucgcuacuguaaau

SEQ ID NO: 932357 - RNA, 19 nt, Homo sapiens
  misc_RNA (1)...(19): siRNA sense strand
gaagaagaggauaauuaug

SEQ ID NO: 932358 - RNA, 19 nt, Homo sapiens
  misc_RNA (1)...(19): siRNA sense strand
aauagaggaugaucaggaa

SEQ ID NO: 932359 - RNA, 19 nt, Homo sapiens
  misc_RNA (1)...(19): siRNA sense strand
caucgcuacuguaaauauu

SEQ ID NO: 932360 - RNA, 19 nt, Homo sapiens
  misc_RNA (1)...(19): siRNA sense strand
ggagaugauuauauuaucg

SEQ ID NO: 932361 - RNA, 19 nt, Homo sapiens
  misc_RNA (1)...(19): siRNA sense strand
caugaaacaaggagaaauu

SEQ ID NO: 932362 - RNA, 19 nt, Homo sapiens
  misc_RNA (1)...(19): siRNA sense strand
ugaaggaaaugacaguaag

SEQ ID NO: 932363 - RNA, 19 nt, Homo sapiens
  misc_RNA (1)...(19): siRNA sense strand
ccaggaccaugcaaauaga

SEQ ID NO: 932364 - RNA, 19 nt, Homo sapiens
  misc_RNA (1)...(19): siRNA sense strand
uaucaggagaguuguauaa

SEQ ID NO: 932365 - RNA, 19 nt, Homo sapiens
  misc_RNA (1)...(19): siRNA sense strand
agaggaugauuuagaagaa

SEQ ID NO: 932366 - RNA, 19 nt, Homo sapiens
  misc_RNA (1)...(19): siRNA sense strand
cuacaucacaacugaaauu

SEQ ID NO: 932367 - RNA, 19 nt, Homo sapiens
  misc_RNA (1)...(19): siRNA sense strand
ggauuaaggagaaauaugg

SEQ ID NO: 932368 - RNA, 19 nt, Homo sapiens
  misc_RNA (1)...(19): siRNA sense strand
caaacuggacaaauaauag

SEQ ID NO: 932369 - RNA, 19 nt, Homo sapiens
  misc_RNA (1)...(19): siRNA sense strand
cggauuacuuucaagaaga

SEQ ID NO: 932370 - RNA, 19 nt, Homo sapiens
  misc_RNA (1)...(19): siRNA sense strand
aagaaacaguggaaagaau

SEQ ID NO: 932371 - RNA, 19 nt, Homo sapiens
  misc_RNA (1)...(19): siRNA sense strand
gcagugaugaaguugauga

SEQ ID NO: 932372 - RNA, 19 nt, Homo sapiens
  misc_RNA (1)...(19): siRNA sense strand
cagagacgcaguaguggua

SEQ ID NO: 932373 - RNA, 19 nt, Homo sapiens
  misc_RNA (1)...(19): siRNA sense strand
caaacuggacaaauaauag

SEQ ID NO: 932374 - RNA, 19 nt, Homo sapiens
  misc_RNA (1)...(19): siRNA sense strand
uagagugguugaagaugaa

SEQ ID NO: 932375 - RNA, 19 nt, Homo sapiens
  misc_RNA (1)...(19): siRNA sense strand
gcggauuacuuucaagaag

SEQ ID NO: 932376 - RNA, 19 nt, Homo sapiens
  misc_RNA (1)...(19): siRNA sense strand
ucaggagaguuguauaaca

SEQ ID NO: 932377 - RNA, 19 nt, Homo sapiens
  misc_RNA (1)...(19): siRNA sense strand
guuggaaagagcaauauaa

SEQ ID NO: 932378 - RNA, 19 nt, Homo sapiens
  misc_RNA (1)...(19): siRNA sense strand
ugaugaagauggagaugau

SEQ ID NO: 932379 - RNA, 19 nt, Homo sapiens
  misc_RNA (1)...(19): siRNA sense strand
ggaccugauuguaauaaaa

SEQ ID NO: 932380 - RNA, 19 nt, Homo sapiens
  misc_RNA (1)...(19): siRNA sense strand
gacagaagaaguugaagau

SEQ ID NO: 932381 - RNA, 19 nt, Homo sapiens
  misc_RNA (1)...(19): siRNA sense strand
aguaguaucucacaauuac

SEQ ID NO: 932382 - RNA, 19 nt, Homo sapiens
  misc_RNA (1)...(19): siRNA sense strand
ggacugcaucgcuacugua

SEQ ID NO: 932383 - RNA, 19 nt, Homo sapiens
  misc_RNA (1)...(19): siRNA sense strand
caacaaacaaacuggacaa

SEQ ID NO: 932384 - RNA, 19 nt, Homo sapiens
  misc_RNA (1)...(19): siRNA sense strand
uaagucaagaggauaauga

SEQ ID NO: 932385 - RNA, 19 nt, Homo sapiens
  misc_RNA (1)...(19): siRNA sense strand
caacaaacaaacuggacaa

SEQ ID NO: 932386 - RNA, 19 nt, Homo sapiens
  misc_RNA (1)...(19): siRNA sense strand
uaagucaagaggauaauga

SEQ ID NO: 932387 - RNA, 19 nt, Homo sapiens
  misc_RNA (1)...(19): siRNA sense strand
agagaaguuugaguuguaa

SEQ ID NO: 932388 - RNA, 19 nt, Homo sapiens
  misc_RNA (1)...(19): siRNA sense strand
gggaccugauuguaauaaa

SEQ ID NO: 932389 - RNA, 19 nt, Homo sapiens
  misc_RNA (1)...(19): siRNA sense strand
cccaagcagugaugaaguu

SEQ ID NO: 932390 - RNA, 19 nt, Homo sapiens
  misc_RNA (1)...(19): siRNA sense strand
gugaaggaaaugacaguaa

SEQ ID NO: 932391 - RNA, 19 nt, Homo sapiens
  misc_RNA (1)...(19): siRNA sense strand
ggaauauugacuuacaaga

SEQ ID NO: 932392 - RNA, 19 nt, Homo sapiens
  misc_RNA (1)...(19): siRNA sense strand
aagaagagaaguuugaguu

SEQ ID NO: 932393 - RNA, 19 nt, Homo sapiens
  misc_RNA (1)...(19): siRNA sense strand
gaagaugaacaaguuaaag

SEQ ID NO: 932394 - RNA, 19 nt, Homo sapiens
  misc_RNA (1)...(19): siRNA sense strand
aguugaagaugaacaaguu

SEQ ID NO: 932395 - RNA, 19 nt, Homo sapiens
  misc_RNA (1)...(19): siRNA sense strand
acaguaagugucucauuaa

SEQ ID NO: 932396 - RNA, 19 nt, Homo sapiens
  misc_RNA (1)...(19): siRNA sense strand
ggauuacuuucaagaagag

SEQ ID NO: 932397 - RNA, 19 nt, Homo sapiens
  misc_RNA (1)...(19): siRNA sense strand
aaaagaaaauggcuggauu

SEQ ID NO: 932398 - RNA, 19 nt, Homo sapiens
  misc_RNA (1)...(19): siRNA sense strand
gcaaugacagaagaaguug

SEQ ID NO: 932399 - RNA, 19 nt, Homo sapiens
  misc_RNA (1)...(19): siRNA sense strand
caaacuauaccaggaaugu

SEQ ID NO: 932400 - RNA, 19 nt, Homo sapiens
  misc_RNA (1)...(19): siRNA sense strand
ugaagagcuugauagugaa

SEQ ID NO: 932401 - RNA, 19 nt, Homo sapiens
  misc_RNA (1)...(19): siRNA sense strand
uauccucugugauguguga

SEQ ID NO: 932402 - RNA, 19 nt, Homo sapiens
  misc_RNA (1)...(19): siRNA sense strand
gcaacgguucaacauauga

SEQ ID NO: 932403 - RNA, 19 nt, Homo sapiens
  misc_RNA (1)...(19): siRNA sense strand
ggcaacgguucaacauaug

SEQ ID NO: 932404 - RNA, 19 nt, Homo sapiens
  misc_RNA (1)...(19): siRNA sense strand
gcaucgcuacuguaaauau

SEQ ID NO: 932405 - RNA, 19 nt, Homo sapiens
  misc_RNA (1)...(19): siRNA sense strand
agaaacaguggaaagaauu

SEQ ID NO: 932406 - RNA, 19 nt, Homo sapiens
  misc_RNA (1)...(19): siRNA sense strand
gaagaggucucaaguauga

SEQ ID NO: 932407 - RNA, 19 nt, Homo sapiens
  misc_RNA (1)...(19): siRNA sense strand
gaaagauccuccggacuua

SEQ ID NO: 932408 - RNA, 19 nt, Homo sapiens
  misc_RNA (1)...(19): siRNA sense strand
gaagaugaaacgaaacuua

SEQ ID NO: 932409 - RNA, 19 nt, Homo sapiens
  misc_RNA (1)...(19): siRNA sense strand
guaaaugaggcaucuauua

SEQ ID NO: 932410 - RNA, 19 nt, Homo sapiens
  misc_RNA (1)...(19): siRNA sense strand
ggccugggcuucaguauaa

SEQ ID NO: 932411 - RNA, 19 nt, Homo sapiens
  misc_RNA (1)...(19): siRNA sense strand
agaaguagauggacagaaa

SEQ ID NO: 932412 - RNA, 19 nt, Homo sapiens
  misc_RNA (1)...(19): siRNA sense strand
gcaaagggcguugugaaua

SEQ ID NO: 932413 - RNA, 19 nt, Homo sapiens
  misc_RNA (1)...(19): siRNA sense strand
agacagaagugaagaaaga

SEQ ID NO: 932414 - RNA, 19 nt, Homo sapiens
  misc_RNA (1)...(19): siRNA sense strand
auacuuaccucaccucuaa

SEQ ID NO: 932415 - RNA, 19 nt, Homo sapiens
  misc_RNA (1)...(19): siRNA sense strand
acaagaagaugaaacgaaa

SEQ ID NO: 932416 - RNA, 19 nt, Homo sapiens
  misc_RNA (1)...(19): siRNA sense strand
ggaaaauucuggauaguaa

SEQ ID NO: 932417 - RNA, 19 nt, Homo sapiens
  misc_RNA (1)...(19): siRNA sense strand
caauagaccuuaugaaugc

SEQ ID NO: 932418 - RNA, 19 nt, Homo sapiens
  misc_RNA (1)...(19): siRNA sense strand
gaaacgaaacuuaaggaaa

SEQ ID NO: 932419 - RNA, 19 nt, Homo sapiens
  misc_RNA (1)...(19): siRNA sense strand
gaaaggauggccacuagaa

SEQ ID NO: 932420 - RNA, 19 nt, Homo sapiens
  misc_RNA (1)...(19): siRNA sense strand
aagaagaggucucaaguau

SEQ ID NO: 932421 - RNA, 19 nt, Homo sapiens
  misc_RNA (1)...(19): siRNA sense strand
gcaauagaccuuaugaaug

SEQ ID NO: 932422 - RNA, 19 nt, Homo sapiens
  misc_RNA (1)...(19): siRNA sense strand
gaagaaggauggagaaaau

SEQ ID NO: 932423 - RNA, 19 nt, Homo sapiens
  misc_RNA (1)...(19): siRNA sense strand
gaaacucacagaagagaaa

SEQ ID NO: 932424 - RNA, 19 nt, Homo sapiens
  misc_RNA (1)...(19): siRNA sense strand
cacuagaacuuauauguga

SEQ ID NO: 932425 - RNA, 19 nt, Homo sapiens
  misc_RNA (1)...(19): siRNA sense strand
agagaaauaucaaguggaa

SEQ ID NO: 932426 - RNA, 19 nt, Homo sapiens
  misc_RNA (1)...(19): siRNA sense strand
gcaauaauacuggaaauuc

SEQ ID NO: 932427 - RNA, 19 nt, Homo sapiens
  misc_RNA (1)...(19): siRNA sense strand
guaaagcaauagaccuuau

SEQ ID NO: 932428 - RNA, 19 nt, Homo sapiens
  misc_RNA (1)...(19): siRNA sense strand
uuaaacaugucucagauug

SEQ ID NO: 932429 - RNA, 19 nt, Homo sapiens
  misc_RNA (1)...(19): siRNA sense strand
ccaaugcggcaaauaauaa

SEQ ID NO: 932430 - RNA, 19 nt, Homo sapiens
  misc_RNA (1)...(19): siRNA sense strand
gaaacagugucuucaaacu

SEQ ID NO: 932431 - RNA, 19 nt, Homo sapiens
  misc_RNA (1)...(19): siRNA sense strand
ggauuggccugguugcaaa

SEQ ID NO: 932432 - RNA, 19 nt, Homo sapiens
  misc_RNA (1)...(19): siRNA sense strand
ggaacaauguguaaaugag

SEQ ID NO: 932433 - RNA, 19 nt, Homo sapiens
  misc_RNA (1)...(19): siRNA sense strand
caaagggcguugugaauac

SEQ ID NO: 932434 - RNA, 19 nt, Homo sapiens
  misc_RNA (1)...(19): siRNA sense strand
aguauaagcuccuaucuca

SEQ ID NO: 932435 - RNA, 19 nt, Homo sapiens
  misc_RNA (1)...(19): siRNA sense strand
gcagauauugaauguauga

SEQ ID NO: 932436 - RNA, 19 nt, Homo sapiens
  misc_RNA (1)...(19): siRNA sense strand
ggcaagggcaaauggauua

SEQ ID NO: 932437 - RNA, 19 nt, Homo sapiens
  misc_RNA (1)...(19): siRNA sense strand
ggaggaacuugaagcuguu

SEQ ID NO: 932438 - RNA, 19 nt, Homo sapiens
  misc_RNA (1)...(19): siRNA sense strand
cagagacccuguuaaauac

SEQ ID NO: 932439 - RNA, 19 nt, Homo sapiens
  misc_RNA (1)...(19): siRNA sense strand
gacgaguaauggaguguuu

SEQ ID NO: 932440 - RNA, 19 nt, Homo sapiens
  misc_RNA (1)...(19): siRNA sense strand
caaauaagaaaguggcaaa

SEQ ID NO: 932441 - RNA, 19 nt, Homo sapiens
  misc_RNA (1)...(19): siRNA sense strand
uaauggagcucaaugaaaa

SEQ ID NO: 932442 - RNA, 19 nt, Homo sapiens
  misc_RNA (1)...(19): siRNA sense strand
gcacuaaugaggcuaaauc

SEQ ID NO: 932443 - RNA, 19 nt, Homo sapiens
  misc_RNA (1)...(19): siRNA sense strand
uaaagaggccauuugaaga

SEQ ID NO: 932444 - RNA, 19 nt, Homo sapiens
  misc_RNA (1)...(19): siRNA sense strand
guaauggagcucaaugaaa

SEQ ID NO: 932445 - RNA, 19 nt, Homo sapiens
  misc_RNA (1)...(19): siRNA sense strand
ucacagaagagaaauauca

SEQ ID NO: 932446 - RNA, 19 nt, Homo sapiens
  misc_RNA (1)...(19): siRNA sense strand
gcaaugggauauccaacag

SEQ ID NO: 932447 - RNA, 19 nt, Homo sapiens
  misc_RNA (1)...(19): siRNA sense strand
acaaagugcuggagaugga

SEQ ID NO: 932448 - RNA, 19 nt, Homo sapiens
  misc_RNA (1)...(19): siRNA sense strand
aaacagagggugagacaga

SEQ ID NO: 932449 - RNA, 19 nt, Homo sapiens
  misc_RNA (1)...(19): siRNA sense strand
gacccaaugcggcaaauaa

SEQ ID NO: 932450 - RNA, 19 nt, Homo sapiens
  misc_RNA (1)...(19): siRNA sense strand
cuaaugaggcuaaaucaga

SEQ ID NO: 932451 - RNA, 19 nt, Homo sapiens
  misc_RNA (1)...(19): siRNA sense strand
aaguauuccuggucaguua

SEQ ID NO: 932452 - RNA, 19 nt, Homo sapiens
  misc_RNA (1)...(19): siRNA sense strand
guaauuguccuccgcauuc

SEQ ID NO: 932453 - RNA, 19 nt, Homo sapiens
  misc_RNA (1)...(19): siRNA sense strand
ugaaagauccuccggacuu

SEQ ID NO: 932454 - RNA, 19 nt, Homo sapiens
  misc_RNA (1)...(19): siRNA sense strand
gcaaagacaaacccacaga

SEQ ID NO: 932455 - RNA, 19 nt, Homo sapiens
  misc_RNA (1)...(19): siRNA sense strand
caaaaggcuugcugauuaa

SEQ ID NO: 932456 - RNA, 19 nt, Homo sapiens
  misc_RNA (1)...(19): siRNA sense strand
gauaaucuuccuauucaga

SEQ ID NO: 932457 - RNA, 19 nt, Homo sapiens
  misc_RNA (1)...(19): siRNA sense strand
uaugguaucuacuguugaa

SEQ ID NO: 932458 - RNA, 19 nt, Homo sapiens
  misc_RNA (1)...(19): siRNA sense strand
gguaucuacuguugaaugu

SEQ ID NO: 932459 - RNA, 19 nt, Homo sapiens
  misc_RNA (1)...(19): siRNA sense strand
gggacgaauuggagaagaa

SEQ ID NO: 932460 - RNA, 19 nt, Homo sapiens
  misc_RNA (1)...(19): siRNA sense strand
ucuucaaacucaagcaaua

SEQ ID NO: 932461 - RNA, 19 nt, Homo sapiens
  misc_RNA (1)...(19): siRNA sense strand
gcgcagguccaaauaagaa

SEQ ID NO: 932462 - RNA, 19 nt, Homo sapiens
  misc_RNA (1)...(19): siRNA sense strand
ugaaaccuccaguaccuua

SEQ ID NO: 932463 - RNA, 19 nt, Homo sapiens
  misc_RNA (1)...(19): siRNA sense strand
aauaugguaucuacuguug

SEQ ID NO: 932464 - RNA, 19 nt, Homo sapiens
  misc_RNA (1)...(19): siRNA sense strand
uaaugaggcuaaaucagau

SEQ ID NO: 932465 - RNA, 19 nt, Homo sapiens
  misc_RNA (1)...(19): siRNA sense strand
ggagguagaaguagaugga

SEQ ID NO: 932466 - RNA, 19 nt, Homo sapiens
  misc_RNA (1)...(19): siRNA sense strand
uaauggagguagaaguaga

SEQ ID NO: 932467 - RNA, 19 nt, Homo sapiens
  misc_RNA (1)...(19): siRNA sense strand
gaaagaugaggccggagaa

SEQ ID NO: 932468 - RNA, 19 nt, Homo sapiens
  misc_RNA (1)...(19): siRNA sense strand
aaagaagaggucucaagua

SEQ ID NO: 932469 - RNA, 19 nt, Homo sapiens
  misc_RNA (1)...(19): siRNA sense strand
gagcgagacccaacagaug

SEQ ID NO: 932470 - RNA, 19 nt, Homo sapiens
  misc_RNA (1)...(19): siRNA sense strand
caaguggaacaauguguaa

SEQ ID NO: 932471 - RNA, 19 nt, Homo sapiens
  misc_RNA (1)...(19): siRNA sense strand
uaaagaugauauggacuug

SEQ ID NO: 932472 - RNA, 19 nt, Homo sapiens
  misc_RNA (1)...(19): siRNA sense strand
ggaaauucuacaacugaaa

SEQ ID NO: 932473 - RNA, 19 nt, Homo sapiens
  misc_RNA (1)...(19): siRNA sense strand
cuaaagaggccauuugaag

SEQ ID NO: 932474 - RNA, 19 nt, Homo sapiens
  misc_RNA (1)...(19): siRNA sense strand
ggagaagaaggauggagaa

SEQ ID NO: 932475 - RNA, 19 nt, Homo sapiens
  misc_RNA (1)...(19): siRNA sense strand
aaacaugucucagauuggu

SEQ ID NO: 932476 - RNA, 19 nt, Homo sapiens
  misc_RNA (1)...(19): siRNA sense strand
ucagauugguuggaugaaa

SEQ ID NO: 932477 - RNA, 19 nt, Homo sapiens
  misc_RNA (1)...(19): siRNA sense strand
ggauggccacuagaacuua

SEQ ID NO: 932478 - RNA, 19 nt, Homo sapiens
  misc_RNA (1)...(19): siRNA sense strand
guagauggacagaaauuca

SEQ ID NO: 932479 - RNA, 19 nt, Homo sapiens
  misc_RNA (1)...(19): siRNA sense strand
uguaauggagguagaagua

SEQ ID NO: 932480 - RNA, 19 nt, Homo sapiens
  misc_RNA (1)...(19): siRNA sense strand
aagaugauauggacuugga

SEQ ID NO: 932481 - RNA, 19 nt, Homo sapiens
  misc_RNA (1)...(19): siRNA sense strand
gaauaugguaucuacuguu

SEQ ID NO: 932482 - RNA, 19 nt, Homo sapiens
  misc_RNA (1)...(19): siRNA sense strand
gauggccacuagaacuuau

SEQ ID NO: 932483 - RNA, 19 nt, Homo sapiens
  misc_RNA (1)...(19): siRNA sense strand
aauaucaaguggaacaaug

SEQ ID NO: 932484 - RNA, 19 nt, Homo sapiens
  misc_RNA (1)...(19): siRNA sense strand
gaaauucuacaacugaaac

SEQ ID NO: 932485 - RNA, 19 nt, Homo sapiens
  misc_RNA (1)...(19): siRNA sense strand
ugaugcagauauugaaugu

SEQ ID NO: 932486 - RNA, 19 nt, Homo sapiens
  misc_RNA (1)...(19): siRNA sense strand
uaaugaugaucgccauguu

SEQ ID NO: 932487 - RNA, 19 nt, Homo sapiens
  misc_RNA (1)...(19): siRNA sense strand
ucaaguggaacaaugugua

SEQ ID NO: 932488 - RNA, 19 nt, Homo sapiens
  misc_RNA (1)...(19): siRNA sense strand
uguaugaguuccgaugaaa

SEQ ID NO: 932489 - RNA, 19 nt, Homo sapiens
  misc_RNA (1)...(19): siRNA sense strand
ccuuaugaaugcacuaaug

SEQ ID NO: 932490 - RNA, 19 nt, Homo sapiens
  misc_RNA (1)...(19): siRNA sense strand
gaaguauuccuggucaguu

SEQ ID NO: 932491 - RNA, 19 nt, Homo sapiens
  misc_RNA (1)...(19): siRNA sense strand
guggaacaauguguaaaug

SEQ ID NO: 932492 - RNA, 19 nt, Homo sapiens
  misc_RNA (1)...(19): siRNA sense strand
uuuggcaucuggaauacua

SEQ ID NO: 932493 - RNA, 19 nt, Homo sapiens
  misc_RNA (1)...(19): siRNA sense strand
aacagugucuucaaacuca

SEQ ID NO: 932494 - RNA, 19 nt, Homo sapiens
  misc_RNA (1)...(19): siRNA sense strand
uauaugaccauccagcaaa

SEQ ID NO: 932495 - RNA, 19 nt, Homo sapiens
  misc_RNA (1)...(19): siRNA sense strand
uucagaaacucacagaaga

SEQ ID NO: 932496 - RNA, 19 nt, Homo sapiens
  misc_RNA (1)...(19): siRNA sense strand
ucuguuacccguuaugaaa

SEQ ID NO: 932497 - RNA, 19 nt, Homo sapiens
  misc_RNA (1)...(19): siRNA sense strand
gauuaucccucaggcaaag

SEQ ID NO: 932498 - RNA, 19 nt, Homo sapiens
  misc_RNA (1)...(19): siRNA sense strand
uguugaaugugcucuuaaa

SEQ ID NO: 932499 - RNA, 19 nt, Homo sapiens
  misc_RNA (1)...(19): siRNA sense strand
caagcaauaauacuggaaa

SEQ ID NO: 932500 - RNA, 19 nt, Homo sapiens
  misc_RNA (1)...(19): siRNA sense strand
cagcaugcacucagacuau

SEQ ID NO: 932501 - RNA, 19 nt, Homo sapiens
  misc_RNA (1)...(19): siRNA sense strand
gagaagaaggauggagaaa

SEQ ID NO: 932502 - RNA, 19 nt, Homo sapiens
  misc_RNA (1)...(19): siRNA sense strand
gaaguagauggacagaaau

SEQ ID NO: 932503 - RNA, 19 nt, Homo sapiens
  misc_RNA (1)...(19): siRNA sense strand
cagaagugaagaaagauga

SEQ ID NO: 932504 - RNA, 19 nt, Homo sapiens
  misc_RNA (1)...(19): siRNA sense strand
aaagaggccauuugaagau

SEQ ID NO: 932505 - RNA, 19 nt, Homo sapiens
  misc_RNA (1)...(19): siRNA sense strand
agaauaugguaucuacugu

SEQ ID NO: 932506 - RNA, 19 nt, Homo sapiens
  misc_RNA (1)...(19): siRNA sense strand
gaagcgaugcgauaagaua

SEQ ID NO: 932507 - RNA, 19 nt, Homo sapiens
  misc_RNA (1)...(19): siRNA sense strand
gauagaagccaaauuugau

SEQ ID NO: 932508 - RNA, 19 nt, Homo sapiens
  misc_RNA (1)...(19): siRNA sense strand
cagaagcgaugcgauaaga

SEQ ID NO: 932509 - RNA, 19 nt, Homo sapiens
  misc_RNA (1)...(19): siRNA sense strand
gcgaugcgauaagauagaa

SEQ ID NO: 932510 - RNA, 19 nt, Homo sapiens
  misc_RNA (1)...(19): siRNA sense strand
ucgagagccugccuaauuc

SEQ ID NO: 932511 - RNA, 19 nt, Homo sapiens
  misc_RNA (1)...(19): siRNA sense strand
gaagccaaauuugauaagg

SEQ ID NO: 932512 - RNA, 19 nt, Homo sapiens
  misc_RNA (1)...(19): siRNA sense strand
agauagaagccaaauuuga

SEQ ID NO: 932513 - RNA, 19 nt, Homo sapiens
  misc_RNA (1)...(19): siRNA sense strand
ggaagaggaguacgaggau

SEQ ID NO: 932514 - RNA, 19 nt, Homo sapiens
  misc_RNA (1)...(19): siRNA sense strand
gggaggaggaggaggaaga

SEQ ID NO: 932515 - RNA, 19 nt, Homo sapiens
  misc_RNA (1)...(19): siRNA sense strand
acgccgagaugccugauga

SEQ ID NO: 932516 - RNA, 19 nt, Homo sapiens
  misc_RNA (1)...(19): siRNA sense strand
cugaugacgccaagaagua

SEQ ID NO: 932517 - RNA, 19 nt, Homo sapiens
  misc_RNA (1)...(19): siRNA sense strand
cugcagaagcgaugcgaua

SEQ ID NO: 932518 - RNA, 19 nt, Homo sapiens
  misc_RNA (1)...(19): siRNA sense strand
agccaaauuugauaaggaa

SEQ ID NO: 932519 - RNA, 19 nt, Homo sapiens
  misc_RNA (1)...(19): siRNA sense strand
aagccaaauuugauaagga

SEQ ID NO: 932520 - RNA, 19 nt, Homo sapiens
  misc_RNA (1)...(19): siRNA sense strand
gauaagauagaagccaaau

SEQ ID NO: 932521 - RNA, 19 nt, Homo sapiens
  misc_RNA (1)...(19): siRNA sense strand
ggaauuucaggcucuggaa

SEQ ID NO: 932522 - RNA, 19 nt, Homo sapiens
  misc_RNA (1)...(19): siRNA sense strand
gcagaagcgaugcgauaag

SEQ ID NO: 932523 - RNA, 19 nt, Homo sapiens
  misc_RNA (1)...(19): siRNA sense strand
aucgagagccugccuaauu

SEQ ID NO: 932524 - RNA, 19 nt, Homo sapiens
  misc_RNA (1)...(19): siRNA sense strand
ugaugacgccaagaaguaa

SEQ ID NO: 932525 - RNA, 19 nt, Homo sapiens
  misc_RNA (1)...(19): siRNA sense strand
aagaggaguacgaggauga

SEQ ID NO: 932526 - RNA, 19 nt, Homo sapiens
  misc_RNA (1)...(19): siRNA sense strand
aagauagaagccaaauuug

SEQ ID NO: 932527 - RNA, 19 nt, Homo sapiens
  misc_RNA (1)...(19): siRNA sense strand
gcagcucggugacuguuga

SEQ ID NO: 932528 - RNA, 19 nt, Homo sapiens
  misc_RNA (1)...(19): siRNA sense strand
gugaucaagugguuguaug

SEQ ID NO: 932529 - RNA, 19 nt, Homo sapiens
  misc_RNA (1)...(19): siRNA sense strand
ucagcagccucaucgacuu

SEQ ID NO: 932530 - RNA, 19 nt, Homo sapiens
  misc_RNA (1)...(19): siRNA sense strand
gaagauacauucccaaaua

SEQ ID NO: 932531 - RNA, 19 nt, Homo sapiens
  misc_RNA (1)...(19): siRNA sense strand
gaaaggauauguucuagga

SEQ ID NO: 932532 - RNA, 19 nt, Homo sapiens
  misc_RNA (1)...(19): siRNA sense strand
ucaaggaaccagagaauua

SEQ ID NO: 932533 - RNA, 19 nt, Homo sapiens
  misc_RNA (1)...(19): siRNA sense strand
ucuaagauaucccuaagaa

SEQ ID NO: 932534 - RNA, 19 nt, Homo sapiens
  misc_RNA (1)...(19): siRNA sense strand
guaaugauccaaaguauag

SEQ ID NO: 932535 - RNA, 19 nt, Homo sapiens
  misc_RNA (1)...(19): siRNA sense strand
gaaacaagcaauuuaccuu

SEQ ID NO: 932536 - RNA, 19 nt, Homo sapiens
  misc_RNA (1)...(19): siRNA sense strand
gcucagaauuccagcaguu

SEQ ID NO: 932537 - RNA, 19 nt, Homo sapiens
  misc_RNA (1)...(19): siRNA sense strand
ggaaacugaucacuucaca

SEQ ID NO: 932538 - RNA, 19 nt, Homo sapiens
  misc_RNA (1)...(19): siRNA sense strand
gauccaaaguauaguacaa

SEQ ID NO: 932539 - RNA, 19 nt, Homo sapiens
  misc_RNA (1)...(19): siRNA sense strand
ggugaaauuugaacagaau

SEQ ID NO: 932540 - RNA, 19 nt, Homo sapiens
  misc_RNA (1)...(19): siRNA sense strand
ccgcagagaauaaagauaa

SEQ ID NO: 932541 - RNA, 19 nt, Homo sapiens
  misc_RNA (1)...(19): siRNA sense strand
cuaagcaacuacuuuccua

SEQ ID NO: 932542 - RNA, 19 nt, Homo sapiens
  misc_RNA (1)...(19): siRNA sense strand
uagagacccuccugcauga

SEQ ID NO: 932543 - RNA, 19 nt, Homo sapiens
  misc_RNA (1)...(19): siRNA sense strand
gcaacuacuuuccuagagu

SEQ ID NO: 932544 - RNA, 19 nt, Homo sapiens
  misc_RNA (1)...(19): siRNA sense strand
acgaugagguggaugagua

SEQ ID NO: 932545 - RNA, 19 nt, Homo sapiens
  misc_RNA (1)...(19): siRNA sense strand
ggacuugcaggcacuguuu

SEQ ID NO: 932546 - RNA, 19 nt, Homo sapiens
  misc_RNA (1)...(19): siRNA sense strand
gugagugggucugaagaua

SEQ ID NO: 932547 - RNA, 19 nt, Homo sapiens
  misc_RNA (1)...(19): siRNA sense strand
gaaaugauacaugccuauu

SEQ ID NO: 932548 - RNA, 19 nt, Homo sapiens
  misc_RNA (1)...(19): siRNA sense strand
aaggauaaguguaacaguu

SEQ ID NO: 932549 - RNA, 19 nt, Homo sapiens
  misc_RNA (1)...(19): siRNA sense strand
gguaaugauccaaaguaua

SEQ ID NO: 932550 - RNA, 19 nt, Homo sapiens
  misc_RNA (1)...(19): siRNA sense strand
ucacuucacaugccauuaa

SEQ ID NO: 932551 - RNA, 19 nt, Homo sapiens
  misc_RNA (1)...(19): siRNA sense strand
aaacugaucacuucacaug

SEQ ID NO: 932552 - RNA, 19 nt, Homo sapiens
  misc_RNA (1)...(19): siRNA sense strand
acagaaugguucaaguaaa

SEQ ID NO: 932553 - RNA, 19 nt, Homo sapiens
  misc_RNA (1)...(19): siRNA sense strand
ccuccugcaugaaaugaua

SEQ ID NO: 932554 - RNA, 19 nt, Homo sapiens
  misc_RNA (1)...(19): siRNA sense strand
gaaugaaguucuggagucu

SEQ ID NO: 932555 - RNA, 19 nt, Homo sapiens
  misc_RNA (1)...(19): siRNA sense strand
ggagaaacaagcaauuuac

SEQ ID NO: 932556 - RNA, 19 nt, Homo sapiens
  misc_RNA (1)...(19): siRNA sense strand
ucacuaauaacgacaaaga

SEQ ID NO: 932557 - RNA, 19 nt, Homo sapiens
  misc_RNA (1)...(19): siRNA sense strand
gcuagaagauaagacuguu

SEQ ID NO: 932558 - RNA, 19 nt, Homo sapiens
  misc_RNA (1)...(19): siRNA sense strand
gacccugugugcugggaua

SEQ ID NO: 932559 - RNA, 19 nt, Homo sapiens
  misc_RNA (1)...(19): siRNA sense strand
cagaaugguucaaguaaaa

SEQ ID NO: 932560 - RNA, 19 nt, Homo sapiens
  misc_RNA (1)...(19): siRNA sense strand
gggaaaggauauguucuag

SEQ ID NO: 932561 - RNA, 19 nt, Homo sapiens
  misc_RNA (1)...(19): siRNA sense strand
guauuacggcuaugucaaa

SEQ ID NO: 932562 - RNA, 19 nt, Homo sapiens
  misc_RNA (1)...(19): siRNA sense strand
gagugggucugaagauaca

SEQ ID NO: 932563 - RNA, 19 nt, Homo sapiens
  misc_RNA (1)...(19): siRNA sense strand
cuucacaugccauuaauaa

SEQ ID NO: 932564 - RNA, 19 nt, Homo sapiens
  misc_RNA (1)...(19): siRNA sense strand
gaaggugacagcaucaaag

SEQ ID NO: 932565 - RNA, 19 nt, Homo sapiens
  misc_RNA (1)...(19): siRNA sense strand
ggugaggcccagcuaguaa

SEQ ID NO: 932566 - RNA, 19 nt, Homo sapiens
  misc_RNA (1)...(19): siRNA sense strand
agaagggcaugguccagaa

SEQ ID NO: 932567 - RNA, 19 nt, Homo sapiens
  misc_RNA (1)...(19): siRNA sense strand
caaccacagcucagaauuc

SEQ ID NO: 932568 - RNA, 19 nt, Homo sapiens
  misc_RNA (1)...(19): siRNA sense strand
cccaagaucuuuuaaauca

SEQ ID NO: 932569 - RNA, 19 nt, Homo sapiens
  misc_RNA (1)...(19): siRNA sense strand
gaagggaaggguggaaugu

SEQ ID NO: 932570 - RNA, 19 nt, Homo sapiens
  misc_RNA (1)...(19): siRNA sense strand
guacaaccacagcucagaa

SEQ ID NO: 932571 - RNA, 19 nt, Homo sapiens
  misc_RNA (1)...(19): siRNA sense strand
cugggaaacugaucacuuc

SEQ ID NO: 932572 - RNA, 19 nt, Homo sapiens
  misc_RNA (1)...(19): siRNA sense strand
aggagaaacaagcaauuua

SEQ ID NO: 932573 - RNA, 19 nt, Homo sapiens
  misc_RNA (1)...(19): siRNA sense strand
gcagugguaaugauccaaa

SEQ ID NO: 932574 - RNA, 19 nt, Homo sapiens
  misc_RNA (1)...(19): siRNA sense strand
gugguaaugauccaaagua

SEQ ID NO: 932575 - RNA, 19 nt, Homo sapiens
  misc_RNA (1)...(19): siRNA sense strand
gcgaaccccuuuugaaguu

SEQ ID NO: 932576 - RNA, 19 nt, Homo sapiens
  misc_RNA (1)...(19): siRNA sense strand
aaccagagaauuacucaaa

SEQ ID NO: 932577 - RNA, 19 nt, Homo sapiens
  misc_RNA (1)...(19): siRNA sense strand
gagacccuccugcaugaaa

SEQ ID NO: 932578 - RNA, 19 nt, Homo sapiens
  misc_RNA (1)...(19): siRNA sense strand
cagcacaggccaccguauu

SEQ ID NO: 932579 - RNA, 19 nt, Homo sapiens
  misc_RNA (1)...(19): siRNA sense strand
ggaaaggaaccaguauugg

SEQ ID NO: 932580 - RNA, 19 nt, Homo sapiens
  misc_RNA (1)...(19): siRNA sense strand
ucagauuaaugagcacuug

SEQ ID NO: 932581 - RNA, 19 nt, Homo sapiens
  misc_RNA (1)...(19): siRNA sense strand
uuacggcuaugucaaacga

SEQ ID NO: 932582 - RNA, 19 nt, Homo sapiens
  misc_RNA (1)...(19): siRNA sense strand
agauaucccuaagaaauuc

SEQ ID NO: 932583 - RNA, 19 nt, Homo sapiens
  misc_RNA (1)...(19): siRNA sense strand
ggaaccagagaauuacuca

SEQ ID NO: 932584 - RNA, 19 nt, Homo sapiens
  misc_RNA (1)...(19): siRNA sense strand
gaaguugaggccaagaaag

SEQ ID NO: 932585 - RNA, 19 nt, Homo sapiens
  misc_RNA (1)...(19): siRNA sense strand
uggagucucagauuaauga

SEQ ID NO: 932586 - RNA, 19 nt, Homo sapiens
  misc_RNA (1)...(19): siRNA sense strand
uaggagaaacaagcaauuu

SEQ ID NO: 932587 - RNA, 19 nt, Homo sapiens
  misc_RNA (1)...(19): siRNA sense strand
ccucugcucaugacuauug

SEQ ID NO: 932588 - RNA, 19 nt, Homo sapiens
  misc_RNA (1)...(19): siRNA sense strand
uaacgacaaagaccgagaa

SEQ ID NO: 932589 - RNA, 19 nt, Homo sapiens
  misc_RNA (1)...(19): siRNA sense strand
cagagaaggguuucaucuu

SEQ ID NO: 932590 - RNA, 19 nt, Homo sapiens
  misc_RNA (1)...(19): siRNA sense strand
guucuaagcaacuacuuuc

SEQ ID NO: 932591 - RNA, 19 nt, Homo sapiens
  misc_RNA (1)...(19): siRNA sense strand
gaucacuucacaugccauu

SEQ ID NO: 932592 - RNA, 19 nt, Homo sapiens
  misc_RNA (1)...(19): siRNA sense strand
cgcagagaauaaagauaaa

SEQ ID NO: 932593 - RNA, 19 nt, Homo sapiens
  misc_RNA (1)...(19): siRNA sense strand
caaaggaaaggcaaaacua

SEQ ID NO: 932594 - RNA, 19 nt, Homo sapiens
  misc_RNA (1)...(19): siRNA sense strand
gaaguggagcgugcgaaug

SEQ ID NO: 932595 - RNA, 19 nt, Homo sapiens
  misc_RNA (1)...(19): siRNA sense strand
ucuccaaggauaaguguaa

SEQ ID NO: 932596 - RNA, 19 nt, Homo sapiens
  misc_RNA (1)...(19): siRNA sense strand
ucaaaaccauucagcaaau

SEQ ID NO: 932597 - RNA, 19 nt, Homo sapiens
  misc_RNA (1)...(19): siRNA sense strand
aacaagcaauuuaccuuca

SEQ ID NO: 932598 - RNA, 19 nt, Homo sapiens
  misc_RNA (1)...(19): siRNA sense strand
guggaggcacuuacauaaa

SEQ ID NO: 932599 - RNA, 19 nt, Homo sapiens
  misc_RNA (1)...(19): siRNA sense strand
uguggaggcacuuacauaa

SEQ ID NO: 932600 - RNA, 19 nt, Homo sapiens
  misc_RNA (1)...(19): siRNA sense strand
ggaacccucugcucaugac

SEQ ID NO: 932601 - RNA, 19 nt, Homo sapiens
  misc_RNA (1)...(19): siRNA sense strand
cagccugacuggagccaau

SEQ ID NO: 932602 - RNA, 19 nt, Homo sapiens
  misc_RNA (1)...(19): siRNA sense strand
aaggugaaauuugaacaga

SEQ ID NO: 932603 - RNA, 19 nt, Homo sapiens
  misc_RNA (1)...(19): siRNA sense strand
ugggaaaggauauguucua

SEQ ID NO: 932604 - RNA, 19 nt, Homo sapiens
  misc_RNA (1)...(19): siRNA sense strand
uggaggcacuuacauaaaa

SEQ ID NO: 932605 - RNA, 19 nt, Homo sapiens
  misc_RNA (1)...(19): siRNA sense strand
ggaaggguggaauguguuc

SEQ ID NO: 932606 - RNA, 19 nt, Homo sapiens
  misc_RNA (1)...(19): siRNA sense strand
gcacaggccaccguauuac

SEQ ID NO: 932607 - RNA, 19 nt, Homo sapiens
  misc_RNA (1)...(19): siRNA sense strand
aggaaaggaaccaguauug

SEQ ID NO: 932608 - RNA, 19 nt, Homo sapiens
  misc_RNA (1)...(19): siRNA sense strand
ugguaaugauccaaaguau

SEQ ID NO: 932609 - RNA, 19 nt, Homo sapiens
  misc_RNA (1)...(19): siRNA sense strand
ggaugugagugggucugaa

SEQ ID NO: 932610 - RNA, 19 nt, Homo sapiens
  misc_RNA (1)...(19): siRNA sense strand
gaguaucauuugccaacca

SEQ ID NO: 932611 - RNA, 19 nt, Homo sapiens
  misc_RNA (1)...(19): siRNA sense strand
ugaaguugaggccaagaaa

SEQ ID NO: 932612 - RNA, 19 nt, Homo sapiens
  misc_RNA (1)...(19): siRNA sense strand
aaguggagcgugcgaauga

SEQ ID NO: 932613 - RNA, 19 nt, Homo sapiens
  misc_RNA (1)...(19): siRNA sense strand
gauacauucccaaauaaac

SEQ ID NO: 932614 - RNA, 19 nt, Homo sapiens
  misc_RNA (1)...(19): siRNA sense strand
uaacggaaucagcaucugu

SEQ ID NO: 932615 - RNA, 19 nt, Homo sapiens
  misc_RNA (1)...(19): siRNA sense strand
aacagaaugguucaaguaa

SEQ ID NO: 932616 - RNA, 19 nt, Homo sapiens
  misc_RNA (1)...(19): siRNA sense strand
gaagggcaugguccagaau

SEQ ID NO: 932617 - RNA, 19 nt, Homo sapiens
  misc_RNA (1)...(19): siRNA sense strand
guuuaacgaccaauucuuc

SEQ ID NO: 932618 - RNA, 19 nt, Homo sapiens
  misc_RNA (1)...(19): siRNA sense strand
agggaaggguggaaugugu

SEQ ID NO: 932619 - RNA, 19 nt, Homo sapiens
  misc_RNA (1)...(19): siRNA sense strand
caaggaaccagagaauuac

SEQ ID NO: 932620 - RNA, 19 nt, Homo sapiens
  misc_RNA (1)...(19): siRNA sense strand
ugaaggugacagcaucaaa

SEQ ID NO: 932621 - RNA, 19 nt, Homo sapiens
  misc_RNA (1)...(19): siRNA sense strand
agagcaaaaugguuaauug

SEQ ID NO: 932622 - RNA, 19 nt, Homo sapiens
  misc_RNA (1)...(19): siRNA sense strand
ggaugaugacuugauguug

SEQ ID NO: 932623 - RNA, 19 nt, Homo sapiens
  misc_RNA (1)...(19): siRNA sense strand
gaggugaggcccagcuagu

SEQ ID NO: 932624 - RNA, 19 nt, Homo sapiens
  misc_RNA (1)...(19): siRNA sense strand
uaaagauaaacccaacaga

SEQ ID NO: 932625 - RNA, 19 nt, Homo sapiens
  misc_RNA (1)...(19): siRNA sense strand
gaaauuugaacagaauggu

SEQ ID NO: 932626 - RNA, 19 nt, Homo sapiens
  misc_RNA (1)...(19): siRNA sense strand
augguuaauugcccaguuu

SEQ ID NO: 932627 - RNA, 19 nt, Homo sapiens
  misc_RNA (1)...(19): siRNA sense strand
ugaaaugauacaugccuau

SEQ ID NO: 932628 - RNA, 19 nt, Homo sapiens
  misc_RNA (1)...(19): siRNA sense strand
ugaagauacauucccaaau

SEQ ID NO: 932629 - RNA, 19 nt, Homo sapiens
  misc_RNA (1)...(19): siRNA sense strand
uuaauugcccaguuuguca

SEQ ID NO: 932630 - RNA, 19 nt, Homo sapiens
  misc_RNA (1)...(19): siRNA sense strand
gaggagagaacacgucuua

SEQ ID NO: 932631 - RNA, 19 nt, Homo sapiens
  misc_RNA (1)...(19): siRNA sense strand
gcaagaacguauuagaugu

SEQ ID NO: 932632 - RNA, 19 nt, Homo sapiens
  misc_RNA (1)...(19): siRNA sense strand
gaguuuaccuuccagcaaa

SEQ ID NO: 932633 - RNA, 19 nt, Homo sapiens
  misc_RNA (1)...(19): siRNA sense strand
gacagugccuuuauguauu

SEQ ID NO: 932634 - RNA, 19 nt, Homo sapiens
  misc_RNA (1)...(19): siRNA sense strand
gcacaaagccaucaagcau

SEQ ID NO: 932635 - RNA, 19 nt, Homo sapiens
  misc_RNA (1)...(19): siRNA sense strand
ggaggaggcacagauauaa

SEQ ID NO: 932636 - RNA, 19 nt, Homo sapiens
  misc_RNA (1)...(19): siRNA sense strand
caucugaccuucacguuca

SEQ ID NO: 932637 - RNA, 19 nt, Homo sapiens
  misc_RNA (1)...(19): siRNA sense strand
gaaguucgauaucaaacag

SEQ ID NO: 932638 - RNA, 19 nt, Homo sapiens
  misc_RNA (1)...(19): siRNA sense strand
gcagaugacagugccuuua

SEQ ID NO: 932639 - RNA, 19 nt, Homo sapiens
  misc_RNA (1)...(19): siRNA sense strand
cuacugggcucaacugcaa

SEQ ID NO: 932640 - RNA, 19 nt, Homo sapiens
  misc_RNA (1)...(19): siRNA sense strand
ugacagugccuuuauguau

SEQ ID NO: 932641 - RNA, 19 nt, Homo sapiens
  misc_RNA (1)...(19): siRNA sense strand
ggagagaacacgucuuaca

SEQ ID NO: 932642 - RNA, 19 nt, Homo sapiens
  misc_RNA (1)...(19): siRNA sense strand
acaaagccaucaagcauca

SEQ ID NO: 932643 - RNA, 19 nt, Homo sapiens
  misc_RNA (1)...(19): siRNA sense strand
caaaacauauugcaaagga

SEQ ID NO: 932644 - RNA, 19 nt, Homo sapiens
  misc_RNA (1)...(19): siRNA sense strand
gaccaucaguucccugcaa

SEQ ID NO: 932645 - RNA, 19 nt, Homo sapiens
  misc_RNA (1)...(19): siRNA sense strand
cgacuccagugcaacauau

SEQ ID NO: 932646 - RNA, 19 nt, Homo sapiens
  misc_RNA (1)...(19): siRNA sense strand
gaagagagaggagagaaca

SEQ ID NO: 932647 - RNA, 19 nt, Homo sapiens
  misc_RNA (1)...(19): siRNA sense strand
guauggaaguucgauauca

SEQ ID NO: 932648 - RNA, 19 nt, Homo sapiens
  misc_RNA (1)...(19): siRNA sense strand
gaacguauuagauguuucu

SEQ ID NO: 932649 - RNA, 19 nt, Homo sapiens
  misc_RNA (1)...(19): siRNA sense strand
uaaagcaaguauggaaguu

SEQ ID NO: 932650 - RNA, 19 nt, Homo sapiens
  misc_RNA (1)...(19): siRNA sense strand
cgauucaucuucaucacuu

SEQ ID NO: 932651 - RNA, 19 nt, Homo sapiens
  misc_RNA (1)...(19): siRNA sense strand
uauaagagcaggaugaaca

SEQ ID NO: 932652 - RNA, 19 nt, Homo sapiens
  misc_RNA (1)...(19): siRNA sense strand
aaagugauuucaugcuaga

SEQ ID NO: 932653 - RNA, 19 nt, Homo sapiens
  misc_RNA (1)...(19): siRNA sense strand
agaagaauuugacaagcuu

SEQ ID NO: 932654 - RNA, 19 nt, Homo sapiens
  misc_RNA (1)...(19): siRNA sense strand
gcacgagggaccaucaguu

SEQ ID NO: 932655 - RNA, 19 nt, Homo sapiens
  misc_RNA (1)...(19): siRNA sense strand
guauuggagugucuacaga

SEQ ID NO: 932656 - RNA, 19 nt, Homo sapiens
  misc_RNA (1)...(19): siRNA sense strand
gauauaagagcaggaugaa

SEQ ID NO: 932657 - RNA, 19 nt, Homo sapiens
  misc_RNA (1)...(19): siRNA sense strand
acagugccuuuauguauug

SEQ ID NO: 932658 - RNA, 19 nt, Homo sapiens
  misc_RNA (1)...(19): siRNA sense strand
gaaacccgcaggcugaguu

SEQ ID NO: 932659 - RNA, 19 nt, Homo sapiens
  misc_RNA (1)...(19): siRNA sense strand
gcaaagugacacccucgaa

SEQ ID NO: 932660 - RNA, 19 nt, Homo sapiens
  misc_RNA (1)...(19): siRNA sense strand
ccaaauccauaaguuagau

SEQ ID NO: 932661 - RNA, 19 nt, Homo sapiens
  misc_RNA (1)...(19): siRNA sense strand
caagaacguauuagauguu

SEQ ID NO: 932662 - RNA, 19 nt, Homo sapiens
  misc_RNA (1)...(19): siRNA sense strand
uggagugucuacagauaaa

SEQ ID NO: 932663 - RNA, 19 nt, Homo sapiens
  misc_RNA (1)...(19): siRNA sense strand
guaggugccugcccaagag

SEQ ID NO: 932664 - RNA, 19 nt, Homo sapiens
  misc_RNA (1)...(19): siRNA sense strand
caaaagaucucuggaagca

SEQ ID NO: 932665 - RNA, 19 nt, Homo sapiens
  misc_RNA (1)...(19): siRNA sense strand
caaaggagccagacguucu

SEQ ID NO: 932666 - RNA, 19 nt, Homo sapiens
  misc_RNA (1)...(19): siRNA sense strand
uauggaaguucgauaucaa

SEQ ID NO: 932667 - RNA, 19 nt, Homo sapiens
  misc_RNA (1)...(19): siRNA sense strand
ucaaaaguauugccucaaa

SEQ ID NO: 932668 - RNA, 19 nt, Homo sapiens
  misc_RNA (1)...(19): siRNA sense strand
gcauuaagagauugcaaga

SEQ ID NO: 932669 - RNA, 19 nt, Homo sapiens
  misc_RNA (1)...(19): siRNA sense strand
gugacacccucgaaguauu

SEQ ID NO: 932670 - RNA, 19 nt, Homo sapiens
  misc_RNA (1)...(19): siRNA sense strand
gaugacagugccuuuaugu

SEQ ID NO: 932671 - RNA, 19 nt, Homo sapiens
  misc_RNA (1)...(19): siRNA sense strand
gaaagggacaggggcauua

SEQ ID NO: 932672 - RNA, 19 nt, Homo sapiens
  misc_RNA (1)...(19): siRNA sense strand
caauugaggcuccuucauc

SEQ ID NO: 932673 - RNA, 19 nt, Homo sapiens
  misc_RNA (1)...(19): siRNA sense strand
ggagccagacguucucaga

SEQ ID NO: 932674 - RNA, 19 nt, Homo sapiens
  misc_RNA (1)...(19): siRNA sense strand
gagauugcaagaacguauu

SEQ ID NO: 932675 - RNA, 19 nt, Homo sapiens
  misc_RNA (1)...(19): siRNA sense strand
ugguuaauuucuccuguaa

SEQ ID NO: 932676 - RNA, 19 nt, Homo sapiens
  misc_RNA (1)...(19): siRNA sense strand
cuacagauaaagcaaguau

SEQ ID NO: 932677 - RNA, 19 nt, Homo sapiens
  misc_RNA (1)...(19): siRNA sense strand
cgucagagggagauugaaa

SEQ ID NO: 932678 - RNA, 19 nt, Homo sapiens
  misc_RNA (1)...(19): siRNA sense strand
gagagaacacgucuuacag

SEQ ID NO: 932679 - RNA, 19 nt, Homo sapiens
  misc_RNA (1)...(19): siRNA sense strand
ggaaguucgauaucaaaca

SEQ ID NO: 932680 - RNA, 19 nt, Homo sapiens
  misc_RNA (1)...(19): siRNA sense strand
agauaaagcaaguauggaa

SEQ ID NO: 932681 - RNA, 19 nt, Homo sapiens
  misc_RNA (1)...(19): siRNA sense strand
gguaggugccugcccaaga

SEQ ID NO: 932682 - RNA, 19 nt, Homo sapiens
  misc_RNA (1)...(19): siRNA sense strand
cuucacagcccaacucaga

SEQ ID NO: 932683 - RNA, 19 nt, Homo sapiens
  misc_RNA (1)...(19): siRNA sense strand
cagaugacagugccuuuau

SEQ ID NO: 932684 - RNA, 19 nt, Homo sapiens
  misc_RNA (1)...(19): siRNA sense strand
gagcgauucaucuucauca

SEQ ID NO: 932685 - RNA, 19 nt, Homo sapiens
  misc_RNA (1)...(19): siRNA sense strand
auuaagagauugcaagaac

SEQ ID NO: 932686 - RNA, 19 nt, Homo sapiens
  misc_RNA (1)...(19): siRNA sense strand
gaauuugacaagcuucauc

SEQ ID NO: 932687 - RNA, 19 nt, Homo sapiens
  misc_RNA (1)...(19): siRNA sense strand
cgacagggccauggagaga

SEQ ID NO: 932688 - RNA, 19 nt, Homo sapiens
  misc_RNA (1)...(19): siRNA sense strand
cuucaucacuuccaaagac

SEQ ID NO: 932689 - RNA, 19 nt, Homo sapiens
  misc_RNA (1)...(19): siRNA sense strand
gcccaacucagaagagaga

SEQ ID NO: 932690 - RNA, 19 nt, Homo sapiens
  misc_RNA (1)...(19): siRNA sense strand
caaguauggaaguucgaua

SEQ ID NO: 932691 - RNA, 19 nt, Homo sapiens
  misc_RNA (1)...(19): siRNA sense strand
aagaagaauuugacaagcu

SEQ ID NO: 932692 - RNA, 19 nt, Homo sapiens
  misc_RNA (1)...(19): siRNA sense strand
gaaggagcgcaaagugaca

SEQ ID NO: 932693 - RNA, 19 nt, Homo sapiens
  misc_RNA (1)...(19): siRNA sense strand
cagcccaacucagaagaga

SEQ ID NO: 932694 - RNA, 19 nt, Homo sapiens
  misc_RNA (1)...(19): siRNA sense strand
aggaggaggcacagauaua

SEQ ID NO: 932695 - RNA, 19 nt, Homo sapiens
  misc_RNA (1)...(19): siRNA sense strand
cuuacaggauggaagagaa

SEQ ID NO: 932696 - RNA, 19 nt, Homo sapiens
  misc_RNA (1)...(19): siRNA sense strand
ugcaagaacguauuagaug

SEQ ID NO: 932697 - RNA, 19 nt, Homo sapiens
  misc_RNA (1)...(19): siRNA sense strand
acagauaaagcaaguaugg

SEQ ID NO: 932698 - RNA, 19 nt, Homo sapiens
  misc_RNA (1)...(19): siRNA sense strand
auuggagugucuacagaua

SEQ ID NO: 932699 - RNA, 19 nt, Homo sapiens
  misc_RNA (1)...(19): siRNA sense strand
cagcaaagcaaaagcaaaa

SEQ ID NO: 932700 - RNA, 19 nt, Homo sapiens
  misc_RNA (1)...(19): siRNA sense strand
agauauaagagcaggauga

SEQ ID NO: 932701 - RNA, 19 nt, Homo sapiens
  misc_RNA (1)...(19): siRNA sense strand
caagcaucaucuccaccaa

SEQ ID NO: 932702 - RNA, 19 nt, Homo sapiens
  misc_RNA (1)...(19): siRNA sense strand
ggacaggggcauuaagaga

SEQ ID NO: 932703 - RNA, 19 nt, Homo sapiens
  misc_RNA (1)...(19): siRNA sense strand
agaugacagugccuuuaug

SEQ ID NO: 932704 - RNA, 19 nt, Homo sapiens
  misc_RNA (1)...(19): siRNA sense strand
uccaugagccggcuguuga

SEQ ID NO: 932705 - RNA, 19 nt, Homo sapiens
  misc_RNA (1)...(19): siRNA sense strand
caacagaccccaaauccau

SEQ ID NO: 932706 - RNA, 19 nt, Homo sapiens
  misc_RNA (1)...(19): siRNA sense strand
agauugcaagaacguauua

SEQ ID NO: 932707 - RNA, 19 nt, Homo sapiens
  misc_RNA (1)...(19): siRNA sense strand
caaaaguauugccucaaau

SEQ ID NO: 932708 - RNA, 19 nt, Homo sapiens
  misc_RNA (1)...(19): siRNA sense strand
aauugaggcuccuucaucu

SEQ ID NO: 932709 - RNA, 19 nt, Homo sapiens
  misc_RNA (1)...(19): siRNA sense strand
gcaauugaggcuccuucau

SEQ ID NO: 932710 - RNA, 19 nt, Homo sapiens
  misc_RNA (1)...(19): siRNA sense strand
gaagucaacagaccccaaa

SEQ ID NO: 932711 - RNA, 19 nt, Homo sapiens
  misc_RNA (1)...(19): siRNA sense strand
aaacguucaucaugcaaaa

SEQ ID NO: 932712 - RNA, 19 nt, Homo sapiens
  misc_RNA (1)...(19): siRNA sense strand
gcaggaugaacaaaacaua

SEQ ID NO: 932713 - RNA, 19 nt, Homo sapiens
  misc_RNA (1)...(19): siRNA sense strand
ugacacccucgaaguauuc

SEQ ID NO: 932714 - RNA, 19 nt, Homo sapiens
  misc_RNA (1)...(19): siRNA sense strand
uggaaggagcgcaaaguga

SEQ ID NO: 932715 - RNA, 19 nt, Homo sapiens
  misc_RNA (1)...(19): siRNA sense strand
aaagugacacccucgaagu

SEQ ID NO: 932716 - RNA, 19 nt, Homo sapiens
  misc_RNA (1)...(19): siRNA sense strand
gcuccuucaucuacaugug

SEQ ID NO: 932717 - RNA, 19 nt, Homo sapiens
  misc_RNA (1)...(19): siRNA sense strand
uccagaaguugccaucauc

SEQ ID NO: 932718 - RNA, 19 nt, Homo sapiens
  misc_RNA (1)...(19): siRNA sense strand
aagugacacccucgaagua

SEQ ID NO: 932719 - RNA, 19 nt, Homo sapiens
  misc_RNA (1)...(19): siRNA sense strand
agugcaacauauaaucuug

SEQ ID NO: 932720 - RNA, 19 nt, Homo sapiens
  misc_RNA (1)...(19): siRNA sense strand
uuacaggauggaagagaaa

SEQ ID NO: 932721 - RNA, 19 nt, Homo sapiens
  misc_RNA (1)...(19): siRNA sense strand
cagaagagagaggagagaa

SEQ ID NO: 932722 - RNA, 19 nt, Homo sapiens
  misc_RNA (1)...(19): siRNA sense strand
gaggcuccuucaucuacau

SEQ ID NO: 932723 - RNA, 19 nt, Homo sapiens
  misc_RNA (1)...(19): siRNA sense strand
gcaaguauggaaguucgau

SEQ ID NO: 932724 - RNA, 19 nt, Homo sapiens
  misc_RNA (1)...(19): siRNA sense strand
ucgggaauauugccugagu

SEQ ID NO: 932725 - RNA, 19 nt, Homo sapiens
  misc_RNA (1)...(19): siRNA sense strand
gugcaacauauaaucuuga

SEQ ID NO: 932726 - RNA, 19 nt, Homo sapiens
  misc_RNA (1)...(19): siRNA sense strand
gaaaaccuaggcaaaagau

SEQ ID NO: 932727 - RNA, 19 nt, Homo sapiens
  misc_RNA (1)...(19): siRNA sense strand
ccaaaacguucaucaugca

SEQ ID NO: 932728 - RNA, 19 nt, Homo sapiens
  misc_RNA (1)...(19): siRNA sense strand
gaggaggcacagauauaag

SEQ ID NO: 932729 - RNA, 19 nt, Homo sapiens
  misc_RNA (1)...(19): siRNA sense strand
gccacggaaggaaucguua

SEQ ID NO: 932730 - RNA, 19 nt, Homo sapiens
  misc_RNA (1)...(19): siRNA sense strand
uuacuuuccuggccaagaa

SEQ ID NO: 932731 - RNA, 19 nt, Homo sapiens
  misc_RNA (1)...(19): siRNA sense strand
ugugagaccuggcagaaac

SEQ ID NO: 932732 - RNA, 19 nt, Homo sapiens
  misc_RNA (1)...(19): siRNA sense strand
gaaccugcgcaccuuugug

SEQ ID NO: 932733 - RNA, 19 nt, Homo sapiens
  misc_RNA (1)...(19): siRNA sense strand
gcugugagaccuggcagaa

SEQ ID NO: 932734 - RNA, 19 nt, Homo sapiens
  misc_RNA (1)...(19): siRNA sense strand
guaccuacaacgagaccaa

SEQ ID NO: 932735 - RNA, 19 nt, Homo sapiens
  misc_RNA (1)...(19): siRNA sense strand
gugggaaccugcgcaccuu

SEQ ID NO: 932736 - RNA, 19 nt, Homo sapiens
  misc_RNA (1)...(19): siRNA sense strand
gggaaccugcgcaccuuug

SEQ ID NO: 932737 - RNA, 19 nt, Homo sapiens
  misc_RNA (1)...(19): siRNA sense strand
ggaaccugcgcaccuuugu

SEQ ID NO: 932738 - RNA, 19 nt, Homo sapiens
  misc_RNA (1)...(19): siRNA sense strand
uauugaagcccaucaucga

SEQ ID NO: 932739 - RNA, 19 nt, Homo sapiens
  misc_RNA (1)...(19): siRNA sense strand
gcugugccgugagggaguu

SEQ ID NO: 932740 - RNA, 19 nt, Homo sapiens
  misc_RNA (1)...(19): siRNA sense strand
ccauggcccuccuccuucu

SEQ ID NO: 932741 - RNA, 19 nt, Homo sapiens
  misc_RNA (1)...(19): siRNA sense strand
ugagggaguuuacuuuccu

SEQ ID NO: 932742 - RNA, 19 nt, Homo sapiens
  misc_RNA (1)...(19): siRNA sense strand
gaaagaauguccagcaaau

SEQ ID NO: 932743 - RNA, 19 nt, Homo sapiens
  misc_RNA (1)...(19): siRNA sense strand
gagcaagaaugauugagua

SEQ ID NO: 932744 - RNA, 19 nt, Homo sapiens
  misc_RNA (1)...(19): siRNA sense strand
gauaaucucugguaugaau

SEQ ID NO: 932745 - RNA, 19 nt, Homo sapiens
  misc_RNA (1)...(19): siRNA sense strand
gagcagacauacagaaaga

SEQ ID NO: 932746 - RNA, 19 nt, Homo sapiens
  misc_RNA (1)...(19): siRNA sense strand
gcgauaaucucugguauga

SEQ ID NO: 932747 - RNA, 19 nt, Homo sapiens
  misc_RNA (1)...(19): siRNA sense strand
gaagaaaacacgaaacuua

SEQ ID NO: 932748 - RNA, 19 nt, Homo sapiens
  misc_RNA (1)...(19): siRNA sense strand
gauaagaaccagaugagaa

SEQ ID NO: 932749 - RNA, 19 nt, Homo sapiens
  misc_RNA (1)...(19): siRNA sense strand
ugaagaugcucucuacuug

SEQ ID NO: 932750 - RNA, 19 nt, Homo sapiens
  misc_RNA (1)...(19): siRNA sense strand
uggagaggcucaauuauau

SEQ ID NO: 932751 - RNA, 19 nt, Homo sapiens
  misc_RNA (1)...(19): siRNA sense strand
uaagugauccugauaguga

SEQ ID NO: 932752 - RNA, 19 nt, Homo sapiens
  misc_RNA (1)...(19): siRNA sense strand
gaugaaagaaugaugagaa

SEQ ID NO: 932753 - RNA, 19 nt, Homo sapiens
  misc_RNA (1)...(19): siRNA sense strand
ccaaacaagugagugaauu

SEQ ID NO: 932754 - RNA, 19 nt, Homo sapiens
  misc_RNA (1)...(19): siRNA sense strand
cuuagaagcuuacguggaa

SEQ ID NO: 932755 - RNA, 19 nt, Homo sapiens
  misc_RNA (1)...(19): siRNA sense strand
ccaauggccaugucaauuu

SEQ ID NO: 932756 - RNA, 19 nt, Homo sapiens
  misc_RNA (1)...(19): siRNA sense strand
gagcuaauggccaaaguuu

SEQ ID NO: 932757 - RNA, 19 nt, Homo sapiens
  misc_RNA (1)...(19): siRNA sense strand
gaacuggccaaacaaguga

SEQ ID NO: 932758 - RNA, 19 nt, Homo sapiens
  misc_RNA (1)...(19): siRNA sense strand
ccagauagaacauacauau

SEQ ID NO: 932759 - RNA, 19 nt, Homo sapiens
  misc_RNA (1)...(19): siRNA sense strand
gaaaucuguaugccuguua

SEQ ID NO: 932760 - RNA, 19 nt, Homo sapiens
  misc_RNA (1)...(19): siRNA sense strand
aaagggauaucauuacugu

SEQ ID NO: 932761 - RNA, 19 nt, Homo sapiens
  misc_RNA (1)...(19): siRNA sense strand
gaaagaaugaugagaaacu

SEQ ID NO: 932762 - RNA, 19 nt, Homo sapiens
  misc_RNA (1)...(19): siRNA sense strand
caaaugaugcagugucuga

SEQ ID NO: 932763 - RNA, 19 nt, Homo sapiens
  misc_RNA (1)...(19): siRNA sense strand
gcucauaguaguagagaaa

SEQ ID NO: 932764 - RNA, 19 nt, Homo sapiens
  misc_RNA (1)...(19): siRNA sense strand
ugacagcagugguuacaau

SEQ ID NO: 932765 - RNA, 19 nt, Homo sapiens
  misc_RNA (1)...(19): siRNA sense strand
ugacguagcucgggagugu

SEQ ID NO: 932766 - RNA, 19 nt, Homo sapiens
  misc_RNA (1)...(19): siRNA sense strand
gaagagcagacauacagaa

SEQ ID NO: 932767 - RNA, 19 nt, Homo sapiens
  misc_RNA (1)...(19): siRNA sense strand
caaacaagugagugaauuu

SEQ ID NO: 932768 - RNA, 19 nt, Homo sapiens
  misc_RNA (1)...(19): siRNA sense strand
gcagcugacucauauagag

SEQ ID NO: 932769 - RNA, 19 nt, Homo sapiens
  misc_RNA (1)...(19): siRNA sense strand
gauggacccuucaagcaau

SEQ ID NO: 932770 - RNA, 19 nt, Homo sapiens
  misc_RNA (1)...(19): siRNA sense strand
ucacaguucucaagaccaa

SEQ ID NO: 932771 - RNA, 19 nt, Homo sapiens
  misc_RNA (1)...(19): siRNA sense strand
cggaagaucuugcaguauc

SEQ ID NO: 932772 - RNA, 19 nt, Homo sapiens
  misc_RNA (1)...(19): siRNA sense strand
agaucuggcucaccgaaua

SEQ ID NO: 932773 - RNA, 19 nt, Homo sapiens
  misc_RNA (1)...(19): siRNA sense strand
caagugagugaauuuauga

SEQ ID NO: 932774 - RNA, 19 nt, Homo sapiens
  misc_RNA (1)...(19): siRNA sense strand
cagaaagaauguccagcaa

SEQ ID NO: 932775 - RNA, 19 nt, Homo sapiens
  misc_RNA (1)...(19): siRNA sense strand
cuacuuggcuucuuaugag

SEQ ID NO: 932776 - RNA, 19 nt, Homo sapiens
  misc_RNA (1)...(19): siRNA sense strand
ugagugaauuuaugacaug

SEQ ID NO: 932777 - RNA, 19 nt, Homo sapiens
  misc_RNA (1)...(19): siRNA sense strand
acaagugagugaauuuaug

SEQ ID NO: 932778 - RNA, 19 nt, Homo sapiens
  misc_RNA (1)...(19): siRNA sense strand
cacgaaacuuagaagcuua

SEQ ID NO: 932779 - RNA, 19 nt, Homo sapiens
  misc_RNA (1)...(19): siRNA sense strand
ugacaagaguugcuacagu

SEQ ID NO: 932780 - RNA, 19 nt, Homo sapiens
  misc_RNA (1)...(19): siRNA sense strand
acacgaaacuuagaagcuu

SEQ ID NO: 932781 - RNA, 19 nt, Homo sapiens
  misc_RNA (1)...(19): siRNA sense strand
ggaacuggccaaacaagug

SEQ ID NO: 932782 - RNA, 19 nt, Homo sapiens
  misc_RNA (1)...(19): siRNA sense strand
cuacuugguugcuacagaa

SEQ ID NO: 932783 - RNA, 19 nt, Homo sapiens
  misc_RNA (1)...(19): siRNA sense strand
aaacaccgagcaagaauga

SEQ ID NO: 932784 - RNA, 19 nt, Homo sapiens
  misc_RNA (1)...(19): siRNA sense strand
gugaauuuaugacauggaa

SEQ ID NO: 932785 - RNA, 19 nt, Homo sapiens
  misc_RNA (1)...(19): siRNA sense strand
gcuguggaggguuguauua

SEQ ID NO: 932786 - RNA, 19 nt, Homo sapiens
  misc_RNA (1)...(19): siRNA sense strand
gagacuaagugauccugau

SEQ ID NO: 932787 - RNA, 19 nt, Homo sapiens
  misc_RNA (1)...(19): siRNA sense strand
gcaagaaugauugaguauu

SEQ ID NO: 932788 - RNA, 19 nt, Homo sapiens
  misc_RNA (1)...(19): siRNA sense strand
ccuacucaguucucgguua

SEQ ID NO: 932789 - RNA, 19 nt, Homo sapiens
  misc_RNA (1)...(19): siRNA sense strand
aagcuuacguggaaugguu

SEQ ID NO: 932790 - RNA, 19 nt, Homo sapiens
  misc_RNA (1)...(19): siRNA sense strand
cuggagaggcucaauuaua

SEQ ID NO: 932791 - RNA, 19 nt, Homo sapiens
  misc_RNA (1)...(19): siRNA sense strand
gagaaagacagauggaagu

SEQ ID NO: 932792 - RNA, 19 nt, Homo sapiens
  misc_RNA (1)...(19): siRNA sense strand
cuacucaguucucgguuau

SEQ ID NO: 932793 - RNA, 19 nt, Homo sapiens
  misc_RNA (1)...(19): siRNA sense strand
ggagaggcucaauuauauu

SEQ ID NO: 932794 - RNA, 19 nt, Homo sapiens
  misc_RNA (1)...(19): siRNA sense strand
acgaagaaguccuggcaaa

SEQ ID NO: 932795 - RNA, 19 nt, Homo sapiens
  misc_RNA (1)...(19): siRNA sense strand
gcagacauacagaaagaau

SEQ ID NO: 932796 - RNA, 19 nt, Homo sapiens
  misc_RNA (1)...(19): siRNA sense strand
auauuuaccuuccuacuca

SEQ ID NO: 932797 - RNA, 19 nt, Homo sapiens
  misc_RNA (1)...(19): siRNA sense strand
gugaagaugcucucuacuu

SEQ ID NO: 932798 - RNA, 19 nt, Homo sapiens
  misc_RNA (1)...(19): siRNA sense strand
aagaauguccagcaaauga

SEQ ID NO: 932799 - RNA, 19 nt, Homo sapiens
  misc_RNA (1)...(19): siRNA sense strand
gcgaagagcagacauacag

SEQ ID NO: 932800 - RNA, 19 nt, Homo sapiens
  misc_RNA (1)...(19): siRNA sense strand
acucaguucucgguuauuu

SEQ ID NO: 932801 - RNA, 19 nt, Homo sapiens
  misc_RNA (1)...(19): siRNA sense strand
ccacagaucggcucacagu

SEQ ID NO: 932802 - RNA, 19 nt, Homo sapiens
  misc_RNA (1)...(19): siRNA sense strand
auaagaaccagaugagaaa

SEQ ID NO: 932803 - RNA, 19 nt, Homo sapiens
  misc_RNA (1)...(19): siRNA sense strand
gagagugaaggaccugaaa

SEQ ID NO: 932804 - RNA, 19 nt, Homo sapiens
  misc_RNA (1)...(19): siRNA sense strand
cuguaugccuguuaagaaa

SEQ ID NO: 932805 - RNA, 19 nt, Homo sapiens
  misc_RNA (1)...(19): siRNA sense strand
gcuacuugguugcuacaga

SEQ ID NO: 932806 - RNA, 19 nt, Homo sapiens
  misc_RNA (1)...(19): siRNA sense strand
gcacucauccagcacuuag

SEQ ID NO: 932807 - RNA, 19 nt, Homo sapiens
  misc_RNA (1)...(19): siRNA sense strand
agacuaagugauccugaua

SEQ ID NO: 932808 - RNA, 19 nt, Homo sapiens
  misc_RNA (1)...(19): siRNA sense strand
aaaucuguaugccuguuaa

SEQ ID NO: 932809 - RNA, 19 nt, Homo sapiens
  misc_RNA (1)...(19): siRNA sense strand
acaaagggauaucauuacu

SEQ ID NO: 932810 - RNA, 19 nt, Homo sapiens
  misc_RNA (1)...(19): siRNA sense strand
guugagcaccagagacuaa

SEQ ID NO: 932811 - RNA, 19 nt, Homo sapiens
  misc_RNA (1)...(19): siRNA sense strand
gaauaugagcccagucucu

SEQ ID NO: 932812 - RNA, 19 nt, Homo sapiens
  misc_RNA (1)...(19): siRNA sense strand
gaccaagccacagucuaua

SEQ ID NO: 932813 - RNA, 19 nt, Homo sapiens
  misc_RNA (1)...(19): siRNA sense strand
gcucagccaguacgaagaa

SEQ ID NO: 932814 - RNA, 19 nt, Homo sapiens
  misc_RNA (1)...(19): siRNA sense strand
cagcagugguuacaaucga

SEQ ID NO: 932815 - RNA, 19 nt, Homo sapiens
  misc_RNA (1)...(19): siRNA sense strand
caccagagacuaagugauc

SEQ ID NO: 932816 - RNA, 19 nt, Homo sapiens
  misc_RNA (1)...(19): siRNA sense strand
cagugaagaugcucucuac

SEQ ID NO: 932817 - RNA, 19 nt, Homo sapiens
  misc_RNA (1)...(19): siRNA sense strand
accggaagaucuugcagua

SEQ ID NO: 932818 - RNA, 19 nt, Homo sapiens
  misc_RNA (1)...(19): siRNA sense strand
ccaaagugaagacugcaaa

SEQ ID NO: 932819 - RNA, 19 nt, Homo sapiens
  misc_RNA (1)...(19): siRNA sense strand
gaauguccagcaaaugaug

SEQ ID NO: 932820 - RNA, 19 nt, Homo sapiens
  misc_RNA (1)...(19): siRNA sense strand
ucaguucucgguuauuuau

SEQ ID NO: 932821 - RNA, 19 nt, Homo sapiens
  misc_RNA (1)...(19): siRNA sense strand
aagccacagucuauacaaa

SEQ ID NO: 932822 - RNA, 19 nt, Homo sapiens
  misc_RNA (1)...(19): siRNA sense strand
guuugccacuuauguguug

SEQ ID NO: 932823 - RNA, 19 nt, Homo sapiens
  misc_RNA (1)...(19): siRNA sense strand
gagagggaccggaagaucu

SEQ ID NO: 932824 - RNA, 19 nt, Homo sapiens
  misc_RNA (1)...(19): siRNA sense strand
gaauuuaugacauggaaac

SEQ ID NO: 932825 - RNA, 19 nt, Homo sapiens
  misc_RNA (1)...(19): siRNA sense strand
ccaaccgccuucccaaugg

SEQ ID NO: 932826 - RNA, 19 nt, Homo sapiens
  misc_RNA (1)...(19): siRNA sense strand
gaaaacacgaaacuuagaa

SEQ ID NO: 932827 - RNA, 19 nt, Homo sapiens
  misc_RNA (1)...(19): siRNA sense strand
cagaucggcucacaguucu

SEQ ID NO: 932828 - RNA, 19 nt, Homo sapiens
  misc_RNA (1)...(19): siRNA sense strand
caguaccagucuucaguga

SEQ ID NO: 932829 - RNA, 19 nt, Homo sapiens
  misc_RNA (1)...(19): siRNA sense strand
gugagugaauuuaugacau

SEQ ID NO: 932830 - RNA, 19 nt, Homo sapiens
  misc_RNA (1)...(19): siRNA sense strand
caauggccaugucaauuuu

SEQ ID NO: 932831 - RNA, 19 nt, Homo sapiens
  misc_RNA (1)...(19): siRNA sense strand
agugaagacugcaaaauuu

SEQ ID NO: 932832 - RNA, 19 nt, Homo sapiens
  misc_RNA (1)...(19): siRNA sense strand
acaccgagcaagaaugauu

SEQ ID NO: 932833 - RNA, 19 nt, Homo sapiens
  misc_RNA (1)...(19): siRNA sense strand
uguauuaccaugacaacaa

SEQ ID NO: 932834 - RNA, 19 nt, Homo sapiens
  misc_RNA (1)...(19): siRNA sense strand
gccaaccgccuucccaaug

SEQ ID NO: 932835 - RNA, 19 nt, Homo sapiens
  misc_RNA (1)...(19): siRNA sense strand
gguuuaaucgccucagcua

SEQ ID NO: 932836 - RNA, 19 nt, Homo sapiens
  misc_RNA (1)...(19): siRNA sense strand
agaaagaauguccagcaaa

SEQ ID NO: 932837 - RNA, 19 nt, Homo sapiens
  misc_RNA (1)...(19): siRNA sense strand
guauuaccaugacaacaac

SEQ ID NO: 932838 - RNA, 19 nt, Homo sapiens
  misc_RNA (1)...(19): siRNA sense strand
agauggaagucuuuaaggu

SEQ ID NO: 932839 - RNA, 19 nt, Homo sapiens
  misc_RNA (1)...(19): siRNA sense strand
ucauauagagaaagacaga

SEQ ID NO: 932840 - RNA, 19 nt, Homo sapiens
  misc_RNA (1)...(19): siRNA sense strand
aaucgaaaccucuaucagu

SEQ ID NO: 932841 - RNA, 19 nt, Homo sapiens
  misc_RNA (1)...(19): siRNA sense strand
gagaaaagauugugauacc

SEQ ID NO: 932842 - RNA, 19 nt, Homo sapiens
  misc_RNA (1)...(19): siRNA sense strand
gaaaguaguugucauucuu

SEQ ID NO: 932843 - RNA, 19 nt, Homo sapiens
  misc_RNA (1)...(19): siRNA sense strand
gaagagaauucgaguuuua

SEQ ID NO: 932844 - RNA, 19 nt, Homo sapiens
  misc_RNA (1)...(19): siRNA sense strand
guacaagccuuuaaagaag

SEQ ID NO: 932845 - RNA, 19 nt, Homo sapiens
  misc_RNA (1)...(19): siRNA sense strand
gcgaagaaaccaauacaua

SEQ ID NO: 932846 - RNA, 19 nt, Homo sapiens
  misc_RNA (1)...(19): siRNA sense strand
gaaaagaacagcaaucuaa

SEQ ID NO: 932847 - RNA, 19 nt, Homo sapiens
  misc_RNA (1)...(19): siRNA sense strand
gaaaagaagugaagagaau

SEQ ID NO: 932848 - RNA, 19 nt, Homo sapiens
  misc_RNA (1)...(19): siRNA sense strand
cgaagaaaccaauacauaa

SEQ ID NO: 932849 - RNA, 19 nt, Homo sapiens
  misc_RNA (1)...(19): siRNA sense strand
uaaagaagauacaggugaa

SEQ ID NO: 932850 - RNA, 19 nt, Homo sapiens
  misc_RNA (1)...(19): siRNA sense strand
ggaauugaaaccugacaua

SEQ ID NO: 932851 - RNA, 19 nt, Homo sapiens
  misc_RNA (1)...(19): siRNA sense strand
gauggaacauggaccuaaa

SEQ ID NO: 932852 - RNA, 19 nt, Homo sapiens
  misc_RNA (1)...(19): siRNA sense strand
gcuaaaagcugcuguacaa

SEQ ID NO: 932853 - RNA, 19 nt, Homo sapiens
  misc_RNA (1)...(19): siRNA sense strand
gaacucugaaccucaauaa

SEQ ID NO: 932854 - RNA, 19 nt, Homo sapiens
  misc_RNA (1)...(19): siRNA sense strand
uaacagugauggcggagaa

SEQ ID NO: 932855 - RNA, 19 nt, Homo sapiens
  misc_RNA (1)...(19): siRNA sense strand
gaugauagcacagaagaaa

SEQ ID NO: 932856 - RNA, 19 nt, Homo sapiens
  misc_RNA (1)...(19): siRNA sense strand
auugaaaccugacauagua

SEQ ID NO: 932857 - RNA, 19 nt, Homo sapiens
  misc_RNA (1)...(19): siRNA sense strand
ggugacgacuucuucauug

SEQ ID NO: 932858 - RNA, 19 nt, Homo sapiens
  misc_RNA (1)...(19): siRNA sense strand
gugaagaggagaaggaaua

SEQ ID NO: 932859 - RNA, 19 nt, Homo sapiens
  misc_RNA (1)...(19): siRNA sense strand
gugaagagaauucgaguuu

SEQ ID NO: 932860 - RNA, 19 nt, Homo sapiens
  misc_RNA (1)...(19): siRNA sense strand
ggaaaguaguugucauucu

SEQ ID NO: 932861 - RNA, 19 nt, Homo sapiens
  misc_RNA (1)...(19): siRNA sense strand
uacugaagaugcacuguua

SEQ ID NO: 932862 - RNA, 19 nt, Homo sapiens
  misc_RNA (1)...(19): siRNA sense strand
guaacuaaaucugcucuug

SEQ ID NO: 932863 - RNA, 19 nt, Homo sapiens
  misc_RNA (1)...(19): siRNA sense strand
gaaagaaggaaaguaguug

SEQ ID NO: 932864 - RNA, 19 nt, Homo sapiens
  misc_RNA (1)...(19): siRNA sense strand
guacagaaaccagaaaguu

SEQ ID NO: 932865 - RNA, 19 nt, Homo sapiens
  misc_RNA (1)...(19): siRNA sense strand
gaaaaggauucuguaguuu

SEQ ID NO: 932866 - RNA, 19 nt, Homo sapiens
  misc_RNA (1)...(19): siRNA sense strand
uacagaaaccagaaaguua

SEQ ID NO: 932867 - RNA, 19 nt, Homo sapiens
  misc_RNA (1)...(19): siRNA sense strand
ucaaagaacaggcuccaaa

SEQ ID NO: 932868 - RNA, 19 nt, Homo sapiens
  misc_RNA (1)...(19): siRNA sense strand
gaaggaaaguaguugucau

SEQ ID NO: 932869 - RNA, 19 nt, Homo sapiens
  misc_RNA (1)...(19): siRNA sense strand
aaacaagaucccuagauuu

SEQ ID NO: 932870 - RNA, 19 nt, Homo sapiens
  misc_RNA (1)...(19): siRNA sense strand
caucaaagaaugcuucaga

SEQ ID NO: 932871 - RNA, 19 nt, Homo sapiens
  misc_RNA (1)...(19): siRNA sense strand
ccagaaaguuagaaucagu

SEQ ID NO: 932872 - RNA, 19 nt, Homo sapiens
  misc_RNA (1)...(19): siRNA sense strand
aagaggagaaggaauauuu

SEQ ID NO: 932873 - RNA, 19 nt, Homo sapiens
  misc_RNA (1)...(19): siRNA sense strand
gaagcuaucaggaagacuu

SEQ ID NO: 932874 - RNA, 19 nt, Homo sapiens
  misc_RNA (1)...(19): siRNA sense strand
cgaaagaaggaaaguaguu

SEQ ID NO: 932875 - RNA, 19 nt, Homo sapiens
  misc_RNA (1)...(19): siRNA sense strand
uguacaagccuuuaaagaa

SEQ ID NO: 932876 - RNA, 19 nt, Homo sapiens
  misc_RNA (1)...(19): siRNA sense strand
caucaaagccuucagaaaa

SEQ ID NO: 932877 - RNA, 19 nt, Homo sapiens
  misc_RNA (1)...(19): siRNA sense strand
uaacgagguugugaagaug

SEQ ID NO: 932878 - RNA, 19 nt, Homo sapiens
  misc_RNA (1)...(19): siRNA sense strand
caagcagucuuccaugucu

SEQ ID NO: 932879 - RNA, 19 nt, Homo sapiens
  misc_RNA (1)...(19): siRNA sense strand
aaaacaagaucccuagauu

SEQ ID NO: 932880 - RNA, 19 nt, Homo sapiens
  misc_RNA (1)...(19): siRNA sense strand
gaaaccagaaaguuagaau

SEQ ID NO: 932881 - RNA, 19 nt, Homo sapiens
  misc_RNA (1)...(19): siRNA sense strand
ugauagcggugacgacuuc

SEQ ID NO: 932882 - RNA, 19 nt, Homo sapiens
  misc_RNA (1)...(19): siRNA sense strand
aaacuugucaggaguguug

SEQ ID NO: 932883 - RNA, 19 nt, Homo sapiens
  misc_RNA (1)...(19): siRNA sense strand
uaaaucugcucuuggugau

SEQ ID NO: 932884 - RNA, 19 nt, Homo sapiens
  misc_RNA (1)...(19): siRNA sense strand
gcaguacauccucuucuga

SEQ ID NO: 932885 - RNA, 19 nt, Homo sapiens
  misc_RNA (1)...(19): siRNA sense strand
auaacgagguugugaagau

SEQ ID NO: 932886 - RNA, 19 nt, Homo sapiens
  misc_RNA (1)...(19): siRNA sense strand
ggaacucugaaccucaaua

SEQ ID NO: 932887 - RNA, 19 nt, Homo sapiens
  misc_RNA (1)...(19): siRNA sense strand
aauaagaagcuaucaggaa

SEQ ID NO: 932888 - RNA, 19 nt, Homo sapiens
  misc_RNA (1)...(19): siRNA sense strand
gaauugaaaccugacauag

SEQ ID NO: 932889 - RNA, 19 nt, Homo sapiens
  misc_RNA (1)...(19): siRNA sense strand
uagcacagaagaaagguuu

SEQ ID NO: 932890 - RNA, 19 nt, Homo sapiens
  misc_RNA (1)...(19): siRNA sense strand
aaucugcucuuggugauga

SEQ ID NO: 932891 - RNA, 19 nt, Homo sapiens
  misc_RNA (1)...(19): siRNA sense strand
gcagugacuauugcaaauu

SEQ ID NO: 932892 - RNA, 19 nt, Homo sapiens
  misc_RNA (1)...(19): siRNA sense strand
cagugacuauugcaaauuc

SEQ ID NO: 932893 - RNA, 19 nt, Homo sapiens
  misc_RNA (1)...(19): siRNA sense strand
cuaaagcagugacuauugc

SEQ ID NO: 932894 - RNA, 19 nt, Homo sapiens
  misc_RNA (1)...(19): siRNA sense strand
ggauacaagaaaugacaaa

SEQ ID NO: 932895 - RNA, 19 nt, Homo sapiens
  misc_RNA (1)...(19): siRNA sense strand
guacugaagaugcacuguu

SEQ ID NO: 932896 - RNA, 19 nt, Homo sapiens
  misc_RNA (1)...(19): siRNA sense strand
gagaaggaauauuuugaug

SEQ ID NO: 932897 - RNA, 19 nt, Homo sapiens
  misc_RNA (1)...(19): siRNA sense strand
gaagaggagaaggaauauu

SEQ ID NO: 932898 - RNA, 19 nt, Homo sapiens
  misc_RNA (1)...(19): siRNA sense strand
gaccuaaagcagugacuau

SEQ ID NO: 932899 - RNA, 19 nt, Homo sapiens
  misc_RNA (1)...(19): siRNA sense strand
cagauucuacugcaacuga

SEQ ID NO: 932900 - RNA, 19 nt, Homo sapiens
  misc_RNA (1)...(19): siRNA sense strand
ggagaagaauuuugugaag

SEQ ID NO: 932901 - RNA, 19 nt, Homo sapiens
  misc_RNA (1)...(19): siRNA sense strand
gaagauacaggugaaacuc

SEQ ID NO: 932902 - RNA, 19 nt, Homo sapiens
  misc_RNA (1)...(19): siRNA sense strand
uacaagcagucuuccaugu

SEQ ID NO: 932903 - RNA, 19 nt, Homo sapiens
  misc_RNA (1)...(19): siRNA sense strand
auagcucacucucugguaa

SEQ ID NO: 932904 - RNA, 19 nt, Homo sapiens
  misc_RNA (1)...(19): siRNA sense strand
gcacagaagaaagguuuua

SEQ ID NO: 932905 - RNA, 19 nt, Homo sapiens
  misc_RNA (1)...(19): siRNA sense strand
gagaagaauuuugugaaga

SEQ ID NO: 932906 - RNA, 19 nt, Homo sapiens
  misc_RNA (1)...(19): siRNA sense strand
gcaacugaaagagcaauug

SEQ ID NO: 932907 - RNA, 19 nt, Homo sapiens
  misc_RNA (1)...(19): siRNA sense strand
gacaaaaucaagccaagua

SEQ ID NO: 932908 - RNA, 19 nt, Homo sapiens
  misc_RNA (1)...(19): siRNA sense strand
caaagauugcuugaagaaa

SEQ ID NO: 932909 - RNA, 19 nt, Homo sapiens
  misc_RNA (1)...(19): siRNA sense strand
ccuaaagcagugacuauug

SEQ ID NO: 932910 - RNA, 19 nt, Homo sapiens
  misc_RNA (1)...(19): siRNA sense strand
gacaaaauguugcugaagu

SEQ ID NO: 932911 - RNA, 19 nt, Homo sapiens
  misc_RNA (1)...(19): siRNA sense strand
aaagagcaauugccagacu

SEQ ID NO: 932912 - RNA, 19 nt, Homo sapiens
  misc_RNA (1)...(19): siRNA sense strand
gaagcaagacaaaauguug

SEQ ID NO: 932913 - RNA, 19 nt, Homo sapiens
  misc_RNA (1)...(19): siRNA sense strand
cagaucaagaaucaguuua

SEQ ID NO: 932914 - RNA, 19 nt, Homo sapiens
  misc_RNA (1)...(19): siRNA sense strand
ucagaucaagaaucaguuu

SEQ ID NO: 932915 - RNA, 19 nt, Homo sapiens
  misc_RNA (1)...(19): siRNA sense strand
aaagucagacggacacgaa

SEQ ID NO: 932916 - RNA, 19 nt, Homo sapiens
  misc_RNA (1)...(19): siRNA sense strand
ugauggcggagaagaauuu

SEQ ID NO: 932917 - RNA, 19 nt, Homo sapiens
  misc_RNA (1)...(19): siRNA sense strand
ggaccuaaagcagugacua

SEQ ID NO: 932918 - RNA, 19 nt, Homo sapiens
  misc_RNA (1)...(19): siRNA sense strand
cgggaacucugaaccucaa

SEQ ID NO: 932919 - RNA, 19 nt, Homo sapiens
  misc_RNA (1)...(19): siRNA sense strand
ccaaguacagaaaccagaa

SEQ ID NO: 932920 - RNA, 19 nt, Homo sapiens
  misc_RNA (1)...(19): siRNA sense strand
aaacaaaggaucugauagc

SEQ ID NO: 932921 - RNA, 19 nt, Homo sapiens
  misc_RNA (1)...(19): siRNA sense strand
agccucagaucaagaauca

SEQ ID NO: 932922 - RNA, 19 nt, Homo sapiens
  misc_RNA (1)...(19): siRNA sense strand
acagaaaccagaaaguuag

SEQ ID NO: 932923 - RNA, 19 nt, Homo sapiens
  misc_RNA (1)...(19): siRNA sense strand
aagagcaauugccagacua

SEQ ID NO: 932924 - RNA, 19 nt, Homo sapiens
  misc_RNA (1)...(19): siRNA sense strand
ucaauaacgagguugugaa

SEQ ID NO: 932925 - RNA, 19 nt, Homo sapiens
  misc_RNA (1)...(19): siRNA sense strand
gaaaguuagaaucaguguu

SEQ ID NO: 932926 - RNA, 19 nt, Homo sapiens
  misc_RNA (1)...(19): siRNA sense strand
caaguacagaaaccagaaa

SEQ ID NO: 932927 - RNA, 19 nt, Homo sapiens
  misc_RNA (1)...(19): siRNA sense strand
aguugucauucuucaguua

SEQ ID NO: 932928 - RNA, 19 nt, Homo sapiens
  misc_RNA (1)...(19): siRNA sense strand
guaguugucauucuucagu

SEQ ID NO: 932929 - RNA, 19 nt, Homo sapiens
  misc_RNA (1)...(19): siRNA sense strand
ggacacgaaagaaggaaag

SEQ ID NO: 932930 - RNA, 19 nt, Homo sapiens
  misc_RNA (1)...(19): siRNA sense strand
gauagcucacucucuggua

SEQ ID NO: 932931 - RNA, 19 nt, Homo sapiens
  misc_RNA (1)...(19): siRNA sense strand
aaauguugcugaaguugag

SEQ ID NO: 932932 - RNA, 19 nt, Homo sapiens
  misc_RNA (1)...(19): siRNA sense strand
aaggaaaguaguugucauu

SEQ ID NO: 932933 - RNA, 19 nt, Homo sapiens
  misc_RNA (1)...(19): siRNA sense strand
aaaggguacugaagaugca

SEQ ID NO: 932934 - RNA, 19 nt, Homo sapiens
  misc_RNA (1)...(19): siRNA sense strand
cuucagaggacaaucauuc

SEQ ID NO: 932935 - RNA, 19 nt, Homo sapiens
  misc_RNA (1)...(19): siRNA sense strand
caauaacgagguugugaag

SEQ ID NO: 932936 - RNA, 19 nt, Homo sapiens
  misc_RNA (1)...(19): siRNA sense strand
caggaagacuugaaaauac

SEQ ID NO: 932937 - RNA, 19 nt, Homo sapiens
  misc_RNA (1)...(19): siRNA sense strand
ucaggaagacuugaaaaua

SEQ ID NO: 932938 - RNA, 19 nt, Homo sapiens
  misc_RNA (1)...(19): siRNA sense strand
ccaucaaagccuucagaaa

SEQ ID NO: 932939 - RNA, 19 nt, Homo sapiens
  misc_RNA (1)...(19): siRNA sense strand
uauugcaaauucuccauca

SEQ ID NO: 932940 - RNA, 19 nt, Homo sapiens
  misc_RNA (1)...(19): siRNA sense strand
cugaagaugcacuguuaaa

SEQ ID NO: 932941 - RNA, 19 nt, Homo sapiens
  misc_RNA (1)...(19): siRNA sense strand
aaccagaaaguuagaauca

SEQ ID NO: 932942 - RNA, 19 nt, Homo sapiens
  misc_RNA (1)...(19): siRNA sense strand
ggaaacaucugugguuguc

SEQ ID NO: 932943 - RNA, 19 nt, Homo sapiens
  misc_RNA (1)...(19): siRNA sense strand
gaccagcagucuugucuuc

SEQ ID NO: 932944 - RNA, 19 nt, Homo sapiens
  misc_RNA (1)...(19): siRNA sense strand
ggagucagaccuucaaugu

SEQ ID NO: 932945 - RNA, 19 nt, Homo sapiens
  misc_RNA (1)...(19): siRNA sense strand
ccagauagcagacguguuc

SEQ ID NO: 932946 - RNA, 19 nt, Homo sapiens
  misc_RNA (1)...(19): siRNA sense strand
gugccugccuccagaguuu

SEQ ID NO: 932947 - RNA, 19 nt, Homo sapiens
  misc_RNA (1)...(19): siRNA sense strand
gauagcagacguguucgua

SEQ ID NO: 932948 - RNA, 19 nt, Homo sapiens
  misc_RNA (1)...(19): siRNA sense strand
gagaaaagcugaggaagca

SEQ ID NO: 932949 - RNA, 19 nt, Homo sapiens
  misc_RNA (1)...(19): siRNA sense strand
uagcagggcugggcucaga

SEQ ID NO: 932950 - RNA, 19 nt, Homo sapiens
  misc_RNA (1)...(19): siRNA sense strand
cauccagaaucuccucuug

SEQ ID NO: 932951 - RNA, 19 nt, Homo sapiens
  misc_RNA (1)...(19): siRNA sense strand
ggaguucccgugccaccua

SEQ ID NO: 932952 - RNA, 19 nt, Homo sapiens
  misc_RNA (1)...(19): siRNA sense strand
ggaagcaggcggagaagag

SEQ ID NO: 932953 - RNA, 19 nt, Homo sapiens
  misc_RNA (1)...(19): siRNA sense strand
aaauggagauccgcugguu

SEQ ID NO: 932954 - RNA, 19 nt, Homo sapiens
  misc_RNA (1)...(19): siRNA sense strand
ugaggaagcaggcggagaa

SEQ ID NO: 932955 - RNA, 19 nt, Homo sapiens
  misc_RNA (1)...(19): siRNA sense strand
cagcggagaagccgagaaa

SEQ ID NO: 932956 - RNA, 19 nt, Homo sapiens
  misc_RNA (1)...(19): siRNA sense strand
gaagcaggcggagaagaga

SEQ ID NO: 932957 - RNA, 19 nt, Homo sapiens
  misc_RNA (1)...(19): siRNA sense strand
gcgaagcucucugggaacu

SEQ ID NO: 932958 - RNA, 19 nt, Homo sapiens
  misc_RNA (1)...(19): siRNA sense strand
ggugcuaggcccugaguau

SEQ ID NO: 932959 - RNA, 19 nt, Homo sapiens
  misc_RNA (1)...(19): siRNA sense strand
caaggacgacaucgccuau

SEQ ID NO: 932960 - RNA, 19 nt, Homo sapiens
  misc_RNA (1)...(19): siRNA sense strand
cgggagcccucagcaaugu

SEQ ID NO: 932961 - RNA, 19 nt, Homo sapiens
  misc_RNA (1)...(19): siRNA sense strand
uccagaaucuccucuugag

SEQ ID NO: 932962 - RNA, 19 nt, Homo sapiens
  misc_RNA (1)...(19): siRNA sense strand
agaguuggugguccagaua

SEQ ID NO: 932963 - RNA, 19 nt, Homo sapiens
  misc_RNA (1)...(19): siRNA sense strand
gaguucccgugccaccuau

SEQ ID NO: 932964 - RNA, 19 nt, Homo sapiens
  misc_RNA (1)...(19): siRNA sense strand
gaccuguucagucuggaaa

SEQ ID NO: 932965 - RNA, 19 nt, Homo sapiens
  misc_RNA (1)...(19): siRNA sense strand
acccucaccucucccuuga

SEQ ID NO: 932966 - RNA, 19 nt, Homo sapiens
  misc_RNA (1)...(19): siRNA sense strand
gagccagaagaaagaguug

SEQ ID NO: 932967 - RNA, 19 nt, Homo sapiens
  misc_RNA (1)...(19): siRNA sense strand
ggaccuguucagucuggaa

SEQ ID NO: 932968 - RNA, 19 nt, Homo sapiens
  misc_RNA (1)...(19): siRNA sense strand
ccucugacaagggcacaua

SEQ ID NO: 932969 - RNA, 19 nt, Homo sapiens
  misc_RNA (1)...(19): siRNA sense strand
aagaguuggugguccagau

SEQ ID NO: 932970 - RNA, 19 nt, Homo sapiens
  misc_RNA (1)...(19): siRNA sense strand
gcaauguguccgucuccau

SEQ ID NO: 932971 - RNA, 19 nt, Homo sapiens
  misc_RNA (1)...(19): siRNA sense strand
caaggaaggaggcauucag

SEQ ID NO: 932972 - RNA, 19 nt, Homo sapiens
  misc_RNA (1)...(19): siRNA sense strand
gagcaaaccucgaauuuaa

SEQ ID NO: 932973 - RNA, 19 nt, Homo sapiens
  misc_RNA (1)...(19): siRNA sense strand
gaacaagccuuccgcauca

SEQ ID NO: 932974 - RNA, 19 nt, Homo sapiens
  misc_RNA (1)...(19): siRNA sense strand
cuacagaucuaguugaaua

SEQ ID NO: 932975 - RNA, 19 nt, Homo sapiens
  misc_RNA (1)...(19): siRNA sense strand
gaaauuacagcgcaagaua

SEQ ID NO: 932976 - RNA, 19 nt, Homo sapiens
  misc_RNA (1)...(19): siRNA sense strand
caaguaaucuguacgaaga

SEQ ID NO: 932977 - RNA, 19 nt, Homo sapiens
  misc_RNA (1)...(19): siRNA sense strand
caagcaaaguagagaauuu

SEQ ID NO: 932978 - RNA, 19 nt, Homo sapiens
  misc_RNA (1)...(19): siRNA sense strand
acgaagaaguugagaauaa

SEQ ID NO: 932979 - RNA, 19 nt, Homo sapiens
  misc_RNA (1)...(19): siRNA sense strand
gaacuaacuuugcaguaca

SEQ ID NO: 932980 - RNA, 19 nt, Homo sapiens
  misc_RNA (1)...(19): siRNA sense strand
gaagcuuucuggagacauu

SEQ ID NO: 932981 - RNA, 19 nt, Homo sapiens
  misc_RNA (1)...(19): siRNA sense strand
caagagcaccggcaaauug

SEQ ID NO: 932982 - RNA, 19 nt, Homo sapiens
  misc_RNA (1)...(19): siRNA sense strand
caagaauucuacagaucua

SEQ ID NO: 932983 - RNA, 19 nt, Homo sapiens
  misc_RNA (1)...(19): siRNA sense strand
uaccauagcuuuccuucuu

SEQ ID NO: 932984 - RNA, 19 nt, Homo sapiens
  misc_RNA (1)...(19): siRNA sense strand
ccagagaggucagcuagaa

SEQ ID NO: 932985 - RNA, 19 nt, Homo sapiens
  misc_RNA (1)...(19): siRNA sense strand
ugagaaagccauucaagaa

SEQ ID NO: 932986 - RNA, 19 nt, Homo sapiens
  misc_RNA (1)...(19): siRNA sense strand
ggaacuaacuuugcaguac

SEQ ID NO: 932987 - RNA, 19 nt, Homo sapiens
  misc_RNA (1)...(19): siRNA sense strand
ggaaacacaacuaaguaaa

SEQ ID NO: 932988 - RNA, 19 nt, Homo sapiens
  misc_RNA (1)...(19): siRNA sense strand
uagagacaaugcagaauga

SEQ ID NO: 932989 - RNA, 19 nt, Homo sapiens
  misc_RNA (1)...(19): siRNA sense strand
acagaaagaccuaaagaaa

SEQ ID NO: 932990 - RNA, 19 nt, Homo sapiens
  misc_RNA (1)...(19): siRNA sense strand
agacaaugcagaaugaaua

SEQ ID NO: 932991 - RNA, 19 nt, Homo sapiens
  misc_RNA (1)...(19): siRNA sense strand
ggaacuccaggaaguauaa

SEQ ID NO: 932992 - RNA, 19 nt, Homo sapiens
  misc_RNA (1)...(19): siRNA sense strand
cgaagaaguugagaauaau

SEQ ID NO: 932993 - RNA, 19 nt, Homo sapiens
  misc_RNA (1)...(19): siRNA sense strand
gaaacaggaaacacaacua

SEQ ID NO: 932994 - RNA, 19 nt, Homo sapiens
  misc_RNA (1)...(19): siRNA sense strand
ugaugcagcucuuaggaaa

SEQ ID NO: 932995 - RNA, 19 nt, Homo sapiens
  misc_RNA (1)...(19): siRNA sense strand
gaaacacaacuaaguaaag

SEQ ID NO: 932996 - RNA, 19 nt, Homo sapiens
  misc_RNA (1)...(19): siRNA sense strand
aaacaggaaacacaacuaa

SEQ ID NO: 932997 - RNA, 19 nt, Homo sapiens
  misc_RNA (1)...(19): siRNA sense strand
guacagaaagaccuaaaga

SEQ ID NO: 932998 - RNA, 19 nt, Homo sapiens
  misc_RNA (1)...(19): siRNA sense strand
gcagaaugaauaucaauca

SEQ ID NO: 932999 - RNA, 19 nt, Homo sapiens
  misc_RNA (1)...(19): siRNA sense strand
guacgaagaaguugagaau

SEQ ID NO: 933000 - RNA, 19 nt, Homo sapiens
  misc_RNA (1)...(19): siRNA sense strand
caaccaagaauucuacaga

SEQ ID NO: 933001 - RNA, 19 nt, Homo sapiens
  misc_RNA (1)...(19): siRNA sense strand
caaauaagagcucgagauc

SEQ ID NO: 933002 - RNA, 19 nt, Homo sapiens
  misc_RNA (1)...(19): siRNA sense strand
caaccaggcgcguaccaua

SEQ ID NO: 933003 - RNA, 19 nt, Homo sapiens
  misc_RNA (1)...(19): siRNA sense strand
cagaaagaccuaaagaaau

SEQ ID NO: 933004 - RNA, 19 nt, Homo sapiens
  misc_RNA (1)...(19): siRNA sense strand
aauaagagcucgagaucag

SEQ ID NO: 933005 - RNA, 19 nt, Homo sapiens
  misc_RNA (1)...(19): siRNA sense strand
caggaaacacaacuaagua

SEQ ID NO: 933006 - RNA, 19 nt, Homo sapiens
  misc_RNA (1)...(19): siRNA sense strand
gaaaugaaccuuuuggaau

SEQ ID NO: 933007 - RNA, 19 nt, Homo sapiens
  misc_RNA (1)...(19): siRNA sense strand
caucaaacaccuacaagga

SEQ ID NO: 933008 - RNA, 19 nt, Homo sapiens
  misc_RNA (1)...(19): siRNA sense strand
cagaugugauucaagcauu

SEQ ID NO: 933009 - RNA, 19 nt, Homo sapiens
  misc_RNA (1)...(19): siRNA sense strand
aggaaucgcucgccaggaa

SEQ ID NO: 933010 - RNA, 19 nt, Homo sapiens
  misc_RNA (1)...(19): siRNA sense strand
ugagcaaaccucgaauuua

SEQ ID NO: 933011 - RNA, 19 nt, Homo sapiens
  misc_RNA (1)...(19): siRNA sense strand
cuggagacauucacuuauu

SEQ ID NO: 933012 - RNA, 19 nt, Homo sapiens
  misc_RNA (1)...(19): siRNA sense strand
gaggaagaguagccagaug

SEQ ID NO: 933013 - RNA, 19 nt, Homo sapiens
  misc_RNA (1)...(19): siRNA sense strand
acaaggaguuggagaucuu

SEQ ID NO: 933014 - RNA, 19 nt, Homo sapiens
  misc_RNA (1)...(19): siRNA sense strand
gcaagagcaccggcaaauu

SEQ ID NO: 933015 - RNA, 19 nt, Homo sapiens
  misc_RNA (1)...(19): siRNA sense strand
gcucagacaauaaccaaga

SEQ ID NO: 933016 - RNA, 19 nt, Homo sapiens
  misc_RNA (1)...(19): siRNA sense strand
gcaaauugagaaagccauu

SEQ ID NO: 933017 - RNA, 19 nt, Homo sapiens
  misc_RNA (1)...(19): siRNA sense strand
gauuaucgccacgaaauga

SEQ ID NO: 933018 - RNA, 19 nt, Homo sapiens
  misc_RNA (1)...(19): siRNA sense strand
gcaaaccucgaauuuaaag

SEQ ID NO: 933019 - RNA, 19 nt, Homo sapiens
  misc_RNA (1)...(19): siRNA sense strand
gaaggugaugcagcucuua

SEQ ID NO: 933020 - RNA, 19 nt, Homo sapiens
  misc_RNA (1)...(19): siRNA sense strand
gauaaacaucaaacaccua

SEQ ID NO: 933021 - RNA, 19 nt, Homo sapiens
  misc_RNA (1)...(19): siRNA sense strand
gcagaucuggggugaauua

SEQ ID NO: 933022 - RNA, 19 nt, Homo sapiens
  misc_RNA (1)...(19): siRNA sense strand
gggauuaucgccacgaaau

SEQ ID NO: 933023 - RNA, 19 nt, Homo sapiens
  misc_RNA (1)...(19): siRNA sense strand
uaaaguacagaaagaccua

SEQ ID NO: 933024 - RNA, 19 nt, Homo sapiens
  misc_RNA (1)...(19): siRNA sense strand
caaagauggauuuagagaa

SEQ ID NO: 933025 - RNA, 19 nt, Homo sapiens
  misc_RNA (1)...(19): siRNA sense strand
gcagaggaacagccaguug

SEQ ID NO: 933026 - RNA, 19 nt, Homo sapiens
  misc_RNA (1)...(19): siRNA sense strand
gaagaguagccagauguga

SEQ ID NO: 933027 - RNA, 19 nt, Homo sapiens
  misc_RNA (1)...(19): siRNA sense strand
aaagauggaacaaauggaa

SEQ ID NO: 933028 - RNA, 19 nt, Homo sapiens
  misc_RNA (1)...(19): siRNA sense strand
ccauagcuuuccuucuuga

SEQ ID NO: 933029 - RNA, 19 nt, Homo sapiens
  misc_RNA (1)...(19): siRNA sense strand
caaugcagaaugaauauca

SEQ ID NO: 933030 - RNA, 19 nt, Homo sapiens
  misc_RNA (1)...(19): siRNA sense strand
aaacaucaaacaccuacaa

SEQ ID NO: 933031 - RNA, 19 nt, Homo sapiens
  misc_RNA (1)...(19): siRNA sense strand
gacaaugcagaaugaauau

SEQ ID NO: 933032 - RNA, 19 nt, Homo sapiens
  misc_RNA (1)...(19): siRNA sense strand
cuuccuggcucagacaaua

SEQ ID NO: 933033 - RNA, 19 nt, Homo sapiens
  misc_RNA (1)...(19): siRNA sense strand
ccaaauaagagcucgagau

SEQ ID NO: 933034 - RNA, 19 nt, Homo sapiens
  misc_RNA (1)...(19): siRNA sense strand
gaccaccugggccauauaa

SEQ ID NO: 933035 - RNA, 19 nt, Homo sapiens
  misc_RNA (1)...(19): siRNA sense strand
gcaguacacgagauaaaca

SEQ ID NO: 933036 - RNA, 19 nt, Homo sapiens
  misc_RNA (1)...(19): siRNA sense strand
ucagcucccuccaacaaau

SEQ ID NO: 933037 - RNA, 19 nt, Homo sapiens
  misc_RNA (1)...(19): siRNA sense strand
ccaccugggccauauaaau

SEQ ID NO: 933038 - RNA, 19 nt, Homo sapiens
  misc_RNA (1)...(19): siRNA sense strand
ggagacauucacuuauuca

SEQ ID NO: 933039 - RNA, 19 nt, Homo sapiens
  misc_RNA (1)...(19): siRNA sense strand
gaauucuacagaucuaguu

SEQ ID NO: 933040 - RNA, 19 nt, Homo sapiens
  misc_RNA (1)...(19): siRNA sense strand
cagaggaacagccaguuga

SEQ ID NO: 933041 - RNA, 19 nt, Homo sapiens
  misc_RNA (1)...(19): siRNA sense strand
uugaauauguugacaagag

SEQ ID NO: 933042 - RNA, 19 nt, Homo sapiens
  misc_RNA (1)...(19): siRNA sense strand
gagcaccggcaaauugaga

SEQ ID NO: 933043 - RNA, 19 nt, Homo sapiens
  misc_RNA (1)...(19): siRNA sense strand
uagcuuuccuucuugaaca

SEQ ID NO: 933044 - RNA, 19 nt, Homo sapiens
  misc_RNA (1)...(19): siRNA sense strand
cagaucuaguugaauaugu

SEQ ID NO: 933045 - RNA, 19 nt, Homo sapiens
  misc_RNA (1)...(19): siRNA sense strand
ugaauauguugacaagagu

SEQ ID NO: 933046 - RNA, 19 nt, Homo sapiens
  misc_RNA (1)...(19): siRNA sense strand
ggccacaggaacuaacuuu

SEQ ID NO: 933047 - RNA, 19 nt, Homo sapiens
  misc_RNA (1)...(19): siRNA sense strand
uaacacacagaaacaggaa

SEQ ID NO: 933048 - RNA, 19 nt, Homo sapiens
  misc_RNA (1)...(19): siRNA sense strand
guucugagcaaaccucgaa

SEQ ID NO: 933049 - RNA, 19 nt, Homo sapiens
  misc_RNA (1)...(19): siRNA sense strand
gccaaaaugucaaccaaga

SEQ ID NO: 933050 - RNA, 19 nt, Homo sapiens
  misc_RNA (1)...(19): siRNA sense strand
guacacgagauaaacauca

SEQ ID NO: 933051 - RNA, 19 nt, Homo sapiens
  misc_RNA (1)...(19): siRNA sense strand
cacaggaacuaacuuugca

SEQ ID NO: 933052 - RNA, 19 nt, Homo sapiens
  misc_RNA (1)...(19): siRNA sense strand
aaacucagccaaaauauug

SEQ ID NO: 933053 - RNA, 19 nt, Homo sapiens
  misc_RNA (1)...(19): siRNA sense strand
acaaagauggauuuagaga

SEQ ID NO: 933054 - RNA, 19 nt, Homo sapiens
  misc_RNA (1)...(19): siRNA sense strand
gagacaaugcagaaugaau

SEQ ID NO: 933055 - RNA, 19 nt, Homo sapiens
  misc_RNA (1)...(19): siRNA sense strand
uggagacauucacuuauuc

SEQ ID NO: 933056 - RNA, 19 nt, Homo sapiens
  misc_RNA (1)...(19): siRNA sense strand
ggaagaguagccagaugug

SEQ ID NO: 933057 - RNA, 19 nt, Homo sapiens
  misc_RNA (1)...(19): siRNA sense strand
guagccagaugugauucaa

SEQ ID NO: 933058 - RNA, 19 nt, Homo sapiens
  misc_RNA (1)...(19): siRNA sense strand
caccugggccauauaaaug

SEQ ID NO: 933059 - RNA, 19 nt, Homo sapiens
  misc_RNA (1)...(19): siRNA sense strand
ggacccauggcuuucgaaa

SEQ ID NO: 933060 - RNA, 19 nt, Homo sapiens
  misc_RNA (1)...(19): siRNA sense strand
ccaagaauucuacagaucu

SEQ ID NO: 933061 - RNA, 19 nt, Homo sapiens
  misc_RNA (1)...(19): siRNA sense strand
ugaaggugaugcagcucuu

SEQ ID NO: 933062 - RNA, 19 nt, Homo sapiens
  misc_RNA (1)...(19): siRNA sense strand
gaucuaguugaauauguug

SEQ ID NO: 933063 - RNA, 19 nt, Homo sapiens
  misc_RNA (1)...(19): siRNA sense strand
cagcucccuccaacaaaua

SEQ ID NO: 933064 - RNA, 19 nt, Homo sapiens
  misc_RNA (1)...(19): siRNA sense strand
guaaaguaaagcauaugga

SEQ ID NO: 933065 - RNA, 19 nt, Homo sapiens
  misc_RNA (1)...(19): siRNA sense strand
gcaccggcaaauugagaaa

SEQ ID NO: 933066 - RNA, 19 nt, Homo sapiens
  misc_RNA (1)...(19): siRNA sense strand
gaucuggggugaauuagag

SEQ ID NO: 933067 - RNA, 19 nt, Homo sapiens
  misc_RNA (1)...(19): siRNA sense strand
aaccaagaauucuacagau

SEQ ID NO: 933068 - RNA, 19 nt, Homo sapiens
  misc_RNA (1)...(19): siRNA sense strand
acaggaaacacaacuaagu

SEQ ID NO: 933069 - RNA, 19 nt, Homo sapiens
  misc_RNA (1)...(19): siRNA sense strand
gcaaaguagagaauuucau

SEQ ID NO: 933070 - RNA, 19 nt, Homo sapiens
  misc_RNA (1)...(19): siRNA sense strand
uaaaugaaugucugaaggu

SEQ ID NO: 933071 - RNA, 19 nt, Homo sapiens
  misc_RNA (1)...(19): siRNA sense strand
cugagcaaaccucgaauuu

SEQ ID NO: 933072 - RNA, 19 nt, Homo sapiens
  misc_RNA (1)...(19): siRNA sense strand
gaaaugugcuucccaguua

SEQ ID NO: 933073 - RNA, 19 nt, Homo sapiens
  misc_RNA (1)...(19): siRNA sense strand
gaagagaagacaacuaaua

SEQ ID NO: 933074 - RNA, 19 nt, Homo sapiens
  misc_RNA (1)...(19): siRNA sense strand
gagcagagguugauauaug

SEQ ID NO: 933075 - RNA, 19 nt, Homo sapiens
  misc_RNA (1)...(19): siRNA sense strand
gaaagaacaggaagaauuu

SEQ ID NO: 933076 - RNA, 19 nt, Homo sapiens
  misc_RNA (1)...(19): siRNA sense strand
uaaagaaacuucagcauca

SEQ ID NO: 933077 - RNA, 19 nt, Homo sapiens
  misc_RNA (1)...(19): siRNA sense strand
cagaagagguacuagauuu

SEQ ID NO: 933078 - RNA, 19 nt, Homo sapiens
  misc_RNA (1)...(19): siRNA sense strand
gaacaaagaaagaaacaga

SEQ ID NO: 933079 - RNA, 19 nt, Homo sapiens
  misc_RNA (1)...(19): siRNA sense strand
caaaguuccuguagacaaa

SEQ ID NO: 933080 - RNA, 19 nt, Homo sapiens
  misc_RNA (1)...(19): siRNA sense strand
gaagacaacuaauaaugag

SEQ ID NO: 933081 - RNA, 19 nt, Homo sapiens
  misc_RNA (1)...(19): siRNA sense strand
gagaaaugauggaagaaau

SEQ ID NO: 933082 - RNA, 19 nt, Homo sapiens
  misc_RNA (1)...(19): siRNA sense strand
gaaacuucagcaucaauua

SEQ ID NO: 933083 - RNA, 19 nt, Homo sapiens
  misc_RNA (1)...(19): siRNA sense strand
gaagaaagaacaggaagaa

SEQ ID NO: 933084 - RNA, 19 nt, Homo sapiens
  misc_RNA (1)...(19): siRNA sense strand
aaacagaaauuggcaguug

SEQ ID NO: 933085 - RNA, 19 nt, Homo sapiens
  misc_RNA (1)...(19): siRNA sense strand
ucagagaaaugauggaaga

SEQ ID NO: 933086 - RNA, 19 nt, Homo sapiens
  misc_RNA (1)...(19): siRNA sense strand
gagaagacaacuaauaaug

SEQ ID NO: 933087 - RNA, 19 nt, Homo sapiens
  misc_RNA (1)...(19): siRNA sense strand
guugauauaugaagagcua

SEQ ID NO: 933088 - RNA, 19 nt, Homo sapiens
  misc_RNA (1)...(19): siRNA sense strand
aaagggaagccaacauuua

SEQ ID NO: 933089 - RNA, 19 nt, Homo sapiens
  misc_RNA (1)...(19): siRNA sense strand
gaacgccagcgccaguuua

SEQ ID NO: 933090 - RNA, 19 nt, Homo sapiens
  misc_RNA (1)...(19): siRNA sense strand
gaaaugauggaagaaauug

SEQ ID NO: 933091 - RNA, 19 nt, Homo sapiens
  misc_RNA (1)...(19): siRNA sense strand
caacauuuauggaagaagu

SEQ ID NO: 933092 - RNA, 19 nt, Homo sapiens
  misc_RNA (1)...(19): siRNA sense strand
agaaagaacaggaagaauu

SEQ ID NO: 933093 - RNA, 19 nt, Homo sapiens
  misc_RNA (1)...(19): siRNA sense strand
gaagagcagagguugauau

SEQ ID NO: 933094 - RNA, 19 nt, Homo sapiens
  misc_RNA (1)...(19): siRNA sense strand
gcaaaguuccuguagacaa

SEQ ID NO: 933095 - RNA, 19 nt, Homo sapiens
  misc_RNA (1)...(19): siRNA sense strand
caaggugccugggaugauu

SEQ ID NO: 933096 - RNA, 19 nt, Homo sapiens
  misc_RNA (1)...(19): siRNA sense strand
gagaagcucagagaaauga

SEQ ID NO: 933097 - RNA, 19 nt, Homo sapiens
  misc_RNA (1)...(19): siRNA sense strand
gaaauuggcaguugaagcu

SEQ ID NO: 933098 - RNA, 19 nt, Homo sapiens
  misc_RNA (1)...(19): siRNA sense strand
aagaagagaagacaacuaa

SEQ ID NO: 933099 - RNA, 19 nt, Homo sapiens
  misc_RNA (1)...(19): siRNA sense strand
gacaaaguaacaccaagua

SEQ ID NO: 933100 - RNA, 19 nt, Homo sapiens
  misc_RNA (1)...(19): siRNA sense strand
caagcaaaguuccuguaga

SEQ ID NO: 933101 - RNA, 19 nt, Homo sapiens
  misc_RNA (1)...(19): siRNA sense strand
aaagaagacuggcaaaauu

SEQ ID NO: 933102 - RNA, 19 nt, Homo sapiens
  misc_RNA (1)...(19): siRNA sense strand
gaagccaacauuuauggaa

SEQ ID NO: 933103 - RNA, 19 nt, Homo sapiens
  misc_RNA (1)...(19): siRNA sense strand
gaagagcuaauuaaagaag

SEQ ID NO: 933104 - RNA, 19 nt, Homo sapiens
  misc_RNA (1)...(19): siRNA sense strand
ugaguugagugccauauca

SEQ ID NO: 933105 - RNA, 19 nt, Homo sapiens
  misc_RNA (1)...(19): siRNA sense strand
gaagaagaagagaaagaga

SEQ ID NO: 933106 - RNA, 19 nt, Homo sapiens
  misc_RNA (1)...(19): siRNA sense strand
uaaagggaagccaacauuu

SEQ ID NO: 933107 - RNA, 19 nt, Homo sapiens
  misc_RNA (1)...(19): siRNA sense strand
ggugagaaacaaacauaaa

SEQ ID NO: 933108 - RNA, 19 nt, Homo sapiens
  misc_RNA (1)...(19): siRNA sense strand
acacaugggcuuuggguaa

SEQ ID NO: 933109 - RNA, 19 nt, Homo sapiens
  misc_RNA (1)...(19): siRNA sense strand
gauaaacacagucauuucu

SEQ ID NO: 933110 - RNA, 19 nt, Homo sapiens
  misc_RNA (1)...(19): siRNA sense strand
aagagucaauucagauuug

SEQ ID NO: 933111 - RNA, 19 nt, Homo sapiens
  misc_RNA (1)...(19): siRNA sense strand
gcagaagaaagaacaggaa

SEQ ID NO: 933112 - RNA, 19 nt, Homo sapiens
  misc_RNA (1)...(19): siRNA sense strand
ucagagcaaucucaagcaa

SEQ ID NO: 933113 - RNA, 19 nt, Homo sapiens
  misc_RNA (1)...(19): siRNA sense strand
uaaacacagucauuucuac

SEQ ID NO: 933114 - RNA, 19 nt, Homo sapiens
  misc_RNA (1)...(19): siRNA sense strand
ggaagaaacagaaaaguau

SEQ ID NO: 933115 - RNA, 19 nt, Homo sapiens
  misc_RNA (1)...(19): siRNA sense strand
ugagugccauaucaagaaa

SEQ ID NO: 933116 - RNA, 19 nt, Homo sapiens
  misc_RNA (1)...(19): siRNA sense strand
gaaaacagaaagagcaaaa

SEQ ID NO: 933117 - RNA, 19 nt, Homo sapiens
  misc_RNA (1)...(19): siRNA sense strand
aaaugcugcugauggaauu

SEQ ID NO: 933118 - RNA, 19 nt, Homo sapiens
  misc_RNA (1)...(19): siRNA sense strand
gacaaggaauacagagaag

SEQ ID NO: 933119 - RNA, 19 nt, Homo sapiens
  misc_RNA (1)...(19): siRNA sense strand
gaucaccagaacuuuguaa

SEQ ID NO: 933120 - RNA, 19 nt, Homo sapiens
  misc_RNA (1)...(19): siRNA sense strand
aaaguuauacccagcagaa

SEQ ID NO: 933121 - RNA, 19 nt, Homo sapiens
  misc_RNA (1)...(19): siRNA sense strand
agaagaagagaaagagaaa

SEQ ID NO: 933122 - RNA, 19 nt, Homo sapiens
  misc_RNA (1)...(19): siRNA sense strand
ugaaaugugcuucccaguu

SEQ ID NO: 933123 - RNA, 19 nt, Homo sapiens
  misc_RNA (1)...(19): siRNA sense strand
gaaaugucaaugaaaugug

SEQ ID NO: 933124 - RNA, 19 nt, Homo sapiens
  misc_RNA (1)...(19): siRNA sense strand
aaagaaacuucagcaucaa

SEQ ID NO: 933125 - RNA, 19 nt, Homo sapiens
  misc_RNA (1)...(19): siRNA sense strand
aaaggaagaugaaaaguca

SEQ ID NO: 933126 - RNA, 19 nt, Homo sapiens
  misc_RNA (1)...(19): siRNA sense strand
cagaaacagagaaagcuuu

SEQ ID NO: 933127 - RNA, 19 nt, Homo sapiens
  misc_RNA (1)...(19): siRNA sense strand
agacaaggaauacagagaa

SEQ ID NO: 933128 - RNA, 19 nt, Homo sapiens
  misc_RNA (1)...(19): siRNA sense strand
agagcaaucucaagcaaag

SEQ ID NO: 933129 - RNA, 19 nt, Homo sapiens
  misc_RNA (1)...(19): siRNA sense strand
ccagaagagguacuagauu

SEQ ID NO: 933130 - RNA, 19 nt, Homo sapiens
  misc_RNA (1)...(19): siRNA sense strand
aaagaggaacaaagaaaga

SEQ ID NO: 933131 - RNA, 19 nt, Homo sapiens
  misc_RNA (1)...(19): siRNA sense strand
aagagcagagguugauaua

SEQ ID NO: 933132 - RNA, 19 nt, Homo sapiens
  misc_RNA (1)...(19): siRNA sense strand
aaaugugcuucccaguuaa

SEQ ID NO: 933133 - RNA, 19 nt, Homo sapiens
  misc_RNA (1)...(19): siRNA sense strand
gcaguugaagcuuggaaga

SEQ ID NO: 933134 - RNA, 19 nt, Homo sapiens
  misc_RNA (1)...(19): siRNA sense strand
aagcaaaguuccuguagac

SEQ ID NO: 933135 - RNA, 19 nt, Homo sapiens
  misc_RNA (1)...(19): siRNA sense strand
gaagcucagagaaaugaug

SEQ ID NO: 933136 - RNA, 19 nt, Homo sapiens
  misc_RNA (1)...(19): siRNA sense strand
gagacaaggaauacagaga

SEQ ID NO: 933137 - RNA, 19 nt, Homo sapiens
  misc_RNA (1)...(19): siRNA sense strand
gaaaaggagauaagggaaa

SEQ ID NO: 933138 - RNA, 19 nt, Homo sapiens
  misc_RNA (1)...(19): siRNA sense strand
aguugaagcuuggaagaaa

SEQ ID NO: 933139 - RNA, 19 nt, Homo sapiens
  misc_RNA (1)...(19): siRNA sense strand
ggaagaaauugaaaaugca

SEQ ID NO: 933140 - RNA, 19 nt, Homo sapiens
  misc_RNA (1)...(19): siRNA sense strand
agcagagguugauauauga

SEQ ID NO: 933141 - RNA, 19 nt, Homo sapiens
  misc_RNA (1)...(19): siRNA sense strand
guuauacccagcagaagaa

SEQ ID NO: 933142 - RNA, 19 nt, Homo sapiens
  misc_RNA (1)...(19): siRNA sense strand
ccagcgccaguuuaaguua

SEQ ID NO: 933143 - RNA, 19 nt, Homo sapiens
  misc_RNA (1)...(19): siRNA sense strand
uuaaagaagagcagagguu

SEQ ID NO: 933144 - RNA, 19 nt, Homo sapiens
  misc_RNA (1)...(19): siRNA sense strand
gaauuuccagauuucaaga

SEQ ID NO: 933145 - RNA, 19 nt, Homo sapiens
  misc_RNA (1)...(19): siRNA sense strand
aagggaagccaacauuuau

SEQ ID NO: 933146 - RNA, 19 nt, Homo sapiens
  misc_RNA (1)...(19): siRNA sense strand
gcaaacaggagggcgacaa

SEQ ID NO: 933147 - RNA, 19 nt, Homo sapiens
  misc_RNA (1)...(19): siRNA sense strand
gcaacaauuggccaaaaua

SEQ ID NO: 933148 - RNA, 19 nt, Homo sapiens
  misc_RNA (1)...(19): siRNA sense strand
guagacaaaguaacaccaa

SEQ ID NO: 933149 - RNA, 19 nt, Homo sapiens
  misc_RNA (1)...(19): siRNA sense strand
aagaagaagagaaagagaa

SEQ ID NO: 933150 - RNA, 19 nt, Homo sapiens
  misc_RNA (1)...(19): siRNA sense strand
gaaacagaaauuggcaguu

SEQ ID NO: 933151 - RNA, 19 nt, Homo sapiens
  misc_RNA (1)...(19): siRNA sense strand
ggaaaaggcagacaacaca

SEQ ID NO: 933152 - RNA, 19 nt, Homo sapiens
  misc_RNA (1)...(19): siRNA sense strand
auaaagggaagccaacauu

SEQ ID NO: 933153 - RNA, 19 nt, Homo sapiens
  misc_RNA (1)...(19): siRNA sense strand
agagguugauauaugaaga

SEQ ID NO: 933154 - RNA, 19 nt, Homo sapiens
  misc_RNA (1)...(19): siRNA sense strand
ccucuaggcuuuacaaacc

SEQ ID NO: 933155 - RNA, 19 nt, Homo sapiens
  misc_RNA (1)...(19): siRNA sense strand
aaaaggagauaagggaaaa

SEQ ID NO: 933156 - RNA, 19 nt, Homo sapiens
  misc_RNA (1)...(19): siRNA sense strand
aaggugagaaacaaacaua

SEQ ID NO: 933157 - RNA, 19 nt, Homo sapiens
  misc_RNA (1)...(19): siRNA sense strand
gcucagagaaaugauggaa

SEQ ID NO: 933158 - RNA, 19 nt, Homo sapiens
  misc_RNA (1)...(19): siRNA sense strand
guaauucagaaacagagaa

SEQ ID NO: 933159 - RNA, 19 nt, Homo sapiens
  misc_RNA (1)...(19): siRNA sense strand
agucauuucuacaaccaaa

SEQ ID NO: 933160 - RNA, 19 nt, Homo sapiens
  misc_RNA (1)...(19): siRNA sense strand
aaagaagagaagacaacua

SEQ ID NO: 933161 - RNA, 19 nt, Homo sapiens
  misc_RNA (1)...(19): siRNA sense strand
cacaugggcuuuggguaau

SEQ ID NO: 933162 - RNA, 19 nt, Homo sapiens
  misc_RNA (1)...(19): siRNA sense strand
uuacaaacccaccaaaggu

SEQ ID NO: 933163 - RNA, 19 nt, Homo sapiens
  misc_RNA (1)...(19): siRNA sense strand
gacaggcaaaggaagauga

SEQ ID NO: 933164 - RNA, 19 nt, Homo sapiens
  misc_RNA (1)...(19): siRNA sense strand
aacagaaauuggcaguuga

SEQ ID NO: 933165 - RNA, 19 nt, Homo sapiens
  misc_RNA (1)...(19): siRNA sense strand
gcagagguugauauaugaa

SEQ ID NO: 933166 - RNA, 19 nt, Homo sapiens
  misc_RNA (1)...(19): siRNA sense strand
agaaagaaacagaaauugg

SEQ ID NO: 933167 - RNA, 19 nt, Homo sapiens
  misc_RNA (1)...(19): siRNA sense strand
gccaacauuuauggaagaa

SEQ ID NO: 933168 - RNA, 19 nt, Homo sapiens
  misc_RNA (1)...(19): siRNA sense strand
gugagaaacaaacauaaag

SEQ ID NO: 933169 - RNA, 19 nt, Homo sapiens
  misc_RNA (1)...(19): siRNA sense strand
caaggaauacagagaagag

SEQ ID NO: 933170 - RNA, 19 nt, Homo sapiens
  misc_RNA (1)...(19): siRNA sense strand
gggaagccaacauuuaugg

SEQ ID NO: 933171 - RNA, 19 nt, Homo sapiens
  misc_RNA (1)...(19): siRNA sense strand
aagaagaagaagagaaaga

SEQ ID NO: 933172 - RNA, 19 nt, Homo sapiens
  misc_RNA (1)...(19): siRNA sense strand
gaacaaaggucgccaguca

SEQ ID NO: 933173 - RNA, 19 nt, Homo sapiens
  misc_RNA (1)...(19): siRNA sense strand
ggagacagcuugaugagaa

SEQ ID NO: 933174 - RNA, 19 nt, Homo sapiens
  misc_RNA (1)...(19): siRNA sense strand
gaaggcaaguuaggagaua

SEQ ID NO: 933175 - RNA, 19 nt, Homo sapiens
  misc_RNA (1)...(19): siRNA sense strand
caaguuaggagauaaagua

SEQ ID NO: 933176 - RNA, 19 nt, Homo sapiens
  misc_RNA (1)...(19): siRNA sense strand
gcaaaggccuuaugcaacu

SEQ ID NO: 933177 - RNA, 19 nt, Homo sapiens
  misc_RNA (1)...(19): siRNA sense strand
ucagaaagaccucuaguuu

SEQ ID NO: 933178 - RNA, 19 nt, Homo sapiens
  misc_RNA (1)...(19): siRNA sense strand
gcagggcccucuacaacuu

SEQ ID NO: 933179 - RNA, 19 nt, Homo sapiens
  misc_RNA (1)...(19): siRNA sense strand
caucuucccuaucuuguuu

SEQ ID NO: 933180 - RNA, 19 nt, Homo sapiens
  misc_RNA (1)...(19): siRNA sense strand
gagcaaaggccuuaugcaa

SEQ ID NO: 933181 - RNA, 19 nt, Homo sapiens
  misc_RNA (1)...(19): siRNA sense strand
ggagugcccugugugcuuu

SEQ ID NO: 933182 - RNA, 19 nt, Homo sapiens
  misc_RNA (1)...(19): siRNA sense strand
gcuagugccuaaugucaga

SEQ ID NO: 933183 - RNA, 19 nt, Homo sapiens
  misc_RNA (1)...(19): siRNA sense strand
gaugagaacugggcagaag

SEQ ID NO: 933184 - RNA, 19 nt, Homo sapiens
  misc_RNA (1)...(19): siRNA sense strand
gauuugacguuacuugauc

SEQ ID NO: 933185 - RNA, 19 nt, Homo sapiens
  misc_RNA (1)...(19): siRNA sense strand
caagacaccuuuuagagaa

SEQ ID NO: 933186 - RNA, 19 nt, Homo sapiens
  misc_RNA (1)...(19): siRNA sense strand
caacagccuugaacacucu

SEQ ID NO: 933187 - RNA, 19 nt, Homo sapiens
  misc_RNA (1)...(19): siRNA sense strand
ggacaggucagcacuuauc

SEQ ID NO: 933188 - RNA, 19 nt, Homo sapiens
  misc_RNA (1)...(19): siRNA sense strand
gcagaaucccggugaccua

SEQ ID NO: 933189 - RNA, 19 nt, Homo sapiens
  misc_RNA (1)...(19): siRNA sense strand
gcaucuucccaaacaauua

SEQ ID NO: 933190 - RNA, 19 nt, Homo sapiens
  misc_RNA (1)...(19): siRNA sense strand
caacaccucucagcgaaca

SEQ ID NO: 933191 - RNA, 19 nt, Homo sapiens
  misc_RNA (1)...(19): siRNA sense strand
ugggacaggucagcacuua

SEQ ID NO: 933192 - RNA, 19 nt, Homo sapiens
  misc_RNA (1)...(19): siRNA sense strand
cagcacaccuucugcaaac

SEQ ID NO: 933193 - RNA, 19 nt, Homo sapiens
  misc_RNA (1)...(19): siRNA sense strand
caaaggccuuaugcaacua

SEQ ID NO: 933194 - RNA, 19 nt, Homo sapiens
  misc_RNA (1)...(19): siRNA sense strand
gagacagcuugaugagaau

SEQ ID NO: 933195 - RNA, 19 nt, Homo sapiens
  misc_RNA (1)...(19): siRNA sense strand
gcaaggacaagagugagaa

SEQ ID NO: 933196 - RNA, 19 nt, Homo sapiens
  misc_RNA (1)...(19): siRNA sense strand
gaggcaaggacaagaguga

SEQ ID NO: 933197 - RNA, 19 nt, Homo sapiens
  misc_RNA (1)...(19): siRNA sense strand
caaggacgauaucaucacu

SEQ ID NO: 933198 - RNA, 19 nt, Homo sapiens
  misc_RNA (1)...(19): siRNA sense strand
gcaagacaccuuuuagaga

SEQ ID NO: 933199 - RNA, 19 nt, Homo sapiens
  misc_RNA (1)...(19): siRNA sense strand
ggagaaagcagacguuccu

SEQ ID NO: 933200 - RNA, 19 nt, Homo sapiens
  misc_RNA (1)...(19): siRNA sense strand
ugacguuacuugaucuucu

SEQ ID NO: 933201 - RNA, 19 nt, Homo sapiens
  misc_RNA (1)...(19): siRNA sense strand
ucacccagcccauggagaa

SEQ ID NO: 933202 - RNA, 19 nt, Homo sapiens
  misc_RNA (1)...(19): siRNA sense strand
gaaucccggugaccuaagg

SEQ ID NO: 933203 - RNA, 19 nt, Homo sapiens
  misc_RNA (1)...(19): siRNA sense strand
ccucucagcgaacauguuu

SEQ ID NO: 933204 - RNA, 19 nt, Homo sapiens
  misc_RNA (1)...(19): siRNA sense strand
gaugauuugacguuacuug

SEQ ID NO: 933205 - RNA, 19 nt, Homo sapiens
  misc_RNA (1)...(19): siRNA sense strand
ugcaaaccaugucuacaga

SEQ ID NO: 933206 - RNA, 19 nt, Homo sapiens
  misc_RNA (1)...(19): siRNA sense strand
gacguuacuugaucuucug

SEQ ID NO: 933207 - RNA, 19 nt, Homo sapiens
  misc_RNA (1)...(19): siRNA sense strand
agagugagaaccaggauug

SEQ ID NO: 933208 - RNA, 19 nt, Homo sapiens
  misc_RNA (1)...(19): siRNA sense strand
cccaaacaauuacgucauc

SEQ ID NO: 933209 - RNA, 19 nt, Homo sapiens
  misc_RNA (1)...(19): siRNA sense strand
gagucggcaucuucccaaa

SEQ ID NO: 933210 - RNA, 19 nt, Homo sapiens
  misc_RNA (1)...(19): siRNA sense strand
gucggcaucuucccaaaca

SEQ ID NO: 933211 - RNA, 19 nt, Homo sapiens
  misc_RNA (1)...(19): siRNA sense strand
cagaaucccggugaccuaa

SEQ ID NO: 933212 - RNA, 19 nt, Homo sapiens
  misc_RNA (1)...(19): siRNA sense strand
ccucaaggacgauaucauc

SEQ ID NO: 933213 - RNA, 19 nt, Homo sapiens
  misc_RNA (1)...(19): siRNA sense strand
ccagcacaccuucugcaaa

SEQ ID NO: 933214 - RNA, 19 nt, Homo sapiens
  misc_RNA (1)...(19): siRNA sense strand
cagaaagaccucuaguuuu

SEQ ID NO: 933215 - RNA, 19 nt, Homo sapiens
  misc_RNA (1)...(19): siRNA sense strand
ggccuuaugcaacuacaga

SEQ ID NO: 933216 - RNA, 19 nt, Homo sapiens
  misc_RNA (1)...(19): siRNA sense strand
acaaaggucgccagucauc

SEQ ID NO: 933217 - RNA, 19 nt, Homo sapiens
  misc_RNA (1)...(19): siRNA sense strand
gcaucuucccuaucuuguu

SEQ ID NO: 933218 - RNA, 19 nt, Homo sapiens
  misc_RNA (1)...(19): siRNA sense strand
aggacgauaucaucacugu

SEQ ID NO: 933219 - RNA, 19 nt, Homo sapiens
  misc_RNA (1)...(19): siRNA sense strand
gcaaguuaggagauaaagu

SEQ ID NO: 933220 - RNA, 19 nt, Homo sapiens
  misc_RNA (1)...(19): siRNA sense strand
ucagcgaacauguuuguag

SEQ ID NO: 933221 - RNA, 19 nt, Homo sapiens
  misc_RNA (1)...(19): siRNA sense strand
uucccuaucuuguuuguag

SEQ ID NO: 933222 - RNA, 19 nt, Homo sapiens
  misc_RNA (1)...(19): siRNA sense strand
ccucuacaacuucgaccua

SEQ ID NO: 933223 - RNA, 19 nt, Homo sapiens
  misc_RNA (1)...(19): siRNA sense strand
gcacaccuucugcaaacca

SEQ ID NO: 933224 - RNA, 19 nt, Homo sapiens
  misc_RNA (1)...(19): siRNA sense strand
ggacgccuguguuuuccaa

SEQ ID NO: 933225 - RNA, 19 nt, Homo sapiens
  misc_RNA (1)...(19): siRNA sense strand
ggcaucuucccaaacaauu

SEQ ID NO: 933226 - RNA, 19 nt, Homo sapiens
  misc_RNA (1)...(19): siRNA sense strand
gaugagcuggaccugcaaa

SEQ ID NO: 933227 - RNA, 19 nt, Homo sapiens
  misc_RNA (1)...(19): siRNA sense strand
uuguagcccugcacuccua

SEQ ID NO: 933228 - RNA, 19 nt, Homo sapiens
  misc_RNA (1)...(19): siRNA sense strand
ggcaaggacaagagugaga

SEQ ID NO: 933229 - RNA, 19 nt, Homo sapiens
  misc_RNA (1)...(19): siRNA sense strand
cugggcagaaggcaaguua

SEQ ID NO: 933230 - RNA, 19 nt, Homo sapiens
  misc_RNA (1)...(19): siRNA sense strand
aaggcaaguuaggagauaa

SEQ ID NO: 933231 - RNA, 19 nt, Homo sapiens
  misc_RNA (1)...(19): siRNA sense strand
gggcagaaggcaaguuagg

SEQ ID NO: 933232 - RNA, 19 nt, Homo sapiens
  misc_RNA (1)...(19): siRNA sense strand
caucacaacagccuugaac

SEQ ID NO: 933233 - RNA, 19 nt, Homo sapiens
  misc_RNA (1)...(19): siRNA sense strand
gaaacaaauucuagcaaga

SEQ ID NO: 933234 - RNA, 19 nt, Homo sapiens
  misc_RNA (1)...(19): siRNA sense strand
gaucacagcaugaggauaa

SEQ ID NO: 933235 - RNA, 19 nt, Homo sapiens
  misc_RNA (1)...(19): siRNA sense strand
ggauaaggaucauugaguu

SEQ ID NO: 933236 - RNA, 19 nt, Homo sapiens
  misc_RNA (1)...(19): siRNA sense strand
gcaccaggcuguucugaug

SEQ ID NO: 933237 - RNA, 19 nt, Homo sapiens
  misc_RNA (1)...(19): siRNA sense strand
caaagaguauugaaacaga

SEQ ID NO: 933238 - RNA, 19 nt, Homo sapiens
  misc_RNA (1)...(19): siRNA sense strand
gagaagaaaugugaaacaa

SEQ ID NO: 933239 - RNA, 19 nt, Homo sapiens
  misc_RNA (1)...(19): siRNA sense strand
aaacagagaagaaauguga

SEQ ID NO: 933240 - RNA, 19 nt, Homo sapiens
  misc_RNA (1)...(19): siRNA sense strand
uaccagaguuucccuauga

SEQ ID NO: 933241 - RNA, 19 nt, Homo sapiens
  misc_RNA (1)...(19): siRNA sense strand
gcacccagcaguacaauga

SEQ ID NO: 933242 - RNA, 19 nt, Homo sapiens
  misc_RNA (1)...(19): siRNA sense strand
gcaguacaaugacgugguu

SEQ ID NO: 933243 - RNA, 19 nt, Homo sapiens
  misc_RNA (1)...(19): siRNA sense strand
gcaguugguugguggagaa

SEQ ID NO: 933244 - RNA, 19 nt, Homo sapiens
  misc_RNA (1)...(19): siRNA sense strand
uaggagagcuaguucauag

SEQ ID NO: 933245 - RNA, 19 nt, Homo sapiens
  misc_RNA (1)...(19): siRNA sense strand
agagcuaguucauagauuu

SEQ ID NO: 933246 - RNA, 19 nt, Homo sapiens
  misc_RNA (1)...(19): siRNA sense strand
gagauuacagggauaaaga

SEQ ID NO: 933247 - RNA, 19 nt, Homo sapiens
  misc_RNA (1)...(19): siRNA sense strand
gauaaggaucauugaguuu

SEQ ID NO: 933248 - RNA, 19 nt, Homo sapiens
  misc_RNA (1)...(19): siRNA sense strand
agaagcagcucgagauuac

SEQ ID NO: 933249 - RNA, 19 nt, Homo sapiens
  misc_RNA (1)...(19): siRNA sense strand
gagagcuaguucauagauu

SEQ ID NO: 933250 - RNA, 19 nt, Homo sapiens
  misc_RNA (1)...(19): siRNA sense strand
uggcuucgcuggaguauag

SEQ ID NO: 933251 - RNA, 19 nt, Homo sapiens
  misc_RNA (1)...(19): siRNA sense strand
ucauagauuucaagaggaa

SEQ ID NO: 933252 - RNA, 19 nt, Homo sapiens
  misc_RNA (1)...(19): siRNA sense strand
gaugucaaaugcauguuag

SEQ ID NO: 933253 - RNA, 19 nt, Homo sapiens
  misc_RNA (1)...(19): siRNA sense strand
acaaugacgugguuaaugc

SEQ ID NO: 933254 - RNA, 19 nt, Homo sapiens
  misc_RNA (1)...(19): siRNA sense strand
cagaagcagcucgagauua

SEQ ID NO: 933255 - RNA, 19 nt, Homo sapiens
  misc_RNA (1)...(19): siRNA sense strand
gcucgagauuacagggaua

SEQ ID NO: 933256 - RNA, 19 nt, Homo sapiens
  misc_RNA (1)...(19): siRNA sense strand
ggagagcuaguucauagau

SEQ ID NO: 933257 - RNA, 19 nt, Homo sapiens
  misc_RNA (1)...(19): siRNA sense strand
gcauuacaguggacgaagu

SEQ ID NO: 933258 - RNA, 19 nt, Homo sapiens
  misc_RNA (1)...(19): siRNA sense strand
gacgaaguccuauguuuua

SEQ ID NO: 933259 - RNA, 19 nt, Homo sapiens
  misc_RNA (1)...(19): siRNA sense strand
aggccgacaugacuaagua

SEQ ID NO: 933260 - RNA, 19 nt, Homo sapiens
  misc_RNA (1)...(19): siRNA sense strand
aaaccuugauaauggacua

SEQ ID NO: 933261 - RNA, 19 nt, Homo sapiens
  misc_RNA (1)...(19): siRNA sense strand
gcaagaagcaaagcauuac

SEQ ID NO: 933262 - RNA, 19 nt, Homo sapiens
  misc_RNA (1)...(19): siRNA sense strand
aggcuguucugauggauuu

SEQ ID NO: 933263 - RNA, 19 nt, Homo sapiens
  misc_RNA (1)...(19): siRNA sense strand
cgacaugacuaaguaucug

SEQ ID NO: 933264 - RNA, 19 nt, Homo sapiens
  misc_RNA (1)...(19): siRNA sense strand
gaccaaagaguauugaaac

SEQ ID NO: 933265 - RNA, 19 nt, Homo sapiens
  misc_RNA (1)...(19): siRNA sense strand
cuaauugaccaaagaguau

SEQ ID NO: 933266 - RNA, 19 nt, Homo sapiens
  misc_RNA (1)...(19): siRNA sense strand
guauugaaacagagaagaa

SEQ ID NO: 933267 - RNA, 19 nt, Homo sapiens
  misc_RNA (1)...(19): siRNA sense strand
ugaccaaagaguauugaaa

SEQ ID NO: 933268 - RNA, 19 nt, Homo sapiens
  misc_RNA (1)...(19): siRNA sense strand
ccuaugaugucaaaugcau

SEQ ID NO: 933269 - RNA, 19 nt, Homo sapiens
  misc_RNA (1)...(19): siRNA sense strand
ugaugucaaaugcauguua

SEQ ID NO: 933270 - RNA, 19 nt, Homo sapiens
  misc_RNA (1)...(19): siRNA sense strand
uggacuaauugaccaaaga

SEQ ID NO: 933271 - RNA, 19 nt, Homo sapiens
  misc_RNA (1)...(19): siRNA sense strand
uucagcaacugguaaagaa

SEQ ID NO: 933272 - RNA, 19 nt, Homo sapiens
  misc_RNA (1)...(19): siRNA sense strand
agcaagaagcaaagcauua

SEQ ID NO: 933273 - RNA, 19 nt, Homo sapiens
  misc_RNA (1)...(19): siRNA sense strand
ccgcucuucuugcacuuaa

SEQ ID NO: 933274 - RNA, 19 nt, Homo sapiens
  misc_RNA (1)...(19): siRNA sense strand
gcuaguucauagauuucaa

SEQ ID NO: 933275 - RNA, 19 nt, Homo sapiens
  misc_RNA (1)...(19): siRNA sense strand
guacaaugacgugguuaau

SEQ ID NO: 933276 - RNA, 19 nt, Homo sapiens
  misc_RNA (1)...(19): siRNA sense strand
uaaggaucauugaguuucu

SEQ ID NO: 933277 - RNA, 19 nt, Homo sapiens
  misc_RNA (1)...(19): siRNA sense strand
gaguuucccuaugauguca

SEQ ID NO: 933278 - RNA, 19 nt, Homo sapiens
  misc_RNA (1)...(19): siRNA sense strand
ucaagaggaagaaguaagu

SEQ ID NO: 933279 - RNA, 19 nt, Homo sapiens
  misc_RNA (1)...(19): siRNA sense strand
acuaauugaccaaagagua

SEQ ID NO: 933280 - RNA, 19 nt, Homo sapiens
  misc_RNA (1)...(19): siRNA sense strand
acagagaagaaaugugaaa

SEQ ID NO: 933281 - RNA, 19 nt, Homo sapiens
  misc_RNA (1)...(19): siRNA sense strand
aauacaagcagaacacuca

SEQ ID NO: 933282 - RNA, 19 nt, Homo sapiens
  misc_RNA (1)...(19): siRNA sense strand
uuaaugaucggaugguuca

SEQ ID NO: 933283 - RNA, 19 nt, Homo sapiens
  misc_RNA (1)...(19): siRNA sense strand
gaaacagagaagaaaugug

SEQ ID NO: 933284 - RNA, 19 nt, Homo sapiens
  misc_RNA (1)...(19): siRNA sense strand
cugaaaaccuugauaaugg

SEQ ID NO: 933285 - RNA, 19 nt, Homo sapiens
  misc_RNA (1)...(19): siRNA sense strand
ccuugauaauggacuaauu

SEQ ID NO: 933286 - RNA, 19 nt, Homo sapiens
  misc_RNA (1)...(19): siRNA sense strand
ggacuaauugaccaaagag

SEQ ID NO: 933287 - RNA, 19 nt, Homo sapiens
  misc_RNA (1)...(19): siRNA sense strand
gagcuaguucauagauuuc

SEQ ID NO: 933288 - RNA, 19 nt, Homo sapiens
  misc_RNA (1)...(19): siRNA sense strand
guucagcaacugguaaaga

SEQ ID NO: 933289 - RNA, 19 nt, Homo sapiens
  misc_RNA (1)...(19): siRNA sense strand
ugaaacagagaagaaaugu

SEQ ID NO: 933290 - RNA, 19 nt, Homo sapiens
  misc_RNA (1)...(19): siRNA sense strand
gaacacucaaggacugaag

SEQ ID NO: 933291 - RNA, 19 nt, Homo sapiens
  misc_RNA (1)...(19): siRNA sense strand
gcucuucuugcacuuaaug

SEQ ID NO: 933292 - RNA, 19 nt, Homo sapiens
  misc_RNA (1)...(19): siRNA sense strand
cagaguuucccuaugaugu

SEQ ID NO: 933293 - RNA, 19 nt, Homo sapiens
  misc_RNA (1)...(19): siRNA sense strand
uagcaagaagcaaagcauu

SEQ ID NO: 933294 - RNA, 19 nt, Homo sapiens
  misc_RNA (1)...(19): siRNA sense strand
aaauuuaggagagcuaguu

SEQ ID NO: 933295 - RNA, 19 nt, Homo sapiens
  misc_RNA (1)...(19): siRNA sense strand
ggcccacccuuuccuggau

SEQ ID NO: 933296 - RNA, 19 nt, Homo sapiens
  misc_RNA (1)...(19): siRNA sense strand
gugaaacaaauucuagcaa

SEQ ID NO: 933297 - RNA, 19 nt, Homo sapiens
  misc_RNA (1)...(19): siRNA sense strand
gaugguucagcaacuggua

SEQ ID NO: 933298 - RNA, 19 nt, Homo sapiens
  misc_RNA (1)...(19): siRNA sense strand
aaaggcagcccuggucaug

SEQ ID NO: 933299 - RNA, 19 nt, Homo sapiens
  misc_RNA (1)...(19): siRNA sense strand
uuaccagaguuucccuaug

SEQ ID NO: 933300 - RNA, 19 nt, Homo sapiens
  misc_RNA (1)...(19): siRNA sense strand
gcugaaaaccuugauaaug

SEQ ID NO: 933301 - RNA, 19 nt, Homo sapiens
  misc_RNA (1)...(19): siRNA sense strand
caagaagcaaagcauuaca

SEQ ID NO: 933302 - RNA, 19 nt, Homo sapiens
  misc_RNA (1)...(19): siRNA sense strand
cuugauaauggacuaauug

SEQ ID NO: 933303 - RNA, 19 nt, Homo sapiens
  misc_RNA (1)...(19): siRNA sense strand
acagaagcagcucgagauu

SEQ ID NO: 933304 - RNA, 19 nt, Homo sapiens
  misc_RNA (1)...(19): siRNA sense strand
gaaguccuauguuuuacca

SEQ ID NO: 933305 - RNA, 19 nt, Homo sapiens
  misc_RNA (1)...(19): siRNA sense strand
gcuguucugauggauuuaa

SEQ ID NO: 933306 - RNA, 19 nt, Homo sapiens
  misc_RNA (1)...(19): siRNA sense strand
ggaaaccuggucaguugag

SEQ ID NO: 933307 - RNA, 19 nt, Homo sapiens
  misc_RNA (1)...(19): siRNA sense strand
agagaagaaaugugaaaca

SEQ ID NO: 933308 - RNA, 19 nt, Homo sapiens
  misc_RNA (1)...(19): siRNA sense strand
ugaaaaccuugauaaugga

SEQ ID NO: 933309 - RNA, 19 nt, Homo sapiens
  misc_RNA (1)...(19): siRNA sense strand
ccaaagaguauugaaacag

SEQ ID NO: 933310 - RNA, 19 nt, Homo sapiens
  misc_RNA (1)...(19): siRNA sense strand
aggcagcccuggucaugca

SEQ ID NO: 933311 - RNA, 19 nt, Homo sapiens
  misc_RNA (1)...(19): siRNA sense strand
uuaggagagcuaguucaua

SEQ ID NO: 933312 - RNA, 19 nt, Homo sapiens
  misc_RNA (1)...(19): siRNA sense strand
gaggauaaggaucauugag

SEQ ID NO: 933313 - RNA, 19 nt, Homo sapiens
  misc_RNA (1)...(19): siRNA sense strand
accaaagaguauugaaaca

SEQ ID NO: 933314 - RNA, 19 nt, Homo sapiens
  misc_RNA (1)...(19): siRNA sense strand
gggaaaccgugcccaauua

SEQ ID NO: 933315 - RNA, 19 nt, Homo sapiens
  misc_RNA (1)...(19): siRNA sense strand
ggacaggaguuaccacuga

SEQ ID NO: 933316 - RNA, 19 nt, Homo sapiens
  misc_RNA (1)...(19): siRNA sense strand
gaaggucgcaggcucauuu

SEQ ID NO: 933317 - RNA, 19 nt, Homo sapiens
  misc_RNA (1)...(19): siRNA sense strand
aggcugagaugucuaauaa

SEQ ID NO: 933318 - RNA, 19 nt, Homo sapiens
  misc_RNA (1)...(19): siRNA sense strand
uagaauaccuaaaggaguu

SEQ ID NO: 933319 - RNA, 19 nt, Homo sapiens
  misc_RNA (1)...(19): siRNA sense strand
gcugagaugucuaauaaag

SEQ ID NO: 933320 - RNA, 19 nt, Homo sapiens
  misc_RNA (1)...(19): siRNA sense strand
agacucagcuucagcauuc

SEQ ID NO: 933321 - RNA, 19 nt, Homo sapiens
  misc_RNA (1)...(19): siRNA sense strand
ugacaacuguggccuuuau

SEQ ID NO: 933322 - RNA, 19 nt, Homo sapiens
  misc_RNA (1)...(19): siRNA sense strand
ggaagaggaagauguagaa

SEQ ID NO: 933323 - RNA, 19 nt, Homo sapiens
  misc_RNA (1)...(19): siRNA sense strand
uaauaaagcuagugaccau

SEQ ID NO: 933324 - RNA, 19 nt, Homo sapiens
  misc_RNA (1)...(19): siRNA sense strand
ucacugccuuuauuauuga

SEQ ID NO: 933325 - RNA, 19 nt, Homo sapiens
  misc_RNA (1)...(19): siRNA sense strand
ugacauauccaaagacuca

SEQ ID NO: 933326 - RNA, 19 nt, Homo sapiens
  misc_RNA (1)...(19): siRNA sense strand
gcugacaacuguggccuuu

SEQ ID NO: 933327 - RNA, 19 nt, Homo sapiens
  misc_RNA (1)...(19): siRNA sense strand
gcaaaguguuacucaccaa

SEQ ID NO: 933328 - RNA, 19 nt, Homo sapiens
  misc_RNA (1)...(19): siRNA sense strand
aaaggugucagccucauua

SEQ ID NO: 933329 - RNA, 19 nt, Homo sapiens
  misc_RNA (1)...(19): siRNA sense strand
gcauucacugccuuuauua

SEQ ID NO: 933330 - RNA, 19 nt, Homo sapiens
  misc_RNA (1)...(19): siRNA sense strand
aagauuggcugccucaugu

SEQ ID NO: 933331 - RNA, 19 nt, Homo sapiens
  misc_RNA (1)...(19): siRNA sense strand
aagaugacauauccaaaga

SEQ ID NO: 933332 - RNA, 19 nt, Homo sapiens
  misc_RNA (1)...(19): siRNA sense strand
gaugacauauccaaagacu

SEQ ID NO: 933333 - RNA, 19 nt, Homo sapiens
  misc_RNA (1)...(19): siRNA sense strand
gcaguguaaugacaauagu

SEQ ID NO: 933334 - RNA, 19 nt, Homo sapiens
  misc_RNA (1)...(19): siRNA sense strand
ugaggaagaggaagaugua

SEQ ID NO: 933335 - RNA, 19 nt, Homo sapiens
  misc_RNA (1)...(19): siRNA sense strand
gcugagcaguguaaugaca

SEQ ID NO: 933336 - RNA, 19 nt, Homo sapiens
  misc_RNA (1)...(19): siRNA sense strand
auguugagguucagaguua

SEQ ID NO: 933337 - RNA, 19 nt, Homo sapiens
  misc_RNA (1)...(19): siRNA sense strand
gaaaggugucagccucauu

SEQ ID NO: 933338 - RNA, 19 nt, Homo sapiens
  misc_RNA (1)...(19): siRNA sense strand
cuauguggcugacaacugu

SEQ ID NO: 933339 - RNA, 19 nt, Homo sapiens
  misc_RNA (1)...(19): siRNA sense strand
gggcuucgcuacgauaaag

SEQ ID NO: 933340 - RNA, 19 nt, Homo sapiens
  misc_RNA (1)...(19): siRNA sense strand
aaggugaaauuugaggaua

SEQ ID NO: 933341 - RNA, 19 nt, Homo sapiens
  misc_RNA (1)...(19): siRNA sense strand
gaagaggaagauguagaaa

SEQ ID NO: 933342 - RNA, 19 nt, Homo sapiens
  misc_RNA (1)...(19): siRNA sense strand
cggaugcccauuaucaaua

SEQ ID NO: 933343 - RNA, 19 nt, Homo sapiens
  misc_RNA (1)...(19): siRNA sense strand
ugagaugucuaauaaagcu

SEQ ID NO: 933344 - RNA, 19 nt, Homo sapiens
  misc_RNA (1)...(19): siRNA sense strand
uaagaugacauauccaaag

SEQ ID NO: 933345 - RNA, 19 nt, Homo sapiens
  misc_RNA (1)...(19): siRNA sense strand
caagauuggcugccucaug

SEQ ID NO: 933346 - RNA, 19 nt, Homo sapiens
  misc_RNA (1)...(19): siRNA sense strand
guaaaguccaggccauuuc

SEQ ID NO: 933347 - RNA, 19 nt, Homo sapiens
  misc_RNA (1)...(19): siRNA sense strand
gccggcagcuguggugauu

SEQ ID NO: 933348 - RNA, 19 nt, Homo sapiens
  misc_RNA (1)...(19): siRNA sense strand
ggugaaauuugaggauauc

SEQ ID NO: 933349 - RNA, 19 nt, Homo sapiens
  misc_RNA (1)...(19): siRNA sense strand
agcauucacugccuuuauu

SEQ ID NO: 933350 - RNA, 19 nt, Homo sapiens
  misc_RNA (1)...(19): siRNA sense strand
cguaacgccacaaggaaua

SEQ ID NO: 933351 - RNA, 19 nt, Homo sapiens
  misc_RNA (1)...(19): siRNA sense strand
ucacaaguaugaggaagag

SEQ ID NO: 933352 - RNA, 19 nt, Homo sapiens
  misc_RNA (1)...(19): siRNA sense strand
ugccaagccugaccauguu

SEQ ID NO: 933353 - RNA, 19 nt, Homo sapiens
  misc_RNA (1)...(19): siRNA sense strand
gccagucgauaagcugaaa

SEQ ID NO: 933354 - RNA, 19 nt, Homo sapiens
  misc_RNA (1)...(19): siRNA sense strand
guuaagaugacauauccaa

SEQ ID NO: 933355 - RNA, 19 nt, Homo sapiens
  misc_RNA (1)...(19): siRNA sense strand
caaaguguuacucaccaaa

SEQ ID NO: 933356 - RNA, 19 nt, Homo sapiens
  misc_RNA (1)...(19): siRNA sense strand
ggugucagccucauuaagg

SEQ ID NO: 933357 - RNA, 19 nt, Homo sapiens
  misc_RNA (1)...(19): siRNA sense strand
uucacugccuuuauuauug

SEQ ID NO: 933358 - RNA, 19 nt, Homo sapiens
  misc_RNA (1)...(19): siRNA sense strand
gucgcaggcucauuucaga

SEQ ID NO: 933359 - RNA, 19 nt, Homo sapiens
  misc_RNA (1)...(19): siRNA sense strand
acaggaggcugagcagugu

SEQ ID NO: 933360 - RNA, 19 nt, Homo sapiens
  misc_RNA (1)...(19): siRNA sense strand
caacgagugaugaaguuuc

SEQ ID NO: 933361 - RNA, 19 nt, Homo sapiens
  misc_RNA (1)...(19): siRNA sense strand
ggaguugccagucgauaag

SEQ ID NO: 933362 - RNA, 19 nt, Homo sapiens
  misc_RNA (1)...(19): siRNA sense strand
caccaaaggcuguguggau

SEQ ID NO: 933363 - RNA, 19 nt, Homo sapiens
  misc_RNA (1)...(19): siRNA sense strand
agaggaagauguagaaacc

SEQ ID NO: 933364 - RNA, 19 nt, Homo sapiens
  misc_RNA (1)...(19): siRNA sense strand
guaacgccacaaggaauaa

SEQ ID NO: 933365 - RNA, 19 nt, Homo sapiens
  misc_RNA (1)...(19): siRNA sense strand
caaguaugaggaagaggaa

SEQ ID NO: 933366 - RNA, 19 nt, Homo sapiens
  misc_RNA (1)...(19): siRNA sense strand
cagcauucacugccuuuau

SEQ ID NO: 933367 - RNA, 19 nt, Homo sapiens
  misc_RNA (1)...(19): siRNA sense strand
gauuggcugccucauguug

SEQ ID NO: 933368 - RNA, 19 nt, Homo sapiens
  misc_RNA (1)...(19): siRNA sense strand
ggaaaccgugcccaauuac

SEQ ID NO: 933369 - RNA, 19 nt, Homo sapiens
  misc_RNA (1)...(19): siRNA sense strand
gagcaguguaaugacaaua

SEQ ID NO: 933370 - RNA, 19 nt, Homo sapiens
  misc_RNA (1)...(19): siRNA sense strand
ccucguaacgccacaagga

SEQ ID NO: 933371 - RNA, 19 nt, Homo sapiens
  misc_RNA (1)...(19): siRNA sense strand
cggcagcuguggugauugg

SEQ ID NO: 933372 - RNA, 19 nt, Homo sapiens
  misc_RNA (1)...(19): siRNA sense strand
aggcugagcaguguaauga

SEQ ID NO: 933373 - RNA, 19 nt, Homo sapiens
  misc_RNA (1)...(19): siRNA sense strand
uaucaauaaucuggaaugg

SEQ ID NO: 933374 - RNA, 19 nt, Homo sapiens
  misc_RNA (1)...(19): siRNA sense strand
gccaagccugaccauguua

SEQ ID NO: 933375 - RNA, 19 nt, Homo sapiens
  misc_RNA (1)...(19): siRNA sense strand
caggcugagaugucuaaua

SEQ ID NO: 933376 - RNA, 19 nt, Homo sapiens
  misc_RNA (1)...(19): siRNA sense strand
gggucuauguggcugacaa

SEQ ID NO: 933377 - RNA, 19 nt, Homo sapiens
  misc_RNA (1)...(19): siRNA sense strand
ggguaugggcgcacauuuc

SEQ ID NO: 933378 - RNA, 19 nt, Homo sapiens
  misc_RNA (1)...(19): siRNA sense strand
ccaagccugaccauguuaa

SEQ ID NO: 933379 - RNA, 19 nt, Homo sapiens
  misc_RNA (1)...(19): siRNA sense strand
gaaaccggagccagucaag

SEQ ID NO: 933380 - RNA, 19 nt, Homo sapiens
  misc_RNA (1)...(19): siRNA sense strand
gccugaccauguuaagaug

SEQ ID NO: 933381 - RNA, 19 nt, Homo sapiens
  misc_RNA (1)...(19): siRNA sense strand
gagcaacgagagaaacaac

SEQ ID NO: 933382 - RNA, 19 nt, Homo sapiens
  misc_RNA (1)...(19): siRNA sense strand
ccaggagcaacgagagaaa

SEQ ID NO: 933383 - RNA, 19 nt, Homo sapiens
  misc_RNA (1)...(19): siRNA sense strand
ugagcaguguaaugacaau

SEQ ID NO: 933384 - RNA, 19 nt, Homo sapiens
  misc_RNA (1)...(19): siRNA sense strand
guucuucuuuagccgucua

SEQ ID NO: 933385 - RNA, 19 nt, Homo sapiens
  misc_RNA (1)...(19): siRNA sense strand
cauuuccggaugcccauua

SEQ ID NO: 933386 - RNA, 19 nt, Homo sapiens
  misc_RNA (1)...(19): siRNA sense strand
cgucuagaauaccuaaagg

SEQ ID NO: 933387 - RNA, 19 nt, Homo sapiens
  misc_RNA (1)...(19): siRNA sense strand
ggagcaacgagagaaacaa

SEQ ID NO: 933388 - RNA, 19 nt, Homo sapiens
  misc_RNA (1)...(19): siRNA sense strand
ccucauuaaggugaaauuu

SEQ ID NO: 933389 - RNA, 19 nt, Homo sapiens
  misc_RNA (1)...(19): siRNA sense strand
uaaggugaaauuugaggau

SEQ ID NO: 933390 - RNA, 19 nt, Homo sapiens
  misc_RNA (1)...(19): siRNA sense strand
ugucuaauaaagcuaguga

SEQ ID NO: 933391 - RNA, 19 nt, Homo sapiens
  misc_RNA (1)...(19): siRNA sense strand
ucuuuagccgucuagaaua

SEQ ID NO: 933392 - RNA, 19 nt, Homo sapiens
  misc_RNA (1)...(19): siRNA sense strand
aggcugcagcaaaguguua

SEQ ID NO: 933393 - RNA, 19 nt, Homo sapiens
  misc_RNA (1)...(19): siRNA sense strand
aggugaaauuugaggauau

SEQ ID NO: 933394 - RNA, 19 nt, Homo sapiens
  misc_RNA (1)...(19): siRNA sense strand
gggagucgcugcagcugua

SEQ ID NO: 933395 - RNA, 19 nt, Homo sapiens
  misc_RNA (1)...(19): siRNA sense strand
ccagucagaucuucuugga

SEQ ID NO: 933396 - RNA, 19 nt, Homo sapiens
  misc_RNA (1)...(19): siRNA sense strand
gagcgccucuguucguguu

SEQ ID NO: 933397 - RNA, 19 nt, Homo sapiens
  misc_RNA (1)...(19): siRNA sense strand
gguaggagcgccucuguuc

SEQ ID NO: 933398 - RNA, 19 nt, Homo sapiens
  misc_RNA (1)...(19): siRNA sense strand
ccuccacccugauuacuga

SEQ ID NO: 933399 - RNA, 19 nt, Homo sapiens
  misc_RNA (1)...(19): siRNA sense strand
ugucaugggugaagagcuu

SEQ ID NO: 933400 - RNA, 19 nt, Homo sapiens
  misc_RNA (1)...(19): siRNA sense strand
cagugcagguugcccauga

SEQ ID NO: 933401 - RNA, 19 nt, Homo sapiens
  misc_RNA (1)...(19): siRNA sense strand
uggacaggcugcucuccua

SEQ ID NO: 933402 - RNA, 19 nt, Homo sapiens
  misc_RNA (1)...(19): siRNA sense strand
gguccagacgcgauuguuu

SEQ ID NO: 933403 - RNA, 19 nt, Homo sapiens
  misc_RNA (1)...(19): siRNA sense strand
uagagcaggugcacuuagu

SEQ ID NO: 933404 - RNA, 19 nt, Homo sapiens
  misc_RNA (1)...(19): siRNA sense strand
gguagagcaggugcacuua

SEQ ID NO: 933405 - RNA, 19 nt, Homo sapiens
  misc_RNA (1)...(19): siRNA sense strand
gcagguugcccaugaacuc

SEQ ID NO: 933406 - RNA, 19 nt, Homo sapiens
  misc_RNA (1)...(19): siRNA sense strand
caauuuguccaagucgaua

SEQ ID NO: 933407 - RNA, 19 nt, Homo sapiens
  misc_RNA (1)...(19): siRNA sense strand
guaccagucagaucuucuu

SEQ ID NO: 933408 - RNA, 19 nt, Homo sapiens
  misc_RNA (1)...(19): siRNA sense strand
acaggcugcucuccuagau

SEQ ID NO: 933409 - RNA, 19 nt, Homo sapiens
  misc_RNA (1)...(19): siRNA sense strand
gcaggcuggaggaguugua

SEQ ID NO: 933410 - RNA, 19 nt, Homo sapiens
  misc_RNA (1)...(19): siRNA sense strand
gugaagagcuuggggaaca

SEQ ID NO: 933411 - RNA, 19 nt, Homo sapiens
  misc_RNA (1)...(19): siRNA sense strand
ccugauuacugagauguca

SEQ ID NO: 933412 - RNA, 19 nt, Homo sapiens
  misc_RNA (1)...(19): siRNA sense strand
gauagguaccagucagauc

SEQ ID NO: 933413 - RNA, 19 nt, Homo sapiens
  misc_RNA (1)...(19): siRNA sense strand
aggcugcucuccuagauac

SEQ ID NO: 933414 - RNA, 19 nt, Homo sapiens
  misc_RNA (1)...(19): siRNA sense strand
ccacccugauuacugagau

SEQ ID NO: 933415 - RNA, 19 nt, Homo sapiens
  misc_RNA (1)...(19): siRNA sense strand
ccuagauacugcgaagaug

SEQ ID NO: 933416 - RNA, 19 nt, Homo sapiens
  misc_RNA (1)...(19): siRNA sense strand
gcaggcgcgaggugaaguu

SEQ ID NO: 933417 - RNA, 19 nt, Homo sapiens
  misc_RNA (1)...(19): siRNA sense strand
guagagcaggugcacuuag

SEQ ID NO: 933418 - RNA, 19 nt, Homo sapiens
  misc_RNA (1)...(19): siRNA sense strand
ggcuggggaucuccaauuu

SEQ ID NO: 933419 - RNA, 19 nt, Homo sapiens
  misc_RNA (1)...(19): siRNA sense strand
gacaggcugcucuccuaga

SEQ ID NO: 933420 - RNA, 19 nt, Homo sapiens
  misc_RNA (1)...(19): siRNA sense strand
gaacugagcucgccaagaa

SEQ ID NO: 933421 - RNA, 19 nt, Homo sapiens
  misc_RNA (1)...(19): siRNA sense strand
gagagaagcuugaucaguu

SEQ ID NO: 933422 - RNA, 19 nt, Homo sapiens
  misc_RNA (1)...(19): siRNA sense strand
gaggaagaauacagaaauu

SEQ ID NO: 933423 - RNA, 19 nt, Homo sapiens
  misc_RNA (1)...(19): siRNA sense strand
gcgcauggauuuaggagaa

SEQ ID NO: 933424 - RNA, 19 nt, Homo sapiens
  misc_RNA (1)...(19): siRNA sense strand
ggaaaucagugcggaaguu

SEQ ID NO: 933425 - RNA, 19 nt, Homo sapiens
  misc_RNA (1)...(19): siRNA sense strand
ugaauuagaugcaauggau

SEQ ID NO: 933426 - RNA, 19 nt, Homo sapiens
  misc_RNA (1)...(19): siRNA sense strand
guacaugaguuaaaugaag

SEQ ID NO: 933427 - RNA, 19 nt, Homo sapiens
  misc_RNA (1)...(19): siRNA sense strand
gaagugcgaaauacaagua

SEQ ID NO: 933428 - RNA, 19 nt, Homo sapiens
  misc_RNA (1)...(19): siRNA sense strand
agacagagggucaaguuua

SEQ ID NO: 933429 - RNA, 19 nt, Homo sapiens
  misc_RNA (1)...(19): siRNA sense strand
uaaagaaagagaccuguuu

SEQ ID NO: 933430 - RNA, 19 nt, Homo sapiens
  misc_RNA (1)...(19): siRNA sense strand
ggaaaacugucgcugaaaa

SEQ ID NO: 933431 - RNA, 19 nt, Homo sapiens
  misc_RNA (1)...(19): siRNA sense strand
ccgagcagauuaugagauu

SEQ ID NO: 933432 - RNA, 19 nt, Homo sapiens
  misc_RNA (1)...(19): siRNA sense strand
gaaaucagugcggaaguuu

SEQ ID NO: 933433 - RNA, 19 nt, Homo sapiens
  misc_RNA (1)...(19): siRNA sense strand
gugcggaaguuucugcaaa

SEQ ID NO: 933434 - RNA, 19 nt, Homo sapiens
  misc_RNA (1)...(19): siRNA sense strand
aaaagaagcugaggaagaa

SEQ ID NO: 933435 - RNA, 19 nt, Homo sapiens
  misc_RNA (1)...(19): siRNA sense strand
ggaccgaagugcgaaauac

SEQ ID NO: 933436 - RNA, 19 nt, Homo sapiens
  misc_RNA (1)...(19): siRNA sense strand
gagauugcaaguaaagaaa

SEQ ID NO: 933437 - RNA, 19 nt, Homo sapiens
  misc_RNA (1)...(19): siRNA sense strand
gacagagggucaaguuuac

SEQ ID NO: 933438 - RNA, 19 nt, Homo sapiens
  misc_RNA (1)...(19): siRNA sense strand
gauugcaaguaaagaaaga

SEQ ID NO: 933439 - RNA, 19 nt, Homo sapiens
  misc_RNA (1)...(19): siRNA sense strand
gggucaaguuuacagauga

SEQ ID NO: 933440 - RNA, 19 nt, Homo sapiens
  misc_RNA (1)...(19): siRNA sense strand
gaggaaaacugucgcugaa

SEQ ID NO: 933441 - RNA, 19 nt, Homo sapiens
  misc_RNA (1)...(19): siRNA sense strand
agagaagcuugaucaguug

SEQ ID NO: 933442 - RNA, 19 nt, Homo sapiens
  misc_RNA (1)...(19): siRNA sense strand
cggaggcggucaagaucua

SEQ ID NO: 933443 - RNA, 19 nt, Homo sapiens
  misc_RNA (1)...(19): siRNA sense strand
ucacuuggaguccuuuauu

SEQ ID NO: 933444 - RNA, 19 nt, Homo sapiens
  misc_RNA (1)...(19): siRNA sense strand
ccagacagagggucaaguu

SEQ ID NO: 933445 - RNA, 19 nt, Homo sapiens
  misc_RNA (1)...(19): siRNA sense strand
gaacgggaggagcgucuga

SEQ ID NO: 933446 - RNA, 19 nt, Homo sapiens
  misc_RNA (1)...(19): siRNA sense strand
guaaagaaagagaccuguu

SEQ ID NO: 933447 - RNA, 19 nt, Homo sapiens
  misc_RNA (1)...(19): siRNA sense strand
gcagaaacacaggaggaaa

SEQ ID NO: 933448 - RNA, 19 nt, Homo sapiens
  misc_RNA (1)...(19): siRNA sense strand
cgagagcgacggaaauugu

SEQ ID NO: 933449 - RNA, 19 nt, Homo sapiens
  misc_RNA (1)...(19): siRNA sense strand
ggacgcgcauggauuuagg

SEQ ID NO: 933450 - RNA, 19 nt, Homo sapiens
  misc_RNA (1)...(19): siRNA sense strand
uagaugcaauggaucacuu

SEQ ID NO: 933451 - RNA, 19 nt, Homo sapiens
  misc_RNA (1)...(19): siRNA sense strand
ugaggaagaauacagaaau

SEQ ID NO: 933452 - RNA, 19 nt, Homo sapiens
  misc_RNA (1)...(19): siRNA sense strand
cagaaacacaggaggaaau

SEQ ID NO: 933453 - RNA, 19 nt, Homo sapiens
  misc_RNA (1)...(19): siRNA sense strand
aagaagcugaggaagaaua

SEQ ID NO: 933454 - RNA, 19 nt, Homo sapiens
  misc_RNA (1)...(19): siRNA sense strand
gauuaugagauugcaagua

SEQ ID NO: 933455 - RNA, 19 nt, Homo sapiens
  misc_RNA (1)...(19): siRNA sense strand
ugagauugcaaguaaagaa

SEQ ID NO: 933456 - RNA, 19 nt, Homo sapiens
  misc_RNA (1)...(19): siRNA sense strand
cacuuggaguccuuuauug

SEQ ID NO: 933457 - RNA, 19 nt, Homo sapiens
  misc_RNA (1)...(19): siRNA sense strand
aagguaauguggaugaauc

SEQ ID NO: 933458 - RNA, 19 nt, Homo sapiens
  misc_RNA (1)...(19): siRNA sense strand
gcauggauuuaggagaaug

SEQ ID NO: 933459 - RNA, 19 nt, Homo sapiens
  misc_RNA (1)...(19): siRNA sense strand
gaagguaauguggaugaau

SEQ ID NO: 933460 - RNA, 19 nt, Homo sapiens
  misc_RNA (1)...(19): siRNA sense strand
gaaaacuccuugcuaaagc

SEQ ID NO: 933461 - RNA, 19 nt, Homo sapiens
  misc_RNA (1)...(19): siRNA sense strand
ggaguccuuuauugcugaa

SEQ ID NO: 933462 - RNA, 19 nt, Homo sapiens
  misc_RNA (1)...(19): siRNA sense strand
ggagacgaaaccagacaga

SEQ ID NO: 933463 - RNA, 19 nt, Homo sapiens
  misc_RNA (1)...(19): siRNA sense strand
gaucacuuggaguccuuua

SEQ ID NO: 933464 - RNA, 19 nt, Homo sapiens
  misc_RNA (1)...(19): siRNA sense strand
ucauucagauccgagagaa

SEQ ID NO: 933465 - RNA, 19 nt, Homo sapiens
  misc_RNA (1)...(19): siRNA sense strand
agaagcggcuggcagaaac

SEQ ID NO: 933466 - RNA, 19 nt, Homo sapiens
  misc_RNA (1)...(19): siRNA sense strand
gcuaggggcugaagguaau

SEQ ID NO: 933467 - RNA, 19 nt, Homo sapiens
  misc_RNA (1)...(19): siRNA sense strand
gaaaucaggaucgcuugag

SEQ ID NO: 933468 - RNA, 19 nt, Homo sapiens
  misc_RNA (1)...(19): siRNA sense strand
ugaagguaauguggaugaa

SEQ ID NO: 933469 - RNA, 19 nt, Homo sapiens
  misc_RNA (1)...(19): siRNA sense strand
gagcagauuaugagauugc

SEQ ID NO: 933470 - RNA, 19 nt, Homo sapiens
  misc_RNA (1)...(19): siRNA sense strand
gagaagcuugaucaguuga

SEQ ID NO: 933471 - RNA, 19 nt, Homo sapiens
  misc_RNA (1)...(19): siRNA sense strand
gcugggacgcgcauggauu

SEQ ID NO: 933472 - RNA, 19 nt, Homo sapiens
  misc_RNA (1)...(19): siRNA sense strand
gaaugugaucggagaacug

SEQ ID NO: 933473 - RNA, 19 nt, Homo sapiens
  misc_RNA (1)...(19): siRNA sense strand
gggaccgaagugcgaaaua

SEQ ID NO: 933474 - RNA, 19 nt, Homo sapiens
  misc_RNA (1)...(19): siRNA sense strand
ggagaagagaaaucaggau

SEQ ID NO: 933475 - RNA, 19 nt, Homo sapiens
  misc_RNA (1)...(19): siRNA sense strand
guaccaaaauccacgacuu

SEQ ID NO: 933476 - RNA, 19 nt, Homo sapiens
  misc_RNA (1)...(19): siRNA sense strand
ugcuaaagccgaacagcua

SEQ ID NO: 933477 - RNA, 19 nt, Homo sapiens
  misc_RNA (1)...(19): siRNA sense strand
ggaaaacuccuugcuaaag

SEQ ID NO: 933478 - RNA, 19 nt, Homo sapiens
  misc_RNA (1)...(19): siRNA sense strand
gaaacacaggaggaaauca

SEQ ID NO: 933479 - RNA, 19 nt, Homo sapiens
  misc_RNA (1)...(19): siRNA sense strand
caggaggucgggaucaaga

SEQ ID NO: 933480 - RNA, 19 nt, Homo sapiens
  misc_RNA (1)...(19): siRNA sense strand
gaccgaagugcgaaauaca

SEQ ID NO: 933481 - RNA, 19 nt, Homo sapiens
  misc_RNA (1)...(19): siRNA sense strand
cgucggaggcggucaagau

SEQ ID NO: 933482 - RNA, 19 nt, Homo sapiens
  misc_RNA (1)...(19): siRNA sense strand
ggcugaagguaauguggau

SEQ ID NO: 933483 - RNA, 19 nt, Homo sapiens
  misc_RNA (1)...(19): siRNA sense strand
gaaaagcaggagaagagaa

SEQ ID NO: 933484 - RNA, 19 nt, Homo sapiens
  misc_RNA (1)...(19): siRNA sense strand
cgagagaagcuugaucagu

SEQ ID NO: 933485 - RNA, 19 nt, Homo sapiens
  misc_RNA (1)...(19): siRNA sense strand
gaugaccgugucugcaaga

SEQ ID NO: 933486 - RNA, 19 nt, Homo sapiens
  misc_RNA (1)...(19): siRNA sense strand
cagacagagggucaaguuu

SEQ ID NO: 933487 - RNA, 19 nt, Homo sapiens
  misc_RNA (1)...(19): siRNA sense strand
aagaagcggcuggcagaaa

SEQ ID NO: 933488 - RNA, 19 nt, Homo sapiens
  misc_RNA (1)...(19): siRNA sense strand
uuuaggagaauguaccaaa

SEQ ID NO: 933489 - RNA, 19 nt, Homo sapiens
  misc_RNA (1)...(19): siRNA sense strand
guccuuuauugcugaaugu

SEQ ID NO: 933490 - RNA, 19 nt, Homo sapiens
  misc_RNA (1)...(19): siRNA sense strand
gcugaggaagaauacagaa

SEQ ID NO: 933491 - RNA, 19 nt, Homo sapiens
  misc_RNA (1)...(19): siRNA sense strand
ggcagaaacacaggaggaa

SEQ ID NO: 933492 - RNA, 19 nt, Homo sapiens
  misc_RNA (1)...(19): siRNA sense strand
agggucaaguuuacagaug

SEQ ID NO: 933493 - RNA, 19 nt, Homo sapiens
  misc_RNA (1)...(19): siRNA sense strand
gaagagauguuguucauag

SEQ ID NO: 933494 - RNA, 19 nt, Homo sapiens
  misc_RNA (1)...(19): siRNA sense strand
ggaauuagaugaaucaaag

SEQ ID NO: 933495 - RNA, 19 nt, Homo sapiens
  misc_RNA (1)...(19): siRNA sense strand
acaagggacucacauauaa

SEQ ID NO: 933496 - RNA, 19 nt, Homo sapiens
  misc_RNA (1)...(19): siRNA sense strand
gaacuagauucaccacaug

SEQ ID NO: 933497 - RNA, 19 nt, Homo sapiens
  misc_RNA (1)...(19): siRNA sense strand
ugaagggugugaaccaaua

SEQ ID NO: 933498 - RNA, 19 nt, Homo sapiens
  misc_RNA (1)...(19): siRNA sense strand
gcacagcucccacuuggaa

SEQ ID NO: 933499 - RNA, 19 nt, Homo sapiens
  misc_RNA (1)...(19): siRNA sense strand
agaaagaagaccugauuua

SEQ ID NO: 933500 - RNA, 19 nt, Homo sapiens
  misc_RNA (1)...(19): siRNA sense strand
ggaggaauauagcagaaau

SEQ ID NO: 933501 - RNA, 19 nt, Homo sapiens
  misc_RNA (1)...(19): siRNA sense strand
gaaagugcuucucaugaca

SEQ ID NO: 933502 - RNA, 19 nt, Homo sapiens
  misc_RNA (1)...(19): siRNA sense strand
gaagaccugauuuaccuua

SEQ ID NO: 933503 - RNA, 19 nt, Homo sapiens
  misc_RNA (1)...(19): siRNA sense strand
gaauauagcagaaaugaac

SEQ ID NO: 933504 - RNA, 19 nt, Homo sapiens
  misc_RNA (1)...(19): siRNA sense strand
uagcagaaaugaacuagau

SEQ ID NO: 933505 - RNA, 19 nt, Homo sapiens
  misc_RNA (1)...(19): siRNA sense strand
uaaacaagcgucagauuau

SEQ ID NO: 933506 - RNA, 19 nt, Homo sapiens
  misc_RNA (1)...(19): siRNA sense strand
agacaaagccugugaaagu

SEQ ID NO: 933507 - RNA, 19 nt, Homo sapiens
  misc_RNA (1)...(19): siRNA sense strand
gaaagaagaccugauuuac

SEQ ID NO: 933508 - RNA, 19 nt, Homo sapiens
  misc_RNA (1)...(19): siRNA sense strand
ugauuuaccuuacgucaga

SEQ ID NO: 933509 - RNA, 19 nt, Homo sapiens
  misc_RNA (1)...(19): siRNA sense strand
gaaggaauuagaugaauca

SEQ ID NO: 933510 - RNA, 19 nt, Homo sapiens
  misc_RNA (1)...(19): siRNA sense strand
ggugugaaccaauaucuaa

SEQ ID NO: 933511 - RNA, 19 nt, Homo sapiens
  misc_RNA (1)...(19): siRNA sense strand
ggacucacauauaaacaag

SEQ ID NO: 933512 - RNA, 19 nt, Homo sapiens
  misc_RNA (1)...(19): siRNA sense strand
aaagaaagaagaccugauu

SEQ ID NO: 933513 - RNA, 19 nt, Homo sapiens
  misc_RNA (1)...(19): siRNA sense strand
gacaaagccugugaaagug

SEQ ID NO: 933514 - RNA, 19 nt, Homo sapiens
  misc_RNA (1)...(19): siRNA sense strand
gaagaugaauagucgaaaa

SEQ ID NO: 933515 - RNA, 19 nt, Homo sapiens
  misc_RNA (1)...(19): siRNA sense strand
gaggaggaauauagcagaa

SEQ ID NO: 933516 - RNA, 19 nt, Homo sapiens
  misc_RNA (1)...(19): siRNA sense strand
ucaaaggccuaugugauug

SEQ ID NO: 933517 - RNA, 19 nt, Homo sapiens
  misc_RNA (1)...(19): siRNA sense strand
ugaacucucugccacacua

SEQ ID NO: 933518 - RNA, 19 nt, Homo sapiens
  misc_RNA (1)...(19): siRNA sense strand
auaaacaagcgucagauua

SEQ ID NO: 933519 - RNA, 19 nt, Homo sapiens
  misc_RNA (1)...(19): siRNA sense strand
cauagcacccuucgccuua

SEQ ID NO: 933520 - RNA, 19 nt, Homo sapiens
  misc_RNA (1)...(19): siRNA sense strand
uggaauaccuggaaacaag

SEQ ID NO: 933521 - RNA, 19 nt, Homo sapiens
  misc_RNA (1)...(19): siRNA sense strand
cacaagggacucacauaua

SEQ ID NO: 933522 - RNA, 19 nt, Homo sapiens
  misc_RNA (1)...(19): siRNA sense strand
ucaacgauguuacgcagaa

SEQ ID NO: 933523 - RNA, 19 nt, Homo sapiens
  misc_RNA (1)...(19): siRNA sense strand
cagcauuuauugaaacuuc

SEQ ID NO: 933524 - RNA, 19 nt, Homo sapiens
  misc_RNA (1)...(19): siRNA sense strand
aaacaagcgucagauuaug

SEQ ID NO: 933525 - RNA, 19 nt, Homo sapiens
  misc_RNA (1)...(19): siRNA sense strand
ggcaguuaaucauguguuu

SEQ ID NO: 933526 - RNA, 19 nt, Homo sapiens
  misc_RNA (1)...(19): siRNA sense strand
gaaacaaugggaagagcaa

SEQ ID NO: 933527 - RNA, 19 nt, Homo sapiens
  misc_RNA (1)...(19): siRNA sense strand
gcagaaaugaacuagauuc

SEQ ID NO: 933528 - RNA, 19 nt, Homo sapiens
  misc_RNA (1)...(19): siRNA sense strand
gaaacuucauaagcagauu

SEQ ID NO: 933529 - RNA, 19 nt, Homo sapiens
  misc_RNA (1)...(19): siRNA sense strand
gagccagaagccaagauua

SEQ ID NO: 933530 - RNA, 19 nt, Homo sapiens
  misc_RNA (1)...(19): siRNA sense strand
cuaugugauuggaggauua

SEQ ID NO: 933531 - RNA, 19 nt, Homo sapiens
  misc_RNA (1)...(19): siRNA sense strand
gaacauggaugaaaaugac

SEQ ID NO: 933532 - RNA, 19 nt, Homo sapiens
  misc_RNA (1)...(19): siRNA sense strand
ucgaagagauguuguucau

SEQ ID NO: 933533 - RNA, 19 nt, Homo sapiens
  misc_RNA (1)...(19): siRNA sense strand
ugggucaacuggaaggaua

SEQ ID NO: 933534 - RNA, 19 nt, Homo sapiens
  misc_RNA (1)...(19): siRNA sense strand
gaaucaaaggccuauguga

SEQ ID NO: 933535 - RNA, 19 nt, Homo sapiens
  misc_RNA (1)...(19): siRNA sense strand
aggcauaaaugaagaucaa

SEQ ID NO: 933536 - RNA, 19 nt, Homo sapiens
  misc_RNA (1)...(19): siRNA sense strand
ucacaagggacucacauau

SEQ ID NO: 933537 - RNA, 19 nt, Homo sapiens
  misc_RNA (1)...(19): siRNA sense strand
ugaaagugcuucucaugac

SEQ ID NO: 933538 - RNA, 19 nt, Homo sapiens
  misc_RNA (1)...(19): siRNA sense strand
acaagagacuggcaagaag

SEQ ID NO: 933539 - RNA, 19 nt, Homo sapiens
  misc_RNA (1)...(19): siRNA sense strand
ucaaauggaaccaaacuca

SEQ ID NO: 933540 - RNA, 19 nt, Homo sapiens
  misc_RNA (1)...(19): siRNA sense strand
gcauaaaugaagaucaaga

SEQ ID NO: 933541 - RNA, 19 nt, Homo sapiens
  misc_RNA (1)...(19): siRNA sense strand
caccuaauauacugaagga

SEQ ID NO: 933542 - RNA, 19 nt, Homo sapiens
  misc_RNA (1)...(19): siRNA sense strand
aaggaugggucaacuggaa

SEQ ID NO: 933543 - RNA, 19 nt, Homo sapiens
  misc_RNA (1)...(19): siRNA sense strand
aagaagaccugauuuaccu

SEQ ID NO: 933544 - RNA, 19 nt, Homo sapiens
  misc_RNA (1)...(19): siRNA sense strand
ccagugaggaggaauauag

SEQ ID NO: 933545 - RNA, 19 nt, Homo sapiens
  misc_RNA (1)...(19): siRNA sense strand
gugaaagugcuucucauga

SEQ ID NO: 933546 - RNA, 19 nt, Homo sapiens
  misc_RNA (1)...(19): siRNA sense strand
ugaaggaauuagaugaauc

SEQ ID NO: 933547 - RNA, 19 nt, Homo sapiens
  misc_RNA (1)...(19): siRNA sense strand
ccacggaggccagcugaaa

SEQ ID NO: 933548 - RNA, 19 nt, Homo sapiens
  misc_RNA (1)...(19): siRNA sense strand
caagggacucacauauaaa

SEQ ID NO: 933549 - RNA, 19 nt, Homo sapiens
  misc_RNA (1)...(19): siRNA sense strand
gaacucauaaagaaagaag

SEQ ID NO: 933550 - RNA, 19 nt, Homo sapiens
  misc_RNA (1)...(19): siRNA sense strand
ggaugaaaaugacaaagga

SEQ ID NO: 933551 - RNA, 19 nt, Homo sapiens
  misc_RNA (1)...(19): siRNA sense strand
aaacucagauggacaugac

SEQ ID NO: 933552 - RNA, 19 nt, Homo sapiens
  misc_RNA (1)...(19): siRNA sense strand
ggaauauagcagaaaugaa

SEQ ID NO: 933553 - RNA, 19 nt, Homo sapiens
  misc_RNA (1)...(19): siRNA sense strand
ggaauaccuggaaacaaga

SEQ ID NO: 933554 - RNA, 19 nt, Homo sapiens
  misc_RNA (1)...(19): siRNA sense strand
gaggauuaguagaucacaa

SEQ ID NO: 933555 - RNA, 19 nt, Homo sapiens
  misc_RNA (1)...(19): siRNA sense strand
ggugaagggugugaaccaa

SEQ ID NO: 933556 - RNA, 19 nt, Homo sapiens
  misc_RNA (1)...(19): siRNA sense strand
cagauggacaugacagaaa

SEQ ID NO: 933557 - RNA, 19 nt, Homo sapiens
  misc_RNA (1)...(19): siRNA sense strand
cagaaaacguguucgaaga

SEQ ID NO: 933558 - RNA, 19 nt, Homo sapiens
  misc_RNA (1)...(19): siRNA sense strand
gaaaaucacacugaaucua

SEQ ID NO: 933559 - RNA, 19 nt, Homo sapiens
  misc_RNA (1)...(19): siRNA sense strand
caacgauguuacgcagaaa

SEQ ID NO: 933560 - RNA, 19 nt, Homo sapiens
  misc_RNA (1)...(19): siRNA sense strand
accaauaucuaaacgacaa

SEQ ID NO: 933561 - RNA, 19 nt, Homo sapiens
  misc_RNA (1)...(19): siRNA sense strand
caguuaaucauguguuuga

SEQ ID NO: 933562 - RNA, 19 nt, Homo sapiens
  misc_RNA (1)...(19): siRNA sense strand
gcaacgggaacuccgcaaa

SEQ ID NO: 933563 - RNA, 19 nt, Homo sapiens
  misc_RNA (1)...(19): siRNA sense strand
gaaaacguguucgaagaga

SEQ ID NO: 933564 - RNA, 19 nt, Homo sapiens
  misc_RNA (1)...(19): siRNA sense strand
ggaaccaaacucagaugga

SEQ ID NO: 933565 - RNA, 19 nt, Homo sapiens
  misc_RNA (1)...(19): siRNA sense strand
cauauaaacaagcgucaga

SEQ ID NO: 933566 - RNA, 19 nt, Homo sapiens
  misc_RNA (1)...(19): siRNA sense strand
gauuggaggauuaguagau

SEQ ID NO: 933567 - RNA, 19 nt, Homo sapiens
  misc_RNA (1)...(19): siRNA sense strand
ccuaauauacugaaggaau

SEQ ID NO: 933568 - RNA, 19 nt, Homo sapiens
  misc_RNA (1)...(19): siRNA sense strand
gacaaaggaugggucaacu

SEQ ID NO: 933569 - RNA, 19 nt, Homo sapiens
  misc_RNA (1)...(19): siRNA sense strand
gaacucucugccacacuaa

SEQ ID NO: 933570 - RNA, 19 nt, Homo sapiens
  misc_RNA (1)...(19): siRNA sense strand
uauaaacaagcgucagauu

SEQ ID NO: 933571 - RNA, 19 nt, Homo sapiens
  misc_RNA (1)...(19): siRNA sense strand
aaugucaaauggaaccaaa

SEQ ID NO: 933572 - RNA, 19 nt, Homo sapiens
  misc_RNA (1)...(19): siRNA sense strand
uaucaaaccagagcacuau

SEQ ID NO: 933573 - RNA, 19 nt, Homo sapiens
  misc_RNA (1)...(19): siRNA sense strand
gugaacucauaaagaaaga

SEQ ID NO: 933574 - RNA, 19 nt, Homo sapiens
  misc_RNA (1)...(19): siRNA sense strand
gaugaauagucgaaaaguu

SEQ ID NO: 933575 - RNA, 19 nt, Homo sapiens
  misc_RNA (1)...(19): siRNA sense strand
cgggaacuccgcaaacaaa

SEQ ID NO: 933576 - RNA, 19 nt, Homo sapiens
  misc_RNA (1)...(19): siRNA sense strand
gaagggugugaaccaauau

SEQ ID NO: 933577 - RNA, 19 nt, Homo sapiens
  misc_RNA (1)...(19): siRNA sense strand
uagcacccuucgccuuauu

SEQ ID NO: 933578 - RNA, 19 nt, Homo sapiens
  misc_RNA (1)...(19): siRNA sense strand
gugcuucucaugacaauca

SEQ ID NO: 933579 - RNA, 19 nt, Homo sapiens
  misc_RNA (1)...(19): siRNA sense strand
gagacuggcaagaagcauu

SEQ ID NO: 933580 - RNA, 19 nt, Homo sapiens
  misc_RNA (1)...(19): siRNA sense strand
cgucagauucaccuaauau

SEQ ID NO: 933581 - RNA, 19 nt, Homo sapiens
  misc_RNA (1)...(19): siRNA sense strand
uaagcagauucaacgaugu

SEQ ID NO: 933582 - RNA, 19 nt, Homo sapiens
  misc_RNA (1)...(19): siRNA sense strand
acccuucgccuuauuauug

SEQ ID NO: 933583 - RNA, 19 nt, Homo sapiens
  misc_RNA (1)...(19): siRNA sense strand
uaaggaaaaucacacugaa

SEQ ID NO: 933584 - RNA, 19 nt, Homo sapiens
  misc_RNA (1)...(19): siRNA sense strand
aaagcaaggcauaaaugaa

SEQ ID NO: 933585 - RNA, 19 nt, Homo sapiens
  misc_RNA (1)...(19): siRNA sense strand
gggacucacauauaaacaa

SEQ ID NO: 933586 - RNA, 19 nt, Homo sapiens
  misc_RNA (1)...(19): siRNA sense strand
aaauggaaccaaacucaga

SEQ ID NO: 933587 - RNA, 19 nt, Homo sapiens
  misc_RNA (1)...(19): siRNA sense strand
agacuggcaagaagcauuu

SEQ ID NO: 933588 - RNA, 19 nt, Homo sapiens
  misc_RNA (1)...(19): siRNA sense strand
gaagccaagauuaggugaa

SEQ ID NO: 933589 - RNA, 19 nt, Homo sapiens
  misc_RNA (1)...(19): siRNA sense strand
caacggaaaggagcuguuc

SEQ ID NO: 933590 - RNA, 19 nt, Homo sapiens
  misc_RNA (1)...(19): siRNA sense strand
cgaagagauguuguucaua

SEQ ID NO: 933591 - RNA, 19 nt, Homo sapiens
  misc_RNA (1)...(19): siRNA sense strand
gugaagaugaauagucgaa

SEQ ID NO: 933592 - RNA, 19 nt, Homo sapiens
  misc_RNA (1)...(19): siRNA sense strand
aagcaaggcauaaaugaag

SEQ ID NO: 933593 - RNA, 19 nt, Homo sapiens
  misc_RNA (1)...(19): siRNA sense strand
gaggaauucuugaaccaua

SEQ ID NO: 933594 - RNA, 19 nt, Homo sapiens
  misc_RNA (1)...(19): siRNA sense strand
ugaacagacucgaucguua

SEQ ID NO: 933595 - RNA, 19 nt, Homo sapiens
  misc_RNA (1)...(19): siRNA sense strand
gaagaugagcaacgaagua

SEQ ID NO: 933596 - RNA, 19 nt, Homo sapiens
  misc_RNA (1)...(19): siRNA sense strand
gagaacaacuucgagcaaa

SEQ ID NO: 933597 - RNA, 19 nt, Homo sapiens
  misc_RNA (1)...(19): siRNA sense strand
caccaacaauccagaauuu

SEQ ID NO: 933598 - RNA, 19 nt, Homo sapiens
  misc_RNA (1)...(19): siRNA sense strand
aaacagcgcuaccuugaug

SEQ ID NO: 933599 - RNA, 19 nt, Homo sapiens
  misc_RNA (1)...(19): siRNA sense strand
ggacaccauugacucauau

SEQ ID NO: 933600 - RNA, 19 nt, Homo sapiens
  misc_RNA (1)...(19): siRNA sense strand
guaaaggaacggucuguuu

SEQ ID NO: 933601 - RNA, 19 nt, Homo sapiens
  misc_RNA (1)...(19): siRNA sense strand
gaacagaggcaugaagaug

SEQ ID NO: 933602 - RNA, 19 nt, Homo sapiens
  misc_RNA (1)...(19): siRNA sense strand
gaaugagcgucgagaacaa

SEQ ID NO: 933603 - RNA, 19 nt, Homo sapiens
  misc_RNA (1)...(19): siRNA sense strand
gauaaggagcguuacauga

SEQ ID NO: 933604 - RNA, 19 nt, Homo sapiens
  misc_RNA (1)...(19): siRNA sense strand
gaaagaaacagagguaaag

SEQ ID NO: 933605 - RNA, 19 nt, Homo sapiens
  misc_RNA (1)...(19): siRNA sense strand
cagaaaggcaaaucucaua

SEQ ID NO: 933606 - RNA, 19 nt, Homo sapiens
  misc_RNA (1)...(19): siRNA sense strand
gaacagacucgaucguuag

SEQ ID NO: 933607 - RNA, 19 nt, Homo sapiens
  misc_RNA (1)...(19): siRNA sense strand
gcaaugaacagaggcauga

SEQ ID NO: 933608 - RNA, 19 nt, Homo sapiens
  misc_RNA (1)...(19): siRNA sense strand
ugacaucccuauauuuaca

SEQ ID NO: 933609 - RNA, 19 nt, Homo sapiens
  misc_RNA (1)...(19): siRNA sense strand
caaggucaguugcuucaga

SEQ ID NO: 933610 - RNA, 19 nt, Homo sapiens
  misc_RNA (1)...(19): siRNA sense strand
cagagugagucuucaaaug

SEQ ID NO: 933611 - RNA, 19 nt, Homo sapiens
  misc_RNA (1)...(19): siRNA sense strand
gaacaacuucgagcaaaga

SEQ ID NO: 933612 - RNA, 19 nt, Homo sapiens
  misc_RNA (1)...(19): siRNA sense strand
gcacagcaguggagaagcu

SEQ ID NO: 933613 - RNA, 19 nt, Homo sapiens
  misc_RNA (1)...(19): siRNA sense strand
gcaugaagaugagcaacga

SEQ ID NO: 933614 - RNA, 19 nt, Homo sapiens
  misc_RNA (1)...(19): siRNA sense strand
uagcaaagcucgggaagca

SEQ ID NO: 933615 - RNA, 19 nt, Homo sapiens
  misc_RNA (1)...(19): siRNA sense strand
gcaaaucucauaggcaaga

SEQ ID NO: 933616 - RNA, 19 nt, Homo sapiens
  misc_RNA (1)...(19): siRNA sense strand
uacaaggucuucaguagga

SEQ ID NO: 933617 - RNA, 19 nt, Homo sapiens
  misc_RNA (1)...(19): siRNA sense strand
agacagcaaugcacccaaa

SEQ ID NO: 933618 - RNA, 19 nt, Homo sapiens
  misc_RNA (1)...(19): siRNA sense strand
ccagaaaucacaaggaugu

SEQ ID NO: 933619 - RNA, 19 nt, Homo sapiens
  misc_RNA (1)...(19): siRNA sense strand
aaacagaggccuacaaggu

SEQ ID NO: 933620 - RNA, 19 nt, Homo sapiens
  misc_RNA (1)...(19): siRNA sense strand
gucaguugcuucagaguga

SEQ ID NO: 933621 - RNA, 19 nt, Homo sapiens
  misc_RNA (1)...(19): siRNA sense strand
gaagaaagaggaagaaacc

SEQ ID NO: 933622 - RNA, 19 nt, Homo sapiens
  misc_RNA (1)...(19): siRNA sense strand
gaaaucacaaggauguuag

SEQ ID NO: 933623 - RNA, 19 nt, Homo sapiens
  misc_RNA (1)...(19): siRNA sense strand
ugagaaagaaacagaggua

SEQ ID NO: 933624 - RNA, 19 nt, Homo sapiens
  misc_RNA (1)...(19): siRNA sense strand
uauguucgguucaugaaug

SEQ ID NO: 933625 - RNA, 19 nt, Homo sapiens
  misc_RNA (1)...(19): siRNA sense strand
acagagauaaggagcguua

SEQ ID NO: 933626 - RNA, 19 nt, Homo sapiens
  misc_RNA (1)...(19): siRNA sense strand
gagaccagaagucccauuu

SEQ ID NO: 933627 - RNA, 19 nt, Homo sapiens
  misc_RNA (1)...(19): siRNA sense strand
cuucauagcuacaguucga

SEQ ID NO: 933628 - RNA, 19 nt, Homo sapiens
  misc_RNA (1)...(19): siRNA sense strand
ggauauguucgguucauga

SEQ ID NO: 933629 - RNA, 19 nt, Homo sapiens
  misc_RNA (1)...(19): siRNA sense strand
ggaaguggagagacaccua

SEQ ID NO: 933630 - RNA, 19 nt, Homo sapiens
  misc_RNA (1)...(19): siRNA sense strand
gaugaagcagacagagaua

SEQ ID NO: 933631 - RNA, 19 nt, Homo sapiens
  misc_RNA (1)...(19): siRNA sense strand
agaaaucacaaggauguua

SEQ ID NO: 933632 - RNA, 19 nt, Homo sapiens
  misc_RNA (1)...(19): siRNA sense strand
gagguuccauacaguagug

SEQ ID NO: 933633 - RNA, 19 nt, Homo sapiens
  misc_RNA (1)...(19): siRNA sense strand
gagccgcaacacagucuua

SEQ ID NO: 933634 - RNA, 19 nt, Homo sapiens
  misc_RNA (1)...(19): siRNA sense strand
gcaggccacucaugaucau

SEQ ID NO: 933635 - RNA, 19 nt, Homo sapiens
  misc_RNA (1)...(19): siRNA sense strand
ggcaaugaauggaguaaac

SEQ ID NO: 933636 - RNA, 19 nt, Homo sapiens
  misc_RNA (1)...(19): siRNA sense strand
gauguuaggcaaugaaugg

SEQ ID NO: 933637 - RNA, 19 nt, Homo sapiens
  misc_RNA (1)...(19): siRNA sense strand
gagugagucuucaaaugca

SEQ ID NO: 933638 - RNA, 19 nt, Homo sapiens
  misc_RNA (1)...(19): siRNA sense strand
uaaggagcguuacaugaag

SEQ ID NO: 933639 - RNA, 19 nt, Homo sapiens
  misc_RNA (1)...(19): siRNA sense strand
acaaggauguuaggcaaug

SEQ ID NO: 933640 - RNA, 19 nt, Homo sapiens
  misc_RNA (1)...(19): siRNA sense strand
gagcaaagagaccagaagu

SEQ ID NO: 933641 - RNA, 19 nt, Homo sapiens
  misc_RNA (1)...(19): siRNA sense strand
gagaaguugugaacagacu

SEQ ID NO: 933642 - RNA, 19 nt, Homo sapiens
  misc_RNA (1)...(19): siRNA sense strand
uggacaccauugacucaua

SEQ ID NO: 933643 - RNA, 19 nt, Homo sapiens
  misc_RNA (1)...(19): siRNA sense strand
agaaagaaacagagguaaa

SEQ ID NO: 933644 - RNA, 19 nt, Homo sapiens
  misc_RNA (1)...(19): siRNA sense strand
gagaaagaaacagagguaa

SEQ ID NO: 933645 - RNA, 19 nt, Homo sapiens
  misc_RNA (1)...(19): siRNA sense strand
auaaggagcguuacaugaa

SEQ ID NO: 933646 - RNA, 19 nt, Homo sapiens
  misc_RNA (1)...(19): siRNA sense strand
gcagaaggcaaugaacaga

SEQ ID NO: 933647 - RNA, 19 nt, Homo sapiens
  misc_RNA (1)...(19): siRNA sense strand
agaaacagagguaaaggaa

SEQ ID NO: 933648 - RNA, 19 nt, Homo sapiens
  misc_RNA (1)...(19): siRNA sense strand
gaccagaagucccauuucc

SEQ ID NO: 933649 - RNA, 19 nt, Homo sapiens
  misc_RNA (1)...(19): siRNA sense strand
ggaagaaagaggaagaaac

SEQ ID NO: 933650 - RNA, 19 nt, Homo sapiens
  misc_RNA (1)...(19): siRNA sense strand
ccaaggagaguaaugaucu

SEQ ID NO: 933651 - RNA, 19 nt, Homo sapiens
  misc_RNA (1)...(19): siRNA sense strand
ccagagguuccauacagua

SEQ ID NO: 933652 - RNA, 19 nt, Homo sapiens
  misc_RNA (1)...(19): siRNA sense strand
gauauguucgguucaugaa

SEQ ID NO: 933653 - RNA, 19 nt, Homo sapiens
  misc_RNA (1)...(19): siRNA sense strand
ccaccaacaauccagaauu

SEQ ID NO: 933654 - RNA, 19 nt, Homo sapiens
  misc_RNA (1)...(19): siRNA sense strand
gaaaggcaaaucucauagg

SEQ ID NO: 933655 - RNA, 19 nt, Homo sapiens
  misc_RNA (1)...(19): siRNA sense strand
caaggauguuaggcaauga

SEQ ID NO: 933656 - RNA, 19 nt, Homo sapiens
  misc_RNA (1)...(19): siRNA sense strand
ccacaucauccaccaacaa

SEQ ID NO: 933657 - RNA, 19 nt, Homo sapiens
  misc_RNA (1)...(19): siRNA sense strand
uuacagaggaauucuugaa

SEQ ID NO: 933658 - RNA, 19 nt, Homo sapiens
  misc_RNA (1)...(19): siRNA sense strand
caaggagaguaaugaucug

SEQ ID NO: 933659 - RNA, 19 nt, Homo sapiens
  misc_RNA (1)...(19): siRNA sense strand
cagaggaauucuugaacca

SEQ ID NO: 933660 - RNA, 19 nt, Homo sapiens
  misc_RNA (1)...(19): siRNA sense strand
gaugagcaacgaaguaaac

SEQ ID NO: 933661 - RNA, 19 nt, Homo sapiens
  misc_RNA (1)...(19): siRNA sense strand
cagaauuuguggaggaucu

SEQ ID NO: 933662 - RNA, 19 nt, Homo sapiens
  misc_RNA (1)...(19): siRNA sense strand
uaaaggaacggucuguuuu

SEQ ID NO: 933663 - RNA, 19 nt, Homo sapiens
  misc_RNA (1)...(19): siRNA sense strand
gcgcuaccuugaugaagca

SEQ ID NO: 933664 - RNA, 19 nt, Homo sapiens
  misc_RNA (1)...(19): siRNA sense strand
cgaaguaaacgaggagguu

SEQ ID NO: 933665 - RNA, 19 nt, Homo sapiens
  misc_RNA (1)...(19): siRNA sense strand
ccaagacaaugaaaacuuc

SEQ ID NO: 933666 - RNA, 19 nt, Homo sapiens
  misc_RNA (1)...(19): siRNA sense strand
aagaugagcaacgaaguaa

SEQ ID NO: 933667 - RNA, 19 nt, Homo sapiens
  misc_RNA (1)...(19): siRNA sense strand
ucgagaaguugugaacaga

SEQ ID NO: 933668 - RNA, 19 nt, Homo sapiens
  misc_RNA (1)...(19): siRNA sense strand
cgagaacaacuucgagcaa

SEQ ID NO: 933669 - RNA, 19 nt, Homo sapiens
  misc_RNA (1)...(19): siRNA sense strand
aaaggaagaaagaggaaga

SEQ ID NO: 933670 - RNA, 19 nt, Homo sapiens
  misc_RNA (1)...(19): siRNA sense strand
ccaaaggaagaaagaggaa

SEQ ID NO: 933671 - RNA, 19 nt, Homo sapiens
  misc_RNA (1)...(19): siRNA sense strand
ugaaugagcgucgagaaca

SEQ ID NO: 933672 - RNA, 19 nt, Homo sapiens
  misc_RNA (1)...(19): siRNA sense strand
gagauaaggagcguuacau

SEQ ID NO: 933673 - RNA, 19 nt, Homo sapiens
  misc_RNA (1)...(19): siRNA sense strand
agaagucccauuuccagaa

SEQ ID NO: 933674 - RNA, 19 nt, Homo sapiens
  misc_RNA (1)...(19): siRNA sense strand
gagcgucgagaacaacuuc

SEQ ID NO: 933675 - RNA, 19 nt, Homo sapiens
  misc_RNA (1)...(19): siRNA sense strand
cagcagaaggcaaugaaca

SEQ ID NO: 933676 - RNA, 19 nt, Homo sapiens
  misc_RNA (1)...(19): siRNA sense strand
cuacaguggacaccauuga

SEQ ID NO: 933677 - RNA, 19 nt, Homo sapiens
  misc_RNA (1)...(19): siRNA sense strand
gaaaacagaggccuacaag

SEQ ID NO: 933678 - RNA, 19 nt, Homo sapiens
  misc_RNA (1)...(19): siRNA sense strand
caggauauguucgguucau

SEQ ID NO: 933679 - RNA, 19 nt, Homo sapiens
  misc_RNA (1)...(19): siRNA sense strand
caccauugacucauauaug

SEQ ID NO: 933680 - RNA, 19 nt, Homo sapiens
  misc_RNA (1)...(19): siRNA sense strand
agaacaacuucgagcaaag

SEQ ID NO: 933681 - RNA, 19 nt, Homo sapiens
  misc_RNA (1)...(19): siRNA sense strand
ugaugaagcagacagagau

SEQ ID NO: 933682 - RNA, 19 nt, Homo sapiens
  misc_RNA (1)...(19): siRNA sense strand
gugaacagacucgaucguu

SEQ ID NO: 933683 - RNA, 19 nt, Homo sapiens
  misc_RNA (1)...(19): siRNA sense strand
uuacaugaaggaacuggaa

SEQ ID NO: 933684 - RNA, 19 nt, Homo sapiens
  misc_RNA (1)...(19): siRNA sense strand
guuccaaggagaguaauga

SEQ ID NO: 933685 - RNA, 19 nt, Homo sapiens
  misc_RNA (1)...(19): siRNA sense strand
aacagaggcaugaagauga

SEQ ID NO: 933686 - RNA, 19 nt, Homo sapiens
  misc_RNA (1)...(19): siRNA sense strand
acagaggcaugaagaugag

SEQ ID NO: 933687 - RNA, 19 nt, Homo sapiens
  misc_RNA (1)...(19): siRNA sense strand
uuccagaaaucacaaggau

SEQ ID NO: 933688 - RNA, 19 nt, Homo sapiens
  misc_RNA (1)...(19): siRNA sense strand
gcaaugaauggaguaaacu

SEQ ID NO: 933689 - RNA, 19 nt, Homo sapiens
  misc_RNA (1)...(19): siRNA sense strand
guuaaaucacccagagguu

SEQ ID NO: 933690 - RNA, 19 nt, Homo sapiens
  misc_RNA (1)...(19): siRNA sense strand
ggcuaccacuggguuaaau

SEQ ID NO: 933691 - RNA, 19 nt, Homo sapiens
  misc_RNA (1)...(19): siRNA sense strand
acccagagguuccauacag

SEQ ID NO: 933692 - RNA, 19 nt, Homo sapiens
  misc_RNA (1)...(19): siRNA sense strand
caaggucuucaguaggaaa

SEQ ID NO: 933693 - RNA, 19 nt, Homo sapiens
  misc_RNA (1)...(19): siRNA sense strand
ccaagaagcuggagaaacu

SEQ ID NO: 933694 - RNA, 19 nt, Homo sapiens
  misc_RNA (1)...(19): siRNA sense strand
gagaagcacagggaacuua

SEQ ID NO: 933695 - RNA, 19 nt, Homo sapiens
  misc_RNA (1)...(19): siRNA sense strand
agagagauguggccaagaa

SEQ ID NO: 933696 - RNA, 19 nt, Homo sapiens
  misc_RNA (1)...(19): siRNA sense strand
gaacuuaggcugcggaacu

SEQ ID NO: 933697 - RNA, 19 nt, Homo sapiens
  misc_RNA (1)...(19): siRNA sense strand
gaugaggaccugaagaaga

SEQ ID NO: 933698 - RNA, 19 nt, Homo sapiens
  misc_RNA (1)...(19): siRNA sense strand
ccaaagaccaagcaucuca

SEQ ID NO: 933699 - RNA, 19 nt, Homo sapiens
  misc_RNA (1)...(19): siRNA sense strand
ggaggaagaaggcgagaag

SEQ ID NO: 933700 - RNA, 19 nt, Homo sapiens
  misc_RNA (1)...(19): siRNA sense strand
ugacugggaccucaagaga

SEQ ID NO: 933701 - RNA, 19 nt, Homo sapiens
  misc_RNA (1)...(19): siRNA sense strand
acugggaccucaagagaga

SEQ ID NO: 933702 - RNA, 19 nt, Homo sapiens
  misc_RNA (1)...(19): siRNA sense strand
ucagagaagaggaggaaga

SEQ ID NO: 933703 - RNA, 19 nt, Homo sapiens
  misc_RNA (1)...(19): siRNA sense strand
cagagaagaggaggaagaa

SEQ ID NO: 933704 - RNA, 19 nt, Homo sapiens
  misc_RNA (1)...(19): siRNA sense strand
gaccugugacuccgacuga

SEQ ID NO: 933705 - RNA, 19 nt, Homo sapiens
  misc_RNA (1)...(19): siRNA sense strand
ugaaggcccuacgggagaa

SEQ ID NO: 933706 - RNA, 19 nt, Homo sapiens
  misc_RNA (1)...(19): siRNA sense strand
ggacucagagggcuauugc

SEQ ID NO: 933707 - RNA, 19 nt, Homo sapiens
  misc_RNA (1)...(19): siRNA sense strand
caagaagcuggagaaacua

SEQ ID NO: 933708 - RNA, 19 nt, Homo sapiens
  misc_RNA (1)...(19): siRNA sense strand
gaagauggggagccaaaga

SEQ ID NO: 933709 - RNA, 19 nt, Homo sapiens
  misc_RNA (1)...(19): siRNA sense strand
augaggaccugaagaagag

SEQ ID NO: 933710 - RNA, 19 nt, Homo sapiens
  misc_RNA (1)...(19): siRNA sense strand
aagaagcuggagaaacuaa

SEQ ID NO: 933711 - RNA, 19 nt, Homo sapiens
  misc_RNA (1)...(19): siRNA sense strand
aggaugaggaccugaagaa

SEQ ID NO: 933712 - RNA, 19 nt, Homo sapiens
  misc_RNA (1)...(19): siRNA sense strand
gaacaaaagaccugugacu

SEQ ID NO: 933713 - RNA, 19 nt, Homo sapiens
  misc_RNA (1)...(19): siRNA sense strand
ccuagccucugcaguggau

SEQ ID NO: 933714 - RNA, 19 nt, Homo sapiens
  misc_RNA (1)...(19): siRNA sense strand
gaggaugaggaccugaaga

SEQ ID NO: 933715 - RNA, 19 nt, Homo sapiens
  misc_RNA (1)...(19): siRNA sense strand
gaagcuggagaaacuaaaa

SEQ ID NO: 933716 - RNA, 19 nt, Homo sapiens
  misc_RNA (1)...(19): siRNA sense strand
aacuuaggcugcggaacua

SEQ ID NO: 933717 - RNA, 19 nt, Homo sapiens
  misc_RNA (1)...(19): siRNA sense strand
gaacuaugucccggaggau

SEQ ID NO: 933718 - RNA, 19 nt, Homo sapiens
  misc_RNA (1)...(19): siRNA sense strand
gcgcaaggacaaggaagau

SEQ ID NO: 933719 - RNA, 19 nt, Homo sapiens
  misc_RNA (1)...(19): siRNA sense strand
uggaggagaaggugaagga

SEQ ID NO: 933720 - RNA, 19 nt, Homo sapiens
  misc_RNA (1)...(19): siRNA sense strand
caccaaagguuaugaagaa

SEQ ID NO: 933721 - RNA, 19 nt, Homo sapiens
  misc_RNA (1)...(19): siRNA sense strand
gaagagaaagucugugauu

SEQ ID NO: 933722 - RNA, 19 nt, Homo sapiens
  misc_RNA (1)...(19): siRNA sense strand
gaucgauccuccugcauuu

SEQ ID NO: 933723 - RNA, 19 nt, Homo sapiens
  misc_RNA (1)...(19): siRNA sense strand
gaaaguguuugcuaaaugg

SEQ ID NO: 933724 - RNA, 19 nt, Homo sapiens
  misc_RNA (1)...(19): siRNA sense strand
cagagaagcgcaugaguua

SEQ ID NO: 933725 - RNA, 19 nt, Homo sapiens
  misc_RNA (1)...(19): siRNA sense strand
caacuggacugugaccuuu

SEQ ID NO: 933726 - RNA, 19 nt, Homo sapiens
  misc_RNA (1)...(19): siRNA sense strand
gagaugagugugaugaaua

SEQ ID NO: 933727 - RNA, 19 nt, Homo sapiens
  misc_RNA (1)...(19): siRNA sense strand
gaaaaguccccuaccauua

SEQ ID NO: 933728 - RNA, 19 nt, Homo sapiens
  misc_RNA (1)...(19): siRNA sense strand
aaagacaguugguaucuau

SEQ ID NO: 933729 - RNA, 19 nt, Homo sapiens
  misc_RNA (1)...(19): siRNA sense strand
ugaagugaauuucccauug

SEQ ID NO: 933730 - RNA, 19 nt, Homo sapiens
  misc_RNA (1)...(19): siRNA sense strand
gaaggugggaaaugagaua

SEQ ID NO: 933731 - RNA, 19 nt, Homo sapiens
  misc_RNA (1)...(19): siRNA sense strand
gccagaaggugggaaauga

SEQ ID NO: 933732 - RNA, 19 nt, Homo sapiens
  misc_RNA (1)...(19): siRNA sense strand
gaagugaauuucccauugc

SEQ ID NO: 933733 - RNA, 19 nt, Homo sapiens
  misc_RNA (1)...(19): siRNA sense strand
gaagagaugagugugauga

SEQ ID NO: 933734 - RNA, 19 nt, Homo sapiens
  misc_RNA (1)...(19): siRNA sense strand
ggacgccuguuauggcauu

SEQ ID NO: 933735 - RNA, 19 nt, Homo sapiens
  misc_RNA (1)...(19): siRNA sense strand
aaauauacgugaccacaga

SEQ ID NO: 933736 - RNA, 19 nt, Homo sapiens
  misc_RNA (1)...(19): siRNA sense strand
guacaaaguggauaccauu

SEQ ID NO: 933737 - RNA, 19 nt, Homo sapiens
  misc_RNA (1)...(19): siRNA sense strand
caaagguuaugaagaagau

SEQ ID NO: 933738 - RNA, 19 nt, Homo sapiens
  misc_RNA (1)...(19): siRNA sense strand
ggaccuuuccgcaauauga

SEQ ID NO: 933739 - RNA, 19 nt, Homo sapiens
  misc_RNA (1)...(19): siRNA sense strand
agaaaguguuugcuaaaug

SEQ ID NO: 933740 - RNA, 19 nt, Homo sapiens
  misc_RNA (1)...(19): siRNA sense strand
gaaaagaaaguguuugcua

SEQ ID NO: 933741 - RNA, 19 nt, Homo sapiens
  misc_RNA (1)...(19): siRNA sense strand
gaagcacaggauaauauuu

SEQ ID NO: 933742 - RNA, 19 nt, Homo sapiens
  misc_RNA (1)...(19): siRNA sense strand
ucuacgggaugauaaauga

SEQ ID NO: 933743 - RNA, 19 nt, Homo sapiens
  misc_RNA (1)...(19): siRNA sense strand
caagaagcacaggauaaua

SEQ ID NO: 933744 - RNA, 19 nt, Homo sapiens
  misc_RNA (1)...(19): siRNA sense strand
aaacucaggucagaugguu

SEQ ID NO: 933745 - RNA, 19 nt, Homo sapiens
  misc_RNA (1)...(19): siRNA sense strand
guugguaucuauccgaaug

SEQ ID NO: 933746 - RNA, 19 nt, Homo sapiens
  misc_RNA (1)...(19): siRNA sense strand
uaaaugacaccuacugcaa

SEQ ID NO: 933747 - RNA, 19 nt, Homo sapiens
  misc_RNA (1)...(19): siRNA sense strand
agacagaaggguauagaaa

SEQ ID NO: 933748 - RNA, 19 nt, Homo sapiens
  misc_RNA (1)...(19): siRNA sense strand
gaacaaggaagagaugagu

SEQ ID NO: 933749 - RNA, 19 nt, Homo sapiens
  misc_RNA (1)...(19): siRNA sense strand
gaauuucccauugcuacua

SEQ ID NO: 933750 - RNA, 19 nt, Homo sapiens
  misc_RNA (1)...(19): siRNA sense strand
gccaagaagcacaggauaa

SEQ ID NO: 933751 - RNA, 19 nt, Homo sapiens
  misc_RNA (1)...(19): siRNA sense strand
gucauagguuuaucacuga

SEQ ID NO: 933752 - RNA, 19 nt, Homo sapiens
  misc_RNA (1)...(19): siRNA sense strand
gaguuacugugauggaguu

SEQ ID NO: 933753 - RNA, 19 nt, Homo sapiens
  misc_RNA (1)...(19): siRNA sense strand
caaaguggauaccauucuc

SEQ ID NO: 933754 - RNA, 19 nt, Homo sapiens
  misc_RNA (1)...(19): siRNA sense strand
gcgcaugaguuacugugau

SEQ ID NO: 933755 - RNA, 19 nt, Homo sapiens
  misc_RNA (1)...(19): siRNA sense strand
gaccaugauucgaguugug

SEQ ID NO: 933756 - RNA, 19 nt, Homo sapiens
  misc_RNA (1)...(19): siRNA sense strand
agaugagugugaugaauau

SEQ ID NO: 933757 - RNA, 19 nt, Homo sapiens
  misc_RNA (1)...(19): siRNA sense strand
gagaaagucugugauugcu

SEQ ID NO: 933758 - RNA, 19 nt, Homo sapiens
  misc_RNA (1)...(19): siRNA sense strand
aagagaaagucugugauug

SEQ ID NO: 933759 - RNA, 19 nt, Homo sapiens
  misc_RNA (1)...(19): siRNA sense strand
aagaagcacaggauaauau

SEQ ID NO: 933760 - RNA, 19 nt, Homo sapiens
  misc_RNA (1)...(19): siRNA sense strand
ccaagaagcacaggauaau

SEQ ID NO: 933761 - RNA, 19 nt, Homo sapiens
  misc_RNA (1)...(19): siRNA sense strand
guuauggcauucacgucua

SEQ ID NO: 933762 - RNA, 19 nt, Homo sapiens
  misc_RNA (1)...(19): siRNA sense strand
gcacagggugguuuaccuu

SEQ ID NO: 933763 - RNA, 19 nt, Homo sapiens
  misc_RNA (1)...(19): siRNA sense strand
cauaccagcguuccucuuu

SEQ ID NO: 933764 - RNA, 19 nt, Homo sapiens
  misc_RNA (1)...(19): siRNA sense strand
gcaacuggacugugaccuu

SEQ ID NO: 933765 - RNA, 19 nt, Homo sapiens
  misc_RNA (1)...(19): siRNA sense strand
gagaagcgcaugaguuacu

SEQ ID NO: 933766 - RNA, 19 nt, Homo sapiens
  misc_RNA (1)...(19): siRNA sense strand
ggugggaaaugagauagau

SEQ ID NO: 933767 - RNA, 19 nt, Homo sapiens
  misc_RNA (1)...(19): siRNA sense strand
gguugugcgucuuguaaau

SEQ ID NO: 933768 - RNA, 19 nt, Homo sapiens
  misc_RNA (1)...(19): siRNA sense strand
ggacaaccugguacaaagu

SEQ ID NO: 933769 - RNA, 19 nt, Homo sapiens
  misc_RNA (1)...(19): siRNA sense strand
aaugacaccuacugcaaga

SEQ ID NO: 933770 - RNA, 19 nt, Homo sapiens
  misc_RNA (1)...(19): siRNA sense strand
gaagacacaagagccuuug

SEQ ID NO: 933771 - RNA, 19 nt, Homo sapiens
  misc_RNA (1)...(19): siRNA sense strand
cagucuggcucauaucuca

SEQ ID NO: 933772 - RNA, 19 nt, Homo sapiens
  misc_RNA (1)...(19): siRNA sense strand
cacaagagccuuugcaacu

SEQ ID NO: 933773 - RNA, 19 nt, Homo sapiens
  misc_RNA (1)...(19): siRNA sense strand
ccauuauuaugaacaagga

SEQ ID NO: 933774 - RNA, 19 nt, Homo sapiens
  misc_RNA (1)...(19): siRNA sense strand
uggcaucauuuacaacaug

SEQ ID NO: 933775 - RNA, 19 nt, Homo sapiens
  misc_RNA (1)...(19): siRNA sense strand
ucagaugguuggccagaag

SEQ ID NO: 933776 - RNA, 19 nt, Homo sapiens
  misc_RNA (1)...(19): siRNA sense strand
cuaaaugggccaagaagca

SEQ ID NO: 933777 - RNA, 19 nt, Homo sapiens
  misc_RNA (1)...(19): siRNA sense strand
ccaaagguuaugaagaaga

SEQ ID NO: 933778 - RNA, 19 nt, Homo sapiens
  misc_RNA (1)...(19): siRNA sense strand
caagacagaaggguauaga

SEQ ID NO: 933779 - RNA, 19 nt, Homo sapiens
  misc_RNA (1)...(19): siRNA sense strand
acagagaagcgcaugaguu

SEQ ID NO: 933780 - RNA, 19 nt, Homo sapiens
  misc_RNA (1)...(19): siRNA sense strand
acaagagccuuugcaacug

SEQ ID NO: 933781 - RNA, 19 nt, Homo sapiens
  misc_RNA (1)...(19): siRNA sense strand
ucacgucuacgggaugaua

SEQ ID NO: 933782 - RNA, 19 nt, Homo sapiens
  misc_RNA (1)...(19): siRNA sense strand
cuauccgaaugcccaaaua

SEQ ID NO: 933783 - RNA, 19 nt, Homo sapiens
  misc_RNA (1)...(19): siRNA sense strand
ucaaggaagcgaauacuac

SEQ ID NO: 933784 - RNA, 19 nt, Homo sapiens
  misc_RNA (1)...(19): siRNA sense strand
ccaccaaagguuaugaaga

SEQ ID NO: 933785 - RNA, 19 nt, Homo sapiens
  misc_RNA (1)...(19): siRNA sense strand
ggaaaugagauagaucgau

SEQ ID NO: 933786 - RNA, 19 nt, Homo sapiens
  misc_RNA (1)...(19): siRNA sense strand
uggacaaccugguacaaag

SEQ ID NO: 933787 - RNA, 19 nt, Homo sapiens
  misc_RNA (1)...(19): siRNA sense strand
gcacaggauaauauuuaca

SEQ ID NO: 933788 - RNA, 19 nt, Homo sapiens
  misc_RNA (1)...(19): siRNA sense strand
ggccaagaagcacaggaua

SEQ ID NO: 933789 - RNA, 19 nt, Homo sapiens
  misc_RNA (1)...(19): siRNA sense strand
ugaagacacaagagccuuu

SEQ ID NO: 933790 - RNA, 19 nt, Homo sapiens
  misc_RNA (1)...(19): siRNA sense strand
gcuacuaaacugcuuugga

SEQ ID NO: 933791 - RNA, 19 nt, Homo sapiens
  misc_RNA (1)...(19): siRNA sense strand
agagaugagugugaugaau

SEQ ID NO: 933792 - RNA, 19 nt, Homo sapiens
  misc_RNA (1)...(19): siRNA sense strand
ggccauggacgccuguuau

SEQ ID NO: 933793 - RNA, 19 nt, Homo sapiens
  misc_RNA (1)...(19): siRNA sense strand
cgaguugugucccauacca

SEQ ID NO: 933794 - RNA, 19 nt, Homo sapiens
  misc_RNA (1)...(19): siRNA sense strand
agaagcacaggauaauauu

SEQ ID NO: 933795 - RNA, 19 nt, Homo sapiens
  misc_RNA (1)...(19): siRNA sense strand
cuuugcaacuggacuguga

SEQ ID NO: 933796 - RNA, 19 nt, Homo sapiens
  misc_RNA (1)...(19): siRNA sense strand
cgcaugaguuacugugaug

SEQ ID NO: 933797 - RNA, 19 nt, Homo sapiens
  misc_RNA (1)...(19): siRNA sense strand
aauuucccauugcuacuaa

SEQ ID NO: 933798 - RNA, 19 nt, Homo sapiens
  misc_RNA (1)...(19): siRNA sense strand
cagaaggugggaaaugaga

SEQ ID NO: 933799 - RNA, 19 nt, Homo sapiens
  misc_RNA (1)...(19): siRNA sense strand
cgaacucacuauggauaca

SEQ ID NO: 933800 - RNA, 19 nt, Homo sapiens
  misc_RNA (1)...(19): siRNA sense strand
cugaagagaaagucuguga

SEQ ID NO: 933801 - RNA, 19 nt, Homo sapiens
  misc_RNA (1)...(19): siRNA sense strand
ggcaucauuuacaacaugu

SEQ ID NO: 933802 - RNA, 19 nt, Homo sapiens
  misc_RNA (1)...(19): siRNA sense strand
ugaccuuugugccauagug

SEQ ID NO: 933803 - RNA, 19 nt, Homo sapiens
  misc_RNA (1)...(19): siRNA sense strand
gacacaagagccuuugcaa

SEQ ID NO: 933804 - RNA, 19 nt, Homo sapiens
  misc_RNA (1)...(19): siRNA sense strand
caaggaagcgaauacuacu

SEQ ID NO: 933805 - RNA, 19 nt, Homo sapiens
  misc_RNA (1)...(19): siRNA sense strand
ccugcauccugaagagaaa

SEQ ID NO: 933806 - RNA, 19 nt, Homo sapiens
  misc_RNA (1)...(19): siRNA sense strand
gacagaaggguauagaaaa

SEQ ID NO: 933807 - RNA, 19 nt, Homo sapiens
  misc_RNA (1)...(19): siRNA sense strand
ccuucgaacucacuaugga

SEQ ID NO: 933808 - RNA, 19 nt, Homo sapiens
  misc_RNA (1)...(19): siRNA sense strand
ggaagagaugagugugaug

SEQ ID NO: 933809 - RNA, 19 nt, Homo sapiens
  misc_RNA (1)...(19): siRNA sense strand
acaaggaagagaugagugu

SEQ ID NO: 933810 - RNA, 19 nt, Homo sapiens
  misc_RNA (1)...(19): siRNA sense strand
aggaagagaugagugugau

SEQ ID NO: 933811 - RNA, 19 nt, Homo sapiens
  misc_RNA (1)...(19): siRNA sense strand
gaacucacuauggauacau

SEQ ID NO: 933812 - RNA, 19 nt, Homo sapiens
  misc_RNA (1)...(19): siRNA sense strand
uugugcgucuuguaaauga

SEQ ID NO: 933813 - RNA, 19 nt, Homo sapiens
  misc_RNA (1)...(19): siRNA sense strand
ucauagguuuaucacugaa

SEQ ID NO: 933814 - RNA, 19 nt, Homo sapiens
  misc_RNA (1)...(19): siRNA sense strand
ucccauugcuacuaaacug

SEQ ID NO: 933815 - RNA, 19 nt, Homo sapiens
  misc_RNA (1)...(19): siRNA sense strand
ggaugauaaaugacaccua

SEQ ID NO: 933816 - RNA, 19 nt, Homo sapiens
  misc_RNA (1)...(19): siRNA sense strand
aggaagcgaauacuacuau

SEQ ID NO: 933817 - RNA, 19 nt, Homo sapiens
  misc_RNA (1)...(19): siRNA sense strand
cuaaacugcuuuggacaac

SEQ ID NO: 933818 - RNA, 19 nt, Homo sapiens
  misc_RNA (1)...(19): siRNA sense strand
gucaaacucaggucagaug

SEQ ID NO: 933819 - RNA, 19 nt, Homo sapiens
  misc_RNA (1)...(19): siRNA sense strand
gcaagacagaaggguauag

SEQ ID NO: 933820 - RNA, 19 nt, Homo sapiens
  misc_RNA (1)...(19): siRNA sense strand
ggacguaucuagugguucu

SEQ ID NO: 933821 - RNA, 19 nt, Homo sapiens
  misc_RNA (1)...(19): siRNA sense strand
cccaucggcuuccucuuua

SEQ ID NO: 933822 - RNA, 19 nt, Homo sapiens
  misc_RNA (1)...(19): siRNA sense strand
gaagaauggacguaucuag

SEQ ID NO: 933823 - RNA, 19 nt, Homo sapiens
  misc_RNA (1)...(19): siRNA sense strand
gcucuccucucaccucuuc

SEQ ID NO: 933824 - RNA, 19 nt, Homo sapiens
  misc_RNA (1)...(19): siRNA sense strand
ggccuggacuuucuccuau

SEQ ID NO: 933825 - RNA, 19 nt, Homo sapiens
  misc_RNA (1)...(19): siRNA sense strand
guccugggcugaagagaug

SEQ ID NO: 933826 - RNA, 19 nt, Homo sapiens
  misc_RNA (1)...(19): siRNA sense strand
uaucuagugguucuucuua

SEQ ID NO: 933827 - RNA, 19 nt, Homo sapiens
  misc_RNA (1)...(19): siRNA sense strand
guacugggccuccaucuac

SEQ ID NO: 933828 - RNA, 19 nt, Homo sapiens
  misc_RNA (1)...(19): siRNA sense strand
gcucuggccuggacuuucu

SEQ ID NO: 933829 - RNA, 19 nt, Homo sapiens
  misc_RNA (1)...(19): siRNA sense strand
gggacugggugcacugguu

SEQ ID NO: 933830 - RNA, 19 nt, Homo sapiens
  misc_RNA (1)...(19): siRNA sense strand
ggaccugggcccucauuca

SEQ ID NO: 933831 - RNA, 19 nt, Homo sapiens
  misc_RNA (1)...(19): siRNA sense strand
cggcuuccuuggaguauga

SEQ ID NO: 933832 - RNA, 19 nt, Homo sapiens
  misc_RNA (1)...(19): siRNA sense strand
agugguggcuggcgcagua

SEQ ID NO: 933833 - RNA, 19 nt, Homo sapiens
  misc_RNA (1)...(19): siRNA sense strand
cuacuucuguauccacuuc

SEQ ID NO: 933834 - RNA, 19 nt, Homo sapiens
  misc_RNA (1)...(19): siRNA sense strand
ucuccuaucuccuguucuu

SEQ ID NO: 933835 - RNA, 19 nt, Homo sapiens
  misc_RNA (1)...(19): siRNA sense strand
gcaccugcccguuccuaug

SEQ ID NO: 933836 - RNA, 19 nt, Homo sapiens
  misc_RNA (1)...(19): siRNA sense strand
gugcacugguuccugaaga

SEQ ID NO: 933837 - RNA, 19 nt, Homo sapiens
  misc_RNA (1)...(19): siRNA sense strand
ccaucggcuuccucuuuaa

SEQ ID NO: 933838 - RNA, 19 nt, Homo sapiens
  misc_RNA (1)...(19): siRNA sense strand
cgcaguauaucuacaagag

SEQ ID NO: 933839 - RNA, 19 nt, Homo sapiens
  misc_RNA (1)...(19): siRNA sense strand
agaauggacguaucuagug

SEQ ID NO: 933840 - RNA, 19 nt, Homo sapiens
  misc_RNA (1)...(19): siRNA sense strand
gguacugggccuccaucua

SEQ ID NO: 933841 - RNA, 19 nt, Homo sapiens
  misc_RNA (1)...(19): siRNA sense strand
ucuagugguucuucuuauc

SEQ ID NO: 933842 - RNA, 19 nt, Homo sapiens
  misc_RNA (1)...(19): siRNA sense strand
ggcaugcgguacuggaaca

SEQ ID NO: 933843 - RNA, 19 nt, Homo sapiens
  misc_RNA (1)...(19): siRNA sense strand
gagccuggccagugaaguc

SEQ ID NO: 933844 - RNA, 19 nt, Homo sapiens
  misc_RNA (1)...(19): siRNA sense strand
gcacugguuccugaagaug

SEQ ID NO: 933845 - RNA, 19 nt, Homo sapiens
  misc_RNA (1)...(19): siRNA sense strand
ugauggagacacucagcua

SEQ ID NO: 933846 - RNA, 19 nt, Homo sapiens
  misc_RNA (1)...(19): siRNA sense strand
ccugaagaauggacguauc

SEQ ID NO: 933847 - RNA, 19 nt, Homo sapiens
  misc_RNA (1)...(19): siRNA sense strand
uaugagaccauccgcaaca

SEQ ID NO: 933848 - RNA, 19 nt, Homo sapiens
  misc_RNA (1)...(19): siRNA sense strand
uggugagccuggccaguga

SEQ ID NO: 933849 - RNA, 19 nt, Homo sapiens
  misc_RNA (1)...(19): siRNA sense strand
gggccuccaucuacuucug

SEQ ID NO: 933850 - RNA, 19 nt, Homo sapiens
  misc_RNA (1)...(19): siRNA sense strand
gcgauggcaugcgguacug

SEQ ID NO: 933851 - RNA, 19 nt, Homo sapiens
  misc_RNA (1)...(19): siRNA sense strand
augcgguacuggaacauga

SEQ ID NO: 933852 - RNA, 19 nt, Homo sapiens
  misc_RNA (1)...(19): siRNA sense strand
cccacgcccuucaccaaug

SEQ ID NO: 933853 - RNA, 19 nt, Homo sapiens
  misc_RNA (1)...(19): siRNA sense strand
gccuccaucuacuucugua

SEQ ID NO: 933854 - RNA, 19 nt, Homo sapiens
  misc_RNA (1)...(19): siRNA sense strand
aagaauggacguaucuagu

SEQ ID NO: 933855 - RNA, 19 nt, Homo sapiens
  misc_RNA (1)...(19): siRNA sense strand
gcuucgugcugcucuccuu

SEQ ID NO: 933856 - RNA, 19 nt, Homo sapiens
  misc_RNA (1)...(19): siRNA sense strand
gcucuucggccugcuguuc

SEQ ID NO: 933857 - RNA, 19 nt, Homo sapiens
  misc_RNA (1)...(19): siRNA sense strand
gaacacaaauggugagguu

SEQ ID NO: 933858 - RNA, 19 nt, Homo sapiens
  misc_RNA (1)...(19): siRNA sense strand
uauaugaagucaaggguua

SEQ ID NO: 933859 - RNA, 19 nt, Homo sapiens
  misc_RNA (1)...(19): siRNA sense strand
gcaaaucccauuaaacuug

SEQ ID NO: 933860 - RNA, 19 nt, Homo sapiens
  misc_RNA (1)...(19): siRNA sense strand
ggaagacgaucccgaguuc

SEQ ID NO: 933861 - RNA, 19 nt, Homo sapiens
  misc_RNA (1)...(19): siRNA sense strand
gcaaagggaauguaaccua

SEQ ID NO: 933862 - RNA, 19 nt, Homo sapiens
  misc_RNA (1)...(19): siRNA sense strand
ugaaauggaugcuaguauc

SEQ ID NO: 933863 - RNA, 19 nt, Homo sapiens
  misc_RNA (1)...(19): siRNA sense strand
gagguuaugccgacaauga

SEQ ID NO: 933864 - RNA, 19 nt, Homo sapiens
  misc_RNA (1)...(19): siRNA sense strand
ucuaggagcuggagguuau

SEQ ID NO: 933865 - RNA, 19 nt, Homo sapiens
  misc_RNA (1)...(19): siRNA sense strand
gaauugauccugacgauac

SEQ ID NO: 933866 - RNA, 19 nt, Homo sapiens
  misc_RNA (1)...(19): siRNA sense strand
agucaaggguuaaagguuu

SEQ ID NO: 933867 - RNA, 19 nt, Homo sapiens
  misc_RNA (1)...(19): siRNA sense strand
gaaauggaugcuaguauca

SEQ ID NO: 933868 - RNA, 19 nt, Homo sapiens
  misc_RNA (1)...(19): siRNA sense strand
gagacuggguggcaaagug

SEQ ID NO: 933869 - RNA, 19 nt, Homo sapiens
  misc_RNA (1)...(19): siRNA sense strand
caggcgguaucguuaauaa

SEQ ID NO: 933870 - RNA, 19 nt, Homo sapiens
  misc_RNA (1)...(19): siRNA sense strand
ggacucaccgugucuagga

SEQ ID NO: 933871 - RNA, 19 nt, Homo sapiens
  misc_RNA (1)...(19): siRNA sense strand
gggaaagcauccugaaggu

SEQ ID NO: 933872 - RNA, 19 nt, Homo sapiens
  misc_RNA (1)...(19): siRNA sense strand
ccacauagaacaaggaaag

SEQ ID NO: 933873 - RNA, 19 nt, Homo sapiens
  misc_RNA (1)...(19): siRNA sense strand
gcaguccaguguauagcaa

SEQ ID NO: 933874 - RNA, 19 nt, Homo sapiens
  misc_RNA (1)...(19): siRNA sense strand
agaagaggcugcggaccua

SEQ ID NO: 933875 - RNA, 19 nt, Homo sapiens
  misc_RNA (1)...(19): siRNA sense strand
aagcugcacuuuggaauug

SEQ ID NO: 933876 - RNA, 19 nt, Homo sapiens
  misc_RNA (1)...(19): siRNA sense strand
uagcaaaucccauuaaacu

SEQ ID NO: 933877 - RNA, 19 nt, Homo sapiens
  misc_RNA (1)...(19): siRNA sense strand
guauagcaaaucccauuaa

SEQ ID NO: 933878 - RNA, 19 nt, Homo sapiens
  misc_RNA (1)...(19): siRNA sense strand
gaccuaucguuggguuaua

SEQ ID NO: 933879 - RNA, 19 nt, Homo sapiens
  misc_RNA (1)...(19): siRNA sense strand
ggaauugauccugacgaua

SEQ ID NO: 933880 - RNA, 19 nt, Homo sapiens
  misc_RNA (1)...(19): siRNA sense strand
ggucugucuugaacacaaa

SEQ ID NO: 933881 - RNA, 19 nt, Homo sapiens
  misc_RNA (1)...(19): siRNA sense strand
ccacaggcgguaucguuaa

SEQ ID NO: 933882 - RNA, 19 nt, Homo sapiens
  misc_RNA (1)...(19): siRNA sense strand
ggacugcaaagggaaugua

SEQ ID NO: 933883 - RNA, 19 nt, Homo sapiens
  misc_RNA (1)...(19): siRNA sense strand
acacaaauggugagguuga

SEQ ID NO: 933884 - RNA, 19 nt, Homo sapiens
  misc_RNA (1)...(19): siRNA sense strand
gauccugacgauacuacua

SEQ ID NO: 933885 - RNA, 19 nt, Homo sapiens
  misc_RNA (1)...(19): siRNA sense strand
caaauggugagguugaaau

SEQ ID NO: 933886 - RNA, 19 nt, Homo sapiens
  misc_RNA (1)...(19): siRNA sense strand
aaggaaagacgguagaaga

SEQ ID NO: 933887 - RNA, 19 nt, Homo sapiens
  misc_RNA (1)...(19): siRNA sense strand
ggacggcaagcugcacuuu

SEQ ID NO: 933888 - RNA, 19 nt, Homo sapiens
  misc_RNA (1)...(19): siRNA sense strand
gaagucaaggguuaaaggu

SEQ ID NO: 933889 - RNA, 19 nt, Homo sapiens
  misc_RNA (1)...(19): siRNA sense strand
ggaccuaucguuggguuau

SEQ ID NO: 933890 - RNA, 19 nt, Homo sapiens
  misc_RNA (1)...(19): siRNA sense strand
gcuaguaucauggauggaa

SEQ ID NO: 933891 - RNA, 19 nt, Homo sapiens
  misc_RNA (1)...(19): siRNA sense strand
caagcugcacuuuggaauu

SEQ ID NO: 933892 - RNA, 19 nt, Homo sapiens
  misc_RNA (1)...(19): siRNA sense strand
acaccucauugcuuucuga

SEQ ID NO: 933893 - RNA, 19 nt, Homo sapiens
  misc_RNA (1)...(19): siRNA sense strand
uaucaccgaccuucccuaa

SEQ ID NO: 933894 - RNA, 19 nt, Homo sapiens
  misc_RNA (1)...(19): siRNA sense strand
ggugacagagagaaacaaa

SEQ ID NO: 933895 - RNA, 19 nt, Homo sapiens
  misc_RNA (1)...(19): siRNA sense strand
gcaguuugcagcagcuaug

SEQ ID NO: 933896 - RNA, 19 nt, Homo sapiens
  misc_RNA (1)...(19): siRNA sense strand
cuaguaucauggauggaaa

SEQ ID NO: 933897 - RNA, 19 nt, Homo sapiens
  misc_RNA (1)...(19): siRNA sense strand
uggcuagacucacccuguu

SEQ ID NO: 933898 - RNA, 19 nt, Homo sapiens
  misc_RNA (1)...(19): siRNA sense strand
ugacaucggagccgucuca

SEQ ID NO: 933899 - RNA, 19 nt, Homo sapiens
  misc_RNA (1)...(19): siRNA sense strand
gcaagcugcacuuuggaau

SEQ ID NO: 933900 - RNA, 19 nt, Homo sapiens
  misc_RNA (1)...(19): siRNA sense strand
guguauagcaaaucccauu

SEQ ID NO: 933901 - RNA, 19 nt, Homo sapiens
  misc_RNA (1)...(19): siRNA sense strand
cacaaauggugagguugaa

SEQ ID NO: 933902 - RNA, 19 nt, Homo sapiens
  misc_RNA (1)...(19): siRNA sense strand
cacaggcgguaucguuaau

SEQ ID NO: 933903 - RNA, 19 nt, Homo sapiens
  misc_RNA (1)...(19): siRNA sense strand
gggucugucuugaacacaa

SEQ ID NO: 933904 - RNA, 19 nt, Homo sapiens
  misc_RNA (1)...(19): siRNA sense strand
aauggaugcuaguaucaug

SEQ ID NO: 933905 - RNA, 19 nt, Homo sapiens
  misc_RNA (1)...(19): siRNA sense strand
uggaauugauccugacgau

SEQ ID NO: 933906 - RNA, 19 nt, Homo sapiens
  misc_RNA (1)...(19): siRNA sense strand
uggguuauaugaagucaag

SEQ ID NO: 933907 - RNA, 19 nt, Homo sapiens
  misc_RNA (1)...(19): siRNA sense strand
aaagcauccugaaggugaa

SEQ ID NO: 933908 - RNA, 19 nt, Homo sapiens
  misc_RNA (1)...(19): siRNA sense strand
gguugugggucugucuuga

SEQ ID NO: 933909 - RNA, 19 nt, Homo sapiens
  misc_RNA (1)...(19): siRNA sense strand
gagccggucccaucuccaa

SEQ ID NO: 933910 - RNA, 19 nt, Homo sapiens
  misc_RNA (1)...(19): siRNA sense strand
uaaacuugcucggcuuguc

SEQ ID NO: 933911 - RNA, 19 nt, Homo sapiens
  misc_RNA (1)...(19): siRNA sense strand
uguauagcaaaucccauua

SEQ ID NO: 933912 - RNA, 19 nt, Homo sapiens
  misc_RNA (1)...(19): siRNA sense strand
gaaaagacaccucauugcu

SEQ ID NO: 933913 - RNA, 19 nt, Homo sapiens
  misc_RNA (1)...(19): siRNA sense strand
guugaaauggaugcuagua

SEQ ID NO: 933914 - RNA, 19 nt, Homo sapiens
  misc_RNA (1)...(19): siRNA sense strand
gacugcaaagggaauguaa

SEQ ID NO: 933915 - RNA, 19 nt, Homo sapiens
  misc_RNA (1)...(19): siRNA sense strand
aaacuugcucggcuuguca

SEQ ID NO: 933916 - RNA, 19 nt, Homo sapiens
  misc_RNA (1)...(19): siRNA sense strand
auggugagguugaaaugga

SEQ ID NO: 933917 - RNA, 19 nt, Homo sapiens
  misc_RNA (1)...(19): siRNA sense strand
uugcucggcuugucaugga

SEQ ID NO: 933918 - RNA, 19 nt, Homo sapiens
  misc_RNA (1)...(19): siRNA sense strand
acggcaagcugcacuuugg

SEQ ID NO: 933919 - RNA, 19 nt, Homo sapiens
  misc_RNA (1)...(19): siRNA sense strand
uguccgcaguccaguguau

SEQ ID NO: 933920 - RNA, 19 nt, Homo sapiens
  misc_RNA (1)...(19): siRNA sense strand
gaagaggcugcggaccuau

SEQ ID NO: 933921 - RNA, 19 nt, Homo sapiens
  misc_RNA (1)...(19): siRNA sense strand
ggcaagcugcacuuuggaa

SEQ ID NO: 933922 - RNA, 19 nt, Homo sapiens
  misc_RNA (1)...(19): siRNA sense strand
ccucaucgugguuagcaaa

SEQ ID NO: 933923 - RNA, 19 nt, Homo sapiens
  misc_RNA (1)...(19): siRNA sense strand
gagaaugacuacauagaca

SEQ ID NO: 933924 - RNA, 19 nt, Homo sapiens
  misc_RNA (1)...(19): siRNA sense strand
gaacagcgucaucugcaaa

SEQ ID NO: 933925 - RNA, 19 nt, Homo sapiens
  misc_RNA (1)...(19): siRNA sense strand
gcacgaaugaggacgauga

SEQ ID NO: 933926 - RNA, 19 nt, Homo sapiens
  misc_RNA (1)...(19): siRNA sense strand
ccagccauguggagaauga

SEQ ID NO: 933927 - RNA, 19 nt, Homo sapiens
  misc_RNA (1)...(19): siRNA sense strand
uguggagaaugacuacaua

SEQ ID NO: 933928 - RNA, 19 nt, Homo sapiens
  misc_RNA (1)...(19): siRNA sense strand
cacccgagcuggacaagca

SEQ ID NO: 933929 - RNA, 19 nt, Homo sapiens
  misc_RNA (1)...(19): siRNA sense strand
gaccagccauguggagaau

SEQ ID NO: 933930 - RNA, 19 nt, Homo sapiens
  misc_RNA (1)...(19): siRNA sense strand
cagcacauccucugaccaa

SEQ ID NO: 933931 - RNA, 19 nt, Homo sapiens
  misc_RNA (1)...(19): siRNA sense strand
cgaacagcgucaucugcaa

SEQ ID NO: 933932 - RNA, 19 nt, Homo sapiens
  misc_RNA (1)...(19): siRNA sense strand
gcacgugcauguguuuggu

SEQ ID NO: 933933 - RNA, 19 nt, Homo sapiens
  misc_RNA (1)...(19): siRNA sense strand
ucaccauccuacccauuga

SEQ ID NO: 933934 - RNA, 19 nt, Homo sapiens
  misc_RNA (1)...(19): siRNA sense strand
ggagaaugacuacauagac

SEQ ID NO: 933935 - RNA, 19 nt, Homo sapiens
  misc_RNA (1)...(19): siRNA sense strand
ggaugucacccaccauugg

SEQ ID NO: 933936 - RNA, 19 nt, Homo sapiens
  misc_RNA (1)...(19): siRNA sense strand
agacucuggucaacuaugg

SEQ ID NO: 933937 - RNA, 19 nt, Homo sapiens
  misc_RNA (1)...(19): siRNA sense strand
gcacacgaacagcgucauc

SEQ ID NO: 933938 - RNA, 19 nt, Homo sapiens
  misc_RNA (1)...(19): siRNA sense strand
caggaugucacccaccauu

SEQ ID NO: 933939 - RNA, 19 nt, Homo sapiens
  misc_RNA (1)...(19): siRNA sense strand
gcagcagcacauccucuga

SEQ ID NO: 933940 - RNA, 19 nt, Homo sapiens
  misc_RNA (1)...(19): siRNA sense strand
gaugucacccaccauugga

SEQ ID NO: 933941 - RNA, 19 nt, Homo sapiens
  misc_RNA (1)...(19): siRNA sense strand
uauggcacgugcauguguu

SEQ ID NO: 933942 - RNA, 19 nt, Homo sapiens
  misc_RNA (1)...(19): siRNA sense strand
ggaaguguaaaugcaagga

SEQ ID NO: 933943 - RNA, 19 nt, Homo sapiens
  misc_RNA (1)...(19): siRNA sense strand
ggugaagaccagccaugug

SEQ ID NO: 933944 - RNA, 19 nt, Homo sapiens
  misc_RNA (1)...(19): siRNA sense strand
gaaugacuacauagacaac

SEQ ID NO: 933945 - RNA, 19 nt, Homo sapiens
  misc_RNA (1)...(19): siRNA sense strand
ugugggaaguguaaaugca

SEQ ID NO: 933946 - RNA, 19 nt, Homo sapiens
  misc_RNA (1)...(19): siRNA sense strand
gcacccacucaccauccua

SEQ ID NO: 933947 - RNA, 19 nt, Homo sapiens
  misc_RNA (1)...(19): siRNA sense strand
gagcagaccuccaccaagu

SEQ ID NO: 933948 - RNA, 19 nt, Homo sapiens
  misc_RNA (1)...(19): siRNA sense strand
ucaaugagauccagagcuu

SEQ ID NO: 933949 - RNA, 19 nt, Homo sapiens
  misc_RNA (1)...(19): siRNA sense strand
ggccuaagaagguguguuu

SEQ ID NO: 933950 - RNA, 19 nt, Homo sapiens
  misc_RNA (1)...(19): siRNA sense strand
ggagcuacuaccucaauga

SEQ ID NO: 933951 - RNA, 19 nt, Homo sapiens
  misc_RNA (1)...(19): siRNA sense strand
caucaacaccuacggaauc

SEQ ID NO: 933952 - RNA, 19 nt, Homo sapiens
  misc_RNA (1)...(19): siRNA sense strand
ugugcgagcucuccaagga

SEQ ID NO: 933953 - RNA, 19 nt, Homo sapiens
  misc_RNA (1)...(19): siRNA sense strand
ucagcgaguuccucaucaa

SEQ ID NO: 933954 - RNA, 19 nt, Homo sapiens
  misc_RNA (1)...(19): siRNA sense strand
ggaccaggaggagcuacua

SEQ ID NO: 933955 - RNA, 19 nt, Homo sapiens
  misc_RNA (1)...(19): siRNA sense strand
cauccuggccuacguguuc

SEQ ID NO: 933956 - RNA, 19 nt, Homo sapiens
  misc_RNA (1)...(19): siRNA sense strand
gcgaguuccucaucaacac

SEQ ID NO: 933957 - RNA, 19 nt, Homo sapiens
  misc_RNA (1)...(19): siRNA sense strand
uggagaagcugggcuacag

SEQ ID NO: 933958 - RNA, 19 nt, Homo sapiens
  misc_RNA (1)...(19): siRNA sense strand
guucagcgaguuccucauc

SEQ ID NO: 933959 - RNA, 19 nt, Homo sapiens
  misc_RNA (1)...(19): siRNA sense strand
gagaugagauccaaguaaa

SEQ ID NO: 933960 - RNA, 19 nt, Homo sapiens
  misc_RNA (1)...(19): siRNA sense strand
agagauagaugcuuuguuu

SEQ ID NO: 933961 - RNA, 19 nt, Homo sapiens
  misc_RNA (1)...(19): siRNA sense strand
gauaugguguugaagauuu

SEQ ID NO: 933962 - RNA, 19 nt, Homo sapiens
  misc_RNA (1)...(19): siRNA sense strand
gaaagagcaaccugauuua

SEQ ID NO: 933963 - RNA, 19 nt, Homo sapiens
  misc_RNA (1)...(19): siRNA sense strand
gagagggacucaucuuuga

SEQ ID NO: 933964 - RNA, 19 nt, Homo sapiens
  misc_RNA (1)...(19): siRNA sense strand
gaacuccuauaacuuacua

SEQ ID NO: 933965 - RNA, 19 nt, Homo sapiens
  misc_RNA (1)...(19): siRNA sense strand
gaaauuggaaugggaaaua

SEQ ID NO: 933966 - RNA, 19 nt, Homo sapiens
  misc_RNA (1)...(19): siRNA sense strand
ccaaacagcuuucagagau

SEQ ID NO: 933967 - RNA, 19 nt, Homo sapiens
  misc_RNA (1)...(19): siRNA sense strand
gaacggagaucugaaaggu

SEQ ID NO: 933968 - RNA, 19 nt, Homo sapiens
  misc_RNA (1)...(19): siRNA sense strand
gaucggcuuugaaguuaua

SEQ ID NO: 933969 - RNA, 19 nt, Homo sapiens
  misc_RNA (1)...(19): siRNA sense strand
caaaggguguugaugguuu

SEQ ID NO: 933970 - RNA, 19 nt, Homo sapiens
  misc_RNA (1)...(19): siRNA sense strand
gaugagauccaaguaaaua

SEQ ID NO: 933971 - RNA, 19 nt, Homo sapiens
  misc_RNA (1)...(19): siRNA sense strand
caaagcaccugagagauga

SEQ ID NO: 933972 - RNA, 19 nt, Homo sapiens
  misc_RNA (1)...(19): siRNA sense strand
gcaguaaaguugauacaag

SEQ ID NO: 933973 - RNA, 19 nt, Homo sapiens
  misc_RNA (1)...(19): siRNA sense strand
cagaucggcuuugaaguua

SEQ ID NO: 933974 - RNA, 19 nt, Homo sapiens
  misc_RNA (1)...(19): siRNA sense strand
ugaaagagcaaccugauuu

SEQ ID NO: 933975 - RNA, 19 nt, Homo sapiens
  misc_RNA (1)...(19): siRNA sense strand
caaacagcuuucagagaua

SEQ ID NO: 933976 - RNA, 19 nt, Homo sapiens
  misc_RNA (1)...(19): siRNA sense strand
gcaaagcaccugagagaug

SEQ ID NO: 933977 - RNA, 19 nt, Homo sapiens
  misc_RNA (1)...(19): siRNA sense strand
gaacacaacacgaagaauc

SEQ ID NO: 933978 - RNA, 19 nt, Homo sapiens
  misc_RNA (1)...(19): siRNA sense strand
gaaauauuguagccgcaaa

SEQ ID NO: 933979 - RNA, 19 nt, Homo sapiens
  misc_RNA (1)...(19): siRNA sense strand
cgacaaaggcaguaaaguu

SEQ ID NO: 933980 - RNA, 19 nt, Homo sapiens
  misc_RNA (1)...(19): siRNA sense strand
ggacucaucuuugaacaca

SEQ ID NO: 933981 - RNA, 19 nt, Homo sapiens
  misc_RNA (1)...(19): siRNA sense strand
gaaucugguugcagccaua

SEQ ID NO: 933982 - RNA, 19 nt, Homo sapiens
  misc_RNA (1)...(19): siRNA sense strand
gacaaaggcaguaaaguug

SEQ ID NO: 933983 - RNA, 19 nt, Homo sapiens
  misc_RNA (1)...(19): siRNA sense strand
acucggagcuguaccauga

SEQ ID NO: 933984 - RNA, 19 nt, Homo sapiens
  misc_RNA (1)...(19): siRNA sense strand
ccgcaaaucucaaugaaag

SEQ ID NO: 933985 - RNA, 19 nt, Homo sapiens
  misc_RNA (1)...(19): siRNA sense strand
gaacagcguguaugagguu

SEQ ID NO: 933986 - RNA, 19 nt, Homo sapiens
  misc_RNA (1)...(19): siRNA sense strand
ccaaugcagugggacaaua

SEQ ID NO: 933987 - RNA, 19 nt, Homo sapiens
  misc_RNA (1)...(19): siRNA sense strand
ggagagggacucaucuuug

SEQ ID NO: 933988 - RNA, 19 nt, Homo sapiens
  misc_RNA (1)...(19): siRNA sense strand
agagcaaccugauuuaaau

SEQ ID NO: 933989 - RNA, 19 nt, Homo sapiens
  misc_RNA (1)...(19): siRNA sense strand
ggaaugacagccacuaugu

SEQ ID NO: 933990 - RNA, 19 nt, Homo sapiens
  misc_RNA (1)...(19): siRNA sense strand
ggcagaccauggaccaaua

SEQ ID NO: 933991 - RNA, 19 nt, Homo sapiens
  misc_RNA (1)...(19): siRNA sense strand
gcaaccugauuuaaauuuc

SEQ ID NO: 933992 - RNA, 19 nt, Homo sapiens
  misc_RNA (1)...(19): siRNA sense strand
agaauaagguuaaguacca

SEQ ID NO: 933993 - RNA, 19 nt, Homo sapiens
  misc_RNA (1)...(19): siRNA sense strand
ccaaaccacacgagugaua

SEQ ID NO: 933994 - RNA, 19 nt, Homo sapiens
  misc_RNA (1)...(19): siRNA sense strand
ccaggcagcucaacagaca

SEQ ID NO: 933995 - RNA, 19 nt, Homo sapiens
  misc_RNA (1)...(19): siRNA sense strand
gugaugaacaugcuucuuu

SEQ ID NO: 933996 - RNA, 19 nt, Homo sapiens
  misc_RNA (1)...(19): siRNA sense strand
ggacuacaucacagcuuua

SEQ ID NO: 933997 - RNA, 19 nt, Homo sapiens
  misc_RNA (1)...(19): siRNA sense strand
uuucagagauagaugcuuu

SEQ ID NO: 933998 - RNA, 19 nt, Homo sapiens
  misc_RNA (1)...(19): siRNA sense strand
caacggguuuguccauaau

SEQ ID NO: 933999 - RNA, 19 nt, Homo sapiens
  misc_RNA (1)...(19): siRNA sense strand
aagauaaacuggacuacau

SEQ ID NO: 934000 - RNA, 19 nt, Homo sapiens
  misc_RNA (1)...(19): siRNA sense strand
ccagaucggcuuugaaguu

SEQ ID NO: 934001 - RNA, 19 nt, Homo sapiens
  misc_RNA (1)...(19): siRNA sense strand
ggaccgugauguacuaugg

SEQ ID NO: 934002 - RNA, 19 nt, Homo sapiens
  misc_RNA (1)...(19): siRNA sense strand
cggacacggucacacaaua

SEQ ID NO: 934003 - RNA, 19 nt, Homo sapiens
  misc_RNA (1)...(19): siRNA sense strand
gaaaauggccuaacuggau

SEQ ID NO: 934004 - RNA, 19 nt, Homo sapiens
  misc_RNA (1)...(19): siRNA sense strand
gguuaaguguguauggaaa

SEQ ID NO: 934005 - RNA, 19 nt, Homo sapiens
  misc_RNA (1)...(19): siRNA sense strand
uguaugagguuaucacauc

SEQ ID NO: 934006 - RNA, 19 nt, Homo sapiens
  misc_RNA (1)...(19): siRNA sense strand
caaaggcaguaaaguugau

SEQ ID NO: 934007 - RNA, 19 nt, Homo sapiens
  misc_RNA (1)...(19): siRNA sense strand
cuggaacuccuauaacuua

SEQ ID NO: 934008 - RNA, 19 nt, Homo sapiens
  misc_RNA (1)...(19): siRNA sense strand
uggccuaacuggaugauug

SEQ ID NO: 934009 - RNA, 19 nt, Homo sapiens
  misc_RNA (1)...(19): siRNA sense strand
uuggaacgauggaagauuu

SEQ ID NO: 934010 - RNA, 19 nt, Homo sapiens
  misc_RNA (1)...(19): siRNA sense strand
gaauaagguuaaguaccaa

SEQ ID NO: 934011 - RNA, 19 nt, Homo sapiens
  misc_RNA (1)...(19): siRNA sense strand
uuaauacccuucgcucaaa

SEQ ID NO: 934012 - RNA, 19 nt, Homo sapiens
  misc_RNA (1)...(19): siRNA sense strand
ccaaggaggugcuguucca

SEQ ID NO: 934013 - RNA, 19 nt, Homo sapiens
  misc_RNA (1)...(19): siRNA sense strand
ggacaauaguucaaaugcu

SEQ ID NO: 934014 - RNA, 19 nt, Homo sapiens
  misc_RNA (1)...(19): siRNA sense strand
cccaacaacugguuaagug

SEQ ID NO: 934015 - RNA, 19 nt, Homo sapiens
  misc_RNA (1)...(19): siRNA sense strand
gauggaagauuuugagaau

SEQ ID NO: 934016 - RNA, 19 nt, Homo sapiens
  misc_RNA (1)...(19): siRNA sense strand
cuacaucacagcuuuaaau

SEQ ID NO: 934017 - RNA, 19 nt, Homo sapiens
  misc_RNA (1)...(19): siRNA sense strand
acggagaucugaaagguau

SEQ ID NO: 934018 - RNA, 19 nt, Homo sapiens
  misc_RNA (1)...(19): siRNA sense strand
uaccaauucugccgacaaa

SEQ ID NO: 934019 - RNA, 19 nt, Homo sapiens
  misc_RNA (1)...(19): siRNA sense strand
gaacaugcuucuuuucaca

SEQ ID NO: 934020 - RNA, 19 nt, Homo sapiens
  misc_RNA (1)...(19): siRNA sense strand
caacagacaaccugaagca

SEQ ID NO: 934021 - RNA, 19 nt, Homo sapiens
  misc_RNA (1)...(19): siRNA sense strand
ccacacgagugauaaacau

SEQ ID NO: 934022 - RNA, 19 nt, Homo sapiens
  misc_RNA (1)...(19): siRNA sense strand
cagauaugguguugaagau

SEQ ID NO: 934023 - RNA, 19 nt, Homo sapiens
  misc_RNA (1)...(19): siRNA sense strand
caguaaaguugauacaagu

SEQ ID NO: 934024 - RNA, 19 nt, Homo sapiens
  misc_RNA (1)...(19): siRNA sense strand
ggaaugggaaauauuguag

SEQ ID NO: 934025 - RNA, 19 nt, Homo sapiens
  misc_RNA (1)...(19): siRNA sense strand
acaggaccgugauguacua

SEQ ID NO: 934026 - RNA, 19 nt, Homo sapiens
  misc_RNA (1)...(19): siRNA sense strand
uaguuuggaugcuguuaaa

SEQ ID NO: 934027 - RNA, 19 nt, Homo sapiens
  misc_RNA (1)...(19): siRNA sense strand
gugcgaaaccaauguuauu

SEQ ID NO: 934028 - RNA, 19 nt, Homo sapiens
  misc_RNA (1)...(19): siRNA sense strand
uaaaucgucccuuaaagau

SEQ ID NO: 934029 - RNA, 19 nt, Homo sapiens
  misc_RNA (1)...(19): siRNA sense strand
gggagagggacucaucuuu

SEQ ID NO: 934030 - RNA, 19 nt, Homo sapiens
  misc_RNA (1)...(19): siRNA sense strand
gaaugacagccacuauguu

SEQ ID NO: 934031 - RNA, 19 nt, Homo sapiens
  misc_RNA (1)...(19): siRNA sense strand
aagcaaagcaccugagaga

SEQ ID NO: 934032 - RNA, 19 nt, Homo sapiens
  misc_RNA (1)...(19): siRNA sense strand
gagcaaccugauuuaaauu

SEQ ID NO: 934033 - RNA, 19 nt, Homo sapiens
  misc_RNA (1)...(19): siRNA sense strand
gaagugcgaaaccaauguu

SEQ ID NO: 934034 - RNA, 19 nt, Homo sapiens
  misc_RNA (1)...(19): siRNA sense strand
ucauugcccucucuccaaa

SEQ ID NO: 934035 - RNA, 19 nt, Homo sapiens
  misc_RNA (1)...(19): siRNA sense strand
caauucagauuaccacacu

SEQ ID NO: 934036 - RNA, 19 nt, Homo sapiens
  misc_RNA (1)...(19): siRNA sense strand
uggacuacaucacagcuuu

SEQ ID NO: 934037 - RNA, 19 nt, Homo sapiens
  misc_RNA (1)...(19): siRNA sense strand
cagaaucuuuaucgugguu

SEQ ID NO: 934038 - RNA, 19 nt, Homo sapiens
  misc_RNA (1)...(19): siRNA sense strand
gaaggaaaauggccuaacu

SEQ ID NO: 934039 - RNA, 19 nt, Homo sapiens
  misc_RNA (1)...(19): siRNA sense strand
gagagaugagauccaagua

SEQ ID NO: 934040 - RNA, 19 nt, Homo sapiens
  misc_RNA (1)...(19): siRNA sense strand
gauuucagauaugguguug

SEQ ID NO: 934041 - RNA, 19 nt, Homo sapiens
  misc_RNA (1)...(19): siRNA sense strand
uauaaaucgucccuuaaag

SEQ ID NO: 934042 - RNA, 19 nt, Homo sapiens
  misc_RNA (1)...(19): siRNA sense strand
gagauccaaguaaauaaga

SEQ ID NO: 934043 - RNA, 19 nt, Homo sapiens
  misc_RNA (1)...(19): siRNA sense strand
aagagcaaccugauuuaaa

SEQ ID NO: 934044 - RNA, 19 nt, Homo sapiens
  misc_RNA (1)...(19): siRNA sense strand
aaagagcaaccugauuuaa

SEQ ID NO: 934045 - RNA, 19 nt, Homo sapiens
  misc_RNA (1)...(19): siRNA sense strand
uauuauaucuggcaugacu

SEQ ID NO: 934046 - RNA, 19 nt, Homo sapiens
  misc_RNA (1)...(19): siRNA sense strand
caaggacaguaacaaggau

SEQ ID NO: 934047 - RNA, 19 nt, Homo sapiens
  misc_RNA (1)...(19): siRNA sense strand
gauagaugcuuuguuucca

SEQ ID NO: 934048 - RNA, 19 nt, Homo sapiens
  misc_RNA (1)...(19): siRNA sense strand
aaacagcuuucagagauag

SEQ ID NO: 934049 - RNA, 19 nt, Homo sapiens
  misc_RNA (1)...(19): siRNA sense strand
gauuuucccuucaacaauu

SEQ ID NO: 934050 - RNA, 19 nt, Homo sapiens
  misc_RNA (1)...(19): siRNA sense strand
ucagauaugguguugaaga

SEQ ID NO: 934051 - RNA, 19 nt, Homo sapiens
  misc_RNA (1)...(19): siRNA sense strand
gaugggaacggagaucuga

SEQ ID NO: 934052 - RNA, 19 nt, Homo sapiens
  misc_RNA (1)...(19): siRNA sense strand
uaccagaucuacccaaggu

SEQ ID NO: 934053 - RNA, 19 nt, Homo sapiens
  misc_RNA (1)...(19): siRNA sense strand
ccgcaauccugauguucaa

SEQ ID NO: 934054 - RNA, 19 nt, Homo sapiens
  misc_RNA (1)...(19): siRNA sense strand
caaaccacacgagugauaa

SEQ ID NO: 934055 - RNA, 19 nt, Homo sapiens
  misc_RNA (1)...(19): siRNA sense strand
uaccaaaccacacgaguga

SEQ ID NO: 934056 - RNA, 19 nt, Homo sapiens
  misc_RNA (1)...(19): siRNA sense strand
uugcagccauacaugauaa

SEQ ID NO: 934057 - RNA, 19 nt, Homo sapiens
  misc_RNA (1)...(19): siRNA sense strand
guaaauaagacccaaaucc

SEQ ID NO: 934058 - RNA, 19 nt, Homo sapiens
  misc_RNA (1)...(19): siRNA sense strand
ccgcauaccucgggagauc

SEQ ID NO: 934059 - RNA, 19 nt, Homo sapiens
  misc_RNA (1)...(19): siRNA sense strand
gaauaaacgugaacagauu

SEQ ID NO: 934060 - RNA, 19 nt, Homo sapiens
  misc_RNA (1)...(19): siRNA sense strand
ggagaucucugcucuuauu

SEQ ID NO: 934061 - RNA, 19 nt, Homo sapiens
  misc_RNA (1)...(19): siRNA sense strand
gcaaaguccucagcuaaua

SEQ ID NO: 934062 - RNA, 19 nt, Homo sapiens
  misc_RNA (1)...(19): siRNA sense strand
gcgcaaaccugcuuaaaug

SEQ ID NO: 934063 - RNA, 19 nt, Homo sapiens
  misc_RNA (1)...(19): siRNA sense strand
gcuauagccuccuguauuu

SEQ ID NO: 934064 - RNA, 19 nt, Homo sapiens
  misc_RNA (1)...(19): siRNA sense strand
gaggauaguugcaaguauu

SEQ ID NO: 934065 - RNA, 19 nt, Homo sapiens
  misc_RNA (1)...(19): siRNA sense strand
gaggauagauuuggaguug

SEQ ID NO: 934066 - RNA, 19 nt, Homo sapiens
  misc_RNA (1)...(19): siRNA sense strand
ucucugcucuuauuaguua

SEQ ID NO: 934067 - RNA, 19 nt, Homo sapiens
  misc_RNA (1)...(19): siRNA sense strand
ccauuuggcucuaguguaa

SEQ ID NO: 934068 - RNA, 19 nt, Homo sapiens
  misc_RNA (1)...(19): siRNA sense strand
uaggagaucucugcucuua

SEQ ID NO: 934069 - RNA, 19 nt, Homo sapiens
  misc_RNA (1)...(19): siRNA sense strand
gaaucacuguuccugguua

SEQ ID NO: 934070 - RNA, 19 nt, Homo sapiens
  misc_RNA (1)...(19): siRNA sense strand
ccucuuaaaucucucguua

SEQ ID NO: 934071 - RNA, 19 nt, Homo sapiens
  misc_RNA (1)...(19): siRNA sense strand
gcaagcaucugcagaacau

SEQ ID NO: 934072 - RNA, 19 nt, Homo sapiens
  misc_RNA (1)...(19): siRNA sense strand
caugaacuaucuuccauuu

SEQ ID NO: 934073 - RNA, 19 nt, Homo sapiens
  misc_RNA (1)...(19): siRNA sense strand
uaaaugguaugacucagaa

SEQ ID NO: 934074 - RNA, 19 nt, Homo sapiens
  misc_RNA (1)...(19): siRNA sense strand
cagcuauccuuaauacuuu

SEQ ID NO: 934075 - RNA, 19 nt, Homo sapiens
  misc_RNA (1)...(19): siRNA sense strand
ggagagugucuucaucuua

SEQ ID NO: 934076 - RNA, 19 nt, Homo sapiens
  misc_RNA (1)...(19): siRNA sense strand
ucagugaccuguauaguuc

SEQ ID NO: 934077 - RNA, 19 nt, Homo sapiens
  misc_RNA (1)...(19): siRNA sense strand
ugauguugcuuucucaaua

SEQ ID NO: 934078 - RNA, 19 nt, Homo sapiens
  misc_RNA (1)...(19): siRNA sense strand
ucacauagaugagcagguu

SEQ ID NO: 934079 - RNA, 19 nt, Homo sapiens
  misc_RNA (1)...(19): siRNA sense strand
cagcaggauugauuuguuu

SEQ ID NO: 934080 - RNA, 19 nt, Homo sapiens
  misc_RNA (1)...(19): siRNA sense strand
gaaaagacuucaacaguuc

SEQ ID NO: 934081 - RNA, 19 nt, Homo sapiens
  misc_RNA (1)...(19): siRNA sense strand
caacucaugcacucauuua

SEQ ID NO: 934082 - RNA, 19 nt, Homo sapiens
  misc_RNA (1)...(19): siRNA sense strand
guacagcuuucuugugguu

SEQ ID NO: 934083 - RNA, 19 nt, Homo sapiens
  misc_RNA (1)...(19): siRNA sense strand
gauguugcuuucucaauau

SEQ ID NO: 934084 - RNA, 19 nt, Homo sapiens
  misc_RNA (1)...(19): siRNA sense strand
gcucauguguuuccuguuc

SEQ ID NO: 934085 - RNA, 19 nt, Homo sapiens
  misc_RNA (1)...(19): siRNA sense strand
gguacuaacagcuuugaua

SEQ ID NO: 934086 - RNA, 19 nt, Homo sapiens
  misc_RNA (1)...(19): siRNA sense strand
gagagugucuucaucuuac

SEQ ID NO: 934087 - RNA, 19 nt, Homo sapiens
  misc_RNA (1)...(19): siRNA sense strand
gaaggucugucgcacuuag

SEQ ID NO: 934088 - RNA, 19 nt, Homo sapiens
  misc_RNA (1)...(19): siRNA sense strand
caaaccugcuuaaaugaau

SEQ ID NO: 934089 - RNA, 19 nt, Homo sapiens
  misc_RNA (1)...(19): siRNA sense strand
ggaggauaguugcaaguau

SEQ ID NO: 934090 - RNA, 19 nt, Homo sapiens
  misc_RNA (1)...(19): siRNA sense strand
cacagugaguggccucuua

SEQ ID NO: 934091 - RNA, 19 nt, Homo sapiens
  misc_RNA (1)...(19): siRNA sense strand
ggaguucuaugcaguugug

SEQ ID NO: 934092 - RNA, 19 nt, Homo sapiens
  misc_RNA (1)...(19): siRNA sense strand
gcaaaccugcuuaaaugaa

SEQ ID NO: 934093 - RNA, 19 nt, Homo sapiens
  misc_RNA (1)...(19): siRNA sense strand
gcaccacaguauuuauaau

SEQ ID NO: 934094 - RNA, 19 nt, Homo sapiens
  misc_RNA (1)...(19): siRNA sense strand
gacauacuguggcgcguuu

SEQ ID NO: 934095 - RNA, 19 nt, Homo sapiens
  misc_RNA (1)...(19): siRNA sense strand
gaucauucauccucagcaa

SEQ ID NO: 934096 - RNA, 19 nt, Homo sapiens
  misc_RNA (1)...(19): siRNA sense strand
uuaaaucucucguuacucu

SEQ ID NO: 934097 - RNA, 19 nt, Homo sapiens
  misc_RNA (1)...(19): siRNA sense strand
gaucucugcucuuauuagu

SEQ ID NO: 934098 - RNA, 19 nt, Homo sapiens
  misc_RNA (1)...(19): siRNA sense strand
gcagaagggucagaugagu

SEQ ID NO: 934099 - RNA, 19 nt, Homo sapiens
  misc_RNA (1)...(19): siRNA sense strand
aguggaaccuaagaaauua

SEQ ID NO: 934100 - RNA, 19 nt, Homo sapiens
  misc_RNA (1)...(19): siRNA sense strand
ccuacugacuggagcauuu

SEQ ID NO: 934101 - RNA, 19 nt, Homo sapiens
  misc_RNA (1)...(19): siRNA sense strand
caacaguucuuggaguuca

SEQ ID NO: 934102 - RNA, 19 nt, Homo sapiens
  misc_RNA (1)...(19): siRNA sense strand
gcacuuaguagcagcauca

SEQ ID NO: 934103 - RNA, 19 nt, Homo sapiens
  misc_RNA (1)...(19): siRNA sense strand
ccaucuaccucuauuagug

SEQ ID NO: 934104 - RNA, 19 nt, Homo sapiens
  misc_RNA (1)...(19): siRNA sense strand
caaaguccucagcuaauaa

SEQ ID NO: 934105 - RNA, 19 nt, Homo sapiens
  misc_RNA (1)...(19): siRNA sense strand
ccagugugauuuauucaug

SEQ ID NO: 934106 - RNA, 19 nt, Homo sapiens
  misc_RNA (1)...(19): siRNA sense strand
ggauagauuuggaguuguc

SEQ ID NO: 934107 - RNA, 19 nt, Homo sapiens
  misc_RNA (1)...(19): siRNA sense strand
uagaaggucugucgcacuu

SEQ ID NO: 934108 - RNA, 19 nt, Homo sapiens
  misc_RNA (1)...(19): siRNA sense strand
gcaguugugccuucuauuc

SEQ ID NO: 934109 - RNA, 19 nt, Homo sapiens
  misc_RNA (1)...(19): siRNA sense strand
aagaggcagucgacaagua

SEQ ID NO: 934110 - RNA, 19 nt, Homo sapiens
  misc_RNA (1)...(19): siRNA sense strand
caucugcaccacaguauuu

SEQ ID NO: 934111 - RNA, 19 nt, Homo sapiens
  misc_RNA (1)...(19): siRNA sense strand
gugguucccugcacuggua

SEQ ID NO: 934112 - RNA, 19 nt, Homo sapiens
  misc_RNA (1)...(19): siRNA sense strand
gagcauuuaugggcuauag

SEQ ID NO: 934113 - RNA, 19 nt, Homo sapiens
  misc_RNA (1)...(19): siRNA sense strand
gaauaacuacuacauuugg

SEQ ID NO: 934114 - RNA, 19 nt, Homo sapiens
  misc_RNA (1)...(19): siRNA sense strand
uguggacacuucauauaaa

SEQ ID NO: 934115 - RNA, 19 nt, Homo sapiens
  misc_RNA (1)...(19): siRNA sense strand
gagacaacccagugugauu

SEQ ID NO: 934116 - RNA, 19 nt, Homo sapiens
  misc_RNA (1)...(19): siRNA sense strand
ucagugccaccauuaguua

SEQ ID NO: 934117 - RNA, 19 nt, Homo sapiens
  misc_RNA (1)...(19): siRNA sense strand
ugaguggccucuuaaaucu

SEQ ID NO: 934118 - RNA, 19 nt, Homo sapiens
  misc_RNA (1)...(19): siRNA sense strand
caguggaaccuaagaaauu

SEQ ID NO: 934119 - RNA, 19 nt, Homo sapiens
  misc_RNA (1)...(19): siRNA sense strand
cuuaguagcagcaucauuu

SEQ ID NO: 934120 - RNA, 19 nt, Homo sapiens
  misc_RNA (1)...(19): siRNA sense strand
gacaacccagugugauuua

SEQ ID NO: 934121 - RNA, 19 nt, Homo sapiens
  misc_RNA (1)...(19): siRNA sense strand
gcugucagugguaauaaua

SEQ ID NO: 934122 - RNA, 19 nt, Homo sapiens
  misc_RNA (1)...(19): siRNA sense strand
aaacugccaucuaucgaau

SEQ ID NO: 934123 - RNA, 19 nt, Homo sapiens
  misc_RNA (1)...(19): siRNA sense strand
gcaagaggcagucgacaag

SEQ ID NO: 934124 - RNA, 19 nt, Homo sapiens
  misc_RNA (1)...(19): siRNA sense strand
guacuaacagcuuugauag

SEQ ID NO: 934125 - RNA, 19 nt, Homo sapiens
  misc_RNA (1)...(19): siRNA sense strand
gcagucgacaaguacuuua

SEQ ID NO: 934126 - RNA, 19 nt, Homo sapiens
  misc_RNA (1)...(19): siRNA sense strand
gcacugguacuaacagcuu

SEQ ID NO: 934127 - RNA, 19 nt, Homo sapiens
  misc_RNA (1)...(19): siRNA sense strand
ucagcaggauugauuuguu

SEQ ID NO: 934128 - RNA, 19 nt, Homo sapiens
  misc_RNA (1)...(19): siRNA sense strand
ccagcuauccuuaauacuu

SEQ ID NO: 934129 - RNA, 19 nt, Homo sapiens
  misc_RNA (1)...(19): siRNA sense strand
gggagagugucuucaucuu

SEQ ID NO: 934130 - RNA, 19 nt, Homo sapiens
  misc_RNA (1)...(19): siRNA sense strand
uaucuuccauuucccauca

SEQ ID NO: 934131 - RNA, 19 nt, Homo sapiens
  misc_RNA (1)...(19): siRNA sense strand
cgaauaacuacuacauuug

SEQ ID NO: 934132 - RNA, 19 nt, Homo sapiens
  misc_RNA (1)...(19): siRNA sense strand
cgacaaguacuuuaagcuu

SEQ ID NO: 934133 - RNA, 19 nt, Homo sapiens
  misc_RNA (1)...(19): siRNA sense strand
ucacgaagacaagaaguuu

SEQ ID NO: 934134 - RNA, 19 nt, Homo sapiens
  misc_RNA (1)...(19): siRNA sense strand
ucagaugagugccuuccaa

SEQ ID NO: 934135 - RNA, 19 nt, Homo sapiens
  misc_RNA (1)...(19): siRNA sense strand
guucauaggccacuugaca

SEQ ID NO: 934136 - RNA, 19 nt, Homo sapiens
  misc_RNA (1)...(19): siRNA sense strand
gggccaagauuguggacau

SEQ ID NO: 934137 - RNA, 19 nt, Homo sapiens
  misc_RNA (1)...(19): siRNA sense strand
ccgcaaaguccucagcuaa

SEQ ID NO: 934138 - RNA, 19 nt, Homo sapiens
  misc_RNA (1)...(19): siRNA sense strand
gauguaaacaccugcuaug

SEQ ID NO: 934139 - RNA, 19 nt, Homo sapiens
  misc_RNA (1)...(19): siRNA sense strand
gugaguggccucuuaaauc

SEQ ID NO: 934140 - RNA, 19 nt, Homo sapiens
  misc_RNA (1)...(19): siRNA sense strand
gcaacucaugcacucauuu

SEQ ID NO: 934141 - RNA, 19 nt, Homo sapiens
  misc_RNA (1)...(19): siRNA sense strand
agaaaagacuucaacaguu

SEQ ID NO: 934142 - RNA, 19 nt, Homo sapiens
  misc_RNA (1)...(19): siRNA sense strand
agacgacacuaccagcuau

SEQ ID NO: 934143 - RNA, 19 nt, Homo sapiens
  misc_RNA (1)...(19): siRNA sense strand
cuggugugcugcagugaua

SEQ ID NO: 934144 - RNA, 19 nt, Homo sapiens
  misc_RNA (1)...(19): siRNA sense strand
cucaugcacucauuuauuc

SEQ ID NO: 934145 - RNA, 19 nt, Homo sapiens
  misc_RNA (1)...(19): siRNA sense strand
gaccugauguugcuuucuc

SEQ ID NO: 934146 - RNA, 19 nt, Homo sapiens
  misc_RNA (1)...(19): siRNA sense strand
ugaacuaucuuccauuucc

SEQ ID NO: 934147 - RNA, 19 nt, Homo sapiens
  misc_RNA (1)...(19): siRNA sense strand
gauaguugcaaguauuguu

SEQ ID NO: 934148 - RNA, 19 nt, Homo sapiens
  misc_RNA (1)...(19): siRNA sense strand
uaccagcuauccuuaauac

SEQ ID NO: 934149 - RNA, 19 nt, Homo sapiens
  misc_RNA (1)...(19): siRNA sense strand
caaaacgggugcugauaau

SEQ ID NO: 934150 - RNA, 19 nt, Homo sapiens
  misc_RNA (1)...(19): siRNA sense strand
ucuaauccuucuccaucua

SEQ ID NO: 934151 - RNA, 19 nt, Homo sapiens
  misc_RNA (1)...(19): siRNA sense strand
gagaucucugcucuuauua

SEQ ID NO: 934152 - RNA, 19 nt, Homo sapiens
  misc_RNA (1)...(19): siRNA sense strand
ugaaucggauggcuggaau

SEQ ID NO: 934153 - RNA, 19 nt, Homo sapiens
  misc_RNA (1)...(19): siRNA sense strand
aaacgggugcugauaaugu

SEQ ID NO: 934154 - RNA, 19 nt, Homo sapiens
  misc_RNA (1)...(19): siRNA sense strand
aaacgugaacagauuaaga

SEQ ID NO: 934155 - RNA, 19 nt, Homo sapiens
  misc_RNA (1)...(19): siRNA sense strand
cagaauaaacgugaacaga

SEQ ID NO: 934156 - RNA, 19 nt, Homo sapiens
  misc_RNA (1)...(19): siRNA sense strand
caacccagugugauuuauu

SEQ ID NO: 934157 - RNA, 19 nt, Homo sapiens
  misc_RNA (1)...(19): siRNA sense strand
gggugcugauaauguauuu

SEQ ID NO: 934158 - RNA, 19 nt, Homo sapiens
  misc_RNA (1)...(19): siRNA sense strand
acacuaccagcuauccuua

SEQ ID NO: 934159 - RNA, 19 nt, Homo sapiens
  misc_RNA (1)...(19): siRNA sense strand
gaagaaaucuggacaaguc

SEQ ID NO: 934160 - RNA, 19 nt, Homo sapiens
  misc_RNA (1)...(19): siRNA sense strand
gagaaacaguguacuauuc

SEQ ID NO: 934161 - RNA, 19 nt, Homo sapiens
  misc_RNA (1)...(19): siRNA sense strand
gaaccucucuguacucuca

SEQ ID NO: 934162 - RNA, 19 nt, Homo sapiens
  misc_RNA (1)...(19): siRNA sense strand
ggauggagaucaccaaaga

SEQ ID NO: 934163 - RNA, 19 nt, Homo sapiens
  misc_RNA (1)...(19): siRNA sense strand
aagcaucccuuuaauagaa

SEQ ID NO: 934164 - RNA, 19 nt, Homo sapiens
  misc_RNA (1)...(19): siRNA sense strand
ccagacaccuugaaaauaa

SEQ ID NO: 934165 - RNA, 19 nt, Homo sapiens
  misc_RNA (1)...(19): siRNA sense strand
ucacaaugguucuagaaga

SEQ ID NO: 934166 - RNA, 19 nt, Homo sapiens
  misc_RNA (1)...(19): siRNA sense strand
ggagaaacaguguacuauu

SEQ ID NO: 934167 - RNA, 19 nt, Homo sapiens
  misc_RNA (1)...(19): siRNA sense strand
gaaaucuggacaagucuuu

SEQ ID NO: 934168 - RNA, 19 nt, Homo sapiens
  misc_RNA (1)...(19): siRNA sense strand
cauguuugcucacagauga

SEQ ID NO: 934169 - RNA, 19 nt, Homo sapiens
  misc_RNA (1)...(19): siRNA sense strand
ggacaagucuuuucaugug

SEQ ID NO: 934170 - RNA, 19 nt, Homo sapiens
  misc_RNA (1)...(19): siRNA sense strand
caaccaacaugaagcaucu

SEQ ID NO: 934171 - RNA, 19 nt, Homo sapiens
  misc_RNA (1)...(19): siRNA sense strand
caacaugaagcaucucuug

SEQ ID NO: 934172 - RNA, 19 nt, Homo sapiens
  misc_RNA (1)...(19): siRNA sense strand
gaucgcgccuggagaaaca

SEQ ID NO: 934173 - RNA, 19 nt, Homo sapiens
  misc_RNA (1)...(19): siRNA sense strand
gaaacaguguacuauucug

SEQ ID NO: 934174 - RNA, 19 nt, Homo sapiens
  misc_RNA (1)...(19): siRNA sense strand
ugaagcaucccuuuaauag

SEQ ID NO: 934175 - RNA, 19 nt, Homo sapiens
  misc_RNA (1)...(19): siRNA sense strand
acgcauugauuccauguuu

SEQ ID NO: 934176 - RNA, 19 nt, Homo sapiens
  misc_RNA (1)...(19): siRNA sense strand
gaagcaucccuuuaauaga

SEQ ID NO: 934177 - RNA, 19 nt, Homo sapiens
  misc_RNA (1)...(19): siRNA sense strand
cagaugaaguggccauucu

SEQ ID NO: 934178 - RNA, 19 nt, Homo sapiens
  misc_RNA (1)...(19): siRNA sense strand
ugaaggccauugggaggua

SEQ ID NO: 934179 - RNA, 19 nt, Homo sapiens
  misc_RNA (1)...(19): siRNA sense strand
gcuuccaccugguuauuga

SEQ ID NO: 934180 - RNA, 19 nt, Homo sapiens
  misc_RNA (1)...(19): siRNA sense strand
uagaagaaaucuggacaag

SEQ ID NO: 934181 - RNA, 19 nt, Homo sapiens
  misc_RNA (1)...(19): siRNA sense strand
ccauacaaccuucguguca

SEQ ID NO: 934182 - RNA, 19 nt, Homo sapiens
  misc_RNA (1)...(19): siRNA sense strand
cgaggaacaugucaaaaug

SEQ ID NO: 934183 - RNA, 19 nt, Homo sapiens
  misc_RNA (1)...(19): siRNA sense strand
ccugaagcaucccuuuaau

SEQ ID NO: 934184 - RNA, 19 nt, Homo sapiens
  misc_RNA (1)...(19): siRNA sense strand
gaaacucaaccauccuuac

SEQ ID NO: 934185 - RNA, 19 nt, Homo sapiens
  misc_RNA (1)...(19): siRNA sense strand
cugaagcaucccuuuaaua

SEQ ID NO: 934186 - RNA, 19 nt, Homo sapiens
  misc_RNA (1)...(19): siRNA sense strand
ucacggccacugugccaua

SEQ ID NO: 934187 - RNA, 19 nt, Homo sapiens
  misc_RNA (1)...(19): siRNA sense strand
cugaagguccugaguguga

SEQ ID NO: 934188 - RNA, 19 nt, Homo sapiens
  misc_RNA (1)...(19): siRNA sense strand
ucuguacucucaaccaaca

SEQ ID NO: 934189 - RNA, 19 nt, Homo sapiens
  misc_RNA (1)...(19): siRNA sense strand
gauggcuuccaccugguua

SEQ ID NO: 934190 - RNA, 19 nt, Homo sapiens
  misc_RNA (1)...(19): siRNA sense strand
ucucuguacucucaaccaa

SEQ ID NO: 934191 - RNA, 19 nt, Homo sapiens
  misc_RNA (1)...(19): siRNA sense strand
gugugaaggcccagacauu

SEQ ID NO: 934192 - RNA, 19 nt, Homo sapiens
  misc_RNA (1)...(19): siRNA sense strand
guauuccagugcaccuaga

SEQ ID NO: 934193 - RNA, 19 nt, Homo sapiens
  misc_RNA (1)...(19): siRNA sense strand
gguccugagugugauguca

SEQ ID NO: 934194 - RNA, 19 nt, Homo sapiens
  misc_RNA (1)...(19): siRNA sense strand
agaaacucaaccauccuua

SEQ ID NO: 934195 - RNA, 19 nt, Homo sapiens
  misc_RNA (1)...(19): siRNA sense strand
aguguacuauucugucgaa

SEQ ID NO: 934196 - RNA, 19 nt, Homo sapiens
  misc_RNA (1)...(19): siRNA sense strand
ccaauucaccccagaaguu

SEQ ID NO: 934197 - RNA, 19 nt, Homo sapiens
  misc_RNA (1)...(19): siRNA sense strand
gaccugggauggagaucac

SEQ ID NO: 934198 - RNA, 19 nt, Homo sapiens
  misc_RNA (1)...(19): siRNA sense strand
gcuucaugcugauccuugu

SEQ ID NO: 934199 - RNA, 19 nt, Homo sapiens
  misc_RNA (1)...(19): siRNA sense strand
acaugaagcaucucuugau

SEQ ID NO: 934200 - RNA, 19 nt, Homo sapiens
  misc_RNA (1)...(19): siRNA sense strand
cgcauugauuccauguuug

SEQ ID NO: 934201 - RNA, 19 nt, Homo sapiens
  misc_RNA (1)...(19): siRNA sense strand
cggccacugugccauacaa

SEQ ID NO: 934202 - RNA, 19 nt, Homo sapiens
  misc_RNA (1)...(19): siRNA sense strand
gaagguccugagugugaug

SEQ ID NO: 934203 - RNA, 19 nt, Homo sapiens
  misc_RNA (1)...(19): siRNA sense strand
gcauugauuccauguuugc

SEQ ID NO: 934204 - RNA, 19 nt, Homo sapiens
  misc_RNA (1)...(19): siRNA sense strand
caauucaccccagaaguua

SEQ ID NO: 934205 - RNA, 19 nt, Homo sapiens
  misc_RNA (1)...(19): siRNA sense strand
gccaggggcugcauacugu

SEQ ID NO: 934206 - RNA, 19 nt, Homo sapiens
  misc_RNA (1)...(19): siRNA sense strand
uccugaagcaucccuuuaa

SEQ ID NO: 934207 - RNA, 19 nt, Homo sapiens
  misc_RNA (1)...(19): siRNA sense strand
cuggagaaacaguguacua

SEQ ID NO: 934208 - RNA, 19 nt, Homo sapiens
  misc_RNA (1)...(19): siRNA sense strand
gauguggagcccagugauc

SEQ ID NO: 934209 - RNA, 19 nt, Homo sapiens
  misc_RNA (1)...(19): siRNA sense strand
guacucucaaccaacauga

SEQ ID NO: 934210 - RNA, 19 nt, Homo sapiens
  misc_RNA (1)...(19): siRNA sense strand
ggcccuguuugccuuuguu

SEQ ID NO: 934211 - RNA, 19 nt, Homo sapiens
  misc_RNA (1)...(19): siRNA sense strand
gaaauggucuuguuuguga

SEQ ID NO: 934212 - RNA, 19 nt, Homo sapiens
  misc_RNA (1)...(19): siRNA sense strand
gaagacagaugaagaaaga

SEQ ID NO: 934213 - RNA, 19 nt, Homo sapiens
  misc_RNA (1)...(19): siRNA sense strand
gaacgacaacgaagaauua

SEQ ID NO: 934214 - RNA, 19 nt, Homo sapiens
  misc_RNA (1)...(19): siRNA sense strand
agacagagcuggcugauuu

SEQ ID NO: 934215 - RNA, 19 nt, Homo sapiens
  misc_RNA (1)...(19): siRNA sense strand
gaaaguagcuacaaugacu

SEQ ID NO: 934216 - RNA, 19 nt, Homo sapiens
  misc_RNA (1)...(19): siRNA sense strand
agaagaagccuuugaaaua

SEQ ID NO: 934217 - RNA, 19 nt, Homo sapiens
  misc_RNA (1)...(19): siRNA sense strand
gauaaggucaugaauguua

SEQ ID NO: 934218 - RNA, 19 nt, Homo sapiens
  misc_RNA (1)...(19): siRNA sense strand
gaagaagccuuugaaauag

SEQ ID NO: 934219 - RNA, 19 nt, Homo sapiens
  misc_RNA (1)...(19): siRNA sense strand
gaacagaaacgauuagaga

SEQ ID NO: 934220 - RNA, 19 nt, Homo sapiens
  misc_RNA (1)...(19): siRNA sense strand
gaacauggaaugcuaacua

SEQ ID NO: 934221 - RNA, 19 nt, Homo sapiens
  misc_RNA (1)...(19): siRNA sense strand
gaaagaaaguagcuacaau

SEQ ID NO: 934222 - RNA, 19 nt, Homo sapiens
  misc_RNA (1)...(19): siRNA sense strand
gaagaggccucaguacauu

SEQ ID NO: 934223 - RNA, 19 nt, Homo sapiens
  misc_RNA (1)...(19): siRNA sense strand
cgaagaggaugcacaguuu

SEQ ID NO: 934224 - RNA, 19 nt, Homo sapiens
  misc_RNA (1)...(19): siRNA sense strand
aaacacgacucaaauauuc

SEQ ID NO: 934225 - RNA, 19 nt, Homo sapiens
  misc_RNA (1)...(19): siRNA sense strand
gaugggaacugaagcagaa

SEQ ID NO: 934226 - RNA, 19 nt, Homo sapiens
  misc_RNA (1)...(19): siRNA sense strand
gaagaaagacuggcauuug

SEQ ID NO: 934227 - RNA, 19 nt, Homo sapiens
  misc_RNA (1)...(19): siRNA sense strand
gcaaagcagcagcaacuua

SEQ ID NO: 934228 - RNA, 19 nt, Homo sapiens
  misc_RNA (1)...(19): siRNA sense strand
ggaacaaucucaguuacaa

SEQ ID NO: 934229 - RNA, 19 nt, Homo sapiens
  misc_RNA (1)...(19): siRNA sense strand
gaagaaagugauucaguuu

SEQ ID NO: 934230 - RNA, 19 nt, Homo sapiens
  misc_RNA (1)...(19): siRNA sense strand
gaacuccagugccgagaaa

SEQ ID NO: 934231 - RNA, 19 nt, Homo sapiens
  misc_RNA (1)...(19): siRNA sense strand
gagaaagaguuaaagaauc

SEQ ID NO: 934232 - RNA, 19 nt, Homo sapiens
  misc_RNA (1)...(19): siRNA sense strand
gcaaguagcaucccaggaa

SEQ ID NO: 934233 - RNA, 19 nt, Homo sapiens
  misc_RNA (1)...(19): siRNA sense strand
gcuaagaaaucaauaaagg

SEQ ID NO: 934234 - RNA, 19 nt, Homo sapiens
  misc_RNA (1)...(19): siRNA sense strand
gagcaugucucaaucucaa

SEQ ID NO: 934235 - RNA, 19 nt, Homo sapiens
  misc_RNA (1)...(19): siRNA sense strand
gauaguaaaucuacaaugc

SEQ ID NO: 934236 - RNA, 19 nt, Homo sapiens
  misc_RNA (1)...(19): siRNA sense strand
uagauaaggucaugaaugu

SEQ ID NO: 934237 - RNA, 19 nt, Homo sapiens
  misc_RNA (1)...(19): siRNA sense strand
gagcugaaccugagacauu

SEQ ID NO: 934238 - RNA, 19 nt, Homo sapiens
  misc_RNA (1)...(19): siRNA sense strand
acaagaagcucugcagaaa

SEQ ID NO: 934239 - RNA, 19 nt, Homo sapiens
  misc_RNA (1)...(19): siRNA sense strand
gcucagaauuucgcuuuaa

SEQ ID NO: 934240 - RNA, 19 nt, Homo sapiens
  misc_RNA (1)...(19): siRNA sense strand
gaacuagagaugauuaaga

SEQ ID NO: 934241 - RNA, 19 nt, Homo sapiens
  misc_RNA (1)...(19): siRNA sense strand
gaagaagcaaggcauauug

SEQ ID NO: 934242 - RNA, 19 nt, Homo sapiens
  misc_RNA (1)...(19): siRNA sense strand
acaaagacaugcauggauu

SEQ ID NO: 934243 - RNA, 19 nt, Homo sapiens
  misc_RNA (1)...(19): siRNA sense strand
caaagcagcagcaacuuaa

SEQ ID NO: 934244 - RNA, 19 nt, Homo sapiens
  misc_RNA (1)...(19): siRNA sense strand
aagaaagacuggcauuuga

SEQ ID NO: 934245 - RNA, 19 nt, Homo sapiens
  misc_RNA (1)...(19): siRNA sense strand
caagaccaguuucagauga

SEQ ID NO: 934246 - RNA, 19 nt, Homo sapiens
  misc_RNA (1)...(19): siRNA sense strand
gaagugaauugcagaaugc

SEQ ID NO: 934247 - RNA, 19 nt, Homo sapiens
  misc_RNA (1)...(19): siRNA sense strand
gaaagacuggcauuugaaa

SEQ ID NO: 934248 - RNA, 19 nt, Homo sapiens
  misc_RNA (1)...(19): siRNA sense strand
ggaaaguggcgaagagaaa

SEQ ID NO: 934249 - RNA, 19 nt, Homo sapiens
  misc_RNA (1)...(19): siRNA sense strand
gaaguucagggaaaucuaa

SEQ ID NO: 934250 - RNA, 19 nt, Homo sapiens
  misc_RNA (1)...(19): siRNA sense strand
gaggaggcauggagaaguu

SEQ ID NO: 934251 - RNA, 19 nt, Homo sapiens
  misc_RNA (1)...(19): siRNA sense strand
gaagaaacccaaagaaagg

SEQ ID NO: 934252 - RNA, 19 nt, Homo sapiens
  misc_RNA (1)...(19): siRNA sense strand
gaagaggaugcacaguuua

SEQ ID NO: 934253 - RNA, 19 nt, Homo sapiens
  misc_RNA (1)...(19): siRNA sense strand
guucaucacugccauuguu

SEQ ID NO: 934254 - RNA, 19 nt, Homo sapiens
  misc_RNA (1)...(19): siRNA sense strand
aaaggaacauggaaugcua

SEQ ID NO: 934255 - RNA, 19 nt, Homo sapiens
  misc_RNA (1)...(19): siRNA sense strand
cgacucaaauauucacaaa

SEQ ID NO: 934256 - RNA, 19 nt, Homo sapiens
  misc_RNA (1)...(19): siRNA sense strand
ucagggaacuguagaguca

SEQ ID NO: 934257 - RNA, 19 nt, Homo sapiens
  misc_RNA (1)...(19): siRNA sense strand
guuacaaagugaacuacua

SEQ ID NO: 934258 - RNA, 19 nt, Homo sapiens
  misc_RNA (1)...(19): siRNA sense strand
gccaaucaaugaaagacua

SEQ ID NO: 934259 - RNA, 19 nt, Homo sapiens
  misc_RNA (1)...(19): siRNA sense strand
uaacauaggcaaaguaagu

SEQ ID NO: 934260 - RNA, 19 nt, Homo sapiens
  misc_RNA (1)...(19): siRNA sense strand
gcagauugaggaagaaauu

SEQ ID NO: 934261 - RNA, 19 nt, Homo sapiens
  misc_RNA (1)...(19): siRNA sense strand
gaacuuaaagacugucaga

SEQ ID NO: 934262 - RNA, 19 nt, Homo sapiens
  misc_RNA (1)...(19): siRNA sense strand
gcaaagugcaagacauuga

SEQ ID NO: 934263 - RNA, 19 nt, Homo sapiens
  misc_RNA (1)...(19): siRNA sense strand
uccaagagcuaaaggguuu

SEQ ID NO: 934264 - RNA, 19 nt, Homo sapiens
  misc_RNA (1)...(19): siRNA sense strand
gaacaaguaagaaagaaag

SEQ ID NO: 934265 - RNA, 19 nt, Homo sapiens
  misc_RNA (1)...(19): siRNA sense strand
ugaaggcucuacagucuga

SEQ ID NO: 934266 - RNA, 19 nt, Homo sapiens
  misc_RNA (1)...(19): siRNA sense strand
caaacacgacucaaauauu

SEQ ID NO: 934267 - RNA, 19 nt, Homo sapiens
  misc_RNA (1)...(19): siRNA sense strand
gaagacacuccgcaaagaa

SEQ ID NO: 934268 - RNA, 19 nt, Homo sapiens
  misc_RNA (1)...(19): siRNA sense strand
ggaggaaaguggcgaagag

SEQ ID NO: 934269 - RNA, 19 nt, Homo sapiens
  misc_RNA (1)...(19): siRNA sense strand
gaaaucgaggcccaccuua

SEQ ID NO: 934270 - RNA, 19 nt, Homo sapiens
  misc_RNA (1)...(19): siRNA sense strand
gaaaguacccaggcaacaa

SEQ ID NO: 934271 - RNA, 19 nt, Homo sapiens
  misc_RNA (1)...(19): siRNA sense strand
gaaauuggcguggaaaaua

SEQ ID NO: 934272 - RNA, 19 nt, Homo sapiens
  misc_RNA (1)...(19): siRNA sense strand
ccaggaacaaucucaguua

SEQ ID NO: 934273 - RNA, 19 nt, Homo sapiens
  misc_RNA (1)...(19): siRNA sense strand
ggaagaagcaaggcauauu

SEQ ID NO: 934274 - RNA, 19 nt, Homo sapiens
  misc_RNA (1)...(19): siRNA sense strand
gcucuagauuaccuugaua

SEQ ID NO: 934275 - RNA, 19 nt, Homo sapiens
  misc_RNA (1)...(19): siRNA sense strand
gaaaacauuugcaaggauu

SEQ ID NO: 934276 - RNA, 19 nt, Homo sapiens
  misc_RNA (1)...(19): siRNA sense strand
uagagaaguuagaggagua

SEQ ID NO: 934277 - RNA, 19 nt, Homo sapiens
  misc_RNA (1)...(19): siRNA sense strand
ucaaagagcaaacucaaga

SEQ ID NO: 934278 - RNA, 19 nt, Homo sapiens
  misc_RNA (1)...(19): siRNA sense strand
gacgauaucuuccaacacu

SEQ ID NO: 934279 - RNA, 19 nt, Homo sapiens
  misc_RNA (1)...(19): siRNA sense strand
gaaagugauucaguuugug

SEQ ID NO: 934280 - RNA, 19 nt, Homo sapiens
  misc_RNA (1)...(19): siRNA sense strand
aaagauagauaaggucaug

SEQ ID NO: 934281 - RNA, 19 nt, Homo sapiens
  misc_RNA (1)...(19): siRNA sense strand
gugaagaaacccaaagaaa

SEQ ID NO: 934282 - RNA, 19 nt, Homo sapiens
  misc_RNA (1)...(19): siRNA sense strand
ccuagacaauacuaacaua

SEQ ID NO: 934283 - RNA, 19 nt, Homo sapiens
  misc_RNA (1)...(19): siRNA sense strand
ggcaacaauugauaucuau

SEQ ID NO: 934284 - RNA, 19 nt, Homo sapiens
  misc_RNA (1)...(19): siRNA sense strand
ugaagaaauuggcguggaa

SEQ ID NO: 934285 - RNA, 19 nt, Homo sapiens
  misc_RNA (1)...(19): siRNA sense strand
gcagaaugcugggauugau

SEQ ID NO: 934286 - RNA, 19 nt, Homo sapiens
  misc_RNA (1)...(19): siRNA sense strand
caaagaaaggacccaguuu

SEQ ID NO: 934287 - RNA, 19 nt, Homo sapiens
  misc_RNA (1)...(19): siRNA sense strand
cccuagaucuuucucagua

SEQ ID NO: 934288 - RNA, 19 nt, Homo sapiens
  misc_RNA (1)...(19): siRNA sense strand
aagaagcucugcagaaaca

SEQ ID NO: 934289 - RNA, 19 nt, Homo sapiens
  misc_RNA (1)...(19): siRNA sense strand
gaacugaagcagaaaguac

SEQ ID NO: 934290 - RNA, 19 nt, Homo sapiens
  misc_RNA (1)...(19): siRNA sense strand
gcaagacauugagauaauc

SEQ ID NO: 934291 - RNA, 19 nt, Homo sapiens
  misc_RNA (1)...(19): siRNA sense strand
gaacaaucucaguuacaaa

SEQ ID NO: 934292 - RNA, 19 nt, Homo sapiens
  misc_RNA (1)...(19): siRNA sense strand
ugaagacacuccgcaaaga

SEQ ID NO: 934293 - RNA, 19 nt, Homo sapiens
  misc_RNA (1)...(19): siRNA sense strand
agaaagugauucaguuugu

SEQ ID NO: 934294 - RNA, 19 nt, Homo sapiens
  misc_RNA (1)...(19): siRNA sense strand
ccuaguggaugaaauugaa

SEQ ID NO: 934295 - RNA, 19 nt, Homo sapiens
  misc_RNA (1)...(19): siRNA sense strand
gaaaagauaggcauaauag

SEQ ID NO: 934296 - RNA, 19 nt, Homo sapiens
  misc_RNA (1)...(19): siRNA sense strand
ggaacgacaacgaagaauu

SEQ ID NO: 934297 - RNA, 19 nt, Homo sapiens
  misc_RNA (1)...(19): siRNA sense strand
ggugauugaugucauaaag

SEQ ID NO: 934298 - RNA, 19 nt, Homo sapiens
  misc_RNA (1)...(19): siRNA sense strand
ucagcuggaucguuauaaa

SEQ ID NO: 934299 - RNA, 19 nt, Homo sapiens
  misc_RNA (1)...(19): siRNA sense strand
gcagagcgcagacaagcaa

SEQ ID NO: 934300 - RNA, 19 nt, Homo sapiens
  misc_RNA (1)...(19): siRNA sense strand
caacuacaacaaacagaaa

SEQ ID NO: 934301 - RNA, 19 nt, Homo sapiens
  misc_RNA (1)...(19): siRNA sense strand
caaguuagagcaugugaau

SEQ ID NO: 934302 - RNA, 19 nt, Homo sapiens
  misc_RNA (1)...(19): siRNA sense strand
gauuagagaagcauaacuu

SEQ ID NO: 934303 - RNA, 19 nt, Homo sapiens
  misc_RNA (1)...(19): siRNA sense strand
gaagaggaacggaagaagu

SEQ ID NO: 934304 - RNA, 19 nt, Homo sapiens
  misc_RNA (1)...(19): siRNA sense strand
gcagcaacuuaaggacaua

SEQ ID NO: 934305 - RNA, 19 nt, Homo sapiens
  misc_RNA (1)...(19): siRNA sense strand
gaugagaaagaguuaaaga

SEQ ID NO: 934306 - RNA, 19 nt, Homo sapiens
  misc_RNA (1)...(19): siRNA sense strand
aacaguagcucuugaugga

SEQ ID NO: 934307 - RNA, 19 nt, Homo sapiens
  misc_RNA (1)...(19): siRNA sense strand
gggaacagaagacagauga

SEQ ID NO: 934308 - RNA, 19 nt, Homo sapiens
  misc_RNA (1)...(19): siRNA sense strand
guucuaaacaggaagauga

SEQ ID NO: 934309 - RNA, 19 nt, Homo sapiens
  misc_RNA (1)...(19): siRNA sense strand
agaagugaauugcagaaug

SEQ ID NO: 934310 - RNA, 19 nt, Homo sapiens
  misc_RNA (1)...(19): siRNA sense strand
ggaacaaguaagaaagaaa

SEQ ID NO: 934311 - RNA, 19 nt, Homo sapiens
  misc_RNA (1)...(19): siRNA sense strand
gcacaagacugaauaacga

SEQ ID NO: 934312 - RNA, 19 nt, Homo sapiens
  misc_RNA (1)...(19): siRNA sense strand
gaauaaacauugccauugu

SEQ ID NO: 934313 - RNA, 19 nt, Homo sapiens
  misc_RNA (1)...(19): siRNA sense strand
gaauaacgaugccaagaau

SEQ ID NO: 934314 - RNA, 19 nt, Homo sapiens
  misc_RNA (1)...(19): siRNA sense strand
gagaacagcugggaaaugu

SEQ ID NO: 934315 - RNA, 19 nt, Homo sapiens
  misc_RNA (1)...(19): siRNA sense strand
caaggacguuuguugguua

SEQ ID NO: 934316 - RNA, 19 nt, Homo sapiens
  misc_RNA (1)...(19): siRNA sense strand
ggaauaaacauugccauug

SEQ ID NO: 934317 - RNA, 19 nt, Homo sapiens
  misc_RNA (1)...(19): siRNA sense strand
ggaagcacaagacugaaua

SEQ ID NO: 934318 - RNA, 19 nt, Homo sapiens
  misc_RNA (1)...(19): siRNA sense strand
ggaccgaugacaaaguuua

SEQ ID NO: 934319 - RNA, 19 nt, Homo sapiens
  misc_RNA (1)...(19): siRNA sense strand
guaaagaaaucaggaacau

SEQ ID NO: 934320 - RNA, 19 nt, Homo sapiens
  misc_RNA (1)...(19): siRNA sense strand
aaagaaaucaggaacauga

SEQ ID NO: 934321 - RNA, 19 nt, Homo sapiens
  misc_RNA (1)...(19): siRNA sense strand
guuaagaccuaaaccaaca

SEQ ID NO: 934322 - RNA, 19 nt, Homo sapiens
  misc_RNA (1)...(19): siRNA sense strand
gcuaagaacaacagauauu

SEQ ID NO: 934323 - RNA, 19 nt, Homo sapiens
  misc_RNA (1)...(19): siRNA sense strand
ccagauagaaggcugcaua

SEQ ID NO: 934324 - RNA, 19 nt, Homo sapiens
  misc_RNA (1)...(19): siRNA sense strand
caacagcaaauacaacuug

SEQ ID NO: 934325 - RNA, 19 nt, Homo sapiens
  misc_RNA (1)...(19): siRNA sense strand
gauuagcugcuuugacaua

SEQ ID NO: 934326 - RNA, 19 nt, Homo sapiens
  misc_RNA (1)...(19): siRNA sense strand
gaaaucaggaacaugaaau

SEQ ID NO: 934327 - RNA, 19 nt, Homo sapiens
  misc_RNA (1)...(19): siRNA sense strand
ugacauaaacguucaagga

SEQ ID NO: 934328 - RNA, 19 nt, Homo sapiens
  misc_RNA (1)...(19): siRNA sense strand
cugcagagauccagauaga

SEQ ID NO: 934329 - RNA, 19 nt, Homo sapiens
  misc_RNA (1)...(19): siRNA sense strand
gaaguaaagaaaucaggaa

SEQ ID NO: 934330 - RNA, 19 nt, Homo sapiens
  misc_RNA (1)...(19): siRNA sense strand
gcagagauccagauagaag

SEQ ID NO: 934331 - RNA, 19 nt, Homo sapiens
  misc_RNA (1)...(19): siRNA sense strand
gaacucccuuccgaaauuc

SEQ ID NO: 934332 - RNA, 19 nt, Homo sapiens
  misc_RNA (1)...(19): siRNA sense strand
gcagagcucauuccagaug

SEQ ID NO: 934333 - RNA, 19 nt, Homo sapiens
  misc_RNA (1)...(19): siRNA sense strand
gacggaagcacaagacuga

SEQ ID NO: 934334 - RNA, 19 nt, Homo sapiens
  misc_RNA (1)...(19): siRNA sense strand
gaagcacaagacugaauaa

SEQ ID NO: 934335 - RNA, 19 nt, Homo sapiens
  misc_RNA (1)...(19): siRNA sense strand
uugauuagcugcuuugaca

SEQ ID NO: 934336 - RNA, 19 nt, Homo sapiens
  misc_RNA (1)...(19): siRNA sense strand
caaccacucugaugcuaag

SEQ ID NO: 934337 - RNA, 19 nt, Homo sapiens
  misc_RNA (1)...(19): siRNA sense strand
ucaaggacguuuguugguu

SEQ ID NO: 934338 - RNA, 19 nt, Homo sapiens
  misc_RNA (1)...(19): siRNA sense strand
gaccuaaaccaacagcaaa

SEQ ID NO: 934339 - RNA, 19 nt, Homo sapiens
  misc_RNA (1)...(19): siRNA sense strand
ggucuucgccuccuugugu

SEQ ID NO: 934340 - RNA, 19 nt, Homo sapiens
  misc_RNA (1)...(19): siRNA sense strand
ggacguuuguugguuaagu

SEQ ID NO: 934341 - RNA, 19 nt, Homo sapiens
  misc_RNA (1)...(19): siRNA sense strand
ugaauaacgaugccaagaa

SEQ ID NO: 934342 - RNA, 19 nt, Homo sapiens
  misc_RNA (1)...(19): siRNA sense strand
ggaaauguugccagaggaa

SEQ ID NO: 934343 - RNA, 19 nt, Homo sapiens
  misc_RNA (1)...(19): siRNA sense strand
gacguuuguugguuaaguu

SEQ ID NO: 934344 - RNA, 19 nt, Homo sapiens
  misc_RNA (1)...(19): siRNA sense strand
ggagaacagcugggaaaug

SEQ ID NO: 934345 - RNA, 19 nt, Homo sapiens
  misc_RNA (1)...(19): siRNA sense strand
acauugccauugucaacua

SEQ ID NO: 934346 - RNA, 19 nt, Homo sapiens
  misc_RNA (1)...(19): siRNA sense strand
ggagguggcagaagcaagu

SEQ ID NO: 934347 - RNA, 19 nt, Homo sapiens
  misc_RNA (1)...(19): siRNA sense strand
aggucuagcuggguauuua

SEQ ID NO: 934348 - RNA, 19 nt, Homo sapiens
  misc_RNA (1)...(19): siRNA sense strand
ugccaagaaugccauagaa

SEQ ID NO: 934349 - RNA, 19 nt, Homo sapiens
  misc_RNA (1)...(19): siRNA sense strand
gacaaaguuuauucagagu

SEQ ID NO: 934350 - RNA, 19 nt, Homo sapiens
  misc_RNA (1)...(19): siRNA sense strand
caaaaucccugcucuucau

SEQ ID NO: 934351 - RNA, 19 nt, Homo sapiens
  misc_RNA (1)...(19): siRNA sense strand
caagaaugccauagaagca

SEQ ID NO: 934352 - RNA, 19 nt, Homo sapiens
  misc_RNA (1)...(19): siRNA sense strand
aaaucugcuuugaggauaa

SEQ ID NO: 934353 - RNA, 19 nt, Homo sapiens
  misc_RNA (1)...(19): siRNA sense strand
gccauugucaacuauguaa

SEQ ID NO: 934354 - RNA, 19 nt, Homo sapiens
  misc_RNA (1)...(19): siRNA sense strand
aaauguugccagaggaaua

SEQ ID NO: 934355 - RNA, 19 nt, Homo sapiens
  misc_RNA (1)...(19): siRNA sense strand
gccagaggaauaaacauug

SEQ ID NO: 934356 - RNA, 19 nt, Homo sapiens
  misc_RNA (1)...(19): siRNA sense strand
ucagagugcugcuccaaaa

SEQ ID NO: 934357 - RNA, 19 nt, Homo sapiens
  misc_RNA (1)...(19): siRNA sense strand
cccauuggcuggugguuca

SEQ ID NO: 934358 - RNA, 19 nt, Homo sapiens
  misc_RNA (1)...(19): siRNA sense strand
aaaccaacagcaaauacaa

SEQ ID NO: 934359 - RNA, 19 nt, Homo sapiens
  misc_RNA (1)...(19): siRNA sense strand
gugcuugauuagcugcuuu

SEQ ID NO: 934360 - RNA, 19 nt, Homo sapiens
  misc_RNA (1)...(19): siRNA sense strand
gcuuugacauaaacguuca

SEQ ID NO: 934361 - RNA, 19 nt, Homo sapiens
  misc_RNA (1)...(19): siRNA sense strand
ccuaaaccaacagcaaaua

SEQ ID NO: 934362 - RNA, 19 nt, Homo sapiens
  misc_RNA (1)...(19): siRNA sense strand
ccagaggaauaaacauugc

SEQ ID NO: 934363 - RNA, 19 nt, Homo sapiens
  misc_RNA (1)...(19): siRNA sense strand
cuggaccgaugacaaaguu

SEQ ID NO: 934364 - RNA, 19 nt, Homo sapiens
  misc_RNA (1)...(19): siRNA sense strand
uaaccuacuuaugggagaa

SEQ ID NO: 934365 - RNA, 19 nt, Homo sapiens
  misc_RNA (1)...(19): siRNA sense strand
augcuaagaacaacagaua

SEQ ID NO: 934366 - RNA, 19 nt, Homo sapiens
  misc_RNA (1)...(19): siRNA sense strand
cuuccgaaauucagagaga

SEQ ID NO: 934367 - RNA, 19 nt, Homo sapiens
  misc_RNA (1)...(19): siRNA sense strand
cuauguaacugggaaugug

SEQ ID NO: 934368 - RNA, 19 nt, Homo sapiens
  misc_RNA (1)...(19): siRNA sense strand
agaaaucaggaacaugaaa

SEQ ID NO: 934369 - RNA, 19 nt, Homo sapiens
  misc_RNA (1)...(19): siRNA sense strand
uaaaccaacagcaaauaca

SEQ ID NO: 934370 - RNA, 19 nt, Homo sapiens
  misc_RNA (1)...(19): siRNA sense strand
cagaagcaaguacgccaaa

SEQ ID NO: 934371 - RNA, 19 nt, Homo sapiens
  misc_RNA (1)...(19): siRNA sense strand
gaaggcugcauacccaaag

SEQ ID NO: 934372 - RNA, 19 nt, Homo sapiens
  misc_RNA (1)...(19): siRNA sense strand
cuaagaacaacagauauuc

SEQ ID NO: 934373 - RNA, 19 nt, Homo sapiens
  misc_RNA (1)...(19): siRNA sense strand
aaggacguuuguugguuaa

SEQ ID NO: 934374 - RNA, 19 nt, Homo sapiens
  misc_RNA (1)...(19): siRNA sense strand
gaccgaugacaaaguuuau

SEQ ID NO: 934375 - RNA, 19 nt, Homo sapiens
  misc_RNA (1)...(19): siRNA sense strand
aaacauugccauugucaac

SEQ ID NO: 934376 - RNA, 19 nt, Homo sapiens
  misc_RNA (1)...(19): siRNA sense strand
aauaaacauugccauuguc

SEQ ID NO: 934377 - RNA, 19 nt, Homo sapiens
  misc_RNA (1)...(19): siRNA sense strand
gaaauguugccagaggaau

SEQ ID NO: 934378 - RNA, 19 nt, Homo sapiens
  misc_RNA (1)...(19): siRNA sense strand
uuagcugcuuugacauaaa

SEQ ID NO: 934379 - RNA, 19 nt, Homo sapiens
  misc_RNA (1)...(19): siRNA sense strand
uggcuggccugcagagauc

SEQ ID NO: 934380 - RNA, 19 nt, Homo sapiens
  misc_RNA (1)...(19): siRNA sense strand
ccacucugaugcuaagaac

SEQ ID NO: 934381 - RNA, 19 nt, Homo sapiens
  misc_RNA (1)...(19): siRNA sense strand
aaaaucugcuuugaggaua

SEQ ID NO: 934382 - RNA, 19 nt, Homo sapiens
  misc_RNA (1)...(19): siRNA sense strand
uagcugcuuugacauaaac

SEQ ID NO: 934383 - RNA, 19 nt, Homo sapiens
  misc_RNA (1)...(19): siRNA sense strand
uaaguuaagaccuaaacca

SEQ ID NO: 934384 - RNA, 19 nt, Homo sapiens
  misc_RNA (1)...(19): siRNA sense strand
ggacucccugcccaucuga

SEQ ID NO: 934385 - RNA, 19 nt, Homo sapiens
  misc_RNA (1)...(19): siRNA sense strand
uaaagaaaucaggaacaug

SEQ ID NO: 934386 - RNA, 19 nt, Homo sapiens
  misc_RNA (1)...(19): siRNA sense strand
acucuggaccgaugacaaa

SEQ ID NO: 934387 - RNA, 19 nt, Homo sapiens
  misc_RNA (1)...(19): siRNA sense strand
aggaauaaacauugccauu

SEQ ID NO: 934388 - RNA, 19 nt, Homo sapiens
  misc_RNA (1)...(19): siRNA sense strand
gaaauucagagagaaaaga

SEQ ID NO: 934389 - RNA, 19 nt, Homo sapiens
  misc_RNA (1)...(19): siRNA sense strand
cugcccaucugacaccuau

SEQ ID NO: 934390 - RNA, 19 nt, Homo sapiens
  misc_RNA (1)...(19): siRNA sense strand
acucugaugcuaagaacaa

SEQ ID NO: 934391 - RNA, 19 nt, Homo sapiens
  misc_RNA (1)...(19): siRNA sense strand
ucaaccacucugaugcuaa

SEQ ID NO: 934392 - RNA, 19 nt, Homo sapiens
  misc_RNA (1)...(19): siRNA sense strand
ggucuagcuggguauuuau

SEQ ID NO: 934393 - RNA, 19 nt, Homo sapiens
  misc_RNA (1)...(19): siRNA sense strand
ccgaugacaaaguuuauuc

SEQ ID NO: 934394 - RNA, 19 nt, Homo sapiens
  misc_RNA (1)...(19): siRNA sense strand
ugccagaggaauaaacauu

SEQ ID NO: 934395 - RNA, 19 nt, Homo sapiens
  misc_RNA (1)...(19): siRNA sense strand
ugggagaacagcugggaaa

SEQ ID NO: 934396 - RNA, 19 nt, Homo sapiens
  misc_RNA (1)...(19): siRNA sense strand
agaccuaaaccaacagcaa

SEQ ID NO: 934397 - RNA, 19 nt, Homo sapiens
  misc_RNA (1)...(19): siRNA sense strand
cugcauacccaaagaacga

SEQ ID NO: 934398 - RNA, 19 nt, Homo sapiens
  misc_RNA (1)...(19): siRNA sense strand
auuagcugcuuugacauaa

SEQ ID NO: 934399 - RNA, 19 nt, Homo sapiens
  misc_RNA (1)...(19): siRNA sense strand
aauguugccagaggaauaa

SEQ ID NO: 934400 - RNA, 19 nt, Homo sapiens
  misc_RNA (1)...(19): siRNA sense strand
gagaagaaauaguuaccua

SEQ ID NO: 934401 - RNA, 19 nt, Homo sapiens
  misc_RNA (1)...(19): siRNA sense strand
gaauggaucuuucuuacug

SEQ ID NO: 934402 - RNA, 19 nt, Homo sapiens
  misc_RNA (1)...(19): siRNA sense strand
gaaagaagaagauggagaa

SEQ ID NO: 934403 - RNA, 19 nt, Homo sapiens
  misc_RNA (1)...(19): siRNA sense strand
acaaaugacucucuuauuc

SEQ ID NO: 934404 - RNA, 19 nt, Homo sapiens
  misc_RNA (1)...(19): siRNA sense strand
agaagaagauggagaagaa

SEQ ID NO: 934405 - RNA, 19 nt, Homo sapiens
  misc_RNA (1)...(19): siRNA sense strand
ccuaugaucauuuguguaa

SEQ ID NO: 934406 - RNA, 19 nt, Homo sapiens
  misc_RNA (1)...(19): siRNA sense strand
caaacaaauccuugaaaga

SEQ ID NO: 934407 - RNA, 19 nt, Homo sapiens
  misc_RNA (1)...(19): siRNA sense strand
acaaauccuugaaagaaga

SEQ ID NO: 934408 - RNA, 19 nt, Homo sapiens
  misc_RNA (1)...(19): siRNA sense strand
gacaaaugacucucuuauu

SEQ ID NO: 934409 - RNA, 19 nt, Homo sapiens
  misc_RNA (1)...(19): siRNA sense strand
acaaacaaauccuugaaag

SEQ ID NO: 934410 - RNA, 19 nt, Homo sapiens
  misc_RNA (1)...(19): siRNA sense strand
gauggagaagaaauaguua

SEQ ID NO: 934411 - RNA, 19 nt, Homo sapiens
  misc_RNA (1)...(19): siRNA sense strand
uguaagaauugucaucaug

SEQ ID NO: 934412 - RNA, 19 nt, Homo sapiens
  misc_RNA (1)...(19): siRNA sense strand
agacaugaguauacauuca

SEQ ID NO: 934413 - RNA, 19 nt, Homo sapiens
  misc_RNA (1)...(19): siRNA sense strand
cgacaaaugacucucuuau

SEQ ID NO: 934414 - RNA, 19 nt, Homo sapiens
  misc_RNA (1)...(19): siRNA sense strand
gcaaagccgaagauacuau

SEQ ID NO: 934415 - RNA, 19 nt, Homo sapiens
  misc_RNA (1)...(19): siRNA sense strand
gaagauggagaagaaauag

SEQ ID NO: 934416 - RNA, 19 nt, Homo sapiens
  misc_RNA (1)...(19): siRNA sense strand
agaagauggagaagaaaua

SEQ ID NO: 934417 - RNA, 19 nt, Homo sapiens
  misc_RNA (1)...(19): siRNA sense strand
gaagaagauggagaagaaa

SEQ ID NO: 934418 - RNA, 19 nt, Homo sapiens
  misc_RNA (1)...(19): siRNA sense strand
caaaugacucucuuauucu

SEQ ID NO: 934419 - RNA, 19 nt, Homo sapiens
  misc_RNA (1)...(19): siRNA sense strand
gcaguaagcgggauuuuau

SEQ ID NO: 934420 - RNA, 19 nt, Homo sapiens
  misc_RNA (1)...(19): siRNA sense strand
guaagaauugucaucaugu

SEQ ID NO: 934421 - RNA, 19 nt, Homo sapiens
  misc_RNA (1)...(19): siRNA sense strand
ccagacaugaguauacauu

SEQ ID NO: 934422 - RNA, 19 nt, Homo sapiens
  misc_RNA (1)...(19): siRNA sense strand
gaucuuucuuacugaacuu

SEQ ID NO: 934423 - RNA, 19 nt, Homo sapiens
  misc_RNA (1)...(19): siRNA sense strand
gcgacuguguggagaagga

SEQ ID NO: 934424 - RNA, 19 nt, Homo sapiens
  misc_RNA (1)...(19): siRNA sense strand
ucacaaacaaauccuugaa

SEQ ID NO: 934425 - RNA, 19 nt, Homo sapiens
  misc_RNA (1)...(19): siRNA sense strand
guaauagccagacaugagu

SEQ ID NO: 934426 - RNA, 19 nt, Homo sapiens
  misc_RNA (1)...(19): siRNA sense strand
cacaaacaaauccuugaaa

SEQ ID NO: 934427 - RNA, 19 nt, Homo sapiens
  misc_RNA (1)...(19): siRNA sense strand
uaccuaugaucauuugugu

SEQ ID NO: 934428 - RNA, 19 nt, Homo sapiens
  misc_RNA (1)...(19): siRNA sense strand
agauggagaagaaauaguu

SEQ ID NO: 934429 - RNA, 19 nt, Homo sapiens
  misc_RNA (1)...(19): siRNA sense strand
ggaucuuucuuacugaacu

SEQ ID NO: 934430 - RNA, 19 nt, Homo sapiens
  misc_RNA (1)...(19): siRNA sense strand
aacaaauccuugaaagaag

SEQ ID NO: 934431 - RNA, 19 nt, Homo sapiens
  misc_RNA (1)...(19): siRNA sense strand
uaccaugcugugucuguua

SEQ ID NO: 934432 - RNA, 19 nt, Homo sapiens
  misc_RNA (1)...(19): siRNA sense strand
auaccugccuggagaaugg

SEQ ID NO: 934433 - RNA, 19 nt, Homo sapiens
  misc_RNA (1)...(19): siRNA sense strand
uaauagccagacaugagua

SEQ ID NO: 934434 - RNA, 19 nt, Homo sapiens
  misc_RNA (1)...(19): siRNA sense strand
uguaauagccagacaugag

SEQ ID NO: 934435 - RNA, 19 nt, Homo sapiens
  misc_RNA (1)...(19): siRNA sense strand
guaauaccugccuggagaa

SEQ ID NO: 934436 - RNA, 19 nt, Homo sapiens
  misc_RNA (1)...(19): siRNA sense strand
caaauccuugaaagaagaa

SEQ ID NO: 934437 - RNA, 19 nt, Homo sapiens
  misc_RNA (1)...(19): siRNA sense strand
guguaagaauugucaucau

SEQ ID NO: 934438 - RNA, 19 nt, Homo sapiens
  misc_RNA (1)...(19): siRNA sense strand
ccuggagaauggaucuuuc

SEQ ID NO: 934439 - RNA, 19 nt, Homo sapiens
  misc_RNA (1)...(19): siRNA sense strand
aauggaucuuucuuacuga

SEQ ID NO: 934440 - RNA, 19 nt, Homo sapiens
  misc_RNA (1)...(19): siRNA sense strand
ggcaaagccgaagauacua

SEQ ID NO: 934441 - RNA, 19 nt, Homo sapiens
  misc_RNA (1)...(19): siRNA sense strand
aguuaccuaugaucauuug

SEQ ID NO: 934442 - RNA, 19 nt, Homo sapiens
  misc_RNA (1)...(19): siRNA sense strand
gcuguucuuugccuuguua

SEQ ID NO: 934443 - RNA, 19 nt, Homo sapiens
  misc_RNA (1)...(19): siRNA sense strand
guucuuugccuuguuauua

SEQ ID NO: 934444 - RNA, 19 nt, Homo sapiens
  misc_RNA (1)...(19): siRNA sense strand
ggagaugacuacaagaaaa

SEQ ID NO: 934445 - RNA, 19 nt, Homo sapiens
  misc_RNA (1)...(19): siRNA sense strand
gcaggauguugaagacuca

SEQ ID NO: 934446 - RNA, 19 nt, Homo sapiens
  misc_RNA (1)...(19): siRNA sense strand
gaaccaguaauagucauuu

SEQ ID NO: 934447 - RNA, 19 nt, Homo sapiens
  misc_RNA (1)...(19): siRNA sense strand
aauaguggaaccaguaaua

SEQ ID NO: 934448 - RNA, 19 nt, Homo sapiens
  misc_RNA (1)...(19): siRNA sense strand
gguuggagaugacuacaag

SEQ ID NO: 934449 - RNA, 19 nt, Homo sapiens
  misc_RNA (1)...(19): siRNA sense strand
aacaugggcuucacaagga

SEQ ID NO: 934450 - RNA, 19 nt, Homo sapiens
  misc_RNA (1)...(19): siRNA sense strand
ggacuaguugcuguucuuu

SEQ ID NO: 934451 - RNA, 19 nt, Homo sapiens
  misc_RNA (1)...(19): siRNA sense strand
cgaauaguggaaccaguaa

SEQ ID NO: 934452 - RNA, 19 nt, Homo sapiens
  misc_RNA (1)...(19): siRNA sense strand
ggaaccaguaauagucauu

SEQ ID NO: 934453 - RNA, 19 nt, Homo sapiens
  misc_RNA (1)...(19): siRNA sense strand
gcgagcaggauguugaaga

SEQ ID NO: 934454 - RNA, 19 nt, Homo sapiens
  misc_RNA (1)...(19): siRNA sense strand
ucacaaggauguauuuugg

SEQ ID NO: 934455 - RNA, 19 nt, Homo sapiens
  misc_RNA (1)...(19): siRNA sense strand
ggagagcgagcaggauguu

SEQ ID NO: 934456 - RNA, 19 nt, Homo sapiens
  misc_RNA (1)...(19): siRNA sense strand
gagcgagcaggauguugaa

SEQ ID NO: 934457 - RNA, 19 nt, Homo sapiens
  misc_RNA (1)...(19): siRNA sense strand
acgaauaguggaaccagua

SEQ ID NO: 934458 - RNA, 19 nt, Homo sapiens
  misc_RNA (1)...(19): siRNA sense strand
gugagccgguuggagauga

SEQ ID NO: 934459 - RNA, 19 nt, Homo sapiens
  misc_RNA (1)...(19): siRNA sense strand
gucauuuucuuuuggguua

SEQ ID NO: 934460 - RNA, 19 nt, Homo sapiens
  misc_RNA (1)...(19): siRNA sense strand
cgagcaggauguugaagac

SEQ ID NO: 934461 - RNA, 19 nt, Homo sapiens
  misc_RNA (1)...(19): siRNA sense strand
uggacuaguugcuguucuu

SEQ ID NO: 934462 - RNA, 19 nt, Homo sapiens
  misc_RNA (1)...(19): siRNA sense strand
agagcgagcaggauguuga

SEQ ID NO: 934463 - RNA, 19 nt, Homo sapiens
  misc_RNA (1)...(19): siRNA sense strand
gcuucacaaggauguauuu

SEQ ID NO: 934464 - RNA, 19 nt, Homo sapiens
  misc_RNA (1)...(19): siRNA sense strand
gaauaguggaaccaguaau

SEQ ID NO: 934465 - RNA, 19 nt, Homo sapiens
  misc_RNA (1)...(19): siRNA sense strand
uggagaugacuacaagaaa

SEQ ID NO: 934466 - RNA, 19 nt, Homo sapiens
  misc_RNA (1)...(19): siRNA sense strand
gaaggagagcgagcaggau

SEQ ID NO: 934467 - RNA, 19 nt, Homo sapiens
  misc_RNA (1)...(19): siRNA sense strand
gauguugaagacucacaga

SEQ ID NO: 934468 - RNA, 19 nt, Homo sapiens
  misc_RNA (1)...(19): siRNA sense strand
gaaaugaccugcaauucga

SEQ ID NO: 934469 - RNA, 19 nt, Homo sapiens
  misc_RNA (1)...(19): siRNA sense strand
gcuaaugugugcuguguua

SEQ ID NO: 934470 - RNA, 19 nt, Homo sapiens
  misc_RNA (1)...(19): siRNA sense strand
aaacagccuugguauaaua

SEQ ID NO: 934471 - RNA, 19 nt, Homo sapiens
  misc_RNA (1)...(19): siRNA sense strand
ggaagaggauauuaagaga

SEQ ID NO: 934472 - RNA, 19 nt, Homo sapiens
  misc_RNA (1)...(19): siRNA sense strand
gaaaagagguucaaauugg

SEQ ID NO: 934473 - RNA, 19 nt, Homo sapiens
  misc_RNA (1)...(19): siRNA sense strand
caaagaaacagccuuggua

SEQ ID NO: 934474 - RNA, 19 nt, Homo sapiens
  misc_RNA (1)...(19): siRNA sense strand
gaagaagcauacaugacaa

SEQ ID NO: 934475 - RNA, 19 nt, Homo sapiens
  misc_RNA (1)...(19): siRNA sense strand
gcagauauuucaagauugg

SEQ ID NO: 934476 - RNA, 19 nt, Homo sapiens
  misc_RNA (1)...(19): siRNA sense strand
ggaguuacaaagaagauua

SEQ ID NO: 934477 - RNA, 19 nt, Homo sapiens
  misc_RNA (1)...(19): siRNA sense strand
gaccaucuguauccuaauu

SEQ ID NO: 934478 - RNA, 19 nt, Homo sapiens
  misc_RNA (1)...(19): siRNA sense strand
gaaacagccuugguauaau

SEQ ID NO: 934479 - RNA, 19 nt, Homo sapiens
  misc_RNA (1)...(19): siRNA sense strand
cauaagaaccuguuagcua

SEQ ID NO: 934480 - RNA, 19 nt, Homo sapiens
  misc_RNA (1)...(19): siRNA sense strand
gaaauugucucugccucaa

SEQ ID NO: 934481 - RNA, 19 nt, Homo sapiens
  misc_RNA (1)...(19): siRNA sense strand
uggcagauauuucaagauu

SEQ ID NO: 934482 - RNA, 19 nt, Homo sapiens
  misc_RNA (1)...(19): siRNA sense strand
agaaacagccuugguauaa

SEQ ID NO: 934483 - RNA, 19 nt, Homo sapiens
  misc_RNA (1)...(19): siRNA sense strand
caaugucaaucuuauguug

SEQ ID NO: 934484 - RNA, 19 nt, Homo sapiens
  misc_RNA (1)...(19): siRNA sense strand
ugaaggcacuguuauuuua

SEQ ID NO: 934485 - RNA, 19 nt, Homo sapiens
  misc_RNA (1)...(19): siRNA sense strand
cuacaaggaugucucguau

SEQ ID NO: 934486 - RNA, 19 nt, Homo sapiens
  misc_RNA (1)...(19): siRNA sense strand
gagagcaacuggaacagau

SEQ ID NO: 934487 - RNA, 19 nt, Homo sapiens
  misc_RNA (1)...(19): siRNA sense strand
gaacucauucuuaaacaga

SEQ ID NO: 934488 - RNA, 19 nt, Homo sapiens
  misc_RNA (1)...(19): siRNA sense strand
guaaagcagucucuuaugc

SEQ ID NO: 934489 - RNA, 19 nt, Homo sapiens
  misc_RNA (1)...(19): siRNA sense strand
cuagugaucucuauaaugg

SEQ ID NO: 934490 - RNA, 19 nt, Homo sapiens
  misc_RNA (1)...(19): siRNA sense strand
gcaacgggcucaucaacuc

SEQ ID NO: 934491 - RNA, 19 nt, Homo sapiens
  misc_RNA (1)...(19): siRNA sense strand
uaauagaugucccaagugu

SEQ ID NO: 934492 - RNA, 19 nt, Homo sapiens
  misc_RNA (1)...(19): siRNA sense strand
aauaauagaugucccaagu

SEQ ID NO: 934493 - RNA, 19 nt, Homo sapiens
  misc_RNA (1)...(19): siRNA sense strand
ccagauaccauuuggcuuu

SEQ ID NO: 934494 - RNA, 19 nt, Homo sapiens
  misc_RNA (1)...(19): siRNA sense strand
gaagaagaaacaacuggaa

SEQ ID NO: 934495 - RNA, 19 nt, Homo sapiens
  misc_RNA (1)...(19): siRNA sense strand
cuaagacuuugcuaacuuu

SEQ ID NO: 934496 - RNA, 19 nt, Homo sapiens
  misc_RNA (1)...(19): siRNA sense strand
caacagacagucagcuaaa

SEQ ID NO: 934497 - RNA, 19 nt, Homo sapiens
  misc_RNA (1)...(19): siRNA sense strand
gaagagguguuggaguguu

SEQ ID NO: 934498 - RNA, 19 nt, Homo sapiens
  misc_RNA (1)...(19): siRNA sense strand
aguauagucucuaguauug

SEQ ID NO: 934499 - RNA, 19 nt, Homo sapiens
  misc_RNA (1)...(19): siRNA sense strand
uuauauagcuuguggaagu

SEQ ID NO: 934500 - RNA, 19 nt, Homo sapiens
  misc_RNA (1)...(19): siRNA sense strand
ggaggacaauaauagaugu

SEQ ID NO: 934501 - RNA, 19 nt, Homo sapiens
  misc_RNA (1)...(19): siRNA sense strand
ggaagaaaugaguggcuua

SEQ ID NO: 934502 - RNA, 19 nt, Homo sapiens
  misc_RNA (1)...(19): siRNA sense strand
gcuuugauaugauugaaga

SEQ ID NO: 934503 - RNA, 19 nt, Homo sapiens
  misc_RNA (1)...(19): siRNA sense strand
aaaguguucucgacaaaga

SEQ ID NO: 934504 - RNA, 19 nt, Homo sapiens
  misc_RNA (1)...(19): siRNA sense strand
caauggagauuauauagcu

SEQ ID NO: 934505 - RNA, 19 nt, Homo sapiens
  misc_RNA (1)...(19): siRNA sense strand
caagccaguuggaugaauu

SEQ ID NO: 934506 - RNA, 19 nt, Homo sapiens
  misc_RNA (1)...(19): siRNA sense strand
gauuaugaaggcacuguua

SEQ ID NO: 934507 - RNA, 19 nt, Homo sapiens
  misc_RNA (1)...(19): siRNA sense strand
uaagagagagcaacuggaa

SEQ ID NO: 934508 - RNA, 19 nt, Homo sapiens
  misc_RNA (1)...(19): siRNA sense strand
guuggaguguugacuuuaa

SEQ ID NO: 934509 - RNA, 19 nt, Homo sapiens
  misc_RNA (1)...(19): siRNA sense strand
agaaugaaaugaccugcaa

SEQ ID NO: 934510 - RNA, 19 nt, Homo sapiens
  misc_RNA (1)...(19): siRNA sense strand
agaaaugaguggcuuauac

SEQ ID NO: 934511 - RNA, 19 nt, Homo sapiens
  misc_RNA (1)...(19): siRNA sense strand
uaagagaguggaagaaaug

SEQ ID NO: 934512 - RNA, 19 nt, Homo sapiens
  misc_RNA (1)...(19): siRNA sense strand
caucugcuuugauaugauu

SEQ ID NO: 934513 - RNA, 19 nt, Homo sapiens
  misc_RNA (1)...(19): siRNA sense strand
gauggauccuaaacucuug

SEQ ID NO: 934514 - RNA, 19 nt, Homo sapiens
  misc_RNA (1)...(19): siRNA sense strand
cagaaggagcuaaguguuu

SEQ ID NO: 934515 - RNA, 19 nt, Homo sapiens
  misc_RNA (1)...(19): siRNA sense strand
gcugauugcugcuaacagu

SEQ ID NO: 934516 - RNA, 19 nt, Homo sapiens
  misc_RNA (1)...(19): siRNA sense strand
gcauugaggcaaaggcuaa

SEQ ID NO: 934517 - RNA, 19 nt, Homo sapiens
  misc_RNA (1)...(19): siRNA sense strand
ggaguguugacuuuaauuu

SEQ ID NO: 934518 - RNA, 19 nt, Homo sapiens
  misc_RNA (1)...(19): siRNA sense strand
ugaccgggauugugacuau

SEQ ID NO: 934519 - RNA, 19 nt, Homo sapiens
  misc_RNA (1)...(19): siRNA sense strand
ucacacaguaguauuauug

SEQ ID NO: 934520 - RNA, 19 nt, Homo sapiens
  misc_RNA (1)...(19): siRNA sense strand
acaaggaugucucguaucu

SEQ ID NO: 934521 - RNA, 19 nt, Homo sapiens
  misc_RNA (1)...(19): siRNA sense strand
aaaaucagcuguaucaguu

SEQ ID NO: 934522 - RNA, 19 nt, Homo sapiens
  misc_RNA (1)...(19): siRNA sense strand
gcccaacuacagauucuua

SEQ ID NO: 934523 - RNA, 19 nt, Homo sapiens
  misc_RNA (1)...(19): siRNA sense strand
ugaagaagcauacaugaca

SEQ ID NO: 934524 - RNA, 19 nt, Homo sapiens
  misc_RNA (1)...(19): siRNA sense strand
gauauucauuacccugaga

SEQ ID NO: 934525 - RNA, 19 nt, Homo sapiens
  misc_RNA (1)...(19): siRNA sense strand
gaagaaaugaguggcuuau

SEQ ID NO: 934526 - RNA, 19 nt, Homo sapiens
  misc_RNA (1)...(19): siRNA sense strand
gguggcagauauuucaaga

SEQ ID NO: 934527 - RNA, 19 nt, Homo sapiens
  misc_RNA (1)...(19): siRNA sense strand
ucuaagacuuugcuaacuu

SEQ ID NO: 934528 - RNA, 19 nt, Homo sapiens
  misc_RNA (1)...(19): siRNA sense strand
uguccaaguuuacucgaua

SEQ ID NO: 934529 - RNA, 19 nt, Homo sapiens
  misc_RNA (1)...(19): siRNA sense strand
gaaaugaguggcuuauacu

SEQ ID NO: 934530 - RNA, 19 nt, Homo sapiens
  misc_RNA (1)...(19): siRNA sense strand
gaaauaagagagagcaacu

SEQ ID NO: 934531 - RNA, 19 nt, Homo sapiens
  misc_RNA (1)...(19): siRNA sense strand
ggacaauauugaccaucug

SEQ ID NO: 934532 - RNA, 19 nt, Homo sapiens
  misc_RNA (1)...(19): siRNA sense strand
caaaggacaccguaaagca

SEQ ID NO: 934533 - RNA, 19 nt, Homo sapiens
  misc_RNA (1)...(19): siRNA sense strand
ccaucacacaguaguauua

SEQ ID NO: 934534 - RNA, 19 nt, Homo sapiens
  misc_RNA (1)...(19): siRNA sense strand
ccucaagguugcaagaaga

SEQ ID NO: 934535 - RNA, 19 nt, Homo sapiens
  misc_RNA (1)...(19): siRNA sense strand
gaaacaacuggaagcagaa

SEQ ID NO: 934536 - RNA, 19 nt, Homo sapiens
  misc_RNA (1)...(19): siRNA sense strand
cuaauuucuuggugaauga

SEQ ID NO: 934537 - RNA, 19 nt, Homo sapiens
  misc_RNA (1)...(19): siRNA sense strand
caagaagaaauaagagaga

SEQ ID NO: 934538 - RNA, 19 nt, Homo sapiens
  misc_RNA (1)...(19): siRNA sense strand
cuucaagggucauaucaau

SEQ ID NO: 934539 - RNA, 19 nt, Homo sapiens
  misc_RNA (1)...(19): siRNA sense strand
ggaauguagggaaaccaua

SEQ ID NO: 934540 - RNA, 19 nt, Homo sapiens
  misc_RNA (1)...(19): siRNA sense strand
aaggaugucucguaucuca

SEQ ID NO: 934541 - RNA, 19 nt, Homo sapiens
  misc_RNA (1)...(19): siRNA sense strand
ccaguauagucucuaguau

SEQ ID NO: 934542 - RNA, 19 nt, Homo sapiens
  misc_RNA (1)...(19): siRNA sense strand
ggaguccaaugugcugauu

SEQ ID NO: 934543 - RNA, 19 nt, Homo sapiens
  misc_RNA (1)...(19): siRNA sense strand
uaugaaggcacuguuauuu

SEQ ID NO: 934544 - RNA, 19 nt, Homo sapiens
  misc_RNA (1)...(19): siRNA sense strand
auagaugucccaaguguaa

SEQ ID NO: 934545 - RNA, 19 nt, Homo sapiens
  misc_RNA (1)...(19): siRNA sense strand
cgacaaagaccgaaaagaa

SEQ ID NO: 934546 - RNA, 19 nt, Homo sapiens
  misc_RNA (1)...(19): siRNA sense strand
gauuauauagcuuguggaa

SEQ ID NO: 934547 - RNA, 19 nt, Homo sapiens
  misc_RNA (1)...(19): siRNA sense strand
aaagcagucucuuaugcaa

SEQ ID NO: 934548 - RNA, 19 nt, Homo sapiens
  misc_RNA (1)...(19): siRNA sense strand
uggaguaguuaccauaaga

SEQ ID NO: 934549 - RNA, 19 nt, Homo sapiens
  misc_RNA (1)...(19): siRNA sense strand
caauauugaccaucuguau

SEQ ID NO: 934550 - RNA, 19 nt, Homo sapiens
  misc_RNA (1)...(19): siRNA sense strand
uuaagagaguggaagaaau

SEQ ID NO: 934551 - RNA, 19 nt, Homo sapiens
  misc_RNA (1)...(19): siRNA sense strand
caaaaguguucucgacaaa

SEQ ID NO: 934552 - RNA, 19 nt, Homo sapiens
  misc_RNA (1)...(19): siRNA sense strand
auaacucucucuaccugua

SEQ ID NO: 934553 - RNA, 19 nt, Homo sapiens
  misc_RNA (1)...(19): siRNA sense strand
aaaccauacugccuacguu

SEQ ID NO: 934554 - RNA, 19 nt, Homo sapiens
  misc_RNA (1)...(19): siRNA sense strand
uguaucaguuggaguaguu

SEQ ID NO: 934555 - RNA, 19 nt, Homo sapiens
  misc_RNA (1)...(19): siRNA sense strand
gcaagccaguuggaugaau

SEQ ID NO: 934556 - RNA, 19 nt, Homo sapiens
  misc_RNA (1)...(19): siRNA sense strand
gaagaaacaacuggaagca

SEQ ID NO: 934557 - RNA, 19 nt, Homo sapiens
  misc_RNA (1)...(19): siRNA sense strand
aagaggauauuaagagagu

SEQ ID NO: 934558 - RNA, 19 nt, Homo sapiens
  misc_RNA (1)...(19): siRNA sense strand
ggaaaagagguucaaauug

SEQ ID NO: 934559 - RNA, 19 nt, Homo sapiens
  misc_RNA (1)...(19): siRNA sense strand
uauaauagcacguuagcau

SEQ ID NO: 934560 - RNA, 19 nt, Homo sapiens
  misc_RNA (1)...(19): siRNA sense strand
caagauugguugggaacug

SEQ ID NO: 934561 - RNA, 19 nt, Homo sapiens
  misc_RNA (1)...(19): siRNA sense strand
uggcaagcauugaggcaaa

SEQ ID NO: 934562 - RNA, 19 nt, Homo sapiens
  misc_RNA (1)...(19): siRNA sense strand
guguuggaguguugacuuu

SEQ ID NO: 934563 - RNA, 19 nt, Homo sapiens
  misc_RNA (1)...(19): siRNA sense strand
ccaaguuuacucgauauaa

SEQ ID NO: 934564 - RNA, 19 nt, Homo sapiens
  misc_RNA (1)...(19): siRNA sense strand
gauugaagaagcauacaug

SEQ ID NO: 934565 - RNA, 19 nt, Homo sapiens
  misc_RNA (1)...(19): siRNA sense strand
gaacugaccaagauaaccu

SEQ ID NO: 934566 - RNA, 19 nt, Homo sapiens
  misc_RNA (1)...(19): siRNA sense strand
ggaguaguuaccauaagaa

SEQ ID NO: 934567 - RNA, 19 nt, Homo sapiens
  misc_RNA (1)...(19): siRNA sense strand
caacuacagauucuuaugg

SEQ ID NO: 934568 - RNA, 19 nt, Homo sapiens
  misc_RNA (1)...(19): siRNA sense strand
ggauggagguggccgcuua

SEQ ID NO: 934569 - RNA, 19 nt, Homo sapiens
  misc_RNA (1)...(19): siRNA sense strand
gaacuacgaucccauugug

SEQ ID NO: 934570 - RNA, 19 nt, Homo sapiens
  misc_RNA (1)...(19): siRNA sense strand
gcaaagaaguggagaacgu

SEQ ID NO: 934571 - RNA, 19 nt, Homo sapiens
  misc_RNA (1)...(19): siRNA sense strand
gaacuaagaaggucguguu

SEQ ID NO: 934572 - RNA, 19 nt, Homo sapiens
  misc_RNA (1)...(19): siRNA sense strand
ucaaggaccucgagaaugg

SEQ ID NO: 934573 - RNA, 19 nt, Homo sapiens
  misc_RNA (1)...(19): siRNA sense strand
ugaaggagguugugcugaa

SEQ ID NO: 934574 - RNA, 19 nt, Homo sapiens
  misc_RNA (1)...(19): siRNA sense strand
cuaagaaggucguguucaa

SEQ ID NO: 934575 - RNA, 19 nt, Homo sapiens
  misc_RNA (1)...(19): siRNA sense strand
ucaugaagauguuugagaa

SEQ ID NO: 934576 - RNA, 19 nt, Homo sapiens
  misc_RNA (1)...(19): siRNA sense strand
cagcaagacuggcgacaug

SEQ ID NO: 934577 - RNA, 19 nt, Homo sapiens
  misc_RNA (1)...(19): siRNA sense strand
uggaggagcugaaguuugu

SEQ ID NO: 934578 - RNA, 19 nt, Homo sapiens
  misc_RNA (1)...(19): siRNA sense strand
ggcgacauguccuggcuua

SEQ ID NO: 934579 - RNA, 19 nt, Homo sapiens
  misc_RNA (1)...(19): siRNA sense strand
ccgcuuaccugacggagaa

SEQ ID NO: 934580 - RNA, 19 nt, Homo sapiens
  misc_RNA (1)...(19): siRNA sense strand
aaagugaacauuccacauu

SEQ ID NO: 934581 - RNA, 19 nt, Homo sapiens
  misc_RNA (1)...(19): siRNA sense strand
ggaagguguugcuggugaa

SEQ ID NO: 934582 - RNA, 19 nt, Homo sapiens
  misc_RNA (1)...(19): siRNA sense strand
guucaaggauggcuucaag

SEQ ID NO: 934583 - RNA, 19 nt, Homo sapiens
  misc_RNA (1)...(19): siRNA sense strand
ggaacaaccgcaaagugaa

SEQ ID NO: 934584 - RNA, 19 nt, Homo sapiens
  misc_RNA (1)...(19): siRNA sense strand
guacagcaguagcaccaau

SEQ ID NO: 934585 - RNA, 19 nt, Homo sapiens
  misc_RNA (1)...(19): siRNA sense strand
ccaaggugauggccaagug

SEQ ID NO: 934586 - RNA, 19 nt, Homo sapiens
  misc_RNA (1)...(19): siRNA sense strand
ugaaguuuguggcuuucua

SEQ ID NO: 934587 - RNA, 19 nt, Homo sapiens
  misc_RNA (1)...(19): siRNA sense strand
ccaagacucugagcugcaa

SEQ ID NO: 934588 - RNA, 19 nt, Homo sapiens
  misc_RNA (1)...(19): siRNA sense strand
gaaggagguugugcugaag

SEQ ID NO: 934589 - RNA, 19 nt, Homo sapiens
  misc_RNA (1)...(19): siRNA sense strand
caguggagcucaagaucga

SEQ ID NO: 934590 - RNA, 19 nt, Homo sapiens
  misc_RNA (1)...(19): siRNA sense strand
gagaaggcccacucugugu

SEQ ID NO: 934591 - RNA, 19 nt, Homo sapiens
  misc_RNA (1)...(19): siRNA sense strand
gaacaaccgcaaagugaac

SEQ ID NO: 934592 - RNA, 19 nt, Homo sapiens
  misc_RNA (1)...(19): siRNA sense strand
gagcugcaaaggcaaagaa

SEQ ID NO: 934593 - RNA, 19 nt, Homo sapiens
  misc_RNA (1)...(19): siRNA sense strand
aaguguaucucuccaagug

SEQ ID NO: 934594 - RNA, 19 nt, Homo sapiens
  misc_RNA (1)...(19): siRNA sense strand
gaggaacaaccgcaaagug

SEQ ID NO: 934595 - RNA, 19 nt, Homo sapiens
  misc_RNA (1)...(19): siRNA sense strand
caaugucccaggcguguuu

SEQ ID NO: 934596 - RNA, 19 nt, Homo sapiens
  misc_RNA (1)...(19): siRNA sense strand
caguggacgugagaacuaa

SEQ ID NO: 934597 - RNA, 19 nt, Homo sapiens
  misc_RNA (1)...(19): siRNA sense strand
aagugaacauuccacauug

SEQ ID NO: 934598 - RNA, 19 nt, Homo sapiens
  misc_RNA (1)...(19): siRNA sense strand
ccaaaccaguggagcucaa

SEQ ID NO: 934599 - RNA, 19 nt, Homo sapiens
  misc_RNA (1)...(19): siRNA sense strand
acaagaugaugcagaccaa

SEQ ID NO: 934600 - RNA, 19 nt, Homo sapiens
  misc_RNA (1)...(19): siRNA sense strand
ccucuggaccgccauguuu

SEQ ID NO: 934601 - RNA, 19 nt, Homo sapiens
  misc_RNA (1)...(19): siRNA sense strand
cuucaucccugucaacaag

SEQ ID NO: 934602 - RNA, 19 nt, Homo sapiens
  misc_RNA (1)...(19): siRNA sense strand
acaaccgggugaaguucua

SEQ ID NO: 934603 - RNA, 19 nt, Homo sapiens
  misc_RNA (1)...(19): siRNA sense strand
gaaggucguguucaaggau

SEQ ID NO: 934604 - RNA, 19 nt, Homo sapiens
  misc_RNA (1)...(19): siRNA sense strand
gagaacaaccgggugaagu

SEQ ID NO: 934605 - RNA, 19 nt, Homo sapiens
  misc_RNA (1)...(19): siRNA sense strand
agaacaaccgggugaaguu

SEQ ID NO: 934606 - RNA, 19 nt, Homo sapiens
  misc_RNA (1)...(19): siRNA sense strand
aggaacaaccgcaaaguga

SEQ ID NO: 934607 - RNA, 19 nt, Homo sapiens
  misc_RNA (1)...(19): siRNA sense strand
agaaggucguguucaagga

SEQ ID NO: 934608 - RNA, 19 nt, Homo sapiens
  misc_RNA (1)...(19): siRNA sense strand
ccucgagaauggccagaug

SEQ ID NO: 934609 - RNA, 19 nt, Homo sapiens
  misc_RNA (1)...(19): siRNA sense strand
uggacagucuacacaaguu

SEQ ID NO: 934610 - RNA, 19 nt, Homo sapiens
  misc_RNA (1)...(19): siRNA sense strand
ggacagucuacacaaguuc

SEQ ID NO: 934611 - RNA, 19 nt, Homo sapiens
  misc_RNA (1)...(19): siRNA sense strand
caugaacuacgaucccauu

SEQ ID NO: 934612 - RNA, 19 nt, Homo sapiens
  misc_RNA (1)...(19): siRNA sense strand
gggugaaguucuacaugca

SEQ ID NO: 934613 - RNA, 19 nt, Homo sapiens
  misc_RNA (1)...(19): siRNA sense strand
aggugaagauugagaagga

SEQ ID NO: 934614 - RNA, 19 nt, Homo sapiens
  misc_RNA (1)...(19): siRNA sense strand
acaguggacgugagaacua

SEQ ID NO: 934615 - RNA, 19 nt, Homo sapiens
  misc_RNA (1)...(19): siRNA sense strand
cgucaaggaccucgagaau

SEQ ID NO: 934616 - RNA, 19 nt, Homo sapiens
  misc_RNA (1)...(19): siRNA sense strand
gaaagcugaaggagguugu

SEQ ID NO: 934617 - RNA, 19 nt, Homo sapiens
  misc_RNA (1)...(19): siRNA sense strand
guuuguggcuuucuacacu

SEQ ID NO: 934618 - RNA, 19 nt, Homo sapiens
  misc_RNA (1)...(19): siRNA sense strand
uacacaaguuccaggugaa

SEQ ID NO: 934619 - RNA, 19 nt, Homo sapiens
  misc_RNA (1)...(19): siRNA sense strand
gagguggugcugccugaga

SEQ ID NO: 934620 - RNA, 19 nt, Homo sapiens
  misc_RNA (1)...(19): siRNA sense strand
cggagaaggcccacucugu

SEQ ID NO: 934621 - RNA, 19 nt, Homo sapiens
  misc_RNA (1)...(19): siRNA sense strand
gucccaagcucagcaaguc

SEQ ID NO: 934622 - RNA, 19 nt, Homo sapiens
  misc_RNA (1)...(19): siRNA sense strand
gaaguuuguggcuuucuac

SEQ ID NO: 934623 - RNA, 19 nt, Homo sapiens
  misc_RNA (1)...(19): siRNA sense strand
ggcaaagcggcaucgguuu

SEQ ID NO: 934624 - RNA, 19 nt, Homo sapiens
  misc_RNA (1)...(19): siRNA sense strand
cugcaaaggcaaagaagug

SEQ ID NO: 934625 - RNA, 19 nt, Homo sapiens
  misc_RNA (1)...(19): siRNA sense strand
caaguuccaggugaagauu

SEQ ID NO: 934626 - RNA, 19 nt, Homo sapiens
  misc_RNA (1)...(19): siRNA sense strand
gcaagacuggcgacauguc

SEQ ID NO: 934627 - RNA, 19 nt, Homo sapiens
  misc_RNA (1)...(19): siRNA sense strand
caaagugaacauuccacau

SEQ ID NO: 934628 - RNA, 19 nt, Homo sapiens
  misc_RNA (1)...(19): siRNA sense strand
ggaggaacaaccgcaaagu

SEQ ID NO: 934629 - RNA, 19 nt, Homo sapiens
  misc_RNA (1)...(19): siRNA sense strand
gaaggcccacucugugucu

SEQ ID NO: 934630 - RNA, 19 nt, Homo sapiens
  misc_RNA (1)...(19): siRNA sense strand
gaaggacaauggggaguuc

SEQ ID NO: 934631 - RNA, 19 nt, Homo sapiens
  misc_RNA (1)...(19): siRNA sense strand
gcgaaggaccaaggugaug

SEQ ID NO: 934632 - RNA, 19 nt, Homo sapiens
  misc_RNA (1)...(19): siRNA sense strand
uaaaggcgacgaggugauc

SEQ ID NO: 934633 - RNA, 19 nt, Homo sapiens
  misc_RNA (1)...(19): siRNA sense strand
gcugaaguuuguggcuuuc

SEQ ID NO: 934634 - RNA, 19 nt, Homo sapiens
  misc_RNA (1)...(19): siRNA sense strand
ggacgugagaacuaagaag

SEQ ID NO: 934635 - RNA, 19 nt, Homo sapiens
  misc_RNA (1)...(19): siRNA sense strand
caaccgcaaagugaacauu

SEQ ID NO: 934636 - RNA, 19 nt, Homo sapiens
  misc_RNA (1)...(19): siRNA sense strand
aggcggagaugagcacugu

SEQ ID NO: 934637 - RNA, 19 nt, Homo sapiens
  misc_RNA (1)...(19): siRNA sense strand
ugaacuacgaucccauugu

SEQ ID NO: 934638 - RNA, 19 nt, Homo sapiens
  misc_RNA (1)...(19): siRNA sense strand
gaagugaagugauuaagaa

SEQ ID NO: 934639 - RNA, 19 nt, Homo sapiens
  misc_RNA (1)...(19): siRNA sense strand
uaaaugagcugaggaagga

SEQ ID NO: 934640 - RNA, 19 nt, Homo sapiens
  misc_RNA (1)...(19): siRNA sense strand
ccucagauauccuauaauu

SEQ ID NO: 934641 - RNA, 19 nt, Homo sapiens
  misc_RNA (1)...(19): siRNA sense strand
gaagaguucucccgaagga

SEQ ID NO: 934642 - RNA, 19 nt, Homo sapiens
  misc_RNA (1)...(19): siRNA sense strand
ucagguaacuguucagaaa

SEQ ID NO: 934643 - RNA, 19 nt, Homo sapiens
  misc_RNA (1)...(19): siRNA sense strand
caucuggucuccaugauuu

SEQ ID NO: 934644 - RNA, 19 nt, Homo sapiens
  misc_RNA (1)...(19): siRNA sense strand
gaucaacaaucaaagacaa

SEQ ID NO: 934645 - RNA, 19 nt, Homo sapiens
  misc_RNA (1)...(19): siRNA sense strand
gcuaagauaucaacaugga

SEQ ID NO: 934646 - RNA, 19 nt, Homo sapiens
  misc_RNA (1)...(19): siRNA sense strand
ggaucuaguuggcagcuua

SEQ ID NO: 934647 - RNA, 19 nt, Homo sapiens
  misc_RNA (1)...(19): siRNA sense strand
gugaaugccugcaguuaaa

SEQ ID NO: 934648 - RNA, 19 nt, Homo sapiens
  misc_RNA (1)...(19): siRNA sense strand
gggagaaguugcaguuuga

SEQ ID NO: 934649 - RNA, 19 nt, Homo sapiens
  misc_RNA (1)...(19): siRNA sense strand
gaacauaaggauuacuuug

SEQ ID NO: 934650 - RNA, 19 nt, Homo sapiens
  misc_RNA (1)...(19): siRNA sense strand
gaagacuaaugcucaguug

SEQ ID NO: 934651 - RNA, 19 nt, Homo sapiens
  misc_RNA (1)...(19): siRNA sense strand
gagacaaagcuccauauuu

SEQ ID NO: 934652 - RNA, 19 nt, Homo sapiens
  misc_RNA (1)...(19): siRNA sense strand
caaauugcauuacaagaca

SEQ ID NO: 934653 - RNA, 19 nt, Homo sapiens
  misc_RNA (1)...(19): siRNA sense strand
gagguggcauuacugcaua

SEQ ID NO: 934654 - RNA, 19 nt, Homo sapiens
  misc_RNA (1)...(19): siRNA sense strand
aaacuaagacucacaucua

SEQ ID NO: 934655 - RNA, 19 nt, Homo sapiens
  misc_RNA (1)...(19): siRNA sense strand
cagaaggaaucccuaaaug

SEQ ID NO: 934656 - RNA, 19 nt, Homo sapiens
  misc_RNA (1)...(19): siRNA sense strand
gugaagugauuaagaauuc

SEQ ID NO: 934657 - RNA, 19 nt, Homo sapiens
  misc_RNA (1)...(19): siRNA sense strand
auacaucugugucuuguuu

SEQ ID NO: 934658 - RNA, 19 nt, Homo sapiens
  misc_RNA (1)...(19): siRNA sense strand
cagcuaagauaucaacaug

SEQ ID NO: 934659 - RNA, 19 nt, Homo sapiens
  misc_RNA (1)...(19): siRNA sense strand
cgaaggaucuaugcacuga

SEQ ID NO: 934660 - RNA, 19 nt, Homo sapiens
  misc_RNA (1)...(19): siRNA sense strand
ggugucaaguugccuaauu

SEQ ID NO: 934661 - RNA, 19 nt, Homo sapiens
  misc_RNA (1)...(19): siRNA sense strand
agagagaguuuccacugua

SEQ ID NO: 934662 - RNA, 19 nt, Homo sapiens
  misc_RNA (1)...(19): siRNA sense strand
gcugaaugauggauacuau

SEQ ID NO: 934663 - RNA, 19 nt, Homo sapiens
  misc_RNA (1)...(19): siRNA sense strand
ggagagaccgagagaaaga

SEQ ID NO: 934664 - RNA, 19 nt, Homo sapiens
  misc_RNA (1)...(19): siRNA sense strand
gaaggaaucccuaaaugag

SEQ ID NO: 934665 - RNA, 19 nt, Homo sapiens
  misc_RNA (1)...(19): siRNA sense strand
gaaaggagaacaucuacca

SEQ ID NO: 934666 - RNA, 19 nt, Homo sapiens
  misc_RNA (1)...(19): siRNA sense strand
gagagaguuuccacuguau

SEQ ID NO: 934667 - RNA, 19 nt, Homo sapiens
  misc_RNA (1)...(19): siRNA sense strand
gagagagaguuuccacugu

SEQ ID NO: 934668 - RNA, 19 nt, Homo sapiens
  misc_RNA (1)...(19): siRNA sense strand
gcaggcaguuacucucuga

SEQ ID NO: 934669 - RNA, 19 nt, Homo sapiens
  misc_RNA (1)...(19): siRNA sense strand
gaacuggaacggcagaaga

SEQ ID NO: 934670 - RNA, 19 nt, Homo sapiens
  misc_RNA (1)...(19): siRNA sense strand
gcacaucuggucuccauga

SEQ ID NO: 934671 - RNA, 19 nt, Homo sapiens
  misc_RNA (1)...(19): siRNA sense strand
gggagaauuugaagaguuc

SEQ ID NO: 934672 - RNA, 19 nt, Homo sapiens
  misc_RNA (1)...(19): siRNA sense strand
caaaugcucagaagacuau

SEQ ID NO: 934673 - RNA, 19 nt, Homo sapiens
  misc_RNA (1)...(19): siRNA sense strand
caucacaccuccagugcaa

SEQ ID NO: 934674 - RNA, 19 nt, Homo sapiens
  misc_RNA (1)...(19): siRNA sense strand
agaaguugcaguuugauua

SEQ ID NO: 934675 - RNA, 19 nt, Homo sapiens
  misc_RNA (1)...(19): siRNA sense strand
caauaucaaugacaaacug

SEQ ID NO: 934676 - RNA, 19 nt, Homo sapiens
  misc_RNA (1)...(19): siRNA sense strand
gaaguugcaguuugauuau

SEQ ID NO: 934677 - RNA, 19 nt, Homo sapiens
  misc_RNA (1)...(19): siRNA sense strand
gugaucagcuagaagcauu

SEQ ID NO: 934678 - RNA, 19 nt, Homo sapiens
  misc_RNA (1)...(19): siRNA sense strand
ggagcaagcagaagaaauc

SEQ ID NO: 934679 - RNA, 19 nt, Homo sapiens
  misc_RNA (1)...(19): siRNA sense strand
uggaugggcugaaauacuu

SEQ ID NO: 934680 - RNA, 19 nt, Homo sapiens
  misc_RNA (1)...(19): siRNA sense strand
ucucugagcuuuccuacau

SEQ ID NO: 934681 - RNA, 19 nt, Homo sapiens
  misc_RNA (1)...(19): siRNA sense strand
uacaagcaaugaacugaaa

SEQ ID NO: 934682 - RNA, 19 nt, Homo sapiens
  misc_RNA (1)...(19): siRNA sense strand
ggaaaggaaauugaagaaa

SEQ ID NO: 934683 - RNA, 19 nt, Homo sapiens
  misc_RNA (1)...(19): siRNA sense strand
gcagguggaucagaacugu

SEQ ID NO: 934684 - RNA, 19 nt, Homo sapiens
  misc_RNA (1)...(19): siRNA sense strand
gggucuagaucaacaauca

SEQ ID NO: 934685 - RNA, 19 nt, Homo sapiens
  misc_RNA (1)...(19): siRNA sense strand
ucaaguugccuaauucuga

SEQ ID NO: 934686 - RNA, 19 nt, Homo sapiens
  misc_RNA (1)...(19): siRNA sense strand
ucuaccagcuguugauuga

SEQ ID NO: 934687 - RNA, 19 nt, Homo sapiens
  misc_RNA (1)...(19): siRNA sense strand
gcugagcucugcuguacug

SEQ ID NO: 934688 - RNA, 19 nt, Homo sapiens
  misc_RNA (1)...(19): siRNA sense strand
agacaaaggaagugcauuu

SEQ ID NO: 934689 - RNA, 19 nt, Homo sapiens
  misc_RNA (1)...(19): siRNA sense strand
ugagagacuucaguacaaa

SEQ ID NO: 934690 - RNA, 19 nt, Homo sapiens
  misc_RNA (1)...(19): siRNA sense strand
cauuugaacauaaggguua

SEQ ID NO: 934691 - RNA, 19 nt, Homo sapiens
  misc_RNA (1)...(19): siRNA sense strand
gcaagcagaagaaaucauc

SEQ ID NO: 934692 - RNA, 19 nt, Homo sapiens
  misc_RNA (1)...(19): siRNA sense strand
caaaggaagugcauuuuca

SEQ ID NO: 934693 - RNA, 19 nt, Homo sapiens
  misc_RNA (1)...(19): siRNA sense strand
uguaugcggugucaaguug

SEQ ID NO: 934694 - RNA, 19 nt, Homo sapiens
  misc_RNA (1)...(19): siRNA sense strand
gaucagcuagaagcauuua

SEQ ID NO: 934695 - RNA, 19 nt, Homo sapiens
  misc_RNA (1)...(19): siRNA sense strand
cuuacgaugucuucucuuu

SEQ ID NO: 934696 - RNA, 19 nt, Homo sapiens
  misc_RNA (1)...(19): siRNA sense strand
uaagagacaaagcuccaua

SEQ ID NO: 934697 - RNA, 19 nt, Homo sapiens
  misc_RNA (1)...(19): siRNA sense strand
gauaccuacuuuacacuuc

SEQ ID NO: 934698 - RNA, 19 nt, Homo sapiens
  misc_RNA (1)...(19): siRNA sense strand
uauggugucuaucuucuga

SEQ ID NO: 934699 - RNA, 19 nt, Homo sapiens
  misc_RNA (1)...(19): siRNA sense strand
gcuccuugauaccuacuuu

SEQ ID NO: 934700 - RNA, 19 nt, Homo sapiens
  misc_RNA (1)...(19): siRNA sense strand
caacaaauugcauuacaag

SEQ ID NO: 934701 - RNA, 19 nt, Homo sapiens
  misc_RNA (1)...(19): siRNA sense strand
gaaugaacauaaggauuac

SEQ ID NO: 934702 - RNA, 19 nt, Homo sapiens
  misc_RNA (1)...(19): siRNA sense strand
agaaggaaucccuaaauga

SEQ ID NO: 934703 - RNA, 19 nt, Homo sapiens
  misc_RNA (1)...(19): siRNA sense strand
cauuuacccuauugauuug

SEQ ID NO: 934704 - RNA, 19 nt, Homo sapiens
  misc_RNA (1)...(19): siRNA sense strand
gcuguugauugaauggaaa

SEQ ID NO: 934705 - RNA, 19 nt, Homo sapiens
  misc_RNA (1)...(19): siRNA sense strand
cgacaucuucggaacauug

SEQ ID NO: 934706 - RNA, 19 nt, Homo sapiens
  misc_RNA (1)...(19): siRNA sense strand
gugcuccauuugaacauaa

SEQ ID NO: 934707 - RNA, 19 nt, Homo sapiens
  misc_RNA (1)...(19): siRNA sense strand
ccagaaggaaucccuaaau

SEQ ID NO: 934708 - RNA, 19 nt, Homo sapiens
  misc_RNA (1)...(19): siRNA sense strand
agaaugagagacuucagua

SEQ ID NO: 934709 - RNA, 19 nt, Homo sapiens
  misc_RNA (1)...(19): siRNA sense strand
ggugcuccauuugaacaua

SEQ ID NO: 934710 - RNA, 19 nt, Homo sapiens
  misc_RNA (1)...(19): siRNA sense strand
ggaucuaugcacugaauga

SEQ ID NO: 934711 - RNA, 19 nt, Homo sapiens
  misc_RNA (1)...(19): siRNA sense strand
gugucuaucuucugaacaa

SEQ ID NO: 934712 - RNA, 19 nt, Homo sapiens
  misc_RNA (1)...(19): siRNA sense strand
ucugagcuuuccuacauuu

SEQ ID NO: 934713 - RNA, 19 nt, Homo sapiens
  misc_RNA (1)...(19): siRNA sense strand
gagaaguugcaguuugauu

SEQ ID NO: 934714 - RNA, 19 nt, Homo sapiens
  misc_RNA (1)...(19): siRNA sense strand
acuagggacuccagacuug

SEQ ID NO: 934715 - RNA, 19 nt, Homo sapiens
  misc_RNA (1)...(19): siRNA sense strand
guggaaaggagaacaucua

SEQ ID NO: 934716 - RNA, 19 nt, Homo sapiens
  misc_RNA (1)...(19): siRNA sense strand
uaauagaaauggccaucag

SEQ ID NO: 934717 - RNA, 19 nt, Homo sapiens
  misc_RNA (1)...(19): siRNA sense strand
caaagacaauaucaaugac

SEQ ID NO: 934718 - RNA, 19 nt, Homo sapiens
  misc_RNA (1)...(19): siRNA sense strand
gcuguugcccuugguuaua

SEQ ID NO: 934719 - RNA, 19 nt, Homo sapiens
  misc_RNA (1)...(19): siRNA sense strand
ucacuuguguaguacugaa

SEQ ID NO: 934720 - RNA, 19 nt, Homo sapiens
  misc_RNA (1)...(19): siRNA sense strand
gcagauucaugcccgaaac

SEQ ID NO: 934721 - RNA, 19 nt, Homo sapiens
  misc_RNA (1)...(19): siRNA sense strand
uaccagcuguugauugaau

SEQ ID NO: 934722 - RNA, 19 nt, Homo sapiens
  misc_RNA (1)...(19): siRNA sense strand
agacucacaucuacaagca

SEQ ID NO: 934723 - RNA, 19 nt, Homo sapiens
  misc_RNA (1)...(19): siRNA sense strand
ugggagaauuugaagaguu

SEQ ID NO: 934724 - RNA, 19 nt, Homo sapiens
  misc_RNA (1)...(19): siRNA sense strand
gugcaaucccuguuccuaa

SEQ ID NO: 934725 - RNA, 19 nt, Homo sapiens
  misc_RNA (1)...(19): siRNA sense strand
gcaguuacucucugagcuu

SEQ ID NO: 934726 - RNA, 19 nt, Homo sapiens
  misc_RNA (1)...(19): siRNA sense strand
gaauggaaagucuguuugg

SEQ ID NO: 934727 - RNA, 19 nt, Homo sapiens
  misc_RNA (1)...(19): siRNA sense strand
gcauuagcccagccuguga

SEQ ID NO: 934728 - RNA, 19 nt, Homo sapiens
  misc_RNA (1)...(19): siRNA sense strand
gcacagcuaagauaucaac

SEQ ID NO: 934729 - RNA, 19 nt, Homo sapiens
  misc_RNA (1)...(19): siRNA sense strand
ggaaaaggagagagaguuu

SEQ ID NO: 934730 - RNA, 19 nt, Homo sapiens
  misc_RNA (1)...(19): siRNA sense strand
agacucagguaacuguuca

SEQ ID NO: 934731 - RNA, 19 nt, Homo sapiens
  misc_RNA (1)...(19): siRNA sense strand
uaaacagacucagguaacu

SEQ ID NO: 934732 - RNA, 19 nt, Homo sapiens
  misc_RNA (1)...(19): siRNA sense strand
gagcccagugugcaauuaa

SEQ ID NO: 934733 - RNA, 19 nt, Homo sapiens
  misc_RNA (1)...(19): siRNA sense strand
auacuugggucagcagauu

SEQ ID NO: 934734 - RNA, 19 nt, Homo sapiens
  misc_RNA (1)...(19): siRNA sense strand
ucugaggacuuccaagcaa

SEQ ID NO: 934735 - RNA, 19 nt, Homo sapiens
  misc_RNA (1)...(19): siRNA sense strand
gacgggagguggcauuacu

SEQ ID NO: 934736 - RNA, 19 nt, Homo sapiens
  misc_RNA (1)...(19): siRNA sense strand
cgccucaggugaucagcua

SEQ ID NO: 934737 - RNA, 19 nt, Homo sapiens
  misc_RNA (1)...(19): siRNA sense strand
aaggaucuaugcacugaau

SEQ ID NO: 934738 - RNA, 19 nt, Homo sapiens
  misc_RNA (1)...(19): siRNA sense strand
gagaagaccaucaaccuua

SEQ ID NO: 934739 - RNA, 19 nt, Homo sapiens
  misc_RNA (1)...(19): siRNA sense strand
agaagaagcucccuuuaca

SEQ ID NO: 934740 - RNA, 19 nt, Homo sapiens
  misc_RNA (1)...(19): siRNA sense strand
caagaucaccguauacaga

SEQ ID NO: 934741 - RNA, 19 nt, Homo sapiens
  misc_RNA (1)...(19): siRNA sense strand
gaagcucccuuuacaucau

SEQ ID NO: 934742 - RNA, 19 nt, Homo sapiens
  misc_RNA (1)...(19): siRNA sense strand
ggaaacagaagaagcuaga

SEQ ID NO: 934743 - RNA, 19 nt, Homo sapiens
  misc_RNA (1)...(19): siRNA sense strand
uggaauacauggaucagaa

SEQ ID NO: 934744 - RNA, 19 nt, Homo sapiens
  misc_RNA (1)...(19): siRNA sense strand
gcagacacccucccucgaa

SEQ ID NO: 934745 - RNA, 19 nt, Homo sapiens
  misc_RNA (1)...(19): siRNA sense strand
gcacauaauccgcgagcaa

SEQ ID NO: 934746 - RNA, 19 nt, Homo sapiens
  misc_RNA (1)...(19): siRNA sense strand
gaagucggcucugcuuucu

SEQ ID NO: 934747 - RNA, 19 nt, Homo sapiens
  misc_RNA (1)...(19): siRNA sense strand
gaccguauccgacucuuug

SEQ ID NO: 934748 - RNA, 19 nt, Homo sapiens
  misc_RNA (1)...(19): siRNA sense strand
gcaagccccuccucaauga

SEQ ID NO: 934749 - RNA, 19 nt, Homo sapiens
  misc_RNA (1)...(19): siRNA sense strand
caaccuuacuguagaugug

SEQ ID NO: 934750 - RNA, 19 nt, Homo sapiens
  misc_RNA (1)...(19): siRNA sense strand
ggaagucggcucugcuuuc

SEQ ID NO: 934751 - RNA, 19 nt, Homo sapiens
  misc_RNA (1)...(19): siRNA sense strand
gaccaucaaccuuacugua

SEQ ID NO: 934752 - RNA, 19 nt, Homo sapiens
  misc_RNA (1)...(19): siRNA sense strand
aaacagaagaagcuagaaa

SEQ ID NO: 934753 - RNA, 19 nt, Homo sapiens
  misc_RNA (1)...(19): siRNA sense strand
ggagaagaccaucaaccuu

SEQ ID NO: 934754 - RNA, 19 nt, Homo sapiens
  misc_RNA (1)...(19): siRNA sense strand
gaaugaugaccgccugaaa

SEQ ID NO: 934755 - RNA, 19 nt, Homo sapiens
  misc_RNA (1)...(19): siRNA sense strand
ccaucaaccuuacuguaga

SEQ ID NO: 934756 - RNA, 19 nt, Homo sapiens
  misc_RNA (1)...(19): siRNA sense strand
gaagaagcucccuuuacau

SEQ ID NO: 934757 - RNA, 19 nt, Homo sapiens
  misc_RNA (1)...(19): siRNA sense strand
ccgaugagggcaccuauga

SEQ ID NO: 934758 - RNA, 19 nt, Homo sapiens
  misc_RNA (1)...(19): siRNA sense strand
gaauacauggaucagaaug

SEQ ID NO: 934759 - RNA, 19 nt, Homo sapiens
  misc_RNA (1)...(19): siRNA sense strand
caucaaccuuacuguagau

SEQ ID NO: 934760 - RNA, 19 nt, Homo sapiens
  misc_RNA (1)...(19): siRNA sense strand
ggaauacauggaucagaau

SEQ ID NO: 934761 - RNA, 19 nt, Homo sapiens
  misc_RNA (1)...(19): siRNA sense strand
acagaagaagcucccuuua

SEQ ID NO: 934762 - RNA, 19 nt, Homo sapiens
  misc_RNA (1)...(19): siRNA sense strand
gaucaccguauacagaaga

SEQ ID NO: 934763 - RNA, 19 nt, Homo sapiens
  misc_RNA (1)...(19): siRNA sense strand
cagccugccugucaagauc

SEQ ID NO: 934764 - RNA, 19 nt, Homo sapiens
  misc_RNA (1)...(19): siRNA sense strand
cagaagaagcucccuuuac

SEQ ID NO: 934765 - RNA, 19 nt, Homo sapiens
  misc_RNA (1)...(19): siRNA sense strand
ccuaugaggucgagaucuc

SEQ ID NO: 934766 - RNA, 19 nt, Homo sapiens
  misc_RNA (1)...(19): siRNA sense strand
cugucaagaucaccguaua

SEQ ID NO: 934767 - RNA, 19 nt, Homo sapiens
  misc_RNA (1)...(19): siRNA sense strand
agaagaagcuagaaaagca

SEQ ID NO: 934768 - RNA, 19 nt, Homo sapiens
  misc_RNA (1)...(19): siRNA sense strand
gaaacagaagaagcuagaa

SEQ ID NO: 934769 - RNA, 19 nt, Homo sapiens
  misc_RNA (1)...(19): siRNA sense strand
agucggcucugcuuucugu

SEQ ID NO: 934770 - RNA, 19 nt, Homo sapiens
  misc_RNA (1)...(19): siRNA sense strand
uacagaagaagcucccuuu

SEQ ID NO: 934771 - RNA, 19 nt, Homo sapiens
  misc_RNA (1)...(19): siRNA sense strand
agaagaccaucaaccuuac

SEQ ID NO: 934772 - RNA, 19 nt, Homo sapiens
  misc_RNA (1)...(19): siRNA sense strand
uacaucaucuugucuacag

SEQ ID NO: 934773 - RNA, 19 nt, Homo sapiens
  misc_RNA (1)...(19): siRNA sense strand
aagaagcucccuuuacauc

SEQ ID NO: 934774 - RNA, 19 nt, Homo sapiens
  misc_RNA (1)...(19): siRNA sense strand
cguauccgacucuuugaaa

SEQ ID NO: 934775 - RNA, 19 nt, Homo sapiens
  misc_RNA (1)...(19): siRNA sense strand
guagaugugcccauuucga

SEQ ID NO: 934776 - RNA, 19 nt, Homo sapiens
  misc_RNA (1)...(19): siRNA sense strand
cuguagaugugcccauuuc

SEQ ID NO: 934777 - RNA, 19 nt, Homo sapiens
  misc_RNA (1)...(19): siRNA sense strand
cucaaugacucgagaaugc

SEQ ID NO: 934778 - RNA, 19 nt, Homo sapiens
  misc_RNA (1)...(19): siRNA sense strand
gcaccaagcccagcuacac

SEQ ID NO: 934779 - RNA, 19 nt, Homo sapiens
  misc_RNA (1)...(19): siRNA sense strand
aagcaaaacucccuggaau

SEQ ID NO: 934780 - RNA, 19 nt, Homo sapiens
  misc_RNA (1)...(19): siRNA sense strand
ggaggaugacgaccuguac

SEQ ID NO: 934781 - RNA, 19 nt, Homo sapiens
  misc_RNA (1)...(19): siRNA sense strand
gggagaagaccaucaaccu

SEQ ID NO: 934782 - RNA, 19 nt, Homo sapiens
  misc_RNA (1)...(19): siRNA sense strand
aagaucaccguauacagaa

SEQ ID NO: 934783 - RNA, 19 nt, Homo sapiens
  misc_RNA (1)...(19): siRNA sense strand
gggaagucggcucugcuuu

SEQ ID NO: 934784 - RNA, 19 nt, Homo sapiens
  misc_RNA (1)...(19): siRNA sense strand
gcaaaacucccuggaauac

SEQ ID NO: 934785 - RNA, 19 nt, Homo sapiens
  misc_RNA (1)...(19): siRNA sense strand
aaaggaaacagaagaagcu

SEQ ID NO: 934786 - RNA, 19 nt, Homo sapiens
  misc_RNA (1)...(19): siRNA sense strand
agcgaggccuucaccuuga

SEQ ID NO: 934787 - RNA, 19 nt, Homo sapiens
  misc_RNA (1)...(19): siRNA sense strand
acagcugcgugguggagaa

SEQ ID NO: 934788 - RNA, 19 nt, Homo sapiens
  misc_RNA (1)...(19): siRNA sense strand
ucgaaguggugagcaggaa

SEQ ID NO: 934789 - RNA, 19 nt, Homo sapiens
  misc_RNA (1)...(19): siRNA sense strand
gcaaagugcuucagaacaa

SEQ ID NO: 934790 - RNA, 19 nt, Homo sapiens
  misc_RNA (1)...(19): siRNA sense strand
gaaacuagaggaacgcuuu

SEQ ID NO: 934791 - RNA, 19 nt, Homo sapiens
  misc_RNA (1)...(19): siRNA sense strand
gagaauagcagccucuuca

SEQ ID NO: 934792 - RNA, 19 nt, Homo sapiens
  misc_RNA (1)...(19): siRNA sense strand
gaacaaacaggcagagauc

SEQ ID NO: 934793 - RNA, 19 nt, Homo sapiens
  misc_RNA (1)...(19): siRNA sense strand
gacagcaacuugagaguca

SEQ ID NO: 934794 - RNA, 19 nt, Homo sapiens
  misc_RNA (1)...(19): siRNA sense strand
gaccgucacuagagagaaa

SEQ ID NO: 934795 - RNA, 19 nt, Homo sapiens
  misc_RNA (1)...(19): siRNA sense strand
ugaggaggcgaaaguauua

SEQ ID NO: 934796 - RNA, 19 nt, Homo sapiens
  misc_RNA (1)...(19): siRNA sense strand
gccaggcucugaaggauga

SEQ ID NO: 934797 - RNA, 19 nt, Homo sapiens
  misc_RNA (1)...(19): siRNA sense strand
ggagaggugugcucaggau

SEQ ID NO: 934798 - RNA, 19 nt, Homo sapiens
  misc_RNA (1)...(19): siRNA sense strand
gaagaggagacggaguuua

SEQ ID NO: 934799 - RNA, 19 nt, Homo sapiens
  misc_RNA (1)...(19): siRNA sense strand
ccagaaggccuacgaugaa

SEQ ID NO: 934800 - RNA, 19 nt, Homo sapiens
  misc_RNA (1)...(19): siRNA sense strand
caaagugcuucagaacaaa

SEQ ID NO: 934801 - RNA, 19 nt, Homo sapiens
  misc_RNA (1)...(19): siRNA sense strand
augcagagcuggaggagaa

SEQ ID NO: 934802 - RNA, 19 nt, Homo sapiens
  misc_RNA (1)...(19): siRNA sense strand
aagaggagacggaguuuaa

SEQ ID NO: 934803 - RNA, 19 nt, Homo sapiens
  misc_RNA (1)...(19): siRNA sense strand
ggagauagcaaaugaagac

SEQ ID NO: 934804 - RNA, 19 nt, Homo sapiens
  misc_RNA (1)...(19): siRNA sense strand
ggagacggaguuuaaggaa

SEQ ID NO: 934805 - RNA, 19 nt, Homo sapiens
  misc_RNA (1)...(19): siRNA sense strand
cuagaggaacgcuuuauga

SEQ ID NO: 934806 - RNA, 19 nt, Homo sapiens
  misc_RNA (1)...(19): siRNA sense strand
cugcagcuguccauugaaa

SEQ ID NO: 934807 - RNA, 19 nt, Homo sapiens
  misc_RNA (1)...(19): siRNA sense strand
ugaguacagucggaaacua

SEQ ID NO: 934808 - RNA, 19 nt, Homo sapiens
  misc_RNA (1)...(19): siRNA sense strand
gcaaggagagagaacucaa

SEQ ID NO: 934809 - RNA, 19 nt, Homo sapiens
  misc_RNA (1)...(19): siRNA sense strand
ggaagaggagacggaguuu

SEQ ID NO: 934810 - RNA, 19 nt, Homo sapiens
  misc_RNA (1)...(19): siRNA sense strand
gcacagcuuggaucuuuua

SEQ ID NO: 934811 - RNA, 19 nt, Homo sapiens
  misc_RNA (1)...(19): siRNA sense strand
aaacuagaggaacgcuuua

SEQ ID NO: 934812 - RNA, 19 nt, Homo sapiens
  misc_RNA (1)...(19): siRNA sense strand
gagagaacucaauggcaaa

SEQ ID NO: 934813 - RNA, 19 nt, Homo sapiens
  misc_RNA (1)...(19): siRNA sense strand
gaugaggaggcgaaaguau

SEQ ID NO: 934814 - RNA, 19 nt, Homo sapiens
  misc_RNA (1)...(19): siRNA sense strand
aagcugaggcuggagaaua

SEQ ID NO: 934815 - RNA, 19 nt, Homo sapiens
  misc_RNA (1)...(19): siRNA sense strand
gagcuucagcgcaaaguag

SEQ ID NO: 934816 - RNA, 19 nt, Homo sapiens
  misc_RNA (1)...(19): siRNA sense strand
aguuggagauagcaaauga

SEQ ID NO: 934817 - RNA, 19 nt, Homo sapiens
  misc_RNA (1)...(19): siRNA sense strand
gaaaguauuacagcucaca

SEQ ID NO: 934818 - RNA, 19 nt, Homo sapiens
  misc_RNA (1)...(19): siRNA sense strand
ggaugaggaggcgaaagua

SEQ ID NO: 934819 - RNA, 19 nt, Homo sapiens
  misc_RNA (1)...(19): siRNA sense strand
ugagggaggagaaugagaa

SEQ ID NO: 934820 - RNA, 19 nt, Homo sapiens
  misc_RNA (1)...(19): siRNA sense strand
cugaagaacgcuuagagaa

SEQ ID NO: 934821 - RNA, 19 nt, Homo sapiens
  misc_RNA (1)...(19): siRNA sense strand
ugaagaacgcuuagagaag

SEQ ID NO: 934822 - RNA, 19 nt, Homo sapiens
  misc_RNA (1)...(19): siRNA sense strand
gaucugccagcuugaggaa

SEQ ID NO: 934823 - RNA, 19 nt, Homo sapiens
  misc_RNA (1)...(19): siRNA sense strand
cgccuaugcuccagaaaca

SEQ ID NO: 934824 - RNA, 19 nt, Homo sapiens
  misc_RNA (1)...(19): siRNA sense strand
ugagggaagccuuggcaaa

SEQ ID NO: 934825 - RNA, 19 nt, Homo sapiens
  misc_RNA (1)...(19): siRNA sense strand
gagcuggaggagaagauga

SEQ ID NO: 934826 - RNA, 19 nt, Homo sapiens
  misc_RNA (1)...(19): siRNA sense strand
cuagagagaaagaggaguu

SEQ ID NO: 934827 - RNA, 19 nt, Homo sapiens
  misc_RNA (1)...(19): siRNA sense strand
gaugaauacaagagugaga

SEQ ID NO: 934828 - RNA, 19 nt, Homo sapiens
  misc_RNA (1)...(19): siRNA sense strand
gaguacagucggaaacuag

SEQ ID NO: 934829 - RNA, 19 nt, Homo sapiens
  misc_RNA (1)...(19): siRNA sense strand
ggagcuucagcgcaaagua

SEQ ID NO: 934830 - RNA, 19 nt, Homo sapiens
  misc_RNA (1)...(19): siRNA sense strand
ggagaauagcagccucuuc

SEQ ID NO: 934831 - RNA, 19 nt, Homo sapiens
  misc_RNA (1)...(19): siRNA sense strand
caaggagagagaacucaau

SEQ ID NO: 934832 - RNA, 19 nt, Homo sapiens
  misc_RNA (1)...(19): siRNA sense strand
gagggaagccuuggcaaac

SEQ ID NO: 934833 - RNA, 19 nt, Homo sapiens
  misc_RNA (1)...(19): siRNA sense strand
caaaugaagacaggaagca

SEQ ID NO: 934834 - RNA, 19 nt, Homo sapiens
  misc_RNA (1)...(19): siRNA sense strand
gaggaaaaguuggagauag

SEQ ID NO: 934835 - RNA, 19 nt, Homo sapiens
  misc_RNA (1)...(19): siRNA sense strand
ugcugcagcuguccauuga

SEQ ID NO: 934836 - RNA, 19 nt, Homo sapiens
  misc_RNA (1)...(19): siRNA sense strand
uagcaaaugaagacaggaa

SEQ ID NO: 934837 - RNA, 19 nt, Homo sapiens
  misc_RNA (1)...(19): siRNA sense strand
uccagaaggccuacgauga

SEQ ID NO: 934838 - RNA, 19 nt, Homo sapiens
  misc_RNA (1)...(19): siRNA sense strand
ugaagcggaggucagauga

SEQ ID NO: 934839 - RNA, 19 nt, Homo sapiens
  misc_RNA (1)...(19): siRNA sense strand
gaauacaagagugagaaca

SEQ ID NO: 934840 - RNA, 19 nt, Homo sapiens
  misc_RNA (1)...(19): siRNA sense strand
ggcaaacuccgccaucucu

SEQ ID NO: 934841 - RNA, 19 nt, Homo sapiens
  misc_RNA (1)...(19): siRNA sense strand
gaaggccuacgaugaacuc

SEQ ID NO: 934842 - RNA, 19 nt, Homo sapiens
  misc_RNA (1)...(19): siRNA sense strand
gaaggaugaggaggcgaaa

SEQ ID NO: 934843 - RNA, 19 nt, Homo sapiens
  misc_RNA (1)...(19): siRNA sense strand
auacaagagugagaacauc

SEQ ID NO: 934844 - RNA, 19 nt, Homo sapiens
  misc_RNA (1)...(19): siRNA sense strand
gagcgagaaggcuaugcuu

SEQ ID NO: 934845 - RNA, 19 nt, Homo sapiens
  misc_RNA (1)...(19): siRNA sense strand
ggcaaagugcuucagaaca

SEQ ID NO: 934846 - RNA, 19 nt, Homo sapiens
  misc_RNA (1)...(19): siRNA sense strand
gggcaaagugcuucagaac

SEQ ID NO: 934847 - RNA, 19 nt, Homo sapiens
  misc_RNA (1)...(19): siRNA sense strand
ucaaggcccagggugagua

SEQ ID NO: 934848 - RNA, 19 nt, Homo sapiens
  misc_RNA (1)...(19): siRNA sense strand
gaguugaugcuccgcuuca

SEQ ID NO: 934849 - RNA, 19 nt, Homo sapiens
  misc_RNA (1)...(19): siRNA sense strand
gggaggagaaugagaagcu

SEQ ID NO: 934850 - RNA, 19 nt, Homo sapiens
  misc_RNA (1)...(19): siRNA sense strand
uccgccaucucucuccaua

SEQ ID NO: 934851 - RNA, 19 nt, Homo sapiens
  misc_RNA (1)...(19): siRNA sense strand
agaacucaauggcaaacuc

SEQ ID NO: 934852 - RNA, 19 nt, Homo sapiens
  misc_RNA (1)...(19): siRNA sense strand
gcagcuguccauugaaagg

SEQ ID NO: 934853 - RNA, 19 nt, Homo sapiens
  misc_RNA (1)...(19): siRNA sense strand
caaggaugaauacaagagu

SEQ ID NO: 934854 - RNA, 19 nt, Homo sapiens
  misc_RNA (1)...(19): siRNA sense strand
aggaagaggagacggaguu

SEQ ID NO: 934855 - RNA, 19 nt, Homo sapiens
  misc_RNA (1)...(19): siRNA sense strand
gaggagacggaguuuaagg

SEQ ID NO: 934856 - RNA, 19 nt, Homo sapiens
  misc_RNA (1)...(19): siRNA sense strand
cagaaggccuacgaugaac

SEQ ID NO: 934857 - RNA, 19 nt, Homo sapiens
  misc_RNA (1)...(19): siRNA sense strand
gggaagccuuggcaaaccu

SEQ ID NO: 934858 - RNA, 19 nt, Homo sapiens
  misc_RNA (1)...(19): siRNA sense strand
caaacuccgccaucucucu

SEQ ID NO: 934859 - RNA, 19 nt, Homo sapiens
  misc_RNA (1)...(19): siRNA sense strand
aaaguuggagauagcaaau

SEQ ID NO: 934860 - RNA, 19 nt, Homo sapiens
  misc_RNA (1)...(19): siRNA sense strand
ccugaagaacgcuuagaga

SEQ ID NO: 934861 - RNA, 19 nt, Homo sapiens
  misc_RNA (1)...(19): siRNA sense strand
gaucagggcuauucuaauu

SEQ ID NO: 934862 - RNA, 19 nt, Homo sapiens
  misc_RNA (1)...(19): siRNA sense strand
ggacaaagcucucaguauc

SEQ ID NO: 934863 - RNA, 19 nt, Homo sapiens
  misc_RNA (1)...(19): siRNA sense strand
gaggagaacuacaggcuua

SEQ ID NO: 934864 - RNA, 19 nt, Homo sapiens
  misc_RNA (1)...(19): siRNA sense strand
ugaaccagaugcacuauua

SEQ ID NO: 934865 - RNA, 19 nt, Homo sapiens
  misc_RNA (1)...(19): siRNA sense strand
gaacuacaggcuuaucuua

SEQ ID NO: 934866 - RNA, 19 nt, Homo sapiens
  misc_RNA (1)...(19): siRNA sense strand
gaaagcaaaggucauauuu

SEQ ID NO: 934867 - RNA, 19 nt, Homo sapiens
  misc_RNA (1)...(19): siRNA sense strand
ggucauauuuggaaacuga

SEQ ID NO: 934868 - RNA, 19 nt, Homo sapiens
  misc_RNA (1)...(19): siRNA sense strand
gggacagccugcauaauuu

SEQ ID NO: 934869 - RNA, 19 nt, Homo sapiens
  misc_RNA (1)...(19): siRNA sense strand
cuaccacucuggagaaaua

SEQ ID NO: 934870 - RNA, 19 nt, Homo sapiens
  misc_RNA (1)...(19): siRNA sense strand
gccauuagcuuguuagcaa

SEQ ID NO: 934871 - RNA, 19 nt, Homo sapiens
  misc_RNA (1)...(19): siRNA sense strand
cagaaguacuuguaucaaa

SEQ ID NO: 934872 - RNA, 19 nt, Homo sapiens
  misc_RNA (1)...(19): siRNA sense strand
caacgacccuggaugaugu

SEQ ID NO: 934873 - RNA, 19 nt, Homo sapiens
  misc_RNA (1)...(19): siRNA sense strand
gcucuggacuuucuaugaa

SEQ ID NO: 934874 - RNA, 19 nt, Homo sapiens
  misc_RNA (1)...(19): siRNA sense strand
gaagugguccagagaguuu

SEQ ID NO: 934875 - RNA, 19 nt, Homo sapiens
  misc_RNA (1)...(19): siRNA sense strand
gcugggauguucuuauauu

SEQ ID NO: 934876 - RNA, 19 nt, Homo sapiens
  misc_RNA (1)...(19): siRNA sense strand
aaaguacgcuuccucaguu

SEQ ID NO: 934877 - RNA, 19 nt, Homo sapiens
  misc_RNA (1)...(19): siRNA sense strand
acuaauagcuggaggaaau

SEQ ID NO: 934878 - RNA, 19 nt, Homo sapiens
  misc_RNA (1)...(19): siRNA sense strand
cagacuacuuuacagaaua

SEQ ID NO: 934879 - RNA, 19 nt, Homo sapiens
  misc_RNA (1)...(19): siRNA sense strand
caacaugaguaauaaagag

SEQ ID NO: 934880 - RNA, 19 nt, Homo sapiens
  misc_RNA (1)...(19): siRNA sense strand
gcagugaaggugcuaauga

SEQ ID NO: 934881 - RNA, 19 nt, Homo sapiens
  misc_RNA (1)...(19): siRNA sense strand
ugaaaugcuuccugaaaug

SEQ ID NO: 934882 - RNA, 19 nt, Homo sapiens
  misc_RNA (1)...(19): siRNA sense strand
ccacuacgauugcuaucuu

SEQ ID NO: 934883 - RNA, 19 nt, Homo sapiens
  misc_RNA (1)...(19): siRNA sense strand
gcaggaagccccagaauuu

SEQ ID NO: 934884 - RNA, 19 nt, Homo sapiens
  misc_RNA (1)...(19): siRNA sense strand
gaaaguacgcuuccucagu

SEQ ID NO: 934885 - RNA, 19 nt, Homo sapiens
  misc_RNA (1)...(19): siRNA sense strand
guggagauauuucuacaga

SEQ ID NO: 934886 - RNA, 19 nt, Homo sapiens
  misc_RNA (1)...(19): siRNA sense strand
caaagccaguguauggaaa

SEQ ID NO: 934887 - RNA, 19 nt, Homo sapiens
  misc_RNA (1)...(19): siRNA sense strand
ccagaugcacuauuacuaa

SEQ ID NO: 934888 - RNA, 19 nt, Homo sapiens
  misc_RNA (1)...(19): siRNA sense strand
gaaaugcuuccugaaauga

SEQ ID NO: 934889 - RNA, 19 nt, Homo sapiens
  misc_RNA (1)...(19): siRNA sense strand
cagcugcuccugccacuua

SEQ ID NO: 934890 - RNA, 19 nt, Homo sapiens
  misc_RNA (1)...(19): siRNA sense strand
aaacugaugggauuaauug

SEQ ID NO: 934891 - RNA, 19 nt, Homo sapiens
  misc_RNA (1)...(19): siRNA sense strand
cugcugggauguucuuaua

SEQ ID NO: 934892 - RNA, 19 nt, Homo sapiens
  misc_RNA (1)...(19): siRNA sense strand
gaaacugaugggauuaauu

SEQ ID NO: 934893 - RNA, 19 nt, Homo sapiens
  misc_RNA (1)...(19): siRNA sense strand
gaagaucagcuuagagaag

SEQ ID NO: 934894 - RNA, 19 nt, Homo sapiens
  misc_RNA (1)...(19): siRNA sense strand
ggaaacugaugggauuaau

SEQ ID NO: 934895 - RNA, 19 nt, Homo sapiens
  misc_RNA (1)...(19): siRNA sense strand
cagccaugaucauuacuuu

SEQ ID NO: 934896 - RNA, 19 nt, Homo sapiens
  misc_RNA (1)...(19): siRNA sense strand
ugaaaucccacaugaaaug

SEQ ID NO: 934897 - RNA, 19 nt, Homo sapiens
  misc_RNA (1)...(19): siRNA sense strand
cuccuucucuauuacauua

SEQ ID NO: 934898 - RNA, 19 nt, Homo sapiens
  misc_RNA (1)...(19): siRNA sense strand
uaacugccuucaugggauu

SEQ ID NO: 934899 - RNA, 19 nt, Homo sapiens
  misc_RNA (1)...(19): siRNA sense strand
aaggaggacuuuaagcaaa

SEQ ID NO: 934900 - RNA, 19 nt, Homo sapiens
  misc_RNA (1)...(19): siRNA sense strand
cagugaaggugcuaaugaa

SEQ ID NO: 934901 - RNA, 19 nt, Homo sapiens
  misc_RNA (1)...(19): siRNA sense strand
gagcagccuucucaucauc

SEQ ID NO: 934902 - RNA, 19 nt, Homo sapiens
  misc_RNA (1)...(19): siRNA sense strand
ugaaggugcuaaugaaagu

SEQ ID NO: 934903 - RNA, 19 nt, Homo sapiens
  misc_RNA (1)...(19): siRNA sense strand
gcucuuggcuauauaugag

SEQ ID NO: 934904 - RNA, 19 nt, Homo sapiens
  misc_RNA (1)...(19): siRNA sense strand
gaugauguuucuccugcaa

SEQ ID NO: 934905 - RNA, 19 nt, Homo sapiens
  misc_RNA (1)...(19): siRNA sense strand
uuuauaagcucccuaacug

SEQ ID NO: 934906 - RNA, 19 nt, Homo sapiens
  misc_RNA (1)...(19): siRNA sense strand
gaccagaaguacuuguauc

SEQ ID NO: 934907 - RNA, 19 nt, Homo sapiens
  misc_RNA (1)...(19): siRNA sense strand
cagaagggccucucacuca

SEQ ID NO: 934908 - RNA, 19 nt, Homo sapiens
  misc_RNA (1)...(19): siRNA sense strand
ccagacuacuuuacagaau

SEQ ID NO: 934909 - RNA, 19 nt, Homo sapiens
  misc_RNA (1)...(19): siRNA sense strand
uaucuugugucaugaaauc

SEQ ID NO: 934910 - RNA, 19 nt, Homo sapiens
  misc_RNA (1)...(19): siRNA sense strand
gaggagaaacggaaugcaa

SEQ ID NO: 934911 - RNA, 19 nt, Homo sapiens
  misc_RNA (1)...(19): siRNA sense strand
acacaacgacccuggauga

SEQ ID NO: 934912 - RNA, 19 nt, Homo sapiens
  misc_RNA (1)...(19): siRNA sense strand
guugaaaugcuuccugaaa

SEQ ID NO: 934913 - RNA, 19 nt, Homo sapiens
  misc_RNA (1)...(19): siRNA sense strand
gauuauacauuggccuuuc

SEQ ID NO: 934914 - RNA, 19 nt, Homo sapiens
  misc_RNA (1)...(19): siRNA sense strand
gaagggccucucacucauu

SEQ ID NO: 934915 - RNA, 19 nt, Homo sapiens
  misc_RNA (1)...(19): siRNA sense strand
ucagggcuauucuaauuuc

SEQ ID NO: 934916 - RNA, 19 nt, Homo sapiens
  misc_RNA (1)...(19): siRNA sense strand
aagaucagcuuagagaaga

SEQ ID NO: 934917 - RNA, 19 nt, Homo sapiens
  misc_RNA (1)...(19): siRNA sense strand
agaaugagacagaagauau

SEQ ID NO: 934918 - RNA, 19 nt, Homo sapiens
  misc_RNA (1)...(19): siRNA sense strand
uaucagaacuagaccaacu

SEQ ID NO: 934919 - RNA, 19 nt, Homo sapiens
  misc_RNA (1)...(19): siRNA sense strand
ggcaguacuuugacacuuc

SEQ ID NO: 934920 - RNA, 19 nt, Homo sapiens
  misc_RNA (1)...(19): siRNA sense strand
cgugucagcugauccaugu

SEQ ID NO: 934921 - RNA, 19 nt, Homo sapiens
  misc_RNA (1)...(19): siRNA sense strand
gcuaucuugugucaugaaa

SEQ ID NO: 934922 - RNA, 19 nt, Homo sapiens
  misc_RNA (1)...(19): siRNA sense strand
cauaggagcagccuucuca

SEQ ID NO: 934923 - RNA, 19 nt, Homo sapiens
  misc_RNA (1)...(19): siRNA sense strand
gccucucacucauuucuaa

SEQ ID NO: 934924 - RNA, 19 nt, Homo sapiens
  misc_RNA (1)...(19): siRNA sense strand
gauccuagguuggcuuucu

SEQ ID NO: 934925 - RNA, 19 nt, Homo sapiens
  misc_RNA (1)...(19): siRNA sense strand
ucaagaagccucaucaaaa

SEQ ID NO: 934926 - RNA, 19 nt, Homo sapiens
  misc_RNA (1)...(19): siRNA sense strand
ggagcagccuucucaucau

SEQ ID NO: 934927 - RNA, 19 nt, Homo sapiens
  misc_RNA (1)...(19): siRNA sense strand
ugaaagcaaaggucauauu

SEQ ID NO: 934928 - RNA, 19 nt, Homo sapiens
  misc_RNA (1)...(19): siRNA sense strand
gaaugagacagaagauauc

SEQ ID NO: 934929 - RNA, 19 nt, Homo sapiens
  misc_RNA (1)...(19): siRNA sense strand
agacuuugccgugcucuua

SEQ ID NO: 934930 - RNA, 19 nt, Homo sapiens
  misc_RNA (1)...(19): siRNA sense strand
ccucuuuccuuucacagaa

SEQ ID NO: 934931 - RNA, 19 nt, Homo sapiens
  misc_RNA (1)...(19): siRNA sense strand
uugaaaugcuuccugaaau

SEQ ID NO: 934932 - RNA, 19 nt, Homo sapiens
  misc_RNA (1)...(19): siRNA sense strand
uaugacagccuccaacaga

SEQ ID NO: 934933 - RNA, 19 nt, Homo sapiens
  misc_RNA (1)...(19): siRNA sense strand
gaaaagcccagaagauuca

SEQ ID NO: 934934 - RNA, 19 nt, Homo sapiens
  misc_RNA (1)...(19): siRNA sense strand
cuaggcagcugguggagau

SEQ ID NO: 934935 - RNA, 19 nt, Homo sapiens
  misc_RNA (1)...(19): siRNA sense strand
gaggaaauuuugaagauca

SEQ ID NO: 934936 - RNA, 19 nt, Homo sapiens
  misc_RNA (1)...(19): siRNA sense strand
cgauugcuaucuuguguca

SEQ ID NO: 934937 - RNA, 19 nt, Homo sapiens
  misc_RNA (1)...(19): siRNA sense strand
ccaaggaccaacaagcaaa

SEQ ID NO: 934938 - RNA, 19 nt, Homo sapiens
  misc_RNA (1)...(19): siRNA sense strand
caaaugaguccagggauca

SEQ ID NO: 934939 - RNA, 19 nt, Homo sapiens
  misc_RNA (1)...(19): siRNA sense strand
ggaccagaaguacuuguau

SEQ ID NO: 934940 - RNA, 19 nt, Homo sapiens
  misc_RNA (1)...(19): siRNA sense strand
agagaucuguucuucaaag

SEQ ID NO: 934941 - RNA, 19 nt, Homo sapiens
  misc_RNA (1)...(19): siRNA sense strand
cagcugaaaugccuauagg

SEQ ID NO: 934942 - RNA, 19 nt, Homo sapiens
  misc_RNA (1)...(19): siRNA sense strand
cuucuuguaucaccaaaug

SEQ ID NO: 934943 - RNA, 19 nt, Homo sapiens
  misc_RNA (1)...(19): siRNA sense strand
uuuggaaacugaugggauu

SEQ ID NO: 934944 - RNA, 19 nt, Homo sapiens
  misc_RNA (1)...(19): siRNA sense strand
gcaaagcugccaccuacca

SEQ ID NO: 934945 - RNA, 19 nt, Homo sapiens
  misc_RNA (1)...(19): siRNA sense strand
ggaggacuuuaagcaaaug

SEQ ID NO: 934946 - RNA, 19 nt, Homo sapiens
  misc_RNA (1)...(19): siRNA sense strand
uaaggaggacuuuaagcaa

SEQ ID NO: 934947 - RNA, 19 nt, Homo sapiens
  misc_RNA (1)...(19): siRNA sense strand
aagggccucucacucauuu

SEQ ID NO: 934948 - RNA, 19 nt, Homo sapiens
  misc_RNA (1)...(19): siRNA sense strand
gaguuucucuucuccuucu

SEQ ID NO: 934949 - RNA, 19 nt, Homo sapiens
  misc_RNA (1)...(19): siRNA sense strand
caagcaaagcugccaccua

SEQ ID NO: 934950 - RNA, 19 nt, Homo sapiens
  misc_RNA (1)...(19): siRNA sense strand
cauaauaacccaugaucag

SEQ ID NO: 934951 - RNA, 19 nt, Homo sapiens
  misc_RNA (1)...(19): siRNA sense strand
gccaugaucauuacuuugu

SEQ ID NO: 934952 - RNA, 19 nt, Homo sapiens
  misc_RNA (1)...(19): siRNA sense strand
gcaguacuuugacacuucu

SEQ ID NO: 934953 - RNA, 19 nt, Homo sapiens
  misc_RNA (1)...(19): siRNA sense strand
ucaccaggcaguacuuuga

SEQ ID NO: 934954 - RNA, 19 nt, Homo sapiens
  misc_RNA (1)...(19): siRNA sense strand
ucucaaagccaguguaugg

SEQ ID NO: 934955 - RNA, 19 nt, Homo sapiens
  misc_RNA (1)...(19): siRNA sense strand
gacccuggaugauguuucu

SEQ ID NO: 934956 - RNA, 19 nt, Homo sapiens
  misc_RNA (1)...(19): siRNA sense strand
uauccugggugccauuguu

SEQ ID NO: 934957 - RNA, 19 nt, Homo sapiens
  misc_RNA (1)...(19): siRNA sense strand
caagaagccucaucaaaac

SEQ ID NO: 934958 - RNA, 19 nt, Homo sapiens
  misc_RNA (1)...(19): siRNA sense strand
gcucuuaagcucuggacuu

SEQ ID NO: 934959 - RNA, 19 nt, Homo sapiens
  misc_RNA (1)...(19): siRNA sense strand
ucccucagguucuugguuu

SEQ ID NO: 934960 - RNA, 19 nt, Homo sapiens
  misc_RNA (1)...(19): siRNA sense strand
gccaguguauggaaaccaa

SEQ ID NO: 934961 - RNA, 19 nt, Homo sapiens
  misc_RNA (1)...(19): siRNA sense strand
caagaacucucaaacaaua

SEQ ID NO: 934962 - RNA, 19 nt, Homo sapiens
  misc_RNA (1)...(19): siRNA sense strand
uaagagagcugugaaagua

SEQ ID NO: 934963 - RNA, 19 nt, Homo sapiens
  misc_RNA (1)...(19): siRNA sense strand
gaaagaaccugaaauuaac

SEQ ID NO: 934964 - RNA, 19 nt, Homo sapiens
  misc_RNA (1)...(19): siRNA sense strand
gacaagaacucucaaacaa

SEQ ID NO: 934965 - RNA, 19 nt, Homo sapiens
  misc_RNA (1)...(19): siRNA sense strand
uaacacaacucuucagaug

SEQ ID NO: 934966 - RNA, 19 nt, Homo sapiens
  misc_RNA (1)...(19): siRNA sense strand
gaaauuaacacaacucuuc

SEQ ID NO: 934967 - RNA, 19 nt, Homo sapiens
  misc_RNA (1)...(19): siRNA sense strand
ggaagugugugaagaaaga

SEQ ID NO: 934968 - RNA, 19 nt, Homo sapiens
  misc_RNA (1)...(19): siRNA sense strand
gaaauggaauuccuucagu

SEQ ID NO: 934969 - RNA, 19 nt, Homo sapiens
  misc_RNA (1)...(19): siRNA sense strand
cagaaugcaucgagguuua

SEQ ID NO: 934970 - RNA, 19 nt, Homo sapiens
  misc_RNA (1)...(19): siRNA sense strand
ucagagaccuuggcgauaa

SEQ ID NO: 934971 - RNA, 19 nt, Homo sapiens
  misc_RNA (1)...(19): siRNA sense strand
gaaagaaagcauuaaagga

SEQ ID NO: 934972 - RNA, 19 nt, Homo sapiens
  misc_RNA (1)...(19): siRNA sense strand
gggaaaccgucucuucgua

SEQ ID NO: 934973 - RNA, 19 nt, Homo sapiens
  misc_RNA (1)...(19): siRNA sense strand
gaaaguagcaacaggacaa

SEQ ID NO: 934974 - RNA, 19 nt, Homo sapiens
  misc_RNA (1)...(19): siRNA sense strand
ugcagaagaucauaaguaa

SEQ ID NO: 934975 - RNA, 19 nt, Homo sapiens
  misc_RNA (1)...(19): siRNA sense strand
ccaugcagauguucaguuu

SEQ ID NO: 934976 - RNA, 19 nt, Homo sapiens
  misc_RNA (1)...(19): siRNA sense strand
ggagagagcauuaguuugg

SEQ ID NO: 934977 - RNA, 19 nt, Homo sapiens
  misc_RNA (1)...(19): siRNA sense strand
gaaacaagcuggaaaaggu

SEQ ID NO: 934978 - RNA, 19 nt, Homo sapiens
  misc_RNA (1)...(19): siRNA sense strand
ggacaagaacucucaaaca

SEQ ID NO: 934979 - RNA, 19 nt, Homo sapiens
  misc_RNA (1)...(19): siRNA sense strand
gaacaugaaggagaauauu

SEQ ID NO: 934980 - RNA, 19 nt, Homo sapiens
  misc_RNA (1)...(19): siRNA sense strand
gcauuaguuuggaugaauu

SEQ ID NO: 934981 - RNA, 19 nt, Homo sapiens
  misc_RNA (1)...(19): siRNA sense strand
ggaaaccgucucuucguaa

SEQ ID NO: 934982 - RNA, 19 nt, Homo sapiens
  misc_RNA (1)...(19): siRNA sense strand
aaagaagucuggaaacaag

SEQ ID NO: 934983 - RNA, 19 nt, Homo sapiens
  misc_RNA (1)...(19): siRNA sense strand
ggauacagaugguaaugag

SEQ ID NO: 934984 - RNA, 19 nt, Homo sapiens
  misc_RNA (1)...(19): siRNA sense strand
gugaagaaagaaagcauua

SEQ ID NO: 934985 - RNA, 19 nt, Homo sapiens
  misc_RNA (1)...(19): siRNA sense strand
gugaaagaaccugaaauua

SEQ ID NO: 934986 - RNA, 19 nt, Homo sapiens
  misc_RNA (1)...(19): siRNA sense strand
caggagagagcauuaguuu

SEQ ID NO: 934987 - RNA, 19 nt, Homo sapiens
  misc_RNA (1)...(19): siRNA sense strand
gaaaccgucucuucguaag

SEQ ID NO: 934988 - RNA, 19 nt, Homo sapiens
  misc_RNA (1)...(19): siRNA sense strand
gguuugaguuucaugagaa

SEQ ID NO: 934989 - RNA, 19 nt, Homo sapiens
  misc_RNA (1)...(19): siRNA sense strand
agaaagcauuaaaggagua

SEQ ID NO: 934990 - RNA, 19 nt, Homo sapiens
  misc_RNA (1)...(19): siRNA sense strand
gauaaagggcuaauuucau

SEQ ID NO: 934991 - RNA, 19 nt, Homo sapiens
  misc_RNA (1)...(19): siRNA sense strand
cagaugcguuucuuuggaa

SEQ ID NO: 934992 - RNA, 19 nt, Homo sapiens
  misc_RNA (1)...(19): siRNA sense strand
gguaaugagaugauugaaa

SEQ ID NO: 934993 - RNA, 19 nt, Homo sapiens
  misc_RNA (1)...(19): siRNA sense strand
ggugaugaaugucuuaguc

SEQ ID NO: 934994 - RNA, 19 nt, Homo sapiens
  misc_RNA (1)...(19): siRNA sense strand
gagcauuaguuuggaugaa

SEQ ID NO: 934995 - RNA, 19 nt, Homo sapiens
  misc_RNA (1)...(19): siRNA sense strand
ggcgauaaagggcuaauuu

SEQ ID NO: 934996 - RNA, 19 nt, Homo sapiens
  misc_RNA (1)...(19): siRNA sense strand
gaauuucgaagauuuaugg

SEQ ID NO: 934997 - RNA, 19 nt, Homo sapiens
  misc_RNA (1)...(19): siRNA sense strand
ucaggaagcaauagugaaa

SEQ ID NO: 934998 - RNA, 19 nt, Homo sapiens
  misc_RNA (1)...(19): siRNA sense strand
ugauuuggauggugaugaa

SEQ ID NO: 934999 - RNA, 19 nt, Homo sapiens
  misc_RNA (1)...(19): siRNA sense strand
ucuaaagguuugaguuuca

SEQ ID NO: 935000 - RNA, 19 nt, Homo sapiens
  misc_RNA (1)...(19): siRNA sense strand
ucagaugcguuucuuugga

SEQ ID NO: 935001 - RNA, 19 nt, Homo sapiens
  misc_RNA (1)...(19): siRNA sense strand
ccacgagacuuccucuucu

SEQ ID NO: 935002 - RNA, 19 nt, Homo sapiens
  misc_RNA (1)...(19): siRNA sense strand
ggacaaagaaaacuucauu

SEQ ID NO: 935003 - RNA, 19 nt, Homo sapiens
  misc_RNA (1)...(19): siRNA sense strand
uaaugaaacuggauaucag

SEQ ID NO: 935004 - RNA, 19 nt, Homo sapiens
  misc_RNA (1)...(19): siRNA sense strand
cagaagaucauaaguaaac

SEQ ID NO: 935005 - RNA, 19 nt, Homo sapiens
  misc_RNA (1)...(19): siRNA sense strand
uuucuucacucgaacauga

SEQ ID NO: 935006 - RNA, 19 nt, Homo sapiens
  misc_RNA (1)...(19): siRNA sense strand
caucgaggauacacuguca

SEQ ID NO: 935007 - RNA, 19 nt, Homo sapiens
  misc_RNA (1)...(19): siRNA sense strand
gagagagcauuaguuugga

SEQ ID NO: 935008 - RNA, 19 nt, Homo sapiens
  misc_RNA (1)...(19): siRNA sense strand
gaaccugaaauuaacacaa

SEQ ID NO: 935009 - RNA, 19 nt, Homo sapiens
  misc_RNA (1)...(19): siRNA sense strand
cagagaccuuggcgauaaa

SEQ ID NO: 935010 - RNA, 19 nt, Homo sapiens
  misc_RNA (1)...(19): siRNA sense strand
aaauggaauuccuucaguu

SEQ ID NO: 935011 - RNA, 19 nt, Homo sapiens
  misc_RNA (1)...(19): siRNA sense strand
cgauaaagggcuaauuuca

SEQ ID NO: 935012 - RNA, 19 nt, Homo sapiens
  misc_RNA (1)...(19): siRNA sense strand
gacuuccucuucucaguga

SEQ ID NO: 935013 - RNA, 19 nt, Homo sapiens
  misc_RNA (1)...(19): siRNA sense strand
caaacagagauucaagaaa

SEQ ID NO: 935014 - RNA, 19 nt, Homo sapiens
  misc_RNA (1)...(19): siRNA sense strand
gcagaagaucauaaguaaa

SEQ ID NO: 935015 - RNA, 19 nt, Homo sapiens
  misc_RNA (1)...(19): siRNA sense strand
gcaggagagagcauuaguu

SEQ ID NO: 935016 - RNA, 19 nt, Homo sapiens
  misc_RNA (1)...(19): siRNA sense strand
gaaagcauuaaaggaguaa

SEQ ID NO: 935017 - RNA, 19 nt, Homo sapiens
  misc_RNA (1)...(19): siRNA sense strand
caucagaguauacaagaau

SEQ ID NO: 935018 - RNA, 19 nt, Homo sapiens
  misc_RNA (1)...(19): siRNA sense strand
cauucuggauuucauguug

SEQ ID NO: 935019 - RNA, 19 nt, Homo sapiens
  misc_RNA (1)...(19): siRNA sense strand
caacaucagaguauacaag

SEQ ID NO: 935020 - RNA, 19 nt, Homo sapiens
  misc_RNA (1)...(19): siRNA sense strand
cugcagaagaucauaagua

SEQ ID NO: 935021 - RNA, 19 nt, Homo sapiens
  misc_RNA (1)...(19): siRNA sense strand
gaguaucuuuucuugcuua

SEQ ID NO: 935022 - RNA, 19 nt, Homo sapiens
  misc_RNA (1)...(19): siRNA sense strand
ggauggugaugaaugucuu

SEQ ID NO: 935023 - RNA, 19 nt, Homo sapiens
  misc_RNA (1)...(19): siRNA sense strand
acucgaacaugaaggagaa

SEQ ID NO: 935024 - RNA, 19 nt, Homo sapiens
  misc_RNA (1)...(19): siRNA sense strand
acaaacagagauucaagaa

SEQ ID NO: 935025 - RNA, 19 nt, Homo sapiens
  misc_RNA (1)...(19): siRNA sense strand
gcgauaaagggcuaauuuc

SEQ ID NO: 935026 - RNA, 19 nt, Homo sapiens
  misc_RNA (1)...(19): siRNA sense strand
uaaaagaagucuggaaaca

SEQ ID NO: 935027 - RNA, 19 nt, Homo sapiens
  misc_RNA (1)...(19): siRNA sense strand
caacccacuuggaagacuu

SEQ ID NO: 935028 - RNA, 19 nt, Homo sapiens
  misc_RNA (1)...(19): siRNA sense strand
caagucauuuugccauuuu

SEQ ID NO: 935029 - RNA, 19 nt, Homo sapiens
  misc_RNA (1)...(19): siRNA sense strand
agugaaagaaccugaaauu

SEQ ID NO: 935030 - RNA, 19 nt, Homo sapiens
  misc_RNA (1)...(19): siRNA sense strand
gauggugaugaaugucuua

SEQ ID NO: 935031 - RNA, 19 nt, Homo sapiens
  misc_RNA (1)...(19): siRNA sense strand
cuaaugaaacuggauauca

SEQ ID NO: 935032 - RNA, 19 nt, Homo sapiens
  misc_RNA (1)...(19): siRNA sense strand
gcaguuuucuucacucgaa

SEQ ID NO: 935033 - RNA, 19 nt, Homo sapiens
  misc_RNA (1)...(19): siRNA sense strand
uuggaagacuuugcuauug

SEQ ID NO: 935034 - RNA, 19 nt, Homo sapiens
  misc_RNA (1)...(19): siRNA sense strand
gaacguaaaacuucaguca

SEQ ID NO: 935035 - RNA, 19 nt, Homo sapiens
  misc_RNA (1)...(19): siRNA sense strand
aggaagcaauagugaaaga

SEQ ID NO: 935036 - RNA, 19 nt, Homo sapiens
  misc_RNA (1)...(19): siRNA sense strand
caacucuucagaugcguuu

SEQ ID NO: 935037 - RNA, 19 nt, Homo sapiens
  misc_RNA (1)...(19): siRNA sense strand
guaccacaacaucagagua

SEQ ID NO: 935038 - RNA, 19 nt, Homo sapiens
  misc_RNA (1)...(19): siRNA sense strand
gauguucaguuuagcucau

SEQ ID NO: 935039 - RNA, 19 nt, Homo sapiens
  misc_RNA (1)...(19): siRNA sense strand
uuaaaaugcuggauacaga

SEQ ID NO: 935040 - RNA, 19 nt, Homo sapiens
  misc_RNA (1)...(19): siRNA sense strand
augcagauguucaguuuag

SEQ ID NO: 935041 - RNA, 19 nt, Homo sapiens
  misc_RNA (1)...(19): siRNA sense strand
uugagcaaauggaacguaa

SEQ ID NO: 935042 - RNA, 19 nt, Homo sapiens
  misc_RNA (1)...(19): siRNA sense strand
uaucaggaagcaauaguga

SEQ ID NO: 935043 - RNA, 19 nt, Homo sapiens
  misc_RNA (1)...(19): siRNA sense strand
ggaagcaauagugaaagaa

SEQ ID NO: 935044 - RNA, 19 nt, Homo sapiens
  misc_RNA (1)...(19): siRNA sense strand
agaaagaaagcauuaaagg

SEQ ID NO: 935045 - RNA, 19 nt, Homo sapiens
  misc_RNA (1)...(19): siRNA sense strand
gaucuuugauuuggauggu

SEQ ID NO: 935046 - RNA, 19 nt, Homo sapiens
  misc_RNA (1)...(19): siRNA sense strand
gcuauugccaugcagaugu

SEQ ID NO: 935047 - RNA, 19 nt, Homo sapiens
  misc_RNA (1)...(19): siRNA sense strand
uuacaacccacuuggaaga

SEQ ID NO: 935048 - RNA, 19 nt, Homo sapiens
  misc_RNA (1)...(19): siRNA sense strand
gaagcaauagugaaagaac

SEQ ID NO: 935049 - RNA, 19 nt, Homo sapiens
  misc_RNA (1)...(19): siRNA sense strand
gagcaaauggaacguaaaa

SEQ ID NO: 935050 - RNA, 19 nt, Homo sapiens
  misc_RNA (1)...(19): siRNA sense strand
gaugguaaugagaugauug

SEQ ID NO: 935051 - RNA, 19 nt, Homo sapiens
  misc_RNA (1)...(19): siRNA sense strand
acaagaacucucaaacaau

SEQ ID NO: 935052 - RNA, 19 nt, Homo sapiens
  misc_RNA (1)...(19): siRNA sense strand
cgaacaugaaggagaauau

SEQ ID NO: 935053 - RNA, 19 nt, Homo sapiens
  misc_RNA (1)...(19): siRNA sense strand
aagaugacuugaugacagu

SEQ ID NO: 935054 - RNA, 19 nt, Homo sapiens
  misc_RNA (1)...(19): siRNA sense strand
aauggaauuccuucaguuu

SEQ ID NO: 935055 - RNA, 19 nt, Homo sapiens
  misc_RNA (1)...(19): siRNA sense strand
gaauacuggaaguguguga

SEQ ID NO: 935056 - RNA, 19 nt, Homo sapiens
  misc_RNA (1)...(19): siRNA sense strand
auacaagaauacuggaagu

SEQ ID NO: 935057 - RNA, 19 nt, Homo sapiens
  misc_RNA (1)...(19): siRNA sense strand
uaccacaacaucagaguau

SEQ ID NO: 935058 - RNA, 19 nt, Homo sapiens
  misc_RNA (1)...(19): siRNA sense strand
ccacagccgcgucaguguu

SEQ ID NO: 935059 - RNA, 19 nt, Homo sapiens
  misc_RNA (1)...(19): siRNA sense strand
cuauugccaugcagauguu

SEQ ID NO: 935060 - RNA, 19 nt, Homo sapiens
  misc_RNA (1)...(19): siRNA sense strand
uaguuuggaugaauucaag

SEQ ID NO: 935061 - RNA, 19 nt, Homo sapiens
  misc_RNA (1)...(19): siRNA sense strand
gaagaaacuugccauguua

SEQ ID NO: 935062 - RNA, 19 nt, Homo sapiens
  misc_RNA (1)...(19): siRNA sense strand
ucaaugagcugaucaguga

SEQ ID NO: 935063 - RNA, 19 nt, Homo sapiens
  misc_RNA (1)...(19): siRNA sense strand
guacagacauuucuuugaa

SEQ ID NO: 935064 - RNA, 19 nt, Homo sapiens
  misc_RNA (1)...(19): siRNA sense strand
ugaaagaccuugagaaaca

SEQ ID NO: 935065 - RNA, 19 nt, Homo sapiens
  misc_RNA (1)...(19): siRNA sense strand
gcagggacaugcuguacua

SEQ ID NO: 935066 - RNA, 19 nt, Homo sapiens
  misc_RNA (1)...(19): siRNA sense strand
gaccgaagcucagaauuga

SEQ ID NO: 935067 - RNA, 19 nt, Homo sapiens
  misc_RNA (1)...(19): siRNA sense strand
agaagaaacuugccauguu

SEQ ID NO: 935068 - RNA, 19 nt, Homo sapiens
  misc_RNA (1)...(19): siRNA sense strand
ccacagacgagguuuauuu

SEQ ID NO: 935069 - RNA, 19 nt, Homo sapiens
  misc_RNA (1)...(19): siRNA sense strand
gaccauggaugaccaggaa

SEQ ID NO: 935070 - RNA, 19 nt, Homo sapiens
  misc_RNA (1)...(19): siRNA sense strand
agacgagguuuauuuguuu

SEQ ID NO: 935071 - RNA, 19 nt, Homo sapiens
  misc_RNA (1)...(19): siRNA sense strand
ugaaauaggaucuugcuuu

SEQ ID NO: 935072 - RNA, 19 nt, Homo sapiens
  misc_RNA (1)...(19): siRNA sense strand
caacauaaaggcagcauau

SEQ ID NO: 935073 - RNA, 19 nt, Homo sapiens
  misc_RNA (1)...(19): siRNA sense strand
ggaucuugcuuucuucaaa

SEQ ID NO: 935074 - RNA, 19 nt, Homo sapiens
  misc_RNA (1)...(19): siRNA sense strand
gaacuggacaaucuucuga

SEQ ID NO: 935075 - RNA, 19 nt, Homo sapiens
  misc_RNA (1)...(19): siRNA sense strand
gaggaggacuucagcuaug

SEQ ID NO: 935076 - RNA, 19 nt, Homo sapiens
  misc_RNA (1)...(19): siRNA sense strand
ggagggacuggauaucuua

SEQ ID NO: 935077 - RNA, 19 nt, Homo sapiens
  misc_RNA (1)...(19): siRNA sense strand
caacguuucuucagaugga

SEQ ID NO: 935078 - RNA, 19 nt, Homo sapiens
  misc_RNA (1)...(19): siRNA sense strand
cagacgagguuuauuuguu

SEQ ID NO: 935079 - RNA, 19 nt, Homo sapiens
  misc_RNA (1)...(19): siRNA sense strand
ggagagcaucgacaagaua

SEQ ID NO: 935080 - RNA, 19 nt, Homo sapiens
  misc_RNA (1)...(19): siRNA sense strand
ggacaucugugagggcuau

SEQ ID NO: 935081 - RNA, 19 nt, Homo sapiens
  misc_RNA (1)...(19): siRNA sense strand
gggagcagcuggccaucaa

SEQ ID NO: 935082 - RNA, 19 nt, Homo sapiens
  misc_RNA (1)...(19): siRNA sense strand
ggacguucuuccuguuuga

SEQ ID NO: 935083 - RNA, 19 nt, Homo sapiens
  misc_RNA (1)...(19): siRNA sense strand
cauaugaggccaugaagaa

SEQ ID NO: 935084 - RNA, 19 nt, Homo sapiens
  misc_RNA (1)...(19): siRNA sense strand
gagaaacaguacaacaaag

SEQ ID NO: 935085 - RNA, 19 nt, Homo sapiens
  misc_RNA (1)...(19): siRNA sense strand
caagagggcuuugccaucu

SEQ ID NO: 935086 - RNA, 19 nt, Homo sapiens
  misc_RNA (1)...(19): siRNA sense strand
aauaggaucuugcuuucuu

SEQ ID NO: 935087 - RNA, 19 nt, Homo sapiens
  misc_RNA (1)...(19): siRNA sense strand
gggagggacuggauaucuu

SEQ ID NO: 935088 - RNA, 19 nt, Homo sapiens
  misc_RNA (1)...(19): siRNA sense strand
gagaugggaauggaaauuu

SEQ ID NO: 935089 - RNA, 19 nt, Homo sapiens
  misc_RNA (1)...(19): siRNA sense strand
gaauguggccugucugauc

SEQ ID NO: 935090 - RNA, 19 nt, Homo sapiens
  misc_RNA (1)...(19): siRNA sense strand
uaagugaaauaggaucuug

SEQ ID NO: 935091 - RNA, 19 nt, Homo sapiens
  misc_RNA (1)...(19): siRNA sense strand
cauccaacguuucuucaga

SEQ ID NO: 935092 - RNA, 19 nt, Homo sapiens
  misc_RNA (1)...(19): siRNA sense strand
cggaggaacuggacaaucu

SEQ ID NO: 935093 - RNA, 19 nt, Homo sapiens
  misc_RNA (1)...(19): siRNA sense strand
caaguacagacauuucuuu

SEQ ID NO: 935094 - RNA, 19 nt, Homo sapiens
  misc_RNA (1)...(19): siRNA sense strand
gcgcagcuagccacuauuu

SEQ ID NO: 935095 - RNA, 19 nt, Homo sapiens
  misc_RNA (1)...(19): siRNA sense strand
aaacuugccauguuaaaug

SEQ ID NO: 935096 - RNA, 19 nt, Homo sapiens
  misc_RNA (1)...(19): siRNA sense strand
ggcaggacauggaaaguca

SEQ ID NO: 935097 - RNA, 19 nt, Homo sapiens
  misc_RNA (1)...(19): siRNA sense strand
ugagaaacaguacaacaaa

SEQ ID NO: 935098 - RNA, 19 nt, Homo sapiens
  misc_RNA (1)...(19): siRNA sense strand
ugaagaauguggccugucu

SEQ ID NO: 935099 - RNA, 19 nt, Homo sapiens
  misc_RNA (1)...(19): siRNA sense strand
gcaggccugugcagaugaa

SEQ ID NO: 935100 - RNA, 19 nt, Homo sapiens
  misc_RNA (1)...(19): siRNA sense strand
ggaccacagacgagguuua

SEQ ID NO: 935101 - RNA, 19 nt, Homo sapiens
  misc_RNA (1)...(19): siRNA sense strand
gaaacuugccauguuaaau

SEQ ID NO: 935102 - RNA, 19 nt, Homo sapiens
  misc_RNA (1)...(19): siRNA sense strand
ucugaaagaccuugagaaa

SEQ ID NO: 935103 - RNA, 19 nt, Homo sapiens
  misc_RNA (1)...(19): siRNA sense strand
ggugauuacagcaacauaa

SEQ ID NO: 935104 - RNA, 19 nt, Homo sapiens
  misc_RNA (1)...(19): siRNA sense strand
ucacaccagugcagaagau

SEQ ID NO: 935105 - RNA, 19 nt, Homo sapiens
  misc_RNA (1)...(19): siRNA sense strand
ggagaugggaauggaaauu

SEQ ID NO: 935106 - RNA, 19 nt, Homo sapiens
  misc_RNA (1)...(19): siRNA sense strand
gaaagaccuugagaaacag

SEQ ID NO: 935107 - RNA, 19 nt, Homo sapiens
  misc_RNA (1)...(19): siRNA sense strand
acaaggagaugggaaugga

SEQ ID NO: 935108 - RNA, 19 nt, Homo sapiens
  misc_RNA (1)...(19): siRNA sense strand
gcaaguacagacauuucuu

SEQ ID NO: 935109 - RNA, 19 nt, Homo sapiens
  misc_RNA (1)...(19): siRNA sense strand
cagcugguguccugcaaga

SEQ ID NO: 935110 - RNA, 19 nt, Homo sapiens
  misc_RNA (1)...(19): siRNA sense strand
gagcauccaacguuucuuc

SEQ ID NO: 935111 - RNA, 19 nt, Homo sapiens
  misc_RNA (1)...(19): siRNA sense strand
aggaagagcugucggaaaa

SEQ ID NO: 935112 - RNA, 19 nt, Homo sapiens
  misc_RNA (1)...(19): siRNA sense strand
uggaugagauggagcuugu

SEQ ID NO: 935113 - RNA, 19 nt, Homo sapiens
  misc_RNA (1)...(19): siRNA sense strand
gugauuacagcaacauaaa

SEQ ID NO: 935114 - RNA, 19 nt, Homo sapiens
  misc_RNA (1)...(19): siRNA sense strand
agaaacaguacaacaaaga

SEQ ID NO: 935115 - RNA, 19 nt, Homo sapiens
  misc_RNA (1)...(19): siRNA sense strand
gggaauggaaauuucagaa

SEQ ID NO: 935116 - RNA, 19 nt, Homo sapiens
  misc_RNA (1)...(19): siRNA sense strand
cacaggaacacggugauua

SEQ ID NO: 935117 - RNA, 19 nt, Homo sapiens
  misc_RNA (1)...(19): siRNA sense strand
gaucuugcuuucuucaaaa

SEQ ID NO: 935118 - RNA, 19 nt, Homo sapiens
  misc_RNA (1)...(19): siRNA sense strand
ccgaagcucagaauugauu

SEQ ID NO: 935119 - RNA, 19 nt, Homo sapiens
  misc_RNA (1)...(19): siRNA sense strand
ucaaacaccucagggacau

SEQ ID NO: 935120 - RNA, 19 nt, Homo sapiens
  misc_RNA (1)...(19): siRNA sense strand
gaccacagacgagguuuau

SEQ ID NO: 935121 - RNA, 19 nt, Homo sapiens
  misc_RNA (1)...(19): siRNA sense strand
agaccgaagcucagaauug

SEQ ID NO: 935122 - RNA, 19 nt, Homo sapiens
  misc_RNA (1)...(19): siRNA sense strand
gagcagcuggccaucaaug

SEQ ID NO: 935123 - RNA, 19 nt, Homo sapiens
  misc_RNA (1)...(19): siRNA sense strand
cagcauaugaggccaugaa

SEQ ID NO: 935124 - RNA, 19 nt, Homo sapiens
  misc_RNA (1)...(19): siRNA sense strand
ucaugaagcagggcaagua

SEQ ID NO: 935125 - RNA, 19 nt, Homo sapiens
  misc_RNA (1)...(19): siRNA sense strand
gaaacaguacaacaaagag

SEQ ID NO: 935126 - RNA, 19 nt, Homo sapiens
  misc_RNA (1)...(19): siRNA sense strand
ggagcucgccaaccucaug

SEQ ID NO: 935127 - RNA, 19 nt, Homo sapiens
  misc_RNA (1)...(19): siRNA sense strand
aauguggccugucugauca

SEQ ID NO: 935128 - RNA, 19 nt, Homo sapiens
  misc_RNA (1)...(19): siRNA sense strand
gcauaugaggccaugaaga

SEQ ID NO: 935129 - RNA, 19 nt, Homo sapiens
  misc_RNA (1)...(19): siRNA sense strand
gcaacauaaaggcagcaua

SEQ ID NO: 935130 - RNA, 19 nt, Homo sapiens
  misc_RNA (1)...(19): siRNA sense strand
cagggcaaguacagacauu

SEQ ID NO: 935131 - RNA, 19 nt, Homo sapiens
  misc_RNA (1)...(19): siRNA sense strand
ggacaaggagaugggaaug

SEQ ID NO: 935132 - RNA, 19 nt, Homo sapiens
  misc_RNA (1)...(19): siRNA sense strand
gcaagaggacaaggagaug

SEQ ID NO: 935133 - RNA, 19 nt, Homo sapiens
  misc_RNA (1)...(19): siRNA sense strand
ccuucaagcucgucaguag

SEQ ID NO: 935134 - RNA, 19 nt, Homo sapiens
  misc_RNA (1)...(19): siRNA sense strand
gugaggaggacuucagcua

SEQ ID NO: 935135 - RNA, 19 nt, Homo sapiens
  misc_RNA (1)...(19): siRNA sense strand
caccagcgccacaucacua

SEQ ID NO: 935136 - RNA, 19 nt, Homo sapiens
  misc_RNA (1)...(19): siRNA sense strand
gagagcaucgacaagauag

SEQ ID NO: 935137 - RNA, 19 nt, Homo sapiens
  misc_RNA (1)...(19): siRNA sense strand
gagcggguguacaucaaac

SEQ ID NO: 935138 - RNA, 19 nt, Homo sapiens
  misc_RNA (1)...(19): siRNA sense strand
cagaagaaacuugccaugu

SEQ ID NO: 935139 - RNA, 19 nt, Homo sapiens
  misc_RNA (1)...(19): siRNA sense strand
gaugggaauggaaauuuca

SEQ ID NO: 935140 - RNA, 19 nt, Homo sapiens
  misc_RNA (1)...(19): siRNA sense strand
aaaggaggcgggugcaaga

SEQ ID NO: 935141 - RNA, 19 nt, Homo sapiens
  misc_RNA (1)...(19): siRNA sense strand
gggcaaguacagacauuuc

SEQ ID NO: 935142 - RNA, 19 nt, Homo sapiens
  misc_RNA (1)...(19): siRNA sense strand
ucgccaaccucaugaagca

SEQ ID NO: 935143 - RNA, 19 nt, Homo sapiens
  misc_RNA (1)...(19): siRNA sense strand
uugcgcagcuagccacuau

SEQ ID NO: 935144 - RNA, 19 nt, Homo sapiens
  misc_RNA (1)...(19): siRNA sense strand
agaugggaauggaaauuuc

SEQ ID NO: 935145 - RNA, 19 nt, Homo sapiens
  misc_RNA (1)...(19): siRNA sense strand
caaguauaccacacaggaa

SEQ ID NO: 935146 - RNA, 19 nt, Homo sapiens
  misc_RNA (1)...(19): siRNA sense strand
gagagcauccaacguuucu

SEQ ID NO: 935147 - RNA, 19 nt, Homo sapiens
  misc_RNA (1)...(19): siRNA sense strand
ccgcgagcuucgucagauu

SEQ ID NO: 935148 - RNA, 19 nt, Homo sapiens
  misc_RNA (1)...(19): siRNA sense strand
ggaggaacuggacaaucuu

SEQ ID NO: 935149 - RNA, 19 nt, Homo sapiens
  misc_RNA (1)...(19): siRNA sense strand
gauuacagcaacauaaagg

SEQ ID NO: 935150 - RNA, 19 nt, Homo sapiens
  misc_RNA (1)...(19): siRNA sense strand
agagggcuuugccaucuau

SEQ ID NO: 935151 - RNA, 19 nt, Homo sapiens
  misc_RNA (1)...(19): siRNA sense strand
caagcacacaggaauguuc

SEQ ID NO: 935152 - RNA, 19 nt, Homo sapiens
  misc_RNA (1)...(19): siRNA sense strand
ugauugacaucgccaucga

SEQ ID NO: 935153 - RNA, 19 nt, Homo sapiens
  misc_RNA (1)...(19): siRNA sense strand
uggcggaacccaagaggaa

SEQ ID NO: 935154 - RNA, 19 nt, Homo sapiens
  misc_RNA (1)...(19): siRNA sense strand
ugaggaggacuucagcuau

SEQ ID NO: 935155 - RNA, 19 nt, Homo sapiens
  misc_RNA (1)...(19): siRNA sense strand
gcaagcacacaggaauguu

SEQ ID NO: 935156 - RNA, 19 nt, Homo sapiens
  misc_RNA (1)...(19): siRNA sense strand
ggaacuggacaaucuucug

SEQ ID NO: 935157 - RNA, 19 nt, Homo sapiens
  misc_RNA (1)...(19): siRNA sense strand
cacagacgagguuuauuug

SEQ ID NO: 935158 - RNA, 19 nt, Homo sapiens
  misc_RNA (1)...(19): siRNA sense strand
uggagagcaucgacaagau

SEQ ID NO: 935159 - RNA, 19 nt, Homo sapiens
  misc_RNA (1)...(19): siRNA sense strand
aagagggcuuugccaucua

SEQ ID NO: 935160 - RNA, 19 nt, Homo sapiens
  misc_RNA (1)...(19): siRNA sense strand
ugagcccucugccuuagug

SEQ ID NO: 935161 - RNA, 19 nt, Homo sapiens
  misc_RNA (1)...(19): siRNA sense strand
gaggaaaggagaucacuaa

SEQ ID NO: 935162 - RNA, 19 nt, Homo sapiens
  misc_RNA (1)...(19): siRNA sense strand
cuucauagacugugcauua

SEQ ID NO: 935163 - RNA, 19 nt, Homo sapiens
  misc_RNA (1)...(19): siRNA sense strand
gcaggaagaaccuuucaaa

SEQ ID NO: 935164 - RNA, 19 nt, Homo sapiens
  misc_RNA (1)...(19): siRNA sense strand
ggaagaaagccacaugguu

SEQ ID NO: 935165 - RNA, 19 nt, Homo sapiens
  misc_RNA (1)...(19): siRNA sense strand
ucagcagccuucugguuua

SEQ ID NO: 935166 - RNA, 19 nt, Homo sapiens
  misc_RNA (1)...(19): siRNA sense strand
gaaggaagcaaggaagaaa

SEQ ID NO: 935167 - RNA, 19 nt, Homo sapiens
  misc_RNA (1)...(19): siRNA sense strand
ccacaugguugucaaagag

SEQ ID NO: 935168 - RNA, 19 nt, Homo sapiens
  misc_RNA (1)...(19): siRNA sense strand
aauaaagcaugcaggaaga

SEQ ID NO: 935169 - RNA, 19 nt, Homo sapiens
  misc_RNA (1)...(19): siRNA sense strand
cauagacugugcauuauac

SEQ ID NO: 935170 - RNA, 19 nt, Homo sapiens
  misc_RNA (1)...(19): siRNA sense strand
gcagccuucugguuuauca

SEQ ID NO: 935171 - RNA, 19 nt, Homo sapiens
  misc_RNA (1)...(19): siRNA sense strand
uacaugcucucaaugaaga

SEQ ID NO: 935172 - RNA, 19 nt, Homo sapiens
  misc_RNA (1)...(19): siRNA sense strand
gauucuacaugcucucaau

SEQ ID NO: 935173 - RNA, 19 nt, Homo sapiens
  misc_RNA (1)...(19): siRNA sense strand
ggaaagcaggagauggaaa

SEQ ID NO: 935174 - RNA, 19 nt, Homo sapiens
  misc_RNA (1)...(19): siRNA sense strand
gaaagcaggagauggaaac

SEQ ID NO: 935175 - RNA, 19 nt, Homo sapiens
  misc_RNA (1)...(19): siRNA sense strand
gacagugguuagagugaga

SEQ ID NO: 935176 - RNA, 19 nt, Homo sapiens
  misc_RNA (1)...(19): siRNA sense strand
cauuauacaugccaucucu

SEQ ID NO: 935177 - RNA, 19 nt, Homo sapiens
  misc_RNA (1)...(19): siRNA sense strand
ucauagacugugcauuaua

SEQ ID NO: 935178 - RNA, 19 nt, Homo sapiens
  misc_RNA (1)...(19): siRNA sense strand
gucagcagccuucugguuu

SEQ ID NO: 935179 - RNA, 19 nt, Homo sapiens
  misc_RNA (1)...(19): siRNA sense strand
gccacaugguugucaaaga

SEQ ID NO: 935180 - RNA, 19 nt, Homo sapiens
  misc_RNA (1)...(19): siRNA sense strand
gaaagccacaugguuguca

SEQ ID NO: 935181 - RNA, 19 nt, Homo sapiens
  misc_RNA (1)...(19): siRNA sense strand
caaggaagaaagccacaug

SEQ ID NO: 935182 - RNA, 19 nt, Homo sapiens
  misc_RNA (1)...(19): siRNA sense strand
cagccacacuuacaaaggu

SEQ ID NO: 935183 - RNA, 19 nt, Homo sapiens
  misc_RNA (1)...(19): siRNA sense strand
ggucagcagccuucugguu

SEQ ID NO: 935184 - RNA, 19 nt, Homo sapiens
  misc_RNA (1)...(19): siRNA sense strand
agaagacagugguuagagu

SEQ ID NO: 935185 - RNA, 19 nt, Homo sapiens
  misc_RNA (1)...(19): siRNA sense strand
ucuacaugcucucaaugaa

SEQ ID NO: 935186 - RNA, 19 nt, Homo sapiens
  misc_RNA (1)...(19): siRNA sense strand
cagcagccuucugguuuau

SEQ ID NO: 935187 - RNA, 19 nt, Homo sapiens
  misc_RNA (1)...(19): siRNA sense strand
gugcaaagcgucagaagac

SEQ ID NO: 935188 - RNA, 19 nt, Homo sapiens
  misc_RNA (1)...(19): siRNA sense strand
cgucagaagacagugguua

SEQ ID NO: 935189 - RNA, 19 nt, Homo sapiens
  misc_RNA (1)...(19): siRNA sense strand
ucugcgaccugcaaagaug

SEQ ID NO: 935190 - RNA, 19 nt, Homo sapiens
  misc_RNA (1)...(19): siRNA sense strand
gcaugcaggaagaaccuuu

SEQ ID NO: 935191 - RNA, 19 nt, Homo sapiens
  misc_RNA (1)...(19): siRNA sense strand
uaucagccacacuuacaaa

SEQ ID NO: 935192 - RNA, 19 nt, Homo sapiens
  misc_RNA (1)...(19): siRNA sense strand
agacugugcauuauacaug

SEQ ID NO: 935193 - RNA, 19 nt, Homo sapiens
  misc_RNA (1)...(19): siRNA sense strand
gagaagaggaaaggagauc

SEQ ID NO: 935194 - RNA, 19 nt, Homo sapiens
  misc_RNA (1)...(19): siRNA sense strand
gcaaagaugaaaagggaaa

SEQ ID NO: 935195 - RNA, 19 nt, Homo sapiens
  misc_RNA (1)...(19): siRNA sense strand
caaagcgucagaagacagu

SEQ ID NO: 935196 - RNA, 19 nt, Homo sapiens
  misc_RNA (1)...(19): siRNA sense strand
ucaaagagaagaggaaagg

SEQ ID NO: 935197 - RNA, 19 nt, Homo sapiens
  misc_RNA (1)...(19): siRNA sense strand
ugaaggaagcaaggaagaa

SEQ ID NO: 935198 - RNA, 19 nt, Homo sapiens
  misc_RNA (1)...(19): siRNA sense strand
acaaaggucaaaugugcaa

SEQ ID NO: 935199 - RNA, 19 nt, Homo sapiens
  misc_RNA (1)...(19): siRNA sense strand
caaccagagaccugaagga

SEQ ID NO: 935200 - RNA, 19 nt, Homo sapiens
  misc_RNA (1)...(19): siRNA sense strand
gguuuaucagccacacuua

SEQ ID NO: 935201 - RNA, 19 nt, Homo sapiens
  misc_RNA (1)...(19): siRNA sense strand
aaagccacaugguugucaa

SEQ ID NO: 935202 - RNA, 19 nt, Homo sapiens
  misc_RNA (1)...(19): siRNA sense strand
ugcucucaaugaagaauaa

SEQ ID NO: 935203 - RNA, 19 nt, Homo sapiens
  misc_RNA (1)...(19): siRNA sense strand
ucagaagacagugguuaga

SEQ ID NO: 935204 - RNA, 19 nt, Homo sapiens
  misc_RNA (1)...(19): siRNA sense strand
acaugguugucaaagagaa

SEQ ID NO: 935205 - RNA, 19 nt, Homo sapiens
  misc_RNA (1)...(19): siRNA sense strand
gaagaggaaaggagaucac

SEQ ID NO: 935206 - RNA, 19 nt, Homo sapiens
  misc_RNA (1)...(19): siRNA sense strand
gaacuaagguugccuaaag

SEQ ID NO: 935207 - RNA, 19 nt, Homo sapiens
  misc_RNA (1)...(19): siRNA sense strand
gaaggaagcugcucacacu

SEQ ID NO: 935208 - RNA, 19 nt, Homo sapiens
  misc_RNA (1)...(19): siRNA sense strand
caaacagggucgucuuaaa

SEQ ID NO: 935209 - RNA, 19 nt, Homo sapiens
  misc_RNA (1)...(19): siRNA sense strand
gcaaacagggucgucuuaa

SEQ ID NO: 935210 - RNA, 19 nt, Homo sapiens
  misc_RNA (1)...(19): siRNA sense strand
cagagaauccucaccaguu

SEQ ID NO: 935211 - RNA, 19 nt, Homo sapiens
  misc_RNA (1)...(19): siRNA sense strand
gcagauaacgaacuaaggu

SEQ ID NO: 935212 - RNA, 19 nt, Homo sapiens
  misc_RNA (1)...(19): siRNA sense strand
gguugcagauaacgaacua

SEQ ID NO: 935213 - RNA, 19 nt, Homo sapiens
  misc_RNA (1)...(19): siRNA sense strand
ggcaaacagggucgucuua

SEQ ID NO: 935214 - RNA, 19 nt, Homo sapiens
  misc_RNA (1)...(19): siRNA sense strand
agagaauccucaccaguuc

SEQ ID NO: 935215 - RNA, 19 nt, Homo sapiens
  misc_RNA (1)...(19): siRNA sense strand
cagcacuccuuuccugguu

SEQ ID NO: 935216 - RNA, 19 nt, Homo sapiens
  misc_RNA (1)...(19): siRNA sense strand
aaacagggucgucuuaaaa

SEQ ID NO: 935217 - RNA, 19 nt, Homo sapiens
  misc_RNA (1)...(19): siRNA sense strand
ccucaccaguucucaccaa

SEQ ID NO: 935218 - RNA, 19 nt, Homo sapiens
  misc_RNA (1)...(19): siRNA sense strand
gcucugccaggacagguuu

SEQ ID NO: 935219 - RNA, 19 nt, Homo sapiens
  misc_RNA (1)...(19): siRNA sense strand
cagggucgucuuaaaauua

SEQ ID NO: 935220 - RNA, 19 nt, Homo sapiens
  misc_RNA (1)...(19): siRNA sense strand
caaccagacaccucaaacu

SEQ ID NO: 935221 - RNA, 19 nt, Homo sapiens
  misc_RNA (1)...(19): siRNA sense strand
cagauaacgaacuaagguu

SEQ ID NO: 935222 - RNA, 19 nt, Homo sapiens
  misc_RNA (1)...(19): siRNA sense strand
caaagaaagugauggacua

SEQ ID NO: 935223 - RNA, 19 nt, Homo sapiens
  misc_RNA (1)...(19): siRNA sense strand
gaaacacuuccacuacuua

SEQ ID NO: 935224 - RNA, 19 nt, Homo sapiens
  misc_RNA (1)...(19): siRNA sense strand
ggaaccagcgacucaguua

SEQ ID NO: 935225 - RNA, 19 nt, Homo sapiens
  misc_RNA (1)...(19): siRNA sense strand
caagaaaacuuuacaagga

SEQ ID NO: 935226 - RNA, 19 nt, Homo sapiens
  misc_RNA (1)...(19): siRNA sense strand
uaaaucugcuacucaggua

SEQ ID NO: 935227 - RNA, 19 nt, Homo sapiens
  misc_RNA (1)...(19): siRNA sense strand
agaaagugauggacuagaa

SEQ ID NO: 935228 - RNA, 19 nt, Homo sapiens
  misc_RNA (1)...(19): siRNA sense strand
aaagguaccugcaaauuac

SEQ ID NO: 935229 - RNA, 19 nt, Homo sapiens
  misc_RNA (1)...(19): siRNA sense strand
cuaaugggauuuucacuua

SEQ ID NO: 935230 - RNA, 19 nt, Homo sapiens
  misc_RNA (1)...(19): siRNA sense strand
gaagacacaaaucaagaaa

SEQ ID NO: 935231 - RNA, 19 nt, Homo sapiens
  misc_RNA (1)...(19): siRNA sense strand
gcgacucaguuauuucaaa

SEQ ID NO: 935232 - RNA, 19 nt, Homo sapiens
  misc_RNA (1)...(19): siRNA sense strand
gaaagugauggacuagaaa

SEQ ID NO: 935233 - RNA, 19 nt, Homo sapiens
  misc_RNA (1)...(19): siRNA sense strand
gacuagaaaugacagaugu

SEQ ID NO: 935234 - RNA, 19 nt, Homo sapiens
  misc_RNA (1)...(19): siRNA sense strand
aaugacagauguggaauga

SEQ ID NO: 935235 - RNA, 19 nt, Homo sapiens
  misc_RNA (1)...(19): siRNA sense strand
agaaacacuuccacuacuu

SEQ ID NO: 935236 - RNA, 19 nt, Homo sapiens
  misc_RNA (1)...(19): siRNA sense strand
ggacuagaaaugacagaug

SEQ ID NO: 935237 - RNA, 19 nt, Homo sapiens
  misc_RNA (1)...(19): siRNA sense strand
cuacucagguaucugcuau

SEQ ID NO: 935238 - RNA, 19 nt, Homo sapiens
  misc_RNA (1)...(19): siRNA sense strand
ggaaagccuuggguucagu

SEQ ID NO: 935239 - RNA, 19 nt, Homo sapiens
  misc_RNA (1)...(19): siRNA sense strand
agugguauaugucaaagaa

SEQ ID NO: 935240 - RNA, 19 nt, Homo sapiens
  misc_RNA (1)...(19): siRNA sense strand
agaaaugacagauguggaa

SEQ ID NO: 935241 - RNA, 19 nt, Homo sapiens
  misc_RNA (1)...(19): siRNA sense strand
aaaagguaccugcaaauua

SEQ ID NO: 935242 - RNA, 19 nt, Homo sapiens
  misc_RNA (1)...(19): siRNA sense strand
uagaagacacaaaucaaga

SEQ ID NO: 935243 - RNA, 19 nt, Homo sapiens
  misc_RNA (1)...(19): siRNA sense strand
ucacauuuguucagcuauc

SEQ ID NO: 935244 - RNA, 19 nt, Homo sapiens
  misc_RNA (1)...(19): siRNA sense strand
gaaccagcgacucaguuau

SEQ ID NO: 935245 - RNA, 19 nt, Homo sapiens
  misc_RNA (1)...(19): siRNA sense strand
aaacacuuccacuacuuaa

SEQ ID NO: 935246 - RNA, 19 nt, Homo sapiens
  misc_RNA (1)...(19): siRNA sense strand
ucacuuaguaaaucugcua

SEQ ID NO: 935247 - RNA, 19 nt, Homo sapiens
  misc_RNA (1)...(19): siRNA sense strand
gaaaugacagauguggaau

SEQ ID NO: 935248 - RNA, 19 nt, Homo sapiens
  misc_RNA (1)...(19): siRNA sense strand
uuaauacgagggacugaaa

SEQ ID NO: 935249 - RNA, 19 nt, Homo sapiens
  misc_RNA (1)...(19): siRNA sense strand
uaucugcuauacauaugga

SEQ ID NO: 935250 - RNA, 19 nt, Homo sapiens
  misc_RNA (1)...(19): siRNA sense strand
aagaaacacuuccacuacu

SEQ ID NO: 935251 - RNA, 19 nt, Homo sapiens
  misc_RNA (1)...(19): siRNA sense strand
agccuuggguucaguggua

SEQ ID NO: 935252 - RNA, 19 nt, Homo sapiens
  misc_RNA (1)...(19): siRNA sense strand
agaagacacaaaucaagaa

SEQ ID NO: 935253 - RNA, 19 nt, Homo sapiens
  misc_RNA (1)...(19): siRNA sense strand
cgacucaguuauuucaaaa

SEQ ID NO: 935254 - RNA, 19 nt, Homo sapiens
  misc_RNA (1)...(19): siRNA sense strand
uuucacauuuguucagcua

SEQ ID NO: 935255 - RNA, 19 nt, Homo sapiens
  misc_RNA (1)...(19): siRNA sense strand
ggaaguuaaguaaucaagu

SEQ ID NO: 935256 - RNA, 19 nt, Homo sapiens
  misc_RNA (1)...(19): siRNA sense strand
cagcgacucaguuauuuca

SEQ ID NO: 935257 - RNA, 19 nt, Homo sapiens
  misc_RNA (1)...(19): siRNA sense strand
ugguauaugucaaagaaag

SEQ ID NO: 935258 - RNA, 19 nt, Homo sapiens
  misc_RNA (1)...(19): siRNA sense strand
guucagugguauaugucaa

SEQ ID NO: 935259 - RNA, 19 nt, Homo sapiens
  misc_RNA (1)...(19): siRNA sense strand
aaccagcgacucaguuauu

SEQ ID NO: 935260 - RNA, 19 nt, Homo sapiens
  misc_RNA (1)...(19): siRNA sense strand
uggguucagugguauaugu

SEQ ID NO: 935261 - RNA, 19 nt, Homo sapiens
  misc_RNA (1)...(19): siRNA sense strand
gaagggacuggcacaggau

SEQ ID NO: 935262 - RNA, 19 nt, Homo sapiens
  misc_RNA (1)...(19): siRNA sense strand
gggaaagccuuggguucag

SEQ ID NO: 935263 - RNA, 19 nt, Homo sapiens
  misc_RNA (1)...(19): siRNA sense strand
ggcacaggaucucuuucug

SEQ ID NO: 935264 - RNA, 19 nt, Homo sapiens
  misc_RNA (1)...(19): siRNA sense strand
accagcgacucaguuauuu

SEQ ID NO: 935265 - RNA, 19 nt, Homo sapiens
  misc_RNA (1)...(19): siRNA sense strand
uuguucagcuauccuaaug

SEQ ID NO: 935266 - RNA, 19 nt, Homo sapiens
  misc_RNA (1)...(19): siRNA sense strand
gguaccugcaaauuacuuu

SEQ ID NO: 935267 - RNA, 19 nt, Homo sapiens
  misc_RNA (1)...(19): siRNA sense strand
gugauggacuagaaaugac

SEQ ID NO: 935268 - RNA, 19 nt, Homo sapiens
  misc_RNA (1)...(19): siRNA sense strand
ggaugaucacuuaauacga

SEQ ID NO: 935269 - RNA, 19 nt, Homo sapiens
  misc_RNA (1)...(19): siRNA sense strand
acauauggauucaaaagug

SEQ ID NO: 935270 - RNA, 19 nt, Homo sapiens
  misc_RNA (1)...(19): siRNA sense strand
agugauggacuagaaauga

SEQ ID NO: 935271 - RNA, 19 nt, Homo sapiens
  misc_RNA (1)...(19): siRNA sense strand
aaagugauggacuagaaau

SEQ ID NO: 935272 - RNA, 19 nt, Homo sapiens
  misc_RNA (1)...(19): siRNA sense strand
uuagaagacacaaaucaag

SEQ ID NO: 935273 - RNA, 19 nt, Homo sapiens
  misc_RNA (1)...(19): siRNA sense strand
ugucaaagaaagugaugga

SEQ ID NO: 935274 - RNA, 19 nt, Homo sapiens
  misc_RNA (1)...(19): siRNA sense strand
gcuacucagguaucugcua

SEQ ID NO: 935275 - RNA, 19 nt, Homo sapiens
  misc_RNA (1)...(19): siRNA sense strand
gaggacaaguucagaucuu

SEQ ID NO: 935276 - RNA, 19 nt, Homo sapiens
  misc_RNA (1)...(19): siRNA sense strand
cagugaagcuggagaugga

SEQ ID NO: 935277 - RNA, 19 nt, Homo sapiens
  misc_RNA (1)...(19): siRNA sense strand
gcagaucugucaggagcaa

SEQ ID NO: 935278 - RNA, 19 nt, Homo sapiens
  misc_RNA (1)...(19): siRNA sense strand
caggagggcuucacugucu

SEQ ID NO: 935279 - RNA, 19 nt, Homo sapiens
  misc_RNA (1)...(19): siRNA sense strand
gacaugaacagcuacauca

SEQ ID NO: 935280 - RNA, 19 nt, Homo sapiens
  misc_RNA (1)...(19): siRNA sense strand
gcaagaagccacgaugaag

SEQ ID NO: 935281 - RNA, 19 nt, Homo sapiens
  misc_RNA (1)...(19): siRNA sense strand
ggacaaguucagaucuuug

SEQ ID NO: 935282 - RNA, 19 nt, Homo sapiens
  misc_RNA (1)...(19): siRNA sense strand
gugaagagggucauugaug

SEQ ID NO: 935283 - RNA, 19 nt, Homo sapiens
  misc_RNA (1)...(19): siRNA sense strand
ccucggaccucuucucucu

SEQ ID NO: 935284 - RNA, 19 nt, Homo sapiens
  misc_RNA (1)...(19): siRNA sense strand
guucagaucuuuggaaucc

SEQ ID NO: 935285 - RNA, 19 nt, Homo sapiens
  misc_RNA (1)...(19): siRNA sense strand
gccaucagccucaucauca

SEQ ID NO: 935286 - RNA, 19 nt, Homo sapiens
  misc_RNA (1)...(19): siRNA sense strand
gcuacaucagucaguauua

SEQ ID NO: 935287 - RNA, 19 nt, Homo sapiens
  misc_RNA (1)...(19): siRNA sense strand
ggguaagucuguucaacca

SEQ ID NO: 935288 - RNA, 19 nt, Homo sapiens
  misc_RNA (1)...(19): siRNA sense strand
gagcuggaacacaggguaa

SEQ ID NO: 935289 - RNA, 19 nt, Homo sapiens
  misc_RNA (1)...(19): siRNA sense strand
gggcuucacugucuuucag

SEQ ID NO: 935290 - RNA, 19 nt, Homo sapiens
  misc_RNA (1)...(19): siRNA sense strand
uggagaggcugacgcagau

SEQ ID NO: 935291 - RNA, 19 nt, Homo sapiens
  misc_RNA (1)...(19): siRNA sense strand
caaguucagaucuuuggaa

SEQ ID NO: 935292 - RNA, 19 nt, Homo sapiens
  misc_RNA (1)...(19): siRNA sense strand
ggagggcuucacugucuuu

SEQ ID NO: 935293 - RNA, 19 nt, Homo sapiens
  misc_RNA (1)...(19): siRNA sense strand
acagcuacaucagucagua

SEQ ID NO: 935294 - RNA, 19 nt, Homo sapiens
  misc_RNA (1)...(19): siRNA sense strand
ggagcaaggguuugagauc

SEQ ID NO: 935295 - RNA, 19 nt, Homo sapiens
  misc_RNA (1)...(19): siRNA sense strand
gaugaaggacgacaugaac

SEQ ID NO: 935296 - RNA, 19 nt, Homo sapiens
  misc_RNA (1)...(19): siRNA sense strand
cuacaucagucaguauuac

SEQ ID NO: 935297 - RNA, 19 nt, Homo sapiens
  misc_RNA (1)...(19): siRNA sense strand
gcgcagccgcuucaaagug

SEQ ID NO: 935298 - RNA, 19 nt, Homo sapiens
  misc_RNA (1)...(19): siRNA sense strand
aggccaaggucauccaaga

SEQ ID NO: 935299 - RNA, 19 nt, Homo sapiens
  misc_RNA (1)...(19): siRNA sense strand
ccucuucucucuggacaug

SEQ ID NO: 935300 - RNA, 19 nt, Homo sapiens
  misc_RNA (1)...(19): siRNA sense strand
acaaugggcccagcaguga

SEQ ID NO: 935301 - RNA, 19 nt, Homo sapiens
  misc_RNA (1)...(19): siRNA sense strand
gggugaagagggucauuga

SEQ ID NO: 935302 - RNA, 19 nt, Homo sapiens
  misc_RNA (1)...(19): siRNA sense strand
aggacaaguucagaucuuu

SEQ ID NO: 935303 - RNA, 19 nt, Homo sapiens
  misc_RNA (1)...(19): siRNA sense strand
cgcagccgcuucaaagugu

SEQ ID NO: 935304 - RNA, 19 nt, Homo sapiens
  misc_RNA (1)...(19): siRNA sense strand
aggacgacaugaacagcua

SEQ ID NO: 935305 - RNA, 19 nt, Homo sapiens
  misc_RNA (1)...(19): siRNA sense strand
cgaugaaggacgacaugaa

SEQ ID NO: 935306 - RNA, 19 nt, Homo sapiens
  misc_RNA (1)...(19): siRNA sense strand
cgacaugaacagcuacauc

SEQ ID NO: 935307 - RNA, 19 nt, Homo sapiens
  misc_RNA (1)...(19): siRNA sense strand
agaugguuauccagcagua

SEQ ID NO: 935308 - RNA, 19 nt, Homo sapiens
  misc_RNA (1)...(19): siRNA sense strand
cugcagcccucgcaagaag

SEQ ID NO: 935309 - RNA, 19 nt, Homo sapiens
  misc_RNA (1)...(19): siRNA sense strand
gaaccaggagggcuucacu

SEQ ID NO: 935310 - RNA, 19 nt, Homo sapiens
  misc_RNA (1)...(19): siRNA sense strand
gaaggccaaggucauccaa

SEQ ID NO: 935311 - RNA, 19 nt, Homo sapiens
  misc_RNA (1)...(19): siRNA sense strand
gcagccgcuucaaaguguu

SEQ ID NO: 935312 - RNA, 19 nt, Homo sapiens
  misc_RNA (1)...(19): siRNA sense strand
ggaggacaaguucagaucu

SEQ ID NO: 935313 - RNA, 19 nt, Homo sapiens
  misc_RNA (1)...(19): siRNA sense strand
cgcaagaagccacgaugaa

SEQ ID NO: 935314 - RNA, 19 nt, Homo sapiens
  misc_RNA (1)...(19): siRNA sense strand
aagaagccacgaugaagga

SEQ ID NO: 935315 - RNA, 19 nt, Homo sapiens
  misc_RNA (1)...(19): siRNA sense strand
aaguucagaucuuuggaau

SEQ ID NO: 935316 - RNA, 19 nt, Homo sapiens
  misc_RNA (1)...(19): siRNA sense strand
gacaaguucagaucuuugg

SEQ ID NO: 935317 - RNA, 19 nt, Homo sapiens
  misc_RNA (1)...(19): siRNA sense strand
gacauucaccagcccaaca

SEQ ID NO: 935318 - RNA, 19 nt, Homo sapiens
  misc_RNA (1)...(19): siRNA sense strand
agagccagcuguguguaug

SEQ ID NO: 935319 - RNA, 19 nt, Homo sapiens
  misc_RNA (1)...(19): siRNA sense strand
ccaucagccucaucaucau

SEQ ID NO: 935320 - RNA, 19 nt, Homo sapiens
  misc_RNA (1)...(19): siRNA sense strand
ucaggccugucauccacuu

SEQ ID NO: 935321 - RNA, 19 nt, Homo sapiens
  misc_RNA (1)...(19): siRNA sense strand
ggagauggagaugguuauc

SEQ ID NO: 935322 - RNA, 19 nt, Homo sapiens
  misc_RNA (1)...(19): siRNA sense strand
ggacaugccccucaaacuc

SEQ ID NO: 935323 - RNA, 19 nt, Homo sapiens
  misc_RNA (1)...(19): siRNA sense strand
caugaacagcuacaucagu

SEQ ID NO: 935324 - RNA, 19 nt, Homo sapiens
  misc_RNA (1)...(19): siRNA sense strand
uuucagaucaggccuguca

SEQ ID NO: 935325 - RNA, 19 nt, Homo sapiens
  misc_RNA (1)...(19): siRNA sense strand
cgagaaggccaaggucauc

SEQ ID NO: 935326 - RNA, 19 nt, Homo sapiens
  misc_RNA (1)...(19): siRNA sense strand
caucagucaguauuacaau

SEQ ID NO: 935327 - RNA, 19 nt, Homo sapiens
  misc_RNA (1)...(19): siRNA sense strand
cacccgaccuccaucuuug

SEQ ID NO: 935328 - RNA, 19 nt, Homo sapiens
  misc_RNA (1)...(19): siRNA sense strand
ggaguuuucuuauccaguu

SEQ ID NO: 935329 - RNA, 19 nt, Homo sapiens
  misc_RNA (1)...(19): siRNA sense strand
aaugcgagcucaggccuuu

SEQ ID NO: 935330 - RNA, 19 nt, Homo sapiens
  misc_RNA (1)...(19): siRNA sense strand
ccacccgaccuccaucuuu

SEQ ID NO: 935331 - RNA, 19 nt, Homo sapiens
  misc_RNA (1)...(19): siRNA sense strand
ccgcaagucuggaguuuuc

SEQ ID NO: 935332 - RNA, 19 nt, Homo sapiens
  misc_RNA (1)...(19): siRNA sense strand
cgccuucgcuguacucacu

SEQ ID NO: 935333 - RNA, 19 nt, Homo sapiens
  misc_RNA (1)...(19): siRNA sense strand
gaugacagcuccagaaauu

SEQ ID NO: 935334 - RNA, 19 nt, Homo sapiens
  misc_RNA (1)...(19): siRNA sense strand
gaaagaagcccaagauauc

SEQ ID NO: 935335 - RNA, 19 nt, Homo sapiens
  misc_RNA (1)...(19): siRNA sense strand
caaggagaaucauuucaaa

SEQ ID NO: 935336 - RNA, 19 nt, Homo sapiens
  misc_RNA (1)...(19): siRNA sense strand
gagaauuuguuucgagauu

SEQ ID NO: 935337 - RNA, 19 nt, Homo sapiens
  misc_RNA (1)...(19): siRNA sense strand
caucuuagccugaaggaua

SEQ ID NO: 935338 - RNA, 19 nt, Homo sapiens
  misc_RNA (1)...(19): siRNA sense strand
gguaucaccugccaaagaa

SEQ ID NO: 935339 - RNA, 19 nt, Homo sapiens
  misc_RNA (1)...(19): siRNA sense strand
ugacagcuccagaaauuua

SEQ ID NO: 935340 - RNA, 19 nt, Homo sapiens
  misc_RNA (1)...(19): siRNA sense strand
ugaaggauaucaccaaugu

SEQ ID NO: 935341 - RNA, 19 nt, Homo sapiens
  misc_RNA (1)...(19): siRNA sense strand
uaaagaagcgaaugaaaga

SEQ ID NO: 935342 - RNA, 19 nt, Homo sapiens
  misc_RNA (1)...(19): siRNA sense strand
ucaccaaugucuccuugua

SEQ ID NO: 935343 - RNA, 19 nt, Homo sapiens
  misc_RNA (1)...(19): siRNA sense strand
caaauaaucaccaacacuu

SEQ ID NO: 935344 - RNA, 19 nt, Homo sapiens
  misc_RNA (1)...(19): siRNA sense strand
gaagcuacaccaccugaaa

SEQ ID NO: 935345 - RNA, 19 nt, Homo sapiens
  misc_RNA (1)...(19): siRNA sense strand
guuacuaucucacauguca

SEQ ID NO: 935346 - RNA, 19 nt, Homo sapiens
  misc_RNA (1)...(19): siRNA sense strand
ugaaagaagcccaagauau

SEQ ID NO: 935347 - RNA, 19 nt, Homo sapiens
  misc_RNA (1)...(19): siRNA sense strand
uguaggaaauguaaacuug

SEQ ID NO: 935348 - RNA, 19 nt, Homo sapiens
  misc_RNA (1)...(19): siRNA sense strand
ucagcuauaugcauugaaa

SEQ ID NO: 935349 - RNA, 19 nt, Homo sapiens
  misc_RNA (1)...(19): siRNA sense strand
gcacagccagcgugaacua

SEQ ID NO: 935350 - RNA, 19 nt, Homo sapiens
  misc_RNA (1)...(19): siRNA sense strand
cagccagcgugaacuauaa

SEQ ID NO: 935351 - RNA, 19 nt, Homo sapiens
  misc_RNA (1)...(19): siRNA sense strand
gcugcaccaugccaaauaa

SEQ ID NO: 935352 - RNA, 19 nt, Homo sapiens
  misc_RNA (1)...(19): siRNA sense strand
caugucagcuauaugcauu

SEQ ID NO: 935353 - RNA, 19 nt, Homo sapiens
  misc_RNA (1)...(19): siRNA sense strand
ggacaaggagaaucauuuc

SEQ ID NO: 935354 - RNA, 19 nt, Homo sapiens
  misc_RNA (1)...(19): siRNA sense strand
gcucagaaccaggaaauau

SEQ ID NO: 935355 - RNA, 19 nt, Homo sapiens
  misc_RNA (1)...(19): siRNA sense strand
gacuuucucuuucuccaaa

SEQ ID NO: 935356 - RNA, 19 nt, Homo sapiens
  misc_RNA (1)...(19): siRNA sense strand
gcaccaugccaaauaauca

SEQ ID NO: 935357 - RNA, 19 nt, Homo sapiens
  misc_RNA (1)...(19): siRNA sense strand
caaggaaagaugccugaaa

SEQ ID NO: 935358 - RNA, 19 nt, Homo sapiens
  misc_RNA (1)...(19): siRNA sense strand
cagcagucaccucaucuua

SEQ ID NO: 935359 - RNA, 19 nt, Homo sapiens
  misc_RNA (1)...(19): siRNA sense strand
gcagucaccucaucuuagc

SEQ ID NO: 935360 - RNA, 19 nt, Homo sapiens
  misc_RNA (1)...(19): siRNA sense strand
cuauaugcauugaaaggaa

SEQ ID NO: 935361 - RNA, 19 nt, Homo sapiens
  misc_RNA (1)...(19): siRNA sense strand
aaagagcccuggagguauc

SEQ ID NO: 935362 - RNA, 19 nt, Homo sapiens
  misc_RNA (1)...(19): siRNA sense strand
gugaaggauuuaccgcaaa

SEQ ID NO: 935363 - RNA, 19 nt, Homo sapiens
  misc_RNA (1)...(19): siRNA sense strand
gugaaagaagcccaagaua

SEQ ID NO: 935364 - RNA, 19 nt, Homo sapiens
  misc_RNA (1)...(19): siRNA sense strand
gaaacccacaucugcuuga

SEQ ID NO: 935365 - RNA, 19 nt, Homo sapiens
  misc_RNA (1)...(19): siRNA sense strand
cauaaagaagcgaaugaaa

SEQ ID NO: 935366 - RNA, 19 nt, Homo sapiens
  misc_RNA (1)...(19): siRNA sense strand
gacauaaagaagcgaauga

SEQ ID NO: 935367 - RNA, 19 nt, Homo sapiens
  misc_RNA (1)...(19): siRNA sense strand
uaucucacaugucagcuau

SEQ ID NO: 935368 - RNA, 19 nt, Homo sapiens
  misc_RNA (1)...(19): siRNA sense strand
gaauggaccccaauaguga

SEQ ID NO: 935369 - RNA, 19 nt, Homo sapiens
  misc_RNA (1)...(19): siRNA sense strand
ucucacaugucagcuauau

SEQ ID NO: 935370 - RNA, 19 nt, Homo sapiens
  misc_RNA (1)...(19): siRNA sense strand
agaagcgaaugaaagagaa

SEQ ID NO: 935371 - RNA, 19 nt, Homo sapiens
  misc_RNA (1)...(19): siRNA sense strand
gcauugaaaggaaaacuua

SEQ ID NO: 935372 - RNA, 19 nt, Homo sapiens
  misc_RNA (1)...(19): siRNA sense strand
ccacaucugcuugagguaa

SEQ ID NO: 935373 - RNA, 19 nt, Homo sapiens
  misc_RNA (1)...(19): siRNA sense strand
aaacgcaggucuuuuauag

SEQ ID NO: 935374 - RNA, 19 nt, Homo sapiens
  misc_RNA (1)...(19): siRNA sense strand
caguagaaccugcucagaa

SEQ ID NO: 935375 - RNA, 19 nt, Homo sapiens
  misc_RNA (1)...(19): siRNA sense strand
gaaaggaaaacuuacauca

SEQ ID NO: 935376 - RNA, 19 nt, Homo sapiens
  misc_RNA (1)...(19): siRNA sense strand
gaagcgaaugaaagagaaa

SEQ ID NO: 935377 - RNA, 19 nt, Homo sapiens
  misc_RNA (1)...(19): siRNA sense strand
ggcaaacgcaggucuuuua

SEQ ID NO: 935378 - RNA, 19 nt, Homo sapiens
  misc_RNA (1)...(19): siRNA sense strand
guaggaaauguaaacuuga

SEQ ID NO: 935379 - RNA, 19 nt, Homo sapiens
  misc_RNA (1)...(19): siRNA sense strand
acaaggagaaucauuucaa

SEQ ID NO: 935380 - RNA, 19 nt, Homo sapiens
  misc_RNA (1)...(19): siRNA sense strand
gugaaaaucagaagacuuu

SEQ ID NO: 935381 - RNA, 19 nt, Homo sapiens
  misc_RNA (1)...(19): siRNA sense strand
aaggaaagaugccugaaaa

SEQ ID NO: 935382 - RNA, 19 nt, Homo sapiens
  misc_RNA (1)...(19): siRNA sense strand
gauuugagacguucuaaaa

SEQ ID NO: 935383 - RNA, 19 nt, Homo sapiens
  misc_RNA (1)...(19): siRNA sense strand
uuaccaagacaacaacaaa

SEQ ID NO: 935384 - RNA, 19 nt, Homo sapiens
  misc_RNA (1)...(19): siRNA sense strand
cuacaccaccugaaacuca

SEQ ID NO: 935385 - RNA, 19 nt, Homo sapiens
  misc_RNA (1)...(19): siRNA sense strand
cccaagauaucauccuaca

SEQ ID NO: 935386 - RNA, 19 nt, Homo sapiens
  misc_RNA (1)...(19): siRNA sense strand
ucacaugucagcuauaugc

SEQ ID NO: 935387 - RNA, 19 nt, Homo sapiens
  misc_RNA (1)...(19): siRNA sense strand
ggaaauguaaacuugaaac

SEQ ID NO: 935388 - RNA, 19 nt, Homo sapiens
  misc_RNA (1)...(19): siRNA sense strand
uaccgcaaauuccucuuga

SEQ ID NO: 935389 - RNA, 19 nt, Homo sapiens
  misc_RNA (1)...(19): siRNA sense strand
gugaugacagcuccagaaa

SEQ ID NO: 935390 - RNA, 19 nt, Homo sapiens
  misc_RNA (1)...(19): siRNA sense strand
ucagaaccaggaaauaugu

SEQ ID NO: 935391 - RNA, 19 nt, Homo sapiens
  misc_RNA (1)...(19): siRNA sense strand
ggauuugagacguucuaaa

SEQ ID NO: 935392 - RNA, 19 nt, Homo sapiens
  misc_RNA (1)...(19): siRNA sense strand
cuuguauccuguugugaaa

SEQ ID NO: 935393 - RNA, 19 nt, Homo sapiens
  misc_RNA (1)...(19): siRNA sense strand
aaagaagcccaagauauca

SEQ ID NO: 935394 - RNA, 19 nt, Homo sapiens
  misc_RNA (1)...(19): siRNA sense strand
ccugaaggauaucaccaau

SEQ ID NO: 935395 - RNA, 19 nt, Homo sapiens
  misc_RNA (1)...(19): siRNA sense strand
auaaagaagcgaaugaaag

SEQ ID NO: 935396 - RNA, 19 nt, Homo sapiens
  misc_RNA (1)...(19): siRNA sense strand
ggaauggaccccaauagug

SEQ ID NO: 935397 - RNA, 19 nt, Homo sapiens
  misc_RNA (1)...(19): siRNA sense strand
aguagaaccugcucagaac

SEQ ID NO: 935398 - RNA, 19 nt, Homo sapiens
  misc_RNA (1)...(19): siRNA sense strand
aagaagcgaaugaaagaga

SEQ ID NO: 935399 - RNA, 19 nt, Homo sapiens
  misc_RNA (1)...(19): siRNA sense strand
cagacuguaggaaauguaa

SEQ ID NO: 935400 - RNA, 19 nt, Homo sapiens
  misc_RNA (1)...(19): siRNA sense strand
ugucagcuauaugcauuga

SEQ ID NO: 935401 - RNA, 19 nt, Homo sapiens
  misc_RNA (1)...(19): siRNA sense strand
acagccagcgugaacuaua

SEQ ID NO: 935402 - RNA, 19 nt, Homo sapiens
  misc_RNA (1)...(19): siRNA sense strand
caucacaacaaacaguaga

SEQ ID NO: 935403 - RNA, 19 nt, Homo sapiens
  misc_RNA (1)...(19): siRNA sense strand
caccucaucuuagccugaa

SEQ ID NO: 935404 - RNA, 19 nt, Homo sapiens
  misc_RNA (1)...(19): siRNA sense strand
gcuauaugcauugaaagga

SEQ ID NO: 935405 - RNA, 19 nt, Homo sapiens
  misc_RNA (1)...(19): siRNA sense strand
aaggaaaacuuacaucaca

SEQ ID NO: 935406 - RNA, 19 nt, Homo sapiens
  misc_RNA (1)...(19): siRNA sense strand
gacaaggagaaucauuuca

SEQ ID NO: 935407 - RNA, 19 nt, Homo sapiens
  misc_RNA (1)...(19): siRNA sense strand
aggacaaggagaaucauuu

SEQ ID NO: 935408 - RNA, 19 nt, Homo sapiens
  misc_RNA (1)...(19): siRNA sense strand
ccaaauaaucaccaacacu

SEQ ID NO: 935409 - RNA, 19 nt, Homo sapiens
  misc_RNA (1)...(19): siRNA sense strand
accaaugucuccuuguauc

SEQ ID NO: 935410 - RNA, 19 nt, Homo sapiens
  misc_RNA (1)...(19): siRNA sense strand
acucagcagucaccucauc

SEQ ID NO: 935411 - RNA, 19 nt, Homo sapiens
  misc_RNA (1)...(19): siRNA sense strand
gaaugaaagagaaaaggaa

SEQ ID NO: 935412 - RNA, 19 nt, Homo sapiens
  misc_RNA (1)...(19): siRNA sense strand
uggcagagauuggcaaacg

SEQ ID NO: 935413 - RNA, 19 nt, Homo sapiens
  misc_RNA (1)...(19): siRNA sense strand
gaaauguaaacuugaaacc

SEQ ID NO: 935414 - RNA, 19 nt, Homo sapiens
  misc_RNA (1)...(19): siRNA sense strand
uacaucacaacaaacagua

SEQ ID NO: 935415 - RNA, 19 nt, Homo sapiens
  misc_RNA (1)...(19): siRNA sense strand
agcccaagauaucauccua

SEQ ID NO: 935416 - RNA, 19 nt, Homo sapiens
  misc_RNA (1)...(19): siRNA sense strand
gacagcuccagaaauuuau

SEQ ID NO: 935417 - RNA, 19 nt, Homo sapiens
  misc_RNA (1)...(19): siRNA sense strand
cgagauucccagacuguag

SEQ ID NO: 935418 - RNA, 19 nt, Homo sapiens
  misc_RNA (1)...(19): siRNA sense strand
aaggauaucaccaaugucu

SEQ ID NO: 935419 - RNA, 19 nt, Homo sapiens
  misc_RNA (1)...(19): siRNA sense strand
gcacgguggcugauaguga

SEQ ID NO: 935420 - RNA, 19 nt, Homo sapiens
  misc_RNA (1)...(19): siRNA sense strand
gccuggcccuugucucuaa

SEQ ID NO: 935421 - RNA, 19 nt, Homo sapiens
  misc_RNA (1)...(19): siRNA sense strand
uugcuucccuccucaacua

SEQ ID NO: 935422 - RNA, 19 nt, Homo sapiens
  misc_RNA (1)...(19): siRNA sense strand
gggcuucaccaacuucauu

SEQ ID NO: 935423 - RNA, 19 nt, Homo sapiens
  misc_RNA (1)...(19): siRNA sense strand
cacgguggcugauagugaa

SEQ ID NO: 935424 - RNA, 19 nt, Homo sapiens
  misc_RNA (1)...(19): siRNA sense strand
gcccuccucugcauucuca

SEQ ID NO: 935425 - RNA, 19 nt, Homo sapiens
  misc_RNA (1)...(19): siRNA sense strand
uggcuggccugguuuguuc

SEQ ID NO: 935426 - RNA, 19 nt, Homo sapiens
  misc_RNA (1)...(19): siRNA sense strand
aggcugccaucaccacuuu

SEQ ID NO: 935427 - RNA, 19 nt, Homo sapiens
  misc_RNA (1)...(19): siRNA sense strand
gauccuggcugagcgaaac

SEQ ID NO: 935428 - RNA, 19 nt, Homo sapiens
  misc_RNA (1)...(19): siRNA sense strand
uagugaagcggcagauuga

SEQ ID NO: 935429 - RNA, 19 nt, Homo sapiens
  misc_RNA (1)...(19): siRNA sense strand
ccucugcauucucagcauu

SEQ ID NO: 935430 - RNA, 19 nt, Homo sapiens
  misc_RNA (1)...(19): siRNA sense strand
gauagugaagcggcagauu

SEQ ID NO: 935431 - RNA, 19 nt, Homo sapiens
  misc_RNA (1)...(19): siRNA sense strand
gggagggcacuuccuguuc

SEQ ID NO: 935432 - RNA, 19 nt, Homo sapiens
  misc_RNA (1)...(19): siRNA sense strand
guguugaccugggugucua

SEQ ID NO: 935433 - RNA, 19 nt, Homo sapiens
  misc_RNA (1)...(19): siRNA sense strand
cuucauugcccaugccauu

SEQ ID NO: 935434 - RNA, 19 nt, Homo sapiens
  misc_RNA (1)...(19): siRNA sense strand
auagugaagcggcagauug

SEQ ID NO: 935435 - RNA, 19 nt, Homo sapiens
  misc_RNA (1)...(19): siRNA sense strand
cugcauccucuuccuguuu

SEQ ID NO: 935436 - RNA, 19 nt, Homo sapiens
  misc_RNA (1)...(19): siRNA sense strand
gcucuucuccucccaagcu

SEQ ID NO: 935437 - RNA, 19 nt, Homo sapiens
  misc_RNA (1)...(19): siRNA sense strand
gcacgguggcugauaguga

SEQ ID NO: 935438 - RNA, 19 nt, Homo sapiens
  misc_RNA (1)...(19): siRNA sense strand
gccuggcccuugucucuaa

SEQ ID NO: 935439 - RNA, 19 nt, Homo sapiens
  misc_RNA (1)...(19): siRNA sense strand
uugcuucccuccucaacua

SEQ ID NO: 935440 - RNA, 19 nt, Homo sapiens
  misc_RNA (1)...(19): siRNA sense strand
gggcuucaccaacuucauu

SEQ ID NO: 935441 - RNA, 19 nt, Homo sapiens
  misc_RNA (1)...(19): siRNA sense strand
cacgguggcugauagugaa

SEQ ID NO: 935442 - RNA, 19 nt, Homo sapiens
  misc_RNA (1)...(19): siRNA sense strand
cgucauggcccuccgauuc

SEQ ID NO: 935443 - RNA, 19 nt, Homo sapiens
  misc_RNA (1)...(19): siRNA sense strand
gcccuccucugcauucuca

SEQ ID NO: 935444 - RNA, 19 nt, Homo sapiens
  misc_RNA (1)...(19): siRNA sense strand
uggcuggccugguuuguuc

SEQ ID NO: 935445 - RNA, 19 nt, Homo sapiens
  misc_RNA (1)...(19): siRNA sense strand
aggcugccaucaccacuuu

SEQ ID NO: 935446 - RNA, 19 nt, Homo sapiens
  misc_RNA (1)...(19): siRNA sense strand
gauccuggcugagcgaaac

SEQ ID NO: 935447 - RNA, 19 nt, Homo sapiens
  misc_RNA (1)...(19): siRNA sense strand
uagugaagcggcagauuga

SEQ ID NO: 935448 - RNA, 19 nt, Homo sapiens
  misc_RNA (1)...(19): siRNA sense strand
ccucugcauucucagcauu

SEQ ID NO: 935449 - RNA, 19 nt, Homo sapiens
  misc_RNA (1)...(19): siRNA sense strand
gauagugaagcggcagauu

SEQ ID NO: 935450 - RNA, 19 nt, Homo sapiens
  misc_RNA (1)...(19): siRNA sense strand
guguugaccugggugucua

SEQ ID NO: 935451 - RNA, 19 nt, Homo sapiens
  misc_RNA (1)...(19): siRNA sense strand
gggagggcacuuccuguuc

SEQ ID NO: 935452 - RNA, 19 nt, Homo sapiens
  misc_RNA (1)...(19): siRNA sense strand
cuucauugcccaugccauu

SEQ ID NO: 935453 - RNA, 19 nt, Homo sapiens
  misc_RNA (1)...(19): siRNA sense strand
auagugaagcggcagauug

SEQ ID NO: 935454 - RNA, 19 nt, Homo sapiens
  misc_RNA (1)...(19): siRNA sense strand
cugcauccucuuccuguuu

SEQ ID NO: 935455 - RNA, 19 nt, Homo sapiens
  misc_RNA (1)...(19): siRNA sense strand
gcucuucuccucccaagcu

SEQ ID NO: 935456 - RNA, 19 nt, Homo sapiens
  misc_RNA (1)...(19): siRNA sense strand
agaaggaccugguguuuau

SEQ ID NO: 935457 - RNA, 19 nt, Homo sapiens
  misc_RNA (1)...(19): siRNA sense strand
gugcaagucuucaacacua

SEQ ID NO: 935458 - RNA, 19 nt, Homo sapiens
  misc_RNA (1)...(19): siRNA sense strand
gaagaaggaccugguguuu

SEQ ID NO: 935459 - RNA, 19 nt, Homo sapiens
  misc_RNA (1)...(19): siRNA sense strand
agaagauccugguaaguaa

SEQ ID NO: 935460 - RNA, 19 nt, Homo sapiens
  misc_RNA (1)...(19): siRNA sense strand
ugaagaagcgcaagaaguu

SEQ ID NO: 935461 - RNA, 19 nt, Homo sapiens
  misc_RNA (1)...(19): siRNA sense strand
ccaagaagauccugguaag

SEQ ID NO: 935462 - RNA, 19 nt, Homo sapiens
  misc_RNA (1)...(19): siRNA sense strand
aagaagauccugguaagua

SEQ ID NO: 935463 - RNA, 19 nt, Homo sapiens
  misc_RNA (1)...(19): siRNA sense strand
ucaucaagguguucaguga

SEQ ID NO: 935464 - RNA, 19 nt, Homo sapiens
  misc_RNA (1)...(19): siRNA sense strand
uaaguaauguggaccaaac

SEQ ID NO: 935465 - RNA, 19 nt, Homo sapiens
  misc_RNA (1)...(19): siRNA sense strand
ccauguggcugucuuugau

SEQ ID NO: 935466 - RNA, 19 nt, Homo sapiens
  misc_RNA (1)...(19): siRNA sense strand
ugagugaguacaagaagua

SEQ ID NO: 935467 - RNA, 19 nt, Homo sapiens
  misc_RNA (1)...(19): siRNA sense strand
ccaaggacagcaagaagaa

SEQ ID NO: 935468 - RNA, 19 nt, Homo sapiens
  misc_RNA (1)...(19): siRNA sense strand
ggaccaaaccauugaugau

SEQ ID NO: 935469 - RNA, 19 nt, Homo sapiens
  misc_RNA (1)...(19): siRNA sense strand
gaagaagcgcaagaaguug

SEQ ID NO: 935470 - RNA, 19 nt, Homo sapiens
  misc_RNA (1)...(19): siRNA sense strand
gagucugcauccauuaaga

SEQ ID NO: 935471 - RNA, 19 nt, Homo sapiens
  misc_RNA (1)...(19): siRNA sense strand
ucaagaugcugacaguaag

SEQ ID NO: 935472 - RNA, 19 nt, Homo sapiens
  misc_RNA (1)...(19): siRNA sense strand
gccaagaagauccugguaa

SEQ ID NO: 935473 - RNA, 19 nt, Homo sapiens
  misc_RNA (1)...(19): siRNA sense strand
gaugaucccuaugccacuu

SEQ ID NO: 935474 - RNA, 19 nt, Homo sapiens
  misc_RNA (1)...(19): siRNA sense strand
aagaaggaccugguguuua

SEQ ID NO: 935475 - RNA, 19 nt, Homo sapiens
  misc_RNA (1)...(19): siRNA sense strand
gaagauccugguaaguaau

SEQ ID NO: 935476 - RNA, 19 nt, Homo sapiens
  misc_RNA (1)...(19): siRNA sense strand
gaccugguguuuaucuucu

SEQ ID NO: 935477 - RNA, 19 nt, Homo sapiens
  misc_RNA (1)...(19): siRNA sense strand
caagaaguacaucauccuu

SEQ ID NO: 935478 - RNA, 19 nt, Homo sapiens
  misc_RNA (1)...(19): siRNA sense strand
ggaccugguguuuaucuuc

SEQ ID NO: 935479 - RNA, 19 nt, Homo sapiens
  misc_RNA (1)...(19): siRNA sense strand
gaccaaaccauugaugauc

SEQ ID NO: 935480 - RNA, 19 nt, Homo sapiens
  misc_RNA (1)...(19): siRNA sense strand
gguaaguaauguggaccaa

SEQ ID NO: 935481 - RNA, 19 nt, Homo sapiens
  misc_RNA (1)...(19): siRNA sense strand
cugcauccauuaagagcaa

SEQ ID NO: 935482 - RNA, 19 nt, Homo sapiens
  misc_RNA (1)...(19): siRNA sense strand
gugaagaagcgcaagaagu

SEQ ID NO: 935483 - RNA, 19 nt, Homo sapiens
  misc_RNA (1)...(19): siRNA sense strand
aaccauugaugaucccuau

SEQ ID NO: 935484 - RNA, 19 nt, Homo sapiens
  misc_RNA (1)...(19): siRNA sense strand
gaaagugugcaagucuuca

SEQ ID NO: 935485 - RNA, 19 nt, Homo sapiens
  misc_RNA (1)...(19): siRNA sense strand
gcaagucuucaacacuaga

SEQ ID NO: 935486 - RNA, 19 nt, Homo sapiens
  misc_RNA (1)...(19): siRNA sense strand
guaaguaauguggaccaaa

SEQ ID NO: 935487 - RNA, 19 nt, Homo sapiens
  misc_RNA (1)...(19): siRNA sense strand
gacaugaaagugugcaagu

SEQ ID NO: 935488 - RNA, 19 nt, Homo sapiens
  misc_RNA (1)...(19): siRNA sense strand
agaagaaggaccugguguu

SEQ ID NO: 935489 - RNA, 19 nt, Homo sapiens
  misc_RNA (1)...(19): siRNA sense strand
ccaccaaggacagcaagaa

SEQ ID NO: 935490 - RNA, 19 nt, Homo sapiens
  misc_RNA (1)...(19): siRNA sense strand
gcucccauguggcugucuu

SEQ ID NO: 935491 - RNA, 19 nt, Homo sapiens
  misc_RNA (1)...(19): siRNA sense strand
ggccaagaagauccuggua

SEQ ID NO: 935492 - RNA, 19 nt, Homo sapiens
  misc_RNA (1)...(19): siRNA sense strand
guggcugucuuugaugaug

SEQ ID NO: 935493 - RNA, 19 nt, Homo sapiens
  misc_RNA (1)...(19): siRNA sense strand
ugaaagugugcaagucuuc

SEQ ID NO: 935494 - RNA, 19 nt, Homo sapiens
  misc_RNA (1)...(19): siRNA sense strand
caagaagauccugguaagu

SEQ ID NO: 935495 - RNA, 19 nt, Homo sapiens
  misc_RNA (1)...(19): siRNA sense strand
caugaaagugugcaagucu

SEQ ID NO: 935496 - RNA, 19 nt, Homo sapiens
  misc_RNA (1)...(19): siRNA sense strand
caagucuucaacacuagaa

SEQ ID NO: 935497 - RNA, 19 nt, Homo sapiens
  misc_RNA (1)...(19): siRNA sense strand
ccagauuccuucuccuuaa

SEQ ID NO: 935498 - RNA, 19 nt, Homo sapiens
  misc_RNA (1)...(19): siRNA sense strand
ccugcuggcugaaggguuu

SEQ ID NO: 935499 - RNA, 19 nt, Homo sapiens
  misc_RNA (1)...(19): siRNA sense strand
caagaacaagucccagugu

SEQ ID NO: 935500 - RNA, 19 nt, Homo sapiens
  misc_RNA (1)...(19): siRNA sense strand
caugcagcguucccagauu

SEQ ID NO: 935501 - RNA, 19 nt, Homo sapiens
  misc_RNA (1)...(19): siRNA sense strand
ccuacaacuucuuuaagca

SEQ ID NO: 935502 - RNA, 19 nt, Homo sapiens
  misc_RNA (1)...(19): siRNA sense strand
caagucccaguguguggua

SEQ ID NO: 935503 - RNA, 19 nt, Homo sapiens
  misc_RNA (1)...(19): siRNA sense strand
cccagauuccuucuccuua

SEQ ID NO: 935504 - RNA, 19 nt, Homo sapiens
  misc_RNA (1)...(19): siRNA sense strand
guugcucucugccaguuca

SEQ ID NO: 935505 - RNA, 19 nt, Homo sapiens
  misc_RNA (1)...(19): siRNA sense strand
uaacuugugcccucagcau

SEQ ID NO: 935506 - RNA, 19 nt, Homo sapiens
  misc_RNA (1)...(19): siRNA sense strand
agaacaagucccagugugu

SEQ ID NO: 935507 - RNA, 19 nt, Homo sapiens
  misc_RNA (1)...(19): siRNA sense strand
cuugugcccucagcauauu

SEQ ID NO: 935508 - RNA, 19 nt, Homo sapiens
  misc_RNA (1)...(19): siRNA sense strand
ggacuuugcugaagaauua

SEQ ID NO: 935509 - RNA, 19 nt, Homo sapiens
  misc_RNA (1)...(19): siRNA sense strand
gccagcagcuuccaguuua

SEQ ID NO: 935510 - RNA, 19 nt, Homo sapiens
  misc_RNA (1)...(19): siRNA sense strand
gcuaagagccugugaguug

SEQ ID NO: 935511 - RNA, 19 nt, Homo sapiens
  misc_RNA (1)...(19): siRNA sense strand
ggacagcgacccugaacua

SEQ ID NO: 935512 - RNA, 19 nt, Homo sapiens
  misc_RNA (1)...(19): siRNA sense strand
gagcauggcuuggacaaug

SEQ ID NO: 935513 - RNA, 19 nt, Homo sapiens
  misc_RNA (1)...(19): siRNA sense strand
aaagugcucuguggaguua

SEQ ID NO: 935514 - RNA, 19 nt, Homo sapiens
  misc_RNA (1)...(19): siRNA sense strand
caaacugugucaaacauau

SEQ ID NO: 935515 - RNA, 19 nt, Homo sapiens
  misc_RNA (1)...(19): siRNA sense strand
gaagauguguuuccugaac

SEQ ID NO: 935516 - RNA, 19 nt, Homo sapiens
  misc_RNA (1)...(19): siRNA sense strand
gaaaguccacuguuccaaa

SEQ ID NO: 935517 - RNA, 19 nt, Homo sapiens
  misc_RNA (1)...(19): siRNA sense strand
caggaagccucacagauga

SEQ ID NO: 935518 - RNA, 19 nt, Homo sapiens
  misc_RNA (1)...(19): siRNA sense strand
gaccgagccuuucauacuu

SEQ ID NO: 935519 - RNA, 19 nt, Homo sapiens
  misc_RNA (1)...(19): siRNA sense strand
gcaacacugucuaaucugu

SEQ ID NO: 935520 - RNA, 19 nt, Homo sapiens
  misc_RNA (1)...(19): siRNA sense strand
ccacgauugugucuucuuu

SEQ ID NO: 935521 - RNA, 19 nt, Homo sapiens
  misc_RNA (1)...(19): siRNA sense strand
cagagucacuucuccaaga

SEQ ID NO: 935522 - RNA, 19 nt, Homo sapiens
  misc_RNA (1)...(19): siRNA sense strand
uagcaacacugucuaaucu

SEQ ID NO: 935523 - RNA, 19 nt, Homo sapiens
  misc_RNA (1)...(19): siRNA sense strand
cagaaagaauuggaucaaa

SEQ ID NO: 935524 - RNA, 19 nt, Homo sapiens
  misc_RNA (1)...(19): siRNA sense strand
uuuagggacuucauccuua

SEQ ID NO: 935525 - RNA, 19 nt, Homo sapiens
  misc_RNA (1)...(19): siRNA sense strand
cuucuuagccugagacuuu

SEQ ID NO: 935526 - RNA, 19 nt, Homo sapiens
  misc_RNA (1)...(19): siRNA sense strand
cagcgacccugaacuaagu

SEQ ID NO: 935527 - RNA, 19 nt, Homo sapiens
  misc_RNA (1)...(19): siRNA sense strand
caaggucucucuggugaug

SEQ ID NO: 935528 - RNA, 19 nt, Homo sapiens
  misc_RNA (1)...(19): siRNA sense strand
ucagcaaccuggaggaguu

SEQ ID NO: 935529 - RNA, 19 nt, Homo sapiens
  misc_RNA (1)...(19): siRNA sense strand
gaaagaauuggaucaaacu

SEQ ID NO: 935530 - RNA, 19 nt, Homo sapiens
  misc_RNA (1)...(19): siRNA sense strand
cugagaaccugguaccaaa

SEQ ID NO: 935531 - RNA, 19 nt, Homo sapiens
  misc_RNA (1)...(19): siRNA sense strand
gagugggacuugcugcuau

SEQ ID NO: 935532 - RNA, 19 nt, Homo sapiens
  misc_RNA (1)...(19): siRNA sense strand
ggacaggaagccucacaga

SEQ ID NO: 935533 - RNA, 19 nt, Homo sapiens
  misc_RNA (1)...(19): siRNA sense strand
gaucaaacugugucaaaca

SEQ ID NO: 935534 - RNA, 19 nt, Homo sapiens
  misc_RNA (1)...(19): siRNA sense strand
gcagaaagaauuggaucaa

SEQ ID NO: 935535 - RNA, 19 nt, Homo sapiens
  misc_RNA (1)...(19): siRNA sense strand
ggacuuguucuuucuggaa

SEQ ID NO: 935536 - RNA, 19 nt, Homo sapiens
  misc_RNA (1)...(19): siRNA sense strand
gagcuuguagcccuuguuu

SEQ ID NO: 935537 - RNA, 19 nt, Homo sapiens
  misc_RNA (1)...(19): siRNA sense strand
ccagauguguugaguaugc

SEQ ID NO: 935538 - RNA, 19 nt, Homo sapiens
  misc_RNA (1)...(19): siRNA sense strand
uacgggagcugguggagaa

SEQ ID NO: 935539 - RNA, 19 nt, Homo sapiens
  misc_RNA (1)...(19): siRNA sense strand
cauccacgauugugucuuc

SEQ ID NO: 935540 - RNA, 19 nt, Homo sapiens
  misc_RNA (1)...(19): siRNA sense strand
ugacaaucgugccaacuuc

SEQ ID NO: 935541 - RNA, 19 nt, Homo sapiens
  misc_RNA (1)...(19): siRNA sense strand
ugaagcugcuggcugagaa

SEQ ID NO: 935542 - RNA, 19 nt, Homo sapiens
  misc_RNA (1)...(19): siRNA sense strand
caacuccggugagcgaaga

SEQ ID NO: 935543 - RNA, 19 nt, Homo sapiens
  misc_RNA (1)...(19): siRNA sense strand
agaaagaauuggaucaaac

SEQ ID NO: 935544 - RNA, 19 nt, Homo sapiens
  misc_RNA (1)...(19): siRNA sense strand
acaggaagccucacagaug

SEQ ID NO: 935545 - RNA, 19 nt, Homo sapiens
  misc_RNA (1)...(19): siRNA sense strand
gaagaauuagcaacacugu

SEQ ID NO: 935546 - RNA, 19 nt, Homo sapiens
  misc_RNA (1)...(19): siRNA sense strand
gggacuugcugcuauucuu

SEQ ID NO: 935547 - RNA, 19 nt, Homo sapiens
  misc_RNA (1)...(19): siRNA sense strand
guucguggcagaaagaauu

SEQ ID NO: 935548 - RNA, 19 nt, Homo sapiens
  misc_RNA (1)...(19): siRNA sense strand
ugaacaagcugcugcuacu

SEQ ID NO: 935549 - RNA, 19 nt, Homo sapiens
  misc_RNA (1)...(19): siRNA sense strand
aaacaacuacuccagaugu

SEQ ID NO: 935550 - RNA, 19 nt, Homo sapiens
  misc_RNA (1)...(19): siRNA sense strand
ccagcagcuuccaguuuaa

SEQ ID NO: 935551 - RNA, 19 nt, Homo sapiens
  misc_RNA (1)...(19): siRNA sense strand
ggacuugcugcuauucuug

SEQ ID NO: 935552 - RNA, 19 nt, Homo sapiens
  misc_RNA (1)...(19): siRNA sense strand
ggugaaagcagcagugagu

SEQ ID NO: 935553 - RNA, 19 nt, Homo sapiens
  misc_RNA (1)...(19): siRNA sense strand
aagagcagcuggugacaca

SEQ ID NO: 935554 - RNA, 19 nt, Homo sapiens
  misc_RNA (1)...(19): siRNA sense strand
ccugaggacuuguucuuuc

SEQ ID NO: 935555 - RNA, 19 nt, Homo sapiens
  misc_RNA (1)...(19): siRNA sense strand
uacucaagcugucuccuuu

SEQ ID NO: 935556 - RNA, 19 nt, Homo sapiens
  misc_RNA (1)...(19): siRNA sense strand
cugcugagcccaagaaaug

SEQ ID NO: 935557 - RNA, 19 nt, Homo sapiens
  misc_RNA (1)...(19): siRNA sense strand
uaaaagacgugcucuccuu

SEQ ID NO: 935558 - RNA, 19 nt, Homo sapiens
  misc_RNA (1)...(19): siRNA sense strand
gagcagugcagagaacauu

SEQ ID NO: 935559 - RNA, 19 nt, Homo sapiens
  misc_RNA (1)...(19): siRNA sense strand
gugccaacuucuccaguga

SEQ ID NO: 935560 - RNA, 19 nt, Homo sapiens
  misc_RNA (1)...(19): siRNA sense strand
guccagcuguccuagauuc

SEQ ID NO: 935561 - RNA, 19 nt, Homo sapiens
  misc_RNA (1)...(19): siRNA sense strand
ggagugggacuugcugcua

SEQ ID NO: 935562 - RNA, 19 nt, Homo sapiens
  misc_RNA (1)...(19): siRNA sense strand
cuaaauuccugggcuuugu

SEQ ID NO: 935563 - RNA, 19 nt, Homo sapiens
  misc_RNA (1)...(19): siRNA sense strand
aaaguccacuguuccaaag

SEQ ID NO: 935564 - RNA, 19 nt, Homo sapiens
  misc_RNA (1)...(19): siRNA sense strand
ccucgugcauugcugagaa

SEQ ID NO: 935565 - RNA, 19 nt, Homo sapiens
  misc_RNA (1)...(19): siRNA sense strand
gaauuagcaacacugucua

SEQ ID NO: 935566 - RNA, 19 nt, Homo sapiens
  misc_RNA (1)...(19): siRNA sense strand
caaagugcucuguggaguu

SEQ ID NO: 935567 - RNA, 19 nt, Homo sapiens
  misc_RNA (1)...(19): siRNA sense strand
ggaucaaacugugucaaac

SEQ ID NO: 935568 - RNA, 19 nt, Homo sapiens
  misc_RNA (1)...(19): siRNA sense strand
gggccuggcggaaagaauu

SEQ ID NO: 935569 - RNA, 19 nt, Homo sapiens
  misc_RNA (1)...(19): siRNA sense strand
gaacaagcugcugcuacuu

SEQ ID NO: 935570 - RNA, 19 nt, Homo sapiens
  misc_RNA (1)...(19): siRNA sense strand
uccaaagcauccacgauug

SEQ ID NO: 935571 - RNA, 19 nt, Homo sapiens
  misc_RNA (1)...(19): siRNA sense strand
gcuuguagcccuuguuuac

SEQ ID NO: 935572 - RNA, 19 nt, Homo sapiens
  misc_RNA (1)...(19): siRNA sense strand
cggaaagaauucguacguu

SEQ ID NO: 935573 - RNA, 19 nt, Homo sapiens
  misc_RNA (1)...(19): siRNA sense strand
cgggaguucugucaaagga

SEQ ID NO: 935574 - RNA, 19 nt, Homo sapiens
  misc_RNA (1)...(19): siRNA sense strand
uguuggagaucuuguguuc

SEQ ID NO: 935575 - RNA, 19 nt, Homo sapiens
  misc_RNA (1)...(19): siRNA sense strand
gcaugagcccaaugaugaa

SEQ ID NO: 935576 - RNA, 19 nt, Homo sapiens
  misc_RNA (1)...(19): siRNA sense strand
agagggauguguuuuauga

SEQ ID NO: 935577 - RNA, 19 nt, Homo sapiens
  misc_RNA (1)...(19): siRNA sense strand
gaagauccaggagcucaau

SEQ ID NO: 935578 - RNA, 19 nt, Homo sapiens
  misc_RNA (1)...(19): siRNA sense strand
ucaaacugugucaaacaua

SEQ ID NO: 935579 - RNA, 19 nt, Homo sapiens
  misc_RNA (1)...(19): siRNA sense strand
agcaugagcccaaugauga

SEQ ID NO: 935580 - RNA, 19 nt, Homo sapiens
  misc_RNA (1)...(19): siRNA sense strand
gugggaagaucaccaugag

SEQ ID NO: 935581 - RNA, 19 nt, Homo sapiens
  misc_RNA (1)...(19): siRNA sense strand
ccucguugcagaucaaauu

SEQ ID NO: 935582 - RNA, 19 nt, Homo sapiens
  misc_RNA (1)...(19): siRNA sense strand
gcugagaaccugguaccaa

SEQ ID NO: 935583 - RNA, 19 nt, Homo sapiens
  misc_RNA (1)...(19): siRNA sense strand
gaucaggagggaggugaaa

SEQ ID NO: 935584 - RNA, 19 nt, Homo sapiens
  misc_RNA (1)...(19): siRNA sense strand
cagcaugagcccaaugaug

SEQ ID NO: 935585 - RNA, 19 nt, Homo sapiens
  misc_RNA (1)...(19): siRNA sense strand
ggugaugccucccucuacu

SEQ ID NO: 935586 - RNA, 19 nt, Homo sapiens
  misc_RNA (1)...(19): siRNA sense strand
ccaaagcauccacgauugu

SEQ ID NO: 935587 - RNA, 19 nt, Homo sapiens
  misc_RNA (1)...(19): siRNA sense strand
gguaccaaaccucuucuug

SEQ ID NO: 935588 - RNA, 19 nt, Homo sapiens
  misc_RNA (1)...(19): siRNA sense strand
auucguacguucccuguug

SEQ ID NO: 935589 - RNA, 19 nt, Homo sapiens
  misc_RNA (1)...(19): siRNA sense strand
gacagcgacccugaacuaa

SEQ ID NO: 935590 - RNA, 19 nt, Homo sapiens
  misc_RNA (1)...(19): siRNA sense strand
ugaccgagccuuucauacu

SEQ ID NO: 935591 - RNA, 19 nt, Homo sapiens
  misc_RNA (1)...(19): siRNA sense strand
gacaggaagccucacagau

SEQ ID NO: 935592 - RNA, 19 nt, Homo sapiens
  misc_RNA (1)...(19): siRNA sense strand
agaauuagcaacacugucu

SEQ ID NO: 935593 - RNA, 19 nt, Homo sapiens
  misc_RNA (1)...(19): siRNA sense strand
agaucaaauuccuauccua

SEQ ID NO: 935594 - RNA, 19 nt, Homo sapiens
  misc_RNA (1)...(19): siRNA sense strand
guuuacuccucgugcauug

SEQ ID NO: 935595 - RNA, 19 nt, Homo sapiens
  misc_RNA (1)...(19): siRNA sense strand
cuacaggaacggcuuaugg

SEQ ID NO: 935596 - RNA, 19 nt, Homo sapiens
  misc_RNA (1)...(19): siRNA sense strand
gcggaaagaauucguacgu

SEQ ID NO: 935597 - RNA, 19 nt, Homo sapiens
  misc_RNA (1)...(19): siRNA sense strand
ugggacggauggagauaga

SEQ ID NO: 935598 - RNA, 19 nt, Homo sapiens
  misc_RNA (1)...(19): siRNA sense strand
gcagaucaaauuccuaucc

SEQ ID NO: 935599 - RNA, 19 nt, Homo sapiens
  misc_RNA (1)...(19): siRNA sense strand
gaggugaaagcagcaguga

SEQ ID NO: 935600 - RNA, 19 nt, Homo sapiens
  misc_RNA (1)...(19): siRNA sense strand
gcuaaauuccugggcuuug

SEQ ID NO: 935601 - RNA, 19 nt, Homo sapiens
  misc_RNA (1)...(19): siRNA sense strand
ggugagcggaagcaauuug

SEQ ID NO: 935602 - RNA, 19 nt, Homo sapiens
  misc_RNA (1)...(19): siRNA sense strand
gccagagacugacaaucgu

SEQ ID NO: 935603 - RNA, 19 nt, Homo sapiens
  misc_RNA (1)...(19): siRNA sense strand
ggauggugacugccaagga

SEQ ID NO: 935604 - RNA, 19 nt, Homo sapiens
  misc_RNA (1)...(19): siRNA sense strand
gaugggacggauggagaua

SEQ ID NO: 935605 - RNA, 19 nt, Homo sapiens
  misc_RNA (1)...(19): siRNA sense strand
gaauuggaucaaacugugu

SEQ ID NO: 935606 - RNA, 19 nt, Homo sapiens
  misc_RNA (1)...(19): siRNA sense strand
ccuuugagguggacacagu

SEQ ID NO: 935607 - RNA, 19 nt, Homo sapiens
  misc_RNA (1)...(19): siRNA sense strand
gaauauuaccgggacaucu

SEQ ID NO: 935608 - RNA, 19 nt, Homo sapiens
  misc_RNA (1)...(19): siRNA sense strand
gaaagaaugugaagaagug

SEQ ID NO: 935609 - RNA, 19 nt, Homo sapiens
  misc_RNA (1)...(19): siRNA sense strand
gagaagaugugcauugaaa

SEQ ID NO: 935610 - RNA, 19 nt, Homo sapiens
  misc_RNA (1)...(19): siRNA sense strand
ggagaugacugaagauuug

SEQ ID NO: 935611 - RNA, 19 nt, Homo sapiens
  misc_RNA (1)...(19): siRNA sense strand
ggagagaguugaagauuug

SEQ ID NO: 935612 - RNA, 19 nt, Homo sapiens
  misc_RNA (1)...(19): siRNA sense strand
gggcagagcugaaggaaga

SEQ ID NO: 935613 - RNA, 19 nt, Homo sapiens
  misc_RNA (1)...(19): siRNA sense strand
ugaaggagcuuucuuggaa

SEQ ID NO: 935614 - RNA, 19 nt, Homo sapiens
  misc_RNA (1)...(19): siRNA sense strand
gcucaaagauguugcuuau

SEQ ID NO: 935615 - RNA, 19 nt, Homo sapiens
  misc_RNA (1)...(19): siRNA sense strand
ccucugaccuggaccauua

SEQ ID NO: 935616 - RNA, 19 nt, Homo sapiens
  misc_RNA (1)...(19): siRNA sense strand
caacggaucuauucaagug

SEQ ID NO: 935617 - RNA, 19 nt, Homo sapiens
  misc_RNA (1)...(19): siRNA sense strand
gaucucaucugaagaggaa

SEQ ID NO: 935618 - RNA, 19 nt, Homo sapiens
  misc_RNA (1)...(19): siRNA sense strand
gaauagguguucaaggaaa

SEQ ID NO: 935619 - RNA, 19 nt, Homo sapiens
  misc_RNA (1)...(19): siRNA sense strand
ucaggagacuugccaguua

SEQ ID NO: 935620 - RNA, 19 nt, Homo sapiens
  misc_RNA (1)...(19): siRNA sense strand
gagguugacucgacuacua

SEQ ID NO: 935621 - RNA, 19 nt, Homo sapiens
  misc_RNA (1)...(19): siRNA sense strand
gaaagaauagaauggagua

SEQ ID NO: 935622 - RNA, 19 nt, Homo sapiens
  misc_RNA (1)...(19): siRNA sense strand
caaagaauccucugaacaa

SEQ ID NO: 935623 - RNA, 19 nt, Homo sapiens
  misc_RNA (1)...(19): siRNA sense strand
gauuggagcugguggagaa

SEQ ID NO: 935624 - RNA, 19 nt, Homo sapiens
  misc_RNA (1)...(19): siRNA sense strand
gaagugaugucugaugaga

SEQ ID NO: 935625 - RNA, 19 nt, Homo sapiens
  misc_RNA (1)...(19): siRNA sense strand
gaagaugugcauugaaauu

SEQ ID NO: 935626 - RNA, 19 nt, Homo sapiens
  misc_RNA (1)...(19): siRNA sense strand
ucaaagauguugcuuaugg

SEQ ID NO: 935627 - RNA, 19 nt, Homo sapiens
  misc_RNA (1)...(19): siRNA sense strand
uacuagaccucaagaauaa

SEQ ID NO: 935628 - RNA, 19 nt, Homo sapiens
  misc_RNA (1)...(19): siRNA sense strand
gaacagagaagcucauugg

SEQ ID NO: 935629 - RNA, 19 nt, Homo sapiens
  misc_RNA (1)...(19): siRNA sense strand
gaacucaacccaguccaua

SEQ ID NO: 935630 - RNA, 19 nt, Homo sapiens
  misc_RNA (1)...(19): siRNA sense strand
gaaaauugcugaaugacaa

SEQ ID NO: 935631 - RNA, 19 nt, Homo sapiens
  misc_RNA (1)...(19): siRNA sense strand
gagcuuccauuaaagagaa

SEQ ID NO: 935632 - RNA, 19 nt, Homo sapiens
  misc_RNA (1)...(19): siRNA sense strand
gaggugaaguagccaguaa

SEQ ID NO: 935633 - RNA, 19 nt, Homo sapiens
  misc_RNA (1)...(19): siRNA sense strand
aagaauagguguucaagga

SEQ ID NO: 935634 - RNA, 19 nt, Homo sapiens
  misc_RNA (1)...(19): siRNA sense strand
gaaagaaagcccaggucua

SEQ ID NO: 935635 - RNA, 19 nt, Homo sapiens
  misc_RNA (1)...(19): siRNA sense strand
gcaacaggaugagaucaaa

SEQ ID NO: 935636 - RNA, 19 nt, Homo sapiens
  misc_RNA (1)...(19): siRNA sense strand
acaaggagaugacugaaga

SEQ ID NO: 935637 - RNA, 19 nt, Homo sapiens
  misc_RNA (1)...(19): siRNA sense strand
ucaagcagcuggaagguau

SEQ ID NO: 935638 - RNA, 19 nt, Homo sapiens
  misc_RNA (1)...(19): siRNA sense strand
gaacgaaaauugcugaaug

SEQ ID NO: 935639 - RNA, 19 nt, Homo sapiens
  misc_RNA (1)...(19): siRNA sense strand
cuaaaugaguugcaaguau

SEQ ID NO: 935640 - RNA, 19 nt, Homo sapiens
  misc_RNA (1)...(19): siRNA sense strand
gcuucgagcuuccauuaaa

SEQ ID NO: 935641 - RNA, 19 nt, Homo sapiens
  misc_RNA (1)...(19): siRNA sense strand
cuucauaggugauggcuuu

SEQ ID NO: 935642 - RNA, 19 nt, Homo sapiens
  misc_RNA (1)...(19): siRNA sense strand
uaaaugaguugcaaguauc

SEQ ID NO: 935643 - RNA, 19 nt, Homo sapiens
  misc_RNA (1)...(19): siRNA sense strand
gcaagaaggcugugagcuu

SEQ ID NO: 935644 - RNA, 19 nt, Homo sapiens
  misc_RNA (1)...(19): siRNA sense strand
cagagaagaugugcauuga

SEQ ID NO: 935645 - RNA, 19 nt, Homo sapiens
  misc_RNA (1)...(19): siRNA sense strand
cauugaagcuggccaguau

SEQ ID NO: 935646 - RNA, 19 nt, Homo sapiens
  misc_RNA (1)...(19): siRNA sense strand
gaacuggaggcaaugauga

SEQ ID NO: 935647 - RNA, 19 nt, Homo sapiens
  misc_RNA (1)...(19): siRNA sense strand
guacaaauucuacgaccua

SEQ ID NO: 935648 - RNA, 19 nt, Homo sapiens
  misc_RNA (1)...(19): siRNA sense strand
gcaccuauuccuucuauga

SEQ ID NO: 935649 - RNA, 19 nt, Homo sapiens
  misc_RNA (1)...(19): siRNA sense strand
cuacuagaccucaagaaua

SEQ ID NO: 935650 - RNA, 19 nt, Homo sapiens
  misc_RNA (1)...(19): siRNA sense strand
ucagaaggcugcagagcuu

SEQ ID NO: 935651 - RNA, 19 nt, Homo sapiens
  misc_RNA (1)...(19): siRNA sense strand
aaaccuugcuccagaagaa

SEQ ID NO: 935652 - RNA, 19 nt, Homo sapiens
  misc_RNA (1)...(19): siRNA sense strand
guagagcugauucgacuua

SEQ ID NO: 935653 - RNA, 19 nt, Homo sapiens
  misc_RNA (1)...(19): siRNA sense strand
gaggauaaaguggauauuu

SEQ ID NO: 935654 - RNA, 19 nt, Homo sapiens
  misc_RNA (1)...(19): siRNA sense strand
ucgcgaagaucacauguug

SEQ ID NO: 935655 - RNA, 19 nt, Homo sapiens
  misc_RNA (1)...(19): siRNA sense strand
caagagcuagacauuguua

SEQ ID NO: 935656 - RNA, 19 nt, Homo sapiens
  misc_RNA (1)...(19): siRNA sense strand
gagauauucuagagcaaga

SEQ ID NO: 935657 - RNA, 19 nt, Homo sapiens
  misc_RNA (1)...(19): siRNA sense strand
gcuagagacuguggagaaa

SEQ ID NO: 935658 - RNA, 19 nt, Homo sapiens
  misc_RNA (1)...(19): siRNA sense strand
agaacgagcuguggauuga

SEQ ID NO: 935659 - RNA, 19 nt, Homo sapiens
  misc_RNA (1)...(19): siRNA sense strand
cugaacagcucaaagaugu

SEQ ID NO: 935660 - RNA, 19 nt, Homo sapiens
  misc_RNA (1)...(19): siRNA sense strand
cauaggugauggcuuuaaa

SEQ ID NO: 935661 - RNA, 19 nt, Homo sapiens
  misc_RNA (1)...(19): siRNA sense strand
uaacagugcccacaucaug

SEQ ID NO: 935662 - RNA, 19 nt, Homo sapiens
  misc_RNA (1)...(19): siRNA sense strand
gaucaaggacauuuaaagu

SEQ ID NO: 935663 - RNA, 19 nt, Homo sapiens
  misc_RNA (1)...(19): siRNA sense strand
gccaugaccuuccaacauc

SEQ ID NO: 935664 - RNA, 19 nt, Homo sapiens
  misc_RNA (1)...(19): siRNA sense strand
gacaaaagcugacaaugau

SEQ ID NO: 935665 - RNA, 19 nt, Homo sapiens
  misc_RNA (1)...(19): siRNA sense strand
ggaaguagagcuccuccaa

SEQ ID NO: 935666 - RNA, 19 nt, Homo sapiens
  misc_RNA (1)...(19): siRNA sense strand
gacaaacucuuagaaagca

SEQ ID NO: 935667 - RNA, 19 nt, Homo sapiens
  misc_RNA (1)...(19): siRNA sense strand
gacaguuucuuucgacuuc

SEQ ID NO: 935668 - RNA, 19 nt, Homo sapiens
  misc_RNA (1)...(19): siRNA sense strand
ucacccagcuguauugcaa

SEQ ID NO: 935669 - RNA, 19 nt, Homo sapiens
  misc_RNA (1)...(19): siRNA sense strand
gaaguagagcuccuccaaa

SEQ ID NO: 935670 - RNA, 19 nt, Homo sapiens
  misc_RNA (1)...(19): siRNA sense strand
gagcugauucgacuuaaga

SEQ ID NO: 935671 - RNA, 19 nt, Homo sapiens
  misc_RNA (1)...(19): siRNA sense strand
ccauggagaugaggauaaa

SEQ ID NO: 935672 - RNA, 19 nt, Homo sapiens
  misc_RNA (1)...(19): siRNA sense strand
uaggaaggcugaagguuuc

SEQ ID NO: 935673 - RNA, 19 nt, Homo sapiens
  misc_RNA (1)...(19): siRNA sense strand
caguaucgaucuaagagaa

SEQ ID NO: 935674 - RNA, 19 nt, Homo sapiens
  misc_RNA (1)...(19): siRNA sense strand
caaggacaguucaaagauc

SEQ ID NO: 935675 - RNA, 19 nt, Homo sapiens
  misc_RNA (1)...(19): siRNA sense strand
gagcaugcgacaaaugaaa

SEQ ID NO: 935676 - RNA, 19 nt, Homo sapiens
  misc_RNA (1)...(19): siRNA sense strand
uaaggcagauucagagaag

SEQ ID NO: 935677 - RNA, 19 nt, Homo sapiens
  misc_RNA (1)...(19): siRNA sense strand
uggaguaucuuagccuuaa

SEQ ID NO: 935678 - RNA, 19 nt, Homo sapiens
  misc_RNA (1)...(19): siRNA sense strand
caggauggauuugcuuuga

SEQ ID NO: 935679 - RNA, 19 nt, Homo sapiens
  misc_RNA (1)...(19): siRNA sense strand
uuaaggagcaugcgacaaa

SEQ ID NO: 935680 - RNA, 19 nt, Homo sapiens
  misc_RNA (1)...(19): siRNA sense strand
gaaauauccuaaggcagau

SEQ ID NO: 935681 - RNA, 19 nt, Homo sapiens
  misc_RNA (1)...(19): siRNA sense strand
gauaauagagaucacaaag

SEQ ID NO: 935682 - RNA, 19 nt, Homo sapiens
  misc_RNA (1)...(19): siRNA sense strand
ggaggacaguuucuuucga

SEQ ID NO: 935683 - RNA, 19 nt, Homo sapiens
  misc_RNA (1)...(19): siRNA sense strand
ggaugaaccgggaggaauu

SEQ ID NO: 935684 - RNA, 19 nt, Homo sapiens
  misc_RNA (1)...(19): siRNA sense strand
gaaggaguuucaggagaga

SEQ ID NO: 935685 - RNA, 19 nt, Homo sapiens
  misc_RNA (1)...(19): siRNA sense strand
ucacugacccugcagagaa

SEQ ID NO: 935686 - RNA, 19 nt, Homo sapiens
  misc_RNA (1)...(19): siRNA sense strand
ggauggauuugcuuugaca

SEQ ID NO: 935687 - RNA, 19 nt, Homo sapiens
  misc_RNA (1)...(19): siRNA sense strand
caucugaacagcucaaaga

SEQ ID NO: 935688 - RNA, 19 nt, Homo sapiens
  misc_RNA (1)...(19): siRNA sense strand
gagaaaauguggccuaaag

SEQ ID NO: 935689 - RNA, 19 nt, Homo sapiens
  misc_RNA (1)...(19): siRNA sense strand
ugacaaagaauccucugaa

SEQ ID NO: 935690 - RNA, 19 nt, Homo sapiens
  misc_RNA (1)...(19): siRNA sense strand
ccugagagcuuccugaaac

SEQ ID NO: 935691 - RNA, 19 nt, Homo sapiens
  misc_RNA (1)...(19): siRNA sense strand
gaaacugucccaggugcua

SEQ ID NO: 935692 - RNA, 19 nt, Homo sapiens
  misc_RNA (1)...(19): siRNA sense strand
aaauguggccuaaagauga

SEQ ID NO: 935693 - RNA, 19 nt, Homo sapiens
  misc_RNA (1)...(19): siRNA sense strand
ucucucagcugcaggauca

SEQ ID NO: 935694 - RNA, 19 nt, Homo sapiens
  misc_RNA (1)...(19): siRNA sense strand
uaucuuagccuuaacaucu

SEQ ID NO: 935695 - RNA, 19 nt, Homo sapiens
  misc_RNA (1)...(19): siRNA sense strand
ggagaaggagcaccagguu

SEQ ID NO: 935696 - RNA, 19 nt, Homo sapiens
  misc_RNA (1)...(19): siRNA sense strand
gguucuaacagcauaauuu

SEQ ID NO: 935697 - RNA, 19 nt, Homo sapiens
  misc_RNA (1)...(19): siRNA sense strand
ugaagucagugaagcacaa

SEQ ID NO: 935698 - RNA, 19 nt, Homo sapiens
  misc_RNA (1)...(19): siRNA sense strand
agaauagaauggaguaucu

SEQ ID NO: 935699 - RNA, 19 nt, Homo sapiens
  misc_RNA (1)...(19): siRNA sense strand
ggccuugucuauacauguu

SEQ ID NO: 935700 - RNA, 19 nt, Homo sapiens
  misc_RNA (1)...(19): siRNA sense strand
ggaauuggaggacaguuuc

SEQ ID NO: 935701 - RNA, 19 nt, Homo sapiens
  misc_RNA (1)...(19): siRNA sense strand
ucagaagcauaaacaggaa

SEQ ID NO: 935702 - RNA, 19 nt, Homo sapiens
  misc_RNA (1)...(19): siRNA sense strand
ucaccaacauacuucagaa

SEQ ID NO: 935703 - RNA, 19 nt, Homo sapiens
  misc_RNA (1)...(19): siRNA sense strand
ccagggacaugcuuauucu

SEQ ID NO: 935704 - RNA, 19 nt, Homo sapiens
  misc_RNA (1)...(19): siRNA sense strand
gaaggcgguuucuguucga

SEQ ID NO: 935705 - RNA, 19 nt, Homo sapiens
  misc_RNA (1)...(19): siRNA sense strand
gacaaagaauccucugaac

SEQ ID NO: 935706 - RNA, 19 nt, Homo sapiens
  misc_RNA (1)...(19): siRNA sense strand
gagaaagaaaggagaagga

SEQ ID NO: 935707 - RNA, 19 nt, Homo sapiens
  misc_RNA (1)...(19): siRNA sense strand
ggagauacccaaccuacca

SEQ ID NO: 935708 - RNA, 19 nt, Homo sapiens
  misc_RNA (1)...(19): siRNA sense strand
gaaaucccaucauaccuua

SEQ ID NO: 935709 - RNA, 19 nt, Homo sapiens
  misc_RNA (1)...(19): siRNA sense strand
gaauagggcuggugaaagg

SEQ ID NO: 935710 - RNA, 19 nt, Homo sapiens
  misc_RNA (1)...(19): siRNA sense strand
gaaagaagaaagacaaauc

SEQ ID NO: 935711 - RNA, 19 nt, Homo sapiens
  misc_RNA (1)...(19): siRNA sense strand
aacaagaaaucccaucaua

SEQ ID NO: 935712 - RNA, 19 nt, Homo sapiens
  misc_RNA (1)...(19): siRNA sense strand
gaaagacaaaucugacuga

SEQ ID NO: 935713 - RNA, 19 nt, Homo sapiens
  misc_RNA (1)...(19): siRNA sense strand
ggaaagagucuggaaguga

SEQ ID NO: 935714 - RNA, 19 nt, Homo sapiens
  misc_RNA (1)...(19): siRNA sense strand
aaagugcccuuaacaggaa

SEQ ID NO: 935715 - RNA, 19 nt, Homo sapiens
  misc_RNA (1)...(19): siRNA sense strand
guaaacaaagugcccuuaa

SEQ ID NO: 935716 - RNA, 19 nt, Homo sapiens
  misc_RNA (1)...(19): siRNA sense strand
uaacaggaaagaagaaaga

SEQ ID NO: 935717 - RNA, 19 nt, Homo sapiens
  misc_RNA (1)...(19): siRNA sense strand
aaacaaagugcccuuaaca

SEQ ID NO: 935718 - RNA, 19 nt, Homo sapiens
  misc_RNA (1)...(19): siRNA sense strand
uaaacaaagugcccuuaac

SEQ ID NO: 935719 - RNA, 19 nt, Homo sapiens
  misc_RNA (1)...(19): siRNA sense strand
gggaauagggcuggugaaa

SEQ ID NO: 935720 - RNA, 19 nt, Homo sapiens
  misc_RNA (1)...(19): siRNA sense strand
ggaaagaagaaagacaaau

SEQ ID NO: 935721 - RNA, 19 nt, Homo sapiens
  misc_RNA (1)...(19): siRNA sense strand
agaagaaagacaaaucuga

SEQ ID NO: 935722 - RNA, 19 nt, Homo sapiens
  misc_RNA (1)...(19): siRNA sense strand
gcuguugggucugcuguug

SEQ ID NO: 935723 - RNA, 19 nt, Homo sapiens
  misc_RNA (1)...(19): siRNA sense strand
uaucuucaguguuacaaag

SEQ ID NO: 935724 - RNA, 19 nt, Homo sapiens
  misc_RNA (1)...(19): siRNA sense strand
caggaaagaagaaagacaa

SEQ ID NO: 935725 - RNA, 19 nt, Homo sapiens
  misc_RNA (1)...(19): siRNA sense strand
caagaaaucccaucauacc

SEQ ID NO: 935726 - RNA, 19 nt, Homo sapiens
  misc_RNA (1)...(19): siRNA sense strand
gcagcagccaggcauguug

SEQ ID NO: 935727 - RNA, 19 nt, Homo sapiens
  misc_RNA (1)...(19): siRNA sense strand
uguugggucugcuguugua

SEQ ID NO: 935728 - RNA, 19 nt, Homo sapiens
  misc_RNA (1)...(19): siRNA sense strand
ggaauagggcuggugaaag

SEQ ID NO: 935729 - RNA, 19 nt, Homo sapiens
  misc_RNA (1)...(19): siRNA sense strand
ggcauguugucccguguga

SEQ ID NO: 935730 - RNA, 19 nt, Homo sapiens
  misc_RNA (1)...(19): siRNA sense strand
ccaccagaagguucaauga

SEQ ID NO: 935731 - RNA, 19 nt, Homo sapiens
  misc_RNA (1)...(19): siRNA sense strand
agaaaucccaucauaccuu

SEQ ID NO: 935732 - RNA, 19 nt, Homo sapiens
  misc_RNA (1)...(19): siRNA sense strand
uuacaacugugccuuccau

SEQ ID NO: 935733 - RNA, 19 nt, Homo sapiens
  misc_RNA (1)...(19): siRNA sense strand
caacaagaaaucccaucau

SEQ ID NO: 935734 - RNA, 19 nt, Homo sapiens
  misc_RNA (1)...(19): siRNA sense strand
uggcuuggauugguggaaa

SEQ ID NO: 935735 - RNA, 19 nt, Homo sapiens
  misc_RNA (1)...(19): siRNA sense strand
gcccuuaacaggaaagaag

SEQ ID NO: 935736 - RNA, 19 nt, Homo sapiens
  misc_RNA (1)...(19): siRNA sense strand
uggaaagagucuggaagug

SEQ ID NO: 935737 - RNA, 19 nt, Homo sapiens
  misc_RNA (1)...(19): siRNA sense strand
ucaacaagaaaucccauca

SEQ ID NO: 935738 - RNA, 19 nt, Homo sapiens
  misc_RNA (1)...(19): siRNA sense strand
guggaaagagucuggaagu

SEQ ID NO: 935739 - RNA, 19 nt, Homo sapiens
  misc_RNA (1)...(19): siRNA sense strand
uguaaacaaagugcccuua

SEQ ID NO: 935740 - RNA, 19 nt, Homo sapiens
  misc_RNA (1)...(19): siRNA sense strand
acaagaaaucccaucauac

SEQ ID NO: 935741 - RNA, 19 nt, Homo sapiens
  misc_RNA (1)...(19): siRNA sense strand
gagagaagcaugcuccuuu

SEQ ID NO: 935742 - RNA, 19 nt, Homo sapiens
  misc_RNA (1)...(19): siRNA sense strand
gguaucgauuugcuucuug

SEQ ID NO: 935743 - RNA, 19 nt, Homo sapiens
  misc_RNA (1)...(19): siRNA sense strand
agagaagcaugcuccuuug

SEQ ID NO: 935744 - RNA, 19 nt, Homo sapiens
  misc_RNA (1)...(19): siRNA sense strand
ccugcuggcucacucguuu

SEQ ID NO: 935745 - RNA, 19 nt, Homo sapiens
  misc_RNA (1)...(19): siRNA sense strand
cggcugugcuucuugguau

SEQ ID NO: 935746 - RNA, 19 nt, Homo sapiens
  misc_RNA (1)...(19): siRNA sense strand
gcaugcggcugugcuucuu

SEQ ID NO: 935747 - RNA, 19 nt, Homo sapiens
  misc_RNA (1)...(19): siRNA sense strand
gcggcugugcuucuuggua

SEQ ID NO: 935748 - RNA, 19 nt, Homo sapiens
  misc_RNA (1)...(19): siRNA sense strand
gcuucuugguaucgauuug

SEQ ID NO: 935749 - RNA, 19 nt, Homo sapiens
  misc_RNA (1)...(19): siRNA sense strand
ccacagauguccuuugaug

SEQ ID NO: 935750 - RNA, 19 nt, Homo sapiens
  misc_RNA (1)...(19): siRNA sense strand
gcucaaaggcaucauuaua

SEQ ID NO: 935751 - RNA, 19 nt, Homo sapiens
  misc_RNA (1)...(19): siRNA sense strand
ccacagacacacuuuauuu

SEQ ID NO: 935752 - RNA, 19 nt, Homo sapiens
  misc_RNA (1)...(19): siRNA sense strand
gagaugagacuguacaaga

SEQ ID NO: 935753 - RNA, 19 nt, Homo sapiens
  misc_RNA (1)...(19): siRNA sense strand
ugaaagugaugcagaugaa

SEQ ID NO: 935754 - RNA, 19 nt, Homo sapiens
  misc_RNA (1)...(19): siRNA sense strand
ccaaguuuguugaaaguga

SEQ ID NO: 935755 - RNA, 19 nt, Homo sapiens
  misc_RNA (1)...(19): siRNA sense strand
gggagaggaugaugacuca

SEQ ID NO: 935756 - RNA, 19 nt, Homo sapiens
  misc_RNA (1)...(19): siRNA sense strand
ucaaaugucuaucaucucu

SEQ ID NO: 935757 - RNA, 19 nt, Homo sapiens
  misc_RNA (1)...(19): siRNA sense strand
agacacacuuuauuuccua

SEQ ID NO: 935758 - RNA, 19 nt, Homo sapiens
  misc_RNA (1)...(19): siRNA sense strand
cagauguccuuugaugaua

SEQ ID NO: 935759 - RNA, 19 nt, Homo sapiens
  misc_RNA (1)...(19): siRNA sense strand
acaagaauauuccacagau

SEQ ID NO: 935760 - RNA, 19 nt, Homo sapiens
  misc_RNA (1)...(19): siRNA sense strand
gaggugaccaucugcaauu

SEQ ID NO: 935761 - RNA, 19 nt, Homo sapiens
  misc_RNA (1)...(19): siRNA sense strand
ggaccgaccgcuccaaguu

SEQ ID NO: 935762 - RNA, 19 nt, Homo sapiens
  misc_RNA (1)...(19): siRNA sense strand
ggagccagaucagaccuuu

SEQ ID NO: 935763 - RNA, 19 nt, Homo sapiens
  misc_RNA (1)...(19): siRNA sense strand
ggaucuuacaggagaauua

SEQ ID NO: 935764 - RNA, 19 nt, Homo sapiens
  misc_RNA (1)...(19): siRNA sense strand
gagcagauacgacaaaggu

SEQ ID NO: 935765 - RNA, 19 nt, Homo sapiens
  misc_RNA (1)...(19): siRNA sense strand
agaugagacuguacaagaa

SEQ ID NO: 935766 - RNA, 19 nt, Homo sapiens
  misc_RNA (1)...(19): siRNA sense strand
ucuaucaucucucaauuca

SEQ ID NO: 935767 - RNA, 19 nt, Homo sapiens
  misc_RNA (1)...(19): siRNA sense strand
caagaauauuccacagaug

SEQ ID NO: 935768 - RNA, 19 nt, Homo sapiens
  misc_RNA (1)...(19): siRNA sense strand
ccucugagaugagacugua

SEQ ID NO: 935769 - RNA, 19 nt, Homo sapiens
  misc_RNA (1)...(19): siRNA sense strand
cucaaaggcaucauuauaa

SEQ ID NO: 935770 - RNA, 19 nt, Homo sapiens
  misc_RNA (1)...(19): siRNA sense strand
gaauuagaguaugcuacaa

SEQ ID NO: 935771 - RNA, 19 nt, Homo sapiens
  misc_RNA (1)...(19): siRNA sense strand
gcuccaaguuuguugaaag

SEQ ID NO: 935772 - RNA, 19 nt, Homo sapiens
  misc_RNA (1)...(19): siRNA sense strand
gagcggcugcaaugccuua

SEQ ID NO: 935773 - RNA, 19 nt, Homo sapiens
  misc_RNA (1)...(19): siRNA sense strand
gaaagggagccagaucaga

SEQ ID NO: 935774 - RNA, 19 nt, Homo sapiens
  misc_RNA (1)...(19): siRNA sense strand
aaaugucuaucaucucuca

SEQ ID NO: 935775 - RNA, 19 nt, Homo sapiens
  misc_RNA (1)...(19): siRNA sense strand
gacacgaggugaccaucug

SEQ ID NO: 935776 - RNA, 19 nt, Homo sapiens
  misc_RNA (1)...(19): siRNA sense strand
gaccgaccgcuccaaguuu

SEQ ID NO: 935777 - RNA, 19 nt, Homo sapiens
  misc_RNA (1)...(19): siRNA sense strand
gacacacuuuauuuccuaa

SEQ ID NO: 935778 - RNA, 19 nt, Homo sapiens
  misc_RNA (1)...(19): siRNA sense strand
gaugagacuguacaagaau

SEQ ID NO: 935779 - RNA, 19 nt, Homo sapiens
  misc_RNA (1)...(19): siRNA sense strand
agucugaaccgggaucuua

SEQ ID NO: 935780 - RNA, 19 nt, Homo sapiens
  misc_RNA (1)...(19): siRNA sense strand
uuccacagauguccuuuga

SEQ ID NO: 935781 - RNA, 19 nt, Homo sapiens
  misc_RNA (1)...(19): siRNA sense strand
aagcucaaaggcaucauua

SEQ ID NO: 935782 - RNA, 19 nt, Homo sapiens
  misc_RNA (1)...(19): siRNA sense strand
guccuuugaugauacagaa

SEQ ID NO: 935783 - RNA, 19 nt, Homo sapiens
  misc_RNA (1)...(19): siRNA sense strand
caaguuuguugaaagugau

SEQ ID NO: 935784 - RNA, 19 nt, Homo sapiens
  misc_RNA (1)...(19): siRNA sense strand
gagaggaugaugacucaca

SEQ ID NO: 935785 - RNA, 19 nt, Homo sapiens
  misc_RNA (1)...(19): siRNA sense strand
ugucuaucaucucucaauu

SEQ ID NO: 935786 - RNA, 19 nt, Homo sapiens
  misc_RNA (1)...(19): siRNA sense strand
gaccaucugcaauuacgaa

SEQ ID NO: 935787 - RNA, 19 nt, Homo sapiens
  misc_RNA (1)...(19): siRNA sense strand
gaucuuacaggagaauuag

SEQ ID NO: 935788 - RNA, 19 nt, Homo sapiens
  misc_RNA (1)...(19): siRNA sense strand
ggagaauuagaguaugcua

SEQ ID NO: 935789 - RNA, 19 nt, Homo sapiens
  misc_RNA (1)...(19): siRNA sense strand
uacaggagaauuagaguau

SEQ ID NO: 935790 - RNA, 19 nt, Homo sapiens
  misc_RNA (1)...(19): siRNA sense strand
gauguccuuugaugauaca

SEQ ID NO: 935791 - RNA, 19 nt, Homo sapiens
  misc_RNA (1)...(19): siRNA sense strand
aaagugaugcagaugaaga

SEQ ID NO: 935792 - RNA, 19 nt, Homo sapiens
  misc_RNA (1)...(19): siRNA sense strand
cagaaagggagccagauca

SEQ ID NO: 935793 - RNA, 19 nt, Homo sapiens
  misc_RNA (1)...(19): siRNA sense strand
augagacuguacaagaaua

SEQ ID NO: 935794 - RNA, 19 nt, Homo sapiens
  misc_RNA (1)...(19): siRNA sense strand
caggagaauuagaguaugc

SEQ ID NO: 935795 - RNA, 19 nt, Homo sapiens
  misc_RNA (1)...(19): siRNA sense strand
gagccagaucagaccuuua

SEQ ID NO: 935796 - RNA, 19 nt, Homo sapiens
  misc_RNA (1)...(19): siRNA sense strand
acagauguccuuugaugau

SEQ ID NO: 935797 - RNA, 19 nt, Homo sapiens
  misc_RNA (1)...(19): siRNA sense strand
aagaauauuccacagaugu

SEQ ID NO: 935798 - RNA, 19 nt, Homo sapiens
  misc_RNA (1)...(19): siRNA sense strand
agaauuagaguaugcuaca

SEQ ID NO: 935799 - RNA, 19 nt, Homo sapiens
  misc_RNA (1)...(19): siRNA sense strand
uuacaggagaauuagagua

SEQ ID NO: 935800 - RNA, 19 nt, Homo sapiens
  misc_RNA (1)...(19): siRNA sense strand
caagcucaaaggcaucauu

SEQ ID NO: 935801 - RNA, 19 nt, Homo sapiens
  misc_RNA (1)...(19): siRNA sense strand
aggugaccaucugcaauua

SEQ ID NO: 935802 - RNA, 19 nt, Homo sapiens
  misc_RNA (1)...(19): siRNA sense strand
cacagacacacuuuauuuc

SEQ ID NO: 935803 - RNA, 19 nt, Homo sapiens
  misc_RNA (1)...(19): siRNA sense strand
uaaugggagaggaugauga

SEQ ID NO: 935804 - RNA, 19 nt, Homo sapiens
  misc_RNA (1)...(19): siRNA sense strand
gaaagugaugcagaugaag

SEQ ID NO: 935805 - RNA, 19 nt, Homo sapiens
  misc_RNA (1)...(19): siRNA sense strand
gagacuguacaagaauauu

SEQ ID NO: 935806 - RNA, 19 nt, Homo sapiens
  misc_RNA (1)...(19): siRNA sense strand
ccagaucagaccuuuaguc

SEQ ID NO: 935807 - RNA, 19 nt, Homo sapiens
  misc_RNA (1)...(19): siRNA sense strand
gcaaugucaagcucaaagg

SEQ ID NO: 935808 - RNA, 19 nt, Homo sapiens
  misc_RNA (1)...(19): siRNA sense strand
uacaagaauauuccacaga

SEQ ID NO: 935809 - RNA, 19 nt, Homo sapiens
  misc_RNA (1)...(19): siRNA sense strand
cagacacacuuuauuuccu

SEQ ID NO: 935810 - RNA, 19 nt, Homo sapiens
  misc_RNA (1)...(19): siRNA sense strand
acaggagaauuagaguaug

SEQ ID NO: 935811 - RNA, 19 nt, Homo sapiens
  misc_RNA (1)...(19): siRNA sense strand
gcagacuccugacauguua

SEQ ID NO: 935812 - RNA, 19 nt, Homo sapiens
  misc_RNA (1)...(19): siRNA sense strand
gggaauaccuuguccauca

SEQ ID NO: 935813 - RNA, 19 nt, Homo sapiens
  misc_RNA (1)...(19): siRNA sense strand
gagacggcguggucacuuu

SEQ ID NO: 935814 - RNA, 19 nt, Homo sapiens
  misc_RNA (1)...(19): siRNA sense strand
ccaagaagcaacacaaaga

SEQ ID NO: 935815 - RNA, 19 nt, Homo sapiens
  misc_RNA (1)...(19): siRNA sense strand
gcuauuugcucguuugcuu

SEQ ID NO: 935816 - RNA, 19 nt, Homo sapiens
  misc_RNA (1)...(19): siRNA sense strand
caucuccucuaccggguua

SEQ ID NO: 935817 - RNA, 19 nt, Homo sapiens
  misc_RNA (1)...(19): siRNA sense strand
ggccaugggugccuucuuc

SEQ ID NO: 935818 - RNA, 19 nt, Homo sapiens
  misc_RNA (1)...(19): siRNA sense strand
gcaccuuccugcuggguau

SEQ ID NO: 935819 - RNA, 19 nt, Homo sapiens
  misc_RNA (1)...(19): siRNA sense strand
uaacacuacugguggaagu

SEQ ID NO: 935820 - RNA, 19 nt, Homo sapiens
  misc_RNA (1)...(19): siRNA sense strand
caacaucuuccucaccauu

SEQ ID NO: 935821 - RNA, 19 nt, Homo sapiens
  misc_RNA (1)...(19): siRNA sense strand
aggccuaccucacccauuu

SEQ ID NO: 935822 - RNA, 19 nt, Homo sapiens
  misc_RNA (1)...(19): siRNA sense strand
ggucauguacuuucucuuc

SEQ ID NO: 935823 - RNA, 19 nt, Homo sapiens
  misc_RNA (1)...(19): siRNA sense strand
ccucacccauuucuucuug

SEQ ID NO: 935824 - RNA, 19 nt, Homo sapiens
  misc_RNA (1)...(19): siRNA sense strand
gaaccuggucauguacuuu

SEQ ID NO: 935825 - RNA, 19 nt, Homo sapiens
  misc_RNA (1)...(19): siRNA sense strand
ucuaccggguuaacaagua

SEQ ID NO: 935826 - RNA, 19 nt, Homo sapiens
  misc_RNA (1)...(19): siRNA sense strand
gcaacacaaagacaaguuc

SEQ ID NO: 935827 - RNA, 19 nt, Homo sapiens
  misc_RNA (1)...(19): siRNA sense strand
gaagcaacacaaagacaag

SEQ ID NO: 935828 - RNA, 19 nt, Homo sapiens
  misc_RNA (1)...(19): siRNA sense strand
cuccuucgcucacuccauu

SEQ ID NO: 935829 - RNA, 19 nt, Homo sapiens
  misc_RNA (1)...(19): siRNA sense strand
ggacagacgcgagccucuu

SEQ ID NO: 935830 - RNA, 19 nt, Homo sapiens
  misc_RNA (1)...(19): siRNA sense strand
gacagacgcgagccucuug

SEQ ID NO: 935831 - RNA, 19 nt, Homo sapiens
  misc_RNA (1)...(19): siRNA sense strand
gggcacugcuguguguaug

SEQ ID NO: 935832 - RNA, 19 nt, Homo sapiens
  misc_RNA (1)...(19): siRNA sense strand
cuucuucuccggcaucuuu

SEQ ID NO: 935833 - RNA, 19 nt, Homo sapiens
  misc_RNA (1)...(19): siRNA sense strand
ggcagacuccugacauguu

SEQ ID NO: 935834 - RNA, 19 nt, Homo sapiens
  misc_RNA (1)...(19): siRNA sense strand
cuaccggguuaacaaguau

SEQ ID NO: 935835 - RNA, 19 nt, Homo sapiens
  misc_RNA (1)...(19): siRNA sense strand
guaaugcccaggaucaucu

SEQ ID NO: 935836 - RNA, 19 nt, Homo sapiens
  misc_RNA (1)...(19): siRNA sense strand
ucaguaaugcccaggauca

SEQ ID NO: 935837 - RNA, 19 nt, Homo sapiens
  misc_RNA (1)...(19): siRNA sense strand
ccauucgcaugaugaugaa

SEQ ID NO: 935838 - RNA, 19 nt, Homo sapiens
  misc_RNA (1)...(19): siRNA sense strand
ggaauaccuuguccaucac

SEQ ID NO: 935839 - RNA, 19 nt, Homo sapiens
  misc_RNA (1)...(19): siRNA sense strand
gucacuuucuggcuauuug

SEQ ID NO: 935840 - RNA, 19 nt, Homo sapiens
  misc_RNA (1)...(19): siRNA sense strand
gaucugggcacugcugugu

SEQ ID NO: 935841 - RNA, 19 nt, Homo sapiens
  misc_RNA (1)...(19): siRNA sense strand
augugaaccuggucaugua

SEQ ID NO: 935842 - RNA, 19 nt, Homo sapiens
  misc_RNA (1)...(19): siRNA sense strand
gcgagccucuugggaauac

SEQ ID NO: 935843 - RNA, 19 nt, Homo sapiens
  misc_RNA (1)...(19): siRNA sense strand
ggguauuucauccacgaua

SEQ ID NO: 935844 - RNA, 19 nt, Homo sapiens
  misc_RNA (1)...(19): siRNA sense strand
cccauuucuucuugcguua

SEQ ID NO: 935845 - RNA, 19 nt, Homo sapiens
  misc_RNA (1)...(19): siRNA sense strand
ugaaccuggucauguacuu

SEQ ID NO: 935846 - RNA, 19 nt, Homo sapiens
  misc_RNA (1)...(19): siRNA sense strand
cuaccucacccauuucuuc

SEQ ID NO: 935847 - RNA, 19 nt, Homo sapiens
  misc_RNA (1)...(19): siRNA sense strand
acauguuaguggagauuga

SEQ ID NO: 935848 - RNA, 19 nt, Homo sapiens
  misc_RNA (1)...(19): siRNA sense strand
agaagcaacacaaagacaa

SEQ ID NO: 935849 - RNA, 19 nt, Homo sapiens
  misc_RNA (1)...(19): siRNA sense strand
ucugggcacugcugugugu

SEQ ID NO: 935850 - RNA, 19 nt, Homo sapiens
  misc_RNA (1)...(19): siRNA sense strand
ccucaccauucgcaugaug

SEQ ID NO: 935851 - RNA, 19 nt, Homo sapiens
  misc_RNA (1)...(19): siRNA sense strand
cggguuaacaaguauguga

SEQ ID NO: 935852 - RNA, 19 nt, Homo sapiens
  misc_RNA (1)...(19): siRNA sense strand
gcaacaucuuccucaccau

SEQ ID NO: 935853 - RNA, 19 nt, Homo sapiens
  misc_RNA (1)...(19): siRNA sense strand
aaucaguaaugcccaggau

SEQ ID NO: 935854 - RNA, 19 nt, Homo sapiens
  misc_RNA (1)...(19): siRNA sense strand
caacacaaagacaaguucu

SEQ ID NO: 935855 - RNA, 19 nt, Homo sapiens
  misc_RNA (1)...(19): siRNA sense strand
caagaagcaacacaaagac

SEQ ID NO: 935856 - RNA, 19 nt, Homo sapiens
  misc_RNA (1)...(19): siRNA sense strand
cauuucuucuugcguuaug

SEQ ID NO: 935857 - RNA, 19 nt, Homo sapiens
  misc_RNA (1)...(19): siRNA sense strand
guggucacuuucuggcuau

SEQ ID NO: 935858 - RNA, 19 nt, Homo sapiens
  misc_RNA (1)...(19): siRNA sense strand
acaaccugcucgucuccuu

SEQ ID NO: 935859 - RNA, 19 nt, Homo sapiens
  misc_RNA (1)...(19): siRNA sense strand
acgcgagccucuugggaau

SEQ ID NO: 935860 - RNA, 19 nt, Homo sapiens
  misc_RNA (1)...(19): siRNA sense strand
gcaagaguuucaaguauaa

SEQ ID NO: 935861 - RNA, 19 nt, Homo sapiens
  misc_RNA (1)...(19): siRNA sense strand
ggcaagaguuucaaguaua

SEQ ID NO: 935862 - RNA, 19 nt, Homo sapiens
  misc_RNA (1)...(19): siRNA sense strand
gcgagaagcccuacaagug

SEQ ID NO: 935863 - RNA, 19 nt, Homo sapiens
  misc_RNA (1)...(19): siRNA sense strand
cggcaagaguuucaaguau

SEQ ID NO: 935864 - RNA, 19 nt, Homo sapiens
  misc_RNA (1)...(19): siRNA sense strand
gcggcaagaguuucaagua

SEQ ID NO: 935865 - RNA, 19 nt, Homo sapiens
  misc_RNA (1)...(19): siRNA sense strand
auaacucgcugcuccugaa

SEQ ID NO: 935866 - RNA, 19 nt, Homo sapiens
  misc_RNA (1)...(19): siRNA sense strand
cauccacacuggcgagaag

SEQ ID NO: 935867 - RNA, 19 nt, Homo sapiens
  misc_RNA (1)...(19): siRNA sense strand
agccacagcucgcacuuca

SEQ ID NO: 935868 - RNA, 19 nt, Homo sapiens
  misc_RNA (1)...(19): siRNA sense strand
gcaccacgagccucagcuu

SEQ ID NO: 935869 - RNA, 19 nt, Homo sapiens
  misc_RNA (1)...(19): siRNA sense strand
ucuccaagacguagaggaa

SEQ ID NO: 935870 - RNA, 19 nt, Homo sapiens
  misc_RNA (1)...(19): siRNA sense strand
guggagaucggcagagaca

SEQ ID NO: 935871 - RNA, 19 nt, Homo sapiens
  misc_RNA (1)...(19): siRNA sense strand
gaagauggcuuuaauuucc

SEQ ID NO: 935872 - RNA, 19 nt, Homo sapiens
  misc_RNA (1)...(19): siRNA sense strand
gggaaaccaugaauucuau

SEQ ID NO: 935873 - RNA, 19 nt, Homo sapiens
  misc_RNA (1)...(19): siRNA sense strand
gaauaguccucaaggugaa

SEQ ID NO: 935874 - RNA, 19 nt, Homo sapiens
  misc_RNA (1)...(19): siRNA sense strand
acacuaaguuucuagaaga

SEQ ID NO: 935875 - RNA, 19 nt, Homo sapiens
  misc_RNA (1)...(19): siRNA sense strand
gcauaugacuugagugucu

SEQ ID NO: 935876 - RNA, 19 nt, Homo sapiens
  misc_RNA (1)...(19): siRNA sense strand
gacauagucuucuucacuu

SEQ ID NO: 935877 - RNA, 19 nt, Homo sapiens
  misc_RNA (1)...(19): siRNA sense strand
gaaagcagcaugcccuguu

SEQ ID NO: 935878 - RNA, 19 nt, Homo sapiens
  misc_RNA (1)...(19): siRNA sense strand
ccaaauacggaacugaaua

SEQ ID NO: 935879 - RNA, 19 nt, Homo sapiens
  misc_RNA (1)...(19): siRNA sense strand
uaacuucaguagagaguau

SEQ ID NO: 935880 - RNA, 19 nt, Homo sapiens
  misc_RNA (1)...(19): siRNA sense strand
ucuagaagaucagauugua

SEQ ID NO: 935881 - RNA, 19 nt, Homo sapiens
  misc_RNA (1)...(19): siRNA sense strand
cuuagaagauggcuuuaau

SEQ ID NO: 935882 - RNA, 19 nt, Homo sapiens
  misc_RNA (1)...(19): siRNA sense strand
aagaucagauuguacauca

SEQ ID NO: 935883 - RNA, 19 nt, Homo sapiens
  misc_RNA (1)...(19): siRNA sense strand
agacuuagaagauggcuuu

SEQ ID NO: 935884 - RNA, 19 nt, Homo sapiens
  misc_RNA (1)...(19): siRNA sense strand
ucaauuugcagacuuagaa

SEQ ID NO: 935885 - RNA, 19 nt, Homo sapiens
  misc_RNA (1)...(19): siRNA sense strand
gaacugaauaguccucaag

SEQ ID NO: 935886 - RNA, 19 nt, Homo sapiens
  misc_RNA (1)...(19): siRNA sense strand
acauagucuucuucacuua

SEQ ID NO: 935887 - RNA, 19 nt, Homo sapiens
  misc_RNA (1)...(19): siRNA sense strand
cggcgauacuacagacaua

SEQ ID NO: 935888 - RNA, 19 nt, Homo sapiens
  misc_RNA (1)...(19): siRNA sense strand
caaauacggaacugaauag

SEQ ID NO: 935889 - RNA, 19 nt, Homo sapiens
  misc_RNA (1)...(19): siRNA sense strand
ugagggagcacaauccaaa

SEQ ID NO: 935890 - RNA, 19 nt, Homo sapiens
  misc_RNA (1)...(19): siRNA sense strand
gaagacuggaauaaugaaa

SEQ ID NO: 935891 - RNA, 19 nt, Homo sapiens
  misc_RNA (1)...(19): siRNA sense strand
ggagauaucaucgauggau

SEQ ID NO: 935892 - RNA, 19 nt, Homo sapiens
  misc_RNA (1)...(19): siRNA sense strand
guagagaguauuuaacaca

SEQ ID NO: 935893 - RNA, 19 nt, Homo sapiens
  misc_RNA (1)...(19): siRNA sense strand
aaaguuccaguucaucaua

SEQ ID NO: 935894 - RNA, 19 nt, Homo sapiens
  misc_RNA (1)...(19): siRNA sense strand
gaucagauuguacaucauc

SEQ ID NO: 935895 - RNA, 19 nt, Homo sapiens
  misc_RNA (1)...(19): siRNA sense strand
cuaaguuucuagaagauca

SEQ ID NO: 935896 - RNA, 19 nt, Homo sapiens
  misc_RNA (1)...(19): siRNA sense strand
ggaaaccaugaauucuaua

SEQ ID NO: 935897 - RNA, 19 nt, Homo sapiens
  misc_RNA (1)...(19): siRNA sense strand
gcuuaaaguuccaguucau

SEQ ID NO: 935898 - RNA, 19 nt, Homo sapiens
  misc_RNA (1)...(19): siRNA sense strand
ggaacugaauaguccucaa

SEQ ID NO: 935899 - RNA, 19 nt, Homo sapiens
  misc_RNA (1)...(19): siRNA sense strand
auugaagacuggaauaaug

SEQ ID NO: 935900 - RNA, 19 nt, Homo sapiens
  misc_RNA (1)...(19): siRNA sense strand
gagcaguguaugaagauau

SEQ ID NO: 935901 - RNA, 19 nt, Homo sapiens
  misc_RNA (1)...(19): siRNA sense strand
uguucaauuugcagacuua

SEQ ID NO: 935902 - RNA, 19 nt, Homo sapiens
  misc_RNA (1)...(19): siRNA sense strand
gcuuggagauaucaucgau

SEQ ID NO: 935903 - RNA, 19 nt, Homo sapiens
  misc_RNA (1)...(19): siRNA sense strand
aaagcagcaugcccuguug

SEQ ID NO: 935904 - RNA, 19 nt, Homo sapiens
  misc_RNA (1)...(19): siRNA sense strand
cccuagaacuuguuaugga

SEQ ID NO: 935905 - RNA, 19 nt, Homo sapiens
  misc_RNA (1)...(19): siRNA sense strand
gaagaucagauuguacauc

SEQ ID NO: 935906 - RNA, 19 nt, Homo sapiens
  misc_RNA (1)...(19): siRNA sense strand
ucgcagauguucaauuugc

SEQ ID NO: 935907 - RNA, 19 nt, Homo sapiens
  misc_RNA (1)...(19): siRNA sense strand
caguagagaguauuuaaca

SEQ ID NO: 935908 - RNA, 19 nt, Homo sapiens
  misc_RNA (1)...(19): siRNA sense strand
gauaaacccaauccugaag

SEQ ID NO: 935909 - RNA, 19 nt, Homo sapiens
  misc_RNA (1)...(19): siRNA sense strand
guucaagaggcuuaaaguu

SEQ ID NO: 935910 - RNA, 19 nt, Homo sapiens
  misc_RNA (1)...(19): siRNA sense strand
uagaagaucagauuguaca

SEQ ID NO: 935911 - RNA, 19 nt, Homo sapiens
  misc_RNA (1)...(19): siRNA sense strand
cgagcaguguaugaagaua

SEQ ID NO: 935912 - RNA, 19 nt, Homo sapiens
  misc_RNA (1)...(19): siRNA sense strand
ggaucagucuucuccaaaa

SEQ ID NO: 935913 - RNA, 19 nt, Homo sapiens
  misc_RNA (1)...(19): siRNA sense strand
acaguauaaugcauccaaa

SEQ ID NO: 935914 - RNA, 19 nt, Homo sapiens
  misc_RNA (1)...(19): siRNA sense strand
uacgagcaguguaugaaga

SEQ ID NO: 935915 - RNA, 19 nt, Homo sapiens
  misc_RNA (1)...(19): siRNA sense strand
gacauguucaagaggcuua

SEQ ID NO: 935916 - RNA, 19 nt, Homo sapiens
  misc_RNA (1)...(19): siRNA sense strand
ucacuuacagggugccauu

SEQ ID NO: 935917 - RNA, 19 nt, Homo sapiens
  misc_RNA (1)...(19): siRNA sense strand
guuauggacauguucaaga

SEQ ID NO: 935918 - RNA, 19 nt, Homo sapiens
  misc_RNA (1)...(19): siRNA sense strand
ccauugaagacuggaauaa

SEQ ID NO: 935919 - RNA, 19 nt, Homo sapiens
  misc_RNA (1)...(19): siRNA sense strand
uggauauaaugcacaguau

SEQ ID NO: 935920 - RNA, 19 nt, Homo sapiens
  misc_RNA (1)...(19): siRNA sense strand
ugauaaacccaauccugaa

SEQ ID NO: 935921 - RNA, 19 nt, Homo sapiens
  misc_RNA (1)...(19): siRNA sense strand
gaacuuguuauggacaugu

SEQ ID NO: 935922 - RNA, 19 nt, Homo sapiens
  misc_RNA (1)...(19): siRNA sense strand
ggcuuaaaguuccaguuca

SEQ ID NO: 935923 - RNA, 19 nt, Homo sapiens
  misc_RNA (1)...(19): siRNA sense strand
agaagauggcuuuaauuuc

SEQ ID NO: 935924 - RNA, 19 nt, Homo sapiens
  misc_RNA (1)...(19): siRNA sense strand
agcaguguaugaagauauu

SEQ ID NO: 935925 - RNA, 19 nt, Homo sapiens
  misc_RNA (1)...(19): siRNA sense strand
ccaugaauucuauaacuuc

SEQ ID NO: 935926 - RNA, 19 nt, Homo sapiens
  misc_RNA (1)...(19): siRNA sense strand
ugaugcauaugacuugagu

SEQ ID NO: 935927 - RNA, 19 nt, Homo sapiens
  misc_RNA (1)...(19): siRNA sense strand
ggagcacaauccaaauacg

SEQ ID NO: 935928 - RNA, 19 nt, Homo sapiens
  misc_RNA (1)...(19): siRNA sense strand
gccauugaagacuggaaua

SEQ ID NO: 935929 - RNA, 19 nt, Homo sapiens
  misc_RNA (1)...(19): siRNA sense strand
gaucagucuucuccaaaau

SEQ ID NO: 935930 - RNA, 19 nt, Homo sapiens
  misc_RNA (1)...(19): siRNA sense strand
caagaggcuuaaaguucca

SEQ ID NO: 935931 - RNA, 19 nt, Homo sapiens
  misc_RNA (1)...(19): siRNA sense strand
uuauggacauguucaagag

SEQ ID NO: 935932 - RNA, 19 nt, Homo sapiens
  misc_RNA (1)...(19): siRNA sense strand
uggcuuuaauuuccaagga

SEQ ID NO: 935933 - RNA, 19 nt, Homo sapiens
  misc_RNA (1)...(19): siRNA sense strand
cuuacagggugccauugaa

SEQ ID NO: 935934 - RNA, 19 nt, Homo sapiens
  misc_RNA (1)...(19): siRNA sense strand
gauguucaauuugcagacu

SEQ ID NO: 935935 - RNA, 19 nt, Homo sapiens
  misc_RNA (1)...(19): siRNA sense strand
uugaagacuggaauaauga

SEQ ID NO: 935936 - RNA, 19 nt, Homo sapiens
  misc_RNA (1)...(19): siRNA sense strand
cauaugacuugagugucuu

SEQ ID NO: 935937 - RNA, 19 nt, Homo sapiens
  misc_RNA (1)...(19): siRNA sense strand
uucaagaggcuuaaaguuc

SEQ ID NO: 935938 - RNA, 19 nt, Homo sapiens
  misc_RNA (1)...(19): siRNA sense strand
agggagcacaauccaaaua

SEQ ID NO: 935939 - RNA, 19 nt, Homo sapiens
  misc_RNA (1)...(19): siRNA sense strand
uuaaaguuccaguucauca

SEQ ID NO: 935940 - RNA, 19 nt, Homo sapiens
  misc_RNA (1)...(19): siRNA sense strand
uuuguaccauucccuaaau

SEQ ID NO: 935941 - RNA, 19 nt, Homo sapiens
  misc_RNA (1)...(19): siRNA sense strand
gggcguggaucagucuucu

SEQ ID NO: 935942 - RNA, 19 nt, Homo sapiens
  misc_RNA (1)...(19): siRNA sense strand
agacuggaauaaugaaagc

SEQ ID NO: 935943 - RNA, 19 nt, Homo sapiens
  misc_RNA (1)...(19): siRNA sense strand
gagcgucuuuucuccuuug

SEQ ID NO: 935944 - RNA, 19 nt, Homo sapiens
  misc_RNA (1)...(19): siRNA sense strand
cacuaaguuucuagaagau

SEQ ID NO: 935945 - RNA, 19 nt, Homo sapiens
  misc_RNA (1)...(19): siRNA sense strand
aacacuaaguuucuagaag

SEQ ID NO: 935946 - RNA, 19 nt, Homo sapiens
  misc_RNA (1)...(19): siRNA sense strand
ggggaaaccaugaauucua

SEQ ID NO: 935947 - RNA, 19 nt, Homo sapiens
  misc_RNA (1)...(19): siRNA sense strand
ugaagacuggaauaaugaa

SEQ ID NO: 935948 - RNA, 19 nt, Homo sapiens
  misc_RNA (1)...(19): siRNA sense strand
gggagcacaauccaaauac

SEQ ID NO: 935949 - RNA, 19 nt, Homo sapiens
  misc_RNA (1)...(19): siRNA sense strand
guuucuagaagaucagauu

SEQ ID NO: 935950 - RNA, 19 nt, Homo sapiens
  misc_RNA (1)...(19): siRNA sense strand
gagggagcacaauccaaau

SEQ ID NO: 935951 - RNA, 19 nt, Homo sapiens
  misc_RNA (1)...(19): siRNA sense strand
gaagagaguugugguugua

SEQ ID NO: 935952 - RNA, 19 nt, Homo sapiens
  misc_RNA (1)...(19): siRNA sense strand
ccagagaaguuuacacuga

SEQ ID NO: 935953 - RNA, 19 nt, Homo sapiens
  misc_RNA (1)...(19): siRNA sense strand
gaauagcccucagaagaaa

SEQ ID NO: 935954 - RNA, 19 nt, Homo sapiens
  misc_RNA (1)...(19): siRNA sense strand
gaggaaagguuuacaagca

SEQ ID NO: 935955 - RNA, 19 nt, Homo sapiens
  misc_RNA (1)...(19): siRNA sense strand
gaaagauucuggaggaaag

SEQ ID NO: 935956 - RNA, 19 nt, Homo sapiens
  misc_RNA (1)...(19): siRNA sense strand
gcccuggucuucacauuaa

SEQ ID NO: 935957 - RNA, 19 nt, Homo sapiens
  misc_RNA (1)...(19): siRNA sense strand
cagaauagcccucagaaga

SEQ ID NO: 935958 - RNA, 19 nt, Homo sapiens
  misc_RNA (1)...(19): siRNA sense strand
ucagaagccuuggaauuaa

SEQ ID NO: 935959 - RNA, 19 nt, Homo sapiens
  misc_RNA (1)...(19): siRNA sense strand
gaaucuuguugaagccuua

SEQ ID NO: 935960 - RNA, 19 nt, Homo sapiens
  misc_RNA (1)...(19): siRNA sense strand
cagaagccuuggaauuaaa

SEQ ID NO: 935961 - RNA, 19 nt, Homo sapiens
  misc_RNA (1)...(19): siRNA sense strand
caagaugcguaaacacuca

SEQ ID NO: 935962 - RNA, 19 nt, Homo sapiens
  misc_RNA (1)...(19): siRNA sense strand
aaagauggaucaccuacug

SEQ ID NO: 935963 - RNA, 19 nt, Homo sapiens
  misc_RNA (1)...(19): siRNA sense strand
guugaagccuuacaagaau

SEQ ID NO: 935964 - RNA, 19 nt, Homo sapiens
  misc_RNA (1)...(19): siRNA sense strand
ugaacaagaugcguaaaca

SEQ ID NO: 935965 - RNA, 19 nt, Homo sapiens
  misc_RNA (1)...(19): siRNA sense strand
cucagaagccuuggaauua

SEQ ID NO: 935966 - RNA, 19 nt, Homo sapiens
  misc_RNA (1)...(19): siRNA sense strand
agaauagcccucagaagaa

SEQ ID NO: 935967 - RNA, 19 nt, Homo sapiens
  misc_RNA (1)...(19): siRNA sense strand
gaguugugguuguagaaga

SEQ ID NO: 935968 - RNA, 19 nt, Homo sapiens
  misc_RNA (1)...(19): siRNA sense strand
ugaagagaguugugguugu

SEQ ID NO: 935969 - RNA, 19 nt, Homo sapiens
  misc_RNA (1)...(19): siRNA sense strand
ugaagccuuacaagaauua

SEQ ID NO: 935970 - RNA, 19 nt, Homo sapiens
  misc_RNA (1)...(19): siRNA sense strand
gagcccuggucuucacauu

SEQ ID NO: 935971 - RNA, 19 nt, Homo sapiens
  misc_RNA (1)...(19): siRNA sense strand
ggugagagcccuggucuuc

SEQ ID NO: 935972 - RNA, 19 nt, Homo sapiens
  misc_RNA (1)...(19): siRNA sense strand
uaaacacucagauucagaa

SEQ ID NO: 935973 - RNA, 19 nt, Homo sapiens
  misc_RNA (1)...(19): siRNA sense strand
cuauugaaguuagaaguga

SEQ ID NO: 935974 - RNA, 19 nt, Homo sapiens
  misc_RNA (1)...(19): siRNA sense strand
ucucagaagccuuggaauu

SEQ ID NO: 935975 - RNA, 19 nt, Homo sapiens
  misc_RNA (1)...(19): siRNA sense strand
acaagcaggccacgauuga

SEQ ID NO: 935976 - RNA, 19 nt, Homo sapiens
  misc_RNA (1)...(19): siRNA sense strand
guaaacacucagauucaga

SEQ ID NO: 935977 - RNA, 19 nt, Homo sapiens
  misc_RNA (1)...(19): siRNA sense strand
uguugaagccuuacaagaa

SEQ ID NO: 935978 - RNA, 19 nt, Homo sapiens
  misc_RNA (1)...(19): siRNA sense strand
gaucaaaccaaagagaauc

SEQ ID NO: 935979 - RNA, 19 nt, Homo sapiens
  misc_RNA (1)...(19): siRNA sense strand
ggauaaauucgucauucga

SEQ ID NO: 935980 - RNA, 19 nt, Homo sapiens
  misc_RNA (1)...(19): siRNA sense strand
gaucaccuacugguugaaa

SEQ ID NO: 935981 - RNA, 19 nt, Homo sapiens
  misc_RNA (1)...(19): siRNA sense strand
gcguaaacacucagauuca

SEQ ID NO: 935982 - RNA, 19 nt, Homo sapiens
  misc_RNA (1)...(19): siRNA sense strand
gcucccgccucauuaaugg

SEQ ID NO: 935983 - RNA, 19 nt, Homo sapiens
  misc_RNA (1)...(19): siRNA sense strand
uuaaagcaccgagcugaaa

SEQ ID NO: 935984 - RNA, 19 nt, Homo sapiens
  misc_RNA (1)...(19): siRNA sense strand
gaacgccuagaauccagaa

SEQ ID NO: 935985 - RNA, 19 nt, Homo sapiens
  misc_RNA (1)...(19): siRNA sense strand
uggaucaccuacugguuga

SEQ ID NO: 935986 - RNA, 19 nt, Homo sapiens
  misc_RNA (1)...(19): siRNA sense strand
aaaccgagucguugaggaa

SEQ ID NO: 935987 - RNA, 19 nt, Homo sapiens
  misc_RNA (1)...(19): siRNA sense strand
gagaguugugguuguagaa

SEQ ID NO: 935988 - RNA, 19 nt, Homo sapiens
  misc_RNA (1)...(19): siRNA sense strand
ucagaaauuacucucagaa

SEQ ID NO: 935989 - RNA, 19 nt, Homo sapiens
  misc_RNA (1)...(19): siRNA sense strand
aguuagaagugaucccaaa

SEQ ID NO: 935990 - RNA, 19 nt, Homo sapiens
  misc_RNA (1)...(19): siRNA sense strand
cgccuagaauccagaauag

SEQ ID NO: 935991 - RNA, 19 nt, Homo sapiens
  misc_RNA (1)...(19): siRNA sense strand
gaaaauauugaacgggaaa

SEQ ID NO: 935992 - RNA, 19 nt, Homo sapiens
  misc_RNA (1)...(19): siRNA sense strand
ccagggaaguguuaaaauc

SEQ ID NO: 935993 - RNA, 19 nt, Homo sapiens
  misc_RNA (1)...(19): siRNA sense strand
uaaagcaccgagcugaaau

SEQ ID NO: 935994 - RNA, 19 nt, Homo sapiens
  misc_RNA (1)...(19): siRNA sense strand
gaacaagaugcguaaacac

SEQ ID NO: 935995 - RNA, 19 nt, Homo sapiens
  misc_RNA (1)...(19): siRNA sense strand
ugcuggagcuuccugauca

SEQ ID NO: 935996 - RNA, 19 nt, Homo sapiens
  misc_RNA (1)...(19): siRNA sense strand
agagaguugugguuguaga

SEQ ID NO: 935997 - RNA, 19 nt, Homo sapiens
  misc_RNA (1)...(19): siRNA sense strand
gcuggagcuuccugaucaa

SEQ ID NO: 935998 - RNA, 19 nt, Homo sapiens
  misc_RNA (1)...(19): siRNA sense strand
acgccuagaauccagaaua

SEQ ID NO: 935999 - RNA, 19 nt, Homo sapiens
  misc_RNA (1)...(19): siRNA sense strand
gauucuggaggaaagguuu

SEQ ID NO: 936000 - RNA, 19 nt, Homo sapiens
  misc_RNA (1)...(19): siRNA sense strand
uugaagccuuacaagaauu

SEQ ID NO: 936001 - RNA, 19 nt, Homo sapiens
  misc_RNA (1)...(19): siRNA sense strand
gcccucagaagaaagauuc

SEQ ID NO: 936002 - RNA, 19 nt, Homo sapiens
  misc_RNA (1)...(19): siRNA sense strand
ggagcuuccugaucaaacc

SEQ ID NO: 936003 - RNA, 19 nt, Homo sapiens
  misc_RNA (1)...(19): siRNA sense strand
ugagagcccuggucuucac

SEQ ID NO: 936004 - RNA, 19 nt, Homo sapiens
  misc_RNA (1)...(19): siRNA sense strand
ucucugcucccgccucauu

SEQ ID NO: 936005 - RNA, 19 nt, Homo sapiens
  misc_RNA (1)...(19): siRNA sense strand
cguaaacacucagauucag

SEQ ID NO: 936006 - RNA, 19 nt, Homo sapiens
  misc_RNA (1)...(19): siRNA sense strand
gauggaucaccuacugguu

SEQ ID NO: 936007 - RNA, 19 nt, Homo sapiens
  misc_RNA (1)...(19): siRNA sense strand
caagcaggccacgauugaa

SEQ ID NO: 936008 - RNA, 19 nt, Homo sapiens
  misc_RNA (1)...(19): siRNA sense strand
gucauucgaacgccuagaa

SEQ ID NO: 936009 - RNA, 19 nt, Homo sapiens
  misc_RNA (1)...(19): siRNA sense strand
aagcaggccacgauugaau

SEQ ID NO: 936010 - RNA, 19 nt, Homo sapiens
  misc_RNA (1)...(19): siRNA sense strand
agagaaguuuacacugagu

SEQ ID NO: 936011 - RNA, 19 nt, Homo sapiens
  misc_RNA (1)...(19): siRNA sense strand
acaaagaugcguucaaaua

SEQ ID NO: 936012 - RNA, 19 nt, Homo sapiens
  misc_RNA (1)...(19): siRNA sense strand
ggaaggacuuugugaagga

SEQ ID NO: 936013 - RNA, 19 nt, Homo sapiens
  misc_RNA (1)...(19): siRNA sense strand
uuacaaagaugcguucaaa

SEQ ID NO: 936014 - RNA, 19 nt, Homo sapiens
  misc_RNA (1)...(19): siRNA sense strand
caaggaagcccugaaauga

SEQ ID NO: 936015 - RNA, 19 nt, Homo sapiens
  misc_RNA (1)...(19): siRNA sense strand
uggcauagaucuugggaaa

SEQ ID NO: 936016 - RNA, 19 nt, Homo sapiens
  misc_RNA (1)...(19): siRNA sense strand
aggaauuggugcuggauua

SEQ ID NO: 936017 - RNA, 19 nt, Homo sapiens
  misc_RNA (1)...(19): siRNA sense strand
ggaccuguauaauggaaug

SEQ ID NO: 936018 - RNA, 19 nt, Homo sapiens
  misc_RNA (1)...(19): siRNA sense strand
caaagaugcguucaaauag

SEQ ID NO: 936019 - RNA, 19 nt, Homo sapiens
  misc_RNA (1)...(19): siRNA sense strand
gaaggacuuugugaaggaa

SEQ ID NO: 936020 - RNA, 19 nt, Homo sapiens
  misc_RNA (1)...(19): siRNA sense strand
ggagaugcuucuacuggau

SEQ ID NO: 936021 - RNA, 19 nt, Homo sapiens
  misc_RNA (1)...(19): siRNA sense strand
caggaccucuucccauuga

SEQ ID NO: 936022 - RNA, 19 nt, Homo sapiens
  misc_RNA (1)...(19): siRNA sense strand
ccaaggaagcccugaaaug

SEQ ID NO: 936023 - RNA, 19 nt, Homo sapiens
  misc_RNA (1)...(19): siRNA sense strand
aaagaugcguucaaauagu

SEQ ID NO: 936024 - RNA, 19 nt, Homo sapiens
  misc_RNA (1)...(19): siRNA sense strand
gcauagaucuugggaaaau

SEQ ID NO: 936025 - RNA, 19 nt, Homo sapiens
  misc_RNA (1)...(19): siRNA sense strand
gggaaugucugagggaaag

SEQ ID NO: 936026 - RNA, 19 nt, Homo sapiens
  misc_RNA (1)...(19): siRNA sense strand
gaccaaggaagcccugaaa

SEQ ID NO: 936027 - RNA, 19 nt, Homo sapiens
  misc_RNA (1)...(19): siRNA sense strand
aggaagcccugaaaugaau

SEQ ID NO: 936028 - RNA, 19 nt, Homo sapiens
  misc_RNA (1)...(19): siRNA sense strand
ugucagcguugguauuuca

SEQ ID NO: 936029 - RNA, 19 nt, Homo sapiens
  misc_RNA (1)...(19): siRNA sense strand
aagaugcguucaaauagug

SEQ ID NO: 936030 - RNA, 19 nt, Homo sapiens
  misc_RNA (1)...(19): siRNA sense strand
gcguugguauuucacauuc

SEQ ID NO: 936031 - RNA, 19 nt, Homo sapiens
  misc_RNA (1)...(19): siRNA sense strand
gcagaaaugcaugcuguca

SEQ ID NO: 936032 - RNA, 19 nt, Homo sapiens
  misc_RNA (1)...(19): siRNA sense strand
guugguauuucacauucaa

SEQ ID NO: 936033 - RNA, 19 nt, Homo sapiens
  misc_RNA (1)...(19): siRNA sense strand
gguuggcacuuguucagau

SEQ ID NO: 936034 - RNA, 19 nt, Homo sapiens
  misc_RNA (1)...(19): siRNA sense strand
ucgcaucauuauugaagaa

SEQ ID NO: 936035 - RNA, 19 nt, Homo sapiens
  misc_RNA (1)...(19): siRNA sense strand
uacaagcaguguucaugga

SEQ ID NO: 936036 - RNA, 19 nt, Homo sapiens
  misc_RNA (1)...(19): siRNA sense strand
guuggcacuuguucagauu

SEQ ID NO: 936037 - RNA, 19 nt, Homo sapiens
  misc_RNA (1)...(19): siRNA sense strand
ucaauggagcugaauguuc

SEQ ID NO: 936038 - RNA, 19 nt, Homo sapiens
  misc_RNA (1)...(19): siRNA sense strand
aagcaguguucauggaguu

SEQ ID NO: 936039 - RNA, 19 nt, Homo sapiens
  misc_RNA (1)...(19): siRNA sense strand
gugguggaccuguauaaug

SEQ ID NO: 936040 - RNA, 19 nt, Homo sapiens
  misc_RNA (1)...(19): siRNA sense strand
aauggaaugugcuuacaag

SEQ ID NO: 936041 - RNA, 19 nt, Homo sapiens
  misc_RNA (1)...(19): siRNA sense strand
ucaguuucucgcaucauua

SEQ ID NO: 936042 - RNA, 19 nt, Homo sapiens
  misc_RNA (1)...(19): siRNA sense strand
ugguggaccuguauaaugg

SEQ ID NO: 936043 - RNA, 19 nt, Homo sapiens
  misc_RNA (1)...(19): siRNA sense strand
uucaggaccucuucccauu

SEQ ID NO: 936044 - RNA, 19 nt, Homo sapiens
  misc_RNA (1)...(19): siRNA sense strand
ggacacccaacuacaagca

SEQ ID NO: 936045 - RNA, 19 nt, Homo sapiens
  misc_RNA (1)...(19): siRNA sense strand
ggaccaaggaagcccugaa

SEQ ID NO: 936046 - RNA, 19 nt, Homo sapiens
  misc_RNA (1)...(19): siRNA sense strand
ggauggauucaaaggagaa

SEQ ID NO: 936047 - RNA, 19 nt, Homo sapiens
  misc_RNA (1)...(19): siRNA sense strand
uaucuggguuggcacuugu

SEQ ID NO: 936048 - RNA, 19 nt, Homo sapiens
  misc_RNA (1)...(19): siRNA sense strand
ucgcacuucuucuguggaa

SEQ ID NO: 936049 - RNA, 19 nt, Homo sapiens
  misc_RNA (1)...(19): siRNA sense strand
cccauugaagcuauaauuu

SEQ ID NO: 936050 - RNA, 19 nt, Homo sapiens
  misc_RNA (1)...(19): siRNA sense strand
ccaacuacaagcaguguuc

SEQ ID NO: 936051 - RNA, 19 nt, Homo sapiens
  misc_RNA (1)...(19): siRNA sense strand
aaggaagcccugaaaugaa

SEQ ID NO: 936052 - RNA, 19 nt, Homo sapiens
  misc_RNA (1)...(19): siRNA sense strand
cggcuaaaaugcagaaaug

SEQ ID NO: 936053 - RNA, 19 nt, Homo sapiens
  misc_RNA (1)...(19): siRNA sense strand
guggaccuguauaauggaa

SEQ ID NO: 936054 - RNA, 19 nt, Homo sapiens
  misc_RNA (1)...(19): siRNA sense strand
uuucucgcaucauuauuga

SEQ ID NO: 936055 - RNA, 19 nt, Homo sapiens
  misc_RNA (1)...(19): siRNA sense strand
aauuggugcuggauuagug

SEQ ID NO: 936056 - RNA, 19 nt, Homo sapiens
  misc_RNA (1)...(19): siRNA sense strand
ggaauuggugcuggauuag

SEQ ID NO: 936057 - RNA, 19 nt, Homo sapiens
  misc_RNA (1)...(19): siRNA sense strand
auugcggaguguacauuua

SEQ ID NO: 936058 - RNA, 19 nt, Homo sapiens
  misc_RNA (1)...(19): siRNA sense strand
guuucucgcaucauuauug

SEQ ID NO: 936059 - RNA, 19 nt, Homo sapiens
  misc_RNA (1)...(19): siRNA sense strand
uaauauucaucgcacuucu

SEQ ID NO: 936060 - RNA, 19 nt, Homo sapiens
  misc_RNA (1)...(19): siRNA sense strand
gcguucaaauagugcucua

SEQ ID NO: 936061 - RNA, 19 nt, Homo sapiens
  misc_RNA (1)...(19): siRNA sense strand
ggaagcccugaaaugaauu

SEQ ID NO: 936062 - RNA, 19 nt, Homo sapiens
  misc_RNA (1)...(19): siRNA sense strand
uggauggaauucaguuucu

SEQ ID NO: 936063 - RNA, 19 nt, Homo sapiens
  misc_RNA (1)...(19): siRNA sense strand
ggacuuugugaaggaauug

SEQ ID NO: 936064 - RNA, 19 nt, Homo sapiens
  misc_RNA (1)...(19): siRNA sense strand
gauuaguggauguugcuau

SEQ ID NO: 936065 - RNA, 19 nt, Homo sapiens
  misc_RNA (1)...(19): siRNA sense strand
guucaaauagugcucuaag

SEQ ID NO: 936066 - RNA, 19 nt, Homo sapiens
  misc_RNA (1)...(19): siRNA sense strand
ggauggaauucaguuucuc

SEQ ID NO: 936067 - RNA, 19 nt, Homo sapiens
  misc_RNA (1)...(19): siRNA sense strand
guggaaggacuuugugaag

SEQ ID NO: 936068 - RNA, 19 nt, Homo sapiens
  misc_RNA (1)...(19): siRNA sense strand
gaagcccugaaaugaauuc

SEQ ID NO: 936069 - RNA, 19 nt, Homo sapiens
  misc_RNA (1)...(19): siRNA sense strand
uaauggaaugugcuuacaa

SEQ ID NO: 936070 - RNA, 19 nt, Homo sapiens
  misc_RNA (1)...(19): siRNA sense strand
gaauguucaggaccucuuc

SEQ ID NO: 936071 - RNA, 19 nt, Homo sapiens
  misc_RNA (1)...(19): siRNA sense strand
uucaaauagugcucuaaga

SEQ ID NO: 936072 - RNA, 19 nt, Homo sapiens
  misc_RNA (1)...(19): siRNA sense strand
guauaauggaaugugcuua

SEQ ID NO: 936073 - RNA, 19 nt, Homo sapiens
  misc_RNA (1)...(19): siRNA sense strand
gaaggaauuggugcuggau

SEQ ID NO: 936074 - RNA, 19 nt, Homo sapiens
  misc_RNA (1)...(19): siRNA sense strand
gcaucauuauugaagaacu

SEQ ID NO: 936075 - RNA, 19 nt, Homo sapiens
  misc_RNA (1)...(19): siRNA sense strand
uucaguuucucgcaucauu

SEQ ID NO: 936076 - RNA, 19 nt, Homo sapiens
  misc_RNA (1)...(19): siRNA sense strand
uauaauggaaugugcuuac

SEQ ID NO: 936077 - RNA, 19 nt, Homo sapiens
  misc_RNA (1)...(19): siRNA sense strand
caguuucucgcaucauuau

SEQ ID NO: 936078 - RNA, 19 nt, Homo sapiens
  misc_RNA (1)...(19): siRNA sense strand
aaaaggagaugcuucuacu

SEQ ID NO: 936079 - RNA, 19 nt, Homo sapiens
  misc_RNA (1)...(19): siRNA sense strand
uaguggauguugcuaucug

SEQ ID NO: 936080 - RNA, 19 nt, Homo sapiens
  misc_RNA (1)...(19): siRNA sense strand
gugcuggauuaguggaugu

SEQ ID NO: 936081 - RNA, 19 nt, Homo sapiens
  misc_RNA (1)...(19): siRNA sense strand
gaauuggugcuggauuagu

SEQ ID NO: 936082 - RNA, 19 nt, Homo sapiens
  misc_RNA (1)...(19): siRNA sense strand
gcaaauauguguauaacca

SEQ ID NO: 936083 - RNA, 19 nt, Homo sapiens
  misc_RNA (1)...(19): siRNA sense strand
uagcugaccugcucaagua

SEQ ID NO: 936084 - RNA, 19 nt, Homo sapiens
  misc_RNA (1)...(19): siRNA sense strand
gacaugugcuguuugcuaa

SEQ ID NO: 936085 - RNA, 19 nt, Homo sapiens
  misc_RNA (1)...(19): siRNA sense strand
ggacaugugcuguuugcua

SEQ ID NO: 936086 - RNA, 19 nt, Homo sapiens
  misc_RNA (1)...(19): siRNA sense strand
auucaaaccugguguauga

SEQ ID NO: 936087 - RNA, 19 nt, Homo sapiens
  misc_RNA (1)...(19): siRNA sense strand
cgacuggcuuugcaaauau

SEQ ID NO: 936088 - RNA, 19 nt, Homo sapiens
  misc_RNA (1)...(19): siRNA sense strand
ggucauuccuuaacugcuu

SEQ ID NO: 936089 - RNA, 19 nt, Homo sapiens
  misc_RNA (1)...(19): siRNA sense strand
gcacaaugggcccuuggua

SEQ ID NO: 936090 - RNA, 19 nt, Homo sapiens
  misc_RNA (1)...(19): siRNA sense strand
uggcagagcggguuuguaa

SEQ ID NO: 936091 - RNA, 19 nt, Homo sapiens
  misc_RNA (1)...(19): siRNA sense strand
acaaagagaagccggagua

SEQ ID NO: 936092 - RNA, 19 nt, Homo sapiens
  misc_RNA (1)...(19): siRNA sense strand
gcuugggccuugugacauu

SEQ ID NO: 936093 - RNA, 19 nt, Homo sapiens
  misc_RNA (1)...(19): siRNA sense strand
gcagagcggguuuguaaca

SEQ ID NO: 936094 - RNA, 19 nt, Homo sapiens
  misc_RNA (1)...(19): siRNA sense strand
acgacuggcuuugcaaaua

SEQ ID NO: 936095 - RNA, 19 nt, Homo sapiens
  misc_RNA (1)...(19): siRNA sense strand
uaccuguggucauuccuua

SEQ ID NO: 936096 - RNA, 19 nt, Homo sapiens
  misc_RNA (1)...(19): siRNA sense strand
ggccaaucaugaccuuuga

SEQ ID NO: 936097 - RNA, 19 nt, Homo sapiens
  misc_RNA (1)...(19): siRNA sense strand
caagaggugcuguuucaug

SEQ ID NO: 936098 - RNA, 19 nt, Homo sapiens
  misc_RNA (1)...(19): siRNA sense strand
gaacagccucaaauucaca

SEQ ID NO: 936099 - RNA, 19 nt, Homo sapiens
  misc_RNA (1)...(19): siRNA sense strand
caucuucuuucacuucuuc

SEQ ID NO: 936100 - RNA, 19 nt, Homo sapiens
  misc_RNA (1)...(19): siRNA sense strand
caucauggccgucgacauc

SEQ ID NO: 936101 - RNA, 19 nt, Homo sapiens
  misc_RNA (1)...(19): siRNA sense strand
gaacuucugggccaucauc

SEQ ID NO: 936102 - RNA, 19 nt, Homo sapiens
  misc_RNA (1)...(19): siRNA sense strand
gcguccagcugguaaagga

SEQ ID NO: 936103 - RNA, 19 nt, Homo sapiens
  misc_RNA (1)...(19): siRNA sense strand
cgacaucuucuuucacuuc

SEQ ID NO: 936104 - RNA, 19 nt, Homo sapiens
  misc_RNA (1)...(19): siRNA sense strand
uuacggaaacgcacuuuga

SEQ ID NO: 936105 - RNA, 19 nt, Homo sapiens
  misc_RNA (1)...(19): siRNA sense strand
uucaagaggugcuguuuca

SEQ ID NO: 936106 - RNA, 19 nt, Homo sapiens
  misc_RNA (1)...(19): siRNA sense strand
caacgacuggcuuugcaaa

SEQ ID NO: 936107 - RNA, 19 nt, Homo sapiens
  misc_RNA (1)...(19): siRNA sense strand
ucgagugggugaugugguu

SEQ ID NO: 936108 - RNA, 19 nt, Homo sapiens
  misc_RNA (1)...(19): siRNA sense strand
caaauucacagagcugguu

SEQ ID NO: 936109 - RNA, 19 nt, Homo sapiens
  misc_RNA (1)...(19): siRNA sense strand
ugaccgccacuacuccuua

SEQ ID NO: 936110 - RNA, 19 nt, Homo sapiens
  misc_RNA (1)...(19): siRNA sense strand
aagcuccgcuccuggaugu

SEQ ID NO: 936111 - RNA, 19 nt, Homo sapiens
  misc_RNA (1)...(19): siRNA sense strand
gcacgaugguugccccaaa

SEQ ID NO: 936112 - RNA, 19 nt, Homo sapiens
  misc_RNA (1)...(19): siRNA sense strand
ucugggccaucaucaugua

SEQ ID NO: 936113 - RNA, 19 nt, Homo sapiens
  misc_RNA (1)...(19): siRNA sense strand
ucaccgcacucuacgucuu

SEQ ID NO: 936114 - RNA, 19 nt, Homo sapiens
  misc_RNA (1)...(19): siRNA sense strand
ggccgucgacaucuucuuu

SEQ ID NO: 936115 - RNA, 19 nt, Homo sapiens
  misc_RNA (1)...(19): siRNA sense strand
gggccaaucaugaccuuug

SEQ ID NO: 936116 - RNA, 19 nt, Homo sapiens
  misc_RNA (1)...(19): siRNA sense strand
ucgcuggccuagccuauuc

SEQ ID NO: 936117 - RNA, 19 nt, Homo sapiens
  misc_RNA (1)...(19): siRNA sense strand
gaccuuugaucgcuuccau

SEQ ID NO: 936118 - RNA, 19 nt, Homo sapiens
  misc_RNA (1)...(19): siRNA sense strand
gaagcaggacaaagagaag

SEQ ID NO: 936119 - RNA, 19 nt, Homo sapiens
  misc_RNA (1)...(19): siRNA sense strand
gcagaagcaggacaaagag

SEQ ID NO: 936120 - RNA, 19 nt, Homo sapiens
  misc_RNA (1)...(19): siRNA sense strand
gggccaucaucauguacaa

SEQ ID NO: 936121 - RNA, 19 nt, Homo sapiens
  misc_RNA (1)...(19): siRNA sense strand
uaacugcuuuggccucaac

SEQ ID NO: 936122 - RNA, 19 nt, Homo sapiens
  misc_RNA (1)...(19): siRNA sense strand
guacauuggccggaagaug

SEQ ID NO: 936123 - RNA, 19 nt, Homo sapiens
  misc_RNA (1)...(19): siRNA sense strand
agauggauguggcugacuu

SEQ ID NO: 936124 - RNA, 19 nt, Homo sapiens
  misc_RNA (1)...(19): siRNA sense strand
cgaccuggcugggaguaca

SEQ ID NO: 936125 - RNA, 19 nt, Homo sapiens
  misc_RNA (1)...(19): siRNA sense strand
agaagcaggacaaagagaa

SEQ ID NO: 936126 - RNA, 19 nt, Homo sapiens
  misc_RNA (1)...(19): siRNA sense strand
gggcaucaagacagcauug

SEQ ID NO: 936127 - RNA, 19 nt, Homo sapiens
  misc_RNA (1)...(19): siRNA sense strand
gucgacaucuucuuucacu

SEQ ID NO: 936128 - RNA, 19 nt, Homo sapiens
  misc_RNA (1)...(19): siRNA sense strand
gacaucuucuuucacuucu

SEQ ID NO: 936129 - RNA, 19 nt, Homo sapiens
  misc_RNA (1)...(19): siRNA sense strand
gaccgccacuacuccuuag

SEQ ID NO: 936130 - RNA, 19 nt, Homo sapiens
  misc_RNA (1)...(19): siRNA sense strand
ucgcaacgucaucaucuuu

SEQ ID NO: 936131 - RNA, 19 nt, Homo sapiens
  misc_RNA (1)...(19): siRNA sense strand
gagccugaacagccucaaa

SEQ ID NO: 936132 - RNA, 19 nt, Homo sapiens
  misc_RNA (1)...(19): siRNA sense strand
gucauuccuuaacugcuuu

SEQ ID NO: 936133 - RNA, 19 nt, Homo sapiens
  misc_RNA (1)...(19): siRNA sense strand
gacuggcuuugcaaauaug

SEQ ID NO: 936134 - RNA, 19 nt, Homo sapiens
  misc_RNA (1)...(19): siRNA sense strand
ccugaacagccucaaauuc

SEQ ID NO: 936135 - RNA, 19 nt, Homo sapiens
  misc_RNA (1)...(19): siRNA sense strand
cuaccugcccuucuucuuc

SEQ ID NO: 936136 - RNA, 19 nt, Homo sapiens
  misc_RNA (1)...(19): siRNA sense strand
agcagaagcaggacaaaga

SEQ ID NO: 936137 - RNA, 19 nt, Homo sapiens
  misc_RNA (1)...(19): siRNA sense strand
ugaugugguucaccuccuu

SEQ ID NO: 936138 - RNA, 19 nt, Homo sapiens
  misc_RNA (1)...(19): siRNA sense strand
gccguccucuuugguguug

SEQ ID NO: 936139 - RNA, 19 nt, Homo sapiens
  misc_RNA (1)...(19): siRNA sense strand
gagcagaagcaggacaaag

SEQ ID NO: 936140 - RNA, 19 nt, Homo sapiens
  misc_RNA (1)...(19): siRNA sense strand
cgaauugaggccucucugu

SEQ ID NO: 936141 - RNA, 19 nt, Homo sapiens
  misc_RNA (1)...(19): siRNA sense strand
cuccggacaugugcuguuu

SEQ ID NO: 936142 - RNA, 19 nt, Homo sapiens
  misc_RNA (1)...(19): siRNA sense strand
ccagguggagccagugaga

SEQ ID NO: 936143 - RNA, 19 nt, Homo sapiens
  misc_RNA (1)...(19): siRNA sense strand
ucuucuacauccucacuau

SEQ ID NO: 936144 - RNA, 19 nt, Homo sapiens
  misc_RNA (1)...(19): siRNA sense strand
gaugugguucaccuccuuu

SEQ ID NO: 936145 - RNA, 19 nt, Homo sapiens
  misc_RNA (1)...(19): siRNA sense strand
agccuggccuccuucaaga

SEQ ID NO: 936146 - RNA, 19 nt, Homo sapiens
  misc_RNA (1)...(19): siRNA sense strand
ggcaucaacgacuggcuuu

SEQ ID NO: 936147 - RNA, 19 nt, Homo sapiens
  misc_RNA (1)...(19): siRNA sense strand
uaccugcccuucuucuucu

SEQ ID NO: 936148 - RNA, 19 nt, Homo sapiens
  misc_RNA (1)...(19): siRNA sense strand
ucauggccgucgacaucuu

SEQ ID NO: 936149 - RNA, 19 nt, Homo sapiens
  misc_RNA (1)...(19): siRNA sense strand
uugcuaaacucugcacgau

SEQ ID NO: 936150 - RNA, 19 nt, Homo sapiens
  misc_RNA (1)...(19): siRNA sense strand
gccugaacagccucaaauu

SEQ ID NO: 936151 - RNA, 19 nt, Homo sapiens
  misc_RNA (1)...(19): siRNA sense strand
gaacaagugugacauggaa

SEQ ID NO: 936152 - RNA, 19 nt, Homo sapiens
  misc_RNA (1)...(19): siRNA sense strand
gagaacagcuuggguuuga

SEQ ID NO: 936153 - RNA, 19 nt, Homo sapiens
  misc_RNA (1)...(19): siRNA sense strand
ggacaaugcccaaguuauu

SEQ ID NO: 936154 - RNA, 19 nt, Homo sapiens
  misc_RNA (1)...(19): siRNA sense strand
ugagcgaggucaacauuua

SEQ ID NO: 936155 - RNA, 19 nt, Homo sapiens
  misc_RNA (1)...(19): siRNA sense strand
gcagaugacuccuuuacau

SEQ ID NO: 936156 - RNA, 19 nt, Homo sapiens
  misc_RNA (1)...(19): siRNA sense strand
caagauuggucaacucaaa

SEQ ID NO: 936157 - RNA, 19 nt, Homo sapiens
  misc_RNA (1)...(19): siRNA sense strand
gaucagaacuuugacuaca

SEQ ID NO: 936158 - RNA, 19 nt, Homo sapiens
  misc_RNA (1)...(19): siRNA sense strand
ugggaucgauuucaaagua

SEQ ID NO: 936159 - RNA, 19 nt, Homo sapiens
  misc_RNA (1)...(19): siRNA sense strand
ggacacagcaggccaggaa

SEQ ID NO: 936160 - RNA, 19 nt, Homo sapiens
  misc_RNA (1)...(19): siRNA sense strand
caggaaagauacaggacua

SEQ ID NO: 936161 - RNA, 19 nt, Homo sapiens
  misc_RNA (1)...(19): siRNA sense strand
gggaucgauuucaaaguaa

SEQ ID NO: 936162 - RNA, 19 nt, Homo sapiens
  misc_RNA (1)...(19): siRNA sense strand
gcacaguugggaucgauuu

SEQ ID NO: 936163 - RNA, 19 nt, Homo sapiens
  misc_RNA (1)...(19): siRNA sense strand
ggaucgauuucaaaguaaa

SEQ ID NO: 936164 - RNA, 19 nt, Homo sapiens
  misc_RNA (1)...(19): siRNA sense strand
gccaugggcuuuauuuuaa

SEQ ID NO: 936165 - RNA, 19 nt, Homo sapiens
  misc_RNA (1)...(19): siRNA sense strand
cagcaggccaggaaagaua

SEQ ID NO: 936166 - RNA, 19 nt, Homo sapiens
  misc_RNA (1)...(19): siRNA sense strand
gaacacgagacucaaggaa

SEQ ID NO: 936167 - RNA, 19 nt, Homo sapiens
  misc_RNA (1)...(19): siRNA sense strand
guacaagauuggucaacuc

SEQ ID NO: 936168 - RNA, 19 nt, Homo sapiens
  misc_RNA (1)...(19): siRNA sense strand
gaaagacuccucugaucag

SEQ ID NO: 936169 - RNA, 19 nt, Homo sapiens
  misc_RNA (1)...(19): siRNA sense strand
ucagaacuuugacuacaug

SEQ ID NO: 936170 - RNA, 19 nt, Homo sapiens
  misc_RNA (1)...(19): siRNA sense strand
cagagaguuuggagacuga

SEQ ID NO: 936171 - RNA, 19 nt, Homo sapiens
  misc_RNA (1)...(19): siRNA sense strand
gauggccucugcccaagau

SEQ ID NO: 936172 - RNA, 19 nt, Homo sapiens
  misc_RNA (1)...(19): siRNA sense strand
ggauaucaucugcgacaaa

SEQ ID NO: 936173 - RNA, 19 nt, Homo sapiens
  misc_RNA (1)...(19): siRNA sense strand
uuaugcagaugacuccuuu

SEQ ID NO: 936174 - RNA, 19 nt, Homo sapiens
  misc_RNA (1)...(19): siRNA sense strand
gaacagcuuggguuugagu

SEQ ID NO: 936175 - RNA, 19 nt, Homo sapiens
  misc_RNA (1)...(19): siRNA sense strand
gauaucaucugcgacaaaa

SEQ ID NO: 936176 - RNA, 19 nt, Homo sapiens
  misc_RNA (1)...(19): siRNA sense strand
uuggucaacucaaaucaaa

SEQ ID NO: 936177 - RNA, 19 nt, Homo sapiens
  misc_RNA (1)...(19): siRNA sense strand
gacuacauguucaaauuac

SEQ ID NO: 936178 - RNA, 19 nt, Homo sapiens
  misc_RNA (1)...(19): siRNA sense strand
gugccaaggacaacauuaa

SEQ ID NO: 936179 - RNA, 19 nt, Homo sapiens
  misc_RNA (1)...(19): siRNA sense strand
ggaacaagugugacaugga

SEQ ID NO: 936180 - RNA, 19 nt, Homo sapiens
  misc_RNA (1)...(19): siRNA sense strand
aaacaagugccaaggacaa

SEQ ID NO: 936181 - RNA, 19 nt, Homo sapiens
  misc_RNA (1)...(19): siRNA sense strand
acacgagacucaaggaaac

SEQ ID NO: 936182 - RNA, 19 nt, Homo sapiens
  misc_RNA (1)...(19): siRNA sense strand
gacaaugcccaaguuauuc

SEQ ID NO: 936183 - RNA, 19 nt, Homo sapiens
  misc_RNA (1)...(19): siRNA sense strand
agaaagacuccucugauca

SEQ ID NO: 936184 - RNA, 19 nt, Homo sapiens
  misc_RNA (1)...(19): siRNA sense strand
ggagaacagcuuggguuug

SEQ ID NO: 936185 - RNA, 19 nt, Homo sapiens
  misc_RNA (1)...(19): siRNA sense strand
caguugggaucgauuucaa

SEQ ID NO: 936186 - RNA, 19 nt, Homo sapiens
  misc_RNA (1)...(19): siRNA sense strand
aagcagaacacgagacuca

SEQ ID NO: 936187 - RNA, 19 nt, Homo sapiens
  misc_RNA (1)...(19): siRNA sense strand
gccaaggacaacauuaaug

SEQ ID NO: 936188 - RNA, 19 nt, Homo sapiens
  misc_RNA (1)...(19): siRNA sense strand
caucuuuucuauuccguua

SEQ ID NO: 936189 - RNA, 19 nt, Homo sapiens
  misc_RNA (1)...(19): siRNA sense strand
gcagaacacgagacucaag

SEQ ID NO: 936190 - RNA, 19 nt, Homo sapiens
  misc_RNA (1)...(19): siRNA sense strand
caacugagcgaggucaaca

SEQ ID NO: 936191 - RNA, 19 nt, Homo sapiens
  misc_RNA (1)...(19): siRNA sense strand
ccagguacggccagaaaga

SEQ ID NO: 936192 - RNA, 19 nt, Homo sapiens
  misc_RNA (1)...(19): siRNA sense strand
gagcgggucaucucaacug

SEQ ID NO: 936193 - RNA, 19 nt, Homo sapiens
  misc_RNA (1)...(19): siRNA sense strand
gcauucgucagcacaguug

SEQ ID NO: 936194 - RNA, 19 nt, Homo sapiens
  misc_RNA (1)...(19): siRNA sense strand
uuacucaucaucggcaaua

SEQ ID NO: 936195 - RNA, 19 nt, Homo sapiens
  misc_RNA (1)...(19): siRNA sense strand
gggacaaugcccaaguuau

SEQ ID NO: 936196 - RNA, 19 nt, Homo sapiens
  misc_RNA (1)...(19): siRNA sense strand
uaucaccacagccuauuau

SEQ ID NO: 936197 - RNA, 19 nt, Homo sapiens
  misc_RNA (1)...(19): siRNA sense strand
gagcgaggucaacauuuag

SEQ ID NO: 936198 - RNA, 19 nt, Homo sapiens
  misc_RNA (1)...(19): siRNA sense strand
cagcacaguugggaucgau

SEQ ID NO: 936199 - RNA, 19 nt, Homo sapiens
  misc_RNA (1)...(19): siRNA sense strand
ugccaucacugcugcaaag

SEQ ID NO: 936200 - RNA, 19 nt, Homo sapiens
  misc_RNA (1)...(19): siRNA sense strand
aaacauacucuugggacaa

SEQ ID NO: 936201 - RNA, 19 nt, Homo sapiens
  misc_RNA (1)...(19): siRNA sense strand
ucuauuccguuaugcagau

SEQ ID NO: 936202 - RNA, 19 nt, Homo sapiens
  misc_RNA (1)...(19): siRNA sense strand
caaagcagaacacgagacu

SEQ ID NO: 936203 - RNA, 19 nt, Homo sapiens
  misc_RNA (1)...(19): siRNA sense strand
guucaaauuacucaucauc

SEQ ID NO: 936204 - RNA, 19 nt, Homo sapiens
  misc_RNA (1)...(19): siRNA sense strand
ggucaacauuuaggagaac

SEQ ID NO: 936205 - RNA, 19 nt, Homo sapiens
  misc_RNA (1)...(19): siRNA sense strand
uugagcgccuuguggauau

SEQ ID NO: 936206 - RNA, 19 nt, Homo sapiens
  misc_RNA (1)...(19): siRNA sense strand
aagagaaucaagcuucaga

SEQ ID NO: 936207 - RNA, 19 nt, Homo sapiens
  misc_RNA (1)...(19): siRNA sense strand
ggaagacgagcgggucauc

SEQ ID NO: 936208 - RNA, 19 nt, Homo sapiens
  misc_RNA (1)...(19): siRNA sense strand
aaaagagaaucaagcuuca

SEQ ID NO: 936209 - RNA, 19 nt, Homo sapiens
  misc_RNA (1)...(19): siRNA sense strand
aacauacucuugggacaau

SEQ ID NO: 936210 - RNA, 19 nt, Homo sapiens
  misc_RNA (1)...(19): siRNA sense strand
cuaucaccacagccuauua

SEQ ID NO: 936211 - RNA, 19 nt, Homo sapiens
  misc_RNA (1)...(19): siRNA sense strand
caccacagccuauuaucgu

SEQ ID NO: 936212 - RNA, 19 nt, Homo sapiens
  misc_RNA (1)...(19): siRNA sense strand
gacuaucaccacagccuau

SEQ ID NO: 936213 - RNA, 19 nt, Homo sapiens
  misc_RNA (1)...(19): siRNA sense strand
cagcuuggguuugaguuuu

SEQ ID NO: 936214 - RNA, 19 nt, Homo sapiens
  misc_RNA (1)...(19): siRNA sense strand
ucaaggacaugccaaagaa

SEQ ID NO: 936215 - RNA, 19 nt, Homo sapiens
  misc_RNA (1)...(19): siRNA sense strand
ucacagaugaguucuaugu

SEQ ID NO: 936216 - RNA, 19 nt, Homo sapiens
  misc_RNA (1)...(19): siRNA sense strand
acagaugaguucuauguac

SEQ ID NO: 936217 - RNA, 19 nt, Homo sapiens
  misc_RNA (1)...(19): siRNA sense strand
cagaugaguucuauguacu

SEQ ID NO: 936218 - RNA, 19 nt, Homo sapiens
  misc_RNA (1)...(19): siRNA sense strand
ggacaugccaaagaaaugg

SEQ ID NO: 936219 - RNA, 19 nt, Homo sapiens
  misc_RNA (1)...(19): siRNA sense strand
caaggacaugccaaagaaa

SEQ ID NO: 936220 - RNA, 19 nt, Homo sapiens
  misc_RNA (1)...(19): siRNA sense strand
auccugauccgcaacaaua

SEQ ID NO: 936221 - RNA, 19 nt, Homo sapiens
  misc_RNA (1)...(19): siRNA sense strand
ucgugcggcucacagauga

SEQ ID NO: 936222 - RNA, 19 nt, Homo sapiens
  misc_RNA (1)...(19): siRNA sense strand
cacagaugaguucuaugua

SEQ ID NO: 936223 - RNA, 19 nt, Homo sapiens
  misc_RNA (1)...(19): siRNA sense strand
cagaagagcuuuccuuguu

SEQ ID NO: 936224 - RNA, 19 nt, Homo sapiens
  misc_RNA (1)...(19): siRNA sense strand
gaagagcuuuccuuguuaa

SEQ ID NO: 936225 - RNA, 19 nt, Homo sapiens
  misc_RNA (1)...(19): siRNA sense strand
cagcugcucuuacgauuua

SEQ ID NO: 936226 - RNA, 19 nt, Homo sapiens
  misc_RNA (1)...(19): siRNA sense strand
acauggagauucacaaaua

SEQ ID NO: 936227 - RNA, 19 nt, Homo sapiens
  misc_RNA (1)...(19): siRNA sense strand
gagaguaucuggagaccuu

SEQ ID NO: 936228 - RNA, 19 nt, Homo sapiens
  misc_RNA (1)...(19): siRNA sense strand
gaauaaaccaacucuauga

SEQ ID NO: 936229 - RNA, 19 nt, Homo sapiens
  misc_RNA (1)...(19): siRNA sense strand
cgacuugaauccuaaauau

SEQ ID NO: 936230 - RNA, 19 nt, Homo sapiens
  misc_RNA (1)...(19): siRNA sense strand
gcucuacaguaccacauua

SEQ ID NO: 936231 - RNA, 19 nt, Homo sapiens
  misc_RNA (1)...(19): siRNA sense strand
gcaagauugugcacgagua

SEQ ID NO: 936232 - RNA, 19 nt, Homo sapiens
  misc_RNA (1)...(19): siRNA sense strand
cagaagcacuugcggauau

SEQ ID NO: 936233 - RNA, 19 nt, Homo sapiens
  misc_RNA (1)...(19): siRNA sense strand
gaggagugaugcucaaguu

SEQ ID NO: 936234 - RNA, 19 nt, Homo sapiens
  misc_RNA (1)...(19): siRNA sense strand
agaagagcuuuccuuguua

SEQ ID NO: 936235 - RNA, 19 nt, Homo sapiens
  misc_RNA (1)...(19): siRNA sense strand
ggaaguaacccuagaaggu

SEQ ID NO: 936236 - RNA, 19 nt, Homo sapiens
  misc_RNA (1)...(19): siRNA sense strand
ccaagaaguuacuaccaaa

SEQ ID NO: 936237 - RNA, 19 nt, Homo sapiens
  misc_RNA (1)...(19): siRNA sense strand
ggucagacuuugcucuuug

SEQ ID NO: 936238 - RNA, 19 nt, Homo sapiens
  misc_RNA (1)...(19): siRNA sense strand
ucccuaaacuugcagauaa

SEQ ID NO: 936239 - RNA, 19 nt, Homo sapiens
  misc_RNA (1)...(19): siRNA sense strand
gcacagaggaagaaauguu

SEQ ID NO: 936240 - RNA, 19 nt, Homo sapiens
  misc_RNA (1)...(19): siRNA sense strand
caaagaaacacaaauccaa

SEQ ID NO: 936241 - RNA, 19 nt, Homo sapiens
  misc_RNA (1)...(19): siRNA sense strand
guccgagguugaugaaaua

SEQ ID NO: 936242 - RNA, 19 nt, Homo sapiens
  misc_RNA (1)...(19): siRNA sense strand
ccuacuaccuugucagauu

SEQ ID NO: 936243 - RNA, 19 nt, Homo sapiens
  misc_RNA (1)...(19): siRNA sense strand
ggaaucaaguuacuaaucc

SEQ ID NO: 936244 - RNA, 19 nt, Homo sapiens
  misc_RNA (1)...(19): siRNA sense strand
cgagguugaugaaauagaa

SEQ ID NO: 936245 - RNA, 19 nt, Homo sapiens
  misc_RNA (1)...(19): siRNA sense strand
caacauggagauucacaaa

SEQ ID NO: 936246 - RNA, 19 nt, Homo sapiens
  misc_RNA (1)...(19): siRNA sense strand
gaacaaggagaaccacuag

SEQ ID NO: 936247 - RNA, 19 nt, Homo sapiens
  misc_RNA (1)...(19): siRNA sense strand
caacauccuuucauuucug

SEQ ID NO: 936248 - RNA, 19 nt, Homo sapiens
  misc_RNA (1)...(19): siRNA sense strand
cuacuaccuugucagauuu

SEQ ID NO: 936249 - RNA, 19 nt, Homo sapiens
  misc_RNA (1)...(19): siRNA sense strand
gaugugaccaugagaauca

SEQ ID NO: 936250 - RNA, 19 nt, Homo sapiens
  misc_RNA (1)...(19): siRNA sense strand
gauaugaacccagaauguu

SEQ ID NO: 936251 - RNA, 19 nt, Homo sapiens
  misc_RNA (1)...(19): siRNA sense strand
gcaaaauccugaauauuag

SEQ ID NO: 936252 - RNA, 19 nt, Homo sapiens
  misc_RNA (1)...(19): siRNA sense strand
gaacccauaauugaagaua

SEQ ID NO: 936253 - RNA, 19 nt, Homo sapiens
  misc_RNA (1)...(19): siRNA sense strand
gaaguugugcccgauguaa

SEQ ID NO: 936254 - RNA, 19 nt, Homo sapiens
  misc_RNA (1)...(19): siRNA sense strand
guacauuggcggcuacauu

SEQ ID NO: 936255 - RNA, 19 nt, Homo sapiens
  misc_RNA (1)...(19): siRNA sense strand
acuggacccuggacaaaua

SEQ ID NO: 936256 - RNA, 19 nt, Homo sapiens
  misc_RNA (1)...(19): siRNA sense strand
gaaagacgucacacugaga

SEQ ID NO: 936257 - RNA, 19 nt, Homo sapiens
  misc_RNA (1)...(19): siRNA sense strand
ggaagaaaauuuggaauca

SEQ ID NO: 936258 - RNA, 19 nt, Homo sapiens
  misc_RNA (1)...(19): siRNA sense strand
auaaggaacccauaauuga

SEQ ID NO: 936259 - RNA, 19 nt, Homo sapiens
  misc_RNA (1)...(19): siRNA sense strand
uggaggacauuacugauau

SEQ ID NO: 936260 - RNA, 19 nt, Homo sapiens
  misc_RNA (1)...(19): siRNA sense strand
caggugggccauucucuua

SEQ ID NO: 936261 - RNA, 19 nt, Homo sapiens
  misc_RNA (1)...(19): siRNA sense strand
uaaggaacccauaauugaa

SEQ ID NO: 936262 - RNA, 19 nt, Homo sapiens
  misc_RNA (1)...(19): siRNA sense strand
ggauaugaacccagaaugu

SEQ ID NO: 936263 - RNA, 19 nt, Homo sapiens
  misc_RNA (1)...(19): siRNA sense strand
ccaggcagaugcaaagcuu

SEQ ID NO: 936264 - RNA, 19 nt, Homo sapiens
  misc_RNA (1)...(19): siRNA sense strand
cauggagauucacaaauau

SEQ ID NO: 936265 - RNA, 19 nt, Homo sapiens
  misc_RNA (1)...(19): siRNA sense strand
caaggagaaccacuagaaa

SEQ ID NO: 936266 - RNA, 19 nt, Homo sapiens
  misc_RNA (1)...(19): siRNA sense strand
cgaauaaaccaacucuaug

SEQ ID NO: 936267 - RNA, 19 nt, Homo sapiens
  misc_RNA (1)...(19): siRNA sense strand
gaucagaagagcuuuccuu

SEQ ID NO: 936268 - RNA, 19 nt, Homo sapiens
  misc_RNA (1)...(19): siRNA sense strand
cagaaagacgucacacuga

SEQ ID NO: 936269 - RNA, 19 nt, Homo sapiens
  misc_RNA (1)...(19): siRNA sense strand
acacauccauagcauacuu

SEQ ID NO: 936270 - RNA, 19 nt, Homo sapiens
  misc_RNA (1)...(19): siRNA sense strand
ccgaauaaaccaacucuau

SEQ ID NO: 936271 - RNA, 19 nt, Homo sapiens
  misc_RNA (1)...(19): siRNA sense strand
gauaaagccaagcucaaug

SEQ ID NO: 936272 - RNA, 19 nt, Homo sapiens
  misc_RNA (1)...(19): siRNA sense strand
gcuccaaggaccagaauga

SEQ ID NO: 936273 - RNA, 19 nt, Homo sapiens
  misc_RNA (1)...(19): siRNA sense strand
auaugaugcuguccgaaua

SEQ ID NO: 936274 - RNA, 19 nt, Homo sapiens
  misc_RNA (1)...(19): siRNA sense strand
uuaaagcugucagugauau

SEQ ID NO: 936275 - RNA, 19 nt, Homo sapiens
  misc_RNA (1)...(19): siRNA sense strand
gcagguggucaucgaguuu

SEQ ID NO: 936276 - RNA, 19 nt, Homo sapiens
  misc_RNA (1)...(19): siRNA sense strand
gcaaagaaacacaaaucca

SEQ ID NO: 936277 - RNA, 19 nt, Homo sapiens
  misc_RNA (1)...(19): siRNA sense strand
ggagugaugcucaaguuag

SEQ ID NO: 936278 - RNA, 19 nt, Homo sapiens
  misc_RNA (1)...(19): siRNA sense strand
acaaggagaaccacuagaa

SEQ ID NO: 936279 - RNA, 19 nt, Homo sapiens
  misc_RNA (1)...(19): siRNA sense strand
uuacugauaucccuaaacu

SEQ ID NO: 936280 - RNA, 19 nt, Homo sapiens
  misc_RNA (1)...(19): siRNA sense strand
aauaaggaacccauaauug

SEQ ID NO: 936281 - RNA, 19 nt, Homo sapiens
  misc_RNA (1)...(19): siRNA sense strand
ccacugacuuuacauuugc

SEQ ID NO: 936282 - RNA, 19 nt, Homo sapiens
  misc_RNA (1)...(19): siRNA sense strand
gugacaacauggagauuca

SEQ ID NO: 936283 - RNA, 19 nt, Homo sapiens
  misc_RNA (1)...(19): siRNA sense strand
ggauuccagugacaacaug

SEQ ID NO: 936284 - RNA, 19 nt, Homo sapiens
  misc_RNA (1)...(19): siRNA sense strand
gagugaugcucaaguuagu

SEQ ID NO: 936285 - RNA, 19 nt, Homo sapiens
  misc_RNA (1)...(19): siRNA sense strand
cccaagaaguuacuaccaa

SEQ ID NO: 936286 - RNA, 19 nt, Homo sapiens
  misc_RNA (1)...(19): siRNA sense strand
ggugggaacagaagcauug

SEQ ID NO: 936287 - RNA, 19 nt, Homo sapiens
  misc_RNA (1)...(19): siRNA sense strand
caaaacgucuuuacugcuu

SEQ ID NO: 936288 - RNA, 19 nt, Homo sapiens
  misc_RNA (1)...(19): siRNA sense strand
ccaagacuggucagacuuu

SEQ ID NO: 936289 - RNA, 19 nt, Homo sapiens
  misc_RNA (1)...(19): siRNA sense strand
ggugggccauucucuuaga

SEQ ID NO: 936290 - RNA, 19 nt, Homo sapiens
  misc_RNA (1)...(19): siRNA sense strand
gcuucagguucaucaguaa

SEQ ID NO: 936291 - RNA, 19 nt, Homo sapiens
  misc_RNA (1)...(19): siRNA sense strand
uccaacagcuucagguuca

SEQ ID NO: 936292 - RNA, 19 nt, Homo sapiens
  misc_RNA (1)...(19): siRNA sense strand
acugauaucccuaaacuug

SEQ ID NO: 936293 - RNA, 19 nt, Homo sapiens
  misc_RNA (1)...(19): siRNA sense strand
gaaugaaacacucgaugag

SEQ ID NO: 936294 - RNA, 19 nt, Homo sapiens
  misc_RNA (1)...(19): siRNA sense strand
ccgaugguaugaaugaaau

SEQ ID NO: 936295 - RNA, 19 nt, Homo sapiens
  misc_RNA (1)...(19): siRNA sense strand
guaaauguagcaggaagaa

SEQ ID NO: 936296 - RNA, 19 nt, Homo sapiens
  misc_RNA (1)...(19): siRNA sense strand
gcgaaguugugcccgaugu

SEQ ID NO: 936297 - RNA, 19 nt, Homo sapiens
  misc_RNA (1)...(19): siRNA sense strand
aaagacacauccauagcau

SEQ ID NO: 936298 - RNA, 19 nt, Homo sapiens
  misc_RNA (1)...(19): siRNA sense strand
uagaagaucagaagagcuu

SEQ ID NO: 936299 - RNA, 19 nt, Homo sapiens
  misc_RNA (1)...(19): siRNA sense strand
ucaaacaguggaauguaaa

SEQ ID NO: 936300 - RNA, 19 nt, Homo sapiens
  misc_RNA (1)...(19): siRNA sense strand
gaaucaauacgcccaaugg

SEQ ID NO: 936301 - RNA, 19 nt, Homo sapiens
  misc_RNA (1)...(19): siRNA sense strand
ggaggacauuacugauauc

SEQ ID NO: 936302 - RNA, 19 nt, Homo sapiens
  misc_RNA (1)...(19): siRNA sense strand
guaaaaccaugaccccuau

SEQ ID NO: 936303 - RNA, 19 nt, Homo sapiens
  misc_RNA (1)...(19): siRNA sense strand
agaaugaaacacucgauga

SEQ ID NO: 936304 - RNA, 19 nt, Homo sapiens
  misc_RNA (1)...(19): siRNA sense strand
uacauuggcggcuacauuu

SEQ ID NO: 936305 - RNA, 19 nt, Homo sapiens
  misc_RNA (1)...(19): siRNA sense strand
cuugucagauuuaaaggaa

SEQ ID NO: 936306 - RNA, 19 nt, Homo sapiens
  misc_RNA (1)...(19): siRNA sense strand
gagaaucaauacgcccaau

SEQ ID NO: 936307 - RNA, 19 nt, Homo sapiens
  misc_RNA (1)...(19): siRNA sense strand
gagaugugaccaugagaau

SEQ ID NO: 936308 - RNA, 19 nt, Homo sapiens
  misc_RNA (1)...(19): siRNA sense strand
uaaagacacauccauagca

SEQ ID NO: 936309 - RNA, 19 nt, Homo sapiens
  misc_RNA (1)...(19): siRNA sense strand
gcagcugcucuuacgauuu

SEQ ID NO: 936310 - RNA, 19 nt, Homo sapiens
  misc_RNA (1)...(19): siRNA sense strand
ggaacaaggcauccaagag

SEQ ID NO: 936311 - RNA, 19 nt, Homo sapiens
  misc_RNA (1)...(19): siRNA sense strand
caauggaacaccagcauca

SEQ ID NO: 936312 - RNA, 19 nt, Homo sapiens
  misc_RNA (1)...(19): siRNA sense strand
gaagaucagaagagcuuuc

SEQ ID NO: 936313 - RNA, 19 nt, Homo sapiens
  misc_RNA (1)...(19): siRNA sense strand
ccucaacauccuuucauuu

SEQ ID NO: 936314 - RNA, 19 nt, Homo sapiens
  misc_RNA (1)...(19): siRNA sense strand
cuuagaggcugcgaaguug

SEQ ID NO: 936315 - RNA, 19 nt, Homo sapiens
  misc_RNA (1)...(19): siRNA sense strand
caagacuggucagacuuug

SEQ ID NO: 936316 - RNA, 19 nt, Homo sapiens
  misc_RNA (1)...(19): siRNA sense strand
ugaacaaggagaaccacua

SEQ ID NO: 936317 - RNA, 19 nt, Homo sapiens
  misc_RNA (1)...(19): siRNA sense strand
caaguuaguagaacagauc

SEQ ID NO: 936318 - RNA, 19 nt, Homo sapiens
  misc_RNA (1)...(19): siRNA sense strand
aucaguaaguccugguuua

SEQ ID NO: 936319 - RNA, 19 nt, Homo sapiens
  misc_RNA (1)...(19): siRNA sense strand
aaagccgucuggugacuau

SEQ ID NO: 936320 - RNA, 19 nt, Homo sapiens
  misc_RNA (1)...(19): siRNA sense strand
caguaaguccugguuuaua

SEQ ID NO: 936321 - RNA, 19 nt, Homo sapiens
  misc_RNA (1)...(19): siRNA sense strand
gugcaaagaaacacaaauc

SEQ ID NO: 936322 - RNA, 19 nt, Homo sapiens
  misc_RNA (1)...(19): siRNA sense strand
aucaaacaguggaauguaa

SEQ ID NO: 936323 - RNA, 19 nt, Homo sapiens
  misc_RNA (1)...(19): siRNA sense strand
gacaacaacuggaaaugua

SEQ ID NO: 936324 - RNA, 19 nt, Homo sapiens
  misc_RNA (1)...(19): siRNA sense strand
ggaaugaagccaccaaugu

SEQ ID NO: 936325 - RNA, 19 nt, Homo sapiens
  misc_RNA (1)...(19): siRNA sense strand
gaaugaagccaccaauguu

SEQ ID NO: 936326 - RNA, 19 nt, Homo sapiens
  misc_RNA (1)...(19): siRNA sense strand
gacgaugguucuauugauu

SEQ ID NO: 936327 - RNA, 19 nt, Homo sapiens
  misc_RNA (1)...(19): siRNA sense strand
ggagaauuaugaggauauu

SEQ ID NO: 936328 - RNA, 19 nt, Homo sapiens
  misc_RNA (1)...(19): siRNA sense strand
caccaauguuuacuugaua

SEQ ID NO: 936329 - RNA, 19 nt, Homo sapiens
  misc_RNA (1)...(19): siRNA sense strand
gauaagcaagauucguuua

SEQ ID NO: 936330 - RNA, 19 nt, Homo sapiens
  misc_RNA (1)...(19): siRNA sense strand
caagaaaguacgacuauca

SEQ ID NO: 936331 - RNA, 19 nt, Homo sapiens
  misc_RNA (1)...(19): siRNA sense strand
caagauucguuuaagacaa

SEQ ID NO: 936332 - RNA, 19 nt, Homo sapiens
  misc_RNA (1)...(19): siRNA sense strand
gugcaacucucauuggaau

SEQ ID NO: 936333 - RNA, 19 nt, Homo sapiens
  misc_RNA (1)...(19): siRNA sense strand
ccaccaauguuuacuugau

SEQ ID NO: 936334 - RNA, 19 nt, Homo sapiens
  misc_RNA (1)...(19): siRNA sense strand
uagcuucggucucuucaug

SEQ ID NO: 936335 - RNA, 19 nt, Homo sapiens
  misc_RNA (1)...(19): siRNA sense strand
aagcaagauucguuuaaga

SEQ ID NO: 936336 - RNA, 19 nt, Homo sapiens
  misc_RNA (1)...(19): siRNA sense strand
gcuucggucucuucaugua

SEQ ID NO: 936337 - RNA, 19 nt, Homo sapiens
  misc_RNA (1)...(19): siRNA sense strand
ugucagagcccaacuuuua

SEQ ID NO: 936338 - RNA, 19 nt, Homo sapiens
  misc_RNA (1)...(19): siRNA sense strand
ucacgaagccuggaaugaa

SEQ ID NO: 936339 - RNA, 19 nt, Homo sapiens
  misc_RNA (1)...(19): siRNA sense strand
gggugacgaugguucuauu

SEQ ID NO: 936340 - RNA, 19 nt, Homo sapiens
  misc_RNA (1)...(19): siRNA sense strand
caacaacuggaaauguauu

SEQ ID NO: 936341 - RNA, 19 nt, Homo sapiens
  misc_RNA (1)...(19): siRNA sense strand
aaaggagaauuaugaggau

SEQ ID NO: 936342 - RNA, 19 nt, Homo sapiens
  misc_RNA (1)...(19): siRNA sense strand
uaagcaagauucguuuaag

SEQ ID NO: 936343 - RNA, 19 nt, Homo sapiens
  misc_RNA (1)...(19): siRNA sense strand
caacuuuuaugacacgaua

SEQ ID NO: 936344 - RNA, 19 nt, Homo sapiens
  misc_RNA (1)...(19): siRNA sense strand
ugacgaugguucuauugau

SEQ ID NO: 936345 - RNA, 19 nt, Homo sapiens
  misc_RNA (1)...(19): siRNA sense strand
gcaagauucguuuaagaca

SEQ ID NO: 936346 - RNA, 19 nt, Homo sapiens
  misc_RNA (1)...(19): siRNA sense strand
cagaggaaacuuugucaga

SEQ ID NO: 936347 - RNA, 19 nt, Homo sapiens
  misc_RNA (1)...(19): siRNA sense strand
ugauuauacuguucacgaa

SEQ ID NO: 936348 - RNA, 19 nt, Homo sapiens
  misc_RNA (1)...(19): siRNA sense strand
cgaugguucuauugauuau

SEQ ID NO: 936349 - RNA, 19 nt, Homo sapiens
  misc_RNA (1)...(19): siRNA sense strand
gaacaaaaggagaauuaug

SEQ ID NO: 936350 - RNA, 19 nt, Homo sapiens
  misc_RNA (1)...(19): siRNA sense strand
aaugaagccaccaauguuu

SEQ ID NO: 936351 - RNA, 19 nt, Homo sapiens
  misc_RNA (1)...(19): siRNA sense strand
uaagacaacaacuggaaau

SEQ ID NO: 936352 - RNA, 19 nt, Homo sapiens
  misc_RNA (1)...(19): siRNA sense strand
cacgaagccuggaaugaag

SEQ ID NO: 936353 - RNA, 19 nt, Homo sapiens
  misc_RNA (1)...(19): siRNA sense strand
cgauaagcaagauucguuu

SEQ ID NO: 936354 - RNA, 19 nt, Homo sapiens
  misc_RNA (1)...(19): siRNA sense strand
aaggagaauuaugaggaua

SEQ ID NO: 936355 - RNA, 19 nt, Homo sapiens
  misc_RNA (1)...(19): siRNA sense strand
acgaugguucuauugauua

SEQ ID NO: 936356 - RNA, 19 nt, Homo sapiens
  misc_RNA (1)...(19): siRNA sense strand
gugugcaacucucauugga

SEQ ID NO: 936357 - RNA, 19 nt, Homo sapiens
  misc_RNA (1)...(19): siRNA sense strand
gagcccaacuuuuaugaca

SEQ ID NO: 936358 - RNA, 19 nt, Homo sapiens
  misc_RNA (1)...(19): siRNA sense strand
ucaagaaaguacgacuauc

SEQ ID NO: 936359 - RNA, 19 nt, Homo sapiens
  misc_RNA (1)...(19): siRNA sense strand
agacaacaacuggaaaugu

SEQ ID NO: 936360 - RNA, 19 nt, Homo sapiens
  misc_RNA (1)...(19): siRNA sense strand
gacacgauaagcaagauuc

SEQ ID NO: 936361 - RNA, 19 nt, Homo sapiens
  misc_RNA (1)...(19): siRNA sense strand
augaagccaccaauguuua

SEQ ID NO: 936362 - RNA, 19 nt, Homo sapiens
  misc_RNA (1)...(19): siRNA sense strand
uuaugaggauauucagugu

SEQ ID NO: 936363 - RNA, 19 nt, Homo sapiens
  misc_RNA (1)...(19): siRNA sense strand
aagauucguuuaagacaac

SEQ ID NO: 936364 - RNA, 19 nt, Homo sapiens
  misc_RNA (1)...(19): siRNA sense strand
gugacgaugguucuauuga

SEQ ID NO: 936365 - RNA, 19 nt, Homo sapiens
  misc_RNA (1)...(19): siRNA sense strand
caccuacagaggaaacuuu

SEQ ID NO: 936366 - RNA, 19 nt, Homo sapiens
  misc_RNA (1)...(19): siRNA sense strand
agccaccaauguuuacuug

SEQ ID NO: 936367 - RNA, 19 nt, Homo sapiens
  misc_RNA (1)...(19): siRNA sense strand
cuuguuagcuucggucucu

SEQ ID NO: 936368 - RNA, 19 nt, Homo sapiens
  misc_RNA (1)...(19): siRNA sense strand
cuacagaggaaacuuuguc

SEQ ID NO: 936369 - RNA, 19 nt, Homo sapiens
  misc_RNA (1)...(19): siRNA sense strand
uaguuauccuuguuagcuu

SEQ ID NO: 936370 - RNA, 19 nt, Homo sapiens
  misc_RNA (1)...(19): siRNA sense strand
ggugacgaugguucuauug

SEQ ID NO: 936371 - RNA, 19 nt, Homo sapiens
  misc_RNA (1)...(19): siRNA sense strand
uuuaagacaacaacuggaa

SEQ ID NO: 936372 - RNA, 19 nt, Homo sapiens
  misc_RNA (1)...(19): siRNA sense strand
ccagguaucugaaugcuuu

SEQ ID NO: 936373 - RNA, 19 nt, Homo sapiens
  misc_RNA (1)...(19): siRNA sense strand
cagagaaacuggcaagauu

SEQ ID NO: 936374 - RNA, 19 nt, Homo sapiens
  misc_RNA (1)...(19): siRNA sense strand
gcaaagcgagaacuagaua

SEQ ID NO: 936375 - RNA, 19 nt, Homo sapiens
  misc_RNA (1)...(19): siRNA sense strand
gaacauggacuuucuaaaa

SEQ ID NO: 936376 - RNA, 19 nt, Homo sapiens
  misc_RNA (1)...(19): siRNA sense strand
acaagaggaugucaagaaa

SEQ ID NO: 936377 - RNA, 19 nt, Homo sapiens
  misc_RNA (1)...(19): siRNA sense strand
gcaacagacuauaccuuug

SEQ ID NO: 936378 - RNA, 19 nt, Homo sapiens
  misc_RNA (1)...(19): siRNA sense strand
ugaaugauuugaccucuga

SEQ ID NO: 936379 - RNA, 19 nt, Homo sapiens
  misc_RNA (1)...(19): siRNA sense strand
gaacuuacaagaagaguag

SEQ ID NO: 936380 - RNA, 19 nt, Homo sapiens
  misc_RNA (1)...(19): siRNA sense strand
gacuauaccuuugaagaaa

SEQ ID NO: 936381 - RNA, 19 nt, Homo sapiens
  misc_RNA (1)...(19): siRNA sense strand
gcagaaagcaagugaauac

SEQ ID NO: 936382 - RNA, 19 nt, Homo sapiens
  misc_RNA (1)...(19): siRNA sense strand
ucagaggaauucagauuug

SEQ ID NO: 936383 - RNA, 19 nt, Homo sapiens
  misc_RNA (1)...(19): siRNA sense strand
gagaaacuggcaagauuaa

SEQ ID NO: 936384 - RNA, 19 nt, Homo sapiens
  misc_RNA (1)...(19): siRNA sense strand
ccacagagauuuuacauca

SEQ ID NO: 936385 - RNA, 19 nt, Homo sapiens
  misc_RNA (1)...(19): siRNA sense strand
caacagacuauaccuuuga

SEQ ID NO: 936386 - RNA, 19 nt, Homo sapiens
  misc_RNA (1)...(19): siRNA sense strand
gaaagggccaaaguugaua

SEQ ID NO: 936387 - RNA, 19 nt, Homo sapiens
  misc_RNA (1)...(19): siRNA sense strand
aaggauaccucgcuagcua

SEQ ID NO: 936388 - RNA, 19 nt, Homo sapiens
  misc_RNA (1)...(19): siRNA sense strand
gauuaaagcaacagacuau

SEQ ID NO: 936389 - RNA, 19 nt, Homo sapiens
  misc_RNA (1)...(19): siRNA sense strand
gaagcugaacuuacaagaa

SEQ ID NO: 936390 - RNA, 19 nt, Homo sapiens
  misc_RNA (1)...(19): siRNA sense strand
cauugaagcugaacuuaca

SEQ ID NO: 936391 - RNA, 19 nt, Homo sapiens
  misc_RNA (1)...(19): siRNA sense strand
gaaacuggcaagauuaaag

SEQ ID NO: 936392 - RNA, 19 nt, Homo sapiens
  misc_RNA (1)...(19): siRNA sense strand
agaacuagauagcauugaa

SEQ ID NO: 936393 - RNA, 19 nt, Homo sapiens
  misc_RNA (1)...(19): siRNA sense strand
aagcugaacuuacaagaag

SEQ ID NO: 936394 - RNA, 19 nt, Homo sapiens
  misc_RNA (1)...(19): siRNA sense strand
caagaagaguagacaugau

SEQ ID NO: 936395 - RNA, 19 nt, Homo sapiens
  misc_RNA (1)...(19): siRNA sense strand
ucauggagagugugaauuu

SEQ ID NO: 936396 - RNA, 19 nt, Homo sapiens
  misc_RNA (1)...(19): siRNA sense strand
auaccucgcuagcuaguuu

SEQ ID NO: 936397 - RNA, 19 nt, Homo sapiens
  misc_RNA (1)...(19): siRNA sense strand
agagaaacuggcaagauua

SEQ ID NO: 936398 - RNA, 19 nt, Homo sapiens
  misc_RNA (1)...(19): siRNA sense strand
gguaauagaggacuugaag

SEQ ID NO: 936399 - RNA, 19 nt, Homo sapiens
  misc_RNA (1)...(19): siRNA sense strand
cagaaagggccaaaguuga

SEQ ID NO: 936400 - RNA, 19 nt, Homo sapiens
  misc_RNA (1)...(19): siRNA sense strand
gaguagacaugauggaacu

SEQ ID NO: 936401 - RNA, 19 nt, Homo sapiens
  misc_RNA (1)...(19): siRNA sense strand
gauaaucgucgucagaaca

SEQ ID NO: 936402 - RNA, 19 nt, Homo sapiens
  misc_RNA (1)...(19): siRNA sense strand
ccacggaccacagagauuu

SEQ ID NO: 936403 - RNA, 19 nt, Homo sapiens
  misc_RNA (1)...(19): siRNA sense strand
uagaggacuugaagcagaa

SEQ ID NO: 936404 - RNA, 19 nt, Homo sapiens
  misc_RNA (1)...(19): siRNA sense strand
acagaaagggccaaaguug

SEQ ID NO: 936405 - RNA, 19 nt, Homo sapiens
  misc_RNA (1)...(19): siRNA sense strand
gauuugaccucugaucucu

SEQ ID NO: 936406 - RNA, 19 nt, Homo sapiens
  misc_RNA (1)...(19): siRNA sense strand
gggccaaaguugauaaucg

SEQ ID NO: 936407 - RNA, 19 nt, Homo sapiens
  misc_RNA (1)...(19): siRNA sense strand
uacaagaggaugucaagaa

SEQ ID NO: 936408 - RNA, 19 nt, Homo sapiens
  misc_RNA (1)...(19): siRNA sense strand
uuugaccucugaucucuuu

SEQ ID NO: 936409 - RNA, 19 nt, Homo sapiens
  misc_RNA (1)...(19): siRNA sense strand
ggccaaaguugauaaucgu

SEQ ID NO: 936410 - RNA, 19 nt, Homo sapiens
  misc_RNA (1)...(19): siRNA sense strand
gaggaauucagauuuggaa

SEQ ID NO: 936411 - RNA, 19 nt, Homo sapiens
  misc_RNA (1)...(19): siRNA sense strand
gaauccgucucuugcucaa

SEQ ID NO: 936412 - RNA, 19 nt, Homo sapiens
  misc_RNA (1)...(19): siRNA sense strand
agacuauaccuuugaagaa

SEQ ID NO: 936413 - RNA, 19 nt, Homo sapiens
  misc_RNA (1)...(19): siRNA sense strand
ucucaucaguccuuaguag

SEQ ID NO: 936414 - RNA, 19 nt, Homo sapiens
  misc_RNA (1)...(19): siRNA sense strand
guaucugaaugcuuugguu

SEQ ID NO: 936415 - RNA, 19 nt, Homo sapiens
  misc_RNA (1)...(19): siRNA sense strand
gaacuagauagcauugaag

SEQ ID NO: 936416 - RNA, 19 nt, Homo sapiens
  misc_RNA (1)...(19): siRNA sense strand
caagaaagcagaguugcau

SEQ ID NO: 936417 - RNA, 19 nt, Homo sapiens
  misc_RNA (1)...(19): siRNA sense strand
ucccugcagugaaugauuu

SEQ ID NO: 936418 - RNA, 19 nt, Homo sapiens
  misc_RNA (1)...(19): siRNA sense strand
uaauagaggacuugaagca

SEQ ID NO: 936419 - RNA, 19 nt, Homo sapiens
  misc_RNA (1)...(19): siRNA sense strand
gaagaguagacaugaugga

SEQ ID NO: 936420 - RNA, 19 nt, Homo sapiens
  misc_RNA (1)...(19): siRNA sense strand
acagugcgguggcccuuga

SEQ ID NO: 936421 - RNA, 19 nt, Homo sapiens
  misc_RNA (1)...(19): siRNA sense strand
uucaagaccuucucaugga

SEQ ID NO: 936422 - RNA, 19 nt, Homo sapiens
  misc_RNA (1)...(19): siRNA sense strand
cgguggcccuugaaacaaa

SEQ ID NO: 936423 - RNA, 19 nt, Homo sapiens
  misc_RNA (1)...(19): siRNA sense strand
acaagaagaguagacauga

SEQ ID NO: 936424 - RNA, 19 nt, Homo sapiens
  misc_RNA (1)...(19): siRNA sense strand
gaagcaaagcgagaacuag

SEQ ID NO: 936425 - RNA, 19 nt, Homo sapiens
  misc_RNA (1)...(19): siRNA sense strand
ggagagagaaacgcagguu

SEQ ID NO: 936426 - RNA, 19 nt, Homo sapiens
  misc_RNA (1)...(19): siRNA sense strand
agaaagggccaaaguugau

SEQ ID NO: 936427 - RNA, 19 nt, Homo sapiens
  misc_RNA (1)...(19): siRNA sense strand
cagacuauaccuuugaaga

SEQ ID NO: 936428 - RNA, 19 nt, Homo sapiens
  misc_RNA (1)...(19): siRNA sense strand
cauggaugcuucucugucu

SEQ ID NO: 936429 - RNA, 19 nt, Homo sapiens
  misc_RNA (1)...(19): siRNA sense strand
aagcaaagucagaggaauu

SEQ ID NO: 936430 - RNA, 19 nt, Homo sapiens
  misc_RNA (1)...(19): siRNA sense strand
caagugaauacgagucaga

SEQ ID NO: 936431 - RNA, 19 nt, Homo sapiens
  misc_RNA (1)...(19): siRNA sense strand
cgagucagaagccaaguau

SEQ ID NO: 936432 - RNA, 19 nt, Homo sapiens
  misc_RNA (1)...(19): siRNA sense strand
gucagaggaauucagauuu

SEQ ID NO: 936433 - RNA, 19 nt, Homo sapiens
  misc_RNA (1)...(19): siRNA sense strand
aaagucagaggaauucaga

SEQ ID NO: 936434 - RNA, 19 nt, Homo sapiens
  misc_RNA (1)...(19): siRNA sense strand
cuacagaaagggccaaagu

SEQ ID NO: 936435 - RNA, 19 nt, Homo sapiens
  misc_RNA (1)...(19): siRNA sense strand
ugaagcagaaagcaaguga

SEQ ID NO: 936436 - RNA, 19 nt, Homo sapiens
  misc_RNA (1)...(19): siRNA sense strand
aagcaaagcgagaacuaga

SEQ ID NO: 936437 - RNA, 19 nt, Homo sapiens
  misc_RNA (1)...(19): siRNA sense strand
ugaagaagcaaagcgagaa

SEQ ID NO: 936438 - RNA, 19 nt, Homo sapiens
  misc_RNA (1)...(19): siRNA sense strand
ucugaucucuuucguacca

SEQ ID NO: 936439 - RNA, 19 nt, Homo sapiens
  misc_RNA (1)...(19): siRNA sense strand
gcauugaagcugaacuuac

SEQ ID NO: 936440 - RNA, 19 nt, Homo sapiens
  misc_RNA (1)...(19): siRNA sense strand
gauuuuacaucaccuuuca

SEQ ID NO: 936441 - RNA, 19 nt, Homo sapiens
  misc_RNA (1)...(19): siRNA sense strand
gaagcagaaagcaagugaa

SEQ ID NO: 936442 - RNA, 19 nt, Homo sapiens
  misc_RNA (1)...(19): siRNA sense strand
aagaggaugucaagaaagc

SEQ ID NO: 936443 - RNA, 19 nt, Homo sapiens
  misc_RNA (1)...(19): siRNA sense strand
aagaagaguagacaugaug

SEQ ID NO: 936444 - RNA, 19 nt, Homo sapiens
  misc_RNA (1)...(19): siRNA sense strand
cgagaacuagauagcauug

SEQ ID NO: 936445 - RNA, 19 nt, Homo sapiens
  misc_RNA (1)...(19): siRNA sense strand
gcgagaacuagauagcauu

SEQ ID NO: 936446 - RNA, 19 nt, Homo sapiens
  misc_RNA (1)...(19): siRNA sense strand
agaagcaaagcgagaacua

SEQ ID NO: 936447 - RNA, 19 nt, Homo sapiens
  misc_RNA (1)...(19): siRNA sense strand
guugauaaucgucgucaga

SEQ ID NO: 936448 - RNA, 19 nt, Homo sapiens
  misc_RNA (1)...(19): siRNA sense strand
gcaagauuaaagcaacaga

SEQ ID NO: 936449 - RNA, 19 nt, Homo sapiens
  misc_RNA (1)...(19): siRNA sense strand
uuacaucaccuuucagaac

SEQ ID NO: 936450 - RNA, 19 nt, Homo sapiens
  misc_RNA (1)...(19): siRNA sense strand
augcuucucugucucauca

SEQ ID NO: 936451 - RNA, 19 nt, Homo sapiens
  misc_RNA (1)...(19): siRNA sense strand
agucagaggaauucagauu

SEQ ID NO: 936452 - RNA, 19 nt, Homo sapiens
  misc_RNA (1)...(19): siRNA sense strand
agacaugauggaacuguga

SEQ ID NO: 936453 - RNA, 19 nt, Homo sapiens
  misc_RNA (1)...(19): siRNA sense strand
aagcagaaagcaagugaau

SEQ ID NO: 936454 - RNA, 19 nt, Homo sapiens
  misc_RNA (1)...(19): siRNA sense strand
agcaacagacuauaccuuu

SEQ ID NO: 936455 - RNA, 19 nt, Homo sapiens
  misc_RNA (1)...(19): siRNA sense strand
cagaggaauucagauuugg

SEQ ID NO: 936456 - RNA, 19 nt, Homo sapiens
  misc_RNA (1)...(19): siRNA sense strand
cugcaacuuuaguauuaga

SEQ ID NO: 936457 - RNA, 19 nt, Homo sapiens
  misc_RNA (1)...(19): siRNA sense strand
uacaagaagaguagacaug

SEQ ID NO: 936458 - RNA, 19 nt, Homo sapiens
  misc_RNA (1)...(19): siRNA sense strand
gaucauccuauuccacagu

SEQ ID NO: 936459 - RNA, 19 nt, Homo sapiens
  misc_RNA (1)...(19): siRNA sense strand
gaaaauugaagaagcaaag

SEQ ID NO: 936460 - RNA, 19 nt, Homo sapiens
  misc_RNA (1)...(19): siRNA sense strand
ucagagaaacuggcaagau

SEQ ID NO: 936461 - RNA, 19 nt, Homo sapiens
  misc_RNA (1)...(19): siRNA sense strand
aaagcaaagucagaggaau

SEQ ID NO: 936462 - RNA, 19 nt, Homo sapiens
  misc_RNA (1)...(19): siRNA sense strand
aaagggccaaaguugauaa

SEQ ID NO: 936463 - RNA, 19 nt, Homo sapiens
  misc_RNA (1)...(19): siRNA sense strand
gaagaagcaaagcgagaac

SEQ ID NO: 936464 - RNA, 19 nt, Homo sapiens
  misc_RNA (1)...(19): siRNA sense strand
gguuccagguaucugaaug

SEQ ID NO: 936465 - RNA, 19 nt, Homo sapiens
  misc_RNA (1)...(19): siRNA sense strand
agaaagcaagugaauacga

SEQ ID NO: 936466 - RNA, 19 nt, Homo sapiens
  misc_RNA (1)...(19): siRNA sense strand
agauagcauugaagcugaa

SEQ ID NO: 936467 - RNA, 19 nt, Homo sapiens
  misc_RNA (1)...(19): siRNA sense strand
auuuggagaucauccuauu

SEQ ID NO: 936468 - RNA, 19 nt, Homo sapiens
  misc_RNA (1)...(19): siRNA sense strand
ggacuugaagcagaaagca

SEQ ID NO: 936469 - RNA, 19 nt, Homo sapiens
  misc_RNA (1)...(19): siRNA sense strand
aacagacuauaccuuugaa

SEQ ID NO: 936470 - RNA, 19 nt, Homo sapiens
  misc_RNA (1)...(19): siRNA sense strand
uuaaagcaacagacuauac

SEQ ID NO: 936471 - RNA, 19 nt, Homo sapiens
  misc_RNA (1)...(19): siRNA sense strand
uagcauugaagcugaacuu

SEQ ID NO: 936472 - RNA, 19 nt, Homo sapiens
  misc_RNA (1)...(19): siRNA sense strand
gcaaguauguucacuauga

SEQ ID NO: 936473 - RNA, 19 nt, Homo sapiens
  misc_RNA (1)...(19): siRNA sense strand
gaagacaaaucaacugcaa

SEQ ID NO: 936474 - RNA, 19 nt, Homo sapiens
  misc_RNA (1)...(19): siRNA sense strand
gaacaggacucgacuacag

SEQ ID NO: 936475 - RNA, 19 nt, Homo sapiens
  misc_RNA (1)...(19): siRNA sense strand
gguaucaucucuaaaccua

SEQ ID NO: 936476 - RNA, 19 nt, Homo sapiens
  misc_RNA (1)...(19): siRNA sense strand
gaugaaaucuauggcauga

SEQ ID NO: 936477 - RNA, 19 nt, Homo sapiens
  misc_RNA (1)...(19): siRNA sense strand
cagcacagcuucagcaguu

SEQ ID NO: 936478 - RNA, 19 nt, Homo sapiens
  misc_RNA (1)...(19): siRNA sense strand
gcacuuggaucuacggaau

SEQ ID NO: 936479 - RNA, 19 nt, Homo sapiens
  misc_RNA (1)...(19): siRNA sense strand
caaaggagccagccaagaa

SEQ ID NO: 936480 - RNA, 19 nt, Homo sapiens
  misc_RNA (1)...(19): siRNA sense strand
caguggaucuguugugaua

SEQ ID NO: 936481 - RNA, 19 nt, Homo sapiens
  misc_RNA (1)...(19): siRNA sense strand
ggugacugcucuuuccuua

SEQ ID NO: 936482 - RNA, 19 nt, Homo sapiens
  misc_RNA (1)...(19): siRNA sense strand
gaaacaugcugccucagau

SEQ ID NO: 936483 - RNA, 19 nt, Homo sapiens
  misc_RNA (1)...(19): siRNA sense strand
gaacggguagaugaaauua

SEQ ID NO: 936484 - RNA, 19 nt, Homo sapiens
  misc_RNA (1)...(19): siRNA sense strand
gcaagaauucugugacuau

SEQ ID NO: 936485 - RNA, 19 nt, Homo sapiens
  misc_RNA (1)...(19): siRNA sense strand
gaaggaacacugcuugguu

SEQ ID NO: 936486 - RNA, 19 nt, Homo sapiens
  misc_RNA (1)...(19): siRNA sense strand
ugacugcucuuuccuuaau

SEQ ID NO: 936487 - RNA, 19 nt, Homo sapiens
  misc_RNA (1)...(19): siRNA sense strand
uagaaagccuccugcagaa

SEQ ID NO: 936488 - RNA, 19 nt, Homo sapiens
  misc_RNA (1)...(19): siRNA sense strand
ucaauaaacacacugauga

SEQ ID NO: 936489 - RNA, 19 nt, Homo sapiens
  misc_RNA (1)...(19): siRNA sense strand
gcacauccuacucuuguaa

SEQ ID NO: 936490 - RNA, 19 nt, Homo sapiens
  misc_RNA (1)...(19): siRNA sense strand
cuacagauccugaguuaga

SEQ ID NO: 936491 - RNA, 19 nt, Homo sapiens
  misc_RNA (1)...(19): siRNA sense strand
gcucuuuccuuaauacaug

SEQ ID NO: 936492 - RNA, 19 nt, Homo sapiens
  misc_RNA (1)...(19): siRNA sense strand
ggaaacaugcugccucaga

SEQ ID NO: 936493 - RNA, 19 nt, Homo sapiens
  misc_RNA (1)...(19): siRNA sense strand
caacauacccguacuacag

SEQ ID NO: 936494 - RNA, 19 nt, Homo sapiens
  misc_RNA (1)...(19): siRNA sense strand
gaucuggccuuaacauugc

SEQ ID NO: 936495 - RNA, 19 nt, Homo sapiens
  misc_RNA (1)...(19): siRNA sense strand
gguaugaacggguagauga

SEQ ID NO: 936496 - RNA, 19 nt, Homo sapiens
  misc_RNA (1)...(19): siRNA sense strand
gggagagaaugucuaaauc

SEQ ID NO: 936497 - RNA, 19 nt, Homo sapiens
  misc_RNA (1)...(19): siRNA sense strand
caagcucucugccaugaug

SEQ ID NO: 936498 - RNA, 19 nt, Homo sapiens
  misc_RNA (1)...(19): siRNA sense strand
gauccuagagcuauuaaau

SEQ ID NO: 936499 - RNA, 19 nt, Homo sapiens
  misc_RNA (1)...(19): siRNA sense strand
ggagauccuagagcuauua

SEQ ID NO: 936500 - RNA, 19 nt, Homo sapiens
  misc_RNA (1)...(19): siRNA sense strand
aaagcgaggucuccuacaa

SEQ ID NO: 936501 - RNA, 19 nt, Homo sapiens
  misc_RNA (1)...(19): siRNA sense strand
uaaacacacugaugagucu

SEQ ID NO: 936502 - RNA, 19 nt, Homo sapiens
  misc_RNA (1)...(19): siRNA sense strand
gaaagccagugaugcugau

SEQ ID NO: 936503 - RNA, 19 nt, Homo sapiens
  misc_RNA (1)...(19): siRNA sense strand
acggguagaugaaauuauu

SEQ ID NO: 936504 - RNA, 19 nt, Homo sapiens
  misc_RNA (1)...(19): siRNA sense strand
gaucguagcugagguucgu

SEQ ID NO: 936505 - RNA, 19 nt, Homo sapiens
  misc_RNA (1)...(19): siRNA sense strand
ggauugugaugugaucgua

SEQ ID NO: 936506 - RNA, 19 nt, Homo sapiens
  misc_RNA (1)...(19): siRNA sense strand
gaaagccuccugcagaagu

SEQ ID NO: 936507 - RNA, 19 nt, Homo sapiens
  misc_RNA (1)...(19): siRNA sense strand
agaagcagcuggacucucu

SEQ ID NO: 936508 - RNA, 19 nt, Homo sapiens
  misc_RNA (1)...(19): siRNA sense strand
caagaauucugugacuaug

SEQ ID NO: 936509 - RNA, 19 nt, Homo sapiens
  misc_RNA (1)...(19): siRNA sense strand
gccaagaaaucaaggaaac

SEQ ID NO: 936510 - RNA, 19 nt, Homo sapiens
  misc_RNA (1)...(19): siRNA sense strand
ccugacagaugaugagaug

SEQ ID NO: 936511 - RNA, 19 nt, Homo sapiens
  misc_RNA (1)...(19): siRNA sense strand
acacacugaugagucuuua

SEQ ID NO: 936512 - RNA, 19 nt, Homo sapiens
  misc_RNA (1)...(19): siRNA sense strand
gaaggucagucaggagauc

SEQ ID NO: 936513 - RNA, 19 nt, Homo sapiens
  misc_RNA (1)...(19): siRNA sense strand
gggcccaagugcaagaauu

SEQ ID NO: 936514 - RNA, 19 nt, Homo sapiens
  misc_RNA (1)...(19): siRNA sense strand
caaggaggagugcaugaaa

SEQ ID NO: 936515 - RNA, 19 nt, Homo sapiens
  misc_RNA (1)...(19): siRNA sense strand
caacugcaacgcaucauuc

SEQ ID NO: 936516 - RNA, 19 nt, Homo sapiens
  misc_RNA (1)...(19): siRNA sense strand
ggagagaaugucuaaaucu

SEQ ID NO: 936517 - RNA, 19 nt, Homo sapiens
  misc_RNA (1)...(19): siRNA sense strand
aagcugcacuucagacgaa

SEQ ID NO: 936518 - RNA, 19 nt, Homo sapiens
  misc_RNA (1)...(19): siRNA sense strand
cugcaaguauguucacuau

SEQ ID NO: 936519 - RNA, 19 nt, Homo sapiens
  misc_RNA (1)...(19): siRNA sense strand
ucgcaagauugaguuauuu

SEQ ID NO: 936520 - RNA, 19 nt, Homo sapiens
  misc_RNA (1)...(19): siRNA sense strand
agaauucugugacuaugga

SEQ ID NO: 936521 - RNA, 19 nt, Homo sapiens
  misc_RNA (1)...(19): siRNA sense strand
gaugggugcuguggcagaa

SEQ ID NO: 936522 - RNA, 19 nt, Homo sapiens
  misc_RNA (1)...(19): siRNA sense strand
ugaauuagcuacagauccu

SEQ ID NO: 936523 - RNA, 19 nt, Homo sapiens
  misc_RNA (1)...(19): siRNA sense strand
ucucuggucugaacucuuc

SEQ ID NO: 936524 - RNA, 19 nt, Homo sapiens
  misc_RNA (1)...(19): siRNA sense strand
gauccugaguuagagaaga

SEQ ID NO: 936525 - RNA, 19 nt, Homo sapiens
  misc_RNA (1)...(19): siRNA sense strand
agcuacagauccugaguua

SEQ ID NO: 936526 - RNA, 19 nt, Homo sapiens
  misc_RNA (1)...(19): siRNA sense strand
gagauagagagccuucuga

SEQ ID NO: 936527 - RNA, 19 nt, Homo sapiens
  misc_RNA (1)...(19): siRNA sense strand
gcaaaggagccagccaaga

SEQ ID NO: 936528 - RNA, 19 nt, Homo sapiens
  misc_RNA (1)...(19): siRNA sense strand
uaaccuaugcugaccauuc

SEQ ID NO: 936529 - RNA, 19 nt, Homo sapiens
  misc_RNA (1)...(19): siRNA sense strand
gaggucuccuacaagauga

SEQ ID NO: 936530 - RNA, 19 nt, Homo sapiens
  misc_RNA (1)...(19): siRNA sense strand
uaucaucucuaaaccuaag

SEQ ID NO: 936531 - RNA, 19 nt, Homo sapiens
  misc_RNA (1)...(19): siRNA sense strand
uggcaugauugaaagacua

SEQ ID NO: 936532 - RNA, 19 nt, Homo sapiens
  misc_RNA (1)...(19): siRNA sense strand
acauggaacugcccuaugg

SEQ ID NO: 936533 - RNA, 19 nt, Homo sapiens
  misc_RNA (1)...(19): siRNA sense strand
gaaccaaggaggagugcau

SEQ ID NO: 936534 - RNA, 19 nt, Homo sapiens
  misc_RNA (1)...(19): siRNA sense strand
ggaguugauugagguaaag

SEQ ID NO: 936535 - RNA, 19 nt, Homo sapiens
  misc_RNA (1)...(19): siRNA sense strand
gaugggauccaccuacuag

SEQ ID NO: 936536 - RNA, 19 nt, Homo sapiens
  misc_RNA (1)...(19): siRNA sense strand
gagaugcgcaggcucaaca

SEQ ID NO: 936537 - RNA, 19 nt, Homo sapiens
  misc_RNA (1)...(19): siRNA sense strand
caaguuugcaguugugaug

SEQ ID NO: 936538 - RNA, 19 nt, Homo sapiens
  misc_RNA (1)...(19): siRNA sense strand
ugaaccaacaguccacuaa

SEQ ID NO: 936539 - RNA, 19 nt, Homo sapiens
  misc_RNA (1)...(19): siRNA sense strand
ucuccaaccuuccguagug

SEQ ID NO: 936540 - RNA, 19 nt, Homo sapiens
  misc_RNA (1)...(19): siRNA sense strand
gcacuucagacgaauuauc

SEQ ID NO: 936541 - RNA, 19 nt, Homo sapiens
  misc_RNA (1)...(19): siRNA sense strand
ggucuggauugugauguga

SEQ ID NO: 936542 - RNA, 19 nt, Homo sapiens
  misc_RNA (1)...(19): siRNA sense strand
cgaggucuccuacaagaug

SEQ ID NO: 936543 - RNA, 19 nt, Homo sapiens
  misc_RNA (1)...(19): siRNA sense strand
caagauugaguuauuugga

SEQ ID NO: 936544 - RNA, 19 nt, Homo sapiens
  misc_RNA (1)...(19): siRNA sense strand
guacaggucacugguugaa

SEQ ID NO: 936545 - RNA, 19 nt, Homo sapiens
  misc_RNA (1)...(19): siRNA sense strand
gaauccagaggcagcauug

SEQ ID NO: 936546 - RNA, 19 nt, Homo sapiens
  misc_RNA (1)...(19): siRNA sense strand
guggaucuguugugauauc

SEQ ID NO: 936547 - RNA, 19 nt, Homo sapiens
  misc_RNA (1)...(19): siRNA sense strand
caacagccaaggaacaauc

SEQ ID NO: 936548 - RNA, 19 nt, Homo sapiens
  misc_RNA (1)...(19): siRNA sense strand
gcagaagcggcgugcagaa

SEQ ID NO: 936549 - RNA, 19 nt, Homo sapiens
  misc_RNA (1)...(19): siRNA sense strand
ggagauagagagccuucug

SEQ ID NO: 936550 - RNA, 19 nt, Homo sapiens
  misc_RNA (1)...(19): siRNA sense strand
caucggaaccagcaaagga

SEQ ID NO: 936551 - RNA, 19 nt, Homo sapiens
  misc_RNA (1)...(19): siRNA sense strand
guuagucucuggucugaac

SEQ ID NO: 936552 - RNA, 19 nt, Homo sapiens
  misc_RNA (1)...(19): siRNA sense strand
guagcugccuuugccaguu

SEQ ID NO: 936553 - RNA, 19 nt, Homo sapiens
  misc_RNA (1)...(19): siRNA sense strand
gaagcggcgugcagaacag

SEQ ID NO: 936554 - RNA, 19 nt, Homo sapiens
  misc_RNA (1)...(19): siRNA sense strand
gaaccaacaguccacuaag

SEQ ID NO: 936555 - RNA, 19 nt, Homo sapiens
  misc_RNA (1)...(19): siRNA sense strand
uagagagccuucugaacca

SEQ ID NO: 936556 - RNA, 19 nt, Homo sapiens
  misc_RNA (1)...(19): siRNA sense strand
gcagaacaggacucgacua

SEQ ID NO: 936557 - RNA, 19 nt, Homo sapiens
  misc_RNA (1)...(19): siRNA sense strand
guuugcagcucaggaguug

SEQ ID NO: 936558 - RNA, 19 nt, Homo sapiens
  misc_RNA (1)...(19): siRNA sense strand
cugcuugguuggugucaaa

SEQ ID NO: 936559 - RNA, 19 nt, Homo sapiens
  misc_RNA (1)...(19): siRNA sense strand
acuacaggaugauggcuuu

SEQ ID NO: 936560 - RNA, 19 nt, Homo sapiens
  misc_RNA (1)...(19): siRNA sense strand
gcucaacauacccguacua

SEQ ID NO: 936561 - RNA, 19 nt, Homo sapiens
  misc_RNA (1)...(19): siRNA sense strand
ccugggauauucacaugga

SEQ ID NO: 936562 - RNA, 19 nt, Homo sapiens
  misc_RNA (1)...(19): siRNA sense strand
gugcaagaauucugugacu

SEQ ID NO: 936563 - RNA, 19 nt, Homo sapiens
  misc_RNA (1)...(19): siRNA sense strand
ucucugaucuggccuuaac

SEQ ID NO: 936564 - RNA, 19 nt, Homo sapiens
  misc_RNA (1)...(19): siRNA sense strand
gaggcagcauugucuccaa

SEQ ID NO: 936565 - RNA, 19 nt, Homo sapiens
  misc_RNA (1)...(19): siRNA sense strand
gguaaagcgaggucuccua

SEQ ID NO: 936566 - RNA, 19 nt, Homo sapiens
  misc_RNA (1)...(19): siRNA sense strand
cagcucaggaguugauuga

SEQ ID NO: 936567 - RNA, 19 nt, Homo sapiens
  misc_RNA (1)...(19): siRNA sense strand
ccuacaagaugaugcacau

SEQ ID NO: 936568 - RNA, 19 nt, Homo sapiens
  misc_RNA (1)...(19): siRNA sense strand
gagauccuagagcuauuaa

SEQ ID NO: 936569 - RNA, 19 nt, Homo sapiens
  misc_RNA (1)...(19): siRNA sense strand
aaaggagccagccaagaaa

SEQ ID NO: 936570 - RNA, 19 nt, Homo sapiens
  misc_RNA (1)...(19): siRNA sense strand
ugaucuggccuuaacauug

SEQ ID NO: 936571 - RNA, 19 nt, Homo sapiens
  misc_RNA (1)...(19): siRNA sense strand
ggagccagccaagaaauca

SEQ ID NO: 936572 - RNA, 19 nt, Homo sapiens
  misc_RNA (1)...(19): siRNA sense strand
gcugcuauuugaacuauua

SEQ ID NO: 936573 - RNA, 19 nt, Homo sapiens
  misc_RNA (1)...(19): siRNA sense strand
gaaaguggaagaugugaaa

SEQ ID NO: 936574 - RNA, 19 nt, Homo sapiens
  misc_RNA (1)...(19): siRNA sense strand
ugaaagcucuggucaagau

SEQ ID NO: 936575 - RNA, 19 nt, Homo sapiens
  misc_RNA (1)...(19): siRNA sense strand
gaaccuuguuaaagagaaa

SEQ ID NO: 936576 - RNA, 19 nt, Homo sapiens
  misc_RNA (1)...(19): siRNA sense strand
ggagagcgccagaguaaug

SEQ ID NO: 936577 - RNA, 19 nt, Homo sapiens
  misc_RNA (1)...(19): siRNA sense strand
ggaagccacuaggagauuu

SEQ ID NO: 936578 - RNA, 19 nt, Homo sapiens
  misc_RNA (1)...(19): siRNA sense strand
gcacuggugucuaucaaag

SEQ ID NO: 936579 - RNA, 19 nt, Homo sapiens
  misc_RNA (1)...(19): siRNA sense strand
ucagcaaucuucuaaacaa

SEQ ID NO: 936580 - RNA, 19 nt, Homo sapiens
  misc_RNA (1)...(19): siRNA sense strand
ugaaggcauuggagucuuu

SEQ ID NO: 936581 - RNA, 19 nt, Homo sapiens
  misc_RNA (1)...(19): siRNA sense strand
acacagacuuugguaauau

SEQ ID NO: 936582 - RNA, 19 nt, Homo sapiens
  misc_RNA (1)...(19): siRNA sense strand
ggcugaaccuuguuaaaga

SEQ ID NO: 936583 - RNA, 19 nt, Homo sapiens
  misc_RNA (1)...(19): siRNA sense strand
gcaaucuucuaaacaaagu

SEQ ID NO: 936584 - RNA, 19 nt, Homo sapiens
  misc_RNA (1)...(19): siRNA sense strand
ggccuuugcugcaggaauu

SEQ ID NO: 936585 - RNA, 19 nt, Homo sapiens
  misc_RNA (1)...(19): siRNA sense strand
guggagagcgccagaguaa

SEQ ID NO: 936586 - RNA, 19 nt, Homo sapiens
  misc_RNA (1)...(19): siRNA sense strand
uuacagagucuucauuuga

SEQ ID NO: 936587 - RNA, 19 nt, Homo sapiens
  misc_RNA (1)...(19): siRNA sense strand
cacacagacuuugguaaua

SEQ ID NO: 936588 - RNA, 19 nt, Homo sapiens
  misc_RNA (1)...(19): siRNA sense strand
gaagagaaaguggaagaug

SEQ ID NO: 936589 - RNA, 19 nt, Homo sapiens
  misc_RNA (1)...(19): siRNA sense strand
cagcaaucuucuaaacaaa

SEQ ID NO: 936590 - RNA, 19 nt, Homo sapiens
  misc_RNA (1)...(19): siRNA sense strand
cauaaugggcuuguucuuu

SEQ ID NO: 936591 - RNA, 19 nt, Homo sapiens
  misc_RNA (1)...(19): siRNA sense strand
ccgcaguacuugcugauug

SEQ ID NO: 936592 - RNA, 19 nt, Homo sapiens
  misc_RNA (1)...(19): siRNA sense strand
ucaccgacauguucaagau

SEQ ID NO: 936593 - RNA, 19 nt, Homo sapiens
  misc_RNA (1)...(19): siRNA sense strand
aagagaaaguggaagaugu

SEQ ID NO: 936594 - RNA, 19 nt, Homo sapiens
  misc_RNA (1)...(19): siRNA sense strand
cagcagaacgucagcuuug

SEQ ID NO: 936595 - RNA, 19 nt, Homo sapiens
  misc_RNA (1)...(19): siRNA sense strand
gagcuacccuccugcuuuu

SEQ ID NO: 936596 - RNA, 19 nt, Homo sapiens
  misc_RNA (1)...(19): siRNA sense strand
auuaacggcugcuauuuga

SEQ ID NO: 936597 - RNA, 19 nt, Homo sapiens
  misc_RNA (1)...(19): siRNA sense strand
cguccaaccuggugcuauu

SEQ ID NO: 936598 - RNA, 19 nt, Homo sapiens
  misc_RNA (1)...(19): siRNA sense strand
ggucaagauugucccuguu

SEQ ID NO: 936599 - RNA, 19 nt, Homo sapiens
  misc_RNA (1)...(19): siRNA sense strand
gagaaaaccauuaaucaga

SEQ ID NO: 936600 - RNA, 19 nt, Homo sapiens
  misc_RNA (1)...(19): siRNA sense strand
ucacacagacuuugguaau

SEQ ID NO: 936601 - RNA, 19 nt, Homo sapiens
  misc_RNA (1)...(19): siRNA sense strand
agcgagaucuuugcaagua

SEQ ID NO: 936602 - RNA, 19 nt, Homo sapiens
  misc_RNA (1)...(19): siRNA sense strand
gaacgucagcuuugucacu

SEQ ID NO: 936603 - RNA, 19 nt, Homo sapiens
  misc_RNA (1)...(19): siRNA sense strand
cacagacuuugguaauauu

SEQ ID NO: 936604 - RNA, 19 nt, Homo sapiens
  misc_RNA (1)...(19): siRNA sense strand
aaacuggucgaucccauuu

SEQ ID NO: 936605 - RNA, 19 nt, Homo sapiens
  misc_RNA (1)...(19): siRNA sense strand
caaaugcagacaacauaug

SEQ ID NO: 936606 - RNA, 19 nt, Homo sapiens
  misc_RNA (1)...(19): siRNA sense strand
ucagcuuugucacugguua

SEQ ID NO: 936607 - RNA, 19 nt, Homo sapiens
  misc_RNA (1)...(19): siRNA sense strand
ggagcgauccugucguuag

SEQ ID NO: 936608 - RNA, 19 nt, Homo sapiens
  misc_RNA (1)...(19): siRNA sense strand
cagaagagaaaguggaaga

SEQ ID NO: 936609 - RNA, 19 nt, Homo sapiens
  misc_RNA (1)...(19): siRNA sense strand
gcgagaucuuugcaaguau

SEQ ID NO: 936610 - RNA, 19 nt, Homo sapiens
  misc_RNA (1)...(19): siRNA sense strand
gagcgauccugucguuagg

SEQ ID NO: 936611 - RNA, 19 nt, Homo sapiens
  misc_RNA (1)...(19): siRNA sense strand
gcgccgaccagguuaaaga

SEQ ID NO: 936612 - RNA, 19 nt, Homo sapiens
  misc_RNA (1)...(19): siRNA sense strand
auaaugggcuuguucuuuu

SEQ ID NO: 936613 - RNA, 19 nt, Homo sapiens
  misc_RNA (1)...(19): siRNA sense strand
gcugaaccuuguuaaagag

SEQ ID NO: 936614 - RNA, 19 nt, Homo sapiens
  misc_RNA (1)...(19): siRNA sense strand
ugugaaagcucuggucaag

SEQ ID NO: 936615 - RNA, 19 nt, Homo sapiens
  misc_RNA (1)...(19): siRNA sense strand
ccaaaugcagacaacauau

SEQ ID NO: 936616 - RNA, 19 nt, Homo sapiens
  misc_RNA (1)...(19): siRNA sense strand
cgagaucuuugcaaguauc

SEQ ID NO: 936617 - RNA, 19 nt, Homo sapiens
  misc_RNA (1)...(19): siRNA sense strand
gaggauuccagaaauuuca

SEQ ID NO: 936618 - RNA, 19 nt, Homo sapiens
  misc_RNA (1)...(19): siRNA sense strand
caaacuggucgaucccauu

SEQ ID NO: 936619 - RNA, 19 nt, Homo sapiens
  misc_RNA (1)...(19): siRNA sense strand
ugggagcgauccugucguu

SEQ ID NO: 936620 - RNA, 19 nt, Homo sapiens
  misc_RNA (1)...(19): siRNA sense strand
caugcagagugccauaaug

SEQ ID NO: 936621 - RNA, 19 nt, Homo sapiens
  misc_RNA (1)...(19): siRNA sense strand
uaucgcaggccuggaauuu

SEQ ID NO: 936622 - RNA, 19 nt, Homo sapiens
  misc_RNA (1)...(19): siRNA sense strand
gcaggaauuuuggagagua

SEQ ID NO: 936623 - RNA, 19 nt, Homo sapiens
  misc_RNA (1)...(19): siRNA sense strand
gauugucccuguuuucuug

SEQ ID NO: 936624 - RNA, 19 nt, Homo sapiens
  misc_RNA (1)...(19): siRNA sense strand
gugggcauguucuuuguca

SEQ ID NO: 936625 - RNA, 19 nt, Homo sapiens
  misc_RNA (1)...(19): siRNA sense strand
ccuggaauuugcauacuca

SEQ ID NO: 936626 - RNA, 19 nt, Homo sapiens
  misc_RNA (1)...(19): siRNA sense strand
ggugggccauuuacagaag

SEQ ID NO: 936627 - RNA, 19 nt, Homo sapiens
  misc_RNA (1)...(19): siRNA sense strand
uuugaggauuccagaaauu

SEQ ID NO: 936628 - RNA, 19 nt, Homo sapiens
  misc_RNA (1)...(19): siRNA sense strand
cauuugaggauuccagaaa

SEQ ID NO: 936629 - RNA, 19 nt, Homo sapiens
  misc_RNA (1)...(19): siRNA sense strand
uccaaaugcagacaacaua

SEQ ID NO: 936630 - RNA, 19 nt, Homo sapiens
  misc_RNA (1)...(19): siRNA sense strand
gcagugccuucaccgacau

SEQ ID NO: 936631 - RNA, 19 nt, Homo sapiens
  misc_RNA (1)...(19): siRNA sense strand
uauuaacggcugcuauuug

SEQ ID NO: 936632 - RNA, 19 nt, Homo sapiens
  misc_RNA (1)...(19): siRNA sense strand
gcaggugccgcaguacuug

SEQ ID NO: 936633 - RNA, 19 nt, Homo sapiens
  misc_RNA (1)...(19): siRNA sense strand
aaagucuguuugauucaug

SEQ ID NO: 936634 - RNA, 19 nt, Homo sapiens
  misc_RNA (1)...(19): siRNA sense strand
cggcugcuauuugaacuau

SEQ ID NO: 936635 - RNA, 19 nt, Homo sapiens
  misc_RNA (1)...(19): siRNA sense strand
gucaagauugucccuguuu

SEQ ID NO: 936636 - RNA, 19 nt, Homo sapiens
  misc_RNA (1)...(19): siRNA sense strand
gaaagcucuggucaagauu

SEQ ID NO: 936637 - RNA, 19 nt, Homo sapiens
  misc_RNA (1)...(19): siRNA sense strand
uguucaagauacugacgua

SEQ ID NO: 936638 - RNA, 19 nt, Homo sapiens
  misc_RNA (1)...(19): siRNA sense strand
uacagagucuucauuugag

SEQ ID NO: 936639 - RNA, 19 nt, Homo sapiens
  misc_RNA (1)...(19): siRNA sense strand
gagaaaguggaagauguga

SEQ ID NO: 936640 - RNA, 19 nt, Homo sapiens
  misc_RNA (1)...(19): siRNA sense strand
ucuuggcuuugauaccuua

SEQ ID NO: 936641 - RNA, 19 nt, Homo sapiens
  misc_RNA (1)...(19): siRNA sense strand
gccauuuacagaagagaaa

SEQ ID NO: 936642 - RNA, 19 nt, Homo sapiens
  misc_RNA (1)...(19): siRNA sense strand
gaccaucagcgaucaagag

SEQ ID NO: 936643 - RNA, 19 nt, Homo sapiens
  misc_RNA (1)...(19): siRNA sense strand
ucgcaggccuggaauuugc

SEQ ID NO: 936644 - RNA, 19 nt, Homo sapiens
  misc_RNA (1)...(19): siRNA sense strand
ugaaccuuguuaaagagaa

SEQ ID NO: 936645 - RNA, 19 nt, Homo sapiens
  misc_RNA (1)...(19): siRNA sense strand
uugccuauauucagcagaa

SEQ ID NO: 936646 - RNA, 19 nt, Homo sapiens
  misc_RNA (1)...(19): siRNA sense strand
gacauguucaagauacuga

SEQ ID NO: 936647 - RNA, 19 nt, Homo sapiens
  misc_RNA (1)...(19): siRNA sense strand
cagaacgucagcuuuguca

SEQ ID NO: 936648 - RNA, 19 nt, Homo sapiens
  misc_RNA (1)...(19): siRNA sense strand
uuucagcaaucuucuaaac

SEQ ID NO: 936649 - RNA, 19 nt, Homo sapiens
  misc_RNA (1)...(19): siRNA sense strand
gcagaacgucagcuuuguc

SEQ ID NO: 936650 - RNA, 19 nt, Homo sapiens
  misc_RNA (1)...(19): siRNA sense strand
uuuacagagucuucauuug

SEQ ID NO: 936651 - RNA, 19 nt, Homo sapiens
  misc_RNA (1)...(19): siRNA sense strand
aaaugcagacaacauaugu

SEQ ID NO: 936652 - RNA, 19 nt, Homo sapiens
  misc_RNA (1)...(19): siRNA sense strand
gcgccagaguaauggugaa

SEQ ID NO: 936653 - RNA, 19 nt, Homo sapiens
  misc_RNA (1)...(19): siRNA sense strand
uaacggcugcuauuugaac

SEQ ID NO: 936654 - RNA, 19 nt, Homo sapiens
  misc_RNA (1)...(19): siRNA sense strand
ggaugagcagucacacaga

SEQ ID NO: 936655 - RNA, 19 nt, Homo sapiens
  misc_RNA (1)...(19): siRNA sense strand
ggauggaugagcagucaca

SEQ ID NO: 936656 - RNA, 19 nt, Homo sapiens
  misc_RNA (1)...(19): siRNA sense strand
uggcugaccauguuugaug

SEQ ID NO: 936657 - RNA, 19 nt, Homo sapiens
  misc_RNA (1)...(19): siRNA sense strand
cgaccagguuaaagaucga

SEQ ID NO: 936658 - RNA, 19 nt, Homo sapiens
  misc_RNA (1)...(19): siRNA sense strand
cuaccaugcugccgaucug

SEQ ID NO: 936659 - RNA, 19 nt, Homo sapiens
  misc_RNA (1)...(19): siRNA sense strand
gugaaggcauuggagucuu

SEQ ID NO: 936660 - RNA, 19 nt, Homo sapiens
  misc_RNA (1)...(19): siRNA sense strand
uaauauuaacggcugcuau

SEQ ID NO: 936661 - RNA, 19 nt, Homo sapiens
  misc_RNA (1)...(19): siRNA sense strand
ucggauggaugagcaguca

SEQ ID NO: 936662 - RNA, 19 nt, Homo sapiens
  misc_RNA (1)...(19): siRNA sense strand
agucuucauuugaggauuc

SEQ ID NO: 936663 - RNA, 19 nt, Homo sapiens
  misc_RNA (1)...(19): siRNA sense strand
agagaaaguggaagaugug

SEQ ID NO: 936664 - RNA, 19 nt, Homo sapiens
  misc_RNA (1)...(19): siRNA sense strand
ggauuccagaaauuucaaa

SEQ ID NO: 936665 - RNA, 19 nt, Homo sapiens
  misc_RNA (1)...(19): siRNA sense strand
gccgugggcauguucuuug

SEQ ID NO: 936666 - RNA, 19 nt, Homo sapiens
  misc_RNA (1)...(19): siRNA sense strand
gucaugugcucggccuuug

SEQ ID NO: 936667 - RNA, 19 nt, Homo sapiens
  misc_RNA (1)...(19): siRNA sense strand
ggccagagcguuuucauca

SEQ ID NO: 936668 - RNA, 19 nt, Homo sapiens
  misc_RNA (1)...(19): siRNA sense strand
caccgacauguucaagaua

SEQ ID NO: 936669 - RNA, 19 nt, Homo sapiens
  misc_RNA (1)...(19): siRNA sense strand
gccgagagcugcaggcuuu

SEQ ID NO: 936670 - RNA, 19 nt, Homo sapiens
  misc_RNA (1)...(19): siRNA sense strand
ugacuucaguugugguaau

SEQ ID NO: 936671 - RNA, 19 nt, Homo sapiens
  misc_RNA (1)...(19): siRNA sense strand
ugugcaagauucacucuga

SEQ ID NO: 936672 - RNA, 19 nt, Homo sapiens
  misc_RNA (1)...(19): siRNA sense strand
ugcagcagcuccuggauga

SEQ ID NO: 936673 - RNA, 19 nt, Homo sapiens
  misc_RNA (1)...(19): siRNA sense strand
gcgcaagaguuggccaaga

SEQ ID NO: 936674 - RNA, 19 nt, Homo sapiens
  misc_RNA (1)...(19): siRNA sense strand
ggucacacuuccagacauc

SEQ ID NO: 936675 - RNA, 19 nt, Homo sapiens
  misc_RNA (1)...(19): siRNA sense strand
cagcauguacccaucauug

SEQ ID NO: 936676 - RNA, 19 nt, Homo sapiens
  misc_RNA (1)...(19): siRNA sense strand
cagcggcuccuucaagauu

SEQ ID NO: 936677 - RNA, 19 nt, Homo sapiens
  misc_RNA (1)...(19): siRNA sense strand
gagguucagcugacuggaa

SEQ ID NO: 936678 - RNA, 19 nt, Homo sapiens
  misc_RNA (1)...(19): siRNA sense strand
cccagcggcuccuucaaga

SEQ ID NO: 936679 - RNA, 19 nt, Homo sapiens
  misc_RNA (1)...(19): siRNA sense strand
cgcaagaguuggccaagag

SEQ ID NO: 936680 - RNA, 19 nt, Homo sapiens
  misc_RNA (1)...(19): siRNA sense strand
ccaagcaggagcccuuuca

SEQ ID NO: 936681 - RNA, 19 nt, Homo sapiens
  misc_RNA (1)...(19): siRNA sense strand
agguucagcugacuggaaa

SEQ ID NO: 936682 - RNA, 19 nt, Homo sapiens
  misc_RNA (1)...(19): siRNA sense strand
gagagcugcaggcuuugaa

SEQ ID NO: 936683 - RNA, 19 nt, Homo sapiens
  misc_RNA (1)...(19): siRNA sense strand
ggaggcaacaacaucaaca

SEQ ID NO: 936684 - RNA, 19 nt, Homo sapiens
  misc_RNA (1)...(19): siRNA sense strand
gcaugccugucuuccucaa

SEQ ID NO: 936685 - RNA, 19 nt, Homo sapiens
  misc_RNA (1)...(19): siRNA sense strand
cagcagcuccuggaugaug

SEQ ID NO: 936686 - RNA, 19 nt, Homo sapiens
  misc_RNA (1)...(19): siRNA sense strand
ucugagggcgcaagaguug

SEQ ID NO: 936687 - RNA, 19 nt, Homo sapiens
  misc_RNA (1)...(19): siRNA sense strand
uuccagacaucaccagugu

SEQ ID NO: 936688 - RNA, 19 nt, Homo sapiens
  misc_RNA (1)...(19): siRNA sense strand
gcuaggaagcugggcauuc

SEQ ID NO: 936689 - RNA, 19 nt, Homo sapiens
  misc_RNA (1)...(19): siRNA sense strand
ucaccaguguggccaagag

SEQ ID NO: 936690 - RNA, 19 nt, Homo sapiens
  misc_RNA (1)...(19): siRNA sense strand
ccggcaagcuggucacacu

SEQ ID NO: 936691 - RNA, 19 nt, Homo sapiens
  misc_RNA (1)...(19): siRNA sense strand
gacuucaguugugguaauc

SEQ ID NO: 936692 - RNA, 19 nt, Homo sapiens
  misc_RNA (1)...(19): siRNA sense strand
gcugcugccuaugcugcua

SEQ ID NO: 936693 - RNA, 19 nt, Homo sapiens
  misc_RNA (1)...(19): siRNA sense strand
gaggacaccgaggcuguga

SEQ ID NO: 936694 - RNA, 19 nt, Homo sapiens
  misc_RNA (1)...(19): siRNA sense strand
ggaagaggcccaacgagaa

SEQ ID NO: 936695 - RNA, 19 nt, Homo sapiens
  misc_RNA (1)...(19): siRNA sense strand
ccgaggagguggacuugua

SEQ ID NO: 936696 - RNA, 19 nt, Homo sapiens
  misc_RNA (1)...(19): siRNA sense strand
aggcaggagugaaguauuu

SEQ ID NO: 936697 - RNA, 19 nt, Homo sapiens
  misc_RNA (1)...(19): siRNA sense strand
gaagaggcccaacgagaau

SEQ ID NO: 936698 - RNA, 19 nt, Homo sapiens
  misc_RNA (1)...(19): siRNA sense strand
ccuagcaacugugugauuu

SEQ ID NO: 936699 - RNA, 19 nt, Homo sapiens
  misc_RNA (1)...(19): siRNA sense strand
gguggacggugacaaagug

SEQ ID NO: 936700 - RNA, 19 nt, Homo sapiens
  misc_RNA (1)...(19): siRNA sense strand
gaugguggacggugacaaa

SEQ ID NO: 936701 - RNA, 19 nt, Homo sapiens
  misc_RNA (1)...(19): siRNA sense strand
ugaaguauuuccuggagau

SEQ ID NO: 936702 - RNA, 19 nt, Homo sapiens
  misc_RNA (1)...(19): siRNA sense strand
ggacgaggcaggagugaag

SEQ ID NO: 936703 - RNA, 19 nt, Homo sapiens
  misc_RNA (1)...(19): siRNA sense strand
gaauuccagugcugacauc

SEQ ID NO: 936704 - RNA, 19 nt, Homo sapiens
  misc_RNA (1)...(19): siRNA sense strand
cuggagagcuuccugaaag

SEQ ID NO: 936705 - RNA, 19 nt, Homo sapiens
  misc_RNA (1)...(19): siRNA sense strand
gaacguagagcccuuugac

SEQ ID NO: 936706 - RNA, 19 nt, Homo sapiens
  misc_RNA (1)...(19): siRNA sense strand
gcaggguuggccuccauua

SEQ ID NO: 936707 - RNA, 19 nt, Homo sapiens
  misc_RNA (1)...(19): siRNA sense strand
ugggagagcugagccagaa

SEQ ID NO: 936708 - RNA, 19 nt, Homo sapiens
  misc_RNA (1)...(19): siRNA sense strand
ugacaggcgucggcuucua

SEQ ID NO: 936709 - RNA, 19 nt, Homo sapiens
  misc_RNA (1)...(19): siRNA sense strand
gcaggauggucucucacau

SEQ ID NO: 936710 - RNA, 19 nt, Homo sapiens
  misc_RNA (1)...(19): siRNA sense strand
ccucugaaguggaguuucu

SEQ ID NO: 936711 - RNA, 19 nt, Homo sapiens
  misc_RNA (1)...(19): siRNA sense strand
ugacaggacagaacguaga

SEQ ID NO: 936712 - RNA, 19 nt, Homo sapiens
  misc_RNA (1)...(19): siRNA sense strand
cacugauggugauaucuuu

SEQ ID NO: 936713 - RNA, 19 nt, Homo sapiens
  misc_RNA (1)...(19): siRNA sense strand
ccucccauguggacagaaa

SEQ ID NO: 936714 - RNA, 19 nt, Homo sapiens
  misc_RNA (1)...(19): siRNA sense strand
gagaggcacccagccgaaa

SEQ ID NO: 936715 - RNA, 19 nt, Homo sapiens
  misc_RNA (1)...(19): siRNA sense strand
ccaccgagaccucugaagu

SEQ ID NO: 936716 - RNA, 19 nt, Homo sapiens
  misc_RNA (1)...(19): siRNA sense strand
uggagagcuuccugaaaga

SEQ ID NO: 936717 - RNA, 19 nt, Homo sapiens
  misc_RNA (1)...(19): siRNA sense strand
ccacuggaucuuacagguu

SEQ ID NO: 936718 - RNA, 19 nt, Homo sapiens
  misc_RNA (1)...(19): siRNA sense strand
cacuguggcucgaaagcuu

SEQ ID NO: 936719 - RNA, 19 nt, Homo sapiens
  misc_RNA (1)...(19): siRNA sense strand
gcucacugacuuccggauu

SEQ ID NO: 936720 - RNA, 19 nt, Homo sapiens
  misc_RNA (1)...(19): siRNA sense strand
ggguuggccuccauuacuc

SEQ ID NO: 936721 - RNA, 19 nt, Homo sapiens
  misc_RNA (1)...(19): siRNA sense strand
uuccagugcugacaucuca

SEQ ID NO: 936722 - RNA, 19 nt, Homo sapiens
  misc_RNA (1)...(19): siRNA sense strand
gaggcaggagugaaguauu

SEQ ID NO: 936723 - RNA, 19 nt, Homo sapiens
  misc_RNA (1)...(19): siRNA sense strand
ugccaagccuagcaacugu

SEQ ID NO: 936724 - RNA, 19 nt, Homo sapiens
  misc_RNA (1)...(19): siRNA sense strand
caggauggucucucacaug

SEQ ID NO: 936725 - RNA, 19 nt, Homo sapiens
  misc_RNA (1)...(19): siRNA sense strand
aagccuagcaacuguguga

SEQ ID NO: 936726 - RNA, 19 nt, Homo sapiens
  misc_RNA (1)...(19): siRNA sense strand
caccgagaccucugaagug

SEQ ID NO: 936727 - RNA, 19 nt, Homo sapiens
  misc_RNA (1)...(19): siRNA sense strand
uaaaacaagucccaguucu

SEQ ID NO: 936728 - RNA, 19 nt, Homo sapiens
  misc_RNA (1)...(19): siRNA sense strand
gaaguauuuccuggagaug

SEQ ID NO: 936729 - RNA, 19 nt, Homo sapiens
  misc_RNA (1)...(19): siRNA sense strand
ugauggugauaucuuucaa

SEQ ID NO: 936730 - RNA, 19 nt, Homo sapiens
  misc_RNA (1)...(19): siRNA sense strand
gccuagcaacugugugauu

SEQ ID NO: 936731 - RNA, 19 nt, Homo sapiens
  misc_RNA (1)...(19): siRNA sense strand
aguauuuccuggagaugug

SEQ ID NO: 936732 - RNA, 19 nt, Homo sapiens
  misc_RNA (1)...(19): siRNA sense strand
ggaggaagccgaucugaua

SEQ ID NO: 936733 - RNA, 19 nt, Homo sapiens
  misc_RNA (1)...(19): siRNA sense strand
ugagaaagcucuugaaaca

SEQ ID NO: 936734 - RNA, 19 nt, Homo sapiens
  misc_RNA (1)...(19): siRNA sense strand
gaugauggguauucuacua

SEQ ID NO: 936735 - RNA, 19 nt, Homo sapiens
  misc_RNA (1)...(19): siRNA sense strand
uaagagaucugcaccuuca

SEQ ID NO: 936736 - RNA, 19 nt, Homo sapiens
  misc_RNA (1)...(19): siRNA sense strand
uggcaaauauggacgaaua

SEQ ID NO: 936737 - RNA, 19 nt, Homo sapiens
  misc_RNA (1)...(19): siRNA sense strand
ccagagacaugaauggaaa

SEQ ID NO: 936738 - RNA, 19 nt, Homo sapiens
  misc_RNA (1)...(19): siRNA sense strand
gaaagucauuagauggaaa

SEQ ID NO: 936739 - RNA, 19 nt, Homo sapiens
  misc_RNA (1)...(19): siRNA sense strand
caggaaagcucuucauugg

SEQ ID NO: 936740 - RNA, 19 nt, Homo sapiens
  misc_RNA (1)...(19): siRNA sense strand
gaaagcucuugaaacagua

SEQ ID NO: 936741 - RNA, 19 nt, Homo sapiens
  misc_RNA (1)...(19): siRNA sense strand
guagagauguuuauuuguc

SEQ ID NO: 936742 - RNA, 19 nt, Homo sapiens
  misc_RNA (1)...(19): siRNA sense strand
ugaaagagguagacaugga

SEQ ID NO: 936743 - RNA, 19 nt, Homo sapiens
  misc_RNA (1)...(19): siRNA sense strand
cuacagagauucauaugag

SEQ ID NO: 936744 - RNA, 19 nt, Homo sapiens
  misc_RNA (1)...(19): siRNA sense strand
ggaaagucauuagauggaa

SEQ ID NO: 936745 - RNA, 19 nt, Homo sapiens
  misc_RNA (1)...(19): siRNA sense strand
aaagacagcuauucaagca

SEQ ID NO: 936746 - RNA, 19 nt, Homo sapiens
  misc_RNA (1)...(19): siRNA sense strand
uauagcagcucacgugaug

SEQ ID NO: 936747 - RNA, 19 nt, Homo sapiens
  misc_RNA (1)...(19): siRNA sense strand
agaaagcucuugaaacagu

SEQ ID NO: 936748 - RNA, 19 nt, Homo sapiens
  misc_RNA (1)...(19): siRNA sense strand
ggagguuccuacagagauu

SEQ ID NO: 936749 - RNA, 19 nt, Homo sapiens
  misc_RNA (1)...(19): siRNA sense strand
gaaguacucuugauaaaag

SEQ ID NO: 936750 - RNA, 19 nt, Homo sapiens
  misc_RNA (1)...(19): siRNA sense strand
gagauucauaugagaguua

SEQ ID NO: 936751 - RNA, 19 nt, Homo sapiens
  misc_RNA (1)...(19): siRNA sense strand
gauuauacuuaccgugauu

SEQ ID NO: 936752 - RNA, 19 nt, Homo sapiens
  misc_RNA (1)...(19): siRNA sense strand
agacaugaauggaaaguca

SEQ ID NO: 936753 - RNA, 19 nt, Homo sapiens
  misc_RNA (1)...(19): siRNA sense strand
ucaagaggcuauggcgaua

SEQ ID NO: 936754 - RNA, 19 nt, Homo sapiens
  misc_RNA (1)...(19): siRNA sense strand
ucguagagauguuuauuug

SEQ ID NO: 936755 - RNA, 19 nt, Homo sapiens
  misc_RNA (1)...(19): siRNA sense strand
uaugguaacucacguagug

SEQ ID NO: 936756 - RNA, 19 nt, Homo sapiens
  misc_RNA (1)...(19): siRNA sense strand
uggaaguacucuugauaaa

SEQ ID NO: 936757 - RNA, 19 nt, Homo sapiens
  misc_RNA (1)...(19): siRNA sense strand
gaagcagucgcuaugauga

SEQ ID NO: 936758 - RNA, 19 nt, Homo sapiens
  misc_RNA (1)...(19): siRNA sense strand
aagcagagauuacccaagu

SEQ ID NO: 936759 - RNA, 19 nt, Homo sapiens
  misc_RNA (1)...(19): siRNA sense strand
gaacaagccaccaaaccau

SEQ ID NO: 936760 - RNA, 19 nt, Homo sapiens
  misc_RNA (1)...(19): siRNA sense strand
ggaaacaaaugagaaagcu

SEQ ID NO: 936761 - RNA, 19 nt, Homo sapiens
  misc_RNA (1)...(19): siRNA sense strand
caaaugagaaagcucuuga

SEQ ID NO: 936762 - RNA, 19 nt, Homo sapiens
  misc_RNA (1)...(19): siRNA sense strand
cgauagagauggauauggu

SEQ ID NO: 936763 - RNA, 19 nt, Homo sapiens
  misc_RNA (1)...(19): siRNA sense strand
gaggaggacacauggauga

SEQ ID NO: 936764 - RNA, 19 nt, Homo sapiens
  misc_RNA (1)...(19): siRNA sense strand
cagcucacgugauggauau

SEQ ID NO: 936765 - RNA, 19 nt, Homo sapiens
  misc_RNA (1)...(19): siRNA sense strand
ggaagcagucgcuaugaug

SEQ ID NO: 936766 - RNA, 19 nt, Homo sapiens
  misc_RNA (1)...(19): siRNA sense strand
uacccaaguucucgugaua

SEQ ID NO: 936767 - RNA, 19 nt, Homo sapiens
  misc_RNA (1)...(19): siRNA sense strand
uggaagagauaguuaugga

SEQ ID NO: 936768 - RNA, 19 nt, Homo sapiens
  misc_RNA (1)...(19): siRNA sense strand
ugacaggguuggcagacaa

SEQ ID NO: 936769 - RNA, 19 nt, Homo sapiens
  misc_RNA (1)...(19): siRNA sense strand
ccaggaaagcucuucauug

SEQ ID NO: 936770 - RNA, 19 nt, Homo sapiens
  misc_RNA (1)...(19): siRNA sense strand
gcagcucacgugauggaua

SEQ ID NO: 936771 - RNA, 19 nt, Homo sapiens
  misc_RNA (1)...(19): siRNA sense strand
ggaacaagccaccaaacca

SEQ ID NO: 936772 - RNA, 19 nt, Homo sapiens
  misc_RNA (1)...(19): siRNA sense strand
gcagagauuacccaaguuc

SEQ ID NO: 936773 - RNA, 19 nt, Homo sapiens
  misc_RNA (1)...(19): siRNA sense strand
ccuaagagaucugcaccuu

SEQ ID NO: 936774 - RNA, 19 nt, Homo sapiens
  misc_RNA (1)...(19): siRNA sense strand
guggaaguacucuugauaa

SEQ ID NO: 936775 - RNA, 19 nt, Homo sapiens
  misc_RNA (1)...(19): siRNA sense strand
ggaagccgaucugauagag

SEQ ID NO: 936776 - RNA, 19 nt, Homo sapiens
  misc_RNA (1)...(19): siRNA sense strand
gcagucgcuaugaugauua

SEQ ID NO: 936777 - RNA, 19 nt, Homo sapiens
  misc_RNA (1)...(19): siRNA sense strand
gcuauucaagcagagauua

SEQ ID NO: 936778 - RNA, 19 nt, Homo sapiens
  misc_RNA (1)...(19): siRNA sense strand
gcaccaccaccacgagauu

SEQ ID NO: 936779 - RNA, 19 nt, Homo sapiens
  misc_RNA (1)...(19): siRNA sense strand
cauggaugaugguggauau

SEQ ID NO: 936780 - RNA, 19 nt, Homo sapiens
  misc_RNA (1)...(19): siRNA sense strand
caagagaugauggguauuc

SEQ ID NO: 936781 - RNA, 19 nt, Homo sapiens
  misc_RNA (1)...(19): siRNA sense strand
gcuccucuaucacguggaa

SEQ ID NO: 936782 - RNA, 19 nt, Homo sapiens
  misc_RNA (1)...(19): siRNA sense strand
ugauggguauucuacuaaa

SEQ ID NO: 936783 - RNA, 19 nt, Homo sapiens
  misc_RNA (1)...(19): siRNA sense strand
ucaagcagccgaagugauc

SEQ ID NO: 936784 - RNA, 19 nt, Homo sapiens
  misc_RNA (1)...(19): siRNA sense strand
guggaagucgagacaguua

SEQ ID NO: 936785 - RNA, 19 nt, Homo sapiens
  misc_RNA (1)...(19): siRNA sense strand
caaauauggacgaauagug

SEQ ID NO: 936786 - RNA, 19 nt, Homo sapiens
  misc_RNA (1)...(19): siRNA sense strand
gaaaccaacaaaucaagag

SEQ ID NO: 936787 - RNA, 19 nt, Homo sapiens
  misc_RNA (1)...(19): siRNA sense strand
cgagacaguuacucaagca

SEQ ID NO: 936788 - RNA, 19 nt, Homo sapiens
  misc_RNA (1)...(19): siRNA sense strand
ggaugcagccagagacaug

SEQ ID NO: 936789 - RNA, 19 nt, Homo sapiens
  misc_RNA (1)...(19): siRNA sense strand
gagaugauggguauucuac

SEQ ID NO: 936790 - RNA, 19 nt, Homo sapiens
  misc_RNA (1)...(19): siRNA sense strand
ggaccaccaccaagaagug

SEQ ID NO: 936791 - RNA, 19 nt, Homo sapiens
  misc_RNA (1)...(19): siRNA sense strand
ccaguucacgugaugacua

SEQ ID NO: 936792 - RNA, 19 nt, Homo sapiens
  misc_RNA (1)...(19): siRNA sense strand
caccacgagauuauacuua

SEQ ID NO: 936793 - RNA, 19 nt, Homo sapiens
  misc_RNA (1)...(19): siRNA sense strand
aaguggagguuccuacaga

SEQ ID NO: 936794 - RNA, 19 nt, Homo sapiens
  misc_RNA (1)...(19): siRNA sense strand
gauggguauucuacuaaag

SEQ ID NO: 936795 - RNA, 19 nt, Homo sapiens
  misc_RNA (1)...(19): siRNA sense strand
ugauggauaugguggaagu

SEQ ID NO: 936796 - RNA, 19 nt, Homo sapiens
  misc_RNA (1)...(19): siRNA sense strand
gguggaagcagucgcuaug

SEQ ID NO: 936797 - RNA, 19 nt, Homo sapiens
  misc_RNA (1)...(19): siRNA sense strand
caguucacgugaugacuau

SEQ ID NO: 936798 - RNA, 19 nt, Homo sapiens
  misc_RNA (1)...(19): siRNA sense strand
gaaccgcuccccucucgua

SEQ ID NO: 936799 - RNA, 19 nt, Homo sapiens
  misc_RNA (1)...(19): siRNA sense strand
gcaaauauggacgaauagu

SEQ ID NO: 936800 - RNA, 19 nt, Homo sapiens
  misc_RNA (1)...(19): siRNA sense strand
caaguucucgugauacaag

SEQ ID NO: 936801 - RNA, 19 nt, Homo sapiens
  misc_RNA (1)...(19): siRNA sense strand
aagcagaucgcccaggaaa

SEQ ID NO: 936802 - RNA, 19 nt, Homo sapiens
  misc_RNA (1)...(19): siRNA sense strand
aaugagaaagcucuugaaa

SEQ ID NO: 936803 - RNA, 19 nt, Homo sapiens
  misc_RNA (1)...(19): siRNA sense strand
cuauucagaucauccaagu

SEQ ID NO: 936804 - RNA, 19 nt, Homo sapiens
  misc_RNA (1)...(19): siRNA sense strand
cuaaagacagcuauucaag

SEQ ID NO: 936805 - RNA, 19 nt, Homo sapiens
  misc_RNA (1)...(19): siRNA sense strand
gcagaucgcccaggaaagc

SEQ ID NO: 936806 - RNA, 19 nt, Homo sapiens
  misc_RNA (1)...(19): siRNA sense strand
ggaaguacucuugauaaaa

SEQ ID NO: 936807 - RNA, 19 nt, Homo sapiens
  misc_RNA (1)...(19): siRNA sense strand
ggacgaauaguggaaguac

SEQ ID NO: 936808 - RNA, 19 nt, Homo sapiens
  misc_RNA (1)...(19): siRNA sense strand
uacagagauucauaugaga

SEQ ID NO: 936809 - RNA, 19 nt, Homo sapiens
  misc_RNA (1)...(19): siRNA sense strand
ggaggacacauggaugaug

SEQ ID NO: 936810 - RNA, 19 nt, Homo sapiens
  misc_RNA (1)...(19): siRNA sense strand
gaggaagccgaucugauag

SEQ ID NO: 936811 - RNA, 19 nt, Homo sapiens
  misc_RNA (1)...(19): siRNA sense strand
auacuuaccgugauuaugg

SEQ ID NO: 936812 - RNA, 19 nt, Homo sapiens
  misc_RNA (1)...(19): siRNA sense strand
ccaccaccacgagauuaua

SEQ ID NO: 936813 - RNA, 19 nt, Homo sapiens
  misc_RNA (1)...(19): siRNA sense strand
uaaaagaccgugaaaccaa

SEQ ID NO: 936814 - RNA, 19 nt, Homo sapiens
  misc_RNA (1)...(19): siRNA sense strand
ggcuuaauacggaaacaaa

SEQ ID NO: 936815 - RNA, 19 nt, Homo sapiens
  misc_RNA (1)...(19): siRNA sense strand
guucgcagcagcaguggaa

SEQ ID NO: 936816 - RNA, 19 nt, Homo sapiens
  misc_RNA (1)...(19): siRNA sense strand
ugaaaccaacaaaucaaga

SEQ ID NO: 936817 - RNA, 19 nt, Homo sapiens
  misc_RNA (1)...(19): siRNA sense strand
gaagcagaucgcccaggaa

SEQ ID NO: 936818 - RNA, 19 nt, Homo sapiens
  misc_RNA (1)...(19): siRNA sense strand
uggaagcagucgcuaugau

SEQ ID NO: 936819 - RNA, 19 nt, Homo sapiens
  misc_RNA (1)...(19): siRNA sense strand
guuccuacagagauucaua

SEQ ID NO: 936820 - RNA, 19 nt, Homo sapiens
  misc_RNA (1)...(19): siRNA sense strand
gauuauggucauuccaguu

SEQ ID NO: 936821 - RNA, 19 nt, Homo sapiens
  misc_RNA (1)...(19): siRNA sense strand
gccagagacaugaauggaa

SEQ ID NO: 936822 - RNA, 19 nt, Homo sapiens
  misc_RNA (1)...(19): siRNA sense strand
cgugauuccuacagcaguu

SEQ ID NO: 936823 - RNA, 19 nt, Homo sapiens
  misc_RNA (1)...(19): siRNA sense strand
aauaguggaaguacucuug

SEQ ID NO: 936824 - RNA, 19 nt, Homo sapiens
  misc_RNA (1)...(19): siRNA sense strand
caagaggauuugcuuuugu

SEQ ID NO: 936825 - RNA, 19 nt, Homo sapiens
  misc_RNA (1)...(19): siRNA sense strand
cccaaguucucgugauaca

SEQ ID NO: 936826 - RNA, 19 nt, Homo sapiens
  misc_RNA (1)...(19): siRNA sense strand
cagucgcuaugaugauuau

SEQ ID NO: 936827 - RNA, 19 nt, Homo sapiens
  misc_RNA (1)...(19): siRNA sense strand
ucaagaggauuugcuuuug

SEQ ID NO: 936828 - RNA, 19 nt, Homo sapiens
  misc_RNA (1)...(19): siRNA sense strand
ucacguggaagagauaguu

SEQ ID NO: 936829 - RNA, 19 nt, Homo sapiens
  misc_RNA (1)...(19): siRNA sense strand
cuacuaaagacagcuauuc

SEQ ID NO: 936830 - RNA, 19 nt, Homo sapiens
  misc_RNA (1)...(19): siRNA sense strand
gucgugaucgugacuauuc

SEQ ID NO: 936831 - RNA, 19 nt, Homo sapiens
  misc_RNA (1)...(19): siRNA sense strand
cgugauggauaugguggaa

SEQ ID NO: 936832 - RNA, 19 nt, Homo sapiens
  misc_RNA (1)...(19): siRNA sense strand
gcauaugggugaauguuug

SEQ ID NO: 936833 - RNA, 19 nt, Homo sapiens
  misc_RNA (1)...(19): siRNA sense strand
gcauaugggugaauguuug

SEQ ID NO: 936834 - RNA, 19 nt, Homo sapiens
  misc_RNA (1)...(19): siRNA sense strand
gcauacgggugaauguuug

SEQ ID NO: 936835 - RNA, 19 nt, Homo sapiens
  misc_RNA (1)...(19): siRNA sense strand
gcccaugaguauaugcaua

SEQ ID NO: 936836 - RNA, 19 nt, Homo sapiens
  misc_RNA (1)...(19): siRNA sense strand
gcccaugaguauaugcaua

SEQ ID NO: 936837 - RNA, 19 nt, Homo sapiens
  misc_RNA (1)...(19): siRNA sense strand
gaacacaaacagcuacacu

SEQ ID NO: 936838 - RNA, 19 nt, Homo sapiens
  misc_RNA (1)...(19): siRNA sense strand
gcccgugauuauaugcaua

SEQ ID NO: 936839 - RNA, 19 nt, Homo sapiens
  misc_RNA (1)...(19): siRNA sense strand
ucaugaacacaaacagcua

SEQ ID NO: 936840 - RNA, 19 nt, Homo sapiens
  misc_RNA (1)...(19): siRNA sense strand
uaagagagaugcuggaaua

SEQ ID NO: 936841 - RNA, 19 nt, Homo sapiens
  misc_RNA (1)...(19): siRNA sense strand
caaccaggaucuaauaaua

SEQ ID NO: 936842 - RNA, 19 nt, Homo sapiens
  misc_RNA (1)...(19): siRNA sense strand
gagagaugcuggaauauuu

SEQ ID NO: 936843 - RNA, 19 nt, Homo sapiens
  misc_RNA (1)...(19): siRNA sense strand
gagaauagaucuugggaau

SEQ ID NO: 936844 - RNA, 19 nt, Homo sapiens
  misc_RNA (1)...(19): siRNA sense strand
gaagagaaaguggaaauuu

SEQ ID NO: 936845 - RNA, 19 nt, Homo sapiens
  misc_RNA (1)...(19): siRNA sense strand
ggauccaguuucuuuaaua

SEQ ID NO: 936846 - RNA, 19 nt, Homo sapiens
  misc_RNA (1)...(19): siRNA sense strand
aaaugaagcugcaauuaga

SEQ ID NO: 936847 - RNA, 19 nt, Homo sapiens
  misc_RNA (1)...(19): siRNA sense strand
guacaaccaggaucuaaua

SEQ ID NO: 936848 - RNA, 19 nt, Homo sapiens
  misc_RNA (1)...(19): siRNA sense strand
cuucuaaacucaaggauuu

SEQ ID NO: 936849 - RNA, 19 nt, Homo sapiens
  misc_RNA (1)...(19): siRNA sense strand
gaacagguuuugcugauuu

SEQ ID NO: 936850 - RNA, 19 nt, Homo sapiens
  misc_RNA (1)...(19): siRNA sense strand
gcacuuaaacagaaauuug

SEQ ID NO: 936851 - RNA, 19 nt, Homo sapiens
  misc_RNA (1)...(19): siRNA sense strand
guaaaugaagcugcaauua

SEQ ID NO: 936852 - RNA, 19 nt, Homo sapiens
  misc_RNA (1)...(19): siRNA sense strand
cugaauaucuuaagagaga

SEQ ID NO: 936853 - RNA, 19 nt, Homo sapiens
  misc_RNA (1)...(19): siRNA sense strand
gaacccggcugcuaauaag

SEQ ID NO: 936854 - RNA, 19 nt, Homo sapiens
  misc_RNA (1)...(19): siRNA sense strand
gaagaagccaguuaucuca

SEQ ID NO: 936855 - RNA, 19 nt, Homo sapiens
  misc_RNA (1)...(19): siRNA sense strand
caacugaaaugagcaaaca

SEQ ID NO: 936856 - RNA, 19 nt, Homo sapiens
  misc_RNA (1)...(19): siRNA sense strand
ggaaaugcaggaacugaaa

SEQ ID NO: 936857 - RNA, 19 nt, Homo sapiens
  misc_RNA (1)...(19): siRNA sense strand
gaagaaauggucaacacaa

SEQ ID NO: 936858 - RNA, 19 nt, Homo sapiens
  misc_RNA (1)...(19): siRNA sense strand
gauaauccagcaacugaaa

SEQ ID NO: 936859 - RNA, 19 nt, Homo sapiens
  misc_RNA (1)...(19): siRNA sense strand
ggacaucacauuucacagu

SEQ ID NO: 936860 - RNA, 19 nt, Homo sapiens
  misc_RNA (1)...(19): siRNA sense strand
gacuauggaucaacuagga

SEQ ID NO: 936861 - RNA, 19 nt, Homo sapiens
  misc_RNA (1)...(19): siRNA sense strand
aagaaauggucaacacaaa

SEQ ID NO: 936862 - RNA, 19 nt, Homo sapiens
  misc_RNA (1)...(19): siRNA sense strand
ugaccugccuguaaaugaa

SEQ ID NO: 936863 - RNA, 19 nt, Homo sapiens
  misc_RNA (1)...(19): siRNA sense strand
uaaaugaagcugcaauuag

SEQ ID NO: 936864 - RNA, 19 nt, Homo sapiens
  misc_RNA (1)...(19): siRNA sense strand
gcgguagacccauucauaa

SEQ ID NO: 936865 - RNA, 19 nt, Homo sapiens
  misc_RNA (1)...(19): siRNA sense strand
acacaagccuucuaaacuc

SEQ ID NO: 936866 - RNA, 19 nt, Homo sapiens
  misc_RNA (1)...(19): siRNA sense strand
uuucuucgcucucagauug

SEQ ID NO: 936867 - RNA, 19 nt, Homo sapiens
  misc_RNA (1)...(19): siRNA sense strand
ggacagcgaacuaaagaag

SEQ ID NO: 936868 - RNA, 19 nt, Homo sapiens
  misc_RNA (1)...(19): siRNA sense strand
cagauaauccagcaacuga

SEQ ID NO: 936869 - RNA, 19 nt, Homo sapiens
  misc_RNA (1)...(19): siRNA sense strand
acagcgaacuaaagaagaa

SEQ ID NO: 936870 - RNA, 19 nt, Homo sapiens
  misc_RNA (1)...(19): siRNA sense strand
ggcgguagacccauucaua

SEQ ID NO: 936871 - RNA, 19 nt, Homo sapiens
  misc_RNA (1)...(19): siRNA sense strand
ggaguauuguucguauuau

SEQ ID NO: 936872 - RNA, 19 nt, Homo sapiens
  misc_RNA (1)...(19): siRNA sense strand
gaaggacagcgaacuaaag

SEQ ID NO: 936873 - RNA, 19 nt, Homo sapiens
  misc_RNA (1)...(19): siRNA sense strand
aaagacagaauucacauug

SEQ ID NO: 936874 - RNA, 19 nt, Homo sapiens
  misc_RNA (1)...(19): siRNA sense strand
ccaauuauagucaucauuc

SEQ ID NO: 936875 - RNA, 19 nt, Homo sapiens
  misc_RNA (1)...(19): siRNA sense strand
aaacagaacccggcugcua

SEQ ID NO: 936876 - RNA, 19 nt, Homo sapiens
  misc_RNA (1)...(19): siRNA sense strand
gugacgagcgcauuaguuu

SEQ ID NO: 936877 - RNA, 19 nt, Homo sapiens
  misc_RNA (1)...(19): siRNA sense strand
aaaaugaccugccuguaaa

SEQ ID NO: 936878 - RNA, 19 nt, Homo sapiens
  misc_RNA (1)...(19): siRNA sense strand
uguagacucugauaauugu

SEQ ID NO: 936879 - RNA, 19 nt, Homo sapiens
  misc_RNA (1)...(19): siRNA sense strand
uaaagacuauggaucaacu

SEQ ID NO: 936880 - RNA, 19 nt, Homo sapiens
  misc_RNA (1)...(19): siRNA sense strand
gguagacccauucauaaga

SEQ ID NO: 936881 - RNA, 19 nt, Homo sapiens
  misc_RNA (1)...(19): siRNA sense strand
caagguaucagcaacacaa

SEQ ID NO: 936882 - RNA, 19 nt, Homo sapiens
  misc_RNA (1)...(19): siRNA sense strand
caacacaagccuucuaaac

SEQ ID NO: 936883 - RNA, 19 nt, Homo sapiens
  misc_RNA (1)...(19): siRNA sense strand
gggauccaguuucuuuaau

SEQ ID NO: 936884 - RNA, 19 nt, Homo sapiens
  misc_RNA (1)...(19): siRNA sense strand
gaguugaucccgcucuuga

SEQ ID NO: 936885 - RNA, 19 nt, Homo sapiens
  misc_RNA (1)...(19): siRNA sense strand
gaacuaaagaagaaauggu

SEQ ID NO: 936886 - RNA, 19 nt, Homo sapiens
  misc_RNA (1)...(19): siRNA sense strand
guagacccauucauaagag

SEQ ID NO: 936887 - RNA, 19 nt, Homo sapiens
  misc_RNA (1)...(19): siRNA sense strand
gguuaagcuucgugcaauu

SEQ ID NO: 936888 - RNA, 19 nt, Homo sapiens
  misc_RNA (1)...(19): siRNA sense strand
gaaccuugucgaagaccua

SEQ ID NO: 936889 - RNA, 19 nt, Homo sapiens
  misc_RNA (1)...(19): siRNA sense strand
ucuguagacucugauaauu

SEQ ID NO: 936890 - RNA, 19 nt, Homo sapiens
  misc_RNA (1)...(19): siRNA sense strand
cacaaaagcuguugaccaa

SEQ ID NO: 936891 - RNA, 19 nt, Homo sapiens
  misc_RNA (1)...(19): siRNA sense strand
ugaacucuguagacucuga

SEQ ID NO: 936892 - RNA, 19 nt, Homo sapiens
  misc_RNA (1)...(19): siRNA sense strand
cuaggaguauuguucguau

SEQ ID NO: 936893 - RNA, 19 nt, Homo sapiens
  misc_RNA (1)...(19): siRNA sense strand
ucagaaggacagcgaacua

SEQ ID NO: 936894 - RNA, 19 nt, Homo sapiens
  misc_RNA (1)...(19): siRNA sense strand
acuggaaccuugucgaaga

SEQ ID NO: 936895 - RNA, 19 nt, Homo sapiens
  misc_RNA (1)...(19): siRNA sense strand
ugaagaagagaaaguggaa

SEQ ID NO: 936896 - RNA, 19 nt, Homo sapiens
  misc_RNA (1)...(19): siRNA sense strand
aggaguauuguucguauua

SEQ ID NO: 936897 - RNA, 19 nt, Homo sapiens
  misc_RNA (1)...(19): siRNA sense strand
guuuggacaucacauuuca

SEQ ID NO: 936898 - RNA, 19 nt, Homo sapiens
  misc_RNA (1)...(19): siRNA sense strand
guacaaauucuaguuccuu

SEQ ID NO: 936899 - RNA, 19 nt, Homo sapiens
  misc_RNA (1)...(19): siRNA sense strand
agaagccaguuaucucaga

SEQ ID NO: 936900 - RNA, 19 nt, Homo sapiens
  misc_RNA (1)...(19): siRNA sense strand
cacaagccuucuaaacuca

SEQ ID NO: 936901 - RNA, 19 nt, Homo sapiens
  misc_RNA (1)...(19): siRNA sense strand
gcaacacaagccuucuaaa

SEQ ID NO: 936902 - RNA, 19 nt, Homo sapiens
  misc_RNA (1)...(19): siRNA sense strand
cagaaggacagcgaacuaa

SEQ ID NO: 936903 - RNA, 19 nt, Homo sapiens
  misc_RNA (1)...(19): siRNA sense strand
uagcugcccuugaaaauga

SEQ ID NO: 936904 - RNA, 19 nt, Homo sapiens
  misc_RNA (1)...(19): siRNA sense strand
uguggcaaaugaugaagaa

SEQ ID NO: 936905 - RNA, 19 nt, Homo sapiens
  misc_RNA (1)...(19): siRNA sense strand
ucaacuaggaguauuguuc

SEQ ID NO: 936906 - RNA, 19 nt, Homo sapiens
  misc_RNA (1)...(19): siRNA sense strand
ccacuggaaccuugucgaa

SEQ ID NO: 936907 - RNA, 19 nt, Homo sapiens
  misc_RNA (1)...(19): siRNA sense strand
cucaugcacuuaaacagaa

SEQ ID NO: 936908 - RNA, 19 nt, Homo sapiens
  misc_RNA (1)...(19): siRNA sense strand
ggauaugaauaagguuaag

SEQ ID NO: 936909 - RNA, 19 nt, Homo sapiens
  misc_RNA (1)...(19): siRNA sense strand
acugucaccugcuguaaga

SEQ ID NO: 936910 - RNA, 19 nt, Homo sapiens
  misc_RNA (1)...(19): siRNA sense strand
gaagaagagaaaguggaaa

SEQ ID NO: 936911 - RNA, 19 nt, Homo sapiens
  misc_RNA (1)...(19): siRNA sense strand
guccagaaacuucaagguu

SEQ ID NO: 936912 - RNA, 19 nt, Homo sapiens
  misc_RNA (1)...(19): siRNA sense strand
ccagaucagcuuccagguu

SEQ ID NO: 936913 - RNA, 19 nt, Homo sapiens
  misc_RNA (1)...(19): siRNA sense strand
gauaauuguggaucuaugg

SEQ ID NO: 936914 - RNA, 19 nt, Homo sapiens
  misc_RNA (1)...(19): siRNA sense strand
aagaagaaauggucaacac

SEQ ID NO: 936915 - RNA, 19 nt, Homo sapiens
  misc_RNA (1)...(19): siRNA sense strand
ucacauugggauccaguuu

SEQ ID NO: 936916 - RNA, 19 nt, Homo sapiens
  misc_RNA (1)...(19): siRNA sense strand
agaacccggcugcuaauaa

SEQ ID NO: 936917 - RNA, 19 nt, Homo sapiens
  misc_RNA (1)...(19): siRNA sense strand
ugggucagcugucaucauc

SEQ ID NO: 936918 - RNA, 19 nt, Homo sapiens
  misc_RNA (1)...(19): siRNA sense strand
ugaagaagccaguuaucuc

SEQ ID NO: 936919 - RNA, 19 nt, Homo sapiens
  misc_RNA (1)...(19): siRNA sense strand
aaacauguuggacguucua

SEQ ID NO: 936920 - RNA, 19 nt, Homo sapiens
  misc_RNA (1)...(19): siRNA sense strand
ggaucaacuaggaguauug

SEQ ID NO: 936921 - RNA, 19 nt, Homo sapiens
  misc_RNA (1)...(19): siRNA sense strand
agagagaugcuggaauauu

SEQ ID NO: 936922 - RNA, 19 nt, Homo sapiens
  misc_RNA (1)...(19): siRNA sense strand
ucugauaauuguggaucua

SEQ ID NO: 936923 - RNA, 19 nt, Homo sapiens
  misc_RNA (1)...(19): siRNA sense strand
cagcaacacaagccuucua

SEQ ID NO: 936924 - RNA, 19 nt, Homo sapiens
  misc_RNA (1)...(19): siRNA sense strand
ggaaaagacagaauucaca

SEQ ID NO: 936925 - RNA, 19 nt, Homo sapiens
  misc_RNA (1)...(19): siRNA sense strand
agccagagaaauaaagaua

SEQ ID NO: 936926 - RNA, 19 nt, Homo sapiens
  misc_RNA (1)...(19): siRNA sense strand
aacagaacccggcugcuaa

SEQ ID NO: 936927 - RNA, 19 nt, Homo sapiens
  misc_RNA (1)...(19): siRNA sense strand
gacgagcgcauuaguuugg

SEQ ID NO: 936928 - RNA, 19 nt, Homo sapiens
  misc_RNA (1)...(19): siRNA sense strand
gaucaacuaggaguauugu

SEQ ID NO: 936929 - RNA, 19 nt, Homo sapiens
  misc_RNA (1)...(19): siRNA sense strand
cagcaauuguggaaaugca

SEQ ID NO: 936930 - RNA, 19 nt, Homo sapiens
  misc_RNA (1)...(19): siRNA sense strand
guauguggcaaaugaugaa

SEQ ID NO: 936931 - RNA, 19 nt, Homo sapiens
  misc_RNA (1)...(19): siRNA sense strand
ugauaauuguggaucuaug

SEQ ID NO: 936932 - RNA, 19 nt, Homo sapiens
  misc_RNA (1)...(19): siRNA sense strand
cuugaacucuguagacucu

SEQ ID NO: 936933 - RNA, 19 nt, Homo sapiens
  misc_RNA (1)...(19): siRNA sense strand
agaaggacagcgaacuaaa

SEQ ID NO: 936934 - RNA, 19 nt, Homo sapiens
  misc_RNA (1)...(19): siRNA sense strand
gaugaagaagccaguuauc

SEQ ID NO: 936935 - RNA, 19 nt, Homo sapiens
  misc_RNA (1)...(19): siRNA sense strand
ggacccagaucagcuucca

SEQ ID NO: 936936 - RNA, 19 nt, Homo sapiens
  misc_RNA (1)...(19): siRNA sense strand
ugagaaagagaauagaucu

SEQ ID NO: 936937 - RNA, 19 nt, Homo sapiens
  misc_RNA (1)...(19): siRNA sense strand
ucaugcacuuaaacagaaa

SEQ ID NO: 936938 - RNA, 19 nt, Homo sapiens
  misc_RNA (1)...(19): siRNA sense strand
gaauucacauugggaucca

SEQ ID NO: 936939 - RNA, 19 nt, Homo sapiens
  misc_RNA (1)...(19): siRNA sense strand
gaccaauuauagucaucau

SEQ ID NO: 936940 - RNA, 19 nt, Homo sapiens
  misc_RNA (1)...(19): siRNA sense strand
ccaaaggagucgauucuua

SEQ ID NO: 936941 - RNA, 19 nt, Homo sapiens
  misc_RNA (1)...(19): siRNA sense strand
gaaacuacccauacuaauu

SEQ ID NO: 936942 - RNA, 19 nt, Homo sapiens
  misc_RNA (1)...(19): siRNA sense strand
gaacuugcaucaacaauac

SEQ ID NO: 936943 - RNA, 19 nt, Homo sapiens
  misc_RNA (1)...(19): siRNA sense strand
caauggaucucucagcuaa

SEQ ID NO: 936944 - RNA, 19 nt, Homo sapiens
  misc_RNA (1)...(19): siRNA sense strand
caacaauacuucagucaug

SEQ ID NO: 936945 - RNA, 19 nt, Homo sapiens
  misc_RNA (1)...(19): siRNA sense strand
gggaucaguuugcugguua

SEQ ID NO: 936946 - RNA, 19 nt, Homo sapiens
  misc_RNA (1)...(19): siRNA sense strand
gagcaaaggugaaggacau

SEQ ID NO: 936947 - RNA, 19 nt, Homo sapiens
  misc_RNA (1)...(19): siRNA sense strand
caaaggagucgauucuuaa

SEQ ID NO: 936948 - RNA, 19 nt, Homo sapiens
  misc_RNA (1)...(19): siRNA sense strand
gaagaaacuacccauacua

SEQ ID NO: 936949 - RNA, 19 nt, Homo sapiens
  misc_RNA (1)...(19): siRNA sense strand
gaaggaacuugcaucaaca

SEQ ID NO: 936950 - RNA, 19 nt, Homo sapiens
  misc_RNA (1)...(19): siRNA sense strand
ucaguucggugaugcauuu

SEQ ID NO: 936951 - RNA, 19 nt, Homo sapiens
  misc_RNA (1)...(19): siRNA sense strand
ugaaggacaucuuuaagga

SEQ ID NO: 936952 - RNA, 19 nt, Homo sapiens
  misc_RNA (1)...(19): siRNA sense strand
ggaacuugcaucaacaaua

SEQ ID NO: 936953 - RNA, 19 nt, Homo sapiens
  misc_RNA (1)...(19): siRNA sense strand
cagaggagcuagugucaug

SEQ ID NO: 936954 - RNA, 19 nt, Homo sapiens
  misc_RNA (1)...(19): siRNA sense strand
gaacauauugcugauaaga

SEQ ID NO: 936955 - RNA, 19 nt, Homo sapiens
  misc_RNA (1)...(19): siRNA sense strand
guucucggcuucauccuuu

SEQ ID NO: 936956 - RNA, 19 nt, Homo sapiens
  misc_RNA (1)...(19): siRNA sense strand
ggauggauguuaugcuaug

SEQ ID NO: 936957 - RNA, 19 nt, Homo sapiens
  misc_RNA (1)...(19): siRNA sense strand
gacaacggauggauguuau

SEQ ID NO: 936958 - RNA, 19 nt, Homo sapiens
  misc_RNA (1)...(19): siRNA sense strand
gaacaguaguaaauacaac

SEQ ID NO: 936959 - RNA, 19 nt, Homo sapiens
  misc_RNA (1)...(19): siRNA sense strand
gaaccaauguaaauuucca

SEQ ID NO: 936960 - RNA, 19 nt, Homo sapiens
  misc_RNA (1)...(19): siRNA sense strand
uaagucugcuauugcuaua

SEQ ID NO: 936961 - RNA, 19 nt, Homo sapiens
  misc_RNA (1)...(19): siRNA sense strand
ugaaggaacuugcaucaac

SEQ ID NO: 936962 - RNA, 19 nt, Homo sapiens
  misc_RNA (1)...(19): siRNA sense strand
uauaggaacuacacugguu

SEQ ID NO: 936963 - RNA, 19 nt, Homo sapiens
  misc_RNA (1)...(19): siRNA sense strand
ugagcugucugacguguuu

SEQ ID NO: 936964 - RNA, 19 nt, Homo sapiens
  misc_RNA (1)...(19): siRNA sense strand
caauguaaauuuccaguac

SEQ ID NO: 936965 - RNA, 19 nt, Homo sapiens
  misc_RNA (1)...(19): siRNA sense strand
gagcuagugucauggaauc

SEQ ID NO: 936966 - RNA, 19 nt, Homo sapiens
  misc_RNA (1)...(19): siRNA sense strand
gaaauuggaggaaccauac

SEQ ID NO: 936967 - RNA, 19 nt, Homo sapiens
  misc_RNA (1)...(19): siRNA sense strand
gaagggaggcauuuguguu

SEQ ID NO: 936968 - RNA, 19 nt, Homo sapiens
  misc_RNA (1)...(19): siRNA sense strand
gaacugguccaucugacuu

SEQ ID NO: 936969 - RNA, 19 nt, Homo sapiens
  misc_RNA (1)...(19): siRNA sense strand
gaagaugcaguccaguuug

SEQ ID NO: 936970 - RNA, 19 nt, Homo sapiens
  misc_RNA (1)...(19): siRNA sense strand
gguauuauccaaagagaug

SEQ ID NO: 936971 - RNA, 19 nt, Homo sapiens
  misc_RNA (1)...(19): siRNA sense strand
ugacaacggauggauguua

SEQ ID NO: 936972 - RNA, 19 nt, Homo sapiens
  misc_RNA (1)...(19): siRNA sense strand
ggaagccauuguagaagau

SEQ ID NO: 936973 - RNA, 19 nt, Homo sapiens
  misc_RNA (1)...(19): siRNA sense strand
ugagugaacugguccaucu

SEQ ID NO: 936974 - RNA, 19 nt, Homo sapiens
  misc_RNA (1)...(19): siRNA sense strand
gaaggacaucuuuaaggaa

SEQ ID NO: 936975 - RNA, 19 nt, Homo sapiens
  misc_RNA (1)...(19): siRNA sense strand
gagaagaugcaguccaguu

SEQ ID NO: 936976 - RNA, 19 nt, Homo sapiens
  misc_RNA (1)...(19): siRNA sense strand
cauggaaucuccucacaag

SEQ ID NO: 936977 - RNA, 19 nt, Homo sapiens
  misc_RNA (1)...(19): siRNA sense strand
gaccagagaggaaggagaa

SEQ ID NO: 936978 - RNA, 19 nt, Homo sapiens
  misc_RNA (1)...(19): siRNA sense strand
uaagaagaaacuacccaua

SEQ ID NO: 936979 - RNA, 19 nt, Homo sapiens
  misc_RNA (1)...(19): siRNA sense strand
gaucgacaccugguuacua

SEQ ID NO: 936980 - RNA, 19 nt, Homo sapiens
  misc_RNA (1)...(19): siRNA sense strand
ucacaagaaccaauguaaa

SEQ ID NO: 936981 - RNA, 19 nt, Homo sapiens
  misc_RNA (1)...(19): siRNA sense strand
gcaauggaucucucagcua

SEQ ID NO: 936982 - RNA, 19 nt, Homo sapiens
  misc_RNA (1)...(19): siRNA sense strand
cacaagaaccaauguaaau

SEQ ID NO: 936983 - RNA, 19 nt, Homo sapiens
  misc_RNA (1)...(19): siRNA sense strand
guaaauuuccaguacauca

SEQ ID NO: 936984 - RNA, 19 nt, Homo sapiens
  misc_RNA (1)...(19): siRNA sense strand
uuugaacgcucagaaauga

SEQ ID NO: 936985 - RNA, 19 nt, Homo sapiens
  misc_RNA (1)...(19): siRNA sense strand
gaagggauuggaagccauu

SEQ ID NO: 936986 - RNA, 19 nt, Homo sapiens
  misc_RNA (1)...(19): siRNA sense strand
ggauggaggacuaaagaga

SEQ ID NO: 936987 - RNA, 19 nt, Homo sapiens
  misc_RNA (1)...(19): siRNA sense strand
cuucagucaugauguuuaa

SEQ ID NO: 936988 - RNA, 19 nt, Homo sapiens
  misc_RNA (1)...(19): siRNA sense strand
aagaaacuacccauacuaa

SEQ ID NO: 936989 - RNA, 19 nt, Homo sapiens
  misc_RNA (1)...(19): siRNA sense strand
ucagagagcuauggucaag

SEQ ID NO: 936990 - RNA, 19 nt, Homo sapiens
  misc_RNA (1)...(19): siRNA sense strand
gggauuggaagccauugua

SEQ ID NO: 936991 - RNA, 19 nt, Homo sapiens
  misc_RNA (1)...(19): siRNA sense strand
gcugggccaucgucuguga

SEQ ID NO: 936992 - RNA, 19 nt, Homo sapiens
  misc_RNA (1)...(19): siRNA sense strand
acaugaagauccuagugaa

SEQ ID NO: 936993 - RNA, 19 nt, Homo sapiens
  misc_RNA (1)...(19): siRNA sense strand
uggaagccauuguagaaga

SEQ ID NO: 936994 - RNA, 19 nt, Homo sapiens
  misc_RNA (1)...(19): siRNA sense strand
aauacaacauggugagcua

SEQ ID NO: 936995 - RNA, 19 nt, Homo sapiens
  misc_RNA (1)...(19): siRNA sense strand
ggaacaguaguaaauacaa

SEQ ID NO: 936996 - RNA, 19 nt, Homo sapiens
  misc_RNA (1)...(19): siRNA sense strand
ugaaauuggaggaaccaua

SEQ ID NO: 936997 - RNA, 19 nt, Homo sapiens
  misc_RNA (1)...(19): siRNA sense strand
ggaaucuccucacaagaac

SEQ ID NO: 936998 - RNA, 19 nt, Homo sapiens
  misc_RNA (1)...(19): siRNA sense strand
ucucugguaccauucauua

SEQ ID NO: 936999 - RNA, 19 nt, Homo sapiens
  misc_RNA (1)...(19): siRNA sense strand
ugagcuaccugcuucgaau

SEQ ID NO: 937000 - RNA, 19 nt, Homo sapiens
  misc_RNA (1)...(19): siRNA sense strand
uggaaucuccucacaagaa

SEQ ID NO: 937001 - RNA, 19 nt, Homo sapiens
  misc_RNA (1)...(19): siRNA sense strand
uacauccaguugcaauuaa

SEQ ID NO: 937002 - RNA, 19 nt, Homo sapiens
  misc_RNA (1)...(19): siRNA sense strand
acggauggauguuaugcua

SEQ ID NO: 937003 - RNA, 19 nt, Homo sapiens
  misc_RNA (1)...(19): siRNA sense strand
ccucaugucugguuugaac

SEQ ID NO: 937004 - RNA, 19 nt, Homo sapiens
  misc_RNA (1)...(19): siRNA sense strand
auacuucagucaugauguu

SEQ ID NO: 937005 - RNA, 19 nt, Homo sapiens
  misc_RNA (1)...(19): siRNA sense strand
agaagaaacuacccauacu

SEQ ID NO: 937006 - RNA, 19 nt, Homo sapiens
  misc_RNA (1)...(19): siRNA sense strand
acauauugcugauaagaag

SEQ ID NO: 937007 - RNA, 19 nt, Homo sapiens
  misc_RNA (1)...(19): siRNA sense strand
ugucugacguguuuuauuu

SEQ ID NO: 937008 - RNA, 19 nt, Homo sapiens
  misc_RNA (1)...(19): siRNA sense strand
agaagaugcaguccaguuu

SEQ ID NO: 937009 - RNA, 19 nt, Homo sapiens
  misc_RNA (1)...(19): siRNA sense strand
ccaguugcaauuaaguaua

SEQ ID NO: 937010 - RNA, 19 nt, Homo sapiens
  misc_RNA (1)...(19): siRNA sense strand
ggaaccauacauccaguug

SEQ ID NO: 937011 - RNA, 19 nt, Homo sapiens
  misc_RNA (1)...(19): siRNA sense strand
gaagugacccagagguuuu

SEQ ID NO: 937012 - RNA, 19 nt, Homo sapiens
  misc_RNA (1)...(19): siRNA sense strand
auacauccaguugcaauua

SEQ ID NO: 937013 - RNA, 19 nt, Homo sapiens
  misc_RNA (1)...(19): siRNA sense strand
gcaguccaguuugcuaaca

SEQ ID NO: 937014 - RNA, 19 nt, Homo sapiens
  misc_RNA (1)...(19): siRNA sense strand
uaaggaagagcagcagaaa

SEQ ID NO: 937015 - RNA, 19 nt, Homo sapiens
  misc_RNA (1)...(19): siRNA sense strand
ccaauguaaauuuccagua

SEQ ID NO: 937016 - RNA, 19 nt, Homo sapiens
  misc_RNA (1)...(19): siRNA sense strand
gugcgagcccucucuggua

SEQ ID NO: 937017 - RNA, 19 nt, Homo sapiens
  misc_RNA (1)...(19): siRNA sense strand
uccgagaucuacaugaaga

SEQ ID NO: 937018 - RNA, 19 nt, Homo sapiens
  misc_RNA (1)...(19): siRNA sense strand
ucaguuugcugguuauagg

SEQ ID NO: 937019 - RNA, 19 nt, Homo sapiens
  misc_RNA (1)...(19): siRNA sense strand
aacaauacuucagucauga

SEQ ID NO: 937020 - RNA, 19 nt, Homo sapiens
  misc_RNA (1)...(19): siRNA sense strand
aaacucugcuucuguuggu

SEQ ID NO: 937021 - RNA, 19 nt, Homo sapiens
  misc_RNA (1)...(19): siRNA sense strand
ugaagugacccagagguuu

SEQ ID NO: 937022 - RNA, 19 nt, Homo sapiens
  misc_RNA (1)...(19): siRNA sense strand
caaggaggccugacugaac

SEQ ID NO: 937023 - RNA, 19 nt, Homo sapiens
  misc_RNA (1)...(19): siRNA sense strand
cgacaccugguuacuaaga

SEQ ID NO: 937024 - RNA, 19 nt, Homo sapiens
  misc_RNA (1)...(19): siRNA sense strand
ggaucaguuugcugguuau

SEQ ID NO: 937025 - RNA, 19 nt, Homo sapiens
  misc_RNA (1)...(19): siRNA sense strand
gagaugagucacccaugga

SEQ ID NO: 937026 - RNA, 19 nt, Homo sapiens
  misc_RNA (1)...(19): siRNA sense strand
aucgacaccugguuacuaa

SEQ ID NO: 937027 - RNA, 19 nt, Homo sapiens
  misc_RNA (1)...(19): siRNA sense strand
aaaggagucgauucuuaaa

SEQ ID NO: 937028 - RNA, 19 nt, Homo sapiens
  misc_RNA (1)...(19): siRNA sense strand
gauuggaagccauuguaga

SEQ ID NO: 937029 - RNA, 19 nt, Homo sapiens
  misc_RNA (1)...(19): siRNA sense strand
gguuaagucugcuauugcu

SEQ ID NO: 937030 - RNA, 19 nt, Homo sapiens
  misc_RNA (1)...(19): siRNA sense strand
gaugagucacccauggaaa

SEQ ID NO: 937031 - RNA, 19 nt, Homo sapiens
  misc_RNA (1)...(19): siRNA sense strand
aaggaucgacaccugguua

SEQ ID NO: 937032 - RNA, 19 nt, Homo sapiens
  misc_RNA (1)...(19): siRNA sense strand
gguaccauucauuaucaua

SEQ ID NO: 937033 - RNA, 19 nt, Homo sapiens
  misc_RNA (1)...(19): siRNA sense strand
gcgcuauuguguccuacug

SEQ ID NO: 937034 - RNA, 19 nt, Homo sapiens
  misc_RNA (1)...(19): siRNA sense strand
caugaagauccuagugaaa

SEQ ID NO: 937035 - RNA, 19 nt, Homo sapiens
  misc_RNA (1)...(19): siRNA sense strand
cugguaccauucauuauca

SEQ ID NO: 937036 - RNA, 19 nt, Homo sapiens
  misc_RNA (1)...(19): siRNA sense strand
ccagaagggaggcauuugu

SEQ ID NO: 937037 - RNA, 19 nt, Homo sapiens
  misc_RNA (1)...(19): siRNA sense strand
gaugcaguccaguuugcua

SEQ ID NO: 937038 - RNA, 19 nt, Homo sapiens
  misc_RNA (1)...(19): siRNA sense strand
ggacuaaagagagcaaagg

SEQ ID NO: 937039 - RNA, 19 nt, Homo sapiens
  misc_RNA (1)...(19): siRNA sense strand
aggguuaagucugcuauug

SEQ ID NO: 937040 - RNA, 19 nt, Homo sapiens
  misc_RNA (1)...(19): siRNA sense strand
gaagauagaugcugugaaa

SEQ ID NO: 937041 - RNA, 19 nt, Homo sapiens
  misc_RNA (1)...(19): siRNA sense strand
ggaggaagauuaacauaua

SEQ ID NO: 937042 - RNA, 19 nt, Homo sapiens
  misc_RNA (1)...(19): siRNA sense strand
ggacugaucuuacacaaag

SEQ ID NO: 937043 - RNA, 19 nt, Homo sapiens
  misc_RNA (1)...(19): siRNA sense strand
gaucagauuuauccaauga

SEQ ID NO: 937044 - RNA, 19 nt, Homo sapiens
  misc_RNA (1)...(19): siRNA sense strand
gaauuauccugucgaguuu

SEQ ID NO: 937045 - RNA, 19 nt, Homo sapiens
  misc_RNA (1)...(19): siRNA sense strand
gauaugagccuguaauuuc

SEQ ID NO: 937046 - RNA, 19 nt, Homo sapiens
  misc_RNA (1)...(19): siRNA sense strand
ucagaagucuuaggaauaa

SEQ ID NO: 937047 - RNA, 19 nt, Homo sapiens
  misc_RNA (1)...(19): siRNA sense strand
gaacaccauugucuuugaa

SEQ ID NO: 937048 - RNA, 19 nt, Homo sapiens
  misc_RNA (1)...(19): siRNA sense strand
caauuugucuucagagaaa

SEQ ID NO: 937049 - RNA, 19 nt, Homo sapiens
  misc_RNA (1)...(19): siRNA sense strand
ggucagagacuauuacauu

SEQ ID NO: 937050 - RNA, 19 nt, Homo sapiens
  misc_RNA (1)...(19): siRNA sense strand
ggaauuugcuccuaacagu

SEQ ID NO: 937051 - RNA, 19 nt, Homo sapiens
  misc_RNA (1)...(19): siRNA sense strand
ccagaaacauuggaucuuu

SEQ ID NO: 937052 - RNA, 19 nt, Homo sapiens
  misc_RNA (1)...(19): siRNA sense strand
gaaauuaugucagcuuugg

SEQ ID NO: 937053 - RNA, 19 nt, Homo sapiens
  misc_RNA (1)...(19): siRNA sense strand
cagcagaugugaauaugaa

SEQ ID NO: 937054 - RNA, 19 nt, Homo sapiens
  misc_RNA (1)...(19): siRNA sense strand
aaauagagcuugcaauucu

SEQ ID NO: 937055 - RNA, 19 nt, Homo sapiens
  misc_RNA (1)...(19): siRNA sense strand
gaguuuggcugaauuggaa

SEQ ID NO: 937056 - RNA, 19 nt, Homo sapiens
  misc_RNA (1)...(19): siRNA sense strand
gauagaugcugugaaauuc

SEQ ID NO: 937057 - RNA, 19 nt, Homo sapiens
  misc_RNA (1)...(19): siRNA sense strand
gaucccagcguuugaauuu

SEQ ID NO: 937058 - RNA, 19 nt, Homo sapiens
  misc_RNA (1)...(19): siRNA sense strand
cauccaagcucuuauucaa

SEQ ID NO: 937059 - RNA, 19 nt, Homo sapiens
  misc_RNA (1)...(19): siRNA sense strand
gcacuuucauguuuaguuc

SEQ ID NO: 937060 - RNA, 19 nt, Homo sapiens
  misc_RNA (1)...(19): siRNA sense strand
gguuugagguucagaaaga

SEQ ID NO: 937061 - RNA, 19 nt, Homo sapiens
  misc_RNA (1)...(19): siRNA sense strand
gaaaauagagcuugcaauu

SEQ ID NO: 937062 - RNA, 19 nt, Homo sapiens
  misc_RNA (1)...(19): siRNA sense strand
gagaaauuauugcugaugu

SEQ ID NO: 937063 - RNA, 19 nt, Homo sapiens
  misc_RNA (1)...(19): siRNA sense strand
guacaacucccaucuugaa

SEQ ID NO: 937064 - RNA, 19 nt, Homo sapiens
  misc_RNA (1)...(19): siRNA sense strand
gguauaugcucguauguca

SEQ ID NO: 937065 - RNA, 19 nt, Homo sapiens
  misc_RNA (1)...(19): siRNA sense strand
ggacaucaccauucaggaa

SEQ ID NO: 937066 - RNA, 19 nt, Homo sapiens
  misc_RNA (1)...(19): siRNA sense strand
cagcuuauaucuuuaaugg

SEQ ID NO: 937067 - RNA, 19 nt, Homo sapiens
  misc_RNA (1)...(19): siRNA sense strand
gggaagauaugagccugua

SEQ ID NO: 937068 - RNA, 19 nt, Homo sapiens
  misc_RNA (1)...(19): siRNA sense strand
aaagcacucuuggaacuua

SEQ ID NO: 937069 - RNA, 19 nt, Homo sapiens
  misc_RNA (1)...(19): siRNA sense strand
caacuuagagccuccugua

SEQ ID NO: 937070 - RNA, 19 nt, Homo sapiens
  misc_RNA (1)...(19): siRNA sense strand
gagaauuaguuauggugaa

SEQ ID NO: 937071 - RNA, 19 nt, Homo sapiens
  misc_RNA (1)...(19): siRNA sense strand
gcagcaacaugucuuucaa

SEQ ID NO: 937072 - RNA, 19 nt, Homo sapiens
  misc_RNA (1)...(19): siRNA sense strand
acagugacuugcuacaaua

SEQ ID NO: 937073 - RNA, 19 nt, Homo sapiens
  misc_RNA (1)...(19): siRNA sense strand
guuagcacuuucauguuua

SEQ ID NO: 937074 - RNA, 19 nt, Homo sapiens
  misc_RNA (1)...(19): siRNA sense strand
guggaacacugcauaauag

SEQ ID NO: 937075 - RNA, 19 nt, Homo sapiens
  misc_RNA (1)...(19): siRNA sense strand
ugaauugacucaggaaaug

SEQ ID NO: 937076 - RNA, 19 nt, Homo sapiens
  misc_RNA (1)...(19): siRNA sense strand
cuaaaugaccuuucuguug

SEQ ID NO: 937077 - RNA, 19 nt, Homo sapiens
  misc_RNA (1)...(19): siRNA sense strand
gcgcugcacuuccagaguu

SEQ ID NO: 937078 - RNA, 19 nt, Homo sapiens
  misc_RNA (1)...(19): siRNA sense strand
gaaguguuauguacucauc

SEQ ID NO: 937079 - RNA, 19 nt, Homo sapiens
  misc_RNA (1)...(19): siRNA sense strand
guacucaucucuacauagg

SEQ ID NO: 937080 - RNA, 19 nt, Homo sapiens
  misc_RNA (1)...(19): siRNA sense strand
gaaauuauugcugauguga

SEQ ID NO: 937081 - RNA, 19 nt, Homo sapiens
  misc_RNA (1)...(19): siRNA sense strand
ucacuacucuugauacagu

SEQ ID NO: 937082 - RNA, 19 nt, Homo sapiens
  misc_RNA (1)...(19): siRNA sense strand
acucccaucuugaaacuua

SEQ ID NO: 937083 - RNA, 19 nt, Homo sapiens
  misc_RNA (1)...(19): siRNA sense strand
gaagauaugagccuguaau

SEQ ID NO: 937084 - RNA, 19 nt, Homo sapiens
  misc_RNA (1)...(19): siRNA sense strand
ugcuauggauggagaauua

SEQ ID NO: 937085 - RNA, 19 nt, Homo sapiens
  misc_RNA (1)...(19): siRNA sense strand
ugagagaucacuuagauga

SEQ ID NO: 937086 - RNA, 19 nt, Homo sapiens
  misc_RNA (1)...(19): siRNA sense strand
guuggacucuguugccaua

SEQ ID NO: 937087 - RNA, 19 nt, Homo sapiens
  misc_RNA (1)...(19): siRNA sense strand
cuacagcacugggaauuug

SEQ ID NO: 937088 - RNA, 19 nt, Homo sapiens
  misc_RNA (1)...(19): siRNA sense strand
gaguaauaauccuuucuga

SEQ ID NO: 937089 - RNA, 19 nt, Homo sapiens
  misc_RNA (1)...(19): siRNA sense strand
ugagaaagcacucuuggaa

SEQ ID NO: 937090 - RNA, 19 nt, Homo sapiens
  misc_RNA (1)...(19): siRNA sense strand
gucagagacuauuacauuu

SEQ ID NO: 937091 - RNA, 19 nt, Homo sapiens
  misc_RNA (1)...(19): siRNA sense strand
gggauugccuuugcacuga

SEQ ID NO: 937092 - RNA, 19 nt, Homo sapiens
  misc_RNA (1)...(19): siRNA sense strand
ggacucuguugccauaguu

SEQ ID NO: 937093 - RNA, 19 nt, Homo sapiens
  misc_RNA (1)...(19): siRNA sense strand
gugcuagcaugcucucuuu

SEQ ID NO: 937094 - RNA, 19 nt, Homo sapiens
  misc_RNA (1)...(19): siRNA sense strand
ugaauuacguggcaucaca

SEQ ID NO: 937095 - RNA, 19 nt, Homo sapiens
  misc_RNA (1)...(19): siRNA sense strand
ggacucacuacucuugaua

SEQ ID NO: 937096 - RNA, 19 nt, Homo sapiens
  misc_RNA (1)...(19): siRNA sense strand
guaaaaugguuugcacuua

SEQ ID NO: 937097 - RNA, 19 nt, Homo sapiens
  misc_RNA (1)...(19): siRNA sense strand
ggacaucagaaacuacauu

SEQ ID NO: 937098 - RNA, 19 nt, Homo sapiens
  misc_RNA (1)...(19): siRNA sense strand
agagacagguucacccaaa

SEQ ID NO: 937099 - RNA, 19 nt, Homo sapiens
  misc_RNA (1)...(19): siRNA sense strand
gagcuucaucaucaacuua

SEQ ID NO: 937100 - RNA, 19 nt, Homo sapiens
  misc_RNA (1)...(19): siRNA sense strand
aaacuuauggcagaacuua

SEQ ID NO: 937101 - RNA, 19 nt, Homo sapiens
  misc_RNA (1)...(19): siRNA sense strand
gaauuggaaguguuaugua

SEQ ID NO: 937102 - RNA, 19 nt, Homo sapiens
  misc_RNA (1)...(19): siRNA sense strand
gacaugugcucuucuugug

SEQ ID NO: 937103 - RNA, 19 nt, Homo sapiens
  misc_RNA (1)...(19): siRNA sense strand
ugaacaccauugucuuuga

SEQ ID NO: 937104 - RNA, 19 nt, Homo sapiens
  misc_RNA (1)...(19): siRNA sense strand
ucaccuaccucuucaagca

SEQ ID NO: 937105 - RNA, 19 nt, Homo sapiens
  misc_RNA (1)...(19): siRNA sense strand
acaauguacuccaggcuuu

SEQ ID NO: 937106 - RNA, 19 nt, Homo sapiens
  misc_RNA (1)...(19): siRNA sense strand
gaauagaggcugagaaagc

SEQ ID NO: 937107 - RNA, 19 nt, Homo sapiens
  misc_RNA (1)...(19): siRNA sense strand
gaugguagaucugggugaa

SEQ ID NO: 937108 - RNA, 19 nt, Homo sapiens
  misc_RNA (1)...(19): siRNA sense strand
uagagacguucaugacaaa

SEQ ID NO: 937109 - RNA, 19 nt, Homo sapiens
  misc_RNA (1)...(19): siRNA sense strand
cuagagacguucaugacaa

SEQ ID NO: 937110 - RNA, 19 nt, Homo sapiens
  misc_RNA (1)...(19): siRNA sense strand
aaagguauaugcucguaug

SEQ ID NO: 937111 - RNA, 19 nt, Homo sapiens
  misc_RNA (1)...(19): siRNA sense strand
uaacauauaccaguacaga

SEQ ID NO: 937112 - RNA, 19 nt, Homo sapiens
  misc_RNA (1)...(19): siRNA sense strand
ugccaaaccuuuaaaucuu

SEQ ID NO: 937113 - RNA, 19 nt, Homo sapiens
  misc_RNA (1)...(19): siRNA sense strand
cauagggacugaucuuaca

SEQ ID NO: 937114 - RNA, 19 nt, Homo sapiens
  misc_RNA (1)...(19): siRNA sense strand
ggacaaccauuuugacaau

SEQ ID NO: 937115 - RNA, 19 nt, Homo sapiens
  misc_RNA (1)...(19): siRNA sense strand
cagaaugucucagcaagug

SEQ ID NO: 937116 - RNA, 19 nt, Homo sapiens
  misc_RNA (1)...(19): siRNA sense strand
gauguaaagcguauguuga

SEQ ID NO: 937117 - RNA, 19 nt, Homo sapiens
  misc_RNA (1)...(19): siRNA sense strand
agaauuauccugucgaguu

SEQ ID NO: 937118 - RNA, 19 nt, Homo sapiens
  misc_RNA (1)...(19): siRNA sense strand
caggaucaaugucagcaaa

SEQ ID NO: 937119 - RNA, 19 nt, Homo sapiens
  misc_RNA (1)...(19): siRNA sense strand
gcacuuaugguaaucagau

SEQ ID NO: 937120 - RNA, 19 nt, Homo sapiens
  misc_RNA (1)...(19): siRNA sense strand
gcuacaccaugcuguuuga

SEQ ID NO: 937121 - RNA, 19 nt, Homo sapiens
  misc_RNA (1)...(19): siRNA sense strand
gaagauguaaagcguaugu

SEQ ID NO: 937122 - RNA, 19 nt, Homo sapiens
  misc_RNA (1)...(19): siRNA sense strand
ucaaagguauaugcucgua

SEQ ID NO: 937123 - RNA, 19 nt, Homo sapiens
  misc_RNA (1)...(19): siRNA sense strand
uugcauggcugguauacuu

SEQ ID NO: 937124 - RNA, 19 nt, Homo sapiens
  misc_RNA (1)...(19): siRNA sense strand
gcauccauauucuggugua

SEQ ID NO: 937125 - RNA, 19 nt, Homo sapiens
  misc_RNA (1)...(19): siRNA sense strand
caacaugucuuucaaaacu

SEQ ID NO: 937126 - RNA, 19 nt, Homo sapiens
  misc_RNA (1)...(19): siRNA sense strand
uaauggaauucuucucuuc

SEQ ID NO: 937127 - RNA, 19 nt, Homo sapiens
  misc_RNA (1)...(19): siRNA sense strand
ccacuacuaucucaguuag

SEQ ID NO: 937128 - RNA, 19 nt, Homo sapiens
  misc_RNA (1)...(19): siRNA sense strand
gccaaaccuuuaaaucuuc

SEQ ID NO: 937129 - RNA, 19 nt, Homo sapiens
  misc_RNA (1)...(19): siRNA sense strand
cagagaagcuaguaaaaug

SEQ ID NO: 937130 - RNA, 19 nt, Homo sapiens
  misc_RNA (1)...(19): siRNA sense strand
aguuagcacuuucauguuu

SEQ ID NO: 937131 - RNA, 19 nt, Homo sapiens
  misc_RNA (1)...(19): siRNA sense strand
ucuugaaacugguccuuaa

SEQ ID NO: 937132 - RNA, 19 nt, Homo sapiens
  misc_RNA (1)...(19): siRNA sense strand
caugaacaccauugucuuu

SEQ ID NO: 937133 - RNA, 19 nt, Homo sapiens
  misc_RNA (1)...(19): siRNA sense strand
gagccaacauguacaacuc

SEQ ID NO: 937134 - RNA, 19 nt, Homo sapiens
  misc_RNA (1)...(19): siRNA sense strand
aagaagauguaaagcguau

SEQ ID NO: 937135 - RNA, 19 nt, Homo sapiens
  misc_RNA (1)...(19): siRNA sense strand
ugaagaugaggaugaauuu

SEQ ID NO: 937136 - RNA, 19 nt, Homo sapiens
  misc_RNA (1)...(19): siRNA sense strand
ggugaucaacuucaaagaa

SEQ ID NO: 937137 - RNA, 19 nt, Homo sapiens
  misc_RNA (1)...(19): siRNA sense strand
gaggaagauuaacauauac

SEQ ID NO: 937138 - RNA, 19 nt, Homo sapiens
  misc_RNA (1)...(19): siRNA sense strand
gaaaucacgaaggccuuua

SEQ ID NO: 937139 - RNA, 19 nt, Homo sapiens
  misc_RNA (1)...(19): siRNA sense strand
agaaagcacucuuggaacu

SEQ ID NO: 937140 - RNA, 19 nt, Homo sapiens
  misc_RNA (1)...(19): siRNA sense strand
gaagagagaucuacuggaa

SEQ ID NO: 937141 - RNA, 19 nt, Homo sapiens
  misc_RNA (1)...(19): siRNA sense strand
gaaauucucuucagcauca

SEQ ID NO: 937142 - RNA, 19 nt, Homo sapiens
  misc_RNA (1)...(19): siRNA sense strand
gacaacaacucaggaauuu

SEQ ID NO: 937143 - RNA, 19 nt, Homo sapiens
  misc_RNA (1)...(19): siRNA sense strand
caaggaagaugccacaaug

SEQ ID NO: 937144 - RNA, 19 nt, Homo sapiens
  misc_RNA (1)...(19): siRNA sense strand
ucugaaggcugaaaguuua

SEQ ID NO: 937145 - RNA, 19 nt, Homo sapiens
  misc_RNA (1)...(19): siRNA sense strand
ugagagaacugauggaaga

SEQ ID NO: 937146 - RNA, 19 nt, Homo sapiens
  misc_RNA (1)...(19): siRNA sense strand
gaauuaacccagaaugaaa

SEQ ID NO: 937147 - RNA, 19 nt, Homo sapiens
  misc_RNA (1)...(19): siRNA sense strand
ggaaauugaugcagcuugu

SEQ ID NO: 937148 - RNA, 19 nt, Homo sapiens
  misc_RNA (1)...(19): siRNA sense strand
caacaacucaggaauuuga

SEQ ID NO: 937149 - RNA, 19 nt, Homo sapiens
  misc_RNA (1)...(19): siRNA sense strand
ggaauuaacccagaaugaa

SEQ ID NO: 937150 - RNA, 19 nt, Homo sapiens
  misc_RNA (1)...(19): siRNA sense strand
gaagaugccacaaugaaug

SEQ ID NO: 937151 - RNA, 19 nt, Homo sapiens
  misc_RNA (1)...(19): siRNA sense strand
gagaacugauggaagauau

SEQ ID NO: 937152 - RNA, 19 nt, Homo sapiens
  misc_RNA (1)...(19): siRNA sense strand
gaacugaaagagagagaaa

SEQ ID NO: 937153 - RNA, 19 nt, Homo sapiens
  misc_RNA (1)...(19): siRNA sense strand
gcucaaggaucaacuucuu

SEQ ID NO: 937154 - RNA, 19 nt, Homo sapiens
  misc_RNA (1)...(19): siRNA sense strand
ggacucaguggagaaauua

SEQ ID NO: 937155 - RNA, 19 nt, Homo sapiens
  misc_RNA (1)...(19): siRNA sense strand
ugaaauacaucgugagaag

SEQ ID NO: 937156 - RNA, 19 nt, Homo sapiens
  misc_RNA (1)...(19): siRNA sense strand
gauugcagcucaaggauca

SEQ ID NO: 937157 - RNA, 19 nt, Homo sapiens
  misc_RNA (1)...(19): siRNA sense strand
gaaacugagccuacuagaa

SEQ ID NO: 937158 - RNA, 19 nt, Homo sapiens
  misc_RNA (1)...(19): siRNA sense strand
agagagaucuacuggaaga

SEQ ID NO: 937159 - RNA, 19 nt, Homo sapiens
  misc_RNA (1)...(19): siRNA sense strand
guggucagcuggagaaguu

SEQ ID NO: 937160 - RNA, 19 nt, Homo sapiens
  misc_RNA (1)...(19): siRNA sense strand
gaaagcaagacuaaacuuc

SEQ ID NO: 937161 - RNA, 19 nt, Homo sapiens
  misc_RNA (1)...(19): siRNA sense strand
gcugaaaguuuagaagaga

SEQ ID NO: 937162 - RNA, 19 nt, Homo sapiens
  misc_RNA (1)...(19): siRNA sense strand
guccugauauacauuauga

SEQ ID NO: 937163 - RNA, 19 nt, Homo sapiens
  misc_RNA (1)...(19): siRNA sense strand
aaacugagccuacuagaag

SEQ ID NO: 937164 - RNA, 19 nt, Homo sapiens
  misc_RNA (1)...(19): siRNA sense strand
gcagaaagcaagacuaaac

SEQ ID NO: 937165 - RNA, 19 nt, Homo sapiens
  misc_RNA (1)...(19): siRNA sense strand
ugacccacaucgcugguua

SEQ ID NO: 937166 - RNA, 19 nt, Homo sapiens
  misc_RNA (1)...(19): siRNA sense strand
aaacaaggaaucugaguug

SEQ ID NO: 937167 - RNA, 19 nt, Homo sapiens
  misc_RNA (1)...(19): siRNA sense strand
gaagaggagcacuuaagga

SEQ ID NO: 937168 - RNA, 19 nt, Homo sapiens
  misc_RNA (1)...(19): siRNA sense strand
uagcagaaagcaagacuaa

SEQ ID NO: 937169 - RNA, 19 nt, Homo sapiens
  misc_RNA (1)...(19): siRNA sense strand
gaacugauggaagauauuc

SEQ ID NO: 937170 - RNA, 19 nt, Homo sapiens
  misc_RNA (1)...(19): siRNA sense strand
ucaaagacuucagagauuc

SEQ ID NO: 937171 - RNA, 19 nt, Homo sapiens
  misc_RNA (1)...(19): siRNA sense strand
aggagcagcuucuggauga

SEQ ID NO: 937172 - RNA, 19 nt, Homo sapiens
  misc_RNA (1)...(19): siRNA sense strand
gauggaagaggccagauug

SEQ ID NO: 937173 - RNA, 19 nt, Homo sapiens
  misc_RNA (1)...(19): siRNA sense strand
ggaagaugccacaaugaau

SEQ ID NO: 937174 - RNA, 19 nt, Homo sapiens
  misc_RNA (1)...(19): siRNA sense strand
uggaagagacccaaagaaa

SEQ ID NO: 937175 - RNA, 19 nt, Homo sapiens
  misc_RNA (1)...(19): siRNA sense strand
gaacuguugcuccagauuc

SEQ ID NO: 937176 - RNA, 19 nt, Homo sapiens
  misc_RNA (1)...(19): siRNA sense strand
gaaguugaaaucacagugu

SEQ ID NO: 937177 - RNA, 19 nt, Homo sapiens
  misc_RNA (1)...(19): siRNA sense strand
gaacucauuuaccaaaaga

SEQ ID NO: 937178 - RNA, 19 nt, Homo sapiens
  misc_RNA (1)...(19): siRNA sense strand
gaaauugaugcagcuugua

SEQ ID NO: 937179 - RNA, 19 nt, Homo sapiens
  misc_RNA (1)...(19): siRNA sense strand
gcaggaccguguaauugca

SEQ ID NO: 937180 - RNA, 19 nt, Homo sapiens
  misc_RNA (1)...(19): siRNA sense strand
gcagacaacaacucaggaa

SEQ ID NO: 937181 - RNA, 19 nt, Homo sapiens
  misc_RNA (1)...(19): siRNA sense strand
gaaggaucaacuagaagaa

SEQ ID NO: 937182 - RNA, 19 nt, Homo sapiens
  misc_RNA (1)...(19): siRNA sense strand
uucaaagacuucagagauu

SEQ ID NO: 937183 - RNA, 19 nt, Homo sapiens
  misc_RNA (1)...(19): siRNA sense strand
gaaauacaucgugagaaga

SEQ ID NO: 937184 - RNA, 19 nt, Homo sapiens
  misc_RNA (1)...(19): siRNA sense strand
agacaacaacucaggaauu

SEQ ID NO: 937185 - RNA, 19 nt, Homo sapiens
  misc_RNA (1)...(19): siRNA sense strand
cagugucucuuucaacaga

SEQ ID NO: 937186 - RNA, 19 nt, Homo sapiens
  misc_RNA (1)...(19): siRNA sense strand
ggaagagacccaaagaaaa

SEQ ID NO: 937187 - RNA, 19 nt, Homo sapiens
  misc_RNA (1)...(19): siRNA sense strand
gauaggaaaggaaauugau

SEQ ID NO: 937188 - RNA, 19 nt, Homo sapiens
  misc_RNA (1)...(19): siRNA sense strand
agaggaauaugggagcuaa

SEQ ID NO: 937189 - RNA, 19 nt, Homo sapiens
  misc_RNA (1)...(19): siRNA sense strand
cagaggaauuaacccagaa

SEQ ID NO: 937190 - RNA, 19 nt, Homo sapiens
  misc_RNA (1)...(19): siRNA sense strand
agauucagcuucaaacaag

SEQ ID NO: 937191 - RNA, 19 nt, Homo sapiens
  misc_RNA (1)...(19): siRNA sense strand
uuagaucacucauccucuu

SEQ ID NO: 937192 - RNA, 19 nt, Homo sapiens
  misc_RNA (1)...(19): siRNA sense strand
aagagaagaauauggcuaa

SEQ ID NO: 937193 - RNA, 19 nt, Homo sapiens
  misc_RNA (1)...(19): siRNA sense strand
gaauuugacugaaaacaag

SEQ ID NO: 937194 - RNA, 19 nt, Homo sapiens
  misc_RNA (1)...(19): siRNA sense strand
gaagagacccaaagaaaag

SEQ ID NO: 937195 - RNA, 19 nt, Homo sapiens
  misc_RNA (1)...(19): siRNA sense strand
cacaaugaauggaacaagu

SEQ ID NO: 937196 - RNA, 19 nt, Homo sapiens
  misc_RNA (1)...(19): siRNA sense strand
agagugaggcugagaauca

SEQ ID NO: 937197 - RNA, 19 nt, Homo sapiens
  misc_RNA (1)...(19): siRNA sense strand
ugaaggaucaacuagaaga

SEQ ID NO: 937198 - RNA, 19 nt, Homo sapiens
  misc_RNA (1)...(19): siRNA sense strand
auacaggguucgcagaaau

SEQ ID NO: 937199 - RNA, 19 nt, Homo sapiens
  misc_RNA (1)...(19): siRNA sense strand
uggagaaguugaaaucaca

SEQ ID NO: 937200 - RNA, 19 nt, Homo sapiens
  misc_RNA (1)...(19): siRNA sense strand
ggauggaagaggccagauu

SEQ ID NO: 937201 - RNA, 19 nt, Homo sapiens
  misc_RNA (1)...(19): siRNA sense strand
gaugacaccaaguacagaa

SEQ ID NO: 937202 - RNA, 19 nt, Homo sapiens
  misc_RNA (1)...(19): siRNA sense strand
gagaaacugagccuacuag

SEQ ID NO: 937203 - RNA, 19 nt, Homo sapiens
  misc_RNA (1)...(19): siRNA sense strand
cagacugacagaggaauua

SEQ ID NO: 937204 - RNA, 19 nt, Homo sapiens
  misc_RNA (1)...(19): siRNA sense strand
ucaaggaucaacuucuuug

SEQ ID NO: 937205 - RNA, 19 nt, Homo sapiens
  misc_RNA (1)...(19): siRNA sense strand
aaauugaugcagcuuguaa

SEQ ID NO: 937206 - RNA, 19 nt, Homo sapiens
  misc_RNA (1)...(19): siRNA sense strand
guaaaacauucuccaagga

SEQ ID NO: 937207 - RNA, 19 nt, Homo sapiens
  misc_RNA (1)...(19): siRNA sense strand
acuagaagauuucaaagac

SEQ ID NO: 937208 - RNA, 19 nt, Homo sapiens
  misc_RNA (1)...(19): siRNA sense strand
gaguugcagugucucuuuc

SEQ ID NO: 937209 - RNA, 19 nt, Homo sapiens
  misc_RNA (1)...(19): siRNA sense strand
aggaucaacuucuuugcuu

SEQ ID NO: 937210 - RNA, 19 nt, Homo sapiens
  misc_RNA (1)...(19): siRNA sense strand
caagaugacaccaaguaca

SEQ ID NO: 937211 - RNA, 19 nt, Homo sapiens
  misc_RNA (1)...(19): siRNA sense strand
ccuacuagaagauuucaaa

SEQ ID NO: 937212 - RNA, 19 nt, Homo sapiens
  misc_RNA (1)...(19): siRNA sense strand
ccagauugcagcucaagga

SEQ ID NO: 937213 - RNA, 19 nt, Homo sapiens
  misc_RNA (1)...(19): siRNA sense strand
gagcagcuucuggaugaaa

SEQ ID NO: 937214 - RNA, 19 nt, Homo sapiens
  misc_RNA (1)...(19): siRNA sense strand
aaucugaguugcagugucu

SEQ ID NO: 937215 - RNA, 19 nt, Homo sapiens
  misc_RNA (1)...(19): siRNA sense strand
aaagcaagacuaaacuuca

SEQ ID NO: 937216 - RNA, 19 nt, Homo sapiens
  misc_RNA (1)...(19): siRNA sense strand
caacuagaagaaagggaaa

SEQ ID NO: 937217 - RNA, 19 nt, Homo sapiens
  misc_RNA (1)...(19): siRNA sense strand
uacgugaacucauuuacca

SEQ ID NO: 937218 - RNA, 19 nt, Homo sapiens
  misc_RNA (1)...(19): siRNA sense strand
cagauucagcuucaaacaa

SEQ ID NO: 937219 - RNA, 19 nt, Homo sapiens
  misc_RNA (1)...(19): siRNA sense strand
gaaggcugaaaguuuagaa

SEQ ID NO: 937220 - RNA, 19 nt, Homo sapiens
  misc_RNA (1)...(19): siRNA sense strand
cauugaagaggagcacuua

SEQ ID NO: 937221 - RNA, 19 nt, Homo sapiens
  misc_RNA (1)...(19): siRNA sense strand
ggugugauaggaaaggaaa

SEQ ID NO: 937222 - RNA, 19 nt, Homo sapiens
  misc_RNA (1)...(19): siRNA sense strand
acaaugaauggaacaaguu

SEQ ID NO: 937223 - RNA, 19 nt, Homo sapiens
  misc_RNA (1)...(19): siRNA sense strand
ccaaagaaaagaugaagaa

SEQ ID NO: 937224 - RNA, 19 nt, Homo sapiens
  misc_RNA (1)...(19): siRNA sense strand
caucugguccugauauaca

SEQ ID NO: 937225 - RNA, 19 nt, Homo sapiens
  misc_RNA (1)...(19): siRNA sense strand
caaggacucaguggagaaa

SEQ ID NO: 937226 - RNA, 19 nt, Homo sapiens
  misc_RNA (1)...(19): siRNA sense strand
cuuggagacugaacaggaa

SEQ ID NO: 937227 - RNA, 19 nt, Homo sapiens
  misc_RNA (1)...(19): siRNA sense strand
gagugaggcugagaaucau

SEQ ID NO: 937228 - RNA, 19 nt, Homo sapiens
  misc_RNA (1)...(19): siRNA sense strand
agaaacgaguacccaagug

SEQ ID NO: 937229 - RNA, 19 nt, Homo sapiens
  misc_RNA (1)...(19): siRNA sense strand
gcagcuucuggaugaaaua

SEQ ID NO: 937230 - RNA, 19 nt, Homo sapiens
  misc_RNA (1)...(19): siRNA sense strand
gcacuuaaggaggauggaa

SEQ ID NO: 937231 - RNA, 19 nt, Homo sapiens
  misc_RNA (1)...(19): siRNA sense strand
aggacucaguggagaaauu

SEQ ID NO: 937232 - RNA, 19 nt, Homo sapiens
  misc_RNA (1)...(19): siRNA sense strand
ugaguugcagugucucuuu

SEQ ID NO: 937233 - RNA, 19 nt, Homo sapiens
  misc_RNA (1)...(19): siRNA sense strand
gcucugugaggaacugaaa

SEQ ID NO: 937234 - RNA, 19 nt, Homo sapiens
  misc_RNA (1)...(19): siRNA sense strand
gcuucuggaugaaauacau

SEQ ID NO: 937235 - RNA, 19 nt, Homo sapiens
  misc_RNA (1)...(19): siRNA sense strand
guacagaaccaaaaguuuc

SEQ ID NO: 937236 - RNA, 19 nt, Homo sapiens
  misc_RNA (1)...(19): siRNA sense strand
ugagccuacuagaagauuu

SEQ ID NO: 937237 - RNA, 19 nt, Homo sapiens
  misc_RNA (1)...(19): siRNA sense strand
uggagucuguggcugagaa

SEQ ID NO: 937238 - RNA, 19 nt, Homo sapiens
  misc_RNA (1)...(19): siRNA sense strand
cgugaacucauuuaccaaa

SEQ ID NO: 937239 - RNA, 19 nt, Homo sapiens
  misc_RNA (1)...(19): siRNA sense strand
gcauugaagaggagcacuu

SEQ ID NO: 937240 - RNA, 19 nt, Homo sapiens
  misc_RNA (1)...(19): siRNA sense strand
gcacaggccuuuccaauga

SEQ ID NO: 937241 - RNA, 19 nt, Homo sapiens
  misc_RNA (1)...(19): siRNA sense strand
gaacuucccuucuaaacug

SEQ ID NO: 937242 - RNA, 19 nt, Homo sapiens
  misc_RNA (1)...(19): siRNA sense strand
ugagagagauaacauauuc

SEQ ID NO: 937243 - RNA, 19 nt, Homo sapiens
  misc_RNA (1)...(19): siRNA sense strand
cuacaggucugguaacauu

SEQ ID NO: 937244 - RNA, 19 nt, Homo sapiens
  misc_RNA (1)...(19): siRNA sense strand
aaucacuccucucucuuua

SEQ ID NO: 937245 - RNA, 19 nt, Homo sapiens
  misc_RNA (1)...(19): siRNA sense strand
cuucuaaacugcaauugga

SEQ ID NO: 937246 - RNA, 19 nt, Homo sapiens
  misc_RNA (1)...(19): siRNA sense strand
caaucacuccucucucuuu

SEQ ID NO: 937247 - RNA, 19 nt, Homo sapiens
  misc_RNA (1)...(19): siRNA sense strand
ucacuccucucucuuuaca

SEQ ID NO: 937248 - RNA, 19 nt, Homo sapiens
  misc_RNA (1)...(19): siRNA sense strand
guugagagagauaacauau

SEQ ID NO: 937249 - RNA, 19 nt, Homo sapiens
  misc_RNA (1)...(19): siRNA sense strand
gggcacaggccuuuccaau

SEQ ID NO: 937250 - RNA, 19 nt, Homo sapiens
  misc_RNA (1)...(19): siRNA sense strand
gagagcuacaggucuggua

SEQ ID NO: 937251 - RNA, 19 nt, Homo sapiens
  misc_RNA (1)...(19): siRNA sense strand
acuccucucucuuuacaug

SEQ ID NO: 937252 - RNA, 19 nt, Homo sapiens
  misc_RNA (1)...(19): siRNA sense strand
ggcacaggccuuuccaaug

SEQ ID NO: 937253 - RNA, 19 nt, Homo sapiens
  misc_RNA (1)...(19): siRNA sense strand
gagagagauaacauauuca

SEQ ID NO: 937254 - RNA, 19 nt, Homo sapiens
  misc_RNA (1)...(19): siRNA sense strand
uucaaucacuccucucucu

SEQ ID NO: 937255 - RNA, 19 nt, Homo sapiens
  misc_RNA (1)...(19): siRNA sense strand
ccaacaugcuuucuucuga

SEQ ID NO: 937256 - RNA, 19 nt, Homo sapiens
  misc_RNA (1)...(19): siRNA sense strand
gaauugggaagcaguguuu

SEQ ID NO: 937257 - RNA, 19 nt, Homo sapiens
  misc_RNA (1)...(19): siRNA sense strand
gaagagggcauggacuuga

SEQ ID NO: 937258 - RNA, 19 nt, Homo sapiens
  misc_RNA (1)...(19): siRNA sense strand
aaugugaaauggaaacuga

SEQ ID NO: 937259 - RNA, 19 nt, Homo sapiens
  misc_RNA (1)...(19): siRNA sense strand
ucaccaacaugcuuucuuc

SEQ ID NO: 937260 - RNA, 19 nt, Homo sapiens
  misc_RNA (1)...(19): siRNA sense strand
cggauacccuugauggaaa

SEQ ID NO: 937261 - RNA, 19 nt, Homo sapiens
  misc_RNA (1)...(19): siRNA sense strand
gaauaucagccaaagagau

SEQ ID NO: 937262 - RNA, 19 nt, Homo sapiens
  misc_RNA (1)...(19): siRNA sense strand
gcagaccgcaaugcagaua

SEQ ID NO: 937263 - RNA, 19 nt, Homo sapiens
  misc_RNA (1)...(19): siRNA sense strand
acaacgacguggagaaauc

SEQ ID NO: 937264 - RNA, 19 nt, Homo sapiens
  misc_RNA (1)...(19): siRNA sense strand
ugacaacgacguggagaaa

SEQ ID NO: 937265 - RNA, 19 nt, Homo sapiens
  misc_RNA (1)...(19): siRNA sense strand
caccgacucuccuguguca

SEQ ID NO: 937266 - RNA, 19 nt, Homo sapiens
  misc_RNA (1)...(19): siRNA sense strand
cgccauccuugcaaaguuu

SEQ ID NO: 937267 - RNA, 19 nt, Homo sapiens
  misc_RNA (1)...(19): siRNA sense strand
aauaucagccaaagagauu

SEQ ID NO: 937268 - RNA, 19 nt, Homo sapiens
  misc_RNA (1)...(19): siRNA sense strand
aggagaagauggagcuaga

SEQ ID NO: 937269 - RNA, 19 nt, Homo sapiens
  misc_RNA (1)...(19): siRNA sense strand
gaaauggaaacugaauauc

SEQ ID NO: 937270 - RNA, 19 nt, Homo sapiens
  misc_RNA (1)...(19): siRNA sense strand
gcgcaucgauuucauuccu

SEQ ID NO: 937271 - RNA, 19 nt, Homo sapiens
  misc_RNA (1)...(19): siRNA sense strand
ggaauugggaagcaguguu

SEQ ID NO: 937272 - RNA, 19 nt, Homo sapiens
  misc_RNA (1)...(19): siRNA sense strand
gugaaauggaaacugaaua

SEQ ID NO: 937273 - RNA, 19 nt, Homo sapiens
  misc_RNA (1)...(19): siRNA sense strand
gcaccagaucaaacaagaa

SEQ ID NO: 937274 - RNA, 19 nt, Homo sapiens
  misc_RNA (1)...(19): siRNA sense strand
cagcagcagugccggaucu

SEQ ID NO: 937275 - RNA, 19 nt, Homo sapiens
  misc_RNA (1)...(19): siRNA sense strand
cgauuucauuccuguguca

SEQ ID NO: 937276 - RNA, 19 nt, Homo sapiens
  misc_RNA (1)...(19): siRNA sense strand
ccaacgacccgauuuacca

SEQ ID NO: 937277 - RNA, 19 nt, Homo sapiens
  misc_RNA (1)...(19): siRNA sense strand
caugcuuucuucugacguu

SEQ ID NO: 937278 - RNA, 19 nt, Homo sapiens
  misc_RNA (1)...(19): siRNA sense strand
cgauuuaccacccggagaa

SEQ ID NO: 937279 - RNA, 19 nt, Homo sapiens
  misc_RNA (1)...(19): siRNA sense strand
cagcgaaagucagcacuac

SEQ ID NO: 937280 - RNA, 19 nt, Homo sapiens
  misc_RNA (1)...(19): siRNA sense strand
cggaucuucuuguaacuca

SEQ ID NO: 937281 - RNA, 19 nt, Homo sapiens
  misc_RNA (1)...(19): siRNA sense strand
ccaagcgcaucgauuucau

SEQ ID NO: 937282 - RNA, 19 nt, Homo sapiens
  misc_RNA (1)...(19): siRNA sense strand
guaacucaccagcgaaagu

SEQ ID NO: 937283 - RNA, 19 nt, Homo sapiens
  misc_RNA (1)...(19): siRNA sense strand
caagcgcaucgauuucauu

SEQ ID NO: 937284 - RNA, 19 nt, Homo sapiens
  misc_RNA (1)...(19): siRNA sense strand
gcagugccggaucuucuug

SEQ ID NO: 937285 - RNA, 19 nt, Homo sapiens
  misc_RNA (1)...(19): siRNA sense strand
gauccugguguguguguau

SEQ ID NO: 937286 - RNA, 19 nt, Homo sapiens
  misc_RNA (1)...(19): siRNA sense strand
ucgccauccuugcaaaguu

SEQ ID NO: 937287 - RNA, 19 nt, Homo sapiens
  misc_RNA (1)...(19): siRNA sense strand
ccauuuauuccacuagaug

SEQ ID NO: 937288 - RNA, 19 nt, Homo sapiens
  misc_RNA (1)...(19): siRNA sense strand
gcgaaagucagcacuacca

SEQ ID NO: 937289 - RNA, 19 nt, Homo sapiens
  misc_RNA (1)...(19): siRNA sense strand
aagaagagggcauggacuu

SEQ ID NO: 937290 - RNA, 19 nt, Homo sapiens
  misc_RNA (1)...(19): siRNA sense strand
gucagauccuggugugugu

SEQ ID NO: 937291 - RNA, 19 nt, Homo sapiens
  misc_RNA (1)...(19): siRNA sense strand
ggauacccuugauggaaac

SEQ ID NO: 937292 - RNA, 19 nt, Homo sapiens
  misc_RNA (1)...(19): siRNA sense strand
ugcauuagaccaaguguuc

SEQ ID NO: 937293 - RNA, 19 nt, Homo sapiens
  misc_RNA (1)...(19): siRNA sense strand
ugcaccagaucaaacaaga

SEQ ID NO: 937294 - RNA, 19 nt, Homo sapiens
  misc_RNA (1)...(19): siRNA sense strand
caauugcauuagaccaagu

SEQ ID NO: 937295 - RNA, 19 nt, Homo sapiens
  misc_RNA (1)...(19): siRNA sense strand
aagagggcauggacuugau

SEQ ID NO: 937296 - RNA, 19 nt, Homo sapiens
  misc_RNA (1)...(19): siRNA sense strand
ccagcgaaagucagcacua

SEQ ID NO: 937297 - RNA, 19 nt, Homo sapiens
  misc_RNA (1)...(19): siRNA sense strand
agaccgcaaugcagauaag

SEQ ID NO: 937298 - RNA, 19 nt, Homo sapiens
  misc_RNA (1)...(19): siRNA sense strand
ccagaucaaacaagaagag

SEQ ID NO: 937299 - RNA, 19 nt, Homo sapiens
  misc_RNA (1)...(19): siRNA sense strand
caccagaucaaacaagaag

SEQ ID NO: 937300 - RNA, 19 nt, Homo sapiens
  misc_RNA (1)...(19): siRNA sense strand
ucggauacccuugauggaa

SEQ ID NO: 937301 - RNA, 19 nt, Homo sapiens
  misc_RNA (1)...(19): siRNA sense strand
gaaagcaguuaaugaucua

SEQ ID NO: 937302 - RNA, 19 nt, Homo sapiens
  misc_RNA (1)...(19): siRNA sense strand
ggaauucccugaacgcuau

SEQ ID NO: 937303 - RNA, 19 nt, Homo sapiens
  misc_RNA (1)...(19): siRNA sense strand
ggcaacaccugcuacauga

SEQ ID NO: 937304 - RNA, 19 nt, Homo sapiens
  misc_RNA (1)...(19): siRNA sense strand
gagcuguccuugagaaaug

SEQ ID NO: 937305 - RNA, 19 nt, Homo sapiens
  misc_RNA (1)...(19): siRNA sense strand
gacaugcucuccucucuug

SEQ ID NO: 937306 - RNA, 19 nt, Homo sapiens
  misc_RNA (1)...(19): siRNA sense strand
ccaaacaggucuuaaaggu

SEQ ID NO: 937307 - RNA, 19 nt, Homo sapiens
  misc_RNA (1)...(19): siRNA sense strand
agaggaagcucaccaaaca

SEQ ID NO: 937308 - RNA, 19 nt, Homo sapiens
  misc_RNA (1)...(19): siRNA sense strand
gcucuccucucuugacaaa

SEQ ID NO: 937309 - RNA, 19 nt, Homo sapiens
  misc_RNA (1)...(19): siRNA sense strand
ccacggagcuguccuugag

SEQ ID NO: 937310 - RNA, 19 nt, Homo sapiens
  misc_RNA (1)...(19): siRNA sense strand
ggucaugcaucacgggaaa

SEQ ID NO: 937311 - RNA, 19 nt, Homo sapiens
  misc_RNA (1)...(19): siRNA sense strand
ggauagaugcaaacaugua

SEQ ID NO: 937312 - RNA, 19 nt, Homo sapiens
  misc_RNA (1)...(19): siRNA sense strand
ucagucaggucacauguau

SEQ ID NO: 937313 - RNA, 19 nt, Homo sapiens
  misc_RNA (1)...(19): siRNA sense strand
uauuaaccauggaaccuua

SEQ ID NO: 937314 - RNA, 19 nt, Homo sapiens
  misc_RNA (1)...(19): siRNA sense strand
gaagcuagaaagcaguuaa

SEQ ID NO: 937315 - RNA, 19 nt, Homo sapiens
  misc_RNA (1)...(19): siRNA sense strand
gcuagaaagcaguuaauga

SEQ ID NO: 937316 - RNA, 19 nt, Homo sapiens
  misc_RNA (1)...(19): siRNA sense strand
ugaacgcuaucacugcaua

SEQ ID NO: 937317 - RNA, 19 nt, Homo sapiens
  misc_RNA (1)...(19): siRNA sense strand
ggaccuaucccuggaauuc

SEQ ID NO: 937318 - RNA, 19 nt, Homo sapiens
  misc_RNA (1)...(19): siRNA sense strand
gaccugaagcugcuaagaa

SEQ ID NO: 937319 - RNA, 19 nt, Homo sapiens
  misc_RNA (1)...(19): siRNA sense strand
gcaauuacaaauccaauac

SEQ ID NO: 937320 - RNA, 19 nt, Homo sapiens
  misc_RNA (1)...(19): siRNA sense strand
uuaaugaucuacagacuac

SEQ ID NO: 937321 - RNA, 19 nt, Homo sapiens
  misc_RNA (1)...(19): siRNA sense strand
agaaagcaguuaaugaucu

SEQ ID NO: 937322 - RNA, 19 nt, Homo sapiens
  misc_RNA (1)...(19): siRNA sense strand
gggcaacaccugcuacaug

SEQ ID NO: 937323 - RNA, 19 nt, Homo sapiens
  misc_RNA (1)...(19): siRNA sense strand
cugagaugcuggccaaauu

SEQ ID NO: 937324 - RNA, 19 nt, Homo sapiens
  misc_RNA (1)...(19): siRNA sense strand
acaaggagccgaguucaaa

SEQ ID NO: 937325 - RNA, 19 nt, Homo sapiens
  misc_RNA (1)...(19): siRNA sense strand
ucagccaccuccagaaguu

SEQ ID NO: 937326 - RNA, 19 nt, Homo sapiens
  misc_RNA (1)...(19): siRNA sense strand
cuagaaagcaguuaaugau

SEQ ID NO: 937327 - RNA, 19 nt, Homo sapiens
  misc_RNA (1)...(19): siRNA sense strand
ucaccaaacaggucuuaaa

SEQ ID NO: 937328 - RNA, 19 nt, Homo sapiens
  misc_RNA (1)...(19): siRNA sense strand
acuacgugcucaaugauaa

SEQ ID NO: 937329 - RNA, 19 nt, Homo sapiens
  misc_RNA (1)...(19): siRNA sense strand
gaacggcagggccuccauu

SEQ ID NO: 937330 - RNA, 19 nt, Homo sapiens
  misc_RNA (1)...(19): siRNA sense strand
ucuuaaagguggugaauac

SEQ ID NO: 937331 - RNA, 19 nt, Homo sapiens
  misc_RNA (1)...(19): siRNA sense strand
gggaggugcgugcgcuuua

SEQ ID NO: 937332 - RNA, 19 nt, Homo sapiens
  misc_RNA (1)...(19): siRNA sense strand
agcaggaacucgagucuga

SEQ ID NO: 937333 - RNA, 19 nt, Homo sapiens
  misc_RNA (1)...(19): siRNA sense strand
aagagaccuuugccuauga

SEQ ID NO: 937334 - RNA, 19 nt, Homo sapiens
  misc_RNA (1)...(19): siRNA sense strand
ucagaaguggugcugcuua

SEQ ID NO: 937335 - RNA, 19 nt, Homo sapiens
  misc_RNA (1)...(19): siRNA sense strand
gggagaaucuacgcuugug

SEQ ID NO: 937336 - RNA, 19 nt, Homo sapiens
  misc_RNA (1)...(19): siRNA sense strand
caacaggacgcgcaggaau

SEQ ID NO: 937337 - RNA, 19 nt, Homo sapiens
  misc_RNA (1)...(19): siRNA sense strand
aggacuacgugcucaauga

SEQ ID NO: 937338 - RNA, 19 nt, Homo sapiens
  misc_RNA (1)...(19): siRNA sense strand
gaaguggugcugcuuagag

SEQ ID NO: 937339 - RNA, 19 nt, Homo sapiens
  misc_RNA (1)...(19): siRNA sense strand
gaaguuccgagaauguuuc

SEQ ID NO: 937340 - RNA, 19 nt, Homo sapiens
  misc_RNA (1)...(19): siRNA sense strand
ggcagggccuccauuaguc

SEQ ID NO: 937341 - RNA, 19 nt, Homo sapiens
  misc_RNA (1)...(19): siRNA sense strand
cagaaguggugcugcuuag

SEQ ID NO: 937342 - RNA, 19 nt, Homo sapiens
  misc_RNA (1)...(19): siRNA sense strand
gagaauguuuccucaaccu

SEQ ID NO: 937343 - RNA, 19 nt, Homo sapiens
  misc_RNA (1)...(19): siRNA sense strand
guaaucaucgagagaagau

SEQ ID NO: 937344 - RNA, 19 nt, Homo sapiens
  misc_RNA (1)...(19): siRNA sense strand
ccgcaguggucaugcauca

SEQ ID NO: 937345 - RNA, 19 nt, Homo sapiens
  misc_RNA (1)...(19): siRNA sense strand
ucaggucacauguauauca

SEQ ID NO: 937346 - RNA, 19 nt, Homo sapiens
  misc_RNA (1)...(19): siRNA sense strand
gacacuacacagccuauug

SEQ ID NO: 937347 - RNA, 19 nt, Homo sapiens
  misc_RNA (1)...(19): siRNA sense strand
cgucuuugaccagguauua

SEQ ID NO: 937348 - RNA, 19 nt, Homo sapiens
  misc_RNA (1)...(19): siRNA sense strand
guuaaugaucuacagacua

SEQ ID NO: 937349 - RNA, 19 nt, Homo sapiens
  misc_RNA (1)...(19): siRNA sense strand
gauagaugcaaacauguag

SEQ ID NO: 937350 - RNA, 19 nt, Homo sapiens
  misc_RNA (1)...(19): siRNA sense strand
ggacaugcucuccucucuu

SEQ ID NO: 937351 - RNA, 19 nt, Homo sapiens
  misc_RNA (1)...(19): siRNA sense strand
guucuccggcugcaccuua

SEQ ID NO: 937352 - RNA, 19 nt, Homo sapiens
  misc_RNA (1)...(19): siRNA sense strand
gcaguuaaugaucuacaga

SEQ ID NO: 937353 - RNA, 19 nt, Homo sapiens
  misc_RNA (1)...(19): siRNA sense strand
ggacuacgugcucaaugau

SEQ ID NO: 937354 - RNA, 19 nt, Homo sapiens
  misc_RNA (1)...(19): siRNA sense strand
gggacaugcucuccucucu

SEQ ID NO: 937355 - RNA, 19 nt, Homo sapiens
  misc_RNA (1)...(19): siRNA sense strand
ugucgucuuugaccaggua

SEQ ID NO: 937356 - RNA, 19 nt, Homo sapiens
  misc_RNA (1)...(19): siRNA sense strand
ugaccaguguaacagcaaa

SEQ ID NO: 937357 - RNA, 19 nt, Homo sapiens
  misc_RNA (1)...(19): siRNA sense strand
gcucaccaaacaggucuua

SEQ ID NO: 937358 - RNA, 19 nt, Homo sapiens
  misc_RNA (1)...(19): siRNA sense strand
caaccuugacccuuccaaa

SEQ ID NO: 937359 - RNA, 19 nt, Homo sapiens
  misc_RNA (1)...(19): siRNA sense strand
gacuacgugcucaaugaua

SEQ ID NO: 937360 - RNA, 19 nt, Homo sapiens
  misc_RNA (1)...(19): siRNA sense strand
cagguggucuggccguaau

SEQ ID NO: 937361 - RNA, 19 nt, Homo sapiens
  misc_RNA (1)...(19): siRNA sense strand
gagaugcuggccaaauuca

SEQ ID NO: 937362 - RNA, 19 nt, Homo sapiens
  misc_RNA (1)...(19): siRNA sense strand
gcgagcugcugcacaaggu

SEQ ID NO: 937363 - RNA, 19 nt, Homo sapiens
  misc_RNA (1)...(19): siRNA sense strand
cuccagaaguuccgagaau

SEQ ID NO: 937364 - RNA, 19 nt, Homo sapiens
  misc_RNA (1)...(19): siRNA sense strand
ucuguuaccugugcaagga

SEQ ID NO: 937365 - RNA, 19 nt, Homo sapiens
  misc_RNA (1)...(19): siRNA sense strand
agucaggucacauguauau

SEQ ID NO: 937366 - RNA, 19 nt, Homo sapiens
  misc_RNA (1)...(19): siRNA sense strand
ucugcgagcugcugcacaa

SEQ ID NO: 937367 - RNA, 19 nt, Homo sapiens
  misc_RNA (1)...(19): siRNA sense strand
ccgagaauguuuccucaac

SEQ ID NO: 937368 - RNA, 19 nt, Homo sapiens
  misc_RNA (1)...(19): siRNA sense strand
ccagaaguuccgagaaugu

SEQ ID NO: 937369 - RNA, 19 nt, Homo sapiens
  misc_RNA (1)...(19): siRNA sense strand
acaggacgcgcaggaauuu

SEQ ID NO: 937370 - RNA, 19 nt, Homo sapiens
  misc_RNA (1)...(19): siRNA sense strand
ggagaaucuacgcuuguga

SEQ ID NO: 937371 - RNA, 19 nt, Homo sapiens
  misc_RNA (1)...(19): siRNA sense strand
ggguccaugucgucuuuga

SEQ ID NO: 937372 - RNA, 19 nt, Homo sapiens
  misc_RNA (1)...(19): siRNA sense strand
ggaggugcgugcgcuuuac

SEQ ID NO: 937373 - RNA, 19 nt, Homo sapiens
  misc_RNA (1)...(19): siRNA sense strand
ggaaguccgggaucucuac

SEQ ID NO: 937374 - RNA, 19 nt, Homo sapiens
  misc_RNA (1)...(19): siRNA sense strand
gcaaggacuacgugcucaa

SEQ ID NO: 937375 - RNA, 19 nt, Homo sapiens
  misc_RNA (1)...(19): siRNA sense strand
ggagcuguccuugagaaau

SEQ ID NO: 937376 - RNA, 19 nt, Homo sapiens
  misc_RNA (1)...(19): siRNA sense strand
ugcgugcgcuuuacucugu

SEQ ID NO: 937377 - RNA, 19 nt, Homo sapiens
  misc_RNA (1)...(19): siRNA sense strand
ccaaauucacagagacaga

SEQ ID NO: 937378 - RNA, 19 nt, Homo sapiens
  misc_RNA (1)...(19): siRNA sense strand
ccagaggaagcucaccaaa

SEQ ID NO: 937379 - RNA, 19 nt, Homo sapiens
  misc_RNA (1)...(19): siRNA sense strand
cggcagggccuccauuagu

SEQ ID NO: 937380 - RNA, 19 nt, Homo sapiens
  misc_RNA (1)...(19): siRNA sense strand
caacaccugcuacaugaac

SEQ ID NO: 937381 - RNA, 19 nt, Homo sapiens
  misc_RNA (1)...(19): siRNA sense strand
gaugcuggccaaauucaca

SEQ ID NO: 937382 - RNA, 19 nt, Homo sapiens
  misc_RNA (1)...(19): siRNA sense strand
caggucacauguauaucau

SEQ ID NO: 937383 - RNA, 19 nt, Homo sapiens
  misc_RNA (1)...(19): siRNA sense strand
caccaaacaggucuuaaag

SEQ ID NO: 937384 - RNA, 19 nt, Homo sapiens
  misc_RNA (1)...(19): siRNA sense strand
gacacccgcuagccaugga

SEQ ID NO: 937385 - RNA, 19 nt, Homo sapiens
  misc_RNA (1)...(19): siRNA sense strand
gcaacaccugcuacaugaa

SEQ ID NO: 937386 - RNA, 19 nt, Homo sapiens
  misc_RNA (1)...(19): siRNA sense strand
ggacacuacacagccuauu

SEQ ID NO: 937387 - RNA, 19 nt, Homo sapiens
  misc_RNA (1)...(19): siRNA sense strand
uguaacagcaaacgacgaa

SEQ ID NO: 937388 - RNA, 19 nt, Homo sapiens
  misc_RNA (1)...(19): siRNA sense strand
agaaguuccgagaauguuu

SEQ ID NO: 937389 - RNA, 19 nt, Homo sapiens
  misc_RNA (1)...(19): siRNA sense strand
ggaccugaagcugcuaaga

SEQ ID NO: 937390 - RNA, 19 nt, Homo sapiens
  misc_RNA (1)...(19): siRNA sense strand
uccgggaucucuacguguu

SEQ ID NO: 937391 - RNA, 19 nt, Homo sapiens
  misc_RNA (1)...(19): siRNA sense strand
gcucagccaccuccagaag

SEQ ID NO: 937392 - RNA, 19 nt, Homo sapiens
  misc_RNA (1)...(19): siRNA sense strand
gguuugucccuuugaauca

SEQ ID NO: 937393 - RNA, 19 nt, Homo sapiens
  misc_RNA (1)...(19): siRNA sense strand
ugaggaccacgcccugaaa

SEQ ID NO: 937394 - RNA, 19 nt, Homo sapiens
  misc_RNA (1)...(19): siRNA sense strand
acggagcuguccuugagaa

SEQ ID NO: 937395 - RNA, 19 nt, Homo sapiens
  misc_RNA (1)...(19): siRNA sense strand
cagaaguuccgagaauguu

SEQ ID NO: 937396 - RNA, 19 nt, Homo sapiens
  misc_RNA (1)...(19): siRNA sense strand
uagaaagcaguuaaugauc

SEQ ID NO: 937397 - RNA, 19 nt, Homo sapiens
  misc_RNA (1)...(19): siRNA sense strand
cgaguucaaagcacauuuc

SEQ ID NO: 937398 - RNA, 19 nt, Homo sapiens
  misc_RNA (1)...(19): siRNA sense strand
gggagggcuucugcuggaa

SEQ ID NO: 937399 - RNA, 19 nt, Homo sapiens
  misc_RNA (1)...(19): siRNA sense strand
ccaccaacgggaagacuca

SEQ ID NO: 937400 - RNA, 19 nt, Homo sapiens
  misc_RNA (1)...(19): siRNA sense strand
ggucuuaaagguggugaau

SEQ ID NO: 937401 - RNA, 19 nt, Homo sapiens
  misc_RNA (1)...(19): siRNA sense strand
ccaaggagguggaggagaa

SEQ ID NO: 937402 - RNA, 19 nt, Homo sapiens
  misc_RNA (1)...(19): siRNA sense strand
caacuaugaugucaaugug

SEQ ID NO: 937403 - RNA, 19 nt, Homo sapiens
  misc_RNA (1)...(19): siRNA sense strand
gcaacuaugaugucaaugu

SEQ ID NO: 937404 - RNA, 19 nt, Homo sapiens
  misc_RNA (1)...(19): siRNA sense strand
cggcaacuaugaugucaau

SEQ ID NO: 937405 - RNA, 19 nt, Homo sapiens
  misc_RNA (1)...(19): siRNA sense strand
gguggacggugucuacuac

SEQ ID NO: 937406 - RNA, 19 nt, Homo sapiens
  misc_RNA (1)...(19): siRNA sense strand
gcgaggugcugcugguagu

SEQ ID NO: 937407 - RNA, 19 nt, Homo sapiens
  misc_RNA (1)...(19): siRNA sense strand
ccgaugagaucugcaagag

SEQ ID NO: 937408 - RNA, 19 nt, Homo sapiens
  misc_RNA (1)...(19): siRNA sense strand
gcaccggcaacuaugaugu

SEQ ID NO: 937409 - RNA, 19 nt, Homo sapiens
  misc_RNA (1)...(19): siRNA sense strand
acuaugaugucaaugugau

SEQ ID NO: 937410 - RNA, 19 nt, Homo sapiens
  misc_RNA (1)...(19): siRNA sense strand
ggaggcugccgaugagauc

SEQ ID NO: 937411 - RNA, 19 nt, Homo sapiens
  misc_RNA (1)...(19): siRNA sense strand
gaggugcugcugguaguga

SEQ ID NO: 937412 - RNA, 19 nt, Homo sapiens
  misc_RNA (1)...(19): siRNA sense strand
uggacggugucuacuacaa

SEQ ID NO: 937413 - RNA, 19 nt, Homo sapiens
  misc_RNA (1)...(19): siRNA sense strand
ggacggugucuacuacaac

SEQ ID NO: 937414 - RNA, 19 nt, Homo sapiens
  misc_RNA (1)...(19): siRNA sense strand
gaaaucauccugaaagcua

SEQ ID NO: 937415 - RNA, 19 nt, Homo sapiens
  misc_RNA (1)...(19): siRNA sense strand
cgaugaagaugcuacuuua

SEQ ID NO: 937416 - RNA, 19 nt, Homo sapiens
  misc_RNA (1)...(19): siRNA sense strand
guacaaagcaauagaagaa

SEQ ID NO: 937417 - RNA, 19 nt, Homo sapiens
  misc_RNA (1)...(19): siRNA sense strand
uaugaaagauggaaacuga

SEQ ID NO: 937418 - RNA, 19 nt, Homo sapiens
  misc_RNA (1)...(19): siRNA sense strand
gugaagaccuuuaauaugg

SEQ ID NO: 937419 - RNA, 19 nt, Homo sapiens
  misc_RNA (1)...(19): siRNA sense strand
aaaagaagcuggaggaaua

SEQ ID NO: 937420 - RNA, 19 nt, Homo sapiens
  misc_RNA (1)...(19): siRNA sense strand
gauggaugcuagagaagua

SEQ ID NO: 937421 - RNA, 19 nt, Homo sapiens
  misc_RNA (1)...(19): siRNA sense strand
gauccacuauucaguauga

SEQ ID NO: 937422 - RNA, 19 nt, Homo sapiens
  misc_RNA (1)...(19): siRNA sense strand
cgggaaugcugcagauuua

SEQ ID NO: 937423 - RNA, 19 nt, Homo sapiens
  misc_RNA (1)...(19): siRNA sense strand
gaaagcuaccauucuuaua

SEQ ID NO: 937424 - RNA, 19 nt, Homo sapiens
  misc_RNA (1)...(19): siRNA sense strand
ugaagaugcuacuuuagaa

SEQ ID NO: 937425 - RNA, 19 nt, Homo sapiens
  misc_RNA (1)...(19): siRNA sense strand
ggaugaauauguaggacuu

SEQ ID NO: 937426 - RNA, 19 nt, Homo sapiens
  misc_RNA (1)...(19): siRNA sense strand
gagaaguaaugauccuuau

SEQ ID NO: 937427 - RNA, 19 nt, Homo sapiens
  misc_RNA (1)...(19): siRNA sense strand
ggacaggacagauauuuua

SEQ ID NO: 937428 - RNA, 19 nt, Homo sapiens
  misc_RNA (1)...(19): siRNA sense strand
caacagggaguacaccuuu

SEQ ID NO: 937429 - RNA, 19 nt, Homo sapiens
  misc_RNA (1)...(19): siRNA sense strand
aaucacauguggacuguuu

SEQ ID NO: 937430 - RNA, 19 nt, Homo sapiens
  misc_RNA (1)...(19): siRNA sense strand
ggucauaucgcuuucaaug

SEQ ID NO: 937431 - RNA, 19 nt, Homo sapiens
  misc_RNA (1)...(19): siRNA sense strand
uaaagacucuagcaaugga

SEQ ID NO: 937432 - RNA, 19 nt, Homo sapiens
  misc_RNA (1)...(19): siRNA sense strand
gauaccaucuuggcaaaug

SEQ ID NO: 937433 - RNA, 19 nt, Homo sapiens
  misc_RNA (1)...(19): siRNA sense strand
guaaucgcaucauucaguu

SEQ ID NO: 937434 - RNA, 19 nt, Homo sapiens
  misc_RNA (1)...(19): siRNA sense strand
gaagaaggagucaaucaca

SEQ ID NO: 937435 - RNA, 19 nt, Homo sapiens
  misc_RNA (1)...(19): siRNA sense strand
ugacuuggcuagugaaugg

SEQ ID NO: 937436 - RNA, 19 nt, Homo sapiens
  misc_RNA (1)...(19): siRNA sense strand
ggacaagauuaaagacucu

SEQ ID NO: 937437 - RNA, 19 nt, Homo sapiens
  misc_RNA (1)...(19): siRNA sense strand
guaaugauccuuauaacag

SEQ ID NO: 937438 - RNA, 19 nt, Homo sapiens
  misc_RNA (1)...(19): siRNA sense strand
caagaaaucauccugaaag

SEQ ID NO: 937439 - RNA, 19 nt, Homo sapiens
  misc_RNA (1)...(19): siRNA sense strand
uuaaaggucuaaugcaugu

SEQ ID NO: 937440 - RNA, 19 nt, Homo sapiens
  misc_RNA (1)...(19): siRNA sense strand
gugaaugggcagccaaaua

SEQ ID NO: 937441 - RNA, 19 nt, Homo sapiens
  misc_RNA (1)...(19): siRNA sense strand
ccugaaagcuaccauucuu

SEQ ID NO: 937442 - RNA, 19 nt, Homo sapiens
  misc_RNA (1)...(19): siRNA sense strand
gcgaugaagaugcuacuuu

SEQ ID NO: 937443 - RNA, 19 nt, Homo sapiens
  misc_RNA (1)...(19): siRNA sense strand
gauuaaagacucuagcaau

SEQ ID NO: 937444 - RNA, 19 nt, Homo sapiens
  misc_RNA (1)...(19): siRNA sense strand
gaagaccuuuaauauggau

SEQ ID NO: 937445 - RNA, 19 nt, Homo sapiens
  misc_RNA (1)...(19): siRNA sense strand
ucaaggacaagauuaaaga

SEQ ID NO: 937446 - RNA, 19 nt, Homo sapiens
  misc_RNA (1)...(19): siRNA sense strand
gaagaugcuacuuuagaau

SEQ ID NO: 937447 - RNA, 19 nt, Homo sapiens
  misc_RNA (1)...(19): siRNA sense strand
caucuguaaucgcaucauu

SEQ ID NO: 937448 - RNA, 19 nt, Homo sapiens
  misc_RNA (1)...(19): siRNA sense strand
gaaggagucaaucacaugu

SEQ ID NO: 937449 - RNA, 19 nt, Homo sapiens
  misc_RNA (1)...(19): siRNA sense strand
ugaagaccuuuaauaugga

SEQ ID NO: 937450 - RNA, 19 nt, Homo sapiens
  misc_RNA (1)...(19): siRNA sense strand
ugaaagcuaccauucuuau

SEQ ID NO: 937451 - RNA, 19 nt, Homo sapiens
  misc_RNA (1)...(19): siRNA sense strand
gaauauguaggacuuccaa

SEQ ID NO: 937452 - RNA, 19 nt, Homo sapiens
  misc_RNA (1)...(19): siRNA sense strand
agagaaguaaugauccuua

SEQ ID NO: 937453 - RNA, 19 nt, Homo sapiens
  misc_RNA (1)...(19): siRNA sense strand
caacuauggcucuaacugu

SEQ ID NO: 937454 - RNA, 19 nt, Homo sapiens
  misc_RNA (1)...(19): siRNA sense strand
auuaaagacucuagcaaug

SEQ ID NO: 937455 - RNA, 19 nt, Homo sapiens
  misc_RNA (1)...(19): siRNA sense strand
cauaagaauggacaccuuu

SEQ ID NO: 937456 - RNA, 19 nt, Homo sapiens
  misc_RNA (1)...(19): siRNA sense strand
aagcuaccauucuuauaug

SEQ ID NO: 937457 - RNA, 19 nt, Homo sapiens
  misc_RNA (1)...(19): siRNA sense strand
ccaagaaaucauccugaaa

SEQ ID NO: 937458 - RNA, 19 nt, Homo sapiens
  misc_RNA (1)...(19): siRNA sense strand
ggacaccuuucuuuuaaau

SEQ ID NO: 937459 - RNA, 19 nt, Homo sapiens
  misc_RNA (1)...(19): siRNA sense strand
ggacuuccaagaaaucauc

SEQ ID NO: 937460 - RNA, 19 nt, Homo sapiens
  misc_RNA (1)...(19): siRNA sense strand
uaucaaaagugccaacuau

SEQ ID NO: 937461 - RNA, 19 nt, Homo sapiens
  misc_RNA (1)...(19): siRNA sense strand
cagauggucauaucgcuuu

SEQ ID NO: 937462 - RNA, 19 nt, Homo sapiens
  misc_RNA (1)...(19): siRNA sense strand
uccaagaaaucauccugaa

SEQ ID NO: 937463 - RNA, 19 nt, Homo sapiens
  misc_RNA (1)...(19): siRNA sense strand
ucauaagaauggacaccuu

SEQ ID NO: 937464 - RNA, 19 nt, Homo sapiens
  misc_RNA (1)...(19): siRNA sense strand
agugauggaugcuagagaa

SEQ ID NO: 937465 - RNA, 19 nt, Homo sapiens
  misc_RNA (1)...(19): siRNA sense strand
ugaaugggcagccaaauac

SEQ ID NO: 937466 - RNA, 19 nt, Homo sapiens
  misc_RNA (1)...(19): siRNA sense strand
gaaugcugcagauuuacaa

SEQ ID NO: 937467 - RNA, 19 nt, Homo sapiens
  misc_RNA (1)...(19): siRNA sense strand
ugacgggaaugcugcagau

SEQ ID NO: 937468 - RNA, 19 nt, Homo sapiens
  misc_RNA (1)...(19): siRNA sense strand
ggcuuguaauucuugauaa

SEQ ID NO: 937469 - RNA, 19 nt, Homo sapiens
  misc_RNA (1)...(19): siRNA sense strand
gaagcuggaggaauagauc

SEQ ID NO: 937470 - RNA, 19 nt, Homo sapiens
  misc_RNA (1)...(19): siRNA sense strand
ggaaugcugcagauuuaca

SEQ ID NO: 937471 - RNA, 19 nt, Homo sapiens
  misc_RNA (1)...(19): siRNA sense strand
uggauaccaucuuggcaaa

SEQ ID NO: 937472 - RNA, 19 nt, Homo sapiens
  misc_RNA (1)...(19): siRNA sense strand
ucaaucacauguggacugu

SEQ ID NO: 937473 - RNA, 19 nt, Homo sapiens
  misc_RNA (1)...(19): siRNA sense strand
gaauggacaccuuucuuuu

SEQ ID NO: 937474 - RNA, 19 nt, Homo sapiens
  misc_RNA (1)...(19): siRNA sense strand
gggaguacaccuuuaggau

SEQ ID NO: 937475 - RNA, 19 nt, Homo sapiens
  misc_RNA (1)...(19): siRNA sense strand
caaagcaauagaagaagga

SEQ ID NO: 937476 - RNA, 19 nt, Homo sapiens
  misc_RNA (1)...(19): siRNA sense strand
ggaggaauugguccagaug

SEQ ID NO: 937477 - RNA, 19 nt, Homo sapiens
  misc_RNA (1)...(19): siRNA sense strand
uguaggacuuccaagaaau

SEQ ID NO: 937478 - RNA, 19 nt, Homo sapiens
  misc_RNA (1)...(19): siRNA sense strand
uauguaggacuuccaagaa

SEQ ID NO: 937479 - RNA, 19 nt, Homo sapiens
  misc_RNA (1)...(19): siRNA sense strand
aacagggaguacaccuuua

SEQ ID NO: 937480 - RNA, 19 nt, Homo sapiens
  misc_RNA (1)...(19): siRNA sense strand
aacuauggcucuaacuguu

SEQ ID NO: 937481 - RNA, 19 nt, Homo sapiens
  misc_RNA (1)...(19): siRNA sense strand
cagcauccccggacuauuu

SEQ ID NO: 937482 - RNA, 19 nt, Homo sapiens
  misc_RNA (1)...(19): siRNA sense strand
guacaccuuuaggaugcua

SEQ ID NO: 937483 - RNA, 19 nt, Homo sapiens
  misc_RNA (1)...(19): siRNA sense strand
ugugaagaccuuuaauaug

SEQ ID NO: 937484 - RNA, 19 nt, Homo sapiens
  misc_RNA (1)...(19): siRNA sense strand
uggauccacuauucaguau

SEQ ID NO: 937485 - RNA, 19 nt, Homo sapiens
  misc_RNA (1)...(19): siRNA sense strand
uagaagaaggagucaauca

SEQ ID NO: 937486 - RNA, 19 nt, Homo sapiens
  misc_RNA (1)...(19): siRNA sense strand
gaugcuagagaaguaauga

SEQ ID NO: 937487 - RNA, 19 nt, Homo sapiens
  misc_RNA (1)...(19): siRNA sense strand
aagaaggagucaaucacau

SEQ ID NO: 937488 - RNA, 19 nt, Homo sapiens
  misc_RNA (1)...(19): siRNA sense strand
uguggacuguuuccgcuuu

SEQ ID NO: 937489 - RNA, 19 nt, Homo sapiens
  misc_RNA (1)...(19): siRNA sense strand
ucgcaucauucaguucaaa

SEQ ID NO: 937490 - RNA, 19 nt, Homo sapiens
  misc_RNA (1)...(19): siRNA sense strand
gcaugugcacaauaaacuu

SEQ ID NO: 937491 - RNA, 19 nt, Homo sapiens
  misc_RNA (1)...(19): siRNA sense strand
aauagaagaaggagucaau

SEQ ID NO: 937492 - RNA, 19 nt, Homo sapiens
  misc_RNA (1)...(19): siRNA sense strand
auguaggacuuccaagaaa

SEQ ID NO: 937493 - RNA, 19 nt, Homo sapiens
  misc_RNA (1)...(19): siRNA sense strand
cuuuaaaggucuaaugcau

SEQ ID NO: 937494 - RNA, 19 nt, Homo sapiens
  misc_RNA (1)...(19): siRNA sense strand
gcuggaggaauagaucuuu

SEQ ID NO: 937495 - RNA, 19 nt, Homo sapiens
  misc_RNA (1)...(19): siRNA sense strand
cugaaagcuaccauucuua

SEQ ID NO: 937496 - RNA, 19 nt, Homo sapiens
  misc_RNA (1)...(19): siRNA sense strand
agaaggagucaaucacaug

SEQ ID NO: 937497 - RNA, 19 nt, Homo sapiens
  misc_RNA (1)...(19): siRNA sense strand
gcuuguaauucuugauaac

SEQ ID NO: 937498 - RNA, 19 nt, Homo sapiens
  misc_RNA (1)...(19): siRNA sense strand
uguaaucgcaucauucagu

SEQ ID NO: 937499 - RNA, 19 nt, Homo sapiens
  misc_RNA (1)...(19): siRNA sense strand
gaugaagaugcuacuuuag

SEQ ID NO: 937500 - RNA, 19 nt, Homo sapiens
  misc_RNA (1)...(19): siRNA sense strand
gauccuaauaaugcacaua

SEQ ID NO: 937501 - RNA, 19 nt, Homo sapiens
  misc_RNA (1)...(19): siRNA sense strand
acacuggguuuaccaacag

SEQ ID NO: 937502 - RNA, 19 nt, Homo sapiens
  misc_RNA (1)...(19): siRNA sense strand
guaggacuuccaagaaauc

SEQ ID NO: 937503 - RNA, 19 nt, Homo sapiens
  misc_RNA (1)...(19): siRNA sense strand
auaaugcacauauccuuga

SEQ ID NO: 937504 - RNA, 19 nt, Homo sapiens
  misc_RNA (1)...(19): siRNA sense strand
caauaaacuuguggaucca

SEQ ID NO: 937505 - RNA, 19 nt, Homo sapiens
  misc_RNA (1)...(19): siRNA sense strand
gaaugggcagccaaauaca

SEQ ID NO: 937506 - RNA, 19 nt, Homo sapiens
  misc_RNA (1)...(19): siRNA sense strand
gauccaguuuagugucaag

SEQ ID NO: 937507 - RNA, 19 nt, Homo sapiens
  misc_RNA (1)...(19): siRNA sense strand
gaccuuuaauauggaugaa

SEQ ID NO: 937508 - RNA, 19 nt, Homo sapiens
  misc_RNA (1)...(19): siRNA sense strand
caugugcacaauaaacuug

SEQ ID NO: 937509 - RNA, 19 nt, Homo sapiens
  misc_RNA (1)...(19): siRNA sense strand
uggauccaguuuaguguca

SEQ ID NO: 937510 - RNA, 19 nt, Homo sapiens
  misc_RNA (1)...(19): siRNA sense strand
aggcuuguaauucuugaua

SEQ ID NO: 937511 - RNA, 19 nt, Homo sapiens
  misc_RNA (1)...(19): siRNA sense strand
uacacuggguuuaccaaca

SEQ ID NO: 937512 - RNA, 19 nt, Homo sapiens
  misc_RNA (1)...(19): siRNA sense strand
gcaauagaagaaggaguca

SEQ ID NO: 937513 - RNA, 19 nt, Homo sapiens
  misc_RNA (1)...(19): siRNA sense strand
augaagaugcuacuuuaga

SEQ ID NO: 937514 - RNA, 19 nt, Homo sapiens
  misc_RNA (1)...(19): siRNA sense strand
gaaacaaaguccaacauau

SEQ ID NO: 937515 - RNA, 19 nt, Homo sapiens
  misc_RNA (1)...(19): siRNA sense strand
ucaagaagcucagguguuu

SEQ ID NO: 937516 - RNA, 19 nt, Homo sapiens
  misc_RNA (1)...(19): siRNA sense strand
ggaaacaaaguccaacaua

SEQ ID NO: 937517 - RNA, 19 nt, Homo sapiens
  misc_RNA (1)...(19): siRNA sense strand
gaggcuaccuucaguaaga

SEQ ID NO: 937518 - RNA, 19 nt, Homo sapiens
  misc_RNA (1)...(19): siRNA sense strand
ggagagaccaguaguuuga

SEQ ID NO: 937519 - RNA, 19 nt, Homo sapiens
  misc_RNA (1)...(19): siRNA sense strand
gagaacagaugcucacaag

SEQ ID NO: 937520 - RNA, 19 nt, Homo sapiens
  misc_RNA (1)...(19): siRNA sense strand
ccaggaagcugcaguucuu

SEQ ID NO: 937521 - RNA, 19 nt, Homo sapiens
  misc_RNA (1)...(19): siRNA sense strand
gagagcagccugucaagaa

SEQ ID NO: 937522 - RNA, 19 nt, Homo sapiens
  misc_RNA (1)...(19): siRNA sense strand
agagagaccucccaaugaa

SEQ ID NO: 937523 - RNA, 19 nt, Homo sapiens
  misc_RNA (1)...(19): siRNA sense strand
gcauggaugugacuauugu

SEQ ID NO: 937524 - RNA, 19 nt, Homo sapiens
  misc_RNA (1)...(19): siRNA sense strand
gagagacaguuccacuuga

SEQ ID NO: 937525 - RNA, 19 nt, Homo sapiens
  misc_RNA (1)...(19): siRNA sense strand
gaacagaugaggcuaccuu

SEQ ID NO: 937526 - RNA, 19 nt, Homo sapiens
  misc_RNA (1)...(19): siRNA sense strand
gaugcuggcgucaaaguua

SEQ ID NO: 937527 - RNA, 19 nt, Homo sapiens
  misc_RNA (1)...(19): siRNA sense strand
ccaagaaacuccuggaacu

SEQ ID NO: 937528 - RNA, 19 nt, Homo sapiens
  misc_RNA (1)...(19): siRNA sense strand
cgaaaucacuggaagaaaa

SEQ ID NO: 937529 - RNA, 19 nt, Homo sapiens
  misc_RNA (1)...(19): siRNA sense strand
cagagaugcuggcgucaaa

SEQ ID NO: 937530 - RNA, 19 nt, Homo sapiens
  misc_RNA (1)...(19): siRNA sense strand
ggagagacaguuccacuug

SEQ ID NO: 937531 - RNA, 19 nt, Homo sapiens
  misc_RNA (1)...(19): siRNA sense strand
aaacacggaugugaucauu

SEQ ID NO: 937532 - RNA, 19 nt, Homo sapiens
  misc_RNA (1)...(19): siRNA sense strand
ucaguaagauucccauugg

SEQ ID NO: 937533 - RNA, 19 nt, Homo sapiens
  misc_RNA (1)...(19): siRNA sense strand
acacggaugugaucauugu

SEQ ID NO: 937534 - RNA, 19 nt, Homo sapiens
  misc_RNA (1)...(19): siRNA sense strand
ucacaacacggaauaauca

SEQ ID NO: 937535 - RNA, 19 nt, Homo sapiens
  misc_RNA (1)...(19): siRNA sense strand
gaucaagggugaaaaggaa

SEQ ID NO: 937536 - RNA, 19 nt, Homo sapiens
  misc_RNA (1)...(19): siRNA sense strand
gugcagcuguccaccauug

SEQ ID NO: 937537 - RNA, 19 nt, Homo sapiens
  misc_RNA (1)...(19): siRNA sense strand
uacgaaggcuugcguccua

SEQ ID NO: 937538 - RNA, 19 nt, Homo sapiens
  misc_RNA (1)...(19): siRNA sense strand
ggaugugacuauuguuaag

SEQ ID NO: 937539 - RNA, 19 nt, Homo sapiens
  misc_RNA (1)...(19): siRNA sense strand
cagagagaccucccaauga

SEQ ID NO: 937540 - RNA, 19 nt, Homo sapiens
  misc_RNA (1)...(19): siRNA sense strand
gcaaugaccggccuucgau

SEQ ID NO: 937541 - RNA, 19 nt, Homo sapiens
  misc_RNA (1)...(19): siRNA sense strand
uaagauucccauuggauuu

SEQ ID NO: 937542 - RNA, 19 nt, Homo sapiens
  misc_RNA (1)...(19): siRNA sense strand
gcuaggacucuauuugaaa

SEQ ID NO: 937543 - RNA, 19 nt, Homo sapiens
  misc_RNA (1)...(19): siRNA sense strand
accaguaguuugagucaua

SEQ ID NO: 937544 - RNA, 19 nt, Homo sapiens
  misc_RNA (1)...(19): siRNA sense strand
ugacuauuguuaagacaga

SEQ ID NO: 937545 - RNA, 19 nt, Homo sapiens
  misc_RNA (1)...(19): siRNA sense strand
gcauugacagugaggagua

SEQ ID NO: 937546 - RNA, 19 nt, Homo sapiens
  misc_RNA (1)...(19): siRNA sense strand
gugaagaaggccacuguuu

SEQ ID NO: 937547 - RNA, 19 nt, Homo sapiens
  misc_RNA (1)...(19): siRNA sense strand
gcccggaggucuggaaaga

SEQ ID NO: 937548 - RNA, 19 nt, Homo sapiens
  misc_RNA (1)...(19): siRNA sense strand
guaagauucccauuggauu

SEQ ID NO: 937549 - RNA, 19 nt, Homo sapiens
  misc_RNA (1)...(19): siRNA sense strand
cgacaagcaaagaagauuu

SEQ ID NO: 937550 - RNA, 19 nt, Homo sapiens
  misc_RNA (1)...(19): siRNA sense strand
cugaauaucugcauugaac

SEQ ID NO: 937551 - RNA, 19 nt, Homo sapiens
  misc_RNA (1)...(19): siRNA sense strand
caucaagccucuaucucau

SEQ ID NO: 937552 - RNA, 19 nt, Homo sapiens
  misc_RNA (1)...(19): siRNA sense strand
ccggaggucuggaaagaug

SEQ ID NO: 937553 - RNA, 19 nt, Homo sapiens
  misc_RNA (1)...(19): siRNA sense strand
gaagucgaaaggugagaaa

SEQ ID NO: 937554 - RNA, 19 nt, Homo sapiens
  misc_RNA (1)...(19): siRNA sense strand
acauuuaucuggcauggau

SEQ ID NO: 937555 - RNA, 19 nt, Homo sapiens
  misc_RNA (1)...(19): siRNA sense strand
ugccgaaaguggaaacaaa

SEQ ID NO: 937556 - RNA, 19 nt, Homo sapiens
  misc_RNA (1)...(19): siRNA sense strand
gcgucaaaguuagcaagua

SEQ ID NO: 937557 - RNA, 19 nt, Homo sapiens
  misc_RNA (1)...(19): siRNA sense strand
acagagagaccucccaaug

SEQ ID NO: 937558 - RNA, 19 nt, Homo sapiens
  misc_RNA (1)...(19): siRNA sense strand
ccaaugcacaagugaagaa

SEQ ID NO: 937559 - RNA, 19 nt, Homo sapiens
  misc_RNA (1)...(19): siRNA sense strand
cgucaaaguuagcaaguac

SEQ ID NO: 937560 - RNA, 19 nt, Homo sapiens
  misc_RNA (1)...(19): siRNA sense strand
cagccuguauuugcaauga

SEQ ID NO: 937561 - RNA, 19 nt, Homo sapiens
  misc_RNA (1)...(19): siRNA sense strand
gaaaggagagacaguucca

SEQ ID NO: 937562 - RNA, 19 nt, Homo sapiens
  misc_RNA (1)...(19): siRNA sense strand
gcauugaaccugacaccau

SEQ ID NO: 937563 - RNA, 19 nt, Homo sapiens
  misc_RNA (1)...(19): siRNA sense strand
acacugugauaaccuccua

SEQ ID NO: 937564 - RNA, 19 nt, Homo sapiens
  misc_RNA (1)...(19): siRNA sense strand
ccagugcacuuugcuuauc

SEQ ID NO: 937565 - RNA, 19 nt, Homo sapiens
  misc_RNA (1)...(19): siRNA sense strand
gcucagguguuuggcaauc

SEQ ID NO: 937566 - RNA, 19 nt, Homo sapiens
  misc_RNA (1)...(19): siRNA sense strand
guuuggcaaucaacucauu

SEQ ID NO: 937567 - RNA, 19 nt, Homo sapiens
  misc_RNA (1)...(19): siRNA sense strand
uuaaaacgcuucgaaauca

SEQ ID NO: 937568 - RNA, 19 nt, Homo sapiens
  misc_RNA (1)...(19): siRNA sense strand
uggcauggaugugacuauu

SEQ ID NO: 937569 - RNA, 19 nt, Homo sapiens
  misc_RNA (1)...(19): siRNA sense strand
aagcuaggacucuauuuga

SEQ ID NO: 937570 - RNA, 19 nt, Homo sapiens
  misc_RNA (1)...(19): siRNA sense strand
aaagcuaggacucuauuug

SEQ ID NO: 937571 - RNA, 19 nt, Homo sapiens
  misc_RNA (1)...(19): siRNA sense strand
gaaaagcuaggacucuauu

SEQ ID NO: 937572 - RNA, 19 nt, Homo sapiens
  misc_RNA (1)...(19): siRNA sense strand
agagacaguuccacuugau

SEQ ID NO: 937573 - RNA, 19 nt, Homo sapiens
  misc_RNA (1)...(19): siRNA sense strand
gaugaggcuaccuucagua

SEQ ID NO: 937574 - RNA, 19 nt, Homo sapiens
  misc_RNA (1)...(19): siRNA sense strand
ggagguuguuacugguguu

SEQ ID NO: 937575 - RNA, 19 nt, Homo sapiens
  misc_RNA (1)...(19): siRNA sense strand
aggaugcccuuucccaaga

SEQ ID NO: 937576 - RNA, 19 nt, Homo sapiens
  misc_RNA (1)...(19): siRNA sense strand
cacgggaccuacagagaga

SEQ ID NO: 937577 - RNA, 19 nt, Homo sapiens
  misc_RNA (1)...(19): siRNA sense strand
ucaucaagccucuaucuca

SEQ ID NO: 937578 - RNA, 19 nt, Homo sapiens
  misc_RNA (1)...(19): siRNA sense strand
aagauucccauuggauuua

SEQ ID NO: 937579 - RNA, 19 nt, Homo sapiens
  misc_RNA (1)...(19): siRNA sense strand
ggagagcagccugucaaga

SEQ ID NO: 937580 - RNA, 19 nt, Homo sapiens
  misc_RNA (1)...(19): siRNA sense strand
ucaagccucuaucucauac

SEQ ID NO: 937581 - RNA, 19 nt, Homo sapiens
  misc_RNA (1)...(19): siRNA sense strand
cuuaaggaguggccucaga

SEQ ID NO: 937582 - RNA, 19 nt, Homo sapiens
  misc_RNA (1)...(19): siRNA sense strand
ggacacugcaggagguugu

SEQ ID NO: 937583 - RNA, 19 nt, Homo sapiens
  misc_RNA (1)...(19): siRNA sense strand
gaaacuccuggaacugaug

SEQ ID NO: 937584 - RNA, 19 nt, Homo sapiens
  misc_RNA (1)...(19): siRNA sense strand
gggagagaccaguaguuug

SEQ ID NO: 937585 - RNA, 19 nt, Homo sapiens
  misc_RNA (1)...(19): siRNA sense strand
gcagcuguccaccauugaa

SEQ ID NO: 937586 - RNA, 19 nt, Homo sapiens
  misc_RNA (1)...(19): siRNA sense strand
ugagggacaagccaagaaa

SEQ ID NO: 937587 - RNA, 19 nt, Homo sapiens
  misc_RNA (1)...(19): siRNA sense strand
uacaggagaauauuacgaa

SEQ ID NO: 937588 - RNA, 19 nt, Homo sapiens
  misc_RNA (1)...(19): siRNA sense strand
guacaggagaauauuacga

SEQ ID NO: 937589 - RNA, 19 nt, Homo sapiens
  misc_RNA (1)...(19): siRNA sense strand
ugggagagaccaguaguuu

SEQ ID NO: 937590 - RNA, 19 nt, Homo sapiens
  misc_RNA (1)...(19): siRNA sense strand
aagaaacuccuggaacuga

SEQ ID NO: 937591 - RNA, 19 nt, Homo sapiens
  misc_RNA (1)...(19): siRNA sense strand
gguuguuacugguguucuu

SEQ ID NO: 937592 - RNA, 19 nt, Homo sapiens
  misc_RNA (1)...(19): siRNA sense strand
ggaagucgaaaggugagaa

SEQ ID NO: 937593 - RNA, 19 nt, Homo sapiens
  misc_RNA (1)...(19): siRNA sense strand
gaugugacuauuguuaaga

SEQ ID NO: 937594 - RNA, 19 nt, Homo sapiens
  misc_RNA (1)...(19): siRNA sense strand
ccauugaacuguccaucac

SEQ ID NO: 937595 - RNA, 19 nt, Homo sapiens
  misc_RNA (1)...(19): siRNA sense strand
ugaagaaggccacuguuuu

SEQ ID NO: 937596 - RNA, 19 nt, Homo sapiens
  misc_RNA (1)...(19): siRNA sense strand
ucagguguuuggcaaucaa

SEQ ID NO: 937597 - RNA, 19 nt, Homo sapiens
  misc_RNA (1)...(19): siRNA sense strand
gagaugcuggcgucaaagu

SEQ ID NO: 937598 - RNA, 19 nt, Homo sapiens
  misc_RNA (1)...(19): siRNA sense strand
cugcaguucuucugugauc

SEQ ID NO: 937599 - RNA, 19 nt, Homo sapiens
  misc_RNA (1)...(19): siRNA sense strand
agaaacuccuggaacugau

SEQ ID NO: 937600 - RNA, 19 nt, Homo sapiens
  misc_RNA (1)...(19): siRNA sense strand
gaacuguccaucacaacac

SEQ ID NO: 937601 - RNA, 19 nt, Homo sapiens
  misc_RNA (1)...(19): siRNA sense strand
ggagaccccuguacaaagg

SEQ ID NO: 937602 - RNA, 19 nt, Homo sapiens
  misc_RNA (1)...(19): siRNA sense strand
ggaaaacacggaugugauc

SEQ ID NO: 937603 - RNA, 19 nt, Homo sapiens
  misc_RNA (1)...(19): siRNA sense strand
uggaugugacuauuguuaa

SEQ ID NO: 937604 - RNA, 19 nt, Homo sapiens
  misc_RNA (1)...(19): siRNA sense strand
caaaguccaacauauuacu

SEQ ID NO: 937605 - RNA, 19 nt, Homo sapiens
  misc_RNA (1)...(19): siRNA sense strand
agaugaggcuaccuucagu

SEQ ID NO: 937606 - RNA, 19 nt, Homo sapiens
  misc_RNA (1)...(19): siRNA sense strand
caagaaacuccuggaacug

SEQ ID NO: 937607 - RNA, 19 nt, Homo sapiens
  misc_RNA (1)...(19): siRNA sense strand
caguaagauucccauugga

SEQ ID NO: 937608 - RNA, 19 nt, Homo sapiens
  misc_RNA (1)...(19): siRNA sense strand
caagccagccagugcacuu

SEQ ID NO: 937609 - RNA, 19 nt, Homo sapiens
  misc_RNA (1)...(19): siRNA sense strand
caucacaacacggaauaau

SEQ ID NO: 937610 - RNA, 19 nt, Homo sapiens
  misc_RNA (1)...(19): siRNA sense strand
cuaggacucuauuugaaaa

SEQ ID NO: 937611 - RNA, 19 nt, Homo sapiens
  misc_RNA (1)...(19): siRNA sense strand
gucaagaagcucagguguu

SEQ ID NO: 937612 - RNA, 19 nt, Homo sapiens
  misc_RNA (1)...(19): siRNA sense strand
cauacccucuuugccgaaa

SEQ ID NO: 937613 - RNA, 19 nt, Homo sapiens
  misc_RNA (1)...(19): siRNA sense strand
ugaaacugcuccccaggaa

SEQ ID NO: 937614 - RNA, 19 nt, Homo sapiens
  misc_RNA (1)...(19): siRNA sense strand
gaaauugaccuaacuggua

SEQ ID NO: 937615 - RNA, 19 nt, Homo sapiens
  misc_RNA (1)...(19): siRNA sense strand
uaacaaaccuaaugugugu

SEQ ID NO: 937616 - RNA, 19 nt, Homo sapiens
  misc_RNA (1)...(19): siRNA sense strand
ucaagagaauggaauauga

SEQ ID NO: 937617 - RNA, 19 nt, Homo sapiens
  misc_RNA (1)...(19): siRNA sense strand
ggaaagcugacaugaauga

SEQ ID NO: 937618 - RNA, 19 nt, Homo sapiens
  misc_RNA (1)...(19): siRNA sense strand
aagcugacaugaaugauaa

SEQ ID NO: 937619 - RNA, 19 nt, Homo sapiens
  misc_RNA (1)...(19): siRNA sense strand
cagagacaguucaugauuu

SEQ ID NO: 937620 - RNA, 19 nt, Homo sapiens
  misc_RNA (1)...(19): siRNA sense strand
gcacgaaauugaccuaacu

SEQ ID NO: 937621 - RNA, 19 nt, Homo sapiens
  misc_RNA (1)...(19): siRNA sense strand
gacaguucaugauuucuaa

SEQ ID NO: 937622 - RNA, 19 nt, Homo sapiens
  misc_RNA (1)...(19): siRNA sense strand
ccacagcccucagugauug

SEQ ID NO: 937623 - RNA, 19 nt, Homo sapiens
  misc_RNA (1)...(19): siRNA sense strand
gcaguuacuuguauauugg

SEQ ID NO: 937624 - RNA, 19 nt, Homo sapiens
  misc_RNA (1)...(19): siRNA sense strand
uccaucagcuuuccaaauu

SEQ ID NO: 937625 - RNA, 19 nt, Homo sapiens
  misc_RNA (1)...(19): siRNA sense strand
gcucugcaguuacuuguau

SEQ ID NO: 937626 - RNA, 19 nt, Homo sapiens
  misc_RNA (1)...(19): siRNA sense strand
gcagugaggugugaguaug

SEQ ID NO: 937627 - RNA, 19 nt, Homo sapiens
  misc_RNA (1)...(19): siRNA sense strand
caucagcuuuccaaauuug

SEQ ID NO: 937628 - RNA, 19 nt, Homo sapiens
  misc_RNA (1)...(19): siRNA sense strand
ccaaauuugauccuucuua

SEQ ID NO: 937629 - RNA, 19 nt, Homo sapiens
  misc_RNA (1)...(19): siRNA sense strand
acaaauaccagcauacuau

SEQ ID NO: 937630 - RNA, 19 nt, Homo sapiens
  misc_RNA (1)...(19): siRNA sense strand
caaauaccagcauacuaua

SEQ ID NO: 937631 - RNA, 19 nt, Homo sapiens
  misc_RNA (1)...(19): siRNA sense strand
caaauuugauccuucuuac

SEQ ID NO: 937632 - RNA, 19 nt, Homo sapiens
  misc_RNA (1)...(19): siRNA sense strand
gagaauggauaggcuuuua

SEQ ID NO: 937633 - RNA, 19 nt, Homo sapiens
  misc_RNA (1)...(19): siRNA sense strand
cacauuacccuguuccaua

SEQ ID NO: 937634 - RNA, 19 nt, Homo sapiens
  misc_RNA (1)...(19): siRNA sense strand
guucagagacaguucauga

SEQ ID NO: 937635 - RNA, 19 nt, Homo sapiens
  misc_RNA (1)...(19): siRNA sense strand
aaauugaccuaacugguau

SEQ ID NO: 937636 - RNA, 19 nt, Homo sapiens
  misc_RNA (1)...(19): siRNA sense strand
agaagaauacacagcaaua

SEQ ID NO: 937637 - RNA, 19 nt, Homo sapiens
  misc_RNA (1)...(19): siRNA sense strand
gaaaucaagagaauggaau

SEQ ID NO: 937638 - RNA, 19 nt, Homo sapiens
  misc_RNA (1)...(19): siRNA sense strand
aagaggagcaggucuauga

SEQ ID NO: 937639 - RNA, 19 nt, Homo sapiens
  misc_RNA (1)...(19): siRNA sense strand
gacaggaauucuacaugga

SEQ ID NO: 937640 - RNA, 19 nt, Homo sapiens
  misc_RNA (1)...(19): siRNA sense strand
ccagcauacuauaagauuu

SEQ ID NO: 937641 - RNA, 19 nt, Homo sapiens
  misc_RNA (1)...(19): siRNA sense strand
ggaaaucaagagaauggaa

SEQ ID NO: 937642 - RNA, 19 nt, Homo sapiens
  misc_RNA (1)...(19): siRNA sense strand
caacauuugauucagauga

SEQ ID NO: 937643 - RNA, 19 nt, Homo sapiens
  misc_RNA (1)...(19): siRNA sense strand
agagacaguucaugauuuc

SEQ ID NO: 937644 - RNA, 19 nt, Homo sapiens
  misc_RNA (1)...(19): siRNA sense strand
caacugaugagcaacaaau

SEQ ID NO: 937645 - RNA, 19 nt, Homo sapiens
  misc_RNA (1)...(19): siRNA sense strand
caccaauaaugcuuuaaga

SEQ ID NO: 937646 - RNA, 19 nt, Homo sapiens
  misc_RNA (1)...(19): siRNA sense strand
caagagaauggaauaugaa

SEQ ID NO: 937647 - RNA, 19 nt, Homo sapiens
  misc_RNA (1)...(19): siRNA sense strand
acaggagugucauauauuc

SEQ ID NO: 937648 - RNA, 19 nt, Homo sapiens
  misc_RNA (1)...(19): siRNA sense strand
gaugaggauauucuacuuu

SEQ ID NO: 937649 - RNA, 19 nt, Homo sapiens
  misc_RNA (1)...(19): siRNA sense strand
gaugagcaacaaauaauca

SEQ ID NO: 937650 - RNA, 19 nt, Homo sapiens
  misc_RNA (1)...(19): siRNA sense strand
ccaauaaugcuuuaagagu

SEQ ID NO: 937651 - RNA, 19 nt, Homo sapiens
  misc_RNA (1)...(19): siRNA sense strand
auggaaagcugacaugaau

SEQ ID NO: 937652 - RNA, 19 nt, Homo sapiens
  misc_RNA (1)...(19): siRNA sense strand
ggagugucauauauucuca

SEQ ID NO: 937653 - RNA, 19 nt, Homo sapiens
  misc_RNA (1)...(19): siRNA sense strand
acauuacccuguuccauau

SEQ ID NO: 937654 - RNA, 19 nt, Homo sapiens
  misc_RNA (1)...(19): siRNA sense strand
cagaagcagugagguguga

SEQ ID NO: 937655 - RNA, 19 nt, Homo sapiens
  misc_RNA (1)...(19): siRNA sense strand
gaagaauacacagcaauag

SEQ ID NO: 937656 - RNA, 19 nt, Homo sapiens
  misc_RNA (1)...(19): siRNA sense strand
gguaacaaaccuaaugugu

SEQ ID NO: 937657 - RNA, 19 nt, Homo sapiens
  misc_RNA (1)...(19): siRNA sense strand
gaagacaggaauucuacau

SEQ ID NO: 937658 - RNA, 19 nt, Homo sapiens
  misc_RNA (1)...(19): siRNA sense strand
ucagagacaguucaugauu

SEQ ID NO: 937659 - RNA, 19 nt, Homo sapiens
  misc_RNA (1)...(19): siRNA sense strand
aaugacaacugaugagcaa

SEQ ID NO: 937660 - RNA, 19 nt, Homo sapiens
  misc_RNA (1)...(19): siRNA sense strand
ccaucagcuuuccaaauuu

SEQ ID NO: 937661 - RNA, 19 nt, Homo sapiens
  misc_RNA (1)...(19): siRNA sense strand
ggagugggcauuugugaag

SEQ ID NO: 937662 - RNA, 19 nt, Homo sapiens
  misc_RNA (1)...(19): siRNA sense strand
ugcaguuacuuguauauug

SEQ ID NO: 937663 - RNA, 19 nt, Homo sapiens
  misc_RNA (1)...(19): siRNA sense strand
agaauacacagcaauagaa

SEQ ID NO: 937664 - RNA, 19 nt, Homo sapiens
  misc_RNA (1)...(19): siRNA sense strand
aaagcugacaugaaugaua

SEQ ID NO: 937665 - RNA, 19 nt, Homo sapiens
  misc_RNA (1)...(19): siRNA sense strand
caggaauucuacauggaaa

SEQ ID NO: 937666 - RNA, 19 nt, Homo sapiens
  misc_RNA (1)...(19): siRNA sense strand
uuaaaggagugggcauuug

SEQ ID NO: 937667 - RNA, 19 nt, Homo sapiens
  misc_RNA (1)...(19): siRNA sense strand
ugauucagaugaggauauu

SEQ ID NO: 937668 - RNA, 19 nt, Homo sapiens
  misc_RNA (1)...(19): siRNA sense strand
gcagagagcuccccuucca

SEQ ID NO: 937669 - RNA, 19 nt, Homo sapiens
  misc_RNA (1)...(19): siRNA sense strand
gauccuucuuaccaaauga

SEQ ID NO: 937670 - RNA, 19 nt, Homo sapiens
  misc_RNA (1)...(19): siRNA sense strand
ggaccacauuacccuguuc

SEQ ID NO: 937671 - RNA, 19 nt, Homo sapiens
  misc_RNA (1)...(19): siRNA sense strand
caugauggguuggcagaga

SEQ ID NO: 937672 - RNA, 19 nt, Homo sapiens
  misc_RNA (1)...(19): siRNA sense strand
uaaaggagugggcauuugu

SEQ ID NO: 937673 - RNA, 19 nt, Homo sapiens
  misc_RNA (1)...(19): siRNA sense strand
caauggauggguagaaaga

SEQ ID NO: 937674 - RNA, 19 nt, Homo sapiens
  misc_RNA (1)...(19): siRNA sense strand
gcaccaauaaugcuuuaag

SEQ ID NO: 937675 - RNA, 19 nt, Homo sapiens
  misc_RNA (1)...(19): siRNA sense strand
gaauacacagcaauagaag

SEQ ID NO: 937676 - RNA, 19 nt, Homo sapiens
  misc_RNA (1)...(19): siRNA sense strand
gagaagaauacacagcaau

SEQ ID NO: 937677 - RNA, 19 nt, Homo sapiens
  misc_RNA (1)...(19): siRNA sense strand
cauaagaagcaacauguag

SEQ ID NO: 937678 - RNA, 19 nt, Homo sapiens
  misc_RNA (1)...(19): siRNA sense strand
cauaugcaagcacgaaauu

SEQ ID NO: 937679 - RNA, 19 nt, Homo sapiens
  misc_RNA (1)...(19): siRNA sense strand
agugauugcuguucagaga

SEQ ID NO: 937680 - RNA, 19 nt, Homo sapiens
  misc_RNA (1)...(19): siRNA sense strand
ugagcaagggaccacauua

SEQ ID NO: 937681 - RNA, 19 nt, Homo sapiens
  misc_RNA (1)...(19): siRNA sense strand
uaugcaagcacgaaauuga

SEQ ID NO: 937682 - RNA, 19 nt, Homo sapiens
  misc_RNA (1)...(19): siRNA sense strand
gagcaagggaccacauuac

SEQ ID NO: 937683 - RNA, 19 nt, Homo sapiens
  misc_RNA (1)...(19): siRNA sense strand
ccauaagaagcaacaugua

SEQ ID NO: 937684 - RNA, 19 nt, Homo sapiens
  misc_RNA (1)...(19): siRNA sense strand
gacaacugaugagcaacaa

SEQ ID NO: 937685 - RNA, 19 nt, Homo sapiens
  misc_RNA (1)...(19): siRNA sense strand
ccucagugauugcuguuca

SEQ ID NO: 937686 - RNA, 19 nt, Homo sapiens
  misc_RNA (1)...(19): siRNA sense strand
agacaguucaugauuucua

SEQ ID NO: 937687 - RNA, 19 nt, Homo sapiens
  misc_RNA (1)...(19): siRNA sense strand
gggaccacauuacccuguu

SEQ ID NO: 937688 - RNA, 19 nt, Homo sapiens
  misc_RNA (1)...(19): siRNA sense strand
agagaagaauacacagcaa

SEQ ID NO: 937689 - RNA, 19 nt, Homo sapiens
  misc_RNA (1)...(19): siRNA sense strand
uuacuucuccaucagcuuu

SEQ ID NO: 937690 - RNA, 19 nt, Homo sapiens
  misc_RNA (1)...(19): siRNA sense strand
agaugaggauauucuacuu

SEQ ID NO: 937691 - RNA, 19 nt, Homo sapiens
  misc_RNA (1)...(19): siRNA sense strand
guaugaggacacacacaaa

SEQ ID NO: 937692 - RNA, 19 nt, Homo sapiens
  misc_RNA (1)...(19): siRNA sense strand
cuuaccaaaugacaacuga

SEQ ID NO: 937693 - RNA, 19 nt, Homo sapiens
  misc_RNA (1)...(19): siRNA sense strand
aagaauacacagcaauaga

SEQ ID NO: 937694 - RNA, 19 nt, Homo sapiens
  misc_RNA (1)...(19): siRNA sense strand
gagugggcauuugugaaga

SEQ ID NO: 937695 - RNA, 19 nt, Homo sapiens
  misc_RNA (1)...(19): siRNA sense strand
auaccagcauacuauaaga

SEQ ID NO: 937696 - RNA, 19 nt, Homo sapiens
  misc_RNA (1)...(19): siRNA sense strand
acaccaaacgccaugaaga

SEQ ID NO: 937697 - RNA, 19 nt, Homo sapiens
  misc_RNA (1)...(19): siRNA sense strand
aaaccacagcccucaguga

SEQ ID NO: 937698 - RNA, 19 nt, Homo sapiens
  misc_RNA (1)...(19): siRNA sense strand
gaagaggagcaggucuaug

SEQ ID NO: 937699 - RNA, 19 nt, Homo sapiens
  misc_RNA (1)...(19): siRNA sense strand
gugaagacaggaauucuac

SEQ ID NO: 937700 - RNA, 19 nt, Homo sapiens
  misc_RNA (1)...(19): siRNA sense strand
cccuacagagcauuaauaa

SEQ ID NO: 937701 - RNA, 19 nt, Homo sapiens
  misc_RNA (1)...(19): siRNA sense strand
ugauugcuguucagagaca

SEQ ID NO: 937702 - RNA, 19 nt, Homo sapiens
  misc_RNA (1)...(19): siRNA sense strand
auggauggguagaaagaaa

SEQ ID NO: 937703 - RNA, 19 nt, Homo sapiens
  misc_RNA (1)...(19): siRNA sense strand
aaacaaauaccagcauacu

SEQ ID NO: 937704 - RNA, 19 nt, Homo sapiens
  misc_RNA (1)...(19): siRNA sense strand
ggagcaggucuaugagcaa

SEQ ID NO: 937705 - RNA, 19 nt, Homo sapiens
  misc_RNA (1)...(19): siRNA sense strand
acugaugagcaacaaauaa

SEQ ID NO: 937706 - RNA, 19 nt, Homo sapiens
  misc_RNA (1)...(19): siRNA sense strand
uaccaaaugacaacugaug

SEQ ID NO: 937707 - RNA, 19 nt, Homo sapiens
  misc_RNA (1)...(19): siRNA sense strand
caagcacgaaauugaccua

SEQ ID NO: 937708 - RNA, 19 nt, Homo sapiens
  misc_RNA (1)...(19): siRNA sense strand
gaaguguccaggguucaau

SEQ ID NO: 937709 - RNA, 19 nt, Homo sapiens
  misc_RNA (1)...(19): siRNA sense strand
guuuagagaagaauacaca

SEQ ID NO: 937710 - RNA, 19 nt, Homo sapiens
  misc_RNA (1)...(19): siRNA sense strand
ugacaacugaugagcaaca

SEQ ID NO: 937711 - RNA, 19 nt, Homo sapiens
  misc_RNA (1)...(19): siRNA sense strand
acaggaauucuacauggaa

SEQ ID NO: 937712 - RNA, 19 nt, Homo sapiens
  misc_RNA (1)...(19): siRNA sense strand
ccaaaugacaacugaugag

SEQ ID NO: 937713 - RNA, 19 nt, Homo sapiens
  misc_RNA (1)...(19): siRNA sense strand
cugaugagcaacaaauaau

SEQ ID NO: 937714 - RNA, 19 nt, Homo sapiens
  misc_RNA (1)...(19): siRNA sense strand
gaagagagaugugaacuga

SEQ ID NO: 937715 - RNA, 19 nt, Homo sapiens
  misc_RNA (1)...(19): siRNA sense strand
ggagagaaguggcagcuuu

SEQ ID NO: 937716 - RNA, 19 nt, Homo sapiens
  misc_RNA (1)...(19): siRNA sense strand
ccaaguggcugggaaguua

SEQ ID NO: 937717 - RNA, 19 nt, Homo sapiens
  misc_RNA (1)...(19): siRNA sense strand
gcacaggacgcuuaagaaa

SEQ ID NO: 937718 - RNA, 19 nt, Homo sapiens
  misc_RNA (1)...(19): siRNA sense strand
gcaccgggcucuugaugga

SEQ ID NO: 937719 - RNA, 19 nt, Homo sapiens
  misc_RNA (1)...(19): siRNA sense strand
caauaucaguuucuacuca

SEQ ID NO: 937720 - RNA, 19 nt, Homo sapiens
  misc_RNA (1)...(19): siRNA sense strand
gaacugaacgggagagaag

SEQ ID NO: 937721 - RNA, 19 nt, Homo sapiens
  misc_RNA (1)...(19): siRNA sense strand
gcgcuaauguuuaccagau

SEQ ID NO: 937722 - RNA, 19 nt, Homo sapiens
  misc_RNA (1)...(19): siRNA sense strand
acaggacgcuuaagaaaca

SEQ ID NO: 937723 - RNA, 19 nt, Homo sapiens
  misc_RNA (1)...(19): siRNA sense strand
ggaagaaccaauccaagug

SEQ ID NO: 937724 - RNA, 19 nt, Homo sapiens
  misc_RNA (1)...(19): siRNA sense strand
cagcgaagacagcacaaua

SEQ ID NO: 937725 - RNA, 19 nt, Homo sapiens
  misc_RNA (1)...(19): siRNA sense strand
acacagccaugcauagaug

SEQ ID NO: 937726 - RNA, 19 nt, Homo sapiens
  misc_RNA (1)...(19): siRNA sense strand
gaagacagcacaauaucag

SEQ ID NO: 937727 - RNA, 19 nt, Homo sapiens
  misc_RNA (1)...(19): siRNA sense strand
gcggaggcgcuaauguuua

SEQ ID NO: 937728 - RNA, 19 nt, Homo sapiens
  misc_RNA (1)...(19): siRNA sense strand
gcugggaaguuaucuagag

SEQ ID NO: 937729 - RNA, 19 nt, Homo sapiens
  misc_RNA (1)...(19): siRNA sense strand
ggagaagaagggaagaaga

SEQ ID NO: 937730 - RNA, 19 nt, Homo sapiens
  misc_RNA (1)...(19): siRNA sense strand
gggcggaggcgcuaauguu

SEQ ID NO: 937731 - RNA, 19 nt, Homo sapiens
  misc_RNA (1)...(19): siRNA sense strand
gggcacaggacgcuuaaga

SEQ ID NO: 937732 - RNA, 19 nt, Homo sapiens
  misc_RNA (1)...(19): siRNA sense strand
gacagcacaauaucaguuu

SEQ ID NO: 937733 - RNA, 19 nt, Homo sapiens
  misc_RNA (1)...(19): siRNA sense strand
gagagaaguggcagcuuug

SEQ ID NO: 937734 - RNA, 19 nt, Homo sapiens
  misc_RNA (1)...(19): siRNA sense strand
ggccguucaugcagacuuu

SEQ ID NO: 937735 - RNA, 19 nt, Homo sapiens
  misc_RNA (1)...(19): siRNA sense strand
ggcgagaggucagcgaaga

SEQ ID NO: 937736 - RNA, 19 nt, Homo sapiens
  misc_RNA (1)...(19): siRNA sense strand
gaccacacagccaugcaua

SEQ ID NO: 937737 - RNA, 19 nt, Homo sapiens
  misc_RNA (1)...(19): siRNA sense strand
agagagaugugaacugaac

SEQ ID NO: 937738 - RNA, 19 nt, Homo sapiens
  misc_RNA (1)...(19): siRNA sense strand
gcucugaggccggaaguga

SEQ ID NO: 937739 - RNA, 19 nt, Homo sapiens
  misc_RNA (1)...(19): siRNA sense strand
ccacacagccaugcauaga

SEQ ID NO: 937740 - RNA, 19 nt, Homo sapiens
  misc_RNA (1)...(19): siRNA sense strand
ccaacaaagcaacaaguga

SEQ ID NO: 937741 - RNA, 19 nt, Homo sapiens
  misc_RNA (1)...(19): siRNA sense strand
ggaagagagaugugaacug

SEQ ID NO: 937742 - RNA, 19 nt, Homo sapiens
  misc_RNA (1)...(19): siRNA sense strand
gcgaagacagcacaauauc

SEQ ID NO: 937743 - RNA, 19 nt, Homo sapiens
  misc_RNA (1)...(19): siRNA sense strand
cagagaacauccgcugugu

SEQ ID NO: 937744 - RNA, 19 nt, Homo sapiens
  misc_RNA (1)...(19): siRNA sense strand
ggcggaggcgcuaauguuu

SEQ ID NO: 937745 - RNA, 19 nt, Homo sapiens
  misc_RNA (1)...(19): siRNA sense strand
gagaagaagggaagaagac

SEQ ID NO: 937746 - RNA, 19 nt, Homo sapiens
  misc_RNA (1)...(19): siRNA sense strand
cgaagacagcacaauauca

SEQ ID NO: 937747 - RNA, 19 nt, Homo sapiens
  misc_RNA (1)...(19): siRNA sense strand
cggaggcgcuaauguuuac

SEQ ID NO: 937748 - RNA, 19 nt, Homo sapiens
  misc_RNA (1)...(19): siRNA sense strand
ggccuguggugucggaaga

SEQ ID NO: 937749 - RNA, 19 nt, Homo sapiens
  misc_RNA (1)...(19): siRNA sense strand
gugcucagaaccacaagaa

SEQ ID NO: 937750 - RNA, 19 nt, Homo sapiens
  misc_RNA (1)...(19): siRNA sense strand
agacagcacaauaucaguu

SEQ ID NO: 937751 - RNA, 19 nt, Homo sapiens
  misc_RNA (1)...(19): siRNA sense strand
gagaaguggcagcuuugga

SEQ ID NO: 937752 - RNA, 19 nt, Homo sapiens
  misc_RNA (1)...(19): siRNA sense strand
cggaagaaccaauccaagu

SEQ ID NO: 937753 - RNA, 19 nt, Homo sapiens
  misc_RNA (1)...(19): siRNA sense strand
ggcacaggacgcuuaagaa

SEQ ID NO: 937754 - RNA, 19 nt, Homo sapiens
  misc_RNA (1)...(19): siRNA sense strand
gaggugcucagaaccacaa

SEQ ID NO: 937755 - RNA, 19 nt, Homo sapiens
  misc_RNA (1)...(19): siRNA sense strand
gcacaauaucaguuucuac

SEQ ID NO: 937756 - RNA, 19 nt, Homo sapiens
  misc_RNA (1)...(19): siRNA sense strand
ggacgcuuaagaaacaguu

SEQ ID NO: 937757 - RNA, 19 nt, Homo sapiens
  misc_RNA (1)...(19): siRNA sense strand
ggccggaagugagccuaga

SEQ ID NO: 937758 - RNA, 19 nt, Homo sapiens
  misc_RNA (1)...(19): siRNA sense strand
ccagcaguccuccaugguu

SEQ ID NO: 937759 - RNA, 19 nt, Homo sapiens
  misc_RNA (1)...(19): siRNA sense strand
gcaccaacaaagcaacaag

SEQ ID NO: 937760 - RNA, 19 nt, Homo sapiens
  misc_RNA (1)...(19): siRNA sense strand
aaugggcacaggacgcuua

SEQ ID NO: 937761 - RNA, 19 nt, Homo sapiens
  misc_RNA (1)...(19): siRNA sense strand
aguggcagcuuuggacaga

SEQ ID NO: 937762 - RNA, 19 nt, Homo sapiens
  misc_RNA (1)...(19): siRNA sense strand
cacaauaucaguuucuacu

SEQ ID NO: 937763 - RNA, 19 nt, Homo sapiens
  misc_RNA (1)...(19): siRNA sense strand
gcauuugucuguuugauau

SEQ ID NO: 937764 - RNA, 19 nt, Homo sapiens
  misc_RNA (1)...(19): siRNA sense strand
gugaggagcugccaaagaa

SEQ ID NO: 937765 - RNA, 19 nt, Homo sapiens
  misc_RNA (1)...(19): siRNA sense strand
ccgaggagcugaacaagaa

SEQ ID NO: 937766 - RNA, 19 nt, Homo sapiens
  misc_RNA (1)...(19): siRNA sense strand
ccaacaaggucguguacaa

SEQ ID NO: 937767 - RNA, 19 nt, Homo sapiens
  misc_RNA (1)...(19): siRNA sense strand
gacgagagcuuuguugaca

SEQ ID NO: 937768 - RNA, 19 nt, Homo sapiens
  misc_RNA (1)...(19): siRNA sense strand
ggaggaugccuauguauuc

SEQ ID NO: 937769 - RNA, 19 nt, Homo sapiens
  misc_RNA (1)...(19): siRNA sense strand
gaagcucaacgacuccauu

SEQ ID NO: 937770 - RNA, 19 nt, Homo sapiens
  misc_RNA (1)...(19): siRNA sense strand
caacgugggacucugcauu

SEQ ID NO: 937771 - RNA, 19 nt, Homo sapiens
  misc_RNA (1)...(19): siRNA sense strand
gguguuucauccauuccua

SEQ ID NO: 937772 - RNA, 19 nt, Homo sapiens
  misc_RNA (1)...(19): siRNA sense strand
cagcagaugccaccacuuc

SEQ ID NO: 937773 - RNA, 19 nt, Homo sapiens
  misc_RNA (1)...(19): siRNA sense strand
ggacucugcauuugucugu

SEQ ID NO: 937774 - RNA, 19 nt, Homo sapiens
  misc_RNA (1)...(19): siRNA sense strand
cacacgaccucuacaugga

SEQ ID NO: 937775 - RNA, 19 nt, Homo sapiens
  misc_RNA (1)...(19): siRNA sense strand
ggagugcacgucucucuag

SEQ ID NO: 937776 - RNA, 19 nt, Homo sapiens
  misc_RNA (1)...(19): siRNA sense strand
gcgcaucacacaccaaagu

SEQ ID NO: 937777 - RNA, 19 nt, Homo sapiens
  misc_RNA (1)...(19): siRNA sense strand
acuggaggaugccuaugua

SEQ ID NO: 937778 - RNA, 19 nt, Homo sapiens
  misc_RNA (1)...(19): siRNA sense strand
acucugcauuugucuguuu

SEQ ID NO: 937779 - RNA, 19 nt, Homo sapiens
  misc_RNA (1)...(19): siRNA sense strand
ccagugaggagcugccaaa

SEQ ID NO: 937780 - RNA, 19 nt, Homo sapiens
  misc_RNA (1)...(19): siRNA sense strand
caaacuggaggaugccuau

SEQ ID NO: 937781 - RNA, 19 nt, Homo sapiens
  misc_RNA (1)...(19): siRNA sense strand
gugggacucugcauuuguc

SEQ ID NO: 937782 - RNA, 19 nt, Homo sapiens
  misc_RNA (1)...(19): siRNA sense strand
gcagcagccagccaaguuc

SEQ ID NO: 937783 - RNA, 19 nt, Homo sapiens
  misc_RNA (1)...(19): siRNA sense strand
gagcacacgaccucuacau

SEQ ID NO: 937784 - RNA, 19 nt, Homo sapiens
  misc_RNA (1)...(19): siRNA sense strand
gcagaugccaccacuucca

SEQ ID NO: 937785 - RNA, 19 nt, Homo sapiens
  misc_RNA (1)...(19): siRNA sense strand
guacgagacggaggaagga

SEQ ID NO: 937786 - RNA, 19 nt, Homo sapiens
  misc_RNA (1)...(19): siRNA sense strand
ggacgagagcuuuguugac

SEQ ID NO: 937787 - RNA, 19 nt, Homo sapiens
  misc_RNA (1)...(19): siRNA sense strand
uggaggaugccuauguauu

SEQ ID NO: 937788 - RNA, 19 nt, Homo sapiens
  misc_RNA (1)...(19): siRNA sense strand
gcgugguguuucauccauu

SEQ ID NO: 937789 - RNA, 19 nt, Homo sapiens
  misc_RNA (1)...(19): siRNA sense strand
caacaaggucguguacaac

SEQ ID NO: 937790 - RNA, 19 nt, Homo sapiens
  misc_RNA (1)...(19): siRNA sense strand
ggugguggacgagagcuuu

SEQ ID NO: 937791 - RNA, 19 nt, Homo sapiens
  misc_RNA (1)...(19): siRNA sense strand
gaggaugccuauguauucc

SEQ ID NO: 937792 - RNA, 19 nt, Homo sapiens
  misc_RNA (1)...(19): siRNA sense strand
cgugguguuucauccauuc

SEQ ID NO: 937793 - RNA, 19 nt, Homo sapiens
  misc_RNA (1)...(19): siRNA sense strand
cuuggcaguuugagaggaa

SEQ ID NO: 937794 - RNA, 19 nt, Homo sapiens
  misc_RNA (1)...(19): siRNA sense strand
gaagagaaguuaagacuag

SEQ ID NO: 937795 - RNA, 19 nt, Homo sapiens
  misc_RNA (1)...(19): siRNA sense strand
gaaagcaguugugauuuaa

SEQ ID NO: 937796 - RNA, 19 nt, Homo sapiens
  misc_RNA (1)...(19): siRNA sense strand
agaaagcaguugugauuua

SEQ ID NO: 937797 - RNA, 19 nt, Homo sapiens
  misc_RNA (1)...(19): siRNA sense strand
ggaagaaauuguugaccua

SEQ ID NO: 937798 - RNA, 19 nt, Homo sapiens
  misc_RNA (1)...(19): siRNA sense strand
gaagaaggaaugaauagaa

SEQ ID NO: 937799 - RNA, 19 nt, Homo sapiens
  misc_RNA (1)...(19): siRNA sense strand
gggcagcacuuaaguauag

SEQ ID NO: 937800 - RNA, 19 nt, Homo sapiens
  misc_RNA (1)...(19): siRNA sense strand
cgaaauggaugauaaugga

SEQ ID NO: 937801 - RNA, 19 nt, Homo sapiens
  misc_RNA (1)...(19): siRNA sense strand
caagaaaggcagagaauug

SEQ ID NO: 937802 - RNA, 19 nt, Homo sapiens
  misc_RNA (1)...(19): siRNA sense strand
caagaagacuggaaguaau

SEQ ID NO: 937803 - RNA, 19 nt, Homo sapiens
  misc_RNA (1)...(19): siRNA sense strand
gaaguuaagacuagaagaa

SEQ ID NO: 937804 - RNA, 19 nt, Homo sapiens
  misc_RNA (1)...(19): siRNA sense strand
gcacuuaaguauagcaaca

SEQ ID NO: 937805 - RNA, 19 nt, Homo sapiens
  misc_RNA (1)...(19): siRNA sense strand
gaaauaugaagucacagua

SEQ ID NO: 937806 - RNA, 19 nt, Homo sapiens
  misc_RNA (1)...(19): siRNA sense strand
ggugagcacuugacaauag

SEQ ID NO: 937807 - RNA, 19 nt, Homo sapiens
  misc_RNA (1)...(19): siRNA sense strand
guaguagacucucaucaga

SEQ ID NO: 937808 - RNA, 19 nt, Homo sapiens
  misc_RNA (1)...(19): siRNA sense strand
gagaaaggcauuaugauuc

SEQ ID NO: 937809 - RNA, 19 nt, Homo sapiens
  misc_RNA (1)...(19): siRNA sense strand
caauagaguuugagaaucu

SEQ ID NO: 937810 - RNA, 19 nt, Homo sapiens
  misc_RNA (1)...(19): siRNA sense strand
gcacuugacaauagaguuu

SEQ ID NO: 937811 - RNA, 19 nt, Homo sapiens
  misc_RNA (1)...(19): siRNA sense strand
cgaguauucuggauuugua

SEQ ID NO: 937812 - RNA, 19 nt, Homo sapiens
  misc_RNA (1)...(19): siRNA sense strand
uaagagaaaggcauuauga

SEQ ID NO: 937813 - RNA, 19 nt, Homo sapiens
  misc_RNA (1)...(19): siRNA sense strand
ugagaaauaugaagucaca

SEQ ID NO: 937814 - RNA, 19 nt, Homo sapiens
  misc_RNA (1)...(19): siRNA sense strand
gaugaagaaggaaugaaua

SEQ ID NO: 937815 - RNA, 19 nt, Homo sapiens
  misc_RNA (1)...(19): siRNA sense strand
agaguuagccuuacaagaa

SEQ ID NO: 937816 - RNA, 19 nt, Homo sapiens
  misc_RNA (1)...(19): siRNA sense strand
uauuagaacugucugauuc

SEQ ID NO: 937817 - RNA, 19 nt, Homo sapiens
  misc_RNA (1)...(19): siRNA sense strand
gugccgaaauggaugauaa

SEQ ID NO: 937818 - RNA, 19 nt, Homo sapiens
  misc_RNA (1)...(19): siRNA sense strand
acagaaagcaguugugauu

SEQ ID NO: 937819 - RNA, 19 nt, Homo sapiens
  misc_RNA (1)...(19): siRNA sense strand
gcacauccuuagaucuaga

SEQ ID NO: 937820 - RNA, 19 nt, Homo sapiens
  misc_RNA (1)...(19): siRNA sense strand
gacaauagaguuugagaau

SEQ ID NO: 937821 - RNA, 19 nt, Homo sapiens
  misc_RNA (1)...(19): siRNA sense strand
gaagucacaguaugaaguu

SEQ ID NO: 937822 - RNA, 19 nt, Homo sapiens
  misc_RNA (1)...(19): siRNA sense strand
gaagaaauuguugaccuaa

SEQ ID NO: 937823 - RNA, 19 nt, Homo sapiens
  misc_RNA (1)...(19): siRNA sense strand
agaaauuguugaccuaaga

SEQ ID NO: 937824 - RNA, 19 nt, Homo sapiens
  misc_RNA (1)...(19): siRNA sense strand
cuucgaaucuuguuugaga

SEQ ID NO: 937825 - RNA, 19 nt, Homo sapiens
  misc_RNA (1)...(19): siRNA sense strand
gugggaagaugaagaagga

SEQ ID NO: 937826 - RNA, 19 nt, Homo sapiens
  misc_RNA (1)...(19): siRNA sense strand
gcagagaauugugcagcaa

SEQ ID NO: 937827 - RNA, 19 nt, Homo sapiens
  misc_RNA (1)...(19): siRNA sense strand
cagcacauccuuagaucua

SEQ ID NO: 937828 - RNA, 19 nt, Homo sapiens
  misc_RNA (1)...(19): siRNA sense strand
gaggugagcacuugacaau

SEQ ID NO: 937829 - RNA, 19 nt, Homo sapiens
  misc_RNA (1)...(19): siRNA sense strand
ugacacagaucaacagacu

SEQ ID NO: 937830 - RNA, 19 nt, Homo sapiens
  misc_RNA (1)...(19): siRNA sense strand
gcaagaaaggcagagaauu

SEQ ID NO: 937831 - RNA, 19 nt, Homo sapiens
  misc_RNA (1)...(19): siRNA sense strand
cauaaggcauucugacaca

SEQ ID NO: 937832 - RNA, 19 nt, Homo sapiens
  misc_RNA (1)...(19): siRNA sense strand
acaagaagacuggaaguaa

SEQ ID NO: 937833 - RNA, 19 nt, Homo sapiens
  misc_RNA (1)...(19): siRNA sense strand
gaauagaaugcuuccaaug

SEQ ID NO: 937834 - RNA, 19 nt, Homo sapiens
  misc_RNA (1)...(19): siRNA sense strand
agagaaaggcauuaugauu

SEQ ID NO: 937835 - RNA, 19 nt, Homo sapiens
  misc_RNA (1)...(19): siRNA sense strand
ugaauagaaugcuuccaau

SEQ ID NO: 937836 - RNA, 19 nt, Homo sapiens
  misc_RNA (1)...(19): siRNA sense strand
gaagaugaagaaggaauga

SEQ ID NO: 937837 - RNA, 19 nt, Homo sapiens
  misc_RNA (1)...(19): siRNA sense strand
gaguuagccuuacaagaag

SEQ ID NO: 937838 - RNA, 19 nt, Homo sapiens
  misc_RNA (1)...(19): siRNA sense strand
aauagaaugcuuccaauga

SEQ ID NO: 937839 - RNA, 19 nt, Homo sapiens
  misc_RNA (1)...(19): siRNA sense strand
aauaugaagucacaguaug

SEQ ID NO: 937840 - RNA, 19 nt, Homo sapiens
  misc_RNA (1)...(19): siRNA sense strand
uagaaugcuuccaaugaga

SEQ ID NO: 937841 - RNA, 19 nt, Homo sapiens
  misc_RNA (1)...(19): siRNA sense strand
uaucauccuuccaacaaug

SEQ ID NO: 937842 - RNA, 19 nt, Homo sapiens
  misc_RNA (1)...(19): siRNA sense strand
gcggaggauccaaguauuu

SEQ ID NO: 937843 - RNA, 19 nt, Homo sapiens
  misc_RNA (1)...(19): siRNA sense strand
gacagcacauccuuagauc

SEQ ID NO: 937844 - RNA, 19 nt, Homo sapiens
  misc_RNA (1)...(19): siRNA sense strand
aagcaguugugauuuaaug

SEQ ID NO: 937845 - RNA, 19 nt, Homo sapiens
  misc_RNA (1)...(19): siRNA sense strand
caacaauggagaauaucaa

SEQ ID NO: 937846 - RNA, 19 nt, Homo sapiens
  misc_RNA (1)...(19): siRNA sense strand
cagaucaacagacucgaua

SEQ ID NO: 937847 - RNA, 19 nt, Homo sapiens
  misc_RNA (1)...(19): siRNA sense strand
gaaauggaugauaauggaa

SEQ ID NO: 937848 - RNA, 19 nt, Homo sapiens
  misc_RNA (1)...(19): siRNA sense strand
ggaagaugaagaaggaaug

SEQ ID NO: 937849 - RNA, 19 nt, Homo sapiens
  misc_RNA (1)...(19): siRNA sense strand
cgacagcacauccuuagau

SEQ ID NO: 937850 - RNA, 19 nt, Homo sapiens
  misc_RNA (1)...(19): siRNA sense strand
ccaaauacagaaagcaguu

SEQ ID NO: 937851 - RNA, 19 nt, Homo sapiens
  misc_RNA (1)...(19): siRNA sense strand
acuagaagaagaagcuuua

SEQ ID NO: 937852 - RNA, 19 nt, Homo sapiens
  misc_RNA (1)...(19): siRNA sense strand
gagagaacguuccaaaaca

SEQ ID NO: 937853 - RNA, 19 nt, Homo sapiens
  misc_RNA (1)...(19): siRNA sense strand
uggagaauaucaaaguuca

SEQ ID NO: 937854 - RNA, 19 nt, Homo sapiens
  misc_RNA (1)...(19): siRNA sense strand
caauggagaauaucaaagu

SEQ ID NO: 937855 - RNA, 19 nt, Homo sapiens
  misc_RNA (1)...(19): siRNA sense strand
gagcaagaaaggcagagaa

SEQ ID NO: 937856 - RNA, 19 nt, Homo sapiens
  misc_RNA (1)...(19): siRNA sense strand
gucauaggccucuuacuga

SEQ ID NO: 937857 - RNA, 19 nt, Homo sapiens
  misc_RNA (1)...(19): siRNA sense strand
guucaggaccagaagauga

SEQ ID NO: 937858 - RNA, 19 nt, Homo sapiens
  misc_RNA (1)...(19): siRNA sense strand
ggcggaggauccaaguauu

SEQ ID NO: 937859 - RNA, 19 nt, Homo sapiens
  misc_RNA (1)...(19): siRNA sense strand
gaaaugacgacagcacauc

SEQ ID NO: 937860 - RNA, 19 nt, Homo sapiens
  misc_RNA (1)...(19): siRNA sense strand
guuaagacuagaagaagaa

SEQ ID NO: 937861 - RNA, 19 nt, Homo sapiens
  misc_RNA (1)...(19): siRNA sense strand
gaaggaaugaauagaaugc

SEQ ID NO: 937862 - RNA, 19 nt, Homo sapiens
  misc_RNA (1)...(19): siRNA sense strand
agaagaagaagcuuuauac

SEQ ID NO: 937863 - RNA, 19 nt, Homo sapiens
  misc_RNA (1)...(19): siRNA sense strand
ugacgacagcacauccuua

SEQ ID NO: 937864 - RNA, 19 nt, Homo sapiens
  misc_RNA (1)...(19): siRNA sense strand
guauuagaacugucugauu

SEQ ID NO: 937865 - RNA, 19 nt, Homo sapiens
  misc_RNA (1)...(19): siRNA sense strand
gugcagcaauaucauccuu

SEQ ID NO: 937866 - RNA, 19 nt, Homo sapiens
  misc_RNA (1)...(19): siRNA sense strand
caaaacagaggaagacauu

SEQ ID NO: 937867 - RNA, 19 nt, Homo sapiens
  misc_RNA (1)...(19): siRNA sense strand
gaccuaagagaaaggcauu

SEQ ID NO: 937868 - RNA, 19 nt, Homo sapiens
  misc_RNA (1)...(19): siRNA sense strand
ggaaaugacgacagcacau

SEQ ID NO: 937869 - RNA, 19 nt, Homo sapiens
  misc_RNA (1)...(19): siRNA sense strand
gugagcacuugacaauaga

SEQ ID NO: 937870 - RNA, 19 nt, Homo sapiens
  misc_RNA (1)...(19): siRNA sense strand
gacuucgaaucuuguuuga

SEQ ID NO: 937871 - RNA, 19 nt, Homo sapiens
  misc_RNA (1)...(19): siRNA sense strand
ugacuucgaaucuuguuug

SEQ ID NO: 937872 - RNA, 19 nt, Homo sapiens
  misc_RNA (1)...(19): siRNA sense strand
aauaucauccuuccaacaa

SEQ ID NO: 937873 - RNA, 19 nt, Homo sapiens
  misc_RNA (1)...(19): siRNA sense strand
caaagcagcgaaagcucuu

SEQ ID NO: 937874 - RNA, 19 nt, Homo sapiens
  misc_RNA (1)...(19): siRNA sense strand
aaacagaggaagacauucu

SEQ ID NO: 937875 - RNA, 19 nt, Homo sapiens
  misc_RNA (1)...(19): siRNA sense strand
gaagaagaagcuuuauacg

SEQ ID NO: 937876 - RNA, 19 nt, Homo sapiens
  misc_RNA (1)...(19): siRNA sense strand
ggaaguaauccuacaucag

SEQ ID NO: 937877 - RNA, 19 nt, Homo sapiens
  misc_RNA (1)...(19): siRNA sense strand
uggaaguaauccuacauca

SEQ ID NO: 937878 - RNA, 19 nt, Homo sapiens
  misc_RNA (1)...(19): siRNA sense strand
cagaaagcaguugugauuu

SEQ ID NO: 937879 - RNA, 19 nt, Homo sapiens
  misc_RNA (1)...(19): siRNA sense strand
ucaaaguucaggaccagaa

SEQ ID NO: 937880 - RNA, 19 nt, Homo sapiens
  misc_RNA (1)...(19): siRNA sense strand
agaaaggcauuaugauucc

SEQ ID NO: 937881 - RNA, 19 nt, Homo sapiens
  misc_RNA (1)...(19): siRNA sense strand
aaugagagaacguuccaaa

SEQ ID NO: 937882 - RNA, 19 nt, Homo sapiens
  misc_RNA (1)...(19): siRNA sense strand
acaauagaguuugagaauc

SEQ ID NO: 937883 - RNA, 19 nt, Homo sapiens
  misc_RNA (1)...(19): siRNA sense strand
ccaacaauggagaauauca

SEQ ID NO: 937884 - RNA, 19 nt, Homo sapiens
  misc_RNA (1)...(19): siRNA sense strand
gacgacagcacauccuuag

SEQ ID NO: 937885 - RNA, 19 nt, Homo sapiens
  misc_RNA (1)...(19): siRNA sense strand
gaaaggcauuaugauucca

SEQ ID NO: 937886 - RNA, 19 nt, Homo sapiens
  misc_RNA (1)...(19): siRNA sense strand
cuaaaucaacuaguggaaa

SEQ ID NO: 937887 - RNA, 19 nt, Homo sapiens
  misc_RNA (1)...(19): siRNA sense strand
gaccaaaacuaaaucaacu

SEQ ID NO: 937888 - RNA, 19 nt, Homo sapiens
  misc_RNA (1)...(19): siRNA sense strand
gaaguaguagacucucauc

SEQ ID NO: 937889 - RNA, 19 nt, Homo sapiens
  misc_RNA (1)...(19): siRNA sense strand
agaagagaaguuaagacua

SEQ ID NO: 937890 - RNA, 19 nt, Homo sapiens
  misc_RNA (1)...(19): siRNA sense strand
uuccgaguauucuggauuu

SEQ ID NO: 937891 - RNA, 19 nt, Homo sapiens
  misc_RNA (1)...(19): siRNA sense strand
auagaaugcuuccaaugag

SEQ ID NO: 937892 - RNA, 19 nt, Homo sapiens
  misc_RNA (1)...(19): siRNA sense strand
gaaauuguugaccuaagag

SEQ ID NO: 937893 - RNA, 19 nt, Homo sapiens
  misc_RNA (1)...(19): siRNA sense strand
gauucuggcauaaggcauu

SEQ ID NO: 937894 - RNA, 19 nt, Homo sapiens
  misc_RNA (1)...(19): siRNA sense strand
gaagaugucauuagucaag

SEQ ID NO: 937895 - RNA, 19 nt, Homo sapiens
  misc_RNA (1)...(19): siRNA sense strand
gaguuaggguuguugaaga

SEQ ID NO: 937896 - RNA, 19 nt, Homo sapiens
  misc_RNA (1)...(19): siRNA sense strand
ugaauggugucucccaaga

SEQ ID NO: 937897 - RNA, 19 nt, Homo sapiens
  misc_RNA (1)...(19): siRNA sense strand
uugaagaugucauuaguca

SEQ ID NO: 937898 - RNA, 19 nt, Homo sapiens
  misc_RNA (1)...(19): siRNA sense strand
gaauggugucucccaagaa

SEQ ID NO: 937899 - RNA, 19 nt, Homo sapiens
  misc_RNA (1)...(19): siRNA sense strand
gugacauuguuuggaguua

SEQ ID NO: 937900 - RNA, 19 nt, Homo sapiens
  misc_RNA (1)...(19): siRNA sense strand
ggaguuaggguuguugaag

SEQ ID NO: 937901 - RNA, 19 nt, Homo sapiens
  misc_RNA (1)...(19): siRNA sense strand
caacgugacauuguuugga

SEQ ID NO: 937902 - RNA, 19 nt, Homo sapiens
  misc_RNA (1)...(19): siRNA sense strand
uguugaagaugucauuagu

SEQ ID NO: 937903 - RNA, 19 nt, Homo sapiens
  misc_RNA (1)...(19): siRNA sense strand
gacauuguuuggaguuagg

SEQ ID NO: 937904 - RNA, 19 nt, Homo sapiens
  misc_RNA (1)...(19): siRNA sense strand
ugacauuguuuggaguuag

SEQ ID NO: 937905 - RNA, 19 nt, Homo sapiens
  misc_RNA (1)...(19): siRNA sense strand
aauggugucucccaagaag

SEQ ID NO: 937906 - RNA, 19 nt, Homo sapiens
  misc_RNA (1)...(19): siRNA sense strand
gaugucauuagucaagaug

SEQ ID NO: 937907 - RNA, 19 nt, Homo sapiens
  misc_RNA (1)...(19): siRNA sense strand
uuaggguuguugaagaugu

SEQ ID NO: 937908 - RNA, 19 nt, Homo sapiens
  misc_RNA (1)...(19): siRNA sense strand
agaaagaccuuaugaaugu

SEQ ID NO: 937909 - RNA, 19 nt, Homo sapiens
  misc_RNA (1)...(19): siRNA sense strand
ggauggaccuuauaaaugu

SEQ ID NO: 937910 - RNA, 19 nt, Homo sapiens
  misc_RNA (1)...(19): siRNA sense strand
gaaaggacacaaacacaua

SEQ ID NO: 937911 - RNA, 19 nt, Homo sapiens
  misc_RNA (1)...(19): siRNA sense strand
ggaaagaccagaacauuga

SEQ ID NO: 937912 - RNA, 19 nt, Homo sapiens
  misc_RNA (1)...(19): siRNA sense strand
gaagagaaagucaaugaaa

SEQ ID NO: 937913 - RNA, 19 nt, Homo sapiens
  misc_RNA (1)...(19): siRNA sense strand
ugaaagaacucacauugga

SEQ ID NO: 937914 - RNA, 19 nt, Homo sapiens
  misc_RNA (1)...(19): siRNA sense strand
gagagaaaccguauaaaug

SEQ ID NO: 937915 - RNA, 19 nt, Homo sapiens
  misc_RNA (1)...(19): siRNA sense strand
gagaaaccguaucaaugua

SEQ ID NO: 937916 - RNA, 19 nt, Homo sapiens
  misc_RNA (1)...(19): siRNA sense strand
ggagaaagaccuuaugaau

SEQ ID NO: 937917 - RNA, 19 nt, Homo sapiens
  misc_RNA (1)...(19): siRNA sense strand
agagaaggcuuaucaaugu

SEQ ID NO: 937918 - RNA, 19 nt, Homo sapiens
  misc_RNA (1)...(19): siRNA sense strand
gagaaacccuaugaaugua

SEQ ID NO: 937919 - RNA, 19 nt, Homo sapiens
  misc_RNA (1)...(19): siRNA sense strand
gguaaagccuucacucguu

SEQ ID NO: 937920 - RNA, 19 nt, Homo sapiens
  misc_RNA (1)...(19): siRNA sense strand
gguaacucaucuucuaaua

SEQ ID NO: 937921 - RNA, 19 nt, Homo sapiens
  misc_RNA (1)...(19): siRNA sense strand
gggaaagccuucagauaug

SEQ ID NO: 937922 - RNA, 19 nt, Homo sapiens
  misc_RNA (1)...(19): siRNA sense strand
ggagagaaaccguauaaau

SEQ ID NO: 937923 - RNA, 19 nt, Homo sapiens
  misc_RNA (1)...(19): siRNA sense strand
gaaaggacccacucuagga

SEQ ID NO: 937924 - RNA, 19 nt, Homo sapiens
  misc_RNA (1)...(19): siRNA sense strand
gaaaccguaugaauguaaa

SEQ ID NO: 937925 - RNA, 19 nt, Homo sapiens
  misc_RNA (1)...(19): siRNA sense strand
cuagguaacucaucuucua

SEQ ID NO: 937926 - RNA, 19 nt, Homo sapiens
  misc_RNA (1)...(19): siRNA sense strand
gagaaagaccuuaugaaug

SEQ ID NO: 937927 - RNA, 19 nt, Homo sapiens
  misc_RNA (1)...(19): siRNA sense strand
ggaaagaaacccuaugcuu

SEQ ID NO: 937928 - RNA, 19 nt, Homo sapiens
  misc_RNA (1)...(19): siRNA sense strand
gagagaaacccuaugaaug

SEQ ID NO: 937929 - RNA, 19 nt, Homo sapiens
  misc_RNA (1)...(19): siRNA sense strand
gagagaaaccguaucaaug

SEQ ID NO: 937930 - RNA, 19 nt, Homo sapiens
  misc_RNA (1)...(19): siRNA sense strand
gagaaggcuuaucaaugua

SEQ ID NO: 937931 - RNA, 19 nt, Homo sapiens
  misc_RNA (1)...(19): siRNA sense strand
gagagaaaccguaugaaug

SEQ ID NO: 937932 - RNA, 19 nt, Homo sapiens
  misc_RNA (1)...(19): siRNA sense strand
gaaacccuaugcuuguaaa

SEQ ID NO: 937933 - RNA, 19 nt, Homo sapiens
  misc_RNA (1)...(19): siRNA sense strand
gaaagaccuuaugaaugua

SEQ ID NO: 937934 - RNA, 19 nt, Homo sapiens
  misc_RNA (1)...(19): siRNA sense strand
ggaucacacuggaaagaaa

SEQ ID NO: 937935 - RNA, 19 nt, Homo sapiens
  misc_RNA (1)...(19): siRNA sense strand
ucagauauguccagaacuu

SEQ ID NO: 937936 - RNA, 19 nt, Homo sapiens
  misc_RNA (1)...(19): siRNA sense strand
gagagaaggcuuaucaaug

SEQ ID NO: 937937 - RNA, 19 nt, Homo sapiens
  misc_RNA (1)...(19): siRNA sense strand
gagaaacccuaugagugua

SEQ ID NO: 937938 - RNA, 19 nt, Homo sapiens
  misc_RNA (1)...(19): siRNA sense strand
ggacacaaacacauaagaa

SEQ ID NO: 937939 - RNA, 19 nt, Homo sapiens
  misc_RNA (1)...(19): siRNA sense strand
guccagaacuuucgauuuc

SEQ ID NO: 937940 - RNA, 19 nt, Homo sapiens
  misc_RNA (1)...(19): siRNA sense strand
gaaccugaccucuauagga

SEQ ID NO: 937941 - RNA, 19 nt, Homo sapiens
  misc_RNA (1)...(19): siRNA sense strand
ggaaagccuucagauaugu

SEQ ID NO: 937942 - RNA, 19 nt, Homo sapiens
  misc_RNA (1)...(19): siRNA sense strand
uauccucucuuacaaguuu

SEQ ID NO: 937943 - RNA, 19 nt, Homo sapiens
  misc_RNA (1)...(19): siRNA sense strand
gaauguaaacaauguggua

SEQ ID NO: 937944 - RNA, 19 nt, Homo sapiens
  misc_RNA (1)...(19): siRNA sense strand
ggagagaaaccguaugaau

SEQ ID NO: 937945 - RNA, 19 nt, Homo sapiens
  misc_RNA (1)...(19): siRNA sense strand
ggagagaaacccuaugaau

SEQ ID NO: 937946 - RNA, 19 nt, Homo sapiens
  misc_RNA (1)...(19): siRNA sense strand
ggagagaaaccguaucaau

SEQ ID NO: 937947 - RNA, 19 nt, Homo sapiens
  misc_RNA (1)...(19): siRNA sense strand
gagaaaccguaugaaugua

SEQ ID NO: 937948 - RNA, 19 nt, Homo sapiens
  misc_RNA (1)...(19): siRNA sense strand
gggcuuugcuggauauuuc

SEQ ID NO: 937949 - RNA, 19 nt, Homo sapiens
  misc_RNA (1)...(19): siRNA sense strand
caacuucgaauccaucgua

SEQ ID NO: 937950 - RNA, 19 nt, Homo sapiens
  misc_RNA (1)...(19): siRNA sense strand
gcauuauccucucuuacaa

SEQ ID NO: 937951 - RNA, 19 nt, Homo sapiens
  misc_RNA (1)...(19): siRNA sense strand
gagaaaagccuuaugaaug

SEQ ID NO: 937952 - RNA, 19 nt, Homo sapiens
  misc_RNA (1)...(19): siRNA sense strand
ggauguggcugugaacuuc

SEQ ID NO: 937953 - RNA, 19 nt, Homo sapiens
  misc_RNA (1)...(19): siRNA sense strand
gaacauugaauaugaguac

SEQ ID NO: 937954 - RNA, 19 nt, Homo sapiens
  misc_RNA (1)...(19): siRNA sense strand
gggaaagccuucagaucug

SEQ ID NO: 937955 - RNA, 19 nt, Homo sapiens
  misc_RNA (1)...(19): siRNA sense strand
ggaagagucaacaaccuaa

SEQ ID NO: 937956 - RNA, 19 nt, Homo sapiens
  misc_RNA (1)...(19): siRNA sense strand
cagaagagaaagucaauga

SEQ ID NO: 937957 - RNA, 19 nt, Homo sapiens
  misc_RNA (1)...(19): siRNA sense strand
ggagaaacuucaggagugu

SEQ ID NO: 937958 - RNA, 19 nt, Homo sapiens
  misc_RNA (1)...(19): siRNA sense strand
gggauggaccuuauaaaug

SEQ ID NO: 937959 - RNA, 19 nt, Homo sapiens
  misc_RNA (1)...(19): siRNA sense strand
agagaaacccuaugaaugu

SEQ ID NO: 937960 - RNA, 19 nt, Homo sapiens
  misc_RNA (1)...(19): siRNA sense strand
gauucacacuggagagaaa

SEQ ID NO: 937961 - RNA, 19 nt, Homo sapiens
  misc_RNA (1)...(19): siRNA sense strand
aaagcauuauccucucuua

SEQ ID NO: 937962 - RNA, 19 nt, Homo sapiens
  misc_RNA (1)...(19): siRNA sense strand
gauggaccuuauaaaugua

SEQ ID NO: 937963 - RNA, 19 nt, Homo sapiens
  misc_RNA (1)...(19): siRNA sense strand
aaucuucaauugcauggua

SEQ ID NO: 937964 - RNA, 19 nt, Homo sapiens
  misc_RNA (1)...(19): siRNA sense strand
ggagugggcuuugcuggau

SEQ ID NO: 937965 - RNA, 19 nt, Homo sapiens
  misc_RNA (1)...(19): siRNA sense strand
ggagagaaggcuuaucaau

SEQ ID NO: 937966 - RNA, 19 nt, Homo sapiens
  misc_RNA (1)...(19): siRNA sense strand
uaaagaagacagucauugu

SEQ ID NO: 937967 - RNA, 19 nt, Homo sapiens
  misc_RNA (1)...(19): siRNA sense strand
ggagagaaacccuaugagu

SEQ ID NO: 937968 - RNA, 19 nt, Homo sapiens
  misc_RNA (1)...(19): siRNA sense strand
gaaguaaaaucaugugaca

SEQ ID NO: 937969 - RNA, 19 nt, Homo sapiens
  misc_RNA (1)...(19): siRNA sense strand
ggaaagcauuauccucucu

SEQ ID NO: 937970 - RNA, 19 nt, Homo sapiens
  misc_RNA (1)...(19): siRNA sense strand
ggaccaaagccauggaaga

SEQ ID NO: 937971 - RNA, 19 nt, Homo sapiens
  misc_RNA (1)...(19): siRNA sense strand
agaaugcacucuggagaaa

SEQ ID NO: 937972 - RNA, 19 nt, Homo sapiens
  misc_RNA (1)...(19): siRNA sense strand
gagaaaccguauaaaugca

SEQ ID NO: 937973 - RNA, 19 nt, Homo sapiens
  misc_RNA (1)...(19): siRNA sense strand
agaaugcacucuggagaaa

SEQ ID NO: 937974 - RNA, 19 nt, Homo sapiens
  misc_RNA (1)...(19): siRNA sense strand
caugaaagaacucacauug

SEQ ID NO: 937975 - RNA, 19 nt, Homo sapiens
  misc_RNA (1)...(19): siRNA sense strand
aaagaaacccuaugcuugu

SEQ ID NO: 937976 - RNA, 19 nt, Homo sapiens
  misc_RNA (1)...(19): siRNA sense strand
gaaagaccagaacauugaa

SEQ ID NO: 937977 - RNA, 19 nt, Homo sapiens
  misc_RNA (1)...(19): siRNA sense strand
gaacuuucgauuucaugaa

SEQ ID NO: 937978 - RNA, 19 nt, Homo sapiens
  misc_RNA (1)...(19): siRNA sense strand
ugggaaagccuucagauau

SEQ ID NO: 937979 - RNA, 19 nt, Homo sapiens
  misc_RNA (1)...(19): siRNA sense strand
gaaacccuaugaauguaag

SEQ ID NO: 937980 - RNA, 19 nt, Homo sapiens
  misc_RNA (1)...(19): siRNA sense strand
gaaaccguaucaauguaag

SEQ ID NO: 937981 - RNA, 19 nt, Homo sapiens
  misc_RNA (1)...(19): siRNA sense strand
gaacucacauuggagaaaa

SEQ ID NO: 937982 - RNA, 19 nt, Homo sapiens
  misc_RNA (1)...(19): siRNA sense strand
aaccugaccucuauaggaa

SEQ ID NO: 937983 - RNA, 19 nt, Homo sapiens
  misc_RNA (1)...(19): siRNA sense strand
accagaacauugaauauga

SEQ ID NO: 937984 - RNA, 19 nt, Homo sapiens
  misc_RNA (1)...(19): siRNA sense strand
gaacucacacuggagagaa

SEQ ID NO: 937985 - RNA, 19 nt, Homo sapiens
  misc_RNA (1)...(19): siRNA sense strand
ucuggaaccugaccucuau

SEQ ID NO: 937986 - RNA, 19 nt, Homo sapiens
  misc_RNA (1)...(19): siRNA sense strand
gcagugugggaaagcauua

SEQ ID NO: 937987 - RNA, 19 nt, Homo sapiens
  misc_RNA (1)...(19): siRNA sense strand
ggagucacaugggagagaa

SEQ ID NO: 937988 - RNA, 19 nt, Homo sapiens
  misc_RNA (1)...(19): siRNA sense strand
gcaugugaaugucaggaau

SEQ ID NO: 937989 - RNA, 19 nt, Homo sapiens
  misc_RNA (1)...(19): siRNA sense strand
uuucagaucugccucacaa

SEQ ID NO: 937990 - RNA, 19 nt, Homo sapiens
  misc_RNA (1)...(19): siRNA sense strand
agagaaaccguaucaaugu

SEQ ID NO: 937991 - RNA, 19 nt, Homo sapiens
  misc_RNA (1)...(19): siRNA sense strand
guggagagaaaccguauaa

SEQ ID NO: 937992 - RNA, 19 nt, Homo sapiens
  misc_RNA (1)...(19): siRNA sense strand
agagaaaccguaugaaugu

SEQ ID NO: 937993 - RNA, 19 nt, Homo sapiens
  misc_RNA (1)...(19): siRNA sense strand
gaagagucaacaaccuaaa

SEQ ID NO: 937994 - RNA, 19 nt, Homo sapiens
  misc_RNA (1)...(19): siRNA sense strand
agagaaacccuaugagugu

SEQ ID NO: 937995 - RNA, 19 nt, Homo sapiens
  misc_RNA (1)...(19): siRNA sense strand
ccaagucauuucaaagaca

SEQ ID NO: 937996 - RNA, 19 nt, Homo sapiens
  misc_RNA (1)...(19): siRNA sense strand
uuaaggauguggcugugaa

SEQ ID NO: 937997 - RNA, 19 nt, Homo sapiens
  misc_RNA (1)...(19): siRNA sense strand
ucaggaauauggaccaaag

SEQ ID NO: 937998 - RNA, 19 nt, Homo sapiens
  misc_RNA (1)...(19): siRNA sense strand
agaaaagccuuaugaaugu

SEQ ID NO: 937999 - RNA, 19 nt, Homo sapiens
  misc_RNA (1)...(19): siRNA sense strand
aagaaacccuaugcuugua

SEQ ID NO: 938000 - RNA, 19 nt, Homo sapiens
  misc_RNA (1)...(19): siRNA sense strand
agacagucauuguggagaa

SEQ ID NO: 938001 - RNA, 19 nt, Homo sapiens
  misc_RNA (1)...(19): siRNA sense strand
gaccagaacauugaauaug

SEQ ID NO: 938002 - RNA, 19 nt, Homo sapiens
  misc_RNA (1)...(19): siRNA sense strand
uccauugucucaguuuaua

SEQ ID NO: 938003 - RNA, 19 nt, Homo sapiens
  misc_RNA (1)...(19): siRNA sense strand
ucaggagugucacagaaga

SEQ ID NO: 938004 - RNA, 19 nt, Homo sapiens
  misc_RNA (1)...(19): siRNA sense strand
gugggaaagccuucagaua

SEQ ID NO: 938005 - RNA, 19 nt, Homo sapiens
  misc_RNA (1)...(19): siRNA sense strand
gagugggcuuugcuggaua

SEQ ID NO: 938006 - RNA, 19 nt, Homo sapiens
  misc_RNA (1)...(19): siRNA sense strand
gaaagggaucacacuggaa

SEQ ID NO: 938007 - RNA, 19 nt, Homo sapiens
  misc_RNA (1)...(19): siRNA sense strand
acacaaacacauaagaaug

SEQ ID NO: 938008 - RNA, 19 nt, Homo sapiens
  misc_RNA (1)...(19): siRNA sense strand
gauuauacuugucgaguuu

SEQ ID NO: 938009 - RNA, 19 nt, Homo sapiens
  misc_RNA (1)...(19): siRNA sense strand
gcacaaauuccaccaacua

SEQ ID NO: 938010 - RNA, 19 nt, Homo sapiens
  misc_RNA (1)...(19): siRNA sense strand
gaugacaccuguauucugu

SEQ ID NO: 938011 - RNA, 19 nt, Homo sapiens
  misc_RNA (1)...(19): siRNA sense strand
ggugauagauuauacuugu

SEQ ID NO: 938012 - RNA, 19 nt, Homo sapiens
  misc_RNA (1)...(19): siRNA sense strand
gcccagacauuguauaaga

SEQ ID NO: 938013 - RNA, 19 nt, Homo sapiens
  misc_RNA (1)...(19): siRNA sense strand
gaagucaacuggcuuucug

SEQ ID NO: 938014 - RNA, 19 nt, Homo sapiens
  misc_RNA (1)...(19): siRNA sense strand
gggcuuaaauucacuggaa

SEQ ID NO: 938015 - RNA, 19 nt, Homo sapiens
  misc_RNA (1)...(19): siRNA sense strand
gggcccagcugucauucua

SEQ ID NO: 938016 - RNA, 19 nt, Homo sapiens
  misc_RNA (1)...(19): siRNA sense strand
gccaguacuucuaccauuu

SEQ ID NO: 938017 - RNA, 19 nt, Homo sapiens
  misc_RNA (1)...(19): siRNA sense strand
gggaaauacuagugaaugu

SEQ ID NO: 938018 - RNA, 19 nt, Homo sapiens
  misc_RNA (1)...(19): siRNA sense strand
ccugauaccucugcuauug

SEQ ID NO: 938019 - RNA, 19 nt, Homo sapiens
  misc_RNA (1)...(19): siRNA sense strand
gagcccagacauuguauaa

SEQ ID NO: 938020 - RNA, 19 nt, Homo sapiens
  misc_RNA (1)...(19): siRNA sense strand
caucuccacuggugauaga

SEQ ID NO: 938021 - RNA, 19 nt, Homo sapiens
  misc_RNA (1)...(19): siRNA sense strand
caaauuccaccaacuaaag

SEQ ID NO: 938022 - RNA, 19 nt, Homo sapiens
  misc_RNA (1)...(19): siRNA sense strand
ggaaauacuagugaauguu

SEQ ID NO: 938023 - RNA, 19 nt, Homo sapiens
  misc_RNA (1)...(19): siRNA sense strand
auaagaaguuugugaaguc

SEQ ID NO: 938024 - RNA, 19 nt, Homo sapiens
  misc_RNA (1)...(19): siRNA sense strand
guacucagccuccuuacca

SEQ ID NO: 938025 - RNA, 19 nt, Homo sapiens
  misc_RNA (1)...(19): siRNA sense strand
gcagauacccagacaccau

SEQ ID NO: 938026 - RNA, 19 nt, Homo sapiens
  misc_RNA (1)...(19): siRNA sense strand
uaagaaguuugugaaguca

SEQ ID NO: 938027 - RNA, 19 nt, Homo sapiens
  misc_RNA (1)...(19): siRNA sense strand
ggcaacaucucagggucua

SEQ ID NO: 938028 - RNA, 19 nt, Homo sapiens
  misc_RNA (1)...(19): siRNA sense strand
gccaacacaucugucugua

SEQ ID NO: 938029 - RNA, 19 nt, Homo sapiens
  misc_RNA (1)...(19): siRNA sense strand
gcacaucuccacuggugau

SEQ ID NO: 938030 - RNA, 19 nt, Homo sapiens
  misc_RNA (1)...(19): siRNA sense strand
gaacagugggcagugauuc

SEQ ID NO: 938031 - RNA, 19 nt, Homo sapiens
  misc_RNA (1)...(19): siRNA sense strand
gcccagcugucauucuaau

SEQ ID NO: 938032 - RNA, 19 nt, Homo sapiens
  misc_RNA (1)...(19): siRNA sense strand
cuccacuggugauagauua

SEQ ID NO: 938033 - RNA, 19 nt, Homo sapiens
  misc_RNA (1)...(19): siRNA sense strand
ggacaccaagcuucacaug

SEQ ID NO: 938034 - RNA, 19 nt, Homo sapiens
  misc_RNA (1)...(19): siRNA sense strand
agucagagccacaagugua

SEQ ID NO: 938035 - RNA, 19 nt, Homo sapiens
  misc_RNA (1)...(19): siRNA sense strand
uuauuaugcucacagaaga

SEQ ID NO: 938036 - RNA, 19 nt, Homo sapiens
  misc_RNA (1)...(19): siRNA sense strand
uacccagacaccauuauua

SEQ ID NO: 938037 - RNA, 19 nt, Homo sapiens
  misc_RNA (1)...(19): siRNA sense strand
ggacgcagcacaaauucca

SEQ ID NO: 938038 - RNA, 19 nt, Homo sapiens
  misc_RNA (1)...(19): siRNA sense strand
ccacuggugauagauuaua

SEQ ID NO: 938039 - RNA, 19 nt, Homo sapiens
  misc_RNA (1)...(19): siRNA sense strand
ugauaccucugcuauugau

SEQ ID NO: 938040 - RNA, 19 nt, Homo sapiens
  misc_RNA (1)...(19): siRNA sense strand
acuagugaauguuuccaaa

SEQ ID NO: 938041 - RNA, 19 nt, Homo sapiens
  misc_RNA (1)...(19): siRNA sense strand
cacaaauuccaccaacuaa

SEQ ID NO: 938042 - RNA, 19 nt, Homo sapiens
  misc_RNA (1)...(19): siRNA sense strand
agauuauacuugucgaguu

SEQ ID NO: 938043 - RNA, 19 nt, Homo sapiens
  misc_RNA (1)...(19): siRNA sense strand
ccauuauuaugcucacaga

SEQ ID NO: 938044 - RNA, 19 nt, Homo sapiens
  misc_RNA (1)...(19): siRNA sense strand
cccagacauuguauaagaa

SEQ ID NO: 938045 - RNA, 19 nt, Homo sapiens
  misc_RNA (1)...(19): siRNA sense strand
ccagacaccauuauuaugc

SEQ ID NO: 938046 - RNA, 19 nt, Homo sapiens
  misc_RNA (1)...(19): siRNA sense strand
acaaauuccaccaacuaaa

SEQ ID NO: 938047 - RNA, 19 nt, Homo sapiens
  misc_RNA (1)...(19): siRNA sense strand
ugccaguacuucuaccauu

SEQ ID NO: 938048 - RNA, 19 nt, Homo sapiens
  misc_RNA (1)...(19): siRNA sense strand
uauccgagcccagacauug

SEQ ID NO: 938049 - RNA, 19 nt, Homo sapiens
  misc_RNA (1)...(19): siRNA sense strand
cagauacccagacaccauu

SEQ ID NO: 938050 - RNA, 19 nt, Homo sapiens
  misc_RNA (1)...(19): siRNA sense strand
gucuguagcacacuuuauu

SEQ ID NO: 938051 - RNA, 19 nt, Homo sapiens
  misc_RNA (1)...(19): siRNA sense strand
gaucauaaagcugacuaag

SEQ ID NO: 938052 - RNA, 19 nt, Homo sapiens
  misc_RNA (1)...(19): siRNA sense strand
ucagccuccuuaccauuau

SEQ ID NO: 938053 - RNA, 19 nt, Homo sapiens
  misc_RNA (1)...(19): siRNA sense strand
ucugggaaauacuagugaa

SEQ ID NO: 938054 - RNA, 19 nt, Homo sapiens
  misc_RNA (1)...(19): siRNA sense strand
cucagccuccuuaccauua

SEQ ID NO: 938055 - RNA, 19 nt, Homo sapiens
  misc_RNA (1)...(19): siRNA sense strand
ucuguagcacacuuuauuu

SEQ ID NO: 938056 - RNA, 19 nt, Homo sapiens
  misc_RNA (1)...(19): siRNA sense strand
acccagacaccauuauuau

SEQ ID NO: 938057 - RNA, 19 nt, Homo sapiens
  misc_RNA (1)...(19): siRNA sense strand
ugaugcagauacccagaca

SEQ ID NO: 938058 - RNA, 19 nt, Homo sapiens
  misc_RNA (1)...(19): siRNA sense strand
guauaagaaguuugugaag

SEQ ID NO: 938059 - RNA, 19 nt, Homo sapiens
  misc_RNA (1)...(19): siRNA sense strand
cugggcagcuuuguacuca

SEQ ID NO: 938060 - RNA, 19 nt, Homo sapiens
  misc_RNA (1)...(19): siRNA sense strand
ucagucagagccacaagug

SEQ ID NO: 938061 - RNA, 19 nt, Homo sapiens
  misc_RNA (1)...(19): siRNA sense strand
agaaguuugugaagucaac

SEQ ID NO: 938062 - RNA, 19 nt, Homo sapiens
  misc_RNA (1)...(19): siRNA sense strand
caagaacucuccugacaga

SEQ ID NO: 938063 - RNA, 19 nt, Homo sapiens
  misc_RNA (1)...(19): siRNA sense strand
aaacucaaaugcugccuua

SEQ ID NO: 938064 - RNA, 19 nt, Homo sapiens
  misc_RNA (1)...(19): siRNA sense strand
ggaccuguguuauauuuga

SEQ ID NO: 938065 - RNA, 19 nt, Homo sapiens
  misc_RNA (1)...(19): siRNA sense strand
gacaagaacucuccugaca

SEQ ID NO: 938066 - RNA, 19 nt, Homo sapiens
  misc_RNA (1)...(19): siRNA sense strand
uggaauggcugcaaauaaa

SEQ ID NO: 938067 - RNA, 19 nt, Homo sapiens
  misc_RNA (1)...(19): siRNA sense strand
gacccaacaugauuuguaa

SEQ ID NO: 938068 - RNA, 19 nt, Homo sapiens
  misc_RNA (1)...(19): siRNA sense strand
gaagaaggaaggagaagaa

SEQ ID NO: 938069 - RNA, 19 nt, Homo sapiens
  misc_RNA (1)...(19): siRNA sense strand
guucaaaccugaguuguga

SEQ ID NO: 938070 - RNA, 19 nt, Homo sapiens
  misc_RNA (1)...(19): siRNA sense strand
ggauaaugauuucuccuau

SEQ ID NO: 938071 - RNA, 19 nt, Homo sapiens
  misc_RNA (1)...(19): siRNA sense strand
ugauauaccuucugagaca

SEQ ID NO: 938072 - RNA, 19 nt, Homo sapiens
  misc_RNA (1)...(19): siRNA sense strand
ggacggagaagacgaggaa

SEQ ID NO: 938073 - RNA, 19 nt, Homo sapiens
  misc_RNA (1)...(19): siRNA sense strand
cuagggaccuguguuauau

SEQ ID NO: 938074 - RNA, 19 nt, Homo sapiens
  misc_RNA (1)...(19): siRNA sense strand
gauacagaaggcaauaaua

SEQ ID NO: 938075 - RNA, 19 nt, Homo sapiens
  misc_RNA (1)...(19): siRNA sense strand
ggaaggagaagaaaacaua

SEQ ID NO: 938076 - RNA, 19 nt, Homo sapiens
  misc_RNA (1)...(19): siRNA sense strand
gaagaggaagagauucaaa

SEQ ID NO: 938077 - RNA, 19 nt, Homo sapiens
  misc_RNA (1)...(19): siRNA sense strand
ugaacaugcugauacagaa

SEQ ID NO: 938078 - RNA, 19 nt, Homo sapiens
  misc_RNA (1)...(19): siRNA sense strand
gaggaagagauucaaauga

SEQ ID NO: 938079 - RNA, 19 nt, Homo sapiens
  misc_RNA (1)...(19): siRNA sense strand
ggagaaaccaaugcacuug

SEQ ID NO: 938080 - RNA, 19 nt, Homo sapiens
  misc_RNA (1)...(19): siRNA sense strand
gcaguugguucugguggaa

SEQ ID NO: 938081 - RNA, 19 nt, Homo sapiens
  misc_RNA (1)...(19): siRNA sense strand
uaaaugccauacaaugaag

SEQ ID NO: 938082 - RNA, 19 nt, Homo sapiens
  misc_RNA (1)...(19): siRNA sense strand
ugaagacgaagaaguggua

SEQ ID NO: 938083 - RNA, 19 nt, Homo sapiens
  misc_RNA (1)...(19): siRNA sense strand
gcacuuggaaauagaagau

SEQ ID NO: 938084 - RNA, 19 nt, Homo sapiens
  misc_RNA (1)...(19): siRNA sense strand
guggaauggcugcaaauaa

SEQ ID NO: 938085 - RNA, 19 nt, Homo sapiens
  misc_RNA (1)...(19): siRNA sense strand
caaugcacuuggaaauaga

SEQ ID NO: 938086 - RNA, 19 nt, Homo sapiens
  misc_RNA (1)...(19): siRNA sense strand
ucuagggaccuguguuaua

SEQ ID NO: 938087 - RNA, 19 nt, Homo sapiens
  misc_RNA (1)...(19): siRNA sense strand
cgacccaacaugauuugua

SEQ ID NO: 938088 - RNA, 19 nt, Homo sapiens
  misc_RNA (1)...(19): siRNA sense strand
ugaagaagcucagcaugac

SEQ ID NO: 938089 - RNA, 19 nt, Homo sapiens
  misc_RNA (1)...(19): siRNA sense strand
agggaccuguguuauauuu

SEQ ID NO: 938090 - RNA, 19 nt, Homo sapiens
  misc_RNA (1)...(19): siRNA sense strand
ggaagaggaggagcaguug

SEQ ID NO: 938091 - RNA, 19 nt, Homo sapiens
  misc_RNA (1)...(19): siRNA sense strand
aaaugaagacgaagaagug

SEQ ID NO: 938092 - RNA, 19 nt, Homo sapiens
  misc_RNA (1)...(19): siRNA sense strand
gaacaggagaaaccaaugc

SEQ ID NO: 938093 - RNA, 19 nt, Homo sapiens
  misc_RNA (1)...(19): siRNA sense strand
gaccuguguuauauuugaa

SEQ ID NO: 938094 - RNA, 19 nt, Homo sapiens
  misc_RNA (1)...(19): siRNA sense strand
gguggaauggcugcaaaua

SEQ ID NO: 938095 - RNA, 19 nt, Homo sapiens
  misc_RNA (1)...(19): siRNA sense strand
ccaacaugauuuguaacuu

SEQ ID NO: 938096 - RNA, 19 nt, Homo sapiens
  misc_RNA (1)...(19): siRNA sense strand
auucagacuuccucucaaa

SEQ ID NO: 938097 - RNA, 19 nt, Homo sapiens
  misc_RNA (1)...(19): siRNA sense strand
aagcucagcaugacaagaa

SEQ ID NO: 938098 - RNA, 19 nt, Homo sapiens
  misc_RNA (1)...(19): siRNA sense strand
ggcugcaaauaaaggauaa

SEQ ID NO: 938099 - RNA, 19 nt, Homo sapiens
  misc_RNA (1)...(19): siRNA sense strand
aaacauaggugggguggaa

SEQ ID NO: 938100 - RNA, 19 nt, Homo sapiens
  misc_RNA (1)...(19): siRNA sense strand
gaacaugcugauacagaag

SEQ ID NO: 938101 - RNA, 19 nt, Homo sapiens
  misc_RNA (1)...(19): siRNA sense strand
gauucagacuuccucucaa

SEQ ID NO: 938102 - RNA, 19 nt, Homo sapiens
  misc_RNA (1)...(19): siRNA sense strand
ggaagaggaagagauucaa

SEQ ID NO: 938103 - RNA, 19 nt, Homo sapiens
  misc_RNA (1)...(19): siRNA sense strand
ggaauggcugcaaauaaag

SEQ ID NO: 938104 - RNA, 19 nt, Homo sapiens
  misc_RNA (1)...(19): siRNA sense strand
gaagaagcucagcaugaca

SEQ ID NO: 938105 - RNA, 19 nt, Homo sapiens
  misc_RNA (1)...(19): siRNA sense strand
gauaaaucuuuggaauugg

SEQ ID NO: 938106 - RNA, 19 nt, Homo sapiens
  misc_RNA (1)...(19): siRNA sense strand
gcugauacagaaggcaaua

SEQ ID NO: 938107 - RNA, 19 nt, Homo sapiens
  misc_RNA (1)...(19): siRNA sense strand
uaucgacccaacaugauuu

SEQ ID NO: 938108 - RNA, 19 nt, Homo sapiens
  misc_RNA (1)...(19): siRNA sense strand
acucuagggaccuguguua

SEQ ID NO: 938109 - RNA, 19 nt, Homo sapiens
  misc_RNA (1)...(19): siRNA sense strand
gauucugguccucuuauug

SEQ ID NO: 938110 - RNA, 19 nt, Homo sapiens
  misc_RNA (1)...(19): siRNA sense strand
auaaugauuucuccuaucg

SEQ ID NO: 938111 - RNA, 19 nt, Homo sapiens
  misc_RNA (1)...(19): siRNA sense strand
agaggaagagauucaaaug

SEQ ID NO: 938112 - RNA, 19 nt, Homo sapiens
  misc_RNA (1)...(19): siRNA sense strand
cugguccucuuauugauau

SEQ ID NO: 938113 - RNA, 19 nt, Homo sapiens
  misc_RNA (1)...(19): siRNA sense strand
ggaauuggaagaggaagag

SEQ ID NO: 938114 - RNA, 19 nt, Homo sapiens
  misc_RNA (1)...(19): siRNA sense strand
gccauacaaugaagaagcu

SEQ ID NO: 938115 - RNA, 19 nt, Homo sapiens
  misc_RNA (1)...(19): siRNA sense strand
aaaccugaguugugaacag

SEQ ID NO: 938116 - RNA, 19 nt, Homo sapiens
  misc_RNA (1)...(19): siRNA sense strand
gaauggcugcaaauaaagg

SEQ ID NO: 938117 - RNA, 19 nt, Homo sapiens
  misc_RNA (1)...(19): siRNA sense strand
ugauacagaaggcaauaau

SEQ ID NO: 938118 - RNA, 19 nt, Homo sapiens
  misc_RNA (1)...(19): siRNA sense strand
gugaacaggagaaaccaau

SEQ ID NO: 938119 - RNA, 19 nt, Homo sapiens
  misc_RNA (1)...(19): siRNA sense strand
gaaggaaggagaagaaaac

SEQ ID NO: 938120 - RNA, 19 nt, Homo sapiens
  misc_RNA (1)...(19): siRNA sense strand
augaagaagcucagcauga

SEQ ID NO: 938121 - RNA, 19 nt, Homo sapiens
  misc_RNA (1)...(19): siRNA sense strand
caaugaagaagcucagcau

SEQ ID NO: 938122 - RNA, 19 nt, Homo sapiens
  misc_RNA (1)...(19): siRNA sense strand
agauucugguccucuuauu

SEQ ID NO: 938123 - RNA, 19 nt, Homo sapiens
  misc_RNA (1)...(19): siRNA sense strand
cugguggaauuaucaggaa

SEQ ID NO: 938124 - RNA, 19 nt, Homo sapiens
  misc_RNA (1)...(19): siRNA sense strand
ugauucagacuuccucuca

SEQ ID NO: 938125 - RNA, 19 nt, Homo sapiens
  misc_RNA (1)...(19): siRNA sense strand
ugagaggcccauucugcaa

SEQ ID NO: 938126 - RNA, 19 nt, Homo sapiens
  misc_RNA (1)...(19): siRNA sense strand
aagaagcucagcaugacaa

SEQ ID NO: 938127 - RNA, 19 nt, Homo sapiens
  misc_RNA (1)...(19): siRNA sense strand
uggaagaggaagagauuca

SEQ ID NO: 938128 - RNA, 19 nt, Homo sapiens
  misc_RNA (1)...(19): siRNA sense strand
aggaagaggaggagcaguu

SEQ ID NO: 938129 - RNA, 19 nt, Homo sapiens
  misc_RNA (1)...(19): siRNA sense strand
agagaagaaggaaggagaa

SEQ ID NO: 938130 - RNA, 19 nt, Homo sapiens
  misc_RNA (1)...(19): siRNA sense strand
aagaggaagagauucaaau

SEQ ID NO: 938131 - RNA, 19 nt, Homo sapiens
  misc_RNA (1)...(19): siRNA sense strand
uggcugcaaauaaaggaua

SEQ ID NO: 938132 - RNA, 19 nt, Homo sapiens
  misc_RNA (1)...(19): siRNA sense strand
uaaaggcacuggacaaaua

SEQ ID NO: 938133 - RNA, 19 nt, Homo sapiens
  misc_RNA (1)...(19): siRNA sense strand
cgaggaagguuuaaugaaa

SEQ ID NO: 938134 - RNA, 19 nt, Homo sapiens
  misc_RNA (1)...(19): siRNA sense strand
ggacuacgaggaagguuua

SEQ ID NO: 938135 - RNA, 19 nt, Homo sapiens
  misc_RNA (1)...(19): siRNA sense strand
gcuccacccuguacacuaa

SEQ ID NO: 938136 - RNA, 19 nt, Homo sapiens
  misc_RNA (1)...(19): siRNA sense strand
aagcuaaucuuauccuuug

SEQ ID NO: 938137 - RNA, 19 nt, Homo sapiens
  misc_RNA (1)...(19): siRNA sense strand
agaauaacaugauccuuug

SEQ ID NO: 938138 - RNA, 19 nt, Homo sapiens
  misc_RNA (1)...(19): siRNA sense strand
ggacaaauacuggcaugaa

SEQ ID NO: 938139 - RNA, 19 nt, Homo sapiens
  misc_RNA (1)...(19): siRNA sense strand
ggaccgguaucuucuaaag

SEQ ID NO: 938140 - RNA, 19 nt, Homo sapiens
  misc_RNA (1)...(19): siRNA sense strand
gaggaagguuuaaugaaag

SEQ ID NO: 938141 - RNA, 19 nt, Homo sapiens
  misc_RNA (1)...(19): siRNA sense strand
caugucagcuuuguaauca

SEQ ID NO: 938142 - RNA, 19 nt, Homo sapiens
  misc_RNA (1)...(19): siRNA sense strand
gacaaauacuggcaugaag

SEQ ID NO: 938143 - RNA, 19 nt, Homo sapiens
  misc_RNA (1)...(19): siRNA sense strand
aaacugcgcugccuguagu

SEQ ID NO: 938144 - RNA, 19 nt, Homo sapiens
  misc_RNA (1)...(19): siRNA sense strand
caugaagacugccugaagu

SEQ ID NO: 938145 - RNA, 19 nt, Homo sapiens
  misc_RNA (1)...(19): siRNA sense strand
cacuaaagcuaaucuuauc

SEQ ID NO: 938146 - RNA, 19 nt, Homo sapiens
  misc_RNA (1)...(19): siRNA sense strand
gagacuaucugaggcucuu

SEQ ID NO: 938147 - RNA, 19 nt, Homo sapiens
  misc_RNA (1)...(19): siRNA sense strand
gugccaaggacaauguuua

SEQ ID NO: 938148 - RNA, 19 nt, Homo sapiens
  misc_RNA (1)...(19): siRNA sense strand
gaaacugcgcugccuguag

SEQ ID NO: 938149 - RNA, 19 nt, Homo sapiens
  misc_RNA (1)...(19): siRNA sense strand
gcaugaagacugccugaag

SEQ ID NO: 938150 - RNA, 19 nt, Homo sapiens
  misc_RNA (1)...(19): siRNA sense strand
aaggaccgguaucuucuaa

SEQ ID NO: 938151 - RNA, 19 nt, Homo sapiens
  misc_RNA (1)...(19): siRNA sense strand
cugaggcucuuugguguaa

SEQ ID NO: 938152 - RNA, 19 nt, Homo sapiens
  misc_RNA (1)...(19): siRNA sense strand
ccuaaagaauaacaugauc

SEQ ID NO: 938153 - RNA, 19 nt, Homo sapiens
  misc_RNA (1)...(19): siRNA sense strand
gaucaaggaccgguaucuu

SEQ ID NO: 938154 - RNA, 19 nt, Homo sapiens
  misc_RNA (1)...(19): siRNA sense strand
ugucagcuuuguaaucaga

SEQ ID NO: 938155 - RNA, 19 nt, Homo sapiens
  misc_RNA (1)...(19): siRNA sense strand
gcaugucagcuuuguaauc

SEQ ID NO: 938156 - RNA, 19 nt, Homo sapiens
  misc_RNA (1)...(19): siRNA sense strand
cuacgaggaagguuuaaug

SEQ ID NO: 938157 - RNA, 19 nt, Homo sapiens
  misc_RNA (1)...(19): siRNA sense strand
ggaaacugcgcugccugua

SEQ ID NO: 938158 - RNA, 19 nt, Homo sapiens
  misc_RNA (1)...(19): siRNA sense strand
acaaauacuggcaugaaga

SEQ ID NO: 938159 - RNA, 19 nt, Homo sapiens
  misc_RNA (1)...(19): siRNA sense strand
caaggaccgguaucuucua

SEQ ID NO: 938160 - RNA, 19 nt, Homo sapiens
  misc_RNA (1)...(19): siRNA sense strand
uugcaugucagcuuuguaa

SEQ ID NO: 938161 - RNA, 19 nt, Homo sapiens
  misc_RNA (1)...(19): siRNA sense strand
ccagacggacuacgaggaa

SEQ ID NO: 938162 - RNA, 19 nt, Homo sapiens
  misc_RNA (1)...(19): siRNA sense strand
aggaagguuuaaugaaaga

SEQ ID NO: 938163 - RNA, 19 nt, Homo sapiens
  misc_RNA (1)...(19): siRNA sense strand
gaagguuuaaugaaagaag

SEQ ID NO: 938164 - RNA, 19 nt, Homo sapiens
  misc_RNA (1)...(19): siRNA sense strand
caccuggacugcuuugcau

SEQ ID NO: 938165 - RNA, 19 nt, Homo sapiens
  misc_RNA (1)...(19): siRNA sense strand
ucuaaaggcacuggacaaa

SEQ ID NO: 938166 - RNA, 19 nt, Homo sapiens
  misc_RNA (1)...(19): siRNA sense strand
ccuguacacuaaagcuaau

SEQ ID NO: 938167 - RNA, 19 nt, Homo sapiens
  misc_RNA (1)...(19): siRNA sense strand
ccaaggacaauguuuacca

SEQ ID NO: 938168 - RNA, 19 nt, Homo sapiens
  misc_RNA (1)...(19): siRNA sense strand
gcaaccgaaagaucaagga

SEQ ID NO: 938169 - RNA, 19 nt, Homo sapiens
  misc_RNA (1)...(19): siRNA sense strand
aaagaucaaggaccgguau

SEQ ID NO: 938170 - RNA, 19 nt, Homo sapiens
  misc_RNA (1)...(19): siRNA sense strand
ucaaggaccgguaucuucu

SEQ ID NO: 938171 - RNA, 19 nt, Homo sapiens
  misc_RNA (1)...(19): siRNA sense strand
caaauacuggcaugaagac

SEQ ID NO: 938172 - RNA, 19 nt, Homo sapiens
  misc_RNA (1)...(19): siRNA sense strand
uacgaggaagguuuaauga

SEQ ID NO: 938173 - RNA, 19 nt, Homo sapiens
  misc_RNA (1)...(19): siRNA sense strand
ugaagugugccugcuguga

SEQ ID NO: 938174 - RNA, 19 nt, Homo sapiens
  misc_RNA (1)...(19): siRNA sense strand
ucagagauuuuguguugga

SEQ ID NO: 938175 - RNA, 19 nt, Homo sapiens
  misc_RNA (1)...(19): siRNA sense strand
gaugaccucuuuccuaaug

SEQ ID NO: 938176 - RNA, 19 nt, Homo sapiens
  misc_RNA (1)...(19): siRNA sense strand
uggaugaccucuuuccuaa

SEQ ID NO: 938177 - RNA, 19 nt, Homo sapiens
  misc_RNA (1)...(19): siRNA sense strand
gcagggaggccaugaggaa

SEQ ID NO: 938178 - RNA, 19 nt, Homo sapiens
  misc_RNA (1)...(19): siRNA sense strand
aggaagggcuggugcauga

SEQ ID NO: 938179 - RNA, 19 nt, Homo sapiens
  misc_RNA (1)...(19): siRNA sense strand
gcacaguggagucggagaa

SEQ ID NO: 938180 - RNA, 19 nt, Homo sapiens
  misc_RNA (1)...(19): siRNA sense strand
ccaaggauucccuggauga

SEQ ID NO: 938181 - RNA, 19 nt, Homo sapiens
  misc_RNA (1)...(19): siRNA sense strand
gugaccagaauaaguauaa

SEQ ID NO: 938182 - RNA, 19 nt, Homo sapiens
  misc_RNA (1)...(19): siRNA sense strand
gcaguaugaugaggaugga

SEQ ID NO: 938183 - RNA, 19 nt, Homo sapiens
  misc_RNA (1)...(19): siRNA sense strand
caccaaggauucccuggau

SEQ ID NO: 938184 - RNA, 19 nt, Homo sapiens
  misc_RNA (1)...(19): siRNA sense strand
gaagggcuggugcaugaga

SEQ ID NO: 938185 - RNA, 19 nt, Homo sapiens
  misc_RNA (1)...(19): siRNA sense strand
cagcuucgccguucuaugg

SEQ ID NO: 938186 - RNA, 19 nt, Homo sapiens
  misc_RNA (1)...(19): siRNA sense strand
cauccuugcuuugguguau

SEQ ID NO: 938187 - RNA, 19 nt, Homo sapiens
  misc_RNA (1)...(19): siRNA sense strand
cugcccaccugcugaauga

SEQ ID NO: 938188 - RNA, 19 nt, Homo sapiens
  misc_RNA (1)...(19): siRNA sense strand
gaagaggaccccagcaaug

SEQ ID NO: 938189 - RNA, 19 nt, Homo sapiens
  misc_RNA (1)...(19): siRNA sense strand
gaauaaguauaaggaagcu

SEQ ID NO: 938190 - RNA, 19 nt, Homo sapiens
  misc_RNA (1)...(19): siRNA sense strand
ggaccuggagcgcacauca

SEQ ID NO: 938191 - RNA, 19 nt, Homo sapiens
  misc_RNA (1)...(19): siRNA sense strand
gcucaacauccuugcuuug

SEQ ID NO: 938192 - RNA, 19 nt, Homo sapiens
  misc_RNA (1)...(19): siRNA sense strand
cagcucagcaggguggaua

SEQ ID NO: 938193 - RNA, 19 nt, Homo sapiens
  misc_RNA (1)...(19): siRNA sense strand
gguguaucgugaccagaau

SEQ ID NO: 938194 - RNA, 19 nt, Homo sapiens
  misc_RNA (1)...(19): siRNA sense strand
uagaggcccuacgcaguga

SEQ ID NO: 938195 - RNA, 19 nt, Homo sapiens
  misc_RNA (1)...(19): siRNA sense strand
gcgaugccaccaaggauuc

SEQ ID NO: 938196 - RNA, 19 nt, Homo sapiens
  misc_RNA (1)...(19): siRNA sense strand
ccagaauaaguauaaggaa

SEQ ID NO: 938197 - RNA, 19 nt, Homo sapiens
  misc_RNA (1)...(19): siRNA sense strand
aaaagaagcaccuggaguu

SEQ ID NO: 938198 - RNA, 19 nt, Homo sapiens
  misc_RNA (1)...(19): siRNA sense strand
cagcaggguggauaugaga

SEQ ID NO: 938199 - RNA, 19 nt, Homo sapiens
  misc_RNA (1)...(19): siRNA sense strand
ccauccugcugucaguauu

SEQ ID NO: 938200 - RNA, 19 nt, Homo sapiens
  misc_RNA (1)...(19): siRNA sense strand
ucaacauccuugcuuuggu

SEQ ID NO: 938201 - RNA, 19 nt, Homo sapiens
  misc_RNA (1)...(19): siRNA sense strand
gcuucgccguucuauggaa

SEQ ID NO: 938202 - RNA, 19 nt, Homo sapiens
  misc_RNA (1)...(19): siRNA sense strand
gcugaaugaugcccuuagc

SEQ ID NO: 938203 - RNA, 19 nt, Homo sapiens
  misc_RNA (1)...(19): siRNA sense strand
uaucgugaccagaauaagu

SEQ ID NO: 938204 - RNA, 19 nt, Homo sapiens
  misc_RNA (1)...(19): siRNA sense strand
cuggaugaccucuuuccua

SEQ ID NO: 938205 - RNA, 19 nt, Homo sapiens
  misc_RNA (1)...(19): siRNA sense strand
gcggcaguaugaugaggau

SEQ ID NO: 938206 - RNA, 19 nt, Homo sapiens
  misc_RNA (1)...(19): siRNA sense strand
gcaggguggauaugagauc

SEQ ID NO: 938207 - RNA, 19 nt, Homo sapiens
  misc_RNA (1)...(19): siRNA sense strand
uucccuggaugaccucuuu

SEQ ID NO: 938208 - RNA, 19 nt, Homo sapiens
  misc_RNA (1)...(19): siRNA sense strand
gagugaggcccaggugaug

SEQ ID NO: 938209 - RNA, 19 nt, Homo sapiens
  misc_RNA (1)...(19): siRNA sense strand
ccaguacgcagcccaaggu

SEQ ID NO: 938210 - RNA, 19 nt, Homo sapiens
  misc_RNA (1)...(19): siRNA sense strand
accaguggcugcgggauga

SEQ ID NO: 938211 - RNA, 19 nt, Homo sapiens
  misc_RNA (1)...(19): siRNA sense strand
ucagcaggguggauaugag

SEQ ID NO: 938212 - RNA, 19 nt, Homo sapiens
  misc_RNA (1)...(19): siRNA sense strand
ggcgaugccaccaaggauu

SEQ ID NO: 938213 - RNA, 19 nt, Homo sapiens
  misc_RNA (1)...(19): siRNA sense strand
caccaggccgugcugcaaa

SEQ ID NO: 938214 - RNA, 19 nt, Homo sapiens
  misc_RNA (1)...(19): siRNA sense strand
gcacaacagcuaugcauug

SEQ ID NO: 938215 - RNA, 19 nt, Homo sapiens
  misc_RNA (1)...(19): siRNA sense strand
cggcggagcugcuucaaga

SEQ ID NO: 938216 - RNA, 19 nt, Homo sapiens
  misc_RNA (1)...(19): siRNA sense strand
agucgacgcucaacuauga

SEQ ID NO: 938217 - RNA, 19 nt, Homo sapiens
  misc_RNA (1)...(19): siRNA sense strand
ucaaggcgcugcaggacuu

SEQ ID NO: 938218 - RNA, 19 nt, Homo sapiens
  misc_RNA (1)...(19): siRNA sense strand
gaguggaaaugaagaagau

SEQ ID NO: 938219 - RNA, 19 nt, Homo sapiens
  misc_RNA (1)...(19): siRNA sense strand
cccaaggccuucaccagua

SEQ ID NO: 938220 - RNA, 19 nt, Homo sapiens
  misc_RNA (1)...(19): siRNA sense strand
ccaagacgcagcuggauga

SEQ ID NO: 938221 - RNA, 19 nt, Homo sapiens
  misc_RNA (1)...(19): siRNA sense strand
gcccaggaguggaaaugaa

SEQ ID NO: 938222 - RNA, 19 nt, Homo sapiens
  misc_RNA (1)...(19): siRNA sense strand
gggcugcaguucacagaga

SEQ ID NO: 938223 - RNA, 19 nt, Homo sapiens
  misc_RNA (1)...(19): siRNA sense strand
ggaagaucccagugucuga

SEQ ID NO: 938224 - RNA, 19 nt, Homo sapiens
  misc_RNA (1)...(19): siRNA sense strand
ggacuuggcacggaaggaa

SEQ ID NO: 938225 - RNA, 19 nt, Homo sapiens
  misc_RNA (1)...(19): siRNA sense strand
gcacgucucuggccccauu

SEQ ID NO: 938226 - RNA, 19 nt, Homo sapiens
  misc_RNA (1)...(19): siRNA sense strand
gaaccugacgcucuauuac

SEQ ID NO: 938227 - RNA, 19 nt, Homo sapiens
  misc_RNA (1)...(19): siRNA sense strand
gcaaggggcuggugaaggu

SEQ ID NO: 938228 - RNA, 19 nt, Homo sapiens
  misc_RNA (1)...(19): siRNA sense strand
aaaugaagaagaucacuga

SEQ ID NO: 938229 - RNA, 19 nt, Homo sapiens
  misc_RNA (1)...(19): siRNA sense strand
ugaaccugacgcucuauua

SEQ ID NO: 938230 - RNA, 19 nt, Homo sapiens
  misc_RNA (1)...(19): siRNA sense strand
caagaacgaccauaucaac

SEQ ID NO: 938231 - RNA, 19 nt, Homo sapiens
  misc_RNA (1)...(19): siRNA sense strand
gcuacaagaacgaccauau

SEQ ID NO: 938232 - RNA, 19 nt, Homo sapiens
  misc_RNA (1)...(19): siRNA sense strand
ggaguggaaaugaagaaga

SEQ ID NO: 938233 - RNA, 19 nt, Homo sapiens
  misc_RNA (1)...(19): siRNA sense strand
guaaggaagaucccagugu

SEQ ID NO: 938234 - RNA, 19 nt, Homo sapiens
  misc_RNA (1)...(19): siRNA sense strand
ucuucaagcucaucuacaa

SEQ ID NO: 938235 - RNA, 19 nt, Homo sapiens
  misc_RNA (1)...(19): siRNA sense strand
ggagucgacgcucaacuau

SEQ ID NO: 938236 - RNA, 19 nt, Homo sapiens
  misc_RNA (1)...(19): siRNA sense strand
cagcguggccucccuaauc

SEQ ID NO: 938237 - RNA, 19 nt, Homo sapiens
  misc_RNA (1)...(19): siRNA sense strand
cagagaaccaccuccaguu

SEQ ID NO: 938238 - RNA, 19 nt, Homo sapiens
  misc_RNA (1)...(19): siRNA sense strand
ucacgccacugcucuacau

SEQ ID NO: 938239 - RNA, 19 nt, Homo sapiens
  misc_RNA (1)...(19): siRNA sense strand
ccucugggcucagcucuuc

SEQ ID NO: 938240 - RNA, 19 nt, Homo sapiens
  misc_RNA (1)...(19): siRNA sense strand
ggaaaugcuggagcucuug

SEQ ID NO: 938241 - RNA, 19 nt, Homo sapiens
  misc_RNA (1)...(19): siRNA sense strand
gccagccugucaagaucua

SEQ ID NO: 938242 - RNA, 19 nt, Homo sapiens
  misc_RNA (1)...(19): siRNA sense strand
gcucaacuaugaagaucac

SEQ ID NO: 938243 - RNA, 19 nt, Homo sapiens
  misc_RNA (1)...(19): siRNA sense strand
ccgugaaccugacgcucua

SEQ ID NO: 938244 - RNA, 19 nt, Homo sapiens
  misc_RNA (1)...(19): siRNA sense strand
uacaagaacgaccauauca

SEQ ID NO: 938245 - RNA, 19 nt, Homo sapiens
  misc_RNA (1)...(19): siRNA sense strand
ccaaggccuucaccaguac

SEQ ID NO: 938246 - RNA, 19 nt, Homo sapiens
  misc_RNA (1)...(19): siRNA sense strand
ggcacacgcugcaccucaa

SEQ ID NO: 938247 - RNA, 19 nt, Homo sapiens
  misc_RNA (1)...(19): siRNA sense strand
cuacaagaacgaccauauc

SEQ ID NO: 938248 - RNA, 19 nt, Homo sapiens
  misc_RNA (1)...(19): siRNA sense strand
uggagucgacgcucaacua

SEQ ID NO: 938249 - RNA, 19 nt, Homo sapiens
  misc_RNA (1)...(19): siRNA sense strand
cauggcauccgcuacaaga

SEQ ID NO: 938250 - RNA, 19 nt, Homo sapiens
  misc_RNA (1)...(19): siRNA sense strand
aggaaaugcuggagcucuu

SEQ ID NO: 938251 - RNA, 19 nt, Homo sapiens
  misc_RNA (1)...(19): siRNA sense strand
ggugaaccgccuccaagug

SEQ ID NO: 938252 - RNA, 19 nt, Homo sapiens
  misc_RNA (1)...(19): siRNA sense strand
acaagaacgaccauaucaa

SEQ ID NO: 938253 - RNA, 19 nt, Homo sapiens
  misc_RNA (1)...(19): siRNA sense strand
ucaagcucaucuacaacga

SEQ ID NO: 938254 - RNA, 19 nt, Homo sapiens
  misc_RNA (1)...(19): siRNA sense strand
ggcugcaguucacagagaa

SEQ ID NO: 938255 - RNA, 19 nt, Homo sapiens
  misc_RNA (1)...(19): siRNA sense strand
cacaacagcuaugcauugc

SEQ ID NO: 938256 - RNA, 19 nt, Homo sapiens
  misc_RNA (1)...(19): siRNA sense strand
gcucaucuacaacgaguac

SEQ ID NO: 938257 - RNA, 19 nt, Homo sapiens
  misc_RNA (1)...(19): siRNA sense strand
gcacagagaacauuaaaga

SEQ ID NO: 938258 - RNA, 19 nt, Homo sapiens
  misc_RNA (1)...(19): siRNA sense strand
ggaagcggcugaucuuuua

SEQ ID NO: 938259 - RNA, 19 nt, Homo sapiens
  misc_RNA (1)...(19): siRNA sense strand
ggaagcggcuacacgauga

SEQ ID NO: 938260 - RNA, 19 nt, Homo sapiens
  misc_RNA (1)...(19): siRNA sense strand
gaacaaugcccucaacaca

SEQ ID NO: 938261 - RNA, 19 nt, Homo sapiens
  misc_RNA (1)...(19): siRNA sense strand
aaagaaaggucucuacagu

SEQ ID NO: 938262 - RNA, 19 nt, Homo sapiens
  misc_RNA (1)...(19): siRNA sense strand
ggacagaggcacaaucaug

SEQ ID NO: 938263 - RNA, 19 nt, Homo sapiens
  misc_RNA (1)...(19): siRNA sense strand
gcuacacgaugaagggaua

SEQ ID NO: 938264 - RNA, 19 nt, Homo sapiens
  misc_RNA (1)...(19): siRNA sense strand
uuaaggagccucaaacaaa

SEQ ID NO: 938265 - RNA, 19 nt, Homo sapiens
  misc_RNA (1)...(19): siRNA sense strand
gaaauaggaggccuucaga

SEQ ID NO: 938266 - RNA, 19 nt, Homo sapiens
  misc_RNA (1)...(19): siRNA sense strand
ggaaggacguccgcuacuu

SEQ ID NO: 938267 - RNA, 19 nt, Homo sapiens
  misc_RNA (1)...(19): siRNA sense strand
aaauacagcuucgaaauag

SEQ ID NO: 938268 - RNA, 19 nt, Homo sapiens
  misc_RNA (1)...(19): siRNA sense strand
ggaagagccaggacacaaa

SEQ ID NO: 938269 - RNA, 19 nt, Homo sapiens
  misc_RNA (1)...(19): siRNA sense strand
gggaagcccugcacaugga

SEQ ID NO: 938270 - RNA, 19 nt, Homo sapiens
  misc_RNA (1)...(19): siRNA sense strand
cagagaacauuaaagaaag

SEQ ID NO: 938271 - RNA, 19 nt, Homo sapiens
  misc_RNA (1)...(19): siRNA sense strand
caaagacgacccaaggaaa

SEQ ID NO: 938272 - RNA, 19 nt, Homo sapiens
  misc_RNA (1)...(19): siRNA sense strand
caacgcacagagaacauua

SEQ ID NO: 938273 - RNA, 19 nt, Homo sapiens
  misc_RNA (1)...(19): siRNA sense strand
uaaggagccucaaacaaag

SEQ ID NO: 938274 - RNA, 19 nt, Homo sapiens
  misc_RNA (1)...(19): siRNA sense strand
gaaggacguccgcuacuug

SEQ ID NO: 938275 - RNA, 19 nt, Homo sapiens
  misc_RNA (1)...(19): siRNA sense strand
ccaggacggugucagagaa

SEQ ID NO: 938276 - RNA, 19 nt, Homo sapiens
  misc_RNA (1)...(19): siRNA sense strand
ggagcagugucaacaagga

SEQ ID NO: 938277 - RNA, 19 nt, Homo sapiens
  misc_RNA (1)...(19): siRNA sense strand
gcggagcucucauuaaagg

SEQ ID NO: 938278 - RNA, 19 nt, Homo sapiens
  misc_RNA (1)...(19): siRNA sense strand
ccacaugggccaggagaua

SEQ ID NO: 938279 - RNA, 19 nt, Homo sapiens
  misc_RNA (1)...(19): siRNA sense strand
cauaaaccaugacuucaag

SEQ ID NO: 938280 - RNA, 19 nt, Homo sapiens
  misc_RNA (1)...(19): siRNA sense strand
caacaaggacgagacagaa

SEQ ID NO: 938281 - RNA, 19 nt, Homo sapiens
  misc_RNA (1)...(19): siRNA sense strand
cggcugaucuuuuacauaa

SEQ ID NO: 938282 - RNA, 19 nt, Homo sapiens
  misc_RNA (1)...(19): siRNA sense strand
cagagaaaccaaagacuga

SEQ ID NO: 938283 - RNA, 19 nt, Homo sapiens
  misc_RNA (1)...(19): siRNA sense strand
gccaggagauagacaguca

SEQ ID NO: 938284 - RNA, 19 nt, Homo sapiens
  misc_RNA (1)...(19): siRNA sense strand
gaacugccaaagccaagaa

SEQ ID NO: 938285 - RNA, 19 nt, Homo sapiens
  misc_RNA (1)...(19): siRNA sense strand
gcaaggaggacaaccaucu

SEQ ID NO: 938286 - RNA, 19 nt, Homo sapiens
  misc_RNA (1)...(19): siRNA sense strand
cccagucacuccuuauauu

SEQ ID NO: 938287 - RNA, 19 nt, Homo sapiens
  misc_RNA (1)...(19): siRNA sense strand
ucauggagcucaacuacuc

SEQ ID NO: 938288 - RNA, 19 nt, Homo sapiens
  misc_RNA (1)...(19): siRNA sense strand
cagcagucaucccaccuaa

SEQ ID NO: 938289 - RNA, 19 nt, Homo sapiens
  misc_RNA (1)...(19): siRNA sense strand
acaaugcccucaacacaca

SEQ ID NO: 938290 - RNA, 19 nt, Homo sapiens
  misc_RNA (1)...(19): siRNA sense strand
uuacauaaaccaugacuuc

SEQ ID NO: 938291 - RNA, 19 nt, Homo sapiens
  misc_RNA (1)...(19): siRNA sense strand
gaggcacaaucauggaaga

SEQ ID NO: 938292 - RNA, 19 nt, Homo sapiens
  misc_RNA (1)...(19): siRNA sense strand
gcaccacccuuuggcuuca

SEQ ID NO: 938293 - RNA, 19 nt, Homo sapiens
  misc_RNA (1)...(19): siRNA sense strand
ggaaggcacccgggacuau

SEQ ID NO: 938294 - RNA, 19 nt, Homo sapiens
  misc_RNA (1)...(19): siRNA sense strand
gcacagagggcagcaugga

SEQ ID NO: 938295 - RNA, 19 nt, Homo sapiens
  misc_RNA (1)...(19): siRNA sense strand
gugaccaggugagugcuua

SEQ ID NO: 938296 - RNA, 19 nt, Homo sapiens
  misc_RNA (1)...(19): siRNA sense strand
ggacucggacauccuucua

SEQ ID NO: 938297 - RNA, 19 nt, Homo sapiens
  misc_RNA (1)...(19): siRNA sense strand
gacccagucacuccuuaua

SEQ ID NO: 938298 - RNA, 19 nt, Homo sapiens
  misc_RNA (1)...(19): siRNA sense strand
caaggaggacaaccaucua

SEQ ID NO: 938299 - RNA, 19 nt, Homo sapiens
  misc_RNA (1)...(19): siRNA sense strand
cgacuugcccugacucugu

SEQ ID NO: 938300 - RNA, 19 nt, Homo sapiens
  misc_RNA (1)...(19): siRNA sense strand
gccuugcccucuuuuauua

SEQ ID NO: 938301 - RNA, 19 nt, Homo sapiens
  misc_RNA (1)...(19): siRNA sense strand
gcagucaucccaccuaagg

SEQ ID NO: 938302 - RNA, 19 nt, Homo sapiens
  misc_RNA (1)...(19): siRNA sense strand
gaagagccaggacacaaag

SEQ ID NO: 938303 - RNA, 19 nt, Homo sapiens
  misc_RNA (1)...(19): siRNA sense strand
gcauggaagagcccagaaa

SEQ ID NO: 938304 - RNA, 19 nt, Homo sapiens
  misc_RNA (1)...(19): siRNA sense strand
ccacaccaccggagacaga

SEQ ID NO: 938305 - RNA, 19 nt, Homo sapiens
  misc_RNA (1)...(19): siRNA sense strand
gcacugcuuaugaaucaga

SEQ ID NO: 938306 - RNA, 19 nt, Homo sapiens
  misc_RNA (1)...(19): siRNA sense strand
gacuacguguuccgauuga

SEQ ID NO: 938307 - RNA, 19 nt, Homo sapiens
  misc_RNA (1)...(19): siRNA sense strand
ccgccaacuucaaaucuga

SEQ ID NO: 938308 - RNA, 19 nt, Homo sapiens
  misc_RNA (1)...(19): siRNA sense strand
acagguuucugaggucuaa

SEQ ID NO: 938309 - RNA, 19 nt, Homo sapiens
  misc_RNA (1)...(19): siRNA sense strand
gcagagccagugccagaga

SEQ ID NO: 938310 - RNA, 19 nt, Homo sapiens
  misc_RNA (1)...(19): siRNA sense strand
uuucugaucacuacuauga

SEQ ID NO: 938311 - RNA, 19 nt, Homo sapiens
  misc_RNA (1)...(19): siRNA sense strand
gacuuucuccgauacauga

SEQ ID NO: 938312 - RNA, 19 nt, Homo sapiens
  misc_RNA (1)...(19): siRNA sense strand
ccagucacuccuuauauug

SEQ ID NO: 938313 - RNA, 19 nt, Homo sapiens
  misc_RNA (1)...(19): siRNA sense strand
acccagacuuucuccgaua

SEQ ID NO: 938314 - RNA, 19 nt, Homo sapiens
  misc_RNA (1)...(19): siRNA sense strand
acaaagacgacccaaggaa

SEQ ID NO: 938315 - RNA, 19 nt, Homo sapiens
  misc_RNA (1)...(19): siRNA sense strand
caggagcagugucaacaag

SEQ ID NO: 938316 - RNA, 19 nt, Homo sapiens
  misc_RNA (1)...(19): siRNA sense strand
ggugcccacuggaggauau

SEQ ID NO: 938317 - RNA, 19 nt, Homo sapiens
  misc_RNA (1)...(19): siRNA sense strand
gaaggcacccgggacuaug

SEQ ID NO: 938318 - RNA, 19 nt, Homo sapiens
  misc_RNA (1)...(19): siRNA sense strand
cgacuacguguuccgauug

SEQ ID NO: 938319 - RNA, 19 nt, Homo sapiens
  misc_RNA (1)...(19): siRNA sense strand
aaagacgacccaaggaaau

SEQ ID NO: 938320 - RNA, 19 nt, Homo sapiens
  misc_RNA (1)...(19): siRNA sense strand
ggaccgccuggaacacuuu

SEQ ID NO: 938321 - RNA, 19 nt, Homo sapiens
  misc_RNA (1)...(19): siRNA sense strand
ggaggacaaccaucuaugc

SEQ ID NO: 938322 - RNA, 19 nt, Homo sapiens
  misc_RNA (1)...(19): siRNA sense strand
gguccugccuguggagaug

SEQ ID NO: 938323 - RNA, 19 nt, Homo sapiens
  misc_RNA (1)...(19): siRNA sense strand
uaaaggcuacgaacaggau

SEQ ID NO: 938324 - RNA, 19 nt, Homo sapiens
  misc_RNA (1)...(19): siRNA sense strand
ucaacaaggacgagacaga

SEQ ID NO: 938325 - RNA, 19 nt, Homo sapiens
  misc_RNA (1)...(19): siRNA sense strand
guccuggucuucuuucucu

SEQ ID NO: 938326 - RNA, 19 nt, Homo sapiens
  misc_RNA (1)...(19): siRNA sense strand
gaggaaaggaggccaacca

SEQ ID NO: 938327 - RNA, 19 nt, Homo sapiens
  misc_RNA (1)...(19): siRNA sense strand
cagagccagugccagagaa

SEQ ID NO: 938328 - RNA, 19 nt, Homo sapiens
  misc_RNA (1)...(19): siRNA sense strand
caggacagaggcacaauca

SEQ ID NO: 938329 - RNA, 19 nt, Homo sapiens
  misc_RNA (1)...(19): siRNA sense strand
cauggaagcggcugaucuu

SEQ ID NO: 938330 - RNA, 19 nt, Homo sapiens
  misc_RNA (1)...(19): siRNA sense strand
acacuuugcaccacccuuu

SEQ ID NO: 938331 - RNA, 19 nt, Homo sapiens
  misc_RNA (1)...(19): siRNA sense strand
uaaagaaaggucucuacag

SEQ ID NO: 938332 - RNA, 19 nt, Homo sapiens
  misc_RNA (1)...(19): siRNA sense strand
caugagcgcuuuucugauc

SEQ ID NO: 938333 - RNA, 19 nt, Homo sapiens
  misc_RNA (1)...(19): siRNA sense strand
cuuauggcuucaucacuga

SEQ ID NO: 938334 - RNA, 19 nt, Homo sapiens
  misc_RNA (1)...(19): siRNA sense strand
cgaaauaggaggccuucag

SEQ ID NO: 938335 - RNA, 19 nt, Homo sapiens
  misc_RNA (1)...(19): siRNA sense strand
acuucaagcuggagagaga

SEQ ID NO: 938336 - RNA, 19 nt, Homo sapiens
  misc_RNA (1)...(19): siRNA sense strand
acauaaaccaugacuucaa

SEQ ID NO: 938337 - RNA, 19 nt, Homo sapiens
  misc_RNA (1)...(19): siRNA sense strand
ugagggccaugagcgcuuu

SEQ ID NO: 938338 - RNA, 19 nt, Homo sapiens
  misc_RNA (1)...(19): siRNA sense strand
gaggacaaccaucuaugca

SEQ ID NO: 938339 - RNA, 19 nt, Homo sapiens
  misc_RNA (1)...(19): siRNA sense strand
gggaccgccuggaacacuu

SEQ ID NO: 938340 - RNA, 19 nt, Homo sapiens
  misc_RNA (1)...(19): siRNA sense strand
agagaacaaugcccucaac

SEQ ID NO: 938341 - RNA, 19 nt, Homo sapiens
  misc_RNA (1)...(19): siRNA sense strand
gauacaugaagaacagguu

SEQ ID NO: 938342 - RNA, 19 nt, Homo sapiens
  misc_RNA (1)...(19): siRNA sense strand
gagaacaaugcccucaaca

SEQ ID NO: 938343 - RNA, 19 nt, Homo sapiens
  misc_RNA (1)...(19): siRNA sense strand
ggacuaugaguggcuggaa

SEQ ID NO: 938344 - RNA, 19 nt, Homo sapiens
  misc_RNA (1)...(19): siRNA sense strand
ggcaucaacgcacagagaa

SEQ ID NO: 938345 - RNA, 19 nt, Homo sapiens
  misc_RNA (1)...(19): siRNA sense strand
acgacuacguguuccgauu

SEQ ID NO: 938346 - RNA, 19 nt, Homo sapiens
  misc_RNA (1)...(19): siRNA sense strand
caucaacgcacagagaaca

SEQ ID NO: 938347 - RNA, 19 nt, Homo sapiens
  misc_RNA (1)...(19): siRNA sense strand
ugccaaagccaagaacuga

SEQ ID NO: 938348 - RNA, 19 nt, Homo sapiens
  misc_RNA (1)...(19): siRNA sense strand
gagaaaccaaagacugaag

SEQ ID NO: 938349 - RNA, 19 nt, Homo sapiens
  misc_RNA (1)...(19): siRNA sense strand
uuaaagaaaggucucuaca

SEQ ID NO: 938350 - RNA, 19 nt, Homo sapiens
  misc_RNA (1)...(19): siRNA sense strand
agagaacauuaaagaaagg

SEQ ID NO: 938351 - RNA, 19 nt, Homo sapiens
  misc_RNA (1)...(19): siRNA sense strand
cacagagaacauuaaagaa

SEQ ID NO: 938352 - RNA, 19 nt, Homo sapiens
  misc_RNA (1)...(19): siRNA sense strand
ugagugggaccgccuggaa

SEQ ID NO: 938353 - RNA, 19 nt, Homo sapiens
  misc_RNA (1)...(19): siRNA sense strand
aaaccauggugaacacacu

SEQ ID NO: 938354 - RNA, 19 nt, Homo sapiens
  misc_RNA (1)...(19): siRNA sense strand
cauuaaaggcuacgaacag

SEQ ID NO: 938355 - RNA, 19 nt, Homo sapiens
  misc_RNA (1)...(19): siRNA sense strand
gcaggacagaggcacaauc

SEQ ID NO: 938356 - RNA, 19 nt, Homo sapiens
  misc_RNA (1)...(19): siRNA sense strand
gaagcggcuacacgaugaa

SEQ ID NO: 938357 - RNA, 19 nt, Homo sapiens
  misc_RNA (1)...(19): siRNA sense strand
gacaacaucuacacaauga

SEQ ID NO: 938358 - RNA, 19 nt, Homo sapiens
  misc_RNA (1)...(19): siRNA sense strand
uaacagugcuaacucaauu

SEQ ID NO: 938359 - RNA, 19 nt, Homo sapiens
  misc_RNA (1)...(19): siRNA sense strand
gagagacacuugugaacau

SEQ ID NO: 938360 - RNA, 19 nt, Homo sapiens
  misc_RNA (1)...(19): siRNA sense strand
caacauaaguggcauuagc

SEQ ID NO: 938361 - RNA, 19 nt, Homo sapiens
  misc_RNA (1)...(19): siRNA sense strand
gaggaucaaugcagagaau

SEQ ID NO: 938362 - RNA, 19 nt, Homo sapiens
  misc_RNA (1)...(19): siRNA sense strand
caacaucuacacaaugauu

SEQ ID NO: 938363 - RNA, 19 nt, Homo sapiens
  misc_RNA (1)...(19): siRNA sense strand
gaacuuccuccacuccuuu

SEQ ID NO: 938364 - RNA, 19 nt, Homo sapiens
  misc_RNA (1)...(19): siRNA sense strand
gaaaggagagacacuugug

SEQ ID NO: 938365 - RNA, 19 nt, Homo sapiens
  misc_RNA (1)...(19): siRNA sense strand
caacaugggaggaucaaug

SEQ ID NO: 938366 - RNA, 19 nt, Homo sapiens
  misc_RNA (1)...(19): siRNA sense strand
cuuuauacgucuacgaaua

SEQ ID NO: 938367 - RNA, 19 nt, Homo sapiens
  misc_RNA (1)...(19): siRNA sense strand
gacccuggcccaauccuaa

SEQ ID NO: 938368 - RNA, 19 nt, Homo sapiens
  misc_RNA (1)...(19): siRNA sense strand
gugacaacaucuacacaau

SEQ ID NO: 938369 - RNA, 19 nt, Homo sapiens
  misc_RNA (1)...(19): siRNA sense strand
ggaucaaugcagagaauga

SEQ ID NO: 938370 - RNA, 19 nt, Homo sapiens
  misc_RNA (1)...(19): siRNA sense strand
gaucaaugcagagaaugaa

SEQ ID NO: 938371 - RNA, 19 nt, Homo sapiens
  misc_RNA (1)...(19): siRNA sense strand
ggagagacacuugugaaca

SEQ ID NO: 938372 - RNA, 19 nt, Homo sapiens
  misc_RNA (1)...(19): siRNA sense strand
caacaaauuccagugacaa

SEQ ID NO: 938373 - RNA, 19 nt, Homo sapiens
  misc_RNA (1)...(19): siRNA sense strand
cgacauagacggacuucca

SEQ ID NO: 938374 - RNA, 19 nt, Homo sapiens
  misc_RNA (1)...(19): siRNA sense strand
ucaacaaauuccagugaca

SEQ ID NO: 938375 - RNA, 19 nt, Homo sapiens
  misc_RNA (1)...(19): siRNA sense strand
ccuuucagaacgacaauua

SEQ ID NO: 938376 - RNA, 19 nt, Homo sapiens
  misc_RNA (1)...(19): siRNA sense strand
gacaauuauucuccaagca

SEQ ID NO: 938377 - RNA, 19 nt, Homo sapiens
  misc_RNA (1)...(19): siRNA sense strand
ugacaacaucuacacaaug

SEQ ID NO: 938378 - RNA, 19 nt, Homo sapiens
  misc_RNA (1)...(19): siRNA sense strand
gcacagccuccaccucaca

SEQ ID NO: 938379 - RNA, 19 nt, Homo sapiens
  misc_RNA (1)...(19): siRNA sense strand
aaacaucacguugggagaa

SEQ ID NO: 938380 - RNA, 19 nt, Homo sapiens
  misc_RNA (1)...(19): siRNA sense strand
agagacacuugugaacauu

SEQ ID NO: 938381 - RNA, 19 nt, Homo sapiens
  misc_RNA (1)...(19): siRNA sense strand
caaauuccagugacaacau

SEQ ID NO: 938382 - RNA, 19 nt, Homo sapiens
  misc_RNA (1)...(19): siRNA sense strand
gugcuaacucaauuccaua

SEQ ID NO: 938383 - RNA, 19 nt, Homo sapiens
  misc_RNA (1)...(19): siRNA sense strand
ucuccaagcaugacgauga

SEQ ID NO: 938384 - RNA, 19 nt, Homo sapiens
  misc_RNA (1)...(19): siRNA sense strand
gcauggagccacaccacau

SEQ ID NO: 938385 - RNA, 19 nt, Homo sapiens
  misc_RNA (1)...(19): siRNA sense strand
ccuccaggaacacccauua

SEQ ID NO: 938386 - RNA, 19 nt, Homo sapiens
  misc_RNA (1)...(19): siRNA sense strand
gagccacaccacaugaaug

SEQ ID NO: 938387 - RNA, 19 nt, Homo sapiens
  misc_RNA (1)...(19): siRNA sense strand
ucccgcagauucaacaaau

SEQ ID NO: 938388 - RNA, 19 nt, Homo sapiens
  misc_RNA (1)...(19): siRNA sense strand
gacauagacggacuuccaa

SEQ ID NO: 938389 - RNA, 19 nt, Homo sapiens
  misc_RNA (1)...(19): siRNA sense strand
cuaacucaauuccauacuc

SEQ ID NO: 938390 - RNA, 19 nt, Homo sapiens
  misc_RNA (1)...(19): siRNA sense strand
uaacaacauaaguggcauu

SEQ ID NO: 938391 - RNA, 19 nt, Homo sapiens
  misc_RNA (1)...(19): siRNA sense strand
ccacaccacaugaauggau

SEQ ID NO: 938392 - RNA, 19 nt, Homo sapiens
  misc_RNA (1)...(19): siRNA sense strand
ggagccacaccacaugaau

SEQ ID NO: 938393 - RNA, 19 nt, Homo sapiens
  misc_RNA (1)...(19): siRNA sense strand
ccgcagauucaacaaauuc

SEQ ID NO: 938394 - RNA, 19 nt, Homo sapiens
  misc_RNA (1)...(19): siRNA sense strand
ccaggaacacccauuaugc

SEQ ID NO: 938395 - RNA, 19 nt, Homo sapiens
  misc_RNA (1)...(19): siRNA sense strand
aaaggagagacacuuguga

SEQ ID NO: 938396 - RNA, 19 nt, Homo sapiens
  misc_RNA (1)...(19): siRNA sense strand
ccucaucaccugguaccua

SEQ ID NO: 938397 - RNA, 19 nt, Homo sapiens
  misc_RNA (1)...(19): siRNA sense strand
cucaucaccugguaccuau

SEQ ID NO: 938398 - RNA, 19 nt, Homo sapiens
  misc_RNA (1)...(19): siRNA sense strand
ggaggaucaaugcagagaa

SEQ ID NO: 938399 - RNA, 19 nt, Homo sapiens
  misc_RNA (1)...(19): siRNA sense strand
auaaguggcauuagcaauc

SEQ ID NO: 938400 - RNA, 19 nt, Homo sapiens
  misc_RNA (1)...(19): siRNA sense strand
aaauuccagugacaacauc

SEQ ID NO: 938401 - RNA, 19 nt, Homo sapiens
  misc_RNA (1)...(19): siRNA sense strand
aacaacauaaguggcauua

SEQ ID NO: 938402 - RNA, 19 nt, Homo sapiens
  misc_RNA (1)...(19): siRNA sense strand
ugaaaggagagacacuugu

SEQ ID NO: 938403 - RNA, 19 nt, Homo sapiens
  misc_RNA (1)...(19): siRNA sense strand
caagcaugacgaugagugu

SEQ ID NO: 938404 - RNA, 19 nt, Homo sapiens
  misc_RNA (1)...(19): siRNA sense strand
gggaggaucaaugcagaga

SEQ ID NO: 938405 - RNA, 19 nt, Homo sapiens
  misc_RNA (1)...(19): siRNA sense strand
aaggagagacacuugugaa

SEQ ID NO: 938406 - RNA, 19 nt, Homo sapiens
  misc_RNA (1)...(19): siRNA sense strand
gcccagucccgcagauuca

SEQ ID NO: 938407 - RNA, 19 nt, Homo sapiens
  misc_RNA (1)...(19): siRNA sense strand
caucaccugguaccuaugu

SEQ ID NO: 938408 - RNA, 19 nt, Homo sapiens
  misc_RNA (1)...(19): siRNA sense strand
gacaacaucuacacaauga

SEQ ID NO: 938409 - RNA, 19 nt, Homo sapiens
  misc_RNA (1)...(19): siRNA sense strand
uaacagugcuaacucaauu

SEQ ID NO: 938410 - RNA, 19 nt, Homo sapiens
  misc_RNA (1)...(19): siRNA sense strand
gagagacacuugugaacau

SEQ ID NO: 938411 - RNA, 19 nt, Homo sapiens
  misc_RNA (1)...(19): siRNA sense strand
caacauaaguggcauuagc

SEQ ID NO: 938412 - RNA, 19 nt, Homo sapiens
  misc_RNA (1)...(19): siRNA sense strand
gaggaucaaugcagagaau

SEQ ID NO: 938413 - RNA, 19 nt, Homo sapiens
  misc_RNA (1)...(19): siRNA sense strand
caacaucuacacaaugauu

SEQ ID NO: 938414 - RNA, 19 nt, Homo sapiens
  misc_RNA (1)...(19): siRNA sense strand
gaacuuccuccacuccuuu

SEQ ID NO: 938415 - RNA, 19 nt, Homo sapiens
  misc_RNA (1)...(19): siRNA sense strand
gaaaggagagacacuugug

SEQ ID NO: 938416 - RNA, 19 nt, Homo sapiens
  misc_RNA (1)...(19): siRNA sense strand
caacaugggaggaucaaug

SEQ ID NO: 938417 - RNA, 19 nt, Homo sapiens
  misc_RNA (1)...(19): siRNA sense strand
cuuuauacgucuacgaaua

SEQ ID NO: 938418 - RNA, 19 nt, Homo sapiens
  misc_RNA (1)...(19): siRNA sense strand
gacccuggcccaauccuaa

SEQ ID NO: 938419 - RNA, 19 nt, Homo sapiens
  misc_RNA (1)...(19): siRNA sense strand
gugacaacaucuacacaau

SEQ ID NO: 938420 - RNA, 19 nt, Homo sapiens
  misc_RNA (1)...(19): siRNA sense strand
ggaucaaugcagagaauga

SEQ ID NO: 938421 - RNA, 19 nt, Homo sapiens
  misc_RNA (1)...(19): siRNA sense strand
gaucaaugcagagaaugaa

SEQ ID NO: 938422 - RNA, 19 nt, Homo sapiens
  misc_RNA (1)...(19): siRNA sense strand
ggagagacacuugugaaca

SEQ ID NO: 938423 - RNA, 19 nt, Homo sapiens
  misc_RNA (1)...(19): siRNA sense strand
caacaaauuccagugacaa

SEQ ID NO: 938424 - RNA, 19 nt, Homo sapiens
  misc_RNA (1)...(19): siRNA sense strand
cgacauagacggacuucca

SEQ ID NO: 938425 - RNA, 19 nt, Homo sapiens
  misc_RNA (1)...(19): siRNA sense strand
ucaacaaauuccagugaca

SEQ ID NO: 938426 - RNA, 19 nt, Homo sapiens
  misc_RNA (1)...(19): siRNA sense strand
ccuuucagaacgacaauua

SEQ ID NO: 938427 - RNA, 19 nt, Homo sapiens
  misc_RNA (1)...(19): siRNA sense strand
gacaauuauucuccaagca

SEQ ID NO: 938428 - RNA, 19 nt, Homo sapiens
  misc_RNA (1)...(19): siRNA sense strand
ugacaacaucuacacaaug

SEQ ID NO: 938429 - RNA, 19 nt, Homo sapiens
  misc_RNA (1)...(19): siRNA sense strand
gcacagccuccaccucaca

SEQ ID NO: 938430 - RNA, 19 nt, Homo sapiens
  misc_RNA (1)...(19): siRNA sense strand
aaacaucacguugggagaa

SEQ ID NO: 938431 - RNA, 19 nt, Homo sapiens
  misc_RNA (1)...(19): siRNA sense strand
agagacacuugugaacauu

SEQ ID NO: 938432 - RNA, 19 nt, Homo sapiens
  misc_RNA (1)...(19): siRNA sense strand
caaauuccagugacaacau

SEQ ID NO: 938433 - RNA, 19 nt, Homo sapiens
  misc_RNA (1)...(19): siRNA sense strand
gugcuaacucaauuccaua

SEQ ID NO: 938434 - RNA, 19 nt, Homo sapiens
  misc_RNA (1)...(19): siRNA sense strand
ucuccaagcaugacgauga

SEQ ID NO: 938435 - RNA, 19 nt, Homo sapiens
  misc_RNA (1)...(19): siRNA sense strand
gcauggagccacaccacau

SEQ ID NO: 938436 - RNA, 19 nt, Homo sapiens
  misc_RNA (1)...(19): siRNA sense strand
ccuccaggaacacccauua

SEQ ID NO: 938437 - RNA, 19 nt, Homo sapiens
  misc_RNA (1)...(19): siRNA sense strand
gagccacaccacaugaaug

SEQ ID NO: 938438 - RNA, 19 nt, Homo sapiens
  misc_RNA (1)...(19): siRNA sense strand
ucccgcagauucaacaaau

SEQ ID NO: 938439 - RNA, 19 nt, Homo sapiens
  misc_RNA (1)...(19): siRNA sense strand
gacauagacggacuuccaa

SEQ ID NO: 938440 - RNA, 19 nt, Homo sapiens
  misc_RNA (1)...(19): siRNA sense strand
cuaacucaauuccauacuc

SEQ ID NO: 938441 - RNA, 19 nt, Homo sapiens
  misc_RNA (1)...(19): siRNA sense strand
uaacaacauaaguggcauu

SEQ ID NO: 938442 - RNA, 19 nt, Homo sapiens
  misc_RNA (1)...(19): siRNA sense strand
ccacaccacaugaauggau

SEQ ID NO: 938443 - RNA, 19 nt, Homo sapiens
  misc_RNA (1)...(19): siRNA sense strand
ggagccacaccacaugaau

SEQ ID NO: 938444 - RNA, 19 nt, Homo sapiens
  misc_RNA (1)...(19): siRNA sense strand
ccgcagauucaacaaauuc

SEQ ID NO: 938445 - RNA, 19 nt, Homo sapiens
  misc_RNA (1)...(19): siRNA sense strand
ccaggaacacccauuaugc

SEQ ID NO: 938446 - RNA, 19 nt, Homo sapiens
  misc_RNA (1)...(19): siRNA sense strand
aaaggagagacacuuguga

SEQ ID NO: 938447 - RNA, 19 nt, Homo sapiens
  misc_RNA (1)...(19): siRNA sense strand
ccucaucaccugguaccua

SEQ ID NO: 938448 - RNA, 19 nt, Homo sapiens
  misc_RNA (1)...(19): siRNA sense strand
cucaucaccugguaccuau

SEQ ID NO: 938449 - RNA, 19 nt, Homo sapiens
  misc_RNA (1)...(19): siRNA sense strand
ggaggaucaaugcagagaa

SEQ ID NO: 938450 - RNA, 19 nt, Homo sapiens
  misc_RNA (1)...(19): siRNA sense strand
auaaguggcauuagcaauc

SEQ ID NO: 938451 - RNA, 19 nt, Homo sapiens
  misc_RNA (1)...(19): siRNA sense strand
aaauuccagugacaacauc

SEQ ID NO: 938452 - RNA, 19 nt, Homo sapiens
  misc_RNA (1)...(19): siRNA sense strand
aacaacauaaguggcauua

SEQ ID NO: 938453 - RNA, 19 nt, Homo sapiens
  misc_RNA (1)...(19): siRNA sense strand
ugaaaggagagacacuugu

SEQ ID NO: 938454 - RNA, 19 nt, Homo sapiens
  misc_RNA (1)...(19): siRNA sense strand
caagcaugacgaugagugu

SEQ ID NO: 938455 - RNA, 19 nt, Homo sapiens
  misc_RNA (1)...(19): siRNA sense strand
gggaggaucaaugcagaga

SEQ ID NO: 938456 - RNA, 19 nt, Homo sapiens
  misc_RNA (1)...(19): siRNA sense strand
aaggagagacacuugugaa

SEQ ID NO: 938457 - RNA, 19 nt, Homo sapiens
  misc_RNA (1)...(19): siRNA sense strand
gcccagucccgcagauuca

SEQ ID NO: 938458 - RNA, 19 nt, Homo sapiens
  misc_RNA (1)...(19): siRNA sense strand
caucaccugguaccuaugu

SEQ ID NO: 938459 - RNA, 19 nt, Homo sapiens
  misc_RNA (1)...(19): siRNA sense strand
gggagaagauugugaaguu

SEQ ID NO: 938460 - RNA, 19 nt, Homo sapiens
  misc_RNA (1)...(19): siRNA sense strand
gcagagagguguaaagaag

SEQ ID NO: 938461 - RNA, 19 nt, Homo sapiens
  misc_RNA (1)...(19): siRNA sense strand
gugaagaacuggagaagga

SEQ ID NO: 938462 - RNA, 19 nt, Homo sapiens
  misc_RNA (1)...(19): siRNA sense strand
ggagaagauugugaaguuu

SEQ ID NO: 938463 - RNA, 19 nt, Homo sapiens
  misc_RNA (1)...(19): siRNA sense strand
ggagguguaucgucuguau

SEQ ID NO: 938464 - RNA, 19 nt, Homo sapiens
  misc_RNA (1)...(19): siRNA sense strand
caaggucucuccagucaau

SEQ ID NO: 938465 - RNA, 19 nt, Homo sapiens
  misc_RNA (1)...(19): siRNA sense strand
gguaacaaauggcuuagau

SEQ ID NO: 938466 - RNA, 19 nt, Homo sapiens
  misc_RNA (1)...(19): siRNA sense strand
gcacucaaacucuccauga

SEQ ID NO: 938467 - RNA, 19 nt, Homo sapiens
  misc_RNA (1)...(19): siRNA sense strand
ucaaguggacucuuucuaa

SEQ ID NO: 938468 - RNA, 19 nt, Homo sapiens
  misc_RNA (1)...(19): siRNA sense strand
gcugggagauaauaagguu

SEQ ID NO: 938469 - RNA, 19 nt, Homo sapiens
  misc_RNA (1)...(19): siRNA sense strand
gccaaggucucuccaguca

SEQ ID NO: 938470 - RNA, 19 nt, Homo sapiens
  misc_RNA (1)...(19): siRNA sense strand
ucacaguccucgagcagaa

SEQ ID NO: 938471 - RNA, 19 nt, Homo sapiens
  misc_RNA (1)...(19): siRNA sense strand
ccucucaaguggacucuuu

SEQ ID NO: 938472 - RNA, 19 nt, Homo sapiens
  misc_RNA (1)...(19): siRNA sense strand
ccagacagaucagaugguu

SEQ ID NO: 938473 - RNA, 19 nt, Homo sapiens
  misc_RNA (1)...(19): siRNA sense strand
cagagagccucguggauca

SEQ ID NO: 938474 - RNA, 19 nt, Homo sapiens
  misc_RNA (1)...(19): siRNA sense strand
gagaagauugugaaguuug

SEQ ID NO: 938475 - RNA, 19 nt, Homo sapiens
  misc_RNA (1)...(19): siRNA sense strand
ugagaggaccuucuacuug

SEQ ID NO: 938476 - RNA, 19 nt, Homo sapiens
  misc_RNA (1)...(19): siRNA sense strand
gagaaacuguccuuaucag

SEQ ID NO: 938477 - RNA, 19 nt, Homo sapiens
  misc_RNA (1)...(19): siRNA sense strand
gaacuugaagcugaacuug

SEQ ID NO: 938478 - RNA, 19 nt, Homo sapiens
  misc_RNA (1)...(19): siRNA sense strand
gcgcauguccuuccuguuc

SEQ ID NO: 938479 - RNA, 19 nt, Homo sapiens
  misc_RNA (1)...(19): siRNA sense strand
aagcugaacuugagaaacu

SEQ ID NO: 938480 - RNA, 19 nt, Homo sapiens
  misc_RNA (1)...(19): siRNA sense strand
ggaugaaguuucucagacu

SEQ ID NO: 938481 - RNA, 19 nt, Homo sapiens
  misc_RNA (1)...(19): siRNA sense strand
caaguggacucuuucuaac

SEQ ID NO: 938482 - RNA, 19 nt, Homo sapiens
  misc_RNA (1)...(19): siRNA sense strand
agagagguguaaagaagaa

SEQ ID NO: 938483 - RNA, 19 nt, Homo sapiens
  misc_RNA (1)...(19): siRNA sense strand
cuaacaugcugggagauaa

SEQ ID NO: 938484 - RNA, 19 nt, Homo sapiens
  misc_RNA (1)...(19): siRNA sense strand
gaggagguguaucgucugu

SEQ ID NO: 938485 - RNA, 19 nt, Homo sapiens
  misc_RNA (1)...(19): siRNA sense strand
gcuaacuccugcccagaug

SEQ ID NO: 938486 - RNA, 19 nt, Homo sapiens
  misc_RNA (1)...(19): siRNA sense strand
caauuggaaccgacucuaa

SEQ ID NO: 938487 - RNA, 19 nt, Homo sapiens
  misc_RNA (1)...(19): siRNA sense strand
ggaauuggacauccuccuu

SEQ ID NO: 938488 - RNA, 19 nt, Homo sapiens
  misc_RNA (1)...(19): siRNA sense strand
cagcuucucucacgcaaag

SEQ ID NO: 938489 - RNA, 19 nt, Homo sapiens
  misc_RNA (1)...(19): siRNA sense strand
guggagcuguugaaggaaa

SEQ ID NO: 938490 - RNA, 19 nt, Homo sapiens
  misc_RNA (1)...(19): siRNA sense strand
cagaugagaggaccuucua

SEQ ID NO: 938491 - RNA, 19 nt, Homo sapiens
  misc_RNA (1)...(19): siRNA sense strand
gcaaaguggaguccuuauc

SEQ ID NO: 938492 - RNA, 19 nt, Homo sapiens
  misc_RNA (1)...(19): siRNA sense strand
gaucuaugccucccagaca

SEQ ID NO: 938493 - RNA, 19 nt, Homo sapiens
  misc_RNA (1)...(19): siRNA sense strand
uugagaaacuguccuuauc

SEQ ID NO: 938494 - RNA, 19 nt, Homo sapiens
  misc_RNA (1)...(19): siRNA sense strand
guaacaaauggcuuagauu

SEQ ID NO: 938495 - RNA, 19 nt, Homo sapiens
  misc_RNA (1)...(19): siRNA sense strand
ccaagcaacggacagagaa

SEQ ID NO: 938496 - RNA, 19 nt, Homo sapiens
  misc_RNA (1)...(19): siRNA sense strand
gguaggagcacucaaacuc

SEQ ID NO: 938497 - RNA, 19 nt, Homo sapiens
  misc_RNA (1)...(19): siRNA sense strand
cuguggagcuguugaagga

SEQ ID NO: 938498 - RNA, 19 nt, Homo sapiens
  misc_RNA (1)...(19): siRNA sense strand
ggacagagaagcgcaucga

SEQ ID NO: 938499 - RNA, 19 nt, Homo sapiens
  misc_RNA (1)...(19): siRNA sense strand
gaugcagagugaacagcuu

SEQ ID NO: 938500 - RNA, 19 nt, Homo sapiens
  misc_RNA (1)...(19): siRNA sense strand
gaagaacuggagaaggaau

SEQ ID NO: 938501 - RNA, 19 nt, Homo sapiens
  misc_RNA (1)...(19): siRNA sense strand
gcaauuggaaccgacucua

SEQ ID NO: 938502 - RNA, 19 nt, Homo sapiens
  misc_RNA (1)...(19): siRNA sense strand
ugagaaacuguccuuauca

SEQ ID NO: 938503 - RNA, 19 nt, Homo sapiens
  misc_RNA (1)...(19): siRNA sense strand
gcaauaggcauuuuaccaa

SEQ ID NO: 938504 - RNA, 19 nt, Homo sapiens
  misc_RNA (1)...(19): siRNA sense strand
cacucaaacucuccaugaa

SEQ ID NO: 938505 - RNA, 19 nt, Homo sapiens
  misc_RNA (1)...(19): siRNA sense strand
ggacuugcaggaggccuuu

SEQ ID NO: 938506 - RNA, 19 nt, Homo sapiens
  misc_RNA (1)...(19): siRNA sense strand
ggagaaggaauuggacauc

SEQ ID NO: 938507 - RNA, 19 nt, Homo sapiens
  misc_RNA (1)...(19): siRNA sense strand
uaacaugcugggagauaau

SEQ ID NO: 938508 - RNA, 19 nt, Homo sapiens
  misc_RNA (1)...(19): siRNA sense strand
cgacugggacagcaagaug

SEQ ID NO: 938509 - RNA, 19 nt, Homo sapiens
  misc_RNA (1)...(19): siRNA sense strand
ggaagcagagagguguaaa

SEQ ID NO: 938510 - RNA, 19 nt, Homo sapiens
  misc_RNA (1)...(19): siRNA sense strand
aagcagagagguguaaaga

SEQ ID NO: 938511 - RNA, 19 nt, Homo sapiens
  misc_RNA (1)...(19): siRNA sense strand
gaagcagagagguguaaag

SEQ ID NO: 938512 - RNA, 19 nt, Homo sapiens
  misc_RNA (1)...(19): siRNA sense strand
augccaagcuggacacugu

SEQ ID NO: 938513 - RNA, 19 nt, Homo sapiens
  misc_RNA (1)...(19): siRNA sense strand
gcuuagauuuugacaguga

SEQ ID NO: 938514 - RNA, 19 nt, Homo sapiens
  misc_RNA (1)...(19): siRNA sense strand
caaaguggaguccuuaucc

SEQ ID NO: 938515 - RNA, 19 nt, Homo sapiens
  misc_RNA (1)...(19): siRNA sense strand
aaccgacucuaaagccauu

SEQ ID NO: 938516 - RNA, 19 nt, Homo sapiens
  misc_RNA (1)...(19): siRNA sense strand
gccaagcaacggacagaga

SEQ ID NO: 938517 - RNA, 19 nt, Homo sapiens
  misc_RNA (1)...(19): siRNA sense strand
gggcaugccgagcaggaaa

SEQ ID NO: 938518 - RNA, 19 nt, Homo sapiens
  misc_RNA (1)...(19): siRNA sense strand
gaugagaggaccuucuacu

SEQ ID NO: 938519 - RNA, 19 nt, Homo sapiens
  misc_RNA (1)...(19): siRNA sense strand
ugacacccaggaugaaguu

SEQ ID NO: 938520 - RNA, 19 nt, Homo sapiens
  misc_RNA (1)...(19): siRNA sense strand
agacagaucagaugguuuu

SEQ ID NO: 938521 - RNA, 19 nt, Homo sapiens
  misc_RNA (1)...(19): siRNA sense strand
ucuaacaugcugggagaua

SEQ ID NO: 938522 - RNA, 19 nt, Homo sapiens
  misc_RNA (1)...(19): siRNA sense strand
gaccuucuacuugguguug

SEQ ID NO: 938523 - RNA, 19 nt, Homo sapiens
  misc_RNA (1)...(19): siRNA sense strand
gagugaacagcuucucuca

SEQ ID NO: 938524 - RNA, 19 nt, Homo sapiens
  misc_RNA (1)...(19): siRNA sense strand
cuuuggaucugccugacaa

SEQ ID NO: 938525 - RNA, 19 nt, Homo sapiens
  misc_RNA (1)...(19): siRNA sense strand
aguggacucuuucuaacau

SEQ ID NO: 938526 - RNA, 19 nt, Homo sapiens
  misc_RNA (1)...(19): siRNA sense strand
aauuggaaccgacucuaaa

SEQ ID NO: 938527 - RNA, 19 nt, Homo sapiens
  misc_RNA (1)...(19): siRNA sense strand
acuugaagcugaacuugag

SEQ ID NO: 938528 - RNA, 19 nt, Homo sapiens
  misc_RNA (1)...(19): siRNA sense strand
caggaugaaguuucucaga

SEQ ID NO: 938529 - RNA, 19 nt, Homo sapiens
  misc_RNA (1)...(19): siRNA sense strand
cagagagguguaaagaaga

SEQ ID NO: 938530 - RNA, 19 nt, Homo sapiens
  misc_RNA (1)...(19): siRNA sense strand
cacccaggaugaaguuucu

SEQ ID NO: 938531 - RNA, 19 nt, Homo sapiens
  misc_RNA (1)...(19): siRNA sense strand
caggauaccaccaaagaac

SEQ ID NO: 938532 - RNA, 19 nt, Homo sapiens
  misc_RNA (1)...(19): siRNA sense strand
guaggagcacucaaacucu

SEQ ID NO: 938533 - RNA, 19 nt, Homo sapiens
  misc_RNA (1)...(19): siRNA sense strand
ugaagcugaacuugagaaa

SEQ ID NO: 938534 - RNA, 19 nt, Homo sapiens
  misc_RNA (1)...(19): siRNA sense strand
ucaggauaccaccaaagaa

SEQ ID NO: 938535 - RNA, 19 nt, Homo sapiens
  misc_RNA (1)...(19): siRNA sense strand
agaagauugugaaguuugc

SEQ ID NO: 938536 - RNA, 19 nt, Homo sapiens
  misc_RNA (1)...(19): siRNA sense strand
cuugagaaacuguccuuau

SEQ ID NO: 938537 - RNA, 19 nt, Homo sapiens
  misc_RNA (1)...(19): siRNA sense strand
gcaccgacugggacagcaa

SEQ ID NO: 938538 - RNA, 19 nt, Homo sapiens
  misc_RNA (1)...(19): siRNA sense strand
aauuggacauccuccuuca

SEQ ID NO: 938539 - RNA, 19 nt, Homo sapiens
  misc_RNA (1)...(19): siRNA sense strand
gcauguccuuccuguucuc

SEQ ID NO: 938540 - RNA, 19 nt, Homo sapiens
  misc_RNA (1)...(19): siRNA sense strand
acgcaaaguggaguccuua

SEQ ID NO: 938541 - RNA, 19 nt, Homo sapiens
  misc_RNA (1)...(19): siRNA sense strand
agacaaaucuucaaucuca

SEQ ID NO: 938542 - RNA, 19 nt, Homo sapiens
  misc_RNA (1)...(19): siRNA sense strand
cuacaaaucuaaccucauu

SEQ ID NO: 938543 - RNA, 19 nt, Homo sapiens
  misc_RNA (1)...(19): siRNA sense strand
ggagaacuuugcacaugua

SEQ ID NO: 938544 - RNA, 19 nt, Homo sapiens
  misc_RNA (1)...(19): siRNA sense strand
gcaaauuuauccugauuca

SEQ ID NO: 938545 - RNA, 19 nt, Homo sapiens
  misc_RNA (1)...(19): siRNA sense strand
gagaaaggccuuaugaaug

SEQ ID NO: 938546 - RNA, 19 nt, Homo sapiens
  misc_RNA (1)...(19): siRNA sense strand
gagaaaggccuuaugaaug

SEQ ID NO: 938547 - RNA, 19 nt, Homo sapiens
  misc_RNA (1)...(19): siRNA sense strand
gagaaaggccuuaugaaug

SEQ ID NO: 938548 - RNA, 19 nt, Homo sapiens
  misc_RNA (1)...(19): siRNA sense strand
gagaaaggccuuaugaaug

SEQ ID NO: 938549 - RNA, 19 nt, Homo sapiens
  misc_RNA (1)...(19): siRNA sense strand
ccgcaaaucugaccucauu

SEQ ID NO: 938550 - RNA, 19 nt, Homo sapiens
  misc_RNA (1)...(19): siRNA sense strand
ggagaaagaccuuaugaau

SEQ ID NO: 938551 - RNA, 19 nt, Homo sapiens
  misc_RNA (1)...(19): siRNA sense strand
ggagaaagaccuuaugaau

SEQ ID NO: 938552 - RNA, 19 nt, Homo sapiens
  misc_RNA (1)...(19): siRNA sense strand
gggaaauccuuuagacaaa

SEQ ID NO: 938553 - RNA, 19 nt, Homo sapiens
  misc_RNA (1)...(19): siRNA sense strand
gggaaauccuuuagacaaa

SEQ ID NO: 938554 - RNA, 19 nt, Homo sapiens
  misc_RNA (1)...(19): siRNA sense strand
gagaaaggccuuaugaaug

SEQ ID NO: 938555 - RNA, 19 nt, Homo sapiens
  misc_RNA (1)...(19): siRNA sense strand
agaaaggccuuaugaaugu

SEQ ID NO: 938556 - RNA, 19 nt, Homo sapiens
  misc_RNA (1)...(19): siRNA sense strand
agaaaggccuuaugaaugu

SEQ ID NO: 938557 - RNA, 19 nt, Homo sapiens
  misc_RNA (1)...(19): siRNA sense strand
agaaaggccuuaugaaugu

SEQ ID NO: 938558 - RNA, 19 nt, Homo sapiens
  misc_RNA (1)...(19): siRNA sense strand
ggaaauccuuuagacaauu

SEQ ID NO: 938559 - RNA, 19 nt, Homo sapiens
  misc_RNA (1)...(19): siRNA sense strand
ggagaaaggccuuaugaau

SEQ ID NO: 938560 - RNA, 19 nt, Homo sapiens
  misc_RNA (1)...(19): siRNA sense strand
ggagaaaggccuuaugaau

SEQ ID NO: 938561 - RNA, 19 nt, Homo sapiens
  misc_RNA (1)...(19): siRNA sense strand
ggagaaaggccuuaugaau

SEQ ID NO: 938562 - RNA, 19 nt, Homo sapiens
  misc_RNA (1)...(19): siRNA sense strand
ggagaaaggccuuaugaau

SEQ ID NO: 938563 - RNA, 19 nt, Homo sapiens
  misc_RNA (1)...(19): siRNA sense strand
ggagaaaggccuuaugaau

SEQ ID NO: 938564 - RNA, 19 nt, Homo sapiens
  misc_RNA (1)...(19): siRNA sense strand
agaaagaccuuaugaaugc

SEQ ID NO: 938565 - RNA, 19 nt, Homo sapiens
  misc_RNA (1)...(19): siRNA sense strand
ccacaaaucagaccuuauu

SEQ ID NO: 938566 - RNA, 19 nt, Homo sapiens
  misc_RNA (1)...(19): siRNA sense strand
ccaaagugcuagccucauu

SEQ ID NO: 938567 - RNA, 19 nt, Homo sapiens
  misc_RNA (1)...(19): siRNA sense strand
agaaagaccuuaugaaugc

SEQ ID NO: 938568 - RNA, 19 nt, Homo sapiens
  misc_RNA (1)...(19): siRNA sense strand
gagaaagaccuuaugaaug

SEQ ID NO: 938569 - RNA, 19 nt, Homo sapiens
  misc_RNA (1)...(19): siRNA sense strand
gagaaagaccuuaugaaug

SEQ ID NO: 938570 - RNA, 19 nt, Homo sapiens
  misc_RNA (1)...(19): siRNA sense strand
ccgcaaaucuaaccucauu

SEQ ID NO: 938571 - RNA, 19 nt, Homo sapiens
  misc_RNA (1)...(19): siRNA sense strand
gagaaagccuucacuugca

SEQ ID NO: 938572 - RNA, 19 nt, Homo sapiens
  misc_RNA (1)...(19): siRNA sense strand
gaaauccuuuagacaauuc

SEQ ID NO: 938573 - RNA, 19 nt, Homo sapiens
  misc_RNA (1)...(19): siRNA sense strand
gcaagcauauacaggcauu

SEQ ID NO: 938574 - RNA, 19 nt, Homo sapiens
  misc_RNA (1)...(19): siRNA sense strand
ggagaaagaccuuaugagu

SEQ ID NO: 938575 - RNA, 19 nt, Homo sapiens
  misc_RNA (1)...(19): siRNA sense strand
gaacuuugcacauguaaca

SEQ ID NO: 938576 - RNA, 19 nt, Homo sapiens
  misc_RNA (1)...(19): siRNA sense strand
caacaccggagaauucaua

SEQ ID NO: 938577 - RNA, 19 nt, Homo sapiens
  misc_RNA (1)...(19): siRNA sense strand
gggaaauccuuuagacaau

SEQ ID NO: 938578 - RNA, 19 nt, Homo sapiens
  misc_RNA (1)...(19): siRNA sense strand
gaaaggccuuaugaaugua

SEQ ID NO: 938579 - RNA, 19 nt, Homo sapiens
  misc_RNA (1)...(19): siRNA sense strand
gaaaggccuuaugaaugua

SEQ ID NO: 938580 - RNA, 19 nt, Homo sapiens
  misc_RNA (1)...(19): siRNA sense strand
gcaauacacccacccagaa

SEQ ID NO: 938581 - RNA, 19 nt, Homo sapiens
  misc_RNA (1)...(19): siRNA sense strand
ggaaauccuuuagacaaau

SEQ ID NO: 938582 - RNA, 19 nt, Homo sapiens
  misc_RNA (1)...(19): siRNA sense strand
ggagaaaggccuuaucagu

SEQ ID NO: 938583 - RNA, 19 nt, Homo sapiens
  misc_RNA (1)...(19): siRNA sense strand
ccagagcucuagccucauu

SEQ ID NO: 938584 - RNA, 19 nt, Homo sapiens
  misc_RNA (1)...(19): siRNA sense strand
ucagugagauuaagaugug

SEQ ID NO: 938585 - RNA, 19 nt, Homo sapiens
  misc_RNA (1)...(19): siRNA sense strand
acaauucucuaaccucauu

SEQ ID NO: 938586 - RNA, 19 nt, Homo sapiens
  misc_RNA (1)...(19): siRNA sense strand
gaagagcccuggaaaagga

SEQ ID NO: 938587 - RNA, 19 nt, Homo sapiens
  misc_RNA (1)...(19): siRNA sense strand
gaaauccuuuagacaaauc

SEQ ID NO: 938588 - RNA, 19 nt, Homo sapiens
  misc_RNA (1)...(19): siRNA sense strand
ggaugaggcuacauuugug

SEQ ID NO: 938589 - RNA, 19 nt, Homo sapiens
  misc_RNA (1)...(19): siRNA sense strand
gcucuagccucauucaaca

SEQ ID NO: 938590 - RNA, 19 nt, Homo sapiens
  misc_RNA (1)...(19): siRNA sense strand
uugaggauguggccauuua

SEQ ID NO: 938591 - RNA, 19 nt, Homo sapiens
  misc_RNA (1)...(19): siRNA sense strand
agaaaggccuuaugaaugc

SEQ ID NO: 938592 - RNA, 19 nt, Homo sapiens
  misc_RNA (1)...(19): siRNA sense strand
gaaugugggaaauccuuua

SEQ ID NO: 938593 - RNA, 19 nt, Homo sapiens
  misc_RNA (1)...(19): siRNA sense strand
agaaaggccuuaugaaugc

SEQ ID NO: 938594 - RNA, 19 nt, Homo sapiens
  misc_RNA (1)...(19): siRNA sense strand
gaaugugggaaauccuuua

SEQ ID NO: 938595 - RNA, 19 nt, Homo sapiens
  misc_RNA (1)...(19): siRNA sense strand
gaaugugggaaauccuuua

SEQ ID NO: 938596 - RNA, 19 nt, Homo sapiens
  misc_RNA (1)...(19): siRNA sense strand
ggagaaaugccuuaucagu

SEQ ID NO: 938597 - RNA, 19 nt, Homo sapiens
  misc_RNA (1)...(19): siRNA sense strand
aaucuaaccucauugaaca

SEQ ID NO: 938598 - RNA, 19 nt, Homo sapiens
  misc_RNA (1)...(19): siRNA sense strand
aaagugccaccuaaucuua

SEQ ID NO: 938599 - RNA, 19 nt, Homo sapiens
  misc_RNA (1)...(19): siRNA sense strand
gaaauccuuuagccgcaaa

SEQ ID NO: 938600 - RNA, 19 nt, Homo sapiens
  misc_RNA (1)...(19): siRNA sense strand
ggaaacccuuuacccacaa

SEQ ID NO: 938601 - RNA, 19 nt, Homo sapiens
  misc_RNA (1)...(19): siRNA sense strand
gaaauccuuuagccgcaaa

SEQ ID NO: 938602 - RNA, 19 nt, Homo sapiens
  misc_RNA (1)...(19): siRNA sense strand
ccacggaccuacuccaaca

SEQ ID NO: 938603 - RNA, 19 nt, Homo sapiens
  misc_RNA (1)...(19): siRNA sense strand
aaucggaacucauucaaca

SEQ ID NO: 938604 - RNA, 19 nt, Homo sapiens
  misc_RNA (1)...(19): siRNA sense strand
aaucugaccucauucaaca

SEQ ID NO: 938605 - RNA, 19 nt, Homo sapiens
  misc_RNA (1)...(19): siRNA sense strand
gcaaaucugaccucauuca

SEQ ID NO: 938606 - RNA, 19 nt, Homo sapiens
  misc_RNA (1)...(19): siRNA sense strand
agugggagcuccuugauga

SEQ ID NO: 938607 - RNA, 19 nt, Homo sapiens
  misc_RNA (1)...(19): siRNA sense strand
gaaggagggcuuuaugagu

SEQ ID NO: 938608 - RNA, 19 nt, Homo sapiens
  misc_RNA (1)...(19): siRNA sense strand
gcaaaucggaacucauuca

SEQ ID NO: 938609 - RNA, 19 nt, Homo sapiens
  misc_RNA (1)...(19): siRNA sense strand
ggacucggcucaggguaug

SEQ ID NO: 938610 - RNA, 19 nt, Homo sapiens
  misc_RNA (1)...(19): siRNA sense strand
gaaacccuuuacccacaaa

SEQ ID NO: 938611 - RNA, 19 nt, Homo sapiens
  misc_RNA (1)...(19): siRNA sense strand
gaaugugagaaauccuuua

SEQ ID NO: 938612 - RNA, 19 nt, Homo sapiens
  misc_RNA (1)...(19): siRNA sense strand
ccgcaaauuuauccugauu

SEQ ID NO: 938613 - RNA, 19 nt, Homo sapiens
  misc_RNA (1)...(19): siRNA sense strand
gaagguggaugaggcuaca

SEQ ID NO: 938614 - RNA, 19 nt, Homo sapiens
  misc_RNA (1)...(19): siRNA sense strand
gugcagugauugugggaaa

SEQ ID NO: 938615 - RNA, 19 nt, Homo sapiens
  misc_RNA (1)...(19): siRNA sense strand
gcgaugugaugcuggagaa

SEQ ID NO: 938616 - RNA, 19 nt, Homo sapiens
  misc_RNA (1)...(19): siRNA sense strand
ugagcagaguguaucuaua

SEQ ID NO: 938617 - RNA, 19 nt, Homo sapiens
  misc_RNA (1)...(19): siRNA sense strand
caaauucacacuggacaaa

SEQ ID NO: 938618 - RNA, 19 nt, Homo sapiens
  misc_RNA (1)...(19): siRNA sense strand
ggauguggccauuuauuuc

SEQ ID NO: 938619 - RNA, 19 nt, Homo sapiens
  misc_RNA (1)...(19): siRNA sense strand
ccauuuauuucucccaaga

SEQ ID NO: 938620 - RNA, 19 nt, Homo sapiens
  misc_RNA (1)...(19): siRNA sense strand
gcagauuccauguguugaa

SEQ ID NO: 938621 - RNA, 19 nt, Homo sapiens
  misc_RNA (1)...(19): siRNA sense strand
gugcuagccucauucaaca

SEQ ID NO: 938622 - RNA, 19 nt, Homo sapiens
  misc_RNA (1)...(19): siRNA sense strand
gaauguggcaaaucuuuua

SEQ ID NO: 938623 - RNA, 19 nt, Homo sapiens
  misc_RNA (1)...(19): siRNA sense strand
cuggagaaaugccuuauca

SEQ ID NO: 938624 - RNA, 19 nt, Homo sapiens
  misc_RNA (1)...(19): siRNA sense strand
gagugucuguucugaagga

SEQ ID NO: 938625 - RNA, 19 nt, Homo sapiens
  misc_RNA (1)...(19): siRNA sense strand
gaaaaccuuuagcuacaaa

SEQ ID NO: 938626 - RNA, 19 nt, Homo sapiens
  misc_RNA (1)...(19): siRNA sense strand
caauacacccacccagaaa

SEQ ID NO: 938627 - RNA, 19 nt, Homo sapiens
  misc_RNA (1)...(19): siRNA sense strand
uccuuuagccgcaaauuua

SEQ ID NO: 938628 - RNA, 19 nt, Homo sapiens
  misc_RNA (1)...(19): siRNA sense strand
ggugauaggccuuaugagu

SEQ ID NO: 938629 - RNA, 19 nt, Homo sapiens
  misc_RNA (1)...(19): siRNA sense strand
ugaagaagagcccuggaaa

SEQ ID NO: 938630 - RNA, 19 nt, Homo sapiens
  misc_RNA (1)...(19): siRNA sense strand
gugaauguggcaaaucuuu

SEQ ID NO: 938631 - RNA, 19 nt, Homo sapiens
  misc_RNA (1)...(19): siRNA sense strand
gaggauguggccauuuauu

SEQ ID NO: 938632 - RNA, 19 nt, Homo sapiens
  misc_RNA (1)...(19): siRNA sense strand
gaaaggccuuaugaaugug

SEQ ID NO: 938633 - RNA, 19 nt, Homo sapiens
  misc_RNA (1)...(19): siRNA sense strand
ggaccuacuccaacacgaa

SEQ ID NO: 938634 - RNA, 19 nt, Homo sapiens
  misc_RNA (1)...(19): siRNA sense strand
gaauguagugaauguggaa

SEQ ID NO: 938635 - RNA, 19 nt, Homo sapiens
  misc_RNA (1)...(19): siRNA sense strand
gaccuucaccagcaucaaa

SEQ ID NO: 938636 - RNA, 19 nt, Homo sapiens
  misc_RNA (1)...(19): siRNA sense strand
gaguguagcaaaugugaga

SEQ ID NO: 938637 - RNA, 19 nt, Homo sapiens
  misc_RNA (1)...(19): siRNA sense strand
cagcaccggagacuucaua

SEQ ID NO: 938638 - RNA, 19 nt, Homo sapiens
  misc_RNA (1)...(19): siRNA sense strand
gcagugaaugugagaaauc

SEQ ID NO: 938639 - RNA, 19 nt, Homo sapiens
  misc_RNA (1)...(19): siRNA sense strand
acaaaucuaaccucauuga

SEQ ID NO: 938640 - RNA, 19 nt, Homo sapiens
  misc_RNA (1)...(19): siRNA sense strand
agaaagccuucacuugcaa

SEQ ID NO: 938641 - RNA, 19 nt, Homo sapiens
  misc_RNA (1)...(19): siRNA sense strand
guucaaaccuuucaucuuc

SEQ ID NO: 938642 - RNA, 19 nt, Homo sapiens
  misc_RNA (1)...(19): siRNA sense strand
gcagggugccuuugacuuu

SEQ ID NO: 938643 - RNA, 19 nt, Homo sapiens
  misc_RNA (1)...(19): siRNA sense strand
caggaggccuugcauguga

SEQ ID NO: 938644 - RNA, 19 nt, Homo sapiens
  misc_RNA (1)...(19): siRNA sense strand
ggcagcagcuccagcagaa

SEQ ID NO: 938645 - RNA, 19 nt, Homo sapiens
  misc_RNA (1)...(19): siRNA sense strand
gaagacgcacgcugugauu

SEQ ID NO: 938646 - RNA, 19 nt, Homo sapiens
  misc_RNA (1)...(19): siRNA sense strand
caaggagagugguaucugu

SEQ ID NO: 938647 - RNA, 19 nt, Homo sapiens
  misc_RNA (1)...(19): siRNA sense strand
ggagagugguaucuguaug

SEQ ID NO: 938648 - RNA, 19 nt, Homo sapiens
  misc_RNA (1)...(19): siRNA sense strand
ggucuguguucaaaccuuu

SEQ ID NO: 938649 - RNA, 19 nt, Homo sapiens
  misc_RNA (1)...(19): siRNA sense strand
gcgccauucuccuaccaua

SEQ ID NO: 938650 - RNA, 19 nt, Homo sapiens
  misc_RNA (1)...(19): siRNA sense strand
ggaggaugcugcgccauuc

SEQ ID NO: 938651 - RNA, 19 nt, Homo sapiens
  misc_RNA (1)...(19): siRNA sense strand
gagcauggugucugcauug

SEQ ID NO: 938652 - RNA, 19 nt, Homo sapiens
  misc_RNA (1)...(19): siRNA sense strand
ugacuuugcucagaucuuc

SEQ ID NO: 938653 - RNA, 19 nt, Homo sapiens
  misc_RNA (1)...(19): siRNA sense strand
caucccggcugugaucuuu

SEQ ID NO: 938654 - RNA, 19 nt, Homo sapiens
  misc_RNA (1)...(19): siRNA sense strand
ccagugcaccuacauugaa

SEQ ID NO: 938655 - RNA, 19 nt, Homo sapiens
  misc_RNA (1)...(19): siRNA sense strand
caggguuacuggagcacua

SEQ ID NO: 938656 - RNA, 19 nt, Homo sapiens
  misc_RNA (1)...(19): siRNA sense strand
ugcaggaggugguguuugu

SEQ ID NO: 938657 - RNA, 19 nt, Homo sapiens
  misc_RNA (1)...(19): siRNA sense strand
cgagcauggugucugcauu

SEQ ID NO: 938658 - RNA, 19 nt, Homo sapiens
  misc_RNA (1)...(19): siRNA sense strand
cagggugccuuugacuuug

SEQ ID NO: 938659 - RNA, 19 nt, Homo sapiens
  misc_RNA (1)...(19): siRNA sense strand
caccuacauugaaguggaa

SEQ ID NO: 938660 - RNA, 19 nt, Homo sapiens
  misc_RNA (1)...(19): siRNA sense strand
ggacaucucggcccaacac

SEQ ID NO: 938661 - RNA, 19 nt, Homo sapiens
  misc_RNA (1)...(19): siRNA sense strand
gagagugguaucuguaugg

SEQ ID NO: 938662 - RNA, 19 nt, Homo sapiens
  misc_RNA (1)...(19): siRNA sense strand
uggaacaggugucgaagac

SEQ ID NO: 938663 - RNA, 19 nt, Homo sapiens
  misc_RNA (1)...(19): siRNA sense strand
cgaagacgcacgcugugau

SEQ ID NO: 938664 - RNA, 19 nt, Homo sapiens
  misc_RNA (1)...(19): siRNA sense strand
gagacaaggagagugguau

SEQ ID NO: 938665 - RNA, 19 nt, Homo sapiens
  misc_RNA (1)...(19): siRNA sense strand
gccuuugacuuugcucaga

SEQ ID NO: 938666 - RNA, 19 nt, Homo sapiens
  misc_RNA (1)...(19): siRNA sense strand
aaggagagugguaucugua

SEQ ID NO: 938667 - RNA, 19 nt, Homo sapiens
  misc_RNA (1)...(19): siRNA sense strand
ggaaaggugucugagauua

SEQ ID NO: 938668 - RNA, 19 nt, Homo sapiens
  misc_RNA (1)...(19): siRNA sense strand
gaacaaguuucccuggaua

SEQ ID NO: 938669 - RNA, 19 nt, Homo sapiens
  misc_RNA (1)...(19): siRNA sense strand
gagagaagauccaggagaa

SEQ ID NO: 938670 - RNA, 19 nt, Homo sapiens
  misc_RNA (1)...(19): siRNA sense strand
gaaaggugucugagauuaa

SEQ ID NO: 938671 - RNA, 19 nt, Homo sapiens
  misc_RNA (1)...(19): siRNA sense strand
ugucugagauuaagaagaa

SEQ ID NO: 938672 - RNA, 19 nt, Homo sapiens
  misc_RNA (1)...(19): siRNA sense strand
uagcagagaugguacugaa

SEQ ID NO: 938673 - RNA, 19 nt, Homo sapiens
  misc_RNA (1)...(19): siRNA sense strand
acaaagcgguggucuugaa

SEQ ID NO: 938674 - RNA, 19 nt, Homo sapiens
  misc_RNA (1)...(19): siRNA sense strand
ggaaguggaccaugauuuc

SEQ ID NO: 938675 - RNA, 19 nt, Homo sapiens
  misc_RNA (1)...(19): siRNA sense strand
agaagaagaucaagucgau

SEQ ID NO: 938676 - RNA, 19 nt, Homo sapiens
  misc_RNA (1)...(19): siRNA sense strand
gaacgggaccacacguauu

SEQ ID NO: 938677 - RNA, 19 nt, Homo sapiens
  misc_RNA (1)...(19): siRNA sense strand
gaguggcuuuggcgucuua

SEQ ID NO: 938678 - RNA, 19 nt, Homo sapiens
  misc_RNA (1)...(19): siRNA sense strand
ggagaacaacaucaucuga

SEQ ID NO: 938679 - RNA, 19 nt, Homo sapiens
  misc_RNA (1)...(19): siRNA sense strand
caacaccuuugaccagaau

SEQ ID NO: 938680 - RNA, 19 nt, Homo sapiens
  misc_RNA (1)...(19): siRNA sense strand
ugacaaagcgguggucuug

SEQ ID NO: 938681 - RNA, 19 nt, Homo sapiens
  misc_RNA (1)...(19): siRNA sense strand
ggacgaagguugguuugac

SEQ ID NO: 938682 - RNA, 19 nt, Homo sapiens
  misc_RNA (1)...(19): siRNA sense strand
uacggaacaucaaugagua

SEQ ID NO: 938683 - RNA, 19 nt, Homo sapiens
  misc_RNA (1)...(19): siRNA sense strand
agggagaggugacacguuu

SEQ ID NO: 938684 - RNA, 19 nt, Homo sapiens
  misc_RNA (1)...(19): siRNA sense strand
ggaggacgaagguugguuu

SEQ ID NO: 938685 - RNA, 19 nt, Homo sapiens
  misc_RNA (1)...(19): siRNA sense strand
ggagggagccaaaguuucu

SEQ ID NO: 938686 - RNA, 19 nt, Homo sapiens
  misc_RNA (1)...(19): siRNA sense strand
gagccaaaguuucucugau

SEQ ID NO: 938687 - RNA, 19 nt, Homo sapiens
  misc_RNA (1)...(19): siRNA sense strand
gcuugucuguggccuauug

SEQ ID NO: 938688 - RNA, 19 nt, Homo sapiens
  misc_RNA (1)...(19): siRNA sense strand
gcaggagggagccaaaguu

SEQ ID NO: 938689 - RNA, 19 nt, Homo sapiens
  misc_RNA (1)...(19): siRNA sense strand
ggaagguccugugaucuac

SEQ ID NO: 938690 - RNA, 19 nt, Homo sapiens
  misc_RNA (1)...(19): siRNA sense strand
caaaguuucucugaugucu

SEQ ID NO: 938691 - RNA, 19 nt, Homo sapiens
  misc_RNA (1)...(19): siRNA sense strand
gcacucggauguggugauc

SEQ ID NO: 938692 - RNA, 19 nt, Homo sapiens
  misc_RNA (1)...(19): siRNA sense strand
ccugugaucuacugcaaga

SEQ ID NO: 938693 - RNA, 19 nt, Homo sapiens
  misc_RNA (1)...(19): siRNA sense strand
gaaaagguauguguaugug

SEQ ID NO: 938694 - RNA, 19 nt, Homo sapiens
  misc_RNA (1)...(19): siRNA sense strand
gccaaaguuucucugaugu

SEQ ID NO: 938695 - RNA, 19 nt, Homo sapiens
  misc_RNA (1)...(19): siRNA sense strand
ggaacgggaccacacguau

SEQ ID NO: 938696 - RNA, 19 nt, Homo sapiens
  misc_RNA (1)...(19): siRNA sense strand
gagauuaagaagaagauca

SEQ ID NO: 938697 - RNA, 19 nt, Homo sapiens
  misc_RNA (1)...(19): siRNA sense strand
gucaacauguacuuugcua

SEQ ID NO: 938698 - RNA, 19 nt, Homo sapiens
  misc_RNA (1)...(19): siRNA sense strand
ccuauuggcugaagaagcu

SEQ ID NO: 938699 - RNA, 19 nt, Homo sapiens
  misc_RNA (1)...(19): siRNA sense strand
gagaagauccaggagaaca

SEQ ID NO: 938700 - RNA, 19 nt, Homo sapiens
  misc_RNA (1)...(19): siRNA sense strand
gcauguugaccacagauga

SEQ ID NO: 938701 - RNA, 19 nt, Homo sapiens
  misc_RNA (1)...(19): siRNA sense strand
cagacgaggugcuauucga

SEQ ID NO: 938702 - RNA, 19 nt, Homo sapiens
  misc_RNA (1)...(19): siRNA sense strand
caggagggagccaaaguuu

SEQ ID NO: 938703 - RNA, 19 nt, Homo sapiens
  misc_RNA (1)...(19): siRNA sense strand
ugaaguccaugugaagaug

SEQ ID NO: 938704 - RNA, 19 nt, Homo sapiens
  misc_RNA (1)...(19): siRNA sense strand
acacagagggaguggcuuu

SEQ ID NO: 938705 - RNA, 19 nt, Homo sapiens
  misc_RNA (1)...(19): siRNA sense strand
gauggaaaggugucugaga

SEQ ID NO: 938706 - RNA, 19 nt, Homo sapiens
  misc_RNA (1)...(19): siRNA sense strand
ccuggaagguccugugauc

SEQ ID NO: 938707 - RNA, 19 nt, Homo sapiens
  misc_RNA (1)...(19): siRNA sense strand
agccaaaguuucucugaug

SEQ ID NO: 938708 - RNA, 19 nt, Homo sapiens
  misc_RNA (1)...(19): siRNA sense strand
aaaggugucugagauuaag

SEQ ID NO: 938709 - RNA, 19 nt, Homo sapiens
  misc_RNA (1)...(19): siRNA sense strand
agacaccaguggagccuau

SEQ ID NO: 938710 - RNA, 19 nt, Homo sapiens
  misc_RNA (1)...(19): siRNA sense strand
gaugucuccugaucagcuu

SEQ ID NO: 938711 - RNA, 19 nt, Homo sapiens
  misc_RNA (1)...(19): siRNA sense strand
ggagagcaacgugaaagug

SEQ ID NO: 938712 - RNA, 19 nt, Homo sapiens
  misc_RNA (1)...(19): siRNA sense strand
guaccuggccguagucgau

SEQ ID NO: 938713 - RNA, 19 nt, Homo sapiens
  misc_RNA (1)...(19): siRNA sense strand
ggagccaaaguuucucuga

SEQ ID NO: 938714 - RNA, 19 nt, Homo sapiens
  misc_RNA (1)...(19): siRNA sense strand
caaagcgguggucuugaaa

SEQ ID NO: 938715 - RNA, 19 nt, Homo sapiens
  misc_RNA (1)...(19): siRNA sense strand
uggaagguccugugaucua

SEQ ID NO: 938716 - RNA, 19 nt, Homo sapiens
  misc_RNA (1)...(19): siRNA sense strand
ucucugaugucuccugauc

SEQ ID NO: 938717 - RNA, 19 nt, Homo sapiens
  misc_RNA (1)...(19): siRNA sense strand
cugaucagcuucggaacaa

SEQ ID NO: 938718 - RNA, 19 nt, Homo sapiens
  misc_RNA (1)...(19): siRNA sense strand
caacauguacuuugcuacu

SEQ ID NO: 938719 - RNA, 19 nt, Homo sapiens
  misc_RNA (1)...(19): siRNA sense strand
ugaaaaggauccaugaagu

SEQ ID NO: 938720 - RNA, 19 nt, Homo sapiens
  misc_RNA (1)...(19): siRNA sense strand
cuacggaacaucaaugagu

SEQ ID NO: 938721 - RNA, 19 nt, Homo sapiens
  misc_RNA (1)...(19): siRNA sense strand
uuaagaagaagaucaaguc

SEQ ID NO: 938722 - RNA, 19 nt, Homo sapiens
  misc_RNA (1)...(19): siRNA sense strand
cuagagacuccgcuuguug

SEQ ID NO: 938723 - RNA, 19 nt, Homo sapiens
  misc_RNA (1)...(19): siRNA sense strand
ccuagagacuccgcuuguu

SEQ ID NO: 938724 - RNA, 19 nt, Homo sapiens
  misc_RNA (1)...(19): siRNA sense strand
guaccagccuguggaaugc

SEQ ID NO: 938725 - RNA, 19 nt, Homo sapiens
  misc_RNA (1)...(19): siRNA sense strand
ggaguaccagccuguggaa

SEQ ID NO: 938726 - RNA, 19 nt, Homo sapiens
  misc_RNA (1)...(19): siRNA sense strand
gaucagcuucggaacaagu

SEQ ID NO: 938727 - RNA, 19 nt, Homo sapiens
  misc_RNA (1)...(19): siRNA sense strand
ggaaaagguauguguaugu

SEQ ID NO: 938728 - RNA, 19 nt, Homo sapiens
  misc_RNA (1)...(19): siRNA sense strand
gggauggaaaggugucuga

SEQ ID NO: 938729 - RNA, 19 nt, Homo sapiens
  misc_RNA (1)...(19): siRNA sense strand
gaaguggaccaugauuucu

SEQ ID NO: 938730 - RNA, 19 nt, Homo sapiens
  misc_RNA (1)...(19): siRNA sense strand
acaacaccuuugaccagaa

SEQ ID NO: 938731 - RNA, 19 nt, Homo sapiens
  misc_RNA (1)...(19): siRNA sense strand
auggaaaggugucugagau

SEQ ID NO: 938732 - RNA, 19 nt, Homo sapiens
  misc_RNA (1)...(19): siRNA sense strand
ucucuggacugggauggaa

SEQ ID NO: 938733 - RNA, 19 nt, Homo sapiens
  misc_RNA (1)...(19): siRNA sense strand
guugaccacagaugacaaa

SEQ ID NO: 938734 - RNA, 19 nt, Homo sapiens
  misc_RNA (1)...(19): siRNA sense strand
gaaaaggauccaugaaguc

SEQ ID NO: 938735 - RNA, 19 nt, Homo sapiens
  misc_RNA (1)...(19): siRNA sense strand
gcgguggucuugaaaagga

SEQ ID NO: 938736 - RNA, 19 nt, Homo sapiens
  misc_RNA (1)...(19): siRNA sense strand
uggaaguggaccaugauuu

SEQ ID NO: 938737 - RNA, 19 nt, Homo sapiens
  misc_RNA (1)...(19): siRNA sense strand
cugcagccauggagagcaa

SEQ ID NO: 938738 - RNA, 19 nt, Homo sapiens
  misc_RNA (1)...(19): siRNA sense strand
gacaagguguggccccauu

SEQ ID NO: 938739 - RNA, 19 nt, Homo sapiens
  misc_RNA (1)...(19): siRNA sense strand
gaggaaaagguauguguau

SEQ ID NO: 938740 - RNA, 19 nt, Homo sapiens
  misc_RNA (1)...(19): siRNA sense strand
guccugugaucuacugcaa

SEQ ID NO: 938741 - RNA, 19 nt, Homo sapiens
  misc_RNA (1)...(19): siRNA sense strand
ugucagcaguucucauugc

SEQ ID NO: 938742 - RNA, 19 nt, Homo sapiens
  misc_RNA (1)...(19): siRNA sense strand
uggcuugucuguggccuau

SEQ ID NO: 938743 - RNA, 19 nt, Homo sapiens
  misc_RNA (1)...(19): siRNA sense strand
uuacgacuacaacaccuuu

SEQ ID NO: 938744 - RNA, 19 nt, Homo sapiens
  misc_RNA (1)...(19): siRNA sense strand
gggaaggauuagguagcaa

SEQ ID NO: 938745 - RNA, 19 nt, Homo sapiens
  misc_RNA (1)...(19): siRNA sense strand
gcucucaguaggugggauu

SEQ ID NO: 938746 - RNA, 19 nt, Homo sapiens
  misc_RNA (1)...(19): siRNA sense strand
cgggaaggauuagguagca

SEQ ID NO: 938747 - RNA, 19 nt, Homo sapiens
  misc_RNA (1)...(19): siRNA sense strand
gagccuggucugcgcaaau

SEQ ID NO: 938748 - RNA, 19 nt, Homo sapiens
  misc_RNA (1)...(19): siRNA sense strand
ccauggagagcaacgugaa

SEQ ID NO: 938749 - RNA, 19 nt, Homo sapiens
  misc_RNA (1)...(19): siRNA sense strand
gaagauccaggagaacaac

SEQ ID NO: 938750 - RNA, 19 nt, Homo sapiens
  misc_RNA (1)...(19): siRNA sense strand
uggaaaggugucugagauu

SEQ ID NO: 938751 - RNA, 19 nt, Homo sapiens
  misc_RNA (1)...(19): siRNA sense strand
gaggacgaagguugguuug

SEQ ID NO: 938752 - RNA, 19 nt, Homo sapiens
  misc_RNA (1)...(19): siRNA sense strand
acaaguuucccuggauaaa

SEQ ID NO: 938753 - RNA, 19 nt, Homo sapiens
  misc_RNA (1)...(19): siRNA sense strand
ggaguggcuuuggcgucuu

SEQ ID NO: 938754 - RNA, 19 nt, Homo sapiens
  misc_RNA (1)...(19): siRNA sense strand
caggagaacaacaucaucu

SEQ ID NO: 938755 - RNA, 19 nt, Homo sapiens
  misc_RNA (1)...(19): siRNA sense strand
aguggaccaugauuucuuc

SEQ ID NO: 938756 - RNA, 19 nt, Homo sapiens
  misc_RNA (1)...(19): siRNA sense strand
gaaacacacuugcagacua

SEQ ID NO: 938757 - RNA, 19 nt, Homo sapiens
  misc_RNA (1)...(19): siRNA sense strand
gcagaagcauagaaauaaa

SEQ ID NO: 938758 - RNA, 19 nt, Homo sapiens
  misc_RNA (1)...(19): siRNA sense strand
caaagcagcuggauuuaag

SEQ ID NO: 938759 - RNA, 19 nt, Homo sapiens
  misc_RNA (1)...(19): siRNA sense strand
gagagcugcugaucaguuu

SEQ ID NO: 938760 - RNA, 19 nt, Homo sapiens
  misc_RNA (1)...(19): siRNA sense strand
caaugaagaugccaugaga

SEQ ID NO: 938761 - RNA, 19 nt, Homo sapiens
  misc_RNA (1)...(19): siRNA sense strand
caacuaaagcugcgggaua

SEQ ID NO: 938762 - RNA, 19 nt, Homo sapiens
  misc_RNA (1)...(19): siRNA sense strand
caccaaagcagcuggauuu

SEQ ID NO: 938763 - RNA, 19 nt, Homo sapiens
  misc_RNA (1)...(19): siRNA sense strand
gaaacuagcagugaaguca

SEQ ID NO: 938764 - RNA, 19 nt, Homo sapiens
  misc_RNA (1)...(19): siRNA sense strand
gcagcuggauuuaagacaa

SEQ ID NO: 938765 - RNA, 19 nt, Homo sapiens
  misc_RNA (1)...(19): siRNA sense strand
ggcagaagcauagaaauaa

SEQ ID NO: 938766 - RNA, 19 nt, Homo sapiens
  misc_RNA (1)...(19): siRNA sense strand
cugaucaguuugacauaua

SEQ ID NO: 938767 - RNA, 19 nt, Homo sapiens
  misc_RNA (1)...(19): siRNA sense strand
gaagucaaaccacccaaug

SEQ ID NO: 938768 - RNA, 19 nt, Homo sapiens
  misc_RNA (1)...(19): siRNA sense strand
gcaaauacagccacacagu

SEQ ID NO: 938769 - RNA, 19 nt, Homo sapiens
  misc_RNA (1)...(19): siRNA sense strand
caugagagcugcugaucag

SEQ ID NO: 938770 - RNA, 19 nt, Homo sapiens
  misc_RNA (1)...(19): siRNA sense strand
uggcagaagcauagaaaua

SEQ ID NO: 938771 - RNA, 19 nt, Homo sapiens
  misc_RNA (1)...(19): siRNA sense strand
gcugaucaguuugacauau

SEQ ID NO: 938772 - RNA, 19 nt, Homo sapiens
  misc_RNA (1)...(19): siRNA sense strand
gaggcaagacccauuaaau

SEQ ID NO: 938773 - RNA, 19 nt, Homo sapiens
  misc_RNA (1)...(19): siRNA sense strand
ccaaagcagcuggauuuaa

SEQ ID NO: 938774 - RNA, 19 nt, Homo sapiens
  misc_RNA (1)...(19): siRNA sense strand
ucagaggcaagacccauua

SEQ ID NO: 938775 - RNA, 19 nt, Homo sapiens
  misc_RNA (1)...(19): siRNA sense strand
caaaccacccaaugaguga

SEQ ID NO: 938776 - RNA, 19 nt, Homo sapiens
  misc_RNA (1)...(19): siRNA sense strand
aaacacacuugcagacuac

SEQ ID NO: 938777 - RNA, 19 nt, Homo sapiens
  misc_RNA (1)...(19): siRNA sense strand
agaggaaacuagcagugaa

SEQ ID NO: 938778 - RNA, 19 nt, Homo sapiens
  misc_RNA (1)...(19): siRNA sense strand
ccacacagucaaccacaaa

SEQ ID NO: 938779 - RNA, 19 nt, Homo sapiens
  misc_RNA (1)...(19): siRNA sense strand
gcaguaauccagcuuucug

SEQ ID NO: 938780 - RNA, 19 nt, Homo sapiens
  misc_RNA (1)...(19): siRNA sense strand
gagcugcugaucaguuuga

SEQ ID NO: 938781 - RNA, 19 nt, Homo sapiens
  misc_RNA (1)...(19): siRNA sense strand
gcacugcugcuuuuccuua

SEQ ID NO: 938782 - RNA, 19 nt, Homo sapiens
  misc_RNA (1)...(19): siRNA sense strand
aaagcucuaucccgucuug

SEQ ID NO: 938783 - RNA, 19 nt, Homo sapiens
  misc_RNA (1)...(19): siRNA sense strand
aaucucaaccgaucuggua

SEQ ID NO: 938784 - RNA, 19 nt, Homo sapiens
  misc_RNA (1)...(19): siRNA sense strand
uaaagcugcgggauacaaa

SEQ ID NO: 938785 - RNA, 19 nt, Homo sapiens
  misc_RNA (1)...(19): siRNA sense strand
cagcaguaauccagcuuuc

SEQ ID NO: 938786 - RNA, 19 nt, Homo sapiens
  misc_RNA (1)...(19): siRNA sense strand
aaauacagccacacaguca

SEQ ID NO: 938787 - RNA, 19 nt, Homo sapiens
  misc_RNA (1)...(19): siRNA sense strand
uaaaugaaacacacuugca

SEQ ID NO: 938788 - RNA, 19 nt, Homo sapiens
  misc_RNA (1)...(19): siRNA sense strand
acaaguggcagaagcauag

SEQ ID NO: 938789 - RNA, 19 nt, Homo sapiens
  misc_RNA (1)...(19): siRNA sense strand
ugagagcugcugaucaguu

SEQ ID NO: 938790 - RNA, 19 nt, Homo sapiens
  misc_RNA (1)...(19): siRNA sense strand
gcugcgggauacaaaguca

SEQ ID NO: 938791 - RNA, 19 nt, Homo sapiens
  misc_RNA (1)...(19): siRNA sense strand
cagcuggauuuaagacaag

SEQ ID NO: 938792 - RNA, 19 nt, Homo sapiens
  misc_RNA (1)...(19): siRNA sense strand
ccaccaaaucagcaggaua

SEQ ID NO: 938793 - RNA, 19 nt, Homo sapiens
  misc_RNA (1)...(19): siRNA sense strand
auauauuccucccagcaaa

SEQ ID NO: 938794 - RNA, 19 nt, Homo sapiens
  misc_RNA (1)...(19): siRNA sense strand
caccaaaucagcaggauac

SEQ ID NO: 938795 - RNA, 19 nt, Homo sapiens
  misc_RNA (1)...(19): siRNA sense strand
uagaggaaacuagcaguga

SEQ ID NO: 938796 - RNA, 19 nt, Homo sapiens
  misc_RNA (1)...(19): siRNA sense strand
gcuguggcacugcugcuuu

SEQ ID NO: 938797 - RNA, 19 nt, Homo sapiens
  misc_RNA (1)...(19): siRNA sense strand
aacuagcagugaagucaaa

SEQ ID NO: 938798 - RNA, 19 nt, Homo sapiens
  misc_RNA (1)...(19): siRNA sense strand
gccacacagucaaccacaa

SEQ ID NO: 938799 - RNA, 19 nt, Homo sapiens
  misc_RNA (1)...(19): siRNA sense strand
gaggaaacuagcagugaag

SEQ ID NO: 938800 - RNA, 19 nt, Homo sapiens
  misc_RNA (1)...(19): siRNA sense strand
ccaccaaagcagcuggauu

SEQ ID NO: 938801 - RNA, 19 nt, Homo sapiens
  misc_RNA (1)...(19): siRNA sense strand
cauauauuccucccagcaa

SEQ ID NO: 938802 - RNA, 19 nt, Homo sapiens
  misc_RNA (1)...(19): siRNA sense strand
cagaggcaagacccauuaa

SEQ ID NO: 938803 - RNA, 19 nt, Homo sapiens
  misc_RNA (1)...(19): siRNA sense strand
ggaaacuagcagugaaguc

SEQ ID NO: 938804 - RNA, 19 nt, Homo sapiens
  misc_RNA (1)...(19): siRNA sense strand
gaagaaucucaaccgaucu

SEQ ID NO: 938805 - RNA, 19 nt, Homo sapiens
  misc_RNA (1)...(19): siRNA sense strand
cuaaagcugcgggauacaa

SEQ ID NO: 938806 - RNA, 19 nt, Homo sapiens
  misc_RNA (1)...(19): siRNA sense strand
gcacagaggugacaucuca

SEQ ID NO: 938807 - RNA, 19 nt, Homo sapiens
  misc_RNA (1)...(19): siRNA sense strand
gcacacggcugcacagaaa

SEQ ID NO: 938808 - RNA, 19 nt, Homo sapiens
  misc_RNA (1)...(19): siRNA sense strand
gcauggaucuacugugaaa

SEQ ID NO: 938809 - RNA, 19 nt, Homo sapiens
  misc_RNA (1)...(19): siRNA sense strand
ggaagcagaggaagaagaa

SEQ ID NO: 938810 - RNA, 19 nt, Homo sapiens
  misc_RNA (1)...(19): siRNA sense strand
ggaggaagcagaggaagaa

SEQ ID NO: 938811 - RNA, 19 nt, Homo sapiens
  misc_RNA (1)...(19): siRNA sense strand
ggaagaagaaggcauggau

SEQ ID NO: 938812 - RNA, 19 nt, Homo sapiens
  misc_RNA (1)...(19): siRNA sense strand
aggcauggaucuacuguga

SEQ ID NO: 938813 - RNA, 19 nt, Homo sapiens
  misc_RNA (1)...(19): siRNA sense strand
gaagaaggcauggaucuac

SEQ ID NO: 938814 - RNA, 19 nt, Homo sapiens
  misc_RNA (1)...(19): siRNA sense strand
ggagauggccuggguagag

SEQ ID NO: 938815 - RNA, 19 nt, Homo sapiens
  misc_RNA (1)...(19): siRNA sense strand
ggaggaggaagcagaggaa

SEQ ID NO: 938816 - RNA, 19 nt, Homo sapiens
  misc_RNA (1)...(19): siRNA sense strand
aggcagcccucuucuagug

SEQ ID NO: 938817 - RNA, 19 nt, Homo sapiens
  misc_RNA (1)...(19): siRNA sense strand
ccaggcagcccucuucuag

SEQ ID NO: 938818 - RNA, 19 nt, Homo sapiens
  misc_RNA (1)...(19): siRNA sense strand
gcugcccacuggcugauga

SEQ ID NO: 938819 - RNA, 19 nt, Homo sapiens
  misc_RNA (1)...(19): siRNA sense strand
cgagccaacucccgguaga

SEQ ID NO: 938820 - RNA, 19 nt, Homo sapiens
  misc_RNA (1)...(19): siRNA sense strand
ggaugucaccuuccucuac

SEQ ID NO: 938821 - RNA, 19 nt, Homo sapiens
  misc_RNA (1)...(19): siRNA sense strand
gaaggcauggaucuacugu

SEQ ID NO: 938822 - RNA, 19 nt, Homo sapiens
  misc_RNA (1)...(19): siRNA sense strand
ggcugugucuguucaaguc

SEQ ID NO: 938823 - RNA, 19 nt, Homo sapiens
  misc_RNA (1)...(19): siRNA sense strand
agaagaaggcauggaucua

SEQ ID NO: 938824 - RNA, 19 nt, Homo sapiens
  misc_RNA (1)...(19): siRNA sense strand
caaauugcccggagugucu

SEQ ID NO: 938825 - RNA, 19 nt, Homo sapiens
  misc_RNA (1)...(19): siRNA sense strand
ggaagccccugguggagaa

SEQ ID NO: 938826 - RNA, 19 nt, Homo sapiens
  misc_RNA (1)...(19): siRNA sense strand
gcagcagcuuccaggaucu

SEQ ID NO: 938827 - RNA, 19 nt, Homo sapiens
  misc_RNA (1)...(19): siRNA sense strand
cugccgagcuccugaacca

SEQ ID NO: 938828 - RNA, 19 nt, Homo sapiens
  misc_RNA (1)...(19): siRNA sense strand
gggcagcagcuuccaggau

SEQ ID NO: 938829 - RNA, 19 nt, Homo sapiens
  misc_RNA (1)...(19): siRNA sense strand
ccugaccacagcccaaauu

SEQ ID NO: 938830 - RNA, 19 nt, Homo sapiens
  misc_RNA (1)...(19): siRNA sense strand
gaauugagauuagcagaaa

SEQ ID NO: 938831 - RNA, 19 nt, Homo sapiens
  misc_RNA (1)...(19): siRNA sense strand
gaaauacaaucaacucaag

SEQ ID NO: 938832 - RNA, 19 nt, Homo sapiens
  misc_RNA (1)...(19): siRNA sense strand
ugacagaguugcuaucuau

SEQ ID NO: 938833 - RNA, 19 nt, Homo sapiens
  misc_RNA (1)...(19): siRNA sense strand
gaaagggagcuuauugaaa

SEQ ID NO: 938834 - RNA, 19 nt, Homo sapiens
  misc_RNA (1)...(19): siRNA sense strand
aaagggagcuuauugaaag

SEQ ID NO: 938835 - RNA, 19 nt, Homo sapiens
  misc_RNA (1)...(19): siRNA sense strand
ggaauauguuuauccagaa

SEQ ID NO: 938836 - RNA, 19 nt, Homo sapiens
  misc_RNA (1)...(19): siRNA sense strand
ggaaagggagcuuauugaa

SEQ ID NO: 938837 - RNA, 19 nt, Homo sapiens
  misc_RNA (1)...(19): siRNA sense strand
gagagacccauuacaagua

SEQ ID NO: 938838 - RNA, 19 nt, Homo sapiens
  misc_RNA (1)...(19): siRNA sense strand
caaaauggguuaccuguga

SEQ ID NO: 938839 - RNA, 19 nt, Homo sapiens
  misc_RNA (1)...(19): siRNA sense strand
ugacuuaacauaccacgua

SEQ ID NO: 938840 - RNA, 19 nt, Homo sapiens
  misc_RNA (1)...(19): siRNA sense strand
cuacauggccacacaguuu

SEQ ID NO: 938841 - RNA, 19 nt, Homo sapiens
  misc_RNA (1)...(19): siRNA sense strand
gaauauuccugggacauca

SEQ ID NO: 938842 - RNA, 19 nt, Homo sapiens
  misc_RNA (1)...(19): siRNA sense strand
gcagaaauggaccuuaaga

SEQ ID NO: 938843 - RNA, 19 nt, Homo sapiens
  misc_RNA (1)...(19): siRNA sense strand
gacagacaauacuuacuau

SEQ ID NO: 938844 - RNA, 19 nt, Homo sapiens
  misc_RNA (1)...(19): siRNA sense strand
aggcagaaauggaccuuaa

SEQ ID NO: 938845 - RNA, 19 nt, Homo sapiens
  misc_RNA (1)...(19): siRNA sense strand
ugacucuguugguguauuu

SEQ ID NO: 938846 - RNA, 19 nt, Homo sapiens
  misc_RNA (1)...(19): siRNA sense strand
agacagacaauacuuacua

SEQ ID NO: 938847 - RNA, 19 nt, Homo sapiens
  misc_RNA (1)...(19): siRNA sense strand
ccauggcaauguaugcaua

SEQ ID NO: 938848 - RNA, 19 nt, Homo sapiens
  misc_RNA (1)...(19): siRNA sense strand
ucauggagccaguaacaua

SEQ ID NO: 938849 - RNA, 19 nt, Homo sapiens
  misc_RNA (1)...(19): siRNA sense strand
gcauugagcagcaccaguu

SEQ ID NO: 938850 - RNA, 19 nt, Homo sapiens
  misc_RNA (1)...(19): siRNA sense strand
guaacauacuucaucacuu

SEQ ID NO: 938851 - RNA, 19 nt, Homo sapiens
  misc_RNA (1)...(19): siRNA sense strand
gaauuugggagcuguuuau

SEQ ID NO: 938852 - RNA, 19 nt, Homo sapiens
  misc_RNA (1)...(19): siRNA sense strand
gagcagcaccaguuaaaca

SEQ ID NO: 938853 - RNA, 19 nt, Homo sapiens
  misc_RNA (1)...(19): siRNA sense strand
gaauauguuuauccagaag

SEQ ID NO: 938854 - RNA, 19 nt, Homo sapiens
  misc_RNA (1)...(19): siRNA sense strand
cagaguugcuaucuauuca

SEQ ID NO: 938855 - RNA, 19 nt, Homo sapiens
  misc_RNA (1)...(19): siRNA sense strand
agaaauggaccuuaagaga

SEQ ID NO: 938856 - RNA, 19 nt, Homo sapiens
  misc_RNA (1)...(19): siRNA sense strand
cagagacagacaauacuua

SEQ ID NO: 938857 - RNA, 19 nt, Homo sapiens
  misc_RNA (1)...(19): siRNA sense strand
gcugaaugauguaaagaca

SEQ ID NO: 938858 - RNA, 19 nt, Homo sapiens
  misc_RNA (1)...(19): siRNA sense strand
ggaauugacagaguugcua

SEQ ID NO: 938859 - RNA, 19 nt, Homo sapiens
  misc_RNA (1)...(19): siRNA sense strand
gagacugagagacccauua

SEQ ID NO: 938860 - RNA, 19 nt, Homo sapiens
  misc_RNA (1)...(19): siRNA sense strand
gagaagaggaccacuuugg

SEQ ID NO: 938861 - RNA, 19 nt, Homo sapiens
  misc_RNA (1)...(19): siRNA sense strand
gaaaagguacgaauugaga

SEQ ID NO: 938862 - RNA, 19 nt, Homo sapiens
  misc_RNA (1)...(19): siRNA sense strand
uacgacaacugcaagaaga

SEQ ID NO: 938863 - RNA, 19 nt, Homo sapiens
  misc_RNA (1)...(19): siRNA sense strand
cggcuuaccuggugggaau

SEQ ID NO: 938864 - RNA, 19 nt, Homo sapiens
  misc_RNA (1)...(19): siRNA sense strand
uaaugacacgccaggaaua

SEQ ID NO: 938865 - RNA, 19 nt, Homo sapiens
  misc_RNA (1)...(19): siRNA sense strand
ggagcuuauugaaagacua

SEQ ID NO: 938866 - RNA, 19 nt, Homo sapiens
  misc_RNA (1)...(19): siRNA sense strand
ccaggaauauguuuaucca

SEQ ID NO: 938867 - RNA, 19 nt, Homo sapiens
  misc_RNA (1)...(19): siRNA sense strand
ggcaauguaugcauauuuu

SEQ ID NO: 938868 - RNA, 19 nt, Homo sapiens
  misc_RNA (1)...(19): siRNA sense strand
gacuagaggaucucaaaga

SEQ ID NO: 938869 - RNA, 19 nt, Homo sapiens
  misc_RNA (1)...(19): siRNA sense strand
guaaugacacgccaggaau

SEQ ID NO: 938870 - RNA, 19 nt, Homo sapiens
  misc_RNA (1)...(19): siRNA sense strand
aaauggaccuuaagagacu

SEQ ID NO: 938871 - RNA, 19 nt, Homo sapiens
  misc_RNA (1)...(19): siRNA sense strand
gacuuuaagcuggucauua

SEQ ID NO: 938872 - RNA, 19 nt, Homo sapiens
  misc_RNA (1)...(19): siRNA sense strand
gagaaauacaaucaacuca

SEQ ID NO: 938873 - RNA, 19 nt, Homo sapiens
  misc_RNA (1)...(19): siRNA sense strand
gccuaucucugacucuguu

SEQ ID NO: 938874 - RNA, 19 nt, Homo sapiens
  misc_RNA (1)...(19): siRNA sense strand
cuagagaaauacaaucaac

SEQ ID NO: 938875 - RNA, 19 nt, Homo sapiens
  misc_RNA (1)...(19): siRNA sense strand
guuuugaccuagagaaaua

SEQ ID NO: 938876 - RNA, 19 nt, Homo sapiens
  misc_RNA (1)...(19): siRNA sense strand
ggacaucauggagccagua

SEQ ID NO: 938877 - RNA, 19 nt, Homo sapiens
  misc_RNA (1)...(19): siRNA sense strand
gaauugacagaguugcuau

SEQ ID NO: 938878 - RNA, 19 nt, Homo sapiens
  misc_RNA (1)...(19): siRNA sense strand
caacuauacaccacacugu

SEQ ID NO: 938879 - RNA, 19 nt, Homo sapiens
  misc_RNA (1)...(19): siRNA sense strand
ccacacaguuuggcauuuu

SEQ ID NO: 938880 - RNA, 19 nt, Homo sapiens
  misc_RNA (1)...(19): siRNA sense strand
cgaauugagauuagcagaa

SEQ ID NO: 938881 - RNA, 19 nt, Homo sapiens
  misc_RNA (1)...(19): siRNA sense strand
caucauggagccaguaaca

SEQ ID NO: 938882 - RNA, 19 nt, Homo sapiens
  misc_RNA (1)...(19): siRNA sense strand
ugagagacccauuacaagu

SEQ ID NO: 938883 - RNA, 19 nt, Homo sapiens
  misc_RNA (1)...(19): siRNA sense strand
caaggaaagggagcuuauu

SEQ ID NO: 938884 - RNA, 19 nt, Homo sapiens
  misc_RNA (1)...(19): siRNA sense strand
ugacacgccaggaauaugu

SEQ ID NO: 938885 - RNA, 19 nt, Homo sapiens
  misc_RNA (1)...(19): siRNA sense strand
gguuaccugugauaucugu

SEQ ID NO: 938886 - RNA, 19 nt, Homo sapiens
  misc_RNA (1)...(19): siRNA sense strand
gcugucaguucacacucaa

SEQ ID NO: 938887 - RNA, 19 nt, Homo sapiens
  misc_RNA (1)...(19): siRNA sense strand
cugagaagaggaccacuuu

SEQ ID NO: 938888 - RNA, 19 nt, Homo sapiens
  misc_RNA (1)...(19): siRNA sense strand
ccuccuccuugaugacuuu

SEQ ID NO: 938889 - RNA, 19 nt, Homo sapiens
  misc_RNA (1)...(19): siRNA sense strand
aaggaaagggagcuuauug

SEQ ID NO: 938890 - RNA, 19 nt, Homo sapiens
  misc_RNA (1)...(19): siRNA sense strand
ccagagacagacaauacuu

SEQ ID NO: 938891 - RNA, 19 nt, Homo sapiens
  misc_RNA (1)...(19): siRNA sense strand
gaaagacuagaggaucuca

SEQ ID NO: 938892 - RNA, 19 nt, Homo sapiens
  misc_RNA (1)...(19): siRNA sense strand
aaagguacgaauugagauu

SEQ ID NO: 938893 - RNA, 19 nt, Homo sapiens
  misc_RNA (1)...(19): siRNA sense strand
ccucuuaagucaugaaaau

SEQ ID NO: 938894 - RNA, 19 nt, Homo sapiens
  misc_RNA (1)...(19): siRNA sense strand
caacucaaggaugcaauug

SEQ ID NO: 938895 - RNA, 19 nt, Homo sapiens
  misc_RNA (1)...(19): siRNA sense strand
gaagccagagacagacaau

SEQ ID NO: 938896 - RNA, 19 nt, Homo sapiens
  misc_RNA (1)...(19): siRNA sense strand
agacauugguccagcaacu

SEQ ID NO: 938897 - RNA, 19 nt, Homo sapiens
  misc_RNA (1)...(19): siRNA sense strand
caacgcugaaugauguaaa

SEQ ID NO: 938898 - RNA, 19 nt, Homo sapiens
  misc_RNA (1)...(19): siRNA sense strand
gacauugguccagcaacua

SEQ ID NO: 938899 - RNA, 19 nt, Homo sapiens
  misc_RNA (1)...(19): siRNA sense strand
acugagagacccauuacaa

SEQ ID NO: 938900 - RNA, 19 nt, Homo sapiens
  misc_RNA (1)...(19): siRNA sense strand
guugugcccucugaugaug

SEQ ID NO: 938901 - RNA, 19 nt, Homo sapiens
  misc_RNA (1)...(19): siRNA sense strand
uuugggagcuguuuauugc

SEQ ID NO: 938902 - RNA, 19 nt, Homo sapiens
  misc_RNA (1)...(19): siRNA sense strand
caauugcucaggcagaaau

SEQ ID NO: 938903 - RNA, 19 nt, Homo sapiens
  misc_RNA (1)...(19): siRNA sense strand
gacaucauggagccaguaa

SEQ ID NO: 938904 - RNA, 19 nt, Homo sapiens
  misc_RNA (1)...(19): siRNA sense strand
aagacuagaggaucucaaa

SEQ ID NO: 938905 - RNA, 19 nt, Homo sapiens
  misc_RNA (1)...(19): siRNA sense strand
gagcuuauugaaagacuag

SEQ ID NO: 938906 - RNA, 19 nt, Homo sapiens
  misc_RNA (1)...(19): siRNA sense strand
gaccuccuccuccuugaug

SEQ ID NO: 938907 - RNA, 19 nt, Homo sapiens
  misc_RNA (1)...(19): siRNA sense strand
uggguuaccugugauaucu

SEQ ID NO: 938908 - RNA, 19 nt, Homo sapiens
  misc_RNA (1)...(19): siRNA sense strand
uggcaauguaugcauauuu

SEQ ID NO: 938909 - RNA, 19 nt, Homo sapiens
  misc_RNA (1)...(19): siRNA sense strand
acuagaggaucucaaagag

SEQ ID NO: 938910 - RNA, 19 nt, Homo sapiens
  misc_RNA (1)...(19): siRNA sense strand
cacucaagccuaucucuga

SEQ ID NO: 938911 - RNA, 19 nt, Homo sapiens
  misc_RNA (1)...(19): siRNA sense strand
agaauuugggagcuguuua

SEQ ID NO: 938912 - RNA, 19 nt, Homo sapiens
  misc_RNA (1)...(19): siRNA sense strand
agagacccauuacaaguac

SEQ ID NO: 938913 - RNA, 19 nt, Homo sapiens
  misc_RNA (1)...(19): siRNA sense strand
gcaauugcucaggcagaaa

SEQ ID NO: 938914 - RNA, 19 nt, Homo sapiens
  misc_RNA (1)...(19): siRNA sense strand
ugaccuagagaaauacaau

SEQ ID NO: 938915 - RNA, 19 nt, Homo sapiens
  misc_RNA (1)...(19): siRNA sense strand
ggacgguacaccagaggau

SEQ ID NO: 938916 - RNA, 19 nt, Homo sapiens
  misc_RNA (1)...(19): siRNA sense strand
gcaacgcugaaugauguaa

SEQ ID NO: 938917 - RNA, 19 nt, Homo sapiens
  misc_RNA (1)...(19): siRNA sense strand
cauugagcagcaccaguua

SEQ ID NO: 938918 - RNA, 19 nt, Homo sapiens
  misc_RNA (1)...(19): siRNA sense strand
gcugagaagaggaccacuu

SEQ ID NO: 938919 - RNA, 19 nt, Homo sapiens
  misc_RNA (1)...(19): siRNA sense strand
aagguacgaauugagauua

SEQ ID NO: 938920 - RNA, 19 nt, Homo sapiens
  misc_RNA (1)...(19): siRNA sense strand
acaaggaaagggagcuuau

SEQ ID NO: 938921 - RNA, 19 nt, Homo sapiens
  misc_RNA (1)...(19): siRNA sense strand
acagaguugcuaucuauuc

SEQ ID NO: 938922 - RNA, 19 nt, Homo sapiens
  misc_RNA (1)...(19): siRNA sense strand
ugcaauugcucaggcagaa

SEQ ID NO: 938923 - RNA, 19 nt, Homo sapiens
  misc_RNA (1)...(19): siRNA sense strand
ucaacucaaggaugcaauu

SEQ ID NO: 938924 - RNA, 19 nt, Homo sapiens
  misc_RNA (1)...(19): siRNA sense strand
aggaaagggagcuuauuga

SEQ ID NO: 938925 - RNA, 19 nt, Homo sapiens
  misc_RNA (1)...(19): siRNA sense strand
uugaaagacuagaggaucu

SEQ ID NO: 938926 - RNA, 19 nt, Homo sapiens
  misc_RNA (1)...(19): siRNA sense strand
gaugauguuacagugguuu

SEQ ID NO: 938927 - RNA, 19 nt, Homo sapiens
  misc_RNA (1)...(19): siRNA sense strand
uguaaugacacgccaggaa

SEQ ID NO: 938928 - RNA, 19 nt, Homo sapiens
  misc_RNA (1)...(19): siRNA sense strand
guuuauugcagcacuguug

SEQ ID NO: 938929 - RNA, 19 nt, Homo sapiens
  misc_RNA (1)...(19): siRNA sense strand
caucugccucuccgacaaa

SEQ ID NO: 938930 - RNA, 19 nt, Homo sapiens
  misc_RNA (1)...(19): siRNA sense strand
caucaacgacgacgaauuc

SEQ ID NO: 938931 - RNA, 19 nt, Homo sapiens
  misc_RNA (1)...(19): siRNA sense strand
cgacaucaacgacgacgaa

SEQ ID NO: 938932 - RNA, 19 nt, Homo sapiens
  misc_RNA (1)...(19): siRNA sense strand
aggagcaggucuugcagaa

SEQ ID NO: 938933 - RNA, 19 nt, Homo sapiens
  misc_RNA (1)...(19): siRNA sense strand
gggaggagcaggucuugca

SEQ ID NO: 938934 - RNA, 19 nt, Homo sapiens
  misc_RNA (1)...(19): siRNA sense strand
ucugcucgcugguguacga

SEQ ID NO: 938935 - RNA, 19 nt, Homo sapiens
  misc_RNA (1)...(19): siRNA sense strand
gaaaguggauggaaacuga

SEQ ID NO: 938936 - RNA, 19 nt, Homo sapiens
  misc_RNA (1)...(19): siRNA sense strand
caacagaaacuaugagaua

SEQ ID NO: 938937 - RNA, 19 nt, Homo sapiens
  misc_RNA (1)...(19): siRNA sense strand
gaaaccagcuaaugggauu

SEQ ID NO: 938938 - RNA, 19 nt, Homo sapiens
  misc_RNA (1)...(19): siRNA sense strand
gugcagaccuccaccauaa

SEQ ID NO: 938939 - RNA, 19 nt, Homo sapiens
  misc_RNA (1)...(19): siRNA sense strand
uauaaaggcuucacuaugu

SEQ ID NO: 938940 - RNA, 19 nt, Homo sapiens
  misc_RNA (1)...(19): siRNA sense strand
ugaaauugguggaucguua

SEQ ID NO: 938941 - RNA, 19 nt, Homo sapiens
  misc_RNA (1)...(19): siRNA sense strand
ggaaguuugugaauugaaa

SEQ ID NO: 938942 - RNA, 19 nt, Homo sapiens
  misc_RNA (1)...(19): siRNA sense strand
gacuguaucuggcaauuaa

SEQ ID NO: 938943 - RNA, 19 nt, Homo sapiens
  misc_RNA (1)...(19): siRNA sense strand
cugaagaucuuuaugcuuu

SEQ ID NO: 938944 - RNA, 19 nt, Homo sapiens
  misc_RNA (1)...(19): siRNA sense strand
caccuacccuccugaaaua

SEQ ID NO: 938945 - RNA, 19 nt, Homo sapiens
  misc_RNA (1)...(19): siRNA sense strand
uaacagaugccaacagaaa

SEQ ID NO: 938946 - RNA, 19 nt, Homo sapiens
  misc_RNA (1)...(19): siRNA sense strand
caccauaacuguugugaga

SEQ ID NO: 938947 - RNA, 19 nt, Homo sapiens
  misc_RNA (1)...(19): siRNA sense strand
guucaaaguucagaaguaa

SEQ ID NO: 938948 - RNA, 19 nt, Homo sapiens
  misc_RNA (1)...(19): siRNA sense strand
caacccaccugaucuaugu

SEQ ID NO: 938949 - RNA, 19 nt, Homo sapiens
  misc_RNA (1)...(19): siRNA sense strand
ggagacaugugcaccuuug

SEQ ID NO: 938950 - RNA, 19 nt, Homo sapiens
  misc_RNA (1)...(19): siRNA sense strand
gccaugagguuuauauuuc

SEQ ID NO: 938951 - RNA, 19 nt, Homo sapiens
  misc_RNA (1)...(19): siRNA sense strand
gcaauuaauggaacaguuu

SEQ ID NO: 938952 - RNA, 19 nt, Homo sapiens
  misc_RNA (1)...(19): siRNA sense strand
cauaacagaugccaacaga

SEQ ID NO: 938953 - RNA, 19 nt, Homo sapiens
  misc_RNA (1)...(19): siRNA sense strand
ucaaaggacucaugaucuu

SEQ ID NO: 938954 - RNA, 19 nt, Homo sapiens
  misc_RNA (1)...(19): siRNA sense strand
ggagacagaugugcaugaa

SEQ ID NO: 938955 - RNA, 19 nt, Homo sapiens
  misc_RNA (1)...(19): siRNA sense strand
caggaacccucucuauaaa

SEQ ID NO: 938956 - RNA, 19 nt, Homo sapiens
  misc_RNA (1)...(19): siRNA sense strand
ucaggaacccucucuauaa

SEQ ID NO: 938957 - RNA, 19 nt, Homo sapiens
  misc_RNA (1)...(19): siRNA sense strand
gagggaaaguggauggaaa

SEQ ID NO: 938958 - RNA, 19 nt, Homo sapiens
  misc_RNA (1)...(19): siRNA sense strand
ugaauacccugauggagaa

SEQ ID NO: 938959 - RNA, 19 nt, Homo sapiens
  misc_RNA (1)...(19): siRNA sense strand
aacagaaacuggaccauaa

SEQ ID NO: 938960 - RNA, 19 nt, Homo sapiens
  misc_RNA (1)...(19): siRNA sense strand
caacagaaacuggaccaua

SEQ ID NO: 938961 - RNA, 19 nt, Homo sapiens
  misc_RNA (1)...(19): siRNA sense strand
agacaacuaugccaacauu

SEQ ID NO: 938962 - RNA, 19 nt, Homo sapiens
  misc_RNA (1)...(19): siRNA sense strand
gaaauagugguuccuaaau

SEQ ID NO: 938963 - RNA, 19 nt, Homo sapiens
  misc_RNA (1)...(19): siRNA sense strand
gaaacuggaccauaacaga

SEQ ID NO: 938964 - RNA, 19 nt, Homo sapiens
  misc_RNA (1)...(19): siRNA sense strand
gaagacaacuaugccaaca

SEQ ID NO: 938965 - RNA, 19 nt, Homo sapiens
  misc_RNA (1)...(19): siRNA sense strand
gaucuaagagucuaugaga

SEQ ID NO: 938966 - RNA, 19 nt, Homo sapiens
  misc_RNA (1)...(19): siRNA sense strand
gagcucagauggaucaagu

SEQ ID NO: 938967 - RNA, 19 nt, Homo sapiens
  misc_RNA (1)...(19): siRNA sense strand
ggagccaguuuauguaugu

SEQ ID NO: 938968 - RNA, 19 nt, Homo sapiens
  misc_RNA (1)...(19): siRNA sense strand
gggcuucuccaaagacuua

SEQ ID NO: 938969 - RNA, 19 nt, Homo sapiens
  misc_RNA (1)...(19): siRNA sense strand
gagagccuccuggaaauua

SEQ ID NO: 938970 - RNA, 19 nt, Homo sapiens
  misc_RNA (1)...(19): siRNA sense strand
caaaggcagugaagguaga

SEQ ID NO: 938971 - RNA, 19 nt, Homo sapiens
  misc_RNA (1)...(19): siRNA sense strand
ccauaacuguugugagauu

SEQ ID NO: 938972 - RNA, 19 nt, Homo sapiens
  misc_RNA (1)...(19): siRNA sense strand
gggaagaucuaagagucua

SEQ ID NO: 938973 - RNA, 19 nt, Homo sapiens
  misc_RNA (1)...(19): siRNA sense strand
cuaaugggauucuuuaucu

SEQ ID NO: 938974 - RNA, 19 nt, Homo sapiens
  misc_RNA (1)...(19): siRNA sense strand
uggcaucucuggaaacuug

SEQ ID NO: 938975 - RNA, 19 nt, Homo sapiens
  misc_RNA (1)...(19): siRNA sense strand
gcaccuacccuccugaaau

SEQ ID NO: 938976 - RNA, 19 nt, Homo sapiens
  misc_RNA (1)...(19): siRNA sense strand
ggaaguccuuugaccaauc

SEQ ID NO: 938977 - RNA, 19 nt, Homo sapiens
  misc_RNA (1)...(19): siRNA sense strand
ucuggaaacuuggguauuu

SEQ ID NO: 938978 - RNA, 19 nt, Homo sapiens
  misc_RNA (1)...(19): siRNA sense strand
gaaauugguggaucguuau

SEQ ID NO: 938979 - RNA, 19 nt, Homo sapiens
  misc_RNA (1)...(19): siRNA sense strand
ccacuggcaucucuggaaa

SEQ ID NO: 938980 - RNA, 19 nt, Homo sapiens
  misc_RNA (1)...(19): siRNA sense strand
cuagagagccuccuggaaa

SEQ ID NO: 938981 - RNA, 19 nt, Homo sapiens
  misc_RNA (1)...(19): siRNA sense strand
uauuauggaugcuggaauu

SEQ ID NO: 938982 - RNA, 19 nt, Homo sapiens
  misc_RNA (1)...(19): siRNA sense strand
ucuccuaccucuacaaaga

SEQ ID NO: 938983 - RNA, 19 nt, Homo sapiens
  misc_RNA (1)...(19): siRNA sense strand
ggaacccucucuauaaagg

SEQ ID NO: 938984 - RNA, 19 nt, Homo sapiens
  misc_RNA (1)...(19): siRNA sense strand
guaagaaaccagcuaaugg

SEQ ID NO: 938985 - RNA, 19 nt, Homo sapiens
  misc_RNA (1)...(19): siRNA sense strand
cagcuaaugggauucuuua

SEQ ID NO: 938986 - RNA, 19 nt, Homo sapiens
  misc_RNA (1)...(19): siRNA sense strand
ggagagcucagggugguua

SEQ ID NO: 938987 - RNA, 19 nt, Homo sapiens
  misc_RNA (1)...(19): siRNA sense strand
guggagaaguuacccauca

SEQ ID NO: 938988 - RNA, 19 nt, Homo sapiens
  misc_RNA (1)...(19): siRNA sense strand
gcucagauggaucaaguaa

SEQ ID NO: 938989 - RNA, 19 nt, Homo sapiens
  misc_RNA (1)...(19): siRNA sense strand
gauagagaaggaauggaua

SEQ ID NO: 938990 - RNA, 19 nt, Homo sapiens
  misc_RNA (1)...(19): siRNA sense strand
gaaacuuccuugguaacug

SEQ ID NO: 938991 - RNA, 19 nt, Homo sapiens
  misc_RNA (1)...(19): siRNA sense strand
gcaccaaggaggcagacua

SEQ ID NO: 938992 - RNA, 19 nt, Homo sapiens
  misc_RNA (1)...(19): siRNA sense strand
ucagauggaucaaguaaaa

SEQ ID NO: 938993 - RNA, 19 nt, Homo sapiens
  misc_RNA (1)...(19): siRNA sense strand
auaaaggcuucacuaugua

SEQ ID NO: 938994 - RNA, 19 nt, Homo sapiens
  misc_RNA (1)...(19): siRNA sense strand
gaaagaaacauggauugca

SEQ ID NO: 938995 - RNA, 19 nt, Homo sapiens
  misc_RNA (1)...(19): siRNA sense strand
gagauugugggcagccuua

SEQ ID NO: 938996 - RNA, 19 nt, Homo sapiens
  misc_RNA (1)...(19): siRNA sense strand
ccagggagccaguuuaugu

SEQ ID NO: 938997 - RNA, 19 nt, Homo sapiens
  misc_RNA (1)...(19): siRNA sense strand
ugaaauagugguuccuaaa

SEQ ID NO: 938998 - RNA, 19 nt, Homo sapiens
  misc_RNA (1)...(19): siRNA sense strand
gguuggaaguucaaaguuc

SEQ ID NO: 938999 - RNA, 19 nt, Homo sapiens
  misc_RNA (1)...(19): siRNA sense strand
cuuggaaguuugugaauug

SEQ ID NO: 939000 - RNA, 19 nt, Homo sapiens
  misc_RNA (1)...(19): siRNA sense strand
ggauugcacuccaucacau

SEQ ID NO: 939001 - RNA, 19 nt, Homo sapiens
  misc_RNA (1)...(19): siRNA sense strand
gcuacgggcuucuccaaag

SEQ ID NO: 939002 - RNA, 19 nt, Homo sapiens
  misc_RNA (1)...(19): siRNA sense strand
aacauucgcuucagauuca

SEQ ID NO: 939003 - RNA, 19 nt, Homo sapiens
  misc_RNA (1)...(19): siRNA sense strand
gaagggguaugaaaaugaa

SEQ ID NO: 939004 - RNA, 19 nt, Homo sapiens
  misc_RNA (1)...(19): siRNA sense strand
aaauagugguuccuaaauc

SEQ ID NO: 939005 - RNA, 19 nt, Homo sapiens
  misc_RNA (1)...(19): siRNA sense strand
uagagagccuccuggaaau

SEQ ID NO: 939006 - RNA, 19 nt, Homo sapiens
  misc_RNA (1)...(19): siRNA sense strand
ucuaagagucuaugagaaa

SEQ ID NO: 939007 - RNA, 19 nt, Homo sapiens
  misc_RNA (1)...(19): siRNA sense strand
gagaaguuacccaucacua

SEQ ID NO: 939008 - RNA, 19 nt, Homo sapiens
  misc_RNA (1)...(19): siRNA sense strand
agacagaugugcaugaacu

SEQ ID NO: 939009 - RNA, 19 nt, Homo sapiens
  misc_RNA (1)...(19): siRNA sense strand
ggcaauuaauggaacaguu

SEQ ID NO: 939010 - RNA, 19 nt, Homo sapiens
  misc_RNA (1)...(19): siRNA sense strand
cucaugaucuugauagaga

SEQ ID NO: 939011 - RNA, 19 nt, Homo sapiens
  misc_RNA (1)...(19): siRNA sense strand
gacacaagaccaaaguuga

SEQ ID NO: 939012 - RNA, 19 nt, Homo sapiens
  misc_RNA (1)...(19): siRNA sense strand
ccaugagguuuauauuuca

SEQ ID NO: 939013 - RNA, 19 nt, Homo sapiens
  misc_RNA (1)...(19): siRNA sense strand
caacauucgcuucagauuc

SEQ ID NO: 939014 - RNA, 19 nt, Homo sapiens
  misc_RNA (1)...(19): siRNA sense strand
uaccugcucucaauuagga

SEQ ID NO: 939015 - RNA, 19 nt, Homo sapiens
  misc_RNA (1)...(19): siRNA sense strand
ccagaaggaucgggaagau

SEQ ID NO: 939016 - RNA, 19 nt, Homo sapiens
  misc_RNA (1)...(19): siRNA sense strand
ggacucaugaucuugauag

SEQ ID NO: 939017 - RNA, 19 nt, Homo sapiens
  misc_RNA (1)...(19): siRNA sense strand
guuggaaguucaaaguuca

SEQ ID NO: 939018 - RNA, 19 nt, Homo sapiens
  misc_RNA (1)...(19): siRNA sense strand
ggaaaccagacuucaggaa

SEQ ID NO: 939019 - RNA, 19 nt, Homo sapiens
  misc_RNA (1)...(19): siRNA sense strand
augaugagcucuuguugga

SEQ ID NO: 939020 - RNA, 19 nt, Homo sapiens
  misc_RNA (1)...(19): siRNA sense strand
gugaugagccaccagaaga

SEQ ID NO: 939021 - RNA, 19 nt, Homo sapiens
  misc_RNA (1)...(19): siRNA sense strand
gccuuugaguuuaaugaaa

SEQ ID NO: 939022 - RNA, 19 nt, Homo sapiens
  misc_RNA (1)...(19): siRNA sense strand
caaaagagaugagggaaag

SEQ ID NO: 939023 - RNA, 19 nt, Homo sapiens
  misc_RNA (1)...(19): siRNA sense strand
cuacgggcuucuccaaaga

SEQ ID NO: 939024 - RNA, 19 nt, Homo sapiens
  misc_RNA (1)...(19): siRNA sense strand
ggaaauuaagaaacagaga

SEQ ID NO: 939025 - RNA, 19 nt, Homo sapiens
  misc_RNA (1)...(19): siRNA sense strand
gccagugucuuaguccauu

SEQ ID NO: 939026 - RNA, 19 nt, Homo sapiens
  misc_RNA (1)...(19): siRNA sense strand
gcuaaugggauucuuuauc

SEQ ID NO: 939027 - RNA, 19 nt, Homo sapiens
  misc_RNA (1)...(19): siRNA sense strand
gacccaauaucagacuuug

SEQ ID NO: 939028 - RNA, 19 nt, Homo sapiens
  misc_RNA (1)...(19): siRNA sense strand
gaaguucaaaguucagaag

SEQ ID NO: 939029 - RNA, 19 nt, Homo sapiens
  misc_RNA (1)...(19): siRNA sense strand
agaaaaggccagugucuua

SEQ ID NO: 939030 - RNA, 19 nt, Homo sapiens
  misc_RNA (1)...(19): siRNA sense strand
acacaagaccaaaguugaa

SEQ ID NO: 939031 - RNA, 19 nt, Homo sapiens
  misc_RNA (1)...(19): siRNA sense strand
caacaaugagugaauuucu

SEQ ID NO: 939032 - RNA, 19 nt, Homo sapiens
  misc_RNA (1)...(19): siRNA sense strand
agaugugcaugaacuagaa

SEQ ID NO: 939033 - RNA, 19 nt, Homo sapiens
  misc_RNA (1)...(19): siRNA sense strand
guacugugcccuacaacau

SEQ ID NO: 939034 - RNA, 19 nt, Homo sapiens
  misc_RNA (1)...(19): siRNA sense strand
ggauauccaugggccacaa

SEQ ID NO: 939035 - RNA, 19 nt, Homo sapiens
  misc_RNA (1)...(19): siRNA sense strand
gcacauagcugaagagagu

SEQ ID NO: 939036 - RNA, 19 nt, Homo sapiens
  misc_RNA (1)...(19): siRNA sense strand
cagaaacgcugccgcaaga

SEQ ID NO: 939037 - RNA, 19 nt, Homo sapiens
  misc_RNA (1)...(19): siRNA sense strand
gcuggaaccugauagaaga

SEQ ID NO: 939038 - RNA, 19 nt, Homo sapiens
  misc_RNA (1)...(19): siRNA sense strand
gagaggacacuuccagcua

SEQ ID NO: 939039 - RNA, 19 nt, Homo sapiens
  misc_RNA (1)...(19): siRNA sense strand
gaaacgcugccgcaagauu

SEQ ID NO: 939040 - RNA, 19 nt, Homo sapiens
  misc_RNA (1)...(19): siRNA sense strand
acucaugguuacaaacuaa

SEQ ID NO: 939041 - RNA, 19 nt, Homo sapiens
  misc_RNA (1)...(19): siRNA sense strand
caaacuaaggcaucaaaca

SEQ ID NO: 939042 - RNA, 19 nt, Homo sapiens
  misc_RNA (1)...(19): siRNA sense strand
gcucacagcaagaccaaga

SEQ ID NO: 939043 - RNA, 19 nt, Homo sapiens
  misc_RNA (1)...(19): siRNA sense strand
ggacauggaaagccaacug

SEQ ID NO: 939044 - RNA, 19 nt, Homo sapiens
  misc_RNA (1)...(19): siRNA sense strand
gcagaaacggcgcucuuca

SEQ ID NO: 939045 - RNA, 19 nt, Homo sapiens
  misc_RNA (1)...(19): siRNA sense strand
gacaagcuggaaccugaua

SEQ ID NO: 939046 - RNA, 19 nt, Homo sapiens
  misc_RNA (1)...(19): siRNA sense strand
gagcugcccacucaugguu

SEQ ID NO: 939047 - RNA, 19 nt, Homo sapiens
  misc_RNA (1)...(19): siRNA sense strand
gcccacucaugguuacaaa

SEQ ID NO: 939048 - RNA, 19 nt, Homo sapiens
  misc_RNA (1)...(19): siRNA sense strand
ggacucgucaggagaaugg

SEQ ID NO: 939049 - RNA, 19 nt, Homo sapiens
  misc_RNA (1)...(19): siRNA sense strand
guuacaaacuaaggcauca

SEQ ID NO: 939050 - RNA, 19 nt, Homo sapiens
  misc_RNA (1)...(19): siRNA sense strand
gcagagcagaggccacaug

SEQ ID NO: 939051 - RNA, 19 nt, Homo sapiens
  misc_RNA (1)...(19): siRNA sense strand
acuaaggcaucaaacacaa

SEQ ID NO: 939052 - RNA, 19 nt, Homo sapiens
  misc_RNA (1)...(19): siRNA sense strand
gcagccuccucccuggauu

SEQ ID NO: 939053 - RNA, 19 nt, Homo sapiens
  misc_RNA (1)...(19): siRNA sense strand
augaagggcuggaggacuu

SEQ ID NO: 939054 - RNA, 19 nt, Homo sapiens
  misc_RNA (1)...(19): siRNA sense strand
agaaacggcgcucuucaga

SEQ ID NO: 939055 - RNA, 19 nt, Homo sapiens
  misc_RNA (1)...(19): siRNA sense strand
gccggugucugccuucauc

SEQ ID NO: 939056 - RNA, 19 nt, Homo sapiens
  misc_RNA (1)...(19): siRNA sense strand
ccagugagccaggaacaga

SEQ ID NO: 939057 - RNA, 19 nt, Homo sapiens
  misc_RNA (1)...(19): siRNA sense strand
cauggcacauagcugaaga

SEQ ID NO: 939058 - RNA, 19 nt, Homo sapiens
  misc_RNA (1)...(19): siRNA sense strand
caagcuggaaccugauaga

SEQ ID NO: 939059 - RNA, 19 nt, Homo sapiens
  misc_RNA (1)...(19): siRNA sense strand
aaacgcugccgcaagauuc

SEQ ID NO: 939060 - RNA, 19 nt, Homo sapiens
  misc_RNA (1)...(19): siRNA sense strand
ugccuccacuccagaagaa

SEQ ID NO: 939061 - RNA, 19 nt, Homo sapiens
  misc_RNA (1)...(19): siRNA sense strand
uacaaacuaaggcaucaaa

SEQ ID NO: 939062 - RNA, 19 nt, Homo sapiens
  misc_RNA (1)...(19): siRNA sense strand
gagcucacagcaagaccaa

SEQ ID NO: 939063 - RNA, 19 nt, Homo sapiens
  misc_RNA (1)...(19): siRNA sense strand
cagcccagccucccaagau

SEQ ID NO: 939064 - RNA, 19 nt, Homo sapiens
  misc_RNA (1)...(19): siRNA sense strand
aaacuaaggcaucaaacac

SEQ ID NO: 939065 - RNA, 19 nt, Homo sapiens
  misc_RNA (1)...(19): siRNA sense strand
ccaagaggagcccgaaguc

SEQ ID NO: 939066 - RNA, 19 nt, Homo sapiens
  misc_RNA (1)...(19): siRNA sense strand
cacucaugguuacaaacua

SEQ ID NO: 939067 - RNA, 19 nt, Homo sapiens
  misc_RNA (1)...(19): siRNA sense strand
ggcugaggcuggagaugca

SEQ ID NO: 939068 - RNA, 19 nt, Homo sapiens
  misc_RNA (1)...(19): siRNA sense strand
uggaggaaaguucuagcua

SEQ ID NO: 939069 - RNA, 19 nt, Homo sapiens
  misc_RNA (1)...(19): siRNA sense strand
gauggucacugaacugauu

SEQ ID NO: 939070 - RNA, 19 nt, Homo sapiens
  misc_RNA (1)...(19): siRNA sense strand
gaaaagagaaccuggagua

SEQ ID NO: 939071 - RNA, 19 nt, Homo sapiens
  misc_RNA (1)...(19): siRNA sense strand
ggacuuggcggaucuuaca

SEQ ID NO: 939072 - RNA, 19 nt, Homo sapiens
  misc_RNA (1)...(19): siRNA sense strand
caggaaacccuugggcuua

SEQ ID NO: 939073 - RNA, 19 nt, Homo sapiens
  misc_RNA (1)...(19): siRNA sense strand
ccaacuguguaaaggauga

SEQ ID NO: 939074 - RNA, 19 nt, Homo sapiens
  misc_RNA (1)...(19): siRNA sense strand
ccagagcugugauguccaa

SEQ ID NO: 939075 - RNA, 19 nt, Homo sapiens
  misc_RNA (1)...(19): siRNA sense strand
aagagaaccuggaguacug

SEQ ID NO: 939076 - RNA, 19 nt, Homo sapiens
  misc_RNA (1)...(19): siRNA sense strand
ggcaaguccucccucauca

SEQ ID NO: 939077 - RNA, 19 nt, Homo sapiens
  misc_RNA (1)...(19): siRNA sense strand
gcccagcacucugucaaga

SEQ ID NO: 939078 - RNA, 19 nt, Homo sapiens
  misc_RNA (1)...(19): siRNA sense strand
ccaaggggcugaagaagau

SEQ ID NO: 939079 - RNA, 19 nt, Homo sapiens
  misc_RNA (1)...(19): siRNA sense strand
ccacagucgucauagucuu

SEQ ID NO: 939080 - RNA, 19 nt, Homo sapiens
  misc_RNA (1)...(19): siRNA sense strand
aggaaacccuugggcuuaa

SEQ ID NO: 939081 - RNA, 19 nt, Homo sapiens
  misc_RNA (1)...(19): siRNA sense strand
gggcaaguccucccucauc

SEQ ID NO: 939082 - RNA, 19 nt, Homo sapiens
  misc_RNA (1)...(19): siRNA sense strand
gaaccuggaguacuguauc

SEQ ID NO: 939083 - RNA, 19 nt, Homo sapiens
  misc_RNA (1)...(19): siRNA sense strand
gaaaaugucaagcagauca

SEQ ID NO: 939084 - RNA, 19 nt, Homo sapiens
  misc_RNA (1)...(19): siRNA sense strand
gcugugauguccaaaauuc

SEQ ID NO: 939085 - RNA, 19 nt, Homo sapiens
  misc_RNA (1)...(19): siRNA sense strand
uaccaacuguguaaaggau

SEQ ID NO: 939086 - RNA, 19 nt, Homo sapiens
  misc_RNA (1)...(19): siRNA sense strand
gagcugugauguccaaaau

SEQ ID NO: 939087 - RNA, 19 nt, Homo sapiens
  misc_RNA (1)...(19): siRNA sense strand
gcaaguccucccucaucaa

SEQ ID NO: 939088 - RNA, 19 nt, Homo sapiens
  misc_RNA (1)...(19): siRNA sense strand
ggaaacccuugggcuuaag

SEQ ID NO: 939089 - RNA, 19 nt, Homo sapiens
  misc_RNA (1)...(19): siRNA sense strand
gcaacacuuagaaggagaa

SEQ ID NO: 939090 - RNA, 19 nt, Homo sapiens
  misc_RNA (1)...(19): siRNA sense strand
uuacagagcagcagaaaau

SEQ ID NO: 939091 - RNA, 19 nt, Homo sapiens
  misc_RNA (1)...(19): siRNA sense strand
gagaaccuggaguacugua

SEQ ID NO: 939092 - RNA, 19 nt, Homo sapiens
  misc_RNA (1)...(19): siRNA sense strand
cacagucgucauagucuuu

SEQ ID NO: 939093 - RNA, 19 nt, Homo sapiens
  misc_RNA (1)...(19): siRNA sense strand
gcaccucaggaaagggaaa

SEQ ID NO: 939094 - RNA, 19 nt, Homo sapiens
  misc_RNA (1)...(19): siRNA sense strand
gaugcccggaucccacuuu

SEQ ID NO: 939095 - RNA, 19 nt, Homo sapiens
  misc_RNA (1)...(19): siRNA sense strand
ggcagcaccucaggaaagg

SEQ ID NO: 939096 - RNA, 19 nt, Homo sapiens
  misc_RNA (1)...(19): siRNA sense strand
aaccuggaguacuguauca

SEQ ID NO: 939097 - RNA, 19 nt, Homo sapiens
  misc_RNA (1)...(19): siRNA sense strand
acagagcagcagaaaauua

SEQ ID NO: 939098 - RNA, 19 nt, Homo sapiens
  misc_RNA (1)...(19): siRNA sense strand
gcacugccccugcccuuau

SEQ ID NO: 939099 - RNA, 19 nt, Homo sapiens
  misc_RNA (1)...(19): siRNA sense strand
agaaggagaaggccuaaaa

SEQ ID NO: 939100 - RNA, 19 nt, Homo sapiens
  misc_RNA (1)...(19): siRNA sense strand
gcacugcucuuugaacuua

SEQ ID NO: 939101 - RNA, 19 nt, Homo sapiens
  misc_RNA (1)...(19): siRNA sense strand
gcagauacauggcaaguug

SEQ ID NO: 939102 - RNA, 19 nt, Homo sapiens
  misc_RNA (1)...(19): siRNA sense strand
ggaaucaugccaaauguua

SEQ ID NO: 939103 - RNA, 19 nt, Homo sapiens
  misc_RNA (1)...(19): siRNA sense strand
ggagaaacagcauauuuaa

SEQ ID NO: 939104 - RNA, 19 nt, Homo sapiens
  misc_RNA (1)...(19): siRNA sense strand
gauaaagacuucguugaga

SEQ ID NO: 939105 - RNA, 19 nt, Homo sapiens
  misc_RNA (1)...(19): siRNA sense strand
gaaggaaucaugccaaaug

SEQ ID NO: 939106 - RNA, 19 nt, Homo sapiens
  misc_RNA (1)...(19): siRNA sense strand
caauagagguccaauuaca

SEQ ID NO: 939107 - RNA, 19 nt, Homo sapiens
  misc_RNA (1)...(19): siRNA sense strand
ucacaaggcuuugaauuuc

SEQ ID NO: 939108 - RNA, 19 nt, Homo sapiens
  misc_RNA (1)...(19): siRNA sense strand
uacaauagagguccaauua

SEQ ID NO: 939109 - RNA, 19 nt, Homo sapiens
  misc_RNA (1)...(19): siRNA sense strand
gaucuccacuucaggauau

SEQ ID NO: 939110 - RNA, 19 nt, Homo sapiens
  misc_RNA (1)...(19): siRNA sense strand
acucugagcugaauacaaa

SEQ ID NO: 939111 - RNA, 19 nt, Homo sapiens
  misc_RNA (1)...(19): siRNA sense strand
ccacaaguuucuauuucua

SEQ ID NO: 939112 - RNA, 19 nt, Homo sapiens
  misc_RNA (1)...(19): siRNA sense strand
ggaggaagaaguacaacua

SEQ ID NO: 939113 - RNA, 19 nt, Homo sapiens
  misc_RNA (1)...(19): siRNA sense strand
gauaggaggugaagaacuc

SEQ ID NO: 939114 - RNA, 19 nt, Homo sapiens
  misc_RNA (1)...(19): siRNA sense strand
gagaaaagcuuauugaucu

SEQ ID NO: 939115 - RNA, 19 nt, Homo sapiens
  misc_RNA (1)...(19): siRNA sense strand
gaagaaguacaacuaagaa

SEQ ID NO: 939116 - RNA, 19 nt, Homo sapiens
  misc_RNA (1)...(19): siRNA sense strand
ggaagaaguacaacuaaga

SEQ ID NO: 939117 - RNA, 19 nt, Homo sapiens
  misc_RNA (1)...(19): siRNA sense strand
gcaauucugacuucuagua

SEQ ID NO: 939118 - RNA, 19 nt, Homo sapiens
  misc_RNA (1)...(19): siRNA sense strand
gaugccaacuuacagaauu

SEQ ID NO: 939119 - RNA, 19 nt, Homo sapiens
  misc_RNA (1)...(19): siRNA sense strand
gagguccaauuacacauuu

SEQ ID NO: 939120 - RNA, 19 nt, Homo sapiens
  misc_RNA (1)...(19): siRNA sense strand
gcacaccggaaacuaauuu

SEQ ID NO: 939121 - RNA, 19 nt, Homo sapiens
  misc_RNA (1)...(19): siRNA sense strand
gaaccgggaacuccacuuu

SEQ ID NO: 939122 - RNA, 19 nt, Homo sapiens
  misc_RNA (1)...(19): siRNA sense strand
caugauauaugcuuguguu

SEQ ID NO: 939123 - RNA, 19 nt, Homo sapiens
  misc_RNA (1)...(19): siRNA sense strand
ucugaagaaugacaugaua

SEQ ID NO: 939124 - RNA, 19 nt, Homo sapiens
  misc_RNA (1)...(19): siRNA sense strand
uagugggccuuacaaauuu

SEQ ID NO: 939125 - RNA, 19 nt, Homo sapiens
  misc_RNA (1)...(19): siRNA sense strand
ggaugacucugcauuuagu

SEQ ID NO: 939126 - RNA, 19 nt, Homo sapiens
  misc_RNA (1)...(19): siRNA sense strand
uggagaaacagcauauuua

SEQ ID NO: 939127 - RNA, 19 nt, Homo sapiens
  misc_RNA (1)...(19): siRNA sense strand
gcucuuugaacuuagauua

SEQ ID NO: 939128 - RNA, 19 nt, Homo sapiens
  misc_RNA (1)...(19): siRNA sense strand
gaaggaggaagaaguacaa

SEQ ID NO: 939129 - RNA, 19 nt, Homo sapiens
  misc_RNA (1)...(19): siRNA sense strand
gaggaagaaguacaacuaa

SEQ ID NO: 939130 - RNA, 19 nt, Homo sapiens
  misc_RNA (1)...(19): siRNA sense strand
gauauaugcuuguguucca

SEQ ID NO: 939131 - RNA, 19 nt, Homo sapiens
  misc_RNA (1)...(19): siRNA sense strand
gaaacagccagcuuggaaa

SEQ ID NO: 939132 - RNA, 19 nt, Homo sapiens
  misc_RNA (1)...(19): siRNA sense strand
gcuguucacgcaucaauaa

SEQ ID NO: 939133 - RNA, 19 nt, Homo sapiens
  misc_RNA (1)...(19): siRNA sense strand
uccauucacuccaccuuua

SEQ ID NO: 939134 - RNA, 19 nt, Homo sapiens
  misc_RNA (1)...(19): siRNA sense strand
agaaugacaugauauaugc

SEQ ID NO: 939135 - RNA, 19 nt, Homo sapiens
  misc_RNA (1)...(19): siRNA sense strand
gaaacagcauauuuaaagc

SEQ ID NO: 939136 - RNA, 19 nt, Homo sapiens
  misc_RNA (1)...(19): siRNA sense strand
gcagccauuugacccaauu

SEQ ID NO: 939137 - RNA, 19 nt, Homo sapiens
  misc_RNA (1)...(19): siRNA sense strand
ccaguugccugacuugcuu

SEQ ID NO: 939138 - RNA, 19 nt, Homo sapiens
  misc_RNA (1)...(19): siRNA sense strand
uuagugggccuuacaaauu

SEQ ID NO: 939139 - RNA, 19 nt, Homo sapiens
  misc_RNA (1)...(19): siRNA sense strand
ggaugaugauaaagacuuc

SEQ ID NO: 939140 - RNA, 19 nt, Homo sapiens
  misc_RNA (1)...(19): siRNA sense strand
cagcauauuuaaagcuuca

SEQ ID NO: 939141 - RNA, 19 nt, Homo sapiens
  misc_RNA (1)...(19): siRNA sense strand
ccauuugacccaauuugua

SEQ ID NO: 939142 - RNA, 19 nt, Homo sapiens
  misc_RNA (1)...(19): siRNA sense strand
cuaguucacccuuguguaa

SEQ ID NO: 939143 - RNA, 19 nt, Homo sapiens
  misc_RNA (1)...(19): siRNA sense strand
ucugcaggcuuguccauuu

SEQ ID NO: 939144 - RNA, 19 nt, Homo sapiens
  misc_RNA (1)...(19): siRNA sense strand
ccucguccgccacuaauua

SEQ ID NO: 939145 - RNA, 19 nt, Homo sapiens
  misc_RNA (1)...(19): siRNA sense strand
gagccagagucuucaaugg

SEQ ID NO: 939146 - RNA, 19 nt, Homo sapiens
  misc_RNA (1)...(19): siRNA sense strand
agaaacagccagcuuggaa

SEQ ID NO: 939147 - RNA, 19 nt, Homo sapiens
  misc_RNA (1)...(19): siRNA sense strand
gugaagcccauauaccuuu

SEQ ID NO: 939148 - RNA, 19 nt, Homo sapiens
  misc_RNA (1)...(19): siRNA sense strand
uggaaggaaucaugccaaa

SEQ ID NO: 939149 - RNA, 19 nt, Homo sapiens
  misc_RNA (1)...(19): siRNA sense strand
caagugugauuuggaagga

SEQ ID NO: 939150 - RNA, 19 nt, Homo sapiens
  misc_RNA (1)...(19): siRNA sense strand
uaaacaggguauagcagau

SEQ ID NO: 939151 - RNA, 19 nt, Homo sapiens
  misc_RNA (1)...(19): siRNA sense strand
gcagaucagcauucaguuc

SEQ ID NO: 939152 - RNA, 19 nt, Homo sapiens
  misc_RNA (1)...(19): siRNA sense strand
auucugacuucuaguagua

SEQ ID NO: 939153 - RNA, 19 nt, Homo sapiens
  misc_RNA (1)...(19): siRNA sense strand
gagccaagagccaugagaa

SEQ ID NO: 939154 - RNA, 19 nt, Homo sapiens
  misc_RNA (1)...(19): siRNA sense strand
aaacaggguauagcagaua

SEQ ID NO: 939155 - RNA, 19 nt, Homo sapiens
  misc_RNA (1)...(19): siRNA sense strand
auggaugacucugcauuua

SEQ ID NO: 939156 - RNA, 19 nt, Homo sapiens
  misc_RNA (1)...(19): siRNA sense strand
aaccacaaguuucuauuuc

SEQ ID NO: 939157 - RNA, 19 nt, Homo sapiens
  misc_RNA (1)...(19): siRNA sense strand
gaucagcauucaguucaag

SEQ ID NO: 939158 - RNA, 19 nt, Homo sapiens
  misc_RNA (1)...(19): siRNA sense strand
gauagcuguucacgcauca

SEQ ID NO: 939159 - RNA, 19 nt, Homo sapiens
  misc_RNA (1)...(19): siRNA sense strand
aaugaaggaggaagaagua

SEQ ID NO: 939160 - RNA, 19 nt, Homo sapiens
  misc_RNA (1)...(19): siRNA sense strand
uagagucauucaacuuaug

SEQ ID NO: 939161 - RNA, 19 nt, Homo sapiens
  misc_RNA (1)...(19): siRNA sense strand
ugacucagccacagaaaca

SEQ ID NO: 939162 - RNA, 19 nt, Homo sapiens
  misc_RNA (1)...(19): siRNA sense strand
ggauacaggauuuucuuua

SEQ ID NO: 939163 - RNA, 19 nt, Homo sapiens
  misc_RNA (1)...(19): siRNA sense strand
ucucuugacucugcaauuc

SEQ ID NO: 939164 - RNA, 19 nt, Homo sapiens
  misc_RNA (1)...(19): siRNA sense strand
gcuuauugaucuggauuau

SEQ ID NO: 939165 - RNA, 19 nt, Homo sapiens
  misc_RNA (1)...(19): siRNA sense strand
ccugauaggaggugaagaa

SEQ ID NO: 939166 - RNA, 19 nt, Homo sapiens
  misc_RNA (1)...(19): siRNA sense strand
uaaagccccugcuccagua

SEQ ID NO: 939167 - RNA, 19 nt, Homo sapiens
  misc_RNA (1)...(19): siRNA sense strand
guacuggagaaacagcaua

SEQ ID NO: 939168 - RNA, 19 nt, Homo sapiens
  misc_RNA (1)...(19): siRNA sense strand
gacaugauauaugcuugug

SEQ ID NO: 939169 - RNA, 19 nt, Homo sapiens
  misc_RNA (1)...(19): siRNA sense strand
acaaggcuuugaauuucuu

SEQ ID NO: 939170 - RNA, 19 nt, Homo sapiens
  misc_RNA (1)...(19): siRNA sense strand
ccuuacaaauuuccauuca

SEQ ID NO: 939171 - RNA, 19 nt, Homo sapiens
  misc_RNA (1)...(19): siRNA sense strand
ggaucuccacuucaggaua

SEQ ID NO: 939172 - RNA, 19 nt, Homo sapiens
  misc_RNA (1)...(19): siRNA sense strand
uugcaagugugauuuggaa

SEQ ID NO: 939173 - RNA, 19 nt, Homo sapiens
  misc_RNA (1)...(19): siRNA sense strand
ccacagaaacagccagcuu

SEQ ID NO: 939174 - RNA, 19 nt, Homo sapiens
  misc_RNA (1)...(19): siRNA sense strand
cugcaauucugacuucuag

SEQ ID NO: 939175 - RNA, 19 nt, Homo sapiens
  misc_RNA (1)...(19): siRNA sense strand
cagcauucaguucaaguuu

SEQ ID NO: 939176 - RNA, 19 nt, Homo sapiens
  misc_RNA (1)...(19): siRNA sense strand
caauggagcaaguuaugug

SEQ ID NO: 939177 - RNA, 19 nt, Homo sapiens
  misc_RNA (1)...(19): siRNA sense strand
cuugaaguauuucgagaga

SEQ ID NO: 939178 - RNA, 19 nt, Homo sapiens
  misc_RNA (1)...(19): siRNA sense strand
uggccagcuugaaguauuu

SEQ ID NO: 939179 - RNA, 19 nt, Homo sapiens
  misc_RNA (1)...(19): siRNA sense strand
guacaacuaagaauaacca

SEQ ID NO: 939180 - RNA, 19 nt, Homo sapiens
  misc_RNA (1)...(19): siRNA sense strand
ggccagaaguucccaaaau

SEQ ID NO: 939181 - RNA, 19 nt, Homo sapiens
  misc_RNA (1)...(19): siRNA sense strand
cagaucagcauucaguuca

SEQ ID NO: 939182 - RNA, 19 nt, Homo sapiens
  misc_RNA (1)...(19): siRNA sense strand
cuggagaaacagcauauuu

SEQ ID NO: 939183 - RNA, 19 nt, Homo sapiens
  misc_RNA (1)...(19): siRNA sense strand
caugagaagcagccauuug

SEQ ID NO: 939184 - RNA, 19 nt, Homo sapiens
  misc_RNA (1)...(19): siRNA sense strand
aaaugacucugagcugaau

SEQ ID NO: 939185 - RNA, 19 nt, Homo sapiens
  misc_RNA (1)...(19): siRNA sense strand
ucauucaacuuaugcuucu

SEQ ID NO: 939186 - RNA, 19 nt, Homo sapiens
  misc_RNA (1)...(19): siRNA sense strand
caaauguuaccaucagcuu

SEQ ID NO: 939187 - RNA, 19 nt, Homo sapiens
  misc_RNA (1)...(19): siRNA sense strand
ccaacuuacagaauucauu

SEQ ID NO: 939188 - RNA, 19 nt, Homo sapiens
  misc_RNA (1)...(19): siRNA sense strand
aaacugggacguacaaagg

SEQ ID NO: 939189 - RNA, 19 nt, Homo sapiens
  misc_RNA (1)...(19): siRNA sense strand
gccaugagaagcagccauu

SEQ ID NO: 939190 - RNA, 19 nt, Homo sapiens
  misc_RNA (1)...(19): siRNA sense strand
caugcaauaugauaaacag

SEQ ID NO: 939191 - RNA, 19 nt, Homo sapiens
  misc_RNA (1)...(19): siRNA sense strand
uuacacacuuacuggaugu

SEQ ID NO: 939192 - RNA, 19 nt, Homo sapiens
  misc_RNA (1)...(19): siRNA sense strand
aaggaaucaugccaaaugu

SEQ ID NO: 939193 - RNA, 19 nt, Homo sapiens
  misc_RNA (1)...(19): siRNA sense strand
cagacgguauccaacuguu

SEQ ID NO: 939194 - RNA, 19 nt, Homo sapiens
  misc_RNA (1)...(19): siRNA sense strand
ucaaaugaaggaggaagaa

SEQ ID NO: 939195 - RNA, 19 nt, Homo sapiens
  misc_RNA (1)...(19): siRNA sense strand
uccugaagauggucccuuu

SEQ ID NO: 939196 - RNA, 19 nt, Homo sapiens
  misc_RNA (1)...(19): siRNA sense strand
cugcaggcuuguccauuug

SEQ ID NO: 939197 - RNA, 19 nt, Homo sapiens
  misc_RNA (1)...(19): siRNA sense strand
acucugcaauucugacuuc

SEQ ID NO: 939198 - RNA, 19 nt, Homo sapiens
  misc_RNA (1)...(19): siRNA sense strand
gauuacacacuuacuggau

SEQ ID NO: 939199 - RNA, 19 nt, Homo sapiens
  misc_RNA (1)...(19): siRNA sense strand
ccaagagccaugagaagca

SEQ ID NO: 939200 - RNA, 19 nt, Homo sapiens
  misc_RNA (1)...(19): siRNA sense strand
gaacaacgucuucuucucu

SEQ ID NO: 939201 - RNA, 19 nt, Homo sapiens
  misc_RNA (1)...(19): siRNA sense strand
ggccuuacccuucucaauu

SEQ ID NO: 939202 - RNA, 19 nt, Homo sapiens
  misc_RNA (1)...(19): siRNA sense strand
gccuuacccuucucaauuc

SEQ ID NO: 939203 - RNA, 19 nt, Homo sapiens
  misc_RNA (1)...(19): siRNA sense strand
gcugcugaccgccuugaua

SEQ ID NO: 939204 - RNA, 19 nt, Homo sapiens
  misc_RNA (1)...(19): siRNA sense strand
ugaagaaugcguggaagaa

SEQ ID NO: 939205 - RNA, 19 nt, Homo sapiens
  misc_RNA (1)...(19): siRNA sense strand
aagaaugcguggaagaaca

SEQ ID NO: 939206 - RNA, 19 nt, Homo sapiens
  misc_RNA (1)...(19): siRNA sense strand
cuacuggacccgccaacaa

SEQ ID NO: 939207 - RNA, 19 nt, Homo sapiens
  misc_RNA (1)...(19): siRNA sense strand
gcuacaccgugaagaaugc

SEQ ID NO: 939208 - RNA, 19 nt, Homo sapiens
  misc_RNA (1)...(19): siRNA sense strand
gaagaaugcguggaagaac

SEQ ID NO: 939209 - RNA, 19 nt, Homo sapiens
  misc_RNA (1)...(19): siRNA sense strand
cacgagcgccuuccucuuc

SEQ ID NO: 939210 - RNA, 19 nt, Homo sapiens
  misc_RNA (1)...(19): siRNA sense strand
gugaugggacugcggauuc

SEQ ID NO: 939211 - RNA, 19 nt, Homo sapiens
  misc_RNA (1)...(19): siRNA sense strand
gugaagaaugcguggaaga

SEQ ID NO: 939212 - RNA, 19 nt, Homo sapiens
  misc_RNA (1)...(19): siRNA sense strand
aacaacgucuucuucucuu

SEQ ID NO: 939213 - RNA, 19 nt, Homo sapiens
  misc_RNA (1)...(19): siRNA sense strand
cuucuucucuugguccuau

SEQ ID NO: 939214 - RNA, 19 nt, Homo sapiens
  misc_RNA (1)...(19): siRNA sense strand
ccaacaagagggccacagu

SEQ ID NO: 939215 - RNA, 19 nt, Homo sapiens
  misc_RNA (1)...(19): siRNA sense strand
acaacgucuucuucucuug

SEQ ID NO: 939216 - RNA, 19 nt, Homo sapiens
  misc_RNA (1)...(19): siRNA sense strand
ccacggccaccaacuacug

SEQ ID NO: 939217 - RNA, 19 nt, Homo sapiens
  misc_RNA (1)...(19): siRNA sense strand
gaaggaaccaagcuguuua

SEQ ID NO: 939218 - RNA, 19 nt, Homo sapiens
  misc_RNA (1)...(19): siRNA sense strand
uaaaccagauuguuacuga

SEQ ID NO: 939219 - RNA, 19 nt, Homo sapiens
  misc_RNA (1)...(19): siRNA sense strand
ggaaggaaccaagcuguuu

SEQ ID NO: 939220 - RNA, 19 nt, Homo sapiens
  misc_RNA (1)...(19): siRNA sense strand
gaagaaauggcaguaaaga

SEQ ID NO: 939221 - RNA, 19 nt, Homo sapiens
  misc_RNA (1)...(19): siRNA sense strand
aagaagaaauggcaguaaa

SEQ ID NO: 939222 - RNA, 19 nt, Homo sapiens
  misc_RNA (1)...(19): siRNA sense strand
guaaagagggcaaccauca

SEQ ID NO: 939223 - RNA, 19 nt, Homo sapiens
  misc_RNA (1)...(19): siRNA sense strand
gagagcaaguggaccagaa

SEQ ID NO: 939224 - RNA, 19 nt, Homo sapiens
  misc_RNA (1)...(19): siRNA sense strand
gaagaagaaauggcaguaa

SEQ ID NO: 939225 - RNA, 19 nt, Homo sapiens
  misc_RNA (1)...(19): siRNA sense strand
ggaauaagagaaacccuau

SEQ ID NO: 939226 - RNA, 19 nt, Homo sapiens
  misc_RNA (1)...(19): siRNA sense strand
guccuuugguccugaaaua

SEQ ID NO: 939227 - RNA, 19 nt, Homo sapiens
  misc_RNA (1)...(19): siRNA sense strand
ugaacccgaugcaaacuuu

SEQ ID NO: 939228 - RNA, 19 nt, Homo sapiens
  misc_RNA (1)...(19): siRNA sense strand
gaccagaaggcaacuuaaa

SEQ ID NO: 939229 - RNA, 19 nt, Homo sapiens
  misc_RNA (1)...(19): siRNA sense strand
gggauugucuaaaccuguu

SEQ ID NO: 939230 - RNA, 19 nt, Homo sapiens
  misc_RNA (1)...(19): siRNA sense strand
caacuuaaaccagauuguu

SEQ ID NO: 939231 - RNA, 19 nt, Homo sapiens
  misc_RNA (1)...(19): siRNA sense strand
caugagggauugucuaaac

SEQ ID NO: 939232 - RNA, 19 nt, Homo sapiens
  misc_RNA (1)...(19): siRNA sense strand
gcagcagccgcauuaauau

SEQ ID NO: 939233 - RNA, 19 nt, Homo sapiens
  misc_RNA (1)...(19): siRNA sense strand
uuacugaacccgaugcaaa

SEQ ID NO: 939234 - RNA, 19 nt, Homo sapiens
  misc_RNA (1)...(19): siRNA sense strand
aaagagggcaaccaucauu

SEQ ID NO: 939235 - RNA, 19 nt, Homo sapiens
  misc_RNA (1)...(19): siRNA sense strand
gagcagcagccgcauuaau

SEQ ID NO: 939236 - RNA, 19 nt, Homo sapiens
  misc_RNA (1)...(19): siRNA sense strand
ggaccagaaggcaacuuaa

SEQ ID NO: 939237 - RNA, 19 nt, Homo sapiens
  misc_RNA (1)...(19): siRNA sense strand
aacccuaucuuucaggauu

SEQ ID NO: 939238 - RNA, 19 nt, Homo sapiens
  misc_RNA (1)...(19): siRNA sense strand
agcagcagccgcauuaaua

SEQ ID NO: 939239 - RNA, 19 nt, Homo sapiens
  misc_RNA (1)...(19): siRNA sense strand
aggagcagcagccgcauua

SEQ ID NO: 939240 - RNA, 19 nt, Homo sapiens
  misc_RNA (1)...(19): siRNA sense strand
guucuugcaugagggauug

SEQ ID NO: 939241 - RNA, 19 nt, Homo sapiens
  misc_RNA (1)...(19): siRNA sense strand
aaaccagauuguuacugaa

SEQ ID NO: 939242 - RNA, 19 nt, Homo sapiens
  misc_RNA (1)...(19): siRNA sense strand
gggaaggaaccaagcuguu

SEQ ID NO: 939243 - RNA, 19 nt, Homo sapiens
  misc_RNA (1)...(19): siRNA sense strand
ccaaaaggaauaagagaaa

SEQ ID NO: 939244 - RNA, 19 nt, Homo sapiens
  misc_RNA (1)...(19): siRNA sense strand
aggcugcccuguacggaaa

SEQ ID NO: 939245 - RNA, 19 nt, Homo sapiens
  misc_RNA (1)...(19): siRNA sense strand
agaagaagaaauggcagua

SEQ ID NO: 939246 - RNA, 19 nt, Homo sapiens
  misc_RNA (1)...(19): siRNA sense strand
guauuuucauggagugaua

SEQ ID NO: 939247 - RNA, 19 nt, Homo sapiens
  misc_RNA (1)...(19): siRNA sense strand
uggaccagaaggcaacuua

SEQ ID NO: 939248 - RNA, 19 nt, Homo sapiens
  misc_RNA (1)...(19): siRNA sense strand
aauaagagaaacccuaucu

SEQ ID NO: 939249 - RNA, 19 nt, Homo sapiens
  misc_RNA (1)...(19): siRNA sense strand
guacggaaaagaagaagaa

SEQ ID NO: 939250 - RNA, 19 nt, Homo sapiens
  misc_RNA (1)...(19): siRNA sense strand
ccuuugguccugaaauaaa

SEQ ID NO: 939251 - RNA, 19 nt, Homo sapiens
  misc_RNA (1)...(19): siRNA sense strand
aaggaaccaagcuguuuaa

SEQ ID NO: 939252 - RNA, 19 nt, Homo sapiens
  misc_RNA (1)...(19): siRNA sense strand
gaauaagagaaacccuauc

SEQ ID NO: 939253 - RNA, 19 nt, Homo sapiens
  misc_RNA (1)...(19): siRNA sense strand
gcaugagggauugucuaaa

SEQ ID NO: 939254 - RNA, 19 nt, Homo sapiens
  misc_RNA (1)...(19): siRNA sense strand
gcaacuuaaaccagauugu

SEQ ID NO: 939255 - RNA, 19 nt, Homo sapiens
  misc_RNA (1)...(19): siRNA sense strand
uaaagagggcaaccaucau

SEQ ID NO: 939256 - RNA, 19 nt, Homo sapiens
  misc_RNA (1)...(19): siRNA sense strand
ugcaugagggauugucuaa

SEQ ID NO: 939257 - RNA, 19 nt, Homo sapiens
  misc_RNA (1)...(19): siRNA sense strand
ggcagaaaguggauaauuu

SEQ ID NO: 939258 - RNA, 19 nt, Homo sapiens
  misc_RNA (1)...(19): siRNA sense strand
caacacaucuggacaagca

SEQ ID NO: 939259 - RNA, 19 nt, Homo sapiens
  misc_RNA (1)...(19): siRNA sense strand
ggaguagacaggauuauuu

SEQ ID NO: 939260 - RNA, 19 nt, Homo sapiens
  misc_RNA (1)...(19): siRNA sense strand
acaaauagaacgagcaauu

SEQ ID NO: 939261 - RNA, 19 nt, Homo sapiens
  misc_RNA (1)...(19): siRNA sense strand
gaauggaauccuacgauga

SEQ ID NO: 939262 - RNA, 19 nt, Homo sapiens
  misc_RNA (1)...(19): siRNA sense strand
gaaaguggauaauuuugug

SEQ ID NO: 939263 - RNA, 19 nt, Homo sapiens
  misc_RNA (1)...(19): siRNA sense strand
uagacaggauuauuucuca

SEQ ID NO: 939264 - RNA, 19 nt, Homo sapiens
  misc_RNA (1)...(19): siRNA sense strand
gcagaaaguggauaauuuu

SEQ ID NO: 939265 - RNA, 19 nt, Homo sapiens
  misc_RNA (1)...(19): siRNA sense strand
caucuucaggccacaaaua

SEQ ID NO: 939266 - RNA, 19 nt, Homo sapiens
  misc_RNA (1)...(19): siRNA sense strand
gauguuggaagcuggagua

SEQ ID NO: 939267 - RNA, 19 nt, Homo sapiens
  misc_RNA (1)...(19): siRNA sense strand
ggaauccuacgaugaacaa

SEQ ID NO: 939268 - RNA, 19 nt, Homo sapiens
  misc_RNA (1)...(19): siRNA sense strand
guuggaagcuggaguagac

SEQ ID NO: 939269 - RNA, 19 nt, Homo sapiens
  misc_RNA (1)...(19): siRNA sense strand
gaacgagcaauucaugagu

SEQ ID NO: 939270 - RNA, 19 nt, Homo sapiens
  misc_RNA (1)...(19): siRNA sense strand
aaacuuaaccacaucuuca

SEQ ID NO: 939271 - RNA, 19 nt, Homo sapiens
  misc_RNA (1)...(19): siRNA sense strand
caaauagaacgagcaauuc

SEQ ID NO: 939272 - RNA, 19 nt, Homo sapiens
  misc_RNA (1)...(19): siRNA sense strand
ggacaagcaggaauggaau

SEQ ID NO: 939273 - RNA, 19 nt, Homo sapiens
  misc_RNA (1)...(19): siRNA sense strand
gaguagacaggauuauuuc

SEQ ID NO: 939274 - RNA, 19 nt, Homo sapiens
  misc_RNA (1)...(19): siRNA sense strand
ccacaaauagaacgagcaa

SEQ ID NO: 939275 - RNA, 19 nt, Homo sapiens
  misc_RNA (1)...(19): siRNA sense strand
aauggaauccuacgaugaa

SEQ ID NO: 939276 - RNA, 19 nt, Homo sapiens
  misc_RNA (1)...(19): siRNA sense strand
gcuggaguagacaggauua

SEQ ID NO: 939277 - RNA, 19 nt, Homo sapiens
  misc_RNA (1)...(19): siRNA sense strand
aaauagaacgagcaauuca

SEQ ID NO: 939278 - RNA, 19 nt, Homo sapiens
  misc_RNA (1)...(19): siRNA sense strand
ugaggcagaaaguggauaa

SEQ ID NO: 939279 - RNA, 19 nt, Homo sapiens
  misc_RNA (1)...(19): siRNA sense strand
aacgagcaauucaugaguu

SEQ ID NO: 939280 - RNA, 19 nt, Homo sapiens
  misc_RNA (1)...(19): siRNA sense strand
gcagagugugguucaguca

SEQ ID NO: 939281 - RNA, 19 nt, Homo sapiens
  misc_RNA (1)...(19): siRNA sense strand
cuucaggccacaaauagaa

SEQ ID NO: 939282 - RNA, 19 nt, Homo sapiens
  misc_RNA (1)...(19): siRNA sense strand
guagacaggauuauuucuc

SEQ ID NO: 939283 - RNA, 19 nt, Homo sapiens
  misc_RNA (1)...(19): siRNA sense strand
uggacaagcaggaauggaa

SEQ ID NO: 939284 - RNA, 19 nt, Homo sapiens
  misc_RNA (1)...(19): siRNA sense strand
ggugguggauccaaaacuu

SEQ ID NO: 939285 - RNA, 19 nt, Homo sapiens
  misc_RNA (1)...(19): siRNA sense strand
uagaacgagcaauucauga

SEQ ID NO: 939286 - RNA, 19 nt, Homo sapiens
  misc_RNA (1)...(19): siRNA sense strand
aggcagaaaguggauaauu

SEQ ID NO: 939287 - RNA, 19 nt, Homo sapiens
  misc_RNA (1)...(19): siRNA sense strand
auagaacgagcaauucaug

SEQ ID NO: 939288 - RNA, 19 nt, Homo sapiens
  misc_RNA (1)...(19): siRNA sense strand
ggaauuagcugaugacaua

SEQ ID NO: 939289 - RNA, 19 nt, Homo sapiens
  misc_RNA (1)...(19): siRNA sense strand
ccaagaagcuguacaaaug

SEQ ID NO: 939290 - RNA, 19 nt, Homo sapiens
  misc_RNA (1)...(19): siRNA sense strand
gaagagaucgcuauuauuc

SEQ ID NO: 939291 - RNA, 19 nt, Homo sapiens
  misc_RNA (1)...(19): siRNA sense strand
gggaagauguugucauuug

SEQ ID NO: 939292 - RNA, 19 nt, Homo sapiens
  misc_RNA (1)...(19): siRNA sense strand
ggacuuacgugacaaauac

SEQ ID NO: 939293 - RNA, 19 nt, Homo sapiens
  misc_RNA (1)...(19): siRNA sense strand
gaagaaauccuuagacaag

SEQ ID NO: 939294 - RNA, 19 nt, Homo sapiens
  misc_RNA (1)...(19): siRNA sense strand
caacuggccucaaaggaaa

SEQ ID NO: 939295 - RNA, 19 nt, Homo sapiens
  misc_RNA (1)...(19): siRNA sense strand
gacauaaacugacagcuau

SEQ ID NO: 939296 - RNA, 19 nt, Homo sapiens
  misc_RNA (1)...(19): siRNA sense strand
uaaggaaguuguucaaaga

SEQ ID NO: 939297 - RNA, 19 nt, Homo sapiens
  misc_RNA (1)...(19): siRNA sense strand
acaagaagcucucaagugu

SEQ ID NO: 939298 - RNA, 19 nt, Homo sapiens
  misc_RNA (1)...(19): siRNA sense strand
aagaagcucucaaguguaa

SEQ ID NO: 939299 - RNA, 19 nt, Homo sapiens
  misc_RNA (1)...(19): siRNA sense strand
ggagaaauguccagggaau

SEQ ID NO: 939300 - RNA, 19 nt, Homo sapiens
  misc_RNA (1)...(19): siRNA sense strand
ggaaugugcauauguguuu

SEQ ID NO: 939301 - RNA, 19 nt, Homo sapiens
  misc_RNA (1)...(19): siRNA sense strand
caaguuugcucuuugaguu

SEQ ID NO: 939302 - RNA, 19 nt, Homo sapiens
  misc_RNA (1)...(19): siRNA sense strand
gcagaccaauuugaagaua

SEQ ID NO: 939303 - RNA, 19 nt, Homo sapiens
  misc_RNA (1)...(19): siRNA sense strand
gcaauucagugagguuaaa

SEQ ID NO: 939304 - RNA, 19 nt, Homo sapiens
  misc_RNA (1)...(19): siRNA sense strand
guucagcccuucagauauu

SEQ ID NO: 939305 - RNA, 19 nt, Homo sapiens
  misc_RNA (1)...(19): siRNA sense strand
guaguaacauuccuggauu

SEQ ID NO: 939306 - RNA, 19 nt, Homo sapiens
  misc_RNA (1)...(19): siRNA sense strand
caaagagccuuaggacuug

SEQ ID NO: 939307 - RNA, 19 nt, Homo sapiens
  misc_RNA (1)...(19): siRNA sense strand
gggauguccuuucaaauug

SEQ ID NO: 939308 - RNA, 19 nt, Homo sapiens
  misc_RNA (1)...(19): siRNA sense strand
gaguggaucuuuccuacaa

SEQ ID NO: 939309 - RNA, 19 nt, Homo sapiens
  misc_RNA (1)...(19): siRNA sense strand
ggaagacuaucaagguuca

SEQ ID NO: 939310 - RNA, 19 nt, Homo sapiens
  misc_RNA (1)...(19): siRNA sense strand
ggaaaugggcagagugaaa

SEQ ID NO: 939311 - RNA, 19 nt, Homo sapiens
  misc_RNA (1)...(19): siRNA sense strand
ucaaagagccuuaggacuu

SEQ ID NO: 939312 - RNA, 19 nt, Homo sapiens
  misc_RNA (1)...(19): siRNA sense strand
caaauccaguucccaagaa

SEQ ID NO: 939313 - RNA, 19 nt, Homo sapiens
  misc_RNA (1)...(19): siRNA sense strand
uuaaaggacuggaugcauu

SEQ ID NO: 939314 - RNA, 19 nt, Homo sapiens
  misc_RNA (1)...(19): siRNA sense strand
aaggaaagcugcaggaguu

SEQ ID NO: 939315 - RNA, 19 nt, Homo sapiens
  misc_RNA (1)...(19): siRNA sense strand
ggacaaaacuugagaaagg

SEQ ID NO: 939316 - RNA, 19 nt, Homo sapiens
  misc_RNA (1)...(19): siRNA sense strand
ggacaucagccaauuacaa

SEQ ID NO: 939317 - RNA, 19 nt, Homo sapiens
  misc_RNA (1)...(19): siRNA sense strand
gacauaaaguuagcagauu

SEQ ID NO: 939318 - RNA, 19 nt, Homo sapiens
  misc_RNA (1)...(19): siRNA sense strand
cagaagaaauccuuagaca

SEQ ID NO: 939319 - RNA, 19 nt, Homo sapiens
  misc_RNA (1)...(19): siRNA sense strand
gugggaagauguugucauu

SEQ ID NO: 939320 - RNA, 19 nt, Homo sapiens
  misc_RNA (1)...(19): siRNA sense strand
cugaagagaucgcuauuau

SEQ ID NO: 939321 - RNA, 19 nt, Homo sapiens
  misc_RNA (1)...(19): siRNA sense strand
ggaagauguugucauuugu

SEQ ID NO: 939322 - RNA, 19 nt, Homo sapiens
  misc_RNA (1)...(19): siRNA sense strand
uaacagcuauggacaccuu

SEQ ID NO: 939323 - RNA, 19 nt, Homo sapiens
  misc_RNA (1)...(19): siRNA sense strand
caaaugcuuucuucuguuc

SEQ ID NO: 939324 - RNA, 19 nt, Homo sapiens
  misc_RNA (1)...(19): siRNA sense strand
gacaaaugauggagaaauc

SEQ ID NO: 939325 - RNA, 19 nt, Homo sapiens
  misc_RNA (1)...(19): siRNA sense strand
ccaaagcccuccuucaucu

SEQ ID NO: 939326 - RNA, 19 nt, Homo sapiens
  misc_RNA (1)...(19): siRNA sense strand
gcaacuggccucaaaggaa

SEQ ID NO: 939327 - RNA, 19 nt, Homo sapiens
  misc_RNA (1)...(19): siRNA sense strand
caacagauuuggacacaac

SEQ ID NO: 939328 - RNA, 19 nt, Homo sapiens
  misc_RNA (1)...(19): siRNA sense strand
aaagaucaguuggauauug

SEQ ID NO: 939329 - RNA, 19 nt, Homo sapiens
  misc_RNA (1)...(19): siRNA sense strand
gaauauucaucagcauuug

SEQ ID NO: 939330 - RNA, 19 nt, Homo sapiens
  misc_RNA (1)...(19): siRNA sense strand
uauggacacuggcagauuu

SEQ ID NO: 939331 - RNA, 19 nt, Homo sapiens
  misc_RNA (1)...(19): siRNA sense strand
gcacggaaaggcagaagaa

SEQ ID NO: 939332 - RNA, 19 nt, Homo sapiens
  misc_RNA (1)...(19): siRNA sense strand
cuuggaaucugcacuaauu

SEQ ID NO: 939333 - RNA, 19 nt, Homo sapiens
  misc_RNA (1)...(19): siRNA sense strand
ggacacaacggaaagacaa

SEQ ID NO: 939334 - RNA, 19 nt, Homo sapiens
  misc_RNA (1)...(19): siRNA sense strand
gaaagcugcaggaguuauu

SEQ ID NO: 939335 - RNA, 19 nt, Homo sapiens
  misc_RNA (1)...(19): siRNA sense strand
gaacgcucgguuaagauua

SEQ ID NO: 939336 - RNA, 19 nt, Homo sapiens
  misc_RNA (1)...(19): siRNA sense strand
uaacauuccuggauuacuc

SEQ ID NO: 939337 - RNA, 19 nt, Homo sapiens
  misc_RNA (1)...(19): siRNA sense strand
gacaucagccaauuacaaa

SEQ ID NO: 939338 - RNA, 19 nt, Homo sapiens
  misc_RNA (1)...(19): siRNA sense strand
gcaaccaguuucgaaauca

SEQ ID NO: 939339 - RNA, 19 nt, Homo sapiens
  misc_RNA (1)...(19): siRNA sense strand
agaaauguccagggaauua

SEQ ID NO: 939340 - RNA, 19 nt, Homo sapiens
  misc_RNA (1)...(19): siRNA sense strand
cuucaagagugacaaauga

SEQ ID NO: 939341 - RNA, 19 nt, Homo sapiens
  misc_RNA (1)...(19): siRNA sense strand
caacugauucuagauguaa

SEQ ID NO: 939342 - RNA, 19 nt, Homo sapiens
  misc_RNA (1)...(19): siRNA sense strand
agaagcagguaguaacauu

SEQ ID NO: 939343 - RNA, 19 nt, Homo sapiens
  misc_RNA (1)...(19): siRNA sense strand
agagaucgcuauuauucuu

SEQ ID NO: 939344 - RNA, 19 nt, Homo sapiens
  misc_RNA (1)...(19): siRNA sense strand
gcacaacugauucuagaug

SEQ ID NO: 939345 - RNA, 19 nt, Homo sapiens
  misc_RNA (1)...(19): siRNA sense strand
caacaacaaccgcugaaga

SEQ ID NO: 939346 - RNA, 19 nt, Homo sapiens
  misc_RNA (1)...(19): siRNA sense strand
caguugauauuucuacuug

SEQ ID NO: 939347 - RNA, 19 nt, Homo sapiens
  misc_RNA (1)...(19): siRNA sense strand
uaguaacauuccuggauua

SEQ ID NO: 939348 - RNA, 19 nt, Homo sapiens
  misc_RNA (1)...(19): siRNA sense strand
gcugaagcuuggaacaauu

SEQ ID NO: 939349 - RNA, 19 nt, Homo sapiens
  misc_RNA (1)...(19): siRNA sense strand
agacauaaacugacagcua

SEQ ID NO: 939350 - RNA, 19 nt, Homo sapiens
  misc_RNA (1)...(19): siRNA sense strand
gaguugggauguaccaguu

SEQ ID NO: 939351 - RNA, 19 nt, Homo sapiens
  misc_RNA (1)...(19): siRNA sense strand
ugauucaggucgauauuug

SEQ ID NO: 939352 - RNA, 19 nt, Homo sapiens
  misc_RNA (1)...(19): siRNA sense strand
gaagauguugucauuuguu

SEQ ID NO: 939353 - RNA, 19 nt, Homo sapiens
  misc_RNA (1)...(19): siRNA sense strand
uacaaaugcuuucuucugu

SEQ ID NO: 939354 - RNA, 19 nt, Homo sapiens
  misc_RNA (1)...(19): siRNA sense strand
guacaaaugcuuucuucug

SEQ ID NO: 939355 - RNA, 19 nt, Homo sapiens
  misc_RNA (1)...(19): siRNA sense strand
gauauuacaccauuuaagg

SEQ ID NO: 939356 - RNA, 19 nt, Homo sapiens
  misc_RNA (1)...(19): siRNA sense strand
uaaaggacuggaugcauuu

SEQ ID NO: 939357 - RNA, 19 nt, Homo sapiens
  misc_RNA (1)...(19): siRNA sense strand
cagaccaauuugaagauaa

SEQ ID NO: 939358 - RNA, 19 nt, Homo sapiens
  misc_RNA (1)...(19): siRNA sense strand
cuaaggacaucagccaauu

SEQ ID NO: 939359 - RNA, 19 nt, Homo sapiens
  misc_RNA (1)...(19): siRNA sense strand
gaacauuuaaccaagaauc

SEQ ID NO: 939360 - RNA, 19 nt, Homo sapiens
  misc_RNA (1)...(19): siRNA sense strand
ugaaaagccugaugaaaau

SEQ ID NO: 939361 - RNA, 19 nt, Homo sapiens
  misc_RNA (1)...(19): siRNA sense strand
gcucucaaguguaacuaug

SEQ ID NO: 939362 - RNA, 19 nt, Homo sapiens
  misc_RNA (1)...(19): siRNA sense strand
acauaaaguuagcagauug

SEQ ID NO: 939363 - RNA, 19 nt, Homo sapiens
  misc_RNA (1)...(19): siRNA sense strand
aaaguuagcagauugugaa

SEQ ID NO: 939364 - RNA, 19 nt, Homo sapiens
  misc_RNA (1)...(19): siRNA sense strand
gaggcuguaugcccacgua

SEQ ID NO: 939365 - RNA, 19 nt, Homo sapiens
  misc_RNA (1)...(19): siRNA sense strand
caaaagaucaguuggauau

SEQ ID NO: 939366 - RNA, 19 nt, Homo sapiens
  misc_RNA (1)...(19): siRNA sense strand
ccagggaauuagcugauga

SEQ ID NO: 939367 - RNA, 19 nt, Homo sapiens
  misc_RNA (1)...(19): siRNA sense strand
uuaaggaaguuguucaaag

SEQ ID NO: 939368 - RNA, 19 nt, Homo sapiens
  misc_RNA (1)...(19): siRNA sense strand
agagugacuucaagaguga

SEQ ID NO: 939369 - RNA, 19 nt, Homo sapiens
  misc_RNA (1)...(19): siRNA sense strand
uaacccagugcacacauua

SEQ ID NO: 939370 - RNA, 19 nt, Homo sapiens
  misc_RNA (1)...(19): siRNA sense strand
uggcacaacugauucuaga

SEQ ID NO: 939371 - RNA, 19 nt, Homo sapiens
  misc_RNA (1)...(19): siRNA sense strand
uaaggacaucagccaauua

SEQ ID NO: 939372 - RNA, 19 nt, Homo sapiens
  misc_RNA (1)...(19): siRNA sense strand
ggucgucgguucagagagu

SEQ ID NO: 939373 - RNA, 19 nt, Homo sapiens
  misc_RNA (1)...(19): siRNA sense strand
caguucagcccuucagaua

SEQ ID NO: 939374 - RNA, 19 nt, Homo sapiens
  misc_RNA (1)...(19): siRNA sense strand
ccaaaguucugggccauuc

SEQ ID NO: 939375 - RNA, 19 nt, Homo sapiens
  misc_RNA (1)...(19): siRNA sense strand
ggauguccuuucaaauugu

SEQ ID NO: 939376 - RNA, 19 nt, Homo sapiens
  misc_RNA (1)...(19): siRNA sense strand
ugaugaaacuacagaaucu

SEQ ID NO: 939377 - RNA, 19 nt, Homo sapiens
  misc_RNA (1)...(19): siRNA sense strand
gccauaaaaugcaguaaaa

SEQ ID NO: 939378 - RNA, 19 nt, Homo sapiens
  misc_RNA (1)...(19): siRNA sense strand
ugacaaggccugggaguug

SEQ ID NO: 939379 - RNA, 19 nt, Homo sapiens
  misc_RNA (1)...(19): siRNA sense strand
ggagaccauucuugcuaug

SEQ ID NO: 939380 - RNA, 19 nt, Homo sapiens
  misc_RNA (1)...(19): siRNA sense strand
guggaucuuuccuacaauu

SEQ ID NO: 939381 - RNA, 19 nt, Homo sapiens
  misc_RNA (1)...(19): siRNA sense strand
aaguggagcuucuggcauu

SEQ ID NO: 939382 - RNA, 19 nt, Homo sapiens
  misc_RNA (1)...(19): siRNA sense strand
gcugaagagaucgcuauua

SEQ ID NO: 939383 - RNA, 19 nt, Homo sapiens
  misc_RNA (1)...(19): siRNA sense strand
gcuauggacaccuuaguga

SEQ ID NO: 939384 - RNA, 19 nt, Homo sapiens
  misc_RNA (1)...(19): siRNA sense strand
acaaaugcuuucuucuguu

SEQ ID NO: 939385 - RNA, 19 nt, Homo sapiens
  misc_RNA (1)...(19): siRNA sense strand
gugaaaagccugaugaaaa

SEQ ID NO: 939386 - RNA, 19 nt, Homo sapiens
  misc_RNA (1)...(19): siRNA sense strand
gauguugucauuuguuaug

SEQ ID NO: 939387 - RNA, 19 nt, Homo sapiens
  misc_RNA (1)...(19): siRNA sense strand
cuagaaaugugggaagaug

SEQ ID NO: 939388 - RNA, 19 nt, Homo sapiens
  misc_RNA (1)...(19): siRNA sense strand
gaaaugagcuugcaugaaa

SEQ ID NO: 939389 - RNA, 19 nt, Homo sapiens
  misc_RNA (1)...(19): siRNA sense strand
gaacaagccugacaaguac

SEQ ID NO: 939390 - RNA, 19 nt, Homo sapiens
  misc_RNA (1)...(19): siRNA sense strand
aaaggaagguggaugauaa

SEQ ID NO: 939391 - RNA, 19 nt, Homo sapiens
  misc_RNA (1)...(19): siRNA sense strand
caaaagcgaugacaacuua

SEQ ID NO: 939392 - RNA, 19 nt, Homo sapiens
  misc_RNA (1)...(19): siRNA sense strand
caagaaggcuacagucuau

SEQ ID NO: 939393 - RNA, 19 nt, Homo sapiens
  misc_RNA (1)...(19): siRNA sense strand
ggcacuaugugauguauua

SEQ ID NO: 939394 - RNA, 19 nt, Homo sapiens
  misc_RNA (1)...(19): siRNA sense strand
gaacagagacaauuauauc

SEQ ID NO: 939395 - RNA, 19 nt, Homo sapiens
  misc_RNA (1)...(19): siRNA sense strand
ugaacaagccugacaagua

SEQ ID NO: 939396 - RNA, 19 nt, Homo sapiens
  misc_RNA (1)...(19): siRNA sense strand
gaugauaaguacauaguca

SEQ ID NO: 939397 - RNA, 19 nt, Homo sapiens
  misc_RNA (1)...(19): siRNA sense strand
gcauacuccuuccacguua

SEQ ID NO: 939398 - RNA, 19 nt, Homo sapiens
  misc_RNA (1)...(19): siRNA sense strand
gccaagagauugaauacga

SEQ ID NO: 939399 - RNA, 19 nt, Homo sapiens
  misc_RNA (1)...(19): siRNA sense strand
ugacagugauggugacaaa

SEQ ID NO: 939400 - RNA, 19 nt, Homo sapiens
  misc_RNA (1)...(19): siRNA sense strand
guaaaugguuugugaguac

SEQ ID NO: 939401 - RNA, 19 nt, Homo sapiens
  misc_RNA (1)...(19): siRNA sense strand
ggagccagcuguauugaca

SEQ ID NO: 939402 - RNA, 19 nt, Homo sapiens
  misc_RNA (1)...(19): siRNA sense strand
gcacaagucaucccauuuc

SEQ ID NO: 939403 - RNA, 19 nt, Homo sapiens
  misc_RNA (1)...(19): siRNA sense strand
gguaaaugguuugugagua

SEQ ID NO: 939404 - RNA, 19 nt, Homo sapiens
  misc_RNA (1)...(19): siRNA sense strand
gccaguacuuuguccauuu

SEQ ID NO: 939405 - RNA, 19 nt, Homo sapiens
  misc_RNA (1)...(19): siRNA sense strand
cagcacgccuguucugaaa

SEQ ID NO: 939406 - RNA, 19 nt, Homo sapiens
  misc_RNA (1)...(19): siRNA sense strand
aaagauaaccuccucaaug

SEQ ID NO: 939407 - RNA, 19 nt, Homo sapiens
  misc_RNA (1)...(19): siRNA sense strand
cggcaagccuccagccaua

SEQ ID NO: 939408 - RNA, 19 nt, Homo sapiens
  misc_RNA (1)...(19): siRNA sense strand
gcacgccuguucugaaauc

SEQ ID NO: 939409 - RNA, 19 nt, Homo sapiens
  misc_RNA (1)...(19): siRNA sense strand
gcccauauccugcuccuuu

SEQ ID NO: 939410 - RNA, 19 nt, Homo sapiens
  misc_RNA (1)...(19): siRNA sense strand
gcacaaacagacugaaauc

SEQ ID NO: 939411 - RNA, 19 nt, Homo sapiens
  misc_RNA (1)...(19): siRNA sense strand
gcagaaauggaccugaauu

SEQ ID NO: 939412 - RNA, 19 nt, Homo sapiens
  misc_RNA (1)...(19): siRNA sense strand
gugcacaagucaucccauu

SEQ ID NO: 939413 - RNA, 19 nt, Homo sapiens
  misc_RNA (1)...(19): siRNA sense strand
gcagaggcacuaugugaug

SEQ ID NO: 939414 - RNA, 19 nt, Homo sapiens
  misc_RNA (1)...(19): siRNA sense strand
ggccagcccuucaaguuca

SEQ ID NO: 939415 - RNA, 19 nt, Homo sapiens
  misc_RNA (1)...(19): siRNA sense strand
ccaguacuuuguccauuug

SEQ ID NO: 939416 - RNA, 19 nt, Homo sapiens
  misc_RNA (1)...(19): siRNA sense strand
ccaaagaaaugagcuugca

SEQ ID NO: 939417 - RNA, 19 nt, Homo sapiens
  misc_RNA (1)...(19): siRNA sense strand
caagucaucccauuucugu

SEQ ID NO: 939418 - RNA, 19 nt, Homo sapiens
  misc_RNA (1)...(19): siRNA sense strand
ggacuucagccuccuggaa

SEQ ID NO: 939419 - RNA, 19 nt, Homo sapiens
  misc_RNA (1)...(19): siRNA sense strand
gauaaccuccucaaugcuu

SEQ ID NO: 939420 - RNA, 19 nt, Homo sapiens
  misc_RNA (1)...(19): siRNA sense strand
aagauaaccuccucaaugc

SEQ ID NO: 939421 - RNA, 19 nt, Homo sapiens
  misc_RNA (1)...(19): siRNA sense strand
ugugguaaaugguuuguga

SEQ ID NO: 939422 - RNA, 19 nt, Homo sapiens
  misc_RNA (1)...(19): siRNA sense strand
ccacuucuuugaaauccaa

SEQ ID NO: 939423 - RNA, 19 nt, Homo sapiens
  misc_RNA (1)...(19): siRNA sense strand
gcacagauaaacgcagaaa

SEQ ID NO: 939424 - RNA, 19 nt, Homo sapiens
  misc_RNA (1)...(19): siRNA sense strand
acagauaaacgcagaaaug

SEQ ID NO: 939425 - RNA, 19 nt, Homo sapiens
  misc_RNA (1)...(19): siRNA sense strand
gugcuuagcugugacaucu

SEQ ID NO: 939426 - RNA, 19 nt, Homo sapiens
  misc_RNA (1)...(19): siRNA sense strand
ucacagccuuaaauuggaa

SEQ ID NO: 939427 - RNA, 19 nt, Homo sapiens
  misc_RNA (1)...(19): siRNA sense strand
cgucagugcuuagcuguga

SEQ ID NO: 939428 - RNA, 19 nt, Homo sapiens
  misc_RNA (1)...(19): siRNA sense strand
gaaaugcagaggcacuaug

SEQ ID NO: 939429 - RNA, 19 nt, Homo sapiens
  misc_RNA (1)...(19): siRNA sense strand
uaaagaggaauuccaguuc

SEQ ID NO: 939430 - RNA, 19 nt, Homo sapiens
  misc_RNA (1)...(19): siRNA sense strand
uaucacagccuuaaauugg

SEQ ID NO: 939431 - RNA, 19 nt, Homo sapiens
  misc_RNA (1)...(19): siRNA sense strand
agacugaaaucgccaagag

SEQ ID NO: 939432 - RNA, 19 nt, Homo sapiens
  misc_RNA (1)...(19): siRNA sense strand
acaagaaggcuacagucua

SEQ ID NO: 939433 - RNA, 19 nt, Homo sapiens
  misc_RNA (1)...(19): siRNA sense strand
ggaccggauuaaagaggaa

SEQ ID NO: 939434 - RNA, 19 nt, Homo sapiens
  misc_RNA (1)...(19): siRNA sense strand
ccaagagauugaauacgau

SEQ ID NO: 939435 - RNA, 19 nt, Homo sapiens
  misc_RNA (1)...(19): siRNA sense strand
gagauugaauacgauuugu

SEQ ID NO: 939436 - RNA, 19 nt, Homo sapiens
  misc_RNA (1)...(19): siRNA sense strand
ccaaagaguccucgucagu

SEQ ID NO: 939437 - RNA, 19 nt, Homo sapiens
  misc_RNA (1)...(19): siRNA sense strand
gcauauuccaguccaaaga

SEQ ID NO: 939438 - RNA, 19 nt, Homo sapiens
  misc_RNA (1)...(19): siRNA sense strand
ccugaaauuugcuuacugu

SEQ ID NO: 939439 - RNA, 19 nt, Homo sapiens
  misc_RNA (1)...(19): siRNA sense strand
gaccugaauuuuccaauga

SEQ ID NO: 939440 - RNA, 19 nt, Homo sapiens
  misc_RNA (1)...(19): siRNA sense strand
ucuaagaggcacagauaaa

SEQ ID NO: 939441 - RNA, 19 nt, Homo sapiens
  misc_RNA (1)...(19): siRNA sense strand
ggaagguggaugauaagga

SEQ ID NO: 939442 - RNA, 19 nt, Homo sapiens
  misc_RNA (1)...(19): siRNA sense strand
gccuuaaauuggaauguga

SEQ ID NO: 939443 - RNA, 19 nt, Homo sapiens
  misc_RNA (1)...(19): siRNA sense strand
ccagcuguauugacauuuc

SEQ ID NO: 939444 - RNA, 19 nt, Homo sapiens
  misc_RNA (1)...(19): siRNA sense strand
agacggagccagcuguauu

SEQ ID NO: 939445 - RNA, 19 nt, Homo sapiens
  misc_RNA (1)...(19): siRNA sense strand
uauauccguuccuguaaau

SEQ ID NO: 939446 - RNA, 19 nt, Homo sapiens
  misc_RNA (1)...(19): siRNA sense strand
gaaaauggaaucgacaaaa

SEQ ID NO: 939447 - RNA, 19 nt, Homo sapiens
  misc_RNA (1)...(19): siRNA sense strand
gcagagcaccacagagaca

SEQ ID NO: 939448 - RNA, 19 nt, Homo sapiens
  misc_RNA (1)...(19): siRNA sense strand
gcacaaccagacacuagug

SEQ ID NO: 939449 - RNA, 19 nt, Homo sapiens
  misc_RNA (1)...(19): siRNA sense strand
gagaguaccuaccauuccu

SEQ ID NO: 939450 - RNA, 19 nt, Homo sapiens
  misc_RNA (1)...(19): siRNA sense strand
cagucucacuuggcaauaa

SEQ ID NO: 939451 - RNA, 19 nt, Homo sapiens
  misc_RNA (1)...(19): siRNA sense strand
cccgauggcugcacucuca

SEQ ID NO: 939452 - RNA, 19 nt, Homo sapiens
  misc_RNA (1)...(19): siRNA sense strand
aauuauauccguuccugua

SEQ ID NO: 939453 - RNA, 19 nt, Homo sapiens
  misc_RNA (1)...(19): siRNA sense strand
gagguggugugcgcuguga

SEQ ID NO: 939454 - RNA, 19 nt, Homo sapiens
  misc_RNA (1)...(19): siRNA sense strand
ccaaugacaucaagaaaag

SEQ ID NO: 939455 - RNA, 19 nt, Homo sapiens
  misc_RNA (1)...(19): siRNA sense strand
caagagauugaauacgauu

SEQ ID NO: 939456 - RNA, 19 nt, Homo sapiens
  misc_RNA (1)...(19): siRNA sense strand
uuauauccguuccuguaaa

SEQ ID NO: 939457 - RNA, 19 nt, Homo sapiens
  misc_RNA (1)...(19): siRNA sense strand
guaccuaccauuccuccaa

SEQ ID NO: 939458 - RNA, 19 nt, Homo sapiens
  misc_RNA (1)...(19): siRNA sense strand
gcaagccuccagccauaga

SEQ ID NO: 939459 - RNA, 19 nt, Homo sapiens
  misc_RNA (1)...(19): siRNA sense strand
acgcagaaauggaccugaa

SEQ ID NO: 939460 - RNA, 19 nt, Homo sapiens
  misc_RNA (1)...(19): siRNA sense strand
agucuaagaggcacagaua

SEQ ID NO: 939461 - RNA, 19 nt, Homo sapiens
  misc_RNA (1)...(19): siRNA sense strand
ucaggaacaucaacaacag

SEQ ID NO: 939462 - RNA, 19 nt, Homo sapiens
  misc_RNA (1)...(19): siRNA sense strand
cuaaugaggacccuucuuc

SEQ ID NO: 939463 - RNA, 19 nt, Homo sapiens
  misc_RNA (1)...(19): siRNA sense strand
uuaaagaggaauuccaguu

SEQ ID NO: 939464 - RNA, 19 nt, Homo sapiens
  misc_RNA (1)...(19): siRNA sense strand
gaggcacuaugugauguau

SEQ ID NO: 939465 - RNA, 19 nt, Homo sapiens
  misc_RNA (1)...(19): siRNA sense strand
gaaggcuacagucuaugaa

SEQ ID NO: 939466 - RNA, 19 nt, Homo sapiens
  misc_RNA (1)...(19): siRNA sense strand
cgacuucaccucccagauc

SEQ ID NO: 939467 - RNA, 19 nt, Homo sapiens
  misc_RNA (1)...(19): siRNA sense strand
aaaaucgccugcuaaagaa

SEQ ID NO: 939468 - RNA, 19 nt, Homo sapiens
  misc_RNA (1)...(19): siRNA sense strand
ggaccugaauuuuccaaug

SEQ ID NO: 939469 - RNA, 19 nt, Homo sapiens
  misc_RNA (1)...(19): siRNA sense strand
aaauuugcuuacuguggua

SEQ ID NO: 939470 - RNA, 19 nt, Homo sapiens
  misc_RNA (1)...(19): siRNA sense strand
uaaggacuccagccacuau

SEQ ID NO: 939471 - RNA, 19 nt, Homo sapiens
  misc_RNA (1)...(19): siRNA sense strand
gaccauggcagaguugaau

SEQ ID NO: 939472 - RNA, 19 nt, Homo sapiens
  misc_RNA (1)...(19): siRNA sense strand
gacggagccagcuguauug

SEQ ID NO: 939473 - RNA, 19 nt, Homo sapiens
  misc_RNA (1)...(19): siRNA sense strand
gucaaggucugggacauca

SEQ ID NO: 939474 - RNA, 19 nt, Homo sapiens
  misc_RNA (1)...(19): siRNA sense strand
ggaaaccugcauacuccuu

SEQ ID NO: 939475 - RNA, 19 nt, Homo sapiens
  misc_RNA (1)...(19): siRNA sense strand
uaccuaccauuccuccaaa

SEQ ID NO: 939476 - RNA, 19 nt, Homo sapiens
  misc_RNA (1)...(19): siRNA sense strand
gcucagcaucuuucucaug

SEQ ID NO: 939477 - RNA, 19 nt, Homo sapiens
  misc_RNA (1)...(19): siRNA sense strand
guugcaagcucagcaucuu

SEQ ID NO: 939478 - RNA, 19 nt, Homo sapiens
  misc_RNA (1)...(19): siRNA sense strand
gcuacagucuaugaaguca

SEQ ID NO: 939479 - RNA, 19 nt, Homo sapiens
  misc_RNA (1)...(19): siRNA sense strand
gaaaagauaaccuccucaa

SEQ ID NO: 939480 - RNA, 19 nt, Homo sapiens
  misc_RNA (1)...(19): siRNA sense strand
ggacgggugguuuggacaa

SEQ ID NO: 939481 - RNA, 19 nt, Homo sapiens
  misc_RNA (1)...(19): siRNA sense strand
cugaacagagacaauuaua

SEQ ID NO: 939482 - RNA, 19 nt, Homo sapiens
  misc_RNA (1)...(19): siRNA sense strand
guaucacagccuuaaauug

SEQ ID NO: 939483 - RNA, 19 nt, Homo sapiens
  misc_RNA (1)...(19): siRNA sense strand
caugagaguaccuaccauu

SEQ ID NO: 939484 - RNA, 19 nt, Homo sapiens
  misc_RNA (1)...(19): siRNA sense strand
agaaggcuacagucuauga

SEQ ID NO: 939485 - RNA, 19 nt, Homo sapiens
  misc_RNA (1)...(19): siRNA sense strand
gcuuagcugugacaucucu

SEQ ID NO: 939486 - RNA, 19 nt, Homo sapiens
  misc_RNA (1)...(19): siRNA sense strand
gcauggagagcagcaaugu

SEQ ID NO: 939487 - RNA, 19 nt, Homo sapiens
  misc_RNA (1)...(19): siRNA sense strand
gcaguaucacagccuuaaa

SEQ ID NO: 939488 - RNA, 19 nt, Homo sapiens
  misc_RNA (1)...(19): siRNA sense strand
gaacaagaauuacaugaug

SEQ ID NO: 939489 - RNA, 19 nt, Homo sapiens
  misc_RNA (1)...(19): siRNA sense strand
ggaaauauuugaugguuug

SEQ ID NO: 939490 - RNA, 19 nt, Homo sapiens
  misc_RNA (1)...(19): siRNA sense strand
gaaagaagcauguagagaa

SEQ ID NO: 939491 - RNA, 19 nt, Homo sapiens
  misc_RNA (1)...(19): siRNA sense strand
gaagaagguuuaaacauuc

SEQ ID NO: 939492 - RNA, 19 nt, Homo sapiens
  misc_RNA (1)...(19): siRNA sense strand
uaaaggaacuccagaaugu

SEQ ID NO: 939493 - RNA, 19 nt, Homo sapiens
  misc_RNA (1)...(19): siRNA sense strand
gaacuagauuggauguuaa

SEQ ID NO: 939494 - RNA, 19 nt, Homo sapiens
  misc_RNA (1)...(19): siRNA sense strand
gaaaguaagugaacacagu

SEQ ID NO: 939495 - RNA, 19 nt, Homo sapiens
  misc_RNA (1)...(19): siRNA sense strand
cuaaugaaaugcugucuaa

SEQ ID NO: 939496 - RNA, 19 nt, Homo sapiens
  misc_RNA (1)...(19): siRNA sense strand
agaagaaacuccaagauga

SEQ ID NO: 939497 - RNA, 19 nt, Homo sapiens
  misc_RNA (1)...(19): siRNA sense strand
gcacacaccuuuucucuaa

SEQ ID NO: 939498 - RNA, 19 nt, Homo sapiens
  misc_RNA (1)...(19): siRNA sense strand
ugaacuagauuggauguua

SEQ ID NO: 939499 - RNA, 19 nt, Homo sapiens
  misc_RNA (1)...(19): siRNA sense strand
gaaaaucgaucaaagaaga

SEQ ID NO: 939500 - RNA, 19 nt, Homo sapiens
  misc_RNA (1)...(19): siRNA sense strand
gaacuaagaagacauaaag

SEQ ID NO: 939501 - RNA, 19 nt, Homo sapiens
  misc_RNA (1)...(19): siRNA sense strand
ggacauccuuuguugaaga

SEQ ID NO: 939502 - RNA, 19 nt, Homo sapiens
  misc_RNA (1)...(19): siRNA sense strand
ggauggagaugaagcagaa

SEQ ID NO: 939503 - RNA, 19 nt, Homo sapiens
  misc_RNA (1)...(19): siRNA sense strand
gaaacuccaagaugaaaua

SEQ ID NO: 939504 - RNA, 19 nt, Homo sapiens
  misc_RNA (1)...(19): siRNA sense strand
uaaagcaguuccaaugaaa

SEQ ID NO: 939505 - RNA, 19 nt, Homo sapiens
  misc_RNA (1)...(19): siRNA sense strand
gacauaaaguucaagagaa

SEQ ID NO: 939506 - RNA, 19 nt, Homo sapiens
  misc_RNA (1)...(19): siRNA sense strand
gagauuaacagaacaagaa

SEQ ID NO: 939507 - RNA, 19 nt, Homo sapiens
  misc_RNA (1)...(19): siRNA sense strand
guaccagaccucauaguua

SEQ ID NO: 939508 - RNA, 19 nt, Homo sapiens
  misc_RNA (1)...(19): siRNA sense strand
aaagaagcauguagagaaa

SEQ ID NO: 939509 - RNA, 19 nt, Homo sapiens
  misc_RNA (1)...(19): siRNA sense strand
gaagaaacuccaagaugaa

SEQ ID NO: 939510 - RNA, 19 nt, Homo sapiens
  misc_RNA (1)...(19): siRNA sense strand
gcacaggcguuuacugaag

SEQ ID NO: 939511 - RNA, 19 nt, Homo sapiens
  misc_RNA (1)...(19): siRNA sense strand
gaacuuaaagccagagaga

SEQ ID NO: 939512 - RNA, 19 nt, Homo sapiens
  misc_RNA (1)...(19): siRNA sense strand
ccgagcagcuauuccuuua

SEQ ID NO: 939513 - RNA, 19 nt, Homo sapiens
  misc_RNA (1)...(19): siRNA sense strand
agagggagcugagaucuaa

SEQ ID NO: 939514 - RNA, 19 nt, Homo sapiens
  misc_RNA (1)...(19): siRNA sense strand
uuaagaaucuccuggaaau

SEQ ID NO: 939515 - RNA, 19 nt, Homo sapiens
  misc_RNA (1)...(19): siRNA sense strand
uugaacagcuuaagaaaga

SEQ ID NO: 939516 - RNA, 19 nt, Homo sapiens
  misc_RNA (1)...(19): siRNA sense strand
aaacagauguccgccaauu

SEQ ID NO: 939517 - RNA, 19 nt, Homo sapiens
  misc_RNA (1)...(19): siRNA sense strand
gaaucuaaaucaucaugga

SEQ ID NO: 939518 - RNA, 19 nt, Homo sapiens
  misc_RNA (1)...(19): siRNA sense strand
gagcagcuauuccuuuaca

SEQ ID NO: 939519 - RNA, 19 nt, Homo sapiens
  misc_RNA (1)...(19): siRNA sense strand
uaacacagaaugaugauga

SEQ ID NO: 939520 - RNA, 19 nt, Homo sapiens
  misc_RNA (1)...(19): siRNA sense strand
gagaauauuggaccucuaa

SEQ ID NO: 939521 - RNA, 19 nt, Homo sapiens
  misc_RNA (1)...(19): siRNA sense strand
agaaagagauuaacagaac

SEQ ID NO: 939522 - RNA, 19 nt, Homo sapiens
  misc_RNA (1)...(19): siRNA sense strand
gaaagagauuaacagaaca

SEQ ID NO: 939523 - RNA, 19 nt, Homo sapiens
  misc_RNA (1)...(19): siRNA sense strand
uaccagaccucauaguuau

SEQ ID NO: 939524 - RNA, 19 nt, Homo sapiens
  misc_RNA (1)...(19): siRNA sense strand
gaggagaagcuguucguaa

SEQ ID NO: 939525 - RNA, 19 nt, Homo sapiens
  misc_RNA (1)...(19): siRNA sense strand
ggugaaaucauuagacuug

SEQ ID NO: 939526 - RNA, 19 nt, Homo sapiens
  misc_RNA (1)...(19): siRNA sense strand
gcaaagauuacgagaccua

SEQ ID NO: 939527 - RNA, 19 nt, Homo sapiens
  misc_RNA (1)...(19): siRNA sense strand
cagcuugucucacauaaca

SEQ ID NO: 939528 - RNA, 19 nt, Homo sapiens
  misc_RNA (1)...(19): siRNA sense strand
aggagaagcuguucguaaa

SEQ ID NO: 939529 - RNA, 19 nt, Homo sapiens
  misc_RNA (1)...(19): siRNA sense strand
ggaucuagaugauggacuu

SEQ ID NO: 939530 - RNA, 19 nt, Homo sapiens
  misc_RNA (1)...(19): siRNA sense strand
gaaguaauggugcucaaug

SEQ ID NO: 939531 - RNA, 19 nt, Homo sapiens
  misc_RNA (1)...(19): siRNA sense strand
aagaaacuaugccaaagaa

SEQ ID NO: 939532 - RNA, 19 nt, Homo sapiens
  misc_RNA (1)...(19): siRNA sense strand
agucagcccuggaagauuu

SEQ ID NO: 939533 - RNA, 19 nt, Homo sapiens
  misc_RNA (1)...(19): siRNA sense strand
guacaagcaguaauugauu

SEQ ID NO: 939534 - RNA, 19 nt, Homo sapiens
  misc_RNA (1)...(19): siRNA sense strand
caagaaagagauuaacaga

SEQ ID NO: 939535 - RNA, 19 nt, Homo sapiens
  misc_RNA (1)...(19): siRNA sense strand
gccagaaaguacuaaagaa

SEQ ID NO: 939536 - RNA, 19 nt, Homo sapiens
  misc_RNA (1)...(19): siRNA sense strand
gaggagaacguuuggaaga

SEQ ID NO: 939537 - RNA, 19 nt, Homo sapiens
  misc_RNA (1)...(19): siRNA sense strand
gaagagccagaaaguacua

SEQ ID NO: 939538 - RNA, 19 nt, Homo sapiens
  misc_RNA (1)...(19): siRNA sense strand
gaacaucaagaacuuaaag

SEQ ID NO: 939539 - RNA, 19 nt, Homo sapiens
  misc_RNA (1)...(19): siRNA sense strand
ccauggagaacuacuauaa

SEQ ID NO: 939540 - RNA, 19 nt, Homo sapiens
  misc_RNA (1)...(19): siRNA sense strand
gcaguuccaaugaaaguaa

SEQ ID NO: 939541 - RNA, 19 nt, Homo sapiens
  misc_RNA (1)...(19): siRNA sense strand
uaacaaacacaaacaguuc

SEQ ID NO: 939542 - RNA, 19 nt, Homo sapiens
  misc_RNA (1)...(19): siRNA sense strand
gaaggaggaggaaacagaa

SEQ ID NO: 939543 - RNA, 19 nt, Homo sapiens
  misc_RNA (1)...(19): siRNA sense strand
ucaauguccuaaugaaaug

SEQ ID NO: 939544 - RNA, 19 nt, Homo sapiens
  misc_RNA (1)...(19): siRNA sense strand
cagcaaaugggaaguauau

SEQ ID NO: 939545 - RNA, 19 nt, Homo sapiens
  misc_RNA (1)...(19): siRNA sense strand
caaagaagaaacuccaaga

SEQ ID NO: 939546 - RNA, 19 nt, Homo sapiens
  misc_RNA (1)...(19): siRNA sense strand
aaauaaagcaguuccaaug

SEQ ID NO: 939547 - RNA, 19 nt, Homo sapiens
  misc_RNA (1)...(19): siRNA sense strand
guaaaggaacuccagaaug

SEQ ID NO: 939548 - RNA, 19 nt, Homo sapiens
  misc_RNA (1)...(19): siRNA sense strand
uuacagaacgcaucaguga

SEQ ID NO: 939549 - RNA, 19 nt, Homo sapiens
  misc_RNA (1)...(19): siRNA sense strand
gcccagacauuacauaagg

SEQ ID NO: 939550 - RNA, 19 nt, Homo sapiens
  misc_RNA (1)...(19): siRNA sense strand
ggcaugaccuccuuacuac

SEQ ID NO: 939551 - RNA, 19 nt, Homo sapiens
  misc_RNA (1)...(19): siRNA sense strand
uaagaaagaagcauguaga

SEQ ID NO: 939552 - RNA, 19 nt, Homo sapiens
  misc_RNA (1)...(19): siRNA sense strand
gcacagguugaacagcuua

SEQ ID NO: 939553 - RNA, 19 nt, Homo sapiens
  misc_RNA (1)...(19): siRNA sense strand
gaauauuggaccucuaaga

SEQ ID NO: 939554 - RNA, 19 nt, Homo sapiens
  misc_RNA (1)...(19): siRNA sense strand
gaagacauaaaguucaaga

SEQ ID NO: 939555 - RNA, 19 nt, Homo sapiens
  misc_RNA (1)...(19): siRNA sense strand
gaaagccacccuacagauc

SEQ ID NO: 939556 - RNA, 19 nt, Homo sapiens
  misc_RNA (1)...(19): siRNA sense strand
ggaagccucccaaaggaaa

SEQ ID NO: 939557 - RNA, 19 nt, Homo sapiens
  misc_RNA (1)...(19): siRNA sense strand
caaggaagccucccaaagg

SEQ ID NO: 939558 - RNA, 19 nt, Homo sapiens
  misc_RNA (1)...(19): siRNA sense strand
agacacagcacacaccuuu

SEQ ID NO: 939559 - RNA, 19 nt, Homo sapiens
  misc_RNA (1)...(19): siRNA sense strand
acaggaacaucaagaacuu

SEQ ID NO: 939560 - RNA, 19 nt, Homo sapiens
  misc_RNA (1)...(19): siRNA sense strand
acaagagacugcaagacuu

SEQ ID NO: 939561 - RNA, 19 nt, Homo sapiens
  misc_RNA (1)...(19): siRNA sense strand
acuccaagaugaaauagaa

SEQ ID NO: 939562 - RNA, 19 nt, Homo sapiens
  misc_RNA (1)...(19): siRNA sense strand
ggcguuuacugaagcauuu

SEQ ID NO: 939563 - RNA, 19 nt, Homo sapiens
  misc_RNA (1)...(19): siRNA sense strand
gaagacacggaaacccuuu

SEQ ID NO: 939564 - RNA, 19 nt, Homo sapiens
  misc_RNA (1)...(19): siRNA sense strand
auaaagcaguuccaaugaa

SEQ ID NO: 939565 - RNA, 19 nt, Homo sapiens
  misc_RNA (1)...(19): siRNA sense strand
ccuggaagauuuacucuag

SEQ ID NO: 939566 - RNA, 19 nt, Homo sapiens
  misc_RNA (1)...(19): siRNA sense strand
ggacuuuccaugcguagaa

SEQ ID NO: 939567 - RNA, 19 nt, Homo sapiens
  misc_RNA (1)...(19): siRNA sense strand
ggauggaacugaggagaca

SEQ ID NO: 939568 - RNA, 19 nt, Homo sapiens
  misc_RNA (1)...(19): siRNA sense strand
caauguacaagcaguaauu

SEQ ID NO: 939569 - RNA, 19 nt, Homo sapiens
  misc_RNA (1)...(19): siRNA sense strand
ggaaaagaauacuugcauu

SEQ ID NO: 939570 - RNA, 19 nt, Homo sapiens
  misc_RNA (1)...(19): siRNA sense strand
acagaaugaugaugauguu

SEQ ID NO: 939571 - RNA, 19 nt, Homo sapiens
  misc_RNA (1)...(19): siRNA sense strand
ggaacuaagaagacauaaa

SEQ ID NO: 939572 - RNA, 19 nt, Homo sapiens
  misc_RNA (1)...(19): siRNA sense strand
caggucagcuugucucaca

SEQ ID NO: 939573 - RNA, 19 nt, Homo sapiens
  misc_RNA (1)...(19): siRNA sense strand
agaaaagacugaccauaaa

SEQ ID NO: 939574 - RNA, 19 nt, Homo sapiens
  misc_RNA (1)...(19): siRNA sense strand
ggugaucggauuaaagaaa

SEQ ID NO: 939575 - RNA, 19 nt, Homo sapiens
  misc_RNA (1)...(19): siRNA sense strand
agaaucuccuggaaauauu

SEQ ID NO: 939576 - RNA, 19 nt, Homo sapiens
  misc_RNA (1)...(19): siRNA sense strand
gaaacuaugccaaagaaaa

SEQ ID NO: 939577 - RNA, 19 nt, Homo sapiens
  misc_RNA (1)...(19): siRNA sense strand
uaagaaacuaugccaaaga

SEQ ID NO: 939578 - RNA, 19 nt, Homo sapiens
  misc_RNA (1)...(19): siRNA sense strand
uggaagauuuacucuagaa

SEQ ID NO: 939579 - RNA, 19 nt, Homo sapiens
  misc_RNA (1)...(19): siRNA sense strand
gaaagggaacuaagaagac

SEQ ID NO: 939580 - RNA, 19 nt, Homo sapiens
  misc_RNA (1)...(19): siRNA sense strand
gaagaugaugcacacaaug

SEQ ID NO: 939581 - RNA, 19 nt, Homo sapiens
  misc_RNA (1)...(19): siRNA sense strand
gauauguuguacccuccua

SEQ ID NO: 939582 - RNA, 19 nt, Homo sapiens
  misc_RNA (1)...(19): siRNA sense strand
agaauccacuggugaaauc

SEQ ID NO: 939583 - RNA, 19 nt, Homo sapiens
  misc_RNA (1)...(19): siRNA sense strand
ugaaagggaacuaagaaga

SEQ ID NO: 939584 - RNA, 19 nt, Homo sapiens
  misc_RNA (1)...(19): siRNA sense strand
agacugugaugcuaauguu

SEQ ID NO: 939585 - RNA, 19 nt, Homo sapiens
  misc_RNA (1)...(19): siRNA sense strand
aaagcgagaugaacaaagg

SEQ ID NO: 939586 - RNA, 19 nt, Homo sapiens
  misc_RNA (1)...(19): siRNA sense strand
gagcaguuuccguuucuuu

SEQ ID NO: 939587 - RNA, 19 nt, Homo sapiens
  misc_RNA (1)...(19): siRNA sense strand
gagaagcuguucguaaagg

SEQ ID NO: 939588 - RNA, 19 nt, Homo sapiens
  misc_RNA (1)...(19): siRNA sense strand
gaacuuugccgaccucuuu

SEQ ID NO: 939589 - RNA, 19 nt, Homo sapiens
  misc_RNA (1)...(19): siRNA sense strand
guccugagcuucccugaga

SEQ ID NO: 939590 - RNA, 19 nt, Homo sapiens
  misc_RNA (1)...(19): siRNA sense strand
gagaaaggccagcuuccaa

SEQ ID NO: 939591 - RNA, 19 nt, Homo sapiens
  misc_RNA (1)...(19): siRNA sense strand
ggagaugcccagagugcua

SEQ ID NO: 939592 - RNA, 19 nt, Homo sapiens
  misc_RNA (1)...(19): siRNA sense strand
gggcagggaugaagcucuu

SEQ ID NO: 939593 - RNA, 19 nt, Homo sapiens
  misc_RNA (1)...(19): siRNA sense strand
ggaggaagaagaggagaaa

SEQ ID NO: 939594 - RNA, 19 nt, Homo sapiens
  misc_RNA (1)...(19): siRNA sense strand
gugcuacccucaacuuucu

SEQ ID NO: 939595 - RNA, 19 nt, Homo sapiens
  misc_RNA (1)...(19): siRNA sense strand
ggauguccaugcccuuuac

SEQ ID NO: 939596 - RNA, 19 nt, Homo sapiens
  misc_RNA (1)...(19): siRNA sense strand
caccugcacuggccucuuc

SEQ ID NO: 939597 - RNA, 19 nt, Homo sapiens
  misc_RNA (1)...(19): siRNA sense strand
uugaggagcucugggauuc

SEQ ID NO: 939598 - RNA, 19 nt, Homo sapiens
  misc_RNA (1)...(19): siRNA sense strand
gccagagggugcugagagu

SEQ ID NO: 939599 - RNA, 19 nt, Homo sapiens
  misc_RNA (1)...(19): siRNA sense strand
gcagggaugaagcucuuug

SEQ ID NO: 939600 - RNA, 19 nt, Homo sapiens
  misc_RNA (1)...(19): siRNA sense strand
agauggagaugcccagagu

SEQ ID NO: 939601 - RNA, 19 nt, Homo sapiens
  misc_RNA (1)...(19): siRNA sense strand
ccagagugcuacccucaac

SEQ ID NO: 939602 - RNA, 19 nt, Homo sapiens
  misc_RNA (1)...(19): siRNA sense strand
ggagaaaggccagcuucca

SEQ ID NO: 939603 - RNA, 19 nt, Homo sapiens
  misc_RNA (1)...(19): siRNA sense strand
ugcaaaugcuggcaaaggu

SEQ ID NO: 939604 - RNA, 19 nt, Homo sapiens
  misc_RNA (1)...(19): siRNA sense strand
gagugcuacccucaacuuu

SEQ ID NO: 939605 - RNA, 19 nt, Homo sapiens
  misc_RNA (1)...(19): siRNA sense strand
cacgugccaugcccacuug

SEQ ID NO: 939606 - RNA, 19 nt, Homo sapiens
  misc_RNA (1)...(19): siRNA sense strand
caugcuggcuccccacuuu

SEQ ID NO: 939607 - RNA, 19 nt, Homo sapiens
  misc_RNA (1)...(19): siRNA sense strand
aaagguggcagauggagau

SEQ ID NO: 939608 - RNA, 19 nt, Homo sapiens
  misc_RNA (1)...(19): siRNA sense strand
ugcccagucuccugcauga

SEQ ID NO: 939609 - RNA, 19 nt, Homo sapiens
  misc_RNA (1)...(19): siRNA sense strand
gcacgaacugggaccuaca

SEQ ID NO: 939610 - RNA, 19 nt, Homo sapiens
  misc_RNA (1)...(19): siRNA sense strand
gcuggcaccugcaaaugcu

SEQ ID NO: 939611 - RNA, 19 nt, Homo sapiens
  misc_RNA (1)...(19): siRNA sense strand
uuguggaccucuuggauca

SEQ ID NO: 939612 - RNA, 19 nt, Homo sapiens
  misc_RNA (1)...(19): siRNA sense strand
ggaaggacagcuguaugca

SEQ ID NO: 939613 - RNA, 19 nt, Homo sapiens
  misc_RNA (1)...(19): siRNA sense strand
gcucugugccgaggaggaa

SEQ ID NO: 939614 - RNA, 19 nt, Homo sapiens
  misc_RNA (1)...(19): siRNA sense strand
ccuggcagcacccaaguug

SEQ ID NO: 939615 - RNA, 19 nt, Homo sapiens
  misc_RNA (1)...(19): siRNA sense strand
gcacaacuuugccuucuuu

SEQ ID NO: 939616 - RNA, 19 nt, Homo sapiens
  misc_RNA (1)...(19): siRNA sense strand
ggacauacgugaccacuca

SEQ ID NO: 939617 - RNA, 19 nt, Homo sapiens
  misc_RNA (1)...(19): siRNA sense strand
ggaaggaggugcugagguu

SEQ ID NO: 939618 - RNA, 19 nt, Homo sapiens
  misc_RNA (1)...(19): siRNA sense strand
caaaggagcaagaacaaua

SEQ ID NO: 939619 - RNA, 19 nt, Homo sapiens
  misc_RNA (1)...(19): siRNA sense strand
ucaagcaggugcccaauuu

SEQ ID NO: 939620 - RNA, 19 nt, Homo sapiens
  misc_RNA (1)...(19): siRNA sense strand
gacaagggcuaccggauug

SEQ ID NO: 939621 - RNA, 19 nt, Homo sapiens
  misc_RNA (1)...(19): siRNA sense strand
gagcauggcuaccuguaug

SEQ ID NO: 939622 - RNA, 19 nt, Homo sapiens
  misc_RNA (1)...(19): siRNA sense strand
gcugauggccucucuguuu

SEQ ID NO: 939623 - RNA, 19 nt, Homo sapiens
  misc_RNA (1)...(19): siRNA sense strand
gaaauacuaugagcucaag

SEQ ID NO: 939624 - RNA, 19 nt, Homo sapiens
  misc_RNA (1)...(19): siRNA sense strand
uaaagacugugccuuggaa

SEQ ID NO: 939625 - RNA, 19 nt, Homo sapiens
  misc_RNA (1)...(19): siRNA sense strand
uagcaucacucaauuucuu

SEQ ID NO: 939626 - RNA, 19 nt, Homo sapiens
  misc_RNA (1)...(19): siRNA sense strand
gaagcccgaucuuggauuc

SEQ ID NO: 939627 - RNA, 19 nt, Homo sapiens
  misc_RNA (1)...(19): siRNA sense strand
gaccuggguugucugguuu

SEQ ID NO: 939628 - RNA, 19 nt, Homo sapiens
  misc_RNA (1)...(19): siRNA sense strand
gacaaaagguccccagaaa

SEQ ID NO: 939629 - RNA, 19 nt, Homo sapiens
  misc_RNA (1)...(19): siRNA sense strand
cuacuggaauguuggcuuu

SEQ ID NO: 939630 - RNA, 19 nt, Homo sapiens
  misc_RNA (1)...(19): siRNA sense strand
ccaacgggcuggucagugu

SEQ ID NO: 939631 - RNA, 19 nt, Homo sapiens
  misc_RNA (1)...(19): siRNA sense strand
gaugucuacuggaauguug

SEQ ID NO: 939632 - RNA, 19 nt, Homo sapiens
  misc_RNA (1)...(19): siRNA sense strand
acaauaagacccuagagaa

SEQ ID NO: 939633 - RNA, 19 nt, Homo sapiens
  misc_RNA (1)...(19): siRNA sense strand
gugcaugcauguucagguu

SEQ ID NO: 939634 - RNA, 19 nt, Homo sapiens
  misc_RNA (1)...(19): siRNA sense strand
uaggcuacuuccugacuua

SEQ ID NO: 939635 - RNA, 19 nt, Homo sapiens
  misc_RNA (1)...(19): siRNA sense strand
ggacuacuccuacauugca

SEQ ID NO: 939636 - RNA, 19 nt, Homo sapiens
  misc_RNA (1)...(19): siRNA sense strand
gagcacaacuuugccuucu

SEQ ID NO: 939637 - RNA, 19 nt, Homo sapiens
  misc_RNA (1)...(19): siRNA sense strand
caggaugucuacuggaaug

SEQ ID NO: 939638 - RNA, 19 nt, Homo sapiens
  misc_RNA (1)...(19): siRNA sense strand
guacuccucuuugccuuug

SEQ ID NO: 939639 - RNA, 19 nt, Homo sapiens
  misc_RNA (1)...(19): siRNA sense strand
ggacuaguguacuccucuu

SEQ ID NO: 939640 - RNA, 19 nt, Homo sapiens
  misc_RNA (1)...(19): siRNA sense strand
ugaccuggguugucugguu

SEQ ID NO: 939641 - RNA, 19 nt, Homo sapiens
  misc_RNA (1)...(19): siRNA sense strand
guccucagguguuugugua

SEQ ID NO: 939642 - RNA, 19 nt, Homo sapiens
  misc_RNA (1)...(19): siRNA sense strand
gggauguuccacuaauaua

SEQ ID NO: 939643 - RNA, 19 nt, Homo sapiens
  misc_RNA (1)...(19): siRNA sense strand
ccucugagacagcucuuua

SEQ ID NO: 939644 - RNA, 19 nt, Homo sapiens
  misc_RNA (1)...(19): siRNA sense strand
gaugcugaauccucugaga

SEQ ID NO: 939645 - RNA, 19 nt, Homo sapiens
  misc_RNA (1)...(19): siRNA sense strand
aaaggagcaagaacaauaa

SEQ ID NO: 939646 - RNA, 19 nt, Homo sapiens
  misc_RNA (1)...(19): siRNA sense strand
gugcugagguuugcaguca

SEQ ID NO: 939647 - RNA, 19 nt, Homo sapiens
  misc_RNA (1)...(19): siRNA sense strand
guucuccagucacacgaua

SEQ ID NO: 939648 - RNA, 19 nt, Homo sapiens
  misc_RNA (1)...(19): siRNA sense strand
ccuggcagcugguuacuca

SEQ ID NO: 939649 - RNA, 19 nt, Homo sapiens
  misc_RNA (1)...(19): siRNA sense strand
ccuuugcccucuuucagua

SEQ ID NO: 939650 - RNA, 19 nt, Homo sapiens
  misc_RNA (1)...(19): siRNA sense strand
ccacuccuauuauguacug

SEQ ID NO: 939651 - RNA, 19 nt, Homo sapiens
  misc_RNA (1)...(19): siRNA sense strand
uuacucagaagcuuuguuu

SEQ ID NO: 939652 - RNA, 19 nt, Homo sapiens
  misc_RNA (1)...(19): siRNA sense strand
cuguugagauccuuaaaga

SEQ ID NO: 939653 - RNA, 19 nt, Homo sapiens
  misc_RNA (1)...(19): siRNA sense strand
ccucaguccucagguguuu

SEQ ID NO: 939654 - RNA, 19 nt, Homo sapiens
  misc_RNA (1)...(19): siRNA sense strand
acacuuggccuucccuuug

SEQ ID NO: 939655 - RNA, 19 nt, Homo sapiens
  misc_RNA (1)...(19): siRNA sense strand
ggaaaugaaccgccuuggu

SEQ ID NO: 939656 - RNA, 19 nt, Homo sapiens
  misc_RNA (1)...(19): siRNA sense strand
cuucugggauguuccacua

SEQ ID NO: 939657 - RNA, 19 nt, Homo sapiens
  misc_RNA (1)...(19): siRNA sense strand
caauaagacccuagagaag

SEQ ID NO: 939658 - RNA, 19 nt, Homo sapiens
  misc_RNA (1)...(19): siRNA sense strand
gguagcaucacucaauuuc

SEQ ID NO: 939659 - RNA, 19 nt, Homo sapiens
  misc_RNA (1)...(19): siRNA sense strand
agacaagggcuaccggauu

SEQ ID NO: 939660 - RNA, 19 nt, Homo sapiens
  misc_RNA (1)...(19): siRNA sense strand
ccuauuauguacugguuuc

SEQ ID NO: 939661 - RNA, 19 nt, Homo sapiens
  misc_RNA (1)...(19): siRNA sense strand
gaaccgccuuggugcuucu

SEQ ID NO: 939662 - RNA, 19 nt, Homo sapiens
  misc_RNA (1)...(19): siRNA sense strand
gcuacuuccugacuuacug

SEQ ID NO: 939663 - RNA, 19 nt, Homo sapiens
  misc_RNA (1)...(19): siRNA sense strand
gcaaaggagcaagaacaau

SEQ ID NO: 939664 - RNA, 19 nt, Homo sapiens
  misc_RNA (1)...(19): siRNA sense strand
gauguuccacuaauauaca

SEQ ID NO: 939665 - RNA, 19 nt, Homo sapiens
  misc_RNA (1)...(19): siRNA sense strand
gcaugcauguucagguucu

SEQ ID NO: 939666 - RNA, 19 nt, Homo sapiens
  misc_RNA (1)...(19): siRNA sense strand
gaaggaggugcugagguuu

SEQ ID NO: 939667 - RNA, 19 nt, Homo sapiens
  misc_RNA (1)...(19): siRNA sense strand
cugggauguuccacuaaua

SEQ ID NO: 939668 - RNA, 19 nt, Homo sapiens
  misc_RNA (1)...(19): siRNA sense strand
caaaagguccccagaaauc

SEQ ID NO: 939669 - RNA, 19 nt, Homo sapiens
  misc_RNA (1)...(19): siRNA sense strand
ugagauccuuaaagacugu

SEQ ID NO: 939670 - RNA, 19 nt, Homo sapiens
  misc_RNA (1)...(19): siRNA sense strand
aagagccgcuguugagauc

SEQ ID NO: 939671 - RNA, 19 nt, Homo sapiens
  misc_RNA (1)...(19): siRNA sense strand
ccuccacuccuauuaugua

SEQ ID NO: 939672 - RNA, 19 nt, Homo sapiens
  misc_RNA (1)...(19): siRNA sense strand
ucgguagcaucacucaauu

SEQ ID NO: 939673 - RNA, 19 nt, Homo sapiens
  misc_RNA (1)...(19): siRNA sense strand
caagagccgcuguugagau

SEQ ID NO: 939674 - RNA, 19 nt, Homo sapiens
  misc_RNA (1)...(19): siRNA sense strand
ccucuucaaugccaucauc

SEQ ID NO: 939675 - RNA, 19 nt, Homo sapiens
  misc_RNA (1)...(19): siRNA sense strand
gauacauucuaggcuacuu

SEQ ID NO: 939676 - RNA, 19 nt, Homo sapiens
  misc_RNA (1)...(19): siRNA sense strand
guugagauccuuaaagacu

SEQ ID NO: 939677 - RNA, 19 nt, Homo sapiens
  misc_RNA (1)...(19): siRNA sense strand
ucacugggaugcugaacac

SEQ ID NO: 939678 - RNA, 19 nt, Homo sapiens
  misc_RNA (1)...(19): siRNA sense strand
gaacaauaagacccuagag

SEQ ID NO: 939679 - RNA, 19 nt, Homo sapiens
  misc_RNA (1)...(19): siRNA sense strand
acacuugggcugcaaagga

SEQ ID NO: 939680 - RNA, 19 nt, Homo sapiens
  misc_RNA (1)...(19): siRNA sense strand
ucacucaauuucuuguucu

SEQ ID NO: 939681 - RNA, 19 nt, Homo sapiens
  misc_RNA (1)...(19): siRNA sense strand
ggucugugcaugcauguuc

SEQ ID NO: 939682 - RNA, 19 nt, Homo sapiens
  misc_RNA (1)...(19): siRNA sense strand
gagaagcccgaucuuggau

SEQ ID NO: 939683 - RNA, 19 nt, Homo sapiens
  misc_RNA (1)...(19): siRNA sense strand
ggagcaagaacaauaagac

SEQ ID NO: 939684 - RNA, 19 nt, Homo sapiens
  misc_RNA (1)...(19): siRNA sense strand
uguuugcccuccugacauu

SEQ ID NO: 939685 - RNA, 19 nt, Homo sapiens
  misc_RNA (1)...(19): siRNA sense strand
gcagcugguuacucagaag

SEQ ID NO: 939686 - RNA, 19 nt, Homo sapiens
  misc_RNA (1)...(19): siRNA sense strand
ucucagcccugccaauguc

SEQ ID NO: 939687 - RNA, 19 nt, Homo sapiens
  misc_RNA (1)...(19): siRNA sense strand
ccagucacacgauacauuc

SEQ ID NO: 939688 - RNA, 19 nt, Homo sapiens
  misc_RNA (1)...(19): siRNA sense strand
ugccguauccugacucuga

SEQ ID NO: 939689 - RNA, 19 nt, Homo sapiens
  misc_RNA (1)...(19): siRNA sense strand
acuccuacauugcaacuuc

SEQ ID NO: 939690 - RNA, 19 nt, Homo sapiens
  misc_RNA (1)...(19): siRNA sense strand
gauugcagagggaaaugaa

SEQ ID NO: 939691 - RNA, 19 nt, Homo sapiens
  misc_RNA (1)...(19): siRNA sense strand
cugauggccucucuguuuc

SEQ ID NO: 939692 - RNA, 19 nt, Homo sapiens
  misc_RNA (1)...(19): siRNA sense strand
ggcagcugguuacucagaa

SEQ ID NO: 939693 - RNA, 19 nt, Homo sapiens
  misc_RNA (1)...(19): siRNA sense strand
caucccagaucaccaugca

SEQ ID NO: 939694 - RNA, 19 nt, Homo sapiens
  misc_RNA (1)...(19): siRNA sense strand
ugggacuacuccuacauug

SEQ ID NO: 939695 - RNA, 19 nt, Homo sapiens
  misc_RNA (1)...(19): siRNA sense strand
guuuccagcucacuugcuu

SEQ ID NO: 939696 - RNA, 19 nt, Homo sapiens
  misc_RNA (1)...(19): siRNA sense strand
gguggggacugaacuguug

SEQ ID NO: 939697 - RNA, 19 nt, Homo sapiens
  misc_RNA (1)...(19): siRNA sense strand
uauuaugccuacacccaau

SEQ ID NO: 939698 - RNA, 19 nt, Homo sapiens
  misc_RNA (1)...(19): siRNA sense strand
gcuccuccacuccuauuau

SEQ ID NO: 939699 - RNA, 19 nt, Homo sapiens
  misc_RNA (1)...(19): siRNA sense strand
agagaagcccgaucuugga

SEQ ID NO: 939700 - RNA, 19 nt, Homo sapiens
  misc_RNA (1)...(19): siRNA sense strand
cuagagaagcccgaucuug

SEQ ID NO: 939701 - RNA, 19 nt, Homo sapiens
  misc_RNA (1)...(19): siRNA sense strand
gcugcaggcccucuucaau

SEQ ID NO: 939702 - RNA, 19 nt, Homo sapiens
  misc_RNA (1)...(19): siRNA sense strand
ugaaauacuaugagcucaa

SEQ ID NO: 939703 - RNA, 19 nt, Homo sapiens
  misc_RNA (1)...(19): siRNA sense strand
ggauguuccacuaauauac

SEQ ID NO: 939704 - RNA, 19 nt, Homo sapiens
  misc_RNA (1)...(19): siRNA sense strand
cucaauuucuuguucuuca

SEQ ID NO: 939705 - RNA, 19 nt, Homo sapiens
  misc_RNA (1)...(19): siRNA sense strand
ucugggauguuccacuaau

SEQ ID NO: 939706 - RNA, 19 nt, Homo sapiens
  misc_RNA (1)...(19): siRNA sense strand
ggauugcagagggaaauga

SEQ ID NO: 939707 - RNA, 19 nt, Homo sapiens
  misc_RNA (1)...(19): siRNA sense strand
cugggaugcugaacacuuc

SEQ ID NO: 939708 - RNA, 19 nt, Homo sapiens
  misc_RNA (1)...(19): siRNA sense strand
gcugguuacucagaagcuu

SEQ ID NO: 939709 - RNA, 19 nt, Homo sapiens
  misc_RNA (1)...(19): siRNA sense strand
ucaugggacuuuuguauca

SEQ ID NO: 939710 - RNA, 19 nt, Homo sapiens
  misc_RNA (1)...(19): siRNA sense strand
gauggccucucuguuucug

SEQ ID NO: 939711 - RNA, 19 nt, Homo sapiens
  misc_RNA (1)...(19): siRNA sense strand
caacuuugccuucuuuccu

SEQ ID NO: 939712 - RNA, 19 nt, Homo sapiens
  misc_RNA (1)...(19): siRNA sense strand
ucacuugcuucaggaucaa

SEQ ID NO: 939713 - RNA, 19 nt, Homo sapiens
  misc_RNA (1)...(19): siRNA sense strand
gcuccugggacuacuccua

SEQ ID NO: 939714 - RNA, 19 nt, Homo sapiens
  misc_RNA (1)...(19): siRNA sense strand
ggaucaagagccgcuguug

SEQ ID NO: 939715 - RNA, 19 nt, Homo sapiens
  misc_RNA (1)...(19): siRNA sense strand
gaaccaaccugaauauuga

SEQ ID NO: 939716 - RNA, 19 nt, Homo sapiens
  misc_RNA (1)...(19): siRNA sense strand
gaagaugacuccaguguga

SEQ ID NO: 939717 - RNA, 19 nt, Homo sapiens
  misc_RNA (1)...(19): siRNA sense strand
gcaauuaccuugaagaagu

SEQ ID NO: 939718 - RNA, 19 nt, Homo sapiens
  misc_RNA (1)...(19): siRNA sense strand
gaagaaggcaugcuuaugu

SEQ ID NO: 939719 - RNA, 19 nt, Homo sapiens
  misc_RNA (1)...(19): siRNA sense strand
ggaaccaaccugaauauug

SEQ ID NO: 939720 - RNA, 19 nt, Homo sapiens
  misc_RNA (1)...(19): siRNA sense strand
gcacagugaugauuacuac

SEQ ID NO: 939721 - RNA, 19 nt, Homo sapiens
  misc_RNA (1)...(19): siRNA sense strand
ggacgcacagugaugauua

SEQ ID NO: 939722 - RNA, 19 nt, Homo sapiens
  misc_RNA (1)...(19): siRNA sense strand
acaacaaccuugaagauga

SEQ ID NO: 939723 - RNA, 19 nt, Homo sapiens
  misc_RNA (1)...(19): siRNA sense strand
aaaguacccugaagacaaa

SEQ ID NO: 939724 - RNA, 19 nt, Homo sapiens
  misc_RNA (1)...(19): siRNA sense strand
caaaguacccugaagacaa

SEQ ID NO: 939725 - RNA, 19 nt, Homo sapiens
  misc_RNA (1)...(19): siRNA sense strand
ggagggauaccgccaauga

SEQ ID NO: 939726 - RNA, 19 nt, Homo sapiens
  misc_RNA (1)...(19): siRNA sense strand
gaaacaacaaccuugaaga

SEQ ID NO: 939727 - RNA, 19 nt, Homo sapiens
  misc_RNA (1)...(19): siRNA sense strand
gagccucuuugauggauuu

SEQ ID NO: 939728 - RNA, 19 nt, Homo sapiens
  misc_RNA (1)...(19): siRNA sense strand
gagcgaagaccuagaagug

SEQ ID NO: 939729 - RNA, 19 nt, Homo sapiens
  misc_RNA (1)...(19): siRNA sense strand
gguaggagguauggaagaa

SEQ ID NO: 939730 - RNA, 19 nt, Homo sapiens
  misc_RNA (1)...(19): siRNA sense strand
cuacauggcacuugaagaa

SEQ ID NO: 939731 - RNA, 19 nt, Homo sapiens
  misc_RNA (1)...(19): siRNA sense strand
gauuggagccucuuugaug

SEQ ID NO: 939732 - RNA, 19 nt, Homo sapiens
  misc_RNA (1)...(19): siRNA sense strand
gcagcaauggcagcaauua

SEQ ID NO: 939733 - RNA, 19 nt, Homo sapiens
  misc_RNA (1)...(19): siRNA sense strand
aaacugcccuugcgcacuu

SEQ ID NO: 939734 - RNA, 19 nt, Homo sapiens
  misc_RNA (1)...(19): siRNA sense strand
caauuaccuugaagaaguu

SEQ ID NO: 939735 - RNA, 19 nt, Homo sapiens
  misc_RNA (1)...(19): siRNA sense strand
aaugaggacuauuccagua

SEQ ID NO: 939736 - RNA, 19 nt, Homo sapiens
  misc_RNA (1)...(19): siRNA sense strand
gaaagacgaacuccgaagu

SEQ ID NO: 939737 - RNA, 19 nt, Homo sapiens
  misc_RNA (1)...(19): siRNA sense strand
ucaccuacauggcacuuga

SEQ ID NO: 939738 - RNA, 19 nt, Homo sapiens
  misc_RNA (1)...(19): siRNA sense strand
gaaucuagcaagccuguau

SEQ ID NO: 939739 - RNA, 19 nt, Homo sapiens
  misc_RNA (1)...(19): siRNA sense strand
agaaccaucucuucaggaa

SEQ ID NO: 939740 - RNA, 19 nt, Homo sapiens
  misc_RNA (1)...(19): siRNA sense strand
caucugcuguagcgaauau

SEQ ID NO: 939741 - RNA, 19 nt, Homo sapiens
  misc_RNA (1)...(19): siRNA sense strand
gaacuccgaagucccaaug

SEQ ID NO: 939742 - RNA, 19 nt, Homo sapiens
  misc_RNA (1)...(19): siRNA sense strand
ggaagaaggcaugcuuaug

SEQ ID NO: 939743 - RNA, 19 nt, Homo sapiens
  misc_RNA (1)...(19): siRNA sense strand
gaggagugaccaagugaaa

SEQ ID NO: 939744 - RNA, 19 nt, Homo sapiens
  misc_RNA (1)...(19): siRNA sense strand
ggaaacaacaaccuugaag

SEQ ID NO: 939745 - RNA, 19 nt, Homo sapiens
  misc_RNA (1)...(19): siRNA sense strand
aaacaacaaccuugaagau

SEQ ID NO: 939746 - RNA, 19 nt, Homo sapiens
  misc_RNA (1)...(19): siRNA sense strand
uggcagcaauuaccuugaa

SEQ ID NO: 939747 - RNA, 19 nt, Homo sapiens
  misc_RNA (1)...(19): siRNA sense strand
caacaaccuugaagaugac

SEQ ID NO: 939748 - RNA, 19 nt, Homo sapiens
  misc_RNA (1)...(19): siRNA sense strand
cagugaugauuacuacaaa

SEQ ID NO: 939749 - RNA, 19 nt, Homo sapiens
  misc_RNA (1)...(19): siRNA sense strand
cugaagccauuuccuaugu

SEQ ID NO: 939750 - RNA, 19 nt, Homo sapiens
  misc_RNA (1)...(19): siRNA sense strand
ccgagauccuggucacuga

SEQ ID NO: 939751 - RNA, 19 nt, Homo sapiens
  misc_RNA (1)...(19): siRNA sense strand
ggauaccgccaaugacaau

SEQ ID NO: 939752 - RNA, 19 nt, Homo sapiens
  misc_RNA (1)...(19): siRNA sense strand
gcaagcaaggagagcauug

SEQ ID NO: 939753 - RNA, 19 nt, Homo sapiens
  misc_RNA (1)...(19): siRNA sense strand
gagccaaaguacccugaag

SEQ ID NO: 939754 - RNA, 19 nt, Homo sapiens
  misc_RNA (1)...(19): siRNA sense strand
uaucgaagccgagagcaaa

SEQ ID NO: 939755 - RNA, 19 nt, Homo sapiens
  misc_RNA (1)...(19): siRNA sense strand
ugaagaucauggcgcaguu

SEQ ID NO: 939756 - RNA, 19 nt, Homo sapiens
  misc_RNA (1)...(19): siRNA sense strand
cagcaauuaccuugaagaa

SEQ ID NO: 939757 - RNA, 19 nt, Homo sapiens
  misc_RNA (1)...(19): siRNA sense strand
ccaccacuauuuccacaag

SEQ ID NO: 939758 - RNA, 19 nt, Homo sapiens
  misc_RNA (1)...(19): siRNA sense strand
ccuggaagaaggagaaauu

SEQ ID NO: 939759 - RNA, 19 nt, Homo sapiens
  misc_RNA (1)...(19): siRNA sense strand
gggaaccuccacaggcuaa

SEQ ID NO: 939760 - RNA, 19 nt, Homo sapiens
  misc_RNA (1)...(19): siRNA sense strand
gaagaucauggcgcaguug

SEQ ID NO: 939761 - RNA, 19 nt, Homo sapiens
  misc_RNA (1)...(19): siRNA sense strand
gaggacuauuccaguacuu

SEQ ID NO: 939762 - RNA, 19 nt, Homo sapiens
  misc_RNA (1)...(19): siRNA sense strand
uggauuugcagauggguua

SEQ ID NO: 939763 - RNA, 19 nt, Homo sapiens
  misc_RNA (1)...(19): siRNA sense strand
gaccaagugaaaccagaaa

SEQ ID NO: 939764 - RNA, 19 nt, Homo sapiens
  misc_RNA (1)...(19): siRNA sense strand
uccaguaccaugagaauga

SEQ ID NO: 939765 - RNA, 19 nt, Homo sapiens
  misc_RNA (1)...(19): siRNA sense strand
cggauggccuggcaagaag

SEQ ID NO: 939766 - RNA, 19 nt, Homo sapiens
  misc_RNA (1)...(19): siRNA sense strand
caagcaaggagagcauuga

SEQ ID NO: 939767 - RNA, 19 nt, Homo sapiens
  misc_RNA (1)...(19): siRNA sense strand
aagaaggcaugcuuauguc

SEQ ID NO: 939768 - RNA, 19 nt, Homo sapiens
  misc_RNA (1)...(19): siRNA sense strand
ggauggaaacaacaaccuu

SEQ ID NO: 939769 - RNA, 19 nt, Homo sapiens
  misc_RNA (1)...(19): siRNA sense strand
ggauugccagccagagaaa

SEQ ID NO: 939770 - RNA, 19 nt, Homo sapiens
  misc_RNA (1)...(19): siRNA sense strand
ggaggguaucaguccaaua

SEQ ID NO: 939771 - RNA, 19 nt, Homo sapiens
  misc_RNA (1)...(19): siRNA sense strand
gcagcaauuaccuugaaga

SEQ ID NO: 939772 - RNA, 19 nt, Homo sapiens
  misc_RNA (1)...(19): siRNA sense strand
gcuaucccgagccaaagua

SEQ ID NO: 939773 - RNA, 19 nt, Homo sapiens
  misc_RNA (1)...(19): siRNA sense strand
gcugaagccauuuccuaug

SEQ ID NO: 939774 - RNA, 19 nt, Homo sapiens
  misc_RNA (1)...(19): siRNA sense strand
ccaaccugaauauugauaa

SEQ ID NO: 939775 - RNA, 19 nt, Homo sapiens
  misc_RNA (1)...(19): siRNA sense strand
gaaagaagagcgggaaccu

SEQ ID NO: 939776 - RNA, 19 nt, Homo sapiens
  misc_RNA (1)...(19): siRNA sense strand
gcgaggagugaccaaguga

SEQ ID NO: 939777 - RNA, 19 nt, Homo sapiens
  misc_RNA (1)...(19): siRNA sense strand
gcaugcuuaugucaguuuc

SEQ ID NO: 939778 - RNA, 19 nt, Homo sapiens
  misc_RNA (1)...(19): siRNA sense strand
acagguaggagguauggaa

SEQ ID NO: 939779 - RNA, 19 nt, Homo sapiens
  misc_RNA (1)...(19): siRNA sense strand
gaggagccgaucgccauuu

SEQ ID NO: 939780 - RNA, 19 nt, Homo sapiens
  misc_RNA (1)...(19): siRNA sense strand
ccaauacagguaggaggua

SEQ ID NO: 939781 - RNA, 19 nt, Homo sapiens
  misc_RNA (1)...(19): siRNA sense strand
ugaagccauuuccuaugug

SEQ ID NO: 939782 - RNA, 19 nt, Homo sapiens
  misc_RNA (1)...(19): siRNA sense strand
uauucaugcuggauggaaa

SEQ ID NO: 939783 - RNA, 19 nt, Homo sapiens
  misc_RNA (1)...(19): siRNA sense strand
uggcagcaauggcagcaau

SEQ ID NO: 939784 - RNA, 19 nt, Homo sapiens
  misc_RNA (1)...(19): siRNA sense strand
acagugaugauuacuacaa

SEQ ID NO: 939785 - RNA, 19 nt, Homo sapiens
  misc_RNA (1)...(19): siRNA sense strand
gggaaccaaccugaauauu

SEQ ID NO: 939786 - RNA, 19 nt, Homo sapiens
  misc_RNA (1)...(19): siRNA sense strand
guggagggauaccgccaau

SEQ ID NO: 939787 - RNA, 19 nt, Homo sapiens
  misc_RNA (1)...(19): siRNA sense strand
ugauucuggucacgaguug

SEQ ID NO: 939788 - RNA, 19 nt, Homo sapiens
  misc_RNA (1)...(19): siRNA sense strand
uaucaguccaauacaggua

SEQ ID NO: 939789 - RNA, 19 nt, Homo sapiens
  misc_RNA (1)...(19): siRNA sense strand
gggauaccgccaaugacaa

SEQ ID NO: 939790 - RNA, 19 nt, Homo sapiens
  misc_RNA (1)...(19): siRNA sense strand
ucgggaaccaaccugaaua

SEQ ID NO: 939791 - RNA, 19 nt, Homo sapiens
  misc_RNA (1)...(19): siRNA sense strand
ccuggucacugaagaucau

SEQ ID NO: 939792 - RNA, 19 nt, Homo sapiens
  misc_RNA (1)...(19): siRNA sense strand
ccucuuugauggauuugca

SEQ ID NO: 939793 - RNA, 19 nt, Homo sapiens
  misc_RNA (1)...(19): siRNA sense strand
ggauuggagccucuuugau

SEQ ID NO: 939794 - RNA, 19 nt, Homo sapiens
  misc_RNA (1)...(19): siRNA sense strand
gaagucccaaugcacagau

SEQ ID NO: 939795 - RNA, 19 nt, Homo sapiens
  misc_RNA (1)...(19): siRNA sense strand
gaugcaaccugggguauuc

SEQ ID NO: 939796 - RNA, 19 nt, Homo sapiens
  misc_RNA (1)...(19): siRNA sense strand
agaaugacaguagcaguga

SEQ ID NO: 939797 - RNA, 19 nt, Homo sapiens
  misc_RNA (1)...(19): siRNA sense strand
gcucugcgucggaaauauc

SEQ ID NO: 939798 - RNA, 19 nt, Homo sapiens
  misc_RNA (1)...(19): siRNA sense strand
acgaagacucugacaguga

SEQ ID NO: 939799 - RNA, 19 nt, Homo sapiens
  misc_RNA (1)...(19): siRNA sense strand
gggagaggcgagaguucaa

SEQ ID NO: 939800 - RNA, 19 nt, Homo sapiens
  misc_RNA (1)...(19): siRNA sense strand
ggcaugcuuaugucaguuu

SEQ ID NO: 939801 - RNA, 19 nt, Homo sapiens
  misc_RNA (1)...(19): siRNA sense strand
ggagccucuuugauggauu

SEQ ID NO: 939802 - RNA, 19 nt, Homo sapiens
  misc_RNA (1)...(19): siRNA sense strand
gacgcacagugaugauuac

SEQ ID NO: 939803 - RNA, 19 nt, Homo sapiens
  misc_RNA (1)...(19): siRNA sense strand
ccaaaguacccugaagaca

SEQ ID NO: 939804 - RNA, 19 nt, Homo sapiens
  misc_RNA (1)...(19): siRNA sense strand
uggaagaaggcaugcuuau

SEQ ID NO: 939805 - RNA, 19 nt, Homo sapiens
  misc_RNA (1)...(19): siRNA sense strand
uuugauggauuugcagaug

SEQ ID NO: 939806 - RNA, 19 nt, Homo sapiens
  misc_RNA (1)...(19): siRNA sense strand
gaagaccuagaaguggauu

SEQ ID NO: 939807 - RNA, 19 nt, Homo sapiens
  misc_RNA (1)...(19): siRNA sense strand
gagaggcgagaguucaagu

SEQ ID NO: 939808 - RNA, 19 nt, Homo sapiens
  misc_RNA (1)...(19): siRNA sense strand
ugccgugccaccacuauuu

SEQ ID NO: 939809 - RNA, 19 nt, Homo sapiens
  misc_RNA (1)...(19): siRNA sense strand
uggauuggagccucuuuga

SEQ ID NO: 939810 - RNA, 19 nt, Homo sapiens
  misc_RNA (1)...(19): siRNA sense strand
caugcuggauggaaacaac

SEQ ID NO: 939811 - RNA, 19 nt, Homo sapiens
  misc_RNA (1)...(19): siRNA sense strand
gcuccaguaccaugagaau

SEQ ID NO: 939812 - RNA, 19 nt, Homo sapiens
  misc_RNA (1)...(19): siRNA sense strand
ggacuugcauuuccacuuc

SEQ ID NO: 939813 - RNA, 19 nt, Homo sapiens
  misc_RNA (1)...(19): siRNA sense strand
gcgaguggaucaagaagaa

SEQ ID NO: 939814 - RNA, 19 nt, Homo sapiens
  misc_RNA (1)...(19): siRNA sense strand
ggcagcugcuucacaauaa

SEQ ID NO: 939815 - RNA, 19 nt, Homo sapiens
  misc_RNA (1)...(19): siRNA sense strand
gagcugaacuucgaacaag

SEQ ID NO: 939816 - RNA, 19 nt, Homo sapiens
  misc_RNA (1)...(19): siRNA sense strand
gcacaacggccuuaacuac

SEQ ID NO: 939817 - RNA, 19 nt, Homo sapiens
  misc_RNA (1)...(19): siRNA sense strand
gaagcuaccuggagaaccu

SEQ ID NO: 939818 - RNA, 19 nt, Homo sapiens
  misc_RNA (1)...(19): siRNA sense strand
ccagucggaucaauucuau

SEQ ID NO: 939819 - RNA, 19 nt, Homo sapiens
  misc_RNA (1)...(19): siRNA sense strand
gaacuucgaacaagaugag

SEQ ID NO: 939820 - RNA, 19 nt, Homo sapiens
  misc_RNA (1)...(19): siRNA sense strand
guacuggacuugcauuucc

SEQ ID NO: 939821 - RNA, 19 nt, Homo sapiens
  misc_RNA (1)...(19): siRNA sense strand
gcauagggcaguauacaag

SEQ ID NO: 939822 - RNA, 19 nt, Homo sapiens
  misc_RNA (1)...(19): siRNA sense strand
acaaggaccuggugcuucu

SEQ ID NO: 939823 - RNA, 19 nt, Homo sapiens
  misc_RNA (1)...(19): siRNA sense strand
cggcagcugcuucacaaua

SEQ ID NO: 939824 - RNA, 19 nt, Homo sapiens
  misc_RNA (1)...(19): siRNA sense strand
caucagcccaugcagguuu

SEQ ID NO: 939825 - RNA, 19 nt, Homo sapiens
  misc_RNA (1)...(19): siRNA sense strand
ccgauuaccuccagaccau

SEQ ID NO: 939826 - RNA, 19 nt, Homo sapiens
  misc_RNA (1)...(19): siRNA sense strand
ccgaggcacguaaacauaa

SEQ ID NO: 939827 - RNA, 19 nt, Homo sapiens
  misc_RNA (1)...(19): siRNA sense strand
acaauaaguucguggucau

SEQ ID NO: 939828 - RNA, 19 nt, Homo sapiens
  misc_RNA (1)...(19): siRNA sense strand
cgaagacaauuuuaugguu

SEQ ID NO: 939829 - RNA, 19 nt, Homo sapiens
  misc_RNA (1)...(19): siRNA sense strand
ggagcugaacuucgaacaa

SEQ ID NO: 939830 - RNA, 19 nt, Homo sapiens
  misc_RNA (1)...(19): siRNA sense strand
gccucgaccuucaaagaga

SEQ ID NO: 939831 - RNA, 19 nt, Homo sapiens
  misc_RNA (1)...(19): siRNA sense strand
gcagcugcuucacaauaag

SEQ ID NO: 939832 - RNA, 19 nt, Homo sapiens
  misc_RNA (1)...(19): siRNA sense strand
ugggacaucuccagguaug

SEQ ID NO: 939833 - RNA, 19 nt, Homo sapiens
  misc_RNA (1)...(19): siRNA sense strand
ggagaagcuaccuggagaa

SEQ ID NO: 939834 - RNA, 19 nt, Homo sapiens
  misc_RNA (1)...(19): siRNA sense strand
ccucgaccuucaaagagaa

SEQ ID NO: 939835 - RNA, 19 nt, Homo sapiens
  misc_RNA (1)...(19): siRNA sense strand
ggacaucuccagguauggu

SEQ ID NO: 939836 - RNA, 19 nt, Homo sapiens
  misc_RNA (1)...(19): siRNA sense strand
gcugaacuucgaacaagau

SEQ ID NO: 939837 - RNA, 19 nt, Homo sapiens
  misc_RNA (1)...(19): siRNA sense strand
uggagaaccuggagaaccu

SEQ ID NO: 939838 - RNA, 19 nt, Homo sapiens
  misc_RNA (1)...(19): siRNA sense strand
ugcggcagcugcuucacaa

SEQ ID NO: 939839 - RNA, 19 nt, Homo sapiens
  misc_RNA (1)...(19): siRNA sense strand
cgaggcacguaaacauaac

SEQ ID NO: 939840 - RNA, 19 nt, Homo sapiens
  misc_RNA (1)...(19): siRNA sense strand
ggauguggccauagaauuc

SEQ ID NO: 939841 - RNA, 19 nt, Homo sapiens
  misc_RNA (1)...(19): siRNA sense strand
ucagggauguggccauaga

SEQ ID NO: 939842 - RNA, 19 nt, Homo sapiens
  misc_RNA (1)...(19): siRNA sense strand
acgugaugcuggagaauua

SEQ ID NO: 939843 - RNA, 19 nt, Homo sapiens
  misc_RNA (1)...(19): siRNA sense strand
cagggucuauugacauuca

SEQ ID NO: 939844 - RNA, 19 nt, Homo sapiens
  misc_RNA (1)...(19): siRNA sense strand
gggauguggccauagaauu

SEQ ID NO: 939845 - RNA, 19 nt, Homo sapiens
  misc_RNA (1)...(19): siRNA sense strand
gggacgugaugcuggagaa

SEQ ID NO: 939846 - RNA, 19 nt, Homo sapiens
  misc_RNA (1)...(19): siRNA sense strand
auucagggauguggccaua

SEQ ID NO: 939847 - RNA, 19 nt, Homo sapiens
  misc_RNA (1)...(19): siRNA sense strand
cucagggucuauugacauu

SEQ ID NO: 939848 - RNA, 19 nt, Homo sapiens
  misc_RNA (1)...(19): siRNA sense strand
gugaugcuggagaauuaua

SEQ ID NO: 939849 - RNA, 19 nt, Homo sapiens
  misc_RNA (1)...(19): siRNA sense strand
gacgugaugcuggagaauu

SEQ ID NO: 939850 - RNA, 19 nt, Homo sapiens
  misc_RNA (1)...(19): siRNA sense strand
ggcaggagcuugcagauuu

SEQ ID NO: 939851 - RNA, 19 nt, Homo sapiens
  misc_RNA (1)...(19): siRNA sense strand
gcucagugaugccagcuua

SEQ ID NO: 939852 - RNA, 19 nt, Homo sapiens
  misc_RNA (1)...(19): siRNA sense strand
ggaagagggugaggaagaa

SEQ ID NO: 939853 - RNA, 19 nt, Homo sapiens
  misc_RNA (1)...(19): siRNA sense strand
ugaggacacugcacaaauu

SEQ ID NO: 939854 - RNA, 19 nt, Homo sapiens
  misc_RNA (1)...(19): siRNA sense strand
ggacaaugaugaggaugaa

SEQ ID NO: 939855 - RNA, 19 nt, Homo sapiens
  misc_RNA (1)...(19): siRNA sense strand
acaugaagcugcacaguga

SEQ ID NO: 939856 - RNA, 19 nt, Homo sapiens
  misc_RNA (1)...(19): siRNA sense strand
gcugaugccuugugacuuc

SEQ ID NO: 939857 - RNA, 19 nt, Homo sapiens
  misc_RNA (1)...(19): siRNA sense strand
aagaggagaugcucaguga

SEQ ID NO: 939858 - RNA, 19 nt, Homo sapiens
  misc_RNA (1)...(19): siRNA sense strand
gcaggagcuugcagauuug

SEQ ID NO: 939859 - RNA, 19 nt, Homo sapiens
  misc_RNA (1)...(19): siRNA sense strand
ggaagaagaggacaaugau

SEQ ID NO: 939860 - RNA, 19 nt, Homo sapiens
  misc_RNA (1)...(19): siRNA sense strand
gagagcugaugccuuguga

SEQ ID NO: 939861 - RNA, 19 nt, Homo sapiens
  misc_RNA (1)...(19): siRNA sense strand
caaaaggucugcaguaucu

SEQ ID NO: 939862 - RNA, 19 nt, Homo sapiens
  misc_RNA (1)...(19): siRNA sense strand
gaggagaugcucagugaug

SEQ ID NO: 939863 - RNA, 19 nt, Homo sapiens
  misc_RNA (1)...(19): siRNA sense strand
gcagcaaccuugucaucca

SEQ ID NO: 939864 - RNA, 19 nt, Homo sapiens
  misc_RNA (1)...(19): siRNA sense strand
uaggaaagcugccaaaaga

SEQ ID NO: 939865 - RNA, 19 nt, Homo sapiens
  misc_RNA (1)...(19): siRNA sense strand
ugugagauaugcggguuua

SEQ ID NO: 939866 - RNA, 19 nt, Homo sapiens
  misc_RNA (1)...(19): siRNA sense strand
aagaagaggacaaugauga

SEQ ID NO: 939867 - RNA, 19 nt, Homo sapiens
  misc_RNA (1)...(19): siRNA sense strand
gaagaagaggacaaugaug

SEQ ID NO: 939868 - RNA, 19 nt, Homo sapiens
  misc_RNA (1)...(19): siRNA sense strand
acucgcagcucgccaaguu

SEQ ID NO: 939869 - RNA, 19 nt, Homo sapiens
  misc_RNA (1)...(19): siRNA sense strand
ggacuacaucugugaguuc

SEQ ID NO: 939870 - RNA, 19 nt, Homo sapiens
  misc_RNA (1)...(19): siRNA sense strand
ccacagacguauccacacu

SEQ ID NO: 939871 - RNA, 19 nt, Homo sapiens
  misc_RNA (1)...(19): siRNA sense strand
ccugucaccugcacaccua

SEQ ID NO: 939872 - RNA, 19 nt, Homo sapiens
  misc_RNA (1)...(19): siRNA sense strand
gggacuacaucugugaguu

SEQ ID NO: 939873 - RNA, 19 nt, Homo sapiens
  misc_RNA (1)...(19): siRNA sense strand
ccacauacuacucggagaa

SEQ ID NO: 939874 - RNA, 19 nt, Homo sapiens
  misc_RNA (1)...(19): siRNA sense strand
uuaagaaacaccugaagga

SEQ ID NO: 939875 - RNA, 19 nt, Homo sapiens
  misc_RNA (1)...(19): siRNA sense strand
gaggacacugcacaaauug

SEQ ID NO: 939876 - RNA, 19 nt, Homo sapiens
  misc_RNA (1)...(19): siRNA sense strand
ggacucaagaggccagguu

SEQ ID NO: 939877 - RNA, 19 nt, Homo sapiens
  misc_RNA (1)...(19): siRNA sense strand
gaugaggacacugcacaaa

SEQ ID NO: 939878 - RNA, 19 nt, Homo sapiens
  misc_RNA (1)...(19): siRNA sense strand
gagaagccagacaguguug

SEQ ID NO: 939879 - RNA, 19 nt, Homo sapiens
  misc_RNA (1)...(19): siRNA sense strand
ggagcuugcagauuuggaa

SEQ ID NO: 939880 - RNA, 19 nt, Homo sapiens
  misc_RNA (1)...(19): siRNA sense strand
ucuccaaccggcaguauuu

SEQ ID NO: 939881 - RNA, 19 nt, Homo sapiens
  misc_RNA (1)...(19): siRNA sense strand
gaugauagugagccugaug

SEQ ID NO: 939882 - RNA, 19 nt, Homo sapiens
  misc_RNA (1)...(19): siRNA sense strand
gcacucuccaguccucuug

SEQ ID NO: 939883 - RNA, 19 nt, Homo sapiens
  misc_RNA (1)...(19): siRNA sense strand
gcggcaagcgcuuugagaa

SEQ ID NO: 939884 - RNA, 19 nt, Homo sapiens
  misc_RNA (1)...(19): siRNA sense strand
aggaagaagaggacaauga

SEQ ID NO: 939885 - RNA, 19 nt, Homo sapiens
  misc_RNA (1)...(19): siRNA sense strand
ugaaggagcacaugaagcu

SEQ ID NO: 939886 - RNA, 19 nt, Homo sapiens
  misc_RNA (1)...(19): siRNA sense strand
acaaugaugaggaugaaga

SEQ ID NO: 939887 - RNA, 19 nt, Homo sapiens
  misc_RNA (1)...(19): siRNA sense strand
cagccucccuuccacauac

SEQ ID NO: 939888 - RNA, 19 nt, Homo sapiens
  misc_RNA (1)...(19): siRNA sense strand
gcacuagcagcaaccuugu

SEQ ID NO: 939889 - RNA, 19 nt, Homo sapiens
  misc_RNA (1)...(19): siRNA sense strand
gcacauccaccagaagucu

SEQ ID NO: 939890 - RNA, 19 nt, Homo sapiens
  misc_RNA (1)...(19): siRNA sense strand
ggaaagcugccaaaagaga

SEQ ID NO: 939891 - RNA, 19 nt, Homo sapiens
  misc_RNA (1)...(19): siRNA sense strand
gagcugaugccuugugacu

SEQ ID NO: 939892 - RNA, 19 nt, Homo sapiens
  misc_RNA (1)...(19): siRNA sense strand
gagccagccugugggaagu

SEQ ID NO: 939893 - RNA, 19 nt, Homo sapiens
  misc_RNA (1)...(19): siRNA sense strand
gggcaggagcuugcagauu

SEQ ID NO: 939894 - RNA, 19 nt, Homo sapiens
  misc_RNA (1)...(19): siRNA sense strand
ccaaccggcaguauuugaa

SEQ ID NO: 939895 - RNA, 19 nt, Homo sapiens
  misc_RNA (1)...(19): siRNA sense strand
caagagaauuaggaaagcu

SEQ ID NO: 939896 - RNA, 19 nt, Homo sapiens
  misc_RNA (1)...(19): siRNA sense strand
ccaagagaauuaggaaagc

SEQ ID NO: 939897 - RNA, 19 nt, Homo sapiens
  misc_RNA (1)...(19): siRNA sense strand
ugcaguaucuggugcucuu

SEQ ID NO: 939898 - RNA, 19 nt, Homo sapiens
  misc_RNA (1)...(19): siRNA sense strand
agaggacaaugaugaggau

SEQ ID NO: 939899 - RNA, 19 nt, Homo sapiens
  misc_RNA (1)...(19): siRNA sense strand
cauacuacucggagaaguu

SEQ ID NO: 939900 - RNA, 19 nt, Homo sapiens
  misc_RNA (1)...(19): siRNA sense strand
cuggugcucuugucucaug

SEQ ID NO: 939901 - RNA, 19 nt, Homo sapiens
  misc_RNA (1)...(19): siRNA sense strand
caaccggcaguauuugaau

SEQ ID NO: 939902 - RNA, 19 nt, Homo sapiens
  misc_RNA (1)...(19): siRNA sense strand
agaggaagagggugaggaa

SEQ ID NO: 939903 - RNA, 19 nt, Homo sapiens
  misc_RNA (1)...(19): siRNA sense strand
ugagaagccagacaguguu

SEQ ID NO: 939904 - RNA, 19 nt, Homo sapiens
  misc_RNA (1)...(19): siRNA sense strand
gcacaugaagcugcacagu

SEQ ID NO: 939905 - RNA, 19 nt, Homo sapiens
  misc_RNA (1)...(19): siRNA sense strand
gcaguggugccuccucaag

SEQ ID NO: 939906 - RNA, 19 nt, Homo sapiens
  misc_RNA (1)...(19): siRNA sense strand
ggaugaggacacugcacaa

SEQ ID NO: 939907 - RNA, 19 nt, Homo sapiens
  misc_RNA (1)...(19): siRNA sense strand
aggaagagggugaggaaga

SEQ ID NO: 939908 - RNA, 19 nt, Homo sapiens
  misc_RNA (1)...(19): siRNA sense strand
ucacccagcccugcuucua

SEQ ID NO: 939909 - RNA, 19 nt, Homo sapiens
  misc_RNA (1)...(19): siRNA sense strand
gaagccagacaguguugca

SEQ ID NO: 939910 - RNA, 19 nt, Homo sapiens
  misc_RNA (1)...(19): siRNA sense strand
cagcacauccaccagaagu

SEQ ID NO: 939911 - RNA, 19 nt, Homo sapiens
  misc_RNA (1)...(19): siRNA sense strand
uggaaucugagcaugauga

SEQ ID NO: 939912 - RNA, 19 nt, Homo sapiens
  misc_RNA (1)...(19): siRNA sense strand
gacuacaucugugaguucu

SEQ ID NO: 939913 - RNA, 19 nt, Homo sapiens
  misc_RNA (1)...(19): siRNA sense strand
ggaccgguacacuucuuca

SEQ ID NO: 939914 - RNA, 19 nt, Homo sapiens
  misc_RNA (1)...(19): siRNA sense strand
uagcagcaaccuugucauc

SEQ ID NO: 939915 - RNA, 19 nt, Homo sapiens
  misc_RNA (1)...(19): siRNA sense strand
gcucagcaggccauaccuu

SEQ ID NO: 939916 - RNA, 19 nt, Homo sapiens
  misc_RNA (1)...(19): siRNA sense strand
cccaagagaauuaggaaag

SEQ ID NO: 939917 - RNA, 19 nt, Homo sapiens
  misc_RNA (1)...(19): siRNA sense strand
gcagugaguuugaaagaga

SEQ ID NO: 939918 - RNA, 19 nt, Homo sapiens
  misc_RNA (1)...(19): siRNA sense strand
ggaauucgcccuccacuug

SEQ ID NO: 939919 - RNA, 19 nt, Homo sapiens
  misc_RNA (1)...(19): siRNA sense strand
gcaagaauauaugcugauu

SEQ ID NO: 939920 - RNA, 19 nt, Homo sapiens
  misc_RNA (1)...(19): siRNA sense strand
gaucuucccuuccuacaug

SEQ ID NO: 939921 - RNA, 19 nt, Homo sapiens
  misc_RNA (1)...(19): siRNA sense strand
ggagaaguuuccucacauu

SEQ ID NO: 939922 - RNA, 19 nt, Homo sapiens
  misc_RNA (1)...(19): siRNA sense strand
gggcugccaugcaagaaua

SEQ ID NO: 939923 - RNA, 19 nt, Homo sapiens
  misc_RNA (1)...(19): siRNA sense strand
ugacaacagugauugacua

SEQ ID NO: 939924 - RNA, 19 nt, Homo sapiens
  misc_RNA (1)...(19): siRNA sense strand
gagaacugauugccuuuga

SEQ ID NO: 939925 - RNA, 19 nt, Homo sapiens
  misc_RNA (1)...(19): siRNA sense strand
gaaguuuccucacauuaag

SEQ ID NO: 939926 - RNA, 19 nt, Homo sapiens
  misc_RNA (1)...(19): siRNA sense strand
gaacaggcgagaacugauu

SEQ ID NO: 939927 - RNA, 19 nt, Homo sapiens
  misc_RNA (1)...(19): siRNA sense strand
gaagucaagcauuuaauug

SEQ ID NO: 939928 - RNA, 19 nt, Homo sapiens
  misc_RNA (1)...(19): siRNA sense strand
gaaguuggacggaggaaga

SEQ ID NO: 939929 - RNA, 19 nt, Homo sapiens
  misc_RNA (1)...(19): siRNA sense strand
gagaaguuuccucacauua

SEQ ID NO: 939930 - RNA, 19 nt, Homo sapiens
  misc_RNA (1)...(19): siRNA sense strand
gagacuuuauggacuauga

SEQ ID NO: 939931 - RNA, 19 nt, Homo sapiens
  misc_RNA (1)...(19): siRNA sense strand
uaccaggaauggcagaaua

SEQ ID NO: 939932 - RNA, 19 nt, Homo sapiens
  misc_RNA (1)...(19): siRNA sense strand
ccucggaucucaagaagga

SEQ ID NO: 939933 - RNA, 19 nt, Homo sapiens
  misc_RNA (1)...(19): siRNA sense strand
uggaagauauugaggagaa

SEQ ID NO: 939934 - RNA, 19 nt, Homo sapiens
  misc_RNA (1)...(19): siRNA sense strand
gcauuuaauugacaaacug

SEQ ID NO: 939935 - RNA, 19 nt, Homo sapiens
  misc_RNA (1)...(19): siRNA sense strand
caacagugauugacuacgu

SEQ ID NO: 939936 - RNA, 19 nt, Homo sapiens
  misc_RNA (1)...(19): siRNA sense strand
gaacugauugccuuugaau

SEQ ID NO: 939937 - RNA, 19 nt, Homo sapiens
  misc_RNA (1)...(19): siRNA sense strand
ggacggaggaagacaauca

SEQ ID NO: 939938 - RNA, 19 nt, Homo sapiens
  misc_RNA (1)...(19): siRNA sense strand
ccaguggccuuguggcaaa

SEQ ID NO: 939939 - RNA, 19 nt, Homo sapiens
  misc_RNA (1)...(19): siRNA sense strand
gcaacacgauaccaggaau

SEQ ID NO: 939940 - RNA, 19 nt, Homo sapiens
  misc_RNA (1)...(19): siRNA sense strand
cgaagucaagcauuuaauu

SEQ ID NO: 939941 - RNA, 19 nt, Homo sapiens
  misc_RNA (1)...(19): siRNA sense strand
guagugaccugggagacuu

SEQ ID NO: 939942 - RNA, 19 nt, Homo sapiens
  misc_RNA (1)...(19): siRNA sense strand
gaacaugcggcaacacgau

SEQ ID NO: 939943 - RNA, 19 nt, Homo sapiens
  misc_RNA (1)...(19): siRNA sense strand
ggaggaagacaaucaacug

SEQ ID NO: 939944 - RNA, 19 nt, Homo sapiens
  misc_RNA (1)...(19): siRNA sense strand
caauuucuguuacccacaa

SEQ ID NO: 939945 - RNA, 19 nt, Homo sapiens
  misc_RNA (1)...(19): siRNA sense strand
uggagacccuggaagauau

SEQ ID NO: 939946 - RNA, 19 nt, Homo sapiens
  misc_RNA (1)...(19): siRNA sense strand
agaaguuuccucacauuaa

SEQ ID NO: 939947 - RNA, 19 nt, Homo sapiens
  misc_RNA (1)...(19): siRNA sense strand
gaucauuggucuggaaggu

SEQ ID NO: 939948 - RNA, 19 nt, Homo sapiens
  misc_RNA (1)...(19): siRNA sense strand
aacacgaagucaagcauuu

SEQ ID NO: 939949 - RNA, 19 nt, Homo sapiens
  misc_RNA (1)...(19): siRNA sense strand
cagaauaguccuuaucagu

SEQ ID NO: 939950 - RNA, 19 nt, Homo sapiens
  misc_RNA (1)...(19): siRNA sense strand
caaacgcguucugaucuuc

SEQ ID NO: 939951 - RNA, 19 nt, Homo sapiens
  misc_RNA (1)...(19): siRNA sense strand
gugaagcccucggaucuca

SEQ ID NO: 939952 - RNA, 19 nt, Homo sapiens
  misc_RNA (1)...(19): siRNA sense strand
ugggagacuuuauggacua

SEQ ID NO: 939953 - RNA, 19 nt, Homo sapiens
  misc_RNA (1)...(19): siRNA sense strand
acacgaagucaagcauuua

SEQ ID NO: 939954 - RNA, 19 nt, Homo sapiens
  misc_RNA (1)...(19): siRNA sense strand
gcagaauaguccuuaucag

SEQ ID NO: 939955 - RNA, 19 nt, Homo sapiens
  misc_RNA (1)...(19): siRNA sense strand
uugacaaacuggaagagaa

SEQ ID NO: 939956 - RNA, 19 nt, Homo sapiens
  misc_RNA (1)...(19): siRNA sense strand
aauuggaagugaccucaaa

SEQ ID NO: 939957 - RNA, 19 nt, Homo sapiens
  misc_RNA (1)...(19): siRNA sense strand
gggaaacucaacaaacaga

SEQ ID NO: 939958 - RNA, 19 nt, Homo sapiens
  misc_RNA (1)...(19): siRNA sense strand
cuacaugacaacagugauu

SEQ ID NO: 939959 - RNA, 19 nt, Homo sapiens
  misc_RNA (1)...(19): siRNA sense strand
ucacccagaccaaagaauu

SEQ ID NO: 939960 - RNA, 19 nt, Homo sapiens
  misc_RNA (1)...(19): siRNA sense strand
agagaucauuggucuggaa

SEQ ID NO: 939961 - RNA, 19 nt, Homo sapiens
  misc_RNA (1)...(19): siRNA sense strand
ucaagaacaugcggcaaca

SEQ ID NO: 939962 - RNA, 19 nt, Homo sapiens
  misc_RNA (1)...(19): siRNA sense strand
ggaggacuguggccuugag

SEQ ID NO: 939963 - RNA, 19 nt, Homo sapiens
  misc_RNA (1)...(19): siRNA sense strand
ucaagaaggacaugaacga

SEQ ID NO: 939964 - RNA, 19 nt, Homo sapiens
  misc_RNA (1)...(19): siRNA sense strand
aaacacaaacgcguucuga

SEQ ID NO: 939965 - RNA, 19 nt, Homo sapiens
  misc_RNA (1)...(19): siRNA sense strand
gcugaugggaagacuguuu

SEQ ID NO: 939966 - RNA, 19 nt, Homo sapiens
  misc_RNA (1)...(19): siRNA sense strand
acaaacgcguucugaucuu

SEQ ID NO: 939967 - RNA, 19 nt, Homo sapiens
  misc_RNA (1)...(19): siRNA sense strand
ggaaacucaacaaacagaa

SEQ ID NO: 939968 - RNA, 19 nt, Homo sapiens
  misc_RNA (1)...(19): siRNA sense strand
acacaaacgcguucugauc

SEQ ID NO: 939969 - RNA, 19 nt, Homo sapiens
  misc_RNA (1)...(19): siRNA sense strand
guuaguggccuuggaauuc

SEQ ID NO: 939970 - RNA, 19 nt, Homo sapiens
  misc_RNA (1)...(19): siRNA sense strand
ggcagaauaguccuuauca

SEQ ID NO: 939971 - RNA, 19 nt, Homo sapiens
  misc_RNA (1)...(19): siRNA sense strand
uauggacuaugacccaaau

SEQ ID NO: 939972 - RNA, 19 nt, Homo sapiens
  misc_RNA (1)...(19): siRNA sense strand
gggcaugugugcuguuagc

SEQ ID NO: 939973 - RNA, 19 nt, Homo sapiens
  misc_RNA (1)...(19): siRNA sense strand
ggagacccuggaagauauu

SEQ ID NO: 939974 - RNA, 19 nt, Homo sapiens
  misc_RNA (1)...(19): siRNA sense strand
agaacugauugccuuugaa

SEQ ID NO: 939975 - RNA, 19 nt, Homo sapiens
  misc_RNA (1)...(19): siRNA sense strand
cacccagaccaaagaauuu

SEQ ID NO: 939976 - RNA, 19 nt, Homo sapiens
  misc_RNA (1)...(19): siRNA sense strand
guucugaucuucccuuccu

SEQ ID NO: 939977 - RNA, 19 nt, Homo sapiens
  misc_RNA (1)...(19): siRNA sense strand
cuauacccaauuucuguua

SEQ ID NO: 939978 - RNA, 19 nt, Homo sapiens
  misc_RNA (1)...(19): siRNA sense strand
gugcagugaguuugaaaga

SEQ ID NO: 939979 - RNA, 19 nt, Homo sapiens
  misc_RNA (1)...(19): siRNA sense strand
ccuuaucaguggcagaaga

SEQ ID NO: 939980 - RNA, 19 nt, Homo sapiens
  misc_RNA (1)...(19): siRNA sense strand
gaaacucaacaaacagaac

SEQ ID NO: 939981 - RNA, 19 nt, Homo sapiens
  misc_RNA (1)...(19): siRNA sense strand
cacauuaagcugacacuca

SEQ ID NO: 939982 - RNA, 19 nt, Homo sapiens
  misc_RNA (1)...(19): siRNA sense strand
ccaccgcagccucuccaua

SEQ ID NO: 939983 - RNA, 19 nt, Homo sapiens
  misc_RNA (1)...(19): siRNA sense strand
ggacuaugacccaaaucuc

SEQ ID NO: 939984 - RNA, 19 nt, Homo sapiens
  misc_RNA (1)...(19): siRNA sense strand
cacgaagucaagcauuuaa

SEQ ID NO: 939985 - RNA, 19 nt, Homo sapiens
  misc_RNA (1)...(19): siRNA sense strand
aaacacgaagucaagcauu

SEQ ID NO: 939986 - RNA, 19 nt, Homo sapiens
  misc_RNA (1)...(19): siRNA sense strand
gaagacuguuuccuauacc

SEQ ID NO: 939987 - RNA, 19 nt, Homo sapiens
  misc_RNA (1)...(19): siRNA sense strand
uuuggagcccggagaaaua

SEQ ID NO: 939988 - RNA, 19 nt, Homo sapiens
  misc_RNA (1)...(19): siRNA sense strand
gggagacuuuauggacuau

SEQ ID NO: 939989 - RNA, 19 nt, Homo sapiens
  misc_RNA (1)...(19): siRNA sense strand
ccacuugcccgagcacgaa

SEQ ID NO: 939990 - RNA, 19 nt, Homo sapiens
  misc_RNA (1)...(19): siRNA sense strand
gguguuaguggccuuggaa

SEQ ID NO: 939991 - RNA, 19 nt, Homo sapiens
  misc_RNA (1)...(19): siRNA sense strand
acugauugccuuugaauuc

SEQ ID NO: 939992 - RNA, 19 nt, Homo sapiens
  misc_RNA (1)...(19): siRNA sense strand
gccuucgucuacuuugaaa

SEQ ID NO: 939993 - RNA, 19 nt, Homo sapiens
  misc_RNA (1)...(19): siRNA sense strand
gcccucggaucucaagaag

SEQ ID NO: 939994 - RNA, 19 nt, Homo sapiens
  misc_RNA (1)...(19): siRNA sense strand
caccgcagccucuccauag

SEQ ID NO: 939995 - RNA, 19 nt, Homo sapiens
  misc_RNA (1)...(19): siRNA sense strand
caacacgauaccaggaaug

SEQ ID NO: 939996 - RNA, 19 nt, Homo sapiens
  misc_RNA (1)...(19): siRNA sense strand
ccauggccuucgucuacuu

SEQ ID NO: 939997 - RNA, 19 nt, Homo sapiens
  misc_RNA (1)...(19): siRNA sense strand
uuggagacccuggaagaua

SEQ ID NO: 939998 - RNA, 19 nt, Homo sapiens
  misc_RNA (1)...(19): siRNA sense strand
cacaaacgcguucugaucu

SEQ ID NO: 939999 - RNA, 19 nt, Homo sapiens
  misc_RNA (1)...(19): siRNA sense strand
gacuaugacccaaaucucu

SEQ ID NO: 940000 - RNA, 19 nt, Homo sapiens
  misc_RNA (1)...(19): siRNA sense strand
gcgagaacugauugccuuu

SEQ ID NO: 940001 - RNA, 19 nt, Homo sapiens
  misc_RNA (1)...(19): siRNA sense strand
ugacaaacuggaagagaag

SEQ ID NO: 940002 - RNA, 19 nt, Homo sapiens
  misc_RNA (1)...(19): siRNA sense strand
ggccuucgucuacuuugaa

SEQ ID NO: 940003 - RNA, 19 nt, Homo sapiens
  misc_RNA (1)...(19): siRNA sense strand
uagacuccaccuccucuuu

SEQ ID NO: 940004 - RNA, 19 nt, Homo sapiens
  misc_RNA (1)...(19): siRNA sense strand
aagagaaguuccggcugaa

SEQ ID NO: 940005 - RNA, 19 nt, Homo sapiens
  misc_RNA (1)...(19): siRNA sense strand
ggaagauauugaggagaac

SEQ ID NO: 940006 - RNA, 19 nt, Homo sapiens
  misc_RNA (1)...(19): siRNA sense strand
agauccuucuguaguauau

SEQ ID NO: 940007 - RNA, 19 nt, Homo sapiens
  misc_RNA (1)...(19): siRNA sense strand
uguuuccuauacccaauuu

SEQ ID NO: 940008 - RNA, 19 nt, Homo sapiens
  misc_RNA (1)...(19): siRNA sense strand
uaauugacaaacuggaaga

SEQ ID NO: 940009 - RNA, 19 nt, Homo sapiens
  misc_RNA (1)...(19): siRNA sense strand
ggcaacacgauaccaggaa

SEQ ID NO: 940010 - RNA, 19 nt, Homo sapiens
  misc_RNA (1)...(19): siRNA sense strand
uuucagugcugccguaucg

SEQ ID NO: 940011 - RNA, 19 nt, Homo sapiens
  misc_RNA (1)...(19): siRNA sense strand
ccggagaaauaccauagac

SEQ ID NO: 940012 - RNA, 19 nt, Homo sapiens
  misc_RNA (1)...(19): siRNA sense strand
cuuccuacaugacaacagu

SEQ ID NO: 940013 - RNA, 19 nt, Homo sapiens
  misc_RNA (1)...(19): siRNA sense strand
gaucucaagaaggacauga

SEQ ID NO: 940014 - RNA, 19 nt, Homo sapiens
  misc_RNA (1)...(19): siRNA sense strand
gaacagcggugccgucauc

SEQ ID NO: 940015 - RNA, 19 nt, Homo sapiens
  misc_RNA (1)...(19): siRNA sense strand
gggcgacguugcauaaaua

SEQ ID NO: 940016 - RNA, 19 nt, Homo sapiens
  misc_RNA (1)...(19): siRNA sense strand
gaacaaagucuccuugcaa

SEQ ID NO: 940017 - RNA, 19 nt, Homo sapiens
  misc_RNA (1)...(19): siRNA sense strand
gaucagcucuacucauuuc

SEQ ID NO: 940018 - RNA, 19 nt, Homo sapiens
  misc_RNA (1)...(19): siRNA sense strand
uaaguuggcuguucagaug

SEQ ID NO: 940019 - RNA, 19 nt, Homo sapiens
  misc_RNA (1)...(19): siRNA sense strand
ggacugacacugaagauga

SEQ ID NO: 940020 - RNA, 19 nt, Homo sapiens
  misc_RNA (1)...(19): siRNA sense strand
cagagaaaguugacagaaa

SEQ ID NO: 940021 - RNA, 19 nt, Homo sapiens
  misc_RNA (1)...(19): siRNA sense strand
gauggccgcuccugguaua

SEQ ID NO: 940022 - RNA, 19 nt, Homo sapiens
  misc_RNA (1)...(19): siRNA sense strand
gcagugaugguguacaaua

SEQ ID NO: 940023 - RNA, 19 nt, Homo sapiens
  misc_RNA (1)...(19): siRNA sense strand
gcacaaguucuaaugcuaa

SEQ ID NO: 940024 - RNA, 19 nt, Homo sapiens
  misc_RNA (1)...(19): siRNA sense strand
ggaauuccuggauagauua

SEQ ID NO: 940025 - RNA, 19 nt, Homo sapiens
  misc_RNA (1)...(19): siRNA sense strand
cugaggagcuucugucaaa

SEQ ID NO: 940026 - RNA, 19 nt, Homo sapiens
  misc_RNA (1)...(19): siRNA sense strand
uggaucagcucuacucauu

SEQ ID NO: 940027 - RNA, 19 nt, Homo sapiens
  misc_RNA (1)...(19): siRNA sense strand
gaauucagcacaaaggaaa

SEQ ID NO: 940028 - RNA, 19 nt, Homo sapiens
  misc_RNA (1)...(19): siRNA sense strand
gcaacaacuucuggaauuc

SEQ ID NO: 940029 - RNA, 19 nt, Homo sapiens
  misc_RNA (1)...(19): siRNA sense strand
gcuaugcagugauggugua

SEQ ID NO: 940030 - RNA, 19 nt, Homo sapiens
  misc_RNA (1)...(19): siRNA sense strand
ggaacaaagucuccuugca

SEQ ID NO: 940031 - RNA, 19 nt, Homo sapiens
  misc_RNA (1)...(19): siRNA sense strand
caggagcccucacccauug

SEQ ID NO: 940032 - RNA, 19 nt, Homo sapiens
  misc_RNA (1)...(19): siRNA sense strand
gggcaaggcacaaguucua

SEQ ID NO: 940033 - RNA, 19 nt, Homo sapiens
  misc_RNA (1)...(19): siRNA sense strand
aaaugugacuccugacuau

SEQ ID NO: 940034 - RNA, 19 nt, Homo sapiens
  misc_RNA (1)...(19): siRNA sense strand
gggaaagcacuaaauguga

SEQ ID NO: 940035 - RNA, 19 nt, Homo sapiens
  misc_RNA (1)...(19): siRNA sense strand
gcagauggaagaaguagug

SEQ ID NO: 940036 - RNA, 19 nt, Homo sapiens
  misc_RNA (1)...(19): siRNA sense strand
gcacaaaggaaaggacuau

SEQ ID NO: 940037 - RNA, 19 nt, Homo sapiens
  misc_RNA (1)...(19): siRNA sense strand
gcaacgagagcaacaacuu

SEQ ID NO: 940038 - RNA, 19 nt, Homo sapiens
  misc_RNA (1)...(19): siRNA sense strand
ggcacaaguucuaaugcua

SEQ ID NO: 940039 - RNA, 19 nt, Homo sapiens
  misc_RNA (1)...(19): siRNA sense strand
ggaccuugcuaugcaguga

SEQ ID NO: 940040 - RNA, 19 nt, Homo sapiens
  misc_RNA (1)...(19): siRNA sense strand
uggaauuccuggauagauu

SEQ ID NO: 940041 - RNA, 19 nt, Homo sapiens
  misc_RNA (1)...(19): siRNA sense strand
ggaggaagcaacaggaugu

SEQ ID NO: 940042 - RNA, 19 nt, Homo sapiens
  misc_RNA (1)...(19): siRNA sense strand
ugggaaaggugguauuuag

SEQ ID NO: 940043 - RNA, 19 nt, Homo sapiens
  misc_RNA (1)...(19): siRNA sense strand
aacaaagucuccuugcaaa

SEQ ID NO: 940044 - RNA, 19 nt, Homo sapiens
  misc_RNA (1)...(19): siRNA sense strand
gacugacacugaagaugaa

SEQ ID NO: 940045 - RNA, 19 nt, Homo sapiens
  misc_RNA (1)...(19): siRNA sense strand
agcaacaacuucuggaauu

SEQ ID NO: 940046 - RNA, 19 nt, Homo sapiens
  misc_RNA (1)...(19): siRNA sense strand
uaaaugugacuccugacua

SEQ ID NO: 940047 - RNA, 19 nt, Homo sapiens
  misc_RNA (1)...(19): siRNA sense strand
gcagagaaaguugacagaa

SEQ ID NO: 940048 - RNA, 19 nt, Homo sapiens
  misc_RNA (1)...(19): siRNA sense strand
aagccgaucuugcagaaau

SEQ ID NO: 940049 - RNA, 19 nt, Homo sapiens
  misc_RNA (1)...(19): siRNA sense strand
ccugguagauucagaugga

SEQ ID NO: 940050 - RNA, 19 nt, Homo sapiens
  misc_RNA (1)...(19): siRNA sense strand
gagcaacaacuucuggaau

SEQ ID NO: 940051 - RNA, 19 nt, Homo sapiens
  misc_RNA (1)...(19): siRNA sense strand
cuugggaauucauaucuuu

SEQ ID NO: 940052 - RNA, 19 nt, Homo sapiens
  misc_RNA (1)...(19): siRNA sense strand
uggagacucuguagccauu

SEQ ID NO: 940053 - RNA, 19 nt, Homo sapiens
  misc_RNA (1)...(19): siRNA sense strand
cuucuggaauuccuggaua

SEQ ID NO: 940054 - RNA, 19 nt, Homo sapiens
  misc_RNA (1)...(19): siRNA sense strand
gugaugguguacaauauag

SEQ ID NO: 940055 - RNA, 19 nt, Homo sapiens
  misc_RNA (1)...(19): siRNA sense strand
gauggcugaugaagaggaa

SEQ ID NO: 940056 - RNA, 19 nt, Homo sapiens
  misc_RNA (1)...(19): siRNA sense strand
ugggugagguguacuggaa

SEQ ID NO: 940057 - RNA, 19 nt, Homo sapiens
  misc_RNA (1)...(19): siRNA sense strand
cagugaugguguacaauau

SEQ ID NO: 940058 - RNA, 19 nt, Homo sapiens
  misc_RNA (1)...(19): siRNA sense strand
gaagaagucaagccgaucu

SEQ ID NO: 940059 - RNA, 19 nt, Homo sapiens
  misc_RNA (1)...(19): siRNA sense strand
agagaaaguugacagaaaa

SEQ ID NO: 940060 - RNA, 19 nt, Homo sapiens
  misc_RNA (1)...(19): siRNA sense strand
cauuuggccugguagauuc

SEQ ID NO: 940061 - RNA, 19 nt, Homo sapiens
  misc_RNA (1)...(19): siRNA sense strand
agacugcuauuucgagaca

SEQ ID NO: 940062 - RNA, 19 nt, Homo sapiens
  misc_RNA (1)...(19): siRNA sense strand
agggaaaggugaagaccaa

SEQ ID NO: 940063 - RNA, 19 nt, Homo sapiens
  misc_RNA (1)...(19): siRNA sense strand
ccagccuccuugagaguaa

SEQ ID NO: 940064 - RNA, 19 nt, Homo sapiens
  misc_RNA (1)...(19): siRNA sense strand
ggccagaacccuaagaucu

SEQ ID NO: 940065 - RNA, 19 nt, Homo sapiens
  misc_RNA (1)...(19): siRNA sense strand
ugcaggaacucguggauca

SEQ ID NO: 940066 - RNA, 19 nt, Homo sapiens
  misc_RNA (1)...(19): siRNA sense strand
caaggcacaaguucuaaug

SEQ ID NO: 940067 - RNA, 19 nt, Homo sapiens
  misc_RNA (1)...(19): siRNA sense strand
gcaaggcacaaguucuaau

SEQ ID NO: 940068 - RNA, 19 nt, Homo sapiens
  misc_RNA (1)...(19): siRNA sense strand
ucaccgaauucagcacaaa

SEQ ID NO: 940069 - RNA, 19 nt, Homo sapiens
  misc_RNA (1)...(19): siRNA sense strand
uauuuagccucaccacaga

SEQ ID NO: 940070 - RNA, 19 nt, Homo sapiens
  misc_RNA (1)...(19): siRNA sense strand
gaauuccuggauagauuaa

SEQ ID NO: 940071 - RNA, 19 nt, Homo sapiens
  misc_RNA (1)...(19): siRNA sense strand
acagggcgacguugcauaa

SEQ ID NO: 940072 - RNA, 19 nt, Homo sapiens
  misc_RNA (1)...(19): siRNA sense strand
caacgagagcaacaacuuc

SEQ ID NO: 940073 - RNA, 19 nt, Homo sapiens
  misc_RNA (1)...(19): siRNA sense strand
acaaaggaaaggacuauuc

SEQ ID NO: 940074 - RNA, 19 nt, Homo sapiens
  misc_RNA (1)...(19): siRNA sense strand
uaacugggaaagcacuaaa

SEQ ID NO: 940075 - RNA, 19 nt, Homo sapiens
  misc_RNA (1)...(19): siRNA sense strand
gcucauuggagacucugua

SEQ ID NO: 940076 - RNA, 19 nt, Homo sapiens
  misc_RNA (1)...(19): siRNA sense strand
gcugcggacugacacugaa

SEQ ID NO: 940077 - RNA, 19 nt, Homo sapiens
  misc_RNA (1)...(19): siRNA sense strand
cuacuggccagaacccuaa

SEQ ID NO: 940078 - RNA, 19 nt, Homo sapiens
  misc_RNA (1)...(19): siRNA sense strand
gaacagggcgacguugcau

SEQ ID NO: 940079 - RNA, 19 nt, Homo sapiens
  misc_RNA (1)...(19): siRNA sense strand
ggccgcuccugguauauuc

SEQ ID NO: 940080 - RNA, 19 nt, Homo sapiens
  misc_RNA (1)...(19): siRNA sense strand
ucagauggaccuugcuaug

SEQ ID NO: 940081 - RNA, 19 nt, Homo sapiens
  misc_RNA (1)...(19): siRNA sense strand
acacugaagaugaacauuc

SEQ ID NO: 940082 - RNA, 19 nt, Homo sapiens
  misc_RNA (1)...(19): siRNA sense strand
cgaauucagcacaaaggaa

SEQ ID NO: 940083 - RNA, 19 nt, Homo sapiens
  misc_RNA (1)...(19): siRNA sense strand
agauggaccuugcuaugca

SEQ ID NO: 940084 - RNA, 19 nt, Homo sapiens
  misc_RNA (1)...(19): siRNA sense strand
ggaucagcucuacucauuu

SEQ ID NO: 940085 - RNA, 19 nt, Homo sapiens
  misc_RNA (1)...(19): siRNA sense strand
uacagcagauggaagaagu

SEQ ID NO: 940086 - RNA, 19 nt, Homo sapiens
  misc_RNA (1)...(19): siRNA sense strand
uagcaauccugaccuucau

SEQ ID NO: 940087 - RNA, 19 nt, Homo sapiens
  misc_RNA (1)...(19): siRNA sense strand
cacugaagaugaacauucu

SEQ ID NO: 940088 - RNA, 19 nt, Homo sapiens
  misc_RNA (1)...(19): siRNA sense strand
gaugguguacaauauagug

SEQ ID NO: 940089 - RNA, 19 nt, Homo sapiens
  misc_RNA (1)...(19): siRNA sense strand
uuaaccagccuccuugaga

SEQ ID NO: 940090 - RNA, 19 nt, Homo sapiens
  misc_RNA (1)...(19): siRNA sense strand
ugggaaagcacuaaaugug

SEQ ID NO: 940091 - RNA, 19 nt, Homo sapiens
  misc_RNA (1)...(19): siRNA sense strand
ucaggagcccucacccauu

SEQ ID NO: 940092 - RNA, 19 nt, Homo sapiens
  misc_RNA (1)...(19): siRNA sense strand
uagauuaaccagccuccuu

SEQ ID NO: 940093 - RNA, 19 nt, Homo sapiens
  misc_RNA (1)...(19): siRNA sense strand
aggcuaaguuggcuguuca

SEQ ID NO: 940094 - RNA, 19 nt, Homo sapiens
  misc_RNA (1)...(19): siRNA sense strand
aauccugaccuucaucuga

SEQ ID NO: 940095 - RNA, 19 nt, Homo sapiens
  misc_RNA (1)...(19): siRNA sense strand
gauuaaccagccuccuuga

SEQ ID NO: 940096 - RNA, 19 nt, Homo sapiens
  misc_RNA (1)...(19): siRNA sense strand
agaugaacauucucaccau

SEQ ID NO: 940097 - RNA, 19 nt, Homo sapiens
  misc_RNA (1)...(19): siRNA sense strand
ugaagaggaagaagucaag

SEQ ID NO: 940098 - RNA, 19 nt, Homo sapiens
  misc_RNA (1)...(19): siRNA sense strand
agugaugguguacaauaua

SEQ ID NO: 940099 - RNA, 19 nt, Homo sapiens
  misc_RNA (1)...(19): siRNA sense strand
ucuaggcccuugcagugau

SEQ ID NO: 940100 - RNA, 19 nt, Homo sapiens
  misc_RNA (1)...(19): siRNA sense strand
augcagugaugguguacaa

SEQ ID NO: 940101 - RNA, 19 nt, Homo sapiens
  misc_RNA (1)...(19): siRNA sense strand
ggcaaggcacaaguucuaa

SEQ ID NO: 940102 - RNA, 19 nt, Homo sapiens
  misc_RNA (1)...(19): siRNA sense strand
cuuuacauuuggccuggua

SEQ ID NO: 940103 - RNA, 19 nt, Homo sapiens
  misc_RNA (1)...(19): siRNA sense strand
caggcuaaguuggcuguuc

SEQ ID NO: 940104 - RNA, 19 nt, Homo sapiens
  misc_RNA (1)...(19): siRNA sense strand
acauuuggccugguagauu

SEQ ID NO: 940105 - RNA, 19 nt, Homo sapiens
  misc_RNA (1)...(19): siRNA sense strand
ggaaaggugaagaccaaaa

SEQ ID NO: 940106 - RNA, 19 nt, Homo sapiens
  misc_RNA (1)...(19): siRNA sense strand
gcaauccugaccuucaucu

SEQ ID NO: 940107 - RNA, 19 nt, Homo sapiens
  misc_RNA (1)...(19): siRNA sense strand
cuagcaauccugaccuuca

SEQ ID NO: 940108 - RNA, 19 nt, Homo sapiens
  misc_RNA (1)...(19): siRNA sense strand
gccagaacccuaagaucuc

SEQ ID NO: 940109 - RNA, 19 nt, Homo sapiens
  misc_RNA (1)...(19): siRNA sense strand
ccagggcaaggcacaaguu

SEQ ID NO: 940110 - RNA, 19 nt, Homo sapiens
  misc_RNA (1)...(19): siRNA sense strand
gaggagcuucugucaaagg

SEQ ID NO: 940111 - RNA, 19 nt, Homo sapiens
  misc_RNA (1)...(19): siRNA sense strand
ggugagguguacuggaaaa

SEQ ID NO: 940112 - RNA, 19 nt, Homo sapiens
  misc_RNA (1)...(19): siRNA sense strand
ugucaaaggcugugaagcu

SEQ ID NO: 940113 - RNA, 19 nt, Homo sapiens
  misc_RNA (1)...(19): siRNA sense strand
gaaaggaccugucaccaaa

SEQ ID NO: 940114 - RNA, 19 nt, Homo sapiens
  misc_RNA (1)...(19): siRNA sense strand
ccaaagaucugaggaauaa

SEQ ID NO: 940115 - RNA, 19 nt, Homo sapiens
  misc_RNA (1)...(19): siRNA sense strand
gaucauaacugaagaaaca

SEQ ID NO: 940116 - RNA, 19 nt, Homo sapiens
  misc_RNA (1)...(19): siRNA sense strand
caagauagauguccugaaa

SEQ ID NO: 940117 - RNA, 19 nt, Homo sapiens
  misc_RNA (1)...(19): siRNA sense strand
gaaaucaucucuccuguca

SEQ ID NO: 940118 - RNA, 19 nt, Homo sapiens
  misc_RNA (1)...(19): siRNA sense strand
gaacauaucucagaccaau

SEQ ID NO: 940119 - RNA, 19 nt, Homo sapiens
  misc_RNA (1)...(19): siRNA sense strand
gcaagagaauugauaacua

SEQ ID NO: 940120 - RNA, 19 nt, Homo sapiens
  misc_RNA (1)...(19): siRNA sense strand
gguaguaaaucuucuagua

SEQ ID NO: 940121 - RNA, 19 nt, Homo sapiens
  misc_RNA (1)...(19): siRNA sense strand
gcgaagagauguuauacaa

SEQ ID NO: 940122 - RNA, 19 nt, Homo sapiens
  misc_RNA (1)...(19): siRNA sense strand
gcaggaauguugcuuaaga

SEQ ID NO: 940123 - RNA, 19 nt, Homo sapiens
  misc_RNA (1)...(19): siRNA sense strand
gagaauauaucgccuaaca

SEQ ID NO: 940124 - RNA, 19 nt, Homo sapiens
  misc_RNA (1)...(19): siRNA sense strand
cuacuaaucucaagaagaa

SEQ ID NO: 940125 - RNA, 19 nt, Homo sapiens
  misc_RNA (1)...(19): siRNA sense strand
gaucaugguucuucucaaa

SEQ ID NO: 940126 - RNA, 19 nt, Homo sapiens
  misc_RNA (1)...(19): siRNA sense strand
uaaucuggcugaugaaaua

SEQ ID NO: 940127 - RNA, 19 nt, Homo sapiens
  misc_RNA (1)...(19): siRNA sense strand
ucacaggucuccucaauau

SEQ ID NO: 940128 - RNA, 19 nt, Homo sapiens
  misc_RNA (1)...(19): siRNA sense strand
gcuaugaucuuuccauuuc

SEQ ID NO: 940129 - RNA, 19 nt, Homo sapiens
  misc_RNA (1)...(19): siRNA sense strand
gaaacaggcucugcaguug

SEQ ID NO: 940130 - RNA, 19 nt, Homo sapiens
  misc_RNA (1)...(19): siRNA sense strand
uaagagaacuaaacaggaa

SEQ ID NO: 940131 - RNA, 19 nt, Homo sapiens
  misc_RNA (1)...(19): siRNA sense strand
ggcuaaagcuggauaauau

SEQ ID NO: 940132 - RNA, 19 nt, Homo sapiens
  misc_RNA (1)...(19): siRNA sense strand
gauaaagccuaaugcuauu

SEQ ID NO: 940133 - RNA, 19 nt, Homo sapiens
  misc_RNA (1)...(19): siRNA sense strand
gggaauagcauuacaaaga

SEQ ID NO: 940134 - RNA, 19 nt, Homo sapiens
  misc_RNA (1)...(19): siRNA sense strand
cauggcaucucaacaguua

SEQ ID NO: 940135 - RNA, 19 nt, Homo sapiens
  misc_RNA (1)...(19): siRNA sense strand
gaagauaccagauugauag

SEQ ID NO: 940136 - RNA, 19 nt, Homo sapiens
  misc_RNA (1)...(19): siRNA sense strand
ggauaaagccuaaugcuau

SEQ ID NO: 940137 - RNA, 19 nt, Homo sapiens
  misc_RNA (1)...(19): siRNA sense strand
caagaaggcucagcgauug

SEQ ID NO: 940138 - RNA, 19 nt, Homo sapiens
  misc_RNA (1)...(19): siRNA sense strand
gaaacaagcacuuuaguag

SEQ ID NO: 940139 - RNA, 19 nt, Homo sapiens
  misc_RNA (1)...(19): siRNA sense strand
ugacaugacuccaauugaa

SEQ ID NO: 940140 - RNA, 19 nt, Homo sapiens
  misc_RNA (1)...(19): siRNA sense strand
ugaaauggcuaucaugaug

SEQ ID NO: 940141 - RNA, 19 nt, Homo sapiens
  misc_RNA (1)...(19): siRNA sense strand
gaucaagccuaccuuuaga

SEQ ID NO: 940142 - RNA, 19 nt, Homo sapiens
  misc_RNA (1)...(19): siRNA sense strand
gcauugacauguccuaaga

SEQ ID NO: 940143 - RNA, 19 nt, Homo sapiens
  misc_RNA (1)...(19): siRNA sense strand
ccugaaaucugguaugaaa

SEQ ID NO: 940144 - RNA, 19 nt, Homo sapiens
  misc_RNA (1)...(19): siRNA sense strand
gcagauuucuccuggcaaa

SEQ ID NO: 940145 - RNA, 19 nt, Homo sapiens
  misc_RNA (1)...(19): siRNA sense strand
gaaauccucuucuuaucau

SEQ ID NO: 940146 - RNA, 19 nt, Homo sapiens
  misc_RNA (1)...(19): siRNA sense strand
ugaaccaagugaugaaaua

SEQ ID NO: 940147 - RNA, 19 nt, Homo sapiens
  misc_RNA (1)...(19): siRNA sense strand
ugacacagcuugagaugga

SEQ ID NO: 940148 - RNA, 19 nt, Homo sapiens
  misc_RNA (1)...(19): siRNA sense strand
caagaagaauggugauaga

SEQ ID NO: 940149 - RNA, 19 nt, Homo sapiens
  misc_RNA (1)...(19): siRNA sense strand
ggagauguccaaacuauga

SEQ ID NO: 940150 - RNA, 19 nt, Homo sapiens
  misc_RNA (1)...(19): siRNA sense strand
gagaggaguuguaguuuua

SEQ ID NO: 940151 - RNA, 19 nt, Homo sapiens
  misc_RNA (1)...(19): siRNA sense strand
ccaagugucuguuuaguca

SEQ ID NO: 940152 - RNA, 19 nt, Homo sapiens
  misc_RNA (1)...(19): siRNA sense strand
gugagagucuuauuugaaa

SEQ ID NO: 940153 - RNA, 19 nt, Homo sapiens
  misc_RNA (1)...(19): siRNA sense strand
gaaacaagcagcgacagua

SEQ ID NO: 940154 - RNA, 19 nt, Homo sapiens
  misc_RNA (1)...(19): siRNA sense strand
caaauagucugcaggaagu

SEQ ID NO: 940155 - RNA, 19 nt, Homo sapiens
  misc_RNA (1)...(19): siRNA sense strand
ggaauagcauuacaaagag

SEQ ID NO: 940156 - RNA, 19 nt, Homo sapiens
  misc_RNA (1)...(19): siRNA sense strand
ggaggcccauugcagaaua

SEQ ID NO: 940157 - RNA, 19 nt, Homo sapiens
  misc_RNA (1)...(19): siRNA sense strand
gagagguucugcaagcuuu

SEQ ID NO: 940158 - RNA, 19 nt, Homo sapiens
  misc_RNA (1)...(19): siRNA sense strand
caacacugcugcucuuugu

SEQ ID NO: 940159 - RNA, 19 nt, Homo sapiens
  misc_RNA (1)...(19): siRNA sense strand
gagcuuuaguuuaugauga

SEQ ID NO: 940160 - RNA, 19 nt, Homo sapiens
  misc_RNA (1)...(19): siRNA sense strand
uauaaaggaugaugcagaa

SEQ ID NO: 940161 - RNA, 19 nt, Homo sapiens
  misc_RNA (1)...(19): siRNA sense strand
ggacgaagguacggaaugu

SEQ ID NO: 940162 - RNA, 19 nt, Homo sapiens
  misc_RNA (1)...(19): siRNA sense strand
gcaggcauaugauguacuu

SEQ ID NO: 940163 - RNA, 19 nt, Homo sapiens
  misc_RNA (1)...(19): siRNA sense strand
aaacuggacuagauccuuu

SEQ ID NO: 940164 - RNA, 19 nt, Homo sapiens
  misc_RNA (1)...(19): siRNA sense strand
gagagucuacuaagugaua

SEQ ID NO: 940165 - RNA, 19 nt, Homo sapiens
  misc_RNA (1)...(19): siRNA sense strand
gggagcagaugccaagauu

SEQ ID NO: 940166 - RNA, 19 nt, Homo sapiens
  misc_RNA (1)...(19): siRNA sense strand
gaauguugcuuaagaagag

SEQ ID NO: 940167 - RNA, 19 nt, Homo sapiens
  misc_RNA (1)...(19): siRNA sense strand
ucacagaggcuccuucaaa

SEQ ID NO: 940168 - RNA, 19 nt, Homo sapiens
  misc_RNA (1)...(19): siRNA sense strand
gcaaacuuguguauauuca

SEQ ID NO: 940169 - RNA, 19 nt, Homo sapiens
  misc_RNA (1)...(19): siRNA sense strand
gaaccugacuugaucaacu

SEQ ID NO: 940170 - RNA, 19 nt, Homo sapiens
  misc_RNA (1)...(19): siRNA sense strand
gaaguuccauuuccaagag

SEQ ID NO: 940171 - RNA, 19 nt, Homo sapiens
  misc_RNA (1)...(19): siRNA sense strand
gggagaauauaucgccuaa

SEQ ID NO: 940172 - RNA, 19 nt, Homo sapiens
  misc_RNA (1)...(19): siRNA sense strand
ggacuuguaugucugaaag

SEQ ID NO: 940173 - RNA, 19 nt, Homo sapiens
  misc_RNA (1)...(19): siRNA sense strand
gaaaguuccgucugguaua

SEQ ID NO: 940174 - RNA, 19 nt, Homo sapiens
  misc_RNA (1)...(19): siRNA sense strand
gcagugagagucuuauuug

SEQ ID NO: 940175 - RNA, 19 nt, Homo sapiens
  misc_RNA (1)...(19): siRNA sense strand
ggucacaggucuccucaau

SEQ ID NO: 940176 - RNA, 19 nt, Homo sapiens
  misc_RNA (1)...(19): siRNA sense strand
gaaaccaucaggcagagua

SEQ ID NO: 940177 - RNA, 19 nt, Homo sapiens
  misc_RNA (1)...(19): siRNA sense strand
gaacuuacccagagcaaca

SEQ ID NO: 940178 - RNA, 19 nt, Homo sapiens
  misc_RNA (1)...(19): siRNA sense strand
gcaagaacccauagcuuug

SEQ ID NO: 940179 - RNA, 19 nt, Homo sapiens
  misc_RNA (1)...(19): siRNA sense strand
ggaaaggaccugucaccaa

SEQ ID NO: 940180 - RNA, 19 nt, Homo sapiens
  misc_RNA (1)...(19): siRNA sense strand
guuuggaccuuccuaguaa

SEQ ID NO: 940181 - RNA, 19 nt, Homo sapiens
  misc_RNA (1)...(19): siRNA sense strand
gagaucaagccuaccuuua

SEQ ID NO: 940182 - RNA, 19 nt, Homo sapiens
  misc_RNA (1)...(19): siRNA sense strand
gagggaagauguugaaacu

SEQ ID NO: 940183 - RNA, 19 nt, Homo sapiens
  misc_RNA (1)...(19): siRNA sense strand
cagaggcuccuucaaauaa

SEQ ID NO: 940184 - RNA, 19 nt, Homo sapiens
  misc_RNA (1)...(19): siRNA sense strand
acaaaggaguuuauacaga

SEQ ID NO: 940185 - RNA, 19 nt, Homo sapiens
  misc_RNA (1)...(19): siRNA sense strand
caaucaacauccaaucauu

SEQ ID NO: 940186 - RNA, 19 nt, Homo sapiens
  misc_RNA (1)...(19): siRNA sense strand
cagcagaugacucaaauuu

SEQ ID NO: 940187 - RNA, 19 nt, Homo sapiens
  misc_RNA (1)...(19): siRNA sense strand
cagcaugucuagcaucuau

SEQ ID NO: 940188 - RNA, 19 nt, Homo sapiens
  misc_RNA (1)...(19): siRNA sense strand
gaauauaucgccuaacaca

SEQ ID NO: 940189 - RNA, 19 nt, Homo sapiens
  misc_RNA (1)...(19): siRNA sense strand
ggaauaagagaaguaguuu

SEQ ID NO: 940190 - RNA, 19 nt, Homo sapiens
  misc_RNA (1)...(19): siRNA sense strand
gauaguaggacuuguaugu

SEQ ID NO: 940191 - RNA, 19 nt, Homo sapiens
  misc_RNA (1)...(19): siRNA sense strand
aaaggaugaugcagaaauu

SEQ ID NO: 940192 - RNA, 19 nt, Homo sapiens
  misc_RNA (1)...(19): siRNA sense strand
gcucauaaauuggcgaaga

SEQ ID NO: 940193 - RNA, 19 nt, Homo sapiens
  misc_RNA (1)...(19): siRNA sense strand
agaagaacaugaacuggaa

SEQ ID NO: 940194 - RNA, 19 nt, Homo sapiens
  misc_RNA (1)...(19): siRNA sense strand
cuacuuagcaccuuaaaga

SEQ ID NO: 940195 - RNA, 19 nt, Homo sapiens
  misc_RNA (1)...(19): siRNA sense strand
gucaguccaugaugcauua

SEQ ID NO: 940196 - RNA, 19 nt, Homo sapiens
  misc_RNA (1)...(19): siRNA sense strand
ggaagagagaauauugaua

SEQ ID NO: 940197 - RNA, 19 nt, Homo sapiens
  misc_RNA (1)...(19): siRNA sense strand
ggacuuauccucacaucug

SEQ ID NO: 940198 - RNA, 19 nt, Homo sapiens
  misc_RNA (1)...(19): siRNA sense strand
gacagcagaugacucaaau

SEQ ID NO: 940199 - RNA, 19 nt, Homo sapiens
  misc_RNA (1)...(19): siRNA sense strand
ugauagaacuagaugauuc

SEQ ID NO: 940200 - RNA, 19 nt, Homo sapiens
  misc_RNA (1)...(19): siRNA sense strand
gcauugacuuggauacgaa

SEQ ID NO: 940201 - RNA, 19 nt, Homo sapiens
  misc_RNA (1)...(19): siRNA sense strand
aacaagcacuuuaguagaa

SEQ ID NO: 940202 - RNA, 19 nt, Homo sapiens
  misc_RNA (1)...(19): siRNA sense strand
acaguuagucuuccaaaua

SEQ ID NO: 940203 - RNA, 19 nt, Homo sapiens
  misc_RNA (1)...(19): siRNA sense strand
ggacagcagaugacucaaa

SEQ ID NO: 940204 - RNA, 19 nt, Homo sapiens
  misc_RNA (1)...(19): siRNA sense strand
gggcagcaguauugugaaa

SEQ ID NO: 940205 - RNA, 19 nt, Homo sapiens
  misc_RNA (1)...(19): siRNA sense strand
uaaagauacuggauuagca

SEQ ID NO: 940206 - RNA, 19 nt, Homo sapiens
  misc_RNA (1)...(19): siRNA sense strand
uaaugaagguguacagcuu

SEQ ID NO: 940207 - RNA, 19 nt, Homo sapiens
  misc_RNA (1)...(19): siRNA sense strand
ggaccuuccuaguaacuug

SEQ ID NO: 940208 - RNA, 19 nt, Homo sapiens
  misc_RNA (1)...(19): siRNA sense strand
gaaccucguuugguauuuc

SEQ ID NO: 940209 - RNA, 19 nt, Homo sapiens
  misc_RNA (1)...(19): siRNA sense strand
gaaccaagugaugaaauaa

SEQ ID NO: 940210 - RNA, 19 nt, Homo sapiens
  misc_RNA (1)...(19): siRNA sense strand
cacguaaucuggcugauga

SEQ ID NO: 940211 - RNA, 19 nt, Homo sapiens
  misc_RNA (1)...(19): siRNA sense strand
gcacugguaguauaucaaa

SEQ ID NO: 940212 - RNA, 19 nt, Homo sapiens
  misc_RNA (1)...(19): siRNA sense strand
aaucaucucuccugucaga

SEQ ID NO: 940213 - RNA, 19 nt, Homo sapiens
  misc_RNA (1)...(19): siRNA sense strand
gaacagaucccaaaugauu

SEQ ID NO: 940214 - RNA, 19 nt, Homo sapiens
  misc_RNA (1)...(19): siRNA sense strand
caaaugcccuuacauaauu

SEQ ID NO: 940215 - RNA, 19 nt, Homo sapiens
  misc_RNA (1)...(19): siRNA sense strand
ccacaucucuuucuuauug

SEQ ID NO: 940216 - RNA, 19 nt, Homo sapiens
  misc_RNA (1)...(19): siRNA sense strand
cagcauagauuccaacauu

SEQ ID NO: 940217 - RNA, 19 nt, Homo sapiens
  misc_RNA (1)...(19): siRNA sense strand
gaaggaggcaggcauguua

SEQ ID NO: 940218 - RNA, 19 nt, Homo sapiens
  misc_RNA (1)...(19): siRNA sense strand
uaagauaguugucagcuuu

SEQ ID NO: 940219 - RNA, 19 nt, Homo sapiens
  misc_RNA (1)...(19): siRNA sense strand
gaacaaugcuguggacaug

SEQ ID NO: 940220 - RNA, 19 nt, Homo sapiens
  misc_RNA (1)...(19): siRNA sense strand
gaaguacucugcccaggaa

SEQ ID NO: 940221 - RNA, 19 nt, Homo sapiens
  misc_RNA (1)...(19): siRNA sense strand
gagaagagcagaaccauga

SEQ ID NO: 940222 - RNA, 19 nt, Homo sapiens
  misc_RNA (1)...(19): siRNA sense strand
ccauugagcugcuaaagaa

SEQ ID NO: 940223 - RNA, 19 nt, Homo sapiens
  misc_RNA (1)...(19): siRNA sense strand
gaagagaucaggaauggaa

SEQ ID NO: 940224 - RNA, 19 nt, Homo sapiens
  misc_RNA (1)...(19): siRNA sense strand
ccacaaaugcccuuacaua

SEQ ID NO: 940225 - RNA, 19 nt, Homo sapiens
  misc_RNA (1)...(19): siRNA sense strand
gagaaggacuccagcucua

SEQ ID NO: 940226 - RNA, 19 nt, Homo sapiens
  misc_RNA (1)...(19): siRNA sense strand
gcaagaagaugcaaaagaa

SEQ ID NO: 940227 - RNA, 19 nt, Homo sapiens
  misc_RNA (1)...(19): siRNA sense strand
ggaggaagcucauggaaac

SEQ ID NO: 940228 - RNA, 19 nt, Homo sapiens
  misc_RNA (1)...(19): siRNA sense strand
gagcucaacugcaaaggaa

SEQ ID NO: 940229 - RNA, 19 nt, Homo sapiens
  misc_RNA (1)...(19): siRNA sense strand
gacagccgcuuccggaaua

SEQ ID NO: 940230 - RNA, 19 nt, Homo sapiens
  misc_RNA (1)...(19): siRNA sense strand
gaccacaucucuuucuuau

SEQ ID NO: 940231 - RNA, 19 nt, Homo sapiens
  misc_RNA (1)...(19): siRNA sense strand
aagaacagaucccaaauga

SEQ ID NO: 940232 - RNA, 19 nt, Homo sapiens
  misc_RNA (1)...(19): siRNA sense strand
gcaagaauguggaccucaa

SEQ ID NO: 940233 - RNA, 19 nt, Homo sapiens
  misc_RNA (1)...(19): siRNA sense strand
gaaaugaguuaagagacaa

SEQ ID NO: 940234 - RNA, 19 nt, Homo sapiens
  misc_RNA (1)...(19): siRNA sense strand
gcaaaucccucagcgugaa

SEQ ID NO: 940235 - RNA, 19 nt, Homo sapiens
  misc_RNA (1)...(19): siRNA sense strand
ggagaaggauaaggagaaa

SEQ ID NO: 940236 - RNA, 19 nt, Homo sapiens
  misc_RNA (1)...(19): siRNA sense strand
ggaacaagauucaacuuuu

SEQ ID NO: 940237 - RNA, 19 nt, Homo sapiens
  misc_RNA (1)...(19): siRNA sense strand
gaaggugacccgcugauga

SEQ ID NO: 940238 - RNA, 19 nt, Homo sapiens
  misc_RNA (1)...(19): siRNA sense strand
cagaaugcauggauaguga

SEQ ID NO: 940239 - RNA, 19 nt, Homo sapiens
  misc_RNA (1)...(19): siRNA sense strand
gaacagagucuugguaaca

SEQ ID NO: 940240 - RNA, 19 nt, Homo sapiens
  misc_RNA (1)...(19): siRNA sense strand
gaugacggauucuucuuug

SEQ ID NO: 940241 - RNA, 19 nt, Homo sapiens
  misc_RNA (1)...(19): siRNA sense strand
cagcaacacuuccgaaaca

SEQ ID NO: 940242 - RNA, 19 nt, Homo sapiens
  misc_RNA (1)...(19): siRNA sense strand
gagaugaagcugacggaua

SEQ ID NO: 940243 - RNA, 19 nt, Homo sapiens
  misc_RNA (1)...(19): siRNA sense strand
ggaacacuuugccuaagaa

SEQ ID NO: 940244 - RNA, 19 nt, Homo sapiens
  misc_RNA (1)...(19): siRNA sense strand
cgaaaugaguuaagagaca

SEQ ID NO: 940245 - RNA, 19 nt, Homo sapiens
  misc_RNA (1)...(19): siRNA sense strand
gcagcaacauagagaguga

SEQ ID NO: 940246 - RNA, 19 nt, Homo sapiens
  misc_RNA (1)...(19): siRNA sense strand
ccaaccggcugucugagua

SEQ ID NO: 940247 - RNA, 19 nt, Homo sapiens
  misc_RNA (1)...(19): siRNA sense strand
gcugaaagcugagaaugau

SEQ ID NO: 940248 - RNA, 19 nt, Homo sapiens
  misc_RNA (1)...(19): siRNA sense strand
agaugaagcugacggauau

SEQ ID NO: 940249 - RNA, 19 nt, Homo sapiens
  misc_RNA (1)...(19): siRNA sense strand
ucagggaucuccagcaaga

SEQ ID NO: 940250 - RNA, 19 nt, Homo sapiens
  misc_RNA (1)...(19): siRNA sense strand
caagaagaauccugucauc

SEQ ID NO: 940251 - RNA, 19 nt, Homo sapiens
  misc_RNA (1)...(19): siRNA sense strand
gaagaacagaucccaaaug

SEQ ID NO: 940252 - RNA, 19 nt, Homo sapiens
  misc_RNA (1)...(19): siRNA sense strand
ugaauuuccuggcagcuaa

SEQ ID NO: 940253 - RNA, 19 nt, Homo sapiens
  misc_RNA (1)...(19): siRNA sense strand
ucaaugggcugcucaacug

SEQ ID NO: 940254 - RNA, 19 nt, Homo sapiens
  misc_RNA (1)...(19): siRNA sense strand
guucuuggcuacagcauug

SEQ ID NO: 940255 - RNA, 19 nt, Homo sapiens
  misc_RNA (1)...(19): siRNA sense strand
gcacaucgucaguuuauuc

SEQ ID NO: 940256 - RNA, 19 nt, Homo sapiens
  misc_RNA (1)...(19): siRNA sense strand
gggagacccugcaacgaaa

SEQ ID NO: 940257 - RNA, 19 nt, Homo sapiens
  misc_RNA (1)...(19): siRNA sense strand
gcagguucaucaacacuga

SEQ ID NO: 940258 - RNA, 19 nt, Homo sapiens
  misc_RNA (1)...(19): siRNA sense strand
gaauguuacugccgaguca

SEQ ID NO: 940259 - RNA, 19 nt, Homo sapiens
  misc_RNA (1)...(19): siRNA sense strand
cgacgcagccagagcuuua

SEQ ID NO: 940260 - RNA, 19 nt, Homo sapiens
  misc_RNA (1)...(19): siRNA sense strand
uuagacggcuguucaaaga

SEQ ID NO: 940261 - RNA, 19 nt, Homo sapiens
  misc_RNA (1)...(19): siRNA sense strand
gcccuaagcucccggacaa

SEQ ID NO: 940262 - RNA, 19 nt, Homo sapiens
  misc_RNA (1)...(19): siRNA sense strand
gaaaggcaaugagaaagag

SEQ ID NO: 940263 - RNA, 19 nt, Homo sapiens
  misc_RNA (1)...(19): siRNA sense strand
gugaugaugucaagaaauc

SEQ ID NO: 940264 - RNA, 19 nt, Homo sapiens
  misc_RNA (1)...(19): siRNA sense strand
caccugagcucaacugcaa

SEQ ID NO: 940265 - RNA, 19 nt, Homo sapiens
  misc_RNA (1)...(19): siRNA sense strand
gaaucaggaugacggguau

SEQ ID NO: 940266 - RNA, 19 nt, Homo sapiens
  misc_RNA (1)...(19): siRNA sense strand
ggucggaagucaaguaugg

SEQ ID NO: 940267 - RNA, 19 nt, Homo sapiens
  misc_RNA (1)...(19): siRNA sense strand
cagaagagaucaggaaugg

SEQ ID NO: 940268 - RNA, 19 nt, Homo sapiens
  misc_RNA (1)...(19): siRNA sense strand
ugaacaggaugcagaguga

SEQ ID NO: 940269 - RNA, 19 nt, Homo sapiens
  misc_RNA (1)...(19): siRNA sense strand
gaacaagauucaacuuuuc

SEQ ID NO: 940270 - RNA, 19 nt, Homo sapiens
  misc_RNA (1)...(19): siRNA sense strand
guaacucggugaaagugaa

SEQ ID NO: 940271 - RNA, 19 nt, Homo sapiens
  misc_RNA (1)...(19): siRNA sense strand
gcaaugagaaagagaagga

SEQ ID NO: 940272 - RNA, 19 nt, Homo sapiens
  misc_RNA (1)...(19): siRNA sense strand
auagaugccugcuugaauu

SEQ ID NO: 940273 - RNA, 19 nt, Homo sapiens
  misc_RNA (1)...(19): siRNA sense strand
gcaggcauguuaagauagu

SEQ ID NO: 940274 - RNA, 19 nt, Homo sapiens
  misc_RNA (1)...(19): siRNA sense strand
gcaguccucucuacagcaa

SEQ ID NO: 940275 - RNA, 19 nt, Homo sapiens
  misc_RNA (1)...(19): siRNA sense strand
agaaaggcaucucaucaga

SEQ ID NO: 940276 - RNA, 19 nt, Homo sapiens
  misc_RNA (1)...(19): siRNA sense strand
gcaaaggugucugagaaag

SEQ ID NO: 940277 - RNA, 19 nt, Homo sapiens
  misc_RNA (1)...(19): siRNA sense strand
gcacugaccaacaagaaga

SEQ ID NO: 940278 - RNA, 19 nt, Homo sapiens
  misc_RNA (1)...(19): siRNA sense strand
caucagggaucuccagcaa

SEQ ID NO: 940279 - RNA, 19 nt, Homo sapiens
  misc_RNA (1)...(19): siRNA sense strand
ugaaagggcucgcagaaaa

SEQ ID NO: 940280 - RNA, 19 nt, Homo sapiens
  misc_RNA (1)...(19): siRNA sense strand
ccaacucucuaauuucaga

SEQ ID NO: 940281 - RNA, 19 nt, Homo sapiens
  misc_RNA (1)...(19): siRNA sense strand
ggacaccgcugccaauucc

SEQ ID NO: 940282 - RNA, 19 nt, Homo sapiens
  misc_RNA (1)...(19): siRNA sense strand
gcacgucgggcaagaagaa

SEQ ID NO: 940283 - RNA, 19 nt, Homo sapiens
  misc_RNA (1)...(19): siRNA sense strand
gaggaaaccauguccaguu

SEQ ID NO: 940284 - RNA, 19 nt, Homo sapiens
  misc_RNA (1)...(19): siRNA sense strand
acgcaaaggugucugagaa

SEQ ID NO: 940285 - RNA, 19 nt, Homo sapiens
  misc_RNA (1)...(19): siRNA sense strand
cacaaaugcccuuacauaa

SEQ ID NO: 940286 - RNA, 19 nt, Homo sapiens
  misc_RNA (1)...(19): siRNA sense strand
gaagugggaugugcucgau

SEQ ID NO: 940287 - RNA, 19 nt, Homo sapiens
  misc_RNA (1)...(19): siRNA sense strand
aggcaggcauguuaagaua

SEQ ID NO: 940288 - RNA, 19 nt, Homo sapiens
  misc_RNA (1)...(19): siRNA sense strand
gagcagcaguccucucuac

SEQ ID NO: 940289 - RNA, 19 nt, Homo sapiens
  misc_RNA (1)...(19): siRNA sense strand
caacagcgggagaaggaua

SEQ ID NO: 940290 - RNA, 19 nt, Homo sapiens
  misc_RNA (1)...(19): siRNA sense strand
gaaaucaagcgcagcaaca

SEQ ID NO: 940291 - RNA, 19 nt, Homo sapiens
  misc_RNA (1)...(19): siRNA sense strand
uaagaaaggacucagguau

SEQ ID NO: 940292 - RNA, 19 nt, Homo sapiens
  misc_RNA (1)...(19): siRNA sense strand
cuacgucucccuccugaua

SEQ ID NO: 940293 - RNA, 19 nt, Homo sapiens
  misc_RNA (1)...(19): siRNA sense strand
ggaugacacuggugaaugc

SEQ ID NO: 940294 - RNA, 19 nt, Homo sapiens
  misc_RNA (1)...(19): siRNA sense strand
gcagaaggacucagaacug

SEQ ID NO: 940295 - RNA, 19 nt, Homo sapiens
  misc_RNA (1)...(19): siRNA sense strand
cagacugggccaaucauua

SEQ ID NO: 940296 - RNA, 19 nt, Homo sapiens
  misc_RNA (1)...(19): siRNA sense strand
ggaagcucauggaaacaga

SEQ ID NO: 940297 - RNA, 19 nt, Homo sapiens
  misc_RNA (1)...(19): siRNA sense strand
cacaauggguccacagguu

SEQ ID NO: 940298 - RNA, 19 nt, Homo sapiens
  misc_RNA (1)...(19): siRNA sense strand
gcuccuccaucagcucuua

SEQ ID NO: 940299 - RNA, 19 nt, Homo sapiens
  misc_RNA (1)...(19): siRNA sense strand
ugaagaacaucgcugaucu

SEQ ID NO: 940300 - RNA, 19 nt, Homo sapiens
  misc_RNA (1)...(19): siRNA sense strand
gagcagcugugcccgagau

SEQ ID NO: 940301 - RNA, 19 nt, Homo sapiens
  misc_RNA (1)...(19): siRNA sense strand
gaagcaauaccgucagugu

SEQ ID NO: 940302 - RNA, 19 nt, Homo sapiens
  misc_RNA (1)...(19): siRNA sense strand
ggagagaacacgaccaucu

SEQ ID NO: 940303 - RNA, 19 nt, Homo sapiens
  misc_RNA (1)...(19): siRNA sense strand
gcuccgaaaugaguuaaga

SEQ ID NO: 940304 - RNA, 19 nt, Homo sapiens
  misc_RNA (1)...(19): siRNA sense strand
aaaggcaucucaucagaca

SEQ ID NO: 940305 - RNA, 19 nt, Homo sapiens
  misc_RNA (1)...(19): siRNA sense strand
gcaauaccgucaguguuca

SEQ ID NO: 940306 - RNA, 19 nt, Homo sapiens
  misc_RNA (1)...(19): siRNA sense strand
gcucaacagugccaagaag

SEQ ID NO: 940307 - RNA, 19 nt, Homo sapiens
  misc_RNA (1)...(19): siRNA sense strand
gaacuaacagugugaagac

SEQ ID NO: 940308 - RNA, 19 nt, Homo sapiens
  misc_RNA (1)...(19): siRNA sense strand
guucauggauccucacucu

SEQ ID NO: 940309 - RNA, 19 nt, Homo sapiens
  misc_RNA (1)...(19): siRNA sense strand
acaaaugcccuuacauaau

SEQ ID NO: 940310 - RNA, 19 nt, Homo sapiens
  misc_RNA (1)...(19): siRNA sense strand
caacugcaaguaccacaaa

SEQ ID NO: 940311 - RNA, 19 nt, Homo sapiens
  misc_RNA (1)...(19): siRNA sense strand
ccuuuaacguggaccauaa

SEQ ID NO: 940312 - RNA, 19 nt, Homo sapiens
  misc_RNA (1)...(19): siRNA sense strand
gcaggcagcacuccucaga

SEQ ID NO: 940313 - RNA, 19 nt, Homo sapiens
  misc_RNA (1)...(19): siRNA sense strand
gaacagaucccaaaugauu

SEQ ID NO: 940314 - RNA, 19 nt, Homo sapiens
  misc_RNA (1)...(19): siRNA sense strand
caaaugcccuuacauaauu

SEQ ID NO: 940315 - RNA, 19 nt, Homo sapiens
  misc_RNA (1)...(19): siRNA sense strand
ccacaucucuuucuuauug

SEQ ID NO: 940316 - RNA, 19 nt, Homo sapiens
  misc_RNA (1)...(19): siRNA sense strand
cagcauagauuccaacauu

SEQ ID NO: 940317 - RNA, 19 nt, Homo sapiens
  misc_RNA (1)...(19): siRNA sense strand
gaaggaggcaggcauguua

SEQ ID NO: 940318 - RNA, 19 nt, Homo sapiens
  misc_RNA (1)...(19): siRNA sense strand
uaagauaguugucagcuuu

SEQ ID NO: 940319 - RNA, 19 nt, Homo sapiens
  misc_RNA (1)...(19): siRNA sense strand
gaacaaugcuguggacaug

SEQ ID NO: 940320 - RNA, 19 nt, Homo sapiens
  misc_RNA (1)...(19): siRNA sense strand
gaaguacucugcccaggaa

SEQ ID NO: 940321 - RNA, 19 nt, Homo sapiens
  misc_RNA (1)...(19): siRNA sense strand
gagaagagcagaaccauga

SEQ ID NO: 940322 - RNA, 19 nt, Homo sapiens
  misc_RNA (1)...(19): siRNA sense strand
ccauugagcugcuaaagaa

SEQ ID NO: 940323 - RNA, 19 nt, Homo sapiens
  misc_RNA (1)...(19): siRNA sense strand
gaagagaucaggaauggaa

SEQ ID NO: 940324 - RNA, 19 nt, Homo sapiens
  misc_RNA (1)...(19): siRNA sense strand
ccacaaaugcccuuacaua

SEQ ID NO: 940325 - RNA, 19 nt, Homo sapiens
  misc_RNA (1)...(19): siRNA sense strand
gagaaggacuccagcucua

SEQ ID NO: 940326 - RNA, 19 nt, Homo sapiens
  misc_RNA (1)...(19): siRNA sense strand
gcaagaagaugcaaaagaa

SEQ ID NO: 940327 - RNA, 19 nt, Homo sapiens
  misc_RNA (1)...(19): siRNA sense strand
ggaggaagcucauggaaac

SEQ ID NO: 940328 - RNA, 19 nt, Homo sapiens
  misc_RNA (1)...(19): siRNA sense strand
gagcucaacugcaaaggaa

SEQ ID NO: 940329 - RNA, 19 nt, Homo sapiens
  misc_RNA (1)...(19): siRNA sense strand
gacagccgcuuccggaaua

SEQ ID NO: 940330 - RNA, 19 nt, Homo sapiens
  misc_RNA (1)...(19): siRNA sense strand
gaccacaucucuuucuuau

SEQ ID NO: 940331 - RNA, 19 nt, Homo sapiens
  misc_RNA (1)...(19): siRNA sense strand
aagaacagaucccaaauga

SEQ ID NO: 940332 - RNA, 19 nt, Homo sapiens
  misc_RNA (1)...(19): siRNA sense strand
gcaagaauguggaccucaa

SEQ ID NO: 940333 - RNA, 19 nt, Homo sapiens
  misc_RNA (1)...(19): siRNA sense strand
gaaaugaguuaagagacaa

SEQ ID NO: 940334 - RNA, 19 nt, Homo sapiens
  misc_RNA (1)...(19): siRNA sense strand
gcaaaucccucagcgugaa

SEQ ID NO: 940335 - RNA, 19 nt, Homo sapiens
  misc_RNA (1)...(19): siRNA sense strand
ggagaaggauaaggagaaa

SEQ ID NO: 940336 - RNA, 19 nt, Homo sapiens
  misc_RNA (1)...(19): siRNA sense strand
ggaacaagauucaacuuuu

SEQ ID NO: 940337 - RNA, 19 nt, Homo sapiens
  misc_RNA (1)...(19): siRNA sense strand
gaaggugacccgcugauga

SEQ ID NO: 940338 - RNA, 19 nt, Homo sapiens
  misc_RNA (1)...(19): siRNA sense strand
cagaaugcauggauaguga

SEQ ID NO: 940339 - RNA, 19 nt, Homo sapiens
  misc_RNA (1)...(19): siRNA sense strand
gaacagagucuugguaaca

SEQ ID NO: 940340 - RNA, 19 nt, Homo sapiens
  misc_RNA (1)...(19): siRNA sense strand
gaugacggauucuucuuug

SEQ ID NO: 940341 - RNA, 19 nt, Homo sapiens
  misc_RNA (1)...(19): siRNA sense strand
cagcaacacuuccgaaaca

SEQ ID NO: 940342 - RNA, 19 nt, Homo sapiens
  misc_RNA (1)...(19): siRNA sense strand
gagaugaagcugacggaua

SEQ ID NO: 940343 - RNA, 19 nt, Homo sapiens
  misc_RNA (1)...(19): siRNA sense strand
ggaacacuuugccuaagaa

SEQ ID NO: 940344 - RNA, 19 nt, Homo sapiens
  misc_RNA (1)...(19): siRNA sense strand
cgaaaugaguuaagagaca

SEQ ID NO: 940345 - RNA, 19 nt, Homo sapiens
  misc_RNA (1)...(19): siRNA sense strand
gcagcaacauagagaguga

SEQ ID NO: 940346 - RNA, 19 nt, Homo sapiens
  misc_RNA (1)...(19): siRNA sense strand
ccaaccggcugucugagua

SEQ ID NO: 940347 - RNA, 19 nt, Homo sapiens
  misc_RNA (1)...(19): siRNA sense strand
gcugaaagcugagaaugau

SEQ ID NO: 940348 - RNA, 19 nt, Homo sapiens
  misc_RNA (1)...(19): siRNA sense strand
agaugaagcugacggauau

SEQ ID NO: 940349 - RNA, 19 nt, Homo sapiens
  misc_RNA (1)...(19): siRNA sense strand
ucagggaucuccagcaaga

SEQ ID NO: 940350 - RNA, 19 nt, Homo sapiens
  misc_RNA (1)...(19): siRNA sense strand
caagaagaauccugucauc

SEQ ID NO: 940351 - RNA, 19 nt, Homo sapiens
  misc_RNA (1)...(19): siRNA sense strand
gaagaacagaucccaaaug

SEQ ID NO: 940352 - RNA, 19 nt, Homo sapiens
  misc_RNA (1)...(19): siRNA sense strand
ugaauuuccuggcagcuaa

SEQ ID NO: 940353 - RNA, 19 nt, Homo sapiens
  misc_RNA (1)...(19): siRNA sense strand
ucaaugggcugcucaacug

SEQ ID NO: 940354 - RNA, 19 nt, Homo sapiens
  misc_RNA (1)...(19): siRNA sense strand
guucuuggcuacagcauug

SEQ ID NO: 940355 - RNA, 19 nt, Homo sapiens
  misc_RNA (1)...(19): siRNA sense strand
gcacaucgucaguuuauuc

SEQ ID NO: 940356 - RNA, 19 nt, Homo sapiens
  misc_RNA (1)...(19): siRNA sense strand
gggagacccugcaacgaaa

SEQ ID NO: 940357 - RNA, 19 nt, Homo sapiens
  misc_RNA (1)...(19): siRNA sense strand
gcagguucaucaacacuga

SEQ ID NO: 940358 - RNA, 19 nt, Homo sapiens
  misc_RNA (1)...(19): siRNA sense strand
gaauguuacugccgaguca

SEQ ID NO: 940359 - RNA, 19 nt, Homo sapiens
  misc_RNA (1)...(19): siRNA sense strand
cgacgcagccagagcuuua

SEQ ID NO: 940360 - RNA, 19 nt, Homo sapiens
  misc_RNA (1)...(19): siRNA sense strand
uuagacggcuguucaaaga

SEQ ID NO: 940361 - RNA, 19 nt, Homo sapiens
  misc_RNA (1)...(19): siRNA sense strand
gcccuaagcucccggacaa

SEQ ID NO: 940362 - RNA, 19 nt, Homo sapiens
  misc_RNA (1)...(19): siRNA sense strand
gaaaggcaaugagaaagag

SEQ ID NO: 940363 - RNA, 19 nt, Homo sapiens
  misc_RNA (1)...(19): siRNA sense strand
gugaugaugucaagaaauc

SEQ ID NO: 940364 - RNA, 19 nt, Homo sapiens
  misc_RNA (1)...(19): siRNA sense strand
caccugagcucaacugcaa

SEQ ID NO: 940365 - RNA, 19 nt, Homo sapiens
  misc_RNA (1)...(19): siRNA sense strand
gaaucaggaugacggguau

SEQ ID NO: 940366 - RNA, 19 nt, Homo sapiens
  misc_RNA (1)...(19): siRNA sense strand
ggucggaagucaaguaugg

SEQ ID NO: 940367 - RNA, 19 nt, Homo sapiens
  misc_RNA (1)...(19): siRNA sense strand
cagaagagaucaggaaugg

SEQ ID NO: 940368 - RNA, 19 nt, Homo sapiens
  misc_RNA (1)...(19): siRNA sense strand
ugaacaggaugcagaguga

SEQ ID NO: 940369 - RNA, 19 nt, Homo sapiens
  misc_RNA (1)...(19): siRNA sense strand
gaacaagauucaacuuuuc

SEQ ID NO: 940370 - RNA, 19 nt, Homo sapiens
  misc_RNA (1)...(19): siRNA sense strand
guaacucggugaaagugaa

SEQ ID NO: 940371 - RNA, 19 nt, Homo sapiens
  misc_RNA (1)...(19): siRNA sense strand
gcaaugagaaagagaagga

SEQ ID NO: 940372 - RNA, 19 nt, Homo sapiens
  misc_RNA (1)...(19): siRNA sense strand
auagaugccugcuugaauu

SEQ ID NO: 940373 - RNA, 19 nt, Homo sapiens
  misc_RNA (1)...(19): siRNA sense strand
gcaggcauguuaagauagu

SEQ ID NO: 940374 - RNA, 19 nt, Homo sapiens
  misc_RNA (1)...(19): siRNA sense strand
gcaguccucucuacagcaa

SEQ ID NO: 940375 - RNA, 19 nt, Homo sapiens
  misc_RNA (1)...(19): siRNA sense strand
agaaaggcaucucaucaga

SEQ ID NO: 940376 - RNA, 19 nt, Homo sapiens
  misc_RNA (1)...(19): siRNA sense strand
gcaaaggugucugagaaag

SEQ ID NO: 940377 - RNA, 19 nt, Homo sapiens
  misc_RNA (1)...(19): siRNA sense strand
gcacugaccaacaagaaga

SEQ ID NO: 940378 - RNA, 19 nt, Homo sapiens
  misc_RNA (1)...(19): siRNA sense strand
caucagggaucuccagcaa

SEQ ID NO: 940379 - RNA, 19 nt, Homo sapiens
  misc_RNA (1)...(19): siRNA sense strand
ugaaagggcucgcagaaaa

SEQ ID NO: 940380 - RNA, 19 nt, Homo sapiens
  misc_RNA (1)...(19): siRNA sense strand
ccaacucucuaauuucaga

SEQ ID NO: 940381 - RNA, 19 nt, Homo sapiens
  misc_RNA (1)...(19): siRNA sense strand
ggacaccgcugccaauucc

SEQ ID NO: 940382 - RNA, 19 nt, Homo sapiens
  misc_RNA (1)...(19): siRNA sense strand
gcacgucgggcaagaagaa

SEQ ID NO: 940383 - RNA, 19 nt, Homo sapiens
  misc_RNA (1)...(19): siRNA sense strand
gaggaaaccauguccaguu

SEQ ID NO: 940384 - RNA, 19 nt, Homo sapiens
  misc_RNA (1)...(19): siRNA sense strand
acgcaaaggugucugagaa

SEQ ID NO: 940385 - RNA, 19 nt, Homo sapiens
  misc_RNA (1)...(19): siRNA sense strand
cacaaaugcccuuacauaa

SEQ ID NO: 940386 - RNA, 19 nt, Homo sapiens
  misc_RNA (1)...(19): siRNA sense strand
gaagugggaugugcucgau

SEQ ID NO: 940387 - RNA, 19 nt, Homo sapiens
  misc_RNA (1)...(19): siRNA sense strand
aggcaggcauguuaagaua

SEQ ID NO: 940388 - RNA, 19 nt, Homo sapiens
  misc_RNA (1)...(19): siRNA sense strand
gagcagcaguccucucuac

SEQ ID NO: 940389 - RNA, 19 nt, Homo sapiens
  misc_RNA (1)...(19): siRNA sense strand
caacagcgggagaaggaua

SEQ ID NO: 940390 - RNA, 19 nt, Homo sapiens
  misc_RNA (1)...(19): siRNA sense strand
gaaaucaagcgcagcaaca

SEQ ID NO: 940391 - RNA, 19 nt, Homo sapiens
  misc_RNA (1)...(19): siRNA sense strand
uaagaaaggacucagguau

SEQ ID NO: 940392 - RNA, 19 nt, Homo sapiens
  misc_RNA (1)...(19): siRNA sense strand
cuacgucucccuccugaua

SEQ ID NO: 940393 - RNA, 19 nt, Homo sapiens
  misc_RNA (1)...(19): siRNA sense strand
ggaugacacuggugaaugc

SEQ ID NO: 940394 - RNA, 19 nt, Homo sapiens
  misc_RNA (1)...(19): siRNA sense strand
gcagaaggacucagaacug

SEQ ID NO: 940395 - RNA, 19 nt, Homo sapiens
  misc_RNA (1)...(19): siRNA sense strand
cagacugggccaaucauua

SEQ ID NO: 940396 - RNA, 19 nt, Homo sapiens
  misc_RNA (1)...(19): siRNA sense strand
ggaagcucauggaaacaga

SEQ ID NO: 940397 - RNA, 19 nt, Homo sapiens
  misc_RNA (1)...(19): siRNA sense strand
cacaauggguccacagguu

SEQ ID NO: 940398 - RNA, 19 nt, Homo sapiens
  misc_RNA (1)...(19): siRNA sense strand
gcuccuccaucagcucuua

SEQ ID NO: 940399 - RNA, 19 nt, Homo sapiens
  misc_RNA (1)...(19): siRNA sense strand
ugaagaacaucgcugaucu

SEQ ID NO: 940400 - RNA, 19 nt, Homo sapiens
  misc_RNA (1)...(19): siRNA sense strand
gagcagcugugcccgagau

SEQ ID NO: 940401 - RNA, 19 nt, Homo sapiens
  misc_RNA (1)...(19): siRNA sense strand
gaagcaauaccgucagugu

SEQ ID NO: 940402 - RNA, 19 nt, Homo sapiens
  misc_RNA (1)...(19): siRNA sense strand
ggagagaacacgaccaucu

SEQ ID NO: 940403 - RNA, 19 nt, Homo sapiens
  misc_RNA (1)...(19): siRNA sense strand
gcuccgaaaugaguuaaga

SEQ ID NO: 940404 - RNA, 19 nt, Homo sapiens
  misc_RNA (1)...(19): siRNA sense strand
aaaggcaucucaucagaca

SEQ ID NO: 940405 - RNA, 19 nt, Homo sapiens
  misc_RNA (1)...(19): siRNA sense strand
gcaauaccgucaguguuca

SEQ ID NO: 940406 - RNA, 19 nt, Homo sapiens
  misc_RNA (1)...(19): siRNA sense strand
gcucaacagugccaagaag

SEQ ID NO: 940407 - RNA, 19 nt, Homo sapiens
  misc_RNA (1)...(19): siRNA sense strand
gaacuaacagugugaagac

SEQ ID NO: 940408 - RNA, 19 nt, Homo sapiens
  misc_RNA (1)...(19): siRNA sense strand
guucauggauccucacucu

SEQ ID NO: 940409 - RNA, 19 nt, Homo sapiens
  misc_RNA (1)...(19): siRNA sense strand
acaaaugcccuuacauaau

SEQ ID NO: 940410 - RNA, 19 nt, Homo sapiens
  misc_RNA (1)...(19): siRNA sense strand
caacugcaaguaccacaaa

SEQ ID NO: 940411 - RNA, 19 nt, Homo sapiens
  misc_RNA (1)...(19): siRNA sense strand
ccuuuaacguggaccauaa

SEQ ID NO: 940412 - RNA, 19 nt, Homo sapiens
  misc_RNA (1)...(19): siRNA sense strand
gcaggcagcacuccucaga

SEQ ID NO: 940413 - RNA, 19 nt, Homo sapiens
  misc_RNA (1)...(19): siRNA sense strand
guucaacgauguaaagaua

SEQ ID NO: 940414 - RNA, 19 nt, Homo sapiens
  misc_RNA (1)...(19): siRNA sense strand
ggaauacccaugucaauga

SEQ ID NO: 940415 - RNA, 19 nt, Homo sapiens
  misc_RNA (1)...(19): siRNA sense strand
gaauacccaugucaaugaa

SEQ ID NO: 940416 - RNA, 19 nt, Homo sapiens
  misc_RNA (1)...(19): siRNA sense strand
ggaaacucauggaaaccua

SEQ ID NO: 940417 - RNA, 19 nt, Homo sapiens
  misc_RNA (1)...(19): siRNA sense strand
gaacaccacuccagaugac

SEQ ID NO: 940418 - RNA, 19 nt, Homo sapiens
  misc_RNA (1)...(19): siRNA sense strand
ccaugucaaugaagaauga

SEQ ID NO: 940419 - RNA, 19 nt, Homo sapiens
  misc_RNA (1)...(19): siRNA sense strand
gagggaaacucauggaaac

SEQ ID NO: 940420 - RNA, 19 nt, Homo sapiens
  misc_RNA (1)...(19): siRNA sense strand
gauuugugcucuucgcauu

SEQ ID NO: 940421 - RNA, 19 nt, Homo sapiens
  misc_RNA (1)...(19): siRNA sense strand
acacaaggcuagacuacau

SEQ ID NO: 940422 - RNA, 19 nt, Homo sapiens
  misc_RNA (1)...(19): siRNA sense strand
cauccucacugcagaauca

SEQ ID NO: 940423 - RNA, 19 nt, Homo sapiens
  misc_RNA (1)...(19): siRNA sense strand
caacaucccacgugucaau

SEQ ID NO: 940424 - RNA, 19 nt, Homo sapiens
  misc_RNA (1)...(19): siRNA sense strand
uccaaagaguccaaaguuu

SEQ ID NO: 940425 - RNA, 19 nt, Homo sapiens
  misc_RNA (1)...(19): siRNA sense strand
caagaaagucagcaaaaua

SEQ ID NO: 940426 - RNA, 19 nt, Homo sapiens
  misc_RNA (1)...(19): siRNA sense strand
ggaacaccacuccagauga

SEQ ID NO: 940427 - RNA, 19 nt, Homo sapiens
  misc_RNA (1)...(19): siRNA sense strand
guacugcugccgcauagaa

SEQ ID NO: 940428 - RNA, 19 nt, Homo sapiens
  misc_RNA (1)...(19): siRNA sense strand
caggacagauggauggaau

SEQ ID NO: 940429 - RNA, 19 nt, Homo sapiens
  misc_RNA (1)...(19): siRNA sense strand
gcaaacacgugccuuucac

SEQ ID NO: 940430 - RNA, 19 nt, Homo sapiens
  misc_RNA (1)...(19): siRNA sense strand
cuacagagagccucaacaa

SEQ ID NO: 940431 - RNA, 19 nt, Homo sapiens
  misc_RNA (1)...(19): siRNA sense strand
ggaggaagccacaggucuu

SEQ ID NO: 940432 - RNA, 19 nt, Homo sapiens
  misc_RNA (1)...(19): siRNA sense strand
ugacaaccauugccgucuu

SEQ ID NO: 940433 - RNA, 19 nt, Homo sapiens
  misc_RNA (1)...(19): siRNA sense strand
gaaagugacagcggugugu

SEQ ID NO: 940434 - RNA, 19 nt, Homo sapiens
  misc_RNA (1)...(19): siRNA sense strand
gcgccugaaucuacagaga

SEQ ID NO: 940435 - RNA, 19 nt, Homo sapiens
  misc_RNA (1)...(19): siRNA sense strand
guccaaagaaccucucauu

SEQ ID NO: 940436 - RNA, 19 nt, Homo sapiens
  misc_RNA (1)...(19): siRNA sense strand
cagagagccucaacaacca

SEQ ID NO: 940437 - RNA, 19 nt, Homo sapiens
  misc_RNA (1)...(19): siRNA sense strand
gauaaacgugcgccugaau

SEQ ID NO: 940438 - RNA, 19 nt, Homo sapiens
  misc_RNA (1)...(19): siRNA sense strand
cagcugcacuuccaacaac

SEQ ID NO: 940439 - RNA, 19 nt, Homo sapiens
  misc_RNA (1)...(19): siRNA sense strand
aaacacgugccuuucacua

SEQ ID NO: 940440 - RNA, 19 nt, Homo sapiens
  misc_RNA (1)...(19): siRNA sense strand
gacaaccauugccgucuuc

SEQ ID NO: 940441 - RNA, 19 nt, Homo sapiens
  misc_RNA (1)...(19): siRNA sense strand
gaccacacccgaucucaca

SEQ ID NO: 940442 - RNA, 19 nt, Homo sapiens
  misc_RNA (1)...(19): siRNA sense strand
gaggugaugucuccuugac

SEQ ID NO: 940443 - RNA, 19 nt, Homo sapiens
  misc_RNA (1)...(19): siRNA sense strand
gaaacucauggaaaccuau

SEQ ID NO: 940444 - RNA, 19 nt, Homo sapiens
  misc_RNA (1)...(19): siRNA sense strand
gcagaacaacaacaacaag

SEQ ID NO: 940445 - RNA, 19 nt, Homo sapiens
  misc_RNA (1)...(19): siRNA sense strand
agaaugaaaugcccaucuc

SEQ ID NO: 940446 - RNA, 19 nt, Homo sapiens
  misc_RNA (1)...(19): siRNA sense strand
agggugaccucaagaaagu

SEQ ID NO: 940447 - RNA, 19 nt, Homo sapiens
  misc_RNA (1)...(19): siRNA sense strand
gcauggaagggaagacgaa

SEQ ID NO: 940448 - RNA, 19 nt, Homo sapiens
  misc_RNA (1)...(19): siRNA sense strand
gagagggaaacucauggaa

SEQ ID NO: 940449 - RNA, 19 nt, Homo sapiens
  misc_RNA (1)...(19): siRNA sense strand
ggacagauggauggaauac

SEQ ID NO: 940450 - RNA, 19 nt, Homo sapiens
  misc_RNA (1)...(19): siRNA sense strand
ucaacaaccacgcacagaa

SEQ ID NO: 940451 - RNA, 19 nt, Homo sapiens
  misc_RNA (1)...(19): siRNA sense strand
caacaaccacgcacagaac

SEQ ID NO: 940452 - RNA, 19 nt, Homo sapiens
  misc_RNA (1)...(19): siRNA sense strand
gaaagucagcaaaauauag

SEQ ID NO: 940453 - RNA, 19 nt, Homo sapiens
  misc_RNA (1)...(19): siRNA sense strand
cagcaguuccugagcagaa

SEQ ID NO: 940454 - RNA, 19 nt, Homo sapiens
  misc_RNA (1)...(19): siRNA sense strand
cagccuggagcaucugaua

SEQ ID NO: 940455 - RNA, 19 nt, Homo sapiens
  misc_RNA (1)...(19): siRNA sense strand
ggaaaacgagugauucugu

SEQ ID NO: 940456 - RNA, 19 nt, Homo sapiens
  misc_RNA (1)...(19): siRNA sense strand
cuacauuggagauaguaaa

SEQ ID NO: 940457 - RNA, 19 nt, Homo sapiens
  misc_RNA (1)...(19): siRNA sense strand
acacgugccuuucacuaac

SEQ ID NO: 940458 - RNA, 19 nt, Homo sapiens
  misc_RNA (1)...(19): siRNA sense strand
agagggaaacucauggaaa

SEQ ID NO: 940459 - RNA, 19 nt, Homo sapiens
  misc_RNA (1)...(19): siRNA sense strand
gcccaucucccaacuacug

SEQ ID NO: 940460 - RNA, 19 nt, Homo sapiens
  misc_RNA (1)...(19): siRNA sense strand
cgagugauucugugucuuc

SEQ ID NO: 940461 - RNA, 19 nt, Homo sapiens
  misc_RNA (1)...(19): siRNA sense strand
auacccaugucaaugaaga

SEQ ID NO: 940462 - RNA, 19 nt, Homo sapiens
  misc_RNA (1)...(19): siRNA sense strand
gagcagaacaaaacaacaa

SEQ ID NO: 940463 - RNA, 19 nt, Homo sapiens
  misc_RNA (1)...(19): siRNA sense strand
ugacuuugcccugucugua

SEQ ID NO: 940464 - RNA, 19 nt, Homo sapiens
  misc_RNA (1)...(19): siRNA sense strand
uagacuacauuggagauag

SEQ ID NO: 940465 - RNA, 19 nt, Homo sapiens
  misc_RNA (1)...(19): siRNA sense strand
ucauggaaaccuauuguuc

SEQ ID NO: 940466 - RNA, 19 nt, Homo sapiens
  misc_RNA (1)...(19): siRNA sense strand
acacgcagaacaacaacaa

SEQ ID NO: 940467 - RNA, 19 nt, Homo sapiens
  misc_RNA (1)...(19): siRNA sense strand
cugcugacauccaaagagu

SEQ ID NO: 940468 - RNA, 19 nt, Homo sapiens
  misc_RNA (1)...(19): siRNA sense strand
ucaagaaagucagcaaaau

SEQ ID NO: 940469 - RNA, 19 nt, Homo sapiens
  misc_RNA (1)...(19): siRNA sense strand
caucccacgugucaaugug

SEQ ID NO: 940470 - RNA, 19 nt, Homo sapiens
  misc_RNA (1)...(19): siRNA sense strand
caccaccacccgacaaaug

SEQ ID NO: 940471 - RNA, 19 nt, Homo sapiens
  misc_RNA (1)...(19): siRNA sense strand
acagcaaacacgugccuuu

SEQ ID NO: 940472 - RNA, 19 nt, Homo sapiens
  misc_RNA (1)...(19): siRNA sense strand
ggaagggcccauccucacu

SEQ ID NO: 940473 - RNA, 19 nt, Homo sapiens
  misc_RNA (1)...(19): siRNA sense strand
agugauuccuggaguagug

SEQ ID NO: 940474 - RNA, 19 nt, Homo sapiens
  misc_RNA (1)...(19): siRNA sense strand
gcucuucgcauuguuugug

SEQ ID NO: 940475 - RNA, 19 nt, Homo sapiens
  misc_RNA (1)...(19): siRNA sense strand
agauaaacgugcgccugaa

SEQ ID NO: 940476 - RNA, 19 nt, Homo sapiens
  misc_RNA (1)...(19): siRNA sense strand
cacaacagcaacagcaugu

SEQ ID NO: 940477 - RNA, 19 nt, Homo sapiens
  misc_RNA (1)...(19): siRNA sense strand
cuacuucugcugacacugu

SEQ ID NO: 940478 - RNA, 19 nt, Homo sapiens
  misc_RNA (1)...(19): siRNA sense strand
cggaacaccacuccagaug

SEQ ID NO: 940479 - RNA, 19 nt, Homo sapiens
  misc_RNA (1)...(19): siRNA sense strand
uaaacgugcgccugaaucu

SEQ ID NO: 940480 - RNA, 19 nt, Homo sapiens
  misc_RNA (1)...(19): siRNA sense strand
gaagacgaagacggccuuu

SEQ ID NO: 940481 - RNA, 19 nt, Homo sapiens
  misc_RNA (1)...(19): siRNA sense strand
aaaccuauuguucgcagaa

SEQ ID NO: 940482 - RNA, 19 nt, Homo sapiens
  misc_RNA (1)...(19): siRNA sense strand
ccucaagaaagucagcaaa

SEQ ID NO: 940483 - RNA, 19 nt, Homo sapiens
  misc_RNA (1)...(19): siRNA sense strand
aaacucauggaaaccuauu

SEQ ID NO: 940484 - RNA, 19 nt, Homo sapiens
  misc_RNA (1)...(19): siRNA sense strand
ugacucccgagccuucuaa

SEQ ID NO: 940485 - RNA, 19 nt, Homo sapiens
  misc_RNA (1)...(19): siRNA sense strand
guguacugcugccgcauag

SEQ ID NO: 940486 - RNA, 19 nt, Homo sapiens
  misc_RNA (1)...(19): siRNA sense strand
cagcaaacacgugccuuuc

SEQ ID NO: 940487 - RNA, 19 nt, Homo sapiens
  misc_RNA (1)...(19): siRNA sense strand
aaacgugcgccugaaucua

SEQ ID NO: 940488 - RNA, 19 nt, Homo sapiens
  misc_RNA (1)...(19): siRNA sense strand
gaagugccuggcugguuca

SEQ ID NO: 940489 - RNA, 19 nt, Homo sapiens
  misc_RNA (1)...(19): siRNA sense strand
uggaauacccaugucaaug

SEQ ID NO: 940490 - RNA, 19 nt, Homo sapiens
  misc_RNA (1)...(19): siRNA sense strand
gaacacauuugcuuugaga

SEQ ID NO: 940491 - RNA, 19 nt, Homo sapiens
  misc_RNA (1)...(19): siRNA sense strand
ggaauuaacccucugcuuu

SEQ ID NO: 940492 - RNA, 19 nt, Homo sapiens
  misc_RNA (1)...(19): siRNA sense strand
gaucaagacuuuuccuuua

SEQ ID NO: 940493 - RNA, 19 nt, Homo sapiens
  misc_RNA (1)...(19): siRNA sense strand
ccagcgaacuccuguuuaa

SEQ ID NO: 940494 - RNA, 19 nt, Homo sapiens
  misc_RNA (1)...(19): siRNA sense strand
ggagauaagagaucauauu

SEQ ID NO: 940495 - RNA, 19 nt, Homo sapiens
  misc_RNA (1)...(19): siRNA sense strand
aaacaaccauguacccaaa

SEQ ID NO: 940496 - RNA, 19 nt, Homo sapiens
  misc_RNA (1)...(19): siRNA sense strand
ccaguggguugauuucuuu

SEQ ID NO: 940497 - RNA, 19 nt, Homo sapiens
  misc_RNA (1)...(19): siRNA sense strand
gagaguggguggagaguuc

SEQ ID NO: 940498 - RNA, 19 nt, Homo sapiens
  misc_RNA (1)...(19): siRNA sense strand
cacaauacguguacacuug

SEQ ID NO: 940499 - RNA, 19 nt, Homo sapiens
  misc_RNA (1)...(19): siRNA sense strand
guggagaguucuucuuuga

SEQ ID NO: 940500 - RNA, 19 nt, Homo sapiens
  misc_RNA (1)...(19): siRNA sense strand
gaacucaagccauacauca

SEQ ID NO: 940501 - RNA, 19 nt, Homo sapiens
  misc_RNA (1)...(19): siRNA sense strand
gaagauugcaugcaguuug

SEQ ID NO: 940502 - RNA, 19 nt, Homo sapiens
  misc_RNA (1)...(19): siRNA sense strand
gauaugagauaggaacaau

SEQ ID NO: 940503 - RNA, 19 nt, Homo sapiens
  misc_RNA (1)...(19): siRNA sense strand
gcgaacuccuguuuaagaa

SEQ ID NO: 940504 - RNA, 19 nt, Homo sapiens
  misc_RNA (1)...(19): siRNA sense strand
gaauuggcagugaaauaua

SEQ ID NO: 940505 - RNA, 19 nt, Homo sapiens
  misc_RNA (1)...(19): siRNA sense strand
gaauuaacccucugcuuuc

SEQ ID NO: 940506 - RNA, 19 nt, Homo sapiens
  misc_RNA (1)...(19): siRNA sense strand
caagagagagugauagaau

SEQ ID NO: 940507 - RNA, 19 nt, Homo sapiens
  misc_RNA (1)...(19): siRNA sense strand
gcaggaggagucggaauua

SEQ ID NO: 940508 - RNA, 19 nt, Homo sapiens
  misc_RNA (1)...(19): siRNA sense strand
cuagaaaccucguguugau

SEQ ID NO: 940509 - RNA, 19 nt, Homo sapiens
  misc_RNA (1)...(19): siRNA sense strand
gauugacacucagcacuuu

SEQ ID NO: 940510 - RNA, 19 nt, Homo sapiens
  misc_RNA (1)...(19): siRNA sense strand
gaacuccuguuuaagaaaa

SEQ ID NO: 940511 - RNA, 19 nt, Homo sapiens
  misc_RNA (1)...(19): siRNA sense strand
gaagaauaacggagaagga

SEQ ID NO: 940512 - RNA, 19 nt, Homo sapiens
  misc_RNA (1)...(19): siRNA sense strand
gagauugugucagcagcua

SEQ ID NO: 940513 - RNA, 19 nt, Homo sapiens
  misc_RNA (1)...(19): siRNA sense strand
ucagagagcaggcaaacaa

SEQ ID NO: 940514 - RNA, 19 nt, Homo sapiens
  misc_RNA (1)...(19): siRNA sense strand
cguguacacuugacuguga

SEQ ID NO: 940515 - RNA, 19 nt, Homo sapiens
  misc_RNA (1)...(19): siRNA sense strand
ugaauuuccugagaagauu

SEQ ID NO: 940516 - RNA, 19 nt, Homo sapiens
  misc_RNA (1)...(19): siRNA sense strand
aagagagagugauagaauu

SEQ ID NO: 940517 - RNA, 19 nt, Homo sapiens
  misc_RNA (1)...(19): siRNA sense strand
gauagaauuggcagugaaa

SEQ ID NO: 940518 - RNA, 19 nt, Homo sapiens
  misc_RNA (1)...(19): siRNA sense strand
uagaauuggcagugaaaua

SEQ ID NO: 940519 - RNA, 19 nt, Homo sapiens
  misc_RNA (1)...(19): siRNA sense strand
gagaagauugcaugcaguu

SEQ ID NO: 940520 - RNA, 19 nt, Homo sapiens
  misc_RNA (1)...(19): siRNA sense strand
augcggaacucaagccaua

SEQ ID NO: 940521 - RNA, 19 nt, Homo sapiens
  misc_RNA (1)...(19): siRNA sense strand
aaacagacuacacaaauca

SEQ ID NO: 940522 - RNA, 19 nt, Homo sapiens
  misc_RNA (1)...(19): siRNA sense strand
uaaccagcauaaugaaauc

SEQ ID NO: 940523 - RNA, 19 nt, Homo sapiens
  misc_RNA (1)...(19): siRNA sense strand
caucacggaaggaagaaua

SEQ ID NO: 940524 - RNA, 19 nt, Homo sapiens
  misc_RNA (1)...(19): siRNA sense strand
caggaggagucggaauuaa

SEQ ID NO: 940525 - RNA, 19 nt, Homo sapiens
  misc_RNA (1)...(19): siRNA sense strand
gguggagaguucuucuuug

SEQ ID NO: 940526 - RNA, 19 nt, Homo sapiens
  misc_RNA (1)...(19): siRNA sense strand
gaacaagagagagugauag

SEQ ID NO: 940527 - RNA, 19 nt, Homo sapiens
  misc_RNA (1)...(19): siRNA sense strand
ccagacugcuagaacaaga

SEQ ID NO: 940528 - RNA, 19 nt, Homo sapiens
  misc_RNA (1)...(19): siRNA sense strand
guggguugauuucuuuauu

SEQ ID NO: 940529 - RNA, 19 nt, Homo sapiens
  misc_RNA (1)...(19): siRNA sense strand
gccaguggguugauuucuu

SEQ ID NO: 940530 - RNA, 19 nt, Homo sapiens
  misc_RNA (1)...(19): siRNA sense strand
ggccugugcugcuguuaug

SEQ ID NO: 940531 - RNA, 19 nt, Homo sapiens
  misc_RNA (1)...(19): siRNA sense strand
caaaagaaauggauaugag

SEQ ID NO: 940532 - RNA, 19 nt, Homo sapiens
  misc_RNA (1)...(19): siRNA sense strand
aaacuauucuacagugcaa

SEQ ID NO: 940533 - RNA, 19 nt, Homo sapiens
  misc_RNA (1)...(19): siRNA sense strand
aagaacacauuugcuuuga

SEQ ID NO: 940534 - RNA, 19 nt, Homo sapiens
  misc_RNA (1)...(19): siRNA sense strand
agaaggagauaagagauca

SEQ ID NO: 940535 - RNA, 19 nt, Homo sapiens
  misc_RNA (1)...(19): siRNA sense strand
gaauaacggagaaggagau

SEQ ID NO: 940536 - RNA, 19 nt, Homo sapiens
  misc_RNA (1)...(19): siRNA sense strand
agaaauggauaugagauag

SEQ ID NO: 940537 - RNA, 19 nt, Homo sapiens
  misc_RNA (1)...(19): siRNA sense strand
ugauagaauuggcagugaa

SEQ ID NO: 940538 - RNA, 19 nt, Homo sapiens
  misc_RNA (1)...(19): siRNA sense strand
ccaagcaacuggaaaacaa

SEQ ID NO: 940539 - RNA, 19 nt, Homo sapiens
  misc_RNA (1)...(19): siRNA sense strand
uaacggagaaggagauaag

SEQ ID NO: 940540 - RNA, 19 nt, Homo sapiens
  misc_RNA (1)...(19): siRNA sense strand
ggguggagaguucuucuuu

SEQ ID NO: 940541 - RNA, 19 nt, Homo sapiens
  misc_RNA (1)...(19): siRNA sense strand
gugauagaauuggcaguga

SEQ ID NO: 940542 - RNA, 19 nt, Homo sapiens
  misc_RNA (1)...(19): siRNA sense strand
aaauggauaugagauagga

SEQ ID NO: 940543 - RNA, 19 nt, Homo sapiens
  misc_RNA (1)...(19): siRNA sense strand
agaauuggcagugaaauau

SEQ ID NO: 940544 - RNA, 19 nt, Homo sapiens
  misc_RNA (1)...(19): siRNA sense strand
gaagagccuccgcuugcuu

SEQ ID NO: 940545 - RNA, 19 nt, Homo sapiens
  misc_RNA (1)...(19): siRNA sense strand
acucuaaccagcauaauga

SEQ ID NO: 940546 - RNA, 19 nt, Homo sapiens
  misc_RNA (1)...(19): siRNA sense strand
agaacaagagagagugaua

SEQ ID NO: 940547 - RNA, 19 nt, Homo sapiens
  misc_RNA (1)...(19): siRNA sense strand
caaaacagacuacacaaau

SEQ ID NO: 940548 - RNA, 19 nt, Homo sapiens
  misc_RNA (1)...(19): siRNA sense strand
gagaaggagauaagagauc

SEQ ID NO: 940549 - RNA, 19 nt, Homo sapiens
  misc_RNA (1)...(19): siRNA sense strand
ggagaaggagauaagagau

SEQ ID NO: 940550 - RNA, 19 nt, Homo sapiens
  misc_RNA (1)...(19): siRNA sense strand
agagagagugauagaauug

SEQ ID NO: 940551 - RNA, 19 nt, Homo sapiens
  misc_RNA (1)...(19): siRNA sense strand
agaaaccucguguugauug

SEQ ID NO: 940552 - RNA, 19 nt, Homo sapiens
  misc_RNA (1)...(19): siRNA sense strand
uaugauuccuggguuguug

SEQ ID NO: 940553 - RNA, 19 nt, Homo sapiens
  misc_RNA (1)...(19): siRNA sense strand
acaaccauguacccaaaga

SEQ ID NO: 940554 - RNA, 19 nt, Homo sapiens
  misc_RNA (1)...(19): siRNA sense strand
cuaaccagcauaaugaaau

SEQ ID NO: 940555 - RNA, 19 nt, Homo sapiens
  misc_RNA (1)...(19): siRNA sense strand
guacccaaagaacacauuu

SEQ ID NO: 940556 - RNA, 19 nt, Homo sapiens
  misc_RNA (1)...(19): siRNA sense strand
cgcagcagaucuccucaga

SEQ ID NO: 940557 - RNA, 19 nt, Homo sapiens
  misc_RNA (1)...(19): siRNA sense strand
gcggaugccucuagaaacc

SEQ ID NO: 940558 - RNA, 19 nt, Homo sapiens
  misc_RNA (1)...(19): siRNA sense strand
gaaauggauaugagauagg

SEQ ID NO: 940559 - RNA, 19 nt, Homo sapiens
  misc_RNA (1)...(19): siRNA sense strand
uaccagcgaacuccuguuu

SEQ ID NO: 940560 - RNA, 19 nt, Homo sapiens
  misc_RNA (1)...(19): siRNA sense strand
aaggaaaacugaucacaug

SEQ ID NO: 940561 - RNA, 19 nt, Homo sapiens
  misc_RNA (1)...(19): siRNA sense strand
cggagaaggagauaagaga

SEQ ID NO: 940562 - RNA, 19 nt, Homo sapiens
  misc_RNA (1)...(19): siRNA sense strand
aaggaagaauaacggagaa

SEQ ID NO: 940563 - RNA, 19 nt, Homo sapiens
  misc_RNA (1)...(19): siRNA sense strand
gaaaccucguguugauugc

SEQ ID NO: 940564 - RNA, 19 nt, Homo sapiens
  misc_RNA (1)...(19): siRNA sense strand
uggguugauuucuuuauuc

SEQ ID NO: 940565 - RNA, 19 nt, Homo sapiens
  misc_RNA (1)...(19): siRNA sense strand
gcacuuugcgccaccuuac

SEQ ID NO: 940566 - RNA, 19 nt, Homo sapiens
  misc_RNA (1)...(19): siRNA sense strand
guugguggguuuucaauau

SEQ ID NO: 940567 - RNA, 19 nt, Homo sapiens
  misc_RNA (1)...(19): siRNA sense strand
auacaucacggaaggaaga

SEQ ID NO: 940568 - RNA, 19 nt, Homo sapiens
  misc_RNA (1)...(19): siRNA sense strand
gaauuuccugagaagauug

SEQ ID NO: 940569 - RNA, 19 nt, Homo sapiens
  misc_RNA (1)...(19): siRNA sense strand
cagcauaaugaaauccaaa

SEQ ID NO: 940570 - RNA, 19 nt, Homo sapiens
  misc_RNA (1)...(19): siRNA sense strand
ucacaauacguguacacuu

SEQ ID NO: 940571 - RNA, 19 nt, Homo sapiens
  misc_RNA (1)...(19): siRNA sense strand
guuggagccauccguauug

SEQ ID NO: 940572 - RNA, 19 nt, Homo sapiens
  misc_RNA (1)...(19): siRNA sense strand
aaggagauaagagaucaua

SEQ ID NO: 940573 - RNA, 19 nt, Homo sapiens
  misc_RNA (1)...(19): siRNA sense strand
ggaacucaagccauacauc

SEQ ID NO: 940574 - RNA, 19 nt, Homo sapiens
  misc_RNA (1)...(19): siRNA sense strand
gaggcugcgucacugagau

SEQ ID NO: 940575 - RNA, 19 nt, Homo sapiens
  misc_RNA (1)...(19): siRNA sense strand
agccuccgcuugcuuguug

SEQ ID NO: 940576 - RNA, 19 nt, Homo sapiens
  misc_RNA (1)...(19): siRNA sense strand
cacauuugcuuugagaagu

SEQ ID NO: 940577 - RNA, 19 nt, Homo sapiens
  misc_RNA (1)...(19): siRNA sense strand
acaaaucaaugcggaacuc

SEQ ID NO: 940578 - RNA, 19 nt, Homo sapiens
  misc_RNA (1)...(19): siRNA sense strand
cagagagcaggcaaacaaa

SEQ ID NO: 940579 - RNA, 19 nt, Homo sapiens
  misc_RNA (1)...(19): siRNA sense strand
ccagcauaaugaaauccaa

SEQ ID NO: 940580 - RNA, 19 nt, Homo sapiens
  misc_RNA (1)...(19): siRNA sense strand
gaucacauggagagaacug

SEQ ID NO: 940581 - RNA, 19 nt, Homo sapiens
  misc_RNA (1)...(19): siRNA sense strand
ggauaugagauaggaacaa

SEQ ID NO: 940582 - RNA, 19 nt, Homo sapiens
  misc_RNA (1)...(19): siRNA sense strand
caaccauguacccaaagaa

SEQ ID NO: 940583 - RNA, 19 nt, Homo sapiens
  misc_RNA (1)...(19): siRNA sense strand
acaauacguguacacuuga

SEQ ID NO: 940584 - RNA, 19 nt, Homo sapiens
  misc_RNA (1)...(19): siRNA sense strand
gcuuugagaagugguggua

SEQ ID NO: 940585 - RNA, 19 nt, Homo sapiens
  misc_RNA (1)...(19): siRNA sense strand
cagacuacacaaaucaaug

SEQ ID NO: 940586 - RNA, 19 nt, Homo sapiens
  misc_RNA (1)...(19): siRNA sense strand
cgaacuccuguuuaagaaa

SEQ ID NO: 940587 - RNA, 19 nt, Homo sapiens
  misc_RNA (1)...(19): siRNA sense strand
ucuagaaaccucguguuga

SEQ ID NO: 940588 - RNA, 19 nt, Homo sapiens
  misc_RNA (1)...(19): siRNA sense strand
gucagcagcuaaggugugu

SEQ ID NO: 940589 - RNA, 19 nt, Homo sapiens
  misc_RNA (1)...(19): siRNA sense strand
acauuugcuuugagaagug

SEQ ID NO: 940590 - RNA, 19 nt, Homo sapiens
  misc_RNA (1)...(19): siRNA sense strand
gaaggaggcugugcagaaa

SEQ ID NO: 940591 - RNA, 19 nt, Homo sapiens
  misc_RNA (1)...(19): siRNA sense strand
ucacagaaguccuuuaaga

SEQ ID NO: 940592 - RNA, 19 nt, Homo sapiens
  misc_RNA (1)...(19): siRNA sense strand
gaaagcgucuggaggagau

SEQ ID NO: 940593 - RNA, 19 nt, Homo sapiens
  misc_RNA (1)...(19): siRNA sense strand
ggucacagaaguccuuuaa

SEQ ID NO: 940594 - RNA, 19 nt, Homo sapiens
  misc_RNA (1)...(19): siRNA sense strand
ggaaggaggaggcaaagga

SEQ ID NO: 940595 - RNA, 19 nt, Homo sapiens
  misc_RNA (1)...(19): siRNA sense strand
caggaugucuggaggagaa

SEQ ID NO: 940596 - RNA, 19 nt, Homo sapiens
  misc_RNA (1)...(19): siRNA sense strand
uaagaggguuugccuugga

SEQ ID NO: 940597 - RNA, 19 nt, Homo sapiens
  misc_RNA (1)...(19): siRNA sense strand
ggaggaaggaggaggcaaa

SEQ ID NO: 940598 - RNA, 19 nt, Homo sapiens
  misc_RNA (1)...(19): siRNA sense strand
ccaagaagcaggacagcaa

SEQ ID NO: 940599 - RNA, 19 nt, Homo sapiens
  misc_RNA (1)...(19): siRNA sense strand
cagcgucccuggugaaugg

SEQ ID NO: 940600 - RNA, 19 nt, Homo sapiens
  misc_RNA (1)...(19): siRNA sense strand
agaaggaggcugugcagaa

SEQ ID NO: 940601 - RNA, 19 nt, Homo sapiens
  misc_RNA (1)...(19): siRNA sense strand
uggaggagaucaugaagag

SEQ ID NO: 940602 - RNA, 19 nt, Homo sapiens
  misc_RNA (1)...(19): siRNA sense strand
gccacacucugccuccaaa

SEQ ID NO: 940603 - RNA, 19 nt, Homo sapiens
  misc_RNA (1)...(19): siRNA sense strand
gaaagggacaagcgaaugc

SEQ ID NO: 940604 - RNA, 19 nt, Homo sapiens
  misc_RNA (1)...(19): siRNA sense strand
gcaagcgcagggccaguaa

SEQ ID NO: 940605 - RNA, 19 nt, Homo sapiens
  misc_RNA (1)...(19): siRNA sense strand
caccacagaccgagaagaa

SEQ ID NO: 940606 - RNA, 19 nt, Homo sapiens
  misc_RNA (1)...(19): siRNA sense strand
acucggaagucagaaguuu

SEQ ID NO: 940607 - RNA, 19 nt, Homo sapiens
  misc_RNA (1)...(19): siRNA sense strand
gagacacuccugcccuuug

SEQ ID NO: 940608 - RNA, 19 nt, Homo sapiens
  misc_RNA (1)...(19): siRNA sense strand
gcaggaggcacgagagaag

SEQ ID NO: 940609 - RNA, 19 nt, Homo sapiens
  misc_RNA (1)...(19): siRNA sense strand
gcaggucacagaaguccuu

SEQ ID NO: 940610 - RNA, 19 nt, Homo sapiens
  misc_RNA (1)...(19): siRNA sense strand
gcccagagccugugaaagc

SEQ ID NO: 940611 - RNA, 19 nt, Homo sapiens
  misc_RNA (1)...(19): siRNA sense strand
gaaagaggaggccgaagcu

SEQ ID NO: 940612 - RNA, 19 nt, Homo sapiens
  misc_RNA (1)...(19): siRNA sense strand
gagcaggaggcacgagaga

SEQ ID NO: 940613 - RNA, 19 nt, Homo sapiens
  misc_RNA (1)...(19): siRNA sense strand
gcagggccaguaacgagaa

SEQ ID NO: 940614 - RNA, 19 nt, Homo sapiens
  misc_RNA (1)...(19): siRNA sense strand
gagccgaacaccagagaca

SEQ ID NO: 940615 - RNA, 19 nt, Homo sapiens
  misc_RNA (1)...(19): siRNA sense strand
aggaggcugugcagaaaga

SEQ ID NO: 940616 - RNA, 19 nt, Homo sapiens
  misc_RNA (1)...(19): siRNA sense strand
cagcacaccaggagaaugg

SEQ ID NO: 940617 - RNA, 19 nt, Homo sapiens
  misc_RNA (1)...(19): siRNA sense strand
gguggguccucucuguugu

SEQ ID NO: 940618 - RNA, 19 nt, Homo sapiens
  misc_RNA (1)...(19): siRNA sense strand
agacagaacaaagauggaa

SEQ ID NO: 940619 - RNA, 19 nt, Homo sapiens
  misc_RNA (1)...(19): siRNA sense strand
acucggcucuuggcugaaa

SEQ ID NO: 940620 - RNA, 19 nt, Homo sapiens
  misc_RNA (1)...(19): siRNA sense strand
cagaaagggacaagcgaau

SEQ ID NO: 940621 - RNA, 19 nt, Homo sapiens
  misc_RNA (1)...(19): siRNA sense strand
ggguggguccucucuguug

SEQ ID NO: 940622 - RNA, 19 nt, Homo sapiens
  misc_RNA (1)...(19): siRNA sense strand
uggguccucucuguuguuu

SEQ ID NO: 940623 - RNA, 19 nt, Homo sapiens
  misc_RNA (1)...(19): siRNA sense strand
cacagaaguccuuuaagag

SEQ ID NO: 940624 - RNA, 19 nt, Homo sapiens
  misc_RNA (1)...(19): siRNA sense strand
gaccuucacucucgccuau

SEQ ID NO: 940625 - RNA, 19 nt, Homo sapiens
  misc_RNA (1)...(19): siRNA sense strand
gcuguugccuccucuguca

SEQ ID NO: 940626 - RNA, 19 nt, Homo sapiens
  misc_RNA (1)...(19): siRNA sense strand
acacgugggugaugaaggu

SEQ ID NO: 940627 - RNA, 19 nt, Homo sapiens
  misc_RNA (1)...(19): siRNA sense strand
gacgugcaccugacuguga

SEQ ID NO: 940628 - RNA, 19 nt, Homo sapiens
  misc_RNA (1)...(19): siRNA sense strand
ggagcuggaggccugcaua

SEQ ID NO: 940629 - RNA, 19 nt, Homo sapiens
  misc_RNA (1)...(19): siRNA sense strand
acagacacgugggugauga

SEQ ID NO: 940630 - RNA, 19 nt, Homo sapiens
  misc_RNA (1)...(19): siRNA sense strand
ccuccucugucaacacuga

SEQ ID NO: 940631 - RNA, 19 nt, Homo sapiens
  misc_RNA (1)...(19): siRNA sense strand
caugagcucucgccagacu

SEQ ID NO: 940632 - RNA, 19 nt, Homo sapiens
  misc_RNA (1)...(19): siRNA sense strand
gugcaggccuuugacaucu

SEQ ID NO: 940633 - RNA, 19 nt, Homo sapiens
  misc_RNA (1)...(19): siRNA sense strand
ccugcauccugaucuacua

SEQ ID NO: 940634 - RNA, 19 nt, Homo sapiens
  misc_RNA (1)...(19): siRNA sense strand
gcuacuacgugggcaugug

SEQ ID NO: 940635 - RNA, 19 nt, Homo sapiens
  misc_RNA (1)...(19): siRNA sense strand
ccaggugcccgugugauug

SEQ ID NO: 940636 - RNA, 19 nt, Homo sapiens
  misc_RNA (1)...(19): siRNA sense strand
gcauccugaucuacuacug

SEQ ID NO: 940637 - RNA, 19 nt, Homo sapiens
  misc_RNA (1)...(19): siRNA sense strand
gagcuggaggccugcauag

SEQ ID NO: 940638 - RNA, 19 nt, Homo sapiens
  misc_RNA (1)...(19): siRNA sense strand
ucgccugcauccugaucua

SEQ ID NO: 940639 - RNA, 19 nt, Homo sapiens
  misc_RNA (1)...(19): siRNA sense strand
cggagucucggcagcauga

SEQ ID NO: 940640 - RNA, 19 nt, Homo sapiens
  misc_RNA (1)...(19): siRNA sense strand
cuucgugcccuuccacuug

SEQ ID NO: 940641 - RNA, 19 nt, Homo sapiens
  misc_RNA (1)...(19): siRNA sense strand
gggaugguuucaaguauua

SEQ ID NO: 940642 - RNA, 19 nt, Homo sapiens
  misc_RNA (1)...(19): siRNA sense strand
gaagaacucacuauuauuc

SEQ ID NO: 940643 - RNA, 19 nt, Homo sapiens
  misc_RNA (1)...(19): siRNA sense strand
agauggagaugaugauuua

SEQ ID NO: 940644 - RNA, 19 nt, Homo sapiens
  misc_RNA (1)...(19): siRNA sense strand
gaugaugauuuacaaguug

SEQ ID NO: 940645 - RNA, 19 nt, Homo sapiens
  misc_RNA (1)...(19): siRNA sense strand
ucaggagacuucaggauuu

SEQ ID NO: 940646 - RNA, 19 nt, Homo sapiens
  misc_RNA (1)...(19): siRNA sense strand
cagaucacauugagaguaa

SEQ ID NO: 940647 - RNA, 19 nt, Homo sapiens
  misc_RNA (1)...(19): siRNA sense strand
gccugaagauauugaguua

SEQ ID NO: 940648 - RNA, 19 nt, Homo sapiens
  misc_RNA (1)...(19): siRNA sense strand
uuaaugaacugccuucugu

SEQ ID NO: 940649 - RNA, 19 nt, Homo sapiens
  misc_RNA (1)...(19): siRNA sense strand
guugaagaacucacuauua

SEQ ID NO: 940650 - RNA, 19 nt, Homo sapiens
  misc_RNA (1)...(19): siRNA sense strand
gaaacagauucagauaguu

SEQ ID NO: 940651 - RNA, 19 nt, Homo sapiens
  misc_RNA (1)...(19): siRNA sense strand
gcuggaaacucugaaauuc

SEQ ID NO: 940652 - RNA, 19 nt, Homo sapiens
  misc_RNA (1)...(19): siRNA sense strand
cagaacauaugguaucuca

SEQ ID NO: 940653 - RNA, 19 nt, Homo sapiens
  misc_RNA (1)...(19): siRNA sense strand
uaacucagaacauauggua

SEQ ID NO: 940654 - RNA, 19 nt, Homo sapiens
  misc_RNA (1)...(19): siRNA sense strand
caccagaggccuuagauuu

SEQ ID NO: 940655 - RNA, 19 nt, Homo sapiens
  misc_RNA (1)...(19): siRNA sense strand
aaacauggcugcucaucca

SEQ ID NO: 940656 - RNA, 19 nt, Homo sapiens
  misc_RNA (1)...(19): siRNA sense strand
acaagcagcaggaaagaua

SEQ ID NO: 940657 - RNA, 19 nt, Homo sapiens
  misc_RNA (1)...(19): siRNA sense strand
gaucagaugcaucauggaa

SEQ ID NO: 940658 - RNA, 19 nt, Homo sapiens
  misc_RNA (1)...(19): siRNA sense strand
gcucauccauuacuuaacu

SEQ ID NO: 940659 - RNA, 19 nt, Homo sapiens
  misc_RNA (1)...(19): siRNA sense strand
caccucagcauuucuauaa

SEQ ID NO: 940660 - RNA, 19 nt, Homo sapiens
  misc_RNA (1)...(19): siRNA sense strand
ugaacugccuucuguugaa

SEQ ID NO: 940661 - RNA, 19 nt, Homo sapiens
  misc_RNA (1)...(19): siRNA sense strand
ucagaugcaucauggaaga

SEQ ID NO: 940662 - RNA, 19 nt, Homo sapiens
  misc_RNA (1)...(19): siRNA sense strand
cgagauauuuggaccuguu

SEQ ID NO: 940663 - RNA, 19 nt, Homo sapiens
  misc_RNA (1)...(19): siRNA sense strand
gcaaaaggauaucguaaca

SEQ ID NO: 940664 - RNA, 19 nt, Homo sapiens
  misc_RNA (1)...(19): siRNA sense strand
caggaaagauauucgagau

SEQ ID NO: 940665 - RNA, 19 nt, Homo sapiens
  misc_RNA (1)...(19): siRNA sense strand
ucagauaguucaaguucau

SEQ ID NO: 940666 - RNA, 19 nt, Homo sapiens
  misc_RNA (1)...(19): siRNA sense strand
gggcagaccguggagguua

SEQ ID NO: 940667 - RNA, 19 nt, Homo sapiens
  misc_RNA (1)...(19): siRNA sense strand
gcucauagcucugcuucag

SEQ ID NO: 940668 - RNA, 19 nt, Homo sapiens
  misc_RNA (1)...(19): siRNA sense strand
gaagaaugaucaggaacca

SEQ ID NO: 940669 - RNA, 19 nt, Homo sapiens
  misc_RNA (1)...(19): siRNA sense strand
gauaagggaucagaugcau

SEQ ID NO: 940670 - RNA, 19 nt, Homo sapiens
  misc_RNA (1)...(19): siRNA sense strand
ccagaggccuuagauuuua

SEQ ID NO: 940671 - RNA, 19 nt, Homo sapiens
  misc_RNA (1)...(19): siRNA sense strand
uaaugagccuggugaagau

SEQ ID NO: 940672 - RNA, 19 nt, Homo sapiens
  misc_RNA (1)...(19): siRNA sense strand
cuccaucaaugaaagauuu

SEQ ID NO: 940673 - RNA, 19 nt, Homo sapiens
  misc_RNA (1)...(19): siRNA sense strand
agaauucacacgaggauuu

SEQ ID NO: 940674 - RNA, 19 nt, Homo sapiens
  misc_RNA (1)...(19): siRNA sense strand
uaagggaucagaugcauca

SEQ ID NO: 940675 - RNA, 19 nt, Homo sapiens
  misc_RNA (1)...(19): siRNA sense strand
ggcagaccguggagguuaa

SEQ ID NO: 940676 - RNA, 19 nt, Homo sapiens
  misc_RNA (1)...(19): siRNA sense strand
gcugucagauggagaugau

SEQ ID NO: 940677 - RNA, 19 nt, Homo sapiens
  misc_RNA (1)...(19): siRNA sense strand
gagaaggaagccaaacaga

SEQ ID NO: 940678 - RNA, 19 nt, Homo sapiens
  misc_RNA (1)...(19): siRNA sense strand
gagaugaugauuuacaagu

SEQ ID NO: 940679 - RNA, 19 nt, Homo sapiens
  misc_RNA (1)...(19): siRNA sense strand
ugaaguacaucagaauugg

SEQ ID NO: 940680 - RNA, 19 nt, Homo sapiens
  misc_RNA (1)...(19): siRNA sense strand
aaaaggauaucguaacaga

SEQ ID NO: 940681 - RNA, 19 nt, Homo sapiens
  misc_RNA (1)...(19): siRNA sense strand
ccgcucagcuggaaacucu

SEQ ID NO: 940682 - RNA, 19 nt, Homo sapiens
  misc_RNA (1)...(19): siRNA sense strand
gaauuggaaugcucauagc

SEQ ID NO: 940683 - RNA, 19 nt, Homo sapiens
  misc_RNA (1)...(19): siRNA sense strand
aaacagauucagauaguuc

SEQ ID NO: 940684 - RNA, 19 nt, Homo sapiens
  misc_RNA (1)...(19): siRNA sense strand
uuaaugagccuggugaaga

SEQ ID NO: 940685 - RNA, 19 nt, Homo sapiens
  misc_RNA (1)...(19): siRNA sense strand
aaacauggguugggcuaca

SEQ ID NO: 940686 - RNA, 19 nt, Homo sapiens
  misc_RNA (1)...(19): siRNA sense strand
cagauggagaugaugauuu

SEQ ID NO: 940687 - RNA, 19 nt, Homo sapiens
  misc_RNA (1)...(19): siRNA sense strand
uggagaugaugauuuacaa

SEQ ID NO: 940688 - RNA, 19 nt, Homo sapiens
  misc_RNA (1)...(19): siRNA sense strand
uauucugccugaagauauu

SEQ ID NO: 940689 - RNA, 19 nt, Homo sapiens
  misc_RNA (1)...(19): siRNA sense strand
ggacucggacagugaaaca

SEQ ID NO: 940690 - RNA, 19 nt, Homo sapiens
  misc_RNA (1)...(19): siRNA sense strand
guacaucagaauuggaaug

SEQ ID NO: 940691 - RNA, 19 nt, Homo sapiens
  misc_RNA (1)...(19): siRNA sense strand
ugggaugguuucaaguauu

SEQ ID NO: 940692 - RNA, 19 nt, Homo sapiens
  misc_RNA (1)...(19): siRNA sense strand
gaagauauugaguuaaagc

SEQ ID NO: 940693 - RNA, 19 nt, Homo sapiens
  misc_RNA (1)...(19): siRNA sense strand
ucagaucacauugagagua

SEQ ID NO: 940694 - RNA, 19 nt, Homo sapiens
  misc_RNA (1)...(19): siRNA sense strand
guguuacgguuuaauucuu

SEQ ID NO: 940695 - RNA, 19 nt, Homo sapiens
  misc_RNA (1)...(19): siRNA sense strand
gcugcucauccauuacuua

SEQ ID NO: 940696 - RNA, 19 nt, Homo sapiens
  misc_RNA (1)...(19): siRNA sense strand
aaggauaucguaacagaga

SEQ ID NO: 940697 - RNA, 19 nt, Homo sapiens
  misc_RNA (1)...(19): siRNA sense strand
gaugcaucauggaagaaug

SEQ ID NO: 940698 - RNA, 19 nt, Homo sapiens
  misc_RNA (1)...(19): siRNA sense strand
cuauuauucugccugaaga

SEQ ID NO: 940699 - RNA, 19 nt, Homo sapiens
  misc_RNA (1)...(19): siRNA sense strand
gaaguacaucagaauugga

SEQ ID NO: 940700 - RNA, 19 nt, Homo sapiens
  misc_RNA (1)...(19): siRNA sense strand
guuaaugaggagacuguaa

SEQ ID NO: 940701 - RNA, 19 nt, Homo sapiens
  misc_RNA (1)...(19): siRNA sense strand
uaaugaggagacuguaauu

SEQ ID NO: 940702 - RNA, 19 nt, Homo sapiens
  misc_RNA (1)...(19): siRNA sense strand
caggagacuucaggauuuc

SEQ ID NO: 940703 - RNA, 19 nt, Homo sapiens
  misc_RNA (1)...(19): siRNA sense strand
ggccuccaccucagcauuu

SEQ ID NO: 940704 - RNA, 19 nt, Homo sapiens
  misc_RNA (1)...(19): siRNA sense strand
guucaucgucuuccucuuc

SEQ ID NO: 940705 - RNA, 19 nt, Homo sapiens
  misc_RNA (1)...(19): siRNA sense strand
uaaaagugaucgacaagca

SEQ ID NO: 940706 - RNA, 19 nt, Homo sapiens
  misc_RNA (1)...(19): siRNA sense strand
gagacaaaauaaucccauu

SEQ ID NO: 940707 - RNA, 19 nt, Homo sapiens
  misc_RNA (1)...(19): siRNA sense strand
ccucagcauuucuauaacu

SEQ ID NO: 940708 - RNA, 19 nt, Homo sapiens
  misc_RNA (1)...(19): siRNA sense strand
ccaccucagcauuucuaua

SEQ ID NO: 940709 - RNA, 19 nt, Homo sapiens
  misc_RNA (1)...(19): siRNA sense strand
caggauaagggaucagaug

SEQ ID NO: 940710 - RNA, 19 nt, Homo sapiens
  misc_RNA (1)...(19): siRNA sense strand
caauggcaccgacuuugga

SEQ ID NO: 940711 - RNA, 19 nt, Homo sapiens
  misc_RNA (1)...(19): siRNA sense strand
guguuugacaugcauaauu

SEQ ID NO: 940712 - RNA, 19 nt, Homo sapiens
  misc_RNA (1)...(19): siRNA sense strand
uaaagccucuugggauggu

SEQ ID NO: 940713 - RNA, 19 nt, Homo sapiens
  misc_RNA (1)...(19): siRNA sense strand
agaauuggaaugcucauag

SEQ ID NO: 940714 - RNA, 19 nt, Homo sapiens
  misc_RNA (1)...(19): siRNA sense strand
ggauaagggaucagaugca

SEQ ID NO: 940715 - RNA, 19 nt, Homo sapiens
  misc_RNA (1)...(19): siRNA sense strand
cgacaagcagcaggaaaga

SEQ ID NO: 940716 - RNA, 19 nt, Homo sapiens
  misc_RNA (1)...(19): siRNA sense strand
uuaaugaggagacuguaau

SEQ ID NO: 940717 - RNA, 19 nt, Homo sapiens
  misc_RNA (1)...(19): siRNA sense strand
cauugagaguaaagguauu

SEQ ID NO: 940718 - RNA, 19 nt, Homo sapiens
  misc_RNA (1)...(19): siRNA sense strand
cuauaacucagaacauaug

SEQ ID NO: 940719 - RNA, 19 nt, Homo sapiens
  misc_RNA (1)...(19): siRNA sense strand
guauuuugcuccaucaaug

SEQ ID NO: 940720 - RNA, 19 nt, Homo sapiens
  misc_RNA (1)...(19): siRNA sense strand
caagcagcaggaaagauau

SEQ ID NO: 940721 - RNA, 19 nt, Homo sapiens
  misc_RNA (1)...(19): siRNA sense strand
caauaccccuuuccucuuc

SEQ ID NO: 940722 - RNA, 19 nt, Homo sapiens
  misc_RNA (1)...(19): siRNA sense strand
uaucguaacagagaauuca

SEQ ID NO: 940723 - RNA, 19 nt, Homo sapiens
  misc_RNA (1)...(19): siRNA sense strand
ggauaucguaacagagaau

SEQ ID NO: 940724 - RNA, 19 nt, Homo sapiens
  misc_RNA (1)...(19): siRNA sense strand
cacauugagaguaaaggua

SEQ ID NO: 940725 - RNA, 19 nt, Homo sapiens
  misc_RNA (1)...(19): siRNA sense strand
gaucacauugagaguaaag

SEQ ID NO: 940726 - RNA, 19 nt, Homo sapiens
  misc_RNA (1)...(19): siRNA sense strand
gguuuaauucuucagauca

SEQ ID NO: 940727 - RNA, 19 nt, Homo sapiens
  misc_RNA (1)...(19): siRNA sense strand
aaugaacugccuucuguug

SEQ ID NO: 940728 - RNA, 19 nt, Homo sapiens
  misc_RNA (1)...(19): siRNA sense strand
gauaucguaacagagaauu

SEQ ID NO: 940729 - RNA, 19 nt, Homo sapiens
  misc_RNA (1)...(19): siRNA sense strand
ccucaucgucgucuucuuc

SEQ ID NO: 940730 - RNA, 19 nt, Homo sapiens
  misc_RNA (1)...(19): siRNA sense strand
ugucagauggagaugauga

SEQ ID NO: 940731 - RNA, 19 nt, Homo sapiens
  misc_RNA (1)...(19): siRNA sense strand
agauucagauaguucaagu

SEQ ID NO: 940732 - RNA, 19 nt, Homo sapiens
  misc_RNA (1)...(19): siRNA sense strand
acauugagaguaaagguau

SEQ ID NO: 940733 - RNA, 19 nt, Homo sapiens
  misc_RNA (1)...(19): siRNA sense strand
gagauauuuggaccuguug

SEQ ID NO: 940734 - RNA, 19 nt, Homo sapiens
  misc_RNA (1)...(19): siRNA sense strand
aggaaagauauucgagaua

SEQ ID NO: 940735 - RNA, 19 nt, Homo sapiens
  misc_RNA (1)...(19): siRNA sense strand
cugcucauccauuacuuaa

SEQ ID NO: 940736 - RNA, 19 nt, Homo sapiens
  misc_RNA (1)...(19): siRNA sense strand
cagaauuggaaugcucaua

SEQ ID NO: 940737 - RNA, 19 nt, Homo sapiens
  misc_RNA (1)...(19): siRNA sense strand
ccaccagaggccuuagauu

SEQ ID NO: 940738 - RNA, 19 nt, Homo sapiens
  misc_RNA (1)...(19): siRNA sense strand
auggaagaaugaucaggaa

SEQ ID NO: 940739 - RNA, 19 nt, Homo sapiens
  misc_RNA (1)...(19): siRNA sense strand
ggcaccgacuuuggaguug

SEQ ID NO: 940740 - RNA, 19 nt, Homo sapiens
  misc_RNA (1)...(19): siRNA sense strand
ggccuuagauuuuagugau

SEQ ID NO: 940741 - RNA, 19 nt, Homo sapiens
  misc_RNA (1)...(19): siRNA sense strand
caaaggagaucauaagaaa

SEQ ID NO: 940742 - RNA, 19 nt, Homo sapiens
  misc_RNA (1)...(19): siRNA sense strand
gaauuuagcuccacuucaa

SEQ ID NO: 940743 - RNA, 19 nt, Homo sapiens
  misc_RNA (1)...(19): siRNA sense strand
ucagagggcuuugaauuua

SEQ ID NO: 940744 - RNA, 19 nt, Homo sapiens
  misc_RNA (1)...(19): siRNA sense strand
ggucaaacguguaaagaaa

SEQ ID NO: 940745 - RNA, 19 nt, Homo sapiens
  misc_RNA (1)...(19): siRNA sense strand
gaaauuaaccaccaaaugu

SEQ ID NO: 940746 - RNA, 19 nt, Homo sapiens
  misc_RNA (1)...(19): siRNA sense strand
gaacagagacauaauaaag

SEQ ID NO: 940747 - RNA, 19 nt, Homo sapiens
  misc_RNA (1)...(19): siRNA sense strand
agacaggccuugaaauuaa

SEQ ID NO: 940748 - RNA, 19 nt, Homo sapiens
  misc_RNA (1)...(19): siRNA sense strand
gcacauacauaacuuugga

SEQ ID NO: 940749 - RNA, 19 nt, Homo sapiens
  misc_RNA (1)...(19): siRNA sense strand
ccacuaagcugcuacuuca

SEQ ID NO: 940750 - RNA, 19 nt, Homo sapiens
  misc_RNA (1)...(19): siRNA sense strand
caaugaagcuggacuauac

SEQ ID NO: 940751 - RNA, 19 nt, Homo sapiens
  misc_RNA (1)...(19): siRNA sense strand
gaauacgggugcugaagaa

SEQ ID NO: 940752 - RNA, 19 nt, Homo sapiens
  misc_RNA (1)...(19): siRNA sense strand
gacccaaucuucacauauu

SEQ ID NO: 940753 - RNA, 19 nt, Homo sapiens
  misc_RNA (1)...(19): siRNA sense strand
gaauuaagaaugagccaua

SEQ ID NO: 940754 - RNA, 19 nt, Homo sapiens
  misc_RNA (1)...(19): siRNA sense strand
ucacagaacacauagauuu

SEQ ID NO: 940755 - RNA, 19 nt, Homo sapiens
  misc_RNA (1)...(19): siRNA sense strand
gaagcaugcuguccuaugu

SEQ ID NO: 940756 - RNA, 19 nt, Homo sapiens
  misc_RNA (1)...(19): siRNA sense strand
ggacaaacagcauauucua

SEQ ID NO: 940757 - RNA, 19 nt, Homo sapiens
  misc_RNA (1)...(19): siRNA sense strand
cagaagaaauacuggcuuu

SEQ ID NO: 940758 - RNA, 19 nt, Homo sapiens
  misc_RNA (1)...(19): siRNA sense strand
gcacuggugugguaugaau

SEQ ID NO: 940759 - RNA, 19 nt, Homo sapiens
  misc_RNA (1)...(19): siRNA sense strand
gaguauagaugacauaggu

SEQ ID NO: 940760 - RNA, 19 nt, Homo sapiens
  misc_RNA (1)...(19): siRNA sense strand
gaacucagcagugaugauu

SEQ ID NO: 940761 - RNA, 19 nt, Homo sapiens
  misc_RNA (1)...(19): siRNA sense strand
gcuauugccugucuucaga

SEQ ID NO: 940762 - RNA, 19 nt, Homo sapiens
  misc_RNA (1)...(19): siRNA sense strand
ggagagaguuaaucuuucu

SEQ ID NO: 940763 - RNA, 19 nt, Homo sapiens
  misc_RNA (1)...(19): siRNA sense strand
gaagcaacagaauggauua

SEQ ID NO: 940764 - RNA, 19 nt, Homo sapiens
  misc_RNA (1)...(19): siRNA sense strand
gaagcauccucaugaccua

SEQ ID NO: 940765 - RNA, 19 nt, Homo sapiens
  misc_RNA (1)...(19): siRNA sense strand
ggaccagccuguacgcuau

SEQ ID NO: 940766 - RNA, 19 nt, Homo sapiens
  misc_RNA (1)...(19): siRNA sense strand
ugacaucacagaacacaua

SEQ ID NO: 940767 - RNA, 19 nt, Homo sapiens
  misc_RNA (1)...(19): siRNA sense strand
ggacaucguuaccaagcaa

SEQ ID NO: 940768 - RNA, 19 nt, Homo sapiens
  misc_RNA (1)...(19): siRNA sense strand
gccagaagcucuugcuaug

SEQ ID NO: 940769 - RNA, 19 nt, Homo sapiens
  misc_RNA (1)...(19): siRNA sense strand
gauguucaaucaaaucaga

SEQ ID NO: 940770 - RNA, 19 nt, Homo sapiens
  misc_RNA (1)...(19): siRNA sense strand
ggagauaucuuugaaaaug

SEQ ID NO: 940771 - RNA, 19 nt, Homo sapiens
  misc_RNA (1)...(19): siRNA sense strand
ggaccuggaucuauaugau

SEQ ID NO: 940772 - RNA, 19 nt, Homo sapiens
  misc_RNA (1)...(19): siRNA sense strand
gccaacaucuugcacaaug

SEQ ID NO: 940773 - RNA, 19 nt, Homo sapiens
  misc_RNA (1)...(19): siRNA sense strand
gaaaacagccugaaguuga

SEQ ID NO: 940774 - RNA, 19 nt, Homo sapiens
  misc_RNA (1)...(19): siRNA sense strand
gggaauugccaacguauuu

SEQ ID NO: 940775 - RNA, 19 nt, Homo sapiens
  misc_RNA (1)...(19): siRNA sense strand
gaacacugaaugaguuaaa

SEQ ID NO: 940776 - RNA, 19 nt, Homo sapiens
  misc_RNA (1)...(19): siRNA sense strand
gcacuucacuucucuucca

SEQ ID NO: 940777 - RNA, 19 nt, Homo sapiens
  misc_RNA (1)...(19): siRNA sense strand
guaccuggcuugcaguuuc

SEQ ID NO: 940778 - RNA, 19 nt, Homo sapiens
  misc_RNA (1)...(19): siRNA sense strand
ggacuggaacagagacaua

SEQ ID NO: 940779 - RNA, 19 nt, Homo sapiens
  misc_RNA (1)...(19): siRNA sense strand
ucaguuaacagagguauua

SEQ ID NO: 940780 - RNA, 19 nt, Homo sapiens
  misc_RNA (1)...(19): siRNA sense strand
agaaacaggucagauagaa

SEQ ID NO: 940781 - RNA, 19 nt, Homo sapiens
  misc_RNA (1)...(19): siRNA sense strand
cagaagcucuugcuaugga

SEQ ID NO: 940782 - RNA, 19 nt, Homo sapiens
  misc_RNA (1)...(19): siRNA sense strand
gaaugagccauaucaggua

SEQ ID NO: 940783 - RNA, 19 nt, Homo sapiens
  misc_RNA (1)...(19): siRNA sense strand
uaugaugucugugaacuuu

SEQ ID NO: 940784 - RNA, 19 nt, Homo sapiens
  misc_RNA (1)...(19): siRNA sense strand
caggagagaguuaaucuuu

SEQ ID NO: 940785 - RNA, 19 nt, Homo sapiens
  misc_RNA (1)...(19): siRNA sense strand
ccucguggguacuguauaa

SEQ ID NO: 940786 - RNA, 19 nt, Homo sapiens
  misc_RNA (1)...(19): siRNA sense strand
uguauaacauggcuucauu

SEQ ID NO: 940787 - RNA, 19 nt, Homo sapiens
  misc_RNA (1)...(19): siRNA sense strand
gcaacagaauggauuacau

SEQ ID NO: 940788 - RNA, 19 nt, Homo sapiens
  misc_RNA (1)...(19): siRNA sense strand
uaacuauacuaucccagaa

SEQ ID NO: 940789 - RNA, 19 nt, Homo sapiens
  misc_RNA (1)...(19): siRNA sense strand
cugaugagauggagaauuc

SEQ ID NO: 940790 - RNA, 19 nt, Homo sapiens
  misc_RNA (1)...(19): siRNA sense strand
uaagaaaacuccugggaaa

SEQ ID NO: 940791 - RNA, 19 nt, Homo sapiens
  misc_RNA (1)...(19): siRNA sense strand
gaagaaagguccccaggau

SEQ ID NO: 940792 - RNA, 19 nt, Homo sapiens
  misc_RNA (1)...(19): siRNA sense strand
gcaaccugauuguacuaaa

SEQ ID NO: 940793 - RNA, 19 nt, Homo sapiens
  misc_RNA (1)...(19): siRNA sense strand
ggagagcaaugguucugau

SEQ ID NO: 940794 - RNA, 19 nt, Homo sapiens
  misc_RNA (1)...(19): siRNA sense strand
ccaaauguccagaguguga

SEQ ID NO: 940795 - RNA, 19 nt, Homo sapiens
  misc_RNA (1)...(19): siRNA sense strand
agacaagaagcaacaguua

SEQ ID NO: 940796 - RNA, 19 nt, Homo sapiens
  misc_RNA (1)...(19): siRNA sense strand
uaacauggcuucauuuuac

SEQ ID NO: 940797 - RNA, 19 nt, Homo sapiens
  misc_RNA (1)...(19): siRNA sense strand
gaaacaggucagauagaaa

SEQ ID NO: 940798 - RNA, 19 nt, Homo sapiens
  misc_RNA (1)...(19): siRNA sense strand
ccucaaagaauuagagaaa

SEQ ID NO: 940799 - RNA, 19 nt, Homo sapiens
  misc_RNA (1)...(19): siRNA sense strand
cgucuagacuuacaaggaa

SEQ ID NO: 940800 - RNA, 19 nt, Homo sapiens
  misc_RNA (1)...(19): siRNA sense strand
acagaaagcuacccuagag

SEQ ID NO: 940801 - RNA, 19 nt, Homo sapiens
  misc_RNA (1)...(19): siRNA sense strand
gcagggacucugaugcaua

SEQ ID NO: 940802 - RNA, 19 nt, Homo sapiens
  misc_RNA (1)...(19): siRNA sense strand
gacaagaagcaacaguuaa

SEQ ID NO: 940803 - RNA, 19 nt, Homo sapiens
  misc_RNA (1)...(19): siRNA sense strand
ggaugacagugacuucuuc

SEQ ID NO: 940804 - RNA, 19 nt, Homo sapiens
  misc_RNA (1)...(19): siRNA sense strand
ggcaaacguucuacacaga

SEQ ID NO: 940805 - RNA, 19 nt, Homo sapiens
  misc_RNA (1)...(19): siRNA sense strand
uagacaggccuugaaauua

SEQ ID NO: 940806 - RNA, 19 nt, Homo sapiens
  misc_RNA (1)...(19): siRNA sense strand
cagggacucugaugcauau

SEQ ID NO: 940807 - RNA, 19 nt, Homo sapiens
  misc_RNA (1)...(19): siRNA sense strand
cauaucagguaguagaaug

SEQ ID NO: 940808 - RNA, 19 nt, Homo sapiens
  misc_RNA (1)...(19): siRNA sense strand
caauggagccucuuugcaa

SEQ ID NO: 940809 - RNA, 19 nt, Homo sapiens
  misc_RNA (1)...(19): siRNA sense strand
ggaauacgggugcugaaga

SEQ ID NO: 940810 - RNA, 19 nt, Homo sapiens
  misc_RNA (1)...(19): siRNA sense strand
caccaaauguccagagugu

SEQ ID NO: 940811 - RNA, 19 nt, Homo sapiens
  misc_RNA (1)...(19): siRNA sense strand
gcuccuaucuggcucauac

SEQ ID NO: 940812 - RNA, 19 nt, Homo sapiens
  misc_RNA (1)...(19): siRNA sense strand
gcacacuucucugcugaug

SEQ ID NO: 940813 - RNA, 19 nt, Homo sapiens
  misc_RNA (1)...(19): siRNA sense strand
gaaggaguauagaugacau

SEQ ID NO: 940814 - RNA, 19 nt, Homo sapiens
  misc_RNA (1)...(19): siRNA sense strand
gcaauggaagaauuugaaa

SEQ ID NO: 940815 - RNA, 19 nt, Homo sapiens
  misc_RNA (1)...(19): siRNA sense strand
ggagagcaguaggaaauag

SEQ ID NO: 940816 - RNA, 19 nt, Homo sapiens
  misc_RNA (1)...(19): siRNA sense strand
ucaggaggagcaaaucuua

SEQ ID NO: 940817 - RNA, 19 nt, Homo sapiens
  misc_RNA (1)...(19): siRNA sense strand
aagagcagauuguacagaa

SEQ ID NO: 940818 - RNA, 19 nt, Homo sapiens
  misc_RNA (1)...(19): siRNA sense strand
ccaaaggagaucauaagaa

SEQ ID NO: 940819 - RNA, 19 nt, Homo sapiens
  misc_RNA (1)...(19): siRNA sense strand
gaagaaauacuggcuuugg

SEQ ID NO: 940820 - RNA, 19 nt, Homo sapiens
  misc_RNA (1)...(19): siRNA sense strand
gagcaaugguucugaugag

SEQ ID NO: 940821 - RNA, 19 nt, Homo sapiens
  misc_RNA (1)...(19): siRNA sense strand
ccacuucaauaccaagaug

SEQ ID NO: 940822 - RNA, 19 nt, Homo sapiens
  misc_RNA (1)...(19): siRNA sense strand
gauggcacauacauaacuu

SEQ ID NO: 940823 - RNA, 19 nt, Homo sapiens
  misc_RNA (1)...(19): siRNA sense strand
agagaucgcaccacacuuu

SEQ ID NO: 940824 - RNA, 19 nt, Homo sapiens
  misc_RNA (1)...(19): siRNA sense strand
cagauuggcacccgaauug

SEQ ID NO: 940825 - RNA, 19 nt, Homo sapiens
  misc_RNA (1)...(19): siRNA sense strand
ggaacagagacauaauaaa

SEQ ID NO: 940826 - RNA, 19 nt, Homo sapiens
  misc_RNA (1)...(19): siRNA sense strand
caaugguucugaugagaug

SEQ ID NO: 940827 - RNA, 19 nt, Homo sapiens
  misc_RNA (1)...(19): siRNA sense strand
caugaaggccuacagaaga

SEQ ID NO: 940828 - RNA, 19 nt, Homo sapiens
  misc_RNA (1)...(19): siRNA sense strand
caccagcuauuacacuuug

SEQ ID NO: 940829 - RNA, 19 nt, Homo sapiens
  misc_RNA (1)...(19): siRNA sense strand
caaccagcagcauaguuua

SEQ ID NO: 940830 - RNA, 19 nt, Homo sapiens
  misc_RNA (1)...(19): siRNA sense strand
ucaaccagcagcauaguuu

SEQ ID NO: 940831 - RNA, 19 nt, Homo sapiens
  misc_RNA (1)...(19): siRNA sense strand
gaggagcaaaucuuaagaa

SEQ ID NO: 940832 - RNA, 19 nt, Homo sapiens
  misc_RNA (1)...(19): siRNA sense strand
uuagacaggccuugaaauu

SEQ ID NO: 940833 - RNA, 19 nt, Homo sapiens
  misc_RNA (1)...(19): siRNA sense strand
ggcaaaagaggcacaauua

SEQ ID NO: 940834 - RNA, 19 nt, Homo sapiens
  misc_RNA (1)...(19): siRNA sense strand
gagacaagaagcaacaguu

SEQ ID NO: 940835 - RNA, 19 nt, Homo sapiens
  misc_RNA (1)...(19): siRNA sense strand
ggacgaaugccucaaacuc

SEQ ID NO: 940836 - RNA, 19 nt, Homo sapiens
  misc_RNA (1)...(19): siRNA sense strand
cagcagugaugauuauucu

SEQ ID NO: 940837 - RNA, 19 nt, Homo sapiens
  misc_RNA (1)...(19): siRNA sense strand
gcacccgaauugccaaagu

SEQ ID NO: 940838 - RNA, 19 nt, Homo sapiens
  misc_RNA (1)...(19): siRNA sense strand
ccacaacagucgcuugaac

SEQ ID NO: 940839 - RNA, 19 nt, Homo sapiens
  misc_RNA (1)...(19): siRNA sense strand
ugaagaugaugaagcaaca

SEQ ID NO: 940840 - RNA, 19 nt, Homo sapiens
  misc_RNA (1)...(19): siRNA sense strand
gcagaagugaagaugauga

SEQ ID NO: 940841 - RNA, 19 nt, Homo sapiens
  misc_RNA (1)...(19): siRNA sense strand
caacaaccuuccagacaua

SEQ ID NO: 940842 - RNA, 19 nt, Homo sapiens
  misc_RNA (1)...(19): siRNA sense strand
caacauaccauccauuuau

SEQ ID NO: 940843 - RNA, 19 nt, Homo sapiens
  misc_RNA (1)...(19): siRNA sense strand
caacuuaccuuugggagaa

SEQ ID NO: 940844 - RNA, 19 nt, Homo sapiens
  misc_RNA (1)...(19): siRNA sense strand
ggaacgaauuggugcagua

SEQ ID NO: 940845 - RNA, 19 nt, Homo sapiens
  misc_RNA (1)...(19): siRNA sense strand
gaacaucagugcccugucu

SEQ ID NO: 940846 - RNA, 19 nt, Homo sapiens
  misc_RNA (1)...(19): siRNA sense strand
ggaggaagaagaagaaauu

SEQ ID NO: 940847 - RNA, 19 nt, Homo sapiens
  misc_RNA (1)...(19): siRNA sense strand
acacuaaccucuuccaaug

SEQ ID NO: 940848 - RNA, 19 nt, Homo sapiens
  misc_RNA (1)...(19): siRNA sense strand
caggaacauuggacuaaua

SEQ ID NO: 940849 - RNA, 19 nt, Homo sapiens
  misc_RNA (1)...(19): siRNA sense strand
ccaaagcauuucacacuga

SEQ ID NO: 940850 - RNA, 19 nt, Homo sapiens
  misc_RNA (1)...(19): siRNA sense strand
gaagaagaaauuccuaaug

SEQ ID NO: 940851 - RNA, 19 nt, Homo sapiens
  misc_RNA (1)...(19): siRNA sense strand
acuaauagcuggagccauu

SEQ ID NO: 940852 - RNA, 19 nt, Homo sapiens
  misc_RNA (1)...(19): siRNA sense strand
caaguguucuucugccaaa

SEQ ID NO: 940853 - RNA, 19 nt, Homo sapiens
  misc_RNA (1)...(19): siRNA sense strand
uaccagcgcugcccucauu

SEQ ID NO: 940854 - RNA, 19 nt, Homo sapiens
  misc_RNA (1)...(19): siRNA sense strand
gggccaaucuuucucuuuc

SEQ ID NO: 940855 - RNA, 19 nt, Homo sapiens
  misc_RNA (1)...(19): siRNA sense strand
gcaccugucuucuggaucu

SEQ ID NO: 940856 - RNA, 19 nt, Homo sapiens
  misc_RNA (1)...(19): siRNA sense strand
gaagaagaagaaauuccua

SEQ ID NO: 940857 - RNA, 19 nt, Homo sapiens
  misc_RNA (1)...(19): siRNA sense strand
gacaauacccucaaacuac

SEQ ID NO: 940858 - RNA, 19 nt, Homo sapiens
  misc_RNA (1)...(19): siRNA sense strand
uaccauccauuuaugcuaa

SEQ ID NO: 940859 - RNA, 19 nt, Homo sapiens
  misc_RNA (1)...(19): siRNA sense strand
gggagaaguuagacaauac

SEQ ID NO: 940860 - RNA, 19 nt, Homo sapiens
  misc_RNA (1)...(19): siRNA sense strand
uaaagaggaggaagaagaa

SEQ ID NO: 940861 - RNA, 19 nt, Homo sapiens
  misc_RNA (1)...(19): siRNA sense strand
ucagagagcccugggagua

SEQ ID NO: 940862 - RNA, 19 nt, Homo sapiens
  misc_RNA (1)...(19): siRNA sense strand
gagcaacaauccaaaaguu

SEQ ID NO: 940863 - RNA, 19 nt, Homo sapiens
  misc_RNA (1)...(19): siRNA sense strand
ugggagaaguuagacaaua

SEQ ID NO: 940864 - RNA, 19 nt, Homo sapiens
  misc_RNA (1)...(19): siRNA sense strand
gccaacauaccauccauuu

SEQ ID NO: 940865 - RNA, 19 nt, Homo sapiens
  misc_RNA (1)...(19): siRNA sense strand
agacaauacccucaaacua

SEQ ID NO: 940866 - RNA, 19 nt, Homo sapiens
  misc_RNA (1)...(19): siRNA sense strand
ggaaccagcaccugucuuc

SEQ ID NO: 940867 - RNA, 19 nt, Homo sapiens
  misc_RNA (1)...(19): siRNA sense strand
ucaacaaccuuccagacau

SEQ ID NO: 940868 - RNA, 19 nt, Homo sapiens
  misc_RNA (1)...(19): siRNA sense strand
gaaauaagagaggaugauc

SEQ ID NO: 940869 - RNA, 19 nt, Homo sapiens
  misc_RNA (1)...(19): siRNA sense strand
guuagacaauacccucaaa

SEQ ID NO: 940870 - RNA, 19 nt, Homo sapiens
  misc_RNA (1)...(19): siRNA sense strand
ccaacauaccauccauuua

SEQ ID NO: 940871 - RNA, 19 nt, Homo sapiens
  misc_RNA (1)...(19): siRNA sense strand
cuaccaaugucucuaucuu

SEQ ID NO: 940872 - RNA, 19 nt, Homo sapiens
  misc_RNA (1)...(19): siRNA sense strand
gaacauuggacuaauagcu

SEQ ID NO: 940873 - RNA, 19 nt, Homo sapiens
  misc_RNA (1)...(19): siRNA sense strand
gcauuccucgaccaacuua

SEQ ID NO: 940874 - RNA, 19 nt, Homo sapiens
  misc_RNA (1)...(19): siRNA sense strand
gcauuucacacugagauuu

SEQ ID NO: 940875 - RNA, 19 nt, Homo sapiens
  misc_RNA (1)...(19): siRNA sense strand
ucaccggucucacaguguu

SEQ ID NO: 940876 - RNA, 19 nt, Homo sapiens
  misc_RNA (1)...(19): siRNA sense strand
agcaauggcucagucagua

SEQ ID NO: 940877 - RNA, 19 nt, Homo sapiens
  misc_RNA (1)...(19): siRNA sense strand
guaucaggguggacagaug

SEQ ID NO: 940878 - RNA, 19 nt, Homo sapiens
  misc_RNA (1)...(19): siRNA sense strand
auaaagaggaggaagaaga

SEQ ID NO: 940879 - RNA, 19 nt, Homo sapiens
  misc_RNA (1)...(19): siRNA sense strand
gauauuggcagcgauguca

SEQ ID NO: 940880 - RNA, 19 nt, Homo sapiens
  misc_RNA (1)...(19): siRNA sense strand
ggucacuccucucuccaau

SEQ ID NO: 940881 - RNA, 19 nt, Homo sapiens
  misc_RNA (1)...(19): siRNA sense strand
gcaacacuggaacgaauug

SEQ ID NO: 940882 - RNA, 19 nt, Homo sapiens
  misc_RNA (1)...(19): siRNA sense strand
acaacacacuaaccucuuc

SEQ ID NO: 940883 - RNA, 19 nt, Homo sapiens
  misc_RNA (1)...(19): siRNA sense strand
ucacuccucucuccaaugc

SEQ ID NO: 940884 - RNA, 19 nt, Homo sapiens
  misc_RNA (1)...(19): siRNA sense strand
ccaggaacauuggacuaau

SEQ ID NO: 940885 - RNA, 19 nt, Homo sapiens
  misc_RNA (1)...(19): siRNA sense strand
aaauaaagaggaggaagaa

SEQ ID NO: 940886 - RNA, 19 nt, Homo sapiens
  misc_RNA (1)...(19): siRNA sense strand
gaucuuccacccaaguguu

SEQ ID NO: 940887 - RNA, 19 nt, Homo sapiens
  misc_RNA (1)...(19): siRNA sense strand
guccugcccugcacuuuca

SEQ ID NO: 940888 - RNA, 19 nt, Homo sapiens
  misc_RNA (1)...(19): siRNA sense strand
gaaggcauuccucgaccaa

SEQ ID NO: 940889 - RNA, 19 nt, Homo sapiens
  misc_RNA (1)...(19): siRNA sense strand
acgcaacacuggaacgaau

SEQ ID NO: 940890 - RNA, 19 nt, Homo sapiens
  misc_RNA (1)...(19): siRNA sense strand
gguagugacagccaacaga

SEQ ID NO: 940891 - RNA, 19 nt, Homo sapiens
  misc_RNA (1)...(19): siRNA sense strand
gugcguggcuucuaaugcu

SEQ ID NO: 940892 - RNA, 19 nt, Homo sapiens
  misc_RNA (1)...(19): siRNA sense strand
cauaagacucugguaguga

SEQ ID NO: 940893 - RNA, 19 nt, Homo sapiens
  misc_RNA (1)...(19): siRNA sense strand
acauaagacucugguagug

SEQ ID NO: 940894 - RNA, 19 nt, Homo sapiens
  misc_RNA (1)...(19): siRNA sense strand
accaaugucucuaucuuca

SEQ ID NO: 940895 - RNA, 19 nt, Homo sapiens
  misc_RNA (1)...(19): siRNA sense strand
gcgcugcccucauuaaccu

SEQ ID NO: 940896 - RNA, 19 nt, Homo sapiens
  misc_RNA (1)...(19): siRNA sense strand
cagcaccugucuucuggau

SEQ ID NO: 940897 - RNA, 19 nt, Homo sapiens
  misc_RNA (1)...(19): siRNA sense strand
aaacuaccuccaacagcua

SEQ ID NO: 940898 - RNA, 19 nt, Homo sapiens
  misc_RNA (1)...(19): siRNA sense strand
cacgguaggguaggauuua

SEQ ID NO: 940899 - RNA, 19 nt, Homo sapiens
  misc_RNA (1)...(19): siRNA sense strand
gaacgaauuggugcaguac

SEQ ID NO: 940900 - RNA, 19 nt, Homo sapiens
  misc_RNA (1)...(19): siRNA sense strand
ccacccaaguguucuucug

SEQ ID NO: 940901 - RNA, 19 nt, Homo sapiens
  misc_RNA (1)...(19): siRNA sense strand
gcaccaugccagcuaccaa

SEQ ID NO: 940902 - RNA, 19 nt, Homo sapiens
  misc_RNA (1)...(19): siRNA sense strand
uaucagacacuggcaccua

SEQ ID NO: 940903 - RNA, 19 nt, Homo sapiens
  misc_RNA (1)...(19): siRNA sense strand
ccacgguaggguaggauuu

SEQ ID NO: 940904 - RNA, 19 nt, Homo sapiens
  misc_RNA (1)...(19): siRNA sense strand
gcaauggcucagucaguag

SEQ ID NO: 940905 - RNA, 19 nt, Homo sapiens
  misc_RNA (1)...(19): siRNA sense strand
gaacugcuuuucuagaacu

SEQ ID NO: 940906 - RNA, 19 nt, Homo sapiens
  misc_RNA (1)...(19): siRNA sense strand
guucauagaaacacagagu

SEQ ID NO: 940907 - RNA, 19 nt, Homo sapiens
  misc_RNA (1)...(19): siRNA sense strand
ggucucacaguguuaguuc

SEQ ID NO: 940908 - RNA, 19 nt, Homo sapiens
  misc_RNA (1)...(19): siRNA sense strand
guucuucugccaaagcauu

SEQ ID NO: 940909 - RNA, 19 nt, Homo sapiens
  misc_RNA (1)...(19): siRNA sense strand
agaggaggaagaagaagaa

SEQ ID NO: 940910 - RNA, 19 nt, Homo sapiens
  misc_RNA (1)...(19): siRNA sense strand
ccagcgcugcccucauuaa

SEQ ID NO: 940911 - RNA, 19 nt, Homo sapiens
  misc_RNA (1)...(19): siRNA sense strand
accagugcguggcuucuaa

SEQ ID NO: 940912 - RNA, 19 nt, Homo sapiens
  misc_RNA (1)...(19): siRNA sense strand
ucauagaaacacagaguca

SEQ ID NO: 940913 - RNA, 19 nt, Homo sapiens
  misc_RNA (1)...(19): siRNA sense strand
ggucccgggucaacauaag

SEQ ID NO: 940914 - RNA, 19 nt, Homo sapiens
  misc_RNA (1)...(19): siRNA sense strand
cagcuaccaaugucucuau

SEQ ID NO: 940915 - RNA, 19 nt, Homo sapiens
  misc_RNA (1)...(19): siRNA sense strand
acucauuccuacaccauca

SEQ ID NO: 940916 - RNA, 19 nt, Homo sapiens
  misc_RNA (1)...(19): siRNA sense strand
ggacaacaacacacuaacc

SEQ ID NO: 940917 - RNA, 19 nt, Homo sapiens
  misc_RNA (1)...(19): siRNA sense strand
gucaacaaccuuccagaca

SEQ ID NO: 940918 - RNA, 19 nt, Homo sapiens
  misc_RNA (1)...(19): siRNA sense strand
gcccaggaacauuggacua

SEQ ID NO: 940919 - RNA, 19 nt, Homo sapiens
  misc_RNA (1)...(19): siRNA sense strand
gccaaucuuucucuuucca

SEQ ID NO: 940920 - RNA, 19 nt, Homo sapiens
  misc_RNA (1)...(19): siRNA sense strand
gaugaucuuccacccaagu

SEQ ID NO: 940921 - RNA, 19 nt, Homo sapiens
  misc_RNA (1)...(19): siRNA sense strand
ugaaauaagagaggaugau

SEQ ID NO: 940922 - RNA, 19 nt, Homo sapiens
  misc_RNA (1)...(19): siRNA sense strand
gaggaagaagaagaaauuc

SEQ ID NO: 940923 - RNA, 19 nt, Homo sapiens
  misc_RNA (1)...(19): siRNA sense strand
cagagucagucagccacuu

SEQ ID NO: 940924 - RNA, 19 nt, Homo sapiens
  misc_RNA (1)...(19): siRNA sense strand
uagcucagaggaaggcauu

SEQ ID NO: 940925 - RNA, 19 nt, Homo sapiens
  misc_RNA (1)...(19): siRNA sense strand
gcaacaauccaaaaguuca

SEQ ID NO: 940926 - RNA, 19 nt, Homo sapiens
  misc_RNA (1)...(19): siRNA sense strand
cacacuaaccucuuccaau

SEQ ID NO: 940927 - RNA, 19 nt, Homo sapiens
  misc_RNA (1)...(19): siRNA sense strand
ucggacaacaacacacuaa

SEQ ID NO: 940928 - RNA, 19 nt, Homo sapiens
  misc_RNA (1)...(19): siRNA sense strand
cagagagcccugggaguau

SEQ ID NO: 940929 - RNA, 19 nt, Homo sapiens
  misc_RNA (1)...(19): siRNA sense strand
cccaggaacauuggacuaa

SEQ ID NO: 940930 - RNA, 19 nt, Homo sapiens
  misc_RNA (1)...(19): siRNA sense strand
caugccagcuaccaauguc

SEQ ID NO: 940931 - RNA, 19 nt, Homo sapiens
  misc_RNA (1)...(19): siRNA sense strand
agagagcccugggaguauc

SEQ ID NO: 940932 - RNA, 19 nt, Homo sapiens
  misc_RNA (1)...(19): siRNA sense strand
gcucugguggaacugcuuu

SEQ ID NO: 940933 - RNA, 19 nt, Homo sapiens
  misc_RNA (1)...(19): siRNA sense strand
gaggaggaagaagaagaaa

SEQ ID NO: 940934 - RNA, 19 nt, Homo sapiens
  misc_RNA (1)...(19): siRNA sense strand
ggugcaguuauuaucauuu

SEQ ID NO: 940935 - RNA, 19 nt, Homo sapiens
  misc_RNA (1)...(19): siRNA sense strand
uggaacugcuuuucuagaa

SEQ ID NO: 940936 - RNA, 19 nt, Homo sapiens
  misc_RNA (1)...(19): siRNA sense strand
guacaacccugcaaauuug

SEQ ID NO: 940937 - RNA, 19 nt, Homo sapiens
  misc_RNA (1)...(19): siRNA sense strand
caaagaggcugacuacaga

SEQ ID NO: 940938 - RNA, 19 nt, Homo sapiens
  misc_RNA (1)...(19): siRNA sense strand
ggaaagaacugcugaacag

SEQ ID NO: 940939 - RNA, 19 nt, Homo sapiens
  misc_RNA (1)...(19): siRNA sense strand
ccacacugcucacagaaua

SEQ ID NO: 940940 - RNA, 19 nt, Homo sapiens
  misc_RNA (1)...(19): siRNA sense strand
gaagauccuuaccaaguuu

SEQ ID NO: 940941 - RNA, 19 nt, Homo sapiens
  misc_RNA (1)...(19): siRNA sense strand
ugaccagacugaccacuua

SEQ ID NO: 940942 - RNA, 19 nt, Homo sapiens
  misc_RNA (1)...(19): siRNA sense strand
gcagauuacugaaaacuua

SEQ ID NO: 940943 - RNA, 19 nt, Homo sapiens
  misc_RNA (1)...(19): siRNA sense strand
gcagauuacacacagauua

SEQ ID NO: 940944 - RNA, 19 nt, Homo sapiens
  misc_RNA (1)...(19): siRNA sense strand
cagacaagcuaaucauaaa

SEQ ID NO: 940945 - RNA, 19 nt, Homo sapiens
  misc_RNA (1)...(19): siRNA sense strand
ggaaaggguuaucauauac

SEQ ID NO: 940946 - RNA, 19 nt, Homo sapiens
  misc_RNA (1)...(19): siRNA sense strand
caaacuaucugagagaaga

SEQ ID NO: 940947 - RNA, 19 nt, Homo sapiens
  misc_RNA (1)...(19): siRNA sense strand
aggaaaggguuaucauaua

SEQ ID NO: 940948 - RNA, 19 nt, Homo sapiens
  misc_RNA (1)...(19): siRNA sense strand
caaauauuccagcagauua

SEQ ID NO: 940949 - RNA, 19 nt, Homo sapiens
  misc_RNA (1)...(19): siRNA sense strand
cagaauagcugaccagacu

SEQ ID NO: 940950 - RNA, 19 nt, Homo sapiens
  misc_RNA (1)...(19): siRNA sense strand
ccaaagaccuuccguacag

SEQ ID NO: 940951 - RNA, 19 nt, Homo sapiens
  misc_RNA (1)...(19): siRNA sense strand
gcugaacccuugaaacaug

SEQ ID NO: 940952 - RNA, 19 nt, Homo sapiens
  misc_RNA (1)...(19): siRNA sense strand
ugaccaagcucauaguaau

SEQ ID NO: 940953 - RNA, 19 nt, Homo sapiens
  misc_RNA (1)...(19): siRNA sense strand
ugagaagacugacuacaga

SEQ ID NO: 940954 - RNA, 19 nt, Homo sapiens
  misc_RNA (1)...(19): siRNA sense strand
ggucauccgucccaucuga

SEQ ID NO: 940955 - RNA, 19 nt, Homo sapiens
  misc_RNA (1)...(19): siRNA sense strand
gaugccagauucaccagua

SEQ ID NO: 940956 - RNA, 19 nt, Homo sapiens
  misc_RNA (1)...(19): siRNA sense strand
cuaauaauguacagcauga

SEQ ID NO: 940957 - RNA, 19 nt, Homo sapiens
  misc_RNA (1)...(19): siRNA sense strand
caaggaaaggguuaucaua

SEQ ID NO: 940958 - RNA, 19 nt, Homo sapiens
  misc_RNA (1)...(19): siRNA sense strand
gagcagaugaucagguuaa

SEQ ID NO: 940959 - RNA, 19 nt, Homo sapiens
  misc_RNA (1)...(19): siRNA sense strand
ugaagauccuuaccaaguu

SEQ ID NO: 940960 - RNA, 19 nt, Homo sapiens
  misc_RNA (1)...(19): siRNA sense strand
ccacugaacuagcugaaca

SEQ ID NO: 940961 - RNA, 19 nt, Homo sapiens
  misc_RNA (1)...(19): siRNA sense strand
gcaaauauuccagcagauu

SEQ ID NO: 940962 - RNA, 19 nt, Homo sapiens
  misc_RNA (1)...(19): siRNA sense strand
ggacaaagaggcugacuac

SEQ ID NO: 940963 - RNA, 19 nt, Homo sapiens
  misc_RNA (1)...(19): siRNA sense strand
ggaagaagacgaccagaag

SEQ ID NO: 940964 - RNA, 19 nt, Homo sapiens
  misc_RNA (1)...(19): siRNA sense strand
gaagacugacuacagauug

SEQ ID NO: 940965 - RNA, 19 nt, Homo sapiens
  misc_RNA (1)...(19): siRNA sense strand
gaaauggaaacucagaaug

SEQ ID NO: 940966 - RNA, 19 nt, Homo sapiens
  misc_RNA (1)...(19): siRNA sense strand
aaacaucuguaaagacuca

SEQ ID NO: 940967 - RNA, 19 nt, Homo sapiens
  misc_RNA (1)...(19): siRNA sense strand
ugaccaaaguccuucugua

SEQ ID NO: 940968 - RNA, 19 nt, Homo sapiens
  misc_RNA (1)...(19): siRNA sense strand
gaucguccguaccaucuga

SEQ ID NO: 940969 - RNA, 19 nt, Homo sapiens
  misc_RNA (1)...(19): siRNA sense strand
gcagauggaccgcagaaug

SEQ ID NO: 940970 - RNA, 19 nt, Homo sapiens
  misc_RNA (1)...(19): siRNA sense strand
cagaauauuuccccaguua

SEQ ID NO: 940971 - RNA, 19 nt, Homo sapiens
  misc_RNA (1)...(19): siRNA sense strand
ugaccagacugcccuaaga

SEQ ID NO: 940972 - RNA, 19 nt, Homo sapiens
  misc_RNA (1)...(19): siRNA sense strand
ugaacagacugaacgaaga

SEQ ID NO: 940973 - RNA, 19 nt, Homo sapiens
  misc_RNA (1)...(19): siRNA sense strand
gaagaagacgaccagaaga

SEQ ID NO: 940974 - RNA, 19 nt, Homo sapiens
  misc_RNA (1)...(19): siRNA sense strand
gaacaaaaugggcauagua

SEQ ID NO: 940975 - RNA, 19 nt, Homo sapiens
  misc_RNA (1)...(19): siRNA sense strand
ccaguaacuuccaagcaaa

SEQ ID NO: 940976 - RNA, 19 nt, Homo sapiens
  misc_RNA (1)...(19): siRNA sense strand
ccacuuagcagacagacaa

SEQ ID NO: 940977 - RNA, 19 nt, Homo sapiens
  misc_RNA (1)...(19): siRNA sense strand
ccagcugucuuacuaugaa

SEQ ID NO: 940978 - RNA, 19 nt, Homo sapiens
  misc_RNA (1)...(19): siRNA sense strand
gaccagcugucuuacuaug

SEQ ID NO: 940979 - RNA, 19 nt, Homo sapiens
  misc_RNA (1)...(19): siRNA sense strand
gcugauguuucugaccuua

SEQ ID NO: 940980 - RNA, 19 nt, Homo sapiens
  misc_RNA (1)...(19): siRNA sense strand
gcaaucaaacuuauagaag

SEQ ID NO: 940981 - RNA, 19 nt, Homo sapiens
  misc_RNA (1)...(19): siRNA sense strand
uagagcagaugaucagguu

SEQ ID NO: 940982 - RNA, 19 nt, Homo sapiens
  misc_RNA (1)...(19): siRNA sense strand
gaacagacugaacgaagau

SEQ ID NO: 940983 - RNA, 19 nt, Homo sapiens
  misc_RNA (1)...(19): siRNA sense strand
gaacugcugaacagacuga

SEQ ID NO: 940984 - RNA, 19 nt, Homo sapiens
  misc_RNA (1)...(19): siRNA sense strand
ggaagagccuccgcaagag

SEQ ID NO: 940985 - RNA, 19 nt, Homo sapiens
  misc_RNA (1)...(19): siRNA sense strand
ugacaaugcucacuacacu

SEQ ID NO: 940986 - RNA, 19 nt, Homo sapiens
  misc_RNA (1)...(19): siRNA sense strand
aaaguuaggagaagaaguu

SEQ ID NO: 940987 - RNA, 19 nt, Homo sapiens
  misc_RNA (1)...(19): siRNA sense strand
acacacagauuauccaaac

SEQ ID NO: 940988 - RNA, 19 nt, Homo sapiens
  misc_RNA (1)...(19): siRNA sense strand
gaccuuccguacagauuga

SEQ ID NO: 940989 - RNA, 19 nt, Homo sapiens
  misc_RNA (1)...(19): siRNA sense strand
uguaaagacucaccaccaa

SEQ ID NO: 940990 - RNA, 19 nt, Homo sapiens
  misc_RNA (1)...(19): siRNA sense strand
gacaagcuaaucauaaaga

SEQ ID NO: 940991 - RNA, 19 nt, Homo sapiens
  misc_RNA (1)...(19): siRNA sense strand
acagacaagcuaaucauaa

SEQ ID NO: 940992 - RNA, 19 nt, Homo sapiens
  misc_RNA (1)...(19): siRNA sense strand
gacagacaagcuaaucaua

SEQ ID NO: 940993 - RNA, 19 nt, Homo sapiens
  misc_RNA (1)...(19): siRNA sense strand
ccaaaguccuucuguacag

SEQ ID NO: 940994 - RNA, 19 nt, Homo sapiens
  misc_RNA (1)...(19): siRNA sense strand
cagauuguauggccucguu

SEQ ID NO: 940995 - RNA, 19 nt, Homo sapiens
  misc_RNA (1)...(19): siRNA sense strand
caacggaguagcugaacaa

SEQ ID NO: 940996 - RNA, 19 nt, Homo sapiens
  misc_RNA (1)...(19): siRNA sense strand
cguaccaucugaccaaaga

SEQ ID NO: 940997 - RNA, 19 nt, Homo sapiens
  misc_RNA (1)...(19): siRNA sense strand
cagagagguuccagacaga

SEQ ID NO: 940998 - RNA, 19 nt, Homo sapiens
  misc_RNA (1)...(19): siRNA sense strand
aaguagaccucaauuccaa

SEQ ID NO: 940999 - RNA, 19 nt, Homo sapiens
  misc_RNA (1)...(19): siRNA sense strand
gaguacaacccugcaaauu

SEQ ID NO: 941000 - RNA, 19 nt, Homo sapiens
  misc_RNA (1)...(19): siRNA sense strand
gaaagaacugcugaacaga

SEQ ID NO: 941001 - RNA, 19 nt, Homo sapiens
  misc_RNA (1)...(19): siRNA sense strand
caaaacaucuguaaagacu

SEQ ID NO: 941002 - RNA, 19 nt, Homo sapiens
  misc_RNA (1)...(19): siRNA sense strand
cggaguagcugaacaaaau

SEQ ID NO: 941003 - RNA, 19 nt, Homo sapiens
  misc_RNA (1)...(19): siRNA sense strand
acacagauuauccaaacua

SEQ ID NO: 941004 - RNA, 19 nt, Homo sapiens
  misc_RNA (1)...(19): siRNA sense strand
caaagaccuuccguacaga

SEQ ID NO: 941005 - RNA, 19 nt, Homo sapiens
  misc_RNA (1)...(19): siRNA sense strand
uuaugaagauccuuaccaa

SEQ ID NO: 941006 - RNA, 19 nt, Homo sapiens
  misc_RNA (1)...(19): siRNA sense strand
aguacaacccugcaaauuu

SEQ ID NO: 941007 - RNA, 19 nt, Homo sapiens
  misc_RNA (1)...(19): siRNA sense strand
ugaaacacguggccagucu

SEQ ID NO: 941008 - RNA, 19 nt, Homo sapiens
  misc_RNA (1)...(19): siRNA sense strand
cagauugaccgcagaaugu

SEQ ID NO: 941009 - RNA, 19 nt, Homo sapiens
  misc_RNA (1)...(19): siRNA sense strand
guaaccaaaucugaugaau

SEQ ID NO: 941010 - RNA, 19 nt, Homo sapiens
  misc_RNA (1)...(19): siRNA sense strand
gcuauugaccaagcucaua

SEQ ID NO: 941011 - RNA, 19 nt, Homo sapiens
  misc_RNA (1)...(19): siRNA sense strand
gaccaaaguccuucuguac

SEQ ID NO: 941012 - RNA, 19 nt, Homo sapiens
  misc_RNA (1)...(19): siRNA sense strand
gaaauugaccaaggaaagg

SEQ ID NO: 941013 - RNA, 19 nt, Homo sapiens
  misc_RNA (1)...(19): siRNA sense strand
caacagcaaagaggacaaa

SEQ ID NO: 941014 - RNA, 19 nt, Homo sapiens
  misc_RNA (1)...(19): siRNA sense strand
caacccugcugauguuucu

SEQ ID NO: 941015 - RNA, 19 nt, Homo sapiens
  misc_RNA (1)...(19): siRNA sense strand
acaccacauucugcaaaua

SEQ ID NO: 941016 - RNA, 19 nt, Homo sapiens
  misc_RNA (1)...(19): siRNA sense strand
aaacaccacauucugcaaa

SEQ ID NO: 941017 - RNA, 19 nt, Homo sapiens
  misc_RNA (1)...(19): siRNA sense strand
gaacuauaccagcagucaa

SEQ ID NO: 941018 - RNA, 19 nt, Homo sapiens
  misc_RNA (1)...(19): siRNA sense strand
ccaguuaggcaacagcaaa

SEQ ID NO: 941019 - RNA, 19 nt, Homo sapiens
  misc_RNA (1)...(19): siRNA sense strand
cagauggaccgcagaaugu

SEQ ID NO: 941020 - RNA, 19 nt, Homo sapiens
  misc_RNA (1)...(19): siRNA sense strand
uuaccaaguuucacuccaa

SEQ ID NO: 941021 - RNA, 19 nt, Homo sapiens
  misc_RNA (1)...(19): siRNA sense strand
cagauuacacacagauuau

SEQ ID NO: 941022 - RNA, 19 nt, Homo sapiens
  misc_RNA (1)...(19): siRNA sense strand
gagcagauggaccgcagaa

SEQ ID NO: 941023 - RNA, 19 nt, Homo sapiens
  misc_RNA (1)...(19): siRNA sense strand
aaggaaaggguuaucauau

SEQ ID NO: 941024 - RNA, 19 nt, Homo sapiens
  misc_RNA (1)...(19): siRNA sense strand
acaaugcucacuacacuga

SEQ ID NO: 941025 - RNA, 19 nt, Homo sapiens
  misc_RNA (1)...(19): siRNA sense strand
acaccaggcuauugaccaa

SEQ ID NO: 941026 - RNA, 19 nt, Homo sapiens
  misc_RNA (1)...(19): siRNA sense strand
cacagauuauccaaacuau

SEQ ID NO: 941027 - RNA, 19 nt, Homo sapiens
  misc_RNA (1)...(19): siRNA sense strand
cauauacgcaaucaaacuu

SEQ ID NO: 941028 - RNA, 19 nt, Homo sapiens
  misc_RNA (1)...(19): siRNA sense strand
ugauguuucugaccuuaga

SEQ ID NO: 941029 - RNA, 19 nt, Homo sapiens
  misc_RNA (1)...(19): siRNA sense strand
gaagaaccaggccgaaagg

SEQ ID NO: 941030 - RNA, 19 nt, Homo sapiens
  misc_RNA (1)...(19): siRNA sense strand
cagcaaagaggacaaagag

SEQ ID NO: 941031 - RNA, 19 nt, Homo sapiens
  misc_RNA (1)...(19): siRNA sense strand
gcagacagacaagcuaauc

SEQ ID NO: 941032 - RNA, 19 nt, Homo sapiens
  misc_RNA (1)...(19): siRNA sense strand
gagcagauuacacacagau

SEQ ID NO: 941033 - RNA, 19 nt, Homo sapiens
  misc_RNA (1)...(19): siRNA sense strand
caaggcaucuagccaagcu

SEQ ID NO: 941034 - RNA, 19 nt, Homo sapiens
  misc_RNA (1)...(19): siRNA sense strand
ccaagccacugaacuagcu

SEQ ID NO: 941035 - RNA, 19 nt, Homo sapiens
  misc_RNA (1)...(19): siRNA sense strand
ucccuucuauaguuuauga

SEQ ID NO: 941036 - RNA, 19 nt, Homo sapiens
  misc_RNA (1)...(19): siRNA sense strand
ggacguucccuguugcaua

SEQ ID NO: 941037 - RNA, 19 nt, Homo sapiens
  misc_RNA (1)...(19): siRNA sense strand
gacguucccuguugcauag

SEQ ID NO: 941038 - RNA, 19 nt, Homo sapiens
  misc_RNA (1)...(19): siRNA sense strand
gucaucuucuucuggguua

SEQ ID NO: 941039 - RNA, 19 nt, Homo sapiens
  misc_RNA (1)...(19): siRNA sense strand
ccuguugcauaggcauuua

SEQ ID NO: 941040 - RNA, 19 nt, Homo sapiens
  misc_RNA (1)...(19): siRNA sense strand
uuacugagcagcuucuuuu

SEQ ID NO: 941041 - RNA, 19 nt, Homo sapiens
  misc_RNA (1)...(19): siRNA sense strand
gacaaggacuagaggguuu

SEQ ID NO: 941042 - RNA, 19 nt, Homo sapiens
  misc_RNA (1)...(19): siRNA sense strand
gggcucaccuguccuauag

SEQ ID NO: 941043 - RNA, 19 nt, Homo sapiens
  misc_RNA (1)...(19): siRNA sense strand
ucagaaggaccaccaggaa

SEQ ID NO: 941044 - RNA, 19 nt, Homo sapiens
  misc_RNA (1)...(19): siRNA sense strand
ggaaaagucaggaagagaa

SEQ ID NO: 941045 - RNA, 19 nt, Homo sapiens
  misc_RNA (1)...(19): siRNA sense strand
ccauggcagugucucuuug

SEQ ID NO: 941046 - RNA, 19 nt, Homo sapiens
  misc_RNA (1)...(19): siRNA sense strand
cagaaggaccaccaggaaa

SEQ ID NO: 941047 - RNA, 19 nt, Homo sapiens
  misc_RNA (1)...(19): siRNA sense strand
gggcuucgggucucccuaa

SEQ ID NO: 941048 - RNA, 19 nt, Homo sapiens
  misc_RNA (1)...(19): siRNA sense strand
gggcagcuguccucuucuc

SEQ ID NO: 941049 - RNA, 19 nt, Homo sapiens
  misc_RNA (1)...(19): siRNA sense strand
ugggagaagcgaaucguuu

SEQ ID NO: 941050 - RNA, 19 nt, Homo sapiens
  misc_RNA (1)...(19): siRNA sense strand
gccauggcagugucucuuu

SEQ ID NO: 941051 - RNA, 19 nt, Homo sapiens
  misc_RNA (1)...(19): siRNA sense strand
cgaccacauucguccaaca

SEQ ID NO: 941052 - RNA, 19 nt, Homo sapiens
  misc_RNA (1)...(19): siRNA sense strand
cagugucucuuugcucaga

SEQ ID NO: 941053 - RNA, 19 nt, Homo sapiens
  misc_RNA (1)...(19): siRNA sense strand
gaauuuuaguggcagcauu

SEQ ID NO: 941054 - RNA, 19 nt, Homo sapiens
  misc_RNA (1)...(19): siRNA sense strand
ggaagagaaccaccaucag

SEQ ID NO: 941055 - RNA, 19 nt, Homo sapiens
  misc_RNA (1)...(19): siRNA sense strand
aggaagagaaccaccauca

SEQ ID NO: 941056 - RNA, 19 nt, Homo sapiens
  misc_RNA (1)...(19): siRNA sense strand
gcugggcucaccuguccua

SEQ ID NO: 941057 - RNA, 19 nt, Homo sapiens
  misc_RNA (1)...(19): siRNA sense strand
gggagaagcgaaucguuuu

SEQ ID NO: 941058 - RNA, 19 nt, Homo sapiens
  misc_RNA (1)...(19): siRNA sense strand
agaagaggcucaaugaaua

SEQ ID NO: 941059 - RNA, 19 nt, Homo sapiens
  misc_RNA (1)...(19): siRNA sense strand
guacuuaguucaaagaaga

SEQ ID NO: 941060 - RNA, 19 nt, Homo sapiens
  misc_RNA (1)...(19): siRNA sense strand
caacauacaucacuuucug

SEQ ID NO: 941061 - RNA, 19 nt, Homo sapiens
  misc_RNA (1)...(19): siRNA sense strand
caaagaagaggcucaauga

SEQ ID NO: 941062 - RNA, 19 nt, Homo sapiens
  misc_RNA (1)...(19): siRNA sense strand
gcuaaucucuugccuccuu

SEQ ID NO: 941063 - RNA, 19 nt, Homo sapiens
  misc_RNA (1)...(19): siRNA sense strand
gaagcaacauacaucacuu

SEQ ID NO: 941064 - RNA, 19 nt, Homo sapiens
  misc_RNA (1)...(19): siRNA sense strand
gaacagaaaggagcuaauc

SEQ ID NO: 941065 - RNA, 19 nt, Homo sapiens
  misc_RNA (1)...(19): siRNA sense strand
ggcccuggcucugucauua

SEQ ID NO: 941066 - RNA, 19 nt, Homo sapiens
  misc_RNA (1)...(19): siRNA sense strand
gaagaggcucaaugaauau

SEQ ID NO: 941067 - RNA, 19 nt, Homo sapiens
  misc_RNA (1)...(19): siRNA sense strand
guaccaaccuucacguucu

SEQ ID NO: 941068 - RNA, 19 nt, Homo sapiens
  misc_RNA (1)...(19): siRNA sense strand
caaccuucacguucuaaua

SEQ ID NO: 941069 - RNA, 19 nt, Homo sapiens
  misc_RNA (1)...(19): siRNA sense strand
uugcuucucucuuuccuuu

SEQ ID NO: 941070 - RNA, 19 nt, Homo sapiens
  misc_RNA (1)...(19): siRNA sense strand
uuucuucccuuucuccuuu

SEQ ID NO: 941071 - RNA, 19 nt, Homo sapiens
  misc_RNA (1)...(19): siRNA sense strand
aagaagaggcucaaugaau

SEQ ID NO: 941072 - RNA, 19 nt, Homo sapiens
  misc_RNA (1)...(19): siRNA sense strand
ucaaagaagaggcucaaug

SEQ ID NO: 941073 - RNA, 19 nt, Homo sapiens
  misc_RNA (1)...(19): siRNA sense strand
ggaagcaacauacaucacu

SEQ ID NO: 941074 - RNA, 19 nt, Homo sapiens
  misc_RNA (1)...(19): siRNA sense strand
gccucuugcuucucucuuu

SEQ ID NO: 941075 - RNA, 19 nt, Homo sapiens
  misc_RNA (1)...(19): siRNA sense strand
gaggcucaaugaauauucu

SEQ ID NO: 941076 - RNA, 19 nt, Homo sapiens
  misc_RNA (1)...(19): siRNA sense strand
aaccuucacguucuaauaa

SEQ ID NO: 941077 - RNA, 19 nt, Homo sapiens
  misc_RNA (1)...(19): siRNA sense strand
uaccaaccuucacguucua

SEQ ID NO: 941078 - RNA, 19 nt, Homo sapiens
  misc_RNA (1)...(19): siRNA sense strand
gaguucaggaagcaacaua

SEQ ID NO: 941079 - RNA, 19 nt, Homo sapiens
  misc_RNA (1)...(19): siRNA sense strand
gugaacaaguuaaaguacu

SEQ ID NO: 941080 - RNA, 19 nt, Homo sapiens
  misc_RNA (1)...(19): siRNA sense strand
ucauuaaagugggugaguu

SEQ ID NO: 941081 - RNA, 19 nt, Homo sapiens
  misc_RNA (1)...(19): siRNA sense strand
gcuaaucucccucccuucu

SEQ ID NO: 941082 - RNA, 19 nt, Homo sapiens
  misc_RNA (1)...(19): siRNA sense strand
ccagacuagucauuauaca

SEQ ID NO: 941083 - RNA, 19 nt, Homo sapiens
  misc_RNA (1)...(19): siRNA sense strand
ugccuugucccuaacauaa

SEQ ID NO: 941084 - RNA, 19 nt, Homo sapiens
  misc_RNA (1)...(19): siRNA sense strand
aauaaucugucccgauguc

SEQ ID NO: 941085 - RNA, 19 nt, Homo sapiens
  misc_RNA (1)...(19): siRNA sense strand
aaagaagaggcucaaugaa

SEQ ID NO: 941086 - RNA, 19 nt, Homo sapiens
  misc_RNA (1)...(19): siRNA sense strand
ucucuugccuccuuucucu

SEQ ID NO: 941087 - RNA, 19 nt, Homo sapiens
  misc_RNA (1)...(19): siRNA sense strand
ucaggaagcaacauacauc

SEQ ID NO: 941088 - RNA, 19 nt, Homo sapiens
  misc_RNA (1)...(19): siRNA sense strand
cccuggcucugucauuaaa

SEQ ID NO: 941089 - RNA, 19 nt, Homo sapiens
  misc_RNA (1)...(19): siRNA sense strand
caucacuuucugagucaua

SEQ ID NO: 941090 - RNA, 19 nt, Homo sapiens
  misc_RNA (1)...(19): siRNA sense strand
gcuucucucuuuccuuucu

SEQ ID NO: 941091 - RNA, 19 nt, Homo sapiens
  misc_RNA (1)...(19): siRNA sense strand
aagcaacauacaucacuuu

SEQ ID NO: 941092 - RNA, 19 nt, Homo sapiens
  misc_RNA (1)...(19): siRNA sense strand
ccuuucuccuuuccucuuu

SEQ ID NO: 941093 - RNA, 19 nt, Homo sapiens
  misc_RNA (1)...(19): siRNA sense strand
uacaucacuuucugaguca

SEQ ID NO: 941094 - RNA, 19 nt, Homo sapiens
  misc_RNA (1)...(19): siRNA sense strand
gcaacauacaucacuuucu

SEQ ID NO: 941095 - RNA, 19 nt, Homo sapiens
  misc_RNA (1)...(19): siRNA sense strand
gcccuggcucugucauuaa

SEQ ID NO: 941096 - RNA, 19 nt, Homo sapiens
  misc_RNA (1)...(19): siRNA sense strand
ccacuccagacuagucauu

SEQ ID NO: 941097 - RNA, 19 nt, Homo sapiens
  misc_RNA (1)...(19): siRNA sense strand
cuaaucucuugccuccuuu

SEQ ID NO: 941098 - RNA, 19 nt, Homo sapiens
  misc_RNA (1)...(19): siRNA sense strand
acuccagacuagucauuau

SEQ ID NO: 941099 - RNA, 19 nt, Homo sapiens
  misc_RNA (1)...(19): siRNA sense strand
ccucuugcuucucucuuuc

SEQ ID NO: 941100 - RNA, 19 nt, Homo sapiens
  misc_RNA (1)...(19): siRNA sense strand
cauuaaagugggugaguuc

SEQ ID NO: 941101 - RNA, 19 nt, Homo sapiens
  misc_RNA (1)...(19): siRNA sense strand
cuucuccacuccagacuag

SEQ ID NO: 941102 - RNA, 19 nt, Homo sapiens
  misc_RNA (1)...(19): siRNA sense strand
ccuugucccuaacauaaag

SEQ ID NO: 941103 - RNA, 19 nt, Homo sapiens
  misc_RNA (1)...(19): siRNA sense strand
caggaagcaacauacauca

SEQ ID NO: 941104 - RNA, 19 nt, Homo sapiens
  misc_RNA (1)...(19): siRNA sense strand
cuccagacuagucauuaua

SEQ ID NO: 941105 - RNA, 19 nt, Homo sapiens
  misc_RNA (1)...(19): siRNA sense strand
acauaaagaacagaaagga

SEQ ID NO: 941106 - RNA, 19 nt, Homo sapiens
  misc_RNA (1)...(19): siRNA sense strand
gagaguggcuuucauauca

SEQ ID NO: 941107 - RNA, 19 nt, Homo sapiens
  misc_RNA (1)...(19): siRNA sense strand
gaaauugguuggagaauac

SEQ ID NO: 941108 - RNA, 19 nt, Homo sapiens
  misc_RNA (1)...(19): siRNA sense strand
caaaugggcuauucuuguu

SEQ ID NO: 941109 - RNA, 19 nt, Homo sapiens
  misc_RNA (1)...(19): siRNA sense strand
cagacuacauaaaggauua

SEQ ID NO: 941110 - RNA, 19 nt, Homo sapiens
  misc_RNA (1)...(19): siRNA sense strand
ugaaauugguuggagaaua

SEQ ID NO: 941111 - RNA, 19 nt, Homo sapiens
  misc_RNA (1)...(19): siRNA sense strand
gccaagagcuuccaaacca

SEQ ID NO: 941112 - RNA, 19 nt, Homo sapiens
  misc_RNA (1)...(19): siRNA sense strand
ucagagaaauuccaaaugg

SEQ ID NO: 941113 - RNA, 19 nt, Homo sapiens
  misc_RNA (1)...(19): siRNA sense strand
cagcacaccuccuauguag

SEQ ID NO: 941114 - RNA, 19 nt, Homo sapiens
  misc_RNA (1)...(19): siRNA sense strand
cgaggacacugaucagaga

SEQ ID NO: 941115 - RNA, 19 nt, Homo sapiens
  misc_RNA (1)...(19): siRNA sense strand
gaucagagaaauuccaaau

SEQ ID NO: 941116 - RNA, 19 nt, Homo sapiens
  misc_RNA (1)...(19): siRNA sense strand
guacgucggugaaauuggu

SEQ ID NO: 941117 - RNA, 19 nt, Homo sapiens
  misc_RNA (1)...(19): siRNA sense strand
ggacacugaucagagaaau

SEQ ID NO: 941118 - RNA, 19 nt, Homo sapiens
  misc_RNA (1)...(19): siRNA sense strand
gaagaacuaagucaagcuu

SEQ ID NO: 941119 - RNA, 19 nt, Homo sapiens
  misc_RNA (1)...(19): siRNA sense strand
aaggaaacauuaaccucua

SEQ ID NO: 941120 - RNA, 19 nt, Homo sapiens
  misc_RNA (1)...(19): siRNA sense strand
uaaguacgucggugaaauu

SEQ ID NO: 941121 - RNA, 19 nt, Homo sapiens
  misc_RNA (1)...(19): siRNA sense strand
ccaaaugggcuauucuugu

SEQ ID NO: 941122 - RNA, 19 nt, Homo sapiens
  misc_RNA (1)...(19): siRNA sense strand
ggagaguggcuuucauauc

SEQ ID NO: 941123 - RNA, 19 nt, Homo sapiens
  misc_RNA (1)...(19): siRNA sense strand
ucaauaacccacagauauc

SEQ ID NO: 941124 - RNA, 19 nt, Homo sapiens
  misc_RNA (1)...(19): siRNA sense strand
guuggagaauaccacagua

SEQ ID NO: 941125 - RNA, 19 nt, Homo sapiens
  misc_RNA (1)...(19): siRNA sense strand
agaacagcaucuggcguua

SEQ ID NO: 941126 - RNA, 19 nt, Homo sapiens
  misc_RNA (1)...(19): siRNA sense strand
aggaaacauuaaccucuaa

SEQ ID NO: 941127 - RNA, 19 nt, Homo sapiens
  misc_RNA (1)...(19): siRNA sense strand
gguccagacuacauaaagg

SEQ ID NO: 941128 - RNA, 19 nt, Homo sapiens
  misc_RNA (1)...(19): siRNA sense strand
gcaguguaagucaucauug

SEQ ID NO: 941129 - RNA, 19 nt, Homo sapiens
  misc_RNA (1)...(19): siRNA sense strand
acacugaucagagaaauuc

SEQ ID NO: 941130 - RNA, 19 nt, Homo sapiens
  misc_RNA (1)...(19): siRNA sense strand
caauaacccacagauauca

SEQ ID NO: 941131 - RNA, 19 nt, Homo sapiens
  misc_RNA (1)...(19): siRNA sense strand
cagcaucuggcguuagaaa

SEQ ID NO: 941132 - RNA, 19 nt, Homo sapiens
  misc_RNA (1)...(19): siRNA sense strand
aacagcaucuggcguuaga

SEQ ID NO: 941133 - RNA, 19 nt, Homo sapiens
  misc_RNA (1)...(19): siRNA sense strand
ucagcacaccuccuaugua

SEQ ID NO: 941134 - RNA, 19 nt, Homo sapiens
  misc_RNA (1)...(19): siRNA sense strand
gaacagcaucuggcguuag

SEQ ID NO: 941135 - RNA, 19 nt, Homo sapiens
  misc_RNA (1)...(19): siRNA sense strand
uucaauaacccacagauau

SEQ ID NO: 941136 - RNA, 19 nt, Homo sapiens
  misc_RNA (1)...(19): siRNA sense strand
ggugaaauugguuggagaa

SEQ ID NO: 941137 - RNA, 19 nt, Homo sapiens
  misc_RNA (1)...(19): siRNA sense strand
gagcuuccaaaccaccuaa

SEQ ID NO: 941138 - RNA, 19 nt, Homo sapiens
  misc_RNA (1)...(19): siRNA sense strand
caucuacuacugugggaaa

SEQ ID NO: 941139 - RNA, 19 nt, Homo sapiens
  misc_RNA (1)...(19): siRNA sense strand
caaaagccaacaucuacua

SEQ ID NO: 941140 - RNA, 19 nt, Homo sapiens
  misc_RNA (1)...(19): siRNA sense strand
gaaauuccaaaugggcuau

SEQ ID NO: 941141 - RNA, 19 nt, Homo sapiens
  misc_RNA (1)...(19): siRNA sense strand
caaguaugaagaacuaagu

SEQ ID NO: 941142 - RNA, 19 nt, Homo sapiens
  misc_RNA (1)...(19): siRNA sense strand
auaaguacgucggugaaau

SEQ ID NO: 941143 - RNA, 19 nt, Homo sapiens
  misc_RNA (1)...(19): siRNA sense strand
aagccaacaucuacuacug

SEQ ID NO: 941144 - RNA, 19 nt, Homo sapiens
  misc_RNA (1)...(19): siRNA sense strand
aaaugggcuauucuuguua

SEQ ID NO: 941145 - RNA, 19 nt, Homo sapiens
  misc_RNA (1)...(19): siRNA sense strand
aaccucauguccuggauau

SEQ ID NO: 941146 - RNA, 19 nt, Homo sapiens
  misc_RNA (1)...(19): siRNA sense strand
guaugaagaacuaagucaa

SEQ ID NO: 941147 - RNA, 19 nt, Homo sapiens
  misc_RNA (1)...(19): siRNA sense strand
gaacuaagucaagcuucuc

SEQ ID NO: 941148 - RNA, 19 nt, Homo sapiens
  misc_RNA (1)...(19): siRNA sense strand
aaacagagucgcgcuucuu

SEQ ID NO: 941149 - RNA, 19 nt, Homo sapiens
  misc_RNA (1)...(19): siRNA sense strand
cuggagaguggcuuucaua

SEQ ID NO: 941150 - RNA, 19 nt, Homo sapiens
  misc_RNA (1)...(19): siRNA sense strand
caucagcacaccuccuaug

SEQ ID NO: 941151 - RNA, 19 nt, Homo sapiens
  misc_RNA (1)...(19): siRNA sense strand
gaguggcuuucauaucaag

SEQ ID NO: 941152 - RNA, 19 nt, Homo sapiens
  misc_RNA (1)...(19): siRNA sense strand
caaaacccauggcaaccaa

SEQ ID NO: 941153 - RNA, 19 nt, Homo sapiens
  misc_RNA (1)...(19): siRNA sense strand
agaguggcuuucauaucaa

SEQ ID NO: 941154 - RNA, 19 nt, Homo sapiens
  misc_RNA (1)...(19): siRNA sense strand
uaagucaucauugccaaga

SEQ ID NO: 941155 - RNA, 19 nt, Homo sapiens
  misc_RNA (1)...(19): siRNA sense strand
ggcaguguaagucaucauu

SEQ ID NO: 941156 - RNA, 19 nt, Homo sapiens
  misc_RNA (1)...(19): siRNA sense strand
caguguaagucaucauugc

SEQ ID NO: 941157 - RNA, 19 nt, Homo sapiens
  misc_RNA (1)...(19): siRNA sense strand
ccuggcauaugagugcuuu

SEQ ID NO: 941158 - RNA, 19 nt, Homo sapiens
  misc_RNA (1)...(19): siRNA sense strand
ccagacuacauaaaggauu

SEQ ID NO: 941159 - RNA, 19 nt, Homo sapiens
  misc_RNA (1)...(19): siRNA sense strand
cauaaguacgucggugaaa

SEQ ID NO: 941160 - RNA, 19 nt, Homo sapiens
  misc_RNA (1)...(19): siRNA sense strand
uggcuuucauaucaaguau

SEQ ID NO: 941161 - RNA, 19 nt, Homo sapiens
  misc_RNA (1)...(19): siRNA sense strand
guuaggcaguguaagucau

SEQ ID NO: 941162 - RNA, 19 nt, Homo sapiens
  misc_RNA (1)...(19): siRNA sense strand
aaugggcuauucuuguuag

SEQ ID NO: 941163 - RNA, 19 nt, Homo sapiens
  misc_RNA (1)...(19): siRNA sense strand
gacacugaucagagaaauu

SEQ ID NO: 941164 - RNA, 19 nt, Homo sapiens
  misc_RNA (1)...(19): siRNA sense strand
aacagagucgcgcuucuuu

SEQ ID NO: 941165 - RNA, 19 nt, Homo sapiens
  misc_RNA (1)...(19): siRNA sense strand
uacagguccagacuacaua

SEQ ID NO: 941166 - RNA, 19 nt, Homo sapiens
  misc_RNA (1)...(19): siRNA sense strand
uuacagguccagacuacau

SEQ ID NO: 941167 - RNA, 19 nt, Homo sapiens
  misc_RNA (1)...(19): siRNA sense strand
ggaaagcaauuaaacacaa

SEQ ID NO: 941168 - RNA, 19 nt, Homo sapiens
  misc_RNA (1)...(19): siRNA sense strand
ggaauaccuugacuucauu

SEQ ID NO: 941169 - RNA, 19 nt, Homo sapiens
  misc_RNA (1)...(19): siRNA sense strand
gggaauaccuugacuucau

SEQ ID NO: 941170 - RNA, 19 nt, Homo sapiens
  misc_RNA (1)...(19): siRNA sense strand
cagagaagcuuccguggau

SEQ ID NO: 941171 - RNA, 19 nt, Homo sapiens
  misc_RNA (1)...(19): siRNA sense strand
aaagaggacucaguacauu

SEQ ID NO: 941172 - RNA, 19 nt, Homo sapiens
  misc_RNA (1)...(19): siRNA sense strand
gaaagcaauuaaacacaag

SEQ ID NO: 941173 - RNA, 19 nt, Homo sapiens
  misc_RNA (1)...(19): siRNA sense strand
gaagacugccucaggauuc

SEQ ID NO: 941174 - RNA, 19 nt, Homo sapiens
  misc_RNA (1)...(19): siRNA sense strand
gcaauuaaacacaagaagu

SEQ ID NO: 941175 - RNA, 19 nt, Homo sapiens
  misc_RNA (1)...(19): siRNA sense strand
gaacucacaccauggauac

SEQ ID NO: 941176 - RNA, 19 nt, Homo sapiens
  misc_RNA (1)...(19): siRNA sense strand
gaggagacacuguggaaga

SEQ ID NO: 941177 - RNA, 19 nt, Homo sapiens
  misc_RNA (1)...(19): siRNA sense strand
ccaccuggcugggagcuuu

SEQ ID NO: 941178 - RNA, 19 nt, Homo sapiens
  misc_RNA (1)...(19): siRNA sense strand
cgaaaugggaguuugaaga

SEQ ID NO: 941179 - RNA, 19 nt, Homo sapiens
  misc_RNA (1)...(19): siRNA sense strand
agaggaagaugcaaucaca

SEQ ID NO: 941180 - RNA, 19 nt, Homo sapiens
  misc_RNA (1)...(19): siRNA sense strand
gagaggagacacuguggaa

SEQ ID NO: 941181 - RNA, 19 nt, Homo sapiens
  misc_RNA (1)...(19): siRNA sense strand
gaaaugggaguuugaagac

SEQ ID NO: 941182 - RNA, 19 nt, Homo sapiens
  misc_RNA (1)...(19): siRNA sense strand
gaauaccuugacuucauua

SEQ ID NO: 941183 - RNA, 19 nt, Homo sapiens
  misc_RNA (1)...(19): siRNA sense strand
gagaagcuuccguggauga

SEQ ID NO: 941184 - RNA, 19 nt, Homo sapiens
  misc_RNA (1)...(19): siRNA sense strand
gggcuucaccuguggguuu

SEQ ID NO: 941185 - RNA, 19 nt, Homo sapiens
  misc_RNA (1)...(19): siRNA sense strand
uaccuugacuucauuaaag

SEQ ID NO: 941186 - RNA, 19 nt, Homo sapiens
  misc_RNA (1)...(19): siRNA sense strand
gagacacuguggaagacaa

SEQ ID NO: 941187 - RNA, 19 nt, Homo sapiens
  misc_RNA (1)...(19): siRNA sense strand
gacccuggcuaccuggauu

SEQ ID NO: 941188 - RNA, 19 nt, Homo sapiens
  misc_RNA (1)...(19): siRNA sense strand
gagucugucucguuggaaa

SEQ ID NO: 941189 - RNA, 19 nt, Homo sapiens
  misc_RNA (1)...(19): siRNA sense strand
cgaggaagaagauuucaug

SEQ ID NO: 941190 - RNA, 19 nt, Homo sapiens
  misc_RNA (1)...(19): siRNA sense strand
gcagccaggucuuccuaca

SEQ ID NO: 941191 - RNA, 19 nt, Homo sapiens
  misc_RNA (1)...(19): siRNA sense strand
guagcgaauuuacuguuag

SEQ ID NO: 941192 - RNA, 19 nt, Homo sapiens
  misc_RNA (1)...(19): siRNA sense strand
uaaccauucugaugaacuc

SEQ ID NO: 941193 - RNA, 19 nt, Homo sapiens
  misc_RNA (1)...(19): siRNA sense strand
gaggaagaagauuucauga

SEQ ID NO: 941194 - RNA, 19 nt, Homo sapiens
  misc_RNA (1)...(19): siRNA sense strand
cuacaauugccgcuucuuu

SEQ ID NO: 941195 - RNA, 19 nt, Homo sapiens
  misc_RNA (1)...(19): siRNA sense strand
gaugaacucacaccaugga

SEQ ID NO: 941196 - RNA, 19 nt, Homo sapiens
  misc_RNA (1)...(19): siRNA sense strand
agaggacucaguacauuaa

SEQ ID NO: 941197 - RNA, 19 nt, Homo sapiens
  misc_RNA (1)...(19): siRNA sense strand
ugaacucacaccauggaua

SEQ ID NO: 941198 - RNA, 19 nt, Homo sapiens
  misc_RNA (1)...(19): siRNA sense strand
ggacucaguacauuaagag

SEQ ID NO: 941199 - RNA, 19 nt, Homo sapiens
  misc_RNA (1)...(19): siRNA sense strand
gaaaagaggacucaguaca

SEQ ID NO: 941200 - RNA, 19 nt, Homo sapiens
  misc_RNA (1)...(19): siRNA sense strand
caaaagagucugucucguu

SEQ ID NO: 941201 - RNA, 19 nt, Homo sapiens
  misc_RNA (1)...(19): siRNA sense strand
gaugcaaucacacccaaug

SEQ ID NO: 941202 - RNA, 19 nt, Homo sapiens
  misc_RNA (1)...(19): siRNA sense strand
aagaggacucaguacauua

SEQ ID NO: 941203 - RNA, 19 nt, Homo sapiens
  misc_RNA (1)...(19): siRNA sense strand
ucccugauguugauugguu

SEQ ID NO: 941204 - RNA, 19 nt, Homo sapiens
  misc_RNA (1)...(19): siRNA sense strand
cgaagacugccucaggauu

SEQ ID NO: 941205 - RNA, 19 nt, Homo sapiens
  misc_RNA (1)...(19): siRNA sense strand
ccaggucuuccuacaauug

SEQ ID NO: 941206 - RNA, 19 nt, Homo sapiens
  misc_RNA (1)...(19): siRNA sense strand
ggaguuugaagaccuggaa

SEQ ID NO: 941207 - RNA, 19 nt, Homo sapiens
  misc_RNA (1)...(19): siRNA sense strand
acuguuagguggaaagcaa

SEQ ID NO: 941208 - RNA, 19 nt, Homo sapiens
  misc_RNA (1)...(19): siRNA sense strand
gguuucacguggacgaaga

SEQ ID NO: 941209 - RNA, 19 nt, Homo sapiens
  misc_RNA (1)...(19): siRNA sense strand
gccagggucggguguguaa

SEQ ID NO: 941210 - RNA, 19 nt, Homo sapiens
  misc_RNA (1)...(19): siRNA sense strand
ccugauggcugcgcucugu

SEQ ID NO: 941211 - RNA, 19 nt, Homo sapiens
  misc_RNA (1)...(19): siRNA sense strand
ccaagugguuuugcaagua

SEQ ID NO: 941212 - RNA, 19 nt, Homo sapiens
  misc_RNA (1)...(19): siRNA sense strand
cgguaaccauucugaugaa

SEQ ID NO: 941213 - RNA, 19 nt, Homo sapiens
  misc_RNA (1)...(19): siRNA sense strand
agccaggucuuccuacaau

SEQ ID NO: 941214 - RNA, 19 nt, Homo sapiens
  misc_RNA (1)...(19): siRNA sense strand
gguggaaagcaauuaaaca

SEQ ID NO: 941215 - RNA, 19 nt, Homo sapiens
  misc_RNA (1)...(19): siRNA sense strand
cugcuucuuugacuucauu

SEQ ID NO: 941216 - RNA, 19 nt, Homo sapiens
  misc_RNA (1)...(19): siRNA sense strand
uacaauugccgcuucuuug

SEQ ID NO: 941217 - RNA, 19 nt, Homo sapiens
  misc_RNA (1)...(19): siRNA sense strand
gccaggucuuccuacaauu

SEQ ID NO: 941218 - RNA, 19 nt, Homo sapiens
  misc_RNA (1)...(19): siRNA sense strand
aaagcaaccggaagcgaaa

SEQ ID NO: 941219 - RNA, 19 nt, Homo sapiens
  misc_RNA (1)...(19): siRNA sense strand
ucgguaaccauucugauga

SEQ ID NO: 941220 - RNA, 19 nt, Homo sapiens
  misc_RNA (1)...(19): siRNA sense strand
aagagucugucucguugga

SEQ ID NO: 941221 - RNA, 19 nt, Homo sapiens
  misc_RNA (1)...(19): siRNA sense strand
gaagcuuccguggaugaaa

SEQ ID NO: 941222 - RNA, 19 nt, Homo sapiens
  misc_RNA (1)...(19): siRNA sense strand
gaaugggagaguucacauc

SEQ ID NO: 941223 - RNA, 19 nt, Homo sapiens
  misc_RNA (1)...(19): siRNA sense strand
ggaggcagaguaagaagac

SEQ ID NO: 941224 - RNA, 19 nt, Homo sapiens
  misc_RNA (1)...(19): siRNA sense strand
caaccggaagcgaaacaga

SEQ ID NO: 941225 - RNA, 19 nt, Homo sapiens
  misc_RNA (1)...(19): siRNA sense strand
auggauaccugucauugca

SEQ ID NO: 941226 - RNA, 19 nt, Homo sapiens
  misc_RNA (1)...(19): siRNA sense strand
gcugguucuucaugcauca

SEQ ID NO: 941227 - RNA, 19 nt, Homo sapiens
  misc_RNA (1)...(19): siRNA sense strand
uuagguggaaagcaauuaa

SEQ ID NO: 941228 - RNA, 19 nt, Homo sapiens
  misc_RNA (1)...(19): siRNA sense strand
guuagguggaaagcaauua

SEQ ID NO: 941229 - RNA, 19 nt, Homo sapiens
  misc_RNA (1)...(19): siRNA sense strand
aggcugagcgugugaggaa

SEQ ID NO: 941230 - RNA, 19 nt, Homo sapiens
  misc_RNA (1)...(19): siRNA sense strand
ccauggauaccugucauug

SEQ ID NO: 941231 - RNA, 19 nt, Homo sapiens
  misc_RNA (1)...(19): siRNA sense strand
ucaguuagaggaagaugca

SEQ ID NO: 941232 - RNA, 19 nt, Homo sapiens
  misc_RNA (1)...(19): siRNA sense strand
ccaaugauaagacccuuuu

SEQ ID NO: 941233 - RNA, 19 nt, Homo sapiens
  misc_RNA (1)...(19): siRNA sense strand
ccauucugaugaacucaca

SEQ ID NO: 941234 - RNA, 19 nt, Homo sapiens
  misc_RNA (1)...(19): siRNA sense strand
gcaccagccucaucuauug

SEQ ID NO: 941235 - RNA, 19 nt, Homo sapiens
  misc_RNA (1)...(19): siRNA sense strand
gaagauagccugccuugug

SEQ ID NO: 941236 - RNA, 19 nt, Homo sapiens
  misc_RNA (1)...(19): siRNA sense strand
ggugcuggcuggccuaaua

SEQ ID NO: 941237 - RNA, 19 nt, Homo sapiens
  misc_RNA (1)...(19): siRNA sense strand
ggaaauggccagaagauag

SEQ ID NO: 941238 - RNA, 19 nt, Homo sapiens
  misc_RNA (1)...(19): siRNA sense strand
gcagcccucuggcccauaa

SEQ ID NO: 941239 - RNA, 19 nt, Homo sapiens
  misc_RNA (1)...(19): siRNA sense strand
gggcacagcugggaaaugg

SEQ ID NO: 941240 - RNA, 19 nt, Homo sapiens
  misc_RNA (1)...(19): siRNA sense strand
guccugggcuggcugauga

SEQ ID NO: 941241 - RNA, 19 nt, Homo sapiens
  misc_RNA (1)...(19): siRNA sense strand
gaucagccucuucuacauu

SEQ ID NO: 941242 - RNA, 19 nt, Homo sapiens
  misc_RNA (1)...(19): siRNA sense strand
ucgcgaaucuucaucuuag

SEQ ID NO: 941243 - RNA, 19 nt, Homo sapiens
  misc_RNA (1)...(19): siRNA sense strand
gaucuuucuugguccauca

SEQ ID NO: 941244 - RNA, 19 nt, Homo sapiens
  misc_RNA (1)...(19): siRNA sense strand
gggaaauggccagaagaua

SEQ ID NO: 941245 - RNA, 19 nt, Homo sapiens
  misc_RNA (1)...(19): siRNA sense strand
acacugggccuggaucuuu

SEQ ID NO: 941246 - RNA, 19 nt, Homo sapiens
  misc_RNA (1)...(19): siRNA sense strand
ccaugagucugguuacuac

SEQ ID NO: 941247 - RNA, 19 nt, Homo sapiens
  misc_RNA (1)...(19): siRNA sense strand
cagcccagguucaccaguu

SEQ ID NO: 941248 - RNA, 19 nt, Homo sapiens
  misc_RNA (1)...(19): siRNA sense strand
gaaauggccagaagauagc

SEQ ID NO: 941249 - RNA, 19 nt, Homo sapiens
  misc_RNA (1)...(19): siRNA sense strand
cauguucagugcccaggaa

SEQ ID NO: 941250 - RNA, 19 nt, Homo sapiens
  misc_RNA (1)...(19): siRNA sense strand
ucuggacacugcaugauca

SEQ ID NO: 941251 - RNA, 19 nt, Homo sapiens
  misc_RNA (1)...(19): siRNA sense strand
ugagcggccugaguggaua

SEQ ID NO: 941252 - RNA, 19 nt, Homo sapiens
  misc_RNA (1)...(19): siRNA sense strand
gcaucgcggugcucuggau

SEQ ID NO: 941253 - RNA, 19 nt, Homo sapiens
  misc_RNA (1)...(19): siRNA sense strand
gcuuauugcaccuuccuuu

SEQ ID NO: 941254 - RNA, 19 nt, Homo sapiens
  misc_RNA (1)...(19): siRNA sense strand
cagaucagccucuucuaca

SEQ ID NO: 941255 - RNA, 19 nt, Homo sapiens
  misc_RNA (1)...(19): siRNA sense strand
ugacugcacuggcccucau

SEQ ID NO: 941256 - RNA, 19 nt, Homo sapiens
  misc_RNA (1)...(19): siRNA sense strand
ucaauuuccucaaguacac

SEQ ID NO: 941257 - RNA, 19 nt, Homo sapiens
  misc_RNA (1)...(19): siRNA sense strand
ggcaccagccucaucuauu

SEQ ID NO: 941258 - RNA, 19 nt, Homo sapiens
  misc_RNA (1)...(19): siRNA sense strand
ggcucaaccucaucuucaa

SEQ ID NO: 941259 - RNA, 19 nt, Homo sapiens
  misc_RNA (1)...(19): siRNA sense strand
ccgaguggcucaaccucau

SEQ ID NO: 941260 - RNA, 19 nt, Homo sapiens
  misc_RNA (1)...(19): siRNA sense strand
uaaugacggcccugucuuc

SEQ ID NO: 941261 - RNA, 19 nt, Homo sapiens
  misc_RNA (1)...(19): siRNA sense strand
ccgaggcgcuacagaacca

SEQ ID NO: 941262 - RNA, 19 nt, Homo sapiens
  misc_RNA (1)...(19): siRNA sense strand
aucagccucuucuacauuu

SEQ ID NO: 941263 - RNA, 19 nt, Homo sapiens
  misc_RNA (1)...(19): siRNA sense strand
cauaaugacggcccugucu

SEQ ID NO: 941264 - RNA, 19 nt, Homo sapiens
  misc_RNA (1)...(19): siRNA sense strand
ccugggcagugcacauguu

SEQ ID NO: 941265 - RNA, 19 nt, Homo sapiens
  misc_RNA (1)...(19): siRNA sense strand
gugcuggcuggccuaauaa

SEQ ID NO: 941266 - RNA, 19 nt, Homo sapiens
  misc_RNA (1)...(19): siRNA sense strand
gucgcgaaucuucaucuua

SEQ ID NO: 941267 - RNA, 19 nt, Homo sapiens
  misc_RNA (1)...(19): siRNA sense strand
gauccucuuucuguucuac

SEQ ID NO: 941268 - RNA, 19 nt, Homo sapiens
  misc_RNA (1)...(19): siRNA sense strand
gcaccgcccauccacucuu

SEQ ID NO: 941269 - RNA, 19 nt, Homo sapiens
  misc_RNA (1)...(19): siRNA sense strand
gaguggauacacguggaua

SEQ ID NO: 941270 - RNA, 19 nt, Homo sapiens
  misc_RNA (1)...(19): siRNA sense strand
ucaaccucaucuucaagug

SEQ ID NO: 941271 - RNA, 19 nt, Homo sapiens
  misc_RNA (1)...(19): siRNA sense strand
ucagaucagccucuucuac

SEQ ID NO: 941272 - RNA, 19 nt, Homo sapiens
  misc_RNA (1)...(19): siRNA sense strand
gcacuggaccucgcuauua

SEQ ID NO: 941273 - RNA, 19 nt, Homo sapiens
  misc_RNA (1)...(19): siRNA sense strand
gauccaaauucaagucuaa

SEQ ID NO: 941274 - RNA, 19 nt, Homo sapiens
  misc_RNA (1)...(19): siRNA sense strand
gagacaggccuuaggauuu

SEQ ID NO: 941275 - RNA, 19 nt, Homo sapiens
  misc_RNA (1)...(19): siRNA sense strand
gcaagucacugaggacaau

SEQ ID NO: 941276 - RNA, 19 nt, Homo sapiens
  misc_RNA (1)...(19): siRNA sense strand
ggacagcacaccugaguga

SEQ ID NO: 941277 - RNA, 19 nt, Homo sapiens
  misc_RNA (1)...(19): siRNA sense strand
gcucagggccaguguguuu

SEQ ID NO: 941278 - RNA, 19 nt, Homo sapiens
  misc_RNA (1)...(19): siRNA sense strand
cagcacaccugagugauga

SEQ ID NO: 941279 - RNA, 19 nt, Homo sapiens
  misc_RNA (1)...(19): siRNA sense strand
agacaggccuuaggauuug

SEQ ID NO: 941280 - RNA, 19 nt, Homo sapiens
  misc_RNA (1)...(19): siRNA sense strand
ccugagugaugaugauuaa

SEQ ID NO: 941281 - RNA, 19 nt, Homo sapiens
  misc_RNA (1)...(19): siRNA sense strand
ccagacagcucacaaucca

SEQ ID NO: 941282 - RNA, 19 nt, Homo sapiens
  misc_RNA (1)...(19): siRNA sense strand
gaaccucgaaggcagcaaa

SEQ ID NO: 941283 - RNA, 19 nt, Homo sapiens
  misc_RNA (1)...(19): siRNA sense strand
ggauccaaauucaagucua

SEQ ID NO: 941284 - RNA, 19 nt, Homo sapiens
  misc_RNA (1)...(19): siRNA sense strand
ggguagcguugcugccuuu

SEQ ID NO: 941285 - RNA, 19 nt, Homo sapiens
  misc_RNA (1)...(19): siRNA sense strand
ggaccucgcuauuauuuuc

SEQ ID NO: 941286 - RNA, 19 nt, Homo sapiens
  misc_RNA (1)...(19): siRNA sense strand
gcagugggacccugaagau

SEQ ID NO: 941287 - RNA, 19 nt, Homo sapiens
  misc_RNA (1)...(19): siRNA sense strand
gaugagacaggccuuagga

SEQ ID NO: 941288 - RNA, 19 nt, Homo sapiens
  misc_RNA (1)...(19): siRNA sense strand
cacuggaccucgcuauuau

SEQ ID NO: 941289 - RNA, 19 nt, Homo sapiens
  misc_RNA (1)...(19): siRNA sense strand
caagaugagacaggccuua

SEQ ID NO: 941290 - RNA, 19 nt, Homo sapiens
  misc_RNA (1)...(19): siRNA sense strand
caaagaaaauguggagcua

SEQ ID NO: 941291 - RNA, 19 nt, Homo sapiens
  misc_RNA (1)...(19): siRNA sense strand
gcagagaaagaggaagaaa

SEQ ID NO: 941292 - RNA, 19 nt, Homo sapiens
  misc_RNA (1)...(19): siRNA sense strand
ugagacaggccuuaggauu

SEQ ID NO: 941293 - RNA, 19 nt, Homo sapiens
  misc_RNA (1)...(19): siRNA sense strand
gaagaaaaccaggagaauu

SEQ ID NO: 941294 - RNA, 19 nt, Homo sapiens
  misc_RNA (1)...(19): siRNA sense strand
gcuauugacuuagugaacu

SEQ ID NO: 941295 - RNA, 19 nt, Homo sapiens
  misc_RNA (1)...(19): siRNA sense strand
gaggacagcacaccugagu

SEQ ID NO: 941296 - RNA, 19 nt, Homo sapiens
  misc_RNA (1)...(19): siRNA sense strand
gugaugaagagcaagauga

SEQ ID NO: 941297 - RNA, 19 nt, Homo sapiens
  misc_RNA (1)...(19): siRNA sense strand
gacaaugacagcaaucagu

SEQ ID NO: 941298 - RNA, 19 nt, Homo sapiens
  misc_RNA (1)...(19): siRNA sense strand
ugaggacaaugacagcaau

SEQ ID NO: 941299 - RNA, 19 nt, Homo sapiens
  misc_RNA (1)...(19): siRNA sense strand
cuuaggauuugccaaggaa

SEQ ID NO: 941300 - RNA, 19 nt, Homo sapiens
  misc_RNA (1)...(19): siRNA sense strand
ccucgaaggcagcaaagaa

SEQ ID NO: 941301 - RNA, 19 nt, Homo sapiens
  misc_RNA (1)...(19): siRNA sense strand
gugggacccugaagaugug

SEQ ID NO: 941302 - RNA, 19 nt, Homo sapiens
  misc_RNA (1)...(19): siRNA sense strand
aagaaaaccaggagaauuu

SEQ ID NO: 941303 - RNA, 19 nt, Homo sapiens
  misc_RNA (1)...(19): siRNA sense strand
gugcagagaaagaggaaga

SEQ ID NO: 941304 - RNA, 19 nt, Homo sapiens
  misc_RNA (1)...(19): siRNA sense strand
ugacuuagugaacuuuaug

SEQ ID NO: 941305 - RNA, 19 nt, Homo sapiens
  misc_RNA (1)...(19): siRNA sense strand
gcgcugcuucucuaucuga

SEQ ID NO: 941306 - RNA, 19 nt, Homo sapiens
  misc_RNA (1)...(19): siRNA sense strand
gcaggaaaauacugagauc

SEQ ID NO: 941307 - RNA, 19 nt, Homo sapiens
  misc_RNA (1)...(19): siRNA sense strand
gcagcuauugacuuaguga

SEQ ID NO: 941308 - RNA, 19 nt, Homo sapiens
  misc_RNA (1)...(19): siRNA sense strand
gggaagcccgagagaggaa

SEQ ID NO: 941309 - RNA, 19 nt, Homo sapiens
  misc_RNA (1)...(19): siRNA sense strand
cuauugacuuagugaacuu

SEQ ID NO: 941310 - RNA, 19 nt, Homo sapiens
  misc_RNA (1)...(19): siRNA sense strand
cccacgcgcugcuucucua

SEQ ID NO: 941311 - RNA, 19 nt, Homo sapiens
  misc_RNA (1)...(19): siRNA sense strand
cccagucuguggauccaaa

SEQ ID NO: 941312 - RNA, 19 nt, Homo sapiens
  misc_RNA (1)...(19): siRNA sense strand
cagcucacaauccagguuu

SEQ ID NO: 941313 - RNA, 19 nt, Homo sapiens
  misc_RNA (1)...(19): siRNA sense strand
acaccugagugaugaugau

SEQ ID NO: 941314 - RNA, 19 nt, Homo sapiens
  misc_RNA (1)...(19): siRNA sense strand
ucacacugcaagucacuga

SEQ ID NO: 941315 - RNA, 19 nt, Homo sapiens
  misc_RNA (1)...(19): siRNA sense strand
gucuguggauccaaauuca

SEQ ID NO: 941316 - RNA, 19 nt, Homo sapiens
  misc_RNA (1)...(19): siRNA sense strand
gcacaccugagugaugaug

SEQ ID NO: 941317 - RNA, 19 nt, Homo sapiens
  misc_RNA (1)...(19): siRNA sense strand
ccaggagaauuuggauugg

SEQ ID NO: 941318 - RNA, 19 nt, Homo sapiens
  misc_RNA (1)...(19): siRNA sense strand
uggcuggccuccucuaugc

SEQ ID NO: 941319 - RNA, 19 nt, Homo sapiens
  misc_RNA (1)...(19): siRNA sense strand
cgucguacccucccguuca

SEQ ID NO: 941320 - RNA, 19 nt, Homo sapiens
  misc_RNA (1)...(19): siRNA sense strand
agcaaucagucgcuacaug

SEQ ID NO: 941321 - RNA, 19 nt, Homo sapiens
  misc_RNA (1)...(19): siRNA sense strand
ggacaaugacagcaaucag

SEQ ID NO: 941322 - RNA, 19 nt, Homo sapiens
  misc_RNA (1)...(19): siRNA sense strand
cuggaccucgcuauuauuu

SEQ ID NO: 941323 - RNA, 19 nt, Homo sapiens
  misc_RNA (1)...(19): siRNA sense strand
gaugaagagcaagaugaga

SEQ ID NO: 941324 - RNA, 19 nt, Homo sapiens
  misc_RNA (1)...(19): siRNA sense strand
cgugugugaugaagagcaa

SEQ ID NO: 941325 - RNA, 19 nt, Homo sapiens
  misc_RNA (1)...(19): siRNA sense strand
gaccuggagcagaaguauu

SEQ ID NO: 941326 - RNA, 19 nt, Homo sapiens
  misc_RNA (1)...(19): siRNA sense strand
ggccagacagcucacaauc

SEQ ID NO: 941327 - RNA, 19 nt, Homo sapiens
  misc_RNA (1)...(19): siRNA sense strand
uuugaccugugcagagaaa

SEQ ID NO: 941328 - RNA, 19 nt, Homo sapiens
  misc_RNA (1)...(19): siRNA sense strand
cauaauagauuucgagaca

SEQ ID NO: 941329 - RNA, 19 nt, Homo sapiens
  misc_RNA (1)...(19): siRNA sense strand
ccauaacucugccaaauau

SEQ ID NO: 941330 - RNA, 19 nt, Homo sapiens
  misc_RNA (1)...(19): siRNA sense strand
gaacaacagcaacaacaaa

SEQ ID NO: 941331 - RNA, 19 nt, Homo sapiens
  misc_RNA (1)...(19): siRNA sense strand
ggcagaagcuagucuaaug

SEQ ID NO: 941332 - RNA, 19 nt, Homo sapiens
  misc_RNA (1)...(19): siRNA sense strand
gcagcaacaucacuguaaa

SEQ ID NO: 941333 - RNA, 19 nt, Homo sapiens
  misc_RNA (1)...(19): siRNA sense strand
gaccauaacucugccaaau

SEQ ID NO: 941334 - RNA, 19 nt, Homo sapiens
  misc_RNA (1)...(19): siRNA sense strand
caacaaauguggaauucag

SEQ ID NO: 941335 - RNA, 19 nt, Homo sapiens
  misc_RNA (1)...(19): siRNA sense strand
gcaaauccucuacuucuga

SEQ ID NO: 941336 - RNA, 19 nt, Homo sapiens
  misc_RNA (1)...(19): siRNA sense strand
cuucaaaccugcuucuauu

SEQ ID NO: 941337 - RNA, 19 nt, Homo sapiens
  misc_RNA (1)...(19): siRNA sense strand
cgagcggguucucaaguua

SEQ ID NO: 941338 - RNA, 19 nt, Homo sapiens
  misc_RNA (1)...(19): siRNA sense strand
uagaugauaucgaaagaga

SEQ ID NO: 941339 - RNA, 19 nt, Homo sapiens
  misc_RNA (1)...(19): siRNA sense strand
caacaacaaauguggaauu

SEQ ID NO: 941340 - RNA, 19 nt, Homo sapiens
  misc_RNA (1)...(19): siRNA sense strand
uccaauagaugauaucgaa

SEQ ID NO: 941341 - RNA, 19 nt, Homo sapiens
  misc_RNA (1)...(19): siRNA sense strand
gaaggaagcaguaaaauuc

SEQ ID NO: 941342 - RNA, 19 nt, Homo sapiens
  misc_RNA (1)...(19): siRNA sense strand
gaggauaguucuagugacu

SEQ ID NO: 941343 - RNA, 19 nt, Homo sapiens
  misc_RNA (1)...(19): siRNA sense strand
caacagcaacaacaaaugu

SEQ ID NO: 941344 - RNA, 19 nt, Homo sapiens
  misc_RNA (1)...(19): siRNA sense strand
ggauaguucuagugacuca

SEQ ID NO: 941345 - RNA, 19 nt, Homo sapiens
  misc_RNA (1)...(19): siRNA sense strand
gaacugaaggcagaagcua

SEQ ID NO: 941346 - RNA, 19 nt, Homo sapiens
  misc_RNA (1)...(19): siRNA sense strand
gcgagcggguucucaaguu

SEQ ID NO: 941347 - RNA, 19 nt, Homo sapiens
  misc_RNA (1)...(19): siRNA sense strand
cagaugaguaguugugaua

SEQ ID NO: 941348 - RNA, 19 nt, Homo sapiens
  misc_RNA (1)...(19): siRNA sense strand
guaaagaacaacagcaaca

SEQ ID NO: 941349 - RNA, 19 nt, Homo sapiens
  misc_RNA (1)...(19): siRNA sense strand
gaaggcagaagcuagucua

SEQ ID NO: 941350 - RNA, 19 nt, Homo sapiens
  misc_RNA (1)...(19): siRNA sense strand
gauauagaugccagucaua

SEQ ID NO: 941351 - RNA, 19 nt, Homo sapiens
  misc_RNA (1)...(19): siRNA sense strand
ggagaaugucggcuagaaa

SEQ ID NO: 941352 - RNA, 19 nt, Homo sapiens
  misc_RNA (1)...(19): siRNA sense strand
caacaguggccuucugaug

SEQ ID NO: 941353 - RNA, 19 nt, Homo sapiens
  misc_RNA (1)...(19): siRNA sense strand
auagaugccagucauaaua

SEQ ID NO: 941354 - RNA, 19 nt, Homo sapiens
  misc_RNA (1)...(19): siRNA sense strand
gaagaugaagauugcaaau

SEQ ID NO: 941355 - RNA, 19 nt, Homo sapiens
  misc_RNA (1)...(19): siRNA sense strand
acaguggccuucugaugaa

SEQ ID NO: 941356 - RNA, 19 nt, Homo sapiens
  misc_RNA (1)...(19): siRNA sense strand
gaacaggugaccauaacuc

SEQ ID NO: 941357 - RNA, 19 nt, Homo sapiens
  misc_RNA (1)...(19): siRNA sense strand
aaacucagcagcaacauca

SEQ ID NO: 941358 - RNA, 19 nt, Homo sapiens
  misc_RNA (1)...(19): siRNA sense strand
gaugaguaguugugauagu

SEQ ID NO: 941359 - RNA, 19 nt, Homo sapiens
  misc_RNA (1)...(19): siRNA sense strand
caaauccucuacuucugau

SEQ ID NO: 941360 - RNA, 19 nt, Homo sapiens
  misc_RNA (1)...(19): siRNA sense strand
ccaugauacuggagaaugu

SEQ ID NO: 941361 - RNA, 19 nt, Homo sapiens
  misc_RNA (1)...(19): siRNA sense strand
gugaacaggugaccauaac

SEQ ID NO: 941362 - RNA, 19 nt, Homo sapiens
  misc_RNA (1)...(19): siRNA sense strand
cuaauggaccagaugagua

SEQ ID NO: 941363 - RNA, 19 nt, Homo sapiens
  misc_RNA (1)...(19): siRNA sense strand
uaaccaugauacuggagaa

SEQ ID NO: 941364 - RNA, 19 nt, Homo sapiens
  misc_RNA (1)...(19): siRNA sense strand
ggugaacaggugaccauaa

SEQ ID NO: 941365 - RNA, 19 nt, Homo sapiens
  misc_RNA (1)...(19): siRNA sense strand
uaauagauuucgagacaac

SEQ ID NO: 941366 - RNA, 19 nt, Homo sapiens
  misc_RNA (1)...(19): siRNA sense strand
ugauauagaugccagucau

SEQ ID NO: 941367 - RNA, 19 nt, Homo sapiens
  misc_RNA (1)...(19): siRNA sense strand
gcaguaaaauucaguaucg

SEQ ID NO: 941368 - RNA, 19 nt, Homo sapiens
  misc_RNA (1)...(19): siRNA sense strand
gacaacaguggccuucuga

SEQ ID NO: 941369 - RNA, 19 nt, Homo sapiens
  misc_RNA (1)...(19): siRNA sense strand
gaguaguugugauaguuca

SEQ ID NO: 941370 - RNA, 19 nt, Homo sapiens
  misc_RNA (1)...(19): siRNA sense strand
ggacucccaaucuuguaaa

SEQ ID NO: 941371 - RNA, 19 nt, Homo sapiens
  misc_RNA (1)...(19): siRNA sense strand
gugaggauaguucuaguga

SEQ ID NO: 941372 - RNA, 19 nt, Homo sapiens
  misc_RNA (1)...(19): siRNA sense strand
uauugacacuucuucugaa

SEQ ID NO: 941373 - RNA, 19 nt, Homo sapiens
  misc_RNA (1)...(19): siRNA sense strand
caauagaugauaucgaaag

SEQ ID NO: 941374 - RNA, 19 nt, Homo sapiens
  misc_RNA (1)...(19): siRNA sense strand
uaacucugccaaauauaga

SEQ ID NO: 941375 - RNA, 19 nt, Homo sapiens
  misc_RNA (1)...(19): siRNA sense strand
uggagaaugucggcuagaa

SEQ ID NO: 941376 - RNA, 19 nt, Homo sapiens
  misc_RNA (1)...(19): siRNA sense strand
agacaacaguggccuucug

SEQ ID NO: 941377 - RNA, 19 nt, Homo sapiens
  misc_RNA (1)...(19): siRNA sense strand
gaccagaugaguaguugug

SEQ ID NO: 941378 - RNA, 19 nt, Homo sapiens
  misc_RNA (1)...(19): siRNA sense strand
gaugauaucgaaagagaac

SEQ ID NO: 941379 - RNA, 19 nt, Homo sapiens
  misc_RNA (1)...(19): siRNA sense strand
uaaagaacaacagcaacaa

SEQ ID NO: 941380 - RNA, 19 nt, Homo sapiens
  misc_RNA (1)...(19): siRNA sense strand
gagaaugucggcuagaaaa

SEQ ID NO: 941381 - RNA, 19 nt, Homo sapiens
  misc_RNA (1)...(19): siRNA sense strand
gggagaguuucgagaagca

SEQ ID NO: 941382 - RNA, 19 nt, Homo sapiens
  misc_RNA (1)...(19): siRNA sense strand
aacaacaaauguggaauuc

SEQ ID NO: 941383 - RNA, 19 nt, Homo sapiens
  misc_RNA (1)...(19): siRNA sense strand
aacaguggccuucugauga

SEQ ID NO: 941384 - RNA, 19 nt, Homo sapiens
  misc_RNA (1)...(19): siRNA sense strand
cuauugacacuucuucuga

SEQ ID NO: 941385 - RNA, 19 nt, Homo sapiens
  misc_RNA (1)...(19): siRNA sense strand
ugacucagaagaugaagau

SEQ ID NO: 941386 - RNA, 19 nt, Homo sapiens
  misc_RNA (1)...(19): siRNA sense strand
ccagaugaguaguugugau

SEQ ID NO: 941387 - RNA, 19 nt, Homo sapiens
  misc_RNA (1)...(19): siRNA sense strand
uaauggaccagaugaguag

SEQ ID NO: 941388 - RNA, 19 nt, Homo sapiens
  misc_RNA (1)...(19): siRNA sense strand
ugagguuggugaaggugaa

SEQ ID NO: 941389 - RNA, 19 nt, Homo sapiens
  misc_RNA (1)...(19): siRNA sense strand
gauaagauguccccagcau

SEQ ID NO: 941390 - RNA, 19 nt, Homo sapiens
  misc_RNA (1)...(19): siRNA sense strand
gcagaagcuagucuaaugg

SEQ ID NO: 941391 - RNA, 19 nt, Homo sapiens
  misc_RNA (1)...(19): siRNA sense strand
gccuucugaugaauacuuu

SEQ ID NO: 941392 - RNA, 19 nt, Homo sapiens
  misc_RNA (1)...(19): siRNA sense strand
caaaccugcuucuauugac

SEQ ID NO: 941393 - RNA, 19 nt, Homo sapiens
  misc_RNA (1)...(19): siRNA sense strand
uacagggaauugugucuca

SEQ ID NO: 941394 - RNA, 19 nt, Homo sapiens
  misc_RNA (1)...(19): siRNA sense strand
ucuagugacucagaagaug

SEQ ID NO: 941395 - RNA, 19 nt, Homo sapiens
  misc_RNA (1)...(19): siRNA sense strand
caaguagugaggauaguuc

SEQ ID NO: 941396 - RNA, 19 nt, Homo sapiens
  misc_RNA (1)...(19): siRNA sense strand
cugcuucuauugacacuuc

SEQ ID NO: 941397 - RNA, 19 nt, Homo sapiens
  misc_RNA (1)...(19): siRNA sense strand
aaaccugcuucuauugaca

SEQ ID NO: 941398 - RNA, 19 nt, Homo sapiens
  misc_RNA (1)...(19): siRNA sense strand
agguucaacuccaccagua

SEQ ID NO: 941399 - RNA, 19 nt, Homo sapiens
  misc_RNA (1)...(19): siRNA sense strand
ugccagucauaauagauuu

SEQ ID NO: 941400 - RNA, 19 nt, Homo sapiens
  misc_RNA (1)...(19): siRNA sense strand
guagugaggauaguucuag

SEQ ID NO: 941401 - RNA, 19 nt, Homo sapiens
  misc_RNA (1)...(19): siRNA sense strand
cagcagcaacaucacugua

SEQ ID NO: 941402 - RNA, 19 nt, Homo sapiens
  misc_RNA (1)...(19): siRNA sense strand
ucaguaucguaaagaacaa

SEQ ID NO: 941403 - RNA, 19 nt, Homo sapiens
  misc_RNA (1)...(19): siRNA sense strand
acucagaagaugaagauug

SEQ ID NO: 941404 - RNA, 19 nt, Homo sapiens
  misc_RNA (1)...(19): siRNA sense strand
ccaggacucccaaucuugu

SEQ ID NO: 941405 - RNA, 19 nt, Homo sapiens
  misc_RNA (1)...(19): siRNA sense strand
gccaggacucccaaucuug

SEQ ID NO: 941406 - RNA, 19 nt, Homo sapiens
  misc_RNA (1)...(19): siRNA sense strand
accauaacucugccaaaua

SEQ ID NO: 941407 - RNA, 19 nt, Homo sapiens
  misc_RNA (1)...(19): siRNA sense strand
cagaagaugaagauugcaa

SEQ ID NO: 941408 - RNA, 19 nt, Homo sapiens
  misc_RNA (1)...(19): siRNA sense strand
ccaaauauagaagguucaa

SEQ ID NO: 941409 - RNA, 19 nt, Homo sapiens
  misc_RNA (1)...(19): siRNA sense strand
aaucaggaagugacaguga

SEQ ID NO: 941410 - RNA, 19 nt, Homo sapiens
  misc_RNA (1)...(19): siRNA sense strand
guucaucaucuucaaguag

SEQ ID NO: 941411 - RNA, 19 nt, Homo sapiens
  misc_RNA (1)...(19): siRNA sense strand
augaguaguugugauaguu

SEQ ID NO: 941412 - RNA, 19 nt, Homo sapiens
  misc_RNA (1)...(19): siRNA sense strand
uagcgcagcgggauucuca

SEQ ID NO: 941413 - RNA, 19 nt, Homo sapiens
  misc_RNA (1)...(19): siRNA sense strand
uaaaacauucuccaucuga

SEQ ID NO: 941414 - RNA, 19 nt, Homo sapiens
  misc_RNA (1)...(19): siRNA sense strand
cagaagcuagucuaaugga

SEQ ID NO: 941415 - RNA, 19 nt, Homo sapiens
  misc_RNA (1)...(19): siRNA sense strand
agccaggacucccaaucuu

SEQ ID NO: 941416 - RNA, 19 nt, Homo sapiens
  misc_RNA (1)...(19): siRNA sense strand
gauuugcagcugagugaau

SEQ ID NO: 941417 - RNA, 19 nt, Homo sapiens
  misc_RNA (1)...(19): siRNA sense strand
ugugcgcuaugacuucaaa

SEQ ID NO: 941418 - RNA, 19 nt, Homo sapiens
  misc_RNA (1)...(19): siRNA sense strand
uggaccagaugaguaguug

SEQ ID NO: 941419 - RNA, 19 nt, Homo sapiens
  misc_RNA (1)...(19): siRNA sense strand
gauaucgaaagagaacuga

SEQ ID NO: 941420 - RNA, 19 nt, Homo sapiens
  misc_RNA (1)...(19): siRNA sense strand
agaguugaaggaagcagua

SEQ ID NO: 941421 - RNA, 19 nt, Homo sapiens
  misc_RNA (1)...(19): siRNA sense strand
uauagaugccagucauaau

SEQ ID NO: 941422 - RNA, 19 nt, Homo sapiens
  misc_RNA (1)...(19): siRNA sense strand
auauagaugccagucauaa

SEQ ID NO: 941423 - RNA, 19 nt, Homo sapiens
  misc_RNA (1)...(19): siRNA sense strand
caugacacaguacaggauu

SEQ ID NO: 941424 - RNA, 19 nt, Homo sapiens
  misc_RNA (1)...(19): siRNA sense strand
agaagaugaagauugcaaa

SEQ ID NO: 941425 - RNA, 19 nt, Homo sapiens
  misc_RNA (1)...(19): siRNA sense strand
cucagaagaugaagauugc

SEQ ID NO: 941426 - RNA, 19 nt, Homo sapiens
  misc_RNA (1)...(19): siRNA sense strand
agaacaacagcaacaacaa

SEQ ID NO: 941427 - RNA, 19 nt, Homo sapiens
  misc_RNA (1)...(19): siRNA sense strand
aagaacaacagcaacaaca

SEQ ID NO: 941428 - RNA, 19 nt, Homo sapiens
  misc_RNA (1)...(19): siRNA sense strand
cagaagcagugccgcaagu

SEQ ID NO: 941429 - RNA, 19 nt, Homo sapiens
  misc_RNA (1)...(19): siRNA sense strand
agucgucguucgccuucua

SEQ ID NO: 941430 - RNA, 19 nt, Homo sapiens
  misc_RNA (1)...(19): siRNA sense strand
uguggcugcuggaggauau

SEQ ID NO: 941431 - RNA, 19 nt, Homo sapiens
  misc_RNA (1)...(19): siRNA sense strand
gaacaaggcuuagaagaaa

SEQ ID NO: 941432 - RNA, 19 nt, Homo sapiens
  misc_RNA (1)...(19): siRNA sense strand
gaaauucuguccaaugaaa

SEQ ID NO: 941433 - RNA, 19 nt, Homo sapiens
  misc_RNA (1)...(19): siRNA sense strand
gcaaugaaguggccucuuu

SEQ ID NO: 941434 - RNA, 19 nt, Homo sapiens
  misc_RNA (1)...(19): siRNA sense strand
gaucaguaguguauuguua

SEQ ID NO: 941435 - RNA, 19 nt, Homo sapiens
  misc_RNA (1)...(19): siRNA sense strand
caaagaaguuuacgaauuc

SEQ ID NO: 941436 - RNA, 19 nt, Homo sapiens
  misc_RNA (1)...(19): siRNA sense strand
ccaaagaauuagagaauga

SEQ ID NO: 941437 - RNA, 19 nt, Homo sapiens
  misc_RNA (1)...(19): siRNA sense strand
gaaguggccucuuuaucaa

SEQ ID NO: 941438 - RNA, 19 nt, Homo sapiens
  misc_RNA (1)...(19): siRNA sense strand
gaaggagcccaaccaaaua

SEQ ID NO: 941439 - RNA, 19 nt, Homo sapiens
  misc_RNA (1)...(19): siRNA sense strand
gcagaaagcccacccacuu

SEQ ID NO: 941440 - RNA, 19 nt, Homo sapiens
  misc_RNA (1)...(19): siRNA sense strand
uuagagggcugcaacagua

SEQ ID NO: 941441 - RNA, 19 nt, Homo sapiens
  misc_RNA (1)...(19): siRNA sense strand
aaacggagucccugaaaua

SEQ ID NO: 941442 - RNA, 19 nt, Homo sapiens
  misc_RNA (1)...(19): siRNA sense strand
uuacugagaugccuaauag

SEQ ID NO: 941443 - RNA, 19 nt, Homo sapiens
  misc_RNA (1)...(19): siRNA sense strand
aaagcaagguucagucauu

SEQ ID NO: 941444 - RNA, 19 nt, Homo sapiens
  misc_RNA (1)...(19): siRNA sense strand
guauugagcagcuucauaa

SEQ ID NO: 941445 - RNA, 19 nt, Homo sapiens
  misc_RNA (1)...(19): siRNA sense strand
ucaagaagaacaaggcuua

SEQ ID NO: 941446 - RNA, 19 nt, Homo sapiens
  misc_RNA (1)...(19): siRNA sense strand
cacaguaggucauggauug

SEQ ID NO: 941447 - RNA, 19 nt, Homo sapiens
  misc_RNA (1)...(19): siRNA sense strand
gaacccagauccgaaauac

SEQ ID NO: 941448 - RNA, 19 nt, Homo sapiens
  misc_RNA (1)...(19): siRNA sense strand
guauacaugucguccauug

SEQ ID NO: 941449 - RNA, 19 nt, Homo sapiens
  misc_RNA (1)...(19): siRNA sense strand
ggauacacuugcugaaugu

SEQ ID NO: 941450 - RNA, 19 nt, Homo sapiens
  misc_RNA (1)...(19): siRNA sense strand
ugaaguggccucuuuauca

SEQ ID NO: 941451 - RNA, 19 nt, Homo sapiens
  misc_RNA (1)...(19): siRNA sense strand
ggagacaaagcagaaguua

SEQ ID NO: 941452 - RNA, 19 nt, Homo sapiens
  misc_RNA (1)...(19): siRNA sense strand
ugaaggagcccaaccaaau

SEQ ID NO: 941453 - RNA, 19 nt, Homo sapiens
  misc_RNA (1)...(19): siRNA sense strand
ccagaccaguuguuugaaa

SEQ ID NO: 941454 - RNA, 19 nt, Homo sapiens
  misc_RNA (1)...(19): siRNA sense strand
caugaucaguaguguauug

SEQ ID NO: 941455 - RNA, 19 nt, Homo sapiens
  misc_RNA (1)...(19): siRNA sense strand
cagcugcaguuucacauga

SEQ ID NO: 941456 - RNA, 19 nt, Homo sapiens
  misc_RNA (1)...(19): siRNA sense strand
ggaugcuguuugaugaaua

SEQ ID NO: 941457 - RNA, 19 nt, Homo sapiens
  misc_RNA (1)...(19): siRNA sense strand
ggaauucaucggcaagaaa

SEQ ID NO: 941458 - RNA, 19 nt, Homo sapiens
  misc_RNA (1)...(19): siRNA sense strand
ugauucagcugcaguuuca

SEQ ID NO: 941459 - RNA, 19 nt, Homo sapiens
  misc_RNA (1)...(19): siRNA sense strand
ucacauauccagaccaguu

SEQ ID NO: 941460 - RNA, 19 nt, Homo sapiens
  misc_RNA (1)...(19): siRNA sense strand
gaugcuguuugaugaauau

SEQ ID NO: 941461 - RNA, 19 nt, Homo sapiens
  misc_RNA (1)...(19): siRNA sense strand
gcagaacccagauccgaaa

SEQ ID NO: 941462 - RNA, 19 nt, Homo sapiens
  misc_RNA (1)...(19): siRNA sense strand
gcagaagugcauugugauu

SEQ ID NO: 941463 - RNA, 19 nt, Homo sapiens
  misc_RNA (1)...(19): siRNA sense strand
gaauguccuugcagaaagu

SEQ ID NO: 941464 - RNA, 19 nt, Homo sapiens
  misc_RNA (1)...(19): siRNA sense strand
gucagcaucugccacagua

SEQ ID NO: 941465 - RNA, 19 nt, Homo sapiens
  misc_RNA (1)...(19): siRNA sense strand
gaccauagaggaaguauac

SEQ ID NO: 941466 - RNA, 19 nt, Homo sapiens
  misc_RNA (1)...(19): siRNA sense strand
ggaccaagacgcucaugga

SEQ ID NO: 941467 - RNA, 19 nt, Homo sapiens
  misc_RNA (1)...(19): siRNA sense strand
caaugaaguggccucuuua

SEQ ID NO: 941468 - RNA, 19 nt, Homo sapiens
  misc_RNA (1)...(19): siRNA sense strand
agaagugcauugugauuca

SEQ ID NO: 941469 - RNA, 19 nt, Homo sapiens
  misc_RNA (1)...(19): siRNA sense strand
uaacagaugcagccacaga

SEQ ID NO: 941470 - RNA, 19 nt, Homo sapiens
  misc_RNA (1)...(19): siRNA sense strand
cggagucccugaaauaaca

SEQ ID NO: 941471 - RNA, 19 nt, Homo sapiens
  misc_RNA (1)...(19): siRNA sense strand
gccuaauagugauucuuua

SEQ ID NO: 941472 - RNA, 19 nt, Homo sapiens
  misc_RNA (1)...(19): siRNA sense strand
aagcagaaguuacugagau

SEQ ID NO: 941473 - RNA, 19 nt, Homo sapiens
  misc_RNA (1)...(19): siRNA sense strand
aagcaagguucagucauuu

SEQ ID NO: 941474 - RNA, 19 nt, Homo sapiens
  misc_RNA (1)...(19): siRNA sense strand
agaacaaggcuuagaagaa

SEQ ID NO: 941475 - RNA, 19 nt, Homo sapiens
  misc_RNA (1)...(19): siRNA sense strand
gaagaacaaggcuuagaag

SEQ ID NO: 941476 - RNA, 19 nt, Homo sapiens
  misc_RNA (1)...(19): siRNA sense strand
ugagcagcuucauaaagua

SEQ ID NO: 941477 - RNA, 19 nt, Homo sapiens
  misc_RNA (1)...(19): siRNA sense strand
uaagggaagcuaaggagaa

SEQ ID NO: 941478 - RNA, 19 nt, Homo sapiens
  misc_RNA (1)...(19): siRNA sense strand
cacagcagcucacgaugga

SEQ ID NO: 941479 - RNA, 19 nt, Homo sapiens
  misc_RNA (1)...(19): siRNA sense strand
gccaaagaauuagagaaug

SEQ ID NO: 941480 - RNA, 19 nt, Homo sapiens
  misc_RNA (1)...(19): siRNA sense strand
gaaagucuggcggagguaa

SEQ ID NO: 941481 - RNA, 19 nt, Homo sapiens
  misc_RNA (1)...(19): siRNA sense strand
ucaagacccucaagaagac

SEQ ID NO: 941482 - RNA, 19 nt, Homo sapiens
  misc_RNA (1)...(19): siRNA sense strand
gaaacaaagaaggaagaaa

SEQ ID NO: 941483 - RNA, 19 nt, Homo sapiens
  misc_RNA (1)...(19): siRNA sense strand
gagaagcuggaacucuuaa

SEQ ID NO: 941484 - RNA, 19 nt, Homo sapiens
  misc_RNA (1)...(19): siRNA sense strand
uugagcagcuucauaaagu

SEQ ID NO: 941485 - RNA, 19 nt, Homo sapiens
  misc_RNA (1)...(19): siRNA sense strand
ucaauaaggccaugaagag

SEQ ID NO: 941486 - RNA, 19 nt, Homo sapiens
  misc_RNA (1)...(19): siRNA sense strand
ggccacaccugacaaacuc

SEQ ID NO: 941487 - RNA, 19 nt, Homo sapiens
  misc_RNA (1)...(19): siRNA sense strand
gagcccaaccaaauacuga

SEQ ID NO: 941488 - RNA, 19 nt, Homo sapiens
  misc_RNA (1)...(19): siRNA sense strand
gaacuguuuccuugucuca

SEQ ID NO: 941489 - RNA, 19 nt, Homo sapiens
  misc_RNA (1)...(19): siRNA sense strand
ugaauguccuugcagaaag

SEQ ID NO: 941490 - RNA, 19 nt, Homo sapiens
  misc_RNA (1)...(19): siRNA sense strand
gcaagaaaaccaugaaugu

SEQ ID NO: 941491 - RNA, 19 nt, Homo sapiens
  misc_RNA (1)...(19): siRNA sense strand
ggagagaaccgcgcacuac

SEQ ID NO: 941492 - RNA, 19 nt, Homo sapiens
  misc_RNA (1)...(19): siRNA sense strand
ucaguaguguauuguuaga

SEQ ID NO: 941493 - RNA, 19 nt, Homo sapiens
  misc_RNA (1)...(19): siRNA sense strand
cgaauucuuuaaccacugu

SEQ ID NO: 941494 - RNA, 19 nt, Homo sapiens
  misc_RNA (1)...(19): siRNA sense strand
aggauacacuugcugaaug

SEQ ID NO: 941495 - RNA, 19 nt, Homo sapiens
  misc_RNA (1)...(19): siRNA sense strand
agacaaagcagaaguuacu

SEQ ID NO: 941496 - RNA, 19 nt, Homo sapiens
  misc_RNA (1)...(19): siRNA sense strand
gcacuacgggaugcuguuu

SEQ ID NO: 941497 - RNA, 19 nt, Homo sapiens
  misc_RNA (1)...(19): siRNA sense strand
ugagaugccuaauagugau

SEQ ID NO: 941498 - RNA, 19 nt, Homo sapiens
  misc_RNA (1)...(19): siRNA sense strand
ggauucaugguguaaauuc

SEQ ID NO: 941499 - RNA, 19 nt, Homo sapiens
  misc_RNA (1)...(19): siRNA sense strand
agaagaacaaggcuuagaa

SEQ ID NO: 941500 - RNA, 19 nt, Homo sapiens
  misc_RNA (1)...(19): siRNA sense strand
gggaugcuguuugaugaau

SEQ ID NO: 941501 - RNA, 19 nt, Homo sapiens
  misc_RNA (1)...(19): siRNA sense strand
gagaacuguuuccuugucu

SEQ ID NO: 941502 - RNA, 19 nt, Homo sapiens
  misc_RNA (1)...(19): siRNA sense strand
uaaauucuggaucuucuga

SEQ ID NO: 941503 - RNA, 19 nt, Homo sapiens
  misc_RNA (1)...(19): siRNA sense strand
ggaagaaaaggaagagaaa

SEQ ID NO: 941504 - RNA, 19 nt, Homo sapiens
  misc_RNA (1)...(19): siRNA sense strand
ggaaauucuguccaaugaa

SEQ ID NO: 941505 - RNA, 19 nt, Homo sapiens
  misc_RNA (1)...(19): siRNA sense strand
uggaagcccuggaaauucu

SEQ ID NO: 941506 - RNA, 19 nt, Homo sapiens
  misc_RNA (1)...(19): siRNA sense strand
gaggauacacuugcugaau

SEQ ID NO: 941507 - RNA, 19 nt, Homo sapiens
  misc_RNA (1)...(19): siRNA sense strand
uuccuugucucagauguua

SEQ ID NO: 941508 - RNA, 19 nt, Homo sapiens
  misc_RNA (1)...(19): siRNA sense strand
gaaaacggagucccugaaa

SEQ ID NO: 941509 - RNA, 19 nt, Homo sapiens
  misc_RNA (1)...(19): siRNA sense strand
cgaaagcaagguucaguca

SEQ ID NO: 941510 - RNA, 19 nt, Homo sapiens
  misc_RNA (1)...(19): siRNA sense strand
ccaaugaaagcgaaagcaa

SEQ ID NO: 941511 - RNA, 19 nt, Homo sapiens
  misc_RNA (1)...(19): siRNA sense strand
ccuggaagcccuggaaauu

SEQ ID NO: 941512 - RNA, 19 nt, Homo sapiens
  misc_RNA (1)...(19): siRNA sense strand
gguaugcugucugccauca

SEQ ID NO: 941513 - RNA, 19 nt, Homo sapiens
  misc_RNA (1)...(19): siRNA sense strand
cuuagccacuggagacaaa

SEQ ID NO: 941514 - RNA, 19 nt, Homo sapiens
  misc_RNA (1)...(19): siRNA sense strand
ugucugccaucaccaaugu

SEQ ID NO: 941515 - RNA, 19 nt, Homo sapiens
  misc_RNA (1)...(19): siRNA sense strand
caccugacaaacucaauaa

SEQ ID NO: 941516 - RNA, 19 nt, Homo sapiens
  misc_RNA (1)...(19): siRNA sense strand
gagccacucuacggauuca

SEQ ID NO: 941517 - RNA, 19 nt, Homo sapiens
  misc_RNA (1)...(19): siRNA sense strand
guuacugagaugccuaaua

SEQ ID NO: 941518 - RNA, 19 nt, Homo sapiens
  misc_RNA (1)...(19): siRNA sense strand
cauagaggaaguauacaug

SEQ ID NO: 941519 - RNA, 19 nt, Homo sapiens
  misc_RNA (1)...(19): siRNA sense strand
cgaagaagaaacaaagaag

SEQ ID NO: 941520 - RNA, 19 nt, Homo sapiens
  misc_RNA (1)...(19): siRNA sense strand
acgggaugcuguuugauga

SEQ ID NO: 941521 - RNA, 19 nt, Homo sapiens
  misc_RNA (1)...(19): siRNA sense strand
agagaacuguuuccuuguc

SEQ ID NO: 941522 - RNA, 19 nt, Homo sapiens
  misc_RNA (1)...(19): siRNA sense strand
guucugcaggucucacaua

SEQ ID NO: 941523 - RNA, 19 nt, Homo sapiens
  misc_RNA (1)...(19): siRNA sense strand
aagaagaaacaaagaagga

SEQ ID NO: 941524 - RNA, 19 nt, Homo sapiens
  misc_RNA (1)...(19): siRNA sense strand
aaaccguggugucaguaga

SEQ ID NO: 941525 - RNA, 19 nt, Homo sapiens
  misc_RNA (1)...(19): siRNA sense strand
ucaauagagacgugacuga

SEQ ID NO: 941526 - RNA, 19 nt, Homo sapiens
  misc_RNA (1)...(19): siRNA sense strand
gaaagcaagguucagucau

SEQ ID NO: 941527 - RNA, 19 nt, Homo sapiens
  misc_RNA (1)...(19): siRNA sense strand
gagcagcuucauaaaguag

SEQ ID NO: 941528 - RNA, 19 nt, Homo sapiens
  misc_RNA (1)...(19): siRNA sense strand
uagaggaaguauacauguc

SEQ ID NO: 941529 - RNA, 19 nt, Homo sapiens
  misc_RNA (1)...(19): siRNA sense strand
ccgaagaagaaacaaagaa

SEQ ID NO: 941530 - RNA, 19 nt, Homo sapiens
  misc_RNA (1)...(19): siRNA sense strand
gaagcuggaacucuuaaaa

SEQ ID NO: 941531 - RNA, 19 nt, Homo sapiens
  misc_RNA (1)...(19): siRNA sense strand
gcaacaacggcuccauuua

SEQ ID NO: 941532 - RNA, 19 nt, Homo sapiens
  misc_RNA (1)...(19): siRNA sense strand
gaaacguccucuucaaugg

SEQ ID NO: 941533 - RNA, 19 nt, Homo sapiens
  misc_RNA (1)...(19): siRNA sense strand
ggaaacguccucuucaaug

SEQ ID NO: 941534 - RNA, 19 nt, Homo sapiens
  misc_RNA (1)...(19): siRNA sense strand
ucucgacgcugaaagauga

SEQ ID NO: 941535 - RNA, 19 nt, Homo sapiens
  misc_RNA (1)...(19): siRNA sense strand
ggaaugccgucaccaagca

SEQ ID NO: 941536 - RNA, 19 nt, Homo sapiens
  misc_RNA (1)...(19): siRNA sense strand
gaagucauccaucugaaug

SEQ ID NO: 941537 - RNA, 19 nt, Homo sapiens
  misc_RNA (1)...(19): siRNA sense strand
gugcggacauggucuguga

SEQ ID NO: 941538 - RNA, 19 nt, Homo sapiens
  misc_RNA (1)...(19): siRNA sense strand
ggaguuggaucgaucuucu

SEQ ID NO: 941539 - RNA, 19 nt, Homo sapiens
  misc_RNA (1)...(19): siRNA sense strand
caaugaaacuuccuuuuga

SEQ ID NO: 941540 - RNA, 19 nt, Homo sapiens
  misc_RNA (1)...(19): siRNA sense strand
gaaagacaacgaccuccuu

SEQ ID NO: 941541 - RNA, 19 nt, Homo sapiens
  misc_RNA (1)...(19): siRNA sense strand
caacaacggcuccauuuac

SEQ ID NO: 941542 - RNA, 19 nt, Homo sapiens
  misc_RNA (1)...(19): siRNA sense strand
ccucacaccucccaagaug

SEQ ID NO: 941543 - RNA, 19 nt, Homo sapiens
  misc_RNA (1)...(19): siRNA sense strand
gccgaaugcuggaugagaa

SEQ ID NO: 941544 - RNA, 19 nt, Homo sapiens
  misc_RNA (1)...(19): siRNA sense strand
ccaccaguguucccaguga

SEQ ID NO: 941545 - RNA, 19 nt, Homo sapiens
  misc_RNA (1)...(19): siRNA sense strand
ggaggcaagagauucagua

SEQ ID NO: 941546 - RNA, 19 nt, Homo sapiens
  misc_RNA (1)...(19): siRNA sense strand
guuccagccuccuccauga

SEQ ID NO: 941547 - RNA, 19 nt, Homo sapiens
  misc_RNA (1)...(19): siRNA sense strand
agcaagagcugauggaaca

SEQ ID NO: 941548 - RNA, 19 nt, Homo sapiens
  misc_RNA (1)...(19): siRNA sense strand
gggugaacaugacaagaug

SEQ ID NO: 941549 - RNA, 19 nt, Homo sapiens
  misc_RNA (1)...(19): siRNA sense strand
guggaaacguccucuucaa

SEQ ID NO: 941550 - RNA, 19 nt, Homo sapiens
  misc_RNA (1)...(19): siRNA sense strand
gaucgaucuucuuguggaa

SEQ ID NO: 941551 - RNA, 19 nt, Homo sapiens
  misc_RNA (1)...(19): siRNA sense strand
agaugaagcucaaugaaac

SEQ ID NO: 941552 - RNA, 19 nt, Homo sapiens
  misc_RNA (1)...(19): siRNA sense strand
ggcaagagauucaguaccu

SEQ ID NO: 941553 - RNA, 19 nt, Homo sapiens
  misc_RNA (1)...(19): siRNA sense strand
ccacucgcuuccuuuaaga

SEQ ID NO: 941554 - RNA, 19 nt, Homo sapiens
  misc_RNA (1)...(19): siRNA sense strand
agaagcaccucaucucagu

SEQ ID NO: 941555 - RNA, 19 nt, Homo sapiens
  misc_RNA (1)...(19): siRNA sense strand
gggaagucauccaucugaa

SEQ ID NO: 941556 - RNA, 19 nt, Homo sapiens
  misc_RNA (1)...(19): siRNA sense strand
caagaugaagcucaaugaa

SEQ ID NO: 941557 - RNA, 19 nt, Homo sapiens
  misc_RNA (1)...(19): siRNA sense strand
gugcgucucucaucuacug

SEQ ID NO: 941558 - RNA, 19 nt, Homo sapiens
  misc_RNA (1)...(19): siRNA sense strand
ggaagucauccaucugaau

SEQ ID NO: 941559 - RNA, 19 nt, Homo sapiens
  misc_RNA (1)...(19): siRNA sense strand
ccaagaugaagcucaauga

SEQ ID NO: 941560 - RNA, 19 nt, Homo sapiens
  misc_RNA (1)...(19): siRNA sense strand
gaaugugggaggcaagaga

SEQ ID NO: 941561 - RNA, 19 nt, Homo sapiens
  misc_RNA (1)...(19): siRNA sense strand
aagaugaagcucaaugaaa

SEQ ID NO: 941562 - RNA, 19 nt, Homo sapiens
  misc_RNA (1)...(19): siRNA sense strand
ucacaccucccaagaugaa

SEQ ID NO: 941563 - RNA, 19 nt, Homo sapiens
  misc_RNA (1)...(19): siRNA sense strand
ccaugaagcccaguucuau

SEQ ID NO: 941564 - RNA, 19 nt, Homo sapiens
  misc_RNA (1)...(19): siRNA sense strand
gaucccagacuccuucuuc

SEQ ID NO: 941565 - RNA, 19 nt, Homo sapiens
  misc_RNA (1)...(19): siRNA sense strand
ggacgaccagcuaguguuc

SEQ ID NO: 941566 - RNA, 19 nt, Homo sapiens
  misc_RNA (1)...(19): siRNA sense strand
ggacuggcccaucgaacga

SEQ ID NO: 941567 - RNA, 19 nt, Homo sapiens
  misc_RNA (1)...(19): siRNA sense strand
gcaucucgacgcugaaaga

SEQ ID NO: 941568 - RNA, 19 nt, Homo sapiens
  misc_RNA (1)...(19): siRNA sense strand
caacggcuccauuuacuac

SEQ ID NO: 941569 - RNA, 19 nt, Homo sapiens
  misc_RNA (1)...(19): siRNA sense strand
gaccggagcaaucuucauc

SEQ ID NO: 941570 - RNA, 19 nt, Homo sapiens
  misc_RNA (1)...(19): siRNA sense strand
gcucaaugaaacuuccuuu

SEQ ID NO: 941571 - RNA, 19 nt, Homo sapiens
  misc_RNA (1)...(19): siRNA sense strand
gcagcccugucaccaagau

SEQ ID NO: 941572 - RNA, 19 nt, Homo sapiens
  misc_RNA (1)...(19): siRNA sense strand
gggaaccagcucauugcua

SEQ ID NO: 941573 - RNA, 19 nt, Homo sapiens
  misc_RNA (1)...(19): siRNA sense strand
ggaucgcuguggccuauac

SEQ ID NO: 941574 - RNA, 19 nt, Homo sapiens
  misc_RNA (1)...(19): siRNA sense strand
gaugagaccggagcaaucu

SEQ ID NO: 941575 - RNA, 19 nt, Homo sapiens
  misc_RNA (1)...(19): siRNA sense strand
ugcagcccaucaccaguua

SEQ ID NO: 941576 - RNA, 19 nt, Homo sapiens
  misc_RNA (1)...(19): siRNA sense strand
gaaccggcacagccuagug

SEQ ID NO: 941577 - RNA, 19 nt, Homo sapiens
  misc_RNA (1)...(19): siRNA sense strand
cagcaacaccuccuugucu

SEQ ID NO: 941578 - RNA, 19 nt, Homo sapiens
  misc_RNA (1)...(19): siRNA sense strand
cgagaggaguuggaucgau

SEQ ID NO: 941579 - RNA, 19 nt, Homo sapiens
  misc_RNA (1)...(19): siRNA sense strand
ggagcaagagcugauggaa

SEQ ID NO: 941580 - RNA, 19 nt, Homo sapiens
  misc_RNA (1)...(19): siRNA sense strand
gggcuuugggugaacauga

SEQ ID NO: 941581 - RNA, 19 nt, Homo sapiens
  misc_RNA (1)...(19): siRNA sense strand
gugcagcccaucaccaguu

SEQ ID NO: 941582 - RNA, 19 nt, Homo sapiens
  misc_RNA (1)...(19): siRNA sense strand
ccacgacggccuucacagu

SEQ ID NO: 941583 - RNA, 19 nt, Homo sapiens
  misc_RNA (1)...(19): siRNA sense strand
gcaccucaucucagucugu

SEQ ID NO: 941584 - RNA, 19 nt, Homo sapiens
  misc_RNA (1)...(19): siRNA sense strand
ucaccgcccucagugucua

SEQ ID NO: 941585 - RNA, 19 nt, Homo sapiens
  misc_RNA (1)...(19): siRNA sense strand
cuacguggaugugcagaag

SEQ ID NO: 941586 - RNA, 19 nt, Homo sapiens
  misc_RNA (1)...(19): siRNA sense strand
cuagucugcuacagguuga

SEQ ID NO: 941587 - RNA, 19 nt, Homo sapiens
  misc_RNA (1)...(19): siRNA sense strand
ugcaacaacggcuccauuu

SEQ ID NO: 941588 - RNA, 19 nt, Homo sapiens
  misc_RNA (1)...(19): siRNA sense strand
caacuuccugcgcaccaaa

SEQ ID NO: 941589 - RNA, 19 nt, Homo sapiens
  misc_RNA (1)...(19): siRNA sense strand
uuggaucgaucuucuugug

SEQ ID NO: 941590 - RNA, 19 nt, Homo sapiens
  misc_RNA (1)...(19): siRNA sense strand
ucaaugaaacuuccuuuug

SEQ ID NO: 941591 - RNA, 19 nt, Homo sapiens
  misc_RNA (1)...(19): siRNA sense strand
aacaacggcuccauuuacu

SEQ ID NO: 941592 - RNA, 19 nt, Homo sapiens
  misc_RNA (1)...(19): siRNA sense strand
cccacucgcuuccuuuaag

SEQ ID NO: 941593 - RNA, 19 nt, Homo sapiens
  misc_RNA (1)...(19): siRNA sense strand
agaucaugcugucggagaa

SEQ ID NO: 941594 - RNA, 19 nt, Homo sapiens
  misc_RNA (1)...(19): siRNA sense strand
caccaguguucccagugaa

SEQ ID NO: 941595 - RNA, 19 nt, Homo sapiens
  misc_RNA (1)...(19): siRNA sense strand
gggacgaccagcuaguguu

SEQ ID NO: 941596 - RNA, 19 nt, Homo sapiens
  misc_RNA (1)...(19): siRNA sense strand
acguggaugugcagaaguu

SEQ ID NO: 941597 - RNA, 19 nt, Homo sapiens
  misc_RNA (1)...(19): siRNA sense strand
gccuauacccaguuucuag

SEQ ID NO: 941598 - RNA, 19 nt, Homo sapiens
  misc_RNA (1)...(19): siRNA sense strand
ccggagcaaucuucaucga

SEQ ID NO: 941599 - RNA, 19 nt, Homo sapiens
  misc_RNA (1)...(19): siRNA sense strand
caugaagcccaguucuaug

SEQ ID NO: 941600 - RNA, 19 nt, Homo sapiens
  misc_RNA (1)...(19): siRNA sense strand
ugacggagcaagagcugau

SEQ ID NO: 941601 - RNA, 19 nt, Homo sapiens
  misc_RNA (1)...(19): siRNA sense strand
cccaguuucuagucugcua

SEQ ID NO: 941602 - RNA, 19 nt, Homo sapiens
  misc_RNA (1)...(19): siRNA sense strand
uuggaucgcuguggccuau

SEQ ID NO: 941603 - RNA, 19 nt, Homo sapiens
  misc_RNA (1)...(19): siRNA sense strand
guaaaucacuggagaauuc

SEQ ID NO: 941604 - RNA, 19 nt, Homo sapiens
  misc_RNA (1)...(19): siRNA sense strand
ggcaaggucuuccauaaua

SEQ ID NO: 941605 - RNA, 19 nt, Homo sapiens
  misc_RNA (1)...(19): siRNA sense strand
ggacagaacacuacaaaug

SEQ ID NO: 941606 - RNA, 19 nt, Homo sapiens
  misc_RNA (1)...(19): siRNA sense strand
ggaaagaaaucuaacacau

SEQ ID NO: 941607 - RNA, 19 nt, Homo sapiens
  misc_RNA (1)...(19): siRNA sense strand
gagaagccauauaaaugua

SEQ ID NO: 941608 - RNA, 19 nt, Homo sapiens
  misc_RNA (1)...(19): siRNA sense strand
gagagaaaccuuauaaaug

SEQ ID NO: 941609 - RNA, 19 nt, Homo sapiens
  misc_RNA (1)...(19): siRNA sense strand
caucaaggcuuacauuuua

SEQ ID NO: 941610 - RNA, 19 nt, Homo sapiens
  misc_RNA (1)...(19): siRNA sense strand
agagaaaccuuacaaaugu

SEQ ID NO: 941611 - RNA, 19 nt, Homo sapiens
  misc_RNA (1)...(19): siRNA sense strand
ugagaaaccuuauaagugu

SEQ ID NO: 941612 - RNA, 19 nt, Homo sapiens
  misc_RNA (1)...(19): siRNA sense strand
agagaaaccuuacaaaugu

SEQ ID NO: 941613 - RNA, 19 nt, Homo sapiens
  misc_RNA (1)...(19): siRNA sense strand
agagaaaccuuacaaaugu

SEQ ID NO: 941614 - RNA, 19 nt, Homo sapiens
  misc_RNA (1)...(19): siRNA sense strand
agagaaaccuuacaaaugu

SEQ ID NO: 941615 - RNA, 19 nt, Homo sapiens
  misc_RNA (1)...(19): siRNA sense strand
caacaucggacaauucaua

SEQ ID NO: 941616 - RNA, 19 nt, Homo sapiens
  misc_RNA (1)...(19): siRNA sense strand
ccacauuucucauacauau

SEQ ID NO: 941617 - RNA, 19 nt, Homo sapiens
  misc_RNA (1)...(19): siRNA sense strand
gagagaaaccuuacaaaug

SEQ ID NO: 941618 - RNA, 19 nt, Homo sapiens
  misc_RNA (1)...(19): siRNA sense strand
gagagaaaccuuacaaaug

SEQ ID NO: 941619 - RNA, 19 nt, Homo sapiens
  misc_RNA (1)...(19): siRNA sense strand
gagagaaaccuuacaaaug

SEQ ID NO: 941620 - RNA, 19 nt, Homo sapiens
  misc_RNA (1)...(19): siRNA sense strand
gagagaaaccuuacaaaug

SEQ ID NO: 941621 - RNA, 19 nt, Homo sapiens
  misc_RNA (1)...(19): siRNA sense strand
ggcaaggucuuuaaucaaa

SEQ ID NO: 941622 - RNA, 19 nt, Homo sapiens
  misc_RNA (1)...(19): siRNA sense strand
gagagaagccauauaaaug

SEQ ID NO: 941623 - RNA, 19 nt, Homo sapiens
  misc_RNA (1)...(19): siRNA sense strand
ggagagaaaccauauaaau

SEQ ID NO: 941624 - RNA, 19 nt, Homo sapiens
  misc_RNA (1)...(19): siRNA sense strand
ggagagaaaccuuauaaau

SEQ ID NO: 941625 - RNA, 19 nt, Homo sapiens
  misc_RNA (1)...(19): siRNA sense strand
caacaguaguuccuuaguu

SEQ ID NO: 941626 - RNA, 19 nt, Homo sapiens
  misc_RNA (1)...(19): siRNA sense strand
ggcaaagucuucagucaaa

SEQ ID NO: 941627 - RNA, 19 nt, Homo sapiens
  misc_RNA (1)...(19): siRNA sense strand
caacaucacagaauccaua

SEQ ID NO: 941628 - RNA, 19 nt, Homo sapiens
  misc_RNA (1)...(19): siRNA sense strand
gacaaagcauucagucaaa

SEQ ID NO: 941629 - RNA, 19 nt, Homo sapiens
  misc_RNA (1)...(19): siRNA sense strand
ggagagaagccauauaaau

SEQ ID NO: 941630 - RNA, 19 nt, Homo sapiens
  misc_RNA (1)...(19): siRNA sense strand
gaaagaaaucuaacacaug

SEQ ID NO: 941631 - RNA, 19 nt, Homo sapiens
  misc_RNA (1)...(19): siRNA sense strand
caacaucugaucauucaua

SEQ ID NO: 941632 - RNA, 19 nt, Homo sapiens
  misc_RNA (1)...(19): siRNA sense strand
guggcaagaucuucaauaa

SEQ ID NO: 941633 - RNA, 19 nt, Homo sapiens
  misc_RNA (1)...(19): siRNA sense strand
guucaagccucacuaauca

SEQ ID NO: 941634 - RNA, 19 nt, Homo sapiens
  misc_RNA (1)...(19): siRNA sense strand
gagagaaaccauauaaaug

SEQ ID NO: 941635 - RNA, 19 nt, Homo sapiens
  misc_RNA (1)...(19): siRNA sense strand
aaucaaaccuugcaaguca

SEQ ID NO: 941636 - RNA, 19 nt, Homo sapiens
  misc_RNA (1)...(19): siRNA sense strand
gaaaggucuuccaucauau

SEQ ID NO: 941637 - RNA, 19 nt, Homo sapiens
  misc_RNA (1)...(19): siRNA sense strand
agagaaaccuuacagaugu

SEQ ID NO: 941638 - RNA, 19 nt, Homo sapiens
  misc_RNA (1)...(19): siRNA sense strand
gcacagcauugcaggauuc

SEQ ID NO: 941639 - RNA, 19 nt, Homo sapiens
  misc_RNA (1)...(19): siRNA sense strand
gagagaaaccuuacagaug

SEQ ID NO: 941640 - RNA, 19 nt, Homo sapiens
  misc_RNA (1)...(19): siRNA sense strand
gcaaggucuuccauaauau

SEQ ID NO: 941641 - RNA, 19 nt, Homo sapiens
  misc_RNA (1)...(19): siRNA sense strand
caacguauuucuucuacug

SEQ ID NO: 941642 - RNA, 19 nt, Homo sapiens
  misc_RNA (1)...(19): siRNA sense strand
gcauaucauuggagaauuc

SEQ ID NO: 941643 - RNA, 19 nt, Homo sapiens
  misc_RNA (1)...(19): siRNA sense strand
gcagucacaucuaccagaa

SEQ ID NO: 941644 - RNA, 19 nt, Homo sapiens
  misc_RNA (1)...(19): siRNA sense strand
ggagagaaaccuuacaaau

SEQ ID NO: 941645 - RNA, 19 nt, Homo sapiens
  misc_RNA (1)...(19): siRNA sense strand
ggagagaaaccuuacaaau

SEQ ID NO: 941646 - RNA, 19 nt, Homo sapiens
  misc_RNA (1)...(19): siRNA sense strand
ggagagaaaccuuacaaau

SEQ ID NO: 941647 - RNA, 19 nt, Homo sapiens
  misc_RNA (1)...(19): siRNA sense strand
ggagagaaaccuuacaaau

SEQ ID NO: 941648 - RNA, 19 nt, Homo sapiens
  misc_RNA (1)...(19): siRNA sense strand
ggcaagaucuucaauaaaa

SEQ ID NO: 941649 - RNA, 19 nt, Homo sapiens
  misc_RNA (1)...(19): siRNA sense strand
guaaaucacuggagaaucc

SEQ ID NO: 941650 - RNA, 19 nt, Homo sapiens
  misc_RNA (1)...(19): siRNA sense strand
ggucuucggucuaaacuca

SEQ ID NO: 941651 - RNA, 19 nt, Homo sapiens
  misc_RNA (1)...(19): siRNA sense strand
uaccagaacugcagcuauu

SEQ ID NO: 941652 - RNA, 19 nt, Homo sapiens
  misc_RNA (1)...(19): siRNA sense strand
ucacaagucaucccuagua

SEQ ID NO: 941653 - RNA, 19 nt, Homo sapiens
  misc_RNA (1)...(19): siRNA sense strand
ucacaagucaucccuagua

SEQ ID NO: 941654 - RNA, 19 nt, Homo sapiens
  misc_RNA (1)...(19): siRNA sense strand
gaaaggucuuccaucaaau

SEQ ID NO: 941655 - RNA, 19 nt, Homo sapiens
  misc_RNA (1)...(19): siRNA sense strand
cgucaacaguaguuccuua

SEQ ID NO: 941656 - RNA, 19 nt, Homo sapiens
  misc_RNA (1)...(19): siRNA sense strand
auucauaccuugcauauca

SEQ ID NO: 941657 - RNA, 19 nt, Homo sapiens
  misc_RNA (1)...(19): siRNA sense strand
ggucuuccaucauauuuca

SEQ ID NO: 941658 - RNA, 19 nt, Homo sapiens
  misc_RNA (1)...(19): siRNA sense strand
gcacaacaucggacaauuc

SEQ ID NO: 941659 - RNA, 19 nt, Homo sapiens
  misc_RNA (1)...(19): siRNA sense strand
ggucuuccaucaaauuuca

SEQ ID NO: 941660 - RNA, 19 nt, Homo sapiens
  misc_RNA (1)...(19): siRNA sense strand
guggcaaggucuuccauaa

SEQ ID NO: 941661 - RNA, 19 nt, Homo sapiens
  misc_RNA (1)...(19): siRNA sense strand
uagaaaggaugaugcacaa

SEQ ID NO: 941662 - RNA, 19 nt, Homo sapiens
  misc_RNA (1)...(19): siRNA sense strand
caagucaucccuaguaaau

SEQ ID NO: 941663 - RNA, 19 nt, Homo sapiens
  misc_RNA (1)...(19): siRNA sense strand
caagucaucccuaguaaau

SEQ ID NO: 941664 - RNA, 19 nt, Homo sapiens
  misc_RNA (1)...(19): siRNA sense strand
gcaaggucuuuaaucaaau

SEQ ID NO: 941665 - RNA, 19 nt, Homo sapiens
  misc_RNA (1)...(19): siRNA sense strand
aacaguaguuccuuaguuu

SEQ ID NO: 941666 - RNA, 19 nt, Homo sapiens
  misc_RNA (1)...(19): siRNA sense strand
ggagagaaaccuuacagau

SEQ ID NO: 941667 - RNA, 19 nt, Homo sapiens
  misc_RNA (1)...(19): siRNA sense strand
uacaacaucugaucauuca

SEQ ID NO: 941668 - RNA, 19 nt, Homo sapiens
  misc_RNA (1)...(19): siRNA sense strand
cagcauugcaggauucaua

SEQ ID NO: 941669 - RNA, 19 nt, Homo sapiens
  misc_RNA (1)...(19): siRNA sense strand
gagaauucauacuggagaa

SEQ ID NO: 941670 - RNA, 19 nt, Homo sapiens
  misc_RNA (1)...(19): siRNA sense strand
gcacaaaagcagccuguua

SEQ ID NO: 941671 - RNA, 19 nt, Homo sapiens
  misc_RNA (1)...(19): siRNA sense strand
gcacaacaucaaagaauuc

SEQ ID NO: 941672 - RNA, 19 nt, Homo sapiens
  misc_RNA (1)...(19): siRNA sense strand
caacaucugauaauucaug

SEQ ID NO: 941673 - RNA, 19 nt, Homo sapiens
  misc_RNA (1)...(19): siRNA sense strand
gaacugcagcuauuucaag

SEQ ID NO: 941674 - RNA, 19 nt, Homo sapiens
  misc_RNA (1)...(19): siRNA sense strand
ggucuucagucacaaguca

SEQ ID NO: 941675 - RNA, 19 nt, Homo sapiens
  misc_RNA (1)...(19): siRNA sense strand
ggucuucagucacaaguca

SEQ ID NO: 941676 - RNA, 19 nt, Homo sapiens
  misc_RNA (1)...(19): siRNA sense strand
gacagaacacuacaaaugu

SEQ ID NO: 941677 - RNA, 19 nt, Homo sapiens
  misc_RNA (1)...(19): siRNA sense strand
cccaacaucugauaauuca

SEQ ID NO: 941678 - RNA, 19 nt, Homo sapiens
  misc_RNA (1)...(19): siRNA sense strand
ggucuucagucgcaauuca

SEQ ID NO: 941679 - RNA, 19 nt, Homo sapiens
  misc_RNA (1)...(19): siRNA sense strand
ggcaaggucuucagucaca

SEQ ID NO: 941680 - RNA, 19 nt, Homo sapiens
  misc_RNA (1)...(19): siRNA sense strand
ggcaaggucuucagucaca

SEQ ID NO: 941681 - RNA, 19 nt, Homo sapiens
  misc_RNA (1)...(19): siRNA sense strand
guggcaaggucuuuaauca

SEQ ID NO: 941682 - RNA, 19 nt, Homo sapiens
  misc_RNA (1)...(19): siRNA sense strand
agacgcaauuuaaauguga

SEQ ID NO: 941683 - RNA, 19 nt, Homo sapiens
  misc_RNA (1)...(19): siRNA sense strand
gagacgcaauuuaaaugug

SEQ ID NO: 941684 - RNA, 19 nt, Homo sapiens
  misc_RNA (1)...(19): siRNA sense strand
gugagaaaccuuauaagug

SEQ ID NO: 941685 - RNA, 19 nt, Homo sapiens
  misc_RNA (1)...(19): siRNA sense strand
ggcaaggccuuucaucaag

SEQ ID NO: 941686 - RNA, 19 nt, Homo sapiens
  misc_RNA (1)...(19): siRNA sense strand
gagaaaccuuacaaaugug

SEQ ID NO: 941687 - RNA, 19 nt, Homo sapiens
  misc_RNA (1)...(19): siRNA sense strand
cacaagucaucccuaguaa

SEQ ID NO: 941688 - RNA, 19 nt, Homo sapiens
  misc_RNA (1)...(19): siRNA sense strand
cacaagucaucccuaguaa

SEQ ID NO: 941689 - RNA, 19 nt, Homo sapiens
  misc_RNA (1)...(19): siRNA sense strand
gauguaauguauguggaaa

SEQ ID NO: 941690 - RNA, 19 nt, Homo sapiens
  misc_RNA (1)...(19): siRNA sense strand
gaauguggcaaggucuuua

SEQ ID NO: 941691 - RNA, 19 nt, Homo sapiens
  misc_RNA (1)...(19): siRNA sense strand
ugauauauguggcaagauc

SEQ ID NO: 941692 - RNA, 19 nt, Homo sapiens
  misc_RNA (1)...(19): siRNA sense strand
caucaaagaauucauacug

SEQ ID NO: 941693 - RNA, 19 nt, Homo sapiens
  misc_RNA (1)...(19): siRNA sense strand
guacaacaucugaucauuc

SEQ ID NO: 941694 - RNA, 19 nt, Homo sapiens
  misc_RNA (1)...(19): siRNA sense strand
ggugagaaaccuuauaagu

SEQ ID NO: 941695 - RNA, 19 nt, Homo sapiens
  misc_RNA (1)...(19): siRNA sense strand
gcaagucaucaaagaauuc

SEQ ID NO: 941696 - RNA, 19 nt, Homo sapiens
  misc_RNA (1)...(19): siRNA sense strand
agucaucccuaguaaauca

SEQ ID NO: 941697 - RNA, 19 nt, Homo sapiens
  misc_RNA (1)...(19): siRNA sense strand
gauuaaacccgcagucaca

SEQ ID NO: 941698 - RNA, 19 nt, Homo sapiens
  misc_RNA (1)...(19): siRNA sense strand
agucaucccuaguaaauca

SEQ ID NO: 941699 - RNA, 19 nt, Homo sapiens
  misc_RNA (1)...(19): siRNA sense strand
gauucauacuggagagaaa

SEQ ID NO: 941700 - RNA, 19 nt, Homo sapiens
  misc_RNA (1)...(19): siRNA sense strand
aagcaaauauugggacaga

SEQ ID NO: 941701 - RNA, 19 nt, Homo sapiens
  misc_RNA (1)...(19): siRNA sense strand
gacaauucauacuggagaa

SEQ ID NO: 941702 - RNA, 19 nt, Homo sapiens
  misc_RNA (1)...(19): siRNA sense strand
gaaaggaugaugcacaaaa

SEQ ID NO: 941703 - RNA, 19 nt, Homo sapiens
  misc_RNA (1)...(19): siRNA sense strand
gcauaugccucaaucaaag

SEQ ID NO: 941704 - RNA, 19 nt, Homo sapiens
  misc_RNA (1)...(19): siRNA sense strand
gagcgucucugcugugcaa

SEQ ID NO: 941705 - RNA, 19 nt, Homo sapiens
  misc_RNA (1)...(19): siRNA sense strand
caagugcgccuuccuguug

SEQ ID NO: 941706 - RNA, 19 nt, Homo sapiens
  misc_RNA (1)...(19): siRNA sense strand
gcaaggacgacgacacugu

SEQ ID NO: 941707 - RNA, 19 nt, Homo sapiens
  misc_RNA (1)...(19): siRNA sense strand
gcaagugcgccuuccuguu

SEQ ID NO: 941708 - RNA, 19 nt, Homo sapiens
  misc_RNA (1)...(19): siRNA sense strand
gaaccuggucaccgaagug

SEQ ID NO: 941709 - RNA, 19 nt, Homo sapiens
  misc_RNA (1)...(19): siRNA sense strand
ggugguguacgcccuguuu

SEQ ID NO: 941710 - RNA, 19 nt, Homo sapiens
  misc_RNA (1)...(19): siRNA sense strand
gggcucucaugcuguauca

SEQ ID NO: 941711 - RNA, 19 nt, Homo sapiens
  misc_RNA (1)...(19): siRNA sense strand
ggaaccuggucaccgaagu

SEQ ID NO: 941712 - RNA, 19 nt, Homo sapiens
  misc_RNA (1)...(19): siRNA sense strand
gaauaaccaggaacgucaa

SEQ ID NO: 941713 - RNA, 19 nt, Homo sapiens
  misc_RNA (1)...(19): siRNA sense strand
ucucugcugugcaaucuca

SEQ ID NO: 941714 - RNA, 19 nt, Homo sapiens
  misc_RNA (1)...(19): siRNA sense strand
ggccguagacagaaucaug

SEQ ID NO: 941715 - RNA, 19 nt, Homo sapiens
  misc_RNA (1)...(19): siRNA sense strand
ccgcauaugccucaaucaa

SEQ ID NO: 941716 - RNA, 19 nt, Homo sapiens
  misc_RNA (1)...(19): siRNA sense strand
uagacagaaucaugaacga

SEQ ID NO: 941717 - RNA, 19 nt, Homo sapiens
  misc_RNA (1)...(19): siRNA sense strand
ggagccgucacucugcuaa

SEQ ID NO: 941718 - RNA, 19 nt, Homo sapiens
  misc_RNA (1)...(19): siRNA sense strand
ucacucugcuaagccugua

SEQ ID NO: 941719 - RNA, 19 nt, Homo sapiens
  misc_RNA (1)...(19): siRNA sense strand
uguuugggcuggccgaguu

SEQ ID NO: 941720 - RNA, 19 nt, Homo sapiens
  misc_RNA (1)...(19): siRNA sense strand
cgcauaugccucaaucaaa

SEQ ID NO: 941721 - RNA, 19 nt, Homo sapiens
  misc_RNA (1)...(19): siRNA sense strand
gccguagacagaaucauga

SEQ ID NO: 941722 - RNA, 19 nt, Homo sapiens
  misc_RNA (1)...(19): siRNA sense strand
gugcguccgcuguuccuaa

SEQ ID NO: 941723 - RNA, 19 nt, Homo sapiens
  misc_RNA (1)...(19): siRNA sense strand
uguccugguucccuuucua

SEQ ID NO: 941724 - RNA, 19 nt, Homo sapiens
  misc_RNA (1)...(19): siRNA sense strand
gagcacuuccuggagcaaa

SEQ ID NO: 941725 - RNA, 19 nt, Homo sapiens
  misc_RNA (1)...(19): siRNA sense strand
gcgccuuccuguuguucug

SEQ ID NO: 941726 - RNA, 19 nt, Homo sapiens
  misc_RNA (1)...(19): siRNA sense strand
ccugguucccuuucuacua

SEQ ID NO: 941727 - RNA, 19 nt, Homo sapiens
  misc_RNA (1)...(19): siRNA sense strand
cugguucccuuucuacuac

SEQ ID NO: 941728 - RNA, 19 nt, Homo sapiens
  misc_RNA (1)...(19): siRNA sense strand
uagaaaggcucuucagaaa

SEQ ID NO: 941729 - RNA, 19 nt, Homo sapiens
  misc_RNA (1)...(19): siRNA sense strand
gaaaggcucuucagaaacu

SEQ ID NO: 941730 - RNA, 19 nt, Homo sapiens
  misc_RNA (1)...(19): siRNA sense strand
gaccaagaaucacuagaaa

SEQ ID NO: 941731 - RNA, 19 nt, Homo sapiens
  misc_RNA (1)...(19): siRNA sense strand
ggagagagccaagaucauu

SEQ ID NO: 941732 - RNA, 19 nt, Homo sapiens
  misc_RNA (1)...(19): siRNA sense strand
aaacacagaccaagaauca

SEQ ID NO: 941733 - RNA, 19 nt, Homo sapiens
  misc_RNA (1)...(19): siRNA sense strand
gacacagccucucguaaga

SEQ ID NO: 941734 - RNA, 19 nt, Homo sapiens
  misc_RNA (1)...(19): siRNA sense strand
caagaaagcagaggagaga

SEQ ID NO: 941735 - RNA, 19 nt, Homo sapiens
  misc_RNA (1)...(19): siRNA sense strand
gagagagccaagaucauuu

SEQ ID NO: 941736 - RNA, 19 nt, Homo sapiens
  misc_RNA (1)...(19): siRNA sense strand
cuagaaaggcucuucagaa

SEQ ID NO: 941737 - RNA, 19 nt, Homo sapiens
  misc_RNA (1)...(19): siRNA sense strand
gaggagagagccaagauca

SEQ ID NO: 941738 - RNA, 19 nt, Homo sapiens
  misc_RNA (1)...(19): siRNA sense strand
cacagccucucguaagaaa

SEQ ID NO: 941739 - RNA, 19 nt, Homo sapiens
  misc_RNA (1)...(19): siRNA sense strand
ugccauagaucaagaugug

SEQ ID NO: 941740 - RNA, 19 nt, Homo sapiens
  misc_RNA (1)...(19): siRNA sense strand
ccaccaagccaucaucaug

SEQ ID NO: 941741 - RNA, 19 nt, Homo sapiens
  misc_RNA (1)...(19): siRNA sense strand
cgacacagccucucguaag

SEQ ID NO: 941742 - RNA, 19 nt, Homo sapiens
  misc_RNA (1)...(19): siRNA sense strand
gaaacucuggagacaagaa

SEQ ID NO: 941743 - RNA, 19 nt, Homo sapiens
  misc_RNA (1)...(19): siRNA sense strand
ccaagaaucacuagaaagg

SEQ ID NO: 941744 - RNA, 19 nt, Homo sapiens
  misc_RNA (1)...(19): siRNA sense strand
gaaaacgcgugcccugaug

SEQ ID NO: 941745 - RNA, 19 nt, Homo sapiens
  misc_RNA (1)...(19): siRNA sense strand
ugaaacugcggaaauauuc

SEQ ID NO: 941746 - RNA, 19 nt, Homo sapiens
  misc_RNA (1)...(19): siRNA sense strand
cugauggccuugaagaaga

SEQ ID NO: 941747 - RNA, 19 nt, Homo sapiens
  misc_RNA (1)...(19): siRNA sense strand
agaccaagaaucacuagaa

SEQ ID NO: 941748 - RNA, 19 nt, Homo sapiens
  misc_RNA (1)...(19): siRNA sense strand
caacaucuuugaaaacaca

SEQ ID NO: 941749 - RNA, 19 nt, Homo sapiens
  misc_RNA (1)...(19): siRNA sense strand
agacaagcuuuuccaguuu

SEQ ID NO: 941750 - RNA, 19 nt, Homo sapiens
  misc_RNA (1)...(19): siRNA sense strand
gaaagccgugggcaacauc

SEQ ID NO: 941751 - RNA, 19 nt, Homo sapiens
  misc_RNA (1)...(19): siRNA sense strand
aagacaagcuuuuccaguu

SEQ ID NO: 941752 - RNA, 19 nt, Homo sapiens
  misc_RNA (1)...(19): siRNA sense strand
uucugaaacugcggaaaua

SEQ ID NO: 941753 - RNA, 19 nt, Homo sapiens
  misc_RNA (1)...(19): siRNA sense strand
gugggcaacaucuuugaaa

SEQ ID NO: 941754 - RNA, 19 nt, Homo sapiens
  misc_RNA (1)...(19): siRNA sense strand
cugaaacugcggaaauauu

SEQ ID NO: 941755 - RNA, 19 nt, Homo sapiens
  misc_RNA (1)...(19): siRNA sense strand
aucaagauguggaggagaa

SEQ ID NO: 941756 - RNA, 19 nt, Homo sapiens
  misc_RNA (1)...(19): siRNA sense strand
gcagaggagagagccaaga

SEQ ID NO: 941757 - RNA, 19 nt, Homo sapiens
  misc_RNA (1)...(19): siRNA sense strand
ugaagaagaggacaaaaga

SEQ ID NO: 941758 - RNA, 19 nt, Homo sapiens
  misc_RNA (1)...(19): siRNA sense strand
caccaagccaucaucaugu

SEQ ID NO: 941759 - RNA, 19 nt, Homo sapiens
  misc_RNA (1)...(19): siRNA sense strand
ugaaaacacagaccaagaa

SEQ ID NO: 941760 - RNA, 19 nt, Homo sapiens
  misc_RNA (1)...(19): siRNA sense strand
agaaagccgugggcaacau

SEQ ID NO: 941761 - RNA, 19 nt, Homo sapiens
  misc_RNA (1)...(19): siRNA sense strand
aaacucuggagacaagaaa

SEQ ID NO: 941762 - RNA, 19 nt, Homo sapiens
  misc_RNA (1)...(19): siRNA sense strand
ggcaacaucuuugaaaaca

SEQ ID NO: 941763 - RNA, 19 nt, Homo sapiens
  misc_RNA (1)...(19): siRNA sense strand
gaaaacacagaccaagaau

SEQ ID NO: 941764 - RNA, 19 nt, Homo sapiens
  misc_RNA (1)...(19): siRNA sense strand
cagaggagagagccaagau

SEQ ID NO: 941765 - RNA, 19 nt, Homo sapiens
  misc_RNA (1)...(19): siRNA sense strand
gcccugauggccuugaaga

SEQ ID NO: 941766 - RNA, 19 nt, Homo sapiens
  misc_RNA (1)...(19): siRNA sense strand
ccacauaccugcugaucuu

SEQ ID NO: 941767 - RNA, 19 nt, Homo sapiens
  misc_RNA (1)...(19): siRNA sense strand
gcaaugggcugaccugucu

SEQ ID NO: 941768 - RNA, 19 nt, Homo sapiens
  misc_RNA (1)...(19): siRNA sense strand
ggagacaagugaccaagau

SEQ ID NO: 941769 - RNA, 19 nt, Homo sapiens
  misc_RNA (1)...(19): siRNA sense strand
ugaccaagaugcuguuugu

SEQ ID NO: 941770 - RNA, 19 nt, Homo sapiens
  misc_RNA (1)...(19): siRNA sense strand
gcacgcuacuguuugagau

SEQ ID NO: 941771 - RNA, 19 nt, Homo sapiens
  misc_RNA (1)...(19): siRNA sense strand
gcacgccuaccaacuacua

SEQ ID NO: 941772 - RNA, 19 nt, Homo sapiens
  misc_RNA (1)...(19): siRNA sense strand
ccaccgcgcugcucuucuu

SEQ ID NO: 941773 - RNA, 19 nt, Homo sapiens
  misc_RNA (1)...(19): siRNA sense strand
gcagccagguccagauaca

SEQ ID NO: 941774 - RNA, 19 nt, Homo sapiens
  misc_RNA (1)...(19): siRNA sense strand
gcagcacccugugugaugu

SEQ ID NO: 941775 - RNA, 19 nt, Homo sapiens
  misc_RNA (1)...(19): siRNA sense strand
gggagaggcugcugcucau

SEQ ID NO: 941776 - RNA, 19 nt, Homo sapiens
  misc_RNA (1)...(19): siRNA sense strand
gugccagacucagcuguuu

SEQ ID NO: 941777 - RNA, 19 nt, Homo sapiens
  misc_RNA (1)...(19): siRNA sense strand
gggcguugguggcugcuau

SEQ ID NO: 941778 - RNA, 19 nt, Homo sapiens
  misc_RNA (1)...(19): siRNA sense strand
cagcagccagguccagaua

SEQ ID NO: 941779 - RNA, 19 nt, Homo sapiens
  misc_RNA (1)...(19): siRNA sense strand
gcgcacgccuaccaacuac

SEQ ID NO: 941780 - RNA, 19 nt, Homo sapiens
  misc_RNA (1)...(19): siRNA sense strand
acuccucucugccucaauu

SEQ ID NO: 941781 - RNA, 19 nt, Homo sapiens
  misc_RNA (1)...(19): siRNA sense strand
cgucaucuccggcaucuuc

SEQ ID NO: 941782 - RNA, 19 nt, Homo sapiens
  misc_RNA (1)...(19): siRNA sense strand
cccuggagcucuaugagau

SEQ ID NO: 941783 - RNA, 19 nt, Homo sapiens
  misc_RNA (1)...(19): siRNA sense strand
ggcagcacccugugugaug

SEQ ID NO: 941784 - RNA, 19 nt, Homo sapiens
  misc_RNA (1)...(19): siRNA sense strand
guugguggcugcuauuucc

SEQ ID NO: 941785 - RNA, 19 nt, Homo sapiens
  misc_RNA (1)...(19): siRNA sense strand
gagacaagugaccaagaug

SEQ ID NO: 941786 - RNA, 19 nt, Homo sapiens
  misc_RNA (1)...(19): siRNA sense strand
ucuccggcaucuucuucua

SEQ ID NO: 941787 - RNA, 19 nt, Homo sapiens
  misc_RNA (1)...(19): siRNA sense strand
uccagccgcuuccgagaga

SEQ ID NO: 941788 - RNA, 19 nt, Homo sapiens
  misc_RNA (1)...(19): siRNA sense strand
uaccaacuacuaccucuuc

SEQ ID NO: 941789 - RNA, 19 nt, Homo sapiens
  misc_RNA (1)...(19): siRNA sense strand
gaccacauguuuggaauua

SEQ ID NO: 941790 - RNA, 19 nt, Homo sapiens
  misc_RNA (1)...(19): siRNA sense strand
gaacgcagaucaccuacau

SEQ ID NO: 941791 - RNA, 19 nt, Homo sapiens
  misc_RNA (1)...(19): siRNA sense strand
gcauguggcuauccuguga

SEQ ID NO: 941792 - RNA, 19 nt, Homo sapiens
  misc_RNA (1)...(19): siRNA sense strand
ucacucagcuucuccacaa

SEQ ID NO: 941793 - RNA, 19 nt, Homo sapiens
  misc_RNA (1)...(19): siRNA sense strand
cccaggaggugguacaaua

SEQ ID NO: 941794 - RNA, 19 nt, Homo sapiens
  misc_RNA (1)...(19): siRNA sense strand
ccacauguuuggaauuaug

SEQ ID NO: 941795 - RNA, 19 nt, Homo sapiens
  misc_RNA (1)...(19): siRNA sense strand
ugaggaaacuguggaagaa

SEQ ID NO: 941796 - RNA, 19 nt, Homo sapiens
  misc_RNA (1)...(19): siRNA sense strand
gaguucaagugcaagcaua

SEQ ID NO: 941797 - RNA, 19 nt, Homo sapiens
  misc_RNA (1)...(19): siRNA sense strand
ggauggagauaccaacaca

SEQ ID NO: 941798 - RNA, 19 nt, Homo sapiens
  misc_RNA (1)...(19): siRNA sense strand
caacuuggguccagaagac

SEQ ID NO: 941799 - RNA, 19 nt, Homo sapiens
  misc_RNA (1)...(19): siRNA sense strand
ggauggugcuggaguucaa

SEQ ID NO: 941800 - RNA, 19 nt, Homo sapiens
  misc_RNA (1)...(19): siRNA sense strand
cuaacagacuugcuacuca

SEQ ID NO: 941801 - RNA, 19 nt, Homo sapiens
  misc_RNA (1)...(19): siRNA sense strand
gacuggagaccacauguuu

SEQ ID NO: 941802 - RNA, 19 nt, Homo sapiens
  misc_RNA (1)...(19): siRNA sense strand
gagaggugccgaaguuuca

SEQ ID NO: 941803 - RNA, 19 nt, Homo sapiens
  misc_RNA (1)...(19): siRNA sense strand
ggagaccacauguuuggaa

SEQ ID NO: 941804 - RNA, 19 nt, Homo sapiens
  misc_RNA (1)...(19): siRNA sense strand
caugauguauucacaaguc

SEQ ID NO: 941805 - RNA, 19 nt, Homo sapiens
  misc_RNA (1)...(19): siRNA sense strand
gagaccacauguuuggaau

SEQ ID NO: 941806 - RNA, 19 nt, Homo sapiens
  misc_RNA (1)...(19): siRNA sense strand
cuacaucggacuucaauuc

SEQ ID NO: 941807 - RNA, 19 nt, Homo sapiens
  misc_RNA (1)...(19): siRNA sense strand
gcuacuaacagacuugcua

SEQ ID NO: 941808 - RNA, 19 nt, Homo sapiens
  misc_RNA (1)...(19): siRNA sense strand
caucggacuucaauucauc

SEQ ID NO: 941809 - RNA, 19 nt, Homo sapiens
  misc_RNA (1)...(19): siRNA sense strand
gcagccaagugcuuugaca

SEQ ID NO: 941810 - RNA, 19 nt, Homo sapiens
  misc_RNA (1)...(19): siRNA sense strand
ucaccaccuucaacacgua

SEQ ID NO: 941811 - RNA, 19 nt, Homo sapiens
  misc_RNA (1)...(19): siRNA sense strand
ggggagaggugccgaaguu

SEQ ID NO: 941812 - RNA, 19 nt, Homo sapiens
  misc_RNA (1)...(19): siRNA sense strand
ggagaggugccgaaguuuc

SEQ ID NO: 941813 - RNA, 19 nt, Homo sapiens
  misc_RNA (1)...(19): siRNA sense strand
gaagacuggagaccacaug

SEQ ID NO: 941814 - RNA, 19 nt, Homo sapiens
  misc_RNA (1)...(19): siRNA sense strand
gggaugaccgguucuccuu

SEQ ID NO: 941815 - RNA, 19 nt, Homo sapiens
  misc_RNA (1)...(19): siRNA sense strand
gugaggaaacuguggaaga

SEQ ID NO: 941816 - RNA, 19 nt, Homo sapiens
  misc_RNA (1)...(19): siRNA sense strand
ggagauaccaacacaucca

SEQ ID NO: 941817 - RNA, 19 nt, Homo sapiens
  misc_RNA (1)...(19): siRNA sense strand
gauguauucacaagucuuc

SEQ ID NO: 941818 - RNA, 19 nt, Homo sapiens
  misc_RNA (1)...(19): siRNA sense strand
ggaguggcauguggcuauc

SEQ ID NO: 941819 - RNA, 19 nt, Homo sapiens
  misc_RNA (1)...(19): siRNA sense strand
gagcgccuuugcugcuguu

SEQ ID NO: 941820 - RNA, 19 nt, Homo sapiens
  misc_RNA (1)...(19): siRNA sense strand
ucaccuacaucggacuuca

SEQ ID NO: 941821 - RNA, 19 nt, Homo sapiens
  misc_RNA (1)...(19): siRNA sense strand
caucagcuuccuccugcua

SEQ ID NO: 941822 - RNA, 19 nt, Homo sapiens
  misc_RNA (1)...(19): siRNA sense strand
uggcugggccuucuacaug

SEQ ID NO: 941823 - RNA, 19 nt, Homo sapiens
  misc_RNA (1)...(19): siRNA sense strand
ugggaacgcagaucaccua

SEQ ID NO: 941824 - RNA, 19 nt, Homo sapiens
  misc_RNA (1)...(19): siRNA sense strand
gaucaccuacaucggacuu

SEQ ID NO: 941825 - RNA, 19 nt, Homo sapiens
  misc_RNA (1)...(19): siRNA sense strand
gacuucaauucaucagcuu

SEQ ID NO: 941826 - RNA, 19 nt, Homo sapiens
  misc_RNA (1)...(19): siRNA sense strand
cgucggcugucaccaccuu

SEQ ID NO: 941827 - RNA, 19 nt, Homo sapiens
  misc_RNA (1)...(19): siRNA sense strand
uaucugccauccucagcau

SEQ ID NO: 941828 - RNA, 19 nt, Homo sapiens
  misc_RNA (1)...(19): siRNA sense strand
cggaguggcauguggcuau

SEQ ID NO: 941829 - RNA, 19 nt, Homo sapiens
  misc_RNA (1)...(19): siRNA sense strand
gaggugccgaaguuucauu

SEQ ID NO: 941830 - RNA, 19 nt, Homo sapiens
  misc_RNA (1)...(19): siRNA sense strand
ggccagcggacacuccuau

SEQ ID NO: 941831 - RNA, 19 nt, Homo sapiens
  misc_RNA (1)...(19): siRNA sense strand
gaccacauguuuggaauua

SEQ ID NO: 941832 - RNA, 19 nt, Homo sapiens
  misc_RNA (1)...(19): siRNA sense strand
gaacaagggauuucaaaga

SEQ ID NO: 941833 - RNA, 19 nt, Homo sapiens
  misc_RNA (1)...(19): siRNA sense strand
gcaguuaggucaucuguag

SEQ ID NO: 941834 - RNA, 19 nt, Homo sapiens
  misc_RNA (1)...(19): siRNA sense strand
gaacgcagaucaccuacau

SEQ ID NO: 941835 - RNA, 19 nt, Homo sapiens
  misc_RNA (1)...(19): siRNA sense strand
aguaagagcuucaaggaaa

SEQ ID NO: 941836 - RNA, 19 nt, Homo sapiens
  misc_RNA (1)...(19): siRNA sense strand
gcauguggcuauccuguga

SEQ ID NO: 941837 - RNA, 19 nt, Homo sapiens
  misc_RNA (1)...(19): siRNA sense strand
ucacucagcuucuccacaa

SEQ ID NO: 941838 - RNA, 19 nt, Homo sapiens
  misc_RNA (1)...(19): siRNA sense strand
cccaggaggugguacaaua

SEQ ID NO: 941839 - RNA, 19 nt, Homo sapiens
  misc_RNA (1)...(19): siRNA sense strand
ccacauguuuggaauuaug

SEQ ID NO: 941840 - RNA, 19 nt, Homo sapiens
  misc_RNA (1)...(19): siRNA sense strand
ugaggaaacuguggaagaa

SEQ ID NO: 941841 - RNA, 19 nt, Homo sapiens
  misc_RNA (1)...(19): siRNA sense strand
gaguucaagugcaagcaua

SEQ ID NO: 941842 - RNA, 19 nt, Homo sapiens
  misc_RNA (1)...(19): siRNA sense strand
ggauggagauaccaacaca

SEQ ID NO: 941843 - RNA, 19 nt, Homo sapiens
  misc_RNA (1)...(19): siRNA sense strand
caacuuggguccagaagac

SEQ ID NO: 941844 - RNA, 19 nt, Homo sapiens
  misc_RNA (1)...(19): siRNA sense strand
ggucaucuguagaggaaga

SEQ ID NO: 941845 - RNA, 19 nt, Homo sapiens
  misc_RNA (1)...(19): siRNA sense strand
ggauggugcuggaguucaa

SEQ ID NO: 941846 - RNA, 19 nt, Homo sapiens
  misc_RNA (1)...(19): siRNA sense strand
cuaacagacuugcuacuca

SEQ ID NO: 941847 - RNA, 19 nt, Homo sapiens
  misc_RNA (1)...(19): siRNA sense strand
uagaggaagagcaguguua

SEQ ID NO: 941848 - RNA, 19 nt, Homo sapiens
  misc_RNA (1)...(19): siRNA sense strand
gagcugaaagaagcaguua

SEQ ID NO: 941849 - RNA, 19 nt, Homo sapiens
  misc_RNA (1)...(19): siRNA sense strand
gacuggagaccacauguuu

SEQ ID NO: 941850 - RNA, 19 nt, Homo sapiens
  misc_RNA (1)...(19): siRNA sense strand
uaggucaucuguagaggaa

SEQ ID NO: 941851 - RNA, 19 nt, Homo sapiens
  misc_RNA (1)...(19): siRNA sense strand
gagaggugccgaaguuuca

SEQ ID NO: 941852 - RNA, 19 nt, Homo sapiens
  misc_RNA (1)...(19): siRNA sense strand
ggagaccacauguuuggaa

SEQ ID NO: 941853 - RNA, 19 nt, Homo sapiens
  misc_RNA (1)...(19): siRNA sense strand
caugauguauucacaaguc

SEQ ID NO: 941854 - RNA, 19 nt, Homo sapiens
  misc_RNA (1)...(19): siRNA sense strand
gagaccacauguuuggaau

SEQ ID NO: 941855 - RNA, 19 nt, Homo sapiens
  misc_RNA (1)...(19): siRNA sense strand
cuacaucggacuucaauuc

SEQ ID NO: 941856 - RNA, 19 nt, Homo sapiens
  misc_RNA (1)...(19): siRNA sense strand
gcuaccaccaguaucauaa

SEQ ID NO: 941857 - RNA, 19 nt, Homo sapiens
  misc_RNA (1)...(19): siRNA sense strand
cgaacugccuaccacauca

SEQ ID NO: 941858 - RNA, 19 nt, Homo sapiens
  misc_RNA (1)...(19): siRNA sense strand
gcuacuaacagacuugcua

SEQ ID NO: 941859 - RNA, 19 nt, Homo sapiens
  misc_RNA (1)...(19): siRNA sense strand
caucggacuucaauucauc

SEQ ID NO: 941860 - RNA, 19 nt, Homo sapiens
  misc_RNA (1)...(19): siRNA sense strand
gcagccaagugcuuugaca

SEQ ID NO: 941861 - RNA, 19 nt, Homo sapiens
  misc_RNA (1)...(19): siRNA sense strand
ucaccaccuucaacacgua

SEQ ID NO: 941862 - RNA, 19 nt, Homo sapiens
  misc_RNA (1)...(19): siRNA sense strand
ucaagugcaagcauaguaa

SEQ ID NO: 941863 - RNA, 19 nt, Homo sapiens
  misc_RNA (1)...(19): siRNA sense strand
gaccagcuaccaccaguau

SEQ ID NO: 941864 - RNA, 19 nt, Homo sapiens
  misc_RNA (1)...(19): siRNA sense strand
ggggagaggugccgaaguu

SEQ ID NO: 941865 - RNA, 19 nt, Homo sapiens
  misc_RNA (1)...(19): siRNA sense strand
ccacaucaccaucaguguu

SEQ ID NO: 941866 - RNA, 19 nt, Homo sapiens
  misc_RNA (1)...(19): siRNA sense strand
ggagaggugccgaaguuuc

SEQ ID NO: 941867 - RNA, 19 nt, Homo sapiens
  misc_RNA (1)...(19): siRNA sense strand
ggaacaagggauuucaaag

SEQ ID NO: 941868 - RNA, 19 nt, Homo sapiens
  misc_RNA (1)...(19): siRNA sense strand
aacaagggauuucaaagag

SEQ ID NO: 941869 - RNA, 19 nt, Homo sapiens
  misc_RNA (1)...(19): siRNA sense strand
gaagacuggagaccacaug

SEQ ID NO: 941870 - RNA, 19 nt, Homo sapiens
  misc_RNA (1)...(19): siRNA sense strand
cacaucaccaucaguguuu

SEQ ID NO: 941871 - RNA, 19 nt, Homo sapiens
  misc_RNA (1)...(19): siRNA sense strand
gggaugaccgguucuccuu

SEQ ID NO: 941872 - RNA, 19 nt, Homo sapiens
  misc_RNA (1)...(19): siRNA sense strand
guaagagcuucaaggaaaa

SEQ ID NO: 941873 - RNA, 19 nt, Homo sapiens
  misc_RNA (1)...(19): siRNA sense strand
gugaggaaacuguggaaga

SEQ ID NO: 941874 - RNA, 19 nt, Homo sapiens
  misc_RNA (1)...(19): siRNA sense strand
ccagcuaccaccaguauca

SEQ ID NO: 941875 - RNA, 19 nt, Homo sapiens
  misc_RNA (1)...(19): siRNA sense strand
ggagauaccaacacaucca

SEQ ID NO: 941876 - RNA, 19 nt, Homo sapiens
  misc_RNA (1)...(19): siRNA sense strand
gauguauucacaagucuuc

SEQ ID NO: 941877 - RNA, 19 nt, Homo sapiens
  misc_RNA (1)...(19): siRNA sense strand
ggaguggcauguggcuauc

SEQ ID NO: 941878 - RNA, 19 nt, Homo sapiens
  misc_RNA (1)...(19): siRNA sense strand
cggaacaagggauuucaaa

SEQ ID NO: 941879 - RNA, 19 nt, Homo sapiens
  misc_RNA (1)...(19): siRNA sense strand
gagcgccuuugcugcuguu

SEQ ID NO: 941880 - RNA, 19 nt, Homo sapiens
  misc_RNA (1)...(19): siRNA sense strand
ucaccuacaucggacuuca

SEQ ID NO: 941881 - RNA, 19 nt, Homo sapiens
  misc_RNA (1)...(19): siRNA sense strand
gcugaaagaagcaguuagg

SEQ ID NO: 941882 - RNA, 19 nt, Homo sapiens
  misc_RNA (1)...(19): siRNA sense strand
cugagggagucgacuucua

SEQ ID NO: 941883 - RNA, 19 nt, Homo sapiens
  misc_RNA (1)...(19): siRNA sense strand
caucagcuuccuccugcua

SEQ ID NO: 941884 - RNA, 19 nt, Homo sapiens
  misc_RNA (1)...(19): siRNA sense strand
uggcugggccuucuacaug

SEQ ID NO: 941885 - RNA, 19 nt, Homo sapiens
  misc_RNA (1)...(19): siRNA sense strand
ccaccaguaucauaaucag

SEQ ID NO: 941886 - RNA, 19 nt, Homo sapiens
  misc_RNA (1)...(19): siRNA sense strand
ggagcugaaagaagcaguu

SEQ ID NO: 941887 - RNA, 19 nt, Homo sapiens
  misc_RNA (1)...(19): siRNA sense strand
ugggaacgcagaucaccua

SEQ ID NO: 941888 - RNA, 19 nt, Homo sapiens
  misc_RNA (1)...(19): siRNA sense strand
gaucaccuacaucggacuu

SEQ ID NO: 941889 - RNA, 19 nt, Homo sapiens
  misc_RNA (1)...(19): siRNA sense strand
aagaagcaguuaggucauc

SEQ ID NO: 941890 - RNA, 19 nt, Homo sapiens
  misc_RNA (1)...(19): siRNA sense strand
ccaagauggagcucucgaa

SEQ ID NO: 941891 - RNA, 19 nt, Homo sapiens
  misc_RNA (1)...(19): siRNA sense strand
auaguaagagcuucaagga

SEQ ID NO: 941892 - RNA, 19 nt, Homo sapiens
  misc_RNA (1)...(19): siRNA sense strand
gacuucaauucaucagcuu

SEQ ID NO: 941893 - RNA, 19 nt, Homo sapiens
  misc_RNA (1)...(19): siRNA sense strand
uaucugccauccucagcau

SEQ ID NO: 941894 - RNA, 19 nt, Homo sapiens
  misc_RNA (1)...(19): siRNA sense strand
uaccaccaguaucauaauc

SEQ ID NO: 941895 - RNA, 19 nt, Homo sapiens
  misc_RNA (1)...(19): siRNA sense strand
cgucggcugucaccaccuu

SEQ ID NO: 941896 - RNA, 19 nt, Homo sapiens
  misc_RNA (1)...(19): siRNA sense strand
gaggugccgaaguuucauu

SEQ ID NO: 941897 - RNA, 19 nt, Homo sapiens
  misc_RNA (1)...(19): siRNA sense strand
cggaguggcauguggcuau

SEQ ID NO: 941898 - RNA, 19 nt, Homo sapiens
  misc_RNA (1)...(19): siRNA sense strand
ggccagcggacacuccuau

SEQ ID NO: 941899 - RNA, 19 nt, Homo sapiens
  misc_RNA (1)...(19): siRNA sense strand
gcaaggagcagaaugauaa

SEQ ID NO: 941900 - RNA, 19 nt, Homo sapiens
  misc_RNA (1)...(19): siRNA sense strand
gaacaacgcaaauuucuga

SEQ ID NO: 941901 - RNA, 19 nt, Homo sapiens
  misc_RNA (1)...(19): siRNA sense strand
gagaaaaccuucaacauga

SEQ ID NO: 941902 - RNA, 19 nt, Homo sapiens
  misc_RNA (1)...(19): siRNA sense strand
gaacuuuauuucgccauuu

SEQ ID NO: 941903 - RNA, 19 nt, Homo sapiens
  misc_RNA (1)...(19): siRNA sense strand
cccaauaucuguuugagaa

SEQ ID NO: 941904 - RNA, 19 nt, Homo sapiens
  misc_RNA (1)...(19): siRNA sense strand
gugaugcucuuccuauuug

SEQ ID NO: 941905 - RNA, 19 nt, Homo sapiens
  misc_RNA (1)...(19): siRNA sense strand
ccauuuacccaguauaaua

SEQ ID NO: 941906 - RNA, 19 nt, Homo sapiens
  misc_RNA (1)...(19): siRNA sense strand
gaagacccaauaucuguuu

SEQ ID NO: 941907 - RNA, 19 nt, Homo sapiens
  misc_RNA (1)...(19): siRNA sense strand
ggacugaauuuucuggaua

SEQ ID NO: 941908 - RNA, 19 nt, Homo sapiens
  misc_RNA (1)...(19): siRNA sense strand
cauaggcaguguagagaaa

SEQ ID NO: 941909 - RNA, 19 nt, Homo sapiens
  misc_RNA (1)...(19): siRNA sense strand
gaaagugccaagucaaauc

SEQ ID NO: 941910 - RNA, 19 nt, Homo sapiens
  misc_RNA (1)...(19): siRNA sense strand
gcaauggcaccaacgacua

SEQ ID NO: 941911 - RNA, 19 nt, Homo sapiens
  misc_RNA (1)...(19): siRNA sense strand
caagggcgaugaccugauc

SEQ ID NO: 941912 - RNA, 19 nt, Homo sapiens
  misc_RNA (1)...(19): siRNA sense strand
guacagcuaugccaaagac

SEQ ID NO: 941913 - RNA, 19 nt, Homo sapiens
  misc_RNA (1)...(19): siRNA sense strand
agagaucaaugaggaaauu

SEQ ID NO: 941914 - RNA, 19 nt, Homo sapiens
  misc_RNA (1)...(19): siRNA sense strand
caagguagacuucgacauc

SEQ ID NO: 941915 - RNA, 19 nt, Homo sapiens
  misc_RNA (1)...(19): siRNA sense strand
guauugagggacugaauuu

SEQ ID NO: 941916 - RNA, 19 nt, Homo sapiens
  misc_RNA (1)...(19): siRNA sense strand
gcugcuagcuuuggugaug

SEQ ID NO: 941917 - RNA, 19 nt, Homo sapiens
  misc_RNA (1)...(19): siRNA sense strand
gggaaagcccgaagcagaa

SEQ ID NO: 941918 - RNA, 19 nt, Homo sapiens
  misc_RNA (1)...(19): siRNA sense strand
ucaggaacaacgcaaauuu

SEQ ID NO: 941919 - RNA, 19 nt, Homo sapiens
  misc_RNA (1)...(19): siRNA sense strand
ggugaugcucuuccuauuu

SEQ ID NO: 941920 - RNA, 19 nt, Homo sapiens
  misc_RNA (1)...(19): siRNA sense strand
gccagaauccgaaucagaa

SEQ ID NO: 941921 - RNA, 19 nt, Homo sapiens
  misc_RNA (1)...(19): siRNA sense strand
ggaaagcaucccugcaugu

SEQ ID NO: 941922 - RNA, 19 nt, Homo sapiens
  misc_RNA (1)...(19): siRNA sense strand
gcgaaagcgucaggaacaa

SEQ ID NO: 941923 - RNA, 19 nt, Homo sapiens
  misc_RNA (1)...(19): siRNA sense strand
ggaaagugccaagucaaau

SEQ ID NO: 941924 - RNA, 19 nt, Homo sapiens
  misc_RNA (1)...(19): siRNA sense strand
caaauccgaaugccaauca

SEQ ID NO: 941925 - RNA, 19 nt, Homo sapiens
  misc_RNA (1)...(19): siRNA sense strand
caacaugaacuuuauuucg

SEQ ID NO: 941926 - RNA, 19 nt, Homo sapiens
  misc_RNA (1)...(19): siRNA sense strand
agucaaaucugaagcacau

SEQ ID NO: 941927 - RNA, 19 nt, Homo sapiens
  misc_RNA (1)...(19): siRNA sense strand
ccuacaaucuagccaacaa

SEQ ID NO: 941928 - RNA, 19 nt, Homo sapiens
  misc_RNA (1)...(19): siRNA sense strand
ugaagcacauggcguucuu

SEQ ID NO: 941929 - RNA, 19 nt, Homo sapiens
  misc_RNA (1)...(19): siRNA sense strand
gaucaaugaggaaauucaa

SEQ ID NO: 941930 - RNA, 19 nt, Homo sapiens
  misc_RNA (1)...(19): siRNA sense strand
gaaagcaucccugcauguc

SEQ ID NO: 941931 - RNA, 19 nt, Homo sapiens
  misc_RNA (1)...(19): siRNA sense strand
ggaagacccaauaucuguu

SEQ ID NO: 941932 - RNA, 19 nt, Homo sapiens
  misc_RNA (1)...(19): siRNA sense strand
gcuacaaccucucugucau

SEQ ID NO: 941933 - RNA, 19 nt, Homo sapiens
  misc_RNA (1)...(19): siRNA sense strand
cgaaucagaaucagaguca

SEQ ID NO: 941934 - RNA, 19 nt, Homo sapiens
  misc_RNA (1)...(19): siRNA sense strand
ggcaaggagcagaaugaua

SEQ ID NO: 941935 - RNA, 19 nt, Homo sapiens
  misc_RNA (1)...(19): siRNA sense strand
ugaacuuuauuucgccauu

SEQ ID NO: 941936 - RNA, 19 nt, Homo sapiens
  misc_RNA (1)...(19): siRNA sense strand
guagagaucaaugaggaaa

SEQ ID NO: 941937 - RNA, 19 nt, Homo sapiens
  misc_RNA (1)...(19): siRNA sense strand
cggaagacccaauaucugu

SEQ ID NO: 941938 - RNA, 19 nt, Homo sapiens
  misc_RNA (1)...(19): siRNA sense strand
ccgcgugggucagaagaaa

SEQ ID NO: 941939 - RNA, 19 nt, Homo sapiens
  misc_RNA (1)...(19): siRNA sense strand
auauggaguuguacagcua

SEQ ID NO: 941940 - RNA, 19 nt, Homo sapiens
  misc_RNA (1)...(19): siRNA sense strand
caaagaguuuauggacugu

SEQ ID NO: 941941 - RNA, 19 nt, Homo sapiens
  misc_RNA (1)...(19): siRNA sense strand
cgggaaaccuggcucuucu

SEQ ID NO: 941942 - RNA, 19 nt, Homo sapiens
  misc_RNA (1)...(19): siRNA sense strand
gaaauucaaaagcguauug

SEQ ID NO: 941943 - RNA, 19 nt, Homo sapiens
  misc_RNA (1)...(19): siRNA sense strand
ucuggaaagugccaaguca

SEQ ID NO: 941944 - RNA, 19 nt, Homo sapiens
  misc_RNA (1)...(19): siRNA sense strand
aaugauaacaccagcaaug

SEQ ID NO: 941945 - RNA, 19 nt, Homo sapiens
  misc_RNA (1)...(19): siRNA sense strand
ggcgaaagcgucaggaaca

SEQ ID NO: 941946 - RNA, 19 nt, Homo sapiens
  misc_RNA (1)...(19): siRNA sense strand
gacugucccuacaaucuag

SEQ ID NO: 941947 - RNA, 19 nt, Homo sapiens
  misc_RNA (1)...(19): siRNA sense strand
ggaacaacgcaaauuucug

SEQ ID NO: 941948 - RNA, 19 nt, Homo sapiens
  misc_RNA (1)...(19): siRNA sense strand
cugcaugucugcgauggaa

SEQ ID NO: 941949 - RNA, 19 nt, Homo sapiens
  misc_RNA (1)...(19): siRNA sense strand
caggcaaggagcagaauga

SEQ ID NO: 941950 - RNA, 19 nt, Homo sapiens
  misc_RNA (1)...(19): siRNA sense strand
uggaaagugccaagucaaa

SEQ ID NO: 941951 - RNA, 19 nt, Homo sapiens
  misc_RNA (1)...(19): siRNA sense strand
ggucagaagaaaugcacuu

SEQ ID NO: 941952 - RNA, 19 nt, Homo sapiens
  misc_RNA (1)...(19): siRNA sense strand
caggaacaacgcaaauuuc

SEQ ID NO: 941953 - RNA, 19 nt, Homo sapiens
  misc_RNA (1)...(19): siRNA sense strand
gcggaagacccaauaucug

SEQ ID NO: 941954 - RNA, 19 nt, Homo sapiens
  misc_RNA (1)...(19): siRNA sense strand
cgccauuuacccaguauaa

SEQ ID NO: 941955 - RNA, 19 nt, Homo sapiens
  misc_RNA (1)...(19): siRNA sense strand
ugagaaaaccuucaacaug

SEQ ID NO: 941956 - RNA, 19 nt, Homo sapiens
  misc_RNA (1)...(19): siRNA sense strand
uggcaccaacgacuacaua

SEQ ID NO: 941957 - RNA, 19 nt, Homo sapiens
  misc_RNA (1)...(19): siRNA sense strand
cuacaaccucucugucaug

SEQ ID NO: 941958 - RNA, 19 nt, Homo sapiens
  misc_RNA (1)...(19): siRNA sense strand
agaaugauaacaccagcaa

SEQ ID NO: 941959 - RNA, 19 nt, Homo sapiens
  misc_RNA (1)...(19): siRNA sense strand
agaauccgaaucagaauca

SEQ ID NO: 941960 - RNA, 19 nt, Homo sapiens
  misc_RNA (1)...(19): siRNA sense strand
uagcuuuggugaugcucuu

SEQ ID NO: 941961 - RNA, 19 nt, Homo sapiens
  misc_RNA (1)...(19): siRNA sense strand
gcgggaaaccuggcucuuc

SEQ ID NO: 941962 - RNA, 19 nt, Homo sapiens
  misc_RNA (1)...(19): siRNA sense strand
aagguagacuucgacauca

SEQ ID NO: 941963 - RNA, 19 nt, Homo sapiens
  misc_RNA (1)...(19): siRNA sense strand
ccaauaucuguuugagaaa

SEQ ID NO: 941964 - RNA, 19 nt, Homo sapiens
  misc_RNA (1)...(19): siRNA sense strand
ccagugucccgguacuuga

SEQ ID NO: 941965 - RNA, 19 nt, Homo sapiens
  misc_RNA (1)...(19): siRNA sense strand
gcaccaacgacuacauagg

SEQ ID NO: 941966 - RNA, 19 nt, Homo sapiens
  misc_RNA (1)...(19): siRNA sense strand
gacccaauaucuguuugag

SEQ ID NO: 941967 - RNA, 19 nt, Homo sapiens
  misc_RNA (1)...(19): siRNA sense strand
ccaagucaaaucugaagca

SEQ ID NO: 941968 - RNA, 19 nt, Homo sapiens
  misc_RNA (1)...(19): siRNA sense strand
uggugaugcucuuccuauu

SEQ ID NO: 941969 - RNA, 19 nt, Homo sapiens
  misc_RNA (1)...(19): siRNA sense strand
ccgugaucguccuccaaua

SEQ ID NO: 941970 - RNA, 19 nt, Homo sapiens
  misc_RNA (1)...(19): siRNA sense strand
ugaauuuucuggauaugga

SEQ ID NO: 941971 - RNA, 19 nt, Homo sapiens
  misc_RNA (1)...(19): siRNA sense strand
gcgugggucagaagaaaug

SEQ ID NO: 941972 - RNA, 19 nt, Homo sapiens
  misc_RNA (1)...(19): siRNA sense strand
cguauugagggacugaauu

SEQ ID NO: 941973 - RNA, 19 nt, Homo sapiens
  misc_RNA (1)...(19): siRNA sense strand
guguagagaaauggcguua

SEQ ID NO: 941974 - RNA, 19 nt, Homo sapiens
  misc_RNA (1)...(19): siRNA sense strand
uaggcaguguagagaaaug

SEQ ID NO: 941975 - RNA, 19 nt, Homo sapiens
  misc_RNA (1)...(19): siRNA sense strand
aaucagaaucagagucaga

SEQ ID NO: 941976 - RNA, 19 nt, Homo sapiens
  misc_RNA (1)...(19): siRNA sense strand
gcaaggagcagaaugauaa

SEQ ID NO: 941977 - RNA, 19 nt, Homo sapiens
  misc_RNA (1)...(19): siRNA sense strand
gaacaacgcaaauuucuga

SEQ ID NO: 941978 - RNA, 19 nt, Homo sapiens
  misc_RNA (1)...(19): siRNA sense strand
gagaaaaccuucaacauga

SEQ ID NO: 941979 - RNA, 19 nt, Homo sapiens
  misc_RNA (1)...(19): siRNA sense strand
gaacuuuauuucgccauuu

SEQ ID NO: 941980 - RNA, 19 nt, Homo sapiens
  misc_RNA (1)...(19): siRNA sense strand
cccaauaucuguuugagaa

SEQ ID NO: 941981 - RNA, 19 nt, Homo sapiens
  misc_RNA (1)...(19): siRNA sense strand
gugaugcucuuccuauuug

SEQ ID NO: 941982 - RNA, 19 nt, Homo sapiens
  misc_RNA (1)...(19): siRNA sense strand
ccauuuacccaguauaaua

SEQ ID NO: 941983 - RNA, 19 nt, Homo sapiens
  misc_RNA (1)...(19): siRNA sense strand
gaagacccaauaucuguuu

SEQ ID NO: 941984 - RNA, 19 nt, Homo sapiens
  misc_RNA (1)...(19): siRNA sense strand
ggacugaauuuucuggaua

SEQ ID NO: 941985 - RNA, 19 nt, Homo sapiens
  misc_RNA (1)...(19): siRNA sense strand
cauaggcaguguagagaaa

SEQ ID NO: 941986 - RNA, 19 nt, Homo sapiens
  misc_RNA (1)...(19): siRNA sense strand
gaaagugccaagucaaauc

SEQ ID NO: 941987 - RNA, 19 nt, Homo sapiens
  misc_RNA (1)...(19): siRNA sense strand
gcaauggcaccaacgacua

SEQ ID NO: 941988 - RNA, 19 nt, Homo sapiens
  misc_RNA (1)...(19): siRNA sense strand
caagggcgaugaccugauc

SEQ ID NO: 941989 - RNA, 19 nt, Homo sapiens
  misc_RNA (1)...(19): siRNA sense strand
guacagcuaugccaaagac

SEQ ID NO: 941990 - RNA, 19 nt, Homo sapiens
  misc_RNA (1)...(19): siRNA sense strand
agagaucaaugaggaaauu

SEQ ID NO: 941991 - RNA, 19 nt, Homo sapiens
  misc_RNA (1)...(19): siRNA sense strand
caagguagacuucgacauc

SEQ ID NO: 941992 - RNA, 19 nt, Homo sapiens
  misc_RNA (1)...(19): siRNA sense strand
guauugagggacugaauuu

SEQ ID NO: 941993 - RNA, 19 nt, Homo sapiens
  misc_RNA (1)...(19): siRNA sense strand
gcugcuagcuuuggugaug

SEQ ID NO: 941994 - RNA, 19 nt, Homo sapiens
  misc_RNA (1)...(19): siRNA sense strand
gggaaagcccgaagcagaa

SEQ ID NO: 941995 - RNA, 19 nt, Homo sapiens
  misc_RNA (1)...(19): siRNA sense strand
ucaggaacaacgcaaauuu

SEQ ID NO: 941996 - RNA, 19 nt, Homo sapiens
  misc_RNA (1)...(19): siRNA sense strand
ggugaugcucuuccuauuu

SEQ ID NO: 941997 - RNA, 19 nt, Homo sapiens
  misc_RNA (1)...(19): siRNA sense strand
gccagaauccgaaucagaa

SEQ ID NO: 941998 - RNA, 19 nt, Homo sapiens
  misc_RNA (1)...(19): siRNA sense strand
ggaaagcaucccugcaugu

SEQ ID NO: 941999 - RNA, 19 nt, Homo sapiens
  misc_RNA (1)...(19): siRNA sense strand
gcgaaagcgucaggaacaa

SEQ ID NO: 942000 - RNA, 19 nt, Homo sapiens
  misc_RNA (1)...(19): siRNA sense strand
ggaaagugccaagucaaau

SEQ ID NO: 942001 - RNA, 19 nt, Homo sapiens
  misc_RNA (1)...(19): siRNA sense strand
caaauccgaaugccaauca

SEQ ID NO: 942002 - RNA, 19 nt, Homo sapiens
  misc_RNA (1)...(19): siRNA sense strand
caacaugaacuuuauuucg

SEQ ID NO: 942003 - RNA, 19 nt, Homo sapiens
  misc_RNA (1)...(19): siRNA sense strand
agucaaaucugaagcacau

SEQ ID NO: 942004 - RNA, 19 nt, Homo sapiens
  misc_RNA (1)...(19): siRNA sense strand
ccuacaaucuagccaacaa

SEQ ID NO: 942005 - RNA, 19 nt, Homo sapiens
  misc_RNA (1)...(19): siRNA sense strand
ugaagcacauggcguucuu

SEQ ID NO: 942006 - RNA, 19 nt, Homo sapiens
  misc_RNA (1)...(19): siRNA sense strand
gaucaaugaggaaauucaa

SEQ ID NO: 942007 - RNA, 19 nt, Homo sapiens
  misc_RNA (1)...(19): siRNA sense strand
gaaagcaucccugcauguc

SEQ ID NO: 942008 - RNA, 19 nt, Homo sapiens
  misc_RNA (1)...(19): siRNA sense strand
ggaagacccaauaucuguu

SEQ ID NO: 942009 - RNA, 19 nt, Homo sapiens
  misc_RNA (1)...(19): siRNA sense strand
gcuacaaccucucugucau

SEQ ID NO: 942010 - RNA, 19 nt, Homo sapiens
  misc_RNA (1)...(19): siRNA sense strand
cgaaucagaaucagaguca

SEQ ID NO: 942011 - RNA, 19 nt, Homo sapiens
  misc_RNA (1)...(19): siRNA sense strand
ggcaaggagcagaaugaua

SEQ ID NO: 942012 - RNA, 19 nt, Homo sapiens
  misc_RNA (1)...(19): siRNA sense strand
ugaacuuuauuucgccauu

SEQ ID NO: 942013 - RNA, 19 nt, Homo sapiens
  misc_RNA (1)...(19): siRNA sense strand
guagagaucaaugaggaaa

SEQ ID NO: 942014 - RNA, 19 nt, Homo sapiens
  misc_RNA (1)...(19): siRNA sense strand
cggaagacccaauaucugu

SEQ ID NO: 942015 - RNA, 19 nt, Homo sapiens
  misc_RNA (1)...(19): siRNA sense strand
ccgcgugggucagaagaaa

SEQ ID NO: 942016 - RNA, 19 nt, Homo sapiens
  misc_RNA (1)...(19): siRNA sense strand
auauggaguuguacagcua

SEQ ID NO: 942017 - RNA, 19 nt, Homo sapiens
  misc_RNA (1)...(19): siRNA sense strand
ucgggaacauggaugagaa

SEQ ID NO: 942018 - RNA, 19 nt, Homo sapiens
  misc_RNA (1)...(19): siRNA sense strand
caaagaguuuauggacugu

SEQ ID NO: 942019 - RNA, 19 nt, Homo sapiens
  misc_RNA (1)...(19): siRNA sense strand
cgggaaaccuggcucuucu

SEQ ID NO: 942020 - RNA, 19 nt, Homo sapiens
  misc_RNA (1)...(19): siRNA sense strand
gaaauucaaaagcguauug

SEQ ID NO: 942021 - RNA, 19 nt, Homo sapiens
  misc_RNA (1)...(19): siRNA sense strand
ucuggaaagugccaaguca

SEQ ID NO: 942022 - RNA, 19 nt, Homo sapiens
  misc_RNA (1)...(19): siRNA sense strand
aaugauaacaccagcaaug

SEQ ID NO: 942023 - RNA, 19 nt, Homo sapiens
  misc_RNA (1)...(19): siRNA sense strand
ggcgaaagcgucaggaaca

SEQ ID NO: 942024 - RNA, 19 nt, Homo sapiens
  misc_RNA (1)...(19): siRNA sense strand
ggaacauggaugagaaauc

SEQ ID NO: 942025 - RNA, 19 nt, Homo sapiens
  misc_RNA (1)...(19): siRNA sense strand
gacugucccuacaaucuag

SEQ ID NO: 942026 - RNA, 19 nt, Homo sapiens
  misc_RNA (1)...(19): siRNA sense strand
ggaacaacgcaaauuucug

SEQ ID NO: 942027 - RNA, 19 nt, Homo sapiens
  misc_RNA (1)...(19): siRNA sense strand
cugcaugucugcgauggaa

SEQ ID NO: 942028 - RNA, 19 nt, Homo sapiens
  misc_RNA (1)...(19): siRNA sense strand
caggcaaggagcagaauga

SEQ ID NO: 942029 - RNA, 19 nt, Homo sapiens
  misc_RNA (1)...(19): siRNA sense strand
uggaaagugccaagucaaa

SEQ ID NO: 942030 - RNA, 19 nt, Homo sapiens
  misc_RNA (1)...(19): siRNA sense strand
ggucagaagaaaugcacuu

SEQ ID NO: 942031 - RNA, 19 nt, Homo sapiens
  misc_RNA (1)...(19): siRNA sense strand
caggaacaacgcaaauuuc

SEQ ID NO: 942032 - RNA, 19 nt, Homo sapiens
  misc_RNA (1)...(19): siRNA sense strand
gcggaagacccaauaucug

SEQ ID NO: 942033 - RNA, 19 nt, Homo sapiens
  misc_RNA (1)...(19): siRNA sense strand
cgccauuuacccaguauaa

SEQ ID NO: 942034 - RNA, 19 nt, Homo sapiens
  misc_RNA (1)...(19): siRNA sense strand
ugagaaaaccuucaacaug

SEQ ID NO: 942035 - RNA, 19 nt, Homo sapiens
  misc_RNA (1)...(19): siRNA sense strand
uggcaccaacgacuacaua

SEQ ID NO: 942036 - RNA, 19 nt, Homo sapiens
  misc_RNA (1)...(19): siRNA sense strand
cuacaaccucucugucaug

SEQ ID NO: 942037 - RNA, 19 nt, Homo sapiens
  misc_RNA (1)...(19): siRNA sense strand
agaaugauaacaccagcaa

SEQ ID NO: 942038 - RNA, 19 nt, Homo sapiens
  misc_RNA (1)...(19): siRNA sense strand
agaauccgaaucagaauca

SEQ ID NO: 942039 - RNA, 19 nt, Homo sapiens
  misc_RNA (1)...(19): siRNA sense strand
uagcuuuggugaugcucuu

SEQ ID NO: 942040 - RNA, 19 nt, Homo sapiens
  misc_RNA (1)...(19): siRNA sense strand
gcgggaaaccuggcucuuc

SEQ ID NO: 942041 - RNA, 19 nt, Homo sapiens
  misc_RNA (1)...(19): siRNA sense strand
ccaauaucuguuugagaaa

SEQ ID NO: 942042 - RNA, 19 nt, Homo sapiens
  misc_RNA (1)...(19): siRNA sense strand
aagguagacuucgacauca

SEQ ID NO: 942043 - RNA, 19 nt, Homo sapiens
  misc_RNA (1)...(19): siRNA sense strand
ccagugucccgguacuuga

SEQ ID NO: 942044 - RNA, 19 nt, Homo sapiens
  misc_RNA (1)...(19): siRNA sense strand
gcaccaacgacuacauagg

SEQ ID NO: 942045 - RNA, 19 nt, Homo sapiens
  misc_RNA (1)...(19): siRNA sense strand
uggugaugcucuuccuauu

SEQ ID NO: 942046 - RNA, 19 nt, Homo sapiens
  misc_RNA (1)...(19): siRNA sense strand
gacccaauaucuguuugag

SEQ ID NO: 942047 - RNA, 19 nt, Homo sapiens
  misc_RNA (1)...(19): siRNA sense strand
ccaagucaaaucugaagca

SEQ ID NO: 942048 - RNA, 19 nt, Homo sapiens
  misc_RNA (1)...(19): siRNA sense strand
ccgugaucguccuccaaua

SEQ ID NO: 942049 - RNA, 19 nt, Homo sapiens
  misc_RNA (1)...(19): siRNA sense strand
gcgugggucagaagaaaug

SEQ ID NO: 942050 - RNA, 19 nt, Homo sapiens
  misc_RNA (1)...(19): siRNA sense strand
ugaauuuucuggauaugga

SEQ ID NO: 942051 - RNA, 19 nt, Homo sapiens
  misc_RNA (1)...(19): siRNA sense strand
cguauugagggacugaauu

SEQ ID NO: 942052 - RNA, 19 nt, Homo sapiens
  misc_RNA (1)...(19): siRNA sense strand
guguagagaaauggcguua

SEQ ID NO: 942053 - RNA, 19 nt, Homo sapiens
  misc_RNA (1)...(19): siRNA sense strand
uaggcaguguagagaaaug

SEQ ID NO: 942054 - RNA, 19 nt, Homo sapiens
  misc_RNA (1)...(19): siRNA sense strand
aaucagaaucagagucaga

SEQ ID NO: 942055 - RNA, 19 nt, Homo sapiens
  misc_RNA (1)...(19): siRNA sense strand
gaccagaaguccugcuuua

SEQ ID NO: 942056 - RNA, 19 nt, Homo sapiens
  misc_RNA (1)...(19): siRNA sense strand
gaaugaagaugcaggaugu

SEQ ID NO: 942057 - RNA, 19 nt, Homo sapiens
  misc_RNA (1)...(19): siRNA sense strand
cagcuuggcucgaugcuuu

SEQ ID NO: 942058 - RNA, 19 nt, Homo sapiens
  misc_RNA (1)...(19): siRNA sense strand
caagauguauccaggaaga

SEQ ID NO: 942059 - RNA, 19 nt, Homo sapiens
  misc_RNA (1)...(19): siRNA sense strand
gaucaaauggcuauaagaa

SEQ ID NO: 942060 - RNA, 19 nt, Homo sapiens
  misc_RNA (1)...(19): siRNA sense strand
ccaaaggcaaaguauauua

SEQ ID NO: 942061 - RNA, 19 nt, Homo sapiens
  misc_RNA (1)...(19): siRNA sense strand
ugaaagcaguggaggcuaa

SEQ ID NO: 942062 - RNA, 19 nt, Homo sapiens
  misc_RNA (1)...(19): siRNA sense strand
gaccaaaggcaaaguauau

SEQ ID NO: 942063 - RNA, 19 nt, Homo sapiens
  misc_RNA (1)...(19): siRNA sense strand
ccaggaugcuucuucauga

SEQ ID NO: 942064 - RNA, 19 nt, Homo sapiens
  misc_RNA (1)...(19): siRNA sense strand
aagggugccugauagauua

SEQ ID NO: 942065 - RNA, 19 nt, Homo sapiens
  misc_RNA (1)...(19): siRNA sense strand
ucagaagccuacaaugaaa

SEQ ID NO: 942066 - RNA, 19 nt, Homo sapiens
  misc_RNA (1)...(19): siRNA sense strand
gauguggaccuguucauaa

SEQ ID NO: 942067 - RNA, 19 nt, Homo sapiens
  misc_RNA (1)...(19): siRNA sense strand
uaaagagagugaugacaau

SEQ ID NO: 942068 - RNA, 19 nt, Homo sapiens
  misc_RNA (1)...(19): siRNA sense strand
cagaaguccugcuuuaaau

SEQ ID NO: 942069 - RNA, 19 nt, Homo sapiens
  misc_RNA (1)...(19): siRNA sense strand
guaaagagagugaugacaa

SEQ ID NO: 942070 - RNA, 19 nt, Homo sapiens
  misc_RNA (1)...(19): siRNA sense strand
ggagugcagucuucaaagu

SEQ ID NO: 942071 - RNA, 19 nt, Homo sapiens
  misc_RNA (1)...(19): siRNA sense strand
gaaagacuguugcauacac

SEQ ID NO: 942072 - RNA, 19 nt, Homo sapiens
  misc_RNA (1)...(19): siRNA sense strand
cugaagauguggauauuga

SEQ ID NO: 942073 - RNA, 19 nt, Homo sapiens
  misc_RNA (1)...(19): siRNA sense strand
ccagaaguccugcuuuaaa

SEQ ID NO: 942074 - RNA, 19 nt, Homo sapiens
  misc_RNA (1)...(19): siRNA sense strand
gacauuccacauauaguua

SEQ ID NO: 942075 - RNA, 19 nt, Homo sapiens
  misc_RNA (1)...(19): siRNA sense strand
uagaagaacuggcugugau

SEQ ID NO: 942076 - RNA, 19 nt, Homo sapiens
  misc_RNA (1)...(19): siRNA sense strand
gaagaacuggcugugauuu

SEQ ID NO: 942077 - RNA, 19 nt, Homo sapiens
  misc_RNA (1)...(19): siRNA sense strand
gaaaucagcaagauguauc

SEQ ID NO: 942078 - RNA, 19 nt, Homo sapiens
  misc_RNA (1)...(19): siRNA sense strand
gaaguaaagagagugauga

SEQ ID NO: 942079 - RNA, 19 nt, Homo sapiens
  misc_RNA (1)...(19): siRNA sense strand
gugaguggcuauacuuuca

SEQ ID NO: 942080 - RNA, 19 nt, Homo sapiens
  misc_RNA (1)...(19): siRNA sense strand
ucacaaucccauaucuuua

SEQ ID NO: 942081 - RNA, 19 nt, Homo sapiens
  misc_RNA (1)...(19): siRNA sense strand
aaugaaagacuguugcaua

SEQ ID NO: 942082 - RNA, 19 nt, Homo sapiens
  misc_RNA (1)...(19): siRNA sense strand
gcuauaagaagcuacuaaa

SEQ ID NO: 942083 - RNA, 19 nt, Homo sapiens
  misc_RNA (1)...(19): siRNA sense strand
cuaacucuguguuucuuaa

SEQ ID NO: 942084 - RNA, 19 nt, Homo sapiens
  misc_RNA (1)...(19): siRNA sense strand
gauaauguacuucuugaca

SEQ ID NO: 942085 - RNA, 19 nt, Homo sapiens
  misc_RNA (1)...(19): siRNA sense strand
agagagugaugacaauuau

SEQ ID NO: 942086 - RNA, 19 nt, Homo sapiens
  misc_RNA (1)...(19): siRNA sense strand
ccaaccaaauaaagaaguu

SEQ ID NO: 942087 - RNA, 19 nt, Homo sapiens
  misc_RNA (1)...(19): siRNA sense strand
caagggugccugauagauu

SEQ ID NO: 942088 - RNA, 19 nt, Homo sapiens
  misc_RNA (1)...(19): siRNA sense strand
guagccaacugcuuuguag

SEQ ID NO: 942089 - RNA, 19 nt, Homo sapiens
  misc_RNA (1)...(19): siRNA sense strand
uccaguagguggugcuaua

SEQ ID NO: 942090 - RNA, 19 nt, Homo sapiens
  misc_RNA (1)...(19): siRNA sense strand
gcugugauuugugcuaauu

SEQ ID NO: 942091 - RNA, 19 nt, Homo sapiens
  misc_RNA (1)...(19): siRNA sense strand
gcaacugguaugagucuaa

SEQ ID NO: 942092 - RNA, 19 nt, Homo sapiens
  misc_RNA (1)...(19): siRNA sense strand
auaaagaaguugucagaag

SEQ ID NO: 942093 - RNA, 19 nt, Homo sapiens
  misc_RNA (1)...(19): siRNA sense strand
ggacgauccggugauauuu

SEQ ID NO: 942094 - RNA, 19 nt, Homo sapiens
  misc_RNA (1)...(19): siRNA sense strand
ugucagaagccuacaauga

SEQ ID NO: 942095 - RNA, 19 nt, Homo sapiens
  misc_RNA (1)...(19): siRNA sense strand
ugacaaaacugaagaugug

SEQ ID NO: 942096 - RNA, 19 nt, Homo sapiens
  misc_RNA (1)...(19): siRNA sense strand
auaauuacccuugugcuua

SEQ ID NO: 942097 - RNA, 19 nt, Homo sapiens
  misc_RNA (1)...(19): siRNA sense strand
gcuccaagggugccugaua

SEQ ID NO: 942098 - RNA, 19 nt, Homo sapiens
  misc_RNA (1)...(19): siRNA sense strand
gaaauggcuuuaaaacuag

SEQ ID NO: 942099 - RNA, 19 nt, Homo sapiens
  misc_RNA (1)...(19): siRNA sense strand
ggauguggaccuguucaua

SEQ ID NO: 942100 - RNA, 19 nt, Homo sapiens
  misc_RNA (1)...(19): siRNA sense strand
gucagaagccuacaaugaa

SEQ ID NO: 942101 - RNA, 19 nt, Homo sapiens
  misc_RNA (1)...(19): siRNA sense strand
guucagagcuuggacaaaa

SEQ ID NO: 942102 - RNA, 19 nt, Homo sapiens
  misc_RNA (1)...(19): siRNA sense strand
caaaguguaugcaucucau

SEQ ID NO: 942103 - RNA, 19 nt, Homo sapiens
  misc_RNA (1)...(19): siRNA sense strand
ggaaaucagcaagauguau

SEQ ID NO: 942104 - RNA, 19 nt, Homo sapiens
  misc_RNA (1)...(19): siRNA sense strand
aaacugaagauguggauau

SEQ ID NO: 942105 - RNA, 19 nt, Homo sapiens
  misc_RNA (1)...(19): siRNA sense strand
agacuugacagguguuuaa

SEQ ID NO: 942106 - RNA, 19 nt, Homo sapiens
  misc_RNA (1)...(19): siRNA sense strand
ccucuuggguccaugcaaa

SEQ ID NO: 942107 - RNA, 19 nt, Homo sapiens
  misc_RNA (1)...(19): siRNA sense strand
aagagagugaugacaauua

SEQ ID NO: 942108 - RNA, 19 nt, Homo sapiens
  misc_RNA (1)...(19): siRNA sense strand
gugacgagcugcguacaga

SEQ ID NO: 942109 - RNA, 19 nt, Homo sapiens
  misc_RNA (1)...(19): siRNA sense strand
gaaaagaacgaaguaaaga

SEQ ID NO: 942110 - RNA, 19 nt, Homo sapiens
  misc_RNA (1)...(19): siRNA sense strand
ugacauuccacauauaguu

SEQ ID NO: 942111 - RNA, 19 nt, Homo sapiens
  misc_RNA (1)...(19): siRNA sense strand
ggcucgaguugguagaaua

SEQ ID NO: 942112 - RNA, 19 nt, Homo sapiens
  misc_RNA (1)...(19): siRNA sense strand
aaagaacgaaguaaagaga

SEQ ID NO: 942113 - RNA, 19 nt, Homo sapiens
  misc_RNA (1)...(19): siRNA sense strand
ucacucagcuuggcucgau

SEQ ID NO: 942114 - RNA, 19 nt, Homo sapiens
  misc_RNA (1)...(19): siRNA sense strand
guagguggugcuauaauug

SEQ ID NO: 942115 - RNA, 19 nt, Homo sapiens
  misc_RNA (1)...(19): siRNA sense strand
uaauguacuucuugacaca

SEQ ID NO: 942116 - RNA, 19 nt, Homo sapiens
  misc_RNA (1)...(19): siRNA sense strand
cagcuucaccuucuuuaga

SEQ ID NO: 942117 - RNA, 19 nt, Homo sapiens
  misc_RNA (1)...(19): siRNA sense strand
aguagguggugcuauaauu

SEQ ID NO: 942118 - RNA, 19 nt, Homo sapiens
  misc_RNA (1)...(19): siRNA sense strand
agauguggauauugaagaa

SEQ ID NO: 942119 - RNA, 19 nt, Homo sapiens
  misc_RNA (1)...(19): siRNA sense strand
agagugaugacaauuauga

SEQ ID NO: 942120 - RNA, 19 nt, Homo sapiens
  misc_RNA (1)...(19): siRNA sense strand
caucagccaucggaaugaa

SEQ ID NO: 942121 - RNA, 19 nt, Homo sapiens
  misc_RNA (1)...(19): siRNA sense strand
caggaaaucagcaagaugu

SEQ ID NO: 942122 - RNA, 19 nt, Homo sapiens
  misc_RNA (1)...(19): siRNA sense strand
uaauuacccuugugcuuac

SEQ ID NO: 942123 - RNA, 19 nt, Homo sapiens
  misc_RNA (1)...(19): siRNA sense strand
gaaagcaguggaggcuaaa

SEQ ID NO: 942124 - RNA, 19 nt, Homo sapiens
  misc_RNA (1)...(19): siRNA sense strand
gaagauguggauauugaag

SEQ ID NO: 942125 - RNA, 19 nt, Homo sapiens
  misc_RNA (1)...(19): siRNA sense strand
guuuaaaggcaguaagaaa

SEQ ID NO: 942126 - RNA, 19 nt, Homo sapiens
  misc_RNA (1)...(19): siRNA sense strand
ugauauuucugcugugcaa

SEQ ID NO: 942127 - RNA, 19 nt, Homo sapiens
  misc_RNA (1)...(19): siRNA sense strand
agaacuggcugugauuugu

SEQ ID NO: 942128 - RNA, 19 nt, Homo sapiens
  misc_RNA (1)...(19): siRNA sense strand
gaacuugggccugauugca

SEQ ID NO: 942129 - RNA, 19 nt, Homo sapiens
  misc_RNA (1)...(19): siRNA sense strand
gaguggcuauacuuucaga

SEQ ID NO: 942130 - RNA, 19 nt, Homo sapiens
  misc_RNA (1)...(19): siRNA sense strand
gcucuagccuuuugaacaa

SEQ ID NO: 942131 - RNA, 19 nt, Homo sapiens
  misc_RNA (1)...(19): siRNA sense strand
caugaucacugcagguuuu

SEQ ID NO: 942132 - RNA, 19 nt, Homo sapiens
  misc_RNA (1)...(19): siRNA sense strand
aaucccauaucuuuagcua

SEQ ID NO: 942133 - RNA, 19 nt, Homo sapiens
  misc_RNA (1)...(19): siRNA sense strand
gcuauaauugcuggcuuua

SEQ ID NO: 942134 - RNA, 19 nt, Homo sapiens
  misc_RNA (1)...(19): siRNA sense strand
gugcagucuucaaagugua

SEQ ID NO: 942135 - RNA, 19 nt, Homo sapiens
  misc_RNA (1)...(19): siRNA sense strand
gaacuggcugugauuugug

SEQ ID NO: 942136 - RNA, 19 nt, Homo sapiens
  misc_RNA (1)...(19): siRNA sense strand
aaagaccaaaggcaaagua

SEQ ID NO: 942137 - RNA, 19 nt, Homo sapiens
  misc_RNA (1)...(19): siRNA sense strand
ugcauucuguguauucauu

SEQ ID NO: 942138 - RNA, 19 nt, Homo sapiens
  misc_RNA (1)...(19): siRNA sense strand
cugauugcauucuguguau

SEQ ID NO: 942139 - RNA, 19 nt, Homo sapiens
  misc_RNA (1)...(19): siRNA sense strand
guucauucauggcauugga

SEQ ID NO: 942140 - RNA, 19 nt, Homo sapiens
  misc_RNA (1)...(19): siRNA sense strand
cuagauaauguacuucuug

SEQ ID NO: 942141 - RNA, 19 nt, Homo sapiens
  misc_RNA (1)...(19): siRNA sense strand
ucagaggcuuuaugucaca

SEQ ID NO: 942142 - RNA, 19 nt, Homo sapiens
  misc_RNA (1)...(19): siRNA sense strand
uaauugcuggcuuuaauga

SEQ ID NO: 942143 - RNA, 19 nt, Homo sapiens
  misc_RNA (1)...(19): siRNA sense strand
uauggcaacugguaugagu

SEQ ID NO: 942144 - RNA, 19 nt, Homo sapiens
  misc_RNA (1)...(19): siRNA sense strand
uauugucacuuggaucaaa

SEQ ID NO: 942145 - RNA, 19 nt, Homo sapiens
  misc_RNA (1)...(19): siRNA sense strand
aaagcuggcugguguccau

SEQ ID NO: 942146 - RNA, 19 nt, Homo sapiens
  misc_RNA (1)...(19): siRNA sense strand
uuucagaggcuuuauguca

SEQ ID NO: 942147 - RNA, 19 nt, Homo sapiens
  misc_RNA (1)...(19): siRNA sense strand
cuuuagcuaugacacuuaa

SEQ ID NO: 942148 - RNA, 19 nt, Homo sapiens
  misc_RNA (1)...(19): siRNA sense strand
ccugauagauuagaagaac

SEQ ID NO: 942149 - RNA, 19 nt, Homo sapiens
  misc_RNA (1)...(19): siRNA sense strand
cgaaguaaagagagugaug

SEQ ID NO: 942150 - RNA, 19 nt, Homo sapiens
  misc_RNA (1)...(19): siRNA sense strand
agaccaaaggcaaaguaua

SEQ ID NO: 942151 - RNA, 19 nt, Homo sapiens
  misc_RNA (1)...(19): siRNA sense strand
gagccuguggugauagaaa

SEQ ID NO: 942152 - RNA, 19 nt, Homo sapiens
  misc_RNA (1)...(19): siRNA sense strand
ccaaauaaagaaguuguca

SEQ ID NO: 942153 - RNA, 19 nt, Homo sapiens
  misc_RNA (1)...(19): siRNA sense strand
auugcuggcuuuaaugauu

SEQ ID NO: 942154 - RNA, 19 nt, Homo sapiens
  misc_RNA (1)...(19): siRNA sense strand
gaauagaugcuuuuguuca

SEQ ID NO: 942155 - RNA, 19 nt, Homo sapiens
  misc_RNA (1)...(19): siRNA sense strand
gaccagaaguccugcuuua

SEQ ID NO: 942156 - RNA, 19 nt, Homo sapiens
  misc_RNA (1)...(19): siRNA sense strand
gaaugaagaugcaggaugu

SEQ ID NO: 942157 - RNA, 19 nt, Homo sapiens
  misc_RNA (1)...(19): siRNA sense strand
cagcuuggcucgaugcuuu

SEQ ID NO: 942158 - RNA, 19 nt, Homo sapiens
  misc_RNA (1)...(19): siRNA sense strand
caagauguauccaggaaga

SEQ ID NO: 942159 - RNA, 19 nt, Homo sapiens
  misc_RNA (1)...(19): siRNA sense strand
gaucaaauggcuauaagaa

SEQ ID NO: 942160 - RNA, 19 nt, Homo sapiens
  misc_RNA (1)...(19): siRNA sense strand
ccaaaggcaaaguauauua

SEQ ID NO: 942161 - RNA, 19 nt, Homo sapiens
  misc_RNA (1)...(19): siRNA sense strand
ugaaagcaguggaggcuaa

SEQ ID NO: 942162 - RNA, 19 nt, Homo sapiens
  misc_RNA (1)...(19): siRNA sense strand
gaccaaaggcaaaguauau

SEQ ID NO: 942163 - RNA, 19 nt, Homo sapiens
  misc_RNA (1)...(19): siRNA sense strand
ccaggaugcuucuucauga

SEQ ID NO: 942164 - RNA, 19 nt, Homo sapiens
  misc_RNA (1)...(19): siRNA sense strand
aagggugccugauagauua

SEQ ID NO: 942165 - RNA, 19 nt, Homo sapiens
  misc_RNA (1)...(19): siRNA sense strand
ucagaagccuacaaugaaa

SEQ ID NO: 942166 - RNA, 19 nt, Homo sapiens
  misc_RNA (1)...(19): siRNA sense strand
gauguggaccuguucauaa

SEQ ID NO: 942167 - RNA, 19 nt, Homo sapiens
  misc_RNA (1)...(19): siRNA sense strand
uaaagagagugaugacaau

SEQ ID NO: 942168 - RNA, 19 nt, Homo sapiens
  misc_RNA (1)...(19): siRNA sense strand
cagaaguccugcuuuaaau

SEQ ID NO: 942169 - RNA, 19 nt, Homo sapiens
  misc_RNA (1)...(19): siRNA sense strand
guaaagagagugaugacaa

SEQ ID NO: 942170 - RNA, 19 nt, Homo sapiens
  misc_RNA (1)...(19): siRNA sense strand
ggagugcagucuucaaagu

SEQ ID NO: 942171 - RNA, 19 nt, Homo sapiens
  misc_RNA (1)...(19): siRNA sense strand
gaaagacuguugcauacac

SEQ ID NO: 942172 - RNA, 19 nt, Homo sapiens
  misc_RNA (1)...(19): siRNA sense strand
cugaagauguggauauuga

SEQ ID NO: 942173 - RNA, 19 nt, Homo sapiens
  misc_RNA (1)...(19): siRNA sense strand
ccagaaguccugcuuuaaa

SEQ ID NO: 942174 - RNA, 19 nt, Homo sapiens
  misc_RNA (1)...(19): siRNA sense strand
gacauuccacauauaguua

SEQ ID NO: 942175 - RNA, 19 nt, Homo sapiens
  misc_RNA (1)...(19): siRNA sense strand
uagaagaacuggcugugau

SEQ ID NO: 942176 - RNA, 19 nt, Homo sapiens
  misc_RNA (1)...(19): siRNA sense strand
gaagaacuggcugugauuu

SEQ ID NO: 942177 - RNA, 19 nt, Homo sapiens
  misc_RNA (1)...(19): siRNA sense strand
gaaaucagcaagauguauc

SEQ ID NO: 942178 - RNA, 19 nt, Homo sapiens
  misc_RNA (1)...(19): siRNA sense strand
gaaguaaagagagugauga

SEQ ID NO: 942179 - RNA, 19 nt, Homo sapiens
  misc_RNA (1)...(19): siRNA sense strand
gugaguggcuauacuuuca

SEQ ID NO: 942180 - RNA, 19 nt, Homo sapiens
  misc_RNA (1)...(19): siRNA sense strand
ucacaaucccauaucuuua

SEQ ID NO: 942181 - RNA, 19 nt, Homo sapiens
  misc_RNA (1)...(19): siRNA sense strand
aaugaaagacuguugcaua

SEQ ID NO: 942182 - RNA, 19 nt, Homo sapiens
  misc_RNA (1)...(19): siRNA sense strand
gcuauaagaagcuacuaaa

SEQ ID NO: 942183 - RNA, 19 nt, Homo sapiens
  misc_RNA (1)...(19): siRNA sense strand
cuaacucuguguuucuuaa

SEQ ID NO: 942184 - RNA, 19 nt, Homo sapiens
  misc_RNA (1)...(19): siRNA sense strand
gauaauguacuucuugaca

SEQ ID NO: 942185 - RNA, 19 nt, Homo sapiens
  misc_RNA (1)...(19): siRNA sense strand
agagagugaugacaauuau

SEQ ID NO: 942186 - RNA, 19 nt, Homo sapiens
  misc_RNA (1)...(19): siRNA sense strand
ccaaccaaauaaagaaguu

SEQ ID NO: 942187 - RNA, 19 nt, Homo sapiens
  misc_RNA (1)...(19): siRNA sense strand
caagggugccugauagauu

SEQ ID NO: 942188 - RNA, 19 nt, Homo sapiens
  misc_RNA (1)...(19): siRNA sense strand
gcaacugguaugagucuaa

SEQ ID NO: 942189 - RNA, 19 nt, Homo sapiens
  misc_RNA (1)...(19): siRNA sense strand
uccaguagguggugcuaua

SEQ ID NO: 942190 - RNA, 19 nt, Homo sapiens
  misc_RNA (1)...(19): siRNA sense strand
gcugugauuugugcuaauu

SEQ ID NO: 942191 - RNA, 19 nt, Homo sapiens
  misc_RNA (1)...(19): siRNA sense strand
guagccaacugcuuuguag

SEQ ID NO: 942192 - RNA, 19 nt, Homo sapiens
  misc_RNA (1)...(19): siRNA sense strand
auaaagaaguugucagaag

SEQ ID NO: 942193 - RNA, 19 nt, Homo sapiens
  misc_RNA (1)...(19): siRNA sense strand
ggacgauccggugauauuu

SEQ ID NO: 942194 - RNA, 19 nt, Homo sapiens
  misc_RNA (1)...(19): siRNA sense strand
ugucagaagccuacaauga

SEQ ID NO: 942195 - RNA, 19 nt, Homo sapiens
  misc_RNA (1)...(19): siRNA sense strand
ugacaaaacugaagaugug

SEQ ID NO: 942196 - RNA, 19 nt, Homo sapiens
  misc_RNA (1)...(19): siRNA sense strand
auaauuacccuugugcuua

SEQ ID NO: 942197 - RNA, 19 nt, Homo sapiens
  misc_RNA (1)...(19): siRNA sense strand
gcuccaagggugccugaua

SEQ ID NO: 942198 - RNA, 19 nt, Homo sapiens
  misc_RNA (1)...(19): siRNA sense strand
gaaauggcuuuaaaacuag

SEQ ID NO: 942199 - RNA, 19 nt, Homo sapiens
  misc_RNA (1)...(19): siRNA sense strand
ggauguggaccuguucaua

SEQ ID NO: 942200 - RNA, 19 nt, Homo sapiens
  misc_RNA (1)...(19): siRNA sense strand
gucagaagccuacaaugaa

SEQ ID NO: 942201 - RNA, 19 nt, Homo sapiens
  misc_RNA (1)...(19): siRNA sense strand
guucagagcuuggacaaaa

SEQ ID NO: 942202 - RNA, 19 nt, Homo sapiens
  misc_RNA (1)...(19): siRNA sense strand
caaaguguaugcaucucau

SEQ ID NO: 942203 - RNA, 19 nt, Homo sapiens
  misc_RNA (1)...(19): siRNA sense strand
ggaaaucagcaagauguau

SEQ ID NO: 942204 - RNA, 19 nt, Homo sapiens
  misc_RNA (1)...(19): siRNA sense strand
aaacugaagauguggauau

SEQ ID NO: 942205 - RNA, 19 nt, Homo sapiens
  misc_RNA (1)...(19): siRNA sense strand
agacuugacagguguuuaa

SEQ ID NO: 942206 - RNA, 19 nt, Homo sapiens
  misc_RNA (1)...(19): siRNA sense strand
ccucuuggguccaugcaaa

SEQ ID NO: 942207 - RNA, 19 nt, Homo sapiens
  misc_RNA (1)...(19): siRNA sense strand
aagagagugaugacaauua

SEQ ID NO: 942208 - RNA, 19 nt, Homo sapiens
  misc_RNA (1)...(19): siRNA sense strand
gugacgagcugcguacaga

SEQ ID NO: 942209 - RNA, 19 nt, Homo sapiens
  misc_RNA (1)...(19): siRNA sense strand
gaaaagaacgaaguaaaga

SEQ ID NO: 942210 - RNA, 19 nt, Homo sapiens
  misc_RNA (1)...(19): siRNA sense strand
ugacauuccacauauaguu

SEQ ID NO: 942211 - RNA, 19 nt, Homo sapiens
  misc_RNA (1)...(19): siRNA sense strand
ggcucgaguugguagaaua

SEQ ID NO: 942212 - RNA, 19 nt, Homo sapiens
  misc_RNA (1)...(19): siRNA sense strand
aaagaacgaaguaaagaga

SEQ ID NO: 942213 - RNA, 19 nt, Homo sapiens
  misc_RNA (1)...(19): siRNA sense strand
ucacucagcuuggcucgau

SEQ ID NO: 942214 - RNA, 19 nt, Homo sapiens
  misc_RNA (1)...(19): siRNA sense strand
guagguggugcuauaauug

SEQ ID NO: 942215 - RNA, 19 nt, Homo sapiens
  misc_RNA (1)...(19): siRNA sense strand
uaauguacuucuugacaca

SEQ ID NO: 942216 - RNA, 19 nt, Homo sapiens
  misc_RNA (1)...(19): siRNA sense strand
cagcuucaccuucuuuaga

SEQ ID NO: 942217 - RNA, 19 nt, Homo sapiens
  misc_RNA (1)...(19): siRNA sense strand
aguagguggugcuauaauu

SEQ ID NO: 942218 - RNA, 19 nt, Homo sapiens
  misc_RNA (1)...(19): siRNA sense strand
agauguggauauugaagaa

SEQ ID NO: 942219 - RNA, 19 nt, Homo sapiens
  misc_RNA (1)...(19): siRNA sense strand
agagugaugacaauuauga

SEQ ID NO: 942220 - RNA, 19 nt, Homo sapiens
  misc_RNA (1)...(19): siRNA sense strand
caucagccaucggaaugaa

SEQ ID NO: 942221 - RNA, 19 nt, Homo sapiens
  misc_RNA (1)...(19): siRNA sense strand
caggaaaucagcaagaugu

SEQ ID NO: 942222 - RNA, 19 nt, Homo sapiens
  misc_RNA (1)...(19): siRNA sense strand
uaauuacccuugugcuuac

SEQ ID NO: 942223 - RNA, 19 nt, Homo sapiens
  misc_RNA (1)...(19): siRNA sense strand
gaaagcaguggaggcuaaa

SEQ ID NO: 942224 - RNA, 19 nt, Homo sapiens
  misc_RNA (1)...(19): siRNA sense strand
gaagauguggauauugaag

SEQ ID NO: 942225 - RNA, 19 nt, Homo sapiens
  misc_RNA (1)...(19): siRNA sense strand
guuuaaaggcaguaagaaa

SEQ ID NO: 942226 - RNA, 19 nt, Homo sapiens
  misc_RNA (1)...(19): siRNA sense strand
ugauauuucugcugugcaa

SEQ ID NO: 942227 - RNA, 19 nt, Homo sapiens
  misc_RNA (1)...(19): siRNA sense strand
agaacuggcugugauuugu

SEQ ID NO: 942228 - RNA, 19 nt, Homo sapiens
  misc_RNA (1)...(19): siRNA sense strand
gaacuugggccugauugca

SEQ ID NO: 942229 - RNA, 19 nt, Homo sapiens
  misc_RNA (1)...(19): siRNA sense strand
gcucuagccuuuugaacaa

SEQ ID NO: 942230 - RNA, 19 nt, Homo sapiens
  misc_RNA (1)...(19): siRNA sense strand
gaguggcuauacuuucaga

SEQ ID NO: 942231 - RNA, 19 nt, Homo sapiens
  misc_RNA (1)...(19): siRNA sense strand
caugaucacugcagguuuu

SEQ ID NO: 942232 - RNA, 19 nt, Homo sapiens
  misc_RNA (1)...(19): siRNA sense strand
aaagaccaaaggcaaagua

SEQ ID NO: 942233 - RNA, 19 nt, Homo sapiens
  misc_RNA (1)...(19): siRNA sense strand
aaucccauaucuuuagcua

SEQ ID NO: 942234 - RNA, 19 nt, Homo sapiens
  misc_RNA (1)...(19): siRNA sense strand
gcuauaauugcuggcuuua

SEQ ID NO: 942235 - RNA, 19 nt, Homo sapiens
  misc_RNA (1)...(19): siRNA sense strand
gugcagucuucaaagugua

SEQ ID NO: 942236 - RNA, 19 nt, Homo sapiens
  misc_RNA (1)...(19): siRNA sense strand
gaacuggcugugauuugug

SEQ ID NO: 942237 - RNA, 19 nt, Homo sapiens
  misc_RNA (1)...(19): siRNA sense strand
ugcauucuguguauucauu

SEQ ID NO: 942238 - RNA, 19 nt, Homo sapiens
  misc_RNA (1)...(19): siRNA sense strand
cugauugcauucuguguau

SEQ ID NO: 942239 - RNA, 19 nt, Homo sapiens
  misc_RNA (1)...(19): siRNA sense strand
uaauugcuggcuuuaauga

SEQ ID NO: 942240 - RNA, 19 nt, Homo sapiens
  misc_RNA (1)...(19): siRNA sense strand
cuagauaauguacuucuug

SEQ ID NO: 942241 - RNA, 19 nt, Homo sapiens
  misc_RNA (1)...(19): siRNA sense strand
ucagaggcuuuaugucaca

SEQ ID NO: 942242 - RNA, 19 nt, Homo sapiens
  misc_RNA (1)...(19): siRNA sense strand
guucauucauggcauugga

SEQ ID NO: 942243 - RNA, 19 nt, Homo sapiens
  misc_RNA (1)...(19): siRNA sense strand
uauggcaacugguaugagu

SEQ ID NO: 942244 - RNA, 19 nt, Homo sapiens
  misc_RNA (1)...(19): siRNA sense strand
uauugucacuuggaucaaa

SEQ ID NO: 942245 - RNA, 19 nt, Homo sapiens
  misc_RNA (1)...(19): siRNA sense strand
aaagcuggcugguguccau

SEQ ID NO: 942246 - RNA, 19 nt, Homo sapiens
  misc_RNA (1)...(19): siRNA sense strand
uuucagaggcuuuauguca

SEQ ID NO: 942247 - RNA, 19 nt, Homo sapiens
  misc_RNA (1)...(19): siRNA sense strand
cuuuagcuaugacacuuaa

SEQ ID NO: 942248 - RNA, 19 nt, Homo sapiens
  misc_RNA (1)...(19): siRNA sense strand
ccugauagauuagaagaac

SEQ ID NO: 942249 - RNA, 19 nt, Homo sapiens
  misc_RNA (1)...(19): siRNA sense strand
cgaaguaaagagagugaug

SEQ ID NO: 942250 - RNA, 19 nt, Homo sapiens
  misc_RNA (1)...(19): siRNA sense strand
agaccaaaggcaaaguaua

SEQ ID NO: 942251 - RNA, 19 nt, Homo sapiens
  misc_RNA (1)...(19): siRNA sense strand
gagccuguggugauagaaa

SEQ ID NO: 942252 - RNA, 19 nt, Homo sapiens
  misc_RNA (1)...(19): siRNA sense strand
ccaaauaaagaaguuguca

SEQ ID NO: 942253 - RNA, 19 nt, Homo sapiens
  misc_RNA (1)...(19): siRNA sense strand
auugcuggcuuuaaugauu

SEQ ID NO: 942254 - RNA, 19 nt, Homo sapiens
  misc_RNA (1)...(19): siRNA sense strand
gaauagaugcuuuuguuca

SEQ ID NO: 942255 - RNA, 19 nt, Homo sapiens
  misc_RNA (1)...(19): siRNA sense strand
gagcaaagcuggaggauuc

SEQ ID NO: 942256 - RNA, 19 nt, Homo sapiens
  misc_RNA (1)...(19): siRNA sense strand
ccacugaaguaaccaauaa

SEQ ID NO: 942257 - RNA, 19 nt, Homo sapiens
  misc_RNA (1)...(19): siRNA sense strand
caacugguguggcuacuug

SEQ ID NO: 942258 - RNA, 19 nt, Homo sapiens
  misc_RNA (1)...(19): siRNA sense strand
ggucuucacugguauuguu

SEQ ID NO: 942259 - RNA, 19 nt, Homo sapiens
  misc_RNA (1)...(19): siRNA sense strand
ucaaggagcccaaggauga

SEQ ID NO: 942260 - RNA, 19 nt, Homo sapiens
  misc_RNA (1)...(19): siRNA sense strand
cuacugagccuuccugaaa

SEQ ID NO: 942261 - RNA, 19 nt, Homo sapiens
  misc_RNA (1)...(19): siRNA sense strand
cagcgggucuucacuggua

SEQ ID NO: 942262 - RNA, 19 nt, Homo sapiens
  misc_RNA (1)...(19): siRNA sense strand
ggaagaagccaucaaagag

SEQ ID NO: 942263 - RNA, 19 nt, Homo sapiens
  misc_RNA (1)...(19): siRNA sense strand
ggaccaucaugccuacuuu

SEQ ID NO: 942264 - RNA, 19 nt, Homo sapiens
  misc_RNA (1)...(19): siRNA sense strand
cagcuugcaugacuacuuu

SEQ ID NO: 942265 - RNA, 19 nt, Homo sapiens
  misc_RNA (1)...(19): siRNA sense strand
ggaggaagaagccaucaaa

SEQ ID NO: 942266 - RNA, 19 nt, Homo sapiens
  misc_RNA (1)...(19): siRNA sense strand
cacaauggcagccugauua

SEQ ID NO: 942267 - RNA, 19 nt, Homo sapiens
  misc_RNA (1)...(19): siRNA sense strand
gaucggaggccaaaggaaa

SEQ ID NO: 942268 - RNA, 19 nt, Homo sapiens
  misc_RNA (1)...(19): siRNA sense strand
ggauccaggucucuucuga

SEQ ID NO: 942269 - RNA, 19 nt, Homo sapiens
  misc_RNA (1)...(19): siRNA sense strand
aaacggagccuacugaaca

SEQ ID NO: 942270 - RNA, 19 nt, Homo sapiens
  misc_RNA (1)...(19): siRNA sense strand
ggugaaggcugcauacaac

SEQ ID NO: 942271 - RNA, 19 nt, Homo sapiens
  misc_RNA (1)...(19): siRNA sense strand
gggccgaagugaugacuau

SEQ ID NO: 942272 - RNA, 19 nt, Homo sapiens
  misc_RNA (1)...(19): siRNA sense strand
gugagaaggugcuggugaa

SEQ ID NO: 942273 - RNA, 19 nt, Homo sapiens
  misc_RNA (1)...(19): siRNA sense strand
ggagagccauaaccguuuc

SEQ ID NO: 942274 - RNA, 19 nt, Homo sapiens
  misc_RNA (1)...(19): siRNA sense strand
aagaggagguggucaagga

SEQ ID NO: 942275 - RNA, 19 nt, Homo sapiens
  misc_RNA (1)...(19): siRNA sense strand
ggaguucucuucacuucag

SEQ ID NO: 942276 - RNA, 19 nt, Homo sapiens
  misc_RNA (1)...(19): siRNA sense strand
ccuagaaccugcugucauc

SEQ ID NO: 942277 - RNA, 19 nt, Homo sapiens
  misc_RNA (1)...(19): siRNA sense strand
gagcucagccucaguugau

SEQ ID NO: 942278 - RNA, 19 nt, Homo sapiens
  misc_RNA (1)...(19): siRNA sense strand
ggguccaccucacuccuua

SEQ ID NO: 942279 - RNA, 19 nt, Homo sapiens
  misc_RNA (1)...(19): siRNA sense strand
ugagccaccugaacagauu

SEQ ID NO: 942280 - RNA, 19 nt, Homo sapiens
  misc_RNA (1)...(19): siRNA sense strand
gauuuuggcuauagaguuu

SEQ ID NO: 942281 - RNA, 19 nt, Homo sapiens
  misc_RNA (1)...(19): siRNA sense strand
gaggaauuguaucguuguu

SEQ ID NO: 942282 - RNA, 19 nt, Homo sapiens
  misc_RNA (1)...(19): siRNA sense strand
gggaaacggagccuacuga

SEQ ID NO: 942283 - RNA, 19 nt, Homo sapiens
  misc_RNA (1)...(19): siRNA sense strand
ggaaacggagccuacugaa

SEQ ID NO: 942284 - RNA, 19 nt, Homo sapiens
  misc_RNA (1)...(19): siRNA sense strand
gcaagcagcagacacuucu

SEQ ID NO: 942285 - RNA, 19 nt, Homo sapiens
  misc_RNA (1)...(19): siRNA sense strand
aggcacagcuucaacaucu

SEQ ID NO: 942286 - RNA, 19 nt, Homo sapiens
  misc_RNA (1)...(19): siRNA sense strand
ugacuaugacuccaagaaa

SEQ ID NO: 942287 - RNA, 19 nt, Homo sapiens
  misc_RNA (1)...(19): siRNA sense strand
gagaugcuccagagggauu

SEQ ID NO: 942288 - RNA, 19 nt, Homo sapiens
  misc_RNA (1)...(19): siRNA sense strand
cuaagaagccaaggcauga

SEQ ID NO: 942289 - RNA, 19 nt, Homo sapiens
  misc_RNA (1)...(19): siRNA sense strand
gaaggaggaugggcuuuug

SEQ ID NO: 942290 - RNA, 19 nt, Homo sapiens
  misc_RNA (1)...(19): siRNA sense strand
gacuaugacuccaagaaac

SEQ ID NO: 942291 - RNA, 19 nt, Homo sapiens
  misc_RNA (1)...(19): siRNA sense strand
gcaggaaacggacacugau

SEQ ID NO: 942292 - RNA, 19 nt, Homo sapiens
  misc_RNA (1)...(19): siRNA sense strand
caccugaaccugagaagga

SEQ ID NO: 942293 - RNA, 19 nt, Homo sapiens
  misc_RNA (1)...(19): siRNA sense strand
agaacaagauccacacacu

SEQ ID NO: 942294 - RNA, 19 nt, Homo sapiens
  misc_RNA (1)...(19): siRNA sense strand
ccaaggaugaggcacagaa

SEQ ID NO: 942295 - RNA, 19 nt, Homo sapiens
  misc_RNA (1)...(19): siRNA sense strand
ccaccucacuccuuacacu

SEQ ID NO: 942296 - RNA, 19 nt, Homo sapiens
  misc_RNA (1)...(19): siRNA sense strand
gccggcaccuagcaacuga

SEQ ID NO: 942297 - RNA, 19 nt, Homo sapiens
  misc_RNA (1)...(19): siRNA sense strand
ccacaauggcagccugauu

SEQ ID NO: 942298 - RNA, 19 nt, Homo sapiens
  misc_RNA (1)...(19): siRNA sense strand
gugcagagcaggccaagca

SEQ ID NO: 942299 - RNA, 19 nt, Homo sapiens
  misc_RNA (1)...(19): siRNA sense strand
ucaaagaggagguggucaa

SEQ ID NO: 942300 - RNA, 19 nt, Homo sapiens
  misc_RNA (1)...(19): siRNA sense strand
caucugugacuuccuagaa

SEQ ID NO: 942301 - RNA, 19 nt, Homo sapiens
  misc_RNA (1)...(19): siRNA sense strand
aggaagaagccaucaaaga

SEQ ID NO: 942302 - RNA, 19 nt, Homo sapiens
  misc_RNA (1)...(19): siRNA sense strand
ggagaaacagcgggucuuc

SEQ ID NO: 942303 - RNA, 19 nt, Homo sapiens
  misc_RNA (1)...(19): siRNA sense strand
gcaucugaguuggcuauca

SEQ ID NO: 942304 - RNA, 19 nt, Homo sapiens
  misc_RNA (1)...(19): siRNA sense strand
auccaggucucuucugaaa

SEQ ID NO: 942305 - RNA, 19 nt, Homo sapiens
  misc_RNA (1)...(19): siRNA sense strand
guuaccagcuugcaugacu

SEQ ID NO: 942306 - RNA, 19 nt, Homo sapiens
  misc_RNA (1)...(19): siRNA sense strand
guuguugcaugcucuuugu

SEQ ID NO: 942307 - RNA, 19 nt, Homo sapiens
  misc_RNA (1)...(19): siRNA sense strand
ccagagggauuuuggcuau

SEQ ID NO: 942308 - RNA, 19 nt, Homo sapiens
  misc_RNA (1)...(19): siRNA sense strand
acaauggcagccugauuaa

SEQ ID NO: 942309 - RNA, 19 nt, Homo sapiens
  misc_RNA (1)...(19): siRNA sense strand
ugcaaacgcucuccaacca

SEQ ID NO: 942310 - RNA, 19 nt, Homo sapiens
  misc_RNA (1)...(19): siRNA sense strand
aggaggugcucuucggaaa

SEQ ID NO: 942311 - RNA, 19 nt, Homo sapiens
  misc_RNA (1)...(19): siRNA sense strand
guuuauaagaugcuacuga

SEQ ID NO: 942312 - RNA, 19 nt, Homo sapiens
  misc_RNA (1)...(19): siRNA sense strand
caccuccucuucugcaugu

SEQ ID NO: 942313 - RNA, 19 nt, Homo sapiens
  misc_RNA (1)...(19): siRNA sense strand
ccucugagucucuuccaaa

SEQ ID NO: 942314 - RNA, 19 nt, Homo sapiens
  misc_RNA (1)...(19): siRNA sense strand
gcacgcccuggcuguguaa

SEQ ID NO: 942315 - RNA, 19 nt, Homo sapiens
  misc_RNA (1)...(19): siRNA sense strand
ggagcaagcagcagacacu

SEQ ID NO: 942316 - RNA, 19 nt, Homo sapiens
  misc_RNA (1)...(19): siRNA sense strand
gaaacggagccuacugaac

SEQ ID NO: 942317 - RNA, 19 nt, Homo sapiens
  misc_RNA (1)...(19): siRNA sense strand
gcaugcucuuuguggauga

SEQ ID NO: 942318 - RNA, 19 nt, Homo sapiens
  misc_RNA (1)...(19): siRNA sense strand
ggaggaauuguaucguugu

SEQ ID NO: 942319 - RNA, 19 nt, Homo sapiens
  misc_RNA (1)...(19): siRNA sense strand
cugagucucuuccaaacau

SEQ ID NO: 942320 - RNA, 19 nt, Homo sapiens
  misc_RNA (1)...(19): siRNA sense strand
ggagcucagccucaguuga

SEQ ID NO: 942321 - RNA, 19 nt, Homo sapiens
  misc_RNA (1)...(19): siRNA sense strand
acagcuggguggagaagga

SEQ ID NO: 942322 - RNA, 19 nt, Homo sapiens
  misc_RNA (1)...(19): siRNA sense strand
ccucaaaccagucagagau

SEQ ID NO: 942323 - RNA, 19 nt, Homo sapiens
  misc_RNA (1)...(19): siRNA sense strand
aggaugaggcacagaauga

SEQ ID NO: 942324 - RNA, 19 nt, Homo sapiens
  misc_RNA (1)...(19): siRNA sense strand
gcacagcuucaacaucucu

SEQ ID NO: 942325 - RNA, 19 nt, Homo sapiens
  misc_RNA (1)...(19): siRNA sense strand
agacuggcauugauuugag

SEQ ID NO: 942326 - RNA, 19 nt, Homo sapiens
  misc_RNA (1)...(19): siRNA sense strand
gccgaagugaugacuauga

SEQ ID NO: 942327 - RNA, 19 nt, Homo sapiens
  misc_RNA (1)...(19): siRNA sense strand
gauuugagcggcuguacca

SEQ ID NO: 942328 - RNA, 19 nt, Homo sapiens
  misc_RNA (1)...(19): siRNA sense strand
ucucuucacuucaggacau

SEQ ID NO: 942329 - RNA, 19 nt, Homo sapiens
  misc_RNA (1)...(19): siRNA sense strand
gcccuggaaugcugucaag

SEQ ID NO: 942330 - RNA, 19 nt, Homo sapiens
  misc_RNA (1)...(19): siRNA sense strand
ggagcaaagcuggaggauu

SEQ ID NO: 942331 - RNA, 19 nt, Homo sapiens
  misc_RNA (1)...(19): siRNA sense strand
ggucaaggagcccaaggau

SEQ ID NO: 942332 - RNA, 19 nt, Homo sapiens
  misc_RNA (1)...(19): siRNA sense strand
uuaccagcuugcaugacua

SEQ ID NO: 942333 - RNA, 19 nt, Homo sapiens
  misc_RNA (1)...(19): siRNA sense strand
gccacugaaguaaccaaua

SEQ ID NO: 942334 - RNA, 19 nt, Homo sapiens
  misc_RNA (1)...(19): siRNA sense strand
ggugcuggccgagcuguuu

SEQ ID NO: 942335 - RNA, 19 nt, Homo sapiens
  misc_RNA (1)...(19): siRNA sense strand
uuggaggaauuguaucguu

SEQ ID NO: 942336 - RNA, 19 nt, Homo sapiens
  misc_RNA (1)...(19): siRNA sense strand
gauccaggucucuucugaa

SEQ ID NO: 942337 - RNA, 19 nt, Homo sapiens
  misc_RNA (1)...(19): siRNA sense strand
ccaggucucuucugaaaag

SEQ ID NO: 942338 - RNA, 19 nt, Homo sapiens
  misc_RNA (1)...(19): siRNA sense strand
ccaaaggaaaggaucucuu

SEQ ID NO: 942339 - RNA, 19 nt, Homo sapiens
  misc_RNA (1)...(19): siRNA sense strand
ggaaacggacacugaucuc

SEQ ID NO: 942340 - RNA, 19 nt, Homo sapiens
  misc_RNA (1)...(19): siRNA sense strand
gagaaacagcgggucuuca

SEQ ID NO: 942341 - RNA, 19 nt, Homo sapiens
  misc_RNA (1)...(19): siRNA sense strand
ugguguaccugccggaugu

SEQ ID NO: 942342 - RNA, 19 nt, Homo sapiens
  misc_RNA (1)...(19): siRNA sense strand
cagacuggcauugauuuga

SEQ ID NO: 942343 - RNA, 19 nt, Homo sapiens
  misc_RNA (1)...(19): siRNA sense strand
gaggaagaagccaucaaag

SEQ ID NO: 942344 - RNA, 19 nt, Homo sapiens
  misc_RNA (1)...(19): siRNA sense strand
caccugagccaccugaaca

SEQ ID NO: 942345 - RNA, 19 nt, Homo sapiens
  misc_RNA (1)...(19): siRNA sense strand
cuucugaggaccuguguga

SEQ ID NO: 942346 - RNA, 19 nt, Homo sapiens
  misc_RNA (1)...(19): siRNA sense strand
gaggaucggaggccaaagg

SEQ ID NO: 942347 - RNA, 19 nt, Homo sapiens
  misc_RNA (1)...(19): siRNA sense strand
gaccaucaugccuacuuug

SEQ ID NO: 942348 - RNA, 19 nt, Homo sapiens
  misc_RNA (1)...(19): siRNA sense strand
cuuccagccucaccggauu

SEQ ID NO: 942349 - RNA, 19 nt, Homo sapiens
  misc_RNA (1)...(19): siRNA sense strand
uaccggagccuucaguaca

SEQ ID NO: 942350 - RNA, 19 nt, Homo sapiens
  misc_RNA (1)...(19): siRNA sense strand
ugauggagaggaggaguuu

SEQ ID NO: 942351 - RNA, 19 nt, Homo sapiens
  misc_RNA (1)...(19): siRNA sense strand
gcccaaaccacucucuucu

SEQ ID NO: 942352 - RNA, 19 nt, Homo sapiens
  misc_RNA (1)...(19): siRNA sense strand
caaggaugaggcacagaau

SEQ ID NO: 942353 - RNA, 19 nt, Homo sapiens
  misc_RNA (1)...(19): siRNA sense strand
aggaagaagccaccaagga

SEQ ID NO: 942354 - RNA, 19 nt, Homo sapiens
  misc_RNA (1)...(19): siRNA sense strand
guggcgcuuugccgaguuu

SEQ ID NO: 942355 - RNA, 19 nt, Homo sapiens
  misc_RNA (1)...(19): siRNA sense strand
gaauaugccucuaaaggaa

SEQ ID NO: 942356 - RNA, 19 nt, Homo sapiens
  misc_RNA (1)...(19): siRNA sense strand
gcagagccuugcaauauga

SEQ ID NO: 942357 - RNA, 19 nt, Homo sapiens
  misc_RNA (1)...(19): siRNA sense strand
gagaagcccugaaggacaa

SEQ ID NO: 942358 - RNA, 19 nt, Homo sapiens
  misc_RNA (1)...(19): siRNA sense strand
ucuaaucccuuucuaugua

SEQ ID NO: 942359 - RNA, 19 nt, Homo sapiens
  misc_RNA (1)...(19): siRNA sense strand
ggauauuggucccauucua

SEQ ID NO: 942360 - RNA, 19 nt, Homo sapiens
  misc_RNA (1)...(19): siRNA sense strand
gagcagagcagacuugauc

SEQ ID NO: 942361 - RNA, 19 nt, Homo sapiens
  misc_RNA (1)...(19): siRNA sense strand
aagccgaggucucaauaua

SEQ ID NO: 942362 - RNA, 19 nt, Homo sapiens
  misc_RNA (1)...(19): siRNA sense strand
guuggcaucuugguaaaua

SEQ ID NO: 942363 - RNA, 19 nt, Homo sapiens
  misc_RNA (1)...(19): siRNA sense strand
cagcagagccuugcaauau

SEQ ID NO: 942364 - RNA, 19 nt, Homo sapiens
  misc_RNA (1)...(19): siRNA sense strand
caacagaugggauuggaaa

SEQ ID NO: 942365 - RNA, 19 nt, Homo sapiens
  misc_RNA (1)...(19): siRNA sense strand
agccuacgcugaagaguua

SEQ ID NO: 942366 - RNA, 19 nt, Homo sapiens
  misc_RNA (1)...(19): siRNA sense strand
gcaagccgaggucucaaua

SEQ ID NO: 942367 - RNA, 19 nt, Homo sapiens
  misc_RNA (1)...(19): siRNA sense strand
gguuguugcuaaagacaua

SEQ ID NO: 942368 - RNA, 19 nt, Homo sapiens
  misc_RNA (1)...(19): siRNA sense strand
aagcaucacugucaucugu

SEQ ID NO: 942369 - RNA, 19 nt, Homo sapiens
  misc_RNA (1)...(19): siRNA sense strand
gacaagcucugggacauca

SEQ ID NO: 942370 - RNA, 19 nt, Homo sapiens
  misc_RNA (1)...(19): siRNA sense strand
uaaauaacguggguguguu

SEQ ID NO: 942371 - RNA, 19 nt, Homo sapiens
  misc_RNA (1)...(19): siRNA sense strand
gccgaggucucaauauaau

SEQ ID NO: 942372 - RNA, 19 nt, Homo sapiens
  misc_RNA (1)...(19): siRNA sense strand
gauauuggucccauucuau

SEQ ID NO: 942373 - RNA, 19 nt, Homo sapiens
  misc_RNA (1)...(19): siRNA sense strand
cguacaaaguggaaacuga

SEQ ID NO: 942374 - RNA, 19 nt, Homo sapiens
  misc_RNA (1)...(19): siRNA sense strand
cacaguauaugccugaaug

SEQ ID NO: 942375 - RNA, 19 nt, Homo sapiens
  misc_RNA (1)...(19): siRNA sense strand
caaaguggaaacugauauu

SEQ ID NO: 942376 - RNA, 19 nt, Homo sapiens
  misc_RNA (1)...(19): siRNA sense strand
guaaauaacgugggugugu

SEQ ID NO: 942377 - RNA, 19 nt, Homo sapiens
  misc_RNA (1)...(19): siRNA sense strand
cagcagcggucgugagauc

SEQ ID NO: 942378 - RNA, 19 nt, Homo sapiens
  misc_RNA (1)...(19): siRNA sense strand
gaucaagcaguauggaaga

SEQ ID NO: 942379 - RNA, 19 nt, Homo sapiens
  misc_RNA (1)...(19): siRNA sense strand
ugaauaugccucuaaagga

SEQ ID NO: 942380 - RNA, 19 nt, Homo sapiens
  misc_RNA (1)...(19): siRNA sense strand
gagccuugcaauaugaaua

SEQ ID NO: 942381 - RNA, 19 nt, Homo sapiens
  misc_RNA (1)...(19): siRNA sense strand
cgugagaucuaccuuccaa

SEQ ID NO: 942382 - RNA, 19 nt, Homo sapiens
  misc_RNA (1)...(19): siRNA sense strand
gacagcacccagcaacuuu

SEQ ID NO: 942383 - RNA, 19 nt, Homo sapiens
  misc_RNA (1)...(19): siRNA sense strand
uacagagucuaaucccuuu

SEQ ID NO: 942384 - RNA, 19 nt, Homo sapiens
  misc_RNA (1)...(19): siRNA sense strand
gacguuggcaucuugguaa

SEQ ID NO: 942385 - RNA, 19 nt, Homo sapiens
  misc_RNA (1)...(19): siRNA sense strand
ugagaucuaccuuccaauu

SEQ ID NO: 942386 - RNA, 19 nt, Homo sapiens
  misc_RNA (1)...(19): siRNA sense strand
gaucuaccuuccaauucga

SEQ ID NO: 942387 - RNA, 19 nt, Homo sapiens
  misc_RNA (1)...(19): siRNA sense strand
ggaaugguggagagaaaga

SEQ ID NO: 942388 - RNA, 19 nt, Homo sapiens
  misc_RNA (1)...(19): siRNA sense strand
guacaaaguggaaacugau

SEQ ID NO: 942389 - RNA, 19 nt, Homo sapiens
  misc_RNA (1)...(19): siRNA sense strand
gagaucuaccuuccaauuc

SEQ ID NO: 942390 - RNA, 19 nt, Homo sapiens
  misc_RNA (1)...(19): siRNA sense strand
cgggaaugguggagagaaa

SEQ ID NO: 942391 - RNA, 19 nt, Homo sapiens
  misc_RNA (1)...(19): siRNA sense strand
gcucugggacaucauaaau

SEQ ID NO: 942392 - RNA, 19 nt, Homo sapiens
  misc_RNA (1)...(19): siRNA sense strand
gaaagaaaggugccaucgu

SEQ ID NO: 942393 - RNA, 19 nt, Homo sapiens
  misc_RNA (1)...(19): siRNA sense strand
gcagagcagacuugaucaa

SEQ ID NO: 942394 - RNA, 19 nt, Homo sapiens
  misc_RNA (1)...(19): siRNA sense strand
caagcucugggacaucaua

SEQ ID NO: 942395 - RNA, 19 nt, Homo sapiens
  misc_RNA (1)...(19): siRNA sense strand
ugucagcggugcaacagau

SEQ ID NO: 942396 - RNA, 19 nt, Homo sapiens
  misc_RNA (1)...(19): siRNA sense strand
ccaaaaggaccacaggaua

SEQ ID NO: 942397 - RNA, 19 nt, Homo sapiens
  misc_RNA (1)...(19): siRNA sense strand
gcacaucaugcuguuucua

SEQ ID NO: 942398 - RNA, 19 nt, Homo sapiens
  misc_RNA (1)...(19): siRNA sense strand
ggaacgaggagaaguugca

SEQ ID NO: 942399 - RNA, 19 nt, Homo sapiens
  misc_RNA (1)...(19): siRNA sense strand
gaaaucgccaggucuugca

SEQ ID NO: 942400 - RNA, 19 nt, Homo sapiens
  misc_RNA (1)...(19): siRNA sense strand
gcagcggucgugagaucua

SEQ ID NO: 942401 - RNA, 19 nt, Homo sapiens
  misc_RNA (1)...(19): siRNA sense strand
gcagguuguugcuaaagac

SEQ ID NO: 942402 - RNA, 19 nt, Homo sapiens
  misc_RNA (1)...(19): siRNA sense strand
gacaguuucuaccucuugu

SEQ ID NO: 942403 - RNA, 19 nt, Homo sapiens
  misc_RNA (1)...(19): siRNA sense strand
aaauaacguggguguguuu

SEQ ID NO: 942404 - RNA, 19 nt, Homo sapiens
  misc_RNA (1)...(19): siRNA sense strand
uauuauaguugcggacuuc

SEQ ID NO: 942405 - RNA, 19 nt, Homo sapiens
  misc_RNA (1)...(19): siRNA sense strand
ugacagcacccagcaacuu

SEQ ID NO: 942406 - RNA, 19 nt, Homo sapiens
  misc_RNA (1)...(19): siRNA sense strand
uaacguggguguguuuuau

SEQ ID NO: 942407 - RNA, 19 nt, Homo sapiens
  misc_RNA (1)...(19): siRNA sense strand
gucccauucuauucaguuu

SEQ ID NO: 942408 - RNA, 19 nt, Homo sapiens
  misc_RNA (1)...(19): siRNA sense strand
caaaaggaccacaggauau

SEQ ID NO: 942409 - RNA, 19 nt, Homo sapiens
  misc_RNA (1)...(19): siRNA sense strand
ucagcagagccuugcaaua

SEQ ID NO: 942410 - RNA, 19 nt, Homo sapiens
  misc_RNA (1)...(19): siRNA sense strand
gggagcaaauauucucaac

SEQ ID NO: 942411 - RNA, 19 nt, Homo sapiens
  misc_RNA (1)...(19): siRNA sense strand
gcacaguauaugccugaau

SEQ ID NO: 942412 - RNA, 19 nt, Homo sapiens
  misc_RNA (1)...(19): siRNA sense strand
caugcuguuucuacucuug

SEQ ID NO: 942413 - RNA, 19 nt, Homo sapiens
  misc_RNA (1)...(19): siRNA sense strand
cuaaucccuuucuauguag

SEQ ID NO: 942414 - RNA, 19 nt, Homo sapiens
  misc_RNA (1)...(19): siRNA sense strand
aguugcagguuguugcuaa

SEQ ID NO: 942415 - RNA, 19 nt, Homo sapiens
  misc_RNA (1)...(19): siRNA sense strand
ugacaguuucuaccucuug

SEQ ID NO: 942416 - RNA, 19 nt, Homo sapiens
  misc_RNA (1)...(19): siRNA sense strand
guugcagguuguugcuaaa

SEQ ID NO: 942417 - RNA, 19 nt, Homo sapiens
  misc_RNA (1)...(19): siRNA sense strand
gcaacagaugggauuggaa

SEQ ID NO: 942418 - RNA, 19 nt, Homo sapiens
  misc_RNA (1)...(19): siRNA sense strand
cucaaccguucacuacgua

SEQ ID NO: 942419 - RNA, 19 nt, Homo sapiens
  misc_RNA (1)...(19): siRNA sense strand
ggucuugcaauugcuauau

SEQ ID NO: 942420 - RNA, 19 nt, Homo sapiens
  misc_RNA (1)...(19): siRNA sense strand
agucuaaucccuuucuaug

SEQ ID NO: 942421 - RNA, 19 nt, Homo sapiens
  misc_RNA (1)...(19): siRNA sense strand
gaaugguggagagaaagaa

SEQ ID NO: 942422 - RNA, 19 nt, Homo sapiens
  misc_RNA (1)...(19): siRNA sense strand
uacaaaguggaaacugaua

SEQ ID NO: 942423 - RNA, 19 nt, Homo sapiens
  misc_RNA (1)...(19): siRNA sense strand
cgacacguacaaaguggaa

SEQ ID NO: 942424 - RNA, 19 nt, Homo sapiens
  misc_RNA (1)...(19): siRNA sense strand
aggagaaguugcagguugu

SEQ ID NO: 942425 - RNA, 19 nt, Homo sapiens
  misc_RNA (1)...(19): siRNA sense strand
agcagagccuugcaauaug

SEQ ID NO: 942426 - RNA, 19 nt, Homo sapiens
  misc_RNA (1)...(19): siRNA sense strand
ggacaagcucugggacauc

SEQ ID NO: 942427 - RNA, 19 nt, Homo sapiens
  misc_RNA (1)...(19): siRNA sense strand
cgccaggucuugcaauugc

SEQ ID NO: 942428 - RNA, 19 nt, Homo sapiens
  misc_RNA (1)...(19): siRNA sense strand
gagucuaaucccuuucuau

SEQ ID NO: 942429 - RNA, 19 nt, Homo sapiens
  misc_RNA (1)...(19): siRNA sense strand
ggaaaagccuacgcugaag

SEQ ID NO: 942430 - RNA, 19 nt, Homo sapiens
  misc_RNA (1)...(19): siRNA sense strand
cuaugcacaucaugcuguu

SEQ ID NO: 942431 - RNA, 19 nt, Homo sapiens
  misc_RNA (1)...(19): siRNA sense strand
gaaucuuuguacagagucu

SEQ ID NO: 942432 - RNA, 19 nt, Homo sapiens
  misc_RNA (1)...(19): siRNA sense strand
acaaaguggaaacugauau

SEQ ID NO: 942433 - RNA, 19 nt, Homo sapiens
  misc_RNA (1)...(19): siRNA sense strand
ucucaaccguucacuacgu

SEQ ID NO: 942434 - RNA, 19 nt, Homo sapiens
  misc_RNA (1)...(19): siRNA sense strand
uuucuacucuugggauuuc

SEQ ID NO: 942435 - RNA, 19 nt, Homo sapiens
  misc_RNA (1)...(19): siRNA sense strand
uauguagccaccagcauga

SEQ ID NO: 942436 - RNA, 19 nt, Homo sapiens
  misc_RNA (1)...(19): siRNA sense strand
agagucuaaucccuuucua

SEQ ID NO: 942437 - RNA, 19 nt, Homo sapiens
  misc_RNA (1)...(19): siRNA sense strand
agacguuggcaucuuggua

SEQ ID NO: 942438 - RNA, 19 nt, Homo sapiens
  misc_RNA (1)...(19): siRNA sense strand
gagaaguugcagguuguug

SEQ ID NO: 942439 - RNA, 19 nt, Homo sapiens
  misc_RNA (1)...(19): siRNA sense strand
gaaaagccuacgcugaaga

SEQ ID NO: 942440 - RNA, 19 nt, Homo sapiens
  misc_RNA (1)...(19): siRNA sense strand
cccauucuauucaguuucu

SEQ ID NO: 942441 - RNA, 19 nt, Homo sapiens
  misc_RNA (1)...(19): siRNA sense strand
guuucuaccucuuguacag

SEQ ID NO: 942442 - RNA, 19 nt, Homo sapiens
  misc_RNA (1)...(19): siRNA sense strand
ggagaaguugcagguuguu

SEQ ID NO: 942443 - RNA, 19 nt, Homo sapiens
  misc_RNA (1)...(19): siRNA sense strand
caggauauuggucccauuc

SEQ ID NO: 942444 - RNA, 19 nt, Homo sapiens
  misc_RNA (1)...(19): siRNA sense strand
aggaaucuuuguacagagu

SEQ ID NO: 942445 - RNA, 19 nt, Homo sapiens
  misc_RNA (1)...(19): siRNA sense strand
agaucuaccuuccaauucg

SEQ ID NO: 942446 - RNA, 19 nt, Homo sapiens
  misc_RNA (1)...(19): siRNA sense strand
ggaagaugggccguuguca

SEQ ID NO: 942447 - RNA, 19 nt, Homo sapiens
  misc_RNA (1)...(19): siRNA sense strand
guaaggacauucucaaauu

SEQ ID NO: 942448 - RNA, 19 nt, Homo sapiens
  misc_RNA (1)...(19): siRNA sense strand
caaauuccaugccaucuau

SEQ ID NO: 942449 - RNA, 19 nt, Homo sapiens
  misc_RNA (1)...(19): siRNA sense strand
ggccaccucucauaucaua

SEQ ID NO: 942450 - RNA, 19 nt, Homo sapiens
  misc_RNA (1)...(19): siRNA sense strand
ggacuuggcuggugaaagc

SEQ ID NO: 942451 - RNA, 19 nt, Homo sapiens
  misc_RNA (1)...(19): siRNA sense strand
gcagguagcagaccacuau

SEQ ID NO: 942452 - RNA, 19 nt, Homo sapiens
  misc_RNA (1)...(19): siRNA sense strand
gauccuaggacuugccuua

SEQ ID NO: 942453 - RNA, 19 nt, Homo sapiens
  misc_RNA (1)...(19): siRNA sense strand
uagcagaccacuaugauaa

SEQ ID NO: 942454 - RNA, 19 nt, Homo sapiens
  misc_RNA (1)...(19): siRNA sense strand
uaucauagguaaggacauu

SEQ ID NO: 942455 - RNA, 19 nt, Homo sapiens
  misc_RNA (1)...(19): siRNA sense strand
ucaacuaccucacuguaau

SEQ ID NO: 942456 - RNA, 19 nt, Homo sapiens
  misc_RNA (1)...(19): siRNA sense strand
agaccacuaugauaacuuu

SEQ ID NO: 942457 - RNA, 19 nt, Homo sapiens
  misc_RNA (1)...(19): siRNA sense strand
uaaggacauucucaaauuc

SEQ ID NO: 942458 - RNA, 19 nt, Homo sapiens
  misc_RNA (1)...(19): siRNA sense strand
ccucucauaucauagguaa

SEQ ID NO: 942459 - RNA, 19 nt, Homo sapiens
  misc_RNA (1)...(19): siRNA sense strand
ggacauccaugcccuuuug

SEQ ID NO: 942460 - RNA, 19 nt, Homo sapiens
  misc_RNA (1)...(19): siRNA sense strand
cgaaccauuucaucacgua

SEQ ID NO: 942461 - RNA, 19 nt, Homo sapiens
  misc_RNA (1)...(19): siRNA sense strand
cuacuucacuacacccauu

SEQ ID NO: 942462 - RNA, 19 nt, Homo sapiens
  misc_RNA (1)...(19): siRNA sense strand
uggaugcccuggucaacua

SEQ ID NO: 942463 - RNA, 19 nt, Homo sapiens
  misc_RNA (1)...(19): siRNA sense strand
gaaccgaugcacugccaaa

SEQ ID NO: 942464 - RNA, 19 nt, Homo sapiens
  misc_RNA (1)...(19): siRNA sense strand
uuggagagcucuauuucuu

SEQ ID NO: 942465 - RNA, 19 nt, Homo sapiens
  misc_RNA (1)...(19): siRNA sense strand
ggucaacuaccucacugua

SEQ ID NO: 942466 - RNA, 19 nt, Homo sapiens
  misc_RNA (1)...(19): siRNA sense strand
gguaaggacauucucaaau

SEQ ID NO: 942467 - RNA, 19 nt, Homo sapiens
  misc_RNA (1)...(19): siRNA sense strand
caacuaccucacuguaauu

SEQ ID NO: 942468 - RNA, 19 nt, Homo sapiens
  misc_RNA (1)...(19): siRNA sense strand
guagcagaccacuaugaua

SEQ ID NO: 942469 - RNA, 19 nt, Homo sapiens
  misc_RNA (1)...(19): siRNA sense strand
gagcacgggcugaagauuc

SEQ ID NO: 942470 - RNA, 19 nt, Homo sapiens
  misc_RNA (1)...(19): siRNA sense strand
gugcucaggcagaggauua

SEQ ID NO: 942471 - RNA, 19 nt, Homo sapiens
  misc_RNA (1)...(19): siRNA sense strand
cuacaagggcgucuaugaa

SEQ ID NO: 942472 - RNA, 19 nt, Homo sapiens
  misc_RNA (1)...(19): siRNA sense strand
gagcaguuccagcagcuuu

SEQ ID NO: 942473 - RNA, 19 nt, Homo sapiens
  misc_RNA (1)...(19): siRNA sense strand
gcacaucgggcaccuguac

SEQ ID NO: 942474 - RNA, 19 nt, Homo sapiens
  misc_RNA (1)...(19): siRNA sense strand
caaaugcugaguucaaauc

SEQ ID NO: 942475 - RNA, 19 nt, Homo sapiens
  misc_RNA (1)...(19): siRNA sense strand
ggacugugacuacuaugau

SEQ ID NO: 942476 - RNA, 19 nt, Homo sapiens
  misc_RNA (1)...(19): siRNA sense strand
caacugggacugugacuac

SEQ ID NO: 942477 - RNA, 19 nt, Homo sapiens
  misc_RNA (1)...(19): siRNA sense strand
cccaaaugcugaguucaaa

SEQ ID NO: 942478 - RNA, 19 nt, Homo sapiens
  misc_RNA (1)...(19): siRNA sense strand
uuucuugccucgauucuau

SEQ ID NO: 942479 - RNA, 19 nt, Homo sapiens
  misc_RNA (1)...(19): siRNA sense strand
cagcgcaucuguguccauu

SEQ ID NO: 942480 - RNA, 19 nt, Homo sapiens
  misc_RNA (1)...(19): siRNA sense strand
gggauucguuuccuguauc

SEQ ID NO: 942481 - RNA, 19 nt, Homo sapiens
  misc_RNA (1)...(19): siRNA sense strand
ggaauguuugcgagucuuu

SEQ ID NO: 942482 - RNA, 19 nt, Homo sapiens
  misc_RNA (1)...(19): siRNA sense strand
cgaugaugcuugugaugug

SEQ ID NO: 942483 - RNA, 19 nt, Homo sapiens
  misc_RNA (1)...(19): siRNA sense strand
ucgcagaccaucuauguau

SEQ ID NO: 942484 - RNA, 19 nt, Homo sapiens
  misc_RNA (1)...(19): siRNA sense strand
gcagaccacuaugauaacu

SEQ ID NO: 942485 - RNA, 19 nt, Homo sapiens
  misc_RNA (1)...(19): siRNA sense strand
augcugaguucaaaucuug

SEQ ID NO: 942486 - RNA, 19 nt, Homo sapiens
  misc_RNA (1)...(19): siRNA sense strand
gacugugacuacuaugaug

SEQ ID NO: 942487 - RNA, 19 nt, Homo sapiens
  misc_RNA (1)...(19): siRNA sense strand
ucaaauuccaugccaucua

SEQ ID NO: 942488 - RNA, 19 nt, Homo sapiens
  misc_RNA (1)...(19): siRNA sense strand
ggcccacgcuacuacaguu

SEQ ID NO: 942489 - RNA, 19 nt, Homo sapiens
  misc_RNA (1)...(19): siRNA sense strand
cuacccaaaugcugaguuc

SEQ ID NO: 942490 - RNA, 19 nt, Homo sapiens
  misc_RNA (1)...(19): siRNA sense strand
ggauggcuuccgcuacuuu

SEQ ID NO: 942491 - RNA, 19 nt, Homo sapiens
  misc_RNA (1)...(19): siRNA sense strand
cauguggccuuggaauguu

SEQ ID NO: 942492 - RNA, 19 nt, Homo sapiens
  misc_RNA (1)...(19): siRNA sense strand
acgcgauucuccacuggua

SEQ ID NO: 942493 - RNA, 19 nt, Homo sapiens
  misc_RNA (1)...(19): siRNA sense strand
gguagcagaccacuaugau

SEQ ID NO: 942494 - RNA, 19 nt, Homo sapiens
  misc_RNA (1)...(19): siRNA sense strand
ggauucguuuccuguaucu

SEQ ID NO: 942495 - RNA, 19 nt, Homo sapiens
  misc_RNA (1)...(19): siRNA sense strand
cuaccugcuucccuaguga

SEQ ID NO: 942496 - RNA, 19 nt, Homo sapiens
  misc_RNA (1)...(19): siRNA sense strand
uacccagccuucugcacua

SEQ ID NO: 942497 - RNA, 19 nt, Homo sapiens
  misc_RNA (1)...(19): siRNA sense strand
ccggccaccucucauauca

SEQ ID NO: 942498 - RNA, 19 nt, Homo sapiens
  misc_RNA (1)...(19): siRNA sense strand
guggauggcuuccgcuacu

SEQ ID NO: 942499 - RNA, 19 nt, Homo sapiens
  misc_RNA (1)...(19): siRNA sense strand
gccaaaagauguccaagag

SEQ ID NO: 942500 - RNA, 19 nt, Homo sapiens
  misc_RNA (1)...(19): siRNA sense strand
gcgcaucuguguccauucc

SEQ ID NO: 942501 - RNA, 19 nt, Homo sapiens
  misc_RNA (1)...(19): siRNA sense strand
ccgagucucugagcaguuc

SEQ ID NO: 942502 - RNA, 19 nt, Homo sapiens
  misc_RNA (1)...(19): siRNA sense strand
uaaauccuucugagaccua

SEQ ID NO: 942503 - RNA, 19 nt, Homo sapiens
  misc_RNA (1)...(19): siRNA sense strand
gggacugugacuacuauga

SEQ ID NO: 942504 - RNA, 19 nt, Homo sapiens
  misc_RNA (1)...(19): siRNA sense strand
gcuguguccggcaaacuaa

SEQ ID NO: 942505 - RNA, 19 nt, Homo sapiens
  misc_RNA (1)...(19): siRNA sense strand
ucuacaagggcgucuauga

SEQ ID NO: 942506 - RNA, 19 nt, Homo sapiens
  misc_RNA (1)...(19): siRNA sense strand
uaaccgcuauaccguggau

SEQ ID NO: 942507 - RNA, 19 nt, Homo sapiens
  misc_RNA (1)...(19): siRNA sense strand
gucaacuaccucacuguaa

SEQ ID NO: 942508 - RNA, 19 nt, Homo sapiens
  misc_RNA (1)...(19): siRNA sense strand
guccgugucucgcagaagu

SEQ ID NO: 942509 - RNA, 19 nt, Homo sapiens
  misc_RNA (1)...(19): siRNA sense strand
gcgaugaugcuugugaugu

SEQ ID NO: 942510 - RNA, 19 nt, Homo sapiens
  misc_RNA (1)...(19): siRNA sense strand
gacgagcacgggcugaaga

SEQ ID NO: 942511 - RNA, 19 nt, Homo sapiens
  misc_RNA (1)...(19): siRNA sense strand
gcucuacaagggcgucuau

SEQ ID NO: 942512 - RNA, 19 nt, Homo sapiens
  misc_RNA (1)...(19): siRNA sense strand
gcaccuguacucggcacua

SEQ ID NO: 942513 - RNA, 19 nt, Homo sapiens
  misc_RNA (1)...(19): siRNA sense strand
augaaaaggugguuaaguu

SEQ ID NO: 942514 - RNA, 19 nt, Homo sapiens
  misc_RNA (1)...(19): siRNA sense strand
ggaccaaggaagaaaacua

SEQ ID NO: 942515 - RNA, 19 nt, Homo sapiens
  misc_RNA (1)...(19): siRNA sense strand
caagggcgucuaugaaggu

SEQ ID NO: 942516 - RNA, 19 nt, Homo sapiens
  misc_RNA (1)...(19): siRNA sense strand
ugaaagcccaccggaccua

SEQ ID NO: 942517 - RNA, 19 nt, Homo sapiens
  misc_RNA (1)...(19): siRNA sense strand
ugacuacuaugaugaaaag

SEQ ID NO: 942518 - RNA, 19 nt, Homo sapiens
  misc_RNA (1)...(19): siRNA sense strand
ccgaugcacugccaaaaga

SEQ ID NO: 942519 - RNA, 19 nt, Homo sapiens
  misc_RNA (1)...(19): siRNA sense strand
ggaccugaaacugggcuuu

SEQ ID NO: 942520 - RNA, 19 nt, Homo sapiens
  misc_RNA (1)...(19): siRNA sense strand
caaggaagaaaacuacauu

SEQ ID NO: 942521 - RNA, 19 nt, Homo sapiens
  misc_RNA (1)...(19): siRNA sense strand
cugggacugugacuacuau

SEQ ID NO: 942522 - RNA, 19 nt, Homo sapiens
  misc_RNA (1)...(19): siRNA sense strand
cgcagaccaucuauguaug

SEQ ID NO: 942523 - RNA, 19 nt, Homo sapiens
  misc_RNA (1)...(19): siRNA sense strand
ucauguggccuuggaaugu

SEQ ID NO: 942524 - RNA, 19 nt, Homo sapiens
  misc_RNA (1)...(19): siRNA sense strand
gaacuccgagcuggcagau

SEQ ID NO: 942525 - RNA, 19 nt, Homo sapiens
  misc_RNA (1)...(19): siRNA sense strand
ucacuacacccauuuucua

SEQ ID NO: 942526 - RNA, 19 nt, Homo sapiens
  misc_RNA (1)...(19): siRNA sense strand
uggguacugugcuucaugu

SEQ ID NO: 942527 - RNA, 19 nt, Homo sapiens
  misc_RNA (1)...(19): siRNA sense strand
uacaagggcgucuaugaag

SEQ ID NO: 942528 - RNA, 19 nt, Homo sapiens
  misc_RNA (1)...(19): siRNA sense strand
ccaaaugcugaguucaaau

SEQ ID NO: 942529 - RNA, 19 nt, Homo sapiens
  misc_RNA (1)...(19): siRNA sense strand
ggaagguccuaaauuauga

SEQ ID NO: 942530 - RNA, 19 nt, Homo sapiens
  misc_RNA (1)...(19): siRNA sense strand
aguggaagguccuaaauua

SEQ ID NO: 942531 - RNA, 19 nt, Homo sapiens
  misc_RNA (1)...(19): siRNA sense strand
ccagauugcugccauaguu

SEQ ID NO: 942532 - RNA, 19 nt, Homo sapiens
  misc_RNA (1)...(19): siRNA sense strand
gacaggaucugcucuuuca

SEQ ID NO: 942533 - RNA, 19 nt, Homo sapiens
  misc_RNA (1)...(19): siRNA sense strand
ccucagcgcugcgguuaua

SEQ ID NO: 942534 - RNA, 19 nt, Homo sapiens
  misc_RNA (1)...(19): siRNA sense strand
gagggucacuacagucuga

SEQ ID NO: 942535 - RNA, 19 nt, Homo sapiens
  misc_RNA (1)...(19): siRNA sense strand
gcugugagcucugcuacuu

SEQ ID NO: 942536 - RNA, 19 nt, Homo sapiens
  misc_RNA (1)...(19): siRNA sense strand
ggacauaggaggagaugca

SEQ ID NO: 942537 - RNA, 19 nt, Homo sapiens
  misc_RNA (1)...(19): siRNA sense strand
gcgcugcgguuauacaauc

SEQ ID NO: 942538 - RNA, 19 nt, Homo sapiens
  misc_RNA (1)...(19): siRNA sense strand
caugaaggcuccucugucu

SEQ ID NO: 942539 - RNA, 19 nt, Homo sapiens
  misc_RNA (1)...(19): siRNA sense strand
gguccuaaauuaugacaag

SEQ ID NO: 942540 - RNA, 19 nt, Homo sapiens
  misc_RNA (1)...(19): siRNA sense strand
gcauaggccucaucaucca

SEQ ID NO: 942541 - RNA, 19 nt, Homo sapiens
  misc_RNA (1)...(19): siRNA sense strand
gaucugcuacggcauguau

SEQ ID NO: 942542 - RNA, 19 nt, Homo sapiens
  misc_RNA (1)...(19): siRNA sense strand
ugacaagaccaaggacaua

SEQ ID NO: 942543 - RNA, 19 nt, Homo sapiens
  misc_RNA (1)...(19): siRNA sense strand
gguccagauugcugccaua

SEQ ID NO: 942544 - RNA, 19 nt, Homo sapiens
  misc_RNA (1)...(19): siRNA sense strand
gccgagagguugucaugag

SEQ ID NO: 942545 - RNA, 19 nt, Homo sapiens
  misc_RNA (1)...(19): siRNA sense strand
gcaguggaagguccuaaau

SEQ ID NO: 942546 - RNA, 19 nt, Homo sapiens
  misc_RNA (1)...(19): siRNA sense strand
gcgacgaggaggaguacua

SEQ ID NO: 942547 - RNA, 19 nt, Homo sapiens
  misc_RNA (1)...(19): siRNA sense strand
uggaagguccuaaauuaug

SEQ ID NO: 942548 - RNA, 19 nt, Homo sapiens
  misc_RNA (1)...(19): siRNA sense strand
ugugagcucugcuacuuca

SEQ ID NO: 942549 - RNA, 19 nt, Homo sapiens
  misc_RNA (1)...(19): siRNA sense strand
guggaagguccuaaauuau

SEQ ID NO: 942550 - RNA, 19 nt, Homo sapiens
  misc_RNA (1)...(19): siRNA sense strand
ucgagaagguccagauugc

SEQ ID NO: 942551 - RNA, 19 nt, Homo sapiens
  misc_RNA (1)...(19): siRNA sense strand
ucaugagggucacuacagu

SEQ ID NO: 942552 - RNA, 19 nt, Homo sapiens
  misc_RNA (1)...(19): siRNA sense strand
ugaaggcuccucugucuac

SEQ ID NO: 942553 - RNA, 19 nt, Homo sapiens
  misc_RNA (1)...(19): siRNA sense strand
caagaccaaggacauagga

SEQ ID NO: 942554 - RNA, 19 nt, Homo sapiens
  misc_RNA (1)...(19): siRNA sense strand
cgacaggaucugcucuuuc

SEQ ID NO: 942555 - RNA, 19 nt, Homo sapiens
  misc_RNA (1)...(19): siRNA sense strand
caguggaagguccuaaauu

SEQ ID NO: 942556 - RNA, 19 nt, Homo sapiens
  misc_RNA (1)...(19): siRNA sense strand
caucgagaagguccagauu

SEQ ID NO: 942557 - RNA, 19 nt, Homo sapiens
  misc_RNA (1)...(19): siRNA sense strand
gacaagaccaaggacauag

SEQ ID NO: 942558 - RNA, 19 nt, Homo sapiens
  misc_RNA (1)...(19): siRNA sense strand
cugcauaggccucaucauc

SEQ ID NO: 942559 - RNA, 19 nt, Homo sapiens
  misc_RNA (1)...(19): siRNA sense strand
ucauggaugucgucugcau

SEQ ID NO: 942560 - RNA, 19 nt, Homo sapiens
  misc_RNA (1)...(19): siRNA sense strand
acgacaggaucugcucuuu

SEQ ID NO: 942561 - RNA, 19 nt, Homo sapiens
  misc_RNA (1)...(19): siRNA sense strand
uguauggcuucauggaugu

SEQ ID NO: 942562 - RNA, 19 nt, Homo sapiens
  misc_RNA (1)...(19): siRNA sense strand
cggcuccgcauguuucuga

SEQ ID NO: 942563 - RNA, 19 nt, Homo sapiens
  misc_RNA (1)...(19): siRNA sense strand
gaaaggagcuuauaagaga

SEQ ID NO: 942564 - RNA, 19 nt, Homo sapiens
  misc_RNA (1)...(19): siRNA sense strand
gcacuaauauccagauuua

SEQ ID NO: 942565 - RNA, 19 nt, Homo sapiens
  misc_RNA (1)...(19): siRNA sense strand
gcacagcucuuacucauaa

SEQ ID NO: 942566 - RNA, 19 nt, Homo sapiens
  misc_RNA (1)...(19): siRNA sense strand
uaacugagcugguaaaugu

SEQ ID NO: 942567 - RNA, 19 nt, Homo sapiens
  misc_RNA (1)...(19): siRNA sense strand
gacaaggacuuuagguuua

SEQ ID NO: 942568 - RNA, 19 nt, Homo sapiens
  misc_RNA (1)...(19): siRNA sense strand
gcacuaacaugcuuucuga

SEQ ID NO: 942569 - RNA, 19 nt, Homo sapiens
  misc_RNA (1)...(19): siRNA sense strand
gaaauuaccagguuaacua

SEQ ID NO: 942570 - RNA, 19 nt, Homo sapiens
  misc_RNA (1)...(19): siRNA sense strand
gaagaucgaugcuuuguca

SEQ ID NO: 942571 - RNA, 19 nt, Homo sapiens
  misc_RNA (1)...(19): siRNA sense strand
guuaugagcuguggaaaua

SEQ ID NO: 942572 - RNA, 19 nt, Homo sapiens
  misc_RNA (1)...(19): siRNA sense strand
ggaaguauauccucauguu

SEQ ID NO: 942573 - RNA, 19 nt, Homo sapiens
  misc_RNA (1)...(19): siRNA sense strand
gaaaguauccagaaagauu

SEQ ID NO: 942574 - RNA, 19 nt, Homo sapiens
  misc_RNA (1)...(19): siRNA sense strand
gaagcaaacucguccugua

SEQ ID NO: 942575 - RNA, 19 nt, Homo sapiens
  misc_RNA (1)...(19): siRNA sense strand
gaaggaccauuaugauauu

SEQ ID NO: 942576 - RNA, 19 nt, Homo sapiens
  misc_RNA (1)...(19): siRNA sense strand
caaaucagcugcauccuau

SEQ ID NO: 942577 - RNA, 19 nt, Homo sapiens
  misc_RNA (1)...(19): siRNA sense strand
gcagaaagauuccaucaag

SEQ ID NO: 942578 - RNA, 19 nt, Homo sapiens
  misc_RNA (1)...(19): siRNA sense strand
cuauuuaccuguaccauua

SEQ ID NO: 942579 - RNA, 19 nt, Homo sapiens
  misc_RNA (1)...(19): siRNA sense strand
caacuaagguaaaggcaaa

SEQ ID NO: 942580 - RNA, 19 nt, Homo sapiens
  misc_RNA (1)...(19): siRNA sense strand
gaaugaaauuaccagguua

SEQ ID NO: 942581 - RNA, 19 nt, Homo sapiens
  misc_RNA (1)...(19): siRNA sense strand
guaaaggcauugacacuga

SEQ ID NO: 942582 - RNA, 19 nt, Homo sapiens
  misc_RNA (1)...(19): siRNA sense strand
cuagaagccuuggauauua

SEQ ID NO: 942583 - RNA, 19 nt, Homo sapiens
  misc_RNA (1)...(19): siRNA sense strand
uaacaaugcuucagaguca

SEQ ID NO: 942584 - RNA, 19 nt, Homo sapiens
  misc_RNA (1)...(19): siRNA sense strand
gcaagcuggucauagaaua

SEQ ID NO: 942585 - RNA, 19 nt, Homo sapiens
  misc_RNA (1)...(19): siRNA sense strand
gaggacuucuuguuaauuu

SEQ ID NO: 942586 - RNA, 19 nt, Homo sapiens
  misc_RNA (1)...(19): siRNA sense strand
ugacggaacugcagaaaga

SEQ ID NO: 942587 - RNA, 19 nt, Homo sapiens
  misc_RNA (1)...(19): siRNA sense strand
caauguagaugaugaugaa

SEQ ID NO: 942588 - RNA, 19 nt, Homo sapiens
  misc_RNA (1)...(19): siRNA sense strand
gaaggaaccagaaauguug

SEQ ID NO: 942589 - RNA, 19 nt, Homo sapiens
  misc_RNA (1)...(19): siRNA sense strand
gaugagcucccaccucuua

SEQ ID NO: 942590 - RNA, 19 nt, Homo sapiens
  misc_RNA (1)...(19): siRNA sense strand
guacaaaguuggcuaugug

SEQ ID NO: 942591 - RNA, 19 nt, Homo sapiens
  misc_RNA (1)...(19): siRNA sense strand
gugaauaccuugagaagau

SEQ ID NO: 942592 - RNA, 19 nt, Homo sapiens
  misc_RNA (1)...(19): siRNA sense strand
gaaauguuguugcugaaug

SEQ ID NO: 942593 - RNA, 19 nt, Homo sapiens
  misc_RNA (1)...(19): siRNA sense strand
guaagaagauguccuaagg

SEQ ID NO: 942594 - RNA, 19 nt, Homo sapiens
  misc_RNA (1)...(19): siRNA sense strand
gacaugaguuggaaaguga

SEQ ID NO: 942595 - RNA, 19 nt, Homo sapiens
  misc_RNA (1)...(19): siRNA sense strand
gauaauuccuuugguggua

SEQ ID NO: 942596 - RNA, 19 nt, Homo sapiens
  misc_RNA (1)...(19): siRNA sense strand
gcccgaagcucagugguua

SEQ ID NO: 942597 - RNA, 19 nt, Homo sapiens
  misc_RNA (1)...(19): siRNA sense strand
agaaacaccuuuaacaaug

SEQ ID NO: 942598 - RNA, 19 nt, Homo sapiens
  misc_RNA (1)...(19): siRNA sense strand
aaagauaaguggauccauu

SEQ ID NO: 942599 - RNA, 19 nt, Homo sapiens
  misc_RNA (1)...(19): siRNA sense strand
ugacuuaaguggacaguug

SEQ ID NO: 942600 - RNA, 19 nt, Homo sapiens
  misc_RNA (1)...(19): siRNA sense strand
ggagaaacaccuuuaacaa

SEQ ID NO: 942601 - RNA, 19 nt, Homo sapiens
  misc_RNA (1)...(19): siRNA sense strand
gagaagaguccacugauga

SEQ ID NO: 942602 - RNA, 19 nt, Homo sapiens
  misc_RNA (1)...(19): siRNA sense strand
aaacaucugggccuuauua

SEQ ID NO: 942603 - RNA, 19 nt, Homo sapiens
  misc_RNA (1)...(19): siRNA sense strand
guauaucccuccucccuuu

SEQ ID NO: 942604 - RNA, 19 nt, Homo sapiens
  misc_RNA (1)...(19): siRNA sense strand
aaaucaagcucaucgaauu

SEQ ID NO: 942605 - RNA, 19 nt, Homo sapiens
  misc_RNA (1)...(19): siRNA sense strand
ucaaaugucuugguccuuu

SEQ ID NO: 942606 - RNA, 19 nt, Homo sapiens
  misc_RNA (1)...(19): siRNA sense strand
gaagcuuucucaucuccua

SEQ ID NO: 942607 - RNA, 19 nt, Homo sapiens
  misc_RNA (1)...(19): siRNA sense strand
gaaguugggcaucauauug

SEQ ID NO: 942608 - RNA, 19 nt, Homo sapiens
  misc_RNA (1)...(19): siRNA sense strand
gaacuuauuggacuuguga

SEQ ID NO: 942609 - RNA, 19 nt, Homo sapiens
  misc_RNA (1)...(19): siRNA sense strand
guaauccucuguaaccauu

SEQ ID NO: 942610 - RNA, 19 nt, Homo sapiens
  misc_RNA (1)...(19): siRNA sense strand
uguuaaagcucuucacaaa

SEQ ID NO: 942611 - RNA, 19 nt, Homo sapiens
  misc_RNA (1)...(19): siRNA sense strand
ccucauguuucuaccauua

SEQ ID NO: 942612 - RNA, 19 nt, Homo sapiens
  misc_RNA (1)...(19): siRNA sense strand
caaaugucuugguccuuua

SEQ ID NO: 942613 - RNA, 19 nt, Homo sapiens
  misc_RNA (1)...(19): siRNA sense strand
acacauuccuguacuugua

SEQ ID NO: 942614 - RNA, 19 nt, Homo sapiens
  misc_RNA (1)...(19): siRNA sense strand
gagaaacaccuuuaacaau

SEQ ID NO: 942615 - RNA, 19 nt, Homo sapiens
  misc_RNA (1)...(19): siRNA sense strand
cgagacauuucaaguauug

SEQ ID NO: 942616 - RNA, 19 nt, Homo sapiens
  misc_RNA (1)...(19): siRNA sense strand
cuaacaugcuuucugauaa

SEQ ID NO: 942617 - RNA, 19 nt, Homo sapiens
  misc_RNA (1)...(19): siRNA sense strand
guagauacccucugcacua

SEQ ID NO: 942618 - RNA, 19 nt, Homo sapiens
  misc_RNA (1)...(19): siRNA sense strand
gaaagaauaccaaguagag

SEQ ID NO: 942619 - RNA, 19 nt, Homo sapiens
  misc_RNA (1)...(19): siRNA sense strand
uauuauggcugauauguug

SEQ ID NO: 942620 - RNA, 19 nt, Homo sapiens
  misc_RNA (1)...(19): siRNA sense strand
ggaaggaaccagaaauguu

SEQ ID NO: 942621 - RNA, 19 nt, Homo sapiens
  misc_RNA (1)...(19): siRNA sense strand
ccagagagcuuugaaacug

SEQ ID NO: 942622 - RNA, 19 nt, Homo sapiens
  misc_RNA (1)...(19): siRNA sense strand
caauuuggguucugacuug

SEQ ID NO: 942623 - RNA, 19 nt, Homo sapiens
  misc_RNA (1)...(19): siRNA sense strand
gaacaacuucgagacauuu

SEQ ID NO: 942624 - RNA, 19 nt, Homo sapiens
  misc_RNA (1)...(19): siRNA sense strand
gaugauggucuggauauua

SEQ ID NO: 942625 - RNA, 19 nt, Homo sapiens
  misc_RNA (1)...(19): siRNA sense strand
gaaagugauaugcauguuu

SEQ ID NO: 942626 - RNA, 19 nt, Homo sapiens
  misc_RNA (1)...(19): siRNA sense strand
uuaaagcucuucacaaaca

SEQ ID NO: 942627 - RNA, 19 nt, Homo sapiens
  misc_RNA (1)...(19): siRNA sense strand
uaugagcuguggaaauaua

SEQ ID NO: 942628 - RNA, 19 nt, Homo sapiens
  misc_RNA (1)...(19): siRNA sense strand
cgacaaggacuuuagguuu

SEQ ID NO: 942629 - RNA, 19 nt, Homo sapiens
  misc_RNA (1)...(19): siRNA sense strand
gaaagauuccaucaaguug

SEQ ID NO: 942630 - RNA, 19 nt, Homo sapiens
  misc_RNA (1)...(19): siRNA sense strand
agaaugaaauuaccagguu

SEQ ID NO: 942631 - RNA, 19 nt, Homo sapiens
  misc_RNA (1)...(19): siRNA sense strand
gguucugacuugccuaaua

SEQ ID NO: 942632 - RNA, 19 nt, Homo sapiens
  misc_RNA (1)...(19): siRNA sense strand
gcagggagaaacaccuuua

SEQ ID NO: 942633 - RNA, 19 nt, Homo sapiens
  misc_RNA (1)...(19): siRNA sense strand
ccacaucuuuacaaugaaa

SEQ ID NO: 942634 - RNA, 19 nt, Homo sapiens
  misc_RNA (1)...(19): siRNA sense strand
gguuacggcugugaaauuu

SEQ ID NO: 942635 - RNA, 19 nt, Homo sapiens
  misc_RNA (1)...(19): siRNA sense strand
gggcaaccuuccugaauau

SEQ ID NO: 942636 - RNA, 19 nt, Homo sapiens
  misc_RNA (1)...(19): siRNA sense strand
gucaagaacucaaggucua

SEQ ID NO: 942637 - RNA, 19 nt, Homo sapiens
  misc_RNA (1)...(19): siRNA sense strand
caaguuggaugaugauagu

SEQ ID NO: 942638 - RNA, 19 nt, Homo sapiens
  misc_RNA (1)...(19): siRNA sense strand
caucugggccuuauuacua

SEQ ID NO: 942639 - RNA, 19 nt, Homo sapiens
  misc_RNA (1)...(19): siRNA sense strand
ggcccuaacucaacacauu

SEQ ID NO: 942640 - RNA, 19 nt, Homo sapiens
  misc_RNA (1)...(19): siRNA sense strand
gaccgucucuccugcacua

SEQ ID NO: 942641 - RNA, 19 nt, Homo sapiens
  misc_RNA (1)...(19): siRNA sense strand
ugaaaugcuuccagaauuc

SEQ ID NO: 942642 - RNA, 19 nt, Homo sapiens
  misc_RNA (1)...(19): siRNA sense strand
gaugaugaauuaagagagu

SEQ ID NO: 942643 - RNA, 19 nt, Homo sapiens
  misc_RNA (1)...(19): siRNA sense strand
gcucuuggccaucugguua

SEQ ID NO: 942644 - RNA, 19 nt, Homo sapiens
  misc_RNA (1)...(19): siRNA sense strand
ccuaauacacuucagauuu

SEQ ID NO: 942645 - RNA, 19 nt, Homo sapiens
  misc_RNA (1)...(19): siRNA sense strand
cauguuaacugagcuggua

SEQ ID NO: 942646 - RNA, 19 nt, Homo sapiens
  misc_RNA (1)...(19): siRNA sense strand
uaaagagcgugaagagaau

SEQ ID NO: 942647 - RNA, 19 nt, Homo sapiens
  misc_RNA (1)...(19): siRNA sense strand
ugaugaagaugaagaugaa

SEQ ID NO: 942648 - RNA, 19 nt, Homo sapiens
  misc_RNA (1)...(19): siRNA sense strand
acaagaaccuacauacaau

SEQ ID NO: 942649 - RNA, 19 nt, Homo sapiens
  misc_RNA (1)...(19): siRNA sense strand
gcuagaagccuuggauauu

SEQ ID NO: 942650 - RNA, 19 nt, Homo sapiens
  misc_RNA (1)...(19): siRNA sense strand
gcagagaagaguccacuga

SEQ ID NO: 942651 - RNA, 19 nt, Homo sapiens
  misc_RNA (1)...(19): siRNA sense strand
aaggaggacuucuuguuaa

SEQ ID NO: 942652 - RNA, 19 nt, Homo sapiens
  misc_RNA (1)...(19): siRNA sense strand
gguaaaggcaaacucagua

SEQ ID NO: 942653 - RNA, 19 nt, Homo sapiens
  misc_RNA (1)...(19): siRNA sense strand
cauaacaagccaucauuaa

SEQ ID NO: 942654 - RNA, 19 nt, Homo sapiens
  misc_RNA (1)...(19): siRNA sense strand
uaggauacauggauuuguu

SEQ ID NO: 942655 - RNA, 19 nt, Homo sapiens
  misc_RNA (1)...(19): siRNA sense strand
gaucagccuuccucguuug

SEQ ID NO: 942656 - RNA, 19 nt, Homo sapiens
  misc_RNA (1)...(19): siRNA sense strand
gcaaacucguccuguacaa

SEQ ID NO: 942657 - RNA, 19 nt, Homo sapiens
  misc_RNA (1)...(19): siRNA sense strand
gugcuuggaugcuguaguu

SEQ ID NO: 942658 - RNA, 19 nt, Homo sapiens
  misc_RNA (1)...(19): siRNA sense strand
gaugaugaauacagugaug

SEQ ID NO: 942659 - RNA, 19 nt, Homo sapiens
  misc_RNA (1)...(19): siRNA sense strand
gaaacaccuuuaacaaugc

SEQ ID NO: 942660 - RNA, 19 nt, Homo sapiens
  misc_RNA (1)...(19): siRNA sense strand
uaagggaucuauuggauac

SEQ ID NO: 942661 - RNA, 19 nt, Homo sapiens
  misc_RNA (1)...(19): siRNA sense strand
uaacuacaguaaaggcauu

SEQ ID NO: 942662 - RNA, 19 nt, Homo sapiens
  misc_RNA (1)...(19): siRNA sense strand
caacagcuugucaaaguaa

SEQ ID NO: 942663 - RNA, 19 nt, Homo sapiens
  misc_RNA (1)...(19): siRNA sense strand
ccaagacagugccuggaua

SEQ ID NO: 942664 - RNA, 19 nt, Homo sapiens
  misc_RNA (1)...(19): siRNA sense strand
gcaagagcuucgcgcagaa

SEQ ID NO: 942665 - RNA, 19 nt, Homo sapiens
  misc_RNA (1)...(19): siRNA sense strand
gacagugccuggauaccuu

SEQ ID NO: 942666 - RNA, 19 nt, Homo sapiens
  misc_RNA (1)...(19): siRNA sense strand
gcagccagccagccaagua

SEQ ID NO: 942667 - RNA, 19 nt, Homo sapiens
  misc_RNA (1)...(19): siRNA sense strand
ggaaugacuccaucuacga

SEQ ID NO: 942668 - RNA, 19 nt, Homo sapiens
  misc_RNA (1)...(19): siRNA sense strand
gcaugugugugaagcuguu

SEQ ID NO: 942669 - RNA, 19 nt, Homo sapiens
  misc_RNA (1)...(19): siRNA sense strand
aagaaacgcauguguguga

SEQ ID NO: 942670 - RNA, 19 nt, Homo sapiens
  misc_RNA (1)...(19): siRNA sense strand
acauugaggaggaguauaa

SEQ ID NO: 942671 - RNA, 19 nt, Homo sapiens
  misc_RNA (1)...(19): siRNA sense strand
ucaagucucuggcggacau

SEQ ID NO: 942672 - RNA, 19 nt, Homo sapiens
  misc_RNA (1)...(19): siRNA sense strand
uagagaacccgcaggagaa

SEQ ID NO: 942673 - RNA, 19 nt, Homo sapiens
  misc_RNA (1)...(19): siRNA sense strand
gaacgugguggccgauauc

SEQ ID NO: 942674 - RNA, 19 nt, Homo sapiens
  misc_RNA (1)...(19): siRNA sense strand
ggacauugaggaggaguau

SEQ ID NO: 942675 - RNA, 19 nt, Homo sapiens
  misc_RNA (1)...(19): siRNA sense strand
agaagaaacgcaugugugu

SEQ ID NO: 942676 - RNA, 19 nt, Homo sapiens
  misc_RNA (1)...(19): siRNA sense strand
caagaagaaacgcaugugu

SEQ ID NO: 942677 - RNA, 19 nt, Homo sapiens
  misc_RNA (1)...(19): siRNA sense strand
gccuggauaccuucgaaua

SEQ ID NO: 942678 - RNA, 19 nt, Homo sapiens
  misc_RNA (1)...(19): siRNA sense strand
cagccucuauggcaucuca

SEQ ID NO: 942679 - RNA, 19 nt, Homo sapiens
  misc_RNA (1)...(19): siRNA sense strand
ggacaugcagggccucucu

SEQ ID NO: 942680 - RNA, 19 nt, Homo sapiens
  misc_RNA (1)...(19): siRNA sense strand
gagcuucgcgcagaaaucu

SEQ ID NO: 942681 - RNA, 19 nt, Homo sapiens
  misc_RNA (1)...(19): siRNA sense strand
agaacgugguggccgauau

SEQ ID NO: 942682 - RNA, 19 nt, Homo sapiens
  misc_RNA (1)...(19): siRNA sense strand
gugccuggauaccuucgaa

SEQ ID NO: 942683 - RNA, 19 nt, Homo sapiens
  misc_RNA (1)...(19): siRNA sense strand
gaggaaugacuccaucuac

SEQ ID NO: 942684 - RNA, 19 nt, Homo sapiens
  misc_RNA (1)...(19): siRNA sense strand
cauccacucugcggaggaa

SEQ ID NO: 942685 - RNA, 19 nt, Homo sapiens
  misc_RNA (1)...(19): siRNA sense strand
ggaccugaccaucaagucu

SEQ ID NO: 942686 - RNA, 19 nt, Homo sapiens
  misc_RNA (1)...(19): siRNA sense strand
acacuccacccacgauuug

SEQ ID NO: 942687 - RNA, 19 nt, Homo sapiens
  misc_RNA (1)...(19): siRNA sense strand
cagccagccagccaaguaa

SEQ ID NO: 942688 - RNA, 19 nt, Homo sapiens
  misc_RNA (1)...(19): siRNA sense strand
uugaggaggaguauaacua

SEQ ID NO: 942689 - RNA, 19 nt, Homo sapiens
  misc_RNA (1)...(19): siRNA sense strand
caagagcuucgcgcagaaa

SEQ ID NO: 942690 - RNA, 19 nt, Homo sapiens
  misc_RNA (1)...(19): siRNA sense strand
agaaacgcaugugugugaa

SEQ ID NO: 942691 - RNA, 19 nt, Homo sapiens
  misc_RNA (1)...(19): siRNA sense strand
caagacagugccuggauac

SEQ ID NO: 942692 - RNA, 19 nt, Homo sapiens
  misc_RNA (1)...(19): siRNA sense strand
gaaacgcaugugugugaag

SEQ ID NO: 942693 - RNA, 19 nt, Homo sapiens
  misc_RNA (1)...(19): siRNA sense strand
gagaacgugguggccgaua

SEQ ID NO: 942694 - RNA, 19 nt, Homo sapiens
  misc_RNA (1)...(19): siRNA sense strand
gugggaagaccaagacagu

SEQ ID NO: 942695 - RNA, 19 nt, Homo sapiens
  misc_RNA (1)...(19): siRNA sense strand
ccacucugcggaggaauga

SEQ ID NO: 942696 - RNA, 19 nt, Homo sapiens
  misc_RNA (1)...(19): siRNA sense strand
gguggccgauauccagauc

SEQ ID NO: 942697 - RNA, 19 nt, Homo sapiens
  misc_RNA (1)...(19): siRNA sense strand
gcagauguuugcagcguuu

SEQ ID NO: 942698 - RNA, 19 nt, Homo sapiens
  misc_RNA (1)...(19): siRNA sense strand
gagaagagcucggaaaaga

SEQ ID NO: 942699 - RNA, 19 nt, Homo sapiens
  misc_RNA (1)...(19): siRNA sense strand
guucgacacugaagggaaa

SEQ ID NO: 942700 - RNA, 19 nt, Homo sapiens
  misc_RNA (1)...(19): siRNA sense strand
caacgucuucuccauguuu

SEQ ID NO: 942701 - RNA, 19 nt, Homo sapiens
  misc_RNA (1)...(19): siRNA sense strand
gcaucaaugucaagaacga

SEQ ID NO: 942702 - RNA, 19 nt, Homo sapiens
  misc_RNA (1)...(19): siRNA sense strand
ccaaagugcugggauuaca

SEQ ID NO: 942703 - RNA, 19 nt, Homo sapiens
  misc_RNA (1)...(19): siRNA sense strand
ggacuugagggacaccuuu

SEQ ID NO: 942704 - RNA, 19 nt, Homo sapiens
  misc_RNA (1)...(19): siRNA sense strand
ggagcgcaauggcaugauc

SEQ ID NO: 942705 - RNA, 19 nt, Homo sapiens
  misc_RNA (1)...(19): siRNA sense strand
acacugaagggaaagguuu

SEQ ID NO: 942706 - RNA, 19 nt, Homo sapiens
  misc_RNA (1)...(19): siRNA sense strand
ggaggucaagcagauguuu

SEQ ID NO: 942707 - RNA, 19 nt, Homo sapiens
  misc_RNA (1)...(19): siRNA sense strand
gcuccaacgucuucuccau

SEQ ID NO: 942708 - RNA, 19 nt, Homo sapiens
  misc_RNA (1)...(19): siRNA sense strand
ucaaacuccuggccucaag

SEQ ID NO: 942709 - RNA, 19 nt, Homo sapiens
  misc_RNA (1)...(19): siRNA sense strand
ccucacggguucaagcaau

SEQ ID NO: 942710 - RNA, 19 nt, Homo sapiens
  misc_RNA (1)...(19): siRNA sense strand
aggaggaggucaagcagau

SEQ ID NO: 942711 - RNA, 19 nt, Homo sapiens
  misc_RNA (1)...(19): siRNA sense strand
ugcuuaggcuggucucaaa

SEQ ID NO: 942712 - RNA, 19 nt, Homo sapiens
  misc_RNA (1)...(19): siRNA sense strand
gcggcaaccuggacuacag

SEQ ID NO: 942713 - RNA, 19 nt, Homo sapiens
  misc_RNA (1)...(19): siRNA sense strand
ccgcaucaaugucaagaac

SEQ ID NO: 942714 - RNA, 19 nt, Homo sapiens
  misc_RNA (1)...(19): siRNA sense strand
aggcagaccgcuucaguga

SEQ ID NO: 942715 - RNA, 19 nt, Homo sapiens
  misc_RNA (1)...(19): siRNA sense strand
gaggaggucaagcagaugu

SEQ ID NO: 942716 - RNA, 19 nt, Homo sapiens
  misc_RNA (1)...(19): siRNA sense strand
uccaacgucuucuccaugu

SEQ ID NO: 942717 - RNA, 19 nt, Homo sapiens
  misc_RNA (1)...(19): siRNA sense strand
caaccuggacuacagaaac

SEQ ID NO: 942718 - RNA, 19 nt, Homo sapiens
  misc_RNA (1)...(19): siRNA sense strand
gcaaccuggacuacagaaa

SEQ ID NO: 942719 - RNA, 19 nt, Homo sapiens
  misc_RNA (1)...(19): siRNA sense strand
gauccaggaguuuaaagag

SEQ ID NO: 942720 - RNA, 19 nt, Homo sapiens
  misc_RNA (1)...(19): siRNA sense strand
acggugaagagaaggauua

SEQ ID NO: 942721 - RNA, 19 nt, Homo sapiens
  misc_RNA (1)...(19): siRNA sense strand
uggaggccauggugaagga

SEQ ID NO: 942722 - RNA, 19 nt, Homo sapiens
  misc_RNA (1)...(19): siRNA sense strand
ggcaugaucucggcucacu

SEQ ID NO: 942723 - RNA, 19 nt, Homo sapiens
  misc_RNA (1)...(19): siRNA sense strand
ccaacgucuucuccauguu

SEQ ID NO: 942724 - RNA, 19 nt, Homo sapiens
  misc_RNA (1)...(19): siRNA sense strand
gaggucaagcagauguuug

SEQ ID NO: 942725 - RNA, 19 nt, Homo sapiens
  misc_RNA (1)...(19): siRNA sense strand
ggauuacaggcaccgagaa

SEQ ID NO: 942726 - RNA, 19 nt, Homo sapiens
  misc_RNA (1)...(19): siRNA sense strand
ccagauccaggaguuuaaa

SEQ ID NO: 942727 - RNA, 19 nt, Homo sapiens
  misc_RNA (1)...(19): siRNA sense strand
ucccagauccaggaguuua

SEQ ID NO: 942728 - RNA, 19 nt, Homo sapiens
  misc_RNA (1)...(19): siRNA sense strand
ggacccagaggagaccauu

SEQ ID NO: 942729 - RNA, 19 nt, Homo sapiens
  misc_RNA (1)...(19): siRNA sense strand
ccaggaguuuaaagagagu

SEQ ID NO: 942730 - RNA, 19 nt, Homo sapiens
  misc_RNA (1)...(19): siRNA sense strand
ugugcuacgucaucacuca

SEQ ID NO: 942731 - RNA, 19 nt, Homo sapiens
  misc_RNA (1)...(19): siRNA sense strand
ccaucaacuucacgguguu

SEQ ID NO: 942732 - RNA, 19 nt, Homo sapiens
  misc_RNA (1)...(19): siRNA sense strand
agucccagauccaggaguu

SEQ ID NO: 942733 - RNA, 19 nt, Homo sapiens
  misc_RNA (1)...(19): siRNA sense strand
cuccacgccuucaaagugu

SEQ ID NO: 942734 - RNA, 19 nt, Homo sapiens
  misc_RNA (1)...(19): siRNA sense strand
ggacagacauauaucauug

SEQ ID NO: 942735 - RNA, 19 nt, Homo sapiens
  misc_RNA (1)...(19): siRNA sense strand
gaaggugucuguguauaaa

SEQ ID NO: 942736 - RNA, 19 nt, Homo sapiens
  misc_RNA (1)...(19): siRNA sense strand
ggaaggugucuguguauaa

SEQ ID NO: 942737 - RNA, 19 nt, Homo sapiens
  misc_RNA (1)...(19): siRNA sense strand
gcgggaaggugucugugua

SEQ ID NO: 942738 - RNA, 19 nt, Homo sapiens
  misc_RNA (1)...(19): siRNA sense strand
ggccauggcucaccuguuc

SEQ ID NO: 942739 - RNA, 19 nt, Homo sapiens
  misc_RNA (1)...(19): siRNA sense strand
ggagacguguguaauaaag

SEQ ID NO: 942740 - RNA, 19 nt, Homo sapiens
  misc_RNA (1)...(19): siRNA sense strand
gggaaggugucuguguaua

SEQ ID NO: 942741 - RNA, 19 nt, Homo sapiens
  misc_RNA (1)...(19): siRNA sense strand
gaaggcugguuucauuugu

SEQ ID NO: 942742 - RNA, 19 nt, Homo sapiens
  misc_RNA (1)...(19): siRNA sense strand
acaagaaugucuccacuca

SEQ ID NO: 942743 - RNA, 19 nt, Homo sapiens
  misc_RNA (1)...(19): siRNA sense strand
caacgggcaugaggaggua

SEQ ID NO: 942744 - RNA, 19 nt, Homo sapiens
  misc_RNA (1)...(19): siRNA sense strand
cacugaagcucauggaaga

SEQ ID NO: 942745 - RNA, 19 nt, Homo sapiens
  misc_RNA (1)...(19): siRNA sense strand
ugaaacugcuggagaccaa

SEQ ID NO: 942746 - RNA, 19 nt, Homo sapiens
  misc_RNA (1)...(19): siRNA sense strand
gggauggacagacauauau

SEQ ID NO: 942747 - RNA, 19 nt, Homo sapiens
  misc_RNA (1)...(19): siRNA sense strand
gaaugucuccacucaccua

SEQ ID NO: 942748 - RNA, 19 nt, Homo sapiens
  misc_RNA (1)...(19): siRNA sense strand
ugucuccacucaccuaauu

SEQ ID NO: 942749 - RNA, 19 nt, Homo sapiens
  misc_RNA (1)...(19): siRNA sense strand
gcucauggaagaaauggaa

SEQ ID NO: 942750 - RNA, 19 nt, Homo sapiens
  misc_RNA (1)...(19): siRNA sense strand
guggacagccucucaguga

SEQ ID NO: 942751 - RNA, 19 nt, Homo sapiens
  misc_RNA (1)...(19): siRNA sense strand
gccagggaaugcugacuug

SEQ ID NO: 942752 - RNA, 19 nt, Homo sapiens
  misc_RNA (1)...(19): siRNA sense strand
accagaagaucuaugugua

SEQ ID NO: 942753 - RNA, 19 nt, Homo sapiens
  misc_RNA (1)...(19): siRNA sense strand
ccucguauaugucacuuuc

SEQ ID NO: 942754 - RNA, 19 nt, Homo sapiens
  misc_RNA (1)...(19): siRNA sense strand
ggagcagcguccagucuuc

SEQ ID NO: 942755 - RNA, 19 nt, Homo sapiens
  misc_RNA (1)...(19): siRNA sense strand
guuggagacguguguaaua

SEQ ID NO: 942756 - RNA, 19 nt, Homo sapiens
  misc_RNA (1)...(19): siRNA sense strand
uaaaggaaagaaccuguug

SEQ ID NO: 942757 - RNA, 19 nt, Homo sapiens
  misc_RNA (1)...(19): siRNA sense strand
uuggagacguguguaauaa

SEQ ID NO: 942758 - RNA, 19 nt, Homo sapiens
  misc_RNA (1)...(19): siRNA sense strand
uaguggcucuggccucuuu

SEQ ID NO: 942759 - RNA, 19 nt, Homo sapiens
  misc_RNA (1)...(19): siRNA sense strand
gaagggcccacggauggua

SEQ ID NO: 942760 - RNA, 19 nt, Homo sapiens
  misc_RNA (1)...(19): siRNA sense strand
cagcuggugucccucaaga

SEQ ID NO: 942761 - RNA, 19 nt, Homo sapiens
  misc_RNA (1)...(19): siRNA sense strand
aaauauccgugccuucugu

SEQ ID NO: 942762 - RNA, 19 nt, Homo sapiens
  misc_RNA (1)...(19): siRNA sense strand
gcuggugucccucaagaaa

SEQ ID NO: 942763 - RNA, 19 nt, Homo sapiens
  misc_RNA (1)...(19): siRNA sense strand
agacguguguaauaaagga

SEQ ID NO: 942764 - RNA, 19 nt, Homo sapiens
  misc_RNA (1)...(19): siRNA sense strand
gauggagucuaccaaucug

SEQ ID NO: 942765 - RNA, 19 nt, Homo sapiens
  misc_RNA (1)...(19): siRNA sense strand
ggaagaaauggaagaagca

SEQ ID NO: 942766 - RNA, 19 nt, Homo sapiens
  misc_RNA (1)...(19): siRNA sense strand
gaucagcgacaucgaugga

SEQ ID NO: 942767 - RNA, 19 nt, Homo sapiens
  misc_RNA (1)...(19): siRNA sense strand
ggauggagucuaccaaucu

SEQ ID NO: 942768 - RNA, 19 nt, Homo sapiens
  misc_RNA (1)...(19): siRNA sense strand
guaugcaauucuacugugu

SEQ ID NO: 942769 - RNA, 19 nt, Homo sapiens
  misc_RNA (1)...(19): siRNA sense strand
caacagccccugccucgua

SEQ ID NO: 942770 - RNA, 19 nt, Homo sapiens
  misc_RNA (1)...(19): siRNA sense strand
gauggacagacauauauca

SEQ ID NO: 942771 - RNA, 19 nt, Homo sapiens
  misc_RNA (1)...(19): siRNA sense strand
ucaccuaauuggcaacauc

SEQ ID NO: 942772 - RNA, 19 nt, Homo sapiens
  misc_RNA (1)...(19): siRNA sense strand
aggcugguuucauuuguuu

SEQ ID NO: 942773 - RNA, 19 nt, Homo sapiens
  misc_RNA (1)...(19): siRNA sense strand
acaccaaggucaugcugau

SEQ ID NO: 942774 - RNA, 19 nt, Homo sapiens
  misc_RNA (1)...(19): siRNA sense strand
ucagccagguugugcguau

SEQ ID NO: 942775 - RNA, 19 nt, Homo sapiens
  misc_RNA (1)...(19): siRNA sense strand
ggucagugcagguggauca

SEQ ID NO: 942776 - RNA, 19 nt, Homo sapiens
  misc_RNA (1)...(19): siRNA sense strand
gaagcucauggaagaaaug

SEQ ID NO: 942777 - RNA, 19 nt, Homo sapiens
  misc_RNA (1)...(19): siRNA sense strand
gggcaccacgagacacuaa

SEQ ID NO: 942778 - RNA, 19 nt, Homo sapiens
  misc_RNA (1)...(19): siRNA sense strand
ucguauaugucacuuucaa

SEQ ID NO: 942779 - RNA, 19 nt, Homo sapiens
  misc_RNA (1)...(19): siRNA sense strand
ccaaguggaugaaaauauc

SEQ ID NO: 942780 - RNA, 19 nt, Homo sapiens
  misc_RNA (1)...(19): siRNA sense strand
ggccguauccacaacaaga

SEQ ID NO: 942781 - RNA, 19 nt, Homo sapiens
  misc_RNA (1)...(19): siRNA sense strand
gcucuuugcccuggagaaa

SEQ ID NO: 942782 - RNA, 19 nt, Homo sapiens
  misc_RNA (1)...(19): siRNA sense strand
cagaagaucuauguguacu

SEQ ID NO: 942783 - RNA, 19 nt, Homo sapiens
  misc_RNA (1)...(19): siRNA sense strand
uggugucccucaagaaaug

SEQ ID NO: 942784 - RNA, 19 nt, Homo sapiens
  misc_RNA (1)...(19): siRNA sense strand
gacagacauauaucauuga

SEQ ID NO: 942785 - RNA, 19 nt, Homo sapiens
  misc_RNA (1)...(19): siRNA sense strand
ugggauggacagacauaua

SEQ ID NO: 942786 - RNA, 19 nt, Homo sapiens
  misc_RNA (1)...(19): siRNA sense strand
ccacggcacugagaguagu

SEQ ID NO: 942787 - RNA, 19 nt, Homo sapiens
  misc_RNA (1)...(19): siRNA sense strand
gccacugggucuuccugaa

SEQ ID NO: 942788 - RNA, 19 nt, Homo sapiens
  misc_RNA (1)...(19): siRNA sense strand
gcugguuucauuuguuuga

SEQ ID NO: 942789 - RNA, 19 nt, Homo sapiens
  misc_RNA (1)...(19): siRNA sense strand
ucaaccagaagaucuaugu

SEQ ID NO: 942790 - RNA, 19 nt, Homo sapiens
  misc_RNA (1)...(19): siRNA sense strand
gaaaauauccgugccuucu

SEQ ID NO: 942791 - RNA, 19 nt, Homo sapiens
  misc_RNA (1)...(19): siRNA sense strand
ugaagcucauggaagaaau

SEQ ID NO: 942792 - RNA, 19 nt, Homo sapiens
  misc_RNA (1)...(19): siRNA sense strand
ggacacugaagcucaugga

SEQ ID NO: 942793 - RNA, 19 nt, Homo sapiens
  misc_RNA (1)...(19): siRNA sense strand
gcaauucuacuguguaccu

SEQ ID NO: 942794 - RNA, 19 nt, Homo sapiens
  misc_RNA (1)...(19): siRNA sense strand
gcaccacgagacacuaauc

SEQ ID NO: 942795 - RNA, 19 nt, Homo sapiens
  misc_RNA (1)...(19): siRNA sense strand
cggauggagucuaccaauc

SEQ ID NO: 942796 - RNA, 19 nt, Homo sapiens
  misc_RNA (1)...(19): siRNA sense strand
ccuaauuggcaacaucaaa

SEQ ID NO: 942797 - RNA, 19 nt, Homo sapiens
  misc_RNA (1)...(19): siRNA sense strand
ggacagccucucagugacu

SEQ ID NO: 942798 - RNA, 19 nt, Homo sapiens
  misc_RNA (1)...(19): siRNA sense strand
gaacugguggugggagaca

SEQ ID NO: 942799 - RNA, 19 nt, Homo sapiens
  misc_RNA (1)...(19): siRNA sense strand
ugaggguccugaacaucug

SEQ ID NO: 942800 - RNA, 19 nt, Homo sapiens
  misc_RNA (1)...(19): siRNA sense strand
agaccaagccggaguacca

SEQ ID NO: 942801 - RNA, 19 nt, Homo sapiens
  misc_RNA (1)...(19): siRNA sense strand
gaaauggaagaagcagaca

SEQ ID NO: 942802 - RNA, 19 nt, Homo sapiens
  misc_RNA (1)...(19): siRNA sense strand
gagcagcguccagucuuca

SEQ ID NO: 942803 - RNA, 19 nt, Homo sapiens
  misc_RNA (1)...(19): siRNA sense strand
gcggauggagucuaccaau

SEQ ID NO: 942804 - RNA, 19 nt, Homo sapiens
  misc_RNA (1)...(19): siRNA sense strand
caaggccacggcacugaga

SEQ ID NO: 942805 - RNA, 19 nt, Homo sapiens
  misc_RNA (1)...(19): siRNA sense strand
gggucuuccugaacugaug

SEQ ID NO: 942806 - RNA, 19 nt, Homo sapiens
  misc_RNA (1)...(19): siRNA sense strand
ccagaagaucuauguguac

SEQ ID NO: 942807 - RNA, 19 nt, Homo sapiens
  misc_RNA (1)...(19): siRNA sense strand
ggauggacagacauauauc

SEQ ID NO: 942808 - RNA, 19 nt, Homo sapiens
  misc_RNA (1)...(19): siRNA sense strand
guggaucaccagcucuuug

SEQ ID NO: 942809 - RNA, 19 nt, Homo sapiens
  misc_RNA (1)...(19): siRNA sense strand
gaggagcagcguccagucu

SEQ ID NO: 942810 - RNA, 19 nt, Homo sapiens
  misc_RNA (1)...(19): siRNA sense strand
ggccacggcacugagagua

SEQ ID NO: 942811 - RNA, 19 nt, Homo sapiens
  misc_RNA (1)...(19): siRNA sense strand
caucuggccguauccacaa

SEQ ID NO: 942812 - RNA, 19 nt, Homo sapiens
  misc_RNA (1)...(19): siRNA sense strand
cugaacugauggugucuca

SEQ ID NO: 942813 - RNA, 19 nt, Homo sapiens
  misc_RNA (1)...(19): siRNA sense strand
ucauuuguuugaccugaca

SEQ ID NO: 942814 - RNA, 19 nt, Homo sapiens
  misc_RNA (1)...(19): siRNA sense strand
cgccugggauggacagaca

SEQ ID NO: 942815 - RNA, 19 nt, Homo sapiens
  misc_RNA (1)...(19): siRNA sense strand
aaggcugguuucauuuguu

SEQ ID NO: 942816 - RNA, 19 nt, Homo sapiens
  misc_RNA (1)...(19): siRNA sense strand
gcucauaaauauuccauug

SEQ ID NO: 942817 - RNA, 19 nt, Homo sapiens
  misc_RNA (1)...(19): siRNA sense strand
ccacagcccuugacaguga

SEQ ID NO: 942818 - RNA, 19 nt, Homo sapiens
  misc_RNA (1)...(19): siRNA sense strand
ggagccagauaaaguauuu

SEQ ID NO: 942819 - RNA, 19 nt, Homo sapiens
  misc_RNA (1)...(19): siRNA sense strand
gcccagagguuaauuucua

SEQ ID NO: 942820 - RNA, 19 nt, Homo sapiens
  misc_RNA (1)...(19): siRNA sense strand
ggaggaugaucuucugauu

SEQ ID NO: 942821 - RNA, 19 nt, Homo sapiens
  misc_RNA (1)...(19): siRNA sense strand
ugaacaggcucaugaaguu

SEQ ID NO: 942822 - RNA, 19 nt, Homo sapiens
  misc_RNA (1)...(19): siRNA sense strand
ggacagagccaaagcuugu

SEQ ID NO: 942823 - RNA, 19 nt, Homo sapiens
  misc_RNA (1)...(19): siRNA sense strand
acugaaggcucauaaauau

SEQ ID NO: 942824 - RNA, 19 nt, Homo sapiens
  misc_RNA (1)...(19): siRNA sense strand
gacugaaggcucauaaaua

SEQ ID NO: 942825 - RNA, 19 nt, Homo sapiens
  misc_RNA (1)...(19): siRNA sense strand
uaacagaaccucccagcaa

SEQ ID NO: 942826 - RNA, 19 nt, Homo sapiens
  misc_RNA (1)...(19): siRNA sense strand
ggacugaaggcucauaaau

SEQ ID NO: 942827 - RNA, 19 nt, Homo sapiens
  misc_RNA (1)...(19): siRNA sense strand
gcagaguccucagagaaga

SEQ ID NO: 942828 - RNA, 19 nt, Homo sapiens
  misc_RNA (1)...(19): siRNA sense strand
gaacacagaccagaacuac

SEQ ID NO: 942829 - RNA, 19 nt, Homo sapiens
  misc_RNA (1)...(19): siRNA sense strand
gaggaugaucuucugauuu

SEQ ID NO: 942830 - RNA, 19 nt, Homo sapiens
  misc_RNA (1)...(19): siRNA sense strand
gaacaggcucaugaaguuu

SEQ ID NO: 942831 - RNA, 19 nt, Homo sapiens
  misc_RNA (1)...(19): siRNA sense strand
aggaugaucuucugauuuc

SEQ ID NO: 942832 - RNA, 19 nt, Homo sapiens
  misc_RNA (1)...(19): siRNA sense strand
gauuacaccugggaauaug

SEQ ID NO: 942833 - RNA, 19 nt, Homo sapiens
  misc_RNA (1)...(19): siRNA sense strand
cuauuguucuggaaacuaa

SEQ ID NO: 942834 - RNA, 19 nt, Homo sapiens
  misc_RNA (1)...(19): siRNA sense strand
ugaaggcucauaaauauuc

SEQ ID NO: 942835 - RNA, 19 nt, Homo sapiens
  misc_RNA (1)...(19): siRNA sense strand
gauuggaccaguuuccuuu

SEQ ID NO: 942836 - RNA, 19 nt, Homo sapiens
  misc_RNA (1)...(19): siRNA sense strand
acacagaccagaacuacuu

SEQ ID NO: 942837 - RNA, 19 nt, Homo sapiens
  misc_RNA (1)...(19): siRNA sense strand
gaccacagcccuugacagu

SEQ ID NO: 942838 - RNA, 19 nt, Homo sapiens
  misc_RNA (1)...(19): siRNA sense strand
gcaaucggcaucuaauucu

SEQ ID NO: 942839 - RNA, 19 nt, Homo sapiens
  misc_RNA (1)...(19): siRNA sense strand
cuacaucaaugagguggaa

SEQ ID NO: 942840 - RNA, 19 nt, Homo sapiens
  misc_RNA (1)...(19): siRNA sense strand
ggaccaguuuccuuugaag

SEQ ID NO: 942841 - RNA, 19 nt, Homo sapiens
  misc_RNA (1)...(19): siRNA sense strand
agaaugaacagcuuugugu

SEQ ID NO: 942842 - RNA, 19 nt, Homo sapiens
  misc_RNA (1)...(19): siRNA sense strand
ucagagaagagauucagaa

SEQ ID NO: 942843 - RNA, 19 nt, Homo sapiens
  misc_RNA (1)...(19): siRNA sense strand
cccagagguuaauuucuaa

SEQ ID NO: 942844 - RNA, 19 nt, Homo sapiens
  misc_RNA (1)...(19): siRNA sense strand
gaaggacugaaggcucaua

SEQ ID NO: 942845 - RNA, 19 nt, Homo sapiens
  misc_RNA (1)...(19): siRNA sense strand
ggaguccaggucucucuuu

SEQ ID NO: 942846 - RNA, 19 nt, Homo sapiens
  misc_RNA (1)...(19): siRNA sense strand
aacagaaccucccagcaau

SEQ ID NO: 942847 - RNA, 19 nt, Homo sapiens
  misc_RNA (1)...(19): siRNA sense strand
ugaacagcuuugugucaga

SEQ ID NO: 942848 - RNA, 19 nt, Homo sapiens
  misc_RNA (1)...(19): siRNA sense strand
aauauuccauugugauugg

SEQ ID NO: 942849 - RNA, 19 nt, Homo sapiens
  misc_RNA (1)...(19): siRNA sense strand
gaguccaggucucucuuuc

SEQ ID NO: 942850 - RNA, 19 nt, Homo sapiens
  misc_RNA (1)...(19): siRNA sense strand
uaugagauuggaccaguuu

SEQ ID NO: 942851 - RNA, 19 nt, Homo sapiens
  misc_RNA (1)...(19): siRNA sense strand
gcucaugaaguuugacauc

SEQ ID NO: 942852 - RNA, 19 nt, Homo sapiens
  misc_RNA (1)...(19): siRNA sense strand
cagcaaucggcaucuaauu

SEQ ID NO: 942853 - RNA, 19 nt, Homo sapiens
  misc_RNA (1)...(19): siRNA sense strand
ggguuggucuugcagucuu

SEQ ID NO: 942854 - RNA, 19 nt, Homo sapiens
  misc_RNA (1)...(19): siRNA sense strand
acaccugggaauaugaaua

SEQ ID NO: 942855 - RNA, 19 nt, Homo sapiens
  misc_RNA (1)...(19): siRNA sense strand
ggucucucuuucacugcua

SEQ ID NO: 942856 - RNA, 19 nt, Homo sapiens
  misc_RNA (1)...(19): siRNA sense strand
gaugaucuucugauuucug

SEQ ID NO: 942857 - RNA, 19 nt, Homo sapiens
  misc_RNA (1)...(19): siRNA sense strand
caaucggcaucuaauucug

SEQ ID NO: 942858 - RNA, 19 nt, Homo sapiens
  misc_RNA (1)...(19): siRNA sense strand
uggaccaguuuccuuugaa

SEQ ID NO: 942859 - RNA, 19 nt, Homo sapiens
  misc_RNA (1)...(19): siRNA sense strand
ccaccuauuguucuggaaa

SEQ ID NO: 942860 - RNA, 19 nt, Homo sapiens
  misc_RNA (1)...(19): siRNA sense strand
ugaacacagaccagaacua

SEQ ID NO: 942861 - RNA, 19 nt, Homo sapiens
  misc_RNA (1)...(19): siRNA sense strand
cugauuacaccugggaaua

SEQ ID NO: 942862 - RNA, 19 nt, Homo sapiens
  misc_RNA (1)...(19): siRNA sense strand
ugauuacaccugggaauau

SEQ ID NO: 942863 - RNA, 19 nt, Homo sapiens
  misc_RNA (1)...(19): siRNA sense strand
cagcuuugugucagacuuu

SEQ ID NO: 942864 - RNA, 19 nt, Homo sapiens
  misc_RNA (1)...(19): siRNA sense strand
acaggcucaugaaguuuga

SEQ ID NO: 942865 - RNA, 19 nt, Homo sapiens
  misc_RNA (1)...(19): siRNA sense strand
cuugcagucuucgugauuu

SEQ ID NO: 942866 - RNA, 19 nt, Homo sapiens
  misc_RNA (1)...(19): siRNA sense strand
gaucuucugauuucugaac

SEQ ID NO: 942867 - RNA, 19 nt, Homo sapiens
  misc_RNA (1)...(19): siRNA sense strand
uuucacugcuacaucaaug

SEQ ID NO: 942868 - RNA, 19 nt, Homo sapiens
  misc_RNA (1)...(19): siRNA sense strand
cagaaugaacagcuuugug

SEQ ID NO: 942869 - RNA, 19 nt, Homo sapiens
  misc_RNA (1)...(19): siRNA sense strand
ccagcaaucggcaucuaau

SEQ ID NO: 942870 - RNA, 19 nt, Homo sapiens
  misc_RNA (1)...(19): siRNA sense strand
uuggaccaguuuccuuuga

SEQ ID NO: 942871 - RNA, 19 nt, Homo sapiens
  misc_RNA (1)...(19): siRNA sense strand
augaucuucugauuucuga

SEQ ID NO: 942872 - RNA, 19 nt, Homo sapiens
  misc_RNA (1)...(19): siRNA sense strand
cagcaaagaucauugaaga

SEQ ID NO: 942873 - RNA, 19 nt, Homo sapiens
  misc_RNA (1)...(19): siRNA sense strand
guacuucgauggacucaaa

SEQ ID NO: 942874 - RNA, 19 nt, Homo sapiens
  misc_RNA (1)...(19): siRNA sense strand
ggacagagcugggcagaca

SEQ ID NO: 942875 - RNA, 19 nt, Homo sapiens
  misc_RNA (1)...(19): siRNA sense strand
gagaugcaguuuggcguua

SEQ ID NO: 942876 - RNA, 19 nt, Homo sapiens
  misc_RNA (1)...(19): siRNA sense strand
caacaacgcgggugugaug

SEQ ID NO: 942877 - RNA, 19 nt, Homo sapiens
  misc_RNA (1)...(19): siRNA sense strand
gaggaaguauaacaccaaa

SEQ ID NO: 942878 - RNA, 19 nt, Homo sapiens
  misc_RNA (1)...(19): siRNA sense strand
gcaaggcucuggugugacu

SEQ ID NO: 942879 - RNA, 19 nt, Homo sapiens
  misc_RNA (1)...(19): siRNA sense strand
caaacuugcugcuggacaa

SEQ ID NO: 942880 - RNA, 19 nt, Homo sapiens
  misc_RNA (1)...(19): siRNA sense strand
gaguggacauucuaaucaa

SEQ ID NO: 942881 - RNA, 19 nt, Homo sapiens
  misc_RNA (1)...(19): siRNA sense strand
cauagacuuugacgacuug

SEQ ID NO: 942882 - RNA, 19 nt, Homo sapiens
  misc_RNA (1)...(19): siRNA sense strand
cggaggaacuggcggaugu

SEQ ID NO: 942883 - RNA, 19 nt, Homo sapiens
  misc_RNA (1)...(19): siRNA sense strand
ucgauggacucaaacagaa

SEQ ID NO: 942884 - RNA, 19 nt, Homo sapiens
  misc_RNA (1)...(19): siRNA sense strand
uggcuucccucaagucuau

SEQ ID NO: 942885 - RNA, 19 nt, Homo sapiens
  misc_RNA (1)...(19): siRNA sense strand
ggcagacgaggaaguauaa

SEQ ID NO: 942886 - RNA, 19 nt, Homo sapiens
  misc_RNA (1)...(19): siRNA sense strand
cugcaaggcucugguguga

SEQ ID NO: 942887 - RNA, 19 nt, Homo sapiens
  misc_RNA (1)...(19): siRNA sense strand
cgaguggacauucuaauca

SEQ ID NO: 942888 - RNA, 19 nt, Homo sapiens
  misc_RNA (1)...(19): siRNA sense strand
ggaaguauaacaccaaagc

SEQ ID NO: 942889 - RNA, 19 nt, Homo sapiens
  misc_RNA (1)...(19): siRNA sense strand
ucaagucuauccgagaguu

SEQ ID NO: 942890 - RNA, 19 nt, Homo sapiens
  misc_RNA (1)...(19): siRNA sense strand
gagcgaguggacauucuaa

SEQ ID NO: 942891 - RNA, 19 nt, Homo sapiens
  misc_RNA (1)...(19): siRNA sense strand
ggagcgaguggacauucua

SEQ ID NO: 942892 - RNA, 19 nt, Homo sapiens
  misc_RNA (1)...(19): siRNA sense strand
acauagacuuugacgacuu

SEQ ID NO: 942893 - RNA, 19 nt, Homo sapiens
  misc_RNA (1)...(19): siRNA sense strand
gcgaguggacauucuaauc

SEQ ID NO: 942894 - RNA, 19 nt, Homo sapiens
  misc_RNA (1)...(19): siRNA sense strand
gcuucgagaugcaguuugg

SEQ ID NO: 942895 - RNA, 19 nt, Homo sapiens
  misc_RNA (1)...(19): siRNA sense strand
uggcagacgaggaaguaua

SEQ ID NO: 942896 - RNA, 19 nt, Homo sapiens
  misc_RNA (1)...(19): siRNA sense strand
cugggucacuuucucuuga

SEQ ID NO: 942897 - RNA, 19 nt, Homo sapiens
  misc_RNA (1)...(19): siRNA sense strand
ucucgucccuggcccaugu

SEQ ID NO: 942898 - RNA, 19 nt, Homo sapiens
  misc_RNA (1)...(19): siRNA sense strand
gaggaacuggcggauguuu

SEQ ID NO: 942899 - RNA, 19 nt, Homo sapiens
  misc_RNA (1)...(19): siRNA sense strand
cgaggacggcuucgagaug

SEQ ID NO: 942900 - RNA, 19 nt, Homo sapiens
  misc_RNA (1)...(19): siRNA sense strand
ugaacuggcagacgaggaa

SEQ ID NO: 942901 - RNA, 19 nt, Homo sapiens
  misc_RNA (1)...(19): siRNA sense strand
ccaccugggucacuuucuc

SEQ ID NO: 942902 - RNA, 19 nt, Homo sapiens
  misc_RNA (1)...(19): siRNA sense strand
gcagcaaagaucauugaag

SEQ ID NO: 942903 - RNA, 19 nt, Homo sapiens
  misc_RNA (1)...(19): siRNA sense strand
cgaggaaguauaacaccaa

SEQ ID NO: 942904 - RNA, 19 nt, Homo sapiens
  misc_RNA (1)...(19): siRNA sense strand
uaaccaccugggucacuuu

SEQ ID NO: 942905 - RNA, 19 nt, Homo sapiens
  misc_RNA (1)...(19): siRNA sense strand
gacccucaaucaccauguc

SEQ ID NO: 942906 - RNA, 19 nt, Homo sapiens
  misc_RNA (1)...(19): siRNA sense strand
gaggagcgaguggacauuc

SEQ ID NO: 942907 - RNA, 19 nt, Homo sapiens
  misc_RNA (1)...(19): siRNA sense strand
cacuuucucuugacaaacu

SEQ ID NO: 942908 - RNA, 19 nt, Homo sapiens
  misc_RNA (1)...(19): siRNA sense strand
caagucuauccgagaguuu

SEQ ID NO: 942909 - RNA, 19 nt, Homo sapiens
  misc_RNA (1)...(19): siRNA sense strand
agaugcaguuuggcguuaa

SEQ ID NO: 942910 - RNA, 19 nt, Homo sapiens
  misc_RNA (1)...(19): siRNA sense strand
cggaaaguacuucgaugga

SEQ ID NO: 942911 - RNA, 19 nt, Homo sapiens
  misc_RNA (1)...(19): siRNA sense strand
ggaggagcgaguggacauu

SEQ ID NO: 942912 - RNA, 19 nt, Homo sapiens
  misc_RNA (1)...(19): siRNA sense strand
gaacagcccucuacaagaa

SEQ ID NO: 942913 - RNA, 19 nt, Homo sapiens
  misc_RNA (1)...(19): siRNA sense strand
gcauauaucuacagaguua

SEQ ID NO: 942914 - RNA, 19 nt, Homo sapiens
  misc_RNA (1)...(19): siRNA sense strand
aaacaaaggugaagagaaa

SEQ ID NO: 942915 - RNA, 19 nt, Homo sapiens
  misc_RNA (1)...(19): siRNA sense strand
gaaaggauccucaugaaga

SEQ ID NO: 942916 - RNA, 19 nt, Homo sapiens
  misc_RNA (1)...(19): siRNA sense strand
gcaagcagcucagaagaaa

SEQ ID NO: 942917 - RNA, 19 nt, Homo sapiens
  misc_RNA (1)...(19): siRNA sense strand
gaagagagccagaagagaa

SEQ ID NO: 942918 - RNA, 19 nt, Homo sapiens
  misc_RNA (1)...(19): siRNA sense strand
ggacaaagcauauaucuac

SEQ ID NO: 942919 - RNA, 19 nt, Homo sapiens
  misc_RNA (1)...(19): siRNA sense strand
gcaaauaggauguuaaagu

SEQ ID NO: 942920 - RNA, 19 nt, Homo sapiens
  misc_RNA (1)...(19): siRNA sense strand
gaauuaaacuuccaaacag

SEQ ID NO: 942921 - RNA, 19 nt, Homo sapiens
  misc_RNA (1)...(19): siRNA sense strand
caaaugagcuaaggaaaca

SEQ ID NO: 942922 - RNA, 19 nt, Homo sapiens
  misc_RNA (1)...(19): siRNA sense strand
gcaaggaaauguauaucau

SEQ ID NO: 942923 - RNA, 19 nt, Homo sapiens
  misc_RNA (1)...(19): siRNA sense strand
cagcauagauucauacaca

SEQ ID NO: 942924 - RNA, 19 nt, Homo sapiens
  misc_RNA (1)...(19): siRNA sense strand
caaacagcauagauucaua

SEQ ID NO: 942925 - RNA, 19 nt, Homo sapiens
  misc_RNA (1)...(19): siRNA sense strand
gauaucaucuaccuuuaug

SEQ ID NO: 942926 - RNA, 19 nt, Homo sapiens
  misc_RNA (1)...(19): siRNA sense strand
ggaaauguauaucaucaag

SEQ ID NO: 942927 - RNA, 19 nt, Homo sapiens
  misc_RNA (1)...(19): siRNA sense strand
gagcaaauaggauguuaaa

SEQ ID NO: 942928 - RNA, 19 nt, Homo sapiens
  misc_RNA (1)...(19): siRNA sense strand
gaagagacacccaaacugu

SEQ ID NO: 942929 - RNA, 19 nt, Homo sapiens
  misc_RNA (1)...(19): siRNA sense strand
uuacugggcuucaaacuau

SEQ ID NO: 942930 - RNA, 19 nt, Homo sapiens
  misc_RNA (1)...(19): siRNA sense strand
gaaggaaacgaguaucuga

SEQ ID NO: 942931 - RNA, 19 nt, Homo sapiens
  misc_RNA (1)...(19): siRNA sense strand
gaacuuuaauuaccauugg

SEQ ID NO: 942932 - RNA, 19 nt, Homo sapiens
  misc_RNA (1)...(19): siRNA sense strand
gaugauuuaugacauguug

SEQ ID NO: 942933 - RNA, 19 nt, Homo sapiens
  misc_RNA (1)...(19): siRNA sense strand
gaaagaagagacacccaaa

SEQ ID NO: 942934 - RNA, 19 nt, Homo sapiens
  misc_RNA (1)...(19): siRNA sense strand
gaacagugccagagcagaa

SEQ ID NO: 942935 - RNA, 19 nt, Homo sapiens
  misc_RNA (1)...(19): siRNA sense strand
caaagcauauaucuacaga

SEQ ID NO: 942936 - RNA, 19 nt, Homo sapiens
  misc_RNA (1)...(19): siRNA sense strand
gagagaacaaugagaauga

SEQ ID NO: 942937 - RNA, 19 nt, Homo sapiens
  misc_RNA (1)...(19): siRNA sense strand
gaugagagaugugauugga

SEQ ID NO: 942938 - RNA, 19 nt, Homo sapiens
  misc_RNA (1)...(19): siRNA sense strand
ggaauuggcacuacuagau

SEQ ID NO: 942939 - RNA, 19 nt, Homo sapiens
  misc_RNA (1)...(19): siRNA sense strand
ucucgucaaucacucauua

SEQ ID NO: 942940 - RNA, 19 nt, Homo sapiens
  misc_RNA (1)...(19): siRNA sense strand
ucgaacaacuggauacuug

SEQ ID NO: 942941 - RNA, 19 nt, Homo sapiens
  misc_RNA (1)...(19): siRNA sense strand
caacuccagucacgucuga

SEQ ID NO: 942942 - RNA, 19 nt, Homo sapiens
  misc_RNA (1)...(19): siRNA sense strand
guacuaaaguucugguuac

SEQ ID NO: 942943 - RNA, 19 nt, Homo sapiens
  misc_RNA (1)...(19): siRNA sense strand
uugccuacaugaacaauua

SEQ ID NO: 942944 - RNA, 19 nt, Homo sapiens
  misc_RNA (1)...(19): siRNA sense strand
ucaaaccgcagacaacaua

SEQ ID NO: 942945 - RNA, 19 nt, Homo sapiens
  misc_RNA (1)...(19): siRNA sense strand
gccugcagcuccuguuaua

SEQ ID NO: 942946 - RNA, 19 nt, Homo sapiens
  misc_RNA (1)...(19): siRNA sense strand
gaaggaauuggcacuacua

SEQ ID NO: 942947 - RNA, 19 nt, Homo sapiens
  misc_RNA (1)...(19): siRNA sense strand
ucaacaaggugaagccuau

SEQ ID NO: 942948 - RNA, 19 nt, Homo sapiens
  misc_RNA (1)...(19): siRNA sense strand
auacacagaucgacucuau

SEQ ID NO: 942949 - RNA, 19 nt, Homo sapiens
  misc_RNA (1)...(19): siRNA sense strand
aagacaaacucuccaagaa

SEQ ID NO: 942950 - RNA, 19 nt, Homo sapiens
  misc_RNA (1)...(19): siRNA sense strand
gugauacacagaugauuua

SEQ ID NO: 942951 - RNA, 19 nt, Homo sapiens
  misc_RNA (1)...(19): siRNA sense strand
cagcuccuguuauaaauga

SEQ ID NO: 942952 - RNA, 19 nt, Homo sapiens
  misc_RNA (1)...(19): siRNA sense strand
gaaauuggcaaggaaaugu

SEQ ID NO: 942953 - RNA, 19 nt, Homo sapiens
  misc_RNA (1)...(19): siRNA sense strand
gaacaaugagaaugaacaa

SEQ ID NO: 942954 - RNA, 19 nt, Homo sapiens
  misc_RNA (1)...(19): siRNA sense strand
gugauaucaucuaccuuua

SEQ ID NO: 942955 - RNA, 19 nt, Homo sapiens
  misc_RNA (1)...(19): siRNA sense strand
cuggagaucugaccacaaa

SEQ ID NO: 942956 - RNA, 19 nt, Homo sapiens
  misc_RNA (1)...(19): siRNA sense strand
gaagaaccccacucaguua

SEQ ID NO: 942957 - RNA, 19 nt, Homo sapiens
  misc_RNA (1)...(19): siRNA sense strand
aaaggauccucaugaagaa

SEQ ID NO: 942958 - RNA, 19 nt, Homo sapiens
  misc_RNA (1)...(19): siRNA sense strand
gggagaaauuggcaaggaa

SEQ ID NO: 942959 - RNA, 19 nt, Homo sapiens
  misc_RNA (1)...(19): siRNA sense strand
caugaacaauuacuccauu

SEQ ID NO: 942960 - RNA, 19 nt, Homo sapiens
  misc_RNA (1)...(19): siRNA sense strand
gauacuugcuguuuauucu

SEQ ID NO: 942961 - RNA, 19 nt, Homo sapiens
  misc_RNA (1)...(19): siRNA sense strand
caacagaacauuacuacag

SEQ ID NO: 942962 - RNA, 19 nt, Homo sapiens
  misc_RNA (1)...(19): siRNA sense strand
cuauuugccuggugacuuu

SEQ ID NO: 942963 - RNA, 19 nt, Homo sapiens
  misc_RNA (1)...(19): siRNA sense strand
cgaauuaaacuuccaaaca

SEQ ID NO: 942964 - RNA, 19 nt, Homo sapiens
  misc_RNA (1)...(19): siRNA sense strand
gacaaacucuccaagaaaa

SEQ ID NO: 942965 - RNA, 19 nt, Homo sapiens
  misc_RNA (1)...(19): siRNA sense strand
gaaauucuagugcauuauc

SEQ ID NO: 942966 - RNA, 19 nt, Homo sapiens
  misc_RNA (1)...(19): siRNA sense strand
guucaaggguugugauaca

SEQ ID NO: 942967 - RNA, 19 nt, Homo sapiens
  misc_RNA (1)...(19): siRNA sense strand
ccaguuagcccucgccauu

SEQ ID NO: 942968 - RNA, 19 nt, Homo sapiens
  misc_RNA (1)...(19): siRNA sense strand
aagaggaggagacauaaua

SEQ ID NO: 942969 - RNA, 19 nt, Homo sapiens
  misc_RNA (1)...(19): siRNA sense strand
ggaggaaaccgucgaacug

SEQ ID NO: 942970 - RNA, 19 nt, Homo sapiens
  misc_RNA (1)...(19): siRNA sense strand
cuacagaguuauucgaaca

SEQ ID NO: 942971 - RNA, 19 nt, Homo sapiens
  misc_RNA (1)...(19): siRNA sense strand
ucaguuagaaggacaguuu

SEQ ID NO: 942972 - RNA, 19 nt, Homo sapiens
  misc_RNA (1)...(19): siRNA sense strand
caaugagaaugaacaaagu

SEQ ID NO: 942973 - RNA, 19 nt, Homo sapiens
  misc_RNA (1)...(19): siRNA sense strand
gcaaaccacagcacaggaa

SEQ ID NO: 942974 - RNA, 19 nt, Homo sapiens
  misc_RNA (1)...(19): siRNA sense strand
uugcaagacuacucaaauu

SEQ ID NO: 942975 - RNA, 19 nt, Homo sapiens
  misc_RNA (1)...(19): siRNA sense strand
gguacuaaaguucugguua

SEQ ID NO: 942976 - RNA, 19 nt, Homo sapiens
  misc_RNA (1)...(19): siRNA sense strand
cuuaagacccuaccaacua

SEQ ID NO: 942977 - RNA, 19 nt, Homo sapiens
  misc_RNA (1)...(19): siRNA sense strand
aagcauauaucuacagagu

SEQ ID NO: 942978 - RNA, 19 nt, Homo sapiens
  misc_RNA (1)...(19): siRNA sense strand
uguaagaggaggagacaua

SEQ ID NO: 942979 - RNA, 19 nt, Homo sapiens
  misc_RNA (1)...(19): siRNA sense strand
caagacaaacucuccaaga

SEQ ID NO: 942980 - RNA, 19 nt, Homo sapiens
  misc_RNA (1)...(19): siRNA sense strand
ggagaaauuggcaaggaaa

SEQ ID NO: 942981 - RNA, 19 nt, Homo sapiens
  misc_RNA (1)...(19): siRNA sense strand
gaagccagcccacaaacug

SEQ ID NO: 942982 - RNA, 19 nt, Homo sapiens
  misc_RNA (1)...(19): siRNA sense strand
uaacuggaacugcugguuu

SEQ ID NO: 942983 - RNA, 19 nt, Homo sapiens
  misc_RNA (1)...(19): siRNA sense strand
uagagcaaauaggauguua

SEQ ID NO: 942984 - RNA, 19 nt, Homo sapiens
  misc_RNA (1)...(19): siRNA sense strand
auacacuacuggcuuauug

SEQ ID NO: 942985 - RNA, 19 nt, Homo sapiens
  misc_RNA (1)...(19): siRNA sense strand
aacauacacuacuggcuua

SEQ ID NO: 942986 - RNA, 19 nt, Homo sapiens
  misc_RNA (1)...(19): siRNA sense strand
cuacaggacuucuacaaaa

SEQ ID NO: 942987 - RNA, 19 nt, Homo sapiens
  misc_RNA (1)...(19): siRNA sense strand
cugaaaggauccucaugaa

SEQ ID NO: 942988 - RNA, 19 nt, Homo sapiens
  misc_RNA (1)...(19): siRNA sense strand
caucaagcauggagaaguc

SEQ ID NO: 942989 - RNA, 19 nt, Homo sapiens
  misc_RNA (1)...(19): siRNA sense strand
caacauacaagacaaacuc

SEQ ID NO: 942990 - RNA, 19 nt, Homo sapiens
  misc_RNA (1)...(19): siRNA sense strand
agaaaaggcuaagcaauaa

SEQ ID NO: 942991 - RNA, 19 nt, Homo sapiens
  misc_RNA (1)...(19): siRNA sense strand
cuaaaguucugguuacucu

SEQ ID NO: 942992 - RNA, 19 nt, Homo sapiens
  misc_RNA (1)...(19): siRNA sense strand
acaugggacucucaaagaa

SEQ ID NO: 942993 - RNA, 19 nt, Homo sapiens
  misc_RNA (1)...(19): siRNA sense strand
gauauuugcuaccucuucu

SEQ ID NO: 942994 - RNA, 19 nt, Homo sapiens
  misc_RNA (1)...(19): siRNA sense strand
aacuggaacugcugguuua

SEQ ID NO: 942995 - RNA, 19 nt, Homo sapiens
  misc_RNA (1)...(19): siRNA sense strand
agacaaacucuccaagaaa

SEQ ID NO: 942996 - RNA, 19 nt, Homo sapiens
  misc_RNA (1)...(19): siRNA sense strand
ggaaagaagguccaaacag

SEQ ID NO: 942997 - RNA, 19 nt, Homo sapiens
  misc_RNA (1)...(19): siRNA sense strand
gaauuggcacuacuagaug

SEQ ID NO: 942998 - RNA, 19 nt, Homo sapiens
  misc_RNA (1)...(19): siRNA sense strand
guaagaggaggagacauaa

SEQ ID NO: 942999 - RNA, 19 nt, Homo sapiens
  misc_RNA (1)...(19): siRNA sense strand
caucuaccuuuaugauaug

SEQ ID NO: 943000 - RNA, 19 nt, Homo sapiens
  misc_RNA (1)...(19): siRNA sense strand
gaaaagaaugcgucaaaga

SEQ ID NO: 943001 - RNA, 19 nt, Homo sapiens
  misc_RNA (1)...(19): siRNA sense strand
uaugacauguugcuaagau

SEQ ID NO: 943002 - RNA, 19 nt, Homo sapiens
  misc_RNA (1)...(19): siRNA sense strand
gcuuauugcggacaucaua

SEQ ID NO: 943003 - RNA, 19 nt, Homo sapiens
  misc_RNA (1)...(19): siRNA sense strand
ggagagaacaaugagaaug

SEQ ID NO: 943004 - RNA, 19 nt, Homo sapiens
  misc_RNA (1)...(19): siRNA sense strand
gaggagaggaagaaggaaa

SEQ ID NO: 943005 - RNA, 19 nt, Homo sapiens
  misc_RNA (1)...(19): siRNA sense strand
acagaugauuuaugacaug

SEQ ID NO: 943006 - RNA, 19 nt, Homo sapiens
  misc_RNA (1)...(19): siRNA sense strand
aacaauuacuccauuccua

SEQ ID NO: 943007 - RNA, 19 nt, Homo sapiens
  misc_RNA (1)...(19): siRNA sense strand
gacaaagcauauaucuaca

SEQ ID NO: 943008 - RNA, 19 nt, Homo sapiens
  misc_RNA (1)...(19): siRNA sense strand
ggguuuaauccaauguuua

SEQ ID NO: 943009 - RNA, 19 nt, Homo sapiens
  misc_RNA (1)...(19): siRNA sense strand
acaaaguucucgucggaau

SEQ ID NO: 943010 - RNA, 19 nt, Homo sapiens
  misc_RNA (1)...(19): siRNA sense strand
gcuugucacucuugccuau

SEQ ID NO: 943011 - RNA, 19 nt, Homo sapiens
  misc_RNA (1)...(19): siRNA sense strand
guucggacuugguaugaau

SEQ ID NO: 943012 - RNA, 19 nt, Homo sapiens
  misc_RNA (1)...(19): siRNA sense strand
ggauaaaucuucagacaaa

SEQ ID NO: 943013 - RNA, 19 nt, Homo sapiens
  misc_RNA (1)...(19): siRNA sense strand
cgaaguggcuaaccaagaa

SEQ ID NO: 943014 - RNA, 19 nt, Homo sapiens
  misc_RNA (1)...(19): siRNA sense strand
ccaagaaacuaaagaagac

SEQ ID NO: 943015 - RNA, 19 nt, Homo sapiens
  misc_RNA (1)...(19): siRNA sense strand
agaaagaagccaagucuga

SEQ ID NO: 943016 - RNA, 19 nt, Homo sapiens
  misc_RNA (1)...(19): siRNA sense strand
gaaagaagccaagucugau

SEQ ID NO: 943017 - RNA, 19 nt, Homo sapiens
  misc_RNA (1)...(19): siRNA sense strand
cagcuaaaccuccugcaaa

SEQ ID NO: 943018 - RNA, 19 nt, Homo sapiens
  misc_RNA (1)...(19): siRNA sense strand
aaggauaaaucuucagaca

SEQ ID NO: 943019 - RNA, 19 nt, Homo sapiens
  misc_RNA (1)...(19): siRNA sense strand
ugaugaagcaggagagaaa

SEQ ID NO: 943020 - RNA, 19 nt, Homo sapiens
  misc_RNA (1)...(19): siRNA sense strand
aagaagccaagucugauua

SEQ ID NO: 943021 - RNA, 19 nt, Homo sapiens
  misc_RNA (1)...(19): siRNA sense strand
gaagagcccaagaggagau

SEQ ID NO: 943022 - RNA, 19 nt, Homo sapiens
  misc_RNA (1)...(19): siRNA sense strand
aaagaagccaagucugauu

SEQ ID NO: 943023 - RNA, 19 nt, Homo sapiens
  misc_RNA (1)...(19): siRNA sense strand
cagcagcgaaggauaaauc

SEQ ID NO: 943024 - RNA, 19 nt, Homo sapiens
  misc_RNA (1)...(19): siRNA sense strand
uggcuaaccaagaaacuaa

SEQ ID NO: 943025 - RNA, 19 nt, Homo sapiens
  misc_RNA (1)...(19): siRNA sense strand
gaaguggcuaaccaagaaa

SEQ ID NO: 943026 - RNA, 19 nt, Homo sapiens
  misc_RNA (1)...(19): siRNA sense strand
gaguccagccucugaugaa

SEQ ID NO: 943027 - RNA, 19 nt, Homo sapiens
  misc_RNA (1)...(19): siRNA sense strand
ugaagcaggagagaaagaa

SEQ ID NO: 943028 - RNA, 19 nt, Homo sapiens
  misc_RNA (1)...(19): siRNA sense strand
gagagaaagaagccaaguc

SEQ ID NO: 943029 - RNA, 19 nt, Homo sapiens
  misc_RNA (1)...(19): siRNA sense strand
gaagacuuaccugcggaaa

SEQ ID NO: 943030 - RNA, 19 nt, Homo sapiens
  misc_RNA (1)...(19): siRNA sense strand
agaagccaagucugauuaa

SEQ ID NO: 943031 - RNA, 19 nt, Homo sapiens
  misc_RNA (1)...(19): siRNA sense strand
aggcagcagcgaaggauaa

SEQ ID NO: 943032 - RNA, 19 nt, Homo sapiens
  misc_RNA (1)...(19): siRNA sense strand
agagaaagaagccaagucu

SEQ ID NO: 943033 - RNA, 19 nt, Homo sapiens
  misc_RNA (1)...(19): siRNA sense strand
accaagaaacuaaagaaga

SEQ ID NO: 943034 - RNA, 19 nt, Homo sapiens
  misc_RNA (1)...(19): siRNA sense strand
gaagcaggagagaaagaag

SEQ ID NO: 943035 - RNA, 19 nt, Homo sapiens
  misc_RNA (1)...(19): siRNA sense strand
ccgaaguggcuaaccaaga

SEQ ID NO: 943036 - RNA, 19 nt, Homo sapiens
  misc_RNA (1)...(19): siRNA sense strand
ccaaggaagagcccaagag

SEQ ID NO: 943037 - RNA, 19 nt, Homo sapiens
  misc_RNA (1)...(19): siRNA sense strand
gcagcgaaggauaaaucuu

SEQ ID NO: 943038 - RNA, 19 nt, Homo sapiens
  misc_RNA (1)...(19): siRNA sense strand
gaaacuaaagaagacuuac

SEQ ID NO: 943039 - RNA, 19 nt, Homo sapiens
  misc_RNA (1)...(19): siRNA sense strand
ggagagaaagaagccaagu

SEQ ID NO: 943040 - RNA, 19 nt, Homo sapiens
  misc_RNA (1)...(19): siRNA sense strand
gaaaacggggaaacgaaga

SEQ ID NO: 943041 - RNA, 19 nt, Homo sapiens
  misc_RNA (1)...(19): siRNA sense strand
gaauaugguucaaggcuuu

SEQ ID NO: 943042 - RNA, 19 nt, Homo sapiens
  misc_RNA (1)...(19): siRNA sense strand
ucagaaauccagacaauua

SEQ ID NO: 943043 - RNA, 19 nt, Homo sapiens
  misc_RNA (1)...(19): siRNA sense strand
ugucaaacuuggucaauua

SEQ ID NO: 943044 - RNA, 19 nt, Homo sapiens
  misc_RNA (1)...(19): siRNA sense strand
ugaaaugccuccagauauu

SEQ ID NO: 943045 - RNA, 19 nt, Homo sapiens
  misc_RNA (1)...(19): siRNA sense strand
uaaucaagcuugcuacaaa

SEQ ID NO: 943046 - RNA, 19 nt, Homo sapiens
  misc_RNA (1)...(19): siRNA sense strand
gaaaugccuccagauauua

SEQ ID NO: 943047 - RNA, 19 nt, Homo sapiens
  misc_RNA (1)...(19): siRNA sense strand
gcaugcaguuucugaauau

SEQ ID NO: 943048 - RNA, 19 nt, Homo sapiens
  misc_RNA (1)...(19): siRNA sense strand
acaaauagauguccugaag

SEQ ID NO: 943049 - RNA, 19 nt, Homo sapiens
  misc_RNA (1)...(19): siRNA sense strand
caaacuuggucaauuaugu

SEQ ID NO: 943050 - RNA, 19 nt, Homo sapiens
  misc_RNA (1)...(19): siRNA sense strand
caacugcuguuaccaugga

SEQ ID NO: 943051 - RNA, 19 nt, Homo sapiens
  misc_RNA (1)...(19): siRNA sense strand
caugaaaugccuccagaua

SEQ ID NO: 943052 - RNA, 19 nt, Homo sapiens
  misc_RNA (1)...(19): siRNA sense strand
ccucagaaauccagacaau

SEQ ID NO: 943053 - RNA, 19 nt, Homo sapiens
  misc_RNA (1)...(19): siRNA sense strand
gcugggaccucagaaaguu

SEQ ID NO: 943054 - RNA, 19 nt, Homo sapiens
  misc_RNA (1)...(19): siRNA sense strand
gcuaagagauaugaaggau

SEQ ID NO: 943055 - RNA, 19 nt, Homo sapiens
  misc_RNA (1)...(19): siRNA sense strand
aggaugguauggacaauaa

SEQ ID NO: 943056 - RNA, 19 nt, Homo sapiens
  misc_RNA (1)...(19): siRNA sense strand
aagucgagauggcugauua

SEQ ID NO: 943057 - RNA, 19 nt, Homo sapiens
  misc_RNA (1)...(19): siRNA sense strand
ugccauaauugcagaauau

SEQ ID NO: 943058 - RNA, 19 nt, Homo sapiens
  misc_RNA (1)...(19): siRNA sense strand
gaucauaccaacugcuguu

SEQ ID NO: 943059 - RNA, 19 nt, Homo sapiens
  misc_RNA (1)...(19): siRNA sense strand
acaauaaucacaacuggaa

SEQ ID NO: 943060 - RNA, 19 nt, Homo sapiens
  misc_RNA (1)...(19): siRNA sense strand
gaagcugggaccucagaaa

SEQ ID NO: 943061 - RNA, 19 nt, Homo sapiens
  misc_RNA (1)...(19): siRNA sense strand
caucaguggcuuaaagaaa

SEQ ID NO: 943062 - RNA, 19 nt, Homo sapiens
  misc_RNA (1)...(19): siRNA sense strand
ugaaggcauugcuaagaga

SEQ ID NO: 943063 - RNA, 19 nt, Homo sapiens
  misc_RNA (1)...(19): siRNA sense strand
aaucaucaguggcuuaaag

SEQ ID NO: 943064 - RNA, 19 nt, Homo sapiens
  misc_RNA (1)...(19): siRNA sense strand
ccagugcacccaaggaauu

SEQ ID NO: 943065 - RNA, 19 nt, Homo sapiens
  misc_RNA (1)...(19): siRNA sense strand
acaaagaucauaccaacug

SEQ ID NO: 943066 - RNA, 19 nt, Homo sapiens
  misc_RNA (1)...(19): siRNA sense strand
gaaggaugguauggacaau

SEQ ID NO: 943067 - RNA, 19 nt, Homo sapiens
  misc_RNA (1)...(19): siRNA sense strand
gagaagaccaagucgagau

SEQ ID NO: 943068 - RNA, 19 nt, Homo sapiens
  misc_RNA (1)...(19): siRNA sense strand
uaaaucaucaguggcuuaa

SEQ ID NO: 943069 - RNA, 19 nt, Homo sapiens
  misc_RNA (1)...(19): siRNA sense strand
uaucaggccagacuucgua

SEQ ID NO: 943070 - RNA, 19 nt, Homo sapiens
  misc_RNA (1)...(19): siRNA sense strand
uagauguccugaaggcauu

SEQ ID NO: 943071 - RNA, 19 nt, Homo sapiens
  misc_RNA (1)...(19): siRNA sense strand
caagcuugcuacaaagauc

SEQ ID NO: 943072 - RNA, 19 nt, Homo sapiens
  misc_RNA (1)...(19): siRNA sense strand
aaccaccguucaaacauuu

SEQ ID NO: 943073 - RNA, 19 nt, Homo sapiens
  misc_RNA (1)...(19): siRNA sense strand
uuuccuaggucaguuuaua

SEQ ID NO: 943074 - RNA, 19 nt, Homo sapiens
  misc_RNA (1)...(19): siRNA sense strand
cuaaaucaucaguggcuua

SEQ ID NO: 943075 - RNA, 19 nt, Homo sapiens
  misc_RNA (1)...(19): siRNA sense strand
caaggaauuuucugucuau

SEQ ID NO: 943076 - RNA, 19 nt, Homo sapiens
  misc_RNA (1)...(19): siRNA sense strand
ccauggagcacaucucaga

SEQ ID NO: 943077 - RNA, 19 nt, Homo sapiens
  misc_RNA (1)...(19): siRNA sense strand
agcaugcaguuucugaaua

SEQ ID NO: 943078 - RNA, 19 nt, Homo sapiens
  misc_RNA (1)...(19): siRNA sense strand
gaccucagaaaguuauaaa

SEQ ID NO: 943079 - RNA, 19 nt, Homo sapiens
  misc_RNA (1)...(19): siRNA sense strand
gguucaaggcuuuauaaau

SEQ ID NO: 943080 - RNA, 19 nt, Homo sapiens
  misc_RNA (1)...(19): siRNA sense strand
cagaaauccagacaauuau

SEQ ID NO: 943081 - RNA, 19 nt, Homo sapiens
  misc_RNA (1)...(19): siRNA sense strand
cuccagauauuauucuuca

SEQ ID NO: 943082 - RNA, 19 nt, Homo sapiens
  misc_RNA (1)...(19): siRNA sense strand
ggaccucagaaaguuauaa

SEQ ID NO: 943083 - RNA, 19 nt, Homo sapiens
  misc_RNA (1)...(19): siRNA sense strand
ccggaugucuacccuggaa

SEQ ID NO: 943084 - RNA, 19 nt, Homo sapiens
  misc_RNA (1)...(19): siRNA sense strand
gacuucguaugccuaaaga

SEQ ID NO: 943085 - RNA, 19 nt, Homo sapiens
  misc_RNA (1)...(19): siRNA sense strand
guacuggcaugggauaggu

SEQ ID NO: 943086 - RNA, 19 nt, Homo sapiens
  misc_RNA (1)...(19): siRNA sense strand
gugucaaacuuggucaauu

SEQ ID NO: 943087 - RNA, 19 nt, Homo sapiens
  misc_RNA (1)...(19): siRNA sense strand
gagauaugaaggaugguau

SEQ ID NO: 943088 - RNA, 19 nt, Homo sapiens
  misc_RNA (1)...(19): siRNA sense strand
uaaagaaggaaagccagaa

SEQ ID NO: 943089 - RNA, 19 nt, Homo sapiens
  misc_RNA (1)...(19): siRNA sense strand
gaugguauggacaauaauc

SEQ ID NO: 943090 - RNA, 19 nt, Homo sapiens
  misc_RNA (1)...(19): siRNA sense strand
gcauugcuaagagauauga

SEQ ID NO: 943091 - RNA, 19 nt, Homo sapiens
  misc_RNA (1)...(19): siRNA sense strand
ccaaggaauuuucugucua

SEQ ID NO: 943092 - RNA, 19 nt, Homo sapiens
  misc_RNA (1)...(19): siRNA sense strand
cuaaagagcaacuggaacu

SEQ ID NO: 943093 - RNA, 19 nt, Homo sapiens
  misc_RNA (1)...(19): siRNA sense strand
ugaaggaugguauggacaa

SEQ ID NO: 943094 - RNA, 19 nt, Homo sapiens
  misc_RNA (1)...(19): siRNA sense strand
gaaggcauugcuaagagau

SEQ ID NO: 943095 - RNA, 19 nt, Homo sapiens
  misc_RNA (1)...(19): siRNA sense strand
aaucaagcuugcuacaaag

SEQ ID NO: 943096 - RNA, 19 nt, Homo sapiens
  misc_RNA (1)...(19): siRNA sense strand
cagauguuccucagaaauc

SEQ ID NO: 943097 - RNA, 19 nt, Homo sapiens
  misc_RNA (1)...(19): siRNA sense strand
guauggacaauaaucacaa

SEQ ID NO: 943098 - RNA, 19 nt, Homo sapiens
  misc_RNA (1)...(19): siRNA sense strand
acacugacuuuucuucuug

SEQ ID NO: 943099 - RNA, 19 nt, Homo sapiens
  misc_RNA (1)...(19): siRNA sense strand
cuuggucaauuauguacuu

SEQ ID NO: 943100 - RNA, 19 nt, Homo sapiens
  misc_RNA (1)...(19): siRNA sense strand
aagagcaacuggaacuuuu

SEQ ID NO: 943101 - RNA, 19 nt, Homo sapiens
  misc_RNA (1)...(19): siRNA sense strand
cagcaugcaguuucugaau

SEQ ID NO: 943102 - RNA, 19 nt, Homo sapiens
  misc_RNA (1)...(19): siRNA sense strand
ucaguggcuuaaagaaaca

SEQ ID NO: 943103 - RNA, 19 nt, Homo sapiens
  misc_RNA (1)...(19): siRNA sense strand
guugagagaagaccaaguc

SEQ ID NO: 943104 - RNA, 19 nt, Homo sapiens
  misc_RNA (1)...(19): siRNA sense strand
caacuggaacacccaugga

SEQ ID NO: 943105 - RNA, 19 nt, Homo sapiens
  misc_RNA (1)...(19): siRNA sense strand
aggcauugcuaagagauau

SEQ ID NO: 943106 - RNA, 19 nt, Homo sapiens
  misc_RNA (1)...(19): siRNA sense strand
gccuaaagagcaacuggaa

SEQ ID NO: 943107 - RNA, 19 nt, Homo sapiens
  misc_RNA (1)...(19): siRNA sense strand
ccagacuucguaugccuaa

SEQ ID NO: 943108 - RNA, 19 nt, Homo sapiens
  misc_RNA (1)...(19): siRNA sense strand
cugaaggcauugcuaagag

SEQ ID NO: 943109 - RNA, 19 nt, Homo sapiens
  misc_RNA (1)...(19): siRNA sense strand
gcuacaaagaucauaccaa

SEQ ID NO: 943110 - RNA, 19 nt, Homo sapiens
  misc_RNA (1)...(19): siRNA sense strand
aaagaaggaaagccagaau

SEQ ID NO: 943111 - RNA, 19 nt, Homo sapiens
  misc_RNA (1)...(19): siRNA sense strand
ggaccacacagaggaagug

SEQ ID NO: 943112 - RNA, 19 nt, Homo sapiens
  misc_RNA (1)...(19): siRNA sense strand
gguauggacaauaaucaca

SEQ ID NO: 943113 - RNA, 19 nt, Homo sapiens
  misc_RNA (1)...(19): siRNA sense strand
agaaggaaagccagaaucu

SEQ ID NO: 943114 - RNA, 19 nt, Homo sapiens
  misc_RNA (1)...(19): siRNA sense strand
ccugaaggcauugcuaaga

SEQ ID NO: 943115 - RNA, 19 nt, Homo sapiens
  misc_RNA (1)...(19): siRNA sense strand
guccugaaggcauugcuaa

SEQ ID NO: 943116 - RNA, 19 nt, Homo sapiens
  misc_RNA (1)...(19): siRNA sense strand
gagcaacuggaacuuuuaa

SEQ ID NO: 943117 - RNA, 19 nt, Homo sapiens
  misc_RNA (1)...(19): siRNA sense strand
ggaugucuacccuggaaag

SEQ ID NO: 943118 - RNA, 19 nt, Homo sapiens
  misc_RNA (1)...(19): siRNA sense strand
uaaagagcaacuggaacuu

SEQ ID NO: 943119 - RNA, 19 nt, Homo sapiens
  misc_RNA (1)...(19): siRNA sense strand
augaaaugccuccagauau

SEQ ID NO: 943120 - RNA, 19 nt, Homo sapiens
  misc_RNA (1)...(19): siRNA sense strand
auaaauaucaggccagacu

SEQ ID NO: 943121 - RNA, 19 nt, Homo sapiens
  misc_RNA (1)...(19): siRNA sense strand
gauaugaaggaugguaugg

SEQ ID NO: 943122 - RNA, 19 nt, Homo sapiens
  misc_RNA (1)...(19): siRNA sense strand
ggaacgggacuucaucaug

SEQ ID NO: 943123 - RNA, 19 nt, Homo sapiens
  misc_RNA (1)...(19): siRNA sense strand
caucaugccgcuggacuua

SEQ ID NO: 943124 - RNA, 19 nt, Homo sapiens
  misc_RNA (1)...(19): siRNA sense strand
agaggaaccuggccgugaa

SEQ ID NO: 943125 - RNA, 19 nt, Homo sapiens
  misc_RNA (1)...(19): siRNA sense strand
gugcagcgcuugccguucu

SEQ ID NO: 943126 - RNA, 19 nt, Homo sapiens
  misc_RNA (1)...(19): siRNA sense strand
gugagauccugucugcauu

SEQ ID NO: 943127 - RNA, 19 nt, Homo sapiens
  misc_RNA (1)...(19): siRNA sense strand
ccacagcgugucuggaauu

SEQ ID NO: 943128 - RNA, 19 nt, Homo sapiens
  misc_RNA (1)...(19): siRNA sense strand
cagcgugucuggaauucug

SEQ ID NO: 943129 - RNA, 19 nt, Homo sapiens
  misc_RNA (1)...(19): siRNA sense strand
ggccugcgguuucuucgau

SEQ ID NO: 943130 - RNA, 19 nt, Homo sapiens
  misc_RNA (1)...(19): siRNA sense strand
ggugagauccugucugcau

SEQ ID NO: 943131 - RNA, 19 nt, Homo sapiens
  misc_RNA (1)...(19): siRNA sense strand
ugucuggaauucugguuug

SEQ ID NO: 943132 - RNA, 19 nt, Homo sapiens
  misc_RNA (1)...(19): siRNA sense strand
ggaggaacgggacuucauc

SEQ ID NO: 943133 - RNA, 19 nt, Homo sapiens
  misc_RNA (1)...(19): siRNA sense strand
ggacaacacgggcuaugac

SEQ ID NO: 943134 - RNA, 19 nt, Homo sapiens
  misc_RNA (1)...(19): siRNA sense strand
gagccgguauguggaggaa

SEQ ID NO: 943135 - RNA, 19 nt, Homo sapiens
  misc_RNA (1)...(19): siRNA sense strand
cggaggaggugucccacau

SEQ ID NO: 943136 - RNA, 19 nt, Homo sapiens
  misc_RNA (1)...(19): siRNA sense strand
cugagaagcugggccacuu

SEQ ID NO: 943137 - RNA, 19 nt, Homo sapiens
  misc_RNA (1)...(19): siRNA sense strand
gaggaacgggacuucauca

SEQ ID NO: 943138 - RNA, 19 nt, Homo sapiens
  misc_RNA (1)...(19): siRNA sense strand
ccagaggaaagucaagaug

SEQ ID NO: 943139 - RNA, 19 nt, Homo sapiens
  misc_RNA (1)...(19): siRNA sense strand
gaccagaggaaagucaaga

SEQ ID NO: 943140 - RNA, 19 nt, Homo sapiens
  misc_RNA (1)...(19): siRNA sense strand
auggcuacguguacaagua

SEQ ID NO: 943141 - RNA, 19 nt, Homo sapiens
  misc_RNA (1)...(19): siRNA sense strand
ugaaccggguccucagcuu

SEQ ID NO: 943142 - RNA, 19 nt, Homo sapiens
  misc_RNA (1)...(19): siRNA sense strand
ugagggaaaggaucacaga

SEQ ID NO: 943143 - RNA, 19 nt, Homo sapiens
  misc_RNA (1)...(19): siRNA sense strand
ggaggccugcgguuucuuc

SEQ ID NO: 943144 - RNA, 19 nt, Homo sapiens
  misc_RNA (1)...(19): siRNA sense strand
gccugcgguuucuucgaua

SEQ ID NO: 943145 - RNA, 19 nt, Homo sapiens
  misc_RNA (1)...(19): siRNA sense strand
aaccugcaccucaauguga

SEQ ID NO: 943146 - RNA, 19 nt, Homo sapiens
  misc_RNA (1)...(19): siRNA sense strand
guaaccugcaccucaaugu

SEQ ID NO: 943147 - RNA, 19 nt, Homo sapiens
  misc_RNA (1)...(19): siRNA sense strand
gggcugugaacguggcuuu

SEQ ID NO: 943148 - RNA, 19 nt, Homo sapiens
  misc_RNA (1)...(19): siRNA sense strand
gaaggacaacacgggcuau

SEQ ID NO: 943149 - RNA, 19 nt, Homo sapiens
  misc_RNA (1)...(19): siRNA sense strand
agaggaaagucaagaugcu

SEQ ID NO: 943150 - RNA, 19 nt, Homo sapiens
  misc_RNA (1)...(19): siRNA sense strand
ggggaaacguggcaaccaa

SEQ ID NO: 943151 - RNA, 19 nt, Homo sapiens
  misc_RNA (1)...(19): siRNA sense strand
uaaccugcaccucaaugug

SEQ ID NO: 943152 - RNA, 19 nt, Homo sapiens
  misc_RNA (1)...(19): siRNA sense strand
ggugcaagagaguccguuu

SEQ ID NO: 943153 - RNA, 19 nt, Homo sapiens
  misc_RNA (1)...(19): siRNA sense strand
ggaggaggugucccacauc

SEQ ID NO: 943154 - RNA, 19 nt, Homo sapiens
  misc_RNA (1)...(19): siRNA sense strand
gagcaugucuuuagguaua

SEQ ID NO: 943155 - RNA, 19 nt, Homo sapiens
  misc_RNA (1)...(19): siRNA sense strand
ggaagggcauguucaagua

SEQ ID NO: 943156 - RNA, 19 nt, Homo sapiens
  misc_RNA (1)...(19): siRNA sense strand
gaacuggaccaccaugaua

SEQ ID NO: 943157 - RNA, 19 nt, Homo sapiens
  misc_RNA (1)...(19): siRNA sense strand
caacauugcugucacugaa

SEQ ID NO: 943158 - RNA, 19 nt, Homo sapiens
  misc_RNA (1)...(19): siRNA sense strand
gaagugacaucagcacauu

SEQ ID NO: 943159 - RNA, 19 nt, Homo sapiens
  misc_RNA (1)...(19): siRNA sense strand
gaucagauaucccagacuu

SEQ ID NO: 943160 - RNA, 19 nt, Homo sapiens
  misc_RNA (1)...(19): siRNA sense strand
ggacauagcaaacaaggaa

SEQ ID NO: 943161 - RNA, 19 nt, Homo sapiens
  misc_RNA (1)...(19): siRNA sense strand
gaaauuucauguguggaua

SEQ ID NO: 943162 - RNA, 19 nt, Homo sapiens
  misc_RNA (1)...(19): siRNA sense strand
acacaugucucuggugaua

SEQ ID NO: 943163 - RNA, 19 nt, Homo sapiens
  misc_RNA (1)...(19): siRNA sense strand
agaagugccucgugaauau

SEQ ID NO: 943164 - RNA, 19 nt, Homo sapiens
  misc_RNA (1)...(19): siRNA sense strand
gaacagagagaacuaugug

SEQ ID NO: 943165 - RNA, 19 nt, Homo sapiens
  misc_RNA (1)...(19): siRNA sense strand
cgagaacgguuacacauca

SEQ ID NO: 943166 - RNA, 19 nt, Homo sapiens
  misc_RNA (1)...(19): siRNA sense strand
ggaccaccaugauaaagga

SEQ ID NO: 943167 - RNA, 19 nt, Homo sapiens
  misc_RNA (1)...(19): siRNA sense strand
ggccagacguccaguauca

SEQ ID NO: 943168 - RNA, 19 nt, Homo sapiens
  misc_RNA (1)...(19): siRNA sense strand
uaccuuaacuguggacaua

SEQ ID NO: 943169 - RNA, 19 nt, Homo sapiens
  misc_RNA (1)...(19): siRNA sense strand
acaaggaaauuucaugugu

SEQ ID NO: 943170 - RNA, 19 nt, Homo sapiens
  misc_RNA (1)...(19): siRNA sense strand
gaaagugcaagauagaguu

SEQ ID NO: 943171 - RNA, 19 nt, Homo sapiens
  misc_RNA (1)...(19): siRNA sense strand
caacuggagaccaucuuua

SEQ ID NO: 943172 - RNA, 19 nt, Homo sapiens
  misc_RNA (1)...(19): siRNA sense strand
agaaaucauugggucuuua

SEQ ID NO: 943173 - RNA, 19 nt, Homo sapiens
  misc_RNA (1)...(19): siRNA sense strand
caagauagaguuucugaca

SEQ ID NO: 943174 - RNA, 19 nt, Homo sapiens
  misc_RNA (1)...(19): siRNA sense strand
uaacucgggaggauaauuu

SEQ ID NO: 943175 - RNA, 19 nt, Homo sapiens
  misc_RNA (1)...(19): siRNA sense strand
gagaccaucuuuagcaucu

SEQ ID NO: 943176 - RNA, 19 nt, Homo sapiens
  misc_RNA (1)...(19): siRNA sense strand
gugccaaguuccauaauca

SEQ ID NO: 943177 - RNA, 19 nt, Homo sapiens
  misc_RNA (1)...(19): siRNA sense strand
gcaugucaguaauuugguu

SEQ ID NO: 943178 - RNA, 19 nt, Homo sapiens
  misc_RNA (1)...(19): siRNA sense strand
cgacgccgaguauguguua

SEQ ID NO: 943179 - RNA, 19 nt, Homo sapiens
  misc_RNA (1)...(19): siRNA sense strand
acacagccuuuccagcuuu

SEQ ID NO: 943180 - RNA, 19 nt, Homo sapiens
  misc_RNA (1)...(19): siRNA sense strand
ggucaucgacgccgaguau

SEQ ID NO: 943181 - RNA, 19 nt, Homo sapiens
  misc_RNA (1)...(19): siRNA sense strand
gaaguaucacuaugacaga

SEQ ID NO: 943182 - RNA, 19 nt, Homo sapiens
  misc_RNA (1)...(19): siRNA sense strand
gacaggagaauuuauauac

SEQ ID NO: 943183 - RNA, 19 nt, Homo sapiens
  misc_RNA (1)...(19): siRNA sense strand
cagaaaucauugggucuuu

SEQ ID NO: 943184 - RNA, 19 nt, Homo sapiens
  misc_RNA (1)...(19): siRNA sense strand
uaaugggacucuagacauc

SEQ ID NO: 943185 - RNA, 19 nt, Homo sapiens
  misc_RNA (1)...(19): siRNA sense strand
gcaguucucauacuccuau

SEQ ID NO: 943186 - RNA, 19 nt, Homo sapiens
  misc_RNA (1)...(19): siRNA sense strand
ggaaauuucauguguggau

SEQ ID NO: 943187 - RNA, 19 nt, Homo sapiens
  misc_RNA (1)...(19): siRNA sense strand
gaacaccaaguacaaacug

SEQ ID NO: 943188 - RNA, 19 nt, Homo sapiens
  misc_RNA (1)...(19): siRNA sense strand
cagaagugccucgugaaua

SEQ ID NO: 943189 - RNA, 19 nt, Homo sapiens
  misc_RNA (1)...(19): siRNA sense strand
caaauuugcagaccaauac

SEQ ID NO: 943190 - RNA, 19 nt, Homo sapiens
  misc_RNA (1)...(19): siRNA sense strand
acuagucuccuuccauuua

SEQ ID NO: 943191 - RNA, 19 nt, Homo sapiens
  misc_RNA (1)...(19): siRNA sense strand
uggagcaugucuuuaggua

SEQ ID NO: 943192 - RNA, 19 nt, Homo sapiens
  misc_RNA (1)...(19): siRNA sense strand
cuacguguauggagcauuc

SEQ ID NO: 943193 - RNA, 19 nt, Homo sapiens
  misc_RNA (1)...(19): siRNA sense strand
ccaccaugauaaaggaauu

SEQ ID NO: 943194 - RNA, 19 nt, Homo sapiens
  misc_RNA (1)...(19): siRNA sense strand
gcaggucggcguaccagaa

SEQ ID NO: 943195 - RNA, 19 nt, Homo sapiens
  misc_RNA (1)...(19): siRNA sense strand
aaucaaauuugcagaccaa

SEQ ID NO: 943196 - RNA, 19 nt, Homo sapiens
  misc_RNA (1)...(19): siRNA sense strand
gaccagaccuuguuuucuu

SEQ ID NO: 943197 - RNA, 19 nt, Homo sapiens
  misc_RNA (1)...(19): siRNA sense strand
gaaaucauugggucuuuag

SEQ ID NO: 943198 - RNA, 19 nt, Homo sapiens
  misc_RNA (1)...(19): siRNA sense strand
guuggaaagugcaagauag

SEQ ID NO: 943199 - RNA, 19 nt, Homo sapiens
  misc_RNA (1)...(19): siRNA sense strand
caaacaaggaaauuucaug

SEQ ID NO: 943200 - RNA, 19 nt, Homo sapiens
  misc_RNA (1)...(19): siRNA sense strand
cagaugggaacaccaagua

SEQ ID NO: 943201 - RNA, 19 nt, Homo sapiens
  misc_RNA (1)...(19): siRNA sense strand
aaagaaagccaccaugucu

SEQ ID NO: 943202 - RNA, 19 nt, Homo sapiens
  misc_RNA (1)...(19): siRNA sense strand
ccgaggaccugcacguguu

SEQ ID NO: 943203 - RNA, 19 nt, Homo sapiens
  misc_RNA (1)...(19): siRNA sense strand
caagacaauuacagcuuca

SEQ ID NO: 943204 - RNA, 19 nt, Homo sapiens
  misc_RNA (1)...(19): siRNA sense strand
ucaaauuugcagaccaaua

SEQ ID NO: 943205 - RNA, 19 nt, Homo sapiens
  misc_RNA (1)...(19): siRNA sense strand
caacaacaaugccccuuug

SEQ ID NO: 943206 - RNA, 19 nt, Homo sapiens
  misc_RNA (1)...(19): siRNA sense strand
ggaaagugcaagauagagu

SEQ ID NO: 943207 - RNA, 19 nt, Homo sapiens
  misc_RNA (1)...(19): siRNA sense strand
gacacagccuuuccagcuu

SEQ ID NO: 943208 - RNA, 19 nt, Homo sapiens
  misc_RNA (1)...(19): siRNA sense strand
cagaagacguggcccugau

SEQ ID NO: 943209 - RNA, 19 nt, Homo sapiens
  misc_RNA (1)...(19): siRNA sense strand
ggagucgucauccuacuga

SEQ ID NO: 943210 - RNA, 19 nt, Homo sapiens
  misc_RNA (1)...(19): siRNA sense strand
uaccaucccuacaucaaug

SEQ ID NO: 943211 - RNA, 19 nt, Homo sapiens
  misc_RNA (1)...(19): siRNA sense strand
gggaagggcauguucaagu

SEQ ID NO: 943212 - RNA, 19 nt, Homo sapiens
  misc_RNA (1)...(19): siRNA sense strand
gccaccaugucuaccuuaa

SEQ ID NO: 943213 - RNA, 19 nt, Homo sapiens
  misc_RNA (1)...(19): siRNA sense strand
gaucaccauccacaacauu

SEQ ID NO: 943214 - RNA, 19 nt, Homo sapiens
  misc_RNA (1)...(19): siRNA sense strand
ucagauaucccagacuuau

SEQ ID NO: 943215 - RNA, 19 nt, Homo sapiens
  misc_RNA (1)...(19): siRNA sense strand
ggaacagagagaacuaugu

SEQ ID NO: 943216 - RNA, 19 nt, Homo sapiens
  misc_RNA (1)...(19): siRNA sense strand
gaauugacugcuucguuga

SEQ ID NO: 943217 - RNA, 19 nt, Homo sapiens
  misc_RNA (1)...(19): siRNA sense strand
cagcuggaauugacugcuu

SEQ ID NO: 943218 - RNA, 19 nt, Homo sapiens
  misc_RNA (1)...(19): siRNA sense strand
caggagaauuuauauacag

SEQ ID NO: 943219 - RNA, 19 nt, Homo sapiens
  misc_RNA (1)...(19): siRNA sense strand
gcagaaaucauugggucuu

SEQ ID NO: 943220 - RNA, 19 nt, Homo sapiens
  misc_RNA (1)...(19): siRNA sense strand
ugacagacaggcagaaauc

SEQ ID NO: 943221 - RNA, 19 nt, Homo sapiens
  misc_RNA (1)...(19): siRNA sense strand
cagauaucccagacuuaua

SEQ ID NO: 943222 - RNA, 19 nt, Homo sapiens
  misc_RNA (1)...(19): siRNA sense strand
ucacuuccaguuuaaagaa

SEQ ID NO: 943223 - RNA, 19 nt, Homo sapiens
  misc_RNA (1)...(19): siRNA sense strand
gcauccugcuccuaugguu

SEQ ID NO: 943224 - RNA, 19 nt, Homo sapiens
  misc_RNA (1)...(19): siRNA sense strand
cagacaggcagaaaucauu

SEQ ID NO: 943225 - RNA, 19 nt, Homo sapiens
  misc_RNA (1)...(19): siRNA sense strand
gcuguccucuccucgucua

SEQ ID NO: 943226 - RNA, 19 nt, Homo sapiens
  misc_RNA (1)...(19): siRNA sense strand
uagcaaacaaggaaauuuc

SEQ ID NO: 943227 - RNA, 19 nt, Homo sapiens
  misc_RNA (1)...(19): siRNA sense strand
uaaagaaagccaccauguc

SEQ ID NO: 943228 - RNA, 19 nt, Homo sapiens
  misc_RNA (1)...(19): siRNA sense strand
ccaaguacaaacuggauau

SEQ ID NO: 943229 - RNA, 19 nt, Homo sapiens
  misc_RNA (1)...(19): siRNA sense strand
ucugacaggagaauuuaua

SEQ ID NO: 943230 - RNA, 19 nt, Homo sapiens
  misc_RNA (1)...(19): siRNA sense strand
acaugucucuggugauaau

SEQ ID NO: 943231 - RNA, 19 nt, Homo sapiens
  misc_RNA (1)...(19): siRNA sense strand
ccacaacauugcugucacu

SEQ ID NO: 943232 - RNA, 19 nt, Homo sapiens
  misc_RNA (1)...(19): siRNA sense strand
acagcaaaccagaucauuu

SEQ ID NO: 943233 - RNA, 19 nt, Homo sapiens
  misc_RNA (1)...(19): siRNA sense strand
caaacuggauauuuuccua

SEQ ID NO: 943234 - RNA, 19 nt, Homo sapiens
  misc_RNA (1)...(19): siRNA sense strand
gugugcaugucaguaauuu

SEQ ID NO: 943235 - RNA, 19 nt, Homo sapiens
  misc_RNA (1)...(19): siRNA sense strand
cagcaaaccagaucauuuu

SEQ ID NO: 943236 - RNA, 19 nt, Homo sapiens
  misc_RNA (1)...(19): siRNA sense strand
gacaauuacagcuucauca

SEQ ID NO: 943237 - RNA, 19 nt, Homo sapiens
  misc_RNA (1)...(19): siRNA sense strand
caccaugucuaccuuaacu

SEQ ID NO: 943238 - RNA, 19 nt, Homo sapiens
  misc_RNA (1)...(19): siRNA sense strand
ggaguuucgggcugucuuu

SEQ ID NO: 943239 - RNA, 19 nt, Homo sapiens
  misc_RNA (1)...(19): siRNA sense strand
ccguuuggcuggccuacaa

SEQ ID NO: 943240 - RNA, 19 nt, Homo sapiens
  misc_RNA (1)...(19): siRNA sense strand
gccaaguuccauaaucaaa

SEQ ID NO: 943241 - RNA, 19 nt, Homo sapiens
  misc_RNA (1)...(19): siRNA sense strand
guuguuauacuggaaguuu

SEQ ID NO: 943242 - RNA, 19 nt, Homo sapiens
  misc_RNA (1)...(19): siRNA sense strand
gaccaucuuuagcaucuac

SEQ ID NO: 943243 - RNA, 19 nt, Homo sapiens
  misc_RNA (1)...(19): siRNA sense strand
ggacagcaaaccagaucau

SEQ ID NO: 943244 - RNA, 19 nt, Homo sapiens
  misc_RNA (1)...(19): siRNA sense strand
gcaaacaaggaaauuucau

SEQ ID NO: 943245 - RNA, 19 nt, Homo sapiens
  misc_RNA (1)...(19): siRNA sense strand
uaacuguggacauagcaaa

SEQ ID NO: 943246 - RNA, 19 nt, Homo sapiens
  misc_RNA (1)...(19): siRNA sense strand
gaagacguggcccugaugu

SEQ ID NO: 943247 - RNA, 19 nt, Homo sapiens
  misc_RNA (1)...(19): siRNA sense strand
ccaaguuccauaaucaaau

SEQ ID NO: 943248 - RNA, 19 nt, Homo sapiens
  misc_RNA (1)...(19): siRNA sense strand
ugacccugcaagacaauua

SEQ ID NO: 943249 - RNA, 19 nt, Homo sapiens
  misc_RNA (1)...(19): siRNA sense strand
uuaaagaaagccaccaugu

SEQ ID NO: 943250 - RNA, 19 nt, Homo sapiens
  misc_RNA (1)...(19): siRNA sense strand
ucgggaggauaauuuguau

SEQ ID NO: 943251 - RNA, 19 nt, Homo sapiens
  misc_RNA (1)...(19): siRNA sense strand
gaugggaacaccaaguaca

SEQ ID NO: 943252 - RNA, 19 nt, Homo sapiens
  misc_RNA (1)...(19): siRNA sense strand
gaacgguuacacaucagau

SEQ ID NO: 943253 - RNA, 19 nt, Homo sapiens
  misc_RNA (1)...(19): siRNA sense strand
uuucauguguggauaucaa

SEQ ID NO: 943254 - RNA, 19 nt, Homo sapiens
  misc_RNA (1)...(19): siRNA sense strand
uaacagacuucccaaauuu

SEQ ID NO: 943255 - RNA, 19 nt, Homo sapiens
  misc_RNA (1)...(19): siRNA sense strand
gaccaaagaugaacuacua

SEQ ID NO: 943256 - RNA, 19 nt, Homo sapiens
  misc_RNA (1)...(19): siRNA sense strand
gaagaucuccuuuaacuuu

SEQ ID NO: 943257 - RNA, 19 nt, Homo sapiens
  misc_RNA (1)...(19): siRNA sense strand
gaaauuacauaaccugaag

SEQ ID NO: 943258 - RNA, 19 nt, Homo sapiens
  misc_RNA (1)...(19): siRNA sense strand
ccagagcacuucacauaaa

SEQ ID NO: 943259 - RNA, 19 nt, Homo sapiens
  misc_RNA (1)...(19): siRNA sense strand
gacagaagguuacaggaaa

SEQ ID NO: 943260 - RNA, 19 nt, Homo sapiens
  misc_RNA (1)...(19): siRNA sense strand
guccagagaugaagauaaa

SEQ ID NO: 943261 - RNA, 19 nt, Homo sapiens
  misc_RNA (1)...(19): siRNA sense strand
ucacauaaacauccaguua

SEQ ID NO: 943262 - RNA, 19 nt, Homo sapiens
  misc_RNA (1)...(19): siRNA sense strand
aaacagaacccacuaacaa

SEQ ID NO: 943263 - RNA, 19 nt, Homo sapiens
  misc_RNA (1)...(19): siRNA sense strand
agaaagaacucggcaguga

SEQ ID NO: 943264 - RNA, 19 nt, Homo sapiens
  misc_RNA (1)...(19): siRNA sense strand
ccacaaugcugggcaacua

SEQ ID NO: 943265 - RNA, 19 nt, Homo sapiens
  misc_RNA (1)...(19): siRNA sense strand
cuaacagacuucccaaauu

SEQ ID NO: 943266 - RNA, 19 nt, Homo sapiens
  misc_RNA (1)...(19): siRNA sense strand
ggaaaucaguccgcaggaa

SEQ ID NO: 943267 - RNA, 19 nt, Homo sapiens
  misc_RNA (1)...(19): siRNA sense strand
cuuugcagcucaucauuua

SEQ ID NO: 943268 - RNA, 19 nt, Homo sapiens
  misc_RNA (1)...(19): siRNA sense strand
aagaagaucuccuuuaacu

SEQ ID NO: 943269 - RNA, 19 nt, Homo sapiens
  misc_RNA (1)...(19): siRNA sense strand
gaagaaacagagauacaug

SEQ ID NO: 943270 - RNA, 19 nt, Homo sapiens
  misc_RNA (1)...(19): siRNA sense strand
uaaggcccauucuuuauug

SEQ ID NO: 943271 - RNA, 19 nt, Homo sapiens
  misc_RNA (1)...(19): siRNA sense strand
cagaauguaccuuuacuaa

SEQ ID NO: 943272 - RNA, 19 nt, Homo sapiens
  misc_RNA (1)...(19): siRNA sense strand
uuacuaaggcccauucuuu

SEQ ID NO: 943273 - RNA, 19 nt, Homo sapiens
  misc_RNA (1)...(19): siRNA sense strand
uacauaaccugaagacaga

SEQ ID NO: 943274 - RNA, 19 nt, Homo sapiens
  misc_RNA (1)...(19): siRNA sense strand
caaagaugaacuacuauga

SEQ ID NO: 943275 - RNA, 19 nt, Homo sapiens
  misc_RNA (1)...(19): siRNA sense strand
ggacacugaugaugaggau

SEQ ID NO: 943276 - RNA, 19 nt, Homo sapiens
  misc_RNA (1)...(19): siRNA sense strand
gaaacagagauacauguga

SEQ ID NO: 943277 - RNA, 19 nt, Homo sapiens
  misc_RNA (1)...(19): siRNA sense strand
acagugugauuucuucuaa

SEQ ID NO: 943278 - RNA, 19 nt, Homo sapiens
  misc_RNA (1)...(19): siRNA sense strand
gaaagaacucggcagugaa

SEQ ID NO: 943279 - RNA, 19 nt, Homo sapiens
  misc_RNA (1)...(19): siRNA sense strand
gcucaucauuuaccagaau

SEQ ID NO: 943280 - RNA, 19 nt, Homo sapiens
  misc_RNA (1)...(19): siRNA sense strand
uuaccagaauguaccuuua

SEQ ID NO: 943281 - RNA, 19 nt, Homo sapiens
  misc_RNA (1)...(19): siRNA sense strand
gcgauauccugaacguuug

SEQ ID NO: 943282 - RNA, 19 nt, Homo sapiens
  misc_RNA (1)...(19): siRNA sense strand
gaacucugagcucaaacua

SEQ ID NO: 943283 - RNA, 19 nt, Homo sapiens
  misc_RNA (1)...(19): siRNA sense strand
acaauucaguucagauuuc

SEQ ID NO: 943284 - RNA, 19 nt, Homo sapiens
  misc_RNA (1)...(19): siRNA sense strand
gaaacagaacccacuaaca

SEQ ID NO: 943285 - RNA, 19 nt, Homo sapiens
  misc_RNA (1)...(19): siRNA sense strand
gaaaagaaccgaccugaca

SEQ ID NO: 943286 - RNA, 19 nt, Homo sapiens
  misc_RNA (1)...(19): siRNA sense strand
gcacugcgauauccugaac

SEQ ID NO: 943287 - RNA, 19 nt, Homo sapiens
  misc_RNA (1)...(19): siRNA sense strand
gaagauguuagaaauaugg

SEQ ID NO: 943288 - RNA, 19 nt, Homo sapiens
  misc_RNA (1)...(19): siRNA sense strand
ccuggaugcugaagauaaa

SEQ ID NO: 943289 - RNA, 19 nt, Homo sapiens
  misc_RNA (1)...(19): siRNA sense strand
gagcucaaacuacuuagga

SEQ ID NO: 943290 - RNA, 19 nt, Homo sapiens
  misc_RNA (1)...(19): siRNA sense strand
aaagaacucggcagugaaa

SEQ ID NO: 943291 - RNA, 19 nt, Homo sapiens
  misc_RNA (1)...(19): siRNA sense strand
gcacaggcuggaacucuga

SEQ ID NO: 943292 - RNA, 19 nt, Homo sapiens
  misc_RNA (1)...(19): siRNA sense strand
uuaagaaacaggaggcuaa

SEQ ID NO: 943293 - RNA, 19 nt, Homo sapiens
  misc_RNA (1)...(19): siRNA sense strand
uacuaaggcccauucuuua

SEQ ID NO: 943294 - RNA, 19 nt, Homo sapiens
  misc_RNA (1)...(19): siRNA sense strand
gcaggccuccgaaggguuu

SEQ ID NO: 943295 - RNA, 19 nt, Homo sapiens
  misc_RNA (1)...(19): siRNA sense strand
ucagaacagugacaugaag

SEQ ID NO: 943296 - RNA, 19 nt, Homo sapiens
  misc_RNA (1)...(19): siRNA sense strand
cuucuaagauguuucuauc

SEQ ID NO: 943297 - RNA, 19 nt, Homo sapiens
  misc_RNA (1)...(19): siRNA sense strand
ucccaaauuuccaguguug

SEQ ID NO: 943298 - RNA, 19 nt, Homo sapiens
  misc_RNA (1)...(19): siRNA sense strand
gcucaaacuacuuaggauu

SEQ ID NO: 943299 - RNA, 19 nt, Homo sapiens
  misc_RNA (1)...(19): siRNA sense strand
ccugaacguuugaagaaau

SEQ ID NO: 943300 - RNA, 19 nt, Homo sapiens
  misc_RNA (1)...(19): siRNA sense strand
ccaaauuuccaguguugaa

SEQ ID NO: 943301 - RNA, 19 nt, Homo sapiens
  misc_RNA (1)...(19): siRNA sense strand
cuaaggcccauucuuuauu

SEQ ID NO: 943302 - RNA, 19 nt, Homo sapiens
  misc_RNA (1)...(19): siRNA sense strand
uugaucaacuguacuaaca

SEQ ID NO: 943303 - RNA, 19 nt, Homo sapiens
  misc_RNA (1)...(19): siRNA sense strand
ggauuuccaccacagugua

SEQ ID NO: 943304 - RNA, 19 nt, Homo sapiens
  misc_RNA (1)...(19): siRNA sense strand
agacagaagguuacaggaa

SEQ ID NO: 943305 - RNA, 19 nt, Homo sapiens
  misc_RNA (1)...(19): siRNA sense strand
gcaggaacacgaguaggaa

SEQ ID NO: 943306 - RNA, 19 nt, Homo sapiens
  misc_RNA (1)...(19): siRNA sense strand
cugaacguuugaagaaauu

SEQ ID NO: 943307 - RNA, 19 nt, Homo sapiens
  misc_RNA (1)...(19): siRNA sense strand
acacugaugaugaggauga

SEQ ID NO: 943308 - RNA, 19 nt, Homo sapiens
  misc_RNA (1)...(19): siRNA sense strand
ccgaaggguuuaccugaca

SEQ ID NO: 943309 - RNA, 19 nt, Homo sapiens
  misc_RNA (1)...(19): siRNA sense strand
ccaaagaugaacuacuaug

SEQ ID NO: 943310 - RNA, 19 nt, Homo sapiens
  misc_RNA (1)...(19): siRNA sense strand
guucaugaccgucucuaug

SEQ ID NO: 943311 - RNA, 19 nt, Homo sapiens
  misc_RNA (1)...(19): siRNA sense strand
gcccugaagauguuagaaa

SEQ ID NO: 943312 - RNA, 19 nt, Homo sapiens
  misc_RNA (1)...(19): siRNA sense strand
guguugaauuugaaugaga

SEQ ID NO: 943313 - RNA, 19 nt, Homo sapiens
  misc_RNA (1)...(19): siRNA sense strand
ucucagaguucaaaguuuu

SEQ ID NO: 943314 - RNA, 19 nt, Homo sapiens
  misc_RNA (1)...(19): siRNA sense strand
ucugagcucaaacuacuua

SEQ ID NO: 943315 - RNA, 19 nt, Homo sapiens
  misc_RNA (1)...(19): siRNA sense strand
acuaugaccaugcggauuu

SEQ ID NO: 943316 - RNA, 19 nt, Homo sapiens
  misc_RNA (1)...(19): siRNA sense strand
auccagagcacuucacaua

SEQ ID NO: 943317 - RNA, 19 nt, Homo sapiens
  misc_RNA (1)...(19): siRNA sense strand
guaggaacaccagggauga

SEQ ID NO: 943318 - RNA, 19 nt, Homo sapiens
  misc_RNA (1)...(19): siRNA sense strand
uauuguggaucccagaaga

SEQ ID NO: 943319 - RNA, 19 nt, Homo sapiens
  misc_RNA (1)...(19): siRNA sense strand
ccugaagauguuagaaaua

SEQ ID NO: 943320 - RNA, 19 nt, Homo sapiens
  misc_RNA (1)...(19): siRNA sense strand
guucaaaguuuuacuccaa

SEQ ID NO: 943321 - RNA, 19 nt, Homo sapiens
  misc_RNA (1)...(19): siRNA sense strand
acggagagaccaaagauga

SEQ ID NO: 943322 - RNA, 19 nt, Homo sapiens
  misc_RNA (1)...(19): siRNA sense strand
ugcgauauccugaacguuu

SEQ ID NO: 943323 - RNA, 19 nt, Homo sapiens
  misc_RNA (1)...(19): siRNA sense strand
gaccugacagugugauuuc

SEQ ID NO: 943324 - RNA, 19 nt, Homo sapiens
  misc_RNA (1)...(19): siRNA sense strand
ccagaauguaccuuuacua

SEQ ID NO: 943325 - RNA, 19 nt, Homo sapiens
  misc_RNA (1)...(19): siRNA sense strand
caaacuacuuaggauucuu

SEQ ID NO: 943326 - RNA, 19 nt, Homo sapiens
  misc_RNA (1)...(19): siRNA sense strand
acucugagcucaaacuacu

SEQ ID NO: 943327 - RNA, 19 nt, Homo sapiens
  misc_RNA (1)...(19): siRNA sense strand
gauuuccaccacaguguaa

SEQ ID NO: 943328 - RNA, 19 nt, Homo sapiens
  misc_RNA (1)...(19): siRNA sense strand
uaagaaacaggaggcuaaa

SEQ ID NO: 943329 - RNA, 19 nt, Homo sapiens
  misc_RNA (1)...(19): siRNA sense strand
gacagugugauuucuucua

SEQ ID NO: 943330 - RNA, 19 nt, Homo sapiens
  misc_RNA (1)...(19): siRNA sense strand
ggcucaauccgaagcguua

SEQ ID NO: 943331 - RNA, 19 nt, Homo sapiens
  misc_RNA (1)...(19): siRNA sense strand
cagaagaaacagagauaca

SEQ ID NO: 943332 - RNA, 19 nt, Homo sapiens
  misc_RNA (1)...(19): siRNA sense strand
gcuuugcagcucaucauuu

SEQ ID NO: 943333 - RNA, 19 nt, Homo sapiens
  misc_RNA (1)...(19): siRNA sense strand
caccgugguagacaucuua

SEQ ID NO: 943334 - RNA, 19 nt, Homo sapiens
  misc_RNA (1)...(19): siRNA sense strand
gagagccagugggacgaaa

SEQ ID NO: 943335 - RNA, 19 nt, Homo sapiens
  misc_RNA (1)...(19): siRNA sense strand
gaaggguuuaccugacaaa

SEQ ID NO: 943336 - RNA, 19 nt, Homo sapiens
  misc_RNA (1)...(19): siRNA sense strand
cgaaggguuuaccugacaa

SEQ ID NO: 943337 - RNA, 19 nt, Homo sapiens
  misc_RNA (1)...(19): siRNA sense strand
cuggaacucugagcucaaa

SEQ ID NO: 943338 - RNA, 19 nt, Homo sapiens
  misc_RNA (1)...(19): siRNA sense strand
aguccugaauuguaugaaa

SEQ ID NO: 943339 - RNA, 19 nt, Homo sapiens
  misc_RNA (1)...(19): siRNA sense strand
gaugaacuacuaugaccau

SEQ ID NO: 943340 - RNA, 19 nt, Homo sapiens
  misc_RNA (1)...(19): siRNA sense strand
ccacggagagaccaaagau

SEQ ID NO: 943341 - RNA, 19 nt, Homo sapiens
  misc_RNA (1)...(19): siRNA sense strand
gaccagcacugcgauaucc

SEQ ID NO: 943342 - RNA, 19 nt, Homo sapiens
  misc_RNA (1)...(19): siRNA sense strand
ccagugcaauugucugaac

SEQ ID NO: 943343 - RNA, 19 nt, Homo sapiens
  misc_RNA (1)...(19): siRNA sense strand
cccugaagauguuagaaau

SEQ ID NO: 943344 - RNA, 19 nt, Homo sapiens
  misc_RNA (1)...(19): siRNA sense strand
gcaacuucccugcccugaa

SEQ ID NO: 943345 - RNA, 19 nt, Homo sapiens
  misc_RNA (1)...(19): siRNA sense strand
gaccgucucuaugguuaca

SEQ ID NO: 943346 - RNA, 19 nt, Homo sapiens
  misc_RNA (1)...(19): siRNA sense strand
cagagcacuucacauaaac

SEQ ID NO: 943347 - RNA, 19 nt, Homo sapiens
  misc_RNA (1)...(19): siRNA sense strand
cccagaagaaacagagaua

SEQ ID NO: 943348 - RNA, 19 nt, Homo sapiens
  misc_RNA (1)...(19): siRNA sense strand
ucccugcccugaagauguu

SEQ ID NO: 943349 - RNA, 19 nt, Homo sapiens
  misc_RNA (1)...(19): siRNA sense strand
ucaaacuacuuaggauucu

SEQ ID NO: 943350 - RNA, 19 nt, Homo sapiens
  misc_RNA (1)...(19): siRNA sense strand
ugaagcagcagcagcagau

SEQ ID NO: 943351 - RNA, 19 nt, Homo sapiens
  misc_RNA (1)...(19): siRNA sense strand
cgaccugacagugugauuu

SEQ ID NO: 943352 - RNA, 19 nt, Homo sapiens
  misc_RNA (1)...(19): siRNA sense strand
gaucuacugaaggaacuuu

SEQ ID NO: 943353 - RNA, 19 nt, Homo sapiens
  misc_RNA (1)...(19): siRNA sense strand
ccacuucgaaacaggauuc

SEQ ID NO: 943354 - RNA, 19 nt, Homo sapiens
  misc_RNA (1)...(19): siRNA sense strand
guacauagcucaagugaug

SEQ ID NO: 943355 - RNA, 19 nt, Homo sapiens
  misc_RNA (1)...(19): siRNA sense strand
gaacagacaacuccagaua

SEQ ID NO: 943356 - RNA, 19 nt, Homo sapiens
  misc_RNA (1)...(19): siRNA sense strand
gaaagaaguugaccuccuu

SEQ ID NO: 943357 - RNA, 19 nt, Homo sapiens
  misc_RNA (1)...(19): siRNA sense strand
caaagcaacugaaacuuga

SEQ ID NO: 943358 - RNA, 19 nt, Homo sapiens
  misc_RNA (1)...(19): siRNA sense strand
gaauagaaaucgccuuuua

SEQ ID NO: 943359 - RNA, 19 nt, Homo sapiens
  misc_RNA (1)...(19): siRNA sense strand
gagcaaggauggagagguu

SEQ ID NO: 943360 - RNA, 19 nt, Homo sapiens
  misc_RNA (1)...(19): siRNA sense strand
ggagauggagcccaacuua

SEQ ID NO: 943361 - RNA, 19 nt, Homo sapiens
  misc_RNA (1)...(19): siRNA sense strand
aaaccuccauuuaguguua

SEQ ID NO: 943362 - RNA, 19 nt, Homo sapiens
  misc_RNA (1)...(19): siRNA sense strand
accaagagcuuuacaaauu

SEQ ID NO: 943363 - RNA, 19 nt, Homo sapiens
  misc_RNA (1)...(19): siRNA sense strand
gaacagaagugcagcuacu

SEQ ID NO: 943364 - RNA, 19 nt, Homo sapiens
  misc_RNA (1)...(19): siRNA sense strand
gaaaugacaagauugagaa

SEQ ID NO: 943365 - RNA, 19 nt, Homo sapiens
  misc_RNA (1)...(19): siRNA sense strand
gcaaagcaacugaaacuug

SEQ ID NO: 943366 - RNA, 19 nt, Homo sapiens
  misc_RNA (1)...(19): siRNA sense strand
cgaacuggcuccacacaaa

SEQ ID NO: 943367 - RNA, 19 nt, Homo sapiens
  misc_RNA (1)...(19): siRNA sense strand
gcccacagcuugauauuca

SEQ ID NO: 943368 - RNA, 19 nt, Homo sapiens
  misc_RNA (1)...(19): siRNA sense strand
ccagauaaauguugacugu

SEQ ID NO: 943369 - RNA, 19 nt, Homo sapiens
  misc_RNA (1)...(19): siRNA sense strand
gacaauaggaugaauagaa

SEQ ID NO: 943370 - RNA, 19 nt, Homo sapiens
  misc_RNA (1)...(19): siRNA sense strand
acagacaacuccagauaaa

SEQ ID NO: 943371 - RNA, 19 nt, Homo sapiens
  misc_RNA (1)...(19): siRNA sense strand
guacaaauccaauuacugu

SEQ ID NO: 943372 - RNA, 19 nt, Homo sapiens
  misc_RNA (1)...(19): siRNA sense strand
gcugauauguuuaguucaa

SEQ ID NO: 943373 - RNA, 19 nt, Homo sapiens
  misc_RNA (1)...(19): siRNA sense strand
caagagggauaucuaguca

SEQ ID NO: 943374 - RNA, 19 nt, Homo sapiens
  misc_RNA (1)...(19): siRNA sense strand
agacagacaucucagaguu

SEQ ID NO: 943375 - RNA, 19 nt, Homo sapiens
  misc_RNA (1)...(19): siRNA sense strand
gaaugaauccgucugcuau

SEQ ID NO: 943376 - RNA, 19 nt, Homo sapiens
  misc_RNA (1)...(19): siRNA sense strand
gaaaucgccuuuuacauau

SEQ ID NO: 943377 - RNA, 19 nt, Homo sapiens
  misc_RNA (1)...(19): siRNA sense strand
gacacaaccucgagaugaa

SEQ ID NO: 943378 - RNA, 19 nt, Homo sapiens
  misc_RNA (1)...(19): siRNA sense strand
ggacacaaccucgagauga

SEQ ID NO: 943379 - RNA, 19 nt, Homo sapiens
  misc_RNA (1)...(19): siRNA sense strand
cagcugauauguuuaguuc

SEQ ID NO: 943380 - RNA, 19 nt, Homo sapiens
  misc_RNA (1)...(19): siRNA sense strand
ggaaucaacacucacugua

SEQ ID NO: 943381 - RNA, 19 nt, Homo sapiens
  misc_RNA (1)...(19): siRNA sense strand
ccaagagcuuuacaaauuc

SEQ ID NO: 943382 - RNA, 19 nt, Homo sapiens
  misc_RNA (1)...(19): siRNA sense strand
gagaaaagcccgaagaauu

SEQ ID NO: 943383 - RNA, 19 nt, Homo sapiens
  misc_RNA (1)...(19): siRNA sense strand
ggaaaugacaagauugaga

SEQ ID NO: 943384 - RNA, 19 nt, Homo sapiens
  misc_RNA (1)...(19): siRNA sense strand
auacacagcaucuaguuua

SEQ ID NO: 943385 - RNA, 19 nt, Homo sapiens
  misc_RNA (1)...(19): siRNA sense strand
gauagcugcaccuuucuua

SEQ ID NO: 943386 - RNA, 19 nt, Homo sapiens
  misc_RNA (1)...(19): siRNA sense strand
ggaaugaauccgucugcua

SEQ ID NO: 943387 - RNA, 19 nt, Homo sapiens
  misc_RNA (1)...(19): siRNA sense strand
guugaagucugaaguuaau

SEQ ID NO: 943388 - RNA, 19 nt, Homo sapiens
  misc_RNA (1)...(19): siRNA sense strand
gaaccuauucagcccauuu

SEQ ID NO: 943389 - RNA, 19 nt, Homo sapiens
  misc_RNA (1)...(19): siRNA sense strand
gaggaaaugacaagauuga

SEQ ID NO: 943390 - RNA, 19 nt, Homo sapiens
  misc_RNA (1)...(19): siRNA sense strand
guaccaagagcuuuacaaa

SEQ ID NO: 943391 - RNA, 19 nt, Homo sapiens
  misc_RNA (1)...(19): siRNA sense strand
gaauuagcgugaccuccaa

SEQ ID NO: 943392 - RNA, 19 nt, Homo sapiens
  misc_RNA (1)...(19): siRNA sense strand
uaaauuuaguggaccaaga

SEQ ID NO: 943393 - RNA, 19 nt, Homo sapiens
  misc_RNA (1)...(19): siRNA sense strand
ggaauaccauaguccagau

SEQ ID NO: 943394 - RNA, 19 nt, Homo sapiens
  misc_RNA (1)...(19): siRNA sense strand
ugugauagcugcaccuuuc

SEQ ID NO: 943395 - RNA, 19 nt, Homo sapiens
  misc_RNA (1)...(19): siRNA sense strand
gguauccauucuccuagua

SEQ ID NO: 943396 - RNA, 19 nt, Homo sapiens
  misc_RNA (1)...(19): siRNA sense strand
cagaauaacaacaaucuug

SEQ ID NO: 943397 - RNA, 19 nt, Homo sapiens
  misc_RNA (1)...(19): siRNA sense strand
ucucagaguucaucaggaa

SEQ ID NO: 943398 - RNA, 19 nt, Homo sapiens
  misc_RNA (1)...(19): siRNA sense strand
aaagggaagccauaaauau

SEQ ID NO: 943399 - RNA, 19 nt, Homo sapiens
  misc_RNA (1)...(19): siRNA sense strand
uuaaugguauggagcauga

SEQ ID NO: 943400 - RNA, 19 nt, Homo sapiens
  misc_RNA (1)...(19): siRNA sense strand
cagugcauguuacagaaua

SEQ ID NO: 943401 - RNA, 19 nt, Homo sapiens
  misc_RNA (1)...(19): siRNA sense strand
gauaaauguugacuguaca

SEQ ID NO: 943402 - RNA, 19 nt, Homo sapiens
  misc_RNA (1)...(19): siRNA sense strand
gaugacaauaggaugaaua

SEQ ID NO: 943403 - RNA, 19 nt, Homo sapiens
  misc_RNA (1)...(19): siRNA sense strand
aauguugacuguacacuga

SEQ ID NO: 943404 - RNA, 19 nt, Homo sapiens
  misc_RNA (1)...(19): siRNA sense strand
gaaauuacaguugaaccuu

SEQ ID NO: 943405 - RNA, 19 nt, Homo sapiens
  misc_RNA (1)...(19): siRNA sense strand
cagcguccuuuaccuguuu

SEQ ID NO: 943406 - RNA, 19 nt, Homo sapiens
  misc_RNA (1)...(19): siRNA sense strand
gcagguaaacagcugauau

SEQ ID NO: 943407 - RNA, 19 nt, Homo sapiens
  misc_RNA (1)...(19): siRNA sense strand
gagauggagcccaacuuaa

SEQ ID NO: 943408 - RNA, 19 nt, Homo sapiens
  misc_RNA (1)...(19): siRNA sense strand
agaaaagcccgaagaauua

SEQ ID NO: 943409 - RNA, 19 nt, Homo sapiens
  misc_RNA (1)...(19): siRNA sense strand
cugaggaaaugacaagauu

SEQ ID NO: 943410 - RNA, 19 nt, Homo sapiens
  misc_RNA (1)...(19): siRNA sense strand
gcagagacggcucagaaga

SEQ ID NO: 943411 - RNA, 19 nt, Homo sapiens
  misc_RNA (1)...(19): siRNA sense strand
gcaucuaguuuauccaaag

SEQ ID NO: 943412 - RNA, 19 nt, Homo sapiens
  misc_RNA (1)...(19): siRNA sense strand
agaaaucgccuuuuacaua

SEQ ID NO: 943413 - RNA, 19 nt, Homo sapiens
  misc_RNA (1)...(19): siRNA sense strand
uagcgugaccuccaaagua

SEQ ID NO: 943414 - RNA, 19 nt, Homo sapiens
  misc_RNA (1)...(19): siRNA sense strand
ccaguugggccacaucuuu

SEQ ID NO: 943415 - RNA, 19 nt, Homo sapiens
  misc_RNA (1)...(19): siRNA sense strand
ggucgaacacugguacaua

SEQ ID NO: 943416 - RNA, 19 nt, Homo sapiens
  misc_RNA (1)...(19): siRNA sense strand
gaauccgucugcuaugcaa

SEQ ID NO: 943417 - RNA, 19 nt, Homo sapiens
  misc_RNA (1)...(19): siRNA sense strand
gcaacugaaacuugagaaa

SEQ ID NO: 943418 - RNA, 19 nt, Homo sapiens
  misc_RNA (1)...(19): siRNA sense strand
ggauggagagguuagcaaa

SEQ ID NO: 943419 - RNA, 19 nt, Homo sapiens
  misc_RNA (1)...(19): siRNA sense strand
gaaaagggaagccauaaau

SEQ ID NO: 943420 - RNA, 19 nt, Homo sapiens
  misc_RNA (1)...(19): siRNA sense strand
caacuggaccuucuuguac

SEQ ID NO: 943421 - RNA, 19 nt, Homo sapiens
  misc_RNA (1)...(19): siRNA sense strand
ccaacuggaccuucuugua

SEQ ID NO: 943422 - RNA, 19 nt, Homo sapiens
  misc_RNA (1)...(19): siRNA sense strand
ccaaagguuccaugaagaa

SEQ ID NO: 943423 - RNA, 19 nt, Homo sapiens
  misc_RNA (1)...(19): siRNA sense strand
ucuccugguucuauuuaua

SEQ ID NO: 943424 - RNA, 19 nt, Homo sapiens
  misc_RNA (1)...(19): siRNA sense strand
caaauccaauuacuguuac

SEQ ID NO: 943425 - RNA, 19 nt, Homo sapiens
  misc_RNA (1)...(19): siRNA sense strand
gaacgaacagaacagaagu

SEQ ID NO: 943426 - RNA, 19 nt, Homo sapiens
  misc_RNA (1)...(19): siRNA sense strand
agacaacuccagauaaaug

SEQ ID NO: 943427 - RNA, 19 nt, Homo sapiens
  misc_RNA (1)...(19): siRNA sense strand
ggaagacaaacuccucaga

SEQ ID NO: 943428 - RNA, 19 nt, Homo sapiens
  misc_RNA (1)...(19): siRNA sense strand
ugagaagcaugaacagaca

SEQ ID NO: 943429 - RNA, 19 nt, Homo sapiens
  misc_RNA (1)...(19): siRNA sense strand
guguuaauccuguguauau

SEQ ID NO: 943430 - RNA, 19 nt, Homo sapiens
  misc_RNA (1)...(19): siRNA sense strand
caaccaaaaccuccauuua

SEQ ID NO: 943431 - RNA, 19 nt, Homo sapiens
  misc_RNA (1)...(19): siRNA sense strand
gaccugggacagcaauuaa

SEQ ID NO: 943432 - RNA, 19 nt, Homo sapiens
  misc_RNA (1)...(19): siRNA sense strand
uaucagccuucucaguauu

SEQ ID NO: 943433 - RNA, 19 nt, Homo sapiens
  misc_RNA (1)...(19): siRNA sense strand
cgguugaagucugaaguua

SEQ ID NO: 943434 - RNA, 19 nt, Homo sapiens
  misc_RNA (1)...(19): siRNA sense strand
aaucaacacucacuguaca

SEQ ID NO: 943435 - RNA, 19 nt, Homo sapiens
  misc_RNA (1)...(19): siRNA sense strand
caagugauggacauauuga

SEQ ID NO: 943436 - RNA, 19 nt, Homo sapiens
  misc_RNA (1)...(19): siRNA sense strand
agaggaaacuuugauccaa

SEQ ID NO: 943437 - RNA, 19 nt, Homo sapiens
  misc_RNA (1)...(19): siRNA sense strand
agauaaauguugacuguac

SEQ ID NO: 943438 - RNA, 19 nt, Homo sapiens
  misc_RNA (1)...(19): siRNA sense strand
aacugaaacuugagaaaga

SEQ ID NO: 943439 - RNA, 19 nt, Homo sapiens
  misc_RNA (1)...(19): siRNA sense strand
ggucuccugguucuauuua

SEQ ID NO: 943440 - RNA, 19 nt, Homo sapiens
  misc_RNA (1)...(19): siRNA sense strand
ccacaaauuccaagcaauc

SEQ ID NO: 943441 - RNA, 19 nt, Homo sapiens
  misc_RNA (1)...(19): siRNA sense strand
gauggagcccaacuuaaug

SEQ ID NO: 943442 - RNA, 19 nt, Homo sapiens
  misc_RNA (1)...(19): siRNA sense strand
agucugaaguuaaugguau

SEQ ID NO: 943443 - RNA, 19 nt, Homo sapiens
  misc_RNA (1)...(19): siRNA sense strand
ccauaaauaucagagaagu

SEQ ID NO: 943444 - RNA, 19 nt, Homo sapiens
  misc_RNA (1)...(19): siRNA sense strand
ggauaucuagucaaccaaa

SEQ ID NO: 943445 - RNA, 19 nt, Homo sapiens
  misc_RNA (1)...(19): siRNA sense strand
caagagcuuuacaaauucu

SEQ ID NO: 943446 - RNA, 19 nt, Homo sapiens
  misc_RNA (1)...(19): siRNA sense strand
gucgaacacugguacauag

SEQ ID NO: 943447 - RNA, 19 nt, Homo sapiens
  misc_RNA (1)...(19): siRNA sense strand
caaaguacaggcagacauc

SEQ ID NO: 943448 - RNA, 19 nt, Homo sapiens
  misc_RNA (1)...(19): siRNA sense strand
ccagaugacaauaggauga

SEQ ID NO: 943449 - RNA, 19 nt, Homo sapiens
  misc_RNA (1)...(19): siRNA sense strand
ucaaccaucuccacggaau

SEQ ID NO: 943450 - RNA, 19 nt, Homo sapiens
  misc_RNA (1)...(19): siRNA sense strand
ucagucugcuuaccauuca

SEQ ID NO: 943451 - RNA, 19 nt, Homo sapiens
  misc_RNA (1)...(19): siRNA sense strand
acuaucagccuucucagua

SEQ ID NO: 943452 - RNA, 19 nt, Homo sapiens
  misc_RNA (1)...(19): siRNA sense strand
ccugggacagcaauuaaua

SEQ ID NO: 943453 - RNA, 19 nt, Homo sapiens
  misc_RNA (1)...(19): siRNA sense strand
gguugaagucugaaguuaa

SEQ ID NO: 943454 - RNA, 19 nt, Homo sapiens
  misc_RNA (1)...(19): siRNA sense strand
gaagaaaucugguagguau

SEQ ID NO: 943455 - RNA, 19 nt, Homo sapiens
  misc_RNA (1)...(19): siRNA sense strand
ggccaacaauacaggauua

SEQ ID NO: 943456 - RNA, 19 nt, Homo sapiens
  misc_RNA (1)...(19): siRNA sense strand
gagaaauuguuaaguggaa

SEQ ID NO: 943457 - RNA, 19 nt, Homo sapiens
  misc_RNA (1)...(19): siRNA sense strand
aaagaaggcugcuaguuca

SEQ ID NO: 943458 - RNA, 19 nt, Homo sapiens
  misc_RNA (1)...(19): siRNA sense strand
guauucaucuucuucuuca

SEQ ID NO: 943459 - RNA, 19 nt, Homo sapiens
  misc_RNA (1)...(19): siRNA sense strand
gaaaagcagugaagaacga

SEQ ID NO: 943460 - RNA, 19 nt, Homo sapiens
  misc_RNA (1)...(19): siRNA sense strand
acacagggagaaauuguua

SEQ ID NO: 943461 - RNA, 19 nt, Homo sapiens
  misc_RNA (1)...(19): siRNA sense strand
gaaucagacaguaaggaua

SEQ ID NO: 943462 - RNA, 19 nt, Homo sapiens
  misc_RNA (1)...(19): siRNA sense strand
cauaagaaacacaguaaga

SEQ ID NO: 943463 - RNA, 19 nt, Homo sapiens
  misc_RNA (1)...(19): siRNA sense strand
aaugagaacuggaagaaag

SEQ ID NO: 943464 - RNA, 19 nt, Homo sapiens
  misc_RNA (1)...(19): siRNA sense strand
gaaagcuccaugucagaaa

SEQ ID NO: 943465 - RNA, 19 nt, Homo sapiens
  misc_RNA (1)...(19): siRNA sense strand
gaaaagaagaaaucuggua

SEQ ID NO: 943466 - RNA, 19 nt, Homo sapiens
  misc_RNA (1)...(19): siRNA sense strand
gaaggcugcuaguucaagu

SEQ ID NO: 943467 - RNA, 19 nt, Homo sapiens
  misc_RNA (1)...(19): siRNA sense strand
gaaagauguauucugaaga

SEQ ID NO: 943468 - RNA, 19 nt, Homo sapiens
  misc_RNA (1)...(19): siRNA sense strand
ggcuuuggcugaauuugaa

SEQ ID NO: 943469 - RNA, 19 nt, Homo sapiens
  misc_RNA (1)...(19): siRNA sense strand
caauagcaauggcgagauc

SEQ ID NO: 943470 - RNA, 19 nt, Homo sapiens
  misc_RNA (1)...(19): siRNA sense strand
caacaauacaggauuaucu

SEQ ID NO: 943471 - RNA, 19 nt, Homo sapiens
  misc_RNA (1)...(19): siRNA sense strand
gacaguaaggauaguuuaa

SEQ ID NO: 943472 - RNA, 19 nt, Homo sapiens
  misc_RNA (1)...(19): siRNA sense strand
acauaaaucuucugaaagc

SEQ ID NO: 943473 - RNA, 19 nt, Homo sapiens
  misc_RNA (1)...(19): siRNA sense strand
gcaguucuucugauucuga

SEQ ID NO: 943474 - RNA, 19 nt, Homo sapiens
  misc_RNA (1)...(19): siRNA sense strand
gaaaucugguagguauuca

SEQ ID NO: 943475 - RNA, 19 nt, Homo sapiens
  misc_RNA (1)...(19): siRNA sense strand
agauggaacugagaaagaa

SEQ ID NO: 943476 - RNA, 19 nt, Homo sapiens
  misc_RNA (1)...(19): siRNA sense strand
cagcaguucuucugauucu

SEQ ID NO: 943477 - RNA, 19 nt, Homo sapiens
  misc_RNA (1)...(19): siRNA sense strand
gaagaaaagcagugaagaa

SEQ ID NO: 943478 - RNA, 19 nt, Homo sapiens
  misc_RNA (1)...(19): siRNA sense strand
ggaaaacggagaaagaaaa

SEQ ID NO: 943479 - RNA, 19 nt, Homo sapiens
  misc_RNA (1)...(19): siRNA sense strand
cagaaucagaguauauuga

SEQ ID NO: 943480 - RNA, 19 nt, Homo sapiens
  misc_RNA (1)...(19): siRNA sense strand
gaaugagaacuggaagaaa

SEQ ID NO: 943481 - RNA, 19 nt, Homo sapiens
  misc_RNA (1)...(19): siRNA sense strand
gaaacacaguaagaagaag

SEQ ID NO: 943482 - RNA, 19 nt, Homo sapiens
  misc_RNA (1)...(19): siRNA sense strand
agggagaaauuguuaagug

SEQ ID NO: 943483 - RNA, 19 nt, Homo sapiens
  misc_RNA (1)...(19): siRNA sense strand
gaggauaagaaacaaggaa

SEQ ID NO: 943484 - RNA, 19 nt, Homo sapiens
  misc_RNA (1)...(19): siRNA sense strand
agaaacacaguaagaagaa

SEQ ID NO: 943485 - RNA, 19 nt, Homo sapiens
  misc_RNA (1)...(19): siRNA sense strand
ugaaugagaacuggaagaa

SEQ ID NO: 943486 - RNA, 19 nt, Homo sapiens
  misc_RNA (1)...(19): siRNA sense strand
gaacuggaagaaagaacug

SEQ ID NO: 943487 - RNA, 19 nt, Homo sapiens
  misc_RNA (1)...(19): siRNA sense strand
agacaguaaggauaguuua

SEQ ID NO: 943488 - RNA, 19 nt, Homo sapiens
  misc_RNA (1)...(19): siRNA sense strand
caauacaggauuaucugaa

SEQ ID NO: 943489 - RNA, 19 nt, Homo sapiens
  misc_RNA (1)...(19): siRNA sense strand
gaacugagaaagaaaagga

SEQ ID NO: 943490 - RNA, 19 nt, Homo sapiens
  misc_RNA (1)...(19): siRNA sense strand
uaagaaacacaguaagaag

SEQ ID NO: 943491 - RNA, 19 nt, Homo sapiens
  misc_RNA (1)...(19): siRNA sense strand
ugaagaugaggauaagaaa

SEQ ID NO: 943492 - RNA, 19 nt, Homo sapiens
  misc_RNA (1)...(19): siRNA sense strand
aagaaacacaguaagaaga

SEQ ID NO: 943493 - RNA, 19 nt, Homo sapiens
  misc_RNA (1)...(19): siRNA sense strand
aaacacagggagaaauugu

SEQ ID NO: 943494 - RNA, 19 nt, Homo sapiens
  misc_RNA (1)...(19): siRNA sense strand
aagcauaagaaacacagua

SEQ ID NO: 943495 - RNA, 19 nt, Homo sapiens
  misc_RNA (1)...(19): siRNA sense strand
aagaagaaaucugguaggu

SEQ ID NO: 943496 - RNA, 19 nt, Homo sapiens
  misc_RNA (1)...(19): siRNA sense strand
gaaauuguuaaguggaagu

SEQ ID NO: 943497 - RNA, 19 nt, Homo sapiens
  misc_RNA (1)...(19): siRNA sense strand
aaacacaguaagaagaaga

SEQ ID NO: 943498 - RNA, 19 nt, Homo sapiens
  misc_RNA (1)...(19): siRNA sense strand
aagaugaggauaagaaaca

SEQ ID NO: 943499 - RNA, 19 nt, Homo sapiens
  misc_RNA (1)...(19): siRNA sense strand
gaagaugaggauaagaaac

SEQ ID NO: 943500 - RNA, 19 nt, Homo sapiens
  misc_RNA (1)...(19): siRNA sense strand
gguauucaucuucuucuuc

SEQ ID NO: 943501 - RNA, 19 nt, Homo sapiens
  misc_RNA (1)...(19): siRNA sense strand
ucugguagguauucaucuu

SEQ ID NO: 943502 - RNA, 19 nt, Homo sapiens
  misc_RNA (1)...(19): siRNA sense strand
uauuaaaggacucagcaaa

SEQ ID NO: 943503 - RNA, 19 nt, Homo sapiens
  misc_RNA (1)...(19): siRNA sense strand
gauggaacugagaaagaaa

SEQ ID NO: 943504 - RNA, 19 nt, Homo sapiens
  misc_RNA (1)...(19): siRNA sense strand
cugaagaugaggauaagaa

SEQ ID NO: 943505 - RNA, 19 nt, Homo sapiens
  misc_RNA (1)...(19): siRNA sense strand
uccagcaguucuucugauu

SEQ ID NO: 943506 - RNA, 19 nt, Homo sapiens
  misc_RNA (1)...(19): siRNA sense strand
guagguauucaucuucuuc

SEQ ID NO: 943507 - RNA, 19 nt, Homo sapiens
  misc_RNA (1)...(19): siRNA sense strand
gguagguauucaucuucuu

SEQ ID NO: 943508 - RNA, 19 nt, Homo sapiens
  misc_RNA (1)...(19): siRNA sense strand
guucacauaaaucuucuga

SEQ ID NO: 943509 - RNA, 19 nt, Homo sapiens
  misc_RNA (1)...(19): siRNA sense strand
ugucagaaucagaguauau

SEQ ID NO: 943510 - RNA, 19 nt, Homo sapiens
  misc_RNA (1)...(19): siRNA sense strand
ugaaagcuccaugucagaa

SEQ ID NO: 943511 - RNA, 19 nt, Homo sapiens
  misc_RNA (1)...(19): siRNA sense strand
agaagaaaucugguaggua

SEQ ID NO: 943512 - RNA, 19 nt, Homo sapiens
  misc_RNA (1)...(19): siRNA sense strand
aaaccuuuaucaucugagu

SEQ ID NO: 943513 - RNA, 19 nt, Homo sapiens
  misc_RNA (1)...(19): siRNA sense strand
caaggaaaacggagaaaga

SEQ ID NO: 943514 - RNA, 19 nt, Homo sapiens
  misc_RNA (1)...(19): siRNA sense strand
aagauggaacugagaaaga

SEQ ID NO: 943515 - RNA, 19 nt, Homo sapiens
  misc_RNA (1)...(19): siRNA sense strand
cagacaguaaggauaguuu

SEQ ID NO: 943516 - RNA, 19 nt, Homo sapiens
  misc_RNA (1)...(19): siRNA sense strand
aaucagacaguaaggauag

SEQ ID NO: 943517 - RNA, 19 nt, Homo sapiens
  misc_RNA (1)...(19): siRNA sense strand
ggaagaaagaacuggaaaa

SEQ ID NO: 943518 - RNA, 19 nt, Homo sapiens
  misc_RNA (1)...(19): siRNA sense strand
guaaaagagcaacuagaaa

SEQ ID NO: 943519 - RNA, 19 nt, Homo sapiens
  misc_RNA (1)...(19): siRNA sense strand
gucagaaucagaguauauu

SEQ ID NO: 943520 - RNA, 19 nt, Homo sapiens
  misc_RNA (1)...(19): siRNA sense strand
aaaugaaugagaacuggaa

SEQ ID NO: 943521 - RNA, 19 nt, Homo sapiens
  misc_RNA (1)...(19): siRNA sense strand
ugaaucagacaguaaggau

SEQ ID NO: 943522 - RNA, 19 nt, Homo sapiens
  misc_RNA (1)...(19): siRNA sense strand
gggccaacaauacaggauu

SEQ ID NO: 943523 - RNA, 19 nt, Homo sapiens
  misc_RNA (1)...(19): siRNA sense strand
aaaagaaggcugcuaguuc

SEQ ID NO: 943524 - RNA, 19 nt, Homo sapiens
  misc_RNA (1)...(19): siRNA sense strand
uugaggaggugcgagcaaa

SEQ ID NO: 943525 - RNA, 19 nt, Homo sapiens
  misc_RNA (1)...(19): siRNA sense strand
acaauacaggauuaucuga

SEQ ID NO: 943526 - RNA, 19 nt, Homo sapiens
  misc_RNA (1)...(19): siRNA sense strand
agaaaucugguagguauuc

SEQ ID NO: 943527 - RNA, 19 nt, Homo sapiens
  misc_RNA (1)...(19): siRNA sense strand
gcauaagaaacacaguaag

SEQ ID NO: 943528 - RNA, 19 nt, Homo sapiens
  misc_RNA (1)...(19): siRNA sense strand
ucagaaucagaguauauug

SEQ ID NO: 943529 - RNA, 19 nt, Homo sapiens
  misc_RNA (1)...(19): siRNA sense strand
caaaagauggaacugagaa

SEQ ID NO: 943530 - RNA, 19 nt, Homo sapiens
  misc_RNA (1)...(19): siRNA sense strand
aagagcaacuagaaaagaa

SEQ ID NO: 943531 - RNA, 19 nt, Homo sapiens
  misc_RNA (1)...(19): siRNA sense strand
caaggcuuuggcugaauuu

SEQ ID NO: 943532 - RNA, 19 nt, Homo sapiens
  misc_RNA (1)...(19): siRNA sense strand
ggaaagcucuggacaagau

SEQ ID NO: 943533 - RNA, 19 nt, Homo sapiens
  misc_RNA (1)...(19): siRNA sense strand
gaacacaacuuagugaaca

SEQ ID NO: 943534 - RNA, 19 nt, Homo sapiens
  misc_RNA (1)...(19): siRNA sense strand
gaacaagauuucucccuau

SEQ ID NO: 943535 - RNA, 19 nt, Homo sapiens
  misc_RNA (1)...(19): siRNA sense strand
ucaagucucuguuggaaga

SEQ ID NO: 943536 - RNA, 19 nt, Homo sapiens
  misc_RNA (1)...(19): siRNA sense strand
ggaaaucaagucucuguug

SEQ ID NO: 943537 - RNA, 19 nt, Homo sapiens
  misc_RNA (1)...(19): siRNA sense strand
gauacgugguggcuuguaa

SEQ ID NO: 943538 - RNA, 19 nt, Homo sapiens
  misc_RNA (1)...(19): siRNA sense strand
caacaaguaugagguagau

SEQ ID NO: 943539 - RNA, 19 nt, Homo sapiens
  misc_RNA (1)...(19): siRNA sense strand
caagauuucucccuauuac

SEQ ID NO: 943540 - RNA, 19 nt, Homo sapiens
  misc_RNA (1)...(19): siRNA sense strand
uggccgagguggucaguua

SEQ ID NO: 943541 - RNA, 19 nt, Homo sapiens
  misc_RNA (1)...(19): siRNA sense strand
gcggagcgaacacaacuua

SEQ ID NO: 943542 - RNA, 19 nt, Homo sapiens
  misc_RNA (1)...(19): siRNA sense strand
gcagacagagaacaagauu

SEQ ID NO: 943543 - RNA, 19 nt, Homo sapiens
  misc_RNA (1)...(19): siRNA sense strand
cgugguggcuuguaaggaa

SEQ ID NO: 943544 - RNA, 19 nt, Homo sapiens
  misc_RNA (1)...(19): siRNA sense strand
agacagagaacaagauuuc

SEQ ID NO: 943545 - RNA, 19 nt, Homo sapiens
  misc_RNA (1)...(19): siRNA sense strand
ucaauguggcucagagaua

SEQ ID NO: 943546 - RNA, 19 nt, Homo sapiens
  misc_RNA (1)...(19): siRNA sense strand
caagaucgcggaaaucaag

SEQ ID NO: 943547 - RNA, 19 nt, Homo sapiens
  misc_RNA (1)...(19): siRNA sense strand
ugacuacucgguccuguuu

SEQ ID NO: 943548 - RNA, 19 nt, Homo sapiens
  misc_RNA (1)...(19): siRNA sense strand
gaucaaacaaacccaggaa

SEQ ID NO: 943549 - RNA, 19 nt, Homo sapiens
  misc_RNA (1)...(19): siRNA sense strand
aaucaagucucuguuggaa

SEQ ID NO: 943550 - RNA, 19 nt, Homo sapiens
  misc_RNA (1)...(19): siRNA sense strand
gacaagaucgcggaaauca

SEQ ID NO: 943551 - RNA, 19 nt, Homo sapiens
  misc_RNA (1)...(19): siRNA sense strand
ugaagaaggcaaagagaga

SEQ ID NO: 943552 - RNA, 19 nt, Homo sapiens
  misc_RNA (1)...(19): siRNA sense strand
gagcgaacacaacuuagug

SEQ ID NO: 943553 - RNA, 19 nt, Homo sapiens
  misc_RNA (1)...(19): siRNA sense strand
caauguggcucagagauac

SEQ ID NO: 943554 - RNA, 19 nt, Homo sapiens
  misc_RNA (1)...(19): siRNA sense strand
ucaaacaaacccaggaaga

SEQ ID NO: 943555 - RNA, 19 nt, Homo sapiens
  misc_RNA (1)...(19): siRNA sense strand
acaagauuucucccuauua

SEQ ID NO: 943556 - RNA, 19 nt, Homo sapiens
  misc_RNA (1)...(19): siRNA sense strand
aacaagauuucucccuauu

SEQ ID NO: 943557 - RNA, 19 nt, Homo sapiens
  misc_RNA (1)...(19): siRNA sense strand
caagauugccggucucuac

SEQ ID NO: 943558 - RNA, 19 nt, Homo sapiens
  misc_RNA (1)...(19): siRNA sense strand
acaaguaugagguagauga

SEQ ID NO: 943559 - RNA, 19 nt, Homo sapiens
  misc_RNA (1)...(19): siRNA sense strand
gccaugccaccaacaagua

SEQ ID NO: 943560 - RNA, 19 nt, Homo sapiens
  misc_RNA (1)...(19): siRNA sense strand
gaugaagaaggcaaagaga

SEQ ID NO: 943561 - RNA, 19 nt, Homo sapiens
  misc_RNA (1)...(19): siRNA sense strand
gagcggaugcagacagaga

SEQ ID NO: 943562 - RNA, 19 nt, Homo sapiens
  misc_RNA (1)...(19): siRNA sense strand
uggacaagaucgcggaaau

SEQ ID NO: 943563 - RNA, 19 nt, Homo sapiens
  misc_RNA (1)...(19): siRNA sense strand
ggagcgaacacaacuuagu

SEQ ID NO: 943564 - RNA, 19 nt, Homo sapiens
  misc_RNA (1)...(19): siRNA sense strand
uugccggucucuacaauga

SEQ ID NO: 943565 - RNA, 19 nt, Homo sapiens
  misc_RNA (1)...(19): siRNA sense strand
ucggaaagcucuggacaag

SEQ ID NO: 943566 - RNA, 19 nt, Homo sapiens
  misc_RNA (1)...(19): siRNA sense strand
gcggauugcggccaagauu

SEQ ID NO: 943567 - RNA, 19 nt, Homo sapiens
  misc_RNA (1)...(19): siRNA sense strand
ggaugcagacagagaacaa

SEQ ID NO: 943568 - RNA, 19 nt, Homo sapiens
  misc_RNA (1)...(19): siRNA sense strand
gcggaaaucaagucucugu

SEQ ID NO: 943569 - RNA, 19 nt, Homo sapiens
  misc_RNA (1)...(19): siRNA sense strand
ggacaagaucgcggaaauc

SEQ ID NO: 943570 - RNA, 19 nt, Homo sapiens
  misc_RNA (1)...(19): siRNA sense strand
caaacaaacccaggaagag

SEQ ID NO: 943571 - RNA, 19 nt, Homo sapiens
  misc_RNA (1)...(19): siRNA sense strand
caccaacaaguaugaggua

SEQ ID NO: 943572 - RNA, 19 nt, Homo sapiens
  misc_RNA (1)...(19): siRNA sense strand
acuacucgguccuguuuga

SEQ ID NO: 943573 - RNA, 19 nt, Homo sapiens
  misc_RNA (1)...(19): siRNA sense strand
gcgaacacaacuuagugaa

SEQ ID NO: 943574 - RNA, 19 nt, Homo sapiens
  misc_RNA (1)...(19): siRNA sense strand
cgggaagccuggugacaag

SEQ ID NO: 943575 - RNA, 19 nt, Homo sapiens
  misc_RNA (1)...(19): siRNA sense strand
uuagugaacauccagaaga

SEQ ID NO: 943576 - RNA, 19 nt, Homo sapiens
  misc_RNA (1)...(19): siRNA sense strand
caacauccuucggaaagcu

SEQ ID NO: 943577 - RNA, 19 nt, Homo sapiens
  misc_RNA (1)...(19): siRNA sense strand
ucgcggaaaucaagucucu

SEQ ID NO: 943578 - RNA, 19 nt, Homo sapiens
  misc_RNA (1)...(19): siRNA sense strand
gcaacauccuucggaaagc

SEQ ID NO: 943579 - RNA, 19 nt, Homo sapiens
  misc_RNA (1)...(19): siRNA sense strand
ugaagacaccuccuaugca

SEQ ID NO: 943580 - RNA, 19 nt, Homo sapiens
  misc_RNA (1)...(19): siRNA sense strand
gaaggcaaagagagacaca

SEQ ID NO: 943581 - RNA, 19 nt, Homo sapiens
  misc_RNA (1)...(19): siRNA sense strand
ccaacaaguaugagguaga

SEQ ID NO: 943582 - RNA, 19 nt, Homo sapiens
  misc_RNA (1)...(19): siRNA sense strand
acucgguccuguuugaaga

SEQ ID NO: 943583 - RNA, 19 nt, Homo sapiens
  misc_RNA (1)...(19): siRNA sense strand
gugcaacauccuucggaaa

SEQ ID NO: 943584 - RNA, 19 nt, Homo sapiens
  misc_RNA (1)...(19): siRNA sense strand
agacaccuccuaugcagau

SEQ ID NO: 943585 - RNA, 19 nt, Homo sapiens
  misc_RNA (1)...(19): siRNA sense strand
aguaugagguagaugacau

SEQ ID NO: 943586 - RNA, 19 nt, Homo sapiens
  misc_RNA (1)...(19): siRNA sense strand
ggauugcggccaagauugc

SEQ ID NO: 943587 - RNA, 19 nt, Homo sapiens
  misc_RNA (1)...(19): siRNA sense strand
gcagaaggccuuaaagaaa

SEQ ID NO: 943588 - RNA, 19 nt, Homo sapiens
  misc_RNA (1)...(19): siRNA sense strand
ggaaacggcuggccuccaa

SEQ ID NO: 943589 - RNA, 19 nt, Homo sapiens
  misc_RNA (1)...(19): siRNA sense strand
gaaaaucgccuucauggua

SEQ ID NO: 943590 - RNA, 19 nt, Homo sapiens
  misc_RNA (1)...(19): siRNA sense strand
gcaaggagcggcagugcua

SEQ ID NO: 943591 - RNA, 19 nt, Homo sapiens
  misc_RNA (1)...(19): siRNA sense strand
agaaaugccuggaguugaa

SEQ ID NO: 943592 - RNA, 19 nt, Homo sapiens
  misc_RNA (1)...(19): siRNA sense strand
cagaaggccuuaaagaaag

SEQ ID NO: 943593 - RNA, 19 nt, Homo sapiens
  misc_RNA (1)...(19): siRNA sense strand
ccacaagacagucaaagaa

SEQ ID NO: 943594 - RNA, 19 nt, Homo sapiens
  misc_RNA (1)...(19): siRNA sense strand
gaacggcgaccucaagaag

SEQ ID NO: 943595 - RNA, 19 nt, Homo sapiens
  misc_RNA (1)...(19): siRNA sense strand
gcagaaaugccuggaguug

SEQ ID NO: 943596 - RNA, 19 nt, Homo sapiens
  misc_RNA (1)...(19): siRNA sense strand
ccacggaacauuuggaaga

SEQ ID NO: 943597 - RNA, 19 nt, Homo sapiens
  misc_RNA (1)...(19): siRNA sense strand
agaagcagcuccacgaaag

SEQ ID NO: 943598 - RNA, 19 nt, Homo sapiens
  misc_RNA (1)...(19): siRNA sense strand
acaagacagucaaagaaga

SEQ ID NO: 943599 - RNA, 19 nt, Homo sapiens
  misc_RNA (1)...(19): siRNA sense strand
cgucagcagugcagaaaug

SEQ ID NO: 943600 - RNA, 19 nt, Homo sapiens
  misc_RNA (1)...(19): siRNA sense strand
ccacagaggagccaucuca

SEQ ID NO: 943601 - RNA, 19 nt, Homo sapiens
  misc_RNA (1)...(19): siRNA sense strand
cagcagaaggccuuaaaga

SEQ ID NO: 943602 - RNA, 19 nt, Homo sapiens
  misc_RNA (1)...(19): siRNA sense strand
cgacaggagcggaagagaa

SEQ ID NO: 943603 - RNA, 19 nt, Homo sapiens
  misc_RNA (1)...(19): siRNA sense strand
ucacagcgagagccaauga

SEQ ID NO: 943604 - RNA, 19 nt, Homo sapiens
  misc_RNA (1)...(19): siRNA sense strand
gacaggagcggaagagaag

SEQ ID NO: 943605 - RNA, 19 nt, Homo sapiens
  misc_RNA (1)...(19): siRNA sense strand
agaaggccuuaaagaaaga

SEQ ID NO: 943606 - RNA, 19 nt, Homo sapiens
  misc_RNA (1)...(19): siRNA sense strand
aagaagaggagaagcagaa

SEQ ID NO: 943607 - RNA, 19 nt, Homo sapiens
  misc_RNA (1)...(19): siRNA sense strand
caagaagcagcuccacgaa

SEQ ID NO: 943608 - RNA, 19 nt, Homo sapiens
  misc_RNA (1)...(19): siRNA sense strand
cacggaacauuuggaagaa

SEQ ID NO: 943609 - RNA, 19 nt, Homo sapiens
  misc_RNA (1)...(19): siRNA sense strand
ucaaagaagaggagaagca

SEQ ID NO: 943610 - RNA, 19 nt, Homo sapiens
  misc_RNA (1)...(19): siRNA sense strand
aaacaagcuuugggaacga

SEQ ID NO: 943611 - RNA, 19 nt, Homo sapiens
  misc_RNA (1)...(19): siRNA sense strand
gagcggaagagaagaagca

SEQ ID NO: 943612 - RNA, 19 nt, Homo sapiens
  misc_RNA (1)...(19): siRNA sense strand
acucuuaugucacccacaa

SEQ ID NO: 943613 - RNA, 19 nt, Homo sapiens
  misc_RNA (1)...(19): siRNA sense strand
uggccaucgugcacucuua

SEQ ID NO: 943614 - RNA, 19 nt, Homo sapiens
  misc_RNA (1)...(19): siRNA sense strand
cagaaaugccuggaguuga

SEQ ID NO: 943615 - RNA, 19 nt, Homo sapiens
  misc_RNA (1)...(19): siRNA sense strand
gaacgagaucacccacgau

SEQ ID NO: 943616 - RNA, 19 nt, Homo sapiens
  misc_RNA (1)...(19): siRNA sense strand
caagacagucaaagaagag

SEQ ID NO: 943617 - RNA, 19 nt, Homo sapiens
  misc_RNA (1)...(19): siRNA sense strand
guagcgcuaggccugguua

SEQ ID NO: 943618 - RNA, 19 nt, Homo sapiens
  misc_RNA (1)...(19): siRNA sense strand
gccagcagaaggccuuaaa

SEQ ID NO: 943619 - RNA, 19 nt, Homo sapiens
  misc_RNA (1)...(19): siRNA sense strand
ccagaacggcgaccucaag

SEQ ID NO: 943620 - RNA, 19 nt, Homo sapiens
  misc_RNA (1)...(19): siRNA sense strand
gccaaagacucugauucca

SEQ ID NO: 943621 - RNA, 19 nt, Homo sapiens
  misc_RNA (1)...(19): siRNA sense strand
cggcuggccuccaacuauc

SEQ ID NO: 943622 - RNA, 19 nt, Homo sapiens
  misc_RNA (1)...(19): siRNA sense strand
cgagaucacccacgaugag

SEQ ID NO: 943623 - RNA, 19 nt, Homo sapiens
  misc_RNA (1)...(19): siRNA sense strand
agcagaaggccuuaaagaa

SEQ ID NO: 943624 - RNA, 19 nt, Homo sapiens
  misc_RNA (1)...(19): siRNA sense strand
gaggaccccugcuggaaga

SEQ ID NO: 943625 - RNA, 19 nt, Homo sapiens
  misc_RNA (1)...(19): siRNA sense strand
ucagugacagcaucaaagu

SEQ ID NO: 943626 - RNA, 19 nt, Homo sapiens
  misc_RNA (1)...(19): siRNA sense strand
aagaagcagcuccacgaaa

SEQ ID NO: 943627 - RNA, 19 nt, Homo sapiens
  misc_RNA (1)...(19): siRNA sense strand
gguuaccacggaacauuug

SEQ ID NO: 943628 - RNA, 19 nt, Homo sapiens
  misc_RNA (1)...(19): siRNA sense strand
ccgugucuguggucaguga

SEQ ID NO: 943629 - RNA, 19 nt, Homo sapiens
  misc_RNA (1)...(19): siRNA sense strand
gccuggaguugaagacaag

SEQ ID NO: 943630 - RNA, 19 nt, Homo sapiens
  misc_RNA (1)...(19): siRNA sense strand
ggccaaagacucugauucc

SEQ ID NO: 943631 - RNA, 19 nt, Homo sapiens
  misc_RNA (1)...(19): siRNA sense strand
cagaacggcgaccucaaga

SEQ ID NO: 943632 - RNA, 19 nt, Homo sapiens
  misc_RNA (1)...(19): siRNA sense strand
caucaucauucagccucaa

SEQ ID NO: 943633 - RNA, 19 nt, Homo sapiens
  misc_RNA (1)...(19): siRNA sense strand
caggagcggaagagaagaa

SEQ ID NO: 943634 - RNA, 19 nt, Homo sapiens
  misc_RNA (1)...(19): siRNA sense strand
cacaagacagucaaagaag

SEQ ID NO: 943635 - RNA, 19 nt, Homo sapiens
  misc_RNA (1)...(19): siRNA sense strand
gcaguuggcucuauaguuu

SEQ ID NO: 943636 - RNA, 19 nt, Homo sapiens
  misc_RNA (1)...(19): siRNA sense strand
aaacucagcucuguauuua

SEQ ID NO: 943637 - RNA, 19 nt, Homo sapiens
  misc_RNA (1)...(19): siRNA sense strand
gaaauacgaugaaccuaau

SEQ ID NO: 943638 - RNA, 19 nt, Homo sapiens
  misc_RNA (1)...(19): siRNA sense strand
aaagucagguuuccucuua

SEQ ID NO: 943639 - RNA, 19 nt, Homo sapiens
  misc_RNA (1)...(19): siRNA sense strand
gagcagaggaucagguuua

SEQ ID NO: 943640 - RNA, 19 nt, Homo sapiens
  misc_RNA (1)...(19): siRNA sense strand
gauuauagcuggacagaca

SEQ ID NO: 943641 - RNA, 19 nt, Homo sapiens
  misc_RNA (1)...(19): siRNA sense strand
cgaauggacugcuauaaug

SEQ ID NO: 943642 - RNA, 19 nt, Homo sapiens
  misc_RNA (1)...(19): siRNA sense strand
gaaacucagcucuguauuu

SEQ ID NO: 943643 - RNA, 19 nt, Homo sapiens
  misc_RNA (1)...(19): siRNA sense strand
caacuaacaugcuugaauc

SEQ ID NO: 943644 - RNA, 19 nt, Homo sapiens
  misc_RNA (1)...(19): siRNA sense strand
gaagaaagaaacaugacua

SEQ ID NO: 943645 - RNA, 19 nt, Homo sapiens
  misc_RNA (1)...(19): siRNA sense strand
ggaaugagguaccaucuac

SEQ ID NO: 943646 - RNA, 19 nt, Homo sapiens
  misc_RNA (1)...(19): siRNA sense strand
uggacaauguggaauauua

SEQ ID NO: 943647 - RNA, 19 nt, Homo sapiens
  misc_RNA (1)...(19): siRNA sense strand
gcagucaggugguugaaau

SEQ ID NO: 943648 - RNA, 19 nt, Homo sapiens
  misc_RNA (1)...(19): siRNA sense strand
uaacacaucuucucaacca

SEQ ID NO: 943649 - RNA, 19 nt, Homo sapiens
  misc_RNA (1)...(19): siRNA sense strand
gcacaagaccuagaagaaa

SEQ ID NO: 943650 - RNA, 19 nt, Homo sapiens
  misc_RNA (1)...(19): siRNA sense strand
gaaagcaacugcagaugac

SEQ ID NO: 943651 - RNA, 19 nt, Homo sapiens
  misc_RNA (1)...(19): siRNA sense strand
gguacaagcugaaccacuu

SEQ ID NO: 943652 - RNA, 19 nt, Homo sapiens
  misc_RNA (1)...(19): siRNA sense strand
ggacugcuauaauguagug

SEQ ID NO: 943653 - RNA, 19 nt, Homo sapiens
  misc_RNA (1)...(19): siRNA sense strand
gaagaaucaugggcuggua

SEQ ID NO: 943654 - RNA, 19 nt, Homo sapiens
  misc_RNA (1)...(19): siRNA sense strand
gcuagaauuuccgugaaua

SEQ ID NO: 943655 - RNA, 19 nt, Homo sapiens
  misc_RNA (1)...(19): siRNA sense strand
ccaauggccuaaucuaugu

SEQ ID NO: 943656 - RNA, 19 nt, Homo sapiens
  misc_RNA (1)...(19): siRNA sense strand
gauugaaccugugaagaaa

SEQ ID NO: 943657 - RNA, 19 nt, Homo sapiens
  misc_RNA (1)...(19): siRNA sense strand
ggaccgagaagaacuugua

SEQ ID NO: 943658 - RNA, 19 nt, Homo sapiens
  misc_RNA (1)...(19): siRNA sense strand
gaauuuccgugaauagcaa

SEQ ID NO: 943659 - RNA, 19 nt, Homo sapiens
  misc_RNA (1)...(19): siRNA sense strand
gaaacaugacuaccgcaua

SEQ ID NO: 943660 - RNA, 19 nt, Homo sapiens
  misc_RNA (1)...(19): siRNA sense strand
ccuaaucgccagccauuua

SEQ ID NO: 943661 - RNA, 19 nt, Homo sapiens
  misc_RNA (1)...(19): siRNA sense strand
gcuauaauguagugaagga

SEQ ID NO: 943662 - RNA, 19 nt, Homo sapiens
  misc_RNA (1)...(19): siRNA sense strand
aaacaugacuaccgcauag

SEQ ID NO: 943663 - RNA, 19 nt, Homo sapiens
  misc_RNA (1)...(19): siRNA sense strand
caaauugucuugguauaag

SEQ ID NO: 943664 - RNA, 19 nt, Homo sapiens
  misc_RNA (1)...(19): siRNA sense strand
gaagagacccuugaaacau

SEQ ID NO: 943665 - RNA, 19 nt, Homo sapiens
  misc_RNA (1)...(19): siRNA sense strand
gaaguagaacucaaagaug

SEQ ID NO: 943666 - RNA, 19 nt, Homo sapiens
  misc_RNA (1)...(19): siRNA sense strand
acucagcucuguauuuauu

SEQ ID NO: 943667 - RNA, 19 nt, Homo sapiens
  misc_RNA (1)...(19): siRNA sense strand
caaagaugcugaaccugau

SEQ ID NO: 943668 - RNA, 19 nt, Homo sapiens
  misc_RNA (1)...(19): siRNA sense strand
cagaggaucagguuuauga

SEQ ID NO: 943669 - RNA, 19 nt, Homo sapiens
  misc_RNA (1)...(19): siRNA sense strand
guaggaaacucagcucugu

SEQ ID NO: 943670 - RNA, 19 nt, Homo sapiens
  misc_RNA (1)...(19): siRNA sense strand
guagauggcacaagaccua

SEQ ID NO: 943671 - RNA, 19 nt, Homo sapiens
  misc_RNA (1)...(19): siRNA sense strand
ugaaauacgaugaaccuaa

SEQ ID NO: 943672 - RNA, 19 nt, Homo sapiens
  misc_RNA (1)...(19): siRNA sense strand
gaacaacugguggaauuug

SEQ ID NO: 943673 - RNA, 19 nt, Homo sapiens
  misc_RNA (1)...(19): siRNA sense strand
ggaaggguguaacagugaa

SEQ ID NO: 943674 - RNA, 19 nt, Homo sapiens
  misc_RNA (1)...(19): siRNA sense strand
gaauuugcuuauacugcua

SEQ ID NO: 943675 - RNA, 19 nt, Homo sapiens
  misc_RNA (1)...(19): siRNA sense strand
ccacagucuuguagauauu

SEQ ID NO: 943676 - RNA, 19 nt, Homo sapiens
  misc_RNA (1)...(19): siRNA sense strand
uaaagcgaauggacugcua

SEQ ID NO: 943677 - RNA, 19 nt, Homo sapiens
  misc_RNA (1)...(19): siRNA sense strand
caaccacagucuuguagau

SEQ ID NO: 943678 - RNA, 19 nt, Homo sapiens
  misc_RNA (1)...(19): siRNA sense strand
ucaggguguuggucgauua

SEQ ID NO: 943679 - RNA, 19 nt, Homo sapiens
  misc_RNA (1)...(19): siRNA sense strand
aaggauagcugguauucga

SEQ ID NO: 943680 - RNA, 19 nt, Homo sapiens
  misc_RNA (1)...(19): siRNA sense strand
gguuuccucuuauaucaaa

SEQ ID NO: 943681 - RNA, 19 nt, Homo sapiens
  misc_RNA (1)...(19): siRNA sense strand
uugaacaacugguggaauu

SEQ ID NO: 943682 - RNA, 19 nt, Homo sapiens
  misc_RNA (1)...(19): siRNA sense strand
aaagauaccugcucaucgu

SEQ ID NO: 943683 - RNA, 19 nt, Homo sapiens
  misc_RNA (1)...(19): siRNA sense strand
guucacaacuaacaugcuu

SEQ ID NO: 943684 - RNA, 19 nt, Homo sapiens
  misc_RNA (1)...(19): siRNA sense strand
caaaugaagagacccuuga

SEQ ID NO: 943685 - RNA, 19 nt, Homo sapiens
  misc_RNA (1)...(19): siRNA sense strand
ugaaagcaacugcagauga

SEQ ID NO: 943686 - RNA, 19 nt, Homo sapiens
  misc_RNA (1)...(19): siRNA sense strand
acugaaagcuggcacacaa

SEQ ID NO: 943687 - RNA, 19 nt, Homo sapiens
  misc_RNA (1)...(19): siRNA sense strand
gcgaauggacugcuauaau

SEQ ID NO: 943688 - RNA, 19 nt, Homo sapiens
  misc_RNA (1)...(19): siRNA sense strand
guacaagcugaaccacuua

SEQ ID NO: 943689 - RNA, 19 nt, Homo sapiens
  misc_RNA (1)...(19): siRNA sense strand
cagguuuccucuuauauca

SEQ ID NO: 943690 - RNA, 19 nt, Homo sapiens
  misc_RNA (1)...(19): siRNA sense strand
gcagaaggcaaaauuuaua

SEQ ID NO: 943691 - RNA, 19 nt, Homo sapiens
  misc_RNA (1)...(19): siRNA sense strand
cacaagaccuagaagaaag

SEQ ID NO: 943692 - RNA, 19 nt, Homo sapiens
  misc_RNA (1)...(19): siRNA sense strand
aagagacccuugaaacaug

SEQ ID NO: 943693 - RNA, 19 nt, Homo sapiens
  misc_RNA (1)...(19): siRNA sense strand
gaugcugaaccugauauua

SEQ ID NO: 943694 - RNA, 19 nt, Homo sapiens
  misc_RNA (1)...(19): siRNA sense strand
agucagguuuccucuuaua

SEQ ID NO: 943695 - RNA, 19 nt, Homo sapiens
  misc_RNA (1)...(19): siRNA sense strand
gcagcgaaccaauaucaga

SEQ ID NO: 943696 - RNA, 19 nt, Homo sapiens
  misc_RNA (1)...(19): siRNA sense strand
gcuuauacugcuagaauuu

SEQ ID NO: 943697 - RNA, 19 nt, Homo sapiens
  misc_RNA (1)...(19): siRNA sense strand
caagccacauaaaucuaaa

SEQ ID NO: 943698 - RNA, 19 nt, Homo sapiens
  misc_RNA (1)...(19): siRNA sense strand
uagguggucuggacaaugu

SEQ ID NO: 943699 - RNA, 19 nt, Homo sapiens
  misc_RNA (1)...(19): siRNA sense strand
ugaaguagaacucaaagau

SEQ ID NO: 943700 - RNA, 19 nt, Homo sapiens
  misc_RNA (1)...(19): siRNA sense strand
ggaugcagcgaaccaauau

SEQ ID NO: 943701 - RNA, 19 nt, Homo sapiens
  misc_RNA (1)...(19): siRNA sense strand
caacugcagaugacuuuau

SEQ ID NO: 943702 - RNA, 19 nt, Homo sapiens
  misc_RNA (1)...(19): siRNA sense strand
gaauggacugcuauaaugu

SEQ ID NO: 943703 - RNA, 19 nt, Homo sapiens
  misc_RNA (1)...(19): siRNA sense strand
gcuucaaauugucuuggua

SEQ ID NO: 943704 - RNA, 19 nt, Homo sapiens
  misc_RNA (1)...(19): siRNA sense strand
ucaagacaauccugaaugc

SEQ ID NO: 943705 - RNA, 19 nt, Homo sapiens
  misc_RNA (1)...(19): siRNA sense strand
ugaagagacccuugaaaca

SEQ ID NO: 943706 - RNA, 19 nt, Homo sapiens
  misc_RNA (1)...(19): siRNA sense strand
cuuaauuccugugaaguuu

SEQ ID NO: 943707 - RNA, 19 nt, Homo sapiens
  misc_RNA (1)...(19): siRNA sense strand
gauaccugcucaucguguu

SEQ ID NO: 943708 - RNA, 19 nt, Homo sapiens
  misc_RNA (1)...(19): siRNA sense strand
agaacaaguugaugcuuca

SEQ ID NO: 943709 - RNA, 19 nt, Homo sapiens
  misc_RNA (1)...(19): siRNA sense strand
cgaauauaauaccgaaaca

SEQ ID NO: 943710 - RNA, 19 nt, Homo sapiens
  misc_RNA (1)...(19): siRNA sense strand
gcuaugauacgagaacuga

SEQ ID NO: 943711 - RNA, 19 nt, Homo sapiens
  misc_RNA (1)...(19): siRNA sense strand
gagguaccaucuacugucu

SEQ ID NO: 943712 - RNA, 19 nt, Homo sapiens
  misc_RNA (1)...(19): siRNA sense strand
agauugaaccugugaagaa

SEQ ID NO: 943713 - RNA, 19 nt, Homo sapiens
  misc_RNA (1)...(19): siRNA sense strand
ugagcuguguccaaugauu

SEQ ID NO: 943714 - RNA, 19 nt, Homo sapiens
  misc_RNA (1)...(19): siRNA sense strand
ugacaagccacauaaaucu

SEQ ID NO: 943715 - RNA, 19 nt, Homo sapiens
  misc_RNA (1)...(19): siRNA sense strand
ggcacaagaccuagaagaa

SEQ ID NO: 943716 - RNA, 19 nt, Homo sapiens
  misc_RNA (1)...(19): siRNA sense strand
gagagcagaggaucagguu

SEQ ID NO: 943717 - RNA, 19 nt, Homo sapiens
  misc_RNA (1)...(19): siRNA sense strand
agauuguccugaauugaaa

SEQ ID NO: 943718 - RNA, 19 nt, Homo sapiens
  misc_RNA (1)...(19): siRNA sense strand
uagauuguccugaauugaa

SEQ ID NO: 943719 - RNA, 19 nt, Homo sapiens
  misc_RNA (1)...(19): siRNA sense strand
acaagccacauaaaucuaa

SEQ ID NO: 943720 - RNA, 19 nt, Homo sapiens
  misc_RNA (1)...(19): siRNA sense strand
acugagcuguguccaauga

SEQ ID NO: 943721 - RNA, 19 nt, Homo sapiens
  misc_RNA (1)...(19): siRNA sense strand
ccacagaaacauggacuga

SEQ ID NO: 943722 - RNA, 19 nt, Homo sapiens
  misc_RNA (1)...(19): siRNA sense strand
gcucucaaccacagucuug

SEQ ID NO: 943723 - RNA, 19 nt, Homo sapiens
  misc_RNA (1)...(19): siRNA sense strand
gacaagccacauaaaucua

SEQ ID NO: 943724 - RNA, 19 nt, Homo sapiens
  misc_RNA (1)...(19): siRNA sense strand
ucuagauuguccugaauug

SEQ ID NO: 943725 - RNA, 19 nt, Homo sapiens
  misc_RNA (1)...(19): siRNA sense strand
uaauuuguguugucgauac

SEQ ID NO: 943726 - RNA, 19 nt, Homo sapiens
  misc_RNA (1)...(19): siRNA sense strand
agugaaaugugcagcaguu

SEQ ID NO: 943727 - RNA, 19 nt, Homo sapiens
  misc_RNA (1)...(19): siRNA sense strand
ggauagcugguauucgaaa

SEQ ID NO: 943728 - RNA, 19 nt, Homo sapiens
  misc_RNA (1)...(19): siRNA sense strand
ugcugaaccugauauuauu

SEQ ID NO: 943729 - RNA, 19 nt, Homo sapiens
  misc_RNA (1)...(19): siRNA sense strand
ucaggugguugaaauacga

SEQ ID NO: 943730 - RNA, 19 nt, Homo sapiens
  misc_RNA (1)...(19): siRNA sense strand
ugguugauauccuugcuaa

SEQ ID NO: 943731 - RNA, 19 nt, Homo sapiens
  misc_RNA (1)...(19): siRNA sense strand
uaugauacgagaacugaaa

SEQ ID NO: 943732 - RNA, 19 nt, Homo sapiens
  misc_RNA (1)...(19): siRNA sense strand
uuauacaucuggagguuca

SEQ ID NO: 943733 - RNA, 19 nt, Homo sapiens
  misc_RNA (1)...(19): siRNA sense strand
gugcagcaguuggcucuau

SEQ ID NO: 943734 - RNA, 19 nt, Homo sapiens
  misc_RNA (1)...(19): siRNA sense strand
gcucuauaguuuaugucuu

SEQ ID NO: 943735 - RNA, 19 nt, Homo sapiens
  misc_RNA (1)...(19): siRNA sense strand
ucaaucagcuucauaaagu

SEQ ID NO: 943736 - RNA, 19 nt, Homo sapiens
  misc_RNA (1)...(19): siRNA sense strand
ccauuuaucucaucagguu

SEQ ID NO: 943737 - RNA, 19 nt, Homo sapiens
  misc_RNA (1)...(19): siRNA sense strand
caacuucuuccuccuuaua

SEQ ID NO: 943738 - RNA, 19 nt, Homo sapiens
  misc_RNA (1)...(19): siRNA sense strand
ccagaaagaggcaaauuug

SEQ ID NO: 943739 - RNA, 19 nt, Homo sapiens
  misc_RNA (1)...(19): siRNA sense strand
ucaauacugucaccaccua

SEQ ID NO: 943740 - RNA, 19 nt, Homo sapiens
  misc_RNA (1)...(19): siRNA sense strand
gaaccugcaugagccagaa

SEQ ID NO: 943741 - RNA, 19 nt, Homo sapiens
  misc_RNA (1)...(19): siRNA sense strand
gcucucagaugccucacaa

SEQ ID NO: 943742 - RNA, 19 nt, Homo sapiens
  misc_RNA (1)...(19): siRNA sense strand
gaaucgaucugugggacuu

SEQ ID NO: 943743 - RNA, 19 nt, Homo sapiens
  misc_RNA (1)...(19): siRNA sense strand
uugaagcaguugagaagua

SEQ ID NO: 943744 - RNA, 19 nt, Homo sapiens
  misc_RNA (1)...(19): siRNA sense strand
ccagcuggcuccugcaaga

SEQ ID NO: 943745 - RNA, 19 nt, Homo sapiens
  misc_RNA (1)...(19): siRNA sense strand
gcaaguggagaaugaguau

SEQ ID NO: 943746 - RNA, 19 nt, Homo sapiens
  misc_RNA (1)...(19): siRNA sense strand
gaaagaggcaaauuugacu

SEQ ID NO: 943747 - RNA, 19 nt, Homo sapiens
  misc_RNA (1)...(19): siRNA sense strand
ccaacaagagcuucauuga

SEQ ID NO: 943748 - RNA, 19 nt, Homo sapiens
  misc_RNA (1)...(19): siRNA sense strand
gccagaaagaggcaaauuu

SEQ ID NO: 943749 - RNA, 19 nt, Homo sapiens
  misc_RNA (1)...(19): siRNA sense strand
gcccgugucucuccuggaa

SEQ ID NO: 943750 - RNA, 19 nt, Homo sapiens
  misc_RNA (1)...(19): siRNA sense strand
gaccucugauggugagaaa

SEQ ID NO: 943751 - RNA, 19 nt, Homo sapiens
  misc_RNA (1)...(19): siRNA sense strand
ggacaaccaacaagagcuu

SEQ ID NO: 943752 - RNA, 19 nt, Homo sapiens
  misc_RNA (1)...(19): siRNA sense strand
ugaagcaguugagaaguau

SEQ ID NO: 943753 - RNA, 19 nt, Homo sapiens
  misc_RNA (1)...(19): siRNA sense strand
ccacaaggcccugcugaga

SEQ ID NO: 943754 - RNA, 19 nt, Homo sapiens
  misc_RNA (1)...(19): siRNA sense strand
uuuaauuggucucaucuga

SEQ ID NO: 943755 - RNA, 19 nt, Homo sapiens
  misc_RNA (1)...(19): siRNA sense strand
ccagggagccaguauagau

SEQ ID NO: 943756 - RNA, 19 nt, Homo sapiens
  misc_RNA (1)...(19): siRNA sense strand
gguuuaagcaggaagagaa

SEQ ID NO: 943757 - RNA, 19 nt, Homo sapiens
  misc_RNA (1)...(19): siRNA sense strand
cagccuagguuuaauuggu

SEQ ID NO: 943758 - RNA, 19 nt, Homo sapiens
  misc_RNA (1)...(19): siRNA sense strand
cagaaagaggcaaauuuga

SEQ ID NO: 943759 - RNA, 19 nt, Homo sapiens
  misc_RNA (1)...(19): siRNA sense strand
ucaccaggauacuuucaau

SEQ ID NO: 943760 - RNA, 19 nt, Homo sapiens
  misc_RNA (1)...(19): siRNA sense strand
gcaacuucuuccuccuuau

SEQ ID NO: 943761 - RNA, 19 nt, Homo sapiens
  misc_RNA (1)...(19): siRNA sense strand
acaaggcccugcugagaag

SEQ ID NO: 943762 - RNA, 19 nt, Homo sapiens
  misc_RNA (1)...(19): siRNA sense strand
ugagaaacaugugcugagu

SEQ ID NO: 943763 - RNA, 19 nt, Homo sapiens
  misc_RNA (1)...(19): siRNA sense strand
ggccacaaguuccugaucu

SEQ ID NO: 943764 - RNA, 19 nt, Homo sapiens
  misc_RNA (1)...(19): siRNA sense strand
gccacaaguuccugaucuu

SEQ ID NO: 943765 - RNA, 19 nt, Homo sapiens
  misc_RNA (1)...(19): siRNA sense strand
gccuguggcuucaauacug

SEQ ID NO: 943766 - RNA, 19 nt, Homo sapiens
  misc_RNA (1)...(19): siRNA sense strand
gagugauuccucuccagua

SEQ ID NO: 943767 - RNA, 19 nt, Homo sapiens
  misc_RNA (1)...(19): siRNA sense strand
gagaacuucaugcuuggaa

SEQ ID NO: 943768 - RNA, 19 nt, Homo sapiens
  misc_RNA (1)...(19): siRNA sense strand
agcaacuucuuccuccuua

SEQ ID NO: 943769 - RNA, 19 nt, Homo sapiens
  misc_RNA (1)...(19): siRNA sense strand
gauuguggagcuucucuug

SEQ ID NO: 943770 - RNA, 19 nt, Homo sapiens
  misc_RNA (1)...(19): siRNA sense strand
cggugcaaguggagaauga

SEQ ID NO: 943771 - RNA, 19 nt, Homo sapiens
  misc_RNA (1)...(19): siRNA sense strand
cacaaggcccugcugagaa

SEQ ID NO: 943772 - RNA, 19 nt, Homo sapiens
  misc_RNA (1)...(19): siRNA sense strand
ggacuuggaacugaaagca

SEQ ID NO: 943773 - RNA, 19 nt, Homo sapiens
  misc_RNA (1)...(19): siRNA sense strand
aagcaguugagaaguauuu

SEQ ID NO: 943774 - RNA, 19 nt, Homo sapiens
  misc_RNA (1)...(19): siRNA sense strand
aggcaaauuugacuucucu

SEQ ID NO: 943775 - RNA, 19 nt, Homo sapiens
  misc_RNA (1)...(19): siRNA sense strand
cccuacaucugcagugaga

SEQ ID NO: 943776 - RNA, 19 nt, Homo sapiens
  misc_RNA (1)...(19): siRNA sense strand
gaggcaaauuugacuucuc

SEQ ID NO: 943777 - RNA, 19 nt, Homo sapiens
  misc_RNA (1)...(19): siRNA sense strand
ccgugucucuccuggaaga

SEQ ID NO: 943778 - RNA, 19 nt, Homo sapiens
  misc_RNA (1)...(19): siRNA sense strand
caaucagcuucauaaaguc

SEQ ID NO: 943779 - RNA, 19 nt, Homo sapiens
  misc_RNA (1)...(19): siRNA sense strand
ccaggauacuuucaaucag

SEQ ID NO: 943780 - RNA, 19 nt, Homo sapiens
  misc_RNA (1)...(19): siRNA sense strand
gcugaguggccacaccaaa

SEQ ID NO: 943781 - RNA, 19 nt, Homo sapiens
  misc_RNA (1)...(19): siRNA sense strand
cgucccagccuagguuuaa

SEQ ID NO: 943782 - RNA, 19 nt, Homo sapiens
  misc_RNA (1)...(19): siRNA sense strand
ucacaagcagcaacuucuu

SEQ ID NO: 943783 - RNA, 19 nt, Homo sapiens
  misc_RNA (1)...(19): siRNA sense strand
aaacuucaccaggauacuu

SEQ ID NO: 943784 - RNA, 19 nt, Homo sapiens
  misc_RNA (1)...(19): siRNA sense strand
agaaagaggcaaauuugac

SEQ ID NO: 943785 - RNA, 19 nt, Homo sapiens
  misc_RNA (1)...(19): siRNA sense strand
caccugauucccagaguga

SEQ ID NO: 943786 - RNA, 19 nt, Homo sapiens
  misc_RNA (1)...(19): siRNA sense strand
cauugaagcaguugagaag

SEQ ID NO: 943787 - RNA, 19 nt, Homo sapiens
  misc_RNA (1)...(19): siRNA sense strand
ccugauggccgcagagauc

SEQ ID NO: 943788 - RNA, 19 nt, Homo sapiens
  misc_RNA (1)...(19): siRNA sense strand
ccacaaguuccugaucuuc

SEQ ID NO: 943789 - RNA, 19 nt, Homo sapiens
  misc_RNA (1)...(19): siRNA sense strand
ggggcuccauccacuauuu

SEQ ID NO: 943790 - RNA, 19 nt, Homo sapiens
  misc_RNA (1)...(19): siRNA sense strand
gaagcaguugagaaguauu

SEQ ID NO: 943791 - RNA, 19 nt, Homo sapiens
  misc_RNA (1)...(19): siRNA sense strand
caacauguuucuucaguau

SEQ ID NO: 943792 - RNA, 19 nt, Homo sapiens
  misc_RNA (1)...(19): siRNA sense strand
acagagcacuugcgguuua

SEQ ID NO: 943793 - RNA, 19 nt, Homo sapiens
  misc_RNA (1)...(19): siRNA sense strand
gauccgcucugcccuguuu

SEQ ID NO: 943794 - RNA, 19 nt, Homo sapiens
  misc_RNA (1)...(19): siRNA sense strand
gcaacuggccaacauguuu

SEQ ID NO: 943795 - RNA, 19 nt, Homo sapiens
  misc_RNA (1)...(19): siRNA sense strand
gcucugcccuguuugagaa

SEQ ID NO: 943796 - RNA, 19 nt, Homo sapiens
  misc_RNA (1)...(19): siRNA sense strand
ggaauuggagcgagaagaa

SEQ ID NO: 943797 - RNA, 19 nt, Homo sapiens
  misc_RNA (1)...(19): siRNA sense strand
caucaaagguuuccguuac

SEQ ID NO: 943798 - RNA, 19 nt, Homo sapiens
  misc_RNA (1)...(19): siRNA sense strand
agagaaaucugcaaagcau

SEQ ID NO: 943799 - RNA, 19 nt, Homo sapiens
  misc_RNA (1)...(19): siRNA sense strand
ccaacauguuucuucagua

SEQ ID NO: 943800 - RNA, 19 nt, Homo sapiens
  misc_RNA (1)...(19): siRNA sense strand
ggaccggccuuuauucacu

SEQ ID NO: 943801 - RNA, 19 nt, Homo sapiens
  misc_RNA (1)...(19): siRNA sense strand
aaaugcaucccaacaauga

SEQ ID NO: 943802 - RNA, 19 nt, Homo sapiens
  misc_RNA (1)...(19): siRNA sense strand
cgacguacccaaggaauug

SEQ ID NO: 943803 - RNA, 19 nt, Homo sapiens
  misc_RNA (1)...(19): siRNA sense strand
gccaacauguuucuucagu

SEQ ID NO: 943804 - RNA, 19 nt, Homo sapiens
  misc_RNA (1)...(19): siRNA sense strand
gcauggguccggugccuuu

SEQ ID NO: 943805 - RNA, 19 nt, Homo sapiens
  misc_RNA (1)...(19): siRNA sense strand
caguuuauuucguacacua

SEQ ID NO: 943806 - RNA, 19 nt, Homo sapiens
  misc_RNA (1)...(19): siRNA sense strand
ggucacgagucaaguacug

SEQ ID NO: 943807 - RNA, 19 nt, Homo sapiens
  misc_RNA (1)...(19): siRNA sense strand
cuucgucgccaguuuauuu

SEQ ID NO: 943808 - RNA, 19 nt, Homo sapiens
  misc_RNA (1)...(19): siRNA sense strand
uaaaaugcaucccaacaau

SEQ ID NO: 943809 - RNA, 19 nt, Homo sapiens
  misc_RNA (1)...(19): siRNA sense strand
ucgcuuaacuacaucaaag

SEQ ID NO: 943810 - RNA, 19 nt, Homo sapiens
  misc_RNA (1)...(19): siRNA sense strand
gaccauggcagaacugagu

SEQ ID NO: 943811 - RNA, 19 nt, Homo sapiens
  misc_RNA (1)...(19): siRNA sense strand
gcugggaccggccuuuauu

SEQ ID NO: 943812 - RNA, 19 nt, Homo sapiens
  misc_RNA (1)...(19): siRNA sense strand
ggccggaacgucaguguga

SEQ ID NO: 943813 - RNA, 19 nt, Homo sapiens
  misc_RNA (1)...(19): siRNA sense strand
gucaaguacuggccggauu

SEQ ID NO: 943814 - RNA, 19 nt, Homo sapiens
  misc_RNA (1)...(19): siRNA sense strand
ccaggucacgagucaagua

SEQ ID NO: 943815 - RNA, 19 nt, Homo sapiens
  misc_RNA (1)...(19): siRNA sense strand
gaccggccuuuauucacuu

SEQ ID NO: 943816 - RNA, 19 nt, Homo sapiens
  misc_RNA (1)...(19): siRNA sense strand
ggacucgcuuaacuacauc

SEQ ID NO: 943817 - RNA, 19 nt, Homo sapiens
  misc_RNA (1)...(19): siRNA sense strand
gcauacugcggacucugua

SEQ ID NO: 943818 - RNA, 19 nt, Homo sapiens
  misc_RNA (1)...(19): siRNA sense strand
cagaggacccagcggugua

SEQ ID NO: 943819 - RNA, 19 nt, Homo sapiens
  misc_RNA (1)...(19): siRNA sense strand
uggacucgcuuaacuacau

SEQ ID NO: 943820 - RNA, 19 nt, Homo sapiens
  misc_RNA (1)...(19): siRNA sense strand
ucaaagguuuccguuacga

SEQ ID NO: 943821 - RNA, 19 nt, Homo sapiens
  misc_RNA (1)...(19): siRNA sense strand
caacuggccaacauguuuc

SEQ ID NO: 943822 - RNA, 19 nt, Homo sapiens
  misc_RNA (1)...(19): siRNA sense strand
ugcggacucuguaguaaau

SEQ ID NO: 943823 - RNA, 19 nt, Homo sapiens
  misc_RNA (1)...(19): siRNA sense strand
gcuuugaggcucccgauuc

SEQ ID NO: 943824 - RNA, 19 nt, Homo sapiens
  misc_RNA (1)...(19): siRNA sense strand
gucgccaguuuauuucgua

SEQ ID NO: 943825 - RNA, 19 nt, Homo sapiens
  misc_RNA (1)...(19): siRNA sense strand
gaauuggagcgagaagaau

SEQ ID NO: 943826 - RNA, 19 nt, Homo sapiens
  misc_RNA (1)...(19): siRNA sense strand
ucaaguacuggccggauug

SEQ ID NO: 943827 - RNA, 19 nt, Homo sapiens
  misc_RNA (1)...(19): siRNA sense strand
ggaacgucagugugaguug

SEQ ID NO: 943828 - RNA, 19 nt, Homo sapiens
  misc_RNA (1)...(19): siRNA sense strand
uggccaacauguuucuuca

SEQ ID NO: 943829 - RNA, 19 nt, Homo sapiens
  misc_RNA (1)...(19): siRNA sense strand
ccggcgugcugaagaguug

SEQ ID NO: 943830 - RNA, 19 nt, Homo sapiens
  misc_RNA (1)...(19): siRNA sense strand
gcccuaacgcugcgcuuug

SEQ ID NO: 943831 - RNA, 19 nt, Homo sapiens
  misc_RNA (1)...(19): siRNA sense strand
ucccaacaaugagaacuug

SEQ ID NO: 943832 - RNA, 19 nt, Homo sapiens
  misc_RNA (1)...(19): siRNA sense strand
cccuaacgcugcgcuuuga

SEQ ID NO: 943833 - RNA, 19 nt, Homo sapiens
  misc_RNA (1)...(19): siRNA sense strand
ucacuuuggugggccuaga

SEQ ID NO: 943834 - RNA, 19 nt, Homo sapiens
  misc_RNA (1)...(19): siRNA sense strand
acaucaaagguuuccguua

SEQ ID NO: 943835 - RNA, 19 nt, Homo sapiens
  misc_RNA (1)...(19): siRNA sense strand
uaacuacaucaaagguuuc

SEQ ID NO: 943836 - RNA, 19 nt, Homo sapiens
  misc_RNA (1)...(19): siRNA sense strand
cgccuucgucgccaguuua

SEQ ID NO: 943837 - RNA, 19 nt, Homo sapiens
  misc_RNA (1)...(19): siRNA sense strand
ugaaacagcuguggaauua

SEQ ID NO: 943838 - RNA, 19 nt, Homo sapiens
  misc_RNA (1)...(19): siRNA sense strand
ggaauuagcugcucucugu

SEQ ID NO: 943839 - RNA, 19 nt, Homo sapiens
  misc_RNA (1)...(19): siRNA sense strand
gaaaugcccuuaugaaaca

SEQ ID NO: 943840 - RNA, 19 nt, Homo sapiens
  misc_RNA (1)...(19): siRNA sense strand
cgaaguggcuggaaaugua

SEQ ID NO: 943841 - RNA, 19 nt, Homo sapiens
  misc_RNA (1)...(19): siRNA sense strand
ggaaacagcaaauccaaua

SEQ ID NO: 943842 - RNA, 19 nt, Homo sapiens
  misc_RNA (1)...(19): siRNA sense strand
gaacucuccuaucugaaua

SEQ ID NO: 943843 - RNA, 19 nt, Homo sapiens
  misc_RNA (1)...(19): siRNA sense strand
gcuuuacacuuucgaguua

SEQ ID NO: 943844 - RNA, 19 nt, Homo sapiens
  misc_RNA (1)...(19): siRNA sense strand
gggaagagauggcugugaa

SEQ ID NO: 943845 - RNA, 19 nt, Homo sapiens
  misc_RNA (1)...(19): siRNA sense strand
ugaaggagcuaacaaaaua

SEQ ID NO: 943846 - RNA, 19 nt, Homo sapiens
  misc_RNA (1)...(19): siRNA sense strand
gcggaacucuccuaucuga

SEQ ID NO: 943847 - RNA, 19 nt, Homo sapiens
  misc_RNA (1)...(19): siRNA sense strand
gaagagauggcugugaaua

SEQ ID NO: 943848 - RNA, 19 nt, Homo sapiens
  misc_RNA (1)...(19): siRNA sense strand
cagaagcaauggaauuuga

SEQ ID NO: 943849 - RNA, 19 nt, Homo sapiens
  misc_RNA (1)...(19): siRNA sense strand
gugaggaguuuacaaggua

SEQ ID NO: 943850 - RNA, 19 nt, Homo sapiens
  misc_RNA (1)...(19): siRNA sense strand
gaagcaauggaauuugaua

SEQ ID NO: 943851 - RNA, 19 nt, Homo sapiens
  misc_RNA (1)...(19): siRNA sense strand
agagauggcugugaauauu

SEQ ID NO: 943852 - RNA, 19 nt, Homo sapiens
  misc_RNA (1)...(19): siRNA sense strand
gcaauggaauuugauaucu

SEQ ID NO: 943853 - RNA, 19 nt, Homo sapiens
  misc_RNA (1)...(19): siRNA sense strand
ggauuuguuugaucagauu

SEQ ID NO: 943854 - RNA, 19 nt, Homo sapiens
  misc_RNA (1)...(19): siRNA sense strand
gaagaaccagcaccuuuga

SEQ ID NO: 943855 - RNA, 19 nt, Homo sapiens
  misc_RNA (1)...(19): siRNA sense strand
caagguaccuguuuguuuu

SEQ ID NO: 943856 - RNA, 19 nt, Homo sapiens
  misc_RNA (1)...(19): siRNA sense strand
gaucaugccaaacccauaa

SEQ ID NO: 943857 - RNA, 19 nt, Homo sapiens
  misc_RNA (1)...(19): siRNA sense strand
uccaauagauccgacuuua

SEQ ID NO: 943858 - RNA, 19 nt, Homo sapiens
  misc_RNA (1)...(19): siRNA sense strand
ggaagccuaguaaacguua

SEQ ID NO: 943859 - RNA, 19 nt, Homo sapiens
  misc_RNA (1)...(19): siRNA sense strand
gacagaagcaauggaauuu

SEQ ID NO: 943860 - RNA, 19 nt, Homo sapiens
  misc_RNA (1)...(19): siRNA sense strand
caauagauccgacuuuauc

SEQ ID NO: 943861 - RNA, 19 nt, Homo sapiens
  misc_RNA (1)...(19): siRNA sense strand
cauccucacucuccaaaug

SEQ ID NO: 943862 - RNA, 19 nt, Homo sapiens
  misc_RNA (1)...(19): siRNA sense strand
ggaacucuccuaucugaau

SEQ ID NO: 943863 - RNA, 19 nt, Homo sapiens
  misc_RNA (1)...(19): siRNA sense strand
gacagaauaucaagcuaca

SEQ ID NO: 943864 - RNA, 19 nt, Homo sapiens
  misc_RNA (1)...(19): siRNA sense strand
cgacaggcauauuaaucuu

SEQ ID NO: 943865 - RNA, 19 nt, Homo sapiens
  misc_RNA (1)...(19): siRNA sense strand
aaauugaaaugcccuuaug

SEQ ID NO: 943866 - RNA, 19 nt, Homo sapiens
  misc_RNA (1)...(19): siRNA sense strand
auaauuaccagccucaaua

SEQ ID NO: 943867 - RNA, 19 nt, Homo sapiens
  misc_RNA (1)...(19): siRNA sense strand
acacauggcuccagguuac

SEQ ID NO: 943868 - RNA, 19 nt, Homo sapiens
  misc_RNA (1)...(19): siRNA sense strand
cagcccagcucugcucuaa

SEQ ID NO: 943869 - RNA, 19 nt, Homo sapiens
  misc_RNA (1)...(19): siRNA sense strand
auccggaaguccauaauua

SEQ ID NO: 943870 - RNA, 19 nt, Homo sapiens
  misc_RNA (1)...(19): siRNA sense strand
gaguuucgguucauuccaa

SEQ ID NO: 943871 - RNA, 19 nt, Homo sapiens
  misc_RNA (1)...(19): siRNA sense strand
gcugggcucucgcuucaga

SEQ ID NO: 943872 - RNA, 19 nt, Homo sapiens
  misc_RNA (1)...(19): siRNA sense strand
gaauaucaagcuacacaug

SEQ ID NO: 943873 - RNA, 19 nt, Homo sapiens
  misc_RNA (1)...(19): siRNA sense strand
ucagugggcggacagaaua

SEQ ID NO: 943874 - RNA, 19 nt, Homo sapiens
  misc_RNA (1)...(19): siRNA sense strand
gccaggauuuguuugauca

SEQ ID NO: 943875 - RNA, 19 nt, Homo sapiens
  misc_RNA (1)...(19): siRNA sense strand
cgaagaaccagcaccuuug

SEQ ID NO: 943876 - RNA, 19 nt, Homo sapiens
  misc_RNA (1)...(19): siRNA sense strand
gcguggaccugccgaaaca

SEQ ID NO: 943877 - RNA, 19 nt, Homo sapiens
  misc_RNA (1)...(19): siRNA sense strand
gaggaagccuaguaaacgu

SEQ ID NO: 943878 - RNA, 19 nt, Homo sapiens
  misc_RNA (1)...(19): siRNA sense strand
agacagaagcaauggaauu

SEQ ID NO: 943879 - RNA, 19 nt, Homo sapiens
  misc_RNA (1)...(19): siRNA sense strand
acaggcauauuaaucuuug

SEQ ID NO: 943880 - RNA, 19 nt, Homo sapiens
  misc_RNA (1)...(19): siRNA sense strand
aaagcgaaguggcuggaaa

SEQ ID NO: 943881 - RNA, 19 nt, Homo sapiens
  misc_RNA (1)...(19): siRNA sense strand
gcaagcaacccagugauag

SEQ ID NO: 943882 - RNA, 19 nt, Homo sapiens
  misc_RNA (1)...(19): siRNA sense strand
gcccagcucugcucuaaaa

SEQ ID NO: 943883 - RNA, 19 nt, Homo sapiens
  misc_RNA (1)...(19): siRNA sense strand
caaauccggaaguccauaa

SEQ ID NO: 943884 - RNA, 19 nt, Homo sapiens
  misc_RNA (1)...(19): siRNA sense strand
caaccuucgugaggaguuu

SEQ ID NO: 943885 - RNA, 19 nt, Homo sapiens
  misc_RNA (1)...(19): siRNA sense strand
gagaggaagccuaguaaac

SEQ ID NO: 943886 - RNA, 19 nt, Homo sapiens
  misc_RNA (1)...(19): siRNA sense strand
gaaguggcuggaaauguau

SEQ ID NO: 943887 - RNA, 19 nt, Homo sapiens
  misc_RNA (1)...(19): siRNA sense strand
ccucgacucugcccagguu

SEQ ID NO: 943888 - RNA, 19 nt, Homo sapiens
  misc_RNA (1)...(19): siRNA sense strand
aaacagcaaauccaauaga

SEQ ID NO: 943889 - RNA, 19 nt, Homo sapiens
  misc_RNA (1)...(19): siRNA sense strand
gaaacagcaaauccaauag

SEQ ID NO: 943890 - RNA, 19 nt, Homo sapiens
  misc_RNA (1)...(19): siRNA sense strand
ggguagacaugcacguugu

SEQ ID NO: 943891 - RNA, 19 nt, Homo sapiens
  misc_RNA (1)...(19): siRNA sense strand
caaaucagacagaagcaau

SEQ ID NO: 943892 - RNA, 19 nt, Homo sapiens
  misc_RNA (1)...(19): siRNA sense strand
gagcuugugucugaguuuc

SEQ ID NO: 943893 - RNA, 19 nt, Homo sapiens
  misc_RNA (1)...(19): siRNA sense strand
ggagugcgagcuuccagaa

SEQ ID NO: 943894 - RNA, 19 nt, Homo sapiens
  misc_RNA (1)...(19): siRNA sense strand
uggaccugcuuaugcuuua

SEQ ID NO: 943895 - RNA, 19 nt, Homo sapiens
  misc_RNA (1)...(19): siRNA sense strand
ugaaaugcccuuaugaaac

SEQ ID NO: 943896 - RNA, 19 nt, Homo sapiens
  misc_RNA (1)...(19): siRNA sense strand
uguggaaacagauuacuuu

SEQ ID NO: 943897 - RNA, 19 nt, Homo sapiens
  misc_RNA (1)...(19): siRNA sense strand
aaacagcuguggaauuagc

SEQ ID NO: 943898 - RNA, 19 nt, Homo sapiens
  misc_RNA (1)...(19): siRNA sense strand
aggcggaacucuccuaucu

SEQ ID NO: 943899 - RNA, 19 nt, Homo sapiens
  misc_RNA (1)...(19): siRNA sense strand
gagcaagagcacacguuug

SEQ ID NO: 943900 - RNA, 19 nt, Homo sapiens
  misc_RNA (1)...(19): siRNA sense strand
gacaggcauauuaaucuuu

SEQ ID NO: 943901 - RNA, 19 nt, Homo sapiens
  misc_RNA (1)...(19): siRNA sense strand
ccaauagauccgacuuuau

SEQ ID NO: 943902 - RNA, 19 nt, Homo sapiens
  misc_RNA (1)...(19): siRNA sense strand
cagaauaucaagcuacaca

SEQ ID NO: 943903 - RNA, 19 nt, Homo sapiens
  misc_RNA (1)...(19): siRNA sense strand
ggccaggauuuguuugauc

SEQ ID NO: 943904 - RNA, 19 nt, Homo sapiens
  misc_RNA (1)...(19): siRNA sense strand
ucagacagaagcaauggaa

SEQ ID NO: 943905 - RNA, 19 nt, Homo sapiens
  misc_RNA (1)...(19): siRNA sense strand
ggccuaaaauuaccaaaau

SEQ ID NO: 943906 - RNA, 19 nt, Homo sapiens
  misc_RNA (1)...(19): siRNA sense strand
gagauggcugugaauauuc

SEQ ID NO: 943907 - RNA, 19 nt, Homo sapiens
  misc_RNA (1)...(19): siRNA sense strand
ugcuuaugcuuuacacuuu

SEQ ID NO: 943908 - RNA, 19 nt, Homo sapiens
  misc_RNA (1)...(19): siRNA sense strand
cagccucaauaucauccua

SEQ ID NO: 943909 - RNA, 19 nt, Homo sapiens
  misc_RNA (1)...(19): siRNA sense strand
aaagcaagcaacccaguga

SEQ ID NO: 943910 - RNA, 19 nt, Homo sapiens
  misc_RNA (1)...(19): siRNA sense strand
ggaucaugccaaacccaua

SEQ ID NO: 943911 - RNA, 19 nt, Homo sapiens
  misc_RNA (1)...(19): siRNA sense strand
gcugcucucugucuacaag

SEQ ID NO: 943912 - RNA, 19 nt, Homo sapiens
  misc_RNA (1)...(19): siRNA sense strand
uugaaaugcccuuaugaaa

SEQ ID NO: 943913 - RNA, 19 nt, Homo sapiens
  misc_RNA (1)...(19): siRNA sense strand
gcuuaugcuuuacacuuuc

SEQ ID NO: 943914 - RNA, 19 nt, Homo sapiens
  misc_RNA (1)...(19): siRNA sense strand
acgaagaaccagcaccuuu

SEQ ID NO: 943915 - RNA, 19 nt, Homo sapiens
  misc_RNA (1)...(19): siRNA sense strand
ucuccuaucugaauaaagc

SEQ ID NO: 943916 - RNA, 19 nt, Homo sapiens
  misc_RNA (1)...(19): siRNA sense strand
gaagccuaguaaacguuau

SEQ ID NO: 943917 - RNA, 19 nt, Homo sapiens
  misc_RNA (1)...(19): siRNA sense strand
ggaagagauggcugugaau

SEQ ID NO: 943918 - RNA, 19 nt, Homo sapiens
  misc_RNA (1)...(19): siRNA sense strand
caacucaggcaugacauuc

SEQ ID NO: 943919 - RNA, 19 nt, Homo sapiens
  misc_RNA (1)...(19): siRNA sense strand
uaauuaccagccucaauau

SEQ ID NO: 943920 - RNA, 19 nt, Homo sapiens
  misc_RNA (1)...(19): siRNA sense strand
ggcucucgcuucagauuca

SEQ ID NO: 943921 - RNA, 19 nt, Homo sapiens
  misc_RNA (1)...(19): siRNA sense strand
ugagcaagagcacacguuu

SEQ ID NO: 943922 - RNA, 19 nt, Homo sapiens
  misc_RNA (1)...(19): siRNA sense strand
gaaaauugaaaugcccuua

SEQ ID NO: 943923 - RNA, 19 nt, Homo sapiens
  misc_RNA (1)...(19): siRNA sense strand
ggagacauucaacguucaa

SEQ ID NO: 943924 - RNA, 19 nt, Homo sapiens
  misc_RNA (1)...(19): siRNA sense strand
aaaagcagaugaaaauugg

SEQ ID NO: 943925 - RNA, 19 nt, Homo sapiens
  misc_RNA (1)...(19): siRNA sense strand
gagcguggaccugccgaaa

SEQ ID NO: 943926 - RNA, 19 nt, Homo sapiens
  misc_RNA (1)...(19): siRNA sense strand
gaauauucucuuggacuga

SEQ ID NO: 943927 - RNA, 19 nt, Homo sapiens
  misc_RNA (1)...(19): siRNA sense strand
cgugaggaguuuacaaggu

SEQ ID NO: 943928 - RNA, 19 nt, Homo sapiens
  misc_RNA (1)...(19): siRNA sense strand
ccucaauaucauccuaaua

SEQ ID NO: 943929 - RNA, 19 nt, Homo sapiens
  misc_RNA (1)...(19): siRNA sense strand
gaaaauuggaccugcuuau

SEQ ID NO: 943930 - RNA, 19 nt, Homo sapiens
  misc_RNA (1)...(19): siRNA sense strand
cauucaacguucaaagcaa

SEQ ID NO: 943931 - RNA, 19 nt, Homo sapiens
  misc_RNA (1)...(19): siRNA sense strand
ggcuccagguuacgaagaa

SEQ ID NO: 943932 - RNA, 19 nt, Homo sapiens
  misc_RNA (1)...(19): siRNA sense strand
aggcugggcucucgcuuca

SEQ ID NO: 943933 - RNA, 19 nt, Homo sapiens
  misc_RNA (1)...(19): siRNA sense strand
aacagcaaauccaauagau

SEQ ID NO: 943934 - RNA, 19 nt, Homo sapiens
  misc_RNA (1)...(19): siRNA sense strand
acucaggcaugacauucuu

SEQ ID NO: 943935 - RNA, 19 nt, Homo sapiens
  misc_RNA (1)...(19): siRNA sense strand
uuaccagccucaauaucau

SEQ ID NO: 943936 - RNA, 19 nt, Homo sapiens
  misc_RNA (1)...(19): siRNA sense strand
caggauuuguuugaucaga

SEQ ID NO: 943937 - RNA, 19 nt, Homo sapiens
  misc_RNA (1)...(19): siRNA sense strand
ugaaacagcuguggaauua

SEQ ID NO: 943938 - RNA, 19 nt, Homo sapiens
  misc_RNA (1)...(19): siRNA sense strand
ggaauuagcugcucucugu

SEQ ID NO: 943939 - RNA, 19 nt, Homo sapiens
  misc_RNA (1)...(19): siRNA sense strand
gaaaugcccuuaugaaaca

SEQ ID NO: 943940 - RNA, 19 nt, Homo sapiens
  misc_RNA (1)...(19): siRNA sense strand
cgaaguggcuggaaaugua

SEQ ID NO: 943941 - RNA, 19 nt, Homo sapiens
  misc_RNA (1)...(19): siRNA sense strand
ggaaacagcaaauccaaua

SEQ ID NO: 943942 - RNA, 19 nt, Homo sapiens
  misc_RNA (1)...(19): siRNA sense strand
gaacucuccuaucugaaua

SEQ ID NO: 943943 - RNA, 19 nt, Homo sapiens
  misc_RNA (1)...(19): siRNA sense strand
gcuuuacacuuucgaguua

SEQ ID NO: 943944 - RNA, 19 nt, Homo sapiens
  misc_RNA (1)...(19): siRNA sense strand
gggaagagauggcugugaa

SEQ ID NO: 943945 - RNA, 19 nt, Homo sapiens
  misc_RNA (1)...(19): siRNA sense strand
ugaaggagcuaacaaaaua

SEQ ID NO: 943946 - RNA, 19 nt, Homo sapiens
  misc_RNA (1)...(19): siRNA sense strand
gcggaacucuccuaucuga

SEQ ID NO: 943947 - RNA, 19 nt, Homo sapiens
  misc_RNA (1)...(19): siRNA sense strand
gaagagauggcugugaaua

SEQ ID NO: 943948 - RNA, 19 nt, Homo sapiens
  misc_RNA (1)...(19): siRNA sense strand
cagaagcaauggaauuuga

SEQ ID NO: 943949 - RNA, 19 nt, Homo sapiens
  misc_RNA (1)...(19): siRNA sense strand
gugaggaguuuacaaggua

SEQ ID NO: 943950 - RNA, 19 nt, Homo sapiens
  misc_RNA (1)...(19): siRNA sense strand
gaagcaauggaauuugaua

SEQ ID NO: 943951 - RNA, 19 nt, Homo sapiens
  misc_RNA (1)...(19): siRNA sense strand
agagauggcugugaauauu

SEQ ID NO: 943952 - RNA, 19 nt, Homo sapiens
  misc_RNA (1)...(19): siRNA sense strand
gcaauggaauuugauaucu

SEQ ID NO: 943953 - RNA, 19 nt, Homo sapiens
  misc_RNA (1)...(19): siRNA sense strand
ggauuuguuugaucagauu

SEQ ID NO: 943954 - RNA, 19 nt, Homo sapiens
  misc_RNA (1)...(19): siRNA sense strand
gaagaaccagcaccuuuga

SEQ ID NO: 943955 - RNA, 19 nt, Homo sapiens
  misc_RNA (1)...(19): siRNA sense strand
caagguaccuguuuguuuu

SEQ ID NO: 943956 - RNA, 19 nt, Homo sapiens
  misc_RNA (1)...(19): siRNA sense strand
gaucaugccaaacccauaa

SEQ ID NO: 943957 - RNA, 19 nt, Homo sapiens
  misc_RNA (1)...(19): siRNA sense strand
uccaauagauccgacuuua

SEQ ID NO: 943958 - RNA, 19 nt, Homo sapiens
  misc_RNA (1)...(19): siRNA sense strand
ggaagccuaguaaacguua

SEQ ID NO: 943959 - RNA, 19 nt, Homo sapiens
  misc_RNA (1)...(19): siRNA sense strand
gacagaagcaauggaauuu

SEQ ID NO: 943960 - RNA, 19 nt, Homo sapiens
  misc_RNA (1)...(19): siRNA sense strand
caauagauccgacuuuauc

SEQ ID NO: 943961 - RNA, 19 nt, Homo sapiens
  misc_RNA (1)...(19): siRNA sense strand
cauccucacucuccaaaug

SEQ ID NO: 943962 - RNA, 19 nt, Homo sapiens
  misc_RNA (1)...(19): siRNA sense strand
ggaacucuccuaucugaau

SEQ ID NO: 943963 - RNA, 19 nt, Homo sapiens
  misc_RNA (1)...(19): siRNA sense strand
gacagaauaucaagcuaca

SEQ ID NO: 943964 - RNA, 19 nt, Homo sapiens
  misc_RNA (1)...(19): siRNA sense strand
cgacaggcauauuaaucuu

SEQ ID NO: 943965 - RNA, 19 nt, Homo sapiens
  misc_RNA (1)...(19): siRNA sense strand
aaauugaaaugcccuuaug

SEQ ID NO: 943966 - RNA, 19 nt, Homo sapiens
  misc_RNA (1)...(19): siRNA sense strand
auaauuaccagccucaaua

SEQ ID NO: 943967 - RNA, 19 nt, Homo sapiens
  misc_RNA (1)...(19): siRNA sense strand
acacauggcuccagguuac

SEQ ID NO: 943968 - RNA, 19 nt, Homo sapiens
  misc_RNA (1)...(19): siRNA sense strand
cagcccagcucugcucuaa

SEQ ID NO: 943969 - RNA, 19 nt, Homo sapiens
  misc_RNA (1)...(19): siRNA sense strand
auccggaaguccauaauua

SEQ ID NO: 943970 - RNA, 19 nt, Homo sapiens
  misc_RNA (1)...(19): siRNA sense strand
gaguuucgguucauuccaa

SEQ ID NO: 943971 - RNA, 19 nt, Homo sapiens
  misc_RNA (1)...(19): siRNA sense strand
gcugggcucucgcuucaga

SEQ ID NO: 943972 - RNA, 19 nt, Homo sapiens
  misc_RNA (1)...(19): siRNA sense strand
gaauaucaagcuacacaug

SEQ ID NO: 943973 - RNA, 19 nt, Homo sapiens
  misc_RNA (1)...(19): siRNA sense strand
ucagugggcggacagaaua

SEQ ID NO: 943974 - RNA, 19 nt, Homo sapiens
  misc_RNA (1)...(19): siRNA sense strand
gccaggauuuguuugauca

SEQ ID NO: 943975 - RNA, 19 nt, Homo sapiens
  misc_RNA (1)...(19): siRNA sense strand
cgaagaaccagcaccuuug

SEQ ID NO: 943976 - RNA, 19 nt, Homo sapiens
  misc_RNA (1)...(19): siRNA sense strand
gcguggaccugccgaaaca

SEQ ID NO: 943977 - RNA, 19 nt, Homo sapiens
  misc_RNA (1)...(19): siRNA sense strand
gaggaagccuaguaaacgu

SEQ ID NO: 943978 - RNA, 19 nt, Homo sapiens
  misc_RNA (1)...(19): siRNA sense strand
agacagaagcaauggaauu

SEQ ID NO: 943979 - RNA, 19 nt, Homo sapiens
  misc_RNA (1)...(19): siRNA sense strand
acaggcauauuaaucuuug

SEQ ID NO: 943980 - RNA, 19 nt, Homo sapiens
  misc_RNA (1)...(19): siRNA sense strand
aaagcgaaguggcuggaaa

SEQ ID NO: 943981 - RNA, 19 nt, Homo sapiens
  misc_RNA (1)...(19): siRNA sense strand
gcaagcaacccagugauag

SEQ ID NO: 943982 - RNA, 19 nt, Homo sapiens
  misc_RNA (1)...(19): siRNA sense strand
gcccagcucugcucuaaaa

SEQ ID NO: 943983 - RNA, 19 nt, Homo sapiens
  misc_RNA (1)...(19): siRNA sense strand
caaauccggaaguccauaa

SEQ ID NO: 943984 - RNA, 19 nt, Homo sapiens
  misc_RNA (1)...(19): siRNA sense strand
caaccuucgugaggaguuu

SEQ ID NO: 943985 - RNA, 19 nt, Homo sapiens
  misc_RNA (1)...(19): siRNA sense strand
gagaggaagccuaguaaac

SEQ ID NO: 943986 - RNA, 19 nt, Homo sapiens
  misc_RNA (1)...(19): siRNA sense strand
gaaguggcuggaaauguau

SEQ ID NO: 943987 - RNA, 19 nt, Homo sapiens
  misc_RNA (1)...(19): siRNA sense strand
ccucgacucugcccagguu

SEQ ID NO: 943988 - RNA, 19 nt, Homo sapiens
  misc_RNA (1)...(19): siRNA sense strand
aaacagcaaauccaauaga

SEQ ID NO: 943989 - RNA, 19 nt, Homo sapiens
  misc_RNA (1)...(19): siRNA sense strand
gaaacagcaaauccaauag

SEQ ID NO: 943990 - RNA, 19 nt, Homo sapiens
  misc_RNA (1)...(19): siRNA sense strand
ggguagacaugcacguugu

SEQ ID NO: 943991 - RNA, 19 nt, Homo sapiens
  misc_RNA (1)...(19): siRNA sense strand
caaaucagacagaagcaau

SEQ ID NO: 943992 - RNA, 19 nt, Homo sapiens
  misc_RNA (1)...(19): siRNA sense strand
gagcuugugucugaguuuc

SEQ ID NO: 943993 - RNA, 19 nt, Homo sapiens
  misc_RNA (1)...(19): siRNA sense strand
ggagugcgagcuuccagaa

SEQ ID NO: 943994 - RNA, 19 nt, Homo sapiens
  misc_RNA (1)...(19): siRNA sense strand
uggaccugcuuaugcuuua

SEQ ID NO: 943995 - RNA, 19 nt, Homo sapiens
  misc_RNA (1)...(19): siRNA sense strand
ugaaaugcccuuaugaaac

SEQ ID NO: 943996 - RNA, 19 nt, Homo sapiens
  misc_RNA (1)...(19): siRNA sense strand
uguggaaacagauuacuuu

SEQ ID NO: 943997 - RNA, 19 nt, Homo sapiens
  misc_RNA (1)...(19): siRNA sense strand
aaacagcuguggaauuagc

SEQ ID NO: 943998 - RNA, 19 nt, Homo sapiens
  misc_RNA (1)...(19): siRNA sense strand
aggcggaacucuccuaucu

SEQ ID NO: 943999 - RNA, 19 nt, Homo sapiens
  misc_RNA (1)...(19): siRNA sense strand
gagcaagagcacacguuug

SEQ ID NO: 944000 - RNA, 19 nt, Homo sapiens
  misc_RNA (1)...(19): siRNA sense strand
gacaggcauauuaaucuuu

SEQ ID NO: 944001 - RNA, 19 nt, Homo sapiens
  misc_RNA (1)...(19): siRNA sense strand
ccaauagauccgacuuuau

SEQ ID NO: 944002 - RNA, 19 nt, Homo sapiens
  misc_RNA (1)...(19): siRNA sense strand
cagaauaucaagcuacaca

SEQ ID NO: 944003 - RNA, 19 nt, Homo sapiens
  misc_RNA (1)...(19): siRNA sense strand
ggccaggauuuguuugauc

SEQ ID NO: 944004 - RNA, 19 nt, Homo sapiens
  misc_RNA (1)...(19): siRNA sense strand
ucagacagaagcaauggaa

SEQ ID NO: 944005 - RNA, 19 nt, Homo sapiens
  misc_RNA (1)...(19): siRNA sense strand
ggccuaaaauuaccaaaau

SEQ ID NO: 944006 - RNA, 19 nt, Homo sapiens
  misc_RNA (1)...(19): siRNA sense strand
gagauggcugugaauauuc

SEQ ID NO: 944007 - RNA, 19 nt, Homo sapiens
  misc_RNA (1)...(19): siRNA sense strand
ugcuuaugcuuuacacuuu

SEQ ID NO: 944008 - RNA, 19 nt, Homo sapiens
  misc_RNA (1)...(19): siRNA sense strand
cagccucaauaucauccua

SEQ ID NO: 944009 - RNA, 19 nt, Homo sapiens
  misc_RNA (1)...(19): siRNA sense strand
aaagcaagcaacccaguga

SEQ ID NO: 944010 - RNA, 19 nt, Homo sapiens
  misc_RNA (1)...(19): siRNA sense strand
ggaucaugccaaacccaua

SEQ ID NO: 944011 - RNA, 19 nt, Homo sapiens
  misc_RNA (1)...(19): siRNA sense strand
gcugcucucugucuacaag

SEQ ID NO: 944012 - RNA, 19 nt, Homo sapiens
  misc_RNA (1)...(19): siRNA sense strand
uugaaaugcccuuaugaaa

SEQ ID NO: 944013 - RNA, 19 nt, Homo sapiens
  misc_RNA (1)...(19): siRNA sense strand
gcuuaugcuuuacacuuuc

SEQ ID NO: 944014 - RNA, 19 nt, Homo sapiens
  misc_RNA (1)...(19): siRNA sense strand
acgaagaaccagcaccuuu

SEQ ID NO: 944015 - RNA, 19 nt, Homo sapiens
  misc_RNA (1)...(19): siRNA sense strand
ucuccuaucugaauaaagc

SEQ ID NO: 944016 - RNA, 19 nt, Homo sapiens
  misc_RNA (1)...(19): siRNA sense strand
gaagccuaguaaacguuau

SEQ ID NO: 944017 - RNA, 19 nt, Homo sapiens
  misc_RNA (1)...(19): siRNA sense strand
ggaagagauggcugugaau

SEQ ID NO: 944018 - RNA, 19 nt, Homo sapiens
  misc_RNA (1)...(19): siRNA sense strand
caacucaggcaugacauuc

SEQ ID NO: 944019 - RNA, 19 nt, Homo sapiens
  misc_RNA (1)...(19): siRNA sense strand
uaauuaccagccucaauau

SEQ ID NO: 944020 - RNA, 19 nt, Homo sapiens
  misc_RNA (1)...(19): siRNA sense strand
ggcucucgcuucagauuca

SEQ ID NO: 944021 - RNA, 19 nt, Homo sapiens
  misc_RNA (1)...(19): siRNA sense strand
ugagcaagagcacacguuu

SEQ ID NO: 944022 - RNA, 19 nt, Homo sapiens
  misc_RNA (1)...(19): siRNA sense strand
gaaaauugaaaugcccuua

SEQ ID NO: 944023 - RNA, 19 nt, Homo sapiens
  misc_RNA (1)...(19): siRNA sense strand
ggagacauucaacguucaa

SEQ ID NO: 944024 - RNA, 19 nt, Homo sapiens
  misc_RNA (1)...(19): siRNA sense strand
aaaagcagaugaaaauugg

SEQ ID NO: 944025 - RNA, 19 nt, Homo sapiens
  misc_RNA (1)...(19): siRNA sense strand
gagcguggaccugccgaaa

SEQ ID NO: 944026 - RNA, 19 nt, Homo sapiens
  misc_RNA (1)...(19): siRNA sense strand
gaauauucucuuggacuga

SEQ ID NO: 944027 - RNA, 19 nt, Homo sapiens
  misc_RNA (1)...(19): siRNA sense strand
cgugaggaguuuacaaggu

SEQ ID NO: 944028 - RNA, 19 nt, Homo sapiens
  misc_RNA (1)...(19): siRNA sense strand
ccucaauaucauccuaaua

SEQ ID NO: 944029 - RNA, 19 nt, Homo sapiens
  misc_RNA (1)...(19): siRNA sense strand
gaaaauuggaccugcuuau

SEQ ID NO: 944030 - RNA, 19 nt, Homo sapiens
  misc_RNA (1)...(19): siRNA sense strand
cauucaacguucaaagcaa

SEQ ID NO: 944031 - RNA, 19 nt, Homo sapiens
  misc_RNA (1)...(19): siRNA sense strand
ggcuccagguuacgaagaa

SEQ ID NO: 944032 - RNA, 19 nt, Homo sapiens
  misc_RNA (1)...(19): siRNA sense strand
aggcugggcucucgcuuca

SEQ ID NO: 944033 - RNA, 19 nt, Homo sapiens
  misc_RNA (1)...(19): siRNA sense strand
aacagcaaauccaauagau

SEQ ID NO: 944034 - RNA, 19 nt, Homo sapiens
  misc_RNA (1)...(19): siRNA sense strand
acucaggcaugacauucuu

SEQ ID NO: 944035 - RNA, 19 nt, Homo sapiens
  misc_RNA (1)...(19): siRNA sense strand
uuaccagccucaauaucau

SEQ ID NO: 944036 - RNA, 19 nt, Homo sapiens
  misc_RNA (1)...(19): siRNA sense strand
caggauuuguuugaucaga

SEQ ID NO: 944037 - RNA, 19 nt, Homo sapiens
  misc_RNA (1)...(19): siRNA sense strand
guacgagccucuucauuua

SEQ ID NO: 944038 - RNA, 19 nt, Homo sapiens
  misc_RNA (1)...(19): siRNA sense strand
gaauaggcgugauugcuua

SEQ ID NO: 944039 - RNA, 19 nt, Homo sapiens
  misc_RNA (1)...(19): siRNA sense strand
gcaaaccagucaucauuaa

SEQ ID NO: 944040 - RNA, 19 nt, Homo sapiens
  misc_RNA (1)...(19): siRNA sense strand
gaaagucucggcagaauuu

SEQ ID NO: 944041 - RNA, 19 nt, Homo sapiens
  misc_RNA (1)...(19): siRNA sense strand
uaaaguggauuucucauga

SEQ ID NO: 944042 - RNA, 19 nt, Homo sapiens
  misc_RNA (1)...(19): siRNA sense strand
ucacugaacuuaaggauau

SEQ ID NO: 944043 - RNA, 19 nt, Homo sapiens
  misc_RNA (1)...(19): siRNA sense strand
ggacaacuucccaggauua

SEQ ID NO: 944044 - RNA, 19 nt, Homo sapiens
  misc_RNA (1)...(19): siRNA sense strand
cuacauaugugguggguuu

SEQ ID NO: 944045 - RNA, 19 nt, Homo sapiens
  misc_RNA (1)...(19): siRNA sense strand
caacaucccuggcauuucu

SEQ ID NO: 944046 - RNA, 19 nt, Homo sapiens
  misc_RNA (1)...(19): siRNA sense strand
gagcugugcuuggauaauu

SEQ ID NO: 944047 - RNA, 19 nt, Homo sapiens
  misc_RNA (1)...(19): siRNA sense strand
gcagaaggccuacauguuc

SEQ ID NO: 944048 - RNA, 19 nt, Homo sapiens
  misc_RNA (1)...(19): siRNA sense strand
gaacuuaaggauaucauug

SEQ ID NO: 944049 - RNA, 19 nt, Homo sapiens
  misc_RNA (1)...(19): siRNA sense strand
gaauguuacuugugaggaa

SEQ ID NO: 944050 - RNA, 19 nt, Homo sapiens
  misc_RNA (1)...(19): siRNA sense strand
ggaagaugcuguauuugag

SEQ ID NO: 944051 - RNA, 19 nt, Homo sapiens
  misc_RNA (1)...(19): siRNA sense strand
ucaauaguguuaagcguuu

SEQ ID NO: 944052 - RNA, 19 nt, Homo sapiens
  misc_RNA (1)...(19): siRNA sense strand
gaacaacacugaaaagaag

SEQ ID NO: 944053 - RNA, 19 nt, Homo sapiens
  misc_RNA (1)...(19): siRNA sense strand
gcagaccaguuuaacauca

SEQ ID NO: 944054 - RNA, 19 nt, Homo sapiens
  misc_RNA (1)...(19): siRNA sense strand
gaaaggcuauguguauauc

SEQ ID NO: 944055 - RNA, 19 nt, Homo sapiens
  misc_RNA (1)...(19): siRNA sense strand
gcagacagaugggugaaug

SEQ ID NO: 944056 - RNA, 19 nt, Homo sapiens
  misc_RNA (1)...(19): siRNA sense strand
ugacaguccucggcaauuu

SEQ ID NO: 944057 - RNA, 19 nt, Homo sapiens
  misc_RNA (1)...(19): siRNA sense strand
ucagagcugugcuuggaua

SEQ ID NO: 944058 - RNA, 19 nt, Homo sapiens
  misc_RNA (1)...(19): siRNA sense strand
aaacacugcugaacguuau

SEQ ID NO: 944059 - RNA, 19 nt, Homo sapiens
  misc_RNA (1)...(19): siRNA sense strand
uguaugaccucaacaugaa

SEQ ID NO: 944060 - RNA, 19 nt, Homo sapiens
  misc_RNA (1)...(19): siRNA sense strand
ggaaacgagugccuguuca

SEQ ID NO: 944061 - RNA, 19 nt, Homo sapiens
  misc_RNA (1)...(19): siRNA sense strand
gaacagaggagugaugcaa

SEQ ID NO: 944062 - RNA, 19 nt, Homo sapiens
  misc_RNA (1)...(19): siRNA sense strand
cauaagaacauccucugua

SEQ ID NO: 944063 - RNA, 19 nt, Homo sapiens
  misc_RNA (1)...(19): siRNA sense strand
ggaauaggcgugauugcuu

SEQ ID NO: 944064 - RNA, 19 nt, Homo sapiens
  misc_RNA (1)...(19): siRNA sense strand
gcacaacuuugaggagaug

SEQ ID NO: 944065 - RNA, 19 nt, Homo sapiens
  misc_RNA (1)...(19): siRNA sense strand
gauuagcacugcgagauga

SEQ ID NO: 944066 - RNA, 19 nt, Homo sapiens
  misc_RNA (1)...(19): siRNA sense strand
gggugaauguuacuuguga

SEQ ID NO: 944067 - RNA, 19 nt, Homo sapiens
  misc_RNA (1)...(19): siRNA sense strand
aagaugagcucaaugucaa

SEQ ID NO: 944068 - RNA, 19 nt, Homo sapiens
  misc_RNA (1)...(19): siRNA sense strand
uagcugcaguuccuacuuu

SEQ ID NO: 944069 - RNA, 19 nt, Homo sapiens
  misc_RNA (1)...(19): siRNA sense strand
ggugguggaugaccucuug

SEQ ID NO: 944070 - RNA, 19 nt, Homo sapiens
  misc_RNA (1)...(19): siRNA sense strand
gggaaggucuacauaugug

SEQ ID NO: 944071 - RNA, 19 nt, Homo sapiens
  misc_RNA (1)...(19): siRNA sense strand
acaaguggcuggaacaaca

SEQ ID NO: 944072 - RNA, 19 nt, Homo sapiens
  misc_RNA (1)...(19): siRNA sense strand
gcaagcgccacaacacuuu

SEQ ID NO: 944073 - RNA, 19 nt, Homo sapiens
  misc_RNA (1)...(19): siRNA sense strand
guggguggcuuuaaugguu

SEQ ID NO: 944074 - RNA, 19 nt, Homo sapiens
  misc_RNA (1)...(19): siRNA sense strand
ugagugcgauggccuguga

SEQ ID NO: 944075 - RNA, 19 nt, Homo sapiens
  misc_RNA (1)...(19): siRNA sense strand
uaaacacugcugaacguua

SEQ ID NO: 944076 - RNA, 19 nt, Homo sapiens
  misc_RNA (1)...(19): siRNA sense strand
ucaacgagcuuagacuaga

SEQ ID NO: 944077 - RNA, 19 nt, Homo sapiens
  misc_RNA (1)...(19): siRNA sense strand
uaagaugaaugacuauguc

SEQ ID NO: 944078 - RNA, 19 nt, Homo sapiens
  misc_RNA (1)...(19): siRNA sense strand
aagcagcacauuucaauuu

SEQ ID NO: 944079 - RNA, 19 nt, Homo sapiens
  misc_RNA (1)...(19): siRNA sense strand
gcccugagcugaggcagaa

SEQ ID NO: 944080 - RNA, 19 nt, Homo sapiens
  misc_RNA (1)...(19): siRNA sense strand
uggccaauguugaggaaua

SEQ ID NO: 944081 - RNA, 19 nt, Homo sapiens
  misc_RNA (1)...(19): siRNA sense strand
uggaugaccucuuguuugu

SEQ ID NO: 944082 - RNA, 19 nt, Homo sapiens
  misc_RNA (1)...(19): siRNA sense strand
gcgaguuccucaagucaga

SEQ ID NO: 944083 - RNA, 19 nt, Homo sapiens
  misc_RNA (1)...(19): siRNA sense strand
cgugauugcuuauggagaa

SEQ ID NO: 944084 - RNA, 19 nt, Homo sapiens
  misc_RNA (1)...(19): siRNA sense strand
gacagaugggugaauguua

SEQ ID NO: 944085 - RNA, 19 nt, Homo sapiens
  misc_RNA (1)...(19): siRNA sense strand
uguacgagccucuucauuu

SEQ ID NO: 944086 - RNA, 19 nt, Homo sapiens
  misc_RNA (1)...(19): siRNA sense strand
ugaggaauaugcagcuaga

SEQ ID NO: 944087 - RNA, 19 nt, Homo sapiens
  misc_RNA (1)...(19): siRNA sense strand
guucacagcagaaguguau

SEQ ID NO: 944088 - RNA, 19 nt, Homo sapiens
  misc_RNA (1)...(19): siRNA sense strand
ugaagcuaaucauugagua

SEQ ID NO: 944089 - RNA, 19 nt, Homo sapiens
  misc_RNA (1)...(19): siRNA sense strand
ugauggagcuaaucgacuu

SEQ ID NO: 944090 - RNA, 19 nt, Homo sapiens
  misc_RNA (1)...(19): siRNA sense strand
gcugaguacuucaugaaca

SEQ ID NO: 944091 - RNA, 19 nt, Homo sapiens
  misc_RNA (1)...(19): siRNA sense strand
cagaaggccuacauguuca

SEQ ID NO: 944092 - RNA, 19 nt, Homo sapiens
  misc_RNA (1)...(19): siRNA sense strand
gaagcuaaucauugaguau

SEQ ID NO: 944093 - RNA, 19 nt, Homo sapiens
  misc_RNA (1)...(19): siRNA sense strand
ucacagcagaaguguauaa

SEQ ID NO: 944094 - RNA, 19 nt, Homo sapiens
  misc_RNA (1)...(19): siRNA sense strand
auaagaacauccucuguag

SEQ ID NO: 944095 - RNA, 19 nt, Homo sapiens
  misc_RNA (1)...(19): siRNA sense strand
caucauuaaugcccuaaag

SEQ ID NO: 944096 - RNA, 19 nt, Homo sapiens
  misc_RNA (1)...(19): siRNA sense strand
guucauacugcacaacuuu

SEQ ID NO: 944097 - RNA, 19 nt, Homo sapiens
  misc_RNA (1)...(19): siRNA sense strand
gacaaguacccuaccugua

SEQ ID NO: 944098 - RNA, 19 nt, Homo sapiens
  misc_RNA (1)...(19): siRNA sense strand
gcacugcgagaugaaguaa

SEQ ID NO: 944099 - RNA, 19 nt, Homo sapiens
  misc_RNA (1)...(19): siRNA sense strand
gagcugcuguguaguacca

SEQ ID NO: 944100 - RNA, 19 nt, Homo sapiens
  misc_RNA (1)...(19): siRNA sense strand
gcuaacacuuggcgcacaa

SEQ ID NO: 944101 - RNA, 19 nt, Homo sapiens
  misc_RNA (1)...(19): siRNA sense strand
ccugugagaucuucaacga

SEQ ID NO: 944102 - RNA, 19 nt, Homo sapiens
  misc_RNA (1)...(19): siRNA sense strand
ccgaugcacuccagacguu

SEQ ID NO: 944103 - RNA, 19 nt, Homo sapiens
  misc_RNA (1)...(19): siRNA sense strand
uugaaaggcuauguguaua

SEQ ID NO: 944104 - RNA, 19 nt, Homo sapiens
  misc_RNA (1)...(19): siRNA sense strand
gccauccucuuugcaauug

SEQ ID NO: 944105 - RNA, 19 nt, Homo sapiens
  misc_RNA (1)...(19): siRNA sense strand
ucaaagacagugaggaaug

SEQ ID NO: 944106 - RNA, 19 nt, Homo sapiens
  misc_RNA (1)...(19): siRNA sense strand
ggauaucauugagaaagau

SEQ ID NO: 944107 - RNA, 19 nt, Homo sapiens
  misc_RNA (1)...(19): siRNA sense strand
gugaaagucucggcagaau

SEQ ID NO: 944108 - RNA, 19 nt, Homo sapiens
  misc_RNA (1)...(19): siRNA sense strand
guaaguucacggacuacua

SEQ ID NO: 944109 - RNA, 19 nt, Homo sapiens
  misc_RNA (1)...(19): siRNA sense strand
agaaagaugagcucaaugu

SEQ ID NO: 944110 - RNA, 19 nt, Homo sapiens
  misc_RNA (1)...(19): siRNA sense strand
gaaaagaagguauacaaca

SEQ ID NO: 944111 - RNA, 19 nt, Homo sapiens
  misc_RNA (1)...(19): siRNA sense strand
ccaccaccuuuaauguuga

SEQ ID NO: 944112 - RNA, 19 nt, Homo sapiens
  misc_RNA (1)...(19): siRNA sense strand
agucagagcugugcuugga

SEQ ID NO: 944113 - RNA, 19 nt, Homo sapiens
  misc_RNA (1)...(19): siRNA sense strand
ccuuuaauguugagugcua

SEQ ID NO: 944114 - RNA, 19 nt, Homo sapiens
  misc_RNA (1)...(19): siRNA sense strand
agaccacgcuugcccuaug

SEQ ID NO: 944115 - RNA, 19 nt, Homo sapiens
  misc_RNA (1)...(19): siRNA sense strand
caaagacagugaggaaugc

SEQ ID NO: 944116 - RNA, 19 nt, Homo sapiens
  misc_RNA (1)...(19): siRNA sense strand
ucuguaaguucacggacua

SEQ ID NO: 944117 - RNA, 19 nt, Homo sapiens
  misc_RNA (1)...(19): siRNA sense strand
ggcagaaggccuacauguu

SEQ ID NO: 944118 - RNA, 19 nt, Homo sapiens
  misc_RNA (1)...(19): siRNA sense strand
caacuucccaggauuagca

SEQ ID NO: 944119 - RNA, 19 nt, Homo sapiens
  misc_RNA (1)...(19): siRNA sense strand
guugagugcuaugaugaaa

SEQ ID NO: 944120 - RNA, 19 nt, Homo sapiens
  misc_RNA (1)...(19): siRNA sense strand
aaaccagucaucauuaaug

SEQ ID NO: 944121 - RNA, 19 nt, Homo sapiens
  misc_RNA (1)...(19): siRNA sense strand
uggcauuucuccugacaug

SEQ ID NO: 944122 - RNA, 19 nt, Homo sapiens
  misc_RNA (1)...(19): siRNA sense strand
gugguggguuuaauggaaa

SEQ ID NO: 944123 - RNA, 19 nt, Homo sapiens
  misc_RNA (1)...(19): siRNA sense strand
ugaaaggcuauguguauau

SEQ ID NO: 944124 - RNA, 19 nt, Homo sapiens
  misc_RNA (1)...(19): siRNA sense strand
acagaugggugaauguuac

SEQ ID NO: 944125 - RNA, 19 nt, Homo sapiens
  misc_RNA (1)...(19): siRNA sense strand
gaaagaugagcucaauguc

SEQ ID NO: 944126 - RNA, 19 nt, Homo sapiens
  misc_RNA (1)...(19): siRNA sense strand
uugaggagauggugaaagu

SEQ ID NO: 944127 - RNA, 19 nt, Homo sapiens
  misc_RNA (1)...(19): siRNA sense strand
gaaggccuacauguucaua

SEQ ID NO: 944128 - RNA, 19 nt, Homo sapiens
  misc_RNA (1)...(19): siRNA sense strand
gcauuucuccugacaugau

SEQ ID NO: 944129 - RNA, 19 nt, Homo sapiens
  misc_RNA (1)...(19): siRNA sense strand
ggccaauguugaggaauau

SEQ ID NO: 944130 - RNA, 19 nt, Homo sapiens
  misc_RNA (1)...(19): siRNA sense strand
guuaugagccagagaccaa

SEQ ID NO: 944131 - RNA, 19 nt, Homo sapiens
  misc_RNA (1)...(19): siRNA sense strand
aggaagaugcuguauuuga

SEQ ID NO: 944132 - RNA, 19 nt, Homo sapiens
  misc_RNA (1)...(19): siRNA sense strand
aaagaugagcucaauguca

SEQ ID NO: 944133 - RNA, 19 nt, Homo sapiens
  misc_RNA (1)...(19): siRNA sense strand
ucuaaacacugcugaacgu

SEQ ID NO: 944134 - RNA, 19 nt, Homo sapiens
  misc_RNA (1)...(19): siRNA sense strand
aaagaccgaugagugguau

SEQ ID NO: 944135 - RNA, 19 nt, Homo sapiens
  misc_RNA (1)...(19): siRNA sense strand
gguggaugaccucuuguuu

SEQ ID NO: 944136 - RNA, 19 nt, Homo sapiens
  misc_RNA (1)...(19): siRNA sense strand
ugugguggguuuaauggaa

SEQ ID NO: 944137 - RNA, 19 nt, Homo sapiens
  misc_RNA (1)...(19): siRNA sense strand
gcaugugugugcuugugua

SEQ ID NO: 944138 - RNA, 19 nt, Homo sapiens
  misc_RNA (1)...(19): siRNA sense strand
ccucagaguuugacuguag

SEQ ID NO: 944139 - RNA, 19 nt, Homo sapiens
  misc_RNA (1)...(19): siRNA sense strand
ugugugugcuuguguauau

SEQ ID NO: 944140 - RNA, 19 nt, Homo sapiens
  misc_RNA (1)...(19): siRNA sense strand
ggacugugcaggcaucugu

SEQ ID NO: 944141 - RNA, 19 nt, Homo sapiens
  misc_RNA (1)...(19): siRNA sense strand
caucuguucuccucaugga

SEQ ID NO: 944142 - RNA, 19 nt, Homo sapiens
  misc_RNA (1)...(19): siRNA sense strand
uugaaagagucacacauuc

SEQ ID NO: 944143 - RNA, 19 nt, Homo sapiens
  misc_RNA (1)...(19): siRNA sense strand
gaaagagucacacauucac

SEQ ID NO: 944144 - RNA, 19 nt, Homo sapiens
  misc_RNA (1)...(19): siRNA sense strand
ccugggaggugcugcuuca

SEQ ID NO: 944145 - RNA, 19 nt, Homo sapiens
  misc_RNA (1)...(19): siRNA sense strand
gcaccguuauuuucuaaug

SEQ ID NO: 944146 - RNA, 19 nt, Homo sapiens
  misc_RNA (1)...(19): siRNA sense strand
gccauccuguggguucuuu

SEQ ID NO: 944147 - RNA, 19 nt, Homo sapiens
  misc_RNA (1)...(19): siRNA sense strand
gcgcaccguuauuuucuaa

SEQ ID NO: 944148 - RNA, 19 nt, Homo sapiens
  misc_RNA (1)...(19): siRNA sense strand
uuugaaagagucacacauu

SEQ ID NO: 944149 - RNA, 19 nt, Homo sapiens
  misc_RNA (1)...(19): siRNA sense strand
gugcaugugugugcuugug

SEQ ID NO: 944150 - RNA, 19 nt, Homo sapiens
  misc_RNA (1)...(19): siRNA sense strand
gugcaugugugugcuugug

SEQ ID NO: 944151 - RNA, 19 nt, Homo sapiens
  misc_RNA (1)...(19): siRNA sense strand
ggcccuuucuugccucuca

SEQ ID NO: 944152 - RNA, 19 nt, Homo sapiens
  misc_RNA (1)...(19): siRNA sense strand
guguauaugugugcaugug

SEQ ID NO: 944153 - RNA, 19 nt, Homo sapiens
  misc_RNA (1)...(19): siRNA sense strand
ugaaagcucagcccuuggu

SEQ ID NO: 944154 - RNA, 19 nt, Homo sapiens
  misc_RNA (1)...(19): siRNA sense strand
gcaucgcccuugugcuauu

SEQ ID NO: 944155 - RNA, 19 nt, Homo sapiens
  misc_RNA (1)...(19): siRNA sense strand
caacugccuuuguaugaca

SEQ ID NO: 944156 - RNA, 19 nt, Homo sapiens
  misc_RNA (1)...(19): siRNA sense strand
gugcaucgcccuugugcua

SEQ ID NO: 944157 - RNA, 19 nt, Homo sapiens
  misc_RNA (1)...(19): siRNA sense strand
gggcagcgguugacaaagc

SEQ ID NO: 944158 - RNA, 19 nt, Homo sapiens
  misc_RNA (1)...(19): siRNA sense strand
acauucugcuacaacaaua

SEQ ID NO: 944159 - RNA, 19 nt, Homo sapiens
  misc_RNA (1)...(19): siRNA sense strand
gugggcacuugcacgauuu

SEQ ID NO: 944160 - RNA, 19 nt, Homo sapiens
  misc_RNA (1)...(19): siRNA sense strand
gcaacugccuuuguaugac

SEQ ID NO: 944161 - RNA, 19 nt, Homo sapiens
  misc_RNA (1)...(19): siRNA sense strand
gguguugugcuguguguga

SEQ ID NO: 944162 - RNA, 19 nt, Homo sapiens
  misc_RNA (1)...(19): siRNA sense strand
gcauacacggguucaagau

SEQ ID NO: 944163 - RNA, 19 nt, Homo sapiens
  misc_RNA (1)...(19): siRNA sense strand
cgcaacugccuuuguauga

SEQ ID NO: 944164 - RNA, 19 nt, Homo sapiens
  misc_RNA (1)...(19): siRNA sense strand
caucgcccuugugcuauug

SEQ ID NO: 944165 - RNA, 19 nt, Homo sapiens
  misc_RNA (1)...(19): siRNA sense strand
guaugugugugugcaugug

SEQ ID NO: 944166 - RNA, 19 nt, Homo sapiens
  misc_RNA (1)...(19): siRNA sense strand
ccgggcagcgguugacaaa

SEQ ID NO: 944167 - RNA, 19 nt, Homo sapiens
  misc_RNA (1)...(19): siRNA sense strand
ccuacuaugugcauuauuu

SEQ ID NO: 944168 - RNA, 19 nt, Homo sapiens
  misc_RNA (1)...(19): siRNA sense strand
gaggacaccuggaggaauc

SEQ ID NO: 944169 - RNA, 19 nt, Homo sapiens
  misc_RNA (1)...(19): siRNA sense strand
gcaacacguucacccaaga

SEQ ID NO: 944170 - RNA, 19 nt, Homo sapiens
  misc_RNA (1)...(19): siRNA sense strand
uaccucagcuggaagaauu

SEQ ID NO: 944171 - RNA, 19 nt, Homo sapiens
  misc_RNA (1)...(19): siRNA sense strand
gcaaacgacucugacaagu

SEQ ID NO: 944172 - RNA, 19 nt, Homo sapiens
  misc_RNA (1)...(19): siRNA sense strand
ugacaagucucuguucuca

SEQ ID NO: 944173 - RNA, 19 nt, Homo sapiens
  misc_RNA (1)...(19): siRNA sense strand
gcauagaccaauuugcaaa

SEQ ID NO: 944174 - RNA, 19 nt, Homo sapiens
  misc_RNA (1)...(19): siRNA sense strand
gaaccugugagccaacauu

SEQ ID NO: 944175 - RNA, 19 nt, Homo sapiens
  misc_RNA (1)...(19): siRNA sense strand
acaagucucuguucucaag

SEQ ID NO: 944176 - RNA, 19 nt, Homo sapiens
  misc_RNA (1)...(19): siRNA sense strand
ucagcuggaagaauuaaua

SEQ ID NO: 944177 - RNA, 19 nt, Homo sapiens
  misc_RNA (1)...(19): siRNA sense strand
acacgugcauagaccaauu

SEQ ID NO: 944178 - RNA, 19 nt, Homo sapiens
  misc_RNA (1)...(19): siRNA sense strand
ccugugagccaacauuauu

SEQ ID NO: 944179 - RNA, 19 nt, Homo sapiens
  misc_RNA (1)...(19): siRNA sense strand
cagcuggaagaauuaauaa

SEQ ID NO: 944180 - RNA, 19 nt, Homo sapiens
  misc_RNA (1)...(19): siRNA sense strand
cacguucacccaagaagua

SEQ ID NO: 944181 - RNA, 19 nt, Homo sapiens
  misc_RNA (1)...(19): siRNA sense strand
guucacccaagaaguauuu

SEQ ID NO: 944182 - RNA, 19 nt, Homo sapiens
  misc_RNA (1)...(19): siRNA sense strand
uuacugagcaccuacuaug

SEQ ID NO: 944183 - RNA, 19 nt, Homo sapiens
  misc_RNA (1)...(19): siRNA sense strand
gggcaaacgacucugacaa

SEQ ID NO: 944184 - RNA, 19 nt, Homo sapiens
  misc_RNA (1)...(19): siRNA sense strand
uucaagguauuuccaguug

SEQ ID NO: 944185 - RNA, 19 nt, Homo sapiens
  misc_RNA (1)...(19): siRNA sense strand
caacacguucacccaagaa

SEQ ID NO: 944186 - RNA, 19 nt, Homo sapiens
  misc_RNA (1)...(19): siRNA sense strand
uuaauaagcaacacguuca

SEQ ID NO: 944187 - RNA, 19 nt, Homo sapiens
  misc_RNA (1)...(19): siRNA sense strand
caccuacuaugugcauuau

SEQ ID NO: 944188 - RNA, 19 nt, Homo sapiens
  misc_RNA (1)...(19): siRNA sense strand
ggaaucuacacgugcauag

SEQ ID NO: 944189 - RNA, 19 nt, Homo sapiens
  misc_RNA (1)...(19): siRNA sense strand
cagcgucuucuucaaggua

SEQ ID NO: 944190 - RNA, 19 nt, Homo sapiens
  misc_RNA (1)...(19): siRNA sense strand
auuauuaccucagcuggaa

SEQ ID NO: 944191 - RNA, 19 nt, Homo sapiens
  misc_RNA (1)...(19): siRNA sense strand
ggcaaacgacucugacaag

SEQ ID NO: 944192 - RNA, 19 nt, Homo sapiens
  misc_RNA (1)...(19): siRNA sense strand
cuggaagaauuaauaagca

SEQ ID NO: 944193 - RNA, 19 nt, Homo sapiens
  misc_RNA (1)...(19): siRNA sense strand
ccucagcacuuuucucuuc

SEQ ID NO: 944194 - RNA, 19 nt, Homo sapiens
  misc_RNA (1)...(19): siRNA sense strand
ggaggacaccuggaggaau

SEQ ID NO: 944195 - RNA, 19 nt, Homo sapiens
  misc_RNA (1)...(19): siRNA sense strand
gcuggaagaauuaauaagc

SEQ ID NO: 944196 - RNA, 19 nt, Homo sapiens
  misc_RNA (1)...(19): siRNA sense strand
ugccucagccucccgagua

SEQ ID NO: 944197 - RNA, 19 nt, Homo sapiens
  misc_RNA (1)...(19): siRNA sense strand
cagcccagccucagcacuu

SEQ ID NO: 944198 - RNA, 19 nt, Homo sapiens
  misc_RNA (1)...(19): siRNA sense strand
agaccaauuugcaaaagaa

SEQ ID NO: 944199 - RNA, 19 nt, Homo sapiens
  misc_RNA (1)...(19): siRNA sense strand
aaccugugagccaacauua

SEQ ID NO: 944200 - RNA, 19 nt, Homo sapiens
  misc_RNA (1)...(19): siRNA sense strand
ggagagaaaucuuacaaau

SEQ ID NO: 944201 - RNA, 19 nt, Homo sapiens
  misc_RNA (1)...(19): siRNA sense strand
gauaauccauuuaggagaa

SEQ ID NO: 944202 - RNA, 19 nt, Homo sapiens
  misc_RNA (1)...(19): siRNA sense strand
agagaaaccuuacaaaugu

SEQ ID NO: 944203 - RNA, 19 nt, Homo sapiens
  misc_RNA (1)...(19): siRNA sense strand
gagagaaaccuuacaaaug

SEQ ID NO: 944204 - RNA, 19 nt, Homo sapiens
  misc_RNA (1)...(19): siRNA sense strand
ugagaaaccuuacaagugu

SEQ ID NO: 944205 - RNA, 19 nt, Homo sapiens
  misc_RNA (1)...(19): siRNA sense strand
ugagaaaccuuacaagugu

SEQ ID NO: 944206 - RNA, 19 nt, Homo sapiens
  misc_RNA (1)...(19): siRNA sense strand
ugagaaaccuuacaagugu

SEQ ID NO: 944207 - RNA, 19 nt, Homo sapiens
  misc_RNA (1)...(19): siRNA sense strand
ugagaaaccuuacaagugu

SEQ ID NO: 944208 - RNA, 19 nt, Homo sapiens
  misc_RNA (1)...(19): siRNA sense strand
ggaaaguccuucaguuaca

SEQ ID NO: 944209 - RNA, 19 nt, Homo sapiens
  misc_RNA (1)...(19): siRNA sense strand
ggaaaguccuucaguuaca

SEQ ID NO: 944210 - RNA, 19 nt, Homo sapiens
  misc_RNA (1)...(19): siRNA sense strand
ggaaaguccuucaguuaca

SEQ ID NO: 944211 - RNA, 19 nt, Homo sapiens
  misc_RNA (1)...(19): siRNA sense strand
ggcgaagccuuuaauugua

SEQ ID NO: 944212 - RNA, 19 nt, Homo sapiens
  misc_RNA (1)...(19): siRNA sense strand
agagaaaccuuacaagugu

SEQ ID NO: 944213 - RNA, 19 nt, Homo sapiens
  misc_RNA (1)...(19): siRNA sense strand
agagaaaccuuacaagugu

SEQ ID NO: 944214 - RNA, 19 nt, Homo sapiens
  misc_RNA (1)...(19): siRNA sense strand
agagaaaccuuacaagugu

SEQ ID NO: 944215 - RNA, 19 nt, Homo sapiens
  misc_RNA (1)...(19): siRNA sense strand
agagaaaccuuacaagugu

SEQ ID NO: 944216 - RNA, 19 nt, Homo sapiens
  misc_RNA (1)...(19): siRNA sense strand
gagagaaaccuuacaagug

SEQ ID NO: 944217 - RNA, 19 nt, Homo sapiens
  misc_RNA (1)...(19): siRNA sense strand
gagagaaaccuuacaagug

SEQ ID NO: 944218 - RNA, 19 nt, Homo sapiens
  misc_RNA (1)...(19): siRNA sense strand
gagagaaaccuuacaagug

SEQ ID NO: 944219 - RNA, 19 nt, Homo sapiens
  misc_RNA (1)...(19): siRNA sense strand
gagagaaaccuuacaagug

SEQ ID NO: 944220 - RNA, 19 nt, Homo sapiens
  misc_RNA (1)...(19): siRNA sense strand
ugaagaaugugacagaguu

SEQ ID NO: 944221 - RNA, 19 nt, Homo sapiens
  misc_RNA (1)...(19): siRNA sense strand
guaaggaaacaucagauaa

SEQ ID NO: 944222 - RNA, 19 nt, Homo sapiens
  misc_RNA (1)...(19): siRNA sense strand
ggagagaaaccuuacaaau

SEQ ID NO: 944223 - RNA, 19 nt, Homo sapiens
  misc_RNA (1)...(19): siRNA sense strand
gaaaguccuucaguuacaa

SEQ ID NO: 944224 - RNA, 19 nt, Homo sapiens
  misc_RNA (1)...(19): siRNA sense strand
gaaaguccuucaguuacaa

SEQ ID NO: 944225 - RNA, 19 nt, Homo sapiens
  misc_RNA (1)...(19): siRNA sense strand
gaaaguccuucaguuacaa

SEQ ID NO: 944226 - RNA, 19 nt, Homo sapiens
  misc_RNA (1)...(19): siRNA sense strand
guggaaaguccuucaguua

SEQ ID NO: 944227 - RNA, 19 nt, Homo sapiens
  misc_RNA (1)...(19): siRNA sense strand
guggaaaguccuucaguua

SEQ ID NO: 944228 - RNA, 19 nt, Homo sapiens
  misc_RNA (1)...(19): siRNA sense strand
guggaaaguccuucaguua

SEQ ID NO: 944229 - RNA, 19 nt, Homo sapiens
  misc_RNA (1)...(19): siRNA sense strand
gagagaaaucuuacaaaug

SEQ ID NO: 944230 - RNA, 19 nt, Homo sapiens
  misc_RNA (1)...(19): siRNA sense strand
aaucaacaaucacaccuuu

SEQ ID NO: 944231 - RNA, 19 nt, Homo sapiens
  misc_RNA (1)...(19): siRNA sense strand
cacaagaccuucagucaca

SEQ ID NO: 944232 - RNA, 19 nt, Homo sapiens
  misc_RNA (1)...(19): siRNA sense strand
ggagagaaaccuuacaagu

SEQ ID NO: 944233 - RNA, 19 nt, Homo sapiens
  misc_RNA (1)...(19): siRNA sense strand
ggagagaaaccuuacaagu

SEQ ID NO: 944234 - RNA, 19 nt, Homo sapiens
  misc_RNA (1)...(19): siRNA sense strand
ggagagaaaccuuacaagu

SEQ ID NO: 944235 - RNA, 19 nt, Homo sapiens
  misc_RNA (1)...(19): siRNA sense strand
ggagagaaaccuuacaagu

SEQ ID NO: 944236 - RNA, 19 nt, Homo sapiens
  misc_RNA (1)...(19): siRNA sense strand
caucauagacuucauacug

SEQ ID NO: 944237 - RNA, 19 nt, Homo sapiens
  misc_RNA (1)...(19): siRNA sense strand
ggcaaaccauacuagaauu

SEQ ID NO: 944238 - RNA, 19 nt, Homo sapiens
  misc_RNA (1)...(19): siRNA sense strand
caucauagacuucauacug

SEQ ID NO: 944239 - RNA, 19 nt, Homo sapiens
  misc_RNA (1)...(19): siRNA sense strand
caucauagacuucauacug

SEQ ID NO: 944240 - RNA, 19 nt, Homo sapiens
  misc_RNA (1)...(19): siRNA sense strand
gcgaagccuuuaauuguag

SEQ ID NO: 944241 - RNA, 19 nt, Homo sapiens
  misc_RNA (1)...(19): siRNA sense strand
ucccuuacaugccaucaua

SEQ ID NO: 944242 - RNA, 19 nt, Homo sapiens
  misc_RNA (1)...(19): siRNA sense strand
gaauaaaaccuuacaagug

SEQ ID NO: 944243 - RNA, 19 nt, Homo sapiens
  misc_RNA (1)...(19): siRNA sense strand
gaagaaugugacagaguuu

SEQ ID NO: 944244 - RNA, 19 nt, Homo sapiens
  misc_RNA (1)...(19): siRNA sense strand
caucguagacuucauagug

SEQ ID NO: 944245 - RNA, 19 nt, Homo sapiens
  misc_RNA (1)...(19): siRNA sense strand
gacacaagauaauucauac

SEQ ID NO: 944246 - RNA, 19 nt, Homo sapiens
  misc_RNA (1)...(19): siRNA sense strand
ugauauauguggcaaaguc

SEQ ID NO: 944247 - RNA, 19 nt, Homo sapiens
  misc_RNA (1)...(19): siRNA sense strand
gugagaaaccuuacaagug

SEQ ID NO: 944248 - RNA, 19 nt, Homo sapiens
  misc_RNA (1)...(19): siRNA sense strand
gugagaaaccuuacaagug

SEQ ID NO: 944249 - RNA, 19 nt, Homo sapiens
  misc_RNA (1)...(19): siRNA sense strand
gugagaaaccuuacaagug

SEQ ID NO: 944250 - RNA, 19 nt, Homo sapiens
  misc_RNA (1)...(19): siRNA sense strand
gugagaaaccuuacaagug

SEQ ID NO: 944251 - RNA, 19 nt, Homo sapiens
  misc_RNA (1)...(19): siRNA sense strand
gagagacacaagauaauuc

SEQ ID NO: 944252 - RNA, 19 nt, Homo sapiens
  misc_RNA (1)...(19): siRNA sense strand
ggaaacaucagauaaucca

SEQ ID NO: 944253 - RNA, 19 nt, Homo sapiens
  misc_RNA (1)...(19): siRNA sense strand
uguaaugagugucacaaga

SEQ ID NO: 944254 - RNA, 19 nt, Homo sapiens
  misc_RNA (1)...(19): siRNA sense strand
caacccuuguaauucauaa

SEQ ID NO: 944255 - RNA, 19 nt, Homo sapiens
  misc_RNA (1)...(19): siRNA sense strand
gcaaaccauacuagaauuc

SEQ ID NO: 944256 - RNA, 19 nt, Homo sapiens
  misc_RNA (1)...(19): siRNA sense strand
caaguguaaugacuguguu

SEQ ID NO: 944257 - RNA, 19 nt, Homo sapiens
  misc_RNA (1)...(19): siRNA sense strand
caucguagacuucauacug

SEQ ID NO: 944258 - RNA, 19 nt, Homo sapiens
  misc_RNA (1)...(19): siRNA sense strand
ucucuuccaugccaucgua

SEQ ID NO: 944259 - RNA, 19 nt, Homo sapiens
  misc_RNA (1)...(19): siRNA sense strand
agucacaggucaucucuuc

SEQ ID NO: 944260 - RNA, 19 nt, Homo sapiens
  misc_RNA (1)...(19): siRNA sense strand
uaaugaguguggcaagaug

SEQ ID NO: 944261 - RNA, 19 nt, Homo sapiens
  misc_RNA (1)...(19): siRNA sense strand
uggcgaagccuuuaauugu

SEQ ID NO: 944262 - RNA, 19 nt, Homo sapiens
  misc_RNA (1)...(19): siRNA sense strand
ucagauaauccauuuagga

SEQ ID NO: 944263 - RNA, 19 nt, Homo sapiens
  misc_RNA (1)...(19): siRNA sense strand
caucagauaauccauuuag

SEQ ID NO: 944264 - RNA, 19 nt, Homo sapiens
  misc_RNA (1)...(19): siRNA sense strand
auucaacccuuguaauuca

SEQ ID NO: 944265 - RNA, 19 nt, Homo sapiens
  misc_RNA (1)...(19): siRNA sense strand
gagaaaucuuacaaaugug

SEQ ID NO: 944266 - RNA, 19 nt, Homo sapiens
  misc_RNA (1)...(19): siRNA sense strand
guagcucauuuguaaggaa

SEQ ID NO: 944267 - RNA, 19 nt, Homo sapiens
  misc_RNA (1)...(19): siRNA sense strand
uagcucauuuguaaggaaa

SEQ ID NO: 944268 - RNA, 19 nt, Homo sapiens
  misc_RNA (1)...(19): siRNA sense strand
ucccugacaugccaucgua

SEQ ID NO: 944269 - RNA, 19 nt, Homo sapiens
  misc_RNA (1)...(19): siRNA sense strand
guaaggcucacaaucacuu

SEQ ID NO: 944270 - RNA, 19 nt, Homo sapiens
  misc_RNA (1)...(19): siRNA sense strand
gugguaaggcucacaauca

SEQ ID NO: 944271 - RNA, 19 nt, Homo sapiens
  misc_RNA (1)...(19): siRNA sense strand
acacuagugagaaaccuua

SEQ ID NO: 944272 - RNA, 19 nt, Homo sapiens
  misc_RNA (1)...(19): siRNA sense strand
aguuacaagucaucccuua

SEQ ID NO: 944273 - RNA, 19 nt, Homo sapiens
  misc_RNA (1)...(19): siRNA sense strand
aguuacaagucaucccuua

SEQ ID NO: 944274 - RNA, 19 nt, Homo sapiens
  misc_RNA (1)...(19): siRNA sense strand
aauguacagucacaccuuu

SEQ ID NO: 944275 - RNA, 19 nt, Homo sapiens
  misc_RNA (1)...(19): siRNA sense strand
ggugagaaaccuuacaagu

SEQ ID NO: 944276 - RNA, 19 nt, Homo sapiens
  misc_RNA (1)...(19): siRNA sense strand
uguaaggaaacaucagaua

SEQ ID NO: 944277 - RNA, 19 nt, Homo sapiens
  misc_RNA (1)...(19): siRNA sense strand
ggugagaaaccuuacaagu

SEQ ID NO: 944278 - RNA, 19 nt, Homo sapiens
  misc_RNA (1)...(19): siRNA sense strand
aaggaaacaucagauaauc

SEQ ID NO: 944279 - RNA, 19 nt, Homo sapiens
  misc_RNA (1)...(19): siRNA sense strand
ugagagacacaagauaauu

SEQ ID NO: 944280 - RNA, 19 nt, Homo sapiens
  misc_RNA (1)...(19): siRNA sense strand
auacuggagagaaaucuua

SEQ ID NO: 944281 - RNA, 19 nt, Homo sapiens
  misc_RNA (1)...(19): siRNA sense strand
ggugagaaaccuuacaagu

SEQ ID NO: 944282 - RNA, 19 nt, Homo sapiens
  misc_RNA (1)...(19): siRNA sense strand
acacuggugagaaaccuua

SEQ ID NO: 944283 - RNA, 19 nt, Homo sapiens
  misc_RNA (1)...(19): siRNA sense strand
ucaacaaucacaccuuuca

SEQ ID NO: 944284 - RNA, 19 nt, Homo sapiens
  misc_RNA (1)...(19): siRNA sense strand
uguggaaaguccuucaguu

SEQ ID NO: 944285 - RNA, 19 nt, Homo sapiens
  misc_RNA (1)...(19): siRNA sense strand
acacuggugagaaaccuua

SEQ ID NO: 944286 - RNA, 19 nt, Homo sapiens
  misc_RNA (1)...(19): siRNA sense strand
uguggaaaguccuucaguu

SEQ ID NO: 944287 - RNA, 19 nt, Homo sapiens
  misc_RNA (1)...(19): siRNA sense strand
uguggaaaguccuucaguu

SEQ ID NO: 944288 - RNA, 19 nt, Homo sapiens
  misc_RNA (1)...(19): siRNA sense strand
uuacaagucaucccuuaga

SEQ ID NO: 944289 - RNA, 19 nt, Homo sapiens
  misc_RNA (1)...(19): siRNA sense strand
agccuugcaugucaucaua

SEQ ID NO: 944290 - RNA, 19 nt, Homo sapiens
  misc_RNA (1)...(19): siRNA sense strand
guccuucaguuacaaguca

SEQ ID NO: 944291 - RNA, 19 nt, Homo sapiens
  misc_RNA (1)...(19): siRNA sense strand
gcggagagaaaccuuacaa

SEQ ID NO: 944292 - RNA, 19 nt, Homo sapiens
  misc_RNA (1)...(19): siRNA sense strand
uggcaaaccauacuagaau

SEQ ID NO: 944293 - RNA, 19 nt, Homo sapiens
  misc_RNA (1)...(19): siRNA sense strand
gagacuggcgaagccuuua

SEQ ID NO: 944294 - RNA, 19 nt, Homo sapiens
  misc_RNA (1)...(19): siRNA sense strand
guccuucaguuacaaguca

SEQ ID NO: 944295 - RNA, 19 nt, Homo sapiens
  misc_RNA (1)...(19): siRNA sense strand
guccuucaguuacaaguca

SEQ ID NO: 944296 - RNA, 19 nt, Homo sapiens
  misc_RNA (1)...(19): siRNA sense strand
uagacuucauacuggaaua

SEQ ID NO: 944297 - RNA, 19 nt, Homo sapiens
  misc_RNA (1)...(19): siRNA sense strand
gcacgucaucauagacuuc

SEQ ID NO: 944298 - RNA, 19 nt, Homo sapiens
  misc_RNA (1)...(19): siRNA sense strand
uguaaugaaugugggaaga

SEQ ID NO: 944299 - RNA, 19 nt, Homo sapiens
  misc_RNA (1)...(19): siRNA sense strand
cgucaucauagacuucaua

SEQ ID NO: 944300 - RNA, 19 nt, Homo sapiens
  misc_RNA (1)...(19): siRNA sense strand
ggccuuagauuaccucuua

SEQ ID NO: 944301 - RNA, 19 nt, Homo sapiens
  misc_RNA (1)...(19): siRNA sense strand
ggauaggugugaccauuua

SEQ ID NO: 944302 - RNA, 19 nt, Homo sapiens
  misc_RNA (1)...(19): siRNA sense strand
gauagcaucucuaaacuca

SEQ ID NO: 944303 - RNA, 19 nt, Homo sapiens
  misc_RNA (1)...(19): siRNA sense strand
agaaaucucuccagacaaa

SEQ ID NO: 944304 - RNA, 19 nt, Homo sapiens
  misc_RNA (1)...(19): siRNA sense strand
gagguuacguggcuccaua

SEQ ID NO: 944305 - RNA, 19 nt, Homo sapiens
  misc_RNA (1)...(19): siRNA sense strand
gaaaagagcucugggucua

SEQ ID NO: 944306 - RNA, 19 nt, Homo sapiens
  misc_RNA (1)...(19): siRNA sense strand
uggcaaaccucuacacuug

SEQ ID NO: 944307 - RNA, 19 nt, Homo sapiens
  misc_RNA (1)...(19): siRNA sense strand
ucacaugguuugucccuuu

SEQ ID NO: 944308 - RNA, 19 nt, Homo sapiens
  misc_RNA (1)...(19): siRNA sense strand
ucagaaaucucuccagaca

SEQ ID NO: 944309 - RNA, 19 nt, Homo sapiens
  misc_RNA (1)...(19): siRNA sense strand
ugauggaaguccuaagaua

SEQ ID NO: 944310 - RNA, 19 nt, Homo sapiens
  misc_RNA (1)...(19): siRNA sense strand
gauggaaguccuaagauaa

SEQ ID NO: 944311 - RNA, 19 nt, Homo sapiens
  misc_RNA (1)...(19): siRNA sense strand
gcuaagaguaccagagaua

SEQ ID NO: 944312 - RNA, 19 nt, Homo sapiens
  misc_RNA (1)...(19): siRNA sense strand
aaagaucuaugaugagguu

SEQ ID NO: 944313 - RNA, 19 nt, Homo sapiens
  misc_RNA (1)...(19): siRNA sense strand
uuacguggcuccauaacuu

SEQ ID NO: 944314 - RNA, 19 nt, Homo sapiens
  misc_RNA (1)...(19): siRNA sense strand
aaaauaaacugcccuuuga

SEQ ID NO: 944315 - RNA, 19 nt, Homo sapiens
  misc_RNA (1)...(19): siRNA sense strand
gggaccagcugcacuuaau

SEQ ID NO: 944316 - RNA, 19 nt, Homo sapiens
  misc_RNA (1)...(19): siRNA sense strand
gcacuuaauagccugcuuu

SEQ ID NO: 944317 - RNA, 19 nt, Homo sapiens
  misc_RNA (1)...(19): siRNA sense strand
aaacugcccuuugauggaa

SEQ ID NO: 944318 - RNA, 19 nt, Homo sapiens
  misc_RNA (1)...(19): siRNA sense strand
acagauuggccuuagauua

SEQ ID NO: 944319 - RNA, 19 nt, Homo sapiens
  misc_RNA (1)...(19): siRNA sense strand
ccucuacacuugcauuaau

SEQ ID NO: 944320 - RNA, 19 nt, Homo sapiens
  misc_RNA (1)...(19): siRNA sense strand
caaauagacaacauagcua

SEQ ID NO: 944321 - RNA, 19 nt, Homo sapiens
  misc_RNA (1)...(19): siRNA sense strand
gacaacauagcuaagagua

SEQ ID NO: 944322 - RNA, 19 nt, Homo sapiens
  misc_RNA (1)...(19): siRNA sense strand
cgauagaggaggauauaaa

SEQ ID NO: 944323 - RNA, 19 nt, Homo sapiens
  misc_RNA (1)...(19): siRNA sense strand
ggaccagcugcacuuaaua

SEQ ID NO: 944324 - RNA, 19 nt, Homo sapiens
  misc_RNA (1)...(19): siRNA sense strand
cacaugguuugucccuuua

SEQ ID NO: 944325 - RNA, 19 nt, Homo sapiens
  misc_RNA (1)...(19): siRNA sense strand
caacagauuggccuuagau

SEQ ID NO: 944326 - RNA, 19 nt, Homo sapiens
  misc_RNA (1)...(19): siRNA sense strand
gaugucacccucagaaauc

SEQ ID NO: 944327 - RNA, 19 nt, Homo sapiens
  misc_RNA (1)...(19): siRNA sense strand
gguggagucugugcaguga

SEQ ID NO: 944328 - RNA, 19 nt, Homo sapiens
  misc_RNA (1)...(19): siRNA sense strand
uagcaucucuaaacucaag

SEQ ID NO: 944329 - RNA, 19 nt, Homo sapiens
  misc_RNA (1)...(19): siRNA sense strand
ggugugaccauuuauaaca

SEQ ID NO: 944330 - RNA, 19 nt, Homo sapiens
  misc_RNA (1)...(19): siRNA sense strand
cucaaggccuccauagauu

SEQ ID NO: 944331 - RNA, 19 nt, Homo sapiens
  misc_RNA (1)...(19): siRNA sense strand
ccagacaaauagacaacau

SEQ ID NO: 944332 - RNA, 19 nt, Homo sapiens
  misc_RNA (1)...(19): siRNA sense strand
aaagagcucugggucuaau

SEQ ID NO: 944333 - RNA, 19 nt, Homo sapiens
  misc_RNA (1)...(19): siRNA sense strand
gggauaggugugaccauuu

SEQ ID NO: 944334 - RNA, 19 nt, Homo sapiens
  misc_RNA (1)...(19): siRNA sense strand
cagauuggccuuagauuac

SEQ ID NO: 944335 - RNA, 19 nt, Homo sapiens
  misc_RNA (1)...(19): siRNA sense strand
uaggugugaccauuuauaa

SEQ ID NO: 944336 - RNA, 19 nt, Homo sapiens
  misc_RNA (1)...(19): siRNA sense strand
aaaucucuccagacaaaua

SEQ ID NO: 944337 - RNA, 19 nt, Homo sapiens
  misc_RNA (1)...(19): siRNA sense strand
ggcgauagaggaggauaua

SEQ ID NO: 944338 - RNA, 19 nt, Homo sapiens
  misc_RNA (1)...(19): siRNA sense strand
ucuagcaaauguagucaug

SEQ ID NO: 944339 - RNA, 19 nt, Homo sapiens
  misc_RNA (1)...(19): siRNA sense strand
gcauuaauaacauccaaca

SEQ ID NO: 944340 - RNA, 19 nt, Homo sapiens
  misc_RNA (1)...(19): siRNA sense strand
uaaacugcccuuugaugga

SEQ ID NO: 944341 - RNA, 19 nt, Homo sapiens
  misc_RNA (1)...(19): siRNA sense strand
cagacaaauagacaacaua

SEQ ID NO: 944342 - RNA, 19 nt, Homo sapiens
  misc_RNA (1)...(19): siRNA sense strand
gauagaggaggauauaaaa

SEQ ID NO: 944343 - RNA, 19 nt, Homo sapiens
  misc_RNA (1)...(19): siRNA sense strand
uagcuaagaguaccagaga

SEQ ID NO: 944344 - RNA, 19 nt, Homo sapiens
  misc_RNA (1)...(19): siRNA sense strand
ggaggguucacuuaucaug

SEQ ID NO: 944345 - RNA, 19 nt, Homo sapiens
  misc_RNA (1)...(19): siRNA sense strand
uaaacucaaggccuccaua

SEQ ID NO: 944346 - RNA, 19 nt, Homo sapiens
  misc_RNA (1)...(19): siRNA sense strand
gaggguucacuuaucauga

SEQ ID NO: 944347 - RNA, 19 nt, Homo sapiens
  misc_RNA (1)...(19): siRNA sense strand
gaccagcugcacuuaauag

SEQ ID NO: 944348 - RNA, 19 nt, Homo sapiens
  misc_RNA (1)...(19): siRNA sense strand
acaaauagacaacauagcu

SEQ ID NO: 944349 - RNA, 19 nt, Homo sapiens
  misc_RNA (1)...(19): siRNA sense strand
caugaugucacccucagaa

SEQ ID NO: 944350 - RNA, 19 nt, Homo sapiens
  misc_RNA (1)...(19): siRNA sense strand
agaaugugcugugggacuu

SEQ ID NO: 944351 - RNA, 19 nt, Homo sapiens
  misc_RNA (1)...(19): siRNA sense strand
acucaaggccuccauagau

SEQ ID NO: 944352 - RNA, 19 nt, Homo sapiens
  misc_RNA (1)...(19): siRNA sense strand
agacaaauagacaacauag

SEQ ID NO: 944353 - RNA, 19 nt, Homo sapiens
  misc_RNA (1)...(19): siRNA sense strand
cucuacacuugcauuaaua

SEQ ID NO: 944354 - RNA, 19 nt, Homo sapiens
  misc_RNA (1)...(19): siRNA sense strand
aauaaacugcccuuugaug

SEQ ID NO: 944355 - RNA, 19 nt, Homo sapiens
  misc_RNA (1)...(19): siRNA sense strand
cuuaauagccugcuuucuc

SEQ ID NO: 944356 - RNA, 19 nt, Homo sapiens
  misc_RNA (1)...(19): siRNA sense strand
acaacagauuggccuuaga

SEQ ID NO: 944357 - RNA, 19 nt, Homo sapiens
  misc_RNA (1)...(19): siRNA sense strand
ggggaggguucacuuauca

SEQ ID NO: 944358 - RNA, 19 nt, Homo sapiens
  misc_RNA (1)...(19): siRNA sense strand
gcgauagaggaggauauaa

SEQ ID NO: 944359 - RNA, 19 nt, Homo sapiens
  misc_RNA (1)...(19): siRNA sense strand
agagcaggguggagucugu

SEQ ID NO: 944360 - RNA, 19 nt, Homo sapiens
  misc_RNA (1)...(19): siRNA sense strand
ggggauaggugugaccauu

SEQ ID NO: 944361 - RNA, 19 nt, Homo sapiens
  misc_RNA (1)...(19): siRNA sense strand
uagacaacauagcuaagag

SEQ ID NO: 944362 - RNA, 19 nt, Homo sapiens
  misc_RNA (1)...(19): siRNA sense strand
gaaugugcugugggacuuu

SEQ ID NO: 944363 - RNA, 19 nt, Homo sapiens
  misc_RNA (1)...(19): siRNA sense strand
aggguucacuuaucaugau

SEQ ID NO: 944364 - RNA, 19 nt, Homo sapiens
  misc_RNA (1)...(19): siRNA sense strand
cuuuggcccuugucucuau

SEQ ID NO: 944365 - RNA, 19 nt, Homo sapiens
  misc_RNA (1)...(19): siRNA sense strand
ccuguugcauuuaugucaa

SEQ ID NO: 944366 - RNA, 19 nt, Homo sapiens
  misc_RNA (1)...(19): siRNA sense strand
cauccaacauacgggagaa

SEQ ID NO: 944367 - RNA, 19 nt, Homo sapiens
  misc_RNA (1)...(19): siRNA sense strand
cacccaacccagacagaaa

SEQ ID NO: 944368 - RNA, 19 nt, Homo sapiens
  misc_RNA (1)...(19): siRNA sense strand
ugaugucacccucagaaau

SEQ ID NO: 944369 - RNA, 19 nt, Homo sapiens
  misc_RNA (1)...(19): siRNA sense strand
aaacucaaggccuccauag

SEQ ID NO: 944370 - RNA, 19 nt, Homo sapiens
  misc_RNA (1)...(19): siRNA sense strand
auaggugugaccauuuaua

SEQ ID NO: 944371 - RNA, 19 nt, Homo sapiens
  misc_RNA (1)...(19): siRNA sense strand
gaucuaugaugagguuacg

SEQ ID NO: 944372 - RNA, 19 nt, Homo sapiens
  misc_RNA (1)...(19): siRNA sense strand
caauaacaguggggcgaua

SEQ ID NO: 944373 - RNA, 19 nt, Homo sapiens
  misc_RNA (1)...(19): siRNA sense strand
uggagucugugcagugauc

SEQ ID NO: 944374 - RNA, 19 nt, Homo sapiens
  misc_RNA (1)...(19): siRNA sense strand
ucaaggccuccauagauuc

SEQ ID NO: 944375 - RNA, 19 nt, Homo sapiens
  misc_RNA (1)...(19): siRNA sense strand
gauaggugugaccauuuau

SEQ ID NO: 944376 - RNA, 19 nt, Homo sapiens
  misc_RNA (1)...(19): siRNA sense strand
guucacuuaucaugauguc

SEQ ID NO: 944377 - RNA, 19 nt, Homo sapiens
  misc_RNA (1)...(19): siRNA sense strand
cagaauggcuugauguuua

SEQ ID NO: 944378 - RNA, 19 nt, Homo sapiens
  misc_RNA (1)...(19): siRNA sense strand
gaaugaaauuugcagagua

SEQ ID NO: 944379 - RNA, 19 nt, Homo sapiens
  misc_RNA (1)...(19): siRNA sense strand
ggacucauccagauuguua

SEQ ID NO: 944380 - RNA, 19 nt, Homo sapiens
  misc_RNA (1)...(19): siRNA sense strand
ugacggagcuugaugaaga

SEQ ID NO: 944381 - RNA, 19 nt, Homo sapiens
  misc_RNA (1)...(19): siRNA sense strand
gagcaagaguaucuaaaga

SEQ ID NO: 944382 - RNA, 19 nt, Homo sapiens
  misc_RNA (1)...(19): siRNA sense strand
ggacguggcuuuauuucuc

SEQ ID NO: 944383 - RNA, 19 nt, Homo sapiens
  misc_RNA (1)...(19): siRNA sense strand
uggacaagcucuuugauuu

SEQ ID NO: 944384 - RNA, 19 nt, Homo sapiens
  misc_RNA (1)...(19): siRNA sense strand
gaagaaauggagaaugaaa

SEQ ID NO: 944385 - RNA, 19 nt, Homo sapiens
  misc_RNA (1)...(19): siRNA sense strand
gaaguguuccucugcauuu

SEQ ID NO: 944386 - RNA, 19 nt, Homo sapiens
  misc_RNA (1)...(19): siRNA sense strand
ggacugauuuaacccaaga

SEQ ID NO: 944387 - RNA, 19 nt, Homo sapiens
  misc_RNA (1)...(19): siRNA sense strand
caaguguccucgauuaaga

SEQ ID NO: 944388 - RNA, 19 nt, Homo sapiens
  misc_RNA (1)...(19): siRNA sense strand
gaacauccagcuauuuaug

SEQ ID NO: 944389 - RNA, 19 nt, Homo sapiens
  misc_RNA (1)...(19): siRNA sense strand
guccaaguguccucgauua

SEQ ID NO: 944390 - RNA, 19 nt, Homo sapiens
  misc_RNA (1)...(19): siRNA sense strand
gaauuuaaugcuccugaua

SEQ ID NO: 944391 - RNA, 19 nt, Homo sapiens
  misc_RNA (1)...(19): siRNA sense strand
uagguaauauggccuguuu

SEQ ID NO: 944392 - RNA, 19 nt, Homo sapiens
  misc_RNA (1)...(19): siRNA sense strand
auaaggcgcuugcugauga

SEQ ID NO: 944393 - RNA, 19 nt, Homo sapiens
  misc_RNA (1)...(19): siRNA sense strand
ggacaagcucuuugauuug

SEQ ID NO: 944394 - RNA, 19 nt, Homo sapiens
  misc_RNA (1)...(19): siRNA sense strand
ggagcuugaugaagaaaug

SEQ ID NO: 944395 - RNA, 19 nt, Homo sapiens
  misc_RNA (1)...(19): siRNA sense strand
gcagguuguugcuuacuug

SEQ ID NO: 944396 - RNA, 19 nt, Homo sapiens
  misc_RNA (1)...(19): siRNA sense strand
ggaugagaaacuaauguua

SEQ ID NO: 944397 - RNA, 19 nt, Homo sapiens
  misc_RNA (1)...(19): siRNA sense strand
ccaggaacauccagcuauu

SEQ ID NO: 944398 - RNA, 19 nt, Homo sapiens
  misc_RNA (1)...(19): siRNA sense strand
aaacaaguacguucugaaa

SEQ ID NO: 944399 - RNA, 19 nt, Homo sapiens
  misc_RNA (1)...(19): siRNA sense strand
uaacacagaggaaacuaaa

SEQ ID NO: 944400 - RNA, 19 nt, Homo sapiens
  misc_RNA (1)...(19): siRNA sense strand
augaagaaauggagaauga

SEQ ID NO: 944401 - RNA, 19 nt, Homo sapiens
  misc_RNA (1)...(19): siRNA sense strand
gcagaaguggccaguguuu

SEQ ID NO: 944402 - RNA, 19 nt, Homo sapiens
  misc_RNA (1)...(19): siRNA sense strand
ccaaacaaguacguucuga

SEQ ID NO: 944403 - RNA, 19 nt, Homo sapiens
  misc_RNA (1)...(19): siRNA sense strand
gacgguggcucagggagua

SEQ ID NO: 944404 - RNA, 19 nt, Homo sapiens
  misc_RNA (1)...(19): siRNA sense strand
ggagcacggucuacagcaa

SEQ ID NO: 944405 - RNA, 19 nt, Homo sapiens
  misc_RNA (1)...(19): siRNA sense strand
gcccugugguggaagauuu

SEQ ID NO: 944406 - RNA, 19 nt, Homo sapiens
  misc_RNA (1)...(19): siRNA sense strand
uacaguggaugauggaauu

SEQ ID NO: 944407 - RNA, 19 nt, Homo sapiens
  misc_RNA (1)...(19): siRNA sense strand
gaaaggauccaggaacauc

SEQ ID NO: 944408 - RNA, 19 nt, Homo sapiens
  misc_RNA (1)...(19): siRNA sense strand
agaaaucugugugggaauu

SEQ ID NO: 944409 - RNA, 19 nt, Homo sapiens
  misc_RNA (1)...(19): siRNA sense strand
gacaagcucuuugauuugg

SEQ ID NO: 944410 - RNA, 19 nt, Homo sapiens
  misc_RNA (1)...(19): siRNA sense strand
ggaaaagacauuuggaauu

SEQ ID NO: 944411 - RNA, 19 nt, Homo sapiens
  misc_RNA (1)...(19): siRNA sense strand
ugauuuggaugagaaacua

SEQ ID NO: 944412 - RNA, 19 nt, Homo sapiens
  misc_RNA (1)...(19): siRNA sense strand
aggaacauccagcuauuua

SEQ ID NO: 944413 - RNA, 19 nt, Homo sapiens
  misc_RNA (1)...(19): siRNA sense strand
ggaugaggacguggcuuua

SEQ ID NO: 944414 - RNA, 19 nt, Homo sapiens
  misc_RNA (1)...(19): siRNA sense strand
aagaugauuuccacuugaa

SEQ ID NO: 944415 - RNA, 19 nt, Homo sapiens
  misc_RNA (1)...(19): siRNA sense strand
aaacggugcuagccucugu

SEQ ID NO: 944416 - RNA, 19 nt, Homo sapiens
  misc_RNA (1)...(19): siRNA sense strand
uguccucgauuaagagaaa

SEQ ID NO: 944417 - RNA, 19 nt, Homo sapiens
  misc_RNA (1)...(19): siRNA sense strand
uaaugcuccugauauauuc

SEQ ID NO: 944418 - RNA, 19 nt, Homo sapiens
  misc_RNA (1)...(19): siRNA sense strand
uagaaugggucagaaaugg

SEQ ID NO: 944419 - RNA, 19 nt, Homo sapiens
  misc_RNA (1)...(19): siRNA sense strand
guaaaggaaggccaguuga

SEQ ID NO: 944420 - RNA, 19 nt, Homo sapiens
  misc_RNA (1)...(19): siRNA sense strand
gaugauggaauucaagcaa

SEQ ID NO: 944421 - RNA, 19 nt, Homo sapiens
  misc_RNA (1)...(19): siRNA sense strand
uaugggauaugucaaugga

SEQ ID NO: 944422 - RNA, 19 nt, Homo sapiens
  misc_RNA (1)...(19): siRNA sense strand
gaaggccaguugagcaaac

SEQ ID NO: 944423 - RNA, 19 nt, Homo sapiens
  misc_RNA (1)...(19): siRNA sense strand
gacggagcuugaugaagaa

SEQ ID NO: 944424 - RNA, 19 nt, Homo sapiens
  misc_RNA (1)...(19): siRNA sense strand
ggaacauccagcuauuuau

SEQ ID NO: 944425 - RNA, 19 nt, Homo sapiens
  misc_RNA (1)...(19): siRNA sense strand
acuugaagcugccaaacaa

SEQ ID NO: 944426 - RNA, 19 nt, Homo sapiens
  misc_RNA (1)...(19): siRNA sense strand
agaaugaaauuugcagagu

SEQ ID NO: 944427 - RNA, 19 nt, Homo sapiens
  misc_RNA (1)...(19): siRNA sense strand
gagcacggucuacagcaaa

SEQ ID NO: 944428 - RNA, 19 nt, Homo sapiens
  misc_RNA (1)...(19): siRNA sense strand
ugaagcugccaaacaagua

SEQ ID NO: 944429 - RNA, 19 nt, Homo sapiens
  misc_RNA (1)...(19): siRNA sense strand
cuugugcccuguauacuug

SEQ ID NO: 944430 - RNA, 19 nt, Homo sapiens
  misc_RNA (1)...(19): siRNA sense strand
ugaggacguggcuuuauuu

SEQ ID NO: 944431 - RNA, 19 nt, Homo sapiens
  misc_RNA (1)...(19): siRNA sense strand
gauuuaacccaagaugauu

SEQ ID NO: 944432 - RNA, 19 nt, Homo sapiens
  misc_RNA (1)...(19): siRNA sense strand
gaaacuaaaaggacugauu

SEQ ID NO: 944433 - RNA, 19 nt, Homo sapiens
  misc_RNA (1)...(19): siRNA sense strand
ccagaauggcuugauguuu

SEQ ID NO: 944434 - RNA, 19 nt, Homo sapiens
  misc_RNA (1)...(19): siRNA sense strand
caaacaaguacguucugaa

SEQ ID NO: 944435 - RNA, 19 nt, Homo sapiens
  misc_RNA (1)...(19): siRNA sense strand
gaagagcagccaguguuuc

SEQ ID NO: 944436 - RNA, 19 nt, Homo sapiens
  misc_RNA (1)...(19): siRNA sense strand
gcauuugcuucauuauguc

SEQ ID NO: 944437 - RNA, 19 nt, Homo sapiens
  misc_RNA (1)...(19): siRNA sense strand
guuauugcacuguuuguau

SEQ ID NO: 944438 - RNA, 19 nt, Homo sapiens
  misc_RNA (1)...(19): siRNA sense strand
cggcagagucuaacacaga

SEQ ID NO: 944439 - RNA, 19 nt, Homo sapiens
  misc_RNA (1)...(19): siRNA sense strand
ugaagagcagccaguguuu

SEQ ID NO: 944440 - RNA, 19 nt, Homo sapiens
  misc_RNA (1)...(19): siRNA sense strand
aggcagaaguggccagugu

SEQ ID NO: 944441 - RNA, 19 nt, Homo sapiens
  misc_RNA (1)...(19): siRNA sense strand
ggcgcuugcugaugacuug

SEQ ID NO: 944442 - RNA, 19 nt, Homo sapiens
  misc_RNA (1)...(19): siRNA sense strand
gcauagggagcacggucua

SEQ ID NO: 944443 - RNA, 19 nt, Homo sapiens
  misc_RNA (1)...(19): siRNA sense strand
cagccucauucgggucuua

SEQ ID NO: 944444 - RNA, 19 nt, Homo sapiens
  misc_RNA (1)...(19): siRNA sense strand
gaguaugggauaugucaau

SEQ ID NO: 944445 - RNA, 19 nt, Homo sapiens
  misc_RNA (1)...(19): siRNA sense strand
aguguugucugccaucuau

SEQ ID NO: 944446 - RNA, 19 nt, Homo sapiens
  misc_RNA (1)...(19): siRNA sense strand
gauccacccaucauucuuc

SEQ ID NO: 944447 - RNA, 19 nt, Homo sapiens
  misc_RNA (1)...(19): siRNA sense strand
acaaguacguucugaaaau

SEQ ID NO: 944448 - RNA, 19 nt, Homo sapiens
  misc_RNA (1)...(19): siRNA sense strand
gaugaggacguggcuuuau

SEQ ID NO: 944449 - RNA, 19 nt, Homo sapiens
  misc_RNA (1)...(19): siRNA sense strand
gauaaggcgcuugcugaug

SEQ ID NO: 944450 - RNA, 19 nt, Homo sapiens
  misc_RNA (1)...(19): siRNA sense strand
caagcucuuugauuuggau

SEQ ID NO: 944451 - RNA, 19 nt, Homo sapiens
  misc_RNA (1)...(19): siRNA sense strand
cuacucugcuggaaacaag

SEQ ID NO: 944452 - RNA, 19 nt, Homo sapiens
  misc_RNA (1)...(19): siRNA sense strand
uuauugcacuguuuguaug

SEQ ID NO: 944453 - RNA, 19 nt, Homo sapiens
  misc_RNA (1)...(19): siRNA sense strand
augaggacguggcuuuauu

SEQ ID NO: 944454 - RNA, 19 nt, Homo sapiens
  misc_RNA (1)...(19): siRNA sense strand
aaaccuucuuccuuucuau

SEQ ID NO: 944455 - RNA, 19 nt, Homo sapiens
  misc_RNA (1)...(19): siRNA sense strand
agacugagcaagaguaucu

SEQ ID NO: 944456 - RNA, 19 nt, Homo sapiens
  misc_RNA (1)...(19): siRNA sense strand
guggacaagcucuuugauu

SEQ ID NO: 944457 - RNA, 19 nt, Homo sapiens
  misc_RNA (1)...(19): siRNA sense strand
uugaaaggauccaggaaca

SEQ ID NO: 944458 - RNA, 19 nt, Homo sapiens
  misc_RNA (1)...(19): siRNA sense strand
gaucuuccucuaauugaca

SEQ ID NO: 944459 - RNA, 19 nt, Homo sapiens
  misc_RNA (1)...(19): siRNA sense strand
cagaguaugggauauguca

SEQ ID NO: 944460 - RNA, 19 nt, Homo sapiens
  misc_RNA (1)...(19): siRNA sense strand
ugauuuaacccaagaugau

SEQ ID NO: 944461 - RNA, 19 nt, Homo sapiens
  misc_RNA (1)...(19): siRNA sense strand
cuaauugacagccucauuc

SEQ ID NO: 944462 - RNA, 19 nt, Homo sapiens
  misc_RNA (1)...(19): siRNA sense strand
gaauucugccagucugaug

SEQ ID NO: 944463 - RNA, 19 nt, Homo sapiens
  misc_RNA (1)...(19): siRNA sense strand
cuauagcccugugguggaa

SEQ ID NO: 944464 - RNA, 19 nt, Homo sapiens
  misc_RNA (1)...(19): siRNA sense strand
ucagcggacucauccagau

SEQ ID NO: 944465 - RNA, 19 nt, Homo sapiens
  misc_RNA (1)...(19): siRNA sense strand
agaauggcuugauguuuac

SEQ ID NO: 944466 - RNA, 19 nt, Homo sapiens
  misc_RNA (1)...(19): siRNA sense strand
ccagauuguuagcccugaa

SEQ ID NO: 944467 - RNA, 19 nt, Homo sapiens
  misc_RNA (1)...(19): siRNA sense strand
cagcaaacacuggcucuuc

SEQ ID NO: 944468 - RNA, 19 nt, Homo sapiens
  misc_RNA (1)...(19): siRNA sense strand
aauccuacgugaaguugau

SEQ ID NO: 944469 - RNA, 19 nt, Homo sapiens
  misc_RNA (1)...(19): siRNA sense strand
ggaaggccaguugagcaaa

SEQ ID NO: 944470 - RNA, 19 nt, Homo sapiens
  misc_RNA (1)...(19): siRNA sense strand
gccaguguuuggguugaaa

SEQ ID NO: 944471 - RNA, 19 nt, Homo sapiens
  misc_RNA (1)...(19): siRNA sense strand
cuaacacagaggaaacuaa

SEQ ID NO: 944472 - RNA, 19 nt, Homo sapiens
  misc_RNA (1)...(19): siRNA sense strand
uauggaacagugucagaaa

SEQ ID NO: 944473 - RNA, 19 nt, Homo sapiens
  misc_RNA (1)...(19): siRNA sense strand
auucgggucuuacaaaaua

SEQ ID NO: 944474 - RNA, 19 nt, Homo sapiens
  misc_RNA (1)...(19): siRNA sense strand
cugaagagcagccaguguu

SEQ ID NO: 944475 - RNA, 19 nt, Homo sapiens
  misc_RNA (1)...(19): siRNA sense strand
ccaggaagagucugaagag

SEQ ID NO: 944476 - RNA, 19 nt, Homo sapiens
  misc_RNA (1)...(19): siRNA sense strand
guuagaaugggucagaaau

SEQ ID NO: 944477 - RNA, 19 nt, Homo sapiens
  misc_RNA (1)...(19): siRNA sense strand
gcacuggcuacgaccugua

SEQ ID NO: 944478 - RNA, 19 nt, Homo sapiens
  misc_RNA (1)...(19): siRNA sense strand
cccuggagaugcugcuuug

SEQ ID NO: 944479 - RNA, 19 nt, Homo sapiens
  misc_RNA (1)...(19): siRNA sense strand
guggaucccuucucuauua

SEQ ID NO: 944480 - RNA, 19 nt, Homo sapiens
  misc_RNA (1)...(19): siRNA sense strand
gcuaucaucuucacacuga

SEQ ID NO: 944481 - RNA, 19 nt, Homo sapiens
  misc_RNA (1)...(19): siRNA sense strand
gagaagauauugguggaaa

SEQ ID NO: 944482 - RNA, 19 nt, Homo sapiens
  misc_RNA (1)...(19): siRNA sense strand
guaacucucuggcuaucau

SEQ ID NO: 944483 - RNA, 19 nt, Homo sapiens
  misc_RNA (1)...(19): siRNA sense strand
ggaauuucacucugcauca

SEQ ID NO: 944484 - RNA, 19 nt, Homo sapiens
  misc_RNA (1)...(19): siRNA sense strand
agggccagcugcagacuuu

SEQ ID NO: 944485 - RNA, 19 nt, Homo sapiens
  misc_RNA (1)...(19): siRNA sense strand
uggcugugcccaucuguaa

SEQ ID NO: 944486 - RNA, 19 nt, Homo sapiens
  misc_RNA (1)...(19): siRNA sense strand
gaauuucacucugcaucac

SEQ ID NO: 944487 - RNA, 19 nt, Homo sapiens
  misc_RNA (1)...(19): siRNA sense strand
guguggaucccuucucuau

SEQ ID NO: 944488 - RNA, 19 nt, Homo sapiens
  misc_RNA (1)...(19): siRNA sense strand
ggagaagauauugguggaa

SEQ ID NO: 944489 - RNA, 19 nt, Homo sapiens
  misc_RNA (1)...(19): siRNA sense strand
ggccagcugcagacuuuga

SEQ ID NO: 944490 - RNA, 19 nt, Homo sapiens
  misc_RNA (1)...(19): siRNA sense strand
caguguggaucccuucucu

SEQ ID NO: 944491 - RNA, 19 nt, Homo sapiens
  misc_RNA (1)...(19): siRNA sense strand
agacuuugagccagaaaug

SEQ ID NO: 944492 - RNA, 19 nt, Homo sapiens
  misc_RNA (1)...(19): siRNA sense strand
caucuucacacugauuguu

SEQ ID NO: 944493 - RNA, 19 nt, Homo sapiens
  misc_RNA (1)...(19): siRNA sense strand
acagcaagcucaccaaguu

SEQ ID NO: 944494 - RNA, 19 nt, Homo sapiens
  misc_RNA (1)...(19): siRNA sense strand
gagaggcucaggaaagaaa

SEQ ID NO: 944495 - RNA, 19 nt, Homo sapiens
  misc_RNA (1)...(19): siRNA sense strand
gaucuacaaugagcagguu

SEQ ID NO: 944496 - RNA, 19 nt, Homo sapiens
  misc_RNA (1)...(19): siRNA sense strand
gcagguccaugcacuagag

SEQ ID NO: 944497 - RNA, 19 nt, Homo sapiens
  misc_RNA (1)...(19): siRNA sense strand
ggucucagccgucgaagga

SEQ ID NO: 944498 - RNA, 19 nt, Homo sapiens
  misc_RNA (1)...(19): siRNA sense strand
ccaagucuccuguggcaaa

SEQ ID NO: 944499 - RNA, 19 nt, Homo sapiens
  misc_RNA (1)...(19): siRNA sense strand
agagccagcugcagaauag

SEQ ID NO: 944500 - RNA, 19 nt, Homo sapiens
  misc_RNA (1)...(19): siRNA sense strand
gaaccuguacgggaugcua

SEQ ID NO: 944501 - RNA, 19 nt, Homo sapiens
  misc_RNA (1)...(19): siRNA sense strand
caaagcagccccagcguuu

SEQ ID NO: 944502 - RNA, 19 nt, Homo sapiens
  misc_RNA (1)...(19): siRNA sense strand
gaccuucgccuggcuguug

SEQ ID NO: 944503 - RNA, 19 nt, Homo sapiens
  misc_RNA (1)...(19): siRNA sense strand
uacaggaguucaugcuaga

SEQ ID NO: 944504 - RNA, 19 nt, Homo sapiens
  misc_RNA (1)...(19): siRNA sense strand
gccaagugcccaagagaga

SEQ ID NO: 944505 - RNA, 19 nt, Homo sapiens
  misc_RNA (1)...(19): siRNA sense strand
ggcaggcagugagaaggua

SEQ ID NO: 944506 - RNA, 19 nt, Homo sapiens
  misc_RNA (1)...(19): siRNA sense strand
gcccagugccuuccugaga

SEQ ID NO: 944507 - RNA, 19 nt, Homo sapiens
  misc_RNA (1)...(19): siRNA sense strand
ugccacaucugcccacugu

SEQ ID NO: 944508 - RNA, 19 nt, Homo sapiens
  misc_RNA (1)...(19): siRNA sense strand
guggggagcugaugcuuga

SEQ ID NO: 944509 - RNA, 19 nt, Homo sapiens
  misc_RNA (1)...(19): siRNA sense strand
gcuacaggaguucaugcua

SEQ ID NO: 944510 - RNA, 19 nt, Homo sapiens
  misc_RNA (1)...(19): siRNA sense strand
gcagagccacaucccuuuc

SEQ ID NO: 944511 - RNA, 19 nt, Homo sapiens
  misc_RNA (1)...(19): siRNA sense strand
ggaguucaugcuagagaau

SEQ ID NO: 944512 - RNA, 19 nt, Homo sapiens
  misc_RNA (1)...(19): siRNA sense strand
uacaucagccgucaaacug

SEQ ID NO: 944513 - RNA, 19 nt, Homo sapiens
  misc_RNA (1)...(19): siRNA sense strand
aagagccagcugcagaaua

SEQ ID NO: 944514 - RNA, 19 nt, Homo sapiens
  misc_RNA (1)...(19): siRNA sense strand
cagcaagcucaccaaguug

SEQ ID NO: 944515 - RNA, 19 nt, Homo sapiens
  misc_RNA (1)...(19): siRNA sense strand
gcaacgacauggguaagau

SEQ ID NO: 944516 - RNA, 19 nt, Homo sapiens
  misc_RNA (1)...(19): siRNA sense strand
uggguaagaugcugcaauu

SEQ ID NO: 944517 - RNA, 19 nt, Homo sapiens
  misc_RNA (1)...(19): siRNA sense strand
guaagaugcugcaauucgu

SEQ ID NO: 944518 - RNA, 19 nt, Homo sapiens
  misc_RNA (1)...(19): siRNA sense strand
gguaagaugcugcaauucg

SEQ ID NO: 944519 - RNA, 19 nt, Homo sapiens
  misc_RNA (1)...(19): siRNA sense strand
ugagaucgccagccuguca

SEQ ID NO: 944520 - RNA, 19 nt, Homo sapiens
  misc_RNA (1)...(19): siRNA sense strand
gcgcugagcaagcaaaggu

SEQ ID NO: 944521 - RNA, 19 nt, Homo sapiens
  misc_RNA (1)...(19): siRNA sense strand
caacgacauggguaagaug

SEQ ID NO: 944522 - RNA, 19 nt, Homo sapiens
  misc_RNA (1)...(19): siRNA sense strand
ccagcaggagguuaucaaa

SEQ ID NO: 944523 - RNA, 19 nt, Homo sapiens
  misc_RNA (1)...(19): siRNA sense strand
gcagauccagcaggagguu

SEQ ID NO: 944524 - RNA, 19 nt, Homo sapiens
  misc_RNA (1)...(19): siRNA sense strand
ggaaauguaucuccagaaa

SEQ ID NO: 944525 - RNA, 19 nt, Homo sapiens
  misc_RNA (1)...(19): siRNA sense strand
gaacugcacagcugaagua

SEQ ID NO: 944526 - RNA, 19 nt, Homo sapiens
  misc_RNA (1)...(19): siRNA sense strand
gaaagaauccagaugaaga

SEQ ID NO: 944527 - RNA, 19 nt, Homo sapiens
  misc_RNA (1)...(19): siRNA sense strand
gcacagaacuacaucaacu

SEQ ID NO: 944528 - RNA, 19 nt, Homo sapiens
  misc_RNA (1)...(19): siRNA sense strand
gaagacacaugguauaaaa

SEQ ID NO: 944529 - RNA, 19 nt, Homo sapiens
  misc_RNA (1)...(19): siRNA sense strand
aaauguaucuccagaaaug

SEQ ID NO: 944530 - RNA, 19 nt, Homo sapiens
  misc_RNA (1)...(19): siRNA sense strand
acaagaaacugcaccagaa

SEQ ID NO: 944531 - RNA, 19 nt, Homo sapiens
  misc_RNA (1)...(19): siRNA sense strand
ggaaguacaacuggaauaa

SEQ ID NO: 944532 - RNA, 19 nt, Homo sapiens
  misc_RNA (1)...(19): siRNA sense strand
ucaagcaagugcaaagaaa

SEQ ID NO: 944533 - RNA, 19 nt, Homo sapiens
  misc_RNA (1)...(19): siRNA sense strand
gcacagcugaaguacuuua

SEQ ID NO: 944534 - RNA, 19 nt, Homo sapiens
  misc_RNA (1)...(19): siRNA sense strand
ugaagaagacaacacauuu

SEQ ID NO: 944535 - RNA, 19 nt, Homo sapiens
  misc_RNA (1)...(19): siRNA sense strand
gacgcucguucuacauuua

SEQ ID NO: 944536 - RNA, 19 nt, Homo sapiens
  misc_RNA (1)...(19): siRNA sense strand
ugaauuagacuacaccauu

SEQ ID NO: 944537 - RNA, 19 nt, Homo sapiens
  misc_RNA (1)...(19): siRNA sense strand
caauacggcacuaaaguaa

SEQ ID NO: 944538 - RNA, 19 nt, Homo sapiens
  misc_RNA (1)...(19): siRNA sense strand
cugcacagcugaaguacuu

SEQ ID NO: 944539 - RNA, 19 nt, Homo sapiens
  misc_RNA (1)...(19): siRNA sense strand
gaaggaaccgcuagaagca

SEQ ID NO: 944540 - RNA, 19 nt, Homo sapiens
  misc_RNA (1)...(19): siRNA sense strand
gaagaggacauaaguaucg

SEQ ID NO: 944541 - RNA, 19 nt, Homo sapiens
  misc_RNA (1)...(19): siRNA sense strand
ugccugugguuauauaaua

SEQ ID NO: 944542 - RNA, 19 nt, Homo sapiens
  misc_RNA (1)...(19): siRNA sense strand
aggagaaacuggaaagaau

SEQ ID NO: 944543 - RNA, 19 nt, Homo sapiens
  misc_RNA (1)...(19): siRNA sense strand
gagauuauucccuggcaaa

SEQ ID NO: 944544 - RNA, 19 nt, Homo sapiens
  misc_RNA (1)...(19): siRNA sense strand
gaauccagaugaagaagac

SEQ ID NO: 944545 - RNA, 19 nt, Homo sapiens
  misc_RNA (1)...(19): siRNA sense strand
acaauacggcacuaaagua

SEQ ID NO: 944546 - RNA, 19 nt, Homo sapiens
  misc_RNA (1)...(19): siRNA sense strand
gaaaugacgcucguucuac

SEQ ID NO: 944547 - RNA, 19 nt, Homo sapiens
  misc_RNA (1)...(19): siRNA sense strand
acaccauucuacuucauaa

SEQ ID NO: 944548 - RNA, 19 nt, Homo sapiens
  misc_RNA (1)...(19): siRNA sense strand
gaaauguaucuccagaaau

SEQ ID NO: 944549 - RNA, 19 nt, Homo sapiens
  misc_RNA (1)...(19): siRNA sense strand
gguugccugugguuauaua

SEQ ID NO: 944550 - RNA, 19 nt, Homo sapiens
  misc_RNA (1)...(19): siRNA sense strand
gaagaagacaacacauuuu

SEQ ID NO: 944551 - RNA, 19 nt, Homo sapiens
  misc_RNA (1)...(19): siRNA sense strand
ugacgcucguucuacauuu

SEQ ID NO: 944552 - RNA, 19 nt, Homo sapiens
  misc_RNA (1)...(19): siRNA sense strand
ggagaaacuggaaagaauc

SEQ ID NO: 944553 - RNA, 19 nt, Homo sapiens
  misc_RNA (1)...(19): siRNA sense strand
cuacugaagacacauggua

SEQ ID NO: 944554 - RNA, 19 nt, Homo sapiens
  misc_RNA (1)...(19): siRNA sense strand
aaaugacgcucguucuaca

SEQ ID NO: 944555 - RNA, 19 nt, Homo sapiens
  misc_RNA (1)...(19): siRNA sense strand
ggaagaggacauaaguauc

SEQ ID NO: 944556 - RNA, 19 nt, Homo sapiens
  misc_RNA (1)...(19): siRNA sense strand
ggaaagaauccagaugaag

SEQ ID NO: 944557 - RNA, 19 nt, Homo sapiens
  misc_RNA (1)...(19): siRNA sense strand
aaguaucgccuuaaauuug

SEQ ID NO: 944558 - RNA, 19 nt, Homo sapiens
  misc_RNA (1)...(19): siRNA sense strand
gcuagaagcacaaaauauu

SEQ ID NO: 944559 - RNA, 19 nt, Homo sapiens
  misc_RNA (1)...(19): siRNA sense strand
gaaggagaaacuggaaaga

SEQ ID NO: 944560 - RNA, 19 nt, Homo sapiens
  misc_RNA (1)...(19): siRNA sense strand
ccuuaaauuugcuguugaa

SEQ ID NO: 944561 - RNA, 19 nt, Homo sapiens
  misc_RNA (1)...(19): siRNA sense strand
aaagaauccagaugaagaa

SEQ ID NO: 944562 - RNA, 19 nt, Homo sapiens
  misc_RNA (1)...(19): siRNA sense strand
ccaggaagaggacauaagu

SEQ ID NO: 944563 - RNA, 19 nt, Homo sapiens
  misc_RNA (1)...(19): siRNA sense strand
uggguugccugugguuaua

SEQ ID NO: 944564 - RNA, 19 nt, Homo sapiens
  misc_RNA (1)...(19): siRNA sense strand
gaaacugcaccagaaguca

SEQ ID NO: 944565 - RNA, 19 nt, Homo sapiens
  misc_RNA (1)...(19): siRNA sense strand
cgccuuaaauuugcuguug

SEQ ID NO: 944566 - RNA, 19 nt, Homo sapiens
  misc_RNA (1)...(19): siRNA sense strand
caagugcaaagaaaugaug

SEQ ID NO: 944567 - RNA, 19 nt, Homo sapiens
  misc_RNA (1)...(19): siRNA sense strand
agaacuacaucaacuacca

SEQ ID NO: 944568 - RNA, 19 nt, Homo sapiens
  misc_RNA (1)...(19): siRNA sense strand
aggaagaggacauaaguau

SEQ ID NO: 944569 - RNA, 19 nt, Homo sapiens
  misc_RNA (1)...(19): siRNA sense strand
ugaagacacaugguauaaa

SEQ ID NO: 944570 - RNA, 19 nt, Homo sapiens
  misc_RNA (1)...(19): siRNA sense strand
gccuuaaauuugcuguuga

SEQ ID NO: 944571 - RNA, 19 nt, Homo sapiens
  misc_RNA (1)...(19): siRNA sense strand
gaagacaacacauuuuauc

SEQ ID NO: 944572 - RNA, 19 nt, Homo sapiens
  misc_RNA (1)...(19): siRNA sense strand
caagccagcauggaggaua

SEQ ID NO: 944573 - RNA, 19 nt, Homo sapiens
  misc_RNA (1)...(19): siRNA sense strand
aaaggaaguacaacuggaa

SEQ ID NO: 944574 - RNA, 19 nt, Homo sapiens
  misc_RNA (1)...(19): siRNA sense strand
ccacaauacggcacuaaag

SEQ ID NO: 944575 - RNA, 19 nt, Homo sapiens
  misc_RNA (1)...(19): siRNA sense strand
caagcaagugcaaagaaau

SEQ ID NO: 944576 - RNA, 19 nt, Homo sapiens
  misc_RNA (1)...(19): siRNA sense strand
agacuacaccauucuacuu

SEQ ID NO: 944577 - RNA, 19 nt, Homo sapiens
  misc_RNA (1)...(19): siRNA sense strand
caggaagaggacauaagua

SEQ ID NO: 944578 - RNA, 19 nt, Homo sapiens
  misc_RNA (1)...(19): siRNA sense strand
aauucaaacugucaagcaa

SEQ ID NO: 944579 - RNA, 19 nt, Homo sapiens
  misc_RNA (1)...(19): siRNA sense strand
caagaaacugcaccagaag

SEQ ID NO: 944580 - RNA, 19 nt, Homo sapiens
  misc_RNA (1)...(19): siRNA sense strand
gcaagugcaaagaaaugau

SEQ ID NO: 944581 - RNA, 19 nt, Homo sapiens
  misc_RNA (1)...(19): siRNA sense strand
cugaagacacaugguauaa

SEQ ID NO: 944582 - RNA, 19 nt, Homo sapiens
  misc_RNA (1)...(19): siRNA sense strand
cacaaaauauuccagacaa

SEQ ID NO: 944583 - RNA, 19 nt, Homo sapiens
  misc_RNA (1)...(19): siRNA sense strand
ucucuggcauccacaauac

SEQ ID NO: 944584 - RNA, 19 nt, Homo sapiens
  misc_RNA (1)...(19): siRNA sense strand
gacuacaccauucuacuuc

SEQ ID NO: 944585 - RNA, 19 nt, Homo sapiens
  misc_RNA (1)...(19): siRNA sense strand
gcaaaauucuacugaagac

SEQ ID NO: 944586 - RNA, 19 nt, Homo sapiens
  misc_RNA (1)...(19): siRNA sense strand
aagccagcauggaggauau

SEQ ID NO: 944587 - RNA, 19 nt, Homo sapiens
  misc_RNA (1)...(19): siRNA sense strand
cacaauacggcacuaaagu

SEQ ID NO: 944588 - RNA, 19 nt, Homo sapiens
  misc_RNA (1)...(19): siRNA sense strand
gauuauucccuggcaaaug

SEQ ID NO: 944589 - RNA, 19 nt, Homo sapiens
  misc_RNA (1)...(19): siRNA sense strand
gaaccgcuagaagcacaaa

SEQ ID NO: 944590 - RNA, 19 nt, Homo sapiens
  misc_RNA (1)...(19): siRNA sense strand
gccaaaggaaguacaacug

SEQ ID NO: 944591 - RNA, 19 nt, Homo sapiens
  misc_RNA (1)...(19): siRNA sense strand
auacggcacuaaaguaaaa

SEQ ID NO: 944592 - RNA, 19 nt, Homo sapiens
  misc_RNA (1)...(19): siRNA sense strand
cacagaacuacaucaacua

SEQ ID NO: 944593 - RNA, 19 nt, Homo sapiens
  misc_RNA (1)...(19): siRNA sense strand
acugaagacacaugguaua

SEQ ID NO: 944594 - RNA, 19 nt, Homo sapiens
  misc_RNA (1)...(19): siRNA sense strand
aagcaagugcaaagaaaug

SEQ ID NO: 944595 - RNA, 19 nt, Homo sapiens
  misc_RNA (1)...(19): siRNA sense strand
ugaaggagaaacuggaaag

SEQ ID NO: 944596 - RNA, 19 nt, Homo sapiens
  misc_RNA (1)...(19): siRNA sense strand
uaauagccgucugccaaag

SEQ ID NO: 944597 - RNA, 19 nt, Homo sapiens
  misc_RNA (1)...(19): siRNA sense strand
gucaagcaagugcaaagaa

SEQ ID NO: 944598 - RNA, 19 nt, Homo sapiens
  misc_RNA (1)...(19): siRNA sense strand
aaauucuacugaagacaca

SEQ ID NO: 944599 - RNA, 19 nt, Homo sapiens
  misc_RNA (1)...(19): siRNA sense strand
gugcagaaggucaaacaag

SEQ ID NO: 944600 - RNA, 19 nt, Homo sapiens
  misc_RNA (1)...(19): siRNA sense strand
aaacugcaccagaagucaa

SEQ ID NO: 944601 - RNA, 19 nt, Homo sapiens
  misc_RNA (1)...(19): siRNA sense strand
aaggagaaacuggaaagaa

SEQ ID NO: 944602 - RNA, 19 nt, Homo sapiens
  misc_RNA (1)...(19): siRNA sense strand
cuacaccauucuacuucau

SEQ ID NO: 944603 - RNA, 19 nt, Homo sapiens
  misc_RNA (1)...(19): siRNA sense strand
uguuugaggugcagaaggu

SEQ ID NO: 944604 - RNA, 19 nt, Homo sapiens
  misc_RNA (1)...(19): siRNA sense strand
caugaaggaaccgcuagaa

SEQ ID NO: 944605 - RNA, 19 nt, Homo sapiens
  misc_RNA (1)...(19): siRNA sense strand
auaauagccgucugccaaa

SEQ ID NO: 944606 - RNA, 19 nt, Homo sapiens
  misc_RNA (1)...(19): siRNA sense strand
gcacaaaauauuccagaca

SEQ ID NO: 944607 - RNA, 19 nt, Homo sapiens
  misc_RNA (1)...(19): siRNA sense strand
caaggaacaucuagauaua

SEQ ID NO: 944608 - RNA, 19 nt, Homo sapiens
  misc_RNA (1)...(19): siRNA sense strand
aaacugagcuggauugaga

SEQ ID NO: 944609 - RNA, 19 nt, Homo sapiens
  misc_RNA (1)...(19): siRNA sense strand
gaggaacccuuucuauauu

SEQ ID NO: 944610 - RNA, 19 nt, Homo sapiens
  misc_RNA (1)...(19): siRNA sense strand
gaagguagaucauuuacgu

SEQ ID NO: 944611 - RNA, 19 nt, Homo sapiens
  misc_RNA (1)...(19): siRNA sense strand
gaagaacuaugcccugguu

SEQ ID NO: 944612 - RNA, 19 nt, Homo sapiens
  misc_RNA (1)...(19): siRNA sense strand
caaagcaaguagaagguua

SEQ ID NO: 944613 - RNA, 19 nt, Homo sapiens
  misc_RNA (1)...(19): siRNA sense strand
acaagaagcuuuacacaau

SEQ ID NO: 944614 - RNA, 19 nt, Homo sapiens
  misc_RNA (1)...(19): siRNA sense strand
gacacaggcuucacugaua

SEQ ID NO: 944615 - RNA, 19 nt, Homo sapiens
  misc_RNA (1)...(19): siRNA sense strand
agacagaucuucaccuauu

SEQ ID NO: 944616 - RNA, 19 nt, Homo sapiens
  misc_RNA (1)...(19): siRNA sense strand
gaccagagcuuccaacgau

SEQ ID NO: 944617 - RNA, 19 nt, Homo sapiens
  misc_RNA (1)...(19): siRNA sense strand
gagcuaacuuugauucuga

SEQ ID NO: 944618 - RNA, 19 nt, Homo sapiens
  misc_RNA (1)...(19): siRNA sense strand
gcaaguagaagguuauuau

SEQ ID NO: 944619 - RNA, 19 nt, Homo sapiens
  misc_RNA (1)...(19): siRNA sense strand
guauaucucuuggucauaa

SEQ ID NO: 944620 - RNA, 19 nt, Homo sapiens
  misc_RNA (1)...(19): siRNA sense strand
caagaagcuuuacacaauu

SEQ ID NO: 944621 - RNA, 19 nt, Homo sapiens
  misc_RNA (1)...(19): siRNA sense strand
aaagggagauacugcuaua

SEQ ID NO: 944622 - RNA, 19 nt, Homo sapiens
  misc_RNA (1)...(19): siRNA sense strand
gcuuugaaguucuguaauu

SEQ ID NO: 944623 - RNA, 19 nt, Homo sapiens
  misc_RNA (1)...(19): siRNA sense strand
ccaaugauauucaacaaag

SEQ ID NO: 944624 - RNA, 19 nt, Homo sapiens
  misc_RNA (1)...(19): siRNA sense strand
guuugaagaugaagacuuu

SEQ ID NO: 944625 - RNA, 19 nt, Homo sapiens
  misc_RNA (1)...(19): siRNA sense strand
uaaagucaaugcagccaaa

SEQ ID NO: 944626 - RNA, 19 nt, Homo sapiens
  misc_RNA (1)...(19): siRNA sense strand
cagcaucccucucaaagug

SEQ ID NO: 944627 - RNA, 19 nt, Homo sapiens
  misc_RNA (1)...(19): siRNA sense strand
gaacuaugcccugguuauu

SEQ ID NO: 944628 - RNA, 19 nt, Homo sapiens
  misc_RNA (1)...(19): siRNA sense strand
uaucugaguuugaggguuu

SEQ ID NO: 944629 - RNA, 19 nt, Homo sapiens
  misc_RNA (1)...(19): siRNA sense strand
gaguuuauguggcgauuug

SEQ ID NO: 944630 - RNA, 19 nt, Homo sapiens
  misc_RNA (1)...(19): siRNA sense strand
cagaggaacccuuucuaua

SEQ ID NO: 944631 - RNA, 19 nt, Homo sapiens
  misc_RNA (1)...(19): siRNA sense strand
ccuuaaggcugaagaacua

SEQ ID NO: 944632 - RNA, 19 nt, Homo sapiens
  misc_RNA (1)...(19): siRNA sense strand
cguggagccucuucuauuu

SEQ ID NO: 944633 - RNA, 19 nt, Homo sapiens
  misc_RNA (1)...(19): siRNA sense strand
gcaaagaggaccagagcuu

SEQ ID NO: 944634 - RNA, 19 nt, Homo sapiens
  misc_RNA (1)...(19): siRNA sense strand
gcgauuugcucgugcuuau

SEQ ID NO: 944635 - RNA, 19 nt, Homo sapiens
  misc_RNA (1)...(19): siRNA sense strand
guagaagguuauuaucugu

SEQ ID NO: 944636 - RNA, 19 nt, Homo sapiens
  misc_RNA (1)...(19): siRNA sense strand
gcaaaguguuauacugauc

SEQ ID NO: 944637 - RNA, 19 nt, Homo sapiens
  misc_RNA (1)...(19): siRNA sense strand
ggagacauguaugaacuau

SEQ ID NO: 944638 - RNA, 19 nt, Homo sapiens
  misc_RNA (1)...(19): siRNA sense strand
caucucugcuccugaauau

SEQ ID NO: 944639 - RNA, 19 nt, Homo sapiens
  misc_RNA (1)...(19): siRNA sense strand
gcaaguggccagaaugugu

SEQ ID NO: 944640 - RNA, 19 nt, Homo sapiens
  misc_RNA (1)...(19): siRNA sense strand
ggccaauuauguaaagauu

SEQ ID NO: 944641 - RNA, 19 nt, Homo sapiens
  misc_RNA (1)...(19): siRNA sense strand
ucaaggaacaucuagauau

SEQ ID NO: 944642 - RNA, 19 nt, Homo sapiens
  misc_RNA (1)...(19): siRNA sense strand
agacauguaugaacuaucu

SEQ ID NO: 944643 - RNA, 19 nt, Homo sapiens
  misc_RNA (1)...(19): siRNA sense strand
gccagaauguguuuaaucu

SEQ ID NO: 944644 - RNA, 19 nt, Homo sapiens
  misc_RNA (1)...(19): siRNA sense strand
ccagaaugcuuugaaguuc

SEQ ID NO: 944645 - RNA, 19 nt, Homo sapiens
  misc_RNA (1)...(19): siRNA sense strand
aggaacccuuucuauauua

SEQ ID NO: 944646 - RNA, 19 nt, Homo sapiens
  misc_RNA (1)...(19): siRNA sense strand
gaacaucuagauauagcaa

SEQ ID NO: 944647 - RNA, 19 nt, Homo sapiens
  misc_RNA (1)...(19): siRNA sense strand
ucagaagguagaucauuua

SEQ ID NO: 944648 - RNA, 19 nt, Homo sapiens
  misc_RNA (1)...(19): siRNA sense strand
agaggaacccuuucuauau

SEQ ID NO: 944649 - RNA, 19 nt, Homo sapiens
  misc_RNA (1)...(19): siRNA sense strand
ugaacuaucuacaaacaca

SEQ ID NO: 944650 - RNA, 19 nt, Homo sapiens
  misc_RNA (1)...(19): siRNA sense strand
uaauagagcacccaugaau

SEQ ID NO: 944651 - RNA, 19 nt, Homo sapiens
  misc_RNA (1)...(19): siRNA sense strand
guuuagagaugaaauagag

SEQ ID NO: 944652 - RNA, 19 nt, Homo sapiens
  misc_RNA (1)...(19): siRNA sense strand
ucucugcuccugaauauaa

SEQ ID NO: 944653 - RNA, 19 nt, Homo sapiens
  misc_RNA (1)...(19): siRNA sense strand
acacaggcuucacugauau

SEQ ID NO: 944654 - RNA, 19 nt, Homo sapiens
  misc_RNA (1)...(19): siRNA sense strand
ccaauuacauguacuuagc

SEQ ID NO: 944655 - RNA, 19 nt, Homo sapiens
  misc_RNA (1)...(19): siRNA sense strand
caaagcacaucauccuucu

SEQ ID NO: 944656 - RNA, 19 nt, Homo sapiens
  misc_RNA (1)...(19): siRNA sense strand
gaaacaaacacuacuucuc

SEQ ID NO: 944657 - RNA, 19 nt, Homo sapiens
  misc_RNA (1)...(19): siRNA sense strand
uagcaaaguguuauacuga

SEQ ID NO: 944658 - RNA, 19 nt, Homo sapiens
  misc_RNA (1)...(19): siRNA sense strand
aauaccaucuucaacugua

SEQ ID NO: 944659 - RNA, 19 nt, Homo sapiens
  misc_RNA (1)...(19): siRNA sense strand
gacagaucuucaccuauug

SEQ ID NO: 944660 - RNA, 19 nt, Homo sapiens
  misc_RNA (1)...(19): siRNA sense strand
ucaagcaaguggccagaau

SEQ ID NO: 944661 - RNA, 19 nt, Homo sapiens
  misc_RNA (1)...(19): siRNA sense strand
ggagauacugcuauacugu

SEQ ID NO: 944662 - RNA, 19 nt, Homo sapiens
  misc_RNA (1)...(19): siRNA sense strand
gggagauacugcuauacug

SEQ ID NO: 944663 - RNA, 19 nt, Homo sapiens
  misc_RNA (1)...(19): siRNA sense strand
caacaaagcacaucauccu

SEQ ID NO: 944664 - RNA, 19 nt, Homo sapiens
  misc_RNA (1)...(19): siRNA sense strand
ccucaaagcgaauuaacuu

SEQ ID NO: 944665 - RNA, 19 nt, Homo sapiens
  misc_RNA (1)...(19): siRNA sense strand
gcuccugaauauaacacua

SEQ ID NO: 944666 - RNA, 19 nt, Homo sapiens
  misc_RNA (1)...(19): siRNA sense strand
aagcacaucauccuucuuu

SEQ ID NO: 944667 - RNA, 19 nt, Homo sapiens
  misc_RNA (1)...(19): siRNA sense strand
acacagaagaacagaguuu

SEQ ID NO: 944668 - RNA, 19 nt, Homo sapiens
  misc_RNA (1)...(19): siRNA sense strand
guucuguaauuuggcuuua

SEQ ID NO: 944669 - RNA, 19 nt, Homo sapiens
  misc_RNA (1)...(19): siRNA sense strand
cugcuacucuguuuggaaa

SEQ ID NO: 944670 - RNA, 19 nt, Homo sapiens
  misc_RNA (1)...(19): siRNA sense strand
cagcuaauacugacacaga

SEQ ID NO: 944671 - RNA, 19 nt, Homo sapiens
  misc_RNA (1)...(19): siRNA sense strand
gaagaucaaguuaguacag

SEQ ID NO: 944672 - RNA, 19 nt, Homo sapiens
  misc_RNA (1)...(19): siRNA sense strand
uucagaagguagaucauuu

SEQ ID NO: 944673 - RNA, 19 nt, Homo sapiens
  misc_RNA (1)...(19): siRNA sense strand
gcaacaaaguagagcuaac

SEQ ID NO: 944674 - RNA, 19 nt, Homo sapiens
  misc_RNA (1)...(19): siRNA sense strand
ccagaggaacccuuucuau

SEQ ID NO: 944675 - RNA, 19 nt, Homo sapiens
  misc_RNA (1)...(19): siRNA sense strand
gguagaucauuuacguaug

SEQ ID NO: 944676 - RNA, 19 nt, Homo sapiens
  misc_RNA (1)...(19): siRNA sense strand
uaacuucaggccuguuuga

SEQ ID NO: 944677 - RNA, 19 nt, Homo sapiens
  misc_RNA (1)...(19): siRNA sense strand
ccacagcaucccucucaaa

SEQ ID NO: 944678 - RNA, 19 nt, Homo sapiens
  misc_RNA (1)...(19): siRNA sense strand
aguagaagguuauuaucug

SEQ ID NO: 944679 - RNA, 19 nt, Homo sapiens
  misc_RNA (1)...(19): siRNA sense strand
auacugaucuugaggaaaa

SEQ ID NO: 944680 - RNA, 19 nt, Homo sapiens
  misc_RNA (1)...(19): siRNA sense strand
guacaagaagcuuuacaca

SEQ ID NO: 944681 - RNA, 19 nt, Homo sapiens
  misc_RNA (1)...(19): siRNA sense strand
ucaaagcgaauuaacuuca

SEQ ID NO: 944682 - RNA, 19 nt, Homo sapiens
  misc_RNA (1)...(19): siRNA sense strand
ccauaaagcuggauuuucu

SEQ ID NO: 944683 - RNA, 19 nt, Homo sapiens
  misc_RNA (1)...(19): siRNA sense strand
caacaaaggggccaauuau

SEQ ID NO: 944684 - RNA, 19 nt, Homo sapiens
  misc_RNA (1)...(19): siRNA sense strand
guagagcuaacuuugauuc

SEQ ID NO: 944685 - RNA, 19 nt, Homo sapiens
  misc_RNA (1)...(19): siRNA sense strand
caacuguacaagaagcuuu

SEQ ID NO: 944686 - RNA, 19 nt, Homo sapiens
  misc_RNA (1)...(19): siRNA sense strand
caaaggggccaauuaugua

SEQ ID NO: 944687 - RNA, 19 nt, Homo sapiens
  misc_RNA (1)...(19): siRNA sense strand
uuagauguccuucuucaga

SEQ ID NO: 944688 - RNA, 19 nt, Homo sapiens
  misc_RNA (1)...(19): siRNA sense strand
aaaccagaaugcuuugaag

SEQ ID NO: 944689 - RNA, 19 nt, Homo sapiens
  misc_RNA (1)...(19): siRNA sense strand
ggaacccuuucuauauuac

SEQ ID NO: 944690 - RNA, 19 nt, Homo sapiens
  misc_RNA (1)...(19): siRNA sense strand
aaagaaaugcuuccccuua

SEQ ID NO: 944691 - RNA, 19 nt, Homo sapiens
  misc_RNA (1)...(19): siRNA sense strand
uuacacaauuuccuuaagg

SEQ ID NO: 944692 - RNA, 19 nt, Homo sapiens
  misc_RNA (1)...(19): siRNA sense strand
caaagggagauacugcuau

SEQ ID NO: 944693 - RNA, 19 nt, Homo sapiens
  misc_RNA (1)...(19): siRNA sense strand
ucaaagggagauacugcua

SEQ ID NO: 944694 - RNA, 19 nt, Homo sapiens
  misc_RNA (1)...(19): siRNA sense strand
caaagcgaauuaacuucag

SEQ ID NO: 944695 - RNA, 19 nt, Homo sapiens
  misc_RNA (1)...(19): siRNA sense strand
aaccaucucugcuccugaa

SEQ ID NO: 944696 - RNA, 19 nt, Homo sapiens
  misc_RNA (1)...(19): siRNA sense strand
ccauugugguagcuuuauu

SEQ ID NO: 944697 - RNA, 19 nt, Homo sapiens
  misc_RNA (1)...(19): siRNA sense strand
gaagguuauuaucuguauc

SEQ ID NO: 944698 - RNA, 19 nt, Homo sapiens
  misc_RNA (1)...(19): siRNA sense strand
gcuuuacacaauuuccuua

SEQ ID NO: 944699 - RNA, 19 nt, Homo sapiens
  misc_RNA (1)...(19): siRNA sense strand
caucugugguaugcaguuu

SEQ ID NO: 944700 - RNA, 19 nt, Homo sapiens
  misc_RNA (1)...(19): siRNA sense strand
uccagaagaucaaguuagu

SEQ ID NO: 944701 - RNA, 19 nt, Homo sapiens
  misc_RNA (1)...(19): siRNA sense strand
gugcuuaagcugcugcaaa

SEQ ID NO: 944702 - RNA, 19 nt, Homo sapiens
  misc_RNA (1)...(19): siRNA sense strand
caacaaaguagagcuaacu

SEQ ID NO: 944703 - RNA, 19 nt, Homo sapiens
  misc_RNA (1)...(19): siRNA sense strand
cagaagaucaaguuaguac

SEQ ID NO: 944704 - RNA, 19 nt, Homo sapiens
  misc_RNA (1)...(19): siRNA sense strand
gcagccaaagcaaguagaa

SEQ ID NO: 944705 - RNA, 19 nt, Homo sapiens
  misc_RNA (1)...(19): siRNA sense strand
uggagccucuucuauuuca

SEQ ID NO: 944706 - RNA, 19 nt, Homo sapiens
  misc_RNA (1)...(19): siRNA sense strand
uuagcaaaguguuauacug

SEQ ID NO: 944707 - RNA, 19 nt, Homo sapiens
  misc_RNA (1)...(19): siRNA sense strand
cauuauaacccaagucuua

SEQ ID NO: 944708 - RNA, 19 nt, Homo sapiens
  misc_RNA (1)...(19): siRNA sense strand
ggauggagaccguuaauga

SEQ ID NO: 944709 - RNA, 19 nt, Homo sapiens
  misc_RNA (1)...(19): siRNA sense strand
gaagggauggagaccguua

SEQ ID NO: 944710 - RNA, 19 nt, Homo sapiens
  misc_RNA (1)...(19): siRNA sense strand
ccagucagccuccguaauu

SEQ ID NO: 944711 - RNA, 19 nt, Homo sapiens
  misc_RNA (1)...(19): siRNA sense strand
gucuuaggguucauuauaa

SEQ ID NO: 944712 - RNA, 19 nt, Homo sapiens
  misc_RNA (1)...(19): siRNA sense strand
ugucuuaggguucauuaua

SEQ ID NO: 944713 - RNA, 19 nt, Homo sapiens
  misc_RNA (1)...(19): siRNA sense strand
uaacccaagucuuaaugga

SEQ ID NO: 944714 - RNA, 19 nt, Homo sapiens
  misc_RNA (1)...(19): siRNA sense strand
gggaguggcagcuucguuu

SEQ ID NO: 944715 - RNA, 19 nt, Homo sapiens
  misc_RNA (1)...(19): siRNA sense strand
cagucagccuccguaauua

SEQ ID NO: 944716 - RNA, 19 nt, Homo sapiens
  misc_RNA (1)...(19): siRNA sense strand
ccaggugucuuaggguuca

SEQ ID NO: 944717 - RNA, 19 nt, Homo sapiens
  misc_RNA (1)...(19): siRNA sense strand
gcagcagaagcaagaaaug

SEQ ID NO: 944718 - RNA, 19 nt, Homo sapiens
  misc_RNA (1)...(19): siRNA sense strand
cagccuccguaauuaguau

SEQ ID NO: 944719 - RNA, 19 nt, Homo sapiens
  misc_RNA (1)...(19): siRNA sense strand
uaguaugcguggaguggaa

SEQ ID NO: 944720 - RNA, 19 nt, Homo sapiens
  misc_RNA (1)...(19): siRNA sense strand
gauggagaccguuaaugag

SEQ ID NO: 944721 - RNA, 19 nt, Homo sapiens
  misc_RNA (1)...(19): siRNA sense strand
ggacgcccagcuuucuuug

SEQ ID NO: 944722 - RNA, 19 nt, Homo sapiens
  misc_RNA (1)...(19): siRNA sense strand
ugcguggaguggaaaguaa

SEQ ID NO: 944723 - RNA, 19 nt, Homo sapiens
  misc_RNA (1)...(19): siRNA sense strand
ggucucaccagaggucaaa

SEQ ID NO: 944724 - RNA, 19 nt, Homo sapiens
  misc_RNA (1)...(19): siRNA sense strand
uauaacccaagucuuaaug

SEQ ID NO: 944725 - RNA, 19 nt, Homo sapiens
  misc_RNA (1)...(19): siRNA sense strand
uggaguggaaaguaauuaa

SEQ ID NO: 944726 - RNA, 19 nt, Homo sapiens
  misc_RNA (1)...(19): siRNA sense strand
ggugucuuaggguucauua

SEQ ID NO: 944727 - RNA, 19 nt, Homo sapiens
  misc_RNA (1)...(19): siRNA sense strand
guggaguggaaaguaauua

SEQ ID NO: 944728 - RNA, 19 nt, Homo sapiens
  misc_RNA (1)...(19): siRNA sense strand
ggaguggcagcuucguuuc

SEQ ID NO: 944729 - RNA, 19 nt, Homo sapiens
  misc_RNA (1)...(19): siRNA sense strand
gaagugagauuguuaggaa

SEQ ID NO: 944730 - RNA, 19 nt, Homo sapiens
  misc_RNA (1)...(19): siRNA sense strand
gcaacaugcuucucuacua

SEQ ID NO: 944731 - RNA, 19 nt, Homo sapiens
  misc_RNA (1)...(19): siRNA sense strand
ggaagacauugauaaacua

SEQ ID NO: 944732 - RNA, 19 nt, Homo sapiens
  misc_RNA (1)...(19): siRNA sense strand
gaacugaucacuaaauaug

SEQ ID NO: 944733 - RNA, 19 nt, Homo sapiens
  misc_RNA (1)...(19): siRNA sense strand
ggaagaagugagauuguua

SEQ ID NO: 944734 - RNA, 19 nt, Homo sapiens
  misc_RNA (1)...(19): siRNA sense strand
caacaugcuucucuacuau

SEQ ID NO: 944735 - RNA, 19 nt, Homo sapiens
  misc_RNA (1)...(19): siRNA sense strand
ggacugaaauacgaaaguu

SEQ ID NO: 944736 - RNA, 19 nt, Homo sapiens
  misc_RNA (1)...(19): siRNA sense strand
guacagcucucgggcauug

SEQ ID NO: 944737 - RNA, 19 nt, Homo sapiens
  misc_RNA (1)...(19): siRNA sense strand
gaaacagugucuuguccuu

SEQ ID NO: 944738 - RNA, 19 nt, Homo sapiens
  misc_RNA (1)...(19): siRNA sense strand
gggaagacauugauaaacu

SEQ ID NO: 944739 - RNA, 19 nt, Homo sapiens
  misc_RNA (1)...(19): siRNA sense strand
cuacaggaguuaccagauu

SEQ ID NO: 944740 - RNA, 19 nt, Homo sapiens
  misc_RNA (1)...(19): siRNA sense strand
auacgaaaguuaggaguua

SEQ ID NO: 944741 - RNA, 19 nt, Homo sapiens
  misc_RNA (1)...(19): siRNA sense strand
cgaaggaaauugguaauag

SEQ ID NO: 944742 - RNA, 19 nt, Homo sapiens
  misc_RNA (1)...(19): siRNA sense strand
gaagugccauucagguauc

SEQ ID NO: 944743 - RNA, 19 nt, Homo sapiens
  misc_RNA (1)...(19): siRNA sense strand
cauuagggauggagauaaa

SEQ ID NO: 944744 - RNA, 19 nt, Homo sapiens
  misc_RNA (1)...(19): siRNA sense strand
gaaggaaauugguaauagc

SEQ ID NO: 944745 - RNA, 19 nt, Homo sapiens
  misc_RNA (1)...(19): siRNA sense strand
uggcagaacuaaagaaaca

SEQ ID NO: 944746 - RNA, 19 nt, Homo sapiens
  misc_RNA (1)...(19): siRNA sense strand
ggccaacaaucauuugaau

SEQ ID NO: 944747 - RNA, 19 nt, Homo sapiens
  misc_RNA (1)...(19): siRNA sense strand
gagcgaaggaaauugguaa

SEQ ID NO: 944748 - RNA, 19 nt, Homo sapiens
  misc_RNA (1)...(19): siRNA sense strand
agacuggacugaaauacga

SEQ ID NO: 944749 - RNA, 19 nt, Homo sapiens
  misc_RNA (1)...(19): siRNA sense strand
ugaggagccugaugauuca

SEQ ID NO: 944750 - RNA, 19 nt, Homo sapiens
  misc_RNA (1)...(19): siRNA sense strand
gcccagaggaaaugaagua

SEQ ID NO: 944751 - RNA, 19 nt, Homo sapiens
  misc_RNA (1)...(19): siRNA sense strand
ucucuuaagcuacuacaua

SEQ ID NO: 944752 - RNA, 19 nt, Homo sapiens
  misc_RNA (1)...(19): siRNA sense strand
uacaggaguuaccagauuu

SEQ ID NO: 944753 - RNA, 19 nt, Homo sapiens
  misc_RNA (1)...(19): siRNA sense strand
gcgaaggaaauugguaaua

SEQ ID NO: 944754 - RNA, 19 nt, Homo sapiens
  misc_RNA (1)...(19): siRNA sense strand
gaagaagugagauuguuag

SEQ ID NO: 944755 - RNA, 19 nt, Homo sapiens
  misc_RNA (1)...(19): siRNA sense strand
ccaaacaguggcagaacua

SEQ ID NO: 944756 - RNA, 19 nt, Homo sapiens
  misc_RNA (1)...(19): siRNA sense strand
gagcucuuccugugccuua

SEQ ID NO: 944757 - RNA, 19 nt, Homo sapiens
  misc_RNA (1)...(19): siRNA sense strand
gacaauaaccuccaagacu

SEQ ID NO: 944758 - RNA, 19 nt, Homo sapiens
  misc_RNA (1)...(19): siRNA sense strand
ggaguuauguuuccuucac

SEQ ID NO: 944759 - RNA, 19 nt, Homo sapiens
  misc_RNA (1)...(19): siRNA sense strand
ccaagacuggacugaaaua

SEQ ID NO: 944760 - RNA, 19 nt, Homo sapiens
  misc_RNA (1)...(19): siRNA sense strand
ccagagcagugcaaaagua

SEQ ID NO: 944761 - RNA, 19 nt, Homo sapiens
  misc_RNA (1)...(19): siRNA sense strand
uugcauuccuuuggcauua

SEQ ID NO: 944762 - RNA, 19 nt, Homo sapiens
  misc_RNA (1)...(19): siRNA sense strand
acaugcuucucuacuauuu

SEQ ID NO: 944763 - RNA, 19 nt, Homo sapiens
  misc_RNA (1)...(19): siRNA sense strand
cagaggaaaugaaguacag

SEQ ID NO: 944764 - RNA, 19 nt, Homo sapiens
  misc_RNA (1)...(19): siRNA sense strand
uggaagaagugagauuguu

SEQ ID NO: 944765 - RNA, 19 nt, Homo sapiens
  misc_RNA (1)...(19): siRNA sense strand
cuuaauggcagcguuguua

SEQ ID NO: 944766 - RNA, 19 nt, Homo sapiens
  misc_RNA (1)...(19): siRNA sense strand
gacugaaauacgaaaguua

SEQ ID NO: 944767 - RNA, 19 nt, Homo sapiens
  misc_RNA (1)...(19): siRNA sense strand
caaacuggaagaagugaga

SEQ ID NO: 944768 - RNA, 19 nt, Homo sapiens
  misc_RNA (1)...(19): siRNA sense strand
gaaaguuaggaguuauguu

SEQ ID NO: 944769 - RNA, 19 nt, Homo sapiens
  misc_RNA (1)...(19): siRNA sense strand
ggaccaaacaguggcagaa

SEQ ID NO: 944770 - RNA, 19 nt, Homo sapiens
  misc_RNA (1)...(19): siRNA sense strand
ggagcgaaggaaauuggua

SEQ ID NO: 944771 - RNA, 19 nt, Homo sapiens
  misc_RNA (1)...(19): siRNA sense strand
gcauuagggauggagauaa

SEQ ID NO: 944772 - RNA, 19 nt, Homo sapiens
  misc_RNA (1)...(19): siRNA sense strand
cuaguacaauuacccacaa

SEQ ID NO: 944773 - RNA, 19 nt, Homo sapiens
  misc_RNA (1)...(19): siRNA sense strand
cuaaauaugggaaguugga

SEQ ID NO: 944774 - RNA, 19 nt, Homo sapiens
  misc_RNA (1)...(19): siRNA sense strand
ugucuuguccuucuauuug

SEQ ID NO: 944775 - RNA, 19 nt, Homo sapiens
  misc_RNA (1)...(19): siRNA sense strand
gaucagguggaagaaauga

SEQ ID NO: 944776 - RNA, 19 nt, Homo sapiens
  misc_RNA (1)...(19): siRNA sense strand
cacuaaauaugggaaguug

SEQ ID NO: 944777 - RNA, 19 nt, Homo sapiens
  misc_RNA (1)...(19): siRNA sense strand
aagaagugccauucaggua

SEQ ID NO: 944778 - RNA, 19 nt, Homo sapiens
  misc_RNA (1)...(19): siRNA sense strand
gcauucgucuggaccaaac

SEQ ID NO: 944779 - RNA, 19 nt, Homo sapiens
  misc_RNA (1)...(19): siRNA sense strand
gagcauucgucuggaccaa

SEQ ID NO: 944780 - RNA, 19 nt, Homo sapiens
  misc_RNA (1)...(19): siRNA sense strand
ccagguuguuuccuaaucu

SEQ ID NO: 944781 - RNA, 19 nt, Homo sapiens
  misc_RNA (1)...(19): siRNA sense strand
aaacaguggcagaacuaaa

SEQ ID NO: 944782 - RNA, 19 nt, Homo sapiens
  misc_RNA (1)...(19): siRNA sense strand
acgaucagguggaagaaau

SEQ ID NO: 944783 - RNA, 19 nt, Homo sapiens
  misc_RNA (1)...(19): siRNA sense strand
guacaauuacccacaagca

SEQ ID NO: 944784 - RNA, 19 nt, Homo sapiens
  misc_RNA (1)...(19): siRNA sense strand
cucuuaagcuacuacauau

SEQ ID NO: 944785 - RNA, 19 nt, Homo sapiens
  misc_RNA (1)...(19): siRNA sense strand
uugaggagccugaugauuc

SEQ ID NO: 944786 - RNA, 19 nt, Homo sapiens
  misc_RNA (1)...(19): siRNA sense strand
gccagguuguuuccuaauc

SEQ ID NO: 944787 - RNA, 19 nt, Homo sapiens
  misc_RNA (1)...(19): siRNA sense strand
caaacaguggcagaacuaa

SEQ ID NO: 944788 - RNA, 19 nt, Homo sapiens
  misc_RNA (1)...(19): siRNA sense strand
ggcagaaguggaccuaaga

SEQ ID NO: 944789 - RNA, 19 nt, Homo sapiens
  misc_RNA (1)...(19): siRNA sense strand
uggccagguuguuuccuaa

SEQ ID NO: 944790 - RNA, 19 nt, Homo sapiens
  misc_RNA (1)...(19): siRNA sense strand
gaccaugaagcacccuuug

SEQ ID NO: 944791 - RNA, 19 nt, Homo sapiens
  misc_RNA (1)...(19): siRNA sense strand
gcagaacuaaagaaacagu

SEQ ID NO: 944792 - RNA, 19 nt, Homo sapiens
  misc_RNA (1)...(19): siRNA sense strand
uggcagaaguggaccuaag

SEQ ID NO: 944793 - RNA, 19 nt, Homo sapiens
  misc_RNA (1)...(19): siRNA sense strand
guuggagccuuuggcagaa

SEQ ID NO: 944794 - RNA, 19 nt, Homo sapiens
  misc_RNA (1)...(19): siRNA sense strand
caugaacugaucacuaaau

SEQ ID NO: 944795 - RNA, 19 nt, Homo sapiens
  misc_RNA (1)...(19): siRNA sense strand
gauggugaacgagaagauu

SEQ ID NO: 944796 - RNA, 19 nt, Homo sapiens
  misc_RNA (1)...(19): siRNA sense strand
gaggagcgaaggaaauugg

SEQ ID NO: 944797 - RNA, 19 nt, Homo sapiens
  misc_RNA (1)...(19): siRNA sense strand
ccugggaagacauugauaa

SEQ ID NO: 944798 - RNA, 19 nt, Homo sapiens
  misc_RNA (1)...(19): siRNA sense strand
gcaguccugggaagacauu

SEQ ID NO: 944799 - RNA, 19 nt, Homo sapiens
  misc_RNA (1)...(19): siRNA sense strand
gugagauuguuaggaauuc

SEQ ID NO: 944800 - RNA, 19 nt, Homo sapiens
  misc_RNA (1)...(19): siRNA sense strand
ggcauuagggauggagaua

SEQ ID NO: 944801 - RNA, 19 nt, Homo sapiens
  misc_RNA (1)...(19): siRNA sense strand
gggcauugcauuccuuugg

SEQ ID NO: 944802 - RNA, 19 nt, Homo sapiens
  misc_RNA (1)...(19): siRNA sense strand
ccagauugccaucaguuuc

SEQ ID NO: 944803 - RNA, 19 nt, Homo sapiens
  misc_RNA (1)...(19): siRNA sense strand
cagguuguuuccuaaucuu

SEQ ID NO: 944804 - RNA, 19 nt, Homo sapiens
  misc_RNA (1)...(19): siRNA sense strand
uauguuuccuucacuggau

SEQ ID NO: 944805 - RNA, 19 nt, Homo sapiens
  misc_RNA (1)...(19): siRNA sense strand
agaagugccauucagguau

SEQ ID NO: 944806 - RNA, 19 nt, Homo sapiens
  misc_RNA (1)...(19): siRNA sense strand
ccgaggagcgaaggaaauu

SEQ ID NO: 944807 - RNA, 19 nt, Homo sapiens
  misc_RNA (1)...(19): siRNA sense strand
ccaucagccuccacaaguc

SEQ ID NO: 944808 - RNA, 19 nt, Homo sapiens
  misc_RNA (1)...(19): siRNA sense strand
gugccuuaaugacuaugaa

SEQ ID NO: 944809 - RNA, 19 nt, Homo sapiens
  misc_RNA (1)...(19): siRNA sense strand
cuauugaggagccugauga

SEQ ID NO: 944810 - RNA, 19 nt, Homo sapiens
  misc_RNA (1)...(19): siRNA sense strand
ccucuucugcagccauaua

SEQ ID NO: 944811 - RNA, 19 nt, Homo sapiens
  misc_RNA (1)...(19): siRNA sense strand
uuaacgaucagguggaaga

SEQ ID NO: 944812 - RNA, 19 nt, Homo sapiens
  misc_RNA (1)...(19): siRNA sense strand
ugaaauacgaaaguuagga

SEQ ID NO: 944813 - RNA, 19 nt, Homo sapiens
  misc_RNA (1)...(19): siRNA sense strand
gccagauugccaucaguuu

SEQ ID NO: 944814 - RNA, 19 nt, Homo sapiens
  misc_RNA (1)...(19): siRNA sense strand
ucuauuugcugucauucuc

SEQ ID NO: 944815 - RNA, 19 nt, Homo sapiens
  misc_RNA (1)...(19): siRNA sense strand
caauuacccacaagcaaca

SEQ ID NO: 944816 - RNA, 19 nt, Homo sapiens
  misc_RNA (1)...(19): siRNA sense strand
ucacuaaauaugggaaguu

SEQ ID NO: 944817 - RNA, 19 nt, Homo sapiens
  misc_RNA (1)...(19): siRNA sense strand
gucauucucuuaagcuacu

SEQ ID NO: 944818 - RNA, 19 nt, Homo sapiens
  misc_RNA (1)...(19): siRNA sense strand
ccuucuauuugcugucauu

SEQ ID NO: 944819 - RNA, 19 nt, Homo sapiens
  misc_RNA (1)...(19): siRNA sense strand
augggaaguuggagccuuu

SEQ ID NO: 944820 - RNA, 19 nt, Homo sapiens
  misc_RNA (1)...(19): siRNA sense strand
caucagccuccacaaguca

SEQ ID NO: 944821 - RNA, 19 nt, Homo sapiens
  misc_RNA (1)...(19): siRNA sense strand
uggcagcguuguuacugau

SEQ ID NO: 944822 - RNA, 19 nt, Homo sapiens
  misc_RNA (1)...(19): siRNA sense strand
cagacaauaaccuccaaga

SEQ ID NO: 944823 - RNA, 19 nt, Homo sapiens
  misc_RNA (1)...(19): siRNA sense strand
cugggaagacauugauaaa

SEQ ID NO: 944824 - RNA, 19 nt, Homo sapiens
  misc_RNA (1)...(19): siRNA sense strand
uccugugccuuaaugacua

SEQ ID NO: 944825 - RNA, 19 nt, Homo sapiens
  misc_RNA (1)...(19): siRNA sense strand
uacgaaaguuaggaguuau

SEQ ID NO: 944826 - RNA, 19 nt, Homo sapiens
  misc_RNA (1)...(19): siRNA sense strand
acagugucuuguccuucua

SEQ ID NO: 944827 - RNA, 19 nt, Homo sapiens
  misc_RNA (1)...(19): siRNA sense strand
guccuucuauuugcuguca

SEQ ID NO: 944828 - RNA, 19 nt, Homo sapiens
  misc_RNA (1)...(19): siRNA sense strand
cgaaaguuaggaguuaugu

SEQ ID NO: 944829 - RNA, 19 nt, Homo sapiens
  misc_RNA (1)...(19): siRNA sense strand
gaaagacguuaucuccuaa

SEQ ID NO: 944830 - RNA, 19 nt, Homo sapiens
  misc_RNA (1)...(19): siRNA sense strand
uagcauguaugacaacuua

SEQ ID NO: 944831 - RNA, 19 nt, Homo sapiens
  misc_RNA (1)...(19): siRNA sense strand
gaaauugccuggacaagag

SEQ ID NO: 944832 - RNA, 19 nt, Homo sapiens
  misc_RNA (1)...(19): siRNA sense strand
ugaaagacguuaucuccua

SEQ ID NO: 944833 - RNA, 19 nt, Homo sapiens
  misc_RNA (1)...(19): siRNA sense strand
gaacaaguuuggccuguca

SEQ ID NO: 944834 - RNA, 19 nt, Homo sapiens
  misc_RNA (1)...(19): siRNA sense strand
gaaccucccuuuccuuauc

SEQ ID NO: 944835 - RNA, 19 nt, Homo sapiens
  misc_RNA (1)...(19): siRNA sense strand
caagaaggaugcacaagau

SEQ ID NO: 944836 - RNA, 19 nt, Homo sapiens
  misc_RNA (1)...(19): siRNA sense strand
ggacacaacucaccuccau

SEQ ID NO: 944837 - RNA, 19 nt, Homo sapiens
  misc_RNA (1)...(19): siRNA sense strand
ggacggaggugauguucau

SEQ ID NO: 944838 - RNA, 19 nt, Homo sapiens
  misc_RNA (1)...(19): siRNA sense strand
gagaaugguugcccguauu

SEQ ID NO: 944839 - RNA, 19 nt, Homo sapiens
  misc_RNA (1)...(19): siRNA sense strand
gcaagcagcugacauucuc

SEQ ID NO: 944840 - RNA, 19 nt, Homo sapiens
  misc_RNA (1)...(19): siRNA sense strand
gaauaugcuuugccucaga

SEQ ID NO: 944841 - RNA, 19 nt, Homo sapiens
  misc_RNA (1)...(19): siRNA sense strand
caagagaggccuagugaug

SEQ ID NO: 944842 - RNA, 19 nt, Homo sapiens
  misc_RNA (1)...(19): siRNA sense strand
gugaagaccuacagaguuc

SEQ ID NO: 944843 - RNA, 19 nt, Homo sapiens
  misc_RNA (1)...(19): siRNA sense strand
cuaaugaaccuaccucaaa

SEQ ID NO: 944844 - RNA, 19 nt, Homo sapiens
  misc_RNA (1)...(19): siRNA sense strand
gaagagcgaccugcccuaa

SEQ ID NO: 944845 - RNA, 19 nt, Homo sapiens
  misc_RNA (1)...(19): siRNA sense strand
ugaacuugcuggagacaaa

SEQ ID NO: 944846 - RNA, 19 nt, Homo sapiens
  misc_RNA (1)...(19): siRNA sense strand
gaccugcccuaauggauga

SEQ ID NO: 944847 - RNA, 19 nt, Homo sapiens
  misc_RNA (1)...(19): siRNA sense strand
gacaagagaggccuaguga

SEQ ID NO: 944848 - RNA, 19 nt, Homo sapiens
  misc_RNA (1)...(19): siRNA sense strand
gcuacagaaucaacacaaa

SEQ ID NO: 944849 - RNA, 19 nt, Homo sapiens
  misc_RNA (1)...(19): siRNA sense strand
gacguuaucuccuaagucu

SEQ ID NO: 944850 - RNA, 19 nt, Homo sapiens
  misc_RNA (1)...(19): siRNA sense strand
ggaaauugccuggacaaga

SEQ ID NO: 944851 - RNA, 19 nt, Homo sapiens
  misc_RNA (1)...(19): siRNA sense strand
caaaccagcucugcagugu

SEQ ID NO: 944852 - RNA, 19 nt, Homo sapiens
  misc_RNA (1)...(19): siRNA sense strand
aagccaaucucuauaccua

SEQ ID NO: 944853 - RNA, 19 nt, Homo sapiens
  misc_RNA (1)...(19): siRNA sense strand
gaagaaauacaaggugaug

SEQ ID NO: 944854 - RNA, 19 nt, Homo sapiens
  misc_RNA (1)...(19): siRNA sense strand
gaugaccacuuuguacaga

SEQ ID NO: 944855 - RNA, 19 nt, Homo sapiens
  misc_RNA (1)...(19): siRNA sense strand
guucagacccugcuacaga

SEQ ID NO: 944856 - RNA, 19 nt, Homo sapiens
  misc_RNA (1)...(19): siRNA sense strand
caacuucaccuaucauugg

SEQ ID NO: 944857 - RNA, 19 nt, Homo sapiens
  misc_RNA (1)...(19): siRNA sense strand
ccuauaagccagugcaauu

SEQ ID NO: 944858 - RNA, 19 nt, Homo sapiens
  misc_RNA (1)...(19): siRNA sense strand
ccuaauggaugacagaaag

SEQ ID NO: 944859 - RNA, 19 nt, Homo sapiens
  misc_RNA (1)...(19): siRNA sense strand
cgucgacucuugcaucaga

SEQ ID NO: 944860 - RNA, 19 nt, Homo sapiens
  misc_RNA (1)...(19): siRNA sense strand
ucacugcugugcuccagaa

SEQ ID NO: 944861 - RNA, 19 nt, Homo sapiens
  misc_RNA (1)...(19): siRNA sense strand
gugcugccaugcuuacuga

SEQ ID NO: 944862 - RNA, 19 nt, Homo sapiens
  misc_RNA (1)...(19): siRNA sense strand
gcacgggucccuggauuug

SEQ ID NO: 944863 - RNA, 19 nt, Homo sapiens
  misc_RNA (1)...(19): siRNA sense strand
gagccguggugaagaccua

SEQ ID NO: 944864 - RNA, 19 nt, Homo sapiens
  misc_RNA (1)...(19): siRNA sense strand
uaaugaaccuaccucaaag

SEQ ID NO: 944865 - RNA, 19 nt, Homo sapiens
  misc_RNA (1)...(19): siRNA sense strand
caucuuccaucagugagua

SEQ ID NO: 944866 - RNA, 19 nt, Homo sapiens
  misc_RNA (1)...(19): siRNA sense strand
agagcgaccugcccuaaug

SEQ ID NO: 944867 - RNA, 19 nt, Homo sapiens
  misc_RNA (1)...(19): siRNA sense strand
gauugaugcuguugugaca

SEQ ID NO: 944868 - RNA, 19 nt, Homo sapiens
  misc_RNA (1)...(19): siRNA sense strand
caucagagacagcaacaga

SEQ ID NO: 944869 - RNA, 19 nt, Homo sapiens
  misc_RNA (1)...(19): siRNA sense strand
ggugaagaccuacagaguu

SEQ ID NO: 944870 - RNA, 19 nt, Homo sapiens
  misc_RNA (1)...(19): siRNA sense strand
ggacaagagaggccuagug

SEQ ID NO: 944871 - RNA, 19 nt, Homo sapiens
  misc_RNA (1)...(19): siRNA sense strand
ugagaaaaccuacagcuua

SEQ ID NO: 944872 - RNA, 19 nt, Homo sapiens
  misc_RNA (1)...(19): siRNA sense strand
cagcuucacccaacagauu

SEQ ID NO: 944873 - RNA, 19 nt, Homo sapiens
  misc_RNA (1)...(19): siRNA sense strand
ucaagaaggaugcacaaga

SEQ ID NO: 944874 - RNA, 19 nt, Homo sapiens
  misc_RNA (1)...(19): siRNA sense strand
gaagaugaucgggaccuuu

SEQ ID NO: 944875 - RNA, 19 nt, Homo sapiens
  misc_RNA (1)...(19): siRNA sense strand
gcagcugacauucucauga

SEQ ID NO: 944876 - RNA, 19 nt, Homo sapiens
  misc_RNA (1)...(19): siRNA sense strand
gagugaggaugaugagaca

SEQ ID NO: 944877 - RNA, 19 nt, Homo sapiens
  misc_RNA (1)...(19): siRNA sense strand
gaagucagcaucggaaucu

SEQ ID NO: 944878 - RNA, 19 nt, Homo sapiens
  misc_RNA (1)...(19): siRNA sense strand
gagcagucaucaagaucau

SEQ ID NO: 944879 - RNA, 19 nt, Homo sapiens
  misc_RNA (1)...(19): siRNA sense strand
caaucucuauaccuacaaa

SEQ ID NO: 944880 - RNA, 19 nt, Homo sapiens
  misc_RNA (1)...(19): siRNA sense strand
gaucauguguauccgaaaa

SEQ ID NO: 944881 - RNA, 19 nt, Homo sapiens
  misc_RNA (1)...(19): siRNA sense strand
gcaauuugagggcucuuug

SEQ ID NO: 944882 - RNA, 19 nt, Homo sapiens
  misc_RNA (1)...(19): siRNA sense strand
aaggagcgcaccaagcuua

SEQ ID NO: 944883 - RNA, 19 nt, Homo sapiens
  misc_RNA (1)...(19): siRNA sense strand
aaaccuagugucccucuuu

SEQ ID NO: 944884 - RNA, 19 nt, Homo sapiens
  misc_RNA (1)...(19): siRNA sense strand
gccaaucucuauaccuaca

SEQ ID NO: 944885 - RNA, 19 nt, Homo sapiens
  misc_RNA (1)...(19): siRNA sense strand
gcggucaacuucaccuauc

SEQ ID NO: 944886 - RNA, 19 nt, Homo sapiens
  misc_RNA (1)...(19): siRNA sense strand
ucuaucaucuuccaucagu

SEQ ID NO: 944887 - RNA, 19 nt, Homo sapiens
  misc_RNA (1)...(19): siRNA sense strand
ggcagaaacugaacuugcu

SEQ ID NO: 944888 - RNA, 19 nt, Homo sapiens
  misc_RNA (1)...(19): siRNA sense strand
gcagugucccgaacucuuc

SEQ ID NO: 944889 - RNA, 19 nt, Homo sapiens
  misc_RNA (1)...(19): siRNA sense strand
agagaaugguugcccguau

SEQ ID NO: 944890 - RNA, 19 nt, Homo sapiens
  misc_RNA (1)...(19): siRNA sense strand
cagagacagcaacagaaua

SEQ ID NO: 944891 - RNA, 19 nt, Homo sapiens
  misc_RNA (1)...(19): siRNA sense strand
ugccaugaaucccaaguug

SEQ ID NO: 944892 - RNA, 19 nt, Homo sapiens
  misc_RNA (1)...(19): siRNA sense strand
gagaaaaccuacagcuuac

SEQ ID NO: 944893 - RNA, 19 nt, Homo sapiens
  misc_RNA (1)...(19): siRNA sense strand
gagcgcaccaagcuuauca

SEQ ID NO: 944894 - RNA, 19 nt, Homo sapiens
  misc_RNA (1)...(19): siRNA sense strand
ccacagcaccgucgacucu

SEQ ID NO: 944895 - RNA, 19 nt, Homo sapiens
  misc_RNA (1)...(19): siRNA sense strand
uggcaguccuccuguuaga

SEQ ID NO: 944896 - RNA, 19 nt, Homo sapiens
  misc_RNA (1)...(19): siRNA sense strand
agaaggaugcacaagauga

SEQ ID NO: 944897 - RNA, 19 nt, Homo sapiens
  misc_RNA (1)...(19): siRNA sense strand
auaagccagugcaauuuga

SEQ ID NO: 944898 - RNA, 19 nt, Homo sapiens
  misc_RNA (1)...(19): siRNA sense strand
ggagcagucaucaagauca

SEQ ID NO: 944899 - RNA, 19 nt, Homo sapiens
  misc_RNA (1)...(19): siRNA sense strand
agacagcaacagaauagaa

SEQ ID NO: 944900 - RNA, 19 nt, Homo sapiens
  misc_RNA (1)...(19): siRNA sense strand
gaagucaccggagcaguca

SEQ ID NO: 944901 - RNA, 19 nt, Homo sapiens
  misc_RNA (1)...(19): siRNA sense strand
ggccaagccaaucucuaua

SEQ ID NO: 944902 - RNA, 19 nt, Homo sapiens
  misc_RNA (1)...(19): siRNA sense strand
guccgaagccuguccaugu

SEQ ID NO: 944903 - RNA, 19 nt, Homo sapiens
  misc_RNA (1)...(19): siRNA sense strand
gaaggaugcacaagaugag

SEQ ID NO: 944904 - RNA, 19 nt, Homo sapiens
  misc_RNA (1)...(19): siRNA sense strand
gugaggaugaugagacaaa

SEQ ID NO: 944905 - RNA, 19 nt, Homo sapiens
  misc_RNA (1)...(19): siRNA sense strand
gaaaaggauugggucucua

SEQ ID NO: 944906 - RNA, 19 nt, Homo sapiens
  misc_RNA (1)...(19): siRNA sense strand
ccagagagcacagcuucuu

SEQ ID NO: 944907 - RNA, 19 nt, Homo sapiens
  misc_RNA (1)...(19): siRNA sense strand
guucauggcaacacgagaa

SEQ ID NO: 944908 - RNA, 19 nt, Homo sapiens
  misc_RNA (1)...(19): siRNA sense strand
gaucgggaccuuucugaac

SEQ ID NO: 944909 - RNA, 19 nt, Homo sapiens
  misc_RNA (1)...(19): siRNA sense strand
uaucaucuuccaucaguga

SEQ ID NO: 944910 - RNA, 19 nt, Homo sapiens
  misc_RNA (1)...(19): siRNA sense strand
ucccuuuccuuaucaagaa

SEQ ID NO: 944911 - RNA, 19 nt, Homo sapiens
  misc_RNA (1)...(19): siRNA sense strand
agagcaagcagcugacauu

SEQ ID NO: 944912 - RNA, 19 nt, Homo sapiens
  misc_RNA (1)...(19): siRNA sense strand
ggaaaaggauugggucucu

SEQ ID NO: 944913 - RNA, 19 nt, Homo sapiens
  misc_RNA (1)...(19): siRNA sense strand
cugcugugcuccagaacaa

SEQ ID NO: 944914 - RNA, 19 nt, Homo sapiens
  misc_RNA (1)...(19): siRNA sense strand
gcuaaugaaccuaccucaa

SEQ ID NO: 944915 - RNA, 19 nt, Homo sapiens
  misc_RNA (1)...(19): siRNA sense strand
cagcugacauucucaugac

SEQ ID NO: 944916 - RNA, 19 nt, Homo sapiens
  misc_RNA (1)...(19): siRNA sense strand
ggacuaugaaagacguuau

SEQ ID NO: 944917 - RNA, 19 nt, Homo sapiens
  misc_RNA (1)...(19): siRNA sense strand
uguuagagcuguccccaua

SEQ ID NO: 944918 - RNA, 19 nt, Homo sapiens
  misc_RNA (1)...(19): siRNA sense strand
uauaagccagugcaauuug

SEQ ID NO: 944919 - RNA, 19 nt, Homo sapiens
  misc_RNA (1)...(19): siRNA sense strand
gugauggcccuaagaagga

SEQ ID NO: 944920 - RNA, 19 nt, Homo sapiens
  misc_RNA (1)...(19): siRNA sense strand
ucagagacagcaacagaau

SEQ ID NO: 944921 - RNA, 19 nt, Homo sapiens
  misc_RNA (1)...(19): siRNA sense strand
ugacagaaagcacaaaauu

SEQ ID NO: 944922 - RNA, 19 nt, Homo sapiens
  misc_RNA (1)...(19): siRNA sense strand
ccggagcagucaucaagau

SEQ ID NO: 944923 - RNA, 19 nt, Homo sapiens
  misc_RNA (1)...(19): siRNA sense strand
agagacagcaacagaauag

SEQ ID NO: 944924 - RNA, 19 nt, Homo sapiens
  misc_RNA (1)...(19): siRNA sense strand
caaacuggagcacgccuau

SEQ ID NO: 944925 - RNA, 19 nt, Homo sapiens
  misc_RNA (1)...(19): siRNA sense strand
caccagcacucuccaaucc

SEQ ID NO: 944926 - RNA, 19 nt, Homo sapiens
  misc_RNA (1)...(19): siRNA sense strand
gcauguaugacaacuuaag

SEQ ID NO: 944927 - RNA, 19 nt, Homo sapiens
  misc_RNA (1)...(19): siRNA sense strand
gacagaaagcacaaaauuu

SEQ ID NO: 944928 - RNA, 19 nt, Homo sapiens
  misc_RNA (1)...(19): siRNA sense strand
aagcuuaccguuucuagug

SEQ ID NO: 944929 - RNA, 19 nt, Homo sapiens
  misc_RNA (1)...(19): siRNA sense strand
ggaggagccugcuucauca

SEQ ID NO: 944930 - RNA, 19 nt, Homo sapiens
  misc_RNA (1)...(19): siRNA sense strand
gagaagaaccacaccaguu

SEQ ID NO: 944931 - RNA, 19 nt, Homo sapiens
  misc_RNA (1)...(19): siRNA sense strand
ggacagccauucugcucau

SEQ ID NO: 944932 - RNA, 19 nt, Homo sapiens
  misc_RNA (1)...(19): siRNA sense strand
gggaggagccugcuucauc

SEQ ID NO: 944933 - RNA, 19 nt, Homo sapiens
  misc_RNA (1)...(19): siRNA sense strand
agaagaaccacaccaguug

SEQ ID NO: 944934 - RNA, 19 nt, Homo sapiens
  misc_RNA (1)...(19): siRNA sense strand
ucacuguccuggaguucuu

SEQ ID NO: 944935 - RNA, 19 nt, Homo sapiens
  misc_RNA (1)...(19): siRNA sense strand
ggagccugcuucaucaucu

SEQ ID NO: 944936 - RNA, 19 nt, Homo sapiens
  misc_RNA (1)...(19): siRNA sense strand
gcucauggauuuugguguu

SEQ ID NO: 944937 - RNA, 19 nt, Homo sapiens
  misc_RNA (1)...(19): siRNA sense strand
uaucuggccgugcuuacua

SEQ ID NO: 944938 - RNA, 19 nt, Homo sapiens
  misc_RNA (1)...(19): siRNA sense strand
caacauccucagcgucaug

SEQ ID NO: 944939 - RNA, 19 nt, Homo sapiens
  misc_RNA (1)...(19): siRNA sense strand
ccacgugggcaucuucuuc

SEQ ID NO: 944940 - RNA, 19 nt, Homo sapiens
  misc_RNA (1)...(19): siRNA sense strand
ccagugcaccugugaucuu

SEQ ID NO: 944941 - RNA, 19 nt, Homo sapiens
  misc_RNA (1)...(19): siRNA sense strand
cagcgcagacuucaacauc

SEQ ID NO: 944942 - RNA, 19 nt, Homo sapiens
  misc_RNA (1)...(19): siRNA sense strand
ggucauugccaugcacuuc

SEQ ID NO: 944943 - RNA, 19 nt, Homo sapiens
  misc_RNA (1)...(19): siRNA sense strand
cagugcaccugugaucuuc

SEQ ID NO: 944944 - RNA, 19 nt, Homo sapiens
  misc_RNA (1)...(19): siRNA sense strand
uggccgugcuuacuaucuu

SEQ ID NO: 944945 - RNA, 19 nt, Homo sapiens
  misc_RNA (1)...(19): siRNA sense strand
ggccgugcuuacuaucuuc

SEQ ID NO: 944946 - RNA, 19 nt, Homo sapiens
  misc_RNA (1)...(19): siRNA sense strand
gaaggaagguggcgaaugg

SEQ ID NO: 944947 - RNA, 19 nt, Homo sapiens
  misc_RNA (1)...(19): siRNA sense strand
gaacacagaagguggguuu

SEQ ID NO: 944948 - RNA, 19 nt, Homo sapiens
  misc_RNA (1)...(19): siRNA sense strand
gcacuccuguguagaugua

SEQ ID NO: 944949 - RNA, 19 nt, Homo sapiens
  misc_RNA (1)...(19): siRNA sense strand
ggacauagcccuccuucug

SEQ ID NO: 944950 - RNA, 19 nt, Homo sapiens
  misc_RNA (1)...(19): siRNA sense strand
ggacagagccuggguguuc

SEQ ID NO: 944951 - RNA, 19 nt, Homo sapiens
  misc_RNA (1)...(19): siRNA sense strand
ggaagaguccaccauguaa

SEQ ID NO: 944952 - RNA, 19 nt, Homo sapiens
  misc_RNA (1)...(19): siRNA sense strand
ccaauucccuccagagaug

SEQ ID NO: 944953 - RNA, 19 nt, Homo sapiens
  misc_RNA (1)...(19): siRNA sense strand
gacggaagcuucagcacuu

SEQ ID NO: 944954 - RNA, 19 nt, Homo sapiens
  misc_RNA (1)...(19): siRNA sense strand
gaguacggcugugaccuua

SEQ ID NO: 944955 - RNA, 19 nt, Homo sapiens
  misc_RNA (1)...(19): siRNA sense strand
gaacuggcuuccaccuuca

SEQ ID NO: 944956 - RNA, 19 nt, Homo sapiens
  misc_RNA (1)...(19): siRNA sense strand
gggaagaguccaccaugua

SEQ ID NO: 944957 - RNA, 19 nt, Homo sapiens
  misc_RNA (1)...(19): siRNA sense strand
ggacagugcugcccagacu

SEQ ID NO: 944958 - RNA, 19 nt, Homo sapiens
  misc_RNA (1)...(19): siRNA sense strand
acacagacuuuaccuacaa

SEQ ID NO: 944959 - RNA, 19 nt, Homo sapiens
  misc_RNA (1)...(19): siRNA sense strand
gcugugaccuuaccugcaa

SEQ ID NO: 944960 - RNA, 19 nt, Homo sapiens
  misc_RNA (1)...(19): siRNA sense strand
ccaagacacugacgaaugc

SEQ ID NO: 944961 - RNA, 19 nt, Homo sapiens
  misc_RNA (1)...(19): siRNA sense strand
ggaaacguguccugcaucu

SEQ ID NO: 944962 - RNA, 19 nt, Homo sapiens
  misc_RNA (1)...(19): siRNA sense strand
caucagguguacagacauu

SEQ ID NO: 944963 - RNA, 19 nt, Homo sapiens
  misc_RNA (1)...(19): siRNA sense strand
gaguguaccaccuguguuu

SEQ ID NO: 944964 - RNA, 19 nt, Homo sapiens
  misc_RNA (1)...(19): siRNA sense strand
uaagaacgaacuugaugaa

SEQ ID NO: 944965 - RNA, 19 nt, Homo sapiens
  misc_RNA (1)...(19): siRNA sense strand
gaacgaacuugaugaaaac

SEQ ID NO: 944966 - RNA, 19 nt, Homo sapiens
  misc_RNA (1)...(19): siRNA sense strand
ucgacaggcugcucucuug

SEQ ID NO: 944967 - RNA, 19 nt, Homo sapiens
  misc_RNA (1)...(19): siRNA sense strand
ggcaucagguguacagaca

SEQ ID NO: 944968 - RNA, 19 nt, Homo sapiens
  misc_RNA (1)...(19): siRNA sense strand
ccagugagaugcuauuucc

SEQ ID NO: 944969 - RNA, 19 nt, Homo sapiens
  misc_RNA (1)...(19): siRNA sense strand
ggaguacggcugugaccuu

SEQ ID NO: 944970 - RNA, 19 nt, Homo sapiens
  misc_RNA (1)...(19): siRNA sense strand
agaacgaacuugaugaaaa

SEQ ID NO: 944971 - RNA, 19 nt, Homo sapiens
  misc_RNA (1)...(19): siRNA sense strand
cugcaucucuccugagugu

SEQ ID NO: 944972 - RNA, 19 nt, Homo sapiens
  misc_RNA (1)...(19): siRNA sense strand
cguccaagaugcuucuguu

SEQ ID NO: 944973 - RNA, 19 nt, Homo sapiens
  misc_RNA (1)...(19): siRNA sense strand
cccgugggcuucucgauga

SEQ ID NO: 944974 - RNA, 19 nt, Homo sapiens
  misc_RNA (1)...(19): siRNA sense strand
ggauugcuguacuuguguu

SEQ ID NO: 944975 - RNA, 19 nt, Homo sapiens
  misc_RNA (1)...(19): siRNA sense strand
gcaacacccguccaagaug

SEQ ID NO: 944976 - RNA, 19 nt, Homo sapiens
  misc_RNA (1)...(19): siRNA sense strand
gccaagacacugacgaaug

SEQ ID NO: 944977 - RNA, 19 nt, Homo sapiens
  misc_RNA (1)...(19): siRNA sense strand
cgccacagcugccaagaca

SEQ ID NO: 944978 - RNA, 19 nt, Homo sapiens
  misc_RNA (1)...(19): siRNA sense strand
ccaagaugcuucuguugcu

SEQ ID NO: 944979 - RNA, 19 nt, Homo sapiens
  misc_RNA (1)...(19): siRNA sense strand
cuucagcacuuuccaugau

SEQ ID NO: 944980 - RNA, 19 nt, Homo sapiens
  misc_RNA (1)...(19): siRNA sense strand
gcuguuggcaucaggugua

SEQ ID NO: 944981 - RNA, 19 nt, Homo sapiens
  misc_RNA (1)...(19): siRNA sense strand
ggagaggugagcugugaga

SEQ ID NO: 944982 - RNA, 19 nt, Homo sapiens
  misc_RNA (1)...(19): siRNA sense strand
ugggagaggugagcuguga

SEQ ID NO: 944983 - RNA, 19 nt, Homo sapiens
  misc_RNA (1)...(19): siRNA sense strand
caagaugcuucuguugcuu

SEQ ID NO: 944984 - RNA, 19 nt, Homo sapiens
  misc_RNA (1)...(19): siRNA sense strand
gcugcucucuugacgacaa

SEQ ID NO: 944985 - RNA, 19 nt, Homo sapiens
  misc_RNA (1)...(19): siRNA sense strand
gugcuggacccaugucuga

SEQ ID NO: 944986 - RNA, 19 nt, Homo sapiens
  misc_RNA (1)...(19): siRNA sense strand
gaugaaaacacagacuuua

SEQ ID NO: 944987 - RNA, 19 nt, Homo sapiens
  misc_RNA (1)...(19): siRNA sense strand
ggugagcugugagaagguu

SEQ ID NO: 944988 - RNA, 19 nt, Homo sapiens
  misc_RNA (1)...(19): siRNA sense strand
cugcaucgcucccaauguc

SEQ ID NO: 944989 - RNA, 19 nt, Homo sapiens
  misc_RNA (1)...(19): siRNA sense strand
ggaaggaagguggcgaaug

SEQ ID NO: 944990 - RNA, 19 nt, Homo sapiens
  misc_RNA (1)...(19): siRNA sense strand
caaccggcacuccugugua

SEQ ID NO: 944991 - RNA, 19 nt, Homo sapiens
  misc_RNA (1)...(19): siRNA sense strand
cuacacaggcagaaucuuc

SEQ ID NO: 944992 - RNA, 19 nt, Homo sapiens
  misc_RNA (1)...(19): siRNA sense strand
gugaaaaggugagguguga

SEQ ID NO: 944993 - RNA, 19 nt, Homo sapiens
  misc_RNA (1)...(19): siRNA sense strand
ggcaacacccguccaagau

SEQ ID NO: 944994 - RNA, 19 nt, Homo sapiens
  misc_RNA (1)...(19): siRNA sense strand
gugggcagcuuccuaugca

SEQ ID NO: 944995 - RNA, 19 nt, Homo sapiens
  misc_RNA (1)...(19): siRNA sense strand
aggcgagucugucaccauu

SEQ ID NO: 944996 - RNA, 19 nt, Homo sapiens
  misc_RNA (1)...(19): siRNA sense strand
caccauuccugccacaaca

SEQ ID NO: 944997 - RNA, 19 nt, Homo sapiens
  misc_RNA (1)...(19): siRNA sense strand
ggguugaguuuccgauugg

SEQ ID NO: 944998 - RNA, 19 nt, Homo sapiens
  misc_RNA (1)...(19): siRNA sense strand
gcaaccggcacuccugugu

SEQ ID NO: 944999 - RNA, 19 nt, Homo sapiens
  misc_RNA (1)...(19): siRNA sense strand
aaacguguccugcaucucu

SEQ ID NO: 945000 - RNA, 19 nt, Homo sapiens
  misc_RNA (1)...(19): siRNA sense strand
cggcaacacccguccaaga

SEQ ID NO: 945001 - RNA, 19 nt, Homo sapiens
  misc_RNA (1)...(19): siRNA sense strand
ccaccuguguuugccagaa

SEQ ID NO: 945002 - RNA, 19 nt, Homo sapiens
  misc_RNA (1)...(19): siRNA sense strand
uacaaguguuccugucgaa

SEQ ID NO: 945003 - RNA, 19 nt, Homo sapiens
  misc_RNA (1)...(19): siRNA sense strand
ucaccuguaccuacccuuu

SEQ ID NO: 945004 - RNA, 19 nt, Homo sapiens
  misc_RNA (1)...(19): siRNA sense strand
uuaagaacgaacuugauga

SEQ ID NO: 945005 - RNA, 19 nt, Homo sapiens
  misc_RNA (1)...(19): siRNA sense strand
gcaacuacgagggaaggaa

SEQ ID NO: 945006 - RNA, 19 nt, Homo sapiens
  misc_RNA (1)...(19): siRNA sense strand
gagggccacugugugaaca

SEQ ID NO: 945007 - RNA, 19 nt, Homo sapiens
  misc_RNA (1)...(19): siRNA sense strand
ccucagccaccuccuguga

SEQ ID NO: 945008 - RNA, 19 nt, Homo sapiens
  misc_RNA (1)...(19): siRNA sense strand
cgaggccggugcuucaucu

SEQ ID NO: 945009 - RNA, 19 nt, Homo sapiens
  misc_RNA (1)...(19): siRNA sense strand
gagccugcauggagacacu

SEQ ID NO: 945010 - RNA, 19 nt, Homo sapiens
  misc_RNA (1)...(19): siRNA sense strand
acggauugcuguacuugug

SEQ ID NO: 945011 - RNA, 19 nt, Homo sapiens
  misc_RNA (1)...(19): siRNA sense strand
cagacggauugcuguacuu

SEQ ID NO: 945012 - RNA, 19 nt, Homo sapiens
  misc_RNA (1)...(19): siRNA sense strand
aaccggcacuccuguguag

SEQ ID NO: 945013 - RNA, 19 nt, Homo sapiens
  misc_RNA (1)...(19): siRNA sense strand
gcagcuuccuaugcacaug

SEQ ID NO: 945014 - RNA, 19 nt, Homo sapiens
  misc_RNA (1)...(19): siRNA sense strand
gcgaauggccagguguuca

SEQ ID NO: 945015 - RNA, 19 nt, Homo sapiens
  misc_RNA (1)...(19): siRNA sense strand
gcauuggcagcuacaagug

SEQ ID NO: 945016 - RNA, 19 nt, Homo sapiens
  misc_RNA (1)...(19): siRNA sense strand
cgacaggcugcucucuuga

SEQ ID NO: 945017 - RNA, 19 nt, Homo sapiens
  misc_RNA (1)...(19): siRNA sense strand
gugucugucuggcuggaaa

SEQ ID NO: 945018 - RNA, 19 nt, Homo sapiens
  misc_RNA (1)...(19): siRNA sense strand
gaccgcguguccugugaag

SEQ ID NO: 945019 - RNA, 19 nt, Homo sapiens
  misc_RNA (1)...(19): siRNA sense strand
caucuccuccagcuccuuu

SEQ ID NO: 945020 - RNA, 19 nt, Homo sapiens
  misc_RNA (1)...(19): siRNA sense strand
ccugucagcagagauguaa

SEQ ID NO: 945021 - RNA, 19 nt, Homo sapiens
  misc_RNA (1)...(19): siRNA sense strand
ucagguguacagacauuga

SEQ ID NO: 945022 - RNA, 19 nt, Homo sapiens
  misc_RNA (1)...(19): siRNA sense strand
gcgagucugucaccauucc

SEQ ID NO: 945023 - RNA, 19 nt, Homo sapiens
  misc_RNA (1)...(19): siRNA sense strand
guacggcugugaccuuacc

SEQ ID NO: 945024 - RNA, 19 nt, Homo sapiens
  misc_RNA (1)...(19): siRNA sense strand
uuuaagaacgaacuugaug

SEQ ID NO: 945025 - RNA, 19 nt, Homo sapiens
  misc_RNA (1)...(19): siRNA sense strand
guguucaccuuggaugaug

SEQ ID NO: 945026 - RNA, 19 nt, Homo sapiens
  misc_RNA (1)...(19): siRNA sense strand
gcaccuacacaggcagaau

SEQ ID NO: 945027 - RNA, 19 nt, Homo sapiens
  misc_RNA (1)...(19): siRNA sense strand
caaggagucgcuggacaga

SEQ ID NO: 945028 - RNA, 19 nt, Homo sapiens
  misc_RNA (1)...(19): siRNA sense strand
gagccaugcaugaaucaag

SEQ ID NO: 945029 - RNA, 19 nt, Homo sapiens
  misc_RNA (1)...(19): siRNA sense strand
ugggagccaugcaugaauc

SEQ ID NO: 945030 - RNA, 19 nt, Homo sapiens
  misc_RNA (1)...(19): siRNA sense strand
gaugacggaggcagcuguu

SEQ ID NO: 945031 - RNA, 19 nt, Homo sapiens
  misc_RNA (1)...(19): siRNA sense strand
ccacagcugccaagacacu

SEQ ID NO: 945032 - RNA, 19 nt, Homo sapiens
  misc_RNA (1)...(19): siRNA sense strand
caccuguguuugccagaau

SEQ ID NO: 945033 - RNA, 19 nt, Homo sapiens
  misc_RNA (1)...(19): siRNA sense strand
acaagaggcuggccaagga

SEQ ID NO: 945034 - RNA, 19 nt, Homo sapiens
  misc_RNA (1)...(19): siRNA sense strand
caacucacauugcacucaa

SEQ ID NO: 945035 - RNA, 19 nt, Homo sapiens
  misc_RNA (1)...(19): siRNA sense strand
agcagaagcuggucauuga

SEQ ID NO: 945036 - RNA, 19 nt, Homo sapiens
  misc_RNA (1)...(19): siRNA sense strand
gcacucaaggccaaauuau

SEQ ID NO: 945037 - RNA, 19 nt, Homo sapiens
  misc_RNA (1)...(19): siRNA sense strand
gaucugaaagccuagaaau

SEQ ID NO: 945038 - RNA, 19 nt, Homo sapiens
  misc_RNA (1)...(19): siRNA sense strand
gcacuccuauccacugaac

SEQ ID NO: 945039 - RNA, 19 nt, Homo sapiens
  misc_RNA (1)...(19): siRNA sense strand
gugaccaacuucugcauag

SEQ ID NO: 945040 - RNA, 19 nt, Homo sapiens
  misc_RNA (1)...(19): siRNA sense strand
ucugaaagccuagaaauuc

SEQ ID NO: 945041 - RNA, 19 nt, Homo sapiens
  misc_RNA (1)...(19): siRNA sense strand
ggccaaauuauacaagaaa

SEQ ID NO: 945042 - RNA, 19 nt, Homo sapiens
  misc_RNA (1)...(19): siRNA sense strand
ggaauguucugaguguuuu

SEQ ID NO: 945043 - RNA, 19 nt, Homo sapiens
  misc_RNA (1)...(19): siRNA sense strand
cagcacuccuauccacuga

SEQ ID NO: 945044 - RNA, 19 nt, Homo sapiens
  misc_RNA (1)...(19): siRNA sense strand
ccuagaaauuccaaucagu

SEQ ID NO: 945045 - RNA, 19 nt, Homo sapiens
  misc_RNA (1)...(19): siRNA sense strand
acaaggcccugugggagaa

SEQ ID NO: 945046 - RNA, 19 nt, Homo sapiens
  misc_RNA (1)...(19): siRNA sense strand
ggugaccaacuucugcaua

SEQ ID NO: 945047 - RNA, 19 nt, Homo sapiens
  misc_RNA (1)...(19): siRNA sense strand
cgccacugcugcacaaaga

SEQ ID NO: 945048 - RNA, 19 nt, Homo sapiens
  misc_RNA (1)...(19): siRNA sense strand
ucccgaggcuccacaacuu

SEQ ID NO: 945049 - RNA, 19 nt, Homo sapiens
  misc_RNA (1)...(19): siRNA sense strand
gaggagcucuacgccuuca

SEQ ID NO: 945050 - RNA, 19 nt, Homo sapiens
  misc_RNA (1)...(19): siRNA sense strand
ucuggaauguucugagugu

SEQ ID NO: 945051 - RNA, 19 nt, Homo sapiens
  misc_RNA (1)...(19): siRNA sense strand
gaaagccuagaaauuccaa

SEQ ID NO: 945052 - RNA, 19 nt, Homo sapiens
  misc_RNA (1)...(19): siRNA sense strand
gaccaacuucugcauagga

SEQ ID NO: 945053 - RNA, 19 nt, Homo sapiens
  misc_RNA (1)...(19): siRNA sense strand
gcucagcgacgagauguuc

SEQ ID NO: 945054 - RNA, 19 nt, Homo sapiens
  misc_RNA (1)...(19): siRNA sense strand
cacucaaggccaaauuaua

SEQ ID NO: 945055 - RNA, 19 nt, Homo sapiens
  misc_RNA (1)...(19): siRNA sense strand
cccuggagguggugaagaa

SEQ ID NO: 945056 - RNA, 19 nt, Homo sapiens
  misc_RNA (1)...(19): siRNA sense strand
uggaauguucugaguguuu

SEQ ID NO: 945057 - RNA, 19 nt, Homo sapiens
  misc_RNA (1)...(19): siRNA sense strand
gggagaacaacaagcugaa

SEQ ID NO: 945058 - RNA, 19 nt, Homo sapiens
  misc_RNA (1)...(19): siRNA sense strand
ccucuggaauguucugagu

SEQ ID NO: 945059 - RNA, 19 nt, Homo sapiens
  misc_RNA (1)...(19): siRNA sense strand
ggagcucuacgccuucaug

SEQ ID NO: 945060 - RNA, 19 nt, Homo sapiens
  misc_RNA (1)...(19): siRNA sense strand
acucaaggccaaauuauac

SEQ ID NO: 945061 - RNA, 19 nt, Homo sapiens
  misc_RNA (1)...(19): siRNA sense strand
uggagguggugaagaagga

SEQ ID NO: 945062 - RNA, 19 nt, Homo sapiens
  misc_RNA (1)...(19): siRNA sense strand
accacaagcugcaccacaa

SEQ ID NO: 945063 - RNA, 19 nt, Homo sapiens
  misc_RNA (1)...(19): siRNA sense strand
aaggccaaauuauacaaga

SEQ ID NO: 945064 - RNA, 19 nt, Homo sapiens
  misc_RNA (1)...(19): siRNA sense strand
gcagcucagcgacgagaug

SEQ ID NO: 945065 - RNA, 19 nt, Homo sapiens
  misc_RNA (1)...(19): siRNA sense strand
accuauaccuggcaacuca

SEQ ID NO: 945066 - RNA, 19 nt, Homo sapiens
  misc_RNA (1)...(19): siRNA sense strand
accuggagcuggacuacaa

SEQ ID NO: 945067 - RNA, 19 nt, Homo sapiens
  misc_RNA (1)...(19): siRNA sense strand
ccucgccacugcugcacaa

SEQ ID NO: 945068 - RNA, 19 nt, Homo sapiens
  misc_RNA (1)...(19): siRNA sense strand
uagaaauuccaaucagugu

SEQ ID NO: 945069 - RNA, 19 nt, Homo sapiens
  misc_RNA (1)...(19): siRNA sense strand
gccuagaaauuccaaucag

SEQ ID NO: 945070 - RNA, 19 nt, Homo sapiens
  misc_RNA (1)...(19): siRNA sense strand
ggcgcuggguaaaugagaa

SEQ ID NO: 945071 - RNA, 19 nt, Homo sapiens
  misc_RNA (1)...(19): siRNA sense strand
aggccaaauuauacaagaa

SEQ ID NO: 945072 - RNA, 19 nt, Homo sapiens
  misc_RNA (1)...(19): siRNA sense strand
uccaaucagugugguucua

SEQ ID NO: 945073 - RNA, 19 nt, Homo sapiens
  misc_RNA (1)...(19): siRNA sense strand
ucagcaaggagaacaagau

SEQ ID NO: 945074 - RNA, 19 nt, Homo sapiens
  misc_RNA (1)...(19): siRNA sense strand
ucaaggccaaauuauacaa

SEQ ID NO: 945075 - RNA, 19 nt, Homo sapiens
  misc_RNA (1)...(19): siRNA sense strand
gcaggaggagaacaagucu

SEQ ID NO: 945076 - RNA, 19 nt, Homo sapiens
  misc_RNA (1)...(19): siRNA sense strand
gagaaggacuauucacuuu

SEQ ID NO: 945077 - RNA, 19 nt, Homo sapiens
  misc_RNA (1)...(19): siRNA sense strand
gaacagcguuggugaaauc

SEQ ID NO: 945078 - RNA, 19 nt, Homo sapiens
  misc_RNA (1)...(19): siRNA sense strand
cgccaaaccuggauauuua

SEQ ID NO: 945079 - RNA, 19 nt, Homo sapiens
  misc_RNA (1)...(19): siRNA sense strand
ugagcaacaugaaagauua

SEQ ID NO: 945080 - RNA, 19 nt, Homo sapiens
  misc_RNA (1)...(19): siRNA sense strand
caaugcagaucacucauga

SEQ ID NO: 945081 - RNA, 19 nt, Homo sapiens
  misc_RNA (1)...(19): siRNA sense strand
ggaccaggcucaaugacau

SEQ ID NO: 945082 - RNA, 19 nt, Homo sapiens
  misc_RNA (1)...(19): siRNA sense strand
gcagaucacucaugaaaau

SEQ ID NO: 945083 - RNA, 19 nt, Homo sapiens
  misc_RNA (1)...(19): siRNA sense strand
gcacaaugcagaucacuca

SEQ ID NO: 945084 - RNA, 19 nt, Homo sapiens
  misc_RNA (1)...(19): siRNA sense strand
ggagaaggacuauucacuu

SEQ ID NO: 945085 - RNA, 19 nt, Homo sapiens
  misc_RNA (1)...(19): siRNA sense strand
gaaagauuagugcuagaaa

SEQ ID NO: 945086 - RNA, 19 nt, Homo sapiens
  misc_RNA (1)...(19): siRNA sense strand
ggccauagcugagcaacau

SEQ ID NO: 945087 - RNA, 19 nt, Homo sapiens
  misc_RNA (1)...(19): siRNA sense strand
gggaacagaaugagagauu

SEQ ID NO: 945088 - RNA, 19 nt, Homo sapiens
  misc_RNA (1)...(19): siRNA sense strand
ucacaucacucgucagaac

SEQ ID NO: 945089 - RNA, 19 nt, Homo sapiens
  misc_RNA (1)...(19): siRNA sense strand
ggugaaaucuacaguuugc

SEQ ID NO: 945090 - RNA, 19 nt, Homo sapiens
  misc_RNA (1)...(19): siRNA sense strand
gagauacggucgggacuca

SEQ ID NO: 945091 - RNA, 19 nt, Homo sapiens
  misc_RNA (1)...(19): siRNA sense strand
cagacaagcuugacugaac

SEQ ID NO: 945092 - RNA, 19 nt, Homo sapiens
  misc_RNA (1)...(19): siRNA sense strand
gauuagugcuagaaaugga

SEQ ID NO: 945093 - RNA, 19 nt, Homo sapiens
  misc_RNA (1)...(19): siRNA sense strand
gauucaacguguaucuuau

SEQ ID NO: 945094 - RNA, 19 nt, Homo sapiens
  misc_RNA (1)...(19): siRNA sense strand
gcuccagccucauccaaug

SEQ ID NO: 945095 - RNA, 19 nt, Homo sapiens
  misc_RNA (1)...(19): siRNA sense strand
ggaaggagaaaugaucuau

SEQ ID NO: 945096 - RNA, 19 nt, Homo sapiens
  misc_RNA (1)...(19): siRNA sense strand
aagcuugacugaaccaaug

SEQ ID NO: 945097 - RNA, 19 nt, Homo sapiens
  misc_RNA (1)...(19): siRNA sense strand
gaaggacuauucacuuuuc

SEQ ID NO: 945098 - RNA, 19 nt, Homo sapiens
  misc_RNA (1)...(19): siRNA sense strand
ggauauuuauggugaaugc

SEQ ID NO: 945099 - RNA, 19 nt, Homo sapiens
  misc_RNA (1)...(19): siRNA sense strand
uuggugaaaucuacaguuu

SEQ ID NO: 945100 - RNA, 19 nt, Homo sapiens
  misc_RNA (1)...(19): siRNA sense strand
ugacacaggagaaggacua

SEQ ID NO: 945101 - RNA, 19 nt, Homo sapiens
  misc_RNA (1)...(19): siRNA sense strand
guacuggcaucacaucacu

SEQ ID NO: 945102 - RNA, 19 nt, Homo sapiens
  misc_RNA (1)...(19): siRNA sense strand
cagaacagcguuggugaaa

SEQ ID NO: 945103 - RNA, 19 nt, Homo sapiens
  misc_RNA (1)...(19): siRNA sense strand
caucacaucacucgucaga

SEQ ID NO: 945104 - RNA, 19 nt, Homo sapiens
  misc_RNA (1)...(19): siRNA sense strand
ccacaaugccaaggucaaa

SEQ ID NO: 945105 - RNA, 19 nt, Homo sapiens
  misc_RNA (1)...(19): siRNA sense strand
gaaggagaaaugaucuauc

SEQ ID NO: 945106 - RNA, 19 nt, Homo sapiens
  misc_RNA (1)...(19): siRNA sense strand
ucaaacaagggaaggagaa

SEQ ID NO: 945107 - RNA, 19 nt, Homo sapiens
  misc_RNA (1)...(19): siRNA sense strand
cacaggagaaggacuauuc

SEQ ID NO: 945108 - RNA, 19 nt, Homo sapiens
  misc_RNA (1)...(19): siRNA sense strand
cagcguuggugaaaucuac

SEQ ID NO: 945109 - RNA, 19 nt, Homo sapiens
  misc_RNA (1)...(19): siRNA sense strand
aaaccuggauauuuauggu

SEQ ID NO: 945110 - RNA, 19 nt, Homo sapiens
  misc_RNA (1)...(19): siRNA sense strand
ugaaagauuagugcuagaa

SEQ ID NO: 945111 - RNA, 19 nt, Homo sapiens
  misc_RNA (1)...(19): siRNA sense strand
caaacaagggaaggagaaa

SEQ ID NO: 945112 - RNA, 19 nt, Homo sapiens
  misc_RNA (1)...(19): siRNA sense strand
aagauuagugcuagaaaug

SEQ ID NO: 945113 - RNA, 19 nt, Homo sapiens
  misc_RNA (1)...(19): siRNA sense strand
cacagacauuucccagcua

SEQ ID NO: 945114 - RNA, 19 nt, Homo sapiens
  misc_RNA (1)...(19): siRNA sense strand
uuugcaaggucauggguuu

SEQ ID NO: 945115 - RNA, 19 nt, Homo sapiens
  misc_RNA (1)...(19): siRNA sense strand
ugaaaucuacaguuugcaa

SEQ ID NO: 945116 - RNA, 19 nt, Homo sapiens
  misc_RNA (1)...(19): siRNA sense strand
gagugcagcgggaacagaa

SEQ ID NO: 945117 - RNA, 19 nt, Homo sapiens
  misc_RNA (1)...(19): siRNA sense strand
ugagagauucaacguguau

SEQ ID NO: 945118 - RNA, 19 nt, Homo sapiens
  misc_RNA (1)...(19): siRNA sense strand
ucucugggauauccacaau

SEQ ID NO: 945119 - RNA, 19 nt, Homo sapiens
  misc_RNA (1)...(19): siRNA sense strand
ggucauggguuugguucgu

SEQ ID NO: 945120 - RNA, 19 nt, Homo sapiens
  misc_RNA (1)...(19): siRNA sense strand
gggaaggagaaaugaucua

SEQ ID NO: 945121 - RNA, 19 nt, Homo sapiens
  misc_RNA (1)...(19): siRNA sense strand
augcagaucacucaugaaa

SEQ ID NO: 945122 - RNA, 19 nt, Homo sapiens
  misc_RNA (1)...(19): siRNA sense strand
ugcuagaaauggaacagaa

SEQ ID NO: 945123 - RNA, 19 nt, Homo sapiens
  misc_RNA (1)...(19): siRNA sense strand
ggacuauucacuuuucaaa

SEQ ID NO: 945124 - RNA, 19 nt, Homo sapiens
  misc_RNA (1)...(19): siRNA sense strand
ucaggaagaaugugugaca

SEQ ID NO: 945125 - RNA, 19 nt, Homo sapiens
  misc_RNA (1)...(19): siRNA sense strand
ccauagcugagcaacauga

SEQ ID NO: 945126 - RNA, 19 nt, Homo sapiens
  misc_RNA (1)...(19): siRNA sense strand
gcaacaugaaagauuagug

SEQ ID NO: 945127 - RNA, 19 nt, Homo sapiens
  misc_RNA (1)...(19): siRNA sense strand
acgccaaaccuggauauuu

SEQ ID NO: 945128 - RNA, 19 nt, Homo sapiens
  misc_RNA (1)...(19): siRNA sense strand
gcaaggucauggguuuggu

SEQ ID NO: 945129 - RNA, 19 nt, Homo sapiens
  misc_RNA (1)...(19): siRNA sense strand
gagcaacaugaaagauuag

SEQ ID NO: 945130 - RNA, 19 nt, Homo sapiens
  misc_RNA (1)...(19): siRNA sense strand
uauggugaaugcacaaugc

SEQ ID NO: 945131 - RNA, 19 nt, Homo sapiens
  misc_RNA (1)...(19): siRNA sense strand
ucagaacagcguuggugaa

SEQ ID NO: 945132 - RNA, 19 nt, Homo sapiens
  misc_RNA (1)...(19): siRNA sense strand
uagcugagcaacaugaaag

SEQ ID NO: 945133 - RNA, 19 nt, Homo sapiens
  misc_RNA (1)...(19): siRNA sense strand
ucugggauauccacaaugc

SEQ ID NO: 945134 - RNA, 19 nt, Homo sapiens
  misc_RNA (1)...(19): siRNA sense strand
gccaaaccuggauauuuau

SEQ ID NO: 945135 - RNA, 19 nt, Homo sapiens
  misc_RNA (1)...(19): siRNA sense strand
cuggugauguggccucuca

SEQ ID NO: 945136 - RNA, 19 nt, Homo sapiens
  misc_RNA (1)...(19): siRNA sense strand
cuacagcuccagccucauc

SEQ ID NO: 945137 - RNA, 19 nt, Homo sapiens
  misc_RNA (1)...(19): siRNA sense strand
ccaaaccuggauauuuaug

SEQ ID NO: 945138 - RNA, 19 nt, Homo sapiens
  misc_RNA (1)...(19): siRNA sense strand
cugagcaacaugaaagauu

SEQ ID NO: 945139 - RNA, 19 nt, Homo sapiens
  misc_RNA (1)...(19): siRNA sense strand
ggagugcagcgggaacaga

SEQ ID NO: 945140 - RNA, 19 nt, Homo sapiens
  misc_RNA (1)...(19): siRNA sense strand
aacaagggaaggagaaaug

SEQ ID NO: 945141 - RNA, 19 nt, Homo sapiens
  misc_RNA (1)...(19): siRNA sense strand
caagggaaggagaaaugau

SEQ ID NO: 945142 - RNA, 19 nt, Homo sapiens
  misc_RNA (1)...(19): siRNA sense strand
acaugaaagauuagugcua

SEQ ID NO: 945143 - RNA, 19 nt, Homo sapiens
  misc_RNA (1)...(19): siRNA sense strand
caaggucauggguuugguu

SEQ ID NO: 945144 - RNA, 19 nt, Homo sapiens
  misc_RNA (1)...(19): siRNA sense strand
gcuagaaauggaacagaag

SEQ ID NO: 945145 - RNA, 19 nt, Homo sapiens
  misc_RNA (1)...(19): siRNA sense strand
ggaaaccuuuggcuucuuc

SEQ ID NO: 945146 - RNA, 19 nt, Homo sapiens
  misc_RNA (1)...(19): siRNA sense strand
ccaacaccaucuucgagaa

SEQ ID NO: 945147 - RNA, 19 nt, Homo sapiens
  misc_RNA (1)...(19): siRNA sense strand
ggaacgucaucaccaccaa

SEQ ID NO: 945148 - RNA, 19 nt, Homo sapiens
  misc_RNA (1)...(19): siRNA sense strand
guggaaaccuuuggcuucu

SEQ ID NO: 945149 - RNA, 19 nt, Homo sapiens
  misc_RNA (1)...(19): siRNA sense strand
cgauggcuguggaaaccuu

SEQ ID NO: 945150 - RNA, 19 nt, Homo sapiens
  misc_RNA (1)...(19): siRNA sense strand
gggugacucugccaaacag

SEQ ID NO: 945151 - RNA, 19 nt, Homo sapiens
  misc_RNA (1)...(19): siRNA sense strand
ugacucugccaaacagcua

SEQ ID NO: 945152 - RNA, 19 nt, Homo sapiens
  misc_RNA (1)...(19): siRNA sense strand
ccaccaacaccaucuucga

SEQ ID NO: 945153 - RNA, 19 nt, Homo sapiens
  misc_RNA (1)...(19): siRNA sense strand
ggaaaccuuuggcuucuuc

SEQ ID NO: 945154 - RNA, 19 nt, Homo sapiens
  misc_RNA (1)...(19): siRNA sense strand
ccaacaccaucuucgagaa

SEQ ID NO: 945155 - RNA, 19 nt, Homo sapiens
  misc_RNA (1)...(19): siRNA sense strand
ggaacgucaucaccaccaa

SEQ ID NO: 945156 - RNA, 19 nt, Homo sapiens
  misc_RNA (1)...(19): siRNA sense strand
guggaaaccuuuggcuucu

SEQ ID NO: 945157 - RNA, 19 nt, Homo sapiens
  misc_RNA (1)...(19): siRNA sense strand
cgauggcuguggaaaccuu

SEQ ID NO: 945158 - RNA, 19 nt, Homo sapiens
  misc_RNA (1)...(19): siRNA sense strand
gggugacucugccaaacag

SEQ ID NO: 945159 - RNA, 19 nt, Homo sapiens
  misc_RNA (1)...(19): siRNA sense strand
ugacucugccaaacagcua

SEQ ID NO: 945160 - RNA, 19 nt, Homo sapiens
  misc_RNA (1)...(19): siRNA sense strand
ccaccaacaccaucuucga

SEQ ID NO: 945161 - RNA, 19 nt, Homo sapiens
  misc_RNA (1)...(19): siRNA sense strand
ggaaacugcugccucuguu

SEQ ID NO: 945162 - RNA, 19 nt, Homo sapiens
  misc_RNA (1)...(19): siRNA sense strand
gcacccagcaccuuucuuu

SEQ ID NO: 945163 - RNA, 19 nt, Homo sapiens
  misc_RNA (1)...(19): siRNA sense strand
cauggacgcuggcacaauc

SEQ ID NO: 945164 - RNA, 19 nt, Homo sapiens
  misc_RNA (1)...(19): siRNA sense strand
gaaacugcugccucuguug

SEQ ID NO: 945165 - RNA, 19 nt, Homo sapiens
  misc_RNA (1)...(19): siRNA sense strand
gcucauccucucugccuuu

SEQ ID NO: 945166 - RNA, 19 nt, Homo sapiens
  misc_RNA (1)...(19): siRNA sense strand
gccuaugucugcagcacuu

SEQ ID NO: 945167 - RNA, 19 nt, Homo sapiens
  misc_RNA (1)...(19): siRNA sense strand
gguugcugcuguuguugaa

SEQ ID NO: 945168 - RNA, 19 nt, Homo sapiens
  misc_RNA (1)...(19): siRNA sense strand
aaacugcugccucuguuga

SEQ ID NO: 945169 - RNA, 19 nt, Homo sapiens
  misc_RNA (1)...(19): siRNA sense strand
gaguugggacuguggaaug

SEQ ID NO: 945170 - RNA, 19 nt, Homo sapiens
  misc_RNA (1)...(19): siRNA sense strand
caccuucacugggaugaug

SEQ ID NO: 945171 - RNA, 19 nt, Homo sapiens
  misc_RNA (1)...(19): siRNA sense strand
ggacgcuggcacaaucuug

SEQ ID NO: 945172 - RNA, 19 nt, Homo sapiens
  misc_RNA (1)...(19): siRNA sense strand
gggccuagccugucagacu

SEQ ID NO: 945173 - RNA, 19 nt, Homo sapiens
  misc_RNA (1)...(19): siRNA sense strand
gacgcuggcacaaucuuga

SEQ ID NO: 945174 - RNA, 19 nt, Homo sapiens
  misc_RNA (1)...(19): siRNA sense strand
acccagcaccuuucuuuga

SEQ ID NO: 945175 - RNA, 19 nt, Homo sapiens
  misc_RNA (1)...(19): siRNA sense strand
ccuagcacccagcaccuuu

SEQ ID NO: 945176 - RNA, 19 nt, Homo sapiens
  misc_RNA (1)...(19): siRNA sense strand
gcauggacgcuggcacaau

SEQ ID NO: 945177 - RNA, 19 nt, Homo sapiens
  misc_RNA (1)...(19): siRNA sense strand
gugccgccaugcaggaugu

SEQ ID NO: 945178 - RNA, 19 nt, Homo sapiens
  misc_RNA (1)...(19): siRNA sense strand
gcgacuggcucaacaauua

SEQ ID NO: 945179 - RNA, 19 nt, Homo sapiens
  misc_RNA (1)...(19): siRNA sense strand
ugacaaagcugaggaguuu

SEQ ID NO: 945180 - RNA, 19 nt, Homo sapiens
  misc_RNA (1)...(19): siRNA sense strand
gagauugcguggcuauuua

SEQ ID NO: 945181 - RNA, 19 nt, Homo sapiens
  misc_RNA (1)...(19): siRNA sense strand
gacagcaacuggacacuua

SEQ ID NO: 945182 - RNA, 19 nt, Homo sapiens
  misc_RNA (1)...(19): siRNA sense strand
gaccugagcuucccaacaa

SEQ ID NO: 945183 - RNA, 19 nt, Homo sapiens
  misc_RNA (1)...(19): siRNA sense strand
gcacagccaucaucacaga

SEQ ID NO: 945184 - RNA, 19 nt, Homo sapiens
  misc_RNA (1)...(19): siRNA sense strand
ggagcacaauccaguauuu

SEQ ID NO: 945185 - RNA, 19 nt, Homo sapiens
  misc_RNA (1)...(19): siRNA sense strand
ccaaagcugugaagaauuc

SEQ ID NO: 945186 - RNA, 19 nt, Homo sapiens
  misc_RNA (1)...(19): siRNA sense strand
ggaaggaauugcagaaaca

SEQ ID NO: 945187 - RNA, 19 nt, Homo sapiens
  misc_RNA (1)...(19): siRNA sense strand
gaucauuccuacagauuau

SEQ ID NO: 945188 - RNA, 19 nt, Homo sapiens
  misc_RNA (1)...(19): siRNA sense strand
gaaagagguucccaaaggu

SEQ ID NO: 945189 - RNA, 19 nt, Homo sapiens
  misc_RNA (1)...(19): siRNA sense strand
ggagaaagagguucccaaa

SEQ ID NO: 945190 - RNA, 19 nt, Homo sapiens
  misc_RNA (1)...(19): siRNA sense strand
agaaagagguucccaaagg

SEQ ID NO: 945191 - RNA, 19 nt, Homo sapiens
  misc_RNA (1)...(19): siRNA sense strand
uuaacuggcuggagaaaga

SEQ ID NO: 945192 - RNA, 19 nt, Homo sapiens
  misc_RNA (1)...(19): siRNA sense strand
gcaccugcuucuugacuug

SEQ ID NO: 945193 - RNA, 19 nt, Homo sapiens
  misc_RNA (1)...(19): siRNA sense strand
gcacgggacuggacauggu

SEQ ID NO: 945194 - RNA, 19 nt, Homo sapiens
  misc_RNA (1)...(19): siRNA sense strand
gugaagaccaaguauaauu

SEQ ID NO: 945195 - RNA, 19 nt, Homo sapiens
  misc_RNA (1)...(19): siRNA sense strand
gaagaauucagcugaguca

SEQ ID NO: 945196 - RNA, 19 nt, Homo sapiens
  misc_RNA (1)...(19): siRNA sense strand
gcaugauugucacugauga

SEQ ID NO: 945197 - RNA, 19 nt, Homo sapiens
  misc_RNA (1)...(19): siRNA sense strand
ccaagcaaauggacagcaa

SEQ ID NO: 945198 - RNA, 19 nt, Homo sapiens
  misc_RNA (1)...(19): siRNA sense strand
gacaugguguugggucuuu

SEQ ID NO: 945199 - RNA, 19 nt, Homo sapiens
  misc_RNA (1)...(19): siRNA sense strand
gggauucaggccuagauua

SEQ ID NO: 945200 - RNA, 19 nt, Homo sapiens
  misc_RNA (1)...(19): siRNA sense strand
gaccaccgcugcuguaugc

SEQ ID NO: 945201 - RNA, 19 nt, Homo sapiens
  misc_RNA (1)...(19): siRNA sense strand
ggagaaccucguugacaaa

SEQ ID NO: 945202 - RNA, 19 nt, Homo sapiens
  misc_RNA (1)...(19): siRNA sense strand
ggaagaaaauggccaaagu

SEQ ID NO: 945203 - RNA, 19 nt, Homo sapiens
  misc_RNA (1)...(19): siRNA sense strand
ggacacaccaacucaggaa

SEQ ID NO: 945204 - RNA, 19 nt, Homo sapiens
  misc_RNA (1)...(19): siRNA sense strand
ucgaguggcucaucagaga

SEQ ID NO: 945205 - RNA, 19 nt, Homo sapiens
  misc_RNA (1)...(19): siRNA sense strand
gcaaucauaggacuagaga

SEQ ID NO: 945206 - RNA, 19 nt, Homo sapiens
  misc_RNA (1)...(19): siRNA sense strand
cgccaaagcugugaagaau

SEQ ID NO: 945207 - RNA, 19 nt, Homo sapiens
  misc_RNA (1)...(19): siRNA sense strand
gcaagccucuccucacacu

SEQ ID NO: 945208 - RNA, 19 nt, Homo sapiens
  misc_RNA (1)...(19): siRNA sense strand
caucagagugaguauauug

SEQ ID NO: 945209 - RNA, 19 nt, Homo sapiens
  misc_RNA (1)...(19): siRNA sense strand
aaggaaugcuucacauaug

SEQ ID NO: 945210 - RNA, 19 nt, Homo sapiens
  misc_RNA (1)...(19): siRNA sense strand
cgaucaugcucuucauuga

SEQ ID NO: 945211 - RNA, 19 nt, Homo sapiens
  misc_RNA (1)...(19): siRNA sense strand
agaggaacgucaugugguu

SEQ ID NO: 945212 - RNA, 19 nt, Homo sapiens
  misc_RNA (1)...(19): siRNA sense strand
cuccaaaggugacuucaga

SEQ ID NO: 945213 - RNA, 19 nt, Homo sapiens
  misc_RNA (1)...(19): siRNA sense strand
gcaacuggacacuuaugaa

SEQ ID NO: 945214 - RNA, 19 nt, Homo sapiens
  misc_RNA (1)...(19): siRNA sense strand
gggaaggaauugcagaaac

SEQ ID NO: 945215 - RNA, 19 nt, Homo sapiens
  misc_RNA (1)...(19): siRNA sense strand
ucugugaacucuuuaacug

SEQ ID NO: 945216 - RNA, 19 nt, Homo sapiens
  misc_RNA (1)...(19): siRNA sense strand
ugauagauguggauucucu

SEQ ID NO: 945217 - RNA, 19 nt, Homo sapiens
  misc_RNA (1)...(19): siRNA sense strand
cuuugaaccucuaacauug

SEQ ID NO: 945218 - RNA, 19 nt, Homo sapiens
  misc_RNA (1)...(19): siRNA sense strand
gcaacaggcagacuuugug

SEQ ID NO: 945219 - RNA, 19 nt, Homo sapiens
  misc_RNA (1)...(19): siRNA sense strand
gauccaggccuacaucauc

SEQ ID NO: 945220 - RNA, 19 nt, Homo sapiens
  misc_RNA (1)...(19): siRNA sense strand
uggauucucuuacagacaa

SEQ ID NO: 945221 - RNA, 19 nt, Homo sapiens
  misc_RNA (1)...(19): siRNA sense strand
gaaccucguugacaaaauc

SEQ ID NO: 945222 - RNA, 19 nt, Homo sapiens
  misc_RNA (1)...(19): siRNA sense strand
ugacucgggugcucaauac

SEQ ID NO: 945223 - RNA, 19 nt, Homo sapiens
  misc_RNA (1)...(19): siRNA sense strand
caacuggacacuuaugaag

SEQ ID NO: 945224 - RNA, 19 nt, Homo sapiens
  misc_RNA (1)...(19): siRNA sense strand
aggagaaccucguugacaa

SEQ ID NO: 945225 - RNA, 19 nt, Homo sapiens
  misc_RNA (1)...(19): siRNA sense strand
ucacacugggccuggauua

SEQ ID NO: 945226 - RNA, 19 nt, Homo sapiens
  misc_RNA (1)...(19): siRNA sense strand
gggcacagccaucaucaca

SEQ ID NO: 945227 - RNA, 19 nt, Homo sapiens
  misc_RNA (1)...(19): siRNA sense strand
ugagauugcguggcuauuu

SEQ ID NO: 945228 - RNA, 19 nt, Homo sapiens
  misc_RNA (1)...(19): siRNA sense strand
aagacuggcuggugagugu

SEQ ID NO: 945229 - RNA, 19 nt, Homo sapiens
  misc_RNA (1)...(19): siRNA sense strand
ucccaaagguggugugaca

SEQ ID NO: 945230 - RNA, 19 nt, Homo sapiens
  misc_RNA (1)...(19): siRNA sense strand
gaaaauggccaaaguucug

SEQ ID NO: 945231 - RNA, 19 nt, Homo sapiens
  misc_RNA (1)...(19): siRNA sense strand
ggacagcaacuggacacuu

SEQ ID NO: 945232 - RNA, 19 nt, Homo sapiens
  misc_RNA (1)...(19): siRNA sense strand
gcucucgaguggcucauca

SEQ ID NO: 945233 - RNA, 19 nt, Homo sapiens
  misc_RNA (1)...(19): siRNA sense strand
cauugauggugaccgcaua

SEQ ID NO: 945234 - RNA, 19 nt, Homo sapiens
  misc_RNA (1)...(19): siRNA sense strand
gagacgaucaugcucuuca

SEQ ID NO: 945235 - RNA, 19 nt, Homo sapiens
  misc_RNA (1)...(19): siRNA sense strand
gaagaaaauggccaaaguu

SEQ ID NO: 945236 - RNA, 19 nt, Homo sapiens
  misc_RNA (1)...(19): siRNA sense strand
ggggaagccugaccuuuga

SEQ ID NO: 945237 - RNA, 19 nt, Homo sapiens
  misc_RNA (1)...(19): siRNA sense strand
cugugaagaccaaguauaa

SEQ ID NO: 945238 - RNA, 19 nt, Homo sapiens
  misc_RNA (1)...(19): siRNA sense strand
ccaaagguggugugacaga

SEQ ID NO: 945239 - RNA, 19 nt, Homo sapiens
  misc_RNA (1)...(19): siRNA sense strand
cauuaaagaugcuguugcu

SEQ ID NO: 945240 - RNA, 19 nt, Homo sapiens
  misc_RNA (1)...(19): siRNA sense strand
uugcagaccuucgguugaa

SEQ ID NO: 945241 - RNA, 19 nt, Homo sapiens
  misc_RNA (1)...(19): siRNA sense strand
ugaucauuccuacagauua

SEQ ID NO: 945242 - RNA, 19 nt, Homo sapiens
  misc_RNA (1)...(19): siRNA sense strand
gggaugugauugggaagga

SEQ ID NO: 945243 - RNA, 19 nt, Homo sapiens
  misc_RNA (1)...(19): siRNA sense strand
aaugauagauguggauucu

SEQ ID NO: 945244 - RNA, 19 nt, Homo sapiens
  misc_RNA (1)...(19): siRNA sense strand
ccuuugaaccucuaacauu

SEQ ID NO: 945245 - RNA, 19 nt, Homo sapiens
  misc_RNA (1)...(19): siRNA sense strand
ucauaggacuagagacgau

SEQ ID NO: 945246 - RNA, 19 nt, Homo sapiens
  misc_RNA (1)...(19): siRNA sense strand
gaauguuguccuugugguu

SEQ ID NO: 945247 - RNA, 19 nt, Homo sapiens
  misc_RNA (1)...(19): siRNA sense strand
ugagaauguuguccuugug

SEQ ID NO: 945248 - RNA, 19 nt, Homo sapiens
  misc_RNA (1)...(19): siRNA sense strand
caggcaugauugucacuga

SEQ ID NO: 945249 - RNA, 19 nt, Homo sapiens
  misc_RNA (1)...(19): siRNA sense strand
aggaaugcuucacauaugu

SEQ ID NO: 945250 - RNA, 19 nt, Homo sapiens
  misc_RNA (1)...(19): siRNA sense strand
gcaggcaacaggcagacuu

SEQ ID NO: 945251 - RNA, 19 nt, Homo sapiens
  misc_RNA (1)...(19): siRNA sense strand
gaugagauugcguggcuau

SEQ ID NO: 945252 - RNA, 19 nt, Homo sapiens
  misc_RNA (1)...(19): siRNA sense strand
gaagauggggcuuuuggaa

SEQ ID NO: 945253 - RNA, 19 nt, Homo sapiens
  misc_RNA (1)...(19): siRNA sense strand
ggauucaggccuagauuac

SEQ ID NO: 945254 - RNA, 19 nt, Homo sapiens
  misc_RNA (1)...(19): siRNA sense strand
ugacgcggacaaugcauuu

SEQ ID NO: 945255 - RNA, 19 nt, Homo sapiens
  misc_RNA (1)...(19): siRNA sense strand
gagaaagagguucccaaag

SEQ ID NO: 945256 - RNA, 19 nt, Homo sapiens
  misc_RNA (1)...(19): siRNA sense strand
ccaggugcaucccuacaag

SEQ ID NO: 945257 - RNA, 19 nt, Homo sapiens
  misc_RNA (1)...(19): siRNA sense strand
ggaacgucaugugguuugu

SEQ ID NO: 945258 - RNA, 19 nt, Homo sapiens
  misc_RNA (1)...(19): siRNA sense strand
ggaugugauugggaaggaa

SEQ ID NO: 945259 - RNA, 19 nt, Homo sapiens
  misc_RNA (1)...(19): siRNA sense strand
agauguggauucucuuaca

SEQ ID NO: 945260 - RNA, 19 nt, Homo sapiens
  misc_RNA (1)...(19): siRNA sense strand
gaggcaggcaugauuguca

SEQ ID NO: 945261 - RNA, 19 nt, Homo sapiens
  misc_RNA (1)...(19): siRNA sense strand
ugagacaagccaugaggaa

SEQ ID NO: 945262 - RNA, 19 nt, Homo sapiens
  misc_RNA (1)...(19): siRNA sense strand
ucacugccuuggaugagau

SEQ ID NO: 945263 - RNA, 19 nt, Homo sapiens
  misc_RNA (1)...(19): siRNA sense strand
gagugcgacuggcucaaca

SEQ ID NO: 945264 - RNA, 19 nt, Homo sapiens
  misc_RNA (1)...(19): siRNA sense strand
gauguggauucucuuacag

SEQ ID NO: 945265 - RNA, 19 nt, Homo sapiens
  misc_RNA (1)...(19): siRNA sense strand
acuggacacuuaugaagau

SEQ ID NO: 945266 - RNA, 19 nt, Homo sapiens
  misc_RNA (1)...(19): siRNA sense strand
uugcguggcuauuuaaucu

SEQ ID NO: 945267 - RNA, 19 nt, Homo sapiens
  misc_RNA (1)...(19): siRNA sense strand
ucuccaggcugccaagcaa

SEQ ID NO: 945268 - RNA, 19 nt, Homo sapiens
  misc_RNA (1)...(19): siRNA sense strand
ugaaggacacaccaacuca

SEQ ID NO: 945269 - RNA, 19 nt, Homo sapiens
  misc_RNA (1)...(19): siRNA sense strand
acaaaacauucucugauga

SEQ ID NO: 945270 - RNA, 19 nt, Homo sapiens
  misc_RNA (1)...(19): siRNA sense strand
uugcaagccucuccucaca

SEQ ID NO: 945271 - RNA, 19 nt, Homo sapiens
  misc_RNA (1)...(19): siRNA sense strand
auagauguggauucucuua

SEQ ID NO: 945272 - RNA, 19 nt, Homo sapiens
  misc_RNA (1)...(19): siRNA sense strand
auucaggccuagauuacuu

SEQ ID NO: 945273 - RNA, 19 nt, Homo sapiens
  misc_RNA (1)...(19): siRNA sense strand
ucaccuucuugacuccuuu

SEQ ID NO: 945274 - RNA, 19 nt, Homo sapiens
  misc_RNA (1)...(19): siRNA sense strand
cuucacauauguccucaag

SEQ ID NO: 945275 - RNA, 19 nt, Homo sapiens
  misc_RNA (1)...(19): siRNA sense strand
gaugugacgcggacaaugc

SEQ ID NO: 945276 - RNA, 19 nt, Homo sapiens
  misc_RNA (1)...(19): siRNA sense strand
ggaccugagcuucccaaca

SEQ ID NO: 945277 - RNA, 19 nt, Homo sapiens
  misc_RNA (1)...(19): siRNA sense strand
gacaagccaugaggaacuc

SEQ ID NO: 945278 - RNA, 19 nt, Homo sapiens
  misc_RNA (1)...(19): siRNA sense strand
ggagacauaugauaaacca

SEQ ID NO: 945279 - RNA, 19 nt, Homo sapiens
  misc_RNA (1)...(19): siRNA sense strand
ucaaaggcaucccugugua

SEQ ID NO: 945280 - RNA, 19 nt, Homo sapiens
  misc_RNA (1)...(19): siRNA sense strand
ucgaugagcuggccaagug

SEQ ID NO: 945281 - RNA, 19 nt, Homo sapiens
  misc_RNA (1)...(19): siRNA sense strand
gagaagaccaguaagaucu

SEQ ID NO: 945282 - RNA, 19 nt, Homo sapiens
  misc_RNA (1)...(19): siRNA sense strand
ggaguacuauucuuuccau

SEQ ID NO: 945283 - RNA, 19 nt, Homo sapiens
  misc_RNA (1)...(19): siRNA sense strand
ccagagagcauuaccuuca

SEQ ID NO: 945284 - RNA, 19 nt, Homo sapiens
  misc_RNA (1)...(19): siRNA sense strand
guacuauucuuuccaugag

SEQ ID NO: 945285 - RNA, 19 nt, Homo sapiens
  misc_RNA (1)...(19): siRNA sense strand
ggagaagaccaguaagauc

SEQ ID NO: 945286 - RNA, 19 nt, Homo sapiens
  misc_RNA (1)...(19): siRNA sense strand
cccggaagcugaggccuua

SEQ ID NO: 945287 - RNA, 19 nt, Homo sapiens
  misc_RNA (1)...(19): siRNA sense strand
gaccuuaucagcagcauca

SEQ ID NO: 945288 - RNA, 19 nt, Homo sapiens
  misc_RNA (1)...(19): siRNA sense strand
caaggacccuggccaccau

SEQ ID NO: 945289 - RNA, 19 nt, Homo sapiens
  misc_RNA (1)...(19): siRNA sense strand
gagcauuaccuucaucucu

SEQ ID NO: 945290 - RNA, 19 nt, Homo sapiens
  misc_RNA (1)...(19): siRNA sense strand
gccagcagcucaagucaac

SEQ ID NO: 945291 - RNA, 19 nt, Homo sapiens
  misc_RNA (1)...(19): siRNA sense strand
caaaggcaucccuguguau

SEQ ID NO: 945292 - RNA, 19 nt, Homo sapiens
  misc_RNA (1)...(19): siRNA sense strand
ccgaggaguacuauucuuu

SEQ ID NO: 945293 - RNA, 19 nt, Homo sapiens
  misc_RNA (1)...(19): siRNA sense strand
ggcaucauucgcauuagua

SEQ ID NO: 945294 - RNA, 19 nt, Homo sapiens
  misc_RNA (1)...(19): siRNA sense strand
ggccagagagcauuaccuu

SEQ ID NO: 945295 - RNA, 19 nt, Homo sapiens
  misc_RNA (1)...(19): siRNA sense strand
cagagagcauuaccuucau

SEQ ID NO: 945296 - RNA, 19 nt, Homo sapiens
  misc_RNA (1)...(19): siRNA sense strand
gcguacaccagaucgauga

SEQ ID NO: 945297 - RNA, 19 nt, Homo sapiens
  misc_RNA (1)...(19): siRNA sense strand
cccagcaccuuugccagua

SEQ ID NO: 945298 - RNA, 19 nt, Homo sapiens
  misc_RNA (1)...(19): siRNA sense strand
gagcugacagugcagaucu

SEQ ID NO: 945299 - RNA, 19 nt, Homo sapiens
  misc_RNA (1)...(19): siRNA sense strand
gaggaguacuauucuuucc

SEQ ID NO: 945300 - RNA, 19 nt, Homo sapiens
  misc_RNA (1)...(19): siRNA sense strand
gcuccaggguacccagcaa

SEQ ID NO: 945301 - RNA, 19 nt, Homo sapiens
  misc_RNA (1)...(19): siRNA sense strand
cggcaucauucgcauuagu

SEQ ID NO: 945302 - RNA, 19 nt, Homo sapiens
  misc_RNA (1)...(19): siRNA sense strand
cgaggaguacuauucuuuc

SEQ ID NO: 945303 - RNA, 19 nt, Homo sapiens
  misc_RNA (1)...(19): siRNA sense strand
gaagcugaggccuuaugga

SEQ ID NO: 945304 - RNA, 19 nt, Homo sapiens
  misc_RNA (1)...(19): siRNA sense strand
gagccgagaaauugaugug

SEQ ID NO: 945305 - RNA, 19 nt, Homo sapiens
  misc_RNA (1)...(19): siRNA sense strand
cgcggcaucauucgcauua

SEQ ID NO: 945306 - RNA, 19 nt, Homo sapiens
  misc_RNA (1)...(19): siRNA sense strand
gggccaaggagcacaaugg

SEQ ID NO: 945307 - RNA, 19 nt, Homo sapiens
  misc_RNA (1)...(19): siRNA sense strand
ggaagcugaggccuuaugg

SEQ ID NO: 945308 - RNA, 19 nt, Homo sapiens
  misc_RNA (1)...(19): siRNA sense strand
caugggccagagagcauua

SEQ ID NO: 945309 - RNA, 19 nt, Homo sapiens
  misc_RNA (1)...(19): siRNA sense strand
ggccaaggagcacaaugga

SEQ ID NO: 945310 - RNA, 19 nt, Homo sapiens
  misc_RNA (1)...(19): siRNA sense strand
ccugguacgcggcaucauu

SEQ ID NO: 945311 - RNA, 19 nt, Homo sapiens
  misc_RNA (1)...(19): siRNA sense strand
ggagcggccaacagagcua

SEQ ID NO: 945312 - RNA, 19 nt, Homo sapiens
  misc_RNA (1)...(19): siRNA sense strand
caugucgagccgagaaauu

SEQ ID NO: 945313 - RNA, 19 nt, Homo sapiens
  misc_RNA (1)...(19): siRNA sense strand
ucuggagacauaugauaaa

SEQ ID NO: 945314 - RNA, 19 nt, Homo sapiens
  misc_RNA (1)...(19): siRNA sense strand
ccagcaccuuugccaguag

SEQ ID NO: 945315 - RNA, 19 nt, Homo sapiens
  misc_RNA (1)...(19): siRNA sense strand
agagagcauuaccuucauc

SEQ ID NO: 945316 - RNA, 19 nt, Homo sapiens
  misc_RNA (1)...(19): siRNA sense strand
gcagcaucacgcaggacua

SEQ ID NO: 945317 - RNA, 19 nt, Homo sapiens
  misc_RNA (1)...(19): siRNA sense strand
ggacugcugaagccaacug

SEQ ID NO: 945318 - RNA, 19 nt, Homo sapiens
  misc_RNA (1)...(19): siRNA sense strand
gccaagugcacaucagaca

SEQ ID NO: 945319 - RNA, 19 nt, Homo sapiens
  misc_RNA (1)...(19): siRNA sense strand
ccaacgaggucuucugcua

SEQ ID NO: 945320 - RNA, 19 nt, Homo sapiens
  misc_RNA (1)...(19): siRNA sense strand
cccggaagcucaugguguu

SEQ ID NO: 945321 - RNA, 19 nt, Homo sapiens
  misc_RNA (1)...(19): siRNA sense strand
ggaagcucaugguguuucu

SEQ ID NO: 945322 - RNA, 19 nt, Homo sapiens
  misc_RNA (1)...(19): siRNA sense strand
ggacgagugcccauacagu

SEQ ID NO: 945323 - RNA, 19 nt, Homo sapiens
  misc_RNA (1)...(19): siRNA sense strand
gcuacaacccucugaccaa

SEQ ID NO: 945324 - RNA, 19 nt, Homo sapiens
  misc_RNA (1)...(19): siRNA sense strand
gguccucaguccauucauc

SEQ ID NO: 945325 - RNA, 19 nt, Homo sapiens
  misc_RNA (1)...(19): siRNA sense strand
gcacaacuaccuguuucug

SEQ ID NO: 945326 - RNA, 19 nt, Homo sapiens
  misc_RNA (1)...(19): siRNA sense strand
gcaccugcauguguucaac

SEQ ID NO: 945327 - RNA, 19 nt, Homo sapiens
  misc_RNA (1)...(19): siRNA sense strand
ccaaggccgucugcuccaa

SEQ ID NO: 945328 - RNA, 19 nt, Homo sapiens
  misc_RNA (1)...(19): siRNA sense strand
cugcgcaccugcauguguu

SEQ ID NO: 945329 - RNA, 19 nt, Homo sapiens
  misc_RNA (1)...(19): siRNA sense strand
caugcacaacuaccuguuu

SEQ ID NO: 945330 - RNA, 19 nt, Homo sapiens
  misc_RNA (1)...(19): siRNA sense strand
acaacccucugaccaacau

SEQ ID NO: 945331 - RNA, 19 nt, Homo sapiens
  misc_RNA (1)...(19): siRNA sense strand
gcuacgacccgcgaacaga

SEQ ID NO: 945332 - RNA, 19 nt, Homo sapiens
  misc_RNA (1)...(19): siRNA sense strand
uggacgggcugcucuaugc

SEQ ID NO: 945333 - RNA, 19 nt, Homo sapiens
  misc_RNA (1)...(19): siRNA sense strand
ggaagcaaguccucgugua

SEQ ID NO: 945334 - RNA, 19 nt, Homo sapiens
  misc_RNA (1)...(19): siRNA sense strand
gagauuagagugucugaau

SEQ ID NO: 945335 - RNA, 19 nt, Homo sapiens
  misc_RNA (1)...(19): siRNA sense strand
gcaucauugucaagaagua

SEQ ID NO: 945336 - RNA, 19 nt, Homo sapiens
  misc_RNA (1)...(19): siRNA sense strand
agaaguaucugugggagaa

SEQ ID NO: 945337 - RNA, 19 nt, Homo sapiens
  misc_RNA (1)...(19): siRNA sense strand
agauuagagugucugaaua

SEQ ID NO: 945338 - RNA, 19 nt, Homo sapiens
  misc_RNA (1)...(19): siRNA sense strand
ccacaggagccuucucuga

SEQ ID NO: 945339 - RNA, 19 nt, Homo sapiens
  misc_RNA (1)...(19): siRNA sense strand
gaaggagauuagagugucu

SEQ ID NO: 945340 - RNA, 19 nt, Homo sapiens
  misc_RNA (1)...(19): siRNA sense strand
gaagcaaguccucguguac

SEQ ID NO: 945341 - RNA, 19 nt, Homo sapiens
  misc_RNA (1)...(19): siRNA sense strand
cagcaucauugucaagaag

SEQ ID NO: 945342 - RNA, 19 nt, Homo sapiens
  misc_RNA (1)...(19): siRNA sense strand
gauuagagugucugaauac

SEQ ID NO: 945343 - RNA, 19 nt, Homo sapiens
  misc_RNA (1)...(19): siRNA sense strand
ccagcaucauugucaagaa

SEQ ID NO: 945344 - RNA, 19 nt, Homo sapiens
  misc_RNA (1)...(19): siRNA sense strand
gcagguucacacacacuuu

SEQ ID NO: 945345 - RNA, 19 nt, Homo sapiens
  misc_RNA (1)...(19): siRNA sense strand
uguacaaggugaaggagau

SEQ ID NO: 945346 - RNA, 19 nt, Homo sapiens
  misc_RNA (1)...(19): siRNA sense strand
uggagcagguucacacaca

SEQ ID NO: 945347 - RNA, 19 nt, Homo sapiens
  misc_RNA (1)...(19): siRNA sense strand
gggccagcaucauugucaa

SEQ ID NO: 945348 - RNA, 19 nt, Homo sapiens
  misc_RNA (1)...(19): siRNA sense strand
guacaaggugaaggagauu

SEQ ID NO: 945349 - RNA, 19 nt, Homo sapiens
  misc_RNA (1)...(19): siRNA sense strand
ccaccaggguagccaagag

SEQ ID NO: 945350 - RNA, 19 nt, Homo sapiens
  misc_RNA (1)...(19): siRNA sense strand
gcucaacaagcucuucuac

SEQ ID NO: 945351 - RNA, 19 nt, Homo sapiens
  misc_RNA (1)...(19): siRNA sense strand
ccaccaucuaucugucuua

SEQ ID NO: 945352 - RNA, 19 nt, Homo sapiens
  misc_RNA (1)...(19): siRNA sense strand
agcaaguccucguguacaa

SEQ ID NO: 945353 - RNA, 19 nt, Homo sapiens
  misc_RNA (1)...(19): siRNA sense strand
ggagaaugagaccguugga

SEQ ID NO: 945354 - RNA, 19 nt, Homo sapiens
  misc_RNA (1)...(19): siRNA sense strand
gugaaggagauuagagugu

SEQ ID NO: 945355 - RNA, 19 nt, Homo sapiens
  misc_RNA (1)...(19): siRNA sense strand
ucugaauacucuuugaacu

SEQ ID NO: 945356 - RNA, 19 nt, Homo sapiens
  misc_RNA (1)...(19): siRNA sense strand
gccaccaucuaucugucuu

SEQ ID NO: 945357 - RNA, 19 nt, Homo sapiens
  misc_RNA (1)...(19): siRNA sense strand
gaacaacuaucccaaagug

SEQ ID NO: 945358 - RNA, 19 nt, Homo sapiens
  misc_RNA (1)...(19): siRNA sense strand
gcaaguggcuggagaaaca

SEQ ID NO: 945359 - RNA, 19 nt, Homo sapiens
  misc_RNA (1)...(19): siRNA sense strand
gaagaaagauagagauaag

SEQ ID NO: 945360 - RNA, 19 nt, Homo sapiens
  misc_RNA (1)...(19): siRNA sense strand
gaaggucuaugucuacuga

SEQ ID NO: 945361 - RNA, 19 nt, Homo sapiens
  misc_RNA (1)...(19): siRNA sense strand
gaccugagcugcccauuga

SEQ ID NO: 945362 - RNA, 19 nt, Homo sapiens
  misc_RNA (1)...(19): siRNA sense strand
ggaaugauccagcuuauug

SEQ ID NO: 945363 - RNA, 19 nt, Homo sapiens
  misc_RNA (1)...(19): siRNA sense strand
gauagacucucacucaaga

SEQ ID NO: 945364 - RNA, 19 nt, Homo sapiens
  misc_RNA (1)...(19): siRNA sense strand
gaacgaagaauuucccauu

SEQ ID NO: 945365 - RNA, 19 nt, Homo sapiens
  misc_RNA (1)...(19): siRNA sense strand
gaaacagcguuggaugaua

SEQ ID NO: 945366 - RNA, 19 nt, Homo sapiens
  misc_RNA (1)...(19): siRNA sense strand
gagcaaauaugccucuuca

SEQ ID NO: 945367 - RNA, 19 nt, Homo sapiens
  misc_RNA (1)...(19): siRNA sense strand
gcaaauaugccucuucaug

SEQ ID NO: 945368 - RNA, 19 nt, Homo sapiens
  misc_RNA (1)...(19): siRNA sense strand
gggaauuucugacauuuga

SEQ ID NO: 945369 - RNA, 19 nt, Homo sapiens
  misc_RNA (1)...(19): siRNA sense strand
gcaagaggcuuaauaucca

SEQ ID NO: 945370 - RNA, 19 nt, Homo sapiens
  misc_RNA (1)...(19): siRNA sense strand
gagauaaggagaaggauaa

SEQ ID NO: 945371 - RNA, 19 nt, Homo sapiens
  misc_RNA (1)...(19): siRNA sense strand
ggagaaaggugguaaagcu

SEQ ID NO: 945372 - RNA, 19 nt, Homo sapiens
  misc_RNA (1)...(19): siRNA sense strand
aaagcaagaugaagaugua

SEQ ID NO: 945373 - RNA, 19 nt, Homo sapiens
  misc_RNA (1)...(19): siRNA sense strand
ggagacauguucagguuug

SEQ ID NO: 945374 - RNA, 19 nt, Homo sapiens
  misc_RNA (1)...(19): siRNA sense strand
gaagaaaguucaagaucag

SEQ ID NO: 945375 - RNA, 19 nt, Homo sapiens
  misc_RNA (1)...(19): siRNA sense strand
ggaagaagacacagaagaa

SEQ ID NO: 945376 - RNA, 19 nt, Homo sapiens
  misc_RNA (1)...(19): siRNA sense strand
gcagauagacucucacuca

SEQ ID NO: 945377 - RNA, 19 nt, Homo sapiens
  misc_RNA (1)...(19): siRNA sense strand
ggaaggagcagcagaugaa

SEQ ID NO: 945378 - RNA, 19 nt, Homo sapiens
  misc_RNA (1)...(19): siRNA sense strand
gauagagaacgaagaauuu

SEQ ID NO: 945379 - RNA, 19 nt, Homo sapiens
  misc_RNA (1)...(19): siRNA sense strand
caaauaaagagcaguauga

SEQ ID NO: 945380 - RNA, 19 nt, Homo sapiens
  misc_RNA (1)...(19): siRNA sense strand
gcaacuaugacucguauaa

SEQ ID NO: 945381 - RNA, 19 nt, Homo sapiens
  misc_RNA (1)...(19): siRNA sense strand
aagcauggauuuagguaua

SEQ ID NO: 945382 - RNA, 19 nt, Homo sapiens
  misc_RNA (1)...(19): siRNA sense strand
ggauaaaacuggaaaagaa

SEQ ID NO: 945383 - RNA, 19 nt, Homo sapiens
  misc_RNA (1)...(19): siRNA sense strand
gaagaaagaugaaaacuac

SEQ ID NO: 945384 - RNA, 19 nt, Homo sapiens
  misc_RNA (1)...(19): siRNA sense strand
cuaagaaggucuaugucua

SEQ ID NO: 945385 - RNA, 19 nt, Homo sapiens
  misc_RNA (1)...(19): siRNA sense strand
gaacaagcacaacauaugu

SEQ ID NO: 945386 - RNA, 19 nt, Homo sapiens
  misc_RNA (1)...(19): siRNA sense strand
gaaguuguuucgcuguuga

SEQ ID NO: 945387 - RNA, 19 nt, Homo sapiens
  misc_RNA (1)...(19): siRNA sense strand
gaggagaggauacgaauga

SEQ ID NO: 945388 - RNA, 19 nt, Homo sapiens
  misc_RNA (1)...(19): siRNA sense strand
gaauggaaaccaagagaaa

SEQ ID NO: 945389 - RNA, 19 nt, Homo sapiens
  misc_RNA (1)...(19): siRNA sense strand
acauggagauggaggaaua

SEQ ID NO: 945390 - RNA, 19 nt, Homo sapiens
  misc_RNA (1)...(19): siRNA sense strand
aaaccaagaugccauggaa

SEQ ID NO: 945391 - RNA, 19 nt, Homo sapiens
  misc_RNA (1)...(19): siRNA sense strand
gaaaggugguaaagcugaa

SEQ ID NO: 945392 - RNA, 19 nt, Homo sapiens
  misc_RNA (1)...(19): siRNA sense strand
gaugaugaguuaauguaug

SEQ ID NO: 945393 - RNA, 19 nt, Homo sapiens
  misc_RNA (1)...(19): siRNA sense strand
ggagaggauucaagccaaa

SEQ ID NO: 945394 - RNA, 19 nt, Homo sapiens
  misc_RNA (1)...(19): siRNA sense strand
agacuaaacucaauacagu

SEQ ID NO: 945395 - RNA, 19 nt, Homo sapiens
  misc_RNA (1)...(19): siRNA sense strand
uuccagagauguaacaaua

SEQ ID NO: 945396 - RNA, 19 nt, Homo sapiens
  misc_RNA (1)...(19): siRNA sense strand
ggaaggccaucgccaagga

SEQ ID NO: 945397 - RNA, 19 nt, Homo sapiens
  misc_RNA (1)...(19): siRNA sense strand
ggucacaccuucaguccuu

SEQ ID NO: 945398 - RNA, 19 nt, Homo sapiens
  misc_RNA (1)...(19): siRNA sense strand
uaagaaagguacagaaggu

SEQ ID NO: 945399 - RNA, 19 nt, Homo sapiens
  misc_RNA (1)...(19): siRNA sense strand
guacacccaucauuugguu

SEQ ID NO: 945400 - RNA, 19 nt, Homo sapiens
  misc_RNA (1)...(19): siRNA sense strand
agaagaaaguucaagauca

SEQ ID NO: 945401 - RNA, 19 nt, Homo sapiens
  misc_RNA (1)...(19): siRNA sense strand
gaagaagacacagaagaaa

SEQ ID NO: 945402 - RNA, 19 nt, Homo sapiens
  misc_RNA (1)...(19): siRNA sense strand
gggcaaaucccaagaggaa

SEQ ID NO: 945403 - RNA, 19 nt, Homo sapiens
  misc_RNA (1)...(19): siRNA sense strand
aaauaugccucuucauguu

SEQ ID NO: 945404 - RNA, 19 nt, Homo sapiens
  misc_RNA (1)...(19): siRNA sense strand
uaugauggaugcuuuguau

SEQ ID NO: 945405 - RNA, 19 nt, Homo sapiens
  misc_RNA (1)...(19): siRNA sense strand
agacagacuuauagaggua

SEQ ID NO: 945406 - RNA, 19 nt, Homo sapiens
  misc_RNA (1)...(19): siRNA sense strand
aaacagcguuggaugauag

SEQ ID NO: 945407 - RNA, 19 nt, Homo sapiens
  misc_RNA (1)...(19): siRNA sense strand
gauggcgaccuucgaaaua

SEQ ID NO: 945408 - RNA, 19 nt, Homo sapiens
  misc_RNA (1)...(19): siRNA sense strand
gggaguuucuucuuaugaa

SEQ ID NO: 945409 - RNA, 19 nt, Homo sapiens
  misc_RNA (1)...(19): siRNA sense strand
gugauaagacugauagaaa

SEQ ID NO: 945410 - RNA, 19 nt, Homo sapiens
  misc_RNA (1)...(19): siRNA sense strand
ccagggaauuucugacauu

SEQ ID NO: 945411 - RNA, 19 nt, Homo sapiens
  misc_RNA (1)...(19): siRNA sense strand
ugguaaagcugaacaugaa

SEQ ID NO: 945412 - RNA, 19 nt, Homo sapiens
  misc_RNA (1)...(19): siRNA sense strand
gagcugccaucgacaaauc

SEQ ID NO: 945413 - RNA, 19 nt, Homo sapiens
  misc_RNA (1)...(19): siRNA sense strand
gaggaaugauccagcuuau

SEQ ID NO: 945414 - RNA, 19 nt, Homo sapiens
  misc_RNA (1)...(19): siRNA sense strand
cagaauguauuuaguacga

SEQ ID NO: 945415 - RNA, 19 nt, Homo sapiens
  misc_RNA (1)...(19): siRNA sense strand
caaauaugccucuucaugu

SEQ ID NO: 945416 - RNA, 19 nt, Homo sapiens
  misc_RNA (1)...(19): siRNA sense strand
ggagaaggauaaaaugaaa

SEQ ID NO: 945417 - RNA, 19 nt, Homo sapiens
  misc_RNA (1)...(19): siRNA sense strand
gguagaugaugaugaugaa

SEQ ID NO: 945418 - RNA, 19 nt, Homo sapiens
  misc_RNA (1)...(19): siRNA sense strand
gaugauagagaacgaagaa

SEQ ID NO: 945419 - RNA, 19 nt, Homo sapiens
  misc_RNA (1)...(19): siRNA sense strand
ccagagauauuugguagug

SEQ ID NO: 945420 - RNA, 19 nt, Homo sapiens
  misc_RNA (1)...(19): siRNA sense strand
gaucgucggcggaccuaua

SEQ ID NO: 945421 - RNA, 19 nt, Homo sapiens
  misc_RNA (1)...(19): siRNA sense strand
gaucaacuccuagcaauca

SEQ ID NO: 945422 - RNA, 19 nt, Homo sapiens
  misc_RNA (1)...(19): siRNA sense strand
gagaagggcauaugaugga

SEQ ID NO: 945423 - RNA, 19 nt, Homo sapiens
  misc_RNA (1)...(19): siRNA sense strand
uggcugugaugaugaguua

SEQ ID NO: 945424 - RNA, 19 nt, Homo sapiens
  misc_RNA (1)...(19): siRNA sense strand
gagcgugacuaugcugaaa

SEQ ID NO: 945425 - RNA, 19 nt, Homo sapiens
  misc_RNA (1)...(19): siRNA sense strand
gaaaagaugacaagauuga

SEQ ID NO: 945426 - RNA, 19 nt, Homo sapiens
  misc_RNA (1)...(19): siRNA sense strand
ggccaaggcugcaaucagu

SEQ ID NO: 945427 - RNA, 19 nt, Homo sapiens
  misc_RNA (1)...(19): siRNA sense strand
gcaaggagaauaagcaagu

SEQ ID NO: 945428 - RNA, 19 nt, Homo sapiens
  misc_RNA (1)...(19): siRNA sense strand
cagcaucacuuccagagau

SEQ ID NO: 945429 - RNA, 19 nt, Homo sapiens
  misc_RNA (1)...(19): siRNA sense strand
gaggaauacuagaccuuga

SEQ ID NO: 945430 - RNA, 19 nt, Homo sapiens
  misc_RNA (1)...(19): siRNA sense strand
cagcaacuaugacucguau

SEQ ID NO: 945431 - RNA, 19 nt, Homo sapiens
  misc_RNA (1)...(19): siRNA sense strand
acaaaugaauggaaaccaa

SEQ ID NO: 945432 - RNA, 19 nt, Homo sapiens
  misc_RNA (1)...(19): siRNA sense strand
ggauuuggacgucagagua

SEQ ID NO: 945433 - RNA, 19 nt, Homo sapiens
  misc_RNA (1)...(19): siRNA sense strand
gaaaugcugcccucaguag

SEQ ID NO: 945434 - RNA, 19 nt, Homo sapiens
  misc_RNA (1)...(19): siRNA sense strand
uggcucagcuccaaucuau

SEQ ID NO: 945435 - RNA, 19 nt, Homo sapiens
  misc_RNA (1)...(19): siRNA sense strand
guacagaagguuugggauu

SEQ ID NO: 945436 - RNA, 19 nt, Homo sapiens
  misc_RNA (1)...(19): siRNA sense strand
gaaagguacagaagguuug

SEQ ID NO: 945437 - RNA, 19 nt, Homo sapiens
  misc_RNA (1)...(19): siRNA sense strand
gcaagaugaagauguagaa

SEQ ID NO: 945438 - RNA, 19 nt, Homo sapiens
  misc_RNA (1)...(19): siRNA sense strand
gcaagaauuucagcaagca

SEQ ID NO: 945439 - RNA, 19 nt, Homo sapiens
  misc_RNA (1)...(19): siRNA sense strand
agagacaaaugaauggaaa

SEQ ID NO: 945440 - RNA, 19 nt, Homo sapiens
  misc_RNA (1)...(19): siRNA sense strand
gugcaucgcuuggaacaug

SEQ ID NO: 945441 - RNA, 19 nt, Homo sapiens
  misc_RNA (1)...(19): siRNA sense strand
gaaagcagaagaugaggau

SEQ ID NO: 945442 - RNA, 19 nt, Homo sapiens
  misc_RNA (1)...(19): siRNA sense strand
gugagaagaacaauuacua

SEQ ID NO: 945443 - RNA, 19 nt, Homo sapiens
  misc_RNA (1)...(19): siRNA sense strand
uagcaaucaugaucggaua

SEQ ID NO: 945444 - RNA, 19 nt, Homo sapiens
  misc_RNA (1)...(19): siRNA sense strand
aguaacagaucaacuccua

SEQ ID NO: 945445 - RNA, 19 nt, Homo sapiens
  misc_RNA (1)...(19): siRNA sense strand
gaagaggagaggauacgaa

SEQ ID NO: 945446 - RNA, 19 nt, Homo sapiens
  misc_RNA (1)...(19): siRNA sense strand
ugacgagacuaaacucaau

SEQ ID NO: 945447 - RNA, 19 nt, Homo sapiens
  misc_RNA (1)...(19): siRNA sense strand
ggaaguuguuucgcuguug

SEQ ID NO: 945448 - RNA, 19 nt, Homo sapiens
  misc_RNA (1)...(19): siRNA sense strand
gaauccauguagugccuuu

SEQ ID NO: 945449 - RNA, 19 nt, Homo sapiens
  misc_RNA (1)...(19): siRNA sense strand
gagaaaacggguaaaauaa

SEQ ID NO: 945450 - RNA, 19 nt, Homo sapiens
  misc_RNA (1)...(19): siRNA sense strand
gcauggagaccuuggaaga

SEQ ID NO: 945451 - RNA, 19 nt, Homo sapiens
  misc_RNA (1)...(19): siRNA sense strand
caacaaugucucagccuuu

SEQ ID NO: 945452 - RNA, 19 nt, Homo sapiens
  misc_RNA (1)...(19): siRNA sense strand
gcaaauaaagagcaguaug

SEQ ID NO: 945453 - RNA, 19 nt, Homo sapiens
  misc_RNA (1)...(19): siRNA sense strand
cgauaaagacagacuggua

SEQ ID NO: 945454 - RNA, 19 nt, Homo sapiens
  misc_RNA (1)...(19): siRNA sense strand
cagaucaacuccuagcaau

SEQ ID NO: 945455 - RNA, 19 nt, Homo sapiens
  misc_RNA (1)...(19): siRNA sense strand
ggagauggaggaauacuag

SEQ ID NO: 945456 - RNA, 19 nt, Homo sapiens
  misc_RNA (1)...(19): siRNA sense strand
gcgugacuaugcugaaauu

SEQ ID NO: 945457 - RNA, 19 nt, Homo sapiens
  misc_RNA (1)...(19): siRNA sense strand
ccacaaauaucccuaccaa

SEQ ID NO: 945458 - RNA, 19 nt, Homo sapiens
  misc_RNA (1)...(19): siRNA sense strand
cgacuuggauccuuuggaa

SEQ ID NO: 945459 - RNA, 19 nt, Homo sapiens
  misc_RNA (1)...(19): siRNA sense strand
gaacuggaguaucugacaa

SEQ ID NO: 945460 - RNA, 19 nt, Homo sapiens
  misc_RNA (1)...(19): siRNA sense strand
acaaguagauuccgcaaau

SEQ ID NO: 945461 - RNA, 19 nt, Homo sapiens
  misc_RNA (1)...(19): siRNA sense strand
uaaauaauccugccuguca

SEQ ID NO: 945462 - RNA, 19 nt, Homo sapiens
  misc_RNA (1)...(19): siRNA sense strand
gaaagaaguguagaugauu

SEQ ID NO: 945463 - RNA, 19 nt, Homo sapiens
  misc_RNA (1)...(19): siRNA sense strand
gcuugucguuuacauauuu

SEQ ID NO: 945464 - RNA, 19 nt, Homo sapiens
  misc_RNA (1)...(19): siRNA sense strand
gaaccuaccucuggcuugu

SEQ ID NO: 945465 - RNA, 19 nt, Homo sapiens
  misc_RNA (1)...(19): siRNA sense strand
gguuagaacuggaguaucu

SEQ ID NO: 945466 - RNA, 19 nt, Homo sapiens
  misc_RNA (1)...(19): siRNA sense strand
agaaagaaguguagaugau

SEQ ID NO: 945467 - RNA, 19 nt, Homo sapiens
  misc_RNA (1)...(19): siRNA sense strand
aaagcuaugugaaccuuaa

SEQ ID NO: 945468 - RNA, 19 nt, Homo sapiens
  misc_RNA (1)...(19): siRNA sense strand
gagcaucacuagagcaucu

SEQ ID NO: 945469 - RNA, 19 nt, Homo sapiens
  misc_RNA (1)...(19): siRNA sense strand
gcaagcaguuccgaaugaa

SEQ ID NO: 945470 - RNA, 19 nt, Homo sapiens
  misc_RNA (1)...(19): siRNA sense strand
cgaauacccaccacaagua

SEQ ID NO: 945471 - RNA, 19 nt, Homo sapiens
  misc_RNA (1)...(19): siRNA sense strand
ucuaggaccagaauaaaua

SEQ ID NO: 945472 - RNA, 19 nt, Homo sapiens
  misc_RNA (1)...(19): siRNA sense strand
cagauaagcuuggaugagu

SEQ ID NO: 945473 - RNA, 19 nt, Homo sapiens
  misc_RNA (1)...(19): siRNA sense strand
gagaaugaaagcuauguga

SEQ ID NO: 945474 - RNA, 19 nt, Homo sapiens
  misc_RNA (1)...(19): siRNA sense strand
uggaguaucugacaaguag

SEQ ID NO: 945475 - RNA, 19 nt, Homo sapiens
  misc_RNA (1)...(19): siRNA sense strand
gaggaugugugauggagau

SEQ ID NO: 945476 - RNA, 19 nt, Homo sapiens
  misc_RNA (1)...(19): siRNA sense strand
gaaccugucguauauucuu

SEQ ID NO: 945477 - RNA, 19 nt, Homo sapiens
  misc_RNA (1)...(19): siRNA sense strand
aaaugcagauucaaacaug

SEQ ID NO: 945478 - RNA, 19 nt, Homo sapiens
  misc_RNA (1)...(19): siRNA sense strand
ggagagaggaugaagaucu

SEQ ID NO: 945479 - RNA, 19 nt, Homo sapiens
  misc_RNA (1)...(19): siRNA sense strand
gaggaagagucggaaauag

SEQ ID NO: 945480 - RNA, 19 nt, Homo sapiens
  misc_RNA (1)...(19): siRNA sense strand
aaagaaguguagaugauuc

SEQ ID NO: 945481 - RNA, 19 nt, Homo sapiens
  misc_RNA (1)...(19): siRNA sense strand
ggaagaauagaaagaagug

SEQ ID NO: 945482 - RNA, 19 nt, Homo sapiens
  misc_RNA (1)...(19): siRNA sense strand
ucagagacauuuggagaga

SEQ ID NO: 945483 - RNA, 19 nt, Homo sapiens
  misc_RNA (1)...(19): siRNA sense strand
gaaucaagagaaagugaaa

SEQ ID NO: 945484 - RNA, 19 nt, Homo sapiens
  misc_RNA (1)...(19): siRNA sense strand
agaaagaauucagaacaga

SEQ ID NO: 945485 - RNA, 19 nt, Homo sapiens
  misc_RNA (1)...(19): siRNA sense strand
ggaagagucggaaauaguc

SEQ ID NO: 945486 - RNA, 19 nt, Homo sapiens
  misc_RNA (1)...(19): siRNA sense strand
uuuggaauaugcuggcuua

SEQ ID NO: 945487 - RNA, 19 nt, Homo sapiens
  misc_RNA (1)...(19): siRNA sense strand
gagaaucaagagaaaguga

SEQ ID NO: 945488 - RNA, 19 nt, Homo sapiens
  misc_RNA (1)...(19): siRNA sense strand
uaacgaauacccaccacaa

SEQ ID NO: 945489 - RNA, 19 nt, Homo sapiens
  misc_RNA (1)...(19): siRNA sense strand
gaaagcuaugugaaccuua

SEQ ID NO: 945490 - RNA, 19 nt, Homo sapiens
  misc_RNA (1)...(19): siRNA sense strand
uagccucaguggagccuua

SEQ ID NO: 945491 - RNA, 19 nt, Homo sapiens
  misc_RNA (1)...(19): siRNA sense strand
cuaaucaaauuccagaagu

SEQ ID NO: 945492 - RNA, 19 nt, Homo sapiens
  misc_RNA (1)...(19): siRNA sense strand
gaugugugauggagaugug

SEQ ID NO: 945493 - RNA, 19 nt, Homo sapiens
  misc_RNA (1)...(19): siRNA sense strand
ugcaagcaguuccgaauga

SEQ ID NO: 945494 - RNA, 19 nt, Homo sapiens
  misc_RNA (1)...(19): siRNA sense strand
gaagaugaugagccugauu

SEQ ID NO: 945495 - RNA, 19 nt, Homo sapiens
  misc_RNA (1)...(19): siRNA sense strand
ugaaagcuaugugaaccuu

SEQ ID NO: 945496 - RNA, 19 nt, Homo sapiens
  misc_RNA (1)...(19): siRNA sense strand
cggaaccugucguauauuc

SEQ ID NO: 945497 - RNA, 19 nt, Homo sapiens
  misc_RNA (1)...(19): siRNA sense strand
ucacuagagcaucuccuua

SEQ ID NO: 945498 - RNA, 19 nt, Homo sapiens
  misc_RNA (1)...(19): siRNA sense strand
gaaugaaagcuaugugaac

SEQ ID NO: 945499 - RNA, 19 nt, Homo sapiens
  misc_RNA (1)...(19): siRNA sense strand
caaauuguuggaagaauag

SEQ ID NO: 945500 - RNA, 19 nt, Homo sapiens
  misc_RNA (1)...(19): siRNA sense strand
uagaaagaauucagaacag

SEQ ID NO: 945501 - RNA, 19 nt, Homo sapiens
  misc_RNA (1)...(19): siRNA sense strand
gggaggaggaagaugauga

SEQ ID NO: 945502 - RNA, 19 nt, Homo sapiens
  misc_RNA (1)...(19): siRNA sense strand
uauagugacccuccuguga

SEQ ID NO: 945503 - RNA, 19 nt, Homo sapiens
  misc_RNA (1)...(19): siRNA sense strand
agaggaagagucggaaaua

SEQ ID NO: 945504 - RNA, 19 nt, Homo sapiens
  misc_RNA (1)...(19): siRNA sense strand
cuucggaaccugucguaua

SEQ ID NO: 945505 - RNA, 19 nt, Homo sapiens
  misc_RNA (1)...(19): siRNA sense strand
gcaagaacaagaugcugau

SEQ ID NO: 945506 - RNA, 19 nt, Homo sapiens
  misc_RNA (1)...(19): siRNA sense strand
gccuuauguuccagaauuu

SEQ ID NO: 945507 - RNA, 19 nt, Homo sapiens
  misc_RNA (1)...(19): siRNA sense strand
ggaccagaauaaauaaucc

SEQ ID NO: 945508 - RNA, 19 nt, Homo sapiens
  misc_RNA (1)...(19): siRNA sense strand
agccuuauguuccagaauu

SEQ ID NO: 945509 - RNA, 19 nt, Homo sapiens
  misc_RNA (1)...(19): siRNA sense strand
ggaagaugaugagccugau

SEQ ID NO: 945510 - RNA, 19 nt, Homo sapiens
  misc_RNA (1)...(19): siRNA sense strand
agucggaaauagucaaguu

SEQ ID NO: 945511 - RNA, 19 nt, Homo sapiens
  misc_RNA (1)...(19): siRNA sense strand
aagcuccgcucguggcauu

SEQ ID NO: 945512 - RNA, 19 nt, Homo sapiens
  misc_RNA (1)...(19): siRNA sense strand
uagaaagaaguguagauga

SEQ ID NO: 945513 - RNA, 19 nt, Homo sapiens
  misc_RNA (1)...(19): siRNA sense strand
ccucaaaggaaauuguaaa

SEQ ID NO: 945514 - RNA, 19 nt, Homo sapiens
  misc_RNA (1)...(19): siRNA sense strand
gauaugacuggcaggcaaa

SEQ ID NO: 945515 - RNA, 19 nt, Homo sapiens
  misc_RNA (1)...(19): siRNA sense strand
gaaguguagaugauucuca

SEQ ID NO: 945516 - RNA, 19 nt, Homo sapiens
  misc_RNA (1)...(19): siRNA sense strand
uucggaaccugucguauau

SEQ ID NO: 945517 - RNA, 19 nt, Homo sapiens
  misc_RNA (1)...(19): siRNA sense strand
gcuaugugaaccuuaagaa

SEQ ID NO: 945518 - RNA, 19 nt, Homo sapiens
  misc_RNA (1)...(19): siRNA sense strand
ugacgguccugcaccuguu

SEQ ID NO: 945519 - RNA, 19 nt, Homo sapiens
  misc_RNA (1)...(19): siRNA sense strand
uccugcaccuguuauagua

SEQ ID NO: 945520 - RNA, 19 nt, Homo sapiens
  misc_RNA (1)...(19): siRNA sense strand
gauaagcuuggaugagugu

SEQ ID NO: 945521 - RNA, 19 nt, Homo sapiens
  misc_RNA (1)...(19): siRNA sense strand
uaguagagaaugaaagcua

SEQ ID NO: 945522 - RNA, 19 nt, Homo sapiens
  misc_RNA (1)...(19): siRNA sense strand
cuaaagaccacaaauaucc

SEQ ID NO: 945523 - RNA, 19 nt, Homo sapiens
  misc_RNA (1)...(19): siRNA sense strand
gaaagugaaagcucuucuc

SEQ ID NO: 945524 - RNA, 19 nt, Homo sapiens
  misc_RNA (1)...(19): siRNA sense strand
acuuggauccuuuggaaua

SEQ ID NO: 945525 - RNA, 19 nt, Homo sapiens
  misc_RNA (1)...(19): siRNA sense strand
gaagagucggaaauaguca

SEQ ID NO: 945526 - RNA, 19 nt, Homo sapiens
  misc_RNA (1)...(19): siRNA sense strand
ggagccuuauguuccagaa

SEQ ID NO: 945527 - RNA, 19 nt, Homo sapiens
  misc_RNA (1)...(19): siRNA sense strand
gcaaauccaagccaaaaga

SEQ ID NO: 945528 - RNA, 19 nt, Homo sapiens
  misc_RNA (1)...(19): siRNA sense strand
uccgagaccugcaagaaca

SEQ ID NO: 945529 - RNA, 19 nt, Homo sapiens
  misc_RNA (1)...(19): siRNA sense strand
aguagagaaugaaagcuau

SEQ ID NO: 945530 - RNA, 19 nt, Homo sapiens
  misc_RNA (1)...(19): siRNA sense strand
gaauagaaagaaguguaga

SEQ ID NO: 945531 - RNA, 19 nt, Homo sapiens
  misc_RNA (1)...(19): siRNA sense strand
gaggcagucaaccagauaa

SEQ ID NO: 945532 - RNA, 19 nt, Homo sapiens
  misc_RNA (1)...(19): siRNA sense strand
ugaggcagucaaccagaua

SEQ ID NO: 945533 - RNA, 19 nt, Homo sapiens
  misc_RNA (1)...(19): siRNA sense strand
agaaugaaagcuaugugaa

SEQ ID NO: 945534 - RNA, 19 nt, Homo sapiens
  misc_RNA (1)...(19): siRNA sense strand
caaauuccagaaguugaaa

SEQ ID NO: 945535 - RNA, 19 nt, Homo sapiens
  misc_RNA (1)...(19): siRNA sense strand
cuaggaccagaauaaauaa

SEQ ID NO: 945536 - RNA, 19 nt, Homo sapiens
  misc_RNA (1)...(19): siRNA sense strand
agaacaagaugcugaugcu

SEQ ID NO: 945537 - RNA, 19 nt, Homo sapiens
  misc_RNA (1)...(19): siRNA sense strand
ugacauuugcggaaacuuc

SEQ ID NO: 945538 - RNA, 19 nt, Homo sapiens
  misc_RNA (1)...(19): siRNA sense strand
cugaguuucuuuaugacaa

SEQ ID NO: 945539 - RNA, 19 nt, Homo sapiens
  misc_RNA (1)...(19): siRNA sense strand
aaacuuuccagguaugguu

SEQ ID NO: 945540 - RNA, 19 nt, Homo sapiens
  misc_RNA (1)...(19): siRNA sense strand
caagcaguuccgaaugaaa

SEQ ID NO: 945541 - RNA, 19 nt, Homo sapiens
  misc_RNA (1)...(19): siRNA sense strand
aauaauccugccugucaua

SEQ ID NO: 945542 - RNA, 19 nt, Homo sapiens
  misc_RNA (1)...(19): siRNA sense strand
gaugcuggaucugaaagag

SEQ ID NO: 945543 - RNA, 19 nt, Homo sapiens
  misc_RNA (1)...(19): siRNA sense strand
caaauaucccuaccaagcu

SEQ ID NO: 945544 - RNA, 19 nt, Homo sapiens
  misc_RNA (1)...(19): siRNA sense strand
ggaucaaaaugcagauuca

SEQ ID NO: 945545 - RNA, 19 nt, Homo sapiens
  misc_RNA (1)...(19): siRNA sense strand
ugacccuccugugaacuuu

SEQ ID NO: 945546 - RNA, 19 nt, Homo sapiens
  misc_RNA (1)...(19): siRNA sense strand
gucggaaauagucaaguua

SEQ ID NO: 945547 - RNA, 19 nt, Homo sapiens
  misc_RNA (1)...(19): siRNA sense strand
gauaacccuuuuagaggaa

SEQ ID NO: 945548 - RNA, 19 nt, Homo sapiens
  misc_RNA (1)...(19): siRNA sense strand
guuggaagaauagaaagaa

SEQ ID NO: 945549 - RNA, 19 nt, Homo sapiens
  misc_RNA (1)...(19): siRNA sense strand
gcagucaaccagauaagcu

SEQ ID NO: 945550 - RNA, 19 nt, Homo sapiens
  misc_RNA (1)...(19): siRNA sense strand
guuccagaauuuacagucu

SEQ ID NO: 945551 - RNA, 19 nt, Homo sapiens
  misc_RNA (1)...(19): siRNA sense strand
aagaugaugagccugauug

SEQ ID NO: 945552 - RNA, 19 nt, Homo sapiens
  misc_RNA (1)...(19): siRNA sense strand
gcaggcaaagucaguacau

SEQ ID NO: 945553 - RNA, 19 nt, Homo sapiens
  misc_RNA (1)...(19): siRNA sense strand
gacgguccugcaccuguua

SEQ ID NO: 945554 - RNA, 19 nt, Homo sapiens
  misc_RNA (1)...(19): siRNA sense strand
aaucaaauuccagaaguug

SEQ ID NO: 945555 - RNA, 19 nt, Homo sapiens
  misc_RNA (1)...(19): siRNA sense strand
agucuggaccauuggguua

SEQ ID NO: 945556 - RNA, 19 nt, Homo sapiens
  misc_RNA (1)...(19): siRNA sense strand
cauuugcucucaaguccau

SEQ ID NO: 945557 - RNA, 19 nt, Homo sapiens
  misc_RNA (1)...(19): siRNA sense strand
ccacaaauaucccuaccaa

SEQ ID NO: 945558 - RNA, 19 nt, Homo sapiens
  misc_RNA (1)...(19): siRNA sense strand
cgacuuggauccuuuggaa

SEQ ID NO: 945559 - RNA, 19 nt, Homo sapiens
  misc_RNA (1)...(19): siRNA sense strand
gaacuggaguaucugacaa

SEQ ID NO: 945560 - RNA, 19 nt, Homo sapiens
  misc_RNA (1)...(19): siRNA sense strand
acaaguagauuccgcaaau

SEQ ID NO: 945561 - RNA, 19 nt, Homo sapiens
  misc_RNA (1)...(19): siRNA sense strand
uaaauaauccugccuguca

SEQ ID NO: 945562 - RNA, 19 nt, Homo sapiens
  misc_RNA (1)...(19): siRNA sense strand
gaaagaaguguagaugauu

SEQ ID NO: 945563 - RNA, 19 nt, Homo sapiens
  misc_RNA (1)...(19): siRNA sense strand
gcuugucguuuacauauuu

SEQ ID NO: 945564 - RNA, 19 nt, Homo sapiens
  misc_RNA (1)...(19): siRNA sense strand
gaaccuaccucuggcuugu

SEQ ID NO: 945565 - RNA, 19 nt, Homo sapiens
  misc_RNA (1)...(19): siRNA sense strand
gguuagaacuggaguaucu

SEQ ID NO: 945566 - RNA, 19 nt, Homo sapiens
  misc_RNA (1)...(19): siRNA sense strand
agaaagaaguguagaugau

SEQ ID NO: 945567 - RNA, 19 nt, Homo sapiens
  misc_RNA (1)...(19): siRNA sense strand
aaagcuaugugaaccuuaa

SEQ ID NO: 945568 - RNA, 19 nt, Homo sapiens
  misc_RNA (1)...(19): siRNA sense strand
gagcaucacuagagcaucu

SEQ ID NO: 945569 - RNA, 19 nt, Homo sapiens
  misc_RNA (1)...(19): siRNA sense strand
gcaagcaguuccgaaugaa

SEQ ID NO: 945570 - RNA, 19 nt, Homo sapiens
  misc_RNA (1)...(19): siRNA sense strand
cgaauacccaccacaagua

SEQ ID NO: 945571 - RNA, 19 nt, Homo sapiens
  misc_RNA (1)...(19): siRNA sense strand
ucuaggaccagaauaaaua

SEQ ID NO: 945572 - RNA, 19 nt, Homo sapiens
  misc_RNA (1)...(19): siRNA sense strand
cagauaagcuuggaugagu

SEQ ID NO: 945573 - RNA, 19 nt, Homo sapiens
  misc_RNA (1)...(19): siRNA sense strand
gagaaugaaagcuauguga

SEQ ID NO: 945574 - RNA, 19 nt, Homo sapiens
  misc_RNA (1)...(19): siRNA sense strand
uggaguaucugacaaguag

SEQ ID NO: 945575 - RNA, 19 nt, Homo sapiens
  misc_RNA (1)...(19): siRNA sense strand
gaggaugugugauggagau

SEQ ID NO: 945576 - RNA, 19 nt, Homo sapiens
  misc_RNA (1)...(19): siRNA sense strand
gaaccugucguauauucuu

SEQ ID NO: 945577 - RNA, 19 nt, Homo sapiens
  misc_RNA (1)...(19): siRNA sense strand
aaaugcagauucaaacaug

SEQ ID NO: 945578 - RNA, 19 nt, Homo sapiens
  misc_RNA (1)...(19): siRNA sense strand
ggagagaggaugaagaucu

SEQ ID NO: 945579 - RNA, 19 nt, Homo sapiens
  misc_RNA (1)...(19): siRNA sense strand
gaggaagagucggaaauag

SEQ ID NO: 945580 - RNA, 19 nt, Homo sapiens
  misc_RNA (1)...(19): siRNA sense strand
aaagaaguguagaugauuc

SEQ ID NO: 945581 - RNA, 19 nt, Homo sapiens
  misc_RNA (1)...(19): siRNA sense strand
ggaagaauagaaagaagug

SEQ ID NO: 945582 - RNA, 19 nt, Homo sapiens
  misc_RNA (1)...(19): siRNA sense strand
ucagagacauuuggagaga

SEQ ID NO: 945583 - RNA, 19 nt, Homo sapiens
  misc_RNA (1)...(19): siRNA sense strand
gaaucaagagaaagugaaa

SEQ ID NO: 945584 - RNA, 19 nt, Homo sapiens
  misc_RNA (1)...(19): siRNA sense strand
agaaagaauucagaacaga

SEQ ID NO: 945585 - RNA, 19 nt, Homo sapiens
  misc_RNA (1)...(19): siRNA sense strand
ggaagagucggaaauaguc

SEQ ID NO: 945586 - RNA, 19 nt, Homo sapiens
  misc_RNA (1)...(19): siRNA sense strand
uuuggaauaugcuggcuua

SEQ ID NO: 945587 - RNA, 19 nt, Homo sapiens
  misc_RNA (1)...(19): siRNA sense strand
gagaaucaagagaaaguga

SEQ ID NO: 945588 - RNA, 19 nt, Homo sapiens
  misc_RNA (1)...(19): siRNA sense strand
uaacgaauacccaccacaa

SEQ ID NO: 945589 - RNA, 19 nt, Homo sapiens
  misc_RNA (1)...(19): siRNA sense strand
gaaagcuaugugaaccuua

SEQ ID NO: 945590 - RNA, 19 nt, Homo sapiens
  misc_RNA (1)...(19): siRNA sense strand
uagccucaguggagccuua

SEQ ID NO: 945591 - RNA, 19 nt, Homo sapiens
  misc_RNA (1)...(19): siRNA sense strand
cuaaucaaauuccagaagu

SEQ ID NO: 945592 - RNA, 19 nt, Homo sapiens
  misc_RNA (1)...(19): siRNA sense strand
gaugugugauggagaugug

SEQ ID NO: 945593 - RNA, 19 nt, Homo sapiens
  misc_RNA (1)...(19): siRNA sense strand
ugcaagcaguuccgaauga

SEQ ID NO: 945594 - RNA, 19 nt, Homo sapiens
  misc_RNA (1)...(19): siRNA sense strand
gaagaugaugagccugauu

SEQ ID NO: 945595 - RNA, 19 nt, Homo sapiens
  misc_RNA (1)...(19): siRNA sense strand
ugaaagcuaugugaaccuu

SEQ ID NO: 945596 - RNA, 19 nt, Homo sapiens
  misc_RNA (1)...(19): siRNA sense strand
cggaaccugucguauauuc

SEQ ID NO: 945597 - RNA, 19 nt, Homo sapiens
  misc_RNA (1)...(19): siRNA sense strand
ucacuagagcaucuccuua

SEQ ID NO: 945598 - RNA, 19 nt, Homo sapiens
  misc_RNA (1)...(19): siRNA sense strand
gaaugaaagcuaugugaac

SEQ ID NO: 945599 - RNA, 19 nt, Homo sapiens
  misc_RNA (1)...(19): siRNA sense strand
caaauuguuggaagaauag

SEQ ID NO: 945600 - RNA, 19 nt, Homo sapiens
  misc_RNA (1)...(19): siRNA sense strand
uagaaagaauucagaacag

SEQ ID NO: 945601 - RNA, 19 nt, Homo sapiens
  misc_RNA (1)...(19): siRNA sense strand
gggaggaggaagaugauga

SEQ ID NO: 945602 - RNA, 19 nt, Homo sapiens
  misc_RNA (1)...(19): siRNA sense strand
uauagugacccuccuguga

SEQ ID NO: 945603 - RNA, 19 nt, Homo sapiens
  misc_RNA (1)...(19): siRNA sense strand
agaggaagagucggaaaua

SEQ ID NO: 945604 - RNA, 19 nt, Homo sapiens
  misc_RNA (1)...(19): siRNA sense strand
cuucggaaccugucguaua

SEQ ID NO: 945605 - RNA, 19 nt, Homo sapiens
  misc_RNA (1)...(19): siRNA sense strand
gcaagaacaagaugcugau

SEQ ID NO: 945606 - RNA, 19 nt, Homo sapiens
  misc_RNA (1)...(19): siRNA sense strand
gccuuauguuccagaauuu

SEQ ID NO: 945607 - RNA, 19 nt, Homo sapiens
  misc_RNA (1)...(19): siRNA sense strand
ggaccagaauaaauaaucc

SEQ ID NO: 945608 - RNA, 19 nt, Homo sapiens
  misc_RNA (1)...(19): siRNA sense strand
agccuuauguuccagaauu

SEQ ID NO: 945609 - RNA, 19 nt, Homo sapiens
  misc_RNA (1)...(19): siRNA sense strand
ggaagaugaugagccugau

SEQ ID NO: 945610 - RNA, 19 nt, Homo sapiens
  misc_RNA (1)...(19): siRNA sense strand
agucggaaauagucaaguu

SEQ ID NO: 945611 - RNA, 19 nt, Homo sapiens
  misc_RNA (1)...(19): siRNA sense strand
aagcuccgcucguggcauu

SEQ ID NO: 945612 - RNA, 19 nt, Homo sapiens
  misc_RNA (1)...(19): siRNA sense strand
uagaaagaaguguagauga

SEQ ID NO: 945613 - RNA, 19 nt, Homo sapiens
  misc_RNA (1)...(19): siRNA sense strand
ccucaaaggaaauuguaaa

SEQ ID NO: 945614 - RNA, 19 nt, Homo sapiens
  misc_RNA (1)...(19): siRNA sense strand
gauaugacuggcaggcaaa

SEQ ID NO: 945615 - RNA, 19 nt, Homo sapiens
  misc_RNA (1)...(19): siRNA sense strand
gaaguguagaugauucuca

SEQ ID NO: 945616 - RNA, 19 nt, Homo sapiens
  misc_RNA (1)...(19): siRNA sense strand
uucggaaccugucguauau

SEQ ID NO: 945617 - RNA, 19 nt, Homo sapiens
  misc_RNA (1)...(19): siRNA sense strand
gcuaugugaaccuuaagaa

SEQ ID NO: 945618 - RNA, 19 nt, Homo sapiens
  misc_RNA (1)...(19): siRNA sense strand
ugacgguccugcaccuguu

SEQ ID NO: 945619 - RNA, 19 nt, Homo sapiens
  misc_RNA (1)...(19): siRNA sense strand
uccugcaccuguuauagua

SEQ ID NO: 945620 - RNA, 19 nt, Homo sapiens
  misc_RNA (1)...(19): siRNA sense strand
gauaagcuuggaugagugu

SEQ ID NO: 945621 - RNA, 19 nt, Homo sapiens
  misc_RNA (1)...(19): siRNA sense strand
uaguagagaaugaaagcua

SEQ ID NO: 945622 - RNA, 19 nt, Homo sapiens
  misc_RNA (1)...(19): siRNA sense strand
cuaaagaccacaaauaucc

SEQ ID NO: 945623 - RNA, 19 nt, Homo sapiens
  misc_RNA (1)...(19): siRNA sense strand
gaaagugaaagcucuucuc

SEQ ID NO: 945624 - RNA, 19 nt, Homo sapiens
  misc_RNA (1)...(19): siRNA sense strand
acuuggauccuuuggaaua

SEQ ID NO: 945625 - RNA, 19 nt, Homo sapiens
  misc_RNA (1)...(19): siRNA sense strand
gaagagucggaaauaguca

SEQ ID NO: 945626 - RNA, 19 nt, Homo sapiens
  misc_RNA (1)...(19): siRNA sense strand
ggagccuuauguuccagaa

SEQ ID NO: 945627 - RNA, 19 nt, Homo sapiens
  misc_RNA (1)...(19): siRNA sense strand
gcaaauccaagccaaaaga

SEQ ID NO: 945628 - RNA, 19 nt, Homo sapiens
  misc_RNA (1)...(19): siRNA sense strand
uccgagaccugcaagaaca

SEQ ID NO: 945629 - RNA, 19 nt, Homo sapiens
  misc_RNA (1)...(19): siRNA sense strand
aguagagaaugaaagcuau

SEQ ID NO: 945630 - RNA, 19 nt, Homo sapiens
  misc_RNA (1)...(19): siRNA sense strand
gaauagaaagaaguguaga

SEQ ID NO: 945631 - RNA, 19 nt, Homo sapiens
  misc_RNA (1)...(19): siRNA sense strand
gaggcagucaaccagauaa

SEQ ID NO: 945632 - RNA, 19 nt, Homo sapiens
  misc_RNA (1)...(19): siRNA sense strand
ugaggcagucaaccagaua

SEQ ID NO: 945633 - RNA, 19 nt, Homo sapiens
  misc_RNA (1)...(19): siRNA sense strand
agaaugaaagcuaugugaa

SEQ ID NO: 945634 - RNA, 19 nt, Homo sapiens
  misc_RNA (1)...(19): siRNA sense strand
caaauuccagaaguugaaa

SEQ ID NO: 945635 - RNA, 19 nt, Homo sapiens
  misc_RNA (1)...(19): siRNA sense strand
cuaggaccagaauaaauaa

SEQ ID NO: 945636 - RNA, 19 nt, Homo sapiens
  misc_RNA (1)...(19): siRNA sense strand
agaacaagaugcugaugcu

SEQ ID NO: 945637 - RNA, 19 nt, Homo sapiens
  misc_RNA (1)...(19): siRNA sense strand
ugacauuugcggaaacuuc

SEQ ID NO: 945638 - RNA, 19 nt, Homo sapiens
  misc_RNA (1)...(19): siRNA sense strand
cugaguuucuuuaugacaa

SEQ ID NO: 945639 - RNA, 19 nt, Homo sapiens
  misc_RNA (1)...(19): siRNA sense strand
aaacuuuccagguaugguu

SEQ ID NO: 945640 - RNA, 19 nt, Homo sapiens
  misc_RNA (1)...(19): siRNA sense strand
caagcaguuccgaaugaaa

SEQ ID NO: 945641 - RNA, 19 nt, Homo sapiens
  misc_RNA (1)...(19): siRNA sense strand
aauaauccugccugucaua

SEQ ID NO: 945642 - RNA, 19 nt, Homo sapiens
  misc_RNA (1)...(19): siRNA sense strand
gaugcuggaucugaaagag

SEQ ID NO: 945643 - RNA, 19 nt, Homo sapiens
  misc_RNA (1)...(19): siRNA sense strand
caaauaucccuaccaagcu

SEQ ID NO: 945644 - RNA, 19 nt, Homo sapiens
  misc_RNA (1)...(19): siRNA sense strand
ggaucaaaaugcagauuca

SEQ ID NO: 945645 - RNA, 19 nt, Homo sapiens
  misc_RNA (1)...(19): siRNA sense strand
ugacccuccugugaacuuu

SEQ ID NO: 945646 - RNA, 19 nt, Homo sapiens
  misc_RNA (1)...(19): siRNA sense strand
gucggaaauagucaaguua

SEQ ID NO: 945647 - RNA, 19 nt, Homo sapiens
  misc_RNA (1)...(19): siRNA sense strand
gauaacccuuuuagaggaa

SEQ ID NO: 945648 - RNA, 19 nt, Homo sapiens
  misc_RNA (1)...(19): siRNA sense strand
guuggaagaauagaaagaa

SEQ ID NO: 945649 - RNA, 19 nt, Homo sapiens
  misc_RNA (1)...(19): siRNA sense strand
gcagucaaccagauaagcu

SEQ ID NO: 945650 - RNA, 19 nt, Homo sapiens
  misc_RNA (1)...(19): siRNA sense strand
guuccagaauuuacagucu

SEQ ID NO: 945651 - RNA, 19 nt, Homo sapiens
  misc_RNA (1)...(19): siRNA sense strand
aagaugaugagccugauug

SEQ ID NO: 945652 - RNA, 19 nt, Homo sapiens
  misc_RNA (1)...(19): siRNA sense strand
gcaggcaaagucaguacau

SEQ ID NO: 945653 - RNA, 19 nt, Homo sapiens
  misc_RNA (1)...(19): siRNA sense strand
gacgguccugcaccuguua

SEQ ID NO: 945654 - RNA, 19 nt, Homo sapiens
  misc_RNA (1)...(19): siRNA sense strand
aaucaaauuccagaaguug

SEQ ID NO: 945655 - RNA, 19 nt, Homo sapiens
  misc_RNA (1)...(19): siRNA sense strand
agucuggaccauuggguua

SEQ ID NO: 945656 - RNA, 19 nt, Homo sapiens
  misc_RNA (1)...(19): siRNA sense strand
cauuugcucucaaguccau

SEQ ID NO: 945657 - RNA, 19 nt, Homo sapiens
  misc_RNA (1)...(19): siRNA sense strand
ccacaaauaucccuaccaa

SEQ ID NO: 945658 - RNA, 19 nt, Homo sapiens
  misc_RNA (1)...(19): siRNA sense strand
cgacuuggauccuuuggaa

SEQ ID NO: 945659 - RNA, 19 nt, Homo sapiens
  misc_RNA (1)...(19): siRNA sense strand
gaacuggaguaucugacaa

SEQ ID NO: 945660 - RNA, 19 nt, Homo sapiens
  misc_RNA (1)...(19): siRNA sense strand
acaaguagauuccgcaaau

SEQ ID NO: 945661 - RNA, 19 nt, Homo sapiens
  misc_RNA (1)...(19): siRNA sense strand
uaaauaauccugccuguca

SEQ ID NO: 945662 - RNA, 19 nt, Homo sapiens
  misc_RNA (1)...(19): siRNA sense strand
gaaagaaguguagaugauu

SEQ ID NO: 945663 - RNA, 19 nt, Homo sapiens
  misc_RNA (1)...(19): siRNA sense strand
gcuugucguuuacauauuu

SEQ ID NO: 945664 - RNA, 19 nt, Homo sapiens
  misc_RNA (1)...(19): siRNA sense strand
gaaccuaccucuggcuugu

SEQ ID NO: 945665 - RNA, 19 nt, Homo sapiens
  misc_RNA (1)...(19): siRNA sense strand
gguuagaacuggaguaucu

SEQ ID NO: 945666 - RNA, 19 nt, Homo sapiens
  misc_RNA (1)...(19): siRNA sense strand
agaaagaaguguagaugau

SEQ ID NO: 945667 - RNA, 19 nt, Homo sapiens
  misc_RNA (1)...(19): siRNA sense strand
aaagcuaugugaaccuuaa

SEQ ID NO: 945668 - RNA, 19 nt, Homo sapiens
  misc_RNA (1)...(19): siRNA sense strand
gagcaucacuagagcaucu

SEQ ID NO: 945669 - RNA, 19 nt, Homo sapiens
  misc_RNA (1)...(19): siRNA sense strand
gcaagcaguuccgaaugaa

SEQ ID NO: 945670 - RNA, 19 nt, Homo sapiens
  misc_RNA (1)...(19): siRNA sense strand
cgaauacccaccacaagua

SEQ ID NO: 945671 - RNA, 19 nt, Homo sapiens
  misc_RNA (1)...(19): siRNA sense strand
ucuaggaccagaauaaaua

SEQ ID NO: 945672 - RNA, 19 nt, Homo sapiens
  misc_RNA (1)...(19): siRNA sense strand
cagauaagcuuggaugagu

SEQ ID NO: 945673 - RNA, 19 nt, Homo sapiens
  misc_RNA (1)...(19): siRNA sense strand
gagaaugaaagcuauguga

SEQ ID NO: 945674 - RNA, 19 nt, Homo sapiens
  misc_RNA (1)...(19): siRNA sense strand
uggaguaucugacaaguag

SEQ ID NO: 945675 - RNA, 19 nt, Homo sapiens
  misc_RNA (1)...(19): siRNA sense strand
gaaacccaaagccaaagua

SEQ ID NO: 945676 - RNA, 19 nt, Homo sapiens
  misc_RNA (1)...(19): siRNA sense strand
gaaccugucguauauucuu

SEQ ID NO: 945677 - RNA, 19 nt, Homo sapiens
  misc_RNA (1)...(19): siRNA sense strand
aaaugcagauucaaacaug

SEQ ID NO: 945678 - RNA, 19 nt, Homo sapiens
  misc_RNA (1)...(19): siRNA sense strand
gaggaugugugauggagau

SEQ ID NO: 945679 - RNA, 19 nt, Homo sapiens
  misc_RNA (1)...(19): siRNA sense strand
ggagagaggaugaagaucu

SEQ ID NO: 945680 - RNA, 19 nt, Homo sapiens
  misc_RNA (1)...(19): siRNA sense strand
gaggaagagucggaaauag

SEQ ID NO: 945681 - RNA, 19 nt, Homo sapiens
  misc_RNA (1)...(19): siRNA sense strand
aaagaaguguagaugauuc

SEQ ID NO: 945682 - RNA, 19 nt, Homo sapiens
  misc_RNA (1)...(19): siRNA sense strand
ggaagaauagaaagaagug

SEQ ID NO: 945683 - RNA, 19 nt, Homo sapiens
  misc_RNA (1)...(19): siRNA sense strand
gaaucaagagaaagugaaa

SEQ ID NO: 945684 - RNA, 19 nt, Homo sapiens
  misc_RNA (1)...(19): siRNA sense strand
ucagagacauuuggagaga

SEQ ID NO: 945685 - RNA, 19 nt, Homo sapiens
  misc_RNA (1)...(19): siRNA sense strand
agaaagaauucagaacaga

SEQ ID NO: 945686 - RNA, 19 nt, Homo sapiens
  misc_RNA (1)...(19): siRNA sense strand
ggaagagucggaaauaguc

SEQ ID NO: 945687 - RNA, 19 nt, Homo sapiens
  misc_RNA (1)...(19): siRNA sense strand
gagaaucaagagaaaguga

SEQ ID NO: 945688 - RNA, 19 nt, Homo sapiens
  misc_RNA (1)...(19): siRNA sense strand
uuuggaauaugcuggcuua

SEQ ID NO: 945689 - RNA, 19 nt, Homo sapiens
  misc_RNA (1)...(19): siRNA sense strand
uaacgaauacccaccacaa

SEQ ID NO: 945690 - RNA, 19 nt, Homo sapiens
  misc_RNA (1)...(19): siRNA sense strand
gaaagcuaugugaaccuua

SEQ ID NO: 945691 - RNA, 19 nt, Homo sapiens
  misc_RNA (1)...(19): siRNA sense strand
uagccucaguggagccuua

SEQ ID NO: 945692 - RNA, 19 nt, Homo sapiens
  misc_RNA (1)...(19): siRNA sense strand
cuaaucaaauuccagaagu

SEQ ID NO: 945693 - RNA, 19 nt, Homo sapiens
  misc_RNA (1)...(19): siRNA sense strand
gaugugugauggagaugug

SEQ ID NO: 945694 - RNA, 19 nt, Homo sapiens
  misc_RNA (1)...(19): siRNA sense strand
ugcaagcaguuccgaauga

SEQ ID NO: 945695 - RNA, 19 nt, Homo sapiens
  misc_RNA (1)...(19): siRNA sense strand
cuacauaugacuucugaga

SEQ ID NO: 945696 - RNA, 19 nt, Homo sapiens
  misc_RNA (1)...(19): siRNA sense strand
ugaaagcuaugugaaccuu

SEQ ID NO: 945697 - RNA, 19 nt, Homo sapiens
  misc_RNA (1)...(19): siRNA sense strand
cggaaccugucguauauuc

SEQ ID NO: 945698 - RNA, 19 nt, Homo sapiens
  misc_RNA (1)...(19): siRNA sense strand
gaagaugaugagccugauu

SEQ ID NO: 945699 - RNA, 19 nt, Homo sapiens
  misc_RNA (1)...(19): siRNA sense strand
ccuagcaacaguaacauaa

SEQ ID NO: 945700 - RNA, 19 nt, Homo sapiens
  misc_RNA (1)...(19): siRNA sense strand
gaaugaaagcuaugugaac

SEQ ID NO: 945701 - RNA, 19 nt, Homo sapiens
  misc_RNA (1)...(19): siRNA sense strand
caacaguaacauaagcaaa

SEQ ID NO: 945702 - RNA, 19 nt, Homo sapiens
  misc_RNA (1)...(19): siRNA sense strand
ucacuagagcaucuccuua

SEQ ID NO: 945703 - RNA, 19 nt, Homo sapiens
  misc_RNA (1)...(19): siRNA sense strand
caaauuguuggaagaauag

SEQ ID NO: 945704 - RNA, 19 nt, Homo sapiens
  misc_RNA (1)...(19): siRNA sense strand
gcaagaacaagaugcugau

SEQ ID NO: 945705 - RNA, 19 nt, Homo sapiens
  misc_RNA (1)...(19): siRNA sense strand
uauagugacccuccuguga

SEQ ID NO: 945706 - RNA, 19 nt, Homo sapiens
  misc_RNA (1)...(19): siRNA sense strand
agaggaagagucggaaaua

SEQ ID NO: 945707 - RNA, 19 nt, Homo sapiens
  misc_RNA (1)...(19): siRNA sense strand
cuucggaaccugucguaua

SEQ ID NO: 945708 - RNA, 19 nt, Homo sapiens
  misc_RNA (1)...(19): siRNA sense strand
uagaaagaauucagaacag

SEQ ID NO: 945709 - RNA, 19 nt, Homo sapiens
  misc_RNA (1)...(19): siRNA sense strand
gggaggaggaagaugauga

SEQ ID NO: 945710 - RNA, 19 nt, Homo sapiens
  misc_RNA (1)...(19): siRNA sense strand
gccuuauguuccagaauuu

SEQ ID NO: 945711 - RNA, 19 nt, Homo sapiens
  misc_RNA (1)...(19): siRNA sense strand
ggaccagaauaaauaaucc

SEQ ID NO: 945712 - RNA, 19 nt, Homo sapiens
  misc_RNA (1)...(19): siRNA sense strand
ggaagaugaugagccugau

SEQ ID NO: 945713 - RNA, 19 nt, Homo sapiens
  misc_RNA (1)...(19): siRNA sense strand
agucggaaauagucaaguu

SEQ ID NO: 945714 - RNA, 19 nt, Homo sapiens
  misc_RNA (1)...(19): siRNA sense strand
aagcuccgcucguggcauu

SEQ ID NO: 945715 - RNA, 19 nt, Homo sapiens
  misc_RNA (1)...(19): siRNA sense strand
cuucagacucuacauauga

SEQ ID NO: 945716 - RNA, 19 nt, Homo sapiens
  misc_RNA (1)...(19): siRNA sense strand
uagaaagaaguguagauga

SEQ ID NO: 945717 - RNA, 19 nt, Homo sapiens
  misc_RNA (1)...(19): siRNA sense strand
agccuuauguuccagaauu

SEQ ID NO: 945718 - RNA, 19 nt, Homo sapiens
  misc_RNA (1)...(19): siRNA sense strand
ccucaaaggaaauuguaaa

SEQ ID NO: 945719 - RNA, 19 nt, Homo sapiens
  misc_RNA (1)...(19): siRNA sense strand
gauaugacuggcaggcaaa

SEQ ID NO: 945720 - RNA, 19 nt, Homo sapiens
  misc_RNA (1)...(19): siRNA sense strand
gaaguguagaugauucuca

SEQ ID NO: 945721 - RNA, 19 nt, Homo sapiens
  misc_RNA (1)...(19): siRNA sense strand
uucggaaccugucguauau

SEQ ID NO: 945722 - RNA, 19 nt, Homo sapiens
  misc_RNA (1)...(19): siRNA sense strand
gcuaugugaaccuuaagaa

SEQ ID NO: 945723 - RNA, 19 nt, Homo sapiens
  misc_RNA (1)...(19): siRNA sense strand
ugacgguccugcaccuguu

SEQ ID NO: 945724 - RNA, 19 nt, Homo sapiens
  misc_RNA (1)...(19): siRNA sense strand
uccugcaccuguuauagua

SEQ ID NO: 945725 - RNA, 19 nt, Homo sapiens
  misc_RNA (1)...(19): siRNA sense strand
gauaagcuuggaugagugu

SEQ ID NO: 945726 - RNA, 19 nt, Homo sapiens
  misc_RNA (1)...(19): siRNA sense strand
uaguagagaaugaaagcua

SEQ ID NO: 945727 - RNA, 19 nt, Homo sapiens
  misc_RNA (1)...(19): siRNA sense strand
gcaacaguaacauaagcaa

SEQ ID NO: 945728 - RNA, 19 nt, Homo sapiens
  misc_RNA (1)...(19): siRNA sense strand
cuaaagaccacaaauaucc

SEQ ID NO: 945729 - RNA, 19 nt, Homo sapiens
  misc_RNA (1)...(19): siRNA sense strand
gaaagugaaagcucuucuc

SEQ ID NO: 945730 - RNA, 19 nt, Homo sapiens
  misc_RNA (1)...(19): siRNA sense strand
acuuggauccuuuggaaua

SEQ ID NO: 945731 - RNA, 19 nt, Homo sapiens
  misc_RNA (1)...(19): siRNA sense strand
gaagagucggaaauaguca

SEQ ID NO: 945732 - RNA, 19 nt, Homo sapiens
  misc_RNA (1)...(19): siRNA sense strand
ggagccuuauguuccagaa

SEQ ID NO: 945733 - RNA, 19 nt, Homo sapiens
  misc_RNA (1)...(19): siRNA sense strand
gcaaauccaagccaaaaga

SEQ ID NO: 945734 - RNA, 19 nt, Homo sapiens
  misc_RNA (1)...(19): siRNA sense strand
uccgagaccugcaagaaca

SEQ ID NO: 945735 - RNA, 19 nt, Homo sapiens
  misc_RNA (1)...(19): siRNA sense strand
aguagagaaugaaagcuau

SEQ ID NO: 945736 - RNA, 19 nt, Homo sapiens
  misc_RNA (1)...(19): siRNA sense strand
gaauagaaagaaguguaga

SEQ ID NO: 945737 - RNA, 19 nt, Homo sapiens
  misc_RNA (1)...(19): siRNA sense strand
gaggcagucaaccagauaa

SEQ ID NO: 945738 - RNA, 19 nt, Homo sapiens
  misc_RNA (1)...(19): siRNA sense strand
ugaggcagucaaccagaua

SEQ ID NO: 945739 - RNA, 19 nt, Homo sapiens
  misc_RNA (1)...(19): siRNA sense strand
agaaugaaagcuaugugaa

SEQ ID NO: 945740 - RNA, 19 nt, Homo sapiens
  misc_RNA (1)...(19): siRNA sense strand
caaauuccagaaguugaaa

SEQ ID NO: 945741 - RNA, 19 nt, Homo sapiens
  misc_RNA (1)...(19): siRNA sense strand
cuaggaccagaauaaauaa

SEQ ID NO: 945742 - RNA, 19 nt, Homo sapiens
  misc_RNA (1)...(19): siRNA sense strand
agaacaagaugcugaugcu

SEQ ID NO: 945743 - RNA, 19 nt, Homo sapiens
  misc_RNA (1)...(19): siRNA sense strand
ugacauuugcggaaacuuc

SEQ ID NO: 945744 - RNA, 19 nt, Homo sapiens
  misc_RNA (1)...(19): siRNA sense strand
cugaguuucuuuaugacaa

SEQ ID NO: 945745 - RNA, 19 nt, Homo sapiens
  misc_RNA (1)...(19): siRNA sense strand
aaacuuuccagguaugguu

SEQ ID NO: 945746 - RNA, 19 nt, Homo sapiens
  misc_RNA (1)...(19): siRNA sense strand
caagcaguuccgaaugaaa

SEQ ID NO: 945747 - RNA, 19 nt, Homo sapiens
  misc_RNA (1)...(19): siRNA sense strand
cauaagcaaaggagaguca

SEQ ID NO: 945748 - RNA, 19 nt, Homo sapiens
  misc_RNA (1)...(19): siRNA sense strand
gaugcuggaucugaaagag

SEQ ID NO: 945749 - RNA, 19 nt, Homo sapiens
  misc_RNA (1)...(19): siRNA sense strand
aauaauccugccugucaua

SEQ ID NO: 945750 - RNA, 19 nt, Homo sapiens
  misc_RNA (1)...(19): siRNA sense strand
caaauaucccuaccaagcu

SEQ ID NO: 945751 - RNA, 19 nt, Homo sapiens
  misc_RNA (1)...(19): siRNA sense strand
ggaucaaaaugcagauuca

SEQ ID NO: 945752 - RNA, 19 nt, Homo sapiens
  misc_RNA (1)...(19): siRNA sense strand
ugacccuccugugaacuuu

SEQ ID NO: 945753 - RNA, 19 nt, Homo sapiens
  misc_RNA (1)...(19): siRNA sense strand
gucggaaauagucaaguua

SEQ ID NO: 945754 - RNA, 19 nt, Homo sapiens
  misc_RNA (1)...(19): siRNA sense strand
ggaaacccaaagccaaagu

SEQ ID NO: 945755 - RNA, 19 nt, Homo sapiens
  misc_RNA (1)...(19): siRNA sense strand
gauaacccuuuuagaggaa

SEQ ID NO: 945756 - RNA, 19 nt, Homo sapiens
  misc_RNA (1)...(19): siRNA sense strand
guuggaagaauagaaagaa

SEQ ID NO: 945757 - RNA, 19 nt, Homo sapiens
  misc_RNA (1)...(19): siRNA sense strand
ggaaagauguccuuaauug

SEQ ID NO: 945758 - RNA, 19 nt, Homo sapiens
  misc_RNA (1)...(19): siRNA sense strand
gaaauucgagagcaucuua

SEQ ID NO: 945759 - RNA, 19 nt, Homo sapiens
  misc_RNA (1)...(19): siRNA sense strand
agaaagauguugacaguga

SEQ ID NO: 945760 - RNA, 19 nt, Homo sapiens
  misc_RNA (1)...(19): siRNA sense strand
gcaagaagccuauguugau

SEQ ID NO: 945761 - RNA, 19 nt, Homo sapiens
  misc_RNA (1)...(19): siRNA sense strand
ucacauggcuccaccuuau

SEQ ID NO: 945762 - RNA, 19 nt, Homo sapiens
  misc_RNA (1)...(19): siRNA sense strand
gagcaaggcccaaggauga

SEQ ID NO: 945763 - RNA, 19 nt, Homo sapiens
  misc_RNA (1)...(19): siRNA sense strand
gguguugucucacuuauug

SEQ ID NO: 945764 - RNA, 19 nt, Homo sapiens
  misc_RNA (1)...(19): siRNA sense strand
caaagaagauccuaauacu

SEQ ID NO: 945765 - RNA, 19 nt, Homo sapiens
  misc_RNA (1)...(19): siRNA sense strand
gaaggagugucccagacua

SEQ ID NO: 945766 - RNA, 19 nt, Homo sapiens
  misc_RNA (1)...(19): siRNA sense strand
gcaacuacaagcccaaaua

SEQ ID NO: 945767 - RNA, 19 nt, Homo sapiens
  misc_RNA (1)...(19): siRNA sense strand
gaagaugaguucuauaagc

SEQ ID NO: 945768 - RNA, 19 nt, Homo sapiens
  misc_RNA (1)...(19): siRNA sense strand
ccagaaagauguugacagu

SEQ ID NO: 945769 - RNA, 19 nt, Homo sapiens
  misc_RNA (1)...(19): siRNA sense strand
gcacagagacaaagaagau

SEQ ID NO: 945770 - RNA, 19 nt, Homo sapiens
  misc_RNA (1)...(19): siRNA sense strand
ccaagaaccuggaacuuag

SEQ ID NO: 945771 - RNA, 19 nt, Homo sapiens
  misc_RNA (1)...(19): siRNA sense strand
gagaagaggccaauaguag

SEQ ID NO: 945772 - RNA, 19 nt, Homo sapiens
  misc_RNA (1)...(19): siRNA sense strand
gaggaaacccuugcacaua

SEQ ID NO: 945773 - RNA, 19 nt, Homo sapiens
  misc_RNA (1)...(19): siRNA sense strand
ugaagaagaggccauauuu

SEQ ID NO: 945774 - RNA, 19 nt, Homo sapiens
  misc_RNA (1)...(19): siRNA sense strand
aaacugagguccaaguaau

SEQ ID NO: 945775 - RNA, 19 nt, Homo sapiens
  misc_RNA (1)...(19): siRNA sense strand
gaugaugauuucagucuug

SEQ ID NO: 945776 - RNA, 19 nt, Homo sapiens
  misc_RNA (1)...(19): siRNA sense strand
ggguuucucuccuuauuaa

SEQ ID NO: 945777 - RNA, 19 nt, Homo sapiens
  misc_RNA (1)...(19): siRNA sense strand
cgaggucacuguugaauuc

SEQ ID NO: 945778 - RNA, 19 nt, Homo sapiens
  misc_RNA (1)...(19): siRNA sense strand
ggacaaauagagaagauug

SEQ ID NO: 945779 - RNA, 19 nt, Homo sapiens
  misc_RNA (1)...(19): siRNA sense strand
gaaagauguccuuaauuga

SEQ ID NO: 945780 - RNA, 19 nt, Homo sapiens
  misc_RNA (1)...(19): siRNA sense strand
gggcuaaacaucagacuaa

SEQ ID NO: 945781 - RNA, 19 nt, Homo sapiens
  misc_RNA (1)...(19): siRNA sense strand
caagaagccuauguugauu

SEQ ID NO: 945782 - RNA, 19 nt, Homo sapiens
  misc_RNA (1)...(19): siRNA sense strand
gcacagggcuaaacaucag

SEQ ID NO: 945783 - RNA, 19 nt, Homo sapiens
  misc_RNA (1)...(19): siRNA sense strand
guggaaagauguccuuaau

SEQ ID NO: 945784 - RNA, 19 nt, Homo sapiens
  misc_RNA (1)...(19): siRNA sense strand
ggagaagaggccaauagua

SEQ ID NO: 945785 - RNA, 19 nt, Homo sapiens
  misc_RNA (1)...(19): siRNA sense strand
cuaaaucccuguccugugu

SEQ ID NO: 945786 - RNA, 19 nt, Homo sapiens
  misc_RNA (1)...(19): siRNA sense strand
gaagaagaggccauauuug

SEQ ID NO: 945787 - RNA, 19 nt, Homo sapiens
  misc_RNA (1)...(19): siRNA sense strand
cugaagaguuugaagaauu

SEQ ID NO: 945788 - RNA, 19 nt, Homo sapiens
  misc_RNA (1)...(19): siRNA sense strand
uauaagcaguccuggguuu

SEQ ID NO: 945789 - RNA, 19 nt, Homo sapiens
  misc_RNA (1)...(19): siRNA sense strand
gggacgaggucacuguuga

SEQ ID NO: 945790 - RNA, 19 nt, Homo sapiens
  misc_RNA (1)...(19): siRNA sense strand
gaaagauguugacagugau

SEQ ID NO: 945791 - RNA, 19 nt, Homo sapiens
  misc_RNA (1)...(19): siRNA sense strand
gugauagggucaaacaaga

SEQ ID NO: 945792 - RNA, 19 nt, Homo sapiens
  misc_RNA (1)...(19): siRNA sense strand
ugaagaguuugaagaauuc

SEQ ID NO: 945793 - RNA, 19 nt, Homo sapiens
  misc_RNA (1)...(19): siRNA sense strand
gacaaagaagauccuaaua

SEQ ID NO: 945794 - RNA, 19 nt, Homo sapiens
  misc_RNA (1)...(19): siRNA sense strand
ggguggagcuucagcaauc

SEQ ID NO: 945795 - RNA, 19 nt, Homo sapiens
  misc_RNA (1)...(19): siRNA sense strand
gaucauggcccagggaaga

SEQ ID NO: 945796 - RNA, 19 nt, Homo sapiens
  misc_RNA (1)...(19): siRNA sense strand
acacacugauugccaacua

SEQ ID NO: 945797 - RNA, 19 nt, Homo sapiens
  misc_RNA (1)...(19): siRNA sense strand
gcagcugacuggaauaagg

SEQ ID NO: 945798 - RNA, 19 nt, Homo sapiens
  misc_RNA (1)...(19): siRNA sense strand
gcagcugcauacaauguga

SEQ ID NO: 945799 - RNA, 19 nt, Homo sapiens
  misc_RNA (1)...(19): siRNA sense strand
gagaugaggccugcuuuga

SEQ ID NO: 945800 - RNA, 19 nt, Homo sapiens
  misc_RNA (1)...(19): siRNA sense strand
gaagaggccaauaguagau

SEQ ID NO: 945801 - RNA, 19 nt, Homo sapiens
  misc_RNA (1)...(19): siRNA sense strand
gaggaggaagucauuauug

SEQ ID NO: 945802 - RNA, 19 nt, Homo sapiens
  misc_RNA (1)...(19): siRNA sense strand
gaaaauugguucugaagag

SEQ ID NO: 945803 - RNA, 19 nt, Homo sapiens
  misc_RNA (1)...(19): siRNA sense strand
ggaaacccuugcacauagu

SEQ ID NO: 945804 - RNA, 19 nt, Homo sapiens
  misc_RNA (1)...(19): siRNA sense strand
cccaagaaccuggaacuua

SEQ ID NO: 945805 - RNA, 19 nt, Homo sapiens
  misc_RNA (1)...(19): siRNA sense strand
cuaagggccugucuaugga

SEQ ID NO: 945806 - RNA, 19 nt, Homo sapiens
  misc_RNA (1)...(19): siRNA sense strand
gagcagcugacuggaauaa

SEQ ID NO: 945807 - RNA, 19 nt, Homo sapiens
  misc_RNA (1)...(19): siRNA sense strand
cugaaaugcuugaggcaaa

SEQ ID NO: 945808 - RNA, 19 nt, Homo sapiens
  misc_RNA (1)...(19): siRNA sense strand
gaauucaaaccuggucuuu

SEQ ID NO: 945809 - RNA, 19 nt, Homo sapiens
  misc_RNA (1)...(19): siRNA sense strand
agugauagguucagagaug

SEQ ID NO: 945810 - RNA, 19 nt, Homo sapiens
  misc_RNA (1)...(19): siRNA sense strand
cugaagaugaguucuauaa

SEQ ID NO: 945811 - RNA, 19 nt, Homo sapiens
  misc_RNA (1)...(19): siRNA sense strand
gcaggaaucuuugcuucag

SEQ ID NO: 945812 - RNA, 19 nt, Homo sapiens
  misc_RNA (1)...(19): siRNA sense strand
gaaacucagggcccagaaa

SEQ ID NO: 945813 - RNA, 19 nt, Homo sapiens
  misc_RNA (1)...(19): siRNA sense strand
cauacaaugugagcugaaa

SEQ ID NO: 945814 - RNA, 19 nt, Homo sapiens
  misc_RNA (1)...(19): siRNA sense strand
gugggucucuuuaacauag

SEQ ID NO: 945815 - RNA, 19 nt, Homo sapiens
  misc_RNA (1)...(19): siRNA sense strand
aaacaugauugagacauuc

SEQ ID NO: 945816 - RNA, 19 nt, Homo sapiens
  misc_RNA (1)...(19): siRNA sense strand
aagaugaguucuauaagca

SEQ ID NO: 945817 - RNA, 19 nt, Homo sapiens
  misc_RNA (1)...(19): siRNA sense strand
aguaauggguggugcaaga

SEQ ID NO: 945818 - RNA, 19 nt, Homo sapiens
  misc_RNA (1)...(19): siRNA sense strand
caacuacaagcccaaauag

SEQ ID NO: 945819 - RNA, 19 nt, Homo sapiens
  misc_RNA (1)...(19): siRNA sense strand
gcaauggguaugagaagug

SEQ ID NO: 945820 - RNA, 19 nt, Homo sapiens
  misc_RNA (1)...(19): siRNA sense strand
guccugaguucacauuuca

SEQ ID NO: 945821 - RNA, 19 nt, Homo sapiens
  misc_RNA (1)...(19): siRNA sense strand
guagguggcgcucguucua

SEQ ID NO: 945822 - RNA, 19 nt, Homo sapiens
  misc_RNA (1)...(19): siRNA sense strand
gcuauugaauuugucugaa

SEQ ID NO: 945823 - RNA, 19 nt, Homo sapiens
  misc_RNA (1)...(19): siRNA sense strand
gaguucacauuucaguaug

SEQ ID NO: 945824 - RNA, 19 nt, Homo sapiens
  misc_RNA (1)...(19): siRNA sense strand
gagucuggaucaguuacua

SEQ ID NO: 945825 - RNA, 19 nt, Homo sapiens
  misc_RNA (1)...(19): siRNA sense strand
aagauguccuuaauugaug

SEQ ID NO: 945826 - RNA, 19 nt, Homo sapiens
  misc_RNA (1)...(19): siRNA sense strand
cuaugacuauugacuauca

SEQ ID NO: 945827 - RNA, 19 nt, Homo sapiens
  misc_RNA (1)...(19): siRNA sense strand
aggaaacccuugcacauag

SEQ ID NO: 945828 - RNA, 19 nt, Homo sapiens
  misc_RNA (1)...(19): siRNA sense strand
gagauuucauucgagauuc

SEQ ID NO: 945829 - RNA, 19 nt, Homo sapiens
  misc_RNA (1)...(19): siRNA sense strand
aaacugaggcccaagcaau

SEQ ID NO: 945830 - RNA, 19 nt, Homo sapiens
  misc_RNA (1)...(19): siRNA sense strand
aaacggaggcucaaggaau

SEQ ID NO: 945831 - RNA, 19 nt, Homo sapiens
  misc_RNA (1)...(19): siRNA sense strand
ucagggaggaggcaaauau

SEQ ID NO: 945832 - RNA, 19 nt, Homo sapiens
  misc_RNA (1)...(19): siRNA sense strand
uguggaugcugaaaccuuu

SEQ ID NO: 945833 - RNA, 19 nt, Homo sapiens
  misc_RNA (1)...(19): siRNA sense strand
agacaaagaagauccuaau

SEQ ID NO: 945834 - RNA, 19 nt, Homo sapiens
  misc_RNA (1)...(19): siRNA sense strand
ucacuaugacuauugacua

SEQ ID NO: 945835 - RNA, 19 nt, Homo sapiens
  misc_RNA (1)...(19): siRNA sense strand
gagcuucagcaaucuguga

SEQ ID NO: 945836 - RNA, 19 nt, Homo sapiens
  misc_RNA (1)...(19): siRNA sense strand
ggaggccucuaaugagucu

SEQ ID NO: 945837 - RNA, 19 nt, Homo sapiens
  misc_RNA (1)...(19): siRNA sense strand
gaggugggacaacaaaguu

SEQ ID NO: 945838 - RNA, 19 nt, Homo sapiens
  misc_RNA (1)...(19): siRNA sense strand
cacuaugacuauugacuau

SEQ ID NO: 945839 - RNA, 19 nt, Homo sapiens
  misc_RNA (1)...(19): siRNA sense strand
aaaccuugcuuaauuaucc

SEQ ID NO: 945840 - RNA, 19 nt, Homo sapiens
  misc_RNA (1)...(19): siRNA sense strand
cgagauuucauucgagauu

SEQ ID NO: 945841 - RNA, 19 nt, Homo sapiens
  misc_RNA (1)...(19): siRNA sense strand
ggacgaggucacuguugaa

SEQ ID NO: 945842 - RNA, 19 nt, Homo sapiens
  misc_RNA (1)...(19): siRNA sense strand
aauacugccuugaaacuca

SEQ ID NO: 945843 - RNA, 19 nt, Homo sapiens
  misc_RNA (1)...(19): siRNA sense strand
caagcaagaagccuauguu

SEQ ID NO: 945844 - RNA, 19 nt, Homo sapiens
  misc_RNA (1)...(19): siRNA sense strand
uccaagcucaggacaaaua

SEQ ID NO: 945845 - RNA, 19 nt, Homo sapiens
  misc_RNA (1)...(19): siRNA sense strand
acauagaagagacaaauga

SEQ ID NO: 945846 - RNA, 19 nt, Homo sapiens
  misc_RNA (1)...(19): siRNA sense strand
guccggguuucucuccuua

SEQ ID NO: 945847 - RNA, 19 nt, Homo sapiens
  misc_RNA (1)...(19): siRNA sense strand
auucauaugucaagugugu

SEQ ID NO: 945848 - RNA, 19 nt, Homo sapiens
  misc_RNA (1)...(19): siRNA sense strand
caauuuacccgagauuuca

SEQ ID NO: 945849 - RNA, 19 nt, Homo sapiens
  misc_RNA (1)...(19): siRNA sense strand
acaaagaagauccuaauac

SEQ ID NO: 945850 - RNA, 19 nt, Homo sapiens
  misc_RNA (1)...(19): siRNA sense strand
caggacaaauagagaagau

SEQ ID NO: 945851 - RNA, 19 nt, Homo sapiens
  misc_RNA (1)...(19): siRNA sense strand
gcucaggacaaauagagaa

SEQ ID NO: 945852 - RNA, 19 nt, Homo sapiens
  misc_RNA (1)...(19): siRNA sense strand
gagacaaagaagauccuaa

SEQ ID NO: 945853 - RNA, 19 nt, Homo sapiens
  misc_RNA (1)...(19): siRNA sense strand
ggugggacaacaaaguuaa

SEQ ID NO: 945854 - RNA, 19 nt, Homo sapiens
  misc_RNA (1)...(19): siRNA sense strand
caccuuauccaaaucuaaa

SEQ ID NO: 945855 - RNA, 19 nt, Homo sapiens
  misc_RNA (1)...(19): siRNA sense strand
cuuagacaccucacuauga

SEQ ID NO: 945856 - RNA, 19 nt, Homo sapiens
  misc_RNA (1)...(19): siRNA sense strand
ggccugagagagagaauga

SEQ ID NO: 945857 - RNA, 19 nt, Homo sapiens
  misc_RNA (1)...(19): siRNA sense strand
gcaagggugugcacugugu

SEQ ID NO: 945858 - RNA, 19 nt, Homo sapiens
  misc_RNA (1)...(19): siRNA sense strand
gaacagaagacaguggauu

SEQ ID NO: 945859 - RNA, 19 nt, Homo sapiens
  misc_RNA (1)...(19): siRNA sense strand
gcacagacagaacagaaga

SEQ ID NO: 945860 - RNA, 19 nt, Homo sapiens
  misc_RNA (1)...(19): siRNA sense strand
ccaggaagcccagaaaguu

SEQ ID NO: 945861 - RNA, 19 nt, Homo sapiens
  misc_RNA (1)...(19): siRNA sense strand
gcgcaagggugugcacugu

SEQ ID NO: 945862 - RNA, 19 nt, Homo sapiens
  misc_RNA (1)...(19): siRNA sense strand
aacagaagacaguggauua

SEQ ID NO: 945863 - RNA, 19 nt, Homo sapiens
  misc_RNA (1)...(19): siRNA sense strand
gcucacagccuccaaagac

SEQ ID NO: 945864 - RNA, 19 nt, Homo sapiens
  misc_RNA (1)...(19): siRNA sense strand
agaagacaguggauuagca

SEQ ID NO: 945865 - RNA, 19 nt, Homo sapiens
  misc_RNA (1)...(19): siRNA sense strand
agacagaacagaagacagu

SEQ ID NO: 945866 - RNA, 19 nt, Homo sapiens
  misc_RNA (1)...(19): siRNA sense strand
ggugugcacugugucaugu

SEQ ID NO: 945867 - RNA, 19 nt, Homo sapiens
  misc_RNA (1)...(19): siRNA sense strand
ccaaagacagcaccaaggu

SEQ ID NO: 945868 - RNA, 19 nt, Homo sapiens
  misc_RNA (1)...(19): siRNA sense strand
ggacccaggcacagacaga

SEQ ID NO: 945869 - RNA, 19 nt, Homo sapiens
  misc_RNA (1)...(19): siRNA sense strand
caggaagcccagaaaguuc

SEQ ID NO: 945870 - RNA, 19 nt, Homo sapiens
  misc_RNA (1)...(19): siRNA sense strand
gagaggaggucuaccauuu

SEQ ID NO: 945871 - RNA, 19 nt, Homo sapiens
  misc_RNA (1)...(19): siRNA sense strand
gaaccacaaugaucagaau

SEQ ID NO: 945872 - RNA, 19 nt, Homo sapiens
  misc_RNA (1)...(19): siRNA sense strand
gaagaggauucuagagucu

SEQ ID NO: 945873 - RNA, 19 nt, Homo sapiens
  misc_RNA (1)...(19): siRNA sense strand
ggacuugcccuucauguuc

SEQ ID NO: 945874 - RNA, 19 nt, Homo sapiens
  misc_RNA (1)...(19): siRNA sense strand
ggacugcaccugugacguu

SEQ ID NO: 945875 - RNA, 19 nt, Homo sapiens
  misc_RNA (1)...(19): siRNA sense strand
ggugcagugucauguauuu

SEQ ID NO: 945876 - RNA, 19 nt, Homo sapiens
  misc_RNA (1)...(19): siRNA sense strand
guauuucacucgaggauuc

SEQ ID NO: 945877 - RNA, 19 nt, Homo sapiens
  misc_RNA (1)...(19): siRNA sense strand
ggagcacccuuuguccuuu

SEQ ID NO: 945878 - RNA, 19 nt, Homo sapiens
  misc_RNA (1)...(19): siRNA sense strand
gaaaaugaccugucuguuc

SEQ ID NO: 945879 - RNA, 19 nt, Homo sapiens
  misc_RNA (1)...(19): siRNA sense strand
uagcagcccucuaugacaa

SEQ ID NO: 945880 - RNA, 19 nt, Homo sapiens
  misc_RNA (1)...(19): siRNA sense strand
gaaacacaguauuacacau

SEQ ID NO: 945881 - RNA, 19 nt, Homo sapiens
  misc_RNA (1)...(19): siRNA sense strand
ggaaacacaguauuacaca

SEQ ID NO: 945882 - RNA, 19 nt, Homo sapiens
  misc_RNA (1)...(19): siRNA sense strand
ggagacggcgcugcacaua

SEQ ID NO: 945883 - RNA, 19 nt, Homo sapiens
  misc_RNA (1)...(19): siRNA sense strand
ggucuccucugauaaacga

SEQ ID NO: 945884 - RNA, 19 nt, Homo sapiens
  misc_RNA (1)...(19): siRNA sense strand
gagcacccuuuguccuuug

SEQ ID NO: 945885 - RNA, 19 nt, Homo sapiens
  misc_RNA (1)...(19): siRNA sense strand
aaucuuggacugaaccuua

SEQ ID NO: 945886 - RNA, 19 nt, Homo sapiens
  misc_RNA (1)...(19): siRNA sense strand
cuuguggucuccucugaua

SEQ ID NO: 945887 - RNA, 19 nt, Homo sapiens
  misc_RNA (1)...(19): siRNA sense strand
ccacacugcucaugcucaa

SEQ ID NO: 945888 - RNA, 19 nt, Homo sapiens
  misc_RNA (1)...(19): siRNA sense strand
ccugggaaacacaguauua

SEQ ID NO: 945889 - RNA, 19 nt, Homo sapiens
  misc_RNA (1)...(19): siRNA sense strand
guucagcauugucaacuuc

SEQ ID NO: 945890 - RNA, 19 nt, Homo sapiens
  misc_RNA (1)...(19): siRNA sense strand
caacuacgacguggacuug

SEQ ID NO: 945891 - RNA, 19 nt, Homo sapiens
  misc_RNA (1)...(19): siRNA sense strand
ugagacacgugaagauauc

SEQ ID NO: 945892 - RNA, 19 nt, Homo sapiens
  misc_RNA (1)...(19): siRNA sense strand
gcacugcacaucgcuguug

SEQ ID NO: 945893 - RNA, 19 nt, Homo sapiens
  misc_RNA (1)...(19): siRNA sense strand
ggagaggaggucuaccauu

SEQ ID NO: 945894 - RNA, 19 nt, Homo sapiens
  misc_RNA (1)...(19): siRNA sense strand
uuggagaccuaaugcguuu

SEQ ID NO: 945895 - RNA, 19 nt, Homo sapiens
  misc_RNA (1)...(19): siRNA sense strand
guuggugccucucgcuauu

SEQ ID NO: 945896 - RNA, 19 nt, Homo sapiens
  misc_RNA (1)...(19): siRNA sense strand
uacaugaucugcuuuacca

SEQ ID NO: 945897 - RNA, 19 nt, Homo sapiens
  misc_RNA (1)...(19): siRNA sense strand
cauccuggcugccuuguac

SEQ ID NO: 945898 - RNA, 19 nt, Homo sapiens
  misc_RNA (1)...(19): siRNA sense strand
ugggagauccuucgucaaa

SEQ ID NO: 945899 - RNA, 19 nt, Homo sapiens
  misc_RNA (1)...(19): siRNA sense strand
gacguggacuugcccuuca

SEQ ID NO: 945900 - RNA, 19 nt, Homo sapiens
  misc_RNA (1)...(19): siRNA sense strand
uaugagacacgugaagaua

SEQ ID NO: 945901 - RNA, 19 nt, Homo sapiens
  misc_RNA (1)...(19): siRNA sense strand
gcacuguucaccaccuuug

SEQ ID NO: 945902 - RNA, 19 nt, Homo sapiens
  misc_RNA (1)...(19): siRNA sense strand
aaugaccugucuguucuua

SEQ ID NO: 945903 - RNA, 19 nt, Homo sapiens
  misc_RNA (1)...(19): siRNA sense strand
gagcauccaucugagaaac

SEQ ID NO: 945904 - RNA, 19 nt, Homo sapiens
  misc_RNA (1)...(19): siRNA sense strand
guugugaaccagaauguga

SEQ ID NO: 945905 - RNA, 19 nt, Homo sapiens
  misc_RNA (1)...(19): siRNA sense strand
guggucaucuugggauuug

SEQ ID NO: 945906 - RNA, 19 nt, Homo sapiens
  misc_RNA (1)...(19): siRNA sense strand
gguggcaaccgcacucauu

SEQ ID NO: 945907 - RNA, 19 nt, Homo sapiens
  misc_RNA (1)...(19): siRNA sense strand
gccauuccaugucaucauc

SEQ ID NO: 945908 - RNA, 19 nt, Homo sapiens
  misc_RNA (1)...(19): siRNA sense strand
gacuugcccuucauguuca

SEQ ID NO: 945909 - RNA, 19 nt, Homo sapiens
  misc_RNA (1)...(19): siRNA sense strand
ucuagagucuccacugcuu

SEQ ID NO: 945910 - RNA, 19 nt, Homo sapiens
  misc_RNA (1)...(19): siRNA sense strand
gaacucagacaaggaggau

SEQ ID NO: 945911 - RNA, 19 nt, Homo sapiens
  misc_RNA (1)...(19): siRNA sense strand
gaucugugggugcgaauuc

SEQ ID NO: 945912 - RNA, 19 nt, Homo sapiens
  misc_RNA (1)...(19): siRNA sense strand
gagcauggagcugacauca

SEQ ID NO: 945913 - RNA, 19 nt, Homo sapiens
  misc_RNA (1)...(19): siRNA sense strand
ugaccugucuguucuuagg

SEQ ID NO: 945914 - RNA, 19 nt, Homo sapiens
  misc_RNA (1)...(19): siRNA sense strand
ugaccuccauucucuacga

SEQ ID NO: 945915 - RNA, 19 nt, Homo sapiens
  misc_RNA (1)...(19): siRNA sense strand
uggcuggaguggaggguaa

SEQ ID NO: 945916 - RNA, 19 nt, Homo sapiens
  misc_RNA (1)...(19): siRNA sense strand
aaacacaguauuacacauc

SEQ ID NO: 945917 - RNA, 19 nt, Homo sapiens
  misc_RNA (1)...(19): siRNA sense strand
gggagcacccuuuguccuu

SEQ ID NO: 945918 - RNA, 19 nt, Homo sapiens
  misc_RNA (1)...(19): siRNA sense strand
ucuacgaccucacagagau

SEQ ID NO: 945919 - RNA, 19 nt, Homo sapiens
  misc_RNA (1)...(19): siRNA sense strand
acaaccugcugcuguccua

SEQ ID NO: 945920 - RNA, 19 nt, Homo sapiens
  misc_RNA (1)...(19): siRNA sense strand
ucaccaucaugauccagaa

SEQ ID NO: 945921 - RNA, 19 nt, Homo sapiens
  misc_RNA (1)...(19): siRNA sense strand
ggagcauccaucugagaaa

SEQ ID NO: 945922 - RNA, 19 nt, Homo sapiens
  misc_RNA (1)...(19): siRNA sense strand
uccagcaccugaugcagaa

SEQ ID NO: 945923 - RNA, 19 nt, Homo sapiens
  misc_RNA (1)...(19): siRNA sense strand
guugagaaccacaaugauc

SEQ ID NO: 945924 - RNA, 19 nt, Homo sapiens
  misc_RNA (1)...(19): siRNA sense strand
agacggcgcugcacauagc

SEQ ID NO: 945925 - RNA, 19 nt, Homo sapiens
  misc_RNA (1)...(19): siRNA sense strand
ucaaguggaacaaguaugg

SEQ ID NO: 945926 - RNA, 19 nt, Homo sapiens
  misc_RNA (1)...(19): siRNA sense strand
gcaaccucaucuacuuugg

SEQ ID NO: 945927 - RNA, 19 nt, Homo sapiens
  misc_RNA (1)...(19): siRNA sense strand
aaaaugaccugucuguucu

SEQ ID NO: 945928 - RNA, 19 nt, Homo sapiens
  misc_RNA (1)...(19): siRNA sense strand
ugaugcaccugccaacuac

SEQ ID NO: 945929 - RNA, 19 nt, Homo sapiens
  misc_RNA (1)...(19): siRNA sense strand
gagaggcucgccaaauucu

SEQ ID NO: 945930 - RNA, 19 nt, Homo sapiens
  misc_RNA (1)...(19): siRNA sense strand
gaggguaacacugugaugu

SEQ ID NO: 945931 - RNA, 19 nt, Homo sapiens
  misc_RNA (1)...(19): siRNA sense strand
uggacaagcuucauaugcu

SEQ ID NO: 945932 - RNA, 19 nt, Homo sapiens
  misc_RNA (1)...(19): siRNA sense strand
gagcauccaaggaaaauga

SEQ ID NO: 945933 - RNA, 19 nt, Homo sapiens
  misc_RNA (1)...(19): siRNA sense strand
gaaacuucugcccuccuuu

SEQ ID NO: 945934 - RNA, 19 nt, Homo sapiens
  misc_RNA (1)...(19): siRNA sense strand
cuucgagcauccaaggaaa

SEQ ID NO: 945935 - RNA, 19 nt, Homo sapiens
  misc_RNA (1)...(19): siRNA sense strand
gcuucaaguggaacaagua

SEQ ID NO: 945936 - RNA, 19 nt, Homo sapiens
  misc_RNA (1)...(19): siRNA sense strand
cccgcaaccucaucuacuu

SEQ ID NO: 945937 - RNA, 19 nt, Homo sapiens
  misc_RNA (1)...(19): siRNA sense strand
caaggaaaaugaccugucu

SEQ ID NO: 945938 - RNA, 19 nt, Homo sapiens
  misc_RNA (1)...(19): siRNA sense strand
caccuggacaagcuucaua

SEQ ID NO: 945939 - RNA, 19 nt, Homo sapiens
  misc_RNA (1)...(19): siRNA sense strand
acaggaggccuaugagaca

SEQ ID NO: 945940 - RNA, 19 nt, Homo sapiens
  misc_RNA (1)...(19): siRNA sense strand
ucaagaacucagacaagga

SEQ ID NO: 945941 - RNA, 19 nt, Homo sapiens
  misc_RNA (1)...(19): siRNA sense strand
gcuucgagcauccaaggaa

SEQ ID NO: 945942 - RNA, 19 nt, Homo sapiens
  misc_RNA (1)...(19): siRNA sense strand
aaacuucugcccuccuuuc

SEQ ID NO: 945943 - RNA, 19 nt, Homo sapiens
  misc_RNA (1)...(19): siRNA sense strand
guucaccaccuuugagcuu

SEQ ID NO: 945944 - RNA, 19 nt, Homo sapiens
  misc_RNA (1)...(19): siRNA sense strand
ggauuugccuccgcguucu

SEQ ID NO: 945945 - RNA, 19 nt, Homo sapiens
  misc_RNA (1)...(19): siRNA sense strand
gcuggugcagugucaugua

SEQ ID NO: 945946 - RNA, 19 nt, Homo sapiens
  misc_RNA (1)...(19): siRNA sense strand
guucuuaggcaacuucuac

SEQ ID NO: 945947 - RNA, 19 nt, Homo sapiens
  misc_RNA (1)...(19): siRNA sense strand
ucgugcggcugcucauuga

SEQ ID NO: 945948 - RNA, 19 nt, Homo sapiens
  misc_RNA (1)...(19): siRNA sense strand
ccaucaugauccagaagau

SEQ ID NO: 945949 - RNA, 19 nt, Homo sapiens
  misc_RNA (1)...(19): siRNA sense strand
cuacaggaggccuaugaga

SEQ ID NO: 945950 - RNA, 19 nt, Homo sapiens
  misc_RNA (1)...(19): siRNA sense strand
uguggucuccucugauaaa

SEQ ID NO: 945951 - RNA, 19 nt, Homo sapiens
  misc_RNA (1)...(19): siRNA sense strand
gggaaacacaguauuacac

SEQ ID NO: 945952 - RNA, 19 nt, Homo sapiens
  misc_RNA (1)...(19): siRNA sense strand
gcauccaucugagaaacag

SEQ ID NO: 945953 - RNA, 19 nt, Homo sapiens
  misc_RNA (1)...(19): siRNA sense strand
acucagacaaggaggauga

SEQ ID NO: 945954 - RNA, 19 nt, Homo sapiens
  misc_RNA (1)...(19): siRNA sense strand
gcucaugcucaacuuguuc

SEQ ID NO: 945955 - RNA, 19 nt, Homo sapiens
  misc_RNA (1)...(19): siRNA sense strand
cugggucccuucaccauca

SEQ ID NO: 945956 - RNA, 19 nt, Homo sapiens
  misc_RNA (1)...(19): siRNA sense strand
gcagugucauguauuucac

SEQ ID NO: 945957 - RNA, 19 nt, Homo sapiens
  misc_RNA (1)...(19): siRNA sense strand
gauguuccagcaccugaug

SEQ ID NO: 945958 - RNA, 19 nt, Homo sapiens
  misc_RNA (1)...(19): siRNA sense strand
ccuagagauuccagacauc

SEQ ID NO: 945959 - RNA, 19 nt, Homo sapiens
  misc_RNA (1)...(19): siRNA sense strand
accaggagcauccaucuga

SEQ ID NO: 945960 - RNA, 19 nt, Homo sapiens
  misc_RNA (1)...(19): siRNA sense strand
gagaaccacaaugaucaga

SEQ ID NO: 945961 - RNA, 19 nt, Homo sapiens
  misc_RNA (1)...(19): siRNA sense strand
gcugguuccugcggguuga

SEQ ID NO: 945962 - RNA, 19 nt, Homo sapiens
  misc_RNA (1)...(19): siRNA sense strand
uugaugcaccugccaacua

SEQ ID NO: 945963 - RNA, 19 nt, Homo sapiens
  misc_RNA (1)...(19): siRNA sense strand
cuggugcagugucauguau

SEQ ID NO: 945964 - RNA, 19 nt, Homo sapiens
  misc_RNA (1)...(19): siRNA sense strand
uaccugcucuacaugaucu

SEQ ID NO: 945965 - RNA, 19 nt, Homo sapiens
  misc_RNA (1)...(19): siRNA sense strand
ucuuugagcccaccacaug

SEQ ID NO: 945966 - RNA, 19 nt, Homo sapiens
  misc_RNA (1)...(19): siRNA sense strand
ccgcaaccucaucuacuuu

SEQ ID NO: 945967 - RNA, 19 nt, Homo sapiens
  misc_RNA (1)...(19): siRNA sense strand
ggagauccuucgucaaaac

SEQ ID NO: 945968 - RNA, 19 nt, Homo sapiens
  misc_RNA (1)...(19): siRNA sense strand
cagaggacccaaccagucu

SEQ ID NO: 945969 - RNA, 19 nt, Homo sapiens
  misc_RNA (1)...(19): siRNA sense strand
gagacggcgcugcacauag

SEQ ID NO: 945970 - RNA, 19 nt, Homo sapiens
  misc_RNA (1)...(19): siRNA sense strand
gaacaagcaugccuaaaua

SEQ ID NO: 945971 - RNA, 19 nt, Homo sapiens
  misc_RNA (1)...(19): siRNA sense strand
ggaauaaccuggauauaaa

SEQ ID NO: 945972 - RNA, 19 nt, Homo sapiens
  misc_RNA (1)...(19): siRNA sense strand
gcacagcucuggccuuuaa

SEQ ID NO: 945973 - RNA, 19 nt, Homo sapiens
  misc_RNA (1)...(19): siRNA sense strand
ggaaacagguucaaucuug

SEQ ID NO: 945974 - RNA, 19 nt, Homo sapiens
  misc_RNA (1)...(19): siRNA sense strand
ggaauuagcucaucagcaa

SEQ ID NO: 945975 - RNA, 19 nt, Homo sapiens
  misc_RNA (1)...(19): siRNA sense strand
gaaaugcacuuacaagaug

SEQ ID NO: 945976 - RNA, 19 nt, Homo sapiens
  misc_RNA (1)...(19): siRNA sense strand
gcaaagaguugaagaugaa

SEQ ID NO: 945977 - RNA, 19 nt, Homo sapiens
  misc_RNA (1)...(19): siRNA sense strand
aaagagagcugaaaguaaa

SEQ ID NO: 945978 - RNA, 19 nt, Homo sapiens
  misc_RNA (1)...(19): siRNA sense strand
ccugaaagcucuaguauau

SEQ ID NO: 945979 - RNA, 19 nt, Homo sapiens
  misc_RNA (1)...(19): siRNA sense strand
gauauaaccucccagcuau

SEQ ID NO: 945980 - RNA, 19 nt, Homo sapiens
  misc_RNA (1)...(19): siRNA sense strand
uaagaagacuggaugauga

SEQ ID NO: 945981 - RNA, 19 nt, Homo sapiens
  misc_RNA (1)...(19): siRNA sense strand
gaaggaagcugaaggaaaa

SEQ ID NO: 945982 - RNA, 19 nt, Homo sapiens
  misc_RNA (1)...(19): siRNA sense strand
aggcagcucuuuagaauua

SEQ ID NO: 945983 - RNA, 19 nt, Homo sapiens
  misc_RNA (1)...(19): siRNA sense strand
gaagauuugcccaauaaua

SEQ ID NO: 945984 - RNA, 19 nt, Homo sapiens
  misc_RNA (1)...(19): siRNA sense strand
uaugagagaucgagaaauu

SEQ ID NO: 945985 - RNA, 19 nt, Homo sapiens
  misc_RNA (1)...(19): siRNA sense strand
ccuagaaccucacaauuaa

SEQ ID NO: 945986 - RNA, 19 nt, Homo sapiens
  misc_RNA (1)...(19): siRNA sense strand
gaagaaacaagaagagaaa

SEQ ID NO: 945987 - RNA, 19 nt, Homo sapiens
  misc_RNA (1)...(19): siRNA sense strand
gaggcuagcugcugugaaa

SEQ ID NO: 945988 - RNA, 19 nt, Homo sapiens
  misc_RNA (1)...(19): siRNA sense strand
ggaaugaugaauuggauua

SEQ ID NO: 945989 - RNA, 19 nt, Homo sapiens
  misc_RNA (1)...(19): siRNA sense strand
ugaauuaccagauggauua

SEQ ID NO: 945990 - RNA, 19 nt, Homo sapiens
  misc_RNA (1)...(19): siRNA sense strand
cugcucagcuguaaucuua

SEQ ID NO: 945991 - RNA, 19 nt, Homo sapiens
  misc_RNA (1)...(19): siRNA sense strand
gcagacaguugaagauaug

SEQ ID NO: 945992 - RNA, 19 nt, Homo sapiens
  misc_RNA (1)...(19): siRNA sense strand
gcagaugccuauagacgaa

SEQ ID NO: 945993 - RNA, 19 nt, Homo sapiens
  misc_RNA (1)...(19): siRNA sense strand
cagauucagucuuuacaua

SEQ ID NO: 945994 - RNA, 19 nt, Homo sapiens
  misc_RNA (1)...(19): siRNA sense strand
aaagaaagcugaauauucg

SEQ ID NO: 945995 - RNA, 19 nt, Homo sapiens
  misc_RNA (1)...(19): siRNA sense strand
gaaagaauaaggaaugaug

SEQ ID NO: 945996 - RNA, 19 nt, Homo sapiens
  misc_RNA (1)...(19): siRNA sense strand
ggagaaagguauauaugag

SEQ ID NO: 945997 - RNA, 19 nt, Homo sapiens
  misc_RNA (1)...(19): siRNA sense strand
gagaaagaauaaggaauga

SEQ ID NO: 945998 - RNA, 19 nt, Homo sapiens
  misc_RNA (1)...(19): siRNA sense strand
gccuagaaccucacaauua

SEQ ID NO: 945999 - RNA, 19 nt, Homo sapiens
  misc_RNA (1)...(19): siRNA sense strand
uaaaggaaaugcacuuaca

SEQ ID NO: 946000 - RNA, 19 nt, Homo sapiens
  misc_RNA (1)...(19): siRNA sense strand
ggcauuagcugauuauucu

SEQ ID NO: 946001 - RNA, 19 nt, Homo sapiens
  misc_RNA (1)...(19): siRNA sense strand
gagccucgaugaaggaauu

SEQ ID NO: 946002 - RNA, 19 nt, Homo sapiens
  misc_RNA (1)...(19): siRNA sense strand
gaaacagguucaaucuugu

SEQ ID NO: 946003 - RNA, 19 nt, Homo sapiens
  misc_RNA (1)...(19): siRNA sense strand
gaaccucacaauuaaauga

SEQ ID NO: 946004 - RNA, 19 nt, Homo sapiens
  misc_RNA (1)...(19): siRNA sense strand
gaaguagccaaacuccuua

SEQ ID NO: 946005 - RNA, 19 nt, Homo sapiens
  misc_RNA (1)...(19): siRNA sense strand
ggaaguagccaaacuccuu

SEQ ID NO: 946006 - RNA, 19 nt, Homo sapiens
  misc_RNA (1)...(19): siRNA sense strand
ggaaauggagcuaagaaga

SEQ ID NO: 946007 - RNA, 19 nt, Homo sapiens
  misc_RNA (1)...(19): siRNA sense strand
caaaguuuauuguggacua

SEQ ID NO: 946008 - RNA, 19 nt, Homo sapiens
  misc_RNA (1)...(19): siRNA sense strand
gcacugaccuaggcaacaa

SEQ ID NO: 946009 - RNA, 19 nt, Homo sapiens
  misc_RNA (1)...(19): siRNA sense strand
gcucuggccuuuaaucuuc

SEQ ID NO: 946010 - RNA, 19 nt, Homo sapiens
  misc_RNA (1)...(19): siRNA sense strand
uuaguacccucauagauaa

SEQ ID NO: 946011 - RNA, 19 nt, Homo sapiens
  misc_RNA (1)...(19): siRNA sense strand
acaaccaacucaucuguuu

SEQ ID NO: 946012 - RNA, 19 nt, Homo sapiens
  misc_RNA (1)...(19): siRNA sense strand
ggaaggaagcugaaggaaa

SEQ ID NO: 946013 - RNA, 19 nt, Homo sapiens
  misc_RNA (1)...(19): siRNA sense strand
gaaauugggagaaagguau

SEQ ID NO: 946014 - RNA, 19 nt, Homo sapiens
  misc_RNA (1)...(19): siRNA sense strand
gcucagcuguaaucuuaaa

SEQ ID NO: 946015 - RNA, 19 nt, Homo sapiens
  misc_RNA (1)...(19): siRNA sense strand
cagaagugcugacaagaga

SEQ ID NO: 946016 - RNA, 19 nt, Homo sapiens
  misc_RNA (1)...(19): siRNA sense strand
ggaaaugcacuuacaagau

SEQ ID NO: 946017 - RNA, 19 nt, Homo sapiens
  misc_RNA (1)...(19): siRNA sense strand
gaaaauccaugucauaaag

SEQ ID NO: 946018 - RNA, 19 nt, Homo sapiens
  misc_RNA (1)...(19): siRNA sense strand
aacaggagcugcuucguaa

SEQ ID NO: 946019 - RNA, 19 nt, Homo sapiens
  misc_RNA (1)...(19): siRNA sense strand
ugaaauggaucccucaaca

SEQ ID NO: 946020 - RNA, 19 nt, Homo sapiens
  misc_RNA (1)...(19): siRNA sense strand
gaugagaggacaugaauca

SEQ ID NO: 946021 - RNA, 19 nt, Homo sapiens
  misc_RNA (1)...(19): siRNA sense strand
gauaaaugcggcuguagaa

SEQ ID NO: 946022 - RNA, 19 nt, Homo sapiens
  misc_RNA (1)...(19): siRNA sense strand
gugaugaucuacaacgaaa

SEQ ID NO: 946023 - RNA, 19 nt, Homo sapiens
  misc_RNA (1)...(19): siRNA sense strand
ggcaaaggcugaacaagca

SEQ ID NO: 946024 - RNA, 19 nt, Homo sapiens
  misc_RNA (1)...(19): siRNA sense strand
ucacaacacuuccgauuac

SEQ ID NO: 946025 - RNA, 19 nt, Homo sapiens
  misc_RNA (1)...(19): siRNA sense strand
cggaauaaccuggauauaa

SEQ ID NO: 946026 - RNA, 19 nt, Homo sapiens
  misc_RNA (1)...(19): siRNA sense strand
gacgguacauugcaucuau

SEQ ID NO: 946027 - RNA, 19 nt, Homo sapiens
  misc_RNA (1)...(19): siRNA sense strand
aaaugacucuucugaaaug

SEQ ID NO: 946028 - RNA, 19 nt, Homo sapiens
  misc_RNA (1)...(19): siRNA sense strand
caacacugguuugaauauu

SEQ ID NO: 946029 - RNA, 19 nt, Homo sapiens
  misc_RNA (1)...(19): siRNA sense strand
gaacaaccaacucaucugu

SEQ ID NO: 946030 - RNA, 19 nt, Homo sapiens
  misc_RNA (1)...(19): siRNA sense strand
ccacauggacgguacauug

SEQ ID NO: 946031 - RNA, 19 nt, Homo sapiens
  misc_RNA (1)...(19): siRNA sense strand
gaaaagagagcugaaagua

SEQ ID NO: 946032 - RNA, 19 nt, Homo sapiens
  misc_RNA (1)...(19): siRNA sense strand
gaacgagaaagaauaagga

SEQ ID NO: 946033 - RNA, 19 nt, Homo sapiens
  misc_RNA (1)...(19): siRNA sense strand
uggcugaaauuguucgaua

SEQ ID NO: 946034 - RNA, 19 nt, Homo sapiens
  misc_RNA (1)...(19): siRNA sense strand
uugaagauuugcccaauaa

SEQ ID NO: 946035 - RNA, 19 nt, Homo sapiens
  misc_RNA (1)...(19): siRNA sense strand
ugaauuccuuguggcauua

SEQ ID NO: 946036 - RNA, 19 nt, Homo sapiens
  misc_RNA (1)...(19): siRNA sense strand
gggagaaagguauauauga

SEQ ID NO: 946037 - RNA, 19 nt, Homo sapiens
  misc_RNA (1)...(19): siRNA sense strand
gaacauuauucacaacacu

SEQ ID NO: 946038 - RNA, 19 nt, Homo sapiens
  misc_RNA (1)...(19): siRNA sense strand
gagaggaguggcugaaauu

SEQ ID NO: 946039 - RNA, 19 nt, Homo sapiens
  misc_RNA (1)...(19): siRNA sense strand
acaaggaacugcugcaaca

SEQ ID NO: 946040 - RNA, 19 nt, Homo sapiens
  misc_RNA (1)...(19): siRNA sense strand
guacauugcaucuauuaug

SEQ ID NO: 946041 - RNA, 19 nt, Homo sapiens
  misc_RNA (1)...(19): siRNA sense strand
cuuguaaacuucucuuuga

SEQ ID NO: 946042 - RNA, 19 nt, Homo sapiens
  misc_RNA (1)...(19): siRNA sense strand
cuaggcagcucuuuagaau

SEQ ID NO: 946043 - RNA, 19 nt, Homo sapiens
  misc_RNA (1)...(19): siRNA sense strand
ggaggcaagucaaaucauc

SEQ ID NO: 946044 - RNA, 19 nt, Homo sapiens
  misc_RNA (1)...(19): siRNA sense strand
ggaaauaugccaucacaac

SEQ ID NO: 946045 - RNA, 19 nt, Homo sapiens
  misc_RNA (1)...(19): siRNA sense strand
uauauucaguucaggcuuu

SEQ ID NO: 946046 - RNA, 19 nt, Homo sapiens
  misc_RNA (1)...(19): siRNA sense strand
ucguaaagcugaagaaaca

SEQ ID NO: 946047 - RNA, 19 nt, Homo sapiens
  misc_RNA (1)...(19): siRNA sense strand
uugaagauaugcaagcuaa

SEQ ID NO: 946048 - RNA, 19 nt, Homo sapiens
  misc_RNA (1)...(19): siRNA sense strand
ggacucauguggcguuucu

SEQ ID NO: 946049 - RNA, 19 nt, Homo sapiens
  misc_RNA (1)...(19): siRNA sense strand
caccauaucuuccacucuu

SEQ ID NO: 946050 - RNA, 19 nt, Homo sapiens
  misc_RNA (1)...(19): siRNA sense strand
gaaaacagaaggaaagaaa

SEQ ID NO: 946051 - RNA, 19 nt, Homo sapiens
  misc_RNA (1)...(19): siRNA sense strand
aaacucagaaggugauuaa

SEQ ID NO: 946052 - RNA, 19 nt, Homo sapiens
  misc_RNA (1)...(19): siRNA sense strand
ucagcaagaucaacaggaa

SEQ ID NO: 946053 - RNA, 19 nt, Homo sapiens
  misc_RNA (1)...(19): siRNA sense strand
ggcaguauccaguauuuaa

SEQ ID NO: 946054 - RNA, 19 nt, Homo sapiens
  misc_RNA (1)...(19): siRNA sense strand
ccagacagcaugcuuaaug

SEQ ID NO: 946055 - RNA, 19 nt, Homo sapiens
  misc_RNA (1)...(19): siRNA sense strand
gaagaaauaccccaucaaa

SEQ ID NO: 946056 - RNA, 19 nt, Homo sapiens
  misc_RNA (1)...(19): siRNA sense strand
aagacuggaugaugaaauu

SEQ ID NO: 946057 - RNA, 19 nt, Homo sapiens
  misc_RNA (1)...(19): siRNA sense strand
cgagaaagaauaaggaaug

SEQ ID NO: 946058 - RNA, 19 nt, Homo sapiens
  misc_RNA (1)...(19): siRNA sense strand
gaccacgccuacugacauu

SEQ ID NO: 946059 - RNA, 19 nt, Homo sapiens
  misc_RNA (1)...(19): siRNA sense strand
ucaauaugcagacuuguaa

SEQ ID NO: 946060 - RNA, 19 nt, Homo sapiens
  misc_RNA (1)...(19): siRNA sense strand
gaacucgaaucacaaaaga

SEQ ID NO: 946061 - RNA, 19 nt, Homo sapiens
  misc_RNA (1)...(19): siRNA sense strand
gagaaccuuaucugcauua

SEQ ID NO: 946062 - RNA, 19 nt, Homo sapiens
  misc_RNA (1)...(19): siRNA sense strand
ccagauggauuaaacaaaa

SEQ ID NO: 946063 - RNA, 19 nt, Homo sapiens
  misc_RNA (1)...(19): siRNA sense strand
gagaaagguauauaugaga

SEQ ID NO: 946064 - RNA, 19 nt, Homo sapiens
  misc_RNA (1)...(19): siRNA sense strand
gagcugaaaguaaaggaaa

SEQ ID NO: 946065 - RNA, 19 nt, Homo sapiens
  misc_RNA (1)...(19): siRNA sense strand
aaacaggagcugcuucgua

SEQ ID NO: 946066 - RNA, 19 nt, Homo sapiens
  misc_RNA (1)...(19): siRNA sense strand
caaggagagcggcaagaua

SEQ ID NO: 946067 - RNA, 19 nt, Homo sapiens
  misc_RNA (1)...(19): siRNA sense strand
gagagaggcagacaguuga

SEQ ID NO: 946068 - RNA, 19 nt, Homo sapiens
  misc_RNA (1)...(19): siRNA sense strand
gacagcaugcuuaauguuu

SEQ ID NO: 946069 - RNA, 19 nt, Homo sapiens
  misc_RNA (1)...(19): siRNA sense strand
ccagagaccuagaaaugag

SEQ ID NO: 946070 - RNA, 19 nt, Homo sapiens
  misc_RNA (1)...(19): siRNA sense strand
gaagaaacauggcggcuau

SEQ ID NO: 946071 - RNA, 19 nt, Homo sapiens
  misc_RNA (1)...(19): siRNA sense strand
ggaagaaauuaacgacauu

SEQ ID NO: 946072 - RNA, 19 nt, Homo sapiens
  misc_RNA (1)...(19): siRNA sense strand
gcuguaacacuucuuauua

SEQ ID NO: 946073 - RNA, 19 nt, Homo sapiens
  misc_RNA (1)...(19): siRNA sense strand
gaagauuucugcaccuaau

SEQ ID NO: 946074 - RNA, 19 nt, Homo sapiens
  misc_RNA (1)...(19): siRNA sense strand
ggugaaauauuaucagcuu

SEQ ID NO: 946075 - RNA, 19 nt, Homo sapiens
  misc_RNA (1)...(19): siRNA sense strand
ucuauucucuagcaacuua

SEQ ID NO: 946076 - RNA, 19 nt, Homo sapiens
  misc_RNA (1)...(19): siRNA sense strand
cuaagaugcugucaaaguu

SEQ ID NO: 946077 - RNA, 19 nt, Homo sapiens
  misc_RNA (1)...(19): siRNA sense strand
ccaacacucgugcauauua

SEQ ID NO: 946078 - RNA, 19 nt, Homo sapiens
  misc_RNA (1)...(19): siRNA sense strand
uagaacagcugaaagaaag

SEQ ID NO: 946079 - RNA, 19 nt, Homo sapiens
  misc_RNA (1)...(19): siRNA sense strand
ggaagcaacuacgacuaaa

SEQ ID NO: 946080 - RNA, 19 nt, Homo sapiens
  misc_RNA (1)...(19): siRNA sense strand
agagaaauguugcaggaaa

SEQ ID NO: 946081 - RNA, 19 nt, Homo sapiens
  misc_RNA (1)...(19): siRNA sense strand
cuucuaagaugcugucaaa

SEQ ID NO: 946082 - RNA, 19 nt, Homo sapiens
  misc_RNA (1)...(19): siRNA sense strand
caagaaggccugcgcauuc

SEQ ID NO: 946083 - RNA, 19 nt, Homo sapiens
  misc_RNA (1)...(19): siRNA sense strand
aagaugcugucaaaguuua

SEQ ID NO: 946084 - RNA, 19 nt, Homo sapiens
  misc_RNA (1)...(19): siRNA sense strand
gcaaaggaaggaaaugguu

SEQ ID NO: 946085 - RNA, 19 nt, Homo sapiens
  misc_RNA (1)...(19): siRNA sense strand
gaaagaaagguuuaaagac

SEQ ID NO: 946086 - RNA, 19 nt, Homo sapiens
  misc_RNA (1)...(19): siRNA sense strand
ccagaacccucaagacagu

SEQ ID NO: 946087 - RNA, 19 nt, Homo sapiens
  misc_RNA (1)...(19): siRNA sense strand
aacaaugaguuuccaguuu

SEQ ID NO: 946088 - RNA, 19 nt, Homo sapiens
  misc_RNA (1)...(19): siRNA sense strand
caaaggaaggaaaugguuu

SEQ ID NO: 946089 - RNA, 19 nt, Homo sapiens
  misc_RNA (1)...(19): siRNA sense strand
gagaaauguugcaggaaag

SEQ ID NO: 946090 - RNA, 19 nt, Homo sapiens
  misc_RNA (1)...(19): siRNA sense strand
gaacaccgggagcuacuau

SEQ ID NO: 946091 - RNA, 19 nt, Homo sapiens
  misc_RNA (1)...(19): siRNA sense strand
acaaagaagagaaauguug

SEQ ID NO: 946092 - RNA, 19 nt, Homo sapiens
  misc_RNA (1)...(19): siRNA sense strand
ggauauaacccuggcuuug

SEQ ID NO: 946093 - RNA, 19 nt, Homo sapiens
  misc_RNA (1)...(19): siRNA sense strand
gaacaaucauggaaaaucu

SEQ ID NO: 946094 - RNA, 19 nt, Homo sapiens
  misc_RNA (1)...(19): siRNA sense strand
ggaaaaucauuaaggaaga

SEQ ID NO: 946095 - RNA, 19 nt, Homo sapiens
  misc_RNA (1)...(19): siRNA sense strand
gaaggccugcgcauucaaa

SEQ ID NO: 946096 - RNA, 19 nt, Homo sapiens
  misc_RNA (1)...(19): siRNA sense strand
gcaggaaagauuguuuaaa

SEQ ID NO: 946097 - RNA, 19 nt, Homo sapiens
  misc_RNA (1)...(19): siRNA sense strand
aaacauggcggcuauccuu

SEQ ID NO: 946098 - RNA, 19 nt, Homo sapiens
  misc_RNA (1)...(19): siRNA sense strand
gugaagauuucugcaccua

SEQ ID NO: 946099 - RNA, 19 nt, Homo sapiens
  misc_RNA (1)...(19): siRNA sense strand
agaagaauauuccaacacu

SEQ ID NO: 946100 - RNA, 19 nt, Homo sapiens
  misc_RNA (1)...(19): siRNA sense strand
gaauuucugacaaagcaaa

SEQ ID NO: 946101 - RNA, 19 nt, Homo sapiens
  misc_RNA (1)...(19): siRNA sense strand
ucuagcaacuuaauugaca

SEQ ID NO: 946102 - RNA, 19 nt, Homo sapiens
  misc_RNA (1)...(19): siRNA sense strand
gaccugggccucugcuuug

SEQ ID NO: 946103 - RNA, 19 nt, Homo sapiens
  misc_RNA (1)...(19): siRNA sense strand
uaagaugcugucaaaguuu

SEQ ID NO: 946104 - RNA, 19 nt, Homo sapiens
  misc_RNA (1)...(19): siRNA sense strand
auuaucagcuucuaagaug

SEQ ID NO: 946105 - RNA, 19 nt, Homo sapiens
  misc_RNA (1)...(19): siRNA sense strand
uaugagcacgugaagauuu

SEQ ID NO: 946106 - RNA, 19 nt, Homo sapiens
  misc_RNA (1)...(19): siRNA sense strand
cagcugaaagaaagguuua

SEQ ID NO: 946107 - RNA, 19 nt, Homo sapiens
  misc_RNA (1)...(19): siRNA sense strand
caacacucgugcauauuac

SEQ ID NO: 946108 - RNA, 19 nt, Homo sapiens
  misc_RNA (1)...(19): siRNA sense strand
ugugaaaacugccuucuuu

SEQ ID NO: 946109 - RNA, 19 nt, Homo sapiens
  misc_RNA (1)...(19): siRNA sense strand
ccuaaugaauuugauguca

SEQ ID NO: 946110 - RNA, 19 nt, Homo sapiens
  misc_RNA (1)...(19): siRNA sense strand
cauuaaagauacagauguc

SEQ ID NO: 946111 - RNA, 19 nt, Homo sapiens
  misc_RNA (1)...(19): siRNA sense strand
gagcccugcuguaacacuu

SEQ ID NO: 946112 - RNA, 19 nt, Homo sapiens
  misc_RNA (1)...(19): siRNA sense strand
uaacugcgugacauacuuu

SEQ ID NO: 946113 - RNA, 19 nt, Homo sapiens
  misc_RNA (1)...(19): siRNA sense strand
gauauaacccuggcuuugg

SEQ ID NO: 946114 - RNA, 19 nt, Homo sapiens
  misc_RNA (1)...(19): siRNA sense strand
aaaacuggcuuucagcaaa

SEQ ID NO: 946115 - RNA, 19 nt, Homo sapiens
  misc_RNA (1)...(19): siRNA sense strand
acaaugaguuuccaguuuu

SEQ ID NO: 946116 - RNA, 19 nt, Homo sapiens
  misc_RNA (1)...(19): siRNA sense strand
cuggauaaauucucuucuu

SEQ ID NO: 946117 - RNA, 19 nt, Homo sapiens
  misc_RNA (1)...(19): siRNA sense strand
cuagaagaauauuccaaca

SEQ ID NO: 946118 - RNA, 19 nt, Homo sapiens
  misc_RNA (1)...(19): siRNA sense strand
ccaagaaggccugcgcauu

SEQ ID NO: 946119 - RNA, 19 nt, Homo sapiens
  misc_RNA (1)...(19): siRNA sense strand
uuccaacacucgugcauau

SEQ ID NO: 946120 - RNA, 19 nt, Homo sapiens
  misc_RNA (1)...(19): siRNA sense strand
gcugaaagaaagguuuaaa

SEQ ID NO: 946121 - RNA, 19 nt, Homo sapiens
  misc_RNA (1)...(19): siRNA sense strand
uuagaacagcugaaagaaa

SEQ ID NO: 946122 - RNA, 19 nt, Homo sapiens
  misc_RNA (1)...(19): siRNA sense strand
aggaagaaauuaacgacau

SEQ ID NO: 946123 - RNA, 19 nt, Homo sapiens
  misc_RNA (1)...(19): siRNA sense strand
cugggccucugcuuugaua

SEQ ID NO: 946124 - RNA, 19 nt, Homo sapiens
  misc_RNA (1)...(19): siRNA sense strand
aagcucagccgcgaugaua

SEQ ID NO: 946125 - RNA, 19 nt, Homo sapiens
  misc_RNA (1)...(19): siRNA sense strand
gacauuaaagauacagaug

SEQ ID NO: 946126 - RNA, 19 nt, Homo sapiens
  misc_RNA (1)...(19): siRNA sense strand
gaagcaacuacgacuaaag

SEQ ID NO: 946127 - RNA, 19 nt, Homo sapiens
  misc_RNA (1)...(19): siRNA sense strand
aagaaggccugcgcauuca

SEQ ID NO: 946128 - RNA, 19 nt, Homo sapiens
  misc_RNA (1)...(19): siRNA sense strand
cuguaacacuucuuauuag

SEQ ID NO: 946129 - RNA, 19 nt, Homo sapiens
  misc_RNA (1)...(19): siRNA sense strand
ucuaagaugcugucaaagu

SEQ ID NO: 946130 - RNA, 19 nt, Homo sapiens
  misc_RNA (1)...(19): siRNA sense strand
ucacguauguacccagaac

SEQ ID NO: 946131 - RNA, 19 nt, Homo sapiens
  misc_RNA (1)...(19): siRNA sense strand
gaaauaccuuuuagaacag

SEQ ID NO: 946132 - RNA, 19 nt, Homo sapiens
  misc_RNA (1)...(19): siRNA sense strand
ucuaaaacgugcugugaaa

SEQ ID NO: 946133 - RNA, 19 nt, Homo sapiens
  misc_RNA (1)...(19): siRNA sense strand
gcaccuaaugaauuugaug

SEQ ID NO: 946134 - RNA, 19 nt, Homo sapiens
  misc_RNA (1)...(19): siRNA sense strand
aggaagcaacuacgacuaa

SEQ ID NO: 946135 - RNA, 19 nt, Homo sapiens
  misc_RNA (1)...(19): siRNA sense strand
cagaauucaacuagaagaa

SEQ ID NO: 946136 - RNA, 19 nt, Homo sapiens
  misc_RNA (1)...(19): siRNA sense strand
auauaacccuggcuuugga

SEQ ID NO: 946137 - RNA, 19 nt, Homo sapiens
  misc_RNA (1)...(19): siRNA sense strand
ugucauguuuaaacuggaa

SEQ ID NO: 946138 - RNA, 19 nt, Homo sapiens
  misc_RNA (1)...(19): siRNA sense strand
guacccagaacccucaaga

SEQ ID NO: 946139 - RNA, 19 nt, Homo sapiens
  misc_RNA (1)...(19): siRNA sense strand
gaaggugaaauauuaucag

SEQ ID NO: 946140 - RNA, 19 nt, Homo sapiens
  misc_RNA (1)...(19): siRNA sense strand
gaacagcugaaagaaaggu

SEQ ID NO: 946141 - RNA, 19 nt, Homo sapiens
  misc_RNA (1)...(19): siRNA sense strand
aaauguugcaggaaagauu

SEQ ID NO: 946142 - RNA, 19 nt, Homo sapiens
  misc_RNA (1)...(19): siRNA sense strand
gcucagccgcgaugauauc

SEQ ID NO: 946143 - RNA, 19 nt, Homo sapiens
  misc_RNA (1)...(19): siRNA sense strand
uuucugcaccuaaugaauu

SEQ ID NO: 946144 - RNA, 19 nt, Homo sapiens
  misc_RNA (1)...(19): siRNA sense strand
gugacauacuuucuucagu

SEQ ID NO: 946145 - RNA, 19 nt, Homo sapiens
  misc_RNA (1)...(19): siRNA sense strand
auaacugcgugacauacuu

SEQ ID NO: 946146 - RNA, 19 nt, Homo sapiens
  misc_RNA (1)...(19): siRNA sense strand
acaccgggagcuacuauga

SEQ ID NO: 946147 - RNA, 19 nt, Homo sapiens
  misc_RNA (1)...(19): siRNA sense strand
uugcaggaaagauuguuua

SEQ ID NO: 946148 - RNA, 19 nt, Homo sapiens
  misc_RNA (1)...(19): siRNA sense strand
gaaauguugcaggaaagau

SEQ ID NO: 946149 - RNA, 19 nt, Homo sapiens
  misc_RNA (1)...(19): siRNA sense strand
cggcuauccuucucucaca

SEQ ID NO: 946150 - RNA, 19 nt, Homo sapiens
  misc_RNA (1)...(19): siRNA sense strand
acuaugagcacgugaagau

SEQ ID NO: 946151 - RNA, 19 nt, Homo sapiens
  misc_RNA (1)...(19): siRNA sense strand
gugcauauuacuuugugaa

SEQ ID NO: 946152 - RNA, 19 nt, Homo sapiens
  misc_RNA (1)...(19): siRNA sense strand
gcugucaaaguuuaggaaa

SEQ ID NO: 946153 - RNA, 19 nt, Homo sapiens
  misc_RNA (1)...(19): siRNA sense strand
gaagcucagccgcgaugau

SEQ ID NO: 946154 - RNA, 19 nt, Homo sapiens
  misc_RNA (1)...(19): siRNA sense strand
gcaugcaaaggaaggaaau

SEQ ID NO: 946155 - RNA, 19 nt, Homo sapiens
  misc_RNA (1)...(19): siRNA sense strand
aaacuggcuuucagcaaaa

SEQ ID NO: 946156 - RNA, 19 nt, Homo sapiens
  misc_RNA (1)...(19): siRNA sense strand
aacccuggcuuuggaauca

SEQ ID NO: 946157 - RNA, 19 nt, Homo sapiens
  misc_RNA (1)...(19): siRNA sense strand
gcaacuuaauugacaaaag

SEQ ID NO: 946158 - RNA, 19 nt, Homo sapiens
  misc_RNA (1)...(19): siRNA sense strand
ccagaauucaacuagaaga

SEQ ID NO: 946159 - RNA, 19 nt, Homo sapiens
  misc_RNA (1)...(19): siRNA sense strand
agaccugggccucugcuuu

SEQ ID NO: 946160 - RNA, 19 nt, Homo sapiens
  misc_RNA (1)...(19): siRNA sense strand
acccaagcaugcaaaggaa

SEQ ID NO: 946161 - RNA, 19 nt, Homo sapiens
  misc_RNA (1)...(19): siRNA sense strand
cgacauuaaagauacagau

SEQ ID NO: 946162 - RNA, 19 nt, Homo sapiens
  misc_RNA (1)...(19): siRNA sense strand
gauaacugcgugacauacu

SEQ ID NO: 946163 - RNA, 19 nt, Homo sapiens
  misc_RNA (1)...(19): siRNA sense strand
ugaagauuucugcaccuaa

SEQ ID NO: 946164 - RNA, 19 nt, Homo sapiens
  misc_RNA (1)...(19): siRNA sense strand
uacccaagcaugcaaagga

SEQ ID NO: 946165 - RNA, 19 nt, Homo sapiens
  misc_RNA (1)...(19): siRNA sense strand
aaucuauucucuagcaacu

SEQ ID NO: 946166 - RNA, 19 nt, Homo sapiens
  misc_RNA (1)...(19): siRNA sense strand
acucgugcauauuacuuug

SEQ ID NO: 946167 - RNA, 19 nt, Homo sapiens
  misc_RNA (1)...(19): siRNA sense strand
uucugcaccuaaugaauuu

SEQ ID NO: 946168 - RNA, 19 nt, Homo sapiens
  misc_RNA (1)...(19): siRNA sense strand
cuagcaacuuaauugacaa

SEQ ID NO: 946169 - RNA, 19 nt, Homo sapiens
  misc_RNA (1)...(19): siRNA sense strand
ucaaucuauucucuagcaa

SEQ ID NO: 946170 - RNA, 19 nt, Homo sapiens
  misc_RNA (1)...(19): siRNA sense strand
ugaaacagcugcucaagaa

SEQ ID NO: 946171 - RNA, 19 nt, Homo sapiens
  misc_RNA (1)...(19): siRNA sense strand
gcaaggaggagaaggagaa

SEQ ID NO: 946172 - RNA, 19 nt, Homo sapiens
  misc_RNA (1)...(19): siRNA sense strand
acaaacacgucaugaggaa

SEQ ID NO: 946173 - RNA, 19 nt, Homo sapiens
  misc_RNA (1)...(19): siRNA sense strand
ggaaggagcagcgcaagga

SEQ ID NO: 946174 - RNA, 19 nt, Homo sapiens
  misc_RNA (1)...(19): siRNA sense strand
ggaaggacgacgacaaaca

SEQ ID NO: 946175 - RNA, 19 nt, Homo sapiens
  misc_RNA (1)...(19): siRNA sense strand
ucgaccagcuggaacguaa

SEQ ID NO: 946176 - RNA, 19 nt, Homo sapiens
  misc_RNA (1)...(19): siRNA sense strand
cuucacagccuuugaggaa

SEQ ID NO: 946177 - RNA, 19 nt, Homo sapiens
  misc_RNA (1)...(19): siRNA sense strand
gaaggacgacgacaaacac

SEQ ID NO: 946178 - RNA, 19 nt, Homo sapiens
  misc_RNA (1)...(19): siRNA sense strand
gcuccgcucuccugacaac

SEQ ID NO: 946179 - RNA, 19 nt, Homo sapiens
  misc_RNA (1)...(19): siRNA sense strand
gaccagcuggaacguaaga

SEQ ID NO: 946180 - RNA, 19 nt, Homo sapiens
  misc_RNA (1)...(19): siRNA sense strand
cgaccggcacccagaaaga

SEQ ID NO: 946181 - RNA, 19 nt, Homo sapiens
  misc_RNA (1)...(19): siRNA sense strand
uggcuccgcucuccugaca

SEQ ID NO: 946182 - RNA, 19 nt, Homo sapiens
  misc_RNA (1)...(19): siRNA sense strand
gcagaaggagcuggaggau

SEQ ID NO: 946183 - RNA, 19 nt, Homo sapiens
  misc_RNA (1)...(19): siRNA sense strand
gaaacagcugcucaagaag

SEQ ID NO: 946184 - RNA, 19 nt, Homo sapiens
  misc_RNA (1)...(19): siRNA sense strand
aacagcugcucaagaagga

SEQ ID NO: 946185 - RNA, 19 nt, Homo sapiens
  misc_RNA (1)...(19): siRNA sense strand
cuggaaggacgacgacaaa

SEQ ID NO: 946186 - RNA, 19 nt, Homo sapiens
  misc_RNA (1)...(19): siRNA sense strand
caccaucgaggacgccauu

SEQ ID NO: 946187 - RNA, 19 nt, Homo sapiens
  misc_RNA (1)...(19): siRNA sense strand
uggaggaugccuacuggaa

SEQ ID NO: 946188 - RNA, 19 nt, Homo sapiens
  misc_RNA (1)...(19): siRNA sense strand
gcacaagcgucucagcuau

SEQ ID NO: 946189 - RNA, 19 nt, Homo sapiens
  misc_RNA (1)...(19): siRNA sense strand
gauuacggcugguacaaug

SEQ ID NO: 946190 - RNA, 19 nt, Homo sapiens
  misc_RNA (1)...(19): siRNA sense strand
aggcggaccuggugaauga

SEQ ID NO: 946191 - RNA, 19 nt, Homo sapiens
  misc_RNA (1)...(19): siRNA sense strand
guaccacccucuucuccuu

SEQ ID NO: 946192 - RNA, 19 nt, Homo sapiens
  misc_RNA (1)...(19): siRNA sense strand
gcuuaugaaccucuacuuu

SEQ ID NO: 946193 - RNA, 19 nt, Homo sapiens
  misc_RNA (1)...(19): siRNA sense strand
gggccucgcugcucuuucu

SEQ ID NO: 946194 - RNA, 19 nt, Homo sapiens
  misc_RNA (1)...(19): siRNA sense strand
ggcuggacaccuucgauua

SEQ ID NO: 946195 - RNA, 19 nt, Homo sapiens
  misc_RNA (1)...(19): siRNA sense strand
gcugggcacugugaagaug

SEQ ID NO: 946196 - RNA, 19 nt, Homo sapiens
  misc_RNA (1)...(19): siRNA sense strand
acaagcgucucagcuauca

SEQ ID NO: 946197 - RNA, 19 nt, Homo sapiens
  misc_RNA (1)...(19): siRNA sense strand
gcugguacaaugugucuga

SEQ ID NO: 946198 - RNA, 19 nt, Homo sapiens
  misc_RNA (1)...(19): siRNA sense strand
cuuaugaaccucuacuuug

SEQ ID NO: 946199 - RNA, 19 nt, Homo sapiens
  misc_RNA (1)...(19): siRNA sense strand
cugcaguucuucaccuuga

SEQ ID NO: 946200 - RNA, 19 nt, Homo sapiens
  misc_RNA (1)...(19): siRNA sense strand
ggcacaagcgucucagcua

SEQ ID NO: 946201 - RNA, 19 nt, Homo sapiens
  misc_RNA (1)...(19): siRNA sense strand
ggugagcgacucccuguuc

SEQ ID NO: 946202 - RNA, 19 nt, Homo sapiens
  misc_RNA (1)...(19): siRNA sense strand
uguaugcccugcucuucuu

SEQ ID NO: 946203 - RNA, 19 nt, Homo sapiens
  misc_RNA (1)...(19): siRNA sense strand
ccuugcugcuccugucaua

SEQ ID NO: 946204 - RNA, 19 nt, Homo sapiens
  misc_RNA (1)...(19): siRNA sense strand
ccucuucuccuucuacuuc

SEQ ID NO: 946205 - RNA, 19 nt, Homo sapiens
  misc_RNA (1)...(19): siRNA sense strand
uuaugaaccucuacuuugc

SEQ ID NO: 946206 - RNA, 19 nt, Homo sapiens
  misc_RNA (1)...(19): siRNA sense strand
ccagccacauccucaaugg

SEQ ID NO: 946207 - RNA, 19 nt, Homo sapiens
  misc_RNA (1)...(19): siRNA sense strand
gcucuucuucuccgucuau

SEQ ID NO: 946208 - RNA, 19 nt, Homo sapiens
  misc_RNA (1)...(19): siRNA sense strand
gcgccaugguccugcucua

SEQ ID NO: 946209 - RNA, 19 nt, Homo sapiens
  misc_RNA (1)...(19): siRNA sense strand
ugacgcuuaugaaccucua

SEQ ID NO: 946210 - RNA, 19 nt, Homo sapiens
  misc_RNA (1)...(19): siRNA sense strand
ugaaugaccuggggaacaa

SEQ ID NO: 946211 - RNA, 19 nt, Homo sapiens
  misc_RNA (1)...(19): siRNA sense strand
gcaccagccacauccucaa

SEQ ID NO: 946212 - RNA, 19 nt, Homo sapiens
  misc_RNA (1)...(19): siRNA sense strand
uucuucaccuugacgcuua

SEQ ID NO: 946213 - RNA, 19 nt, Homo sapiens
  misc_RNA (1)...(19): siRNA sense strand
ggcuggugcuucuguaugg

SEQ ID NO: 946214 - RNA, 19 nt, Homo sapiens
  misc_RNA (1)...(19): siRNA sense strand
gcgacucccuguucgucau

SEQ ID NO: 946215 - RNA, 19 nt, Homo sapiens
  misc_RNA (1)...(19): siRNA sense strand
gcuggacaccuucgauuac

SEQ ID NO: 946216 - RNA, 19 nt, Homo sapiens
  misc_RNA (1)...(19): siRNA sense strand
gggcugggcacugugaaga

SEQ ID NO: 946217 - RNA, 19 nt, Homo sapiens
  misc_RNA (1)...(19): siRNA sense strand
gccaugguccugcucuaug

SEQ ID NO: 946218 - RNA, 19 nt, Homo sapiens
  misc_RNA (1)...(19): siRNA sense strand
ccaugguccugcucuaugc

SEQ ID NO: 946219 - RNA, 19 nt, Homo sapiens
  misc_RNA (1)...(19): siRNA sense strand
ucaaugggcaggucuuugc

SEQ ID NO: 946220 - RNA, 19 nt, Homo sapiens
  misc_RNA (1)...(19): siRNA sense strand
uauuuggccucauccucuu

SEQ ID NO: 946221 - RNA, 19 nt, Homo sapiens
  misc_RNA (1)...(19): siRNA sense strand
ccugguauuuggccucauc

SEQ ID NO: 946222 - RNA, 19 nt, Homo sapiens
  misc_RNA (1)...(19): siRNA sense strand
ccuucuggcuucucuacug

SEQ ID NO: 946223 - RNA, 19 nt, Homo sapiens
  misc_RNA (1)...(19): siRNA sense strand
ucucgguccuacuucuuug

SEQ ID NO: 946224 - RNA, 19 nt, Homo sapiens
  misc_RNA (1)...(19): siRNA sense strand
ucaccuugacgcuuaugaa

SEQ ID NO: 946225 - RNA, 19 nt, Homo sapiens
  misc_RNA (1)...(19): siRNA sense strand
gcacuaauuuccaaacuug

SEQ ID NO: 946226 - RNA, 19 nt, Homo sapiens
  misc_RNA (1)...(19): siRNA sense strand
ggaggaagcccacagagaa

SEQ ID NO: 946227 - RNA, 19 nt, Homo sapiens
  misc_RNA (1)...(19): siRNA sense strand
ggccagaacugugucauug

SEQ ID NO: 946228 - RNA, 19 nt, Homo sapiens
  misc_RNA (1)...(19): siRNA sense strand
caaauccacuuccuuuuaa

SEQ ID NO: 946229 - RNA, 19 nt, Homo sapiens
  misc_RNA (1)...(19): siRNA sense strand
guucaaauccacuuccuuu

SEQ ID NO: 946230 - RNA, 19 nt, Homo sapiens
  misc_RNA (1)...(19): siRNA sense strand
gaucuuaucaggacaaucu

SEQ ID NO: 946231 - RNA, 19 nt, Homo sapiens
  misc_RNA (1)...(19): siRNA sense strand
gguggaaacuuggaacuag

SEQ ID NO: 946232 - RNA, 19 nt, Homo sapiens
  misc_RNA (1)...(19): siRNA sense strand
gaaggaggaagcccacaga

SEQ ID NO: 946233 - RNA, 19 nt, Homo sapiens
  misc_RNA (1)...(19): siRNA sense strand
gaggaagcccacagagaaa

SEQ ID NO: 946234 - RNA, 19 nt, Homo sapiens
  misc_RNA (1)...(19): siRNA sense strand
aaucuugguuguugcacua

SEQ ID NO: 946235 - RNA, 19 nt, Homo sapiens
  misc_RNA (1)...(19): siRNA sense strand
uggcacagcuguagaugca

SEQ ID NO: 946236 - RNA, 19 nt, Homo sapiens
  misc_RNA (1)...(19): siRNA sense strand
gggcaugccaguucaaauc

SEQ ID NO: 946237 - RNA, 19 nt, Homo sapiens
  misc_RNA (1)...(19): siRNA sense strand
ucaaauccacuuccuuuua

SEQ ID NO: 946238 - RNA, 19 nt, Homo sapiens
  misc_RNA (1)...(19): siRNA sense strand
caaggugccaggauuuguu

SEQ ID NO: 946239 - RNA, 19 nt, Homo sapiens
  misc_RNA (1)...(19): siRNA sense strand
cuacagaauaagagagaaa

SEQ ID NO: 946240 - RNA, 19 nt, Homo sapiens
  misc_RNA (1)...(19): siRNA sense strand
gaaaauuuacccagagugu

SEQ ID NO: 946241 - RNA, 19 nt, Homo sapiens
  misc_RNA (1)...(19): siRNA sense strand
ucagcagcccaauaacuuu

SEQ ID NO: 946242 - RNA, 19 nt, Homo sapiens
  misc_RNA (1)...(19): siRNA sense strand
gcaaggugccaggauuugu

SEQ ID NO: 946243 - RNA, 19 nt, Homo sapiens
  misc_RNA (1)...(19): siRNA sense strand
gucauuggcuacugcuauc

SEQ ID NO: 946244 - RNA, 19 nt, Homo sapiens
  misc_RNA (1)...(19): siRNA sense strand
caaacuuggcacagcugua

SEQ ID NO: 946245 - RNA, 19 nt, Homo sapiens
  misc_RNA (1)...(19): siRNA sense strand
uaucaggacaaucuugguu

SEQ ID NO: 946246 - RNA, 19 nt, Homo sapiens
  misc_RNA (1)...(19): siRNA sense strand
gagaaaauuuacccagagu

SEQ ID NO: 946247 - RNA, 19 nt, Homo sapiens
  misc_RNA (1)...(19): siRNA sense strand
aaacuuggcacagcuguag

SEQ ID NO: 946248 - RNA, 19 nt, Homo sapiens
  misc_RNA (1)...(19): siRNA sense strand
cuugguuguugcacuaauu

SEQ ID NO: 946249 - RNA, 19 nt, Homo sapiens
  misc_RNA (1)...(19): siRNA sense strand
ggaaacuuggaacuagguu

SEQ ID NO: 946250 - RNA, 19 nt, Homo sapiens
  misc_RNA (1)...(19): siRNA sense strand
ggguggaaacuuggaacua

SEQ ID NO: 946251 - RNA, 19 nt, Homo sapiens
  misc_RNA (1)...(19): siRNA sense strand
uuccucagcagcccaauaa

SEQ ID NO: 946252 - RNA, 19 nt, Homo sapiens
  misc_RNA (1)...(19): siRNA sense strand
gcaugccaguucaaaucca

SEQ ID NO: 946253 - RNA, 19 nt, Homo sapiens
  misc_RNA (1)...(19): siRNA sense strand
ugcacuaauuuccaaacuu

SEQ ID NO: 946254 - RNA, 19 nt, Homo sapiens
  misc_RNA (1)...(19): siRNA sense strand
ggacagcacacguggauua

SEQ ID NO: 946255 - RNA, 19 nt, Homo sapiens
  misc_RNA (1)...(19): siRNA sense strand
gcuauuaccucaaguucaa

SEQ ID NO: 946256 - RNA, 19 nt, Homo sapiens
  misc_RNA (1)...(19): siRNA sense strand
agacgucgcuggccaagga

SEQ ID NO: 946257 - RNA, 19 nt, Homo sapiens
  misc_RNA (1)...(19): siRNA sense strand
gggacacccugaacgaaag

SEQ ID NO: 946258 - RNA, 19 nt, Homo sapiens
  misc_RNA (1)...(19): siRNA sense strand
ggagcaggccuucgacaag

SEQ ID NO: 946259 - RNA, 19 nt, Homo sapiens
  misc_RNA (1)...(19): siRNA sense strand
gaccagagcgaggacaaga

SEQ ID NO: 946260 - RNA, 19 nt, Homo sapiens
  misc_RNA (1)...(19): siRNA sense strand
caucaccguuugcggaaag

SEQ ID NO: 946261 - RNA, 19 nt, Homo sapiens
  misc_RNA (1)...(19): siRNA sense strand
ucgcugcucuggcgcaugu

SEQ ID NO: 946262 - RNA, 19 nt, Homo sapiens
  misc_RNA (1)...(19): siRNA sense strand
ggaccagcuacaccgagua

SEQ ID NO: 946263 - RNA, 19 nt, Homo sapiens
  misc_RNA (1)...(19): siRNA sense strand
uggauuaccugcgggacuu

SEQ ID NO: 946264 - RNA, 19 nt, Homo sapiens
  misc_RNA (1)...(19): siRNA sense strand
gcuacaccucgcgcuauua

SEQ ID NO: 946265 - RNA, 19 nt, Homo sapiens
  misc_RNA (1)...(19): siRNA sense strand
gcaucaccguuugcggaaa

SEQ ID NO: 946266 - RNA, 19 nt, Homo sapiens
  misc_RNA (1)...(19): siRNA sense strand
gcggacagcacacguggau

SEQ ID NO: 946267 - RNA, 19 nt, Homo sapiens
  misc_RNA (1)...(19): siRNA sense strand
ccagagcgaggacaagauc

SEQ ID NO: 946268 - RNA, 19 nt, Homo sapiens
  misc_RNA (1)...(19): siRNA sense strand
cgcuacaccucgcgcuauu

SEQ ID NO: 946269 - RNA, 19 nt, Homo sapiens
  misc_RNA (1)...(19): siRNA sense strand
cuacaccgaguacgucuuc

SEQ ID NO: 946270 - RNA, 19 nt, Homo sapiens
  misc_RNA (1)...(19): siRNA sense strand
gcgcuauuaccucaaguuc

SEQ ID NO: 946271 - RNA, 19 nt, Homo sapiens
  misc_RNA (1)...(19): siRNA sense strand
ugugaaggauuucuccaaa

SEQ ID NO: 946272 - RNA, 19 nt, Homo sapiens
  misc_RNA (1)...(19): siRNA sense strand
ugaaggauuucuccaaacu

SEQ ID NO: 946273 - RNA, 19 nt, Homo sapiens
  misc_RNA (1)...(19): siRNA sense strand
ucuccucgcugcucuucua

SEQ ID NO: 946274 - RNA, 19 nt, Homo sapiens
  misc_RNA (1)...(19): siRNA sense strand
ccacuucucuaccgcuaca

SEQ ID NO: 946275 - RNA, 19 nt, Homo sapiens
  misc_RNA (1)...(19): siRNA sense strand
ccucacugguggccaugua

SEQ ID NO: 946276 - RNA, 19 nt, Homo sapiens
  misc_RNA (1)...(19): siRNA sense strand
ggacguguacuuugucaac

SEQ ID NO: 946277 - RNA, 19 nt, Homo sapiens
  misc_RNA (1)...(19): siRNA sense strand
gcucuggacgccacacuau

SEQ ID NO: 946278 - RNA, 19 nt, Homo sapiens
  misc_RNA (1)...(19): siRNA sense strand
ucgcugcucuucuacaucu

SEQ ID NO: 946279 - RNA, 19 nt, Homo sapiens
  misc_RNA (1)...(19): siRNA sense strand
gggcuacugcacuuuguga

SEQ ID NO: 946280 - RNA, 19 nt, Homo sapiens
  misc_RNA (1)...(19): siRNA sense strand
gagccucgaccacuacauc

SEQ ID NO: 946281 - RNA, 19 nt, Homo sapiens
  misc_RNA (1)...(19): siRNA sense strand
caagaugcagaacgcagaa

SEQ ID NO: 946282 - RNA, 19 nt, Homo sapiens
  misc_RNA (1)...(19): siRNA sense strand
gcuagagugcgccaagaug

SEQ ID NO: 946283 - RNA, 19 nt, Homo sapiens
  misc_RNA (1)...(19): siRNA sense strand
gugaaggauuucuccaaac

SEQ ID NO: 946284 - RNA, 19 nt, Homo sapiens
  misc_RNA (1)...(19): siRNA sense strand
ugaccaugccggacgugua

SEQ ID NO: 946285 - RNA, 19 nt, Homo sapiens
  misc_RNA (1)...(19): siRNA sense strand
ggccuucuccagcagcuuu

SEQ ID NO: 946286 - RNA, 19 nt, Homo sapiens
  misc_RNA (1)...(19): siRNA sense strand
ccaaacuccuggccuucuc

SEQ ID NO: 946287 - RNA, 19 nt, Homo sapiens
  misc_RNA (1)...(19): siRNA sense strand
ccagugggccugugcuaca

SEQ ID NO: 946288 - RNA, 19 nt, Homo sapiens
  misc_RNA (1)...(19): siRNA sense strand
gaccaugccggacguguac

SEQ ID NO: 946289 - RNA, 19 nt, Homo sapiens
  misc_RNA (1)...(19): siRNA sense strand
ggacgccacacuaucugau

SEQ ID NO: 946290 - RNA, 19 nt, Homo sapiens
  misc_RNA (1)...(19): siRNA sense strand
cguguacuuugucaacaug

SEQ ID NO: 946291 - RNA, 19 nt, Homo sapiens
  misc_RNA (1)...(19): siRNA sense strand
ugccggacguguacuuugu

SEQ ID NO: 946292 - RNA, 19 nt, Homo sapiens
  misc_RNA (1)...(19): siRNA sense strand
gacguguacuuugucaaca

SEQ ID NO: 946293 - RNA, 19 nt, Homo sapiens
  misc_RNA (1)...(19): siRNA sense strand
uggccaaccuacacagcaa

SEQ ID NO: 946294 - RNA, 19 nt, Homo sapiens
  misc_RNA (1)...(19): siRNA sense strand
gcagauccccuucaaugug

SEQ ID NO: 946295 - RNA, 19 nt, Homo sapiens
  misc_RNA (1)...(19): siRNA sense strand
ccucgcugcucuucuacau

SEQ ID NO: 946296 - RNA, 19 nt, Homo sapiens
  misc_RNA (1)...(19): siRNA sense strand
gcaaggccagcaugaccau

SEQ ID NO: 946297 - RNA, 19 nt, Homo sapiens
  misc_RNA (1)...(19): siRNA sense strand
gaaggauuucuccaaacuc

SEQ ID NO: 946298 - RNA, 19 nt, Homo sapiens
  misc_RNA (1)...(19): siRNA sense strand
ggauauugaugcauucuua

SEQ ID NO: 946299 - RNA, 19 nt, Homo sapiens
  misc_RNA (1)...(19): siRNA sense strand
uaacagcagugaugaguau

SEQ ID NO: 946300 - RNA, 19 nt, Homo sapiens
  misc_RNA (1)...(19): siRNA sense strand
guacacaccucaguugauu

SEQ ID NO: 946301 - RNA, 19 nt, Homo sapiens
  misc_RNA (1)...(19): siRNA sense strand
gaaggagaccucacaguug

SEQ ID NO: 946302 - RNA, 19 nt, Homo sapiens
  misc_RNA (1)...(19): siRNA sense strand
ggaugaaccuucuacaaag

SEQ ID NO: 946303 - RNA, 19 nt, Homo sapiens
  misc_RNA (1)...(19): siRNA sense strand
caacggggcuuuagugaaa

SEQ ID NO: 946304 - RNA, 19 nt, Homo sapiens
  misc_RNA (1)...(19): siRNA sense strand
ugacaaccuuggccuauug

SEQ ID NO: 946305 - RNA, 19 nt, Homo sapiens
  misc_RNA (1)...(19): siRNA sense strand
caacaucacacaacauaug

SEQ ID NO: 946306 - RNA, 19 nt, Homo sapiens
  misc_RNA (1)...(19): siRNA sense strand
gagcaucucugaauuacac

SEQ ID NO: 946307 - RNA, 19 nt, Homo sapiens
  misc_RNA (1)...(19): siRNA sense strand
gacaugaucugugccauuc

SEQ ID NO: 946308 - RNA, 19 nt, Homo sapiens
  misc_RNA (1)...(19): siRNA sense strand
uaacagagaauucuaagca

SEQ ID NO: 946309 - RNA, 19 nt, Homo sapiens
  misc_RNA (1)...(19): siRNA sense strand
aaggagaccucacaguuga

SEQ ID NO: 946310 - RNA, 19 nt, Homo sapiens
  misc_RNA (1)...(19): siRNA sense strand
ggaugacgaugaugaugau

SEQ ID NO: 946311 - RNA, 19 nt, Homo sapiens
  misc_RNA (1)...(19): siRNA sense strand
caugaucugugccauucua

SEQ ID NO: 946312 - RNA, 19 nt, Homo sapiens
  misc_RNA (1)...(19): siRNA sense strand
ccacagaggcaaagacaug

SEQ ID NO: 946313 - RNA, 19 nt, Homo sapiens
  misc_RNA (1)...(19): siRNA sense strand
cagaguacauugacaugau

SEQ ID NO: 946314 - RNA, 19 nt, Homo sapiens
  misc_RNA (1)...(19): siRNA sense strand
caucugaaacugauucuga

SEQ ID NO: 946315 - RNA, 19 nt, Homo sapiens
  misc_RNA (1)...(19): siRNA sense strand
aaacugauucugauucuga

SEQ ID NO: 946316 - RNA, 19 nt, Homo sapiens
  misc_RNA (1)...(19): siRNA sense strand
ggagacauggagacauuaa

SEQ ID NO: 946317 - RNA, 19 nt, Homo sapiens
  misc_RNA (1)...(19): siRNA sense strand
cacaacaucacacaacaua

SEQ ID NO: 946318 - RNA, 19 nt, Homo sapiens
  misc_RNA (1)...(19): siRNA sense strand
gaaaauagcaagguccuaa

SEQ ID NO: 946319 - RNA, 19 nt, Homo sapiens
  misc_RNA (1)...(19): siRNA sense strand
gcagugaugaguaugaaga

SEQ ID NO: 946320 - RNA, 19 nt, Homo sapiens
  misc_RNA (1)...(19): siRNA sense strand
uaugagcauuugccaguuu

SEQ ID NO: 946321 - RNA, 19 nt, Homo sapiens
  misc_RNA (1)...(19): siRNA sense strand
ugauugaccuggaccacaa

SEQ ID NO: 946322 - RNA, 19 nt, Homo sapiens
  misc_RNA (1)...(19): siRNA sense strand
uggaugaaccuucuacaaa

SEQ ID NO: 946323 - RNA, 19 nt, Homo sapiens
  misc_RNA (1)...(19): siRNA sense strand
gguauuggaugaaccuucu

SEQ ID NO: 946324 - RNA, 19 nt, Homo sapiens
  misc_RNA (1)...(19): siRNA sense strand
ucacacaacauaugaaagu

SEQ ID NO: 946325 - RNA, 19 nt, Homo sapiens
  misc_RNA (1)...(19): siRNA sense strand
uucaagaacucacagcauu

SEQ ID NO: 946326 - RNA, 19 nt, Homo sapiens
  misc_RNA (1)...(19): siRNA sense strand
agaaggagaccucacaguu

SEQ ID NO: 946327 - RNA, 19 nt, Homo sapiens
  misc_RNA (1)...(19): siRNA sense strand
cuggagacauggagacauu

SEQ ID NO: 946328 - RNA, 19 nt, Homo sapiens
  misc_RNA (1)...(19): siRNA sense strand
caaccuuggccuauuggua

SEQ ID NO: 946329 - RNA, 19 nt, Homo sapiens
  misc_RNA (1)...(19): siRNA sense strand
uggaaagccugacaaccuu

SEQ ID NO: 946330 - RNA, 19 nt, Homo sapiens
  misc_RNA (1)...(19): siRNA sense strand
caucacacaacauaugaaa

SEQ ID NO: 946331 - RNA, 19 nt, Homo sapiens
  misc_RNA (1)...(19): siRNA sense strand
ugacgaugaugaugaugau

SEQ ID NO: 946332 - RNA, 19 nt, Homo sapiens
  misc_RNA (1)...(19): siRNA sense strand
gaacucuuccaguacauca

SEQ ID NO: 946333 - RNA, 19 nt, Homo sapiens
  misc_RNA (1)...(19): siRNA sense strand
cuaugacccugcagacuau

SEQ ID NO: 946334 - RNA, 19 nt, Homo sapiens
  misc_RNA (1)...(19): siRNA sense strand
ccuaugacccugcagacua

SEQ ID NO: 946335 - RNA, 19 nt, Homo sapiens
  misc_RNA (1)...(19): siRNA sense strand
gauaacagcagugaugagu

SEQ ID NO: 946336 - RNA, 19 nt, Homo sapiens
  misc_RNA (1)...(19): siRNA sense strand
aagaaagcauucacuccuu

SEQ ID NO: 946337 - RNA, 19 nt, Homo sapiens
  misc_RNA (1)...(19): siRNA sense strand
ucaagaacucacagcauuu

SEQ ID NO: 946338 - RNA, 19 nt, Homo sapiens
  misc_RNA (1)...(19): siRNA sense strand
cagcagugaugaguaugaa

SEQ ID NO: 946339 - RNA, 19 nt, Homo sapiens
  misc_RNA (1)...(19): siRNA sense strand
ugaaacugauucugauucu

SEQ ID NO: 946340 - RNA, 19 nt, Homo sapiens
  misc_RNA (1)...(19): siRNA sense strand
gaauuacaccguucuaagc

SEQ ID NO: 946341 - RNA, 19 nt, Homo sapiens
  misc_RNA (1)...(19): siRNA sense strand
gcagaguacauugacauga

SEQ ID NO: 946342 - RNA, 19 nt, Homo sapiens
  misc_RNA (1)...(19): siRNA sense strand
gcacagaaaggagaagaag

SEQ ID NO: 946343 - RNA, 19 nt, Homo sapiens
  misc_RNA (1)...(19): siRNA sense strand
cacacaacauaugaaagua

SEQ ID NO: 946344 - RNA, 19 nt, Homo sapiens
  misc_RNA (1)...(19): siRNA sense strand
gguuaacagagaauucuaa

SEQ ID NO: 946345 - RNA, 19 nt, Homo sapiens
  misc_RNA (1)...(19): siRNA sense strand
gaugaaccuucuacaaagc

SEQ ID NO: 946346 - RNA, 19 nt, Homo sapiens
  misc_RNA (1)...(19): siRNA sense strand
gaccuggaccacaaacuga

SEQ ID NO: 946347 - RNA, 19 nt, Homo sapiens
  misc_RNA (1)...(19): siRNA sense strand
gaaacugauucugauucug

SEQ ID NO: 946348 - RNA, 19 nt, Homo sapiens
  misc_RNA (1)...(19): siRNA sense strand
ugaugaguaugaagaggaa

SEQ ID NO: 946349 - RNA, 19 nt, Homo sapiens
  misc_RNA (1)...(19): siRNA sense strand
acagaaaggagaagaagga

SEQ ID NO: 946350 - RNA, 19 nt, Homo sapiens
  misc_RNA (1)...(19): siRNA sense strand
guacagagagagccagaag

SEQ ID NO: 946351 - RNA, 19 nt, Homo sapiens
  misc_RNA (1)...(19): siRNA sense strand
gaacucacagcauuuuaaa

SEQ ID NO: 946352 - RNA, 19 nt, Homo sapiens
  misc_RNA (1)...(19): siRNA sense strand
aaaugaggaugacgaugau

SEQ ID NO: 946353 - RNA, 19 nt, Homo sapiens
  misc_RNA (1)...(19): siRNA sense strand
accacaaacugaagccuuu

SEQ ID NO: 946354 - RNA, 19 nt, Homo sapiens
  misc_RNA (1)...(19): siRNA sense strand
gaaagcauucacuccuuca

SEQ ID NO: 946355 - RNA, 19 nt, Homo sapiens
  misc_RNA (1)...(19): siRNA sense strand
ugaugaugaugaugauuca

SEQ ID NO: 946356 - RNA, 19 nt, Homo sapiens
  misc_RNA (1)...(19): siRNA sense strand
acacguggauugagagcau

SEQ ID NO: 946357 - RNA, 19 nt, Homo sapiens
  misc_RNA (1)...(19): siRNA sense strand
ccagaccccuucucaugua

SEQ ID NO: 946358 - RNA, 19 nt, Homo sapiens
  misc_RNA (1)...(19): siRNA sense strand
acacaccucaguugauuga

SEQ ID NO: 946359 - RNA, 19 nt, Homo sapiens
  misc_RNA (1)...(19): siRNA sense strand
ggugcucucacucugguua

SEQ ID NO: 946360 - RNA, 19 nt, Homo sapiens
  misc_RNA (1)...(19): siRNA sense strand
gcacaacaucacacaacau

SEQ ID NO: 946361 - RNA, 19 nt, Homo sapiens
  misc_RNA (1)...(19): siRNA sense strand
ccacggcagagauugauug

SEQ ID NO: 946362 - RNA, 19 nt, Homo sapiens
  misc_RNA (1)...(19): siRNA sense strand
ugacaugaucugugccauu

SEQ ID NO: 946363 - RNA, 19 nt, Homo sapiens
  misc_RNA (1)...(19): siRNA sense strand
uccaguacaucaguaggua

SEQ ID NO: 946364 - RNA, 19 nt, Homo sapiens
  misc_RNA (1)...(19): siRNA sense strand
gccuauugguauuggauga

SEQ ID NO: 946365 - RNA, 19 nt, Homo sapiens
  misc_RNA (1)...(19): siRNA sense strand
cgaugaugaugaugaugau

SEQ ID NO: 946366 - RNA, 19 nt, Homo sapiens
  misc_RNA (1)...(19): siRNA sense strand
gccauugacacguggauug

SEQ ID NO: 946367 - RNA, 19 nt, Homo sapiens
  misc_RNA (1)...(19): siRNA sense strand
gccagaagcacagaaagga

SEQ ID NO: 946368 - RNA, 19 nt, Homo sapiens
  misc_RNA (1)...(19): siRNA sense strand
ugaauuacaccguucuaag

SEQ ID NO: 946369 - RNA, 19 nt, Homo sapiens
  misc_RNA (1)...(19): siRNA sense strand
ggucccacguccugaugga

SEQ ID NO: 946370 - RNA, 19 nt, Homo sapiens
  misc_RNA (1)...(19): siRNA sense strand
ugaaauuaaggaacucuuc

SEQ ID NO: 946371 - RNA, 19 nt, Homo sapiens
  misc_RNA (1)...(19): siRNA sense strand
acacgcugaugcaggaaug

SEQ ID NO: 946372 - RNA, 19 nt, Homo sapiens
  misc_RNA (1)...(19): siRNA sense strand
aaagaaucccaaagccauu

SEQ ID NO: 946373 - RNA, 19 nt, Homo sapiens
  misc_RNA (1)...(19): siRNA sense strand
aaaaugaggaugacgauga

SEQ ID NO: 946374 - RNA, 19 nt, Homo sapiens
  misc_RNA (1)...(19): siRNA sense strand
acucagaauucaagaacuc

SEQ ID NO: 946375 - RNA, 19 nt, Homo sapiens
  misc_RNA (1)...(19): siRNA sense strand
ggaaugguccccggaguuu

SEQ ID NO: 946376 - RNA, 19 nt, Homo sapiens
  misc_RNA (1)...(19): siRNA sense strand
ccuagaagaugcagaaaag

SEQ ID NO: 946377 - RNA, 19 nt, Homo sapiens
  misc_RNA (1)...(19): siRNA sense strand
gcauggagccccucuggaa

SEQ ID NO: 946378 - RNA, 19 nt, Homo sapiens
  misc_RNA (1)...(19): siRNA sense strand
agaagaaggagaccucaca

SEQ ID NO: 946379 - RNA, 19 nt, Homo sapiens
  misc_RNA (1)...(19): siRNA sense strand
agaguacauugacaugauc

SEQ ID NO: 946380 - RNA, 19 nt, Homo sapiens
  misc_RNA (1)...(19): siRNA sense strand
guacauugacaugaucugu

SEQ ID NO: 946381 - RNA, 19 nt, Homo sapiens
  misc_RNA (1)...(19): siRNA sense strand
ugaugaugaugaugaagag

SEQ ID NO: 946382 - RNA, 19 nt, Homo sapiens
  misc_RNA (1)...(19): siRNA sense strand
acagagagagccagaagca

SEQ ID NO: 946383 - RNA, 19 nt, Homo sapiens
  misc_RNA (1)...(19): siRNA sense strand
aaccuuggccuauugguau

SEQ ID NO: 946384 - RNA, 19 nt, Homo sapiens
  misc_RNA (1)...(19): siRNA sense strand
gguacacaccucaguugau

SEQ ID NO: 946385 - RNA, 19 nt, Homo sapiens
  misc_RNA (1)...(19): siRNA sense strand
cugcugaaauuaaggaacu

SEQ ID NO: 946386 - RNA, 19 nt, Homo sapiens
  misc_RNA (1)...(19): siRNA sense strand
cugcagacuaugagcauuu

SEQ ID NO: 946387 - RNA, 19 nt, Homo sapiens
  misc_RNA (1)...(19): siRNA sense strand
cugacaaccuuggccuauu

SEQ ID NO: 946388 - RNA, 19 nt, Homo sapiens
  misc_RNA (1)...(19): siRNA sense strand
gauccagucccuccaucug

SEQ ID NO: 946389 - RNA, 19 nt, Homo sapiens
  misc_RNA (1)...(19): siRNA sense strand
gaucugugccauucuagac

SEQ ID NO: 946390 - RNA, 19 nt, Homo sapiens
  misc_RNA (1)...(19): siRNA sense strand
uugagagggugggauggua

SEQ ID NO: 946391 - RNA, 19 nt, Homo sapiens
  misc_RNA (1)...(19): siRNA sense strand
agccuuucauuccugauuu

SEQ ID NO: 946392 - RNA, 19 nt, Homo sapiens
  misc_RNA (1)...(19): siRNA sense strand
auggagacauuaaccuuca

SEQ ID NO: 946393 - RNA, 19 nt, Homo sapiens
  misc_RNA (1)...(19): siRNA sense strand
ccauugacacguggauuga

SEQ ID NO: 946394 - RNA, 19 nt, Homo sapiens
  misc_RNA (1)...(19): siRNA sense strand
gaggaugacgaugaugaug

SEQ ID NO: 946395 - RNA, 19 nt, Homo sapiens
  misc_RNA (1)...(19): siRNA sense strand
caagaacucacagcauuuu

SEQ ID NO: 946396 - RNA, 19 nt, Homo sapiens
  misc_RNA (1)...(19): siRNA sense strand
caaagacauggacccuguu

SEQ ID NO: 946397 - RNA, 19 nt, Homo sapiens
  misc_RNA (1)...(19): siRNA sense strand
acgaugaugaugaugauga

SEQ ID NO: 946398 - RNA, 19 nt, Homo sapiens
  misc_RNA (1)...(19): siRNA sense strand
acaaacaccugaaauguaa

SEQ ID NO: 946399 - RNA, 19 nt, Homo sapiens
  misc_RNA (1)...(19): siRNA sense strand
ccagagaaaucuaugaauu

SEQ ID NO: 946400 - RNA, 19 nt, Homo sapiens
  misc_RNA (1)...(19): siRNA sense strand
aaacgugacccucauguua

SEQ ID NO: 946401 - RNA, 19 nt, Homo sapiens
  misc_RNA (1)...(19): siRNA sense strand
gauagcaccugagacagua

SEQ ID NO: 946402 - RNA, 19 nt, Homo sapiens
  misc_RNA (1)...(19): siRNA sense strand
gcagcauggugauucauuu

SEQ ID NO: 946403 - RNA, 19 nt, Homo sapiens
  misc_RNA (1)...(19): siRNA sense strand
gcaagagacauuuguguga

SEQ ID NO: 946404 - RNA, 19 nt, Homo sapiens
  misc_RNA (1)...(19): siRNA sense strand
ccaguuagcucagauagca

SEQ ID NO: 946405 - RNA, 19 nt, Homo sapiens
  misc_RNA (1)...(19): siRNA sense strand
guacaaacaccugaaaugu

SEQ ID NO: 946406 - RNA, 19 nt, Homo sapiens
  misc_RNA (1)...(19): siRNA sense strand
cagauuacuuugugauugu

SEQ ID NO: 946407 - RNA, 19 nt, Homo sapiens
  misc_RNA (1)...(19): siRNA sense strand
gauaugaugguuucacuuc

SEQ ID NO: 946408 - RNA, 19 nt, Homo sapiens
  misc_RNA (1)...(19): siRNA sense strand
ccagguuccuccagaaaug

SEQ ID NO: 946409 - RNA, 19 nt, Homo sapiens
  misc_RNA (1)...(19): siRNA sense strand
caagagacauuugugugau

SEQ ID NO: 946410 - RNA, 19 nt, Homo sapiens
  misc_RNA (1)...(19): siRNA sense strand
gauccagguuccuccagaa

SEQ ID NO: 946411 - RNA, 19 nt, Homo sapiens
  misc_RNA (1)...(19): siRNA sense strand
gcauggugauucauuugau

SEQ ID NO: 946412 - RNA, 19 nt, Homo sapiens
  misc_RNA (1)...(19): siRNA sense strand
uauggacccuacguucuua

SEQ ID NO: 946413 - RNA, 19 nt, Homo sapiens
  misc_RNA (1)...(19): siRNA sense strand
acagauuacuuugugauug

SEQ ID NO: 946414 - RNA, 19 nt, Homo sapiens
  misc_RNA (1)...(19): siRNA sense strand
gacccuacguucuuaugau

SEQ ID NO: 946415 - RNA, 19 nt, Homo sapiens
  misc_RNA (1)...(19): siRNA sense strand
ucauacuggucccaaguuu

SEQ ID NO: 946416 - RNA, 19 nt, Homo sapiens
  misc_RNA (1)...(19): siRNA sense strand
gaagggaaggacacugaug

SEQ ID NO: 946417 - RNA, 19 nt, Homo sapiens
  misc_RNA (1)...(19): siRNA sense strand
ugacccucauguuaagaua

SEQ ID NO: 946418 - RNA, 19 nt, Homo sapiens
  misc_RNA (1)...(19): siRNA sense strand
gaaaccagagaaaucuaug

SEQ ID NO: 946419 - RNA, 19 nt, Homo sapiens
  misc_RNA (1)...(19): siRNA sense strand
gaacuucuacccgacacuu

SEQ ID NO: 946420 - RNA, 19 nt, Homo sapiens
  misc_RNA (1)...(19): siRNA sense strand
gaaauuauggacccuacgu

SEQ ID NO: 946421 - RNA, 19 nt, Homo sapiens
  misc_RNA (1)...(19): siRNA sense strand
gaugaccaguuagcucaga

SEQ ID NO: 946422 - RNA, 19 nt, Homo sapiens
  misc_RNA (1)...(19): siRNA sense strand
caacgagggacgcccagaa

SEQ ID NO: 946423 - RNA, 19 nt, Homo sapiens
  misc_RNA (1)...(19): siRNA sense strand
ggacccuacguucuuauga

SEQ ID NO: 946424 - RNA, 19 nt, Homo sapiens
  misc_RNA (1)...(19): siRNA sense strand
uagaagggaaggacacuga

SEQ ID NO: 946425 - RNA, 19 nt, Homo sapiens
  misc_RNA (1)...(19): siRNA sense strand
cauggugauucauuugaug

SEQ ID NO: 946426 - RNA, 19 nt, Homo sapiens
  misc_RNA (1)...(19): siRNA sense strand
auacuggucccaaguuuga

SEQ ID NO: 946427 - RNA, 19 nt, Homo sapiens
  misc_RNA (1)...(19): siRNA sense strand
gaucauacuggucccaagu

SEQ ID NO: 946428 - RNA, 19 nt, Homo sapiens
  misc_RNA (1)...(19): siRNA sense strand
cauuugaugcuuccagaaa

SEQ ID NO: 946429 - RNA, 19 nt, Homo sapiens
  misc_RNA (1)...(19): siRNA sense strand
ccagaaaccagagaaaucu

SEQ ID NO: 946430 - RNA, 19 nt, Homo sapiens
  misc_RNA (1)...(19): siRNA sense strand
uaugaugguuucacuucug

SEQ ID NO: 946431 - RNA, 19 nt, Homo sapiens
  misc_RNA (1)...(19): siRNA sense strand
ggccuucuacguugugaaa

SEQ ID NO: 946432 - RNA, 19 nt, Homo sapiens
  misc_RNA (1)...(19): siRNA sense strand
guucuuaugaugaccaguu

SEQ ID NO: 946433 - RNA, 19 nt, Homo sapiens
  misc_RNA (1)...(19): siRNA sense strand
caaguuugacaucgauaug

SEQ ID NO: 946434 - RNA, 19 nt, Homo sapiens
  misc_RNA (1)...(19): siRNA sense strand
ggaauagaagaugauacuu

SEQ ID NO: 946435 - RNA, 19 nt, Homo sapiens
  misc_RNA (1)...(19): siRNA sense strand
ccagaaaugagauauacag

SEQ ID NO: 946436 - RNA, 19 nt, Homo sapiens
  misc_RNA (1)...(19): siRNA sense strand
agacaguaccugaagacuu

SEQ ID NO: 946437 - RNA, 19 nt, Homo sapiens
  misc_RNA (1)...(19): siRNA sense strand
aacgugacccucauguuaa

SEQ ID NO: 946438 - RNA, 19 nt, Homo sapiens
  misc_RNA (1)...(19): siRNA sense strand
uaaacgugacccucauguu

SEQ ID NO: 946439 - RNA, 19 nt, Homo sapiens
  misc_RNA (1)...(19): siRNA sense strand
guaaacgugacccucaugu

SEQ ID NO: 946440 - RNA, 19 nt, Homo sapiens
  misc_RNA (1)...(19): siRNA sense strand
ugccauggccuucuacguu

SEQ ID NO: 946441 - RNA, 19 nt, Homo sapiens
  misc_RNA (1)...(19): siRNA sense strand
ggacgcggcagaucauacu

SEQ ID NO: 946442 - RNA, 19 nt, Homo sapiens
  misc_RNA (1)...(19): siRNA sense strand
uguacaaacaccugaaaug

SEQ ID NO: 946443 - RNA, 19 nt, Homo sapiens
  misc_RNA (1)...(19): siRNA sense strand
aaaccagagaaaucuauga

SEQ ID NO: 946444 - RNA, 19 nt, Homo sapiens
  misc_RNA (1)...(19): siRNA sense strand
cagaaaccagagaaaucua

SEQ ID NO: 946445 - RNA, 19 nt, Homo sapiens
  misc_RNA (1)...(19): siRNA sense strand
ggugauucauuugaugcuu

SEQ ID NO: 946446 - RNA, 19 nt, Homo sapiens
  misc_RNA (1)...(19): siRNA sense strand
cagcauggugauucauuug

SEQ ID NO: 946447 - RNA, 19 nt, Homo sapiens
  misc_RNA (1)...(19): siRNA sense strand
agaaaccagagaaaucuau

SEQ ID NO: 946448 - RNA, 19 nt, Homo sapiens
  misc_RNA (1)...(19): siRNA sense strand
ccaaguuugacaucgauau

SEQ ID NO: 946449 - RNA, 19 nt, Homo sapiens
  misc_RNA (1)...(19): siRNA sense strand
cagaaaugagauauacaga

SEQ ID NO: 946450 - RNA, 19 nt, Homo sapiens
  misc_RNA (1)...(19): siRNA sense strand
aagggaaggacacugauga

SEQ ID NO: 946451 - RNA, 19 nt, Homo sapiens
  misc_RNA (1)...(19): siRNA sense strand
aagagacauuugugugauc

SEQ ID NO: 946452 - RNA, 19 nt, Homo sapiens
  misc_RNA (1)...(19): siRNA sense strand
cuccagaaaugagauauac

SEQ ID NO: 946453 - RNA, 19 nt, Homo sapiens
  misc_RNA (1)...(19): siRNA sense strand
ccuccagaaaugagauaua

SEQ ID NO: 946454 - RNA, 19 nt, Homo sapiens
  misc_RNA (1)...(19): siRNA sense strand
ugaccaguuagcucagaua

SEQ ID NO: 946455 - RNA, 19 nt, Homo sapiens
  misc_RNA (1)...(19): siRNA sense strand
uucuuaugaugaccaguua

SEQ ID NO: 946456 - RNA, 19 nt, Homo sapiens
  misc_RNA (1)...(19): siRNA sense strand
ggcagcauggugauucauu

SEQ ID NO: 946457 - RNA, 19 nt, Homo sapiens
  misc_RNA (1)...(19): siRNA sense strand
acccucauguuaagauaga

SEQ ID NO: 946458 - RNA, 19 nt, Homo sapiens
  misc_RNA (1)...(19): siRNA sense strand
aaccagagaaaucuaugaa

SEQ ID NO: 946459 - RNA, 19 nt, Homo sapiens
  misc_RNA (1)...(19): siRNA sense strand
gagagaagcccuacacuug

SEQ ID NO: 946460 - RNA, 19 nt, Homo sapiens
  misc_RNA (1)...(19): siRNA sense strand
ggaaccggcugcucuagau

SEQ ID NO: 946461 - RNA, 19 nt, Homo sapiens
  misc_RNA (1)...(19): siRNA sense strand
ggagagaagcccuacacuu

SEQ ID NO: 946462 - RNA, 19 nt, Homo sapiens
  misc_RNA (1)...(19): siRNA sense strand
ggacguggccguguacuuc

SEQ ID NO: 946463 - RNA, 19 nt, Homo sapiens
  misc_RNA (1)...(19): siRNA sense strand
gcagaaccagaaagaagaa

SEQ ID NO: 946464 - RNA, 19 nt, Homo sapiens
  misc_RNA (1)...(19): siRNA sense strand
caagugcgcccagaaucua

SEQ ID NO: 946465 - RNA, 19 nt, Homo sapiens
  misc_RNA (1)...(19): siRNA sense strand
gaaccagaaagaagaaugg

SEQ ID NO: 946466 - RNA, 19 nt, Homo sapiens
  misc_RNA (1)...(19): siRNA sense strand
gccgagggcucugaaguuc

SEQ ID NO: 946467 - RNA, 19 nt, Homo sapiens
  misc_RNA (1)...(19): siRNA sense strand
ggcuaacaguccagagaaa

SEQ ID NO: 946468 - RNA, 19 nt, Homo sapiens
  misc_RNA (1)...(19): siRNA sense strand
gaacgaaacaccgaugacu

SEQ ID NO: 946469 - RNA, 19 nt, Homo sapiens
  misc_RNA (1)...(19): siRNA sense strand
gaaguauucccgccuaagg

SEQ ID NO: 946470 - RNA, 19 nt, Homo sapiens
  misc_RNA (1)...(19): siRNA sense strand
gcacgcacacagaggagaa

SEQ ID NO: 946471 - RNA, 19 nt, Homo sapiens
  misc_RNA (1)...(19): siRNA sense strand
ccacaagugcgcccagaau

SEQ ID NO: 946472 - RNA, 19 nt, Homo sapiens
  misc_RNA (1)...(19): siRNA sense strand
ggccagacccagucggaaa

SEQ ID NO: 946473 - RNA, 19 nt, Homo sapiens
  misc_RNA (1)...(19): siRNA sense strand
gggcuaacaguccagagaa

SEQ ID NO: 946474 - RNA, 19 nt, Homo sapiens
  misc_RNA (1)...(19): siRNA sense strand
ggcuguaccuucccugauc

SEQ ID NO: 946475 - RNA, 19 nt, Homo sapiens
  misc_RNA (1)...(19): siRNA sense strand
guacacacacgggagagaa

SEQ ID NO: 946476 - RNA, 19 nt, Homo sapiens
  misc_RNA (1)...(19): siRNA sense strand
gcuguaccuucccugauca

SEQ ID NO: 946477 - RNA, 19 nt, Homo sapiens
  misc_RNA (1)...(19): siRNA sense strand
ggccgagggcucugaaguu

SEQ ID NO: 946478 - RNA, 19 nt, Homo sapiens
  misc_RNA (1)...(19): siRNA sense strand
gaaagaagaauggggagaa

SEQ ID NO: 946479 - RNA, 19 nt, Homo sapiens
  misc_RNA (1)...(19): siRNA sense strand
cgagggcucugaaguucgu

SEQ ID NO: 946480 - RNA, 19 nt, Homo sapiens
  misc_RNA (1)...(19): siRNA sense strand
ccucucgccuggucaguca

SEQ ID NO: 946481 - RNA, 19 nt, Homo sapiens
  misc_RNA (1)...(19): siRNA sense strand
cagcaaaccccgacugauu

SEQ ID NO: 946482 - RNA, 19 nt, Homo sapiens
  misc_RNA (1)...(19): siRNA sense strand
gugcgcaggucccaaacca

SEQ ID NO: 946483 - RNA, 19 nt, Homo sapiens
  misc_RNA (1)...(19): siRNA sense strand
caucccugcuggucaguca

SEQ ID NO: 946484 - RNA, 19 nt, Homo sapiens
  misc_RNA (1)...(19): siRNA sense strand
gggaaccggcugcucuaga

SEQ ID NO: 946485 - RNA, 19 nt, Homo sapiens
  misc_RNA (1)...(19): siRNA sense strand
ccaaucaccggaccacaca

SEQ ID NO: 946486 - RNA, 19 nt, Homo sapiens
  misc_RNA (1)...(19): siRNA sense strand
aagcagaaccagaaagaag

SEQ ID NO: 946487 - RNA, 19 nt, Homo sapiens
  misc_RNA (1)...(19): siRNA sense strand
cagcaccaggucauccaua

SEQ ID NO: 946488 - RNA, 19 nt, Homo sapiens
  misc_RNA (1)...(19): siRNA sense strand
ccucaucuccugguuggaa

SEQ ID NO: 946489 - RNA, 19 nt, Homo sapiens
  misc_RNA (1)...(19): siRNA sense strand
gccgguccuuggccaauca

SEQ ID NO: 946490 - RNA, 19 nt, Homo sapiens
  misc_RNA (1)...(19): siRNA sense strand
ucuccugguuggaacgaaa

SEQ ID NO: 946491 - RNA, 19 nt, Homo sapiens
  misc_RNA (1)...(19): siRNA sense strand
gaccacacacacaggugaa

SEQ ID NO: 946492 - RNA, 19 nt, Homo sapiens
  misc_RNA (1)...(19): siRNA sense strand
gaaccggcugcucuagauc

SEQ ID NO: 946493 - RNA, 19 nt, Homo sapiens
  misc_RNA (1)...(19): siRNA sense strand
caaacuguagcccuagauc

SEQ ID NO: 946494 - RNA, 19 nt, Homo sapiens
  misc_RNA (1)...(19): siRNA sense strand
gcaccaggucauccauaca

SEQ ID NO: 946495 - RNA, 19 nt, Homo sapiens
  misc_RNA (1)...(19): siRNA sense strand
gaacaaaccugucuauaua

SEQ ID NO: 946496 - RNA, 19 nt, Homo sapiens
  misc_RNA (1)...(19): siRNA sense strand
ggugguaguuucuauauuu

SEQ ID NO: 946497 - RNA, 19 nt, Homo sapiens
  misc_RNA (1)...(19): siRNA sense strand
gaacucagcuuggaaucuu

SEQ ID NO: 946498 - RNA, 19 nt, Homo sapiens
  misc_RNA (1)...(19): siRNA sense strand
gagcaugagugacaacuuc

SEQ ID NO: 946499 - RNA, 19 nt, Homo sapiens
  misc_RNA (1)...(19): siRNA sense strand
cauaucagcucaacagaau

SEQ ID NO: 946500 - RNA, 19 nt, Homo sapiens
  misc_RNA (1)...(19): siRNA sense strand
caucaaacccauuucuuaa

SEQ ID NO: 946501 - RNA, 19 nt, Homo sapiens
  misc_RNA (1)...(19): siRNA sense strand
augaauggcuccucaagua

SEQ ID NO: 946502 - RNA, 19 nt, Homo sapiens
  misc_RNA (1)...(19): siRNA sense strand
cccagaagcuucaguauag

SEQ ID NO: 946503 - RNA, 19 nt, Homo sapiens
  misc_RNA (1)...(19): siRNA sense strand
ccucuaguuucaucacuua

SEQ ID NO: 946504 - RNA, 19 nt, Homo sapiens
  misc_RNA (1)...(19): siRNA sense strand
ugaacaaaccugucuauau

SEQ ID NO: 946505 - RNA, 19 nt, Homo sapiens
  misc_RNA (1)...(19): siRNA sense strand
gacagcaaguuggaucaua

SEQ ID NO: 946506 - RNA, 19 nt, Homo sapiens
  misc_RNA (1)...(19): siRNA sense strand
ggagauccgacuacacuuu

SEQ ID NO: 946507 - RNA, 19 nt, Homo sapiens
  misc_RNA (1)...(19): siRNA sense strand
ucaucaaacccauuucuua

SEQ ID NO: 946508 - RNA, 19 nt, Homo sapiens
  misc_RNA (1)...(19): siRNA sense strand
cacagaagcugcaaagagu

SEQ ID NO: 946509 - RNA, 19 nt, Homo sapiens
  misc_RNA (1)...(19): siRNA sense strand
ucaaacccauuucuuaauc

SEQ ID NO: 946510 - RNA, 19 nt, Homo sapiens
  misc_RNA (1)...(19): siRNA sense strand
acagcaaguuggaucauaa

SEQ ID NO: 946511 - RNA, 19 nt, Homo sapiens
  misc_RNA (1)...(19): siRNA sense strand
uaugaugggucgaugacua

SEQ ID NO: 946512 - RNA, 19 nt, Homo sapiens
  misc_RNA (1)...(19): siRNA sense strand
gaggaacuauauccagaga

SEQ ID NO: 946513 - RNA, 19 nt, Homo sapiens
  misc_RNA (1)...(19): siRNA sense strand
gcccagaagcuucaguaua

SEQ ID NO: 946514 - RNA, 19 nt, Homo sapiens
  misc_RNA (1)...(19): siRNA sense strand
gcagucgccagucaacaua

SEQ ID NO: 946515 - RNA, 19 nt, Homo sapiens
  misc_RNA (1)...(19): siRNA sense strand
gcaccaauaucaacuucag

SEQ ID NO: 946516 - RNA, 19 nt, Homo sapiens
  misc_RNA (1)...(19): siRNA sense strand
gcuaugagacagcaaguug

SEQ ID NO: 946517 - RNA, 19 nt, Homo sapiens
  misc_RNA (1)...(19): siRNA sense strand
cgaaugcucaacagagaua

SEQ ID NO: 946518 - RNA, 19 nt, Homo sapiens
  misc_RNA (1)...(19): siRNA sense strand
gcauaucagcucaacagaa

SEQ ID NO: 946519 - RNA, 19 nt, Homo sapiens
  misc_RNA (1)...(19): siRNA sense strand
aagcuucaguauagaguaa

SEQ ID NO: 946520 - RNA, 19 nt, Homo sapiens
  misc_RNA (1)...(19): siRNA sense strand
aaacggcagucgccaguca

SEQ ID NO: 946521 - RNA, 19 nt, Homo sapiens
  misc_RNA (1)...(19): siRNA sense strand
gugcagcucauccacuaua

SEQ ID NO: 946522 - RNA, 19 nt, Homo sapiens
  misc_RNA (1)...(19): siRNA sense strand
accaugagcuauauacgaa

SEQ ID NO: 946523 - RNA, 19 nt, Homo sapiens
  misc_RNA (1)...(19): siRNA sense strand
caugagcuauauacgaaug

SEQ ID NO: 946524 - RNA, 19 nt, Homo sapiens
  misc_RNA (1)...(19): siRNA sense strand
gaggagauccgacuacacu

SEQ ID NO: 946525 - RNA, 19 nt, Homo sapiens
  misc_RNA (1)...(19): siRNA sense strand
caaauggauuggugguagu

SEQ ID NO: 946526 - RNA, 19 nt, Homo sapiens
  misc_RNA (1)...(19): siRNA sense strand
gagauccgacuacacuuug

SEQ ID NO: 946527 - RNA, 19 nt, Homo sapiens
  misc_RNA (1)...(19): siRNA sense strand
gagcccagaagcuucagua

SEQ ID NO: 946528 - RNA, 19 nt, Homo sapiens
  misc_RNA (1)...(19): siRNA sense strand
gcacuuggucaacauaucu

SEQ ID NO: 946529 - RNA, 19 nt, Homo sapiens
  misc_RNA (1)...(19): siRNA sense strand
gaagcuucaguauagagua

SEQ ID NO: 946530 - RNA, 19 nt, Homo sapiens
  misc_RNA (1)...(19): siRNA sense strand
gauuggugguaguuucuau

SEQ ID NO: 946531 - RNA, 19 nt, Homo sapiens
  misc_RNA (1)...(19): siRNA sense strand
cuggagggcccaugacaua

SEQ ID NO: 946532 - RNA, 19 nt, Homo sapiens
  misc_RNA (1)...(19): siRNA sense strand
ucacagaagcugcaaagag

SEQ ID NO: 946533 - RNA, 19 nt, Homo sapiens
  misc_RNA (1)...(19): siRNA sense strand
caaccgagcccagaagcuu

SEQ ID NO: 946534 - RNA, 19 nt, Homo sapiens
  misc_RNA (1)...(19): siRNA sense strand
ugacaccucuucgcaucaa

SEQ ID NO: 946535 - RNA, 19 nt, Homo sapiens
  misc_RNA (1)...(19): siRNA sense strand
auagagaccagucacauga

SEQ ID NO: 946536 - RNA, 19 nt, Homo sapiens
  misc_RNA (1)...(19): siRNA sense strand
ccagaagcuucaguauaga

SEQ ID NO: 946537 - RNA, 19 nt, Homo sapiens
  misc_RNA (1)...(19): siRNA sense strand
caaacaaccgagcccagaa

SEQ ID NO: 946538 - RNA, 19 nt, Homo sapiens
  misc_RNA (1)...(19): siRNA sense strand
aaaccugucuauauaacca

SEQ ID NO: 946539 - RNA, 19 nt, Homo sapiens
  misc_RNA (1)...(19): siRNA sense strand
ccagucacaugaucuucga

SEQ ID NO: 946540 - RNA, 19 nt, Homo sapiens
  misc_RNA (1)...(19): siRNA sense strand
caauuucaucgucugcaua

SEQ ID NO: 946541 - RNA, 19 nt, Homo sapiens
  misc_RNA (1)...(19): siRNA sense strand
ggagcacuuggucaacaua

SEQ ID NO: 946542 - RNA, 19 nt, Homo sapiens
  misc_RNA (1)...(19): siRNA sense strand
uaucagcucaacagaauuc

SEQ ID NO: 946543 - RNA, 19 nt, Homo sapiens
  misc_RNA (1)...(19): siRNA sense strand
acaaaccugucuauauaac

SEQ ID NO: 946544 - RNA, 19 nt, Homo sapiens
  misc_RNA (1)...(19): siRNA sense strand
ccacuauaaccaugagcua

SEQ ID NO: 946545 - RNA, 19 nt, Homo sapiens
  misc_RNA (1)...(19): siRNA sense strand
caacacuggaagacacgua

SEQ ID NO: 946546 - RNA, 19 nt, Homo sapiens
  misc_RNA (1)...(19): siRNA sense strand
ucagugggaccauguacaa

SEQ ID NO: 946547 - RNA, 19 nt, Homo sapiens
  misc_RNA (1)...(19): siRNA sense strand
ggagggcccaugacauaca

SEQ ID NO: 946548 - RNA, 19 nt, Homo sapiens
  misc_RNA (1)...(19): siRNA sense strand
uauauacgaaugucacaga

SEQ ID NO: 946549 - RNA, 19 nt, Homo sapiens
  misc_RNA (1)...(19): siRNA sense strand
ccaauuucaucgucugcau

SEQ ID NO: 946550 - RNA, 19 nt, Homo sapiens
  misc_RNA (1)...(19): siRNA sense strand
caaacccauuucuuaaucg

SEQ ID NO: 946551 - RNA, 19 nt, Homo sapiens
  misc_RNA (1)...(19): siRNA sense strand
gaaggcuggugggcauaca

SEQ ID NO: 946552 - RNA, 19 nt, Homo sapiens
  misc_RNA (1)...(19): siRNA sense strand
gccagaaccagccaucuca

SEQ ID NO: 946553 - RNA, 19 nt, Homo sapiens
  misc_RNA (1)...(19): siRNA sense strand
cauagagaccagucacaug

SEQ ID NO: 946554 - RNA, 19 nt, Homo sapiens
  misc_RNA (1)...(19): siRNA sense strand
guauagaguaaaugaaugg

SEQ ID NO: 946555 - RNA, 19 nt, Homo sapiens
  misc_RNA (1)...(19): siRNA sense strand
aaacccauuucuuaaucga

SEQ ID NO: 946556 - RNA, 19 nt, Homo sapiens
  misc_RNA (1)...(19): siRNA sense strand
gcucauccacuauaaccau

SEQ ID NO: 946557 - RNA, 19 nt, Homo sapiens
  misc_RNA (1)...(19): siRNA sense strand
aggugcagcucauccacua

SEQ ID NO: 946558 - RNA, 19 nt, Homo sapiens
  misc_RNA (1)...(19): siRNA sense strand
cuuggaaucuuugcucugu

SEQ ID NO: 946559 - RNA, 19 nt, Homo sapiens
  misc_RNA (1)...(19): siRNA sense strand
gcuucaguauagaguaaau

SEQ ID NO: 946560 - RNA, 19 nt, Homo sapiens
  misc_RNA (1)...(19): siRNA sense strand
ccgcaccaauaucaacuuc

SEQ ID NO: 946561 - RNA, 19 nt, Homo sapiens
  misc_RNA (1)...(19): siRNA sense strand
ggugaacucagcuuggaau

SEQ ID NO: 946562 - RNA, 19 nt, Homo sapiens
  misc_RNA (1)...(19): siRNA sense strand
gagcacuuggucaacauau

SEQ ID NO: 946563 - RNA, 19 nt, Homo sapiens
  misc_RNA (1)...(19): siRNA sense strand
agagaccagucacaugauc

SEQ ID NO: 946564 - RNA, 19 nt, Homo sapiens
  misc_RNA (1)...(19): siRNA sense strand
ucaacagaauucaccaaaa

SEQ ID NO: 946565 - RNA, 19 nt, Homo sapiens
  misc_RNA (1)...(19): siRNA sense strand
uacaggggcuuaauauaga

SEQ ID NO: 946566 - RNA, 19 nt, Homo sapiens
  misc_RNA (1)...(19): siRNA sense strand
cugcaaagaguccaaaugg

SEQ ID NO: 946567 - RNA, 19 nt, Homo sapiens
  misc_RNA (1)...(19): siRNA sense strand
uaaaugaauggcuccucaa

SEQ ID NO: 946568 - RNA, 19 nt, Homo sapiens
  misc_RNA (1)...(19): siRNA sense strand
gcugcaaagaguccaaaug

SEQ ID NO: 946569 - RNA, 19 nt, Homo sapiens
  misc_RNA (1)...(19): siRNA sense strand
cagaaccagccaucucaga

SEQ ID NO: 946570 - RNA, 19 nt, Homo sapiens
  misc_RNA (1)...(19): siRNA sense strand
ugaugcauauuuacuacag

SEQ ID NO: 946571 - RNA, 19 nt, Homo sapiens
  misc_RNA (1)...(19): siRNA sense strand
aaggagcacuuggucaaca

SEQ ID NO: 946572 - RNA, 19 nt, Homo sapiens
  misc_RNA (1)...(19): siRNA sense strand
gagacagcaaguuggauca

SEQ ID NO: 946573 - RNA, 19 nt, Homo sapiens
  misc_RNA (1)...(19): siRNA sense strand
auauacgaaugucacagaa

SEQ ID NO: 946574 - RNA, 19 nt, Homo sapiens
  misc_RNA (1)...(19): siRNA sense strand
ugcagcucauccacuauaa

SEQ ID NO: 946575 - RNA, 19 nt, Homo sapiens
  misc_RNA (1)...(19): siRNA sense strand
acccauuucuuaaucgaau

SEQ ID NO: 946576 - RNA, 19 nt, Homo sapiens
  misc_RNA (1)...(19): siRNA sense strand
gcuggugggcauacaagga

SEQ ID NO: 946577 - RNA, 19 nt, Homo sapiens
  misc_RNA (1)...(19): siRNA sense strand
ugacuaucccacccugcua

SEQ ID NO: 946578 - RNA, 19 nt, Homo sapiens
  misc_RNA (1)...(19): siRNA sense strand
uuucaucgucugcauauca

SEQ ID NO: 946579 - RNA, 19 nt, Homo sapiens
  misc_RNA (1)...(19): siRNA sense strand
gcucaacagaauucaccaa

SEQ ID NO: 946580 - RNA, 19 nt, Homo sapiens
  misc_RNA (1)...(19): siRNA sense strand
gagggcccaugacauacag

SEQ ID NO: 946581 - RNA, 19 nt, Homo sapiens
  misc_RNA (1)...(19): siRNA sense strand
uaacagauuucuccaguaa

SEQ ID NO: 946582 - RNA, 19 nt, Homo sapiens
  misc_RNA (1)...(19): siRNA sense strand
cgacagaaaugaaccaguu

SEQ ID NO: 946583 - RNA, 19 nt, Homo sapiens
  misc_RNA (1)...(19): siRNA sense strand
caacaacagccacggaaua

SEQ ID NO: 946584 - RNA, 19 nt, Homo sapiens
  misc_RNA (1)...(19): siRNA sense strand
gaaccaaguggauggcuua

SEQ ID NO: 946585 - RNA, 19 nt, Homo sapiens
  misc_RNA (1)...(19): siRNA sense strand
ccugauaacaguuccauua

SEQ ID NO: 946586 - RNA, 19 nt, Homo sapiens
  misc_RNA (1)...(19): siRNA sense strand
aaacccacaucuaccauuu

SEQ ID NO: 946587 - RNA, 19 nt, Homo sapiens
  misc_RNA (1)...(19): siRNA sense strand
gauaacaguuccauuacag

SEQ ID NO: 946588 - RNA, 19 nt, Homo sapiens
  misc_RNA (1)...(19): siRNA sense strand
gaaccaacuucuccaucug

SEQ ID NO: 946589 - RNA, 19 nt, Homo sapiens
  misc_RNA (1)...(19): siRNA sense strand
gaaugcaccuauagcagau

SEQ ID NO: 946590 - RNA, 19 nt, Homo sapiens
  misc_RNA (1)...(19): siRNA sense strand
aaacuucacuuggucuuug

SEQ ID NO: 946591 - RNA, 19 nt, Homo sapiens
  misc_RNA (1)...(19): siRNA sense strand
ugacauaccuccacuucgu

SEQ ID NO: 946592 - RNA, 19 nt, Homo sapiens
  misc_RNA (1)...(19): siRNA sense strand
acaaugcaccggaaccuua

SEQ ID NO: 946593 - RNA, 19 nt, Homo sapiens
  misc_RNA (1)...(19): siRNA sense strand
gacauaaacacaacacaga

SEQ ID NO: 946594 - RNA, 19 nt, Homo sapiens
  misc_RNA (1)...(19): siRNA sense strand
cuacuacaauccaacuuug

SEQ ID NO: 946595 - RNA, 19 nt, Homo sapiens
  misc_RNA (1)...(19): siRNA sense strand
caacagccacggaauaaca

SEQ ID NO: 946596 - RNA, 19 nt, Homo sapiens
  misc_RNA (1)...(19): siRNA sense strand
ggaauucuagcuacuacaa

SEQ ID NO: 946597 - RNA, 19 nt, Homo sapiens
  misc_RNA (1)...(19): siRNA sense strand
cugggugucucauugcuua

SEQ ID NO: 946598 - RNA, 19 nt, Homo sapiens
  misc_RNA (1)...(19): siRNA sense strand
ccaaguggauggcuuacca

SEQ ID NO: 946599 - RNA, 19 nt, Homo sapiens
  misc_RNA (1)...(19): siRNA sense strand
acagaacauugcagaaguu

SEQ ID NO: 946600 - RNA, 19 nt, Homo sapiens
  misc_RNA (1)...(19): siRNA sense strand
ccauagcuuuguuucuaaa

SEQ ID NO: 946601 - RNA, 19 nt, Homo sapiens
  misc_RNA (1)...(19): siRNA sense strand
gcaaacuuaaacucagaua

SEQ ID NO: 946602 - RNA, 19 nt, Homo sapiens
  misc_RNA (1)...(19): siRNA sense strand
uaacaguuccauuacaguu

SEQ ID NO: 946603 - RNA, 19 nt, Homo sapiens
  misc_RNA (1)...(19): siRNA sense strand
gcuacuacaauccaacuuu

SEQ ID NO: 946604 - RNA, 19 nt, Homo sapiens
  misc_RNA (1)...(19): siRNA sense strand
aaacacaacacagaacauu

SEQ ID NO: 946605 - RNA, 19 nt, Homo sapiens
  misc_RNA (1)...(19): siRNA sense strand
ucucauugcuuacucuugu

SEQ ID NO: 946606 - RNA, 19 nt, Homo sapiens
  misc_RNA (1)...(19): siRNA sense strand
ccacaaacagugauagcuu

SEQ ID NO: 946607 - RNA, 19 nt, Homo sapiens
  misc_RNA (1)...(19): siRNA sense strand
aagcaaacuuaaacucaga

SEQ ID NO: 946608 - RNA, 19 nt, Homo sapiens
  misc_RNA (1)...(19): siRNA sense strand
gaugacauaccuccacuuc

SEQ ID NO: 946609 - RNA, 19 nt, Homo sapiens
  misc_RNA (1)...(19): siRNA sense strand
gaaaacuccugauaacagu

SEQ ID NO: 946610 - RNA, 19 nt, Homo sapiens
  misc_RNA (1)...(19): siRNA sense strand
uaaagugccuuggaaugca

SEQ ID NO: 946611 - RNA, 19 nt, Homo sapiens
  misc_RNA (1)...(19): siRNA sense strand
caucagcagagcauucuuu

SEQ ID NO: 946612 - RNA, 19 nt, Homo sapiens
  misc_RNA (1)...(19): siRNA sense strand
auccauagcuuuguuucua

SEQ ID NO: 946613 - RNA, 19 nt, Homo sapiens
  misc_RNA (1)...(19): siRNA sense strand
guucugcgauuagacaaug

SEQ ID NO: 946614 - RNA, 19 nt, Homo sapiens
  misc_RNA (1)...(19): siRNA sense strand
cacagaacauugcagaagu

SEQ ID NO: 946615 - RNA, 19 nt, Homo sapiens
  misc_RNA (1)...(19): siRNA sense strand
gcaccggaaccuuaugaug

SEQ ID NO: 946616 - RNA, 19 nt, Homo sapiens
  misc_RNA (1)...(19): siRNA sense strand
ugauaacaguuccauuaca

SEQ ID NO: 946617 - RNA, 19 nt, Homo sapiens
  misc_RNA (1)...(19): siRNA sense strand
caucuaccauuuccacaag

SEQ ID NO: 946618 - RNA, 19 nt, Homo sapiens
  misc_RNA (1)...(19): siRNA sense strand
gccacggaauaacagauuu

SEQ ID NO: 946619 - RNA, 19 nt, Homo sapiens
  misc_RNA (1)...(19): siRNA sense strand
ugaagcaaacuuaaacuca

SEQ ID NO: 946620 - RNA, 19 nt, Homo sapiens
  misc_RNA (1)...(19): siRNA sense strand
auaaccaccucaaaucuca

SEQ ID NO: 946621 - RNA, 19 nt, Homo sapiens
  misc_RNA (1)...(19): siRNA sense strand
uuucuaaagugccuuggaa

SEQ ID NO: 946622 - RNA, 19 nt, Homo sapiens
  misc_RNA (1)...(19): siRNA sense strand
acaauccaacuuugaauga

SEQ ID NO: 946623 - RNA, 19 nt, Homo sapiens
  misc_RNA (1)...(19): siRNA sense strand
gcacgugauggcauuccua

SEQ ID NO: 946624 - RNA, 19 nt, Homo sapiens
  misc_RNA (1)...(19): siRNA sense strand
gugauggcauuccuaugga

SEQ ID NO: 946625 - RNA, 19 nt, Homo sapiens
  misc_RNA (1)...(19): siRNA sense strand
gaaaauauaaccaccucaa

SEQ ID NO: 946626 - RNA, 19 nt, Homo sapiens
  misc_RNA (1)...(19): siRNA sense strand
caccggaaccuuaugaugu

SEQ ID NO: 946627 - RNA, 19 nt, Homo sapiens
  misc_RNA (1)...(19): siRNA sense strand
gccuuggaaugcaccuaua

SEQ ID NO: 946628 - RNA, 19 nt, Homo sapiens
  misc_RNA (1)...(19): siRNA sense strand
uccauagcuuuguuucuaa

SEQ ID NO: 946629 - RNA, 19 nt, Homo sapiens
  misc_RNA (1)...(19): siRNA sense strand
acagauuucuccaguaacu

SEQ ID NO: 946630 - RNA, 19 nt, Homo sapiens
  misc_RNA (1)...(19): siRNA sense strand
aauauaaccaccucaaauc

SEQ ID NO: 946631 - RNA, 19 nt, Homo sapiens
  misc_RNA (1)...(19): siRNA sense strand
ccacuucguacuucuguau

SEQ ID NO: 946632 - RNA, 19 nt, Homo sapiens
  misc_RNA (1)...(19): siRNA sense strand
gacauaccuccacuucgua

SEQ ID NO: 946633 - RNA, 19 nt, Homo sapiens
  misc_RNA (1)...(19): siRNA sense strand
auaacagauuucuccagua

SEQ ID NO: 946634 - RNA, 19 nt, Homo sapiens
  misc_RNA (1)...(19): siRNA sense strand
cauccucucuucagaacca

SEQ ID NO: 946635 - RNA, 19 nt, Homo sapiens
  misc_RNA (1)...(19): siRNA sense strand
ggaaccuuaugaugugagu

SEQ ID NO: 946636 - RNA, 19 nt, Homo sapiens
  misc_RNA (1)...(19): siRNA sense strand
gcgacuuuaugacgacaga

SEQ ID NO: 946637 - RNA, 19 nt, Homo sapiens
  misc_RNA (1)...(19): siRNA sense strand
aacaacagccacggaauaa

SEQ ID NO: 946638 - RNA, 19 nt, Homo sapiens
  misc_RNA (1)...(19): siRNA sense strand
gccagaaagugaagaaaau

SEQ ID NO: 946639 - RNA, 19 nt, Homo sapiens
  misc_RNA (1)...(19): siRNA sense strand
caauccaacuuugaaugau

SEQ ID NO: 946640 - RNA, 19 nt, Homo sapiens
  misc_RNA (1)...(19): siRNA sense strand
gaugugaguuuugggaauu

SEQ ID NO: 946641 - RNA, 19 nt, Homo sapiens
  misc_RNA (1)...(19): siRNA sense strand
cagccuaccuuaaaauuca

SEQ ID NO: 946642 - RNA, 19 nt, Homo sapiens
  misc_RNA (1)...(19): siRNA sense strand
acaguuccauuacaguuag

SEQ ID NO: 946643 - RNA, 19 nt, Homo sapiens
  misc_RNA (1)...(19): siRNA sense strand
uauucugggugucucauug

SEQ ID NO: 946644 - RNA, 19 nt, Homo sapiens
  misc_RNA (1)...(19): siRNA sense strand
ucagaaaacuucacuuggu

SEQ ID NO: 946645 - RNA, 19 nt, Homo sapiens
  misc_RNA (1)...(19): siRNA sense strand
gcauuccuauggaugacau

SEQ ID NO: 946646 - RNA, 19 nt, Homo sapiens
  misc_RNA (1)...(19): siRNA sense strand
caucucagcacaucccaau

SEQ ID NO: 946647 - RNA, 19 nt, Homo sapiens
  misc_RNA (1)...(19): siRNA sense strand
gacuuuaugacgacagaaa

SEQ ID NO: 946648 - RNA, 19 nt, Homo sapiens
  misc_RNA (1)...(19): siRNA sense strand
gauagcuucacuggguuua

SEQ ID NO: 946649 - RNA, 19 nt, Homo sapiens
  misc_RNA (1)...(19): siRNA sense strand
caguuagcauccucucuuc

SEQ ID NO: 946650 - RNA, 19 nt, Homo sapiens
  misc_RNA (1)...(19): siRNA sense strand
ggggagccauggaaaagaa

SEQ ID NO: 946651 - RNA, 19 nt, Homo sapiens
  misc_RNA (1)...(19): siRNA sense strand
aauucuagcuacuacaauc

SEQ ID NO: 946652 - RNA, 19 nt, Homo sapiens
  misc_RNA (1)...(19): siRNA sense strand
aaccuuaugaugugaguuu

SEQ ID NO: 946653 - RNA, 19 nt, Homo sapiens
  misc_RNA (1)...(19): siRNA sense strand
aacaguuccauuacaguua

SEQ ID NO: 946654 - RNA, 19 nt, Homo sapiens
  misc_RNA (1)...(19): siRNA sense strand
cuuggucuuuggucaauga

SEQ ID NO: 946655 - RNA, 19 nt, Homo sapiens
  misc_RNA (1)...(19): siRNA sense strand
uaacucaucagcagagcau

SEQ ID NO: 946656 - RNA, 19 nt, Homo sapiens
  misc_RNA (1)...(19): siRNA sense strand
gaagaaaaugcacgugaug

SEQ ID NO: 946657 - RNA, 19 nt, Homo sapiens
  misc_RNA (1)...(19): siRNA sense strand
cuuugaaucuacccaacaa

SEQ ID NO: 946658 - RNA, 19 nt, Homo sapiens
  misc_RNA (1)...(19): siRNA sense strand
caaugcaccggaaccuuau

SEQ ID NO: 946659 - RNA, 19 nt, Homo sapiens
  misc_RNA (1)...(19): siRNA sense strand
acaguuagcauccucucuu

SEQ ID NO: 946660 - RNA, 19 nt, Homo sapiens
  misc_RNA (1)...(19): siRNA sense strand
gaauucuagcuacuacaau

SEQ ID NO: 946661 - RNA, 19 nt, Homo sapiens
  misc_RNA (1)...(19): siRNA sense strand
agcccucccuugauccaua

SEQ ID NO: 946662 - RNA, 19 nt, Homo sapiens
  misc_RNA (1)...(19): siRNA sense strand
cgugauggcauuccuaugg

SEQ ID NO: 946663 - RNA, 19 nt, Homo sapiens
  misc_RNA (1)...(19): siRNA sense strand
acauaaacacaacacagaa

SEQ ID NO: 946664 - RNA, 19 nt, Homo sapiens
  misc_RNA (1)...(19): siRNA sense strand
ucuaaagugccuuggaaug

SEQ ID NO: 946665 - RNA, 19 nt, Homo sapiens
  misc_RNA (1)...(19): siRNA sense strand
acacagaacauugcagaag

SEQ ID NO: 946666 - RNA, 19 nt, Homo sapiens
  misc_RNA (1)...(19): siRNA sense strand
gauucagccaugccagaaa

SEQ ID NO: 946667 - RNA, 19 nt, Homo sapiens
  misc_RNA (1)...(19): siRNA sense strand
uagcauccucucuucagaa

SEQ ID NO: 946668 - RNA, 19 nt, Homo sapiens
  misc_RNA (1)...(19): siRNA sense strand
uuagcauccucucuucaga

SEQ ID NO: 946669 - RNA, 19 nt, Homo sapiens
  misc_RNA (1)...(19): siRNA sense strand
cagaacauugcagaaguuu

SEQ ID NO: 946670 - RNA, 19 nt, Homo sapiens
  misc_RNA (1)...(19): siRNA sense strand
cuugauccauagcuuuguu

SEQ ID NO: 946671 - RNA, 19 nt, Homo sapiens
  misc_RNA (1)...(19): siRNA sense strand
ccacggaauaacagauuuc

SEQ ID NO: 946672 - RNA, 19 nt, Homo sapiens
  misc_RNA (1)...(19): siRNA sense strand
accggaaccuuaugaugug

SEQ ID NO: 946673 - RNA, 19 nt, Homo sapiens
  misc_RNA (1)...(19): siRNA sense strand
ccaguucugcgauuagaca

SEQ ID NO: 946674 - RNA, 19 nt, Homo sapiens
  misc_RNA (1)...(19): siRNA sense strand
gcuacuuguuguguggaaa

SEQ ID NO: 946675 - RNA, 19 nt, Homo sapiens
  misc_RNA (1)...(19): siRNA sense strand
cuacaccugcucugucuuc

SEQ ID NO: 946676 - RNA, 19 nt, Homo sapiens
  misc_RNA (1)...(19): siRNA sense strand
gcaccuauagcagaugaag

SEQ ID NO: 946677 - RNA, 19 nt, Homo sapiens
  misc_RNA (1)...(19): siRNA sense strand
acacaacacagaacauugc

SEQ ID NO: 946678 - RNA, 19 nt, Homo sapiens
  misc_RNA (1)...(19): siRNA sense strand
cagccaugccagaaaguga

SEQ ID NO: 946679 - RNA, 19 nt, Homo sapiens
  misc_RNA (1)...(19): siRNA sense strand
ucacuuggucuuuggucaa

SEQ ID NO: 946680 - RNA, 19 nt, Homo sapiens
  misc_RNA (1)...(19): siRNA sense strand
gaaagaggcugaggaggaa

SEQ ID NO: 946681 - RNA, 19 nt, Homo sapiens
  misc_RNA (1)...(19): siRNA sense strand
ccauagagcugcagaaauc

SEQ ID NO: 946682 - RNA, 19 nt, Homo sapiens
  misc_RNA (1)...(19): siRNA sense strand
gaacguccuuagacucuug

SEQ ID NO: 946683 - RNA, 19 nt, Homo sapiens
  misc_RNA (1)...(19): siRNA sense strand
ggaccaaacucaccaccau

SEQ ID NO: 946684 - RNA, 19 nt, Homo sapiens
  misc_RNA (1)...(19): siRNA sense strand
ugauagagcuccgugguuu

SEQ ID NO: 946685 - RNA, 19 nt, Homo sapiens
  misc_RNA (1)...(19): siRNA sense strand
gaauagggccaaagacaga

SEQ ID NO: 946686 - RNA, 19 nt, Homo sapiens
  misc_RNA (1)...(19): siRNA sense strand
gcccaguucuuacaggaua

SEQ ID NO: 946687 - RNA, 19 nt, Homo sapiens
  misc_RNA (1)...(19): siRNA sense strand
gugcagaagcccagaauuu

SEQ ID NO: 946688 - RNA, 19 nt, Homo sapiens
  misc_RNA (1)...(19): siRNA sense strand
gcagaaauccagccucuca

SEQ ID NO: 946689 - RNA, 19 nt, Homo sapiens
  misc_RNA (1)...(19): siRNA sense strand
gauaucaguagacagaaua

SEQ ID NO: 946690 - RNA, 19 nt, Homo sapiens
  misc_RNA (1)...(19): siRNA sense strand
gagaucaacuccaagaaaa

SEQ ID NO: 946691 - RNA, 19 nt, Homo sapiens
  misc_RNA (1)...(19): siRNA sense strand
caaagacagacccaucuaa

SEQ ID NO: 946692 - RNA, 19 nt, Homo sapiens
  misc_RNA (1)...(19): siRNA sense strand
ggauaucaguagacagaau

SEQ ID NO: 946693 - RNA, 19 nt, Homo sapiens
  misc_RNA (1)...(19): siRNA sense strand
gcaaagcaaaggacaagga

SEQ ID NO: 946694 - RNA, 19 nt, Homo sapiens
  misc_RNA (1)...(19): siRNA sense strand
gggaagagcgggagaucaa

SEQ ID NO: 946695 - RNA, 19 nt, Homo sapiens
  misc_RNA (1)...(19): siRNA sense strand
ugaccuugcugucguaugu

SEQ ID NO: 946696 - RNA, 19 nt, Homo sapiens
  misc_RNA (1)...(19): siRNA sense strand
gcuccgugguuuccuguuu

SEQ ID NO: 946697 - RNA, 19 nt, Homo sapiens
  misc_RNA (1)...(19): siRNA sense strand
ucaaagacuccaccaagaa

SEQ ID NO: 946698 - RNA, 19 nt, Homo sapiens
  misc_RNA (1)...(19): siRNA sense strand
ggagauggugcgcauggua

SEQ ID NO: 946699 - RNA, 19 nt, Homo sapiens
  misc_RNA (1)...(19): siRNA sense strand
gcagaagcccagaauuuua

SEQ ID NO: 946700 - RNA, 19 nt, Homo sapiens
  misc_RNA (1)...(19): siRNA sense strand
gaagggcaagggcaagaaa

SEQ ID NO: 946701 - RNA, 19 nt, Homo sapiens
  misc_RNA (1)...(19): siRNA sense strand
aaagacagacccaucuaaa

SEQ ID NO: 946702 - RNA, 19 nt, Homo sapiens
  misc_RNA (1)...(19): siRNA sense strand
ggaauuggcggagagaaug

SEQ ID NO: 946703 - RNA, 19 nt, Homo sapiens
  misc_RNA (1)...(19): siRNA sense strand
ucaguagacagaauaguaa

SEQ ID NO: 946704 - RNA, 19 nt, Homo sapiens
  misc_RNA (1)...(19): siRNA sense strand
ccaagaacguccuuagacu

SEQ ID NO: 946705 - RNA, 19 nt, Homo sapiens
  misc_RNA (1)...(19): siRNA sense strand
gcucagagaccgccuccuu

SEQ ID NO: 946706 - RNA, 19 nt, Homo sapiens
  misc_RNA (1)...(19): siRNA sense strand
uccagccucucaccacuua

SEQ ID NO: 946707 - RNA, 19 nt, Homo sapiens
  misc_RNA (1)...(19): siRNA sense strand
caggauaucaguagacaga

SEQ ID NO: 946708 - RNA, 19 nt, Homo sapiens
  misc_RNA (1)...(19): siRNA sense strand
gggauaaggcccaguucuu

SEQ ID NO: 946709 - RNA, 19 nt, Homo sapiens
  misc_RNA (1)...(19): siRNA sense strand
ggagaagggcaagcagaaa

SEQ ID NO: 946710 - RNA, 19 nt, Homo sapiens
  misc_RNA (1)...(19): siRNA sense strand
ccaaagacagacccaucua

SEQ ID NO: 946711 - RNA, 19 nt, Homo sapiens
  misc_RNA (1)...(19): siRNA sense strand
ggaaugcagaggaggaguu

SEQ ID NO: 946712 - RNA, 19 nt, Homo sapiens
  misc_RNA (1)...(19): siRNA sense strand
ugagagagcaugaggaucu

SEQ ID NO: 946713 - RNA, 19 nt, Homo sapiens
  misc_RNA (1)...(19): siRNA sense strand
cagaauagggccaaagaca

SEQ ID NO: 946714 - RNA, 19 nt, Homo sapiens
  misc_RNA (1)...(19): siRNA sense strand
gggcaagggcaagaaauga

SEQ ID NO: 946715 - RNA, 19 nt, Homo sapiens
  misc_RNA (1)...(19): siRNA sense strand
gagaagggcaagcagaaag

SEQ ID NO: 946716 - RNA, 19 nt, Homo sapiens
  misc_RNA (1)...(19): siRNA sense strand
gaauuggcggagagaauga

SEQ ID NO: 946717 - RNA, 19 nt, Homo sapiens
  misc_RNA (1)...(19): siRNA sense strand
gcaauugcaggagcagaaa

SEQ ID NO: 946718 - RNA, 19 nt, Homo sapiens
  misc_RNA (1)...(19): siRNA sense strand
cugcucagauccaagaaga

SEQ ID NO: 946719 - RNA, 19 nt, Homo sapiens
  misc_RNA (1)...(19): siRNA sense strand
ccacuuaugcagcagauca

SEQ ID NO: 946720 - RNA, 19 nt, Homo sapiens
  misc_RNA (1)...(19): siRNA sense strand
aagcaaaggacaaggagaa

SEQ ID NO: 946721 - RNA, 19 nt, Homo sapiens
  misc_RNA (1)...(19): siRNA sense strand
gcggagagaaugaagaaca

SEQ ID NO: 946722 - RNA, 19 nt, Homo sapiens
  misc_RNA (1)...(19): siRNA sense strand
aaggccagcugauccacua

SEQ ID NO: 946723 - RNA, 19 nt, Homo sapiens
  misc_RNA (1)...(19): siRNA sense strand
ugucguauguggcauccaa

SEQ ID NO: 946724 - RNA, 19 nt, Homo sapiens
  misc_RNA (1)...(19): siRNA sense strand
guauguggcauccaacaga

SEQ ID NO: 946725 - RNA, 19 nt, Homo sapiens
  misc_RNA (1)...(19): siRNA sense strand
gcagaaaggcaaggagaag

SEQ ID NO: 946726 - RNA, 19 nt, Homo sapiens
  misc_RNA (1)...(19): siRNA sense strand
ggaggaaggguggcucaga

SEQ ID NO: 946727 - RNA, 19 nt, Homo sapiens
  misc_RNA (1)...(19): siRNA sense strand
gaaugcagaggaggaguug

SEQ ID NO: 946728 - RNA, 19 nt, Homo sapiens
  misc_RNA (1)...(19): siRNA sense strand
gagaagggcaagggcaaga

SEQ ID NO: 946729 - RNA, 19 nt, Homo sapiens
  misc_RNA (1)...(19): siRNA sense strand
uggaugaggcgaucuacaa

SEQ ID NO: 946730 - RNA, 19 nt, Homo sapiens
  misc_RNA (1)...(19): siRNA sense strand
gaccaaacucaccaccauu

SEQ ID NO: 946731 - RNA, 19 nt, Homo sapiens
  misc_RNA (1)...(19): siRNA sense strand
gcaagggcaaagcaaagga

SEQ ID NO: 946732 - RNA, 19 nt, Homo sapiens
  misc_RNA (1)...(19): siRNA sense strand
gaaugaagaacaggaaugc

SEQ ID NO: 946733 - RNA, 19 nt, Homo sapiens
  misc_RNA (1)...(19): siRNA sense strand
gaagugcagaagcccagaa

SEQ ID NO: 946734 - RNA, 19 nt, Homo sapiens
  misc_RNA (1)...(19): siRNA sense strand
gcagacacaggguagaagu

SEQ ID NO: 946735 - RNA, 19 nt, Homo sapiens
  misc_RNA (1)...(19): siRNA sense strand
ccaaacucaccaccauuga

SEQ ID NO: 946736 - RNA, 19 nt, Homo sapiens
  misc_RNA (1)...(19): siRNA sense strand
ucagagaccgccuccuuuc

SEQ ID NO: 946737 - RNA, 19 nt, Homo sapiens
  misc_RNA (1)...(19): siRNA sense strand
agagaaagaaaggcaauug

SEQ ID NO: 946738 - RNA, 19 nt, Homo sapiens
  misc_RNA (1)...(19): siRNA sense strand
gcucagauccaagaagaag

SEQ ID NO: 946739 - RNA, 19 nt, Homo sapiens
  misc_RNA (1)...(19): siRNA sense strand
gaagagcgggagaucaacu

SEQ ID NO: 946740 - RNA, 19 nt, Homo sapiens
  misc_RNA (1)...(19): siRNA sense strand
caaagacuccaccaagaac

SEQ ID NO: 946741 - RNA, 19 nt, Homo sapiens
  misc_RNA (1)...(19): siRNA sense strand
ccaaaaggaucauguccau

SEQ ID NO: 946742 - RNA, 19 nt, Homo sapiens
  misc_RNA (1)...(19): siRNA sense strand
gagaccgccuccuuuccau

SEQ ID NO: 946743 - RNA, 19 nt, Homo sapiens
  misc_RNA (1)...(19): siRNA sense strand
ggcaauugcaggagcagaa

SEQ ID NO: 946744 - RNA, 19 nt, Homo sapiens
  misc_RNA (1)...(19): siRNA sense strand
gacagaauaguaauaacca

SEQ ID NO: 946745 - RNA, 19 nt, Homo sapiens
  misc_RNA (1)...(19): siRNA sense strand
ugggagaguuugcgcagau

SEQ ID NO: 946746 - RNA, 19 nt, Homo sapiens
  misc_RNA (1)...(19): siRNA sense strand
gagaaugaagaacaggaau

SEQ ID NO: 946747 - RNA, 19 nt, Homo sapiens
  misc_RNA (1)...(19): siRNA sense strand
gagaaagaaaggcaauugc

SEQ ID NO: 946748 - RNA, 19 nt, Homo sapiens
  misc_RNA (1)...(19): siRNA sense strand
aucaaagacuccaccaaga

SEQ ID NO: 946749 - RNA, 19 nt, Homo sapiens
  misc_RNA (1)...(19): siRNA sense strand
ccauggaagcgagggauaa

SEQ ID NO: 946750 - RNA, 19 nt, Homo sapiens
  misc_RNA (1)...(19): siRNA sense strand
gcaagcagaaaggcaagga

SEQ ID NO: 946751 - RNA, 19 nt, Homo sapiens
  misc_RNA (1)...(19): siRNA sense strand
gggcaaagcaaaggacaag

SEQ ID NO: 946752 - RNA, 19 nt, Homo sapiens
  misc_RNA (1)...(19): siRNA sense strand
ugccagguccuccuugaaa

SEQ ID NO: 946753 - RNA, 19 nt, Homo sapiens
  misc_RNA (1)...(19): siRNA sense strand
gggcaagggcaaagcaaag

SEQ ID NO: 946754 - RNA, 19 nt, Homo sapiens
  misc_RNA (1)...(19): siRNA sense strand
caccaagaacguccuuaga

SEQ ID NO: 946755 - RNA, 19 nt, Homo sapiens
  misc_RNA (1)...(19): siRNA sense strand
uuaugcagcagaucaaaga

SEQ ID NO: 946756 - RNA, 19 nt, Homo sapiens
  misc_RNA (1)...(19): siRNA sense strand
agaaagaaaggcaauugca

SEQ ID NO: 946757 - RNA, 19 nt, Homo sapiens
  misc_RNA (1)...(19): siRNA sense strand
gaccgccuccuuuccauag

SEQ ID NO: 946758 - RNA, 19 nt, Homo sapiens
  misc_RNA (1)...(19): siRNA sense strand
cgagggauaaggcccaguu

SEQ ID NO: 946759 - RNA, 19 nt, Homo sapiens
  misc_RNA (1)...(19): siRNA sense strand
ccaccaagaacguccuuag

SEQ ID NO: 946760 - RNA, 19 nt, Homo sapiens
  misc_RNA (1)...(19): siRNA sense strand
gggcagugagagagcauga

SEQ ID NO: 946761 - RNA, 19 nt, Homo sapiens
  misc_RNA (1)...(19): siRNA sense strand
ggaugaggcgaucuacaag

SEQ ID NO: 946762 - RNA, 19 nt, Homo sapiens
  misc_RNA (1)...(19): siRNA sense strand
uacaggauaucaguagaca

SEQ ID NO: 946763 - RNA, 19 nt, Homo sapiens
  misc_RNA (1)...(19): siRNA sense strand
gauagagcuccgugguuuc

SEQ ID NO: 946764 - RNA, 19 nt, Homo sapiens
  misc_RNA (1)...(19): siRNA sense strand
aaagagaaagaaaggcaau

SEQ ID NO: 946765 - RNA, 19 nt, Homo sapiens
  misc_RNA (1)...(19): siRNA sense strand
ggaggcagagcaggagaug

SEQ ID NO: 946766 - RNA, 19 nt, Homo sapiens
  misc_RNA (1)...(19): siRNA sense strand
gcucauccaggcccuaugg

SEQ ID NO: 946767 - RNA, 19 nt, Homo sapiens
  misc_RNA (1)...(19): siRNA sense strand
guucuuacaggauaucagu

SEQ ID NO: 946768 - RNA, 19 nt, Homo sapiens
  misc_RNA (1)...(19): siRNA sense strand
caacagaauagggccaaag

SEQ ID NO: 946769 - RNA, 19 nt, Homo sapiens
  misc_RNA (1)...(19): siRNA sense strand
agaaugaagaacaggaaug

SEQ ID NO: 946770 - RNA, 19 nt, Homo sapiens
  misc_RNA (1)...(19): siRNA sense strand
cggagagaaugaagaacag

SEQ ID NO: 946771 - RNA, 19 nt, Homo sapiens
  misc_RNA (1)...(19): siRNA sense strand
gcccagaauuuuauugaca

SEQ ID NO: 946772 - RNA, 19 nt, Homo sapiens
  misc_RNA (1)...(19): siRNA sense strand
ggccagcugauccacuaaa

SEQ ID NO: 946773 - RNA, 19 nt, Homo sapiens
  misc_RNA (1)...(19): siRNA sense strand
gaucuggacgcuguucaca

SEQ ID NO: 946774 - RNA, 19 nt, Homo sapiens
  misc_RNA (1)...(19): siRNA sense strand
aggaggaguuggaggaucu

SEQ ID NO: 946775 - RNA, 19 nt, Homo sapiens
  misc_RNA (1)...(19): siRNA sense strand
uggcggagagaaugaagaa

SEQ ID NO: 946776 - RNA, 19 nt, Homo sapiens
  misc_RNA (1)...(19): siRNA sense strand
aucaguagacagaauagua

SEQ ID NO: 946777 - RNA, 19 nt, Homo sapiens
  misc_RNA (1)...(19): siRNA sense strand
gcaaaugugugguggcuuu

SEQ ID NO: 946778 - RNA, 19 nt, Homo sapiens
  misc_RNA (1)...(19): siRNA sense strand
agacagaacugcugaagga

SEQ ID NO: 946779 - RNA, 19 nt, Homo sapiens
  misc_RNA (1)...(19): siRNA sense strand
gcaagggcgucuagaugug

SEQ ID NO: 946780 - RNA, 19 nt, Homo sapiens
  misc_RNA (1)...(19): siRNA sense strand
caagcuggcugcugacugu

SEQ ID NO: 946781 - RNA, 19 nt, Homo sapiens
  misc_RNA (1)...(19): siRNA sense strand
caaaucagccuucucaucu

SEQ ID NO: 946782 - RNA, 19 nt, Homo sapiens
  misc_RNA (1)...(19): siRNA sense strand
ugaaggagcauauggcaaa

SEQ ID NO: 946783 - RNA, 19 nt, Homo sapiens
  misc_RNA (1)...(19): siRNA sense strand
ggacacccuucgcguuguu

SEQ ID NO: 946784 - RNA, 19 nt, Homo sapiens
  misc_RNA (1)...(19): siRNA sense strand
agaauugaguggcaaaugu

SEQ ID NO: 946785 - RNA, 19 nt, Homo sapiens
  misc_RNA (1)...(19): siRNA sense strand
ggcaacagaucccaauauc

SEQ ID NO: 946786 - RNA, 19 nt, Homo sapiens
  misc_RNA (1)...(19): siRNA sense strand
caacaacgucggacucaga

SEQ ID NO: 946787 - RNA, 19 nt, Homo sapiens
  misc_RNA (1)...(19): siRNA sense strand
uagaugugcuggucaacaa

SEQ ID NO: 946788 - RNA, 19 nt, Homo sapiens
  misc_RNA (1)...(19): siRNA sense strand
gaagugcgaagccuguuug

SEQ ID NO: 946789 - RNA, 19 nt, Homo sapiens
  misc_RNA (1)...(19): siRNA sense strand
gggaugauaucaacaacgu

SEQ ID NO: 946790 - RNA, 19 nt, Homo sapiens
  misc_RNA (1)...(19): siRNA sense strand
ggucaacaaugcuuaugca

SEQ ID NO: 946791 - RNA, 19 nt, Homo sapiens
  misc_RNA (1)...(19): siRNA sense strand
caaagcaggcgccacaguu

SEQ ID NO: 946792 - RNA, 19 nt, Homo sapiens
  misc_RNA (1)...(19): siRNA sense strand
aauaaggcauucugggaaa

SEQ ID NO: 946793 - RNA, 19 nt, Homo sapiens
  misc_RNA (1)...(19): siRNA sense strand
acucagaggccacuacuuu

SEQ ID NO: 946794 - RNA, 19 nt, Homo sapiens
  misc_RNA (1)...(19): siRNA sense strand
guucaaaucagccuucuca

SEQ ID NO: 946795 - RNA, 19 nt, Homo sapiens
  misc_RNA (1)...(19): siRNA sense strand
gugcccaaguggauuauug

SEQ ID NO: 946796 - RNA, 19 nt, Homo sapiens
  misc_RNA (1)...(19): siRNA sense strand
caacagaucccaauauccu

SEQ ID NO: 946797 - RNA, 19 nt, Homo sapiens
  misc_RNA (1)...(19): siRNA sense strand
ugcaguauauguucaaugu

SEQ ID NO: 946798 - RNA, 19 nt, Homo sapiens
  misc_RNA (1)...(19): siRNA sense strand
gguauuggccguggcauug

SEQ ID NO: 946799 - RNA, 19 nt, Homo sapiens
  misc_RNA (1)...(19): siRNA sense strand
gcuauggccuucgggaugu

SEQ ID NO: 946800 - RNA, 19 nt, Homo sapiens
  misc_RNA (1)...(19): siRNA sense strand
ugaccuugcucgacgcuau

SEQ ID NO: 946801 - RNA, 19 nt, Homo sapiens
  misc_RNA (1)...(19): siRNA sense strand
gaauugaguggcaaaugug

SEQ ID NO: 946802 - RNA, 19 nt, Homo sapiens
  misc_RNA (1)...(19): siRNA sense strand
ccucuacacuagcaaguuc

SEQ ID NO: 946803 - RNA, 19 nt, Homo sapiens
  misc_RNA (1)...(19): siRNA sense strand
gcaaagcugcgugugacaa

SEQ ID NO: 946804 - RNA, 19 nt, Homo sapiens
  misc_RNA (1)...(19): siRNA sense strand
gaaggagcauauggcaaag

SEQ ID NO: 946805 - RNA, 19 nt, Homo sapiens
  misc_RNA (1)...(19): siRNA sense strand
aagcaggcgccacaguuua

SEQ ID NO: 946806 - RNA, 19 nt, Homo sapiens
  misc_RNA (1)...(19): siRNA sense strand
aaagcaggcgccacaguuu

SEQ ID NO: 946807 - RNA, 19 nt, Homo sapiens
  misc_RNA (1)...(19): siRNA sense strand
ggaagccugcaguauaugu

SEQ ID NO: 946808 - RNA, 19 nt, Homo sapiens
  misc_RNA (1)...(19): siRNA sense strand
ucaaaucagccuucucauc

SEQ ID NO: 946809 - RNA, 19 nt, Homo sapiens
  misc_RNA (1)...(19): siRNA sense strand
caugugggaugauaucaac

SEQ ID NO: 946810 - RNA, 19 nt, Homo sapiens
  misc_RNA (1)...(19): siRNA sense strand
ccuccuaccugcccuccuu

SEQ ID NO: 946811 - RNA, 19 nt, Homo sapiens
  misc_RNA (1)...(19): siRNA sense strand
gaagccugcaguauauguu

SEQ ID NO: 946812 - RNA, 19 nt, Homo sapiens
  misc_RNA (1)...(19): siRNA sense strand
gcaaagcaggcgccacagu

SEQ ID NO: 946813 - RNA, 19 nt, Homo sapiens
  misc_RNA (1)...(19): siRNA sense strand
uuauugcccucuacacuag

SEQ ID NO: 946814 - RNA, 19 nt, Homo sapiens
  misc_RNA (1)...(19): siRNA sense strand
gaagccuguuugagcaagu

SEQ ID NO: 946815 - RNA, 19 nt, Homo sapiens
  misc_RNA (1)...(19): siRNA sense strand
gaugugcuggucaacaaug

SEQ ID NO: 946816 - RNA, 19 nt, Homo sapiens
  misc_RNA (1)...(19): siRNA sense strand
aggagcauauggcaaagga

SEQ ID NO: 946817 - RNA, 19 nt, Homo sapiens
  misc_RNA (1)...(19): siRNA sense strand
ugaagugcgaagccuguuu

SEQ ID NO: 946818 - RNA, 19 nt, Homo sapiens
  misc_RNA (1)...(19): siRNA sense strand
gauuauugcccucuacacu

SEQ ID NO: 946819 - RNA, 19 nt, Homo sapiens
  misc_RNA (1)...(19): siRNA sense strand
cgugugcccaaguggauua

SEQ ID NO: 946820 - RNA, 19 nt, Homo sapiens
  misc_RNA (1)...(19): siRNA sense strand
aaaucagccuucucaucug

SEQ ID NO: 946821 - RNA, 19 nt, Homo sapiens
  misc_RNA (1)...(19): siRNA sense strand
auccugagccugaguggua

SEQ ID NO: 946822 - RNA, 19 nt, Homo sapiens
  misc_RNA (1)...(19): siRNA sense strand
uggcaacagaucccaauau

SEQ ID NO: 946823 - RNA, 19 nt, Homo sapiens
  misc_RNA (1)...(19): siRNA sense strand
caaagcugcgugugacaag

SEQ ID NO: 946824 - RNA, 19 nt, Homo sapiens
  misc_RNA (1)...(19): siRNA sense strand
ggacucagaggccacuacu

SEQ ID NO: 946825 - RNA, 19 nt, Homo sapiens
  misc_RNA (1)...(19): siRNA sense strand
caugaauggccaagugugu

SEQ ID NO: 946826 - RNA, 19 nt, Homo sapiens
  misc_RNA (1)...(19): siRNA sense strand
ccaaguguguguggugacu

SEQ ID NO: 946827 - RNA, 19 nt, Homo sapiens
  misc_RNA (1)...(19): siRNA sense strand
ucuuugagcucuguucucu

SEQ ID NO: 946828 - RNA, 19 nt, Homo sapiens
  misc_RNA (1)...(19): siRNA sense strand
gcaaagagaaggauaaaca

SEQ ID NO: 946829 - RNA, 19 nt, Homo sapiens
  misc_RNA (1)...(19): siRNA sense strand
ucacggagcuggaguuugu

SEQ ID NO: 946830 - RNA, 19 nt, Homo sapiens
  misc_RNA (1)...(19): siRNA sense strand
gaaaggacacccucucuag

SEQ ID NO: 946831 - RNA, 19 nt, Homo sapiens
  misc_RNA (1)...(19): siRNA sense strand
agagaaggauaaacagaaa

SEQ ID NO: 946832 - RNA, 19 nt, Homo sapiens
  misc_RNA (1)...(19): siRNA sense strand
gaaccaucuucgacaguga

SEQ ID NO: 946833 - RNA, 19 nt, Homo sapiens
  misc_RNA (1)...(19): siRNA sense strand
gacagugaccugauggaua

SEQ ID NO: 946834 - RNA, 19 nt, Homo sapiens
  misc_RNA (1)...(19): siRNA sense strand
acagugaccugauggauag

SEQ ID NO: 946835 - RNA, 19 nt, Homo sapiens
  misc_RNA (1)...(19): siRNA sense strand
ggagcaaagagaaggauaa

SEQ ID NO: 946836 - RNA, 19 nt, Homo sapiens
  misc_RNA (1)...(19): siRNA sense strand
gagcaaagagaaggauaaa

SEQ ID NO: 946837 - RNA, 19 nt, Homo sapiens
  misc_RNA (1)...(19): siRNA sense strand
gagcuggaguuuguucaga

SEQ ID NO: 946838 - RNA, 19 nt, Homo sapiens
  misc_RNA (1)...(19): siRNA sense strand
gcagccaucuggagcaaag

SEQ ID NO: 946839 - RNA, 19 nt, Homo sapiens
  misc_RNA (1)...(19): siRNA sense strand
aagaugcccuguccucaga

SEQ ID NO: 946840 - RNA, 19 nt, Homo sapiens
  misc_RNA (1)...(19): siRNA sense strand
gaucacggagcuggaguuu

SEQ ID NO: 946841 - RNA, 19 nt, Homo sapiens
  misc_RNA (1)...(19): siRNA sense strand
aaagagaaggauaaacaga

SEQ ID NO: 946842 - RNA, 19 nt, Homo sapiens
  misc_RNA (1)...(19): siRNA sense strand
aagagaaggauaaacagaa

SEQ ID NO: 946843 - RNA, 19 nt, Homo sapiens
  misc_RNA (1)...(19): siRNA sense strand
ggaguuuguucagaucauc

SEQ ID NO: 946844 - RNA, 19 nt, Homo sapiens
  misc_RNA (1)...(19): siRNA sense strand
gcgcagccaucuggagcaa

SEQ ID NO: 946845 - RNA, 19 nt, Homo sapiens
  misc_RNA (1)...(19): siRNA sense strand
agaaaggacacccucucua

SEQ ID NO: 946846 - RNA, 19 nt, Homo sapiens
  misc_RNA (1)...(19): siRNA sense strand
gcuggaguuuguucagauc

SEQ ID NO: 946847 - RNA, 19 nt, Homo sapiens
  misc_RNA (1)...(19): siRNA sense strand
ucccagagccgcaggucua

SEQ ID NO: 946848 - RNA, 19 nt, Homo sapiens
  misc_RNA (1)...(19): siRNA sense strand
caaagagaaggauaaacag

SEQ ID NO: 946849 - RNA, 19 nt, Homo sapiens
  misc_RNA (1)...(19): siRNA sense strand
caaacagaaccaucuucga

SEQ ID NO: 946850 - RNA, 19 nt, Homo sapiens
  misc_RNA (1)...(19): siRNA sense strand
cuucgacagugaccugaug

SEQ ID NO: 946851 - RNA, 19 nt, Homo sapiens
  misc_RNA (1)...(19): siRNA sense strand
gaaggauaaacagaaagga

SEQ ID NO: 946852 - RNA, 19 nt, Homo sapiens
  misc_RNA (1)...(19): siRNA sense strand
gcgaggucaucggccacua

SEQ ID NO: 946853 - RNA, 19 nt, Homo sapiens
  misc_RNA (1)...(19): siRNA sense strand
gcaacugcaaacgcucuuu

SEQ ID NO: 946854 - RNA, 19 nt, Homo sapiens
  misc_RNA (1)...(19): siRNA sense strand
gggcggaggagagaagaug

SEQ ID NO: 946855 - RNA, 19 nt, Homo sapiens
  misc_RNA (1)...(19): siRNA sense strand
ggagaccucuuaaaucaua

SEQ ID NO: 946856 - RNA, 19 nt, Homo sapiens
  misc_RNA (1)...(19): siRNA sense strand
gcacauacauucaacauca

SEQ ID NO: 946857 - RNA, 19 nt, Homo sapiens
  misc_RNA (1)...(19): siRNA sense strand
gcaaauggauggcagaaau

SEQ ID NO: 946858 - RNA, 19 nt, Homo sapiens
  misc_RNA (1)...(19): siRNA sense strand
caacagaaucgcaaucuua

SEQ ID NO: 946859 - RNA, 19 nt, Homo sapiens
  misc_RNA (1)...(19): siRNA sense strand
ugucuuagcugucuucaua

SEQ ID NO: 946860 - RNA, 19 nt, Homo sapiens
  misc_RNA (1)...(19): siRNA sense strand
gaagauagguucuggacau

SEQ ID NO: 946861 - RNA, 19 nt, Homo sapiens
  misc_RNA (1)...(19): siRNA sense strand
ggaauugcauggucucaaa

SEQ ID NO: 946862 - RNA, 19 nt, Homo sapiens
  misc_RNA (1)...(19): siRNA sense strand
caaauaaacuggagcagau

SEQ ID NO: 946863 - RNA, 19 nt, Homo sapiens
  misc_RNA (1)...(19): siRNA sense strand
gcaguaggcuugagucaug

SEQ ID NO: 946864 - RNA, 19 nt, Homo sapiens
  misc_RNA (1)...(19): siRNA sense strand
caucuuacaucuugaauga

SEQ ID NO: 946865 - RNA, 19 nt, Homo sapiens
  misc_RNA (1)...(19): siRNA sense strand
gaccaacugugcuuaaauu

SEQ ID NO: 946866 - RNA, 19 nt, Homo sapiens
  misc_RNA (1)...(19): siRNA sense strand
cagaaucgcaaucuuauua

SEQ ID NO: 946867 - RNA, 19 nt, Homo sapiens
  misc_RNA (1)...(19): siRNA sense strand
gacagacagugaaauaauu

SEQ ID NO: 946868 - RNA, 19 nt, Homo sapiens
  misc_RNA (1)...(19): siRNA sense strand
ggaauuaacgggcuuucua

SEQ ID NO: 946869 - RNA, 19 nt, Homo sapiens
  misc_RNA (1)...(19): siRNA sense strand
guaaugauuugguagaguu

SEQ ID NO: 946870 - RNA, 19 nt, Homo sapiens
  misc_RNA (1)...(19): siRNA sense strand
ucaaagauguugccucuca

SEQ ID NO: 946871 - RNA, 19 nt, Homo sapiens
  misc_RNA (1)...(19): siRNA sense strand
gguaguuucucuucaugua

SEQ ID NO: 946872 - RNA, 19 nt, Homo sapiens
  misc_RNA (1)...(19): siRNA sense strand
ggacacacacagauaaauu

SEQ ID NO: 946873 - RNA, 19 nt, Homo sapiens
  misc_RNA (1)...(19): siRNA sense strand
cuucaucucuggcaauaua

SEQ ID NO: 946874 - RNA, 19 nt, Homo sapiens
  misc_RNA (1)...(19): siRNA sense strand
gaagacagcucagaagaac

SEQ ID NO: 946875 - RNA, 19 nt, Homo sapiens
  misc_RNA (1)...(19): siRNA sense strand
ggacaugugccuaucguuu

SEQ ID NO: 946876 - RNA, 19 nt, Homo sapiens
  misc_RNA (1)...(19): siRNA sense strand
gaaucagccugugcgaaua

SEQ ID NO: 946877 - RNA, 19 nt, Homo sapiens
  misc_RNA (1)...(19): siRNA sense strand
guacagguggccuacauua

SEQ ID NO: 946878 - RNA, 19 nt, Homo sapiens
  misc_RNA (1)...(19): siRNA sense strand
ugaagaaugucaugaaagu

SEQ ID NO: 946879 - RNA, 19 nt, Homo sapiens
  misc_RNA (1)...(19): siRNA sense strand
gagcagauuccgagaguuu

SEQ ID NO: 946880 - RNA, 19 nt, Homo sapiens
  misc_RNA (1)...(19): siRNA sense strand
gcagugugaugcaggcuuu

SEQ ID NO: 946881 - RNA, 19 nt, Homo sapiens
  misc_RNA (1)...(19): siRNA sense strand
gaagaacugugggcaaauc

SEQ ID NO: 946882 - RNA, 19 nt, Homo sapiens
  misc_RNA (1)...(19): siRNA sense strand
caguacagcugcaauauca

SEQ ID NO: 946883 - RNA, 19 nt, Homo sapiens
  misc_RNA (1)...(19): siRNA sense strand
gcagugcaguugaagaaug

SEQ ID NO: 946884 - RNA, 19 nt, Homo sapiens
  misc_RNA (1)...(19): siRNA sense strand
acagauaaauucacaggaa

SEQ ID NO: 946885 - RNA, 19 nt, Homo sapiens
  misc_RNA (1)...(19): siRNA sense strand
cuacaggucccuucagaua

SEQ ID NO: 946886 - RNA, 19 nt, Homo sapiens
  misc_RNA (1)...(19): siRNA sense strand
gugccuaucguuuguauua

SEQ ID NO: 946887 - RNA, 19 nt, Homo sapiens
  misc_RNA (1)...(19): siRNA sense strand
cagaagaacugugggcaaa

SEQ ID NO: 946888 - RNA, 19 nt, Homo sapiens
  misc_RNA (1)...(19): siRNA sense strand
caaaccagauggauuucaa

SEQ ID NO: 946889 - RNA, 19 nt, Homo sapiens
  misc_RNA (1)...(19): siRNA sense strand
ucaaggaauugcagaauca

SEQ ID NO: 946890 - RNA, 19 nt, Homo sapiens
  misc_RNA (1)...(19): siRNA sense strand
uaaggcuucuugaaaguuu

SEQ ID NO: 946891 - RNA, 19 nt, Homo sapiens
  misc_RNA (1)...(19): siRNA sense strand
gcaugaaguuaguagaaga

SEQ ID NO: 946892 - RNA, 19 nt, Homo sapiens
  misc_RNA (1)...(19): siRNA sense strand
ugggagaccucuuaaauca

SEQ ID NO: 946893 - RNA, 19 nt, Homo sapiens
  misc_RNA (1)...(19): siRNA sense strand
ugggacaacuucucaauga

SEQ ID NO: 946894 - RNA, 19 nt, Homo sapiens
  misc_RNA (1)...(19): siRNA sense strand
ggagaucacagcagcauga

SEQ ID NO: 946895 - RNA, 19 nt, Homo sapiens
  misc_RNA (1)...(19): siRNA sense strand
gauaacaacacaucacgaa

SEQ ID NO: 946896 - RNA, 19 nt, Homo sapiens
  misc_RNA (1)...(19): siRNA sense strand
gugggcaaaucacguguua

SEQ ID NO: 946897 - RNA, 19 nt, Homo sapiens
  misc_RNA (1)...(19): siRNA sense strand
ucagacagacagugaaaua

SEQ ID NO: 946898 - RNA, 19 nt, Homo sapiens
  misc_RNA (1)...(19): siRNA sense strand
gcacaaaacaacacauaua

SEQ ID NO: 946899 - RNA, 19 nt, Homo sapiens
  misc_RNA (1)...(19): siRNA sense strand
ggacauggacacacacaga

SEQ ID NO: 946900 - RNA, 19 nt, Homo sapiens
  misc_RNA (1)...(19): siRNA sense strand
caaauggauggcagaaaua

SEQ ID NO: 946901 - RNA, 19 nt, Homo sapiens
  misc_RNA (1)...(19): siRNA sense strand
caacaaggcaacuguacaa

SEQ ID NO: 946902 - RNA, 19 nt, Homo sapiens
  misc_RNA (1)...(19): siRNA sense strand
gagcagugcaguugaagaa

SEQ ID NO: 946903 - RNA, 19 nt, Homo sapiens
  misc_RNA (1)...(19): siRNA sense strand
uuacacaagugaaugaaga

SEQ ID NO: 946904 - RNA, 19 nt, Homo sapiens
  misc_RNA (1)...(19): siRNA sense strand
guaaucggcucagugaaug

SEQ ID NO: 946905 - RNA, 19 nt, Homo sapiens
  misc_RNA (1)...(19): siRNA sense strand
ucagaaggcuuaaacuuuu

SEQ ID NO: 946906 - RNA, 19 nt, Homo sapiens
  misc_RNA (1)...(19): siRNA sense strand
gagaguuuaugacguuguu

SEQ ID NO: 946907 - RNA, 19 nt, Homo sapiens
  misc_RNA (1)...(19): siRNA sense strand
uccgaacgcuuaauugaaa

SEQ ID NO: 946908 - RNA, 19 nt, Homo sapiens
  misc_RNA (1)...(19): siRNA sense strand
ucagaaugcuugugugcaa

SEQ ID NO: 946909 - RNA, 19 nt, Homo sapiens
  misc_RNA (1)...(19): siRNA sense strand
cagauguaaugauuuggua

SEQ ID NO: 946910 - RNA, 19 nt, Homo sapiens
  misc_RNA (1)...(19): siRNA sense strand
ucacaaaacuuacagaugu

SEQ ID NO: 946911 - RNA, 19 nt, Homo sapiens
  misc_RNA (1)...(19): siRNA sense strand
ucauguaccuguucacaau

SEQ ID NO: 946912 - RNA, 19 nt, Homo sapiens
  misc_RNA (1)...(19): siRNA sense strand
aagcaaaccagauggauuu

SEQ ID NO: 946913 - RNA, 19 nt, Homo sapiens
  misc_RNA (1)...(19): siRNA sense strand
gaauuaacgggcuuucuau

SEQ ID NO: 946914 - RNA, 19 nt, Homo sapiens
  misc_RNA (1)...(19): siRNA sense strand
gaagccagcacauacauuc

SEQ ID NO: 946915 - RNA, 19 nt, Homo sapiens
  misc_RNA (1)...(19): siRNA sense strand
gauagguucuggacaugug

SEQ ID NO: 946916 - RNA, 19 nt, Homo sapiens
  misc_RNA (1)...(19): siRNA sense strand
gcacagaugcaaaucaaag

SEQ ID NO: 946917 - RNA, 19 nt, Homo sapiens
  misc_RNA (1)...(19): siRNA sense strand
gacaaagguugaagcagau

SEQ ID NO: 946918 - RNA, 19 nt, Homo sapiens
  misc_RNA (1)...(19): siRNA sense strand
gccaauuacucaucagaau

SEQ ID NO: 946919 - RNA, 19 nt, Homo sapiens
  misc_RNA (1)...(19): siRNA sense strand
ggugaaccuuguccuggua

SEQ ID NO: 946920 - RNA, 19 nt, Homo sapiens
  misc_RNA (1)...(19): siRNA sense strand
caggauauaucacuguugu

SEQ ID NO: 946921 - RNA, 19 nt, Homo sapiens
  misc_RNA (1)...(19): siRNA sense strand
gucagaaggcuuaaacuuu

SEQ ID NO: 946922 - RNA, 19 nt, Homo sapiens
  misc_RNA (1)...(19): siRNA sense strand
acacacagauaaauucaca

SEQ ID NO: 946923 - RNA, 19 nt, Homo sapiens
  misc_RNA (1)...(19): siRNA sense strand
gcgccgagcauuggauuua

SEQ ID NO: 946924 - RNA, 19 nt, Homo sapiens
  misc_RNA (1)...(19): siRNA sense strand
caggguggcugcauaauac

SEQ ID NO: 946925 - RNA, 19 nt, Homo sapiens
  misc_RNA (1)...(19): siRNA sense strand
gaaguuaguagaagaagca

SEQ ID NO: 946926 - RNA, 19 nt, Homo sapiens
  misc_RNA (1)...(19): siRNA sense strand
gaucacagcagcaugaagu

SEQ ID NO: 946927 - RNA, 19 nt, Homo sapiens
  misc_RNA (1)...(19): siRNA sense strand
ccagauggauuucaagaac

SEQ ID NO: 946928 - RNA, 19 nt, Homo sapiens
  misc_RNA (1)...(19): siRNA sense strand
caacaacuuucaucauucg

SEQ ID NO: 946929 - RNA, 19 nt, Homo sapiens
  misc_RNA (1)...(19): siRNA sense strand
guuaguagaagaagcagua

SEQ ID NO: 946930 - RNA, 19 nt, Homo sapiens
  misc_RNA (1)...(19): siRNA sense strand
ucucaaacacugaccauuu

SEQ ID NO: 946931 - RNA, 19 nt, Homo sapiens
  misc_RNA (1)...(19): siRNA sense strand
uuacggccgugcucacuaa

SEQ ID NO: 946932 - RNA, 19 nt, Homo sapiens
  misc_RNA (1)...(19): siRNA sense strand
cuaauaauccugugaucaa

SEQ ID NO: 946933 - RNA, 19 nt, Homo sapiens
  misc_RNA (1)...(19): siRNA sense strand
ggauuucaagaacauguua

SEQ ID NO: 946934 - RNA, 19 nt, Homo sapiens
  misc_RNA (1)...(19): siRNA sense strand
caguaaggcuucuugaaag

SEQ ID NO: 946935 - RNA, 19 nt, Homo sapiens
  misc_RNA (1)...(19): siRNA sense strand
ucaacaacuuucaucauuc

SEQ ID NO: 946936 - RNA, 19 nt, Homo sapiens
  misc_RNA (1)...(19): siRNA sense strand
acaguaaggcuucuugaaa

SEQ ID NO: 946937 - RNA, 19 nt, Homo sapiens
  misc_RNA (1)...(19): siRNA sense strand
uuaaauuccuggcaaaugg

SEQ ID NO: 946938 - RNA, 19 nt, Homo sapiens
  misc_RNA (1)...(19): siRNA sense strand
guagauaggaacaacagaa

SEQ ID NO: 946939 - RNA, 19 nt, Homo sapiens
  misc_RNA (1)...(19): siRNA sense strand
ugaaacuucuucuuguguu

SEQ ID NO: 946940 - RNA, 19 nt, Homo sapiens
  misc_RNA (1)...(19): siRNA sense strand
gggacaacuucucaaugaa

SEQ ID NO: 946941 - RNA, 19 nt, Homo sapiens
  misc_RNA (1)...(19): siRNA sense strand
gaaauaauuacuggacaug

SEQ ID NO: 946942 - RNA, 19 nt, Homo sapiens
  misc_RNA (1)...(19): siRNA sense strand
gaagcagcccuuuggaugu

SEQ ID NO: 946943 - RNA, 19 nt, Homo sapiens
  misc_RNA (1)...(19): siRNA sense strand
gguaaucggcucagugaau

SEQ ID NO: 946944 - RNA, 19 nt, Homo sapiens
  misc_RNA (1)...(19): siRNA sense strand
caccugggauuuaauaagu

SEQ ID NO: 946945 - RNA, 19 nt, Homo sapiens
  misc_RNA (1)...(19): siRNA sense strand
gagguaguuucucuucaug

SEQ ID NO: 946946 - RNA, 19 nt, Homo sapiens
  misc_RNA (1)...(19): siRNA sense strand
ugaagcagauaacaacaca

SEQ ID NO: 946947 - RNA, 19 nt, Homo sapiens
  misc_RNA (1)...(19): siRNA sense strand
agcauuggauuuaguauug

SEQ ID NO: 946948 - RNA, 19 nt, Homo sapiens
  misc_RNA (1)...(19): siRNA sense strand
gagcauuggauuuaguauu

SEQ ID NO: 946949 - RNA, 19 nt, Homo sapiens
  misc_RNA (1)...(19): siRNA sense strand
ccuuucaacucuccuauau

SEQ ID NO: 946950 - RNA, 19 nt, Homo sapiens
  misc_RNA (1)...(19): siRNA sense strand
cagaaggaauuaauuuggu

SEQ ID NO: 946951 - RNA, 19 nt, Homo sapiens
  misc_RNA (1)...(19): siRNA sense strand
aaauguguccgaacgcuua

SEQ ID NO: 946952 - RNA, 19 nt, Homo sapiens
  misc_RNA (1)...(19): siRNA sense strand
gaacaacagaaucgcaauc

SEQ ID NO: 946953 - RNA, 19 nt, Homo sapiens
  misc_RNA (1)...(19): siRNA sense strand
caacugugcuuaaauuccu

SEQ ID NO: 946954 - RNA, 19 nt, Homo sapiens
  misc_RNA (1)...(19): siRNA sense strand
ccucuuggcuggcuucauc

SEQ ID NO: 946955 - RNA, 19 nt, Homo sapiens
  misc_RNA (1)...(19): siRNA sense strand
gaacaagucuuaacagaua

SEQ ID NO: 946956 - RNA, 19 nt, Homo sapiens
  misc_RNA (1)...(19): siRNA sense strand
gaaaggaguuugcccuaaa

SEQ ID NO: 946957 - RNA, 19 nt, Homo sapiens
  misc_RNA (1)...(19): siRNA sense strand
gaaaggaacaccugauuga

SEQ ID NO: 946958 - RNA, 19 nt, Homo sapiens
  misc_RNA (1)...(19): siRNA sense strand
gaaagcagguuacuugucu

SEQ ID NO: 946959 - RNA, 19 nt, Homo sapiens
  misc_RNA (1)...(19): siRNA sense strand
uaaagucgauuacaccaaa

SEQ ID NO: 946960 - RNA, 19 nt, Homo sapiens
  misc_RNA (1)...(19): siRNA sense strand
ggaaaggaguuugcccuaa

SEQ ID NO: 946961 - RNA, 19 nt, Homo sapiens
  misc_RNA (1)...(19): siRNA sense strand
gagcuugaccguugcauaa

SEQ ID NO: 946962 - RNA, 19 nt, Homo sapiens
  misc_RNA (1)...(19): siRNA sense strand
gaguuugcccuaaagauua

SEQ ID NO: 946963 - RNA, 19 nt, Homo sapiens
  misc_RNA (1)...(19): siRNA sense strand
ggagaucucuuugaugcaa

SEQ ID NO: 946964 - RNA, 19 nt, Homo sapiens
  misc_RNA (1)...(19): siRNA sense strand
gugcggauccuucugaaua

SEQ ID NO: 946965 - RNA, 19 nt, Homo sapiens
  misc_RNA (1)...(19): siRNA sense strand
ggaguuugcccuaaagauu

SEQ ID NO: 946966 - RNA, 19 nt, Homo sapiens
  misc_RNA (1)...(19): siRNA sense strand
gcagugccaugguguacaa

SEQ ID NO: 946967 - RNA, 19 nt, Homo sapiens
  misc_RNA (1)...(19): siRNA sense strand
aagcugaggugacagguaa

SEQ ID NO: 946968 - RNA, 19 nt, Homo sapiens
  misc_RNA (1)...(19): siRNA sense strand
caaauguuguggaaaggaa

SEQ ID NO: 946969 - RNA, 19 nt, Homo sapiens
  misc_RNA (1)...(19): siRNA sense strand
uaaguauucuggauccaaa

SEQ ID NO: 946970 - RNA, 19 nt, Homo sapiens
  misc_RNA (1)...(19): siRNA sense strand
ggaauuaaucagucaaaug

SEQ ID NO: 946971 - RNA, 19 nt, Homo sapiens
  misc_RNA (1)...(19): siRNA sense strand
agaacaaucuccaggaaga

SEQ ID NO: 946972 - RNA, 19 nt, Homo sapiens
  misc_RNA (1)...(19): siRNA sense strand
ggaaaggaacaccugauug

SEQ ID NO: 946973 - RNA, 19 nt, Homo sapiens
  misc_RNA (1)...(19): siRNA sense strand
ggucaaagguggagaucuc

SEQ ID NO: 946974 - RNA, 19 nt, Homo sapiens
  misc_RNA (1)...(19): siRNA sense strand
ggacucugccaaggaauua

SEQ ID NO: 946975 - RNA, 19 nt, Homo sapiens
  misc_RNA (1)...(19): siRNA sense strand
aauccaaacuggucuguga

SEQ ID NO: 946976 - RNA, 19 nt, Homo sapiens
  misc_RNA (1)...(19): siRNA sense strand
ccucagcuguuaaguauuc

SEQ ID NO: 946977 - RNA, 19 nt, Homo sapiens
  misc_RNA (1)...(19): siRNA sense strand
gaaacaucccaauaucauu

SEQ ID NO: 946978 - RNA, 19 nt, Homo sapiens
  misc_RNA (1)...(19): siRNA sense strand
gucaaaugcuucagguaaa

SEQ ID NO: 946979 - RNA, 19 nt, Homo sapiens
  misc_RNA (1)...(19): siRNA sense strand
gcacagagacaucaaacca

SEQ ID NO: 946980 - RNA, 19 nt, Homo sapiens
  misc_RNA (1)...(19): siRNA sense strand
guccugaagucaucuuauu

SEQ ID NO: 946981 - RNA, 19 nt, Homo sapiens
  misc_RNA (1)...(19): siRNA sense strand
gaggugacagguaaacuaa

SEQ ID NO: 946982 - RNA, 19 nt, Homo sapiens
  misc_RNA (1)...(19): siRNA sense strand
gaauuaaucagucaaaugc

SEQ ID NO: 946983 - RNA, 19 nt, Homo sapiens
  misc_RNA (1)...(19): siRNA sense strand
gaaccaagucuuugaaacu

SEQ ID NO: 946984 - RNA, 19 nt, Homo sapiens
  misc_RNA (1)...(19): siRNA sense strand
uggcagaucuucuuccaau

SEQ ID NO: 946985 - RNA, 19 nt, Homo sapiens
  misc_RNA (1)...(19): siRNA sense strand
guaaagauuucaucaaacc

SEQ ID NO: 946986 - RNA, 19 nt, Homo sapiens
  misc_RNA (1)...(19): siRNA sense strand
ccaaggaauuaaucaguca

SEQ ID NO: 946987 - RNA, 19 nt, Homo sapiens
  misc_RNA (1)...(19): siRNA sense strand
gauccucagcuguuaagua

SEQ ID NO: 946988 - RNA, 19 nt, Homo sapiens
  misc_RNA (1)...(19): siRNA sense strand
guaucgagcuggagcacuu

SEQ ID NO: 946989 - RNA, 19 nt, Homo sapiens
  misc_RNA (1)...(19): siRNA sense strand
gcaaaucaccagcuucagu

SEQ ID NO: 946990 - RNA, 19 nt, Homo sapiens
  misc_RNA (1)...(19): siRNA sense strand
gagugaaacaucccaauau

SEQ ID NO: 946991 - RNA, 19 nt, Homo sapiens
  misc_RNA (1)...(19): siRNA sense strand
gauuauagacaaagccaaa

SEQ ID NO: 946992 - RNA, 19 nt, Homo sapiens
  misc_RNA (1)...(19): siRNA sense strand
cagaucuucuuccaaugua

SEQ ID NO: 946993 - RNA, 19 nt, Homo sapiens
  misc_RNA (1)...(19): siRNA sense strand
caccgaagccauuaaacua

SEQ ID NO: 946994 - RNA, 19 nt, Homo sapiens
  misc_RNA (1)...(19): siRNA sense strand
caaaucaccagcuucaguu

SEQ ID NO: 946995 - RNA, 19 nt, Homo sapiens
  misc_RNA (1)...(19): siRNA sense strand
gcagaucuucuuccaaugu

SEQ ID NO: 946996 - RNA, 19 nt, Homo sapiens
  misc_RNA (1)...(19): siRNA sense strand
cgagugaaacaucccaaua

SEQ ID NO: 946997 - RNA, 19 nt, Homo sapiens
  misc_RNA (1)...(19): siRNA sense strand
gauaucaccgaagccauua

SEQ ID NO: 946998 - RNA, 19 nt, Homo sapiens
  misc_RNA (1)...(19): siRNA sense strand
ccagaaaucauugcugaaa

SEQ ID NO: 946999 - RNA, 19 nt, Homo sapiens
  misc_RNA (1)...(19): siRNA sense strand
ccaaguacacugagagaga

SEQ ID NO: 947000 - RNA, 19 nt, Homo sapiens
  misc_RNA (1)...(19): siRNA sense strand
gauugagaaugaaguguca

SEQ ID NO: 947001 - RNA, 19 nt, Homo sapiens
  misc_RNA (1)...(19): siRNA sense strand
aggaacaccugauugagaa

SEQ ID NO: 947002 - RNA, 19 nt, Homo sapiens
  misc_RNA (1)...(19): siRNA sense strand
ggaaaggucauuggugaug

SEQ ID NO: 947003 - RNA, 19 nt, Homo sapiens
  misc_RNA (1)...(19): siRNA sense strand
ccaggaaguuucagaggau

SEQ ID NO: 947004 - RNA, 19 nt, Homo sapiens
  misc_RNA (1)...(19): siRNA sense strand
ucgaugcgcuccucauaga

SEQ ID NO: 947005 - RNA, 19 nt, Homo sapiens
  misc_RNA (1)...(19): siRNA sense strand
ggaaguuucagaggauuaa

SEQ ID NO: 947006 - RNA, 19 nt, Homo sapiens
  misc_RNA (1)...(19): siRNA sense strand
gccugaagguggacauuug

SEQ ID NO: 947007 - RNA, 19 nt, Homo sapiens
  misc_RNA (1)...(19): siRNA sense strand
ggaaccaagucuuugaaac

SEQ ID NO: 947008 - RNA, 19 nt, Homo sapiens
  misc_RNA (1)...(19): siRNA sense strand
caaguacacugagagagau

SEQ ID NO: 947009 - RNA, 19 nt, Homo sapiens
  misc_RNA (1)...(19): siRNA sense strand
gauggaaccaagucuuuga

SEQ ID NO: 947010 - RNA, 19 nt, Homo sapiens
  misc_RNA (1)...(19): siRNA sense strand
gcugcugccuccucuguga

SEQ ID NO: 947011 - RNA, 19 nt, Homo sapiens
  misc_RNA (1)...(19): siRNA sense strand
ucaaaugcuucagguaaau

SEQ ID NO: 947012 - RNA, 19 nt, Homo sapiens
  misc_RNA (1)...(19): siRNA sense strand
gcucauggcagaucuucuu

SEQ ID NO: 947013 - RNA, 19 nt, Homo sapiens
  misc_RNA (1)...(19): siRNA sense strand
aaacuggucugugaacauc

SEQ ID NO: 947014 - RNA, 19 nt, Homo sapiens
  misc_RNA (1)...(19): siRNA sense strand
ccaaugcccucagguaucu

SEQ ID NO: 947015 - RNA, 19 nt, Homo sapiens
  misc_RNA (1)...(19): siRNA sense strand
gagaaugaagugucaauac

SEQ ID NO: 947016 - RNA, 19 nt, Homo sapiens
  misc_RNA (1)...(19): siRNA sense strand
ccgaagccauuaaacuaga

SEQ ID NO: 947017 - RNA, 19 nt, Homo sapiens
  misc_RNA (1)...(19): siRNA sense strand
gaaugaagugucaauacug

SEQ ID NO: 947018 - RNA, 19 nt, Homo sapiens
  misc_RNA (1)...(19): siRNA sense strand
uuaaagauuucugcucaug

SEQ ID NO: 947019 - RNA, 19 nt, Homo sapiens
  misc_RNA (1)...(19): siRNA sense strand
uuauguggcuccagaaauc

SEQ ID NO: 947020 - RNA, 19 nt, Homo sapiens
  misc_RNA (1)...(19): siRNA sense strand
agaaugaagugucaauacu

SEQ ID NO: 947021 - RNA, 19 nt, Homo sapiens
  misc_RNA (1)...(19): siRNA sense strand
gaucuucuuccaauguaaa

SEQ ID NO: 947022 - RNA, 19 nt, Homo sapiens
  misc_RNA (1)...(19): siRNA sense strand
caaguuagugacugugauu

SEQ ID NO: 947023 - RNA, 19 nt, Homo sapiens
  misc_RNA (1)...(19): siRNA sense strand
ggugacagguaaacuaaaa

SEQ ID NO: 947024 - RNA, 19 nt, Homo sapiens
  misc_RNA (1)...(19): siRNA sense strand
gcccucagcucggagaaga

SEQ ID NO: 947025 - RNA, 19 nt, Homo sapiens
  misc_RNA (1)...(19): siRNA sense strand
ccaacuuucuacuccuaaa

SEQ ID NO: 947026 - RNA, 19 nt, Homo sapiens
  misc_RNA (1)...(19): siRNA sense strand
gcuguuaaguauucuggau

SEQ ID NO: 947027 - RNA, 19 nt, Homo sapiens
  misc_RNA (1)...(19): siRNA sense strand
ucucgauccucagcuguua

SEQ ID NO: 947028 - RNA, 19 nt, Homo sapiens
  misc_RNA (1)...(19): siRNA sense strand
aaacagaacagcacuacca

SEQ ID NO: 947029 - RNA, 19 nt, Homo sapiens
  misc_RNA (1)...(19): siRNA sense strand
ugaaacaucccaauaucau

SEQ ID NO: 947030 - RNA, 19 nt, Homo sapiens
  misc_RNA (1)...(19): siRNA sense strand
aaagccaaauguuguggaa

SEQ ID NO: 947031 - RNA, 19 nt, Homo sapiens
  misc_RNA (1)...(19): siRNA sense strand
cccuaaagauuauagacaa

SEQ ID NO: 947032 - RNA, 19 nt, Homo sapiens
  misc_RNA (1)...(19): siRNA sense strand
gcggauccuucugaauaaa

SEQ ID NO: 947033 - RNA, 19 nt, Homo sapiens
  misc_RNA (1)...(19): siRNA sense strand
cugaaggugugaauggaaa

SEQ ID NO: 947034 - RNA, 19 nt, Homo sapiens
  misc_RNA (1)...(19): siRNA sense strand
cagcaaaucaccagcuuca

SEQ ID NO: 947035 - RNA, 19 nt, Homo sapiens
  misc_RNA (1)...(19): siRNA sense strand
gcucauuccuuugaacaag

SEQ ID NO: 947036 - RNA, 19 nt, Homo sapiens
  misc_RNA (1)...(19): siRNA sense strand
uugaacaagucuuaacaga

SEQ ID NO: 947037 - RNA, 19 nt, Homo sapiens
  misc_RNA (1)...(19): siRNA sense strand
ucagguaaauguugaagcu

SEQ ID NO: 947038 - RNA, 19 nt, Homo sapiens
  misc_RNA (1)...(19): siRNA sense strand
agucaaaugcuucagguaa

SEQ ID NO: 947039 - RNA, 19 nt, Homo sapiens
  misc_RNA (1)...(19): siRNA sense strand
gugaucacauacauacuuc

SEQ ID NO: 947040 - RNA, 19 nt, Homo sapiens
  misc_RNA (1)...(19): siRNA sense strand
agaaaucauugcugaaacu

SEQ ID NO: 947041 - RNA, 19 nt, Homo sapiens
  misc_RNA (1)...(19): siRNA sense strand
gaacaccugauugagaaug

SEQ ID NO: 947042 - RNA, 19 nt, Homo sapiens
  misc_RNA (1)...(19): siRNA sense strand
gucaaagaguguauagaca

SEQ ID NO: 947043 - RNA, 19 nt, Homo sapiens
  misc_RNA (1)...(19): siRNA sense strand
ucagaggauuaaagauuuc

SEQ ID NO: 947044 - RNA, 19 nt, Homo sapiens
  misc_RNA (1)...(19): siRNA sense strand
ggaaagcagguuacuuguc

SEQ ID NO: 947045 - RNA, 19 nt, Homo sapiens
  misc_RNA (1)...(19): siRNA sense strand
ucaagggccugguguuugc

SEQ ID NO: 947046 - RNA, 19 nt, Homo sapiens
  misc_RNA (1)...(19): siRNA sense strand
ugaggugacagguaaacua

SEQ ID NO: 947047 - RNA, 19 nt, Homo sapiens
  misc_RNA (1)...(19): siRNA sense strand
agacugcucauuccuuuga

SEQ ID NO: 947048 - RNA, 19 nt, Homo sapiens
  misc_RNA (1)...(19): siRNA sense strand
aacagcaacugagcucuuu

SEQ ID NO: 947049 - RNA, 19 nt, Homo sapiens
  misc_RNA (1)...(19): siRNA sense strand
caucaaacccaaguuagug

SEQ ID NO: 947050 - RNA, 19 nt, Homo sapiens
  misc_RNA (1)...(19): siRNA sense strand
ccaggagaauaacaugcaa

SEQ ID NO: 947051 - RNA, 19 nt, Homo sapiens
  misc_RNA (1)...(19): siRNA sense strand
ucaauacugcgccgaguga

SEQ ID NO: 947052 - RNA, 19 nt, Homo sapiens
  misc_RNA (1)...(19): siRNA sense strand
ugcggauccuucugaauaa

SEQ ID NO: 947053 - RNA, 19 nt, Homo sapiens
  misc_RNA (1)...(19): siRNA sense strand
cacggacucugccaaggaa

SEQ ID NO: 947054 - RNA, 19 nt, Homo sapiens
  misc_RNA (1)...(19): siRNA sense strand
cgggacaaauccugaguca

SEQ ID NO: 947055 - RNA, 19 nt, Homo sapiens
  misc_RNA (1)...(19): siRNA sense strand
gaagaaaucugaacguuau

SEQ ID NO: 947056 - RNA, 19 nt, Homo sapiens
  misc_RNA (1)...(19): siRNA sense strand
gguaaaugcuucagccuua

SEQ ID NO: 947057 - RNA, 19 nt, Homo sapiens
  misc_RNA (1)...(19): siRNA sense strand
ggaaaggccucucaaggaa

SEQ ID NO: 947058 - RNA, 19 nt, Homo sapiens
  misc_RNA (1)...(19): siRNA sense strand
caagugaacuggcagauga

SEQ ID NO: 947059 - RNA, 19 nt, Homo sapiens
  misc_RNA (1)...(19): siRNA sense strand
gaaagauacugcugcaaug

SEQ ID NO: 947060 - RNA, 19 nt, Homo sapiens
  misc_RNA (1)...(19): siRNA sense strand
ggaagaaaucugaacguua

SEQ ID NO: 947061 - RNA, 19 nt, Homo sapiens
  misc_RNA (1)...(19): siRNA sense strand
gaacaggcauuauaugaac

SEQ ID NO: 947062 - RNA, 19 nt, Homo sapiens
  misc_RNA (1)...(19): siRNA sense strand
gaucaaauacugcauguga

SEQ ID NO: 947063 - RNA, 19 nt, Homo sapiens
  misc_RNA (1)...(19): siRNA sense strand
cuauauggaucguuuagua

SEQ ID NO: 947064 - RNA, 19 nt, Homo sapiens
  misc_RNA (1)...(19): siRNA sense strand
gaagaaugccgaagcuuug

SEQ ID NO: 947065 - RNA, 19 nt, Homo sapiens
  misc_RNA (1)...(19): siRNA sense strand
ggaaggaaauaaugauugg

SEQ ID NO: 947066 - RNA, 19 nt, Homo sapiens
  misc_RNA (1)...(19): siRNA sense strand
gcaaauuccagugcaaaua

SEQ ID NO: 947067 - RNA, 19 nt, Homo sapiens
  misc_RNA (1)...(19): siRNA sense strand
aaucagagguugaagaugu

SEQ ID NO: 947068 - RNA, 19 nt, Homo sapiens
  misc_RNA (1)...(19): siRNA sense strand
ugacuaugaugaugaaaga

SEQ ID NO: 947069 - RNA, 19 nt, Homo sapiens
  misc_RNA (1)...(19): siRNA sense strand
agagcaaaguuaaggaaua

SEQ ID NO: 947070 - RNA, 19 nt, Homo sapiens
  misc_RNA (1)...(19): siRNA sense strand
guacgaugguaaugagaaa

SEQ ID NO: 947071 - RNA, 19 nt, Homo sapiens
  misc_RNA (1)...(19): siRNA sense strand
gaagaagaaugccgaagcu

SEQ ID NO: 947072 - RNA, 19 nt, Homo sapiens
  misc_RNA (1)...(19): siRNA sense strand
gaaccaugccucuagaaga

SEQ ID NO: 947073 - RNA, 19 nt, Homo sapiens
  misc_RNA (1)...(19): siRNA sense strand
gcaaauaguuccccaagug

SEQ ID NO: 947074 - RNA, 19 nt, Homo sapiens
  misc_RNA (1)...(19): siRNA sense strand
gaaggaaccaugccucuag

SEQ ID NO: 947075 - RNA, 19 nt, Homo sapiens
  misc_RNA (1)...(19): siRNA sense strand
gagcuaaacccuaugaaca

SEQ ID NO: 947076 - RNA, 19 nt, Homo sapiens
  misc_RNA (1)...(19): siRNA sense strand
guaaaugcuucagccuuaa

SEQ ID NO: 947077 - RNA, 19 nt, Homo sapiens
  misc_RNA (1)...(19): siRNA sense strand
gagcaaaguuaaggaauac

SEQ ID NO: 947078 - RNA, 19 nt, Homo sapiens
  misc_RNA (1)...(19): siRNA sense strand
aagaggaaaugauggauga

SEQ ID NO: 947079 - RNA, 19 nt, Homo sapiens
  misc_RNA (1)...(19): siRNA sense strand
gaaacagacagugguaauu

SEQ ID NO: 947080 - RNA, 19 nt, Homo sapiens
  misc_RNA (1)...(19): siRNA sense strand
ccagugacuugacagcuuu

SEQ ID NO: 947081 - RNA, 19 nt, Homo sapiens
  misc_RNA (1)...(19): siRNA sense strand
gaucaacagcuaaacauuc

SEQ ID NO: 947082 - RNA, 19 nt, Homo sapiens
  misc_RNA (1)...(19): siRNA sense strand
aggaagcaaucgaaagaua

SEQ ID NO: 947083 - RNA, 19 nt, Homo sapiens
  misc_RNA (1)...(19): siRNA sense strand
uaaccuggguguggacuuu

SEQ ID NO: 947084 - RNA, 19 nt, Homo sapiens
  misc_RNA (1)...(19): siRNA sense strand
ggaaucagagguugaagau

SEQ ID NO: 947085 - RNA, 19 nt, Homo sapiens
  misc_RNA (1)...(19): siRNA sense strand
gauaggauuucugcaggaa

SEQ ID NO: 947086 - RNA, 19 nt, Homo sapiens
  misc_RNA (1)...(19): siRNA sense strand
agaauaaggugagaacuag

SEQ ID NO: 947087 - RNA, 19 nt, Homo sapiens
  misc_RNA (1)...(19): siRNA sense strand
gcuaaacccuaugaacaug

SEQ ID NO: 947088 - RNA, 19 nt, Homo sapiens
  misc_RNA (1)...(19): siRNA sense strand
guugagacuucauuaagga

SEQ ID NO: 947089 - RNA, 19 nt, Homo sapiens
  misc_RNA (1)...(19): siRNA sense strand
gugaauuguuuggaugaua

SEQ ID NO: 947090 - RNA, 19 nt, Homo sapiens
  misc_RNA (1)...(19): siRNA sense strand
caaguguaaccacaauaua

SEQ ID NO: 947091 - RNA, 19 nt, Homo sapiens
  misc_RNA (1)...(19): siRNA sense strand
gacaguugcugagugugua

SEQ ID NO: 947092 - RNA, 19 nt, Homo sapiens
  misc_RNA (1)...(19): siRNA sense strand
cugaauccuuuaugaauga

SEQ ID NO: 947093 - RNA, 19 nt, Homo sapiens
  misc_RNA (1)...(19): siRNA sense strand
aaaggaagcaaucgaaaga

SEQ ID NO: 947094 - RNA, 19 nt, Homo sapiens
  misc_RNA (1)...(19): siRNA sense strand
gaacaugugcagugaagag

SEQ ID NO: 947095 - RNA, 19 nt, Homo sapiens
  misc_RNA (1)...(19): siRNA sense strand
uaaacauucucaacuccuu

SEQ ID NO: 947096 - RNA, 19 nt, Homo sapiens
  misc_RNA (1)...(19): siRNA sense strand
cggacuauauggaucguuu

SEQ ID NO: 947097 - RNA, 19 nt, Homo sapiens
  misc_RNA (1)...(19): siRNA sense strand
cgaaagauacugcugcaau

SEQ ID NO: 947098 - RNA, 19 nt, Homo sapiens
  misc_RNA (1)...(19): siRNA sense strand
uagaagauuuacuggcauu

SEQ ID NO: 947099 - RNA, 19 nt, Homo sapiens
  misc_RNA (1)...(19): siRNA sense strand
ggagagcaaaguuaaggaa

SEQ ID NO: 947100 - RNA, 19 nt, Homo sapiens
  misc_RNA (1)...(19): siRNA sense strand
gaggaaggaaauaaugauu

SEQ ID NO: 947101 - RNA, 19 nt, Homo sapiens
  misc_RNA (1)...(19): siRNA sense strand
agacaugacacuagacaaa

SEQ ID NO: 947102 - RNA, 19 nt, Homo sapiens
  misc_RNA (1)...(19): siRNA sense strand
ugaagaagaggaaaugaug

SEQ ID NO: 947103 - RNA, 19 nt, Homo sapiens
  misc_RNA (1)...(19): siRNA sense strand
ggcauucuauggcuaugaa

SEQ ID NO: 947104 - RNA, 19 nt, Homo sapiens
  misc_RNA (1)...(19): siRNA sense strand
ugaauuguuuggaugauag

SEQ ID NO: 947105 - RNA, 19 nt, Homo sapiens
  misc_RNA (1)...(19): siRNA sense strand
ggacuauauggaucguuua

SEQ ID NO: 947106 - RNA, 19 nt, Homo sapiens
  misc_RNA (1)...(19): siRNA sense strand
ggaauaccuuguugagacu

SEQ ID NO: 947107 - RNA, 19 nt, Homo sapiens
  misc_RNA (1)...(19): siRNA sense strand
gagaguacgaugguaauga

SEQ ID NO: 947108 - RNA, 19 nt, Homo sapiens
  misc_RNA (1)...(19): siRNA sense strand
gaagauuugaggaaggaaa

SEQ ID NO: 947109 - RNA, 19 nt, Homo sapiens
  misc_RNA (1)...(19): siRNA sense strand
ggucugacgccaucuguga

SEQ ID NO: 947110 - RNA, 19 nt, Homo sapiens
  misc_RNA (1)...(19): siRNA sense strand
caaauuccagugcaaauag

SEQ ID NO: 947111 - RNA, 19 nt, Homo sapiens
  misc_RNA (1)...(19): siRNA sense strand
ccaugccucuagaagauuu

SEQ ID NO: 947112 - RNA, 19 nt, Homo sapiens
  misc_RNA (1)...(19): siRNA sense strand
guggacaaguuaaucaugu

SEQ ID NO: 947113 - RNA, 19 nt, Homo sapiens
  misc_RNA (1)...(19): siRNA sense strand
ugaacuggcagaugaacua

SEQ ID NO: 947114 - RNA, 19 nt, Homo sapiens
  misc_RNA (1)...(19): siRNA sense strand
gccagugacuugacagcuu

SEQ ID NO: 947115 - RNA, 19 nt, Homo sapiens
  misc_RNA (1)...(19): siRNA sense strand
uuacuuugcucaacagaca

SEQ ID NO: 947116 - RNA, 19 nt, Homo sapiens
  misc_RNA (1)...(19): siRNA sense strand
agaagaaugccgaagcuuu

SEQ ID NO: 947117 - RNA, 19 nt, Homo sapiens
  misc_RNA (1)...(19): siRNA sense strand
aaaggccucucaaggaaug

SEQ ID NO: 947118 - RNA, 19 nt, Homo sapiens
  misc_RNA (1)...(19): siRNA sense strand
ccaugacuaugaugaugaa

SEQ ID NO: 947119 - RNA, 19 nt, Homo sapiens
  misc_RNA (1)...(19): siRNA sense strand
aagauuuacuggcauucua

SEQ ID NO: 947120 - RNA, 19 nt, Homo sapiens
  misc_RNA (1)...(19): siRNA sense strand
uaccagacaugacacuaga

SEQ ID NO: 947121 - RNA, 19 nt, Homo sapiens
  misc_RNA (1)...(19): siRNA sense strand
gcagaugaacuaccagaca

SEQ ID NO: 947122 - RNA, 19 nt, Homo sapiens
  misc_RNA (1)...(19): siRNA sense strand
cagaugaacuaccagacau

SEQ ID NO: 947123 - RNA, 19 nt, Homo sapiens
  misc_RNA (1)...(19): siRNA sense strand
ccugaauccuuuaugaaug

SEQ ID NO: 947124 - RNA, 19 nt, Homo sapiens
  misc_RNA (1)...(19): siRNA sense strand
aagaauaaggugagaacua

SEQ ID NO: 947125 - RNA, 19 nt, Homo sapiens
  misc_RNA (1)...(19): siRNA sense strand
ggaaggaaccaugccucua

SEQ ID NO: 947126 - RNA, 19 nt, Homo sapiens
  misc_RNA (1)...(19): siRNA sense strand
acaaagaggaaauagcaaa

SEQ ID NO: 947127 - RNA, 19 nt, Homo sapiens
  misc_RNA (1)...(19): siRNA sense strand
acucggagcuaaacccuau

SEQ ID NO: 947128 - RNA, 19 nt, Homo sapiens
  misc_RNA (1)...(19): siRNA sense strand
gcuucagccuuaacuucua

SEQ ID NO: 947129 - RNA, 19 nt, Homo sapiens
  misc_RNA (1)...(19): siRNA sense strand
gcucaacagacaagauuug

SEQ ID NO: 947130 - RNA, 19 nt, Homo sapiens
  misc_RNA (1)...(19): siRNA sense strand
ggacaguugcugagugugu

SEQ ID NO: 947131 - RNA, 19 nt, Homo sapiens
  misc_RNA (1)...(19): siRNA sense strand
aaacgaagaccaguuacuu

SEQ ID NO: 947132 - RNA, 19 nt, Homo sapiens
  misc_RNA (1)...(19): siRNA sense strand
agacaaagaggaaauagca

SEQ ID NO: 947133 - RNA, 19 nt, Homo sapiens
  misc_RNA (1)...(19): siRNA sense strand
uggaagaaaucugaacguu

SEQ ID NO: 947134 - RNA, 19 nt, Homo sapiens
  misc_RNA (1)...(19): siRNA sense strand
gaaaggccucucaaggaau

SEQ ID NO: 947135 - RNA, 19 nt, Homo sapiens
  misc_RNA (1)...(19): siRNA sense strand
aaccaugccucuagaagau

SEQ ID NO: 947136 - RNA, 19 nt, Homo sapiens
  misc_RNA (1)...(19): siRNA sense strand
aaacagacagugguaauuc

SEQ ID NO: 947137 - RNA, 19 nt, Homo sapiens
  misc_RNA (1)...(19): siRNA sense strand
ucacaucaccagugccaaa

SEQ ID NO: 947138 - RNA, 19 nt, Homo sapiens
  misc_RNA (1)...(19): siRNA sense strand
gcauugccgucccugaauc

SEQ ID NO: 947139 - RNA, 19 nt, Homo sapiens
  misc_RNA (1)...(19): siRNA sense strand
uaaccggccugagccuauu

SEQ ID NO: 947140 - RNA, 19 nt, Homo sapiens
  misc_RNA (1)...(19): siRNA sense strand
ugaacaggcauuauaugaa

SEQ ID NO: 947141 - RNA, 19 nt, Homo sapiens
  misc_RNA (1)...(19): siRNA sense strand
gaugaacuaccagacauga

SEQ ID NO: 947142 - RNA, 19 nt, Homo sapiens
  misc_RNA (1)...(19): siRNA sense strand
gucccugaauccuuuauga

SEQ ID NO: 947143 - RNA, 19 nt, Homo sapiens
  misc_RNA (1)...(19): siRNA sense strand
caacagcuaaacauucuca

SEQ ID NO: 947144 - RNA, 19 nt, Homo sapiens
  misc_RNA (1)...(19): siRNA sense strand
gcaauggaaaggccucuca

SEQ ID NO: 947145 - RNA, 19 nt, Homo sapiens
  misc_RNA (1)...(19): siRNA sense strand
caauauaaaggaagcaauc

SEQ ID NO: 947146 - RNA, 19 nt, Homo sapiens
  misc_RNA (1)...(19): siRNA sense strand
ucaaguguaaccacaauau

SEQ ID NO: 947147 - RNA, 19 nt, Homo sapiens
  misc_RNA (1)...(19): siRNA sense strand
acaugacacuagacaaaga

SEQ ID NO: 947148 - RNA, 19 nt, Homo sapiens
  misc_RNA (1)...(19): siRNA sense strand
ugaaaacgaagaccaguua

SEQ ID NO: 947149 - RNA, 19 nt, Homo sapiens
  misc_RNA (1)...(19): siRNA sense strand
gaaaaucacacacaucaca

SEQ ID NO: 947150 - RNA, 19 nt, Homo sapiens
  misc_RNA (1)...(19): siRNA sense strand
uggaaaggccucucaagga

SEQ ID NO: 947151 - RNA, 19 nt, Homo sapiens
  misc_RNA (1)...(19): siRNA sense strand
uauaaaggaagcaaucgaa

SEQ ID NO: 947152 - RNA, 19 nt, Homo sapiens
  misc_RNA (1)...(19): siRNA sense strand
ggcauuauaugaacuucuc

SEQ ID NO: 947153 - RNA, 19 nt, Homo sapiens
  misc_RNA (1)...(19): siRNA sense strand
gaacacacacaagggacaa

SEQ ID NO: 947154 - RNA, 19 nt, Homo sapiens
  misc_RNA (1)...(19): siRNA sense strand
uuacuuugguguccugaug

SEQ ID NO: 947155 - RNA, 19 nt, Homo sapiens
  misc_RNA (1)...(19): siRNA sense strand
cgaaaugacuacuaucuga

SEQ ID NO: 947156 - RNA, 19 nt, Homo sapiens
  misc_RNA (1)...(19): siRNA sense strand
ucacagauuuguuccuuaa

SEQ ID NO: 947157 - RNA, 19 nt, Homo sapiens
  misc_RNA (1)...(19): siRNA sense strand
ggacagagacuggaaagaa

SEQ ID NO: 947158 - RNA, 19 nt, Homo sapiens
  misc_RNA (1)...(19): siRNA sense strand
gacagagacuggaaagaaa

SEQ ID NO: 947159 - RNA, 19 nt, Homo sapiens
  misc_RNA (1)...(19): siRNA sense strand
ccaaagacuugaagcagaa

SEQ ID NO: 947160 - RNA, 19 nt, Homo sapiens
  misc_RNA (1)...(19): siRNA sense strand
gcaauuaugggauguggua

SEQ ID NO: 947161 - RNA, 19 nt, Homo sapiens
  misc_RNA (1)...(19): siRNA sense strand
gaagacaccgccugagaaa

SEQ ID NO: 947162 - RNA, 19 nt, Homo sapiens
  misc_RNA (1)...(19): siRNA sense strand
gaagagaagucaagauucc

SEQ ID NO: 947163 - RNA, 19 nt, Homo sapiens
  misc_RNA (1)...(19): siRNA sense strand
guaacuauaucucuucugu

SEQ ID NO: 947164 - RNA, 19 nt, Homo sapiens
  misc_RNA (1)...(19): siRNA sense strand
caaggcaccucaugcaaug

SEQ ID NO: 947165 - RNA, 19 nt, Homo sapiens
  misc_RNA (1)...(19): siRNA sense strand
gagaugcugugggaaagua

SEQ ID NO: 947166 - RNA, 19 nt, Homo sapiens
  misc_RNA (1)...(19): siRNA sense strand
aaugaaggauggacgcuua

SEQ ID NO: 947167 - RNA, 19 nt, Homo sapiens
  misc_RNA (1)...(19): siRNA sense strand
uaugggaugugguaacuaa

SEQ ID NO: 947168 - RNA, 19 nt, Homo sapiens
  misc_RNA (1)...(19): siRNA sense strand
uggaaaggcugcaaagaug

SEQ ID NO: 947169 - RNA, 19 nt, Homo sapiens
  misc_RNA (1)...(19): siRNA sense strand
cagaagagaagucaagauu

SEQ ID NO: 947170 - RNA, 19 nt, Homo sapiens
  misc_RNA (1)...(19): siRNA sense strand
gagcuggaaucacuuuauc

SEQ ID NO: 947171 - RNA, 19 nt, Homo sapiens
  misc_RNA (1)...(19): siRNA sense strand
cugcaaagauggagucaga

SEQ ID NO: 947172 - RNA, 19 nt, Homo sapiens
  misc_RNA (1)...(19): siRNA sense strand
cgagggagaagugcaauua

SEQ ID NO: 947173 - RNA, 19 nt, Homo sapiens
  misc_RNA (1)...(19): siRNA sense strand
gaaaugacuacuaucugaa

SEQ ID NO: 947174 - RNA, 19 nt, Homo sapiens
  misc_RNA (1)...(19): siRNA sense strand
uuacuggucuucgaaauga

SEQ ID NO: 947175 - RNA, 19 nt, Homo sapiens
  misc_RNA (1)...(19): siRNA sense strand
aagaaaguguugccucaaa

SEQ ID NO: 947176 - RNA, 19 nt, Homo sapiens
  misc_RNA (1)...(19): siRNA sense strand
gcaaagauggagucagaga

SEQ ID NO: 947177 - RNA, 19 nt, Homo sapiens
  misc_RNA (1)...(19): siRNA sense strand
gcuuacacaucuuggauau

SEQ ID NO: 947178 - RNA, 19 nt, Homo sapiens
  misc_RNA (1)...(19): siRNA sense strand
cccagaagcuuccggauca

SEQ ID NO: 947179 - RNA, 19 nt, Homo sapiens
  misc_RNA (1)...(19): siRNA sense strand
uauaaacgauuccauacuc

SEQ ID NO: 947180 - RNA, 19 nt, Homo sapiens
  misc_RNA (1)...(19): siRNA sense strand
cuagggcucuguccucuga

SEQ ID NO: 947181 - RNA, 19 nt, Homo sapiens
  misc_RNA (1)...(19): siRNA sense strand
gaggagaugcugugggaaa

SEQ ID NO: 947182 - RNA, 19 nt, Homo sapiens
  misc_RNA (1)...(19): siRNA sense strand
gcaaggcaccucaugcaau

SEQ ID NO: 947183 - RNA, 19 nt, Homo sapiens
  misc_RNA (1)...(19): siRNA sense strand
caacguacucgauucaguu

SEQ ID NO: 947184 - RNA, 19 nt, Homo sapiens
  misc_RNA (1)...(19): siRNA sense strand
gugauggacugcugacaau

SEQ ID NO: 947185 - RNA, 19 nt, Homo sapiens
  misc_RNA (1)...(19): siRNA sense strand
cuacguauucugacuuuaa

SEQ ID NO: 947186 - RNA, 19 nt, Homo sapiens
  misc_RNA (1)...(19): siRNA sense strand
gcaaagaacaacugaagac

SEQ ID NO: 947187 - RNA, 19 nt, Homo sapiens
  misc_RNA (1)...(19): siRNA sense strand
guaacucugcucuccauuu

SEQ ID NO: 947188 - RNA, 19 nt, Homo sapiens
  misc_RNA (1)...(19): siRNA sense strand
ucaagguacucccaagaau

SEQ ID NO: 947189 - RNA, 19 nt, Homo sapiens
  misc_RNA (1)...(19): siRNA sense strand
gagcaauccgaauguguuu

SEQ ID NO: 947190 - RNA, 19 nt, Homo sapiens
  misc_RNA (1)...(19): siRNA sense strand
agacaccgccugagaaaga

SEQ ID NO: 947191 - RNA, 19 nt, Homo sapiens
  misc_RNA (1)...(19): siRNA sense strand
gauggacugcugacaauau

SEQ ID NO: 947192 - RNA, 19 nt, Homo sapiens
  misc_RNA (1)...(19): siRNA sense strand
ucagaaucuuguugccaua

SEQ ID NO: 947193 - RNA, 19 nt, Homo sapiens
  misc_RNA (1)...(19): siRNA sense strand
agcacaaacucacagauuu

SEQ ID NO: 947194 - RNA, 19 nt, Homo sapiens
  misc_RNA (1)...(19): siRNA sense strand
ggucauuugucaguaguug

SEQ ID NO: 947195 - RNA, 19 nt, Homo sapiens
  misc_RNA (1)...(19): siRNA sense strand
caagguggcagcaaaguca

SEQ ID NO: 947196 - RNA, 19 nt, Homo sapiens
  misc_RNA (1)...(19): siRNA sense strand
gauugcaacuggucaaggu

SEQ ID NO: 947197 - RNA, 19 nt, Homo sapiens
  misc_RNA (1)...(19): siRNA sense strand
gauauaaacgauuccauac

SEQ ID NO: 947198 - RNA, 19 nt, Homo sapiens
  misc_RNA (1)...(19): siRNA sense strand
gaaaggcugcaaagaugga

SEQ ID NO: 947199 - RNA, 19 nt, Homo sapiens
  misc_RNA (1)...(19): siRNA sense strand
ucuaggauccugcaaagaa

SEQ ID NO: 947200 - RNA, 19 nt, Homo sapiens
  misc_RNA (1)...(19): siRNA sense strand
agaaauaugcuuggucauu

SEQ ID NO: 947201 - RNA, 19 nt, Homo sapiens
  misc_RNA (1)...(19): siRNA sense strand
uaacucugcucuccauuuu

SEQ ID NO: 947202 - RNA, 19 nt, Homo sapiens
  misc_RNA (1)...(19): siRNA sense strand
ggagaaccacaaugggauu

SEQ ID NO: 947203 - RNA, 19 nt, Homo sapiens
  misc_RNA (1)...(19): siRNA sense strand
gggcucugcuguauacauc

SEQ ID NO: 947204 - RNA, 19 nt, Homo sapiens
  misc_RNA (1)...(19): siRNA sense strand
ucaagauuccgccaacgua

SEQ ID NO: 947205 - RNA, 19 nt, Homo sapiens
  misc_RNA (1)...(19): siRNA sense strand
aacuauaucucuucugugu

SEQ ID NO: 947206 - RNA, 19 nt, Homo sapiens
  misc_RNA (1)...(19): siRNA sense strand
guacucgauucaguuaaug

SEQ ID NO: 947207 - RNA, 19 nt, Homo sapiens
  misc_RNA (1)...(19): siRNA sense strand
ugaagacaccgccugagaa

SEQ ID NO: 947208 - RNA, 19 nt, Homo sapiens
  misc_RNA (1)...(19): siRNA sense strand
gcagaaaugccuaaaacaa

SEQ ID NO: 947209 - RNA, 19 nt, Homo sapiens
  misc_RNA (1)...(19): siRNA sense strand
ggacggccucuguauggaa

SEQ ID NO: 947210 - RNA, 19 nt, Homo sapiens
  misc_RNA (1)...(19): siRNA sense strand
cguacucgauucaguuaau

SEQ ID NO: 947211 - RNA, 19 nt, Homo sapiens
  misc_RNA (1)...(19): siRNA sense strand
ccaagaaugaugugacugu

SEQ ID NO: 947212 - RNA, 19 nt, Homo sapiens
  misc_RNA (1)...(19): siRNA sense strand
caagguacucccaagaaug

SEQ ID NO: 947213 - RNA, 19 nt, Homo sapiens
  misc_RNA (1)...(19): siRNA sense strand
gaacacuucgccacaagca

SEQ ID NO: 947214 - RNA, 19 nt, Homo sapiens
  misc_RNA (1)...(19): siRNA sense strand
agggagaagugcaauuaug

SEQ ID NO: 947215 - RNA, 19 nt, Homo sapiens
  misc_RNA (1)...(19): siRNA sense strand
caagcugugugugcucuga

SEQ ID NO: 947216 - RNA, 19 nt, Homo sapiens
  misc_RNA (1)...(19): siRNA sense strand
uuaaugcuacguauucuga

SEQ ID NO: 947217 - RNA, 19 nt, Homo sapiens
  misc_RNA (1)...(19): siRNA sense strand
ugacuacuaucugaauauc

SEQ ID NO: 947218 - RNA, 19 nt, Homo sapiens
  misc_RNA (1)...(19): siRNA sense strand
aaagauggagucagagaug

SEQ ID NO: 947219 - RNA, 19 nt, Homo sapiens
  misc_RNA (1)...(19): siRNA sense strand
cagcaaaggaauuucugaa

SEQ ID NO: 947220 - RNA, 19 nt, Homo sapiens
  misc_RNA (1)...(19): siRNA sense strand
ccaacguacucgauucagu

SEQ ID NO: 947221 - RNA, 19 nt, Homo sapiens
  misc_RNA (1)...(19): siRNA sense strand
agucucacuuguaacuaua

SEQ ID NO: 947222 - RNA, 19 nt, Homo sapiens
  misc_RNA (1)...(19): siRNA sense strand
ucuguccucugauuccuuu

SEQ ID NO: 947223 - RNA, 19 nt, Homo sapiens
  misc_RNA (1)...(19): siRNA sense strand
uguauggaauugcuacuag

SEQ ID NO: 947224 - RNA, 19 nt, Homo sapiens
  misc_RNA (1)...(19): siRNA sense strand
aagguacucccaagaauga

SEQ ID NO: 947225 - RNA, 19 nt, Homo sapiens
  misc_RNA (1)...(19): siRNA sense strand
aagcacaaacucacagauu

SEQ ID NO: 947226 - RNA, 19 nt, Homo sapiens
  misc_RNA (1)...(19): siRNA sense strand
gccaaccgcugaaagucau

SEQ ID NO: 947227 - RNA, 19 nt, Homo sapiens
  misc_RNA (1)...(19): siRNA sense strand
gggagaagugcaauuaugg

SEQ ID NO: 947228 - RNA, 19 nt, Homo sapiens
  misc_RNA (1)...(19): siRNA sense strand
gaugggacggccucuguau

SEQ ID NO: 947229 - RNA, 19 nt, Homo sapiens
  misc_RNA (1)...(19): siRNA sense strand
gcagucaaggccauggauu

SEQ ID NO: 947230 - RNA, 19 nt, Homo sapiens
  misc_RNA (1)...(19): siRNA sense strand
gcagaagagaagucaagau

SEQ ID NO: 947231 - RNA, 19 nt, Homo sapiens
  misc_RNA (1)...(19): siRNA sense strand
aaaagcggcugagaaauau

SEQ ID NO: 947232 - RNA, 19 nt, Homo sapiens
  misc_RNA (1)...(19): siRNA sense strand
gcaauccgaauguguuugg

SEQ ID NO: 947233 - RNA, 19 nt, Homo sapiens
  misc_RNA (1)...(19): siRNA sense strand
caguuaaugcuacguauuc

SEQ ID NO: 947234 - RNA, 19 nt, Homo sapiens
  misc_RNA (1)...(19): siRNA sense strand
gacggccucuguauggaau

SEQ ID NO: 947235 - RNA, 19 nt, Homo sapiens
  misc_RNA (1)...(19): siRNA sense strand
ggucaagguacucccaaga

SEQ ID NO: 947236 - RNA, 19 nt, Homo sapiens
  misc_RNA (1)...(19): siRNA sense strand
uccuuaaucuggcuaccua

SEQ ID NO: 947237 - RNA, 19 nt, Homo sapiens
  misc_RNA (1)...(19): siRNA sense strand
gcuacguauucugacuuua

SEQ ID NO: 947238 - RNA, 19 nt, Homo sapiens
  misc_RNA (1)...(19): siRNA sense strand
gagggagaagugcaauuau

SEQ ID NO: 947239 - RNA, 19 nt, Homo sapiens
  misc_RNA (1)...(19): siRNA sense strand
ccugggcucugcuguauac

SEQ ID NO: 947240 - RNA, 19 nt, Homo sapiens
  misc_RNA (1)...(19): siRNA sense strand
ucauauuacuggucuucga

SEQ ID NO: 947241 - RNA, 19 nt, Homo sapiens
  misc_RNA (1)...(19): siRNA sense strand
aagauggagucagagauga

SEQ ID NO: 947242 - RNA, 19 nt, Homo sapiens
  misc_RNA (1)...(19): siRNA sense strand
ugagcaauccgaauguguu

SEQ ID NO: 947243 - RNA, 19 nt, Homo sapiens
  misc_RNA (1)...(19): siRNA sense strand
gcucugcuguauacaucug

SEQ ID NO: 947244 - RNA, 19 nt, Homo sapiens
  misc_RNA (1)...(19): siRNA sense strand
augaauccuuccaucuuaa

SEQ ID NO: 947245 - RNA, 19 nt, Homo sapiens
  misc_RNA (1)...(19): siRNA sense strand
caucuuggauauaaaugcu

SEQ ID NO: 947246 - RNA, 19 nt, Homo sapiens
  misc_RNA (1)...(19): siRNA sense strand
gucaagguacucccaagaa

SEQ ID NO: 947247 - RNA, 19 nt, Homo sapiens
  misc_RNA (1)...(19): siRNA sense strand
ggagauugcaacuggucaa

SEQ ID NO: 947248 - RNA, 19 nt, Homo sapiens
  misc_RNA (1)...(19): siRNA sense strand
gauauaaaugcugggaaga

SEQ ID NO: 947249 - RNA, 19 nt, Homo sapiens
  misc_RNA (1)...(19): siRNA sense strand
cuuaaaaguucuggugaua

SEQ ID NO: 947250 - RNA, 19 nt, Homo sapiens
  misc_RNA (1)...(19): siRNA sense strand
acucacagauuuguuccuu

SEQ ID NO: 947251 - RNA, 19 nt, Homo sapiens
  misc_RNA (1)...(19): siRNA sense strand
ccucagcagugggucaaga

SEQ ID NO: 947252 - RNA, 19 nt, Homo sapiens
  misc_RNA (1)...(19): siRNA sense strand
cauauuacuggucuucgaa

SEQ ID NO: 947253 - RNA, 19 nt, Homo sapiens
  misc_RNA (1)...(19): siRNA sense strand
caaccagaggugaagauuc

SEQ ID NO: 947254 - RNA, 19 nt, Homo sapiens
  misc_RNA (1)...(19): siRNA sense strand
gaggcuguccgcagagguu

SEQ ID NO: 947255 - RNA, 19 nt, Homo sapiens
  misc_RNA (1)...(19): siRNA sense strand
ccacaaagaugcccuauaa

SEQ ID NO: 947256 - RNA, 19 nt, Homo sapiens
  misc_RNA (1)...(19): siRNA sense strand
gcacagagaugagaguuug

SEQ ID NO: 947257 - RNA, 19 nt, Homo sapiens
  misc_RNA (1)...(19): siRNA sense strand
gagcauaagugugggauuu

SEQ ID NO: 947258 - RNA, 19 nt, Homo sapiens
  misc_RNA (1)...(19): siRNA sense strand
gaugagaguuugaaagaau

SEQ ID NO: 947259 - RNA, 19 nt, Homo sapiens
  misc_RNA (1)...(19): siRNA sense strand
ggaagagcaugcccacaaa

SEQ ID NO: 947260 - RNA, 19 nt, Homo sapiens
  misc_RNA (1)...(19): siRNA sense strand
gagaugagaguuugaaaga

SEQ ID NO: 947261 - RNA, 19 nt, Homo sapiens
  misc_RNA (1)...(19): siRNA sense strand
uaaccacccugcagaagaa

SEQ ID NO: 947262 - RNA, 19 nt, Homo sapiens
  misc_RNA (1)...(19): siRNA sense strand
gaaaugaagaugaucaaag

SEQ ID NO: 947263 - RNA, 19 nt, Homo sapiens
  misc_RNA (1)...(19): siRNA sense strand
ggaugugcauuucgacuug

SEQ ID NO: 947264 - RNA, 19 nt, Homo sapiens
  misc_RNA (1)...(19): siRNA sense strand
caacgugggcuuccaauuc

SEQ ID NO: 947265 - RNA, 19 nt, Homo sapiens
  misc_RNA (1)...(19): siRNA sense strand
gcgacaagaccuuccagua

SEQ ID NO: 947266 - RNA, 19 nt, Homo sapiens
  misc_RNA (1)...(19): siRNA sense strand
agaaggaaaugaagaugau

SEQ ID NO: 947267 - RNA, 19 nt, Homo sapiens
  misc_RNA (1)...(19): siRNA sense strand
cgacuuggcugugaagaag

SEQ ID NO: 947268 - RNA, 19 nt, Homo sapiens
  misc_RNA (1)...(19): siRNA sense strand
gagcaugcccacaaagaug

SEQ ID NO: 947269 - RNA, 19 nt, Homo sapiens
  misc_RNA (1)...(19): siRNA sense strand
gaggaucuguccaccaagu

SEQ ID NO: 947270 - RNA, 19 nt, Homo sapiens
  misc_RNA (1)...(19): siRNA sense strand
gaucaaagacgaggaugug

SEQ ID NO: 947271 - RNA, 19 nt, Homo sapiens
  misc_RNA (1)...(19): siRNA sense strand
gcgaggagaccaagcagaa

SEQ ID NO: 947272 - RNA, 19 nt, Homo sapiens
  misc_RNA (1)...(19): siRNA sense strand
aaguaugacucucagauga

SEQ ID NO: 947273 - RNA, 19 nt, Homo sapiens
  misc_RNA (1)...(19): siRNA sense strand
caaccucccuuugcuguuc

SEQ ID NO: 947274 - RNA, 19 nt, Homo sapiens
  misc_RNA (1)...(19): siRNA sense strand
ccgaggaucuguccaccaa

SEQ ID NO: 947275 - RNA, 19 nt, Homo sapiens
  misc_RNA (1)...(19): siRNA sense strand
aagaauuacuggagaggaa

SEQ ID NO: 947276 - RNA, 19 nt, Homo sapiens
  misc_RNA (1)...(19): siRNA sense strand
gcauaagugugggauuugu

SEQ ID NO: 947277 - RNA, 19 nt, Homo sapiens
  misc_RNA (1)...(19): siRNA sense strand
gaaccugacacgccacaug

SEQ ID NO: 947278 - RNA, 19 nt, Homo sapiens
  misc_RNA (1)...(19): siRNA sense strand
ggaaaugaagaugaucaaa

SEQ ID NO: 947279 - RNA, 19 nt, Homo sapiens
  misc_RNA (1)...(19): siRNA sense strand
cgacaagaccuuccaguac

SEQ ID NO: 947280 - RNA, 19 nt, Homo sapiens
  misc_RNA (1)...(19): siRNA sense strand
cagcucagccaccugcaua

SEQ ID NO: 947281 - RNA, 19 nt, Homo sapiens
  misc_RNA (1)...(19): siRNA sense strand
ccuuugaccucucucagaa

SEQ ID NO: 947282 - RNA, 19 nt, Homo sapiens
  misc_RNA (1)...(19): siRNA sense strand
acucugacgugaagccuuu

SEQ ID NO: 947283 - RNA, 19 nt, Homo sapiens
  misc_RNA (1)...(19): siRNA sense strand
caaagaugcccuauaacca

SEQ ID NO: 947284 - RNA, 19 nt, Homo sapiens
  misc_RNA (1)...(19): siRNA sense strand
ugucaccucugcuacaaga

SEQ ID NO: 947285 - RNA, 19 nt, Homo sapiens
  misc_RNA (1)...(19): siRNA sense strand
cagaaggaaaugaagauga

SEQ ID NO: 947286 - RNA, 19 nt, Homo sapiens
  misc_RNA (1)...(19): siRNA sense strand
gaaggagcagggucuagga

SEQ ID NO: 947287 - RNA, 19 nt, Homo sapiens
  misc_RNA (1)...(19): siRNA sense strand
ggagcagggucuaggaaac

SEQ ID NO: 947288 - RNA, 19 nt, Homo sapiens
  misc_RNA (1)...(19): siRNA sense strand
caaguaugacucucagaug

SEQ ID NO: 947289 - RNA, 19 nt, Homo sapiens
  misc_RNA (1)...(19): siRNA sense strand
agacgaggaugugcauuuc

SEQ ID NO: 947290 - RNA, 19 nt, Homo sapiens
  misc_RNA (1)...(19): siRNA sense strand
cggaagagcaugcccacaa

SEQ ID NO: 947291 - RNA, 19 nt, Homo sapiens
  misc_RNA (1)...(19): siRNA sense strand
ucaagcaggaacccauuaa

SEQ ID NO: 947292 - RNA, 19 nt, Homo sapiens
  misc_RNA (1)...(19): siRNA sense strand
guaugacucucagaugauc

SEQ ID NO: 947293 - RNA, 19 nt, Homo sapiens
  misc_RNA (1)...(19): siRNA sense strand
acaagagcuucgugcagaa

SEQ ID NO: 947294 - RNA, 19 nt, Homo sapiens
  misc_RNA (1)...(19): siRNA sense strand
gcaacgugggcuuccaauu

SEQ ID NO: 947295 - RNA, 19 nt, Homo sapiens
  misc_RNA (1)...(19): siRNA sense strand
ccuuucaaaugcaagcuuu

SEQ ID NO: 947296 - RNA, 19 nt, Homo sapiens
  misc_RNA (1)...(19): siRNA sense strand
gcagaaggaaaugaagaug

SEQ ID NO: 947297 - RNA, 19 nt, Homo sapiens
  misc_RNA (1)...(19): siRNA sense strand
aagaggaggauaacugcua

SEQ ID NO: 947298 - RNA, 19 nt, Homo sapiens
  misc_RNA (1)...(19): siRNA sense strand
uugcagaaccacaugauga

SEQ ID NO: 947299 - RNA, 19 nt, Homo sapiens
  misc_RNA (1)...(19): siRNA sense strand
ccaaguaugacucucagau

SEQ ID NO: 947300 - RNA, 19 nt, Homo sapiens
  misc_RNA (1)...(19): siRNA sense strand
ccacucagaggagaacaaa

SEQ ID NO: 947301 - RNA, 19 nt, Homo sapiens
  misc_RNA (1)...(19): siRNA sense strand
gaaaggcuccccaaagaca

SEQ ID NO: 947302 - RNA, 19 nt, Homo sapiens
  misc_RNA (1)...(19): siRNA sense strand
aagacgaggaugugcauuu

SEQ ID NO: 947303 - RNA, 19 nt, Homo sapiens
  misc_RNA (1)...(19): siRNA sense strand
ccaccugcauacccacaug

SEQ ID NO: 947304 - RNA, 19 nt, Homo sapiens
  misc_RNA (1)...(19): siRNA sense strand
gaagagcaugcccacaaag

SEQ ID NO: 947305 - RNA, 19 nt, Homo sapiens
  misc_RNA (1)...(19): siRNA sense strand
caccugaagcgccacauga

SEQ ID NO: 947306 - RNA, 19 nt, Homo sapiens
  misc_RNA (1)...(19): siRNA sense strand
caaagacgaggaugugcau

SEQ ID NO: 947307 - RNA, 19 nt, Homo sapiens
  misc_RNA (1)...(19): siRNA sense strand
uggagaggguggacgugaa

SEQ ID NO: 947308 - RNA, 19 nt, Homo sapiens
  misc_RNA (1)...(19): siRNA sense strand
ccucaaggcacacaugauc

SEQ ID NO: 947309 - RNA, 19 nt, Homo sapiens
  misc_RNA (1)...(19): siRNA sense strand
agaaccacaugaugaagca

SEQ ID NO: 947310 - RNA, 19 nt, Homo sapiens
  misc_RNA (1)...(19): siRNA sense strand
gucaagcaggaacccauua

SEQ ID NO: 947311 - RNA, 19 nt, Homo sapiens
  misc_RNA (1)...(19): siRNA sense strand
agaugagaguuugaaagaa

SEQ ID NO: 947312 - RNA, 19 nt, Homo sapiens
  misc_RNA (1)...(19): siRNA sense strand
acagcaaacccuucaagug

SEQ ID NO: 947313 - RNA, 19 nt, Homo sapiens
  misc_RNA (1)...(19): siRNA sense strand
uggcccagcugaagagaca

SEQ ID NO: 947314 - RNA, 19 nt, Homo sapiens
  misc_RNA (1)...(19): siRNA sense strand
ugaacgugcagaucgauga

SEQ ID NO: 947315 - RNA, 19 nt, Homo sapiens
  misc_RNA (1)...(19): siRNA sense strand
gaugaucaaagacgaggau

SEQ ID NO: 947316 - RNA, 19 nt, Homo sapiens
  misc_RNA (1)...(19): siRNA sense strand
ugacacgccacaugaaagu

SEQ ID NO: 947317 - RNA, 19 nt, Homo sapiens
  misc_RNA (1)...(19): siRNA sense strand
gaagcgacacgugcugauc

SEQ ID NO: 947318 - RNA, 19 nt, Homo sapiens
  misc_RNA (1)...(19): siRNA sense strand
aguccuacaccuccaagua

SEQ ID NO: 947319 - RNA, 19 nt, Homo sapiens
  misc_RNA (1)...(19): siRNA sense strand
cauuucgacuuggcuguga

SEQ ID NO: 947320 - RNA, 19 nt, Homo sapiens
  misc_RNA (1)...(19): siRNA sense strand
gagcaggaggagcccuuug

SEQ ID NO: 947321 - RNA, 19 nt, Homo sapiens
  misc_RNA (1)...(19): siRNA sense strand
ccugacacgccacaugaaa

SEQ ID NO: 947322 - RNA, 19 nt, Homo sapiens
  misc_RNA (1)...(19): siRNA sense strand
ucagacagcaaacccuuca

SEQ ID NO: 947323 - RNA, 19 nt, Homo sapiens
  misc_RNA (1)...(19): siRNA sense strand
gugcugauccacaccaaca

SEQ ID NO: 947324 - RNA, 19 nt, Homo sapiens
  misc_RNA (1)...(19): siRNA sense strand
acgaggaugugcauuucga

SEQ ID NO: 947325 - RNA, 19 nt, Homo sapiens
  misc_RNA (1)...(19): siRNA sense strand
ccacaugaaagucaagcau

SEQ ID NO: 947326 - RNA, 19 nt, Homo sapiens
  misc_RNA (1)...(19): siRNA sense strand
gacagcaaacccuucaagu

SEQ ID NO: 947327 - RNA, 19 nt, Homo sapiens
  misc_RNA (1)...(19): siRNA sense strand
aacgugggcuuccaauucu

SEQ ID NO: 947328 - RNA, 19 nt, Homo sapiens
  misc_RNA (1)...(19): siRNA sense strand
aagagcaugcccacaaaga

SEQ ID NO: 947329 - RNA, 19 nt, Homo sapiens
  misc_RNA (1)...(19): siRNA sense strand
aggaggaagaggaggauaa

SEQ ID NO: 947330 - RNA, 19 nt, Homo sapiens
  misc_RNA (1)...(19): siRNA sense strand
caagcuuugugggaaggaa

SEQ ID NO: 947331 - RNA, 19 nt, Homo sapiens
  misc_RNA (1)...(19): siRNA sense strand
acaugaucguccacucuga

SEQ ID NO: 947332 - RNA, 19 nt, Homo sapiens
  misc_RNA (1)...(19): siRNA sense strand
ccaguacccgagccaguug

SEQ ID NO: 947333 - RNA, 19 nt, Homo sapiens
  misc_RNA (1)...(19): siRNA sense strand
gaaggaaaugaagaugauc

SEQ ID NO: 947334 - RNA, 19 nt, Homo sapiens
  misc_RNA (1)...(19): siRNA sense strand
caagggagaaugggagaag

SEQ ID NO: 947335 - RNA, 19 nt, Homo sapiens
  misc_RNA (1)...(19): siRNA sense strand
ggaggaagaggaggauaac

SEQ ID NO: 947336 - RNA, 19 nt, Homo sapiens
  misc_RNA (1)...(19): siRNA sense strand
ucacccugcuggccaacau

SEQ ID NO: 947337 - RNA, 19 nt, Homo sapiens
  misc_RNA (1)...(19): siRNA sense strand
gaauauaccuccuucagau

SEQ ID NO: 947338 - RNA, 19 nt, Homo sapiens
  misc_RNA (1)...(19): siRNA sense strand
gauaccaggucccuuauuu

SEQ ID NO: 947339 - RNA, 19 nt, Homo sapiens
  misc_RNA (1)...(19): siRNA sense strand
gaacacagccucccuauac

SEQ ID NO: 947340 - RNA, 19 nt, Homo sapiens
  misc_RNA (1)...(19): siRNA sense strand
ccagaucaguccuagcuua

SEQ ID NO: 947341 - RNA, 19 nt, Homo sapiens
  misc_RNA (1)...(19): siRNA sense strand
gaaaguagccacucuccuu

SEQ ID NO: 947342 - RNA, 19 nt, Homo sapiens
  misc_RNA (1)...(19): siRNA sense strand
ggacgcaucuggacaccaa

SEQ ID NO: 947343 - RNA, 19 nt, Homo sapiens
  misc_RNA (1)...(19): siRNA sense strand
ucagauaccaggucccuua

SEQ ID NO: 947344 - RNA, 19 nt, Homo sapiens
  misc_RNA (1)...(19): siRNA sense strand
gcaauagugucucuaacuc

SEQ ID NO: 947345 - RNA, 19 nt, Homo sapiens
  misc_RNA (1)...(19): siRNA sense strand
gggagaagcccaacaagug

SEQ ID NO: 947346 - RNA, 19 nt, Homo sapiens
  misc_RNA (1)...(19): siRNA sense strand
ccaguuaccuccacucaca

SEQ ID NO: 947347 - RNA, 19 nt, Homo sapiens
  misc_RNA (1)...(19): siRNA sense strand
gacccaaguucccuaagaa

SEQ ID NO: 947348 - RNA, 19 nt, Homo sapiens
  misc_RNA (1)...(19): siRNA sense strand
caccaaaccuuaugcuugu

SEQ ID NO: 947349 - RNA, 19 nt, Homo sapiens
  misc_RNA (1)...(19): siRNA sense strand
uagugucucuaacucauua

SEQ ID NO: 947350 - RNA, 19 nt, Homo sapiens
  misc_RNA (1)...(19): siRNA sense strand
gcuauaaacugcugaucca

SEQ ID NO: 947351 - RNA, 19 nt, Homo sapiens
  misc_RNA (1)...(19): siRNA sense strand
ggauagauuucaauaccau

SEQ ID NO: 947352 - RNA, 19 nt, Homo sapiens
  misc_RNA (1)...(19): siRNA sense strand
gcaguguggugccuucguu

SEQ ID NO: 947353 - RNA, 19 nt, Homo sapiens
  misc_RNA (1)...(19): siRNA sense strand
gcgagaagccguauuugug

SEQ ID NO: 947354 - RNA, 19 nt, Homo sapiens
  misc_RNA (1)...(19): siRNA sense strand
caacaaguguacguuugaa

SEQ ID NO: 947355 - RNA, 19 nt, Homo sapiens
  misc_RNA (1)...(19): siRNA sense strand
gaaagucagucggccucaa

SEQ ID NO: 947356 - RNA, 19 nt, Homo sapiens
  misc_RNA (1)...(19): siRNA sense strand
gaaugcagccaaccugaau

SEQ ID NO: 947357 - RNA, 19 nt, Homo sapiens
  misc_RNA (1)...(19): siRNA sense strand
gaaguccuaucagccagaa

SEQ ID NO: 947358 - RNA, 19 nt, Homo sapiens
  misc_RNA (1)...(19): siRNA sense strand
gggcagcaccguagaccua

SEQ ID NO: 947359 - RNA, 19 nt, Homo sapiens
  misc_RNA (1)...(19): siRNA sense strand
aaaguagccacucuccuua

SEQ ID NO: 947360 - RNA, 19 nt, Homo sapiens
  misc_RNA (1)...(19): siRNA sense strand
ggagaagcccaacaagugu

SEQ ID NO: 947361 - RNA, 19 nt, Homo sapiens
  misc_RNA (1)...(19): siRNA sense strand
gagaagcccaacaagugua

SEQ ID NO: 947362 - RNA, 19 nt, Homo sapiens
  misc_RNA (1)...(19): siRNA sense strand
guaccaaacgcuacacaga

SEQ ID NO: 947363 - RNA, 19 nt, Homo sapiens
  misc_RNA (1)...(19): siRNA sense strand
cgcaggagcugagagguuu

SEQ ID NO: 947364 - RNA, 19 nt, Homo sapiens
  misc_RNA (1)...(19): siRNA sense strand
ucauuaccauccuaccuuu

SEQ ID NO: 947365 - RNA, 19 nt, Homo sapiens
  misc_RNA (1)...(19): siRNA sense strand
gggaggacuucacuugcuu

SEQ ID NO: 947366 - RNA, 19 nt, Homo sapiens
  misc_RNA (1)...(19): siRNA sense strand
agagagcgcuguccuuguc

SEQ ID NO: 947367 - RNA, 19 nt, Homo sapiens
  misc_RNA (1)...(19): siRNA sense strand
uuacagagggcaaugaaug

SEQ ID NO: 947368 - RNA, 19 nt, Homo sapiens
  misc_RNA (1)...(19): siRNA sense strand
uagagaugcugcugcugaa

SEQ ID NO: 947369 - RNA, 19 nt, Homo sapiens
  misc_RNA (1)...(19): siRNA sense strand
gaucaguccuagcuuacag

SEQ ID NO: 947370 - RNA, 19 nt, Homo sapiens
  misc_RNA (1)...(19): siRNA sense strand
gcagccaaccugaauauac

SEQ ID NO: 947371 - RNA, 19 nt, Homo sapiens
  misc_RNA (1)...(19): siRNA sense strand
agacccaaguucccuaaga

SEQ ID NO: 947372 - RNA, 19 nt, Homo sapiens
  misc_RNA (1)...(19): siRNA sense strand
ccaacaaguguacguuuga

SEQ ID NO: 947373 - RNA, 19 nt, Homo sapiens
  misc_RNA (1)...(19): siRNA sense strand
ucgacucacucgggcauua

SEQ ID NO: 947374 - RNA, 19 nt, Homo sapiens
  misc_RNA (1)...(19): siRNA sense strand
ccuaucagccagaaacaaa

SEQ ID NO: 947375 - RNA, 19 nt, Homo sapiens
  misc_RNA (1)...(19): siRNA sense strand
aaccacggcucucagaaug

SEQ ID NO: 947376 - RNA, 19 nt, Homo sapiens
  misc_RNA (1)...(19): siRNA sense strand
cuagccagcucuccucugu

SEQ ID NO: 947377 - RNA, 19 nt, Homo sapiens
  misc_RNA (1)...(19): siRNA sense strand
cagaccugcucacagauug

SEQ ID NO: 947378 - RNA, 19 nt, Homo sapiens
  misc_RNA (1)...(19): siRNA sense strand
caaguucccuaagaaagca

SEQ ID NO: 947379 - RNA, 19 nt, Homo sapiens
  misc_RNA (1)...(19): siRNA sense strand
ccgaacgccuggaggaguu

SEQ ID NO: 947380 - RNA, 19 nt, Homo sapiens
  misc_RNA (1)...(19): siRNA sense strand
gcaucgggauagauuucaa

SEQ ID NO: 947381 - RNA, 19 nt, Homo sapiens
  misc_RNA (1)...(19): siRNA sense strand
ccagcaauagugucucuaa

SEQ ID NO: 947382 - RNA, 19 nt, Homo sapiens
  misc_RNA (1)...(19): siRNA sense strand
cagaauggccuugaucuag

SEQ ID NO: 947383 - RNA, 19 nt, Homo sapiens
  misc_RNA (1)...(19): siRNA sense strand
uccacgaccuugagucuga

SEQ ID NO: 947384 - RNA, 19 nt, Homo sapiens
  misc_RNA (1)...(19): siRNA sense strand
caaccacggcucucagaau

SEQ ID NO: 947385 - RNA, 19 nt, Homo sapiens
  misc_RNA (1)...(19): siRNA sense strand
cccaacaaguguacguuug

SEQ ID NO: 947386 - RNA, 19 nt, Homo sapiens
  misc_RNA (1)...(19): siRNA sense strand
gggauagauuucaauacca

SEQ ID NO: 947387 - RNA, 19 nt, Homo sapiens
  misc_RNA (1)...(19): siRNA sense strand
caggcgagaagccguauuu

SEQ ID NO: 947388 - RNA, 19 nt, Homo sapiens
  misc_RNA (1)...(19): siRNA sense strand
ccacaucgaccagcgcaaa

SEQ ID NO: 947389 - RNA, 19 nt, Homo sapiens
  misc_RNA (1)...(19): siRNA sense strand
aaacugcugauccacauga

SEQ ID NO: 947390 - RNA, 19 nt, Homo sapiens
  misc_RNA (1)...(19): siRNA sense strand
ucagaauggccuugaucua

SEQ ID NO: 947391 - RNA, 19 nt, Homo sapiens
  misc_RNA (1)...(19): siRNA sense strand
guuugaagguugcgagaag

SEQ ID NO: 947392 - RNA, 19 nt, Homo sapiens
  misc_RNA (1)...(19): siRNA sense strand
uuauuucgcgugagucuuu

SEQ ID NO: 947393 - RNA, 19 nt, Homo sapiens
  misc_RNA (1)...(19): siRNA sense strand
cagucggccucaagcauga

SEQ ID NO: 947394 - RNA, 19 nt, Homo sapiens
  misc_RNA (1)...(19): siRNA sense strand
ugucuacaccgaaggcuaa

SEQ ID NO: 947395 - RNA, 19 nt, Homo sapiens
  misc_RNA (1)...(19): siRNA sense strand
gcuaccuucuugcagauca

SEQ ID NO: 947396 - RNA, 19 nt, Homo sapiens
  misc_RNA (1)...(19): siRNA sense strand
auccagaccugcucacaga

SEQ ID NO: 947397 - RNA, 19 nt, Homo sapiens
  misc_RNA (1)...(19): siRNA sense strand
ccuuaugcuugucaaauuc

SEQ ID NO: 947398 - RNA, 19 nt, Homo sapiens
  misc_RNA (1)...(19): siRNA sense strand
aauauaccuccuucagaua

SEQ ID NO: 947399 - RNA, 19 nt, Homo sapiens
  misc_RNA (1)...(19): siRNA sense strand
gcccaacaaguguacguuu

SEQ ID NO: 947400 - RNA, 19 nt, Homo sapiens
  misc_RNA (1)...(19): siRNA sense strand
ccagaccugcucacagauu

SEQ ID NO: 947401 - RNA, 19 nt, Homo sapiens
  misc_RNA (1)...(19): siRNA sense strand
acagagccuucucgacuca

SEQ ID NO: 947402 - RNA, 19 nt, Homo sapiens
  misc_RNA (1)...(19): siRNA sense strand
uccagcuccuucuucaaua

SEQ ID NO: 947403 - RNA, 19 nt, Homo sapiens
  misc_RNA (1)...(19): siRNA sense strand
aauagugucucuaacucau

SEQ ID NO: 947404 - RNA, 19 nt, Homo sapiens
  misc_RNA (1)...(19): siRNA sense strand
augggcagcugcagaaguu

SEQ ID NO: 947405 - RNA, 19 nt, Homo sapiens
  misc_RNA (1)...(19): siRNA sense strand
cagcgacugggacucauuu

SEQ ID NO: 947406 - RNA, 19 nt, Homo sapiens
  misc_RNA (1)...(19): siRNA sense strand
caauagugucucuaacuca

SEQ ID NO: 947407 - RNA, 19 nt, Homo sapiens
  misc_RNA (1)...(19): siRNA sense strand
cgggauagauuucaauacc

SEQ ID NO: 947408 - RNA, 19 nt, Homo sapiens
  misc_RNA (1)...(19): siRNA sense strand
ggcgagaagccguauuugu

SEQ ID NO: 947409 - RNA, 19 nt, Homo sapiens
  misc_RNA (1)...(19): siRNA sense strand
auaaacugcugauccacau

SEQ ID NO: 947410 - RNA, 19 nt, Homo sapiens
  misc_RNA (1)...(19): siRNA sense strand
cuaacucauuaccauccua

SEQ ID NO: 947411 - RNA, 19 nt, Homo sapiens
  misc_RNA (1)...(19): siRNA sense strand
uauucaagccgaaguggaa

SEQ ID NO: 947412 - RNA, 19 nt, Homo sapiens
  misc_RNA (1)...(19): siRNA sense strand
accuuaugcuugucaaauu

SEQ ID NO: 947413 - RNA, 19 nt, Homo sapiens
  misc_RNA (1)...(19): siRNA sense strand
gcauccggguugucagaag

SEQ ID NO: 947414 - RNA, 19 nt, Homo sapiens
  misc_RNA (1)...(19): siRNA sense strand
ccacucuccuuacccuagu

SEQ ID NO: 947415 - RNA, 19 nt, Homo sapiens
  misc_RNA (1)...(19): siRNA sense strand
gggcugaagaugcuaccuu

SEQ ID NO: 947416 - RNA, 19 nt, Homo sapiens
  misc_RNA (1)...(19): siRNA sense strand
guguaugauuuaccuucaa

SEQ ID NO: 947417 - RNA, 19 nt, Homo sapiens
  misc_RNA (1)...(19): siRNA sense strand
gcuuacagagggcaaugaa

SEQ ID NO: 947418 - RNA, 19 nt, Homo sapiens
  misc_RNA (1)...(19): siRNA sense strand
ccagcuccuucuucaauac

SEQ ID NO: 947419 - RNA, 19 nt, Homo sapiens
  misc_RNA (1)...(19): siRNA sense strand
caaauuccaggauguacca

SEQ ID NO: 947420 - RNA, 19 nt, Homo sapiens
  misc_RNA (1)...(19): siRNA sense strand
caaaccuuaugcuugucaa

SEQ ID NO: 947421 - RNA, 19 nt, Homo sapiens
  misc_RNA (1)...(19): siRNA sense strand
cagccaaccugaauauacc

SEQ ID NO: 947422 - RNA, 19 nt, Homo sapiens
  misc_RNA (1)...(19): siRNA sense strand
agaacacagccucccuaua

SEQ ID NO: 947423 - RNA, 19 nt, Homo sapiens
  misc_RNA (1)...(19): siRNA sense strand
caaccccuccucccaguua

SEQ ID NO: 947424 - RNA, 19 nt, Homo sapiens
  misc_RNA (1)...(19): siRNA sense strand
ugaaugcagccaaccugaa

SEQ ID NO: 947425 - RNA, 19 nt, Homo sapiens
  misc_RNA (1)...(19): siRNA sense strand
ggaggucuacgggcauuuc

SEQ ID NO: 947426 - RNA, 19 nt, Homo sapiens
  misc_RNA (1)...(19): siRNA sense strand
cuucaauacugcaaagaac

SEQ ID NO: 947427 - RNA, 19 nt, Homo sapiens
  misc_RNA (1)...(19): siRNA sense strand
ugucaaauuccaggaugua

SEQ ID NO: 947428 - RNA, 19 nt, Homo sapiens
  misc_RNA (1)...(19): siRNA sense strand
cagcauccggguugucaga

SEQ ID NO: 947429 - RNA, 19 nt, Homo sapiens
  misc_RNA (1)...(19): siRNA sense strand
gagcaacaagcaaggaaaa

SEQ ID NO: 947430 - RNA, 19 nt, Homo sapiens
  misc_RNA (1)...(19): siRNA sense strand
ccuaagaaagcaugugaag

SEQ ID NO: 947431 - RNA, 19 nt, Homo sapiens
  misc_RNA (1)...(19): siRNA sense strand
caucuggacaccaaaccuu

SEQ ID NO: 947432 - RNA, 19 nt, Homo sapiens
  misc_RNA (1)...(19): siRNA sense strand
cagcaauagugucucuaac

SEQ ID NO: 947433 - RNA, 19 nt, Homo sapiens
  misc_RNA (1)...(19): siRNA sense strand
uguaugauuuaccuucaag

SEQ ID NO: 947434 - RNA, 19 nt, Homo sapiens
  misc_RNA (1)...(19): siRNA sense strand
cagcaagccaggucucuac

SEQ ID NO: 947435 - RNA, 19 nt, Homo sapiens
  misc_RNA (1)...(19): siRNA sense strand
caaguguacguuugaaggu

SEQ ID NO: 947436 - RNA, 19 nt, Homo sapiens
  misc_RNA (1)...(19): siRNA sense strand
agaauugugccgccuguca

SEQ ID NO: 947437 - RNA, 19 nt, Homo sapiens
  misc_RNA (1)...(19): siRNA sense strand
gcaacaggcucuccaagug

SEQ ID NO: 947438 - RNA, 19 nt, Homo sapiens
  misc_RNA (1)...(19): siRNA sense strand
ucaaacaccucaacacaga

SEQ ID NO: 947439 - RNA, 19 nt, Homo sapiens
  misc_RNA (1)...(19): siRNA sense strand
ugaaugagaucuauaacug

SEQ ID NO: 947440 - RNA, 19 nt, Homo sapiens
  misc_RNA (1)...(19): siRNA sense strand
gagaagcagugacaaguuc

SEQ ID NO: 947441 - RNA, 19 nt, Homo sapiens
  misc_RNA (1)...(19): siRNA sense strand
ggaaaccgcagcccaaaga

SEQ ID NO: 947442 - RNA, 19 nt, Homo sapiens
  misc_RNA (1)...(19): siRNA sense strand
ccaggauguucgccuauuu

SEQ ID NO: 947443 - RNA, 19 nt, Homo sapiens
  misc_RNA (1)...(19): siRNA sense strand
agacagcaauggugagaug

SEQ ID NO: 947444 - RNA, 19 nt, Homo sapiens
  misc_RNA (1)...(19): siRNA sense strand
aaucaugaguucuacaaga

SEQ ID NO: 947445 - RNA, 19 nt, Homo sapiens
  misc_RNA (1)...(19): siRNA sense strand
ggagaagcagugacaaguu

SEQ ID NO: 947446 - RNA, 19 nt, Homo sapiens
  misc_RNA (1)...(19): siRNA sense strand
gaaacacugccaccuggaa

SEQ ID NO: 947447 - RNA, 19 nt, Homo sapiens
  misc_RNA (1)...(19): siRNA sense strand
cuacaggaguacuacaaga

SEQ ID NO: 947448 - RNA, 19 nt, Homo sapiens
  misc_RNA (1)...(19): siRNA sense strand
gcugugagacccuguguga

SEQ ID NO: 947449 - RNA, 19 nt, Homo sapiens
  misc_RNA (1)...(19): siRNA sense strand
gcaaguggccaggcuguga

SEQ ID NO: 947450 - RNA, 19 nt, Homo sapiens
  misc_RNA (1)...(19): siRNA sense strand
gcagacucauucccagaug

SEQ ID NO: 947451 - RNA, 19 nt, Homo sapiens
  misc_RNA (1)...(19): siRNA sense strand
cagcugacccugaaugaga

SEQ ID NO: 947452 - RNA, 19 nt, Homo sapiens
  misc_RNA (1)...(19): siRNA sense strand
gaacaaugacagcaaacag

SEQ ID NO: 947453 - RNA, 19 nt, Homo sapiens
  misc_RNA (1)...(19): siRNA sense strand
uccagcagcuacaggagua

SEQ ID NO: 947454 - RNA, 19 nt, Homo sapiens
  misc_RNA (1)...(19): siRNA sense strand
cagcagaggcagaggaaga

SEQ ID NO: 947455 - RNA, 19 nt, Homo sapiens
  misc_RNA (1)...(19): siRNA sense strand
gaaucugccucggagacaa

SEQ ID NO: 947456 - RNA, 19 nt, Homo sapiens
  misc_RNA (1)...(19): siRNA sense strand
gggagaagaacuguccuaa

SEQ ID NO: 947457 - RNA, 19 nt, Homo sapiens
  misc_RNA (1)...(19): siRNA sense strand
gcagacagcaauggugaga

SEQ ID NO: 947458 - RNA, 19 nt, Homo sapiens
  misc_RNA (1)...(19): siRNA sense strand
gugagacccugugugaaga

SEQ ID NO: 947459 - RNA, 19 nt, Homo sapiens
  misc_RNA (1)...(19): siRNA sense strand
uaucaaacaccucaacaca

SEQ ID NO: 947460 - RNA, 19 nt, Homo sapiens
  misc_RNA (1)...(19): siRNA sense strand
ccucagcuauggagcacuu

SEQ ID NO: 947461 - RNA, 19 nt, Homo sapiens
  misc_RNA (1)...(19): siRNA sense strand
acaagcagcuggccuucca

SEQ ID NO: 947462 - RNA, 19 nt, Homo sapiens
  misc_RNA (1)...(19): siRNA sense strand
ggagcugccgggagaagaa

SEQ ID NO: 947463 - RNA, 19 nt, Homo sapiens
  misc_RNA (1)...(19): siRNA sense strand
cgccaccgcuaccucguuu

SEQ ID NO: 947464 - RNA, 19 nt, Homo sapiens
  misc_RNA (1)...(19): siRNA sense strand
gacccugaaugagaucuau

SEQ ID NO: 947465 - RNA, 19 nt, Homo sapiens
  misc_RNA (1)...(19): siRNA sense strand
cgcaacagaugcagcagau

SEQ ID NO: 947466 - RNA, 19 nt, Homo sapiens
  misc_RNA (1)...(19): siRNA sense strand
ggaacaaugacagcaaaca

SEQ ID NO: 947467 - RNA, 19 nt, Homo sapiens
  misc_RNA (1)...(19): siRNA sense strand
ggcccagaaucaugaguuc

SEQ ID NO: 947468 - RNA, 19 nt, Homo sapiens
  misc_RNA (1)...(19): siRNA sense strand
agauccagcucgccaagga

SEQ ID NO: 947469 - RNA, 19 nt, Homo sapiens
  misc_RNA (1)...(19): siRNA sense strand
agggaacaaugacagcaaa

SEQ ID NO: 947470 - RNA, 19 nt, Homo sapiens
  misc_RNA (1)...(19): siRNA sense strand
cagcaauggugagaugagu

SEQ ID NO: 947471 - RNA, 19 nt, Homo sapiens
  misc_RNA (1)...(19): siRNA sense strand
cagagcacgcccuggauga

SEQ ID NO: 947472 - RNA, 19 nt, Homo sapiens
  misc_RNA (1)...(19): siRNA sense strand
ggacacggagagugcaagu

SEQ ID NO: 947473 - RNA, 19 nt, Homo sapiens
  misc_RNA (1)...(19): siRNA sense strand
uacaggaguacuacaagaa

SEQ ID NO: 947474 - RNA, 19 nt, Homo sapiens
  misc_RNA (1)...(19): siRNA sense strand
gcagcaacaggcucuccaa

SEQ ID NO: 947475 - RNA, 19 nt, Homo sapiens
  misc_RNA (1)...(19): siRNA sense strand
uggacgagcgggaguauca

SEQ ID NO: 947476 - RNA, 19 nt, Homo sapiens
  misc_RNA (1)...(19): siRNA sense strand
gagcacuuaaugccagcua

SEQ ID NO: 947477 - RNA, 19 nt, Homo sapiens
  misc_RNA (1)...(19): siRNA sense strand
gaucucuggccucagcuau

SEQ ID NO: 947478 - RNA, 19 nt, Homo sapiens
  misc_RNA (1)...(19): siRNA sense strand
ggaaucugccucggagaca

SEQ ID NO: 947479 - RNA, 19 nt, Homo sapiens
  misc_RNA (1)...(19): siRNA sense strand
ggagaccgccaaagaugac

SEQ ID NO: 947480 - RNA, 19 nt, Homo sapiens
  misc_RNA (1)...(19): siRNA sense strand
caccuacgccucccucauc

SEQ ID NO: 947481 - RNA, 19 nt, Homo sapiens
  misc_RNA (1)...(19): siRNA sense strand
cggagaccgccaaagauga

SEQ ID NO: 947482 - RNA, 19 nt, Homo sapiens
  misc_RNA (1)...(19): siRNA sense strand
ugugagacccugugugaag

SEQ ID NO: 947483 - RNA, 19 nt, Homo sapiens
  misc_RNA (1)...(19): siRNA sense strand
ccacaucucuggaaggaaa

SEQ ID NO: 947484 - RNA, 19 nt, Homo sapiens
  misc_RNA (1)...(19): siRNA sense strand
gcucauaaaucuacugugu

SEQ ID NO: 947485 - RNA, 19 nt, Homo sapiens
  misc_RNA (1)...(19): siRNA sense strand
cagcagagauauuuagcua

SEQ ID NO: 947486 - RNA, 19 nt, Homo sapiens
  misc_RNA (1)...(19): siRNA sense strand
gaacacagcauccaaccaa

SEQ ID NO: 947487 - RNA, 19 nt, Homo sapiens
  misc_RNA (1)...(19): siRNA sense strand
guaaagggccauaaagaaa

SEQ ID NO: 947488 - RNA, 19 nt, Homo sapiens
  misc_RNA (1)...(19): siRNA sense strand
ggccaaaccuauuaaaugu

SEQ ID NO: 947489 - RNA, 19 nt, Homo sapiens
  misc_RNA (1)...(19): siRNA sense strand
guggaaaccuucauauaug

SEQ ID NO: 947490 - RNA, 19 nt, Homo sapiens
  misc_RNA (1)...(19): siRNA sense strand
gaaaaggccaaaccuauua

SEQ ID NO: 947491 - RNA, 19 nt, Homo sapiens
  misc_RNA (1)...(19): siRNA sense strand
gguggaaaccuucauauau

SEQ ID NO: 947492 - RNA, 19 nt, Homo sapiens
  misc_RNA (1)...(19): siRNA sense strand
gcagagauauuuagcuacu

SEQ ID NO: 947493 - RNA, 19 nt, Homo sapiens
  misc_RNA (1)...(19): siRNA sense strand
agaaggagcaccugaaauu

SEQ ID NO: 947494 - RNA, 19 nt, Homo sapiens
  misc_RNA (1)...(19): siRNA sense strand
ucucagaaauauggcauua

SEQ ID NO: 947495 - RNA, 19 nt, Homo sapiens
  misc_RNA (1)...(19): siRNA sense strand
ggagaaggagcaccugaaa

SEQ ID NO: 947496 - RNA, 19 nt, Homo sapiens
  misc_RNA (1)...(19): siRNA sense strand
uggcauagguggacuagga

SEQ ID NO: 947497 - RNA, 19 nt, Homo sapiens
  misc_RNA (1)...(19): siRNA sense strand
uauggaaccuguacaagga

SEQ ID NO: 947498 - RNA, 19 nt, Homo sapiens
  misc_RNA (1)...(19): siRNA sense strand
gccaguauauucuguaaag

SEQ ID NO: 947499 - RNA, 19 nt, Homo sapiens
  misc_RNA (1)...(19): siRNA sense strand
gcuuggaguuugacagaaa

SEQ ID NO: 947500 - RNA, 19 nt, Homo sapiens
  misc_RNA (1)...(19): siRNA sense strand
agaagaacguguuguuugu

SEQ ID NO: 947501 - RNA, 19 nt, Homo sapiens
  misc_RNA (1)...(19): siRNA sense strand
cuccagagaugccaguaua

SEQ ID NO: 947502 - RNA, 19 nt, Homo sapiens
  misc_RNA (1)...(19): siRNA sense strand
aaagggccauaaagaaauu

SEQ ID NO: 947503 - RNA, 19 nt, Homo sapiens
  misc_RNA (1)...(19): siRNA sense strand
uuuagaagcuccagagaug

SEQ ID NO: 947504 - RNA, 19 nt, Homo sapiens
  misc_RNA (1)...(19): siRNA sense strand
gaacagggagcucuuucug

SEQ ID NO: 947505 - RNA, 19 nt, Homo sapiens
  misc_RNA (1)...(19): siRNA sense strand
gaaggagcaccugaaauug

SEQ ID NO: 947506 - RNA, 19 nt, Homo sapiens
  misc_RNA (1)...(19): siRNA sense strand
gaguacugaucguuacaaa

SEQ ID NO: 947507 - RNA, 19 nt, Homo sapiens
  misc_RNA (1)...(19): siRNA sense strand
caagaagaacguguuguuu

SEQ ID NO: 947508 - RNA, 19 nt, Homo sapiens
  misc_RNA (1)...(19): siRNA sense strand
aagaugauccuguugcuaa

SEQ ID NO: 947509 - RNA, 19 nt, Homo sapiens
  misc_RNA (1)...(19): siRNA sense strand
uggcaaugcuuauaaucaa

SEQ ID NO: 947510 - RNA, 19 nt, Homo sapiens
  misc_RNA (1)...(19): siRNA sense strand
uaaagggccauaaagaaau

SEQ ID NO: 947511 - RNA, 19 nt, Homo sapiens
  misc_RNA (1)...(19): siRNA sense strand
ucaagaagaacguguuguu

SEQ ID NO: 947512 - RNA, 19 nt, Homo sapiens
  misc_RNA (1)...(19): siRNA sense strand
gaacauuuggugcaacauc

SEQ ID NO: 947513 - RNA, 19 nt, Homo sapiens
  misc_RNA (1)...(19): siRNA sense strand
gugagaguacugaucguua

SEQ ID NO: 947514 - RNA, 19 nt, Homo sapiens
  misc_RNA (1)...(19): siRNA sense strand
gaaaugggagucgcagguu

SEQ ID NO: 947515 - RNA, 19 nt, Homo sapiens
  misc_RNA (1)...(19): siRNA sense strand
agaaaaggcucauaaaucu

SEQ ID NO: 947516 - RNA, 19 nt, Homo sapiens
  misc_RNA (1)...(19): siRNA sense strand
ucauucagcuguacgagau

SEQ ID NO: 947517 - RNA, 19 nt, Homo sapiens
  misc_RNA (1)...(19): siRNA sense strand
gcaaugcuuauaaucaaga

SEQ ID NO: 947518 - RNA, 19 nt, Homo sapiens
  misc_RNA (1)...(19): siRNA sense strand
cgagaagccucagaucauc

SEQ ID NO: 947519 - RNA, 19 nt, Homo sapiens
  misc_RNA (1)...(19): siRNA sense strand
gggagucgcagguucugua

SEQ ID NO: 947520 - RNA, 19 nt, Homo sapiens
  misc_RNA (1)...(19): siRNA sense strand
uguaaagggccauaaagaa

SEQ ID NO: 947521 - RNA, 19 nt, Homo sapiens
  misc_RNA (1)...(19): siRNA sense strand
ccagagaugccaguauauu

SEQ ID NO: 947522 - RNA, 19 nt, Homo sapiens
  misc_RNA (1)...(19): siRNA sense strand
aagaagaacguguuguuug

SEQ ID NO: 947523 - RNA, 19 nt, Homo sapiens
  misc_RNA (1)...(19): siRNA sense strand
gaaaccuucauauauggaa

SEQ ID NO: 947524 - RNA, 19 nt, Homo sapiens
  misc_RNA (1)...(19): siRNA sense strand
guacugaucguuacaaagc

SEQ ID NO: 947525 - RNA, 19 nt, Homo sapiens
  misc_RNA (1)...(19): siRNA sense strand
gcagaacagggagcucuuu

SEQ ID NO: 947526 - RNA, 19 nt, Homo sapiens
  misc_RNA (1)...(19): siRNA sense strand
guguguagcuuggaguuug

SEQ ID NO: 947527 - RNA, 19 nt, Homo sapiens
  misc_RNA (1)...(19): siRNA sense strand
gaugauccuguugcuaaua

SEQ ID NO: 947528 - RNA, 19 nt, Homo sapiens
  misc_RNA (1)...(19): siRNA sense strand
ucagaaauauggcauuacg

SEQ ID NO: 947529 - RNA, 19 nt, Homo sapiens
  misc_RNA (1)...(19): siRNA sense strand
gcauuacggugggagacaa

SEQ ID NO: 947530 - RNA, 19 nt, Homo sapiens
  misc_RNA (1)...(19): siRNA sense strand
uaauauggaaccuguacaa

SEQ ID NO: 947531 - RNA, 19 nt, Homo sapiens
  misc_RNA (1)...(19): siRNA sense strand
ggagucgcagguucuguaa

SEQ ID NO: 947532 - RNA, 19 nt, Homo sapiens
  misc_RNA (1)...(19): siRNA sense strand
gcccugcagcgccaaauuu

SEQ ID NO: 947533 - RNA, 19 nt, Homo sapiens
  misc_RNA (1)...(19): siRNA sense strand
gagaaggagcaccugaaau

SEQ ID NO: 947534 - RNA, 19 nt, Homo sapiens
  misc_RNA (1)...(19): siRNA sense strand
gaaccuguacaaggagaaa

SEQ ID NO: 947535 - RNA, 19 nt, Homo sapiens
  misc_RNA (1)...(19): siRNA sense strand
cagagaugccaguauauuc

SEQ ID NO: 947536 - RNA, 19 nt, Homo sapiens
  misc_RNA (1)...(19): siRNA sense strand
ugagaguacugaucguuac

SEQ ID NO: 947537 - RNA, 19 nt, Homo sapiens
  misc_RNA (1)...(19): siRNA sense strand
gaagaacguguuguuugug

SEQ ID NO: 947538 - RNA, 19 nt, Homo sapiens
  misc_RNA (1)...(19): siRNA sense strand
ccucagaucaucgcccaua

SEQ ID NO: 947539 - RNA, 19 nt, Homo sapiens
  misc_RNA (1)...(19): siRNA sense strand
cugcgucuguaguucauuu

SEQ ID NO: 947540 - RNA, 19 nt, Homo sapiens
  misc_RNA (1)...(19): siRNA sense strand
uggaaaccuucauauaugg

SEQ ID NO: 947541 - RNA, 19 nt, Homo sapiens
  misc_RNA (1)...(19): siRNA sense strand
auauuuagcuacuggagau

SEQ ID NO: 947542 - RNA, 19 nt, Homo sapiens
  misc_RNA (1)...(19): siRNA sense strand
gagauggaacugugaaggu

SEQ ID NO: 947543 - RNA, 19 nt, Homo sapiens
  misc_RNA (1)...(19): siRNA sense strand
ggaaaccuucauauaugga

SEQ ID NO: 947544 - RNA, 19 nt, Homo sapiens
  misc_RNA (1)...(19): siRNA sense strand
cccagcccauuucaaguuu

SEQ ID NO: 947545 - RNA, 19 nt, Homo sapiens
  misc_RNA (1)...(19): siRNA sense strand
ccacccagcccauuucaag

SEQ ID NO: 947546 - RNA, 19 nt, Homo sapiens
  misc_RNA (1)...(19): siRNA sense strand
gaaaaggcucauaaaucua

SEQ ID NO: 947547 - RNA, 19 nt, Homo sapiens
  misc_RNA (1)...(19): siRNA sense strand
caauggggauaucaaacua

SEQ ID NO: 947548 - RNA, 19 nt, Homo sapiens
  misc_RNA (1)...(19): siRNA sense strand
acuaggaauuggagaagga

SEQ ID NO: 947549 - RNA, 19 nt, Homo sapiens
  misc_RNA (1)...(19): siRNA sense strand
ugaccaaacggugagagua

SEQ ID NO: 947550 - RNA, 19 nt, Homo sapiens
  misc_RNA (1)...(19): siRNA sense strand
cuauucagcggucaaagaa

SEQ ID NO: 947551 - RNA, 19 nt, Homo sapiens
  misc_RNA (1)...(19): siRNA sense strand
aggagcaccugaaauugug

SEQ ID NO: 947552 - RNA, 19 nt, Homo sapiens
  misc_RNA (1)...(19): siRNA sense strand
gaccaaacggugagaguac

SEQ ID NO: 947553 - RNA, 19 nt, Homo sapiens
  misc_RNA (1)...(19): siRNA sense strand
cagaaaaggcucauaaauc

SEQ ID NO: 947554 - RNA, 19 nt, Homo sapiens
  misc_RNA (1)...(19): siRNA sense strand
aggccaaaccuauuaaaug

SEQ ID NO: 947555 - RNA, 19 nt, Homo sapiens
  misc_RNA (1)...(19): siRNA sense strand
ggacuaggaauuggagaag

SEQ ID NO: 947556 - RNA, 19 nt, Homo sapiens
  misc_RNA (1)...(19): siRNA sense strand
ggugggagacaaacaucaa

SEQ ID NO: 947557 - RNA, 19 nt, Homo sapiens
  misc_RNA (1)...(19): siRNA sense strand
ggcaaugcuuauaaucaag

SEQ ID NO: 947558 - RNA, 19 nt, Homo sapiens
  misc_RNA (1)...(19): siRNA sense strand
gcgccaaauuugugaccau

SEQ ID NO: 947559 - RNA, 19 nt, Homo sapiens
  misc_RNA (1)...(19): siRNA sense strand
ggucucugcgucuguaguu

SEQ ID NO: 947560 - RNA, 19 nt, Homo sapiens
  misc_RNA (1)...(19): siRNA sense strand
gcuaauauggaaccuguac

SEQ ID NO: 947561 - RNA, 19 nt, Homo sapiens
  misc_RNA (1)...(19): siRNA sense strand
ugguggaaaccuucauaua

SEQ ID NO: 947562 - RNA, 19 nt, Homo sapiens
  misc_RNA (1)...(19): siRNA sense strand
ccuauucagcggucaaaga

SEQ ID NO: 947563 - RNA, 19 nt, Homo sapiens
  misc_RNA (1)...(19): siRNA sense strand
uggaacauuuggugcaaca

SEQ ID NO: 947564 - RNA, 19 nt, Homo sapiens
  misc_RNA (1)...(19): siRNA sense strand
uaaguuaguagccacaucu

SEQ ID NO: 947565 - RNA, 19 nt, Homo sapiens
  misc_RNA (1)...(19): siRNA sense strand
uagcuuggaguuugacaga

SEQ ID NO: 947566 - RNA, 19 nt, Homo sapiens
  misc_RNA (1)...(19): siRNA sense strand
gaugccaguauauucugua

SEQ ID NO: 947567 - RNA, 19 nt, Homo sapiens
  misc_RNA (1)...(19): siRNA sense strand
cauagguggacuaggaauu

SEQ ID NO: 947568 - RNA, 19 nt, Homo sapiens
  misc_RNA (1)...(19): siRNA sense strand
ccauuucaaguuuggauug

SEQ ID NO: 947569 - RNA, 19 nt, Homo sapiens
  misc_RNA (1)...(19): siRNA sense strand
auucagcggucaaagaaag

SEQ ID NO: 947570 - RNA, 19 nt, Homo sapiens
  misc_RNA (1)...(19): siRNA sense strand
ucgagaagccucagaucau

SEQ ID NO: 947571 - RNA, 19 nt, Homo sapiens
  misc_RNA (1)...(19): siRNA sense strand
uguguagcuuggaguuuga

SEQ ID NO: 947572 - RNA, 19 nt, Homo sapiens
  misc_RNA (1)...(19): siRNA sense strand
aaggagcaccugaaauugu

SEQ ID NO: 947573 - RNA, 19 nt, Homo sapiens
  misc_RNA (1)...(19): siRNA sense strand
ugaaaaggccaaaccuauu

SEQ ID NO: 947574 - RNA, 19 nt, Homo sapiens
  misc_RNA (1)...(19): siRNA sense strand
cuuuacagcagagauauuu

SEQ ID NO: 947575 - RNA, 19 nt, Homo sapiens
  misc_RNA (1)...(19): siRNA sense strand
uuacagcagagauauuuag

SEQ ID NO: 947576 - RNA, 19 nt, Homo sapiens
  misc_RNA (1)...(19): siRNA sense strand
gagaugccaguauauucug

SEQ ID NO: 947577 - RNA, 19 nt, Homo sapiens
  misc_RNA (1)...(19): siRNA sense strand
augauccuguugcuaauau

SEQ ID NO: 947578 - RNA, 19 nt, Homo sapiens
  misc_RNA (1)...(19): siRNA sense strand
uaaucaagaagaacguguu

SEQ ID NO: 947579 - RNA, 19 nt, Homo sapiens
  misc_RNA (1)...(19): siRNA sense strand
guuggacuguggcauuugg

SEQ ID NO: 947580 - RNA, 19 nt, Homo sapiens
  misc_RNA (1)...(19): siRNA sense strand
ggugagaguacugaucguu

SEQ ID NO: 947581 - RNA, 19 nt, Homo sapiens
  misc_RNA (1)...(19): siRNA sense strand
ugcagaauguuacguuguc

SEQ ID NO: 947582 - RNA, 19 nt, Homo sapiens
  misc_RNA (1)...(19): siRNA sense strand
caaacggugagaguacuga

SEQ ID NO: 947583 - RNA, 19 nt, Homo sapiens
  misc_RNA (1)...(19): siRNA sense strand
gcauguggcugguaacuuu

SEQ ID NO: 947584 - RNA, 19 nt, Homo sapiens
  misc_RNA (1)...(19): siRNA sense strand
gcagaaauguugauaagca

SEQ ID NO: 947585 - RNA, 19 nt, Homo sapiens
  misc_RNA (1)...(19): siRNA sense strand
caucaaagcugucccuuca

SEQ ID NO: 947586 - RNA, 19 nt, Homo sapiens
  misc_RNA (1)...(19): siRNA sense strand
gcaaggagcucaccaucag

SEQ ID NO: 947587 - RNA, 19 nt, Homo sapiens
  misc_RNA (1)...(19): siRNA sense strand
ucaagaaguucgcccagua

SEQ ID NO: 947588 - RNA, 19 nt, Homo sapiens
  misc_RNA (1)...(19): siRNA sense strand
caagaacaauagaagcuuu

SEQ ID NO: 947589 - RNA, 19 nt, Homo sapiens
  misc_RNA (1)...(19): siRNA sense strand
gaauagggccucuuuaugg

SEQ ID NO: 947590 - RNA, 19 nt, Homo sapiens
  misc_RNA (1)...(19): siRNA sense strand
gagaauagggccucuuuau

SEQ ID NO: 947591 - RNA, 19 nt, Homo sapiens
  misc_RNA (1)...(19): siRNA sense strand
gacaacaccuuggaugaaa

SEQ ID NO: 947592 - RNA, 19 nt, Homo sapiens
  misc_RNA (1)...(19): siRNA sense strand
gcaccagccucuacuuugu

SEQ ID NO: 947593 - RNA, 19 nt, Homo sapiens
  misc_RNA (1)...(19): siRNA sense strand
gaauaucaggcgcgaauaa

SEQ ID NO: 947594 - RNA, 19 nt, Homo sapiens
  misc_RNA (1)...(19): siRNA sense strand
ggaauauguuagcguugua

SEQ ID NO: 947595 - RNA, 19 nt, Homo sapiens
  misc_RNA (1)...(19): siRNA sense strand
gcagugugguugugucuug

SEQ ID NO: 947596 - RNA, 19 nt, Homo sapiens
  misc_RNA (1)...(19): siRNA sense strand
gcaagaagaggaaggagaa

SEQ ID NO: 947597 - RNA, 19 nt, Homo sapiens
  misc_RNA (1)...(19): siRNA sense strand
ucagaggccuucuuucgaa

SEQ ID NO: 947598 - RNA, 19 nt, Homo sapiens
  misc_RNA (1)...(19): siRNA sense strand
ggacaaagaaggcaucaag

SEQ ID NO: 947599 - RNA, 19 nt, Homo sapiens
  misc_RNA (1)...(19): siRNA sense strand
ggacagcggcaccuacauu

SEQ ID NO: 947600 - RNA, 19 nt, Homo sapiens
  misc_RNA (1)...(19): siRNA sense strand
ggaaggcacccaagaagga

SEQ ID NO: 947601 - RNA, 19 nt, Homo sapiens
  misc_RNA (1)...(19): siRNA sense strand
ucacguagccgucaaagug

SEQ ID NO: 947602 - RNA, 19 nt, Homo sapiens
  misc_RNA (1)...(19): siRNA sense strand
cagauuggcuacagagaga

SEQ ID NO: 947603 - RNA, 19 nt, Homo sapiens
  misc_RNA (1)...(19): siRNA sense strand
ccacgacaaugacuacuuc

SEQ ID NO: 947604 - RNA, 19 nt, Homo sapiens
  misc_RNA (1)...(19): siRNA sense strand
gaggucgucuccacacuga

SEQ ID NO: 947605 - RNA, 19 nt, Homo sapiens
  misc_RNA (1)...(19): siRNA sense strand
ccucuucagugcaggaaua

SEQ ID NO: 947606 - RNA, 19 nt, Homo sapiens
  misc_RNA (1)...(19): siRNA sense strand
caucaagucugcucaaggu

SEQ ID NO: 947607 - RNA, 19 nt, Homo sapiens
  misc_RNA (1)...(19): siRNA sense strand
ucaagcaacugggagauga

SEQ ID NO: 947608 - RNA, 19 nt, Homo sapiens
  misc_RNA (1)...(19): siRNA sense strand
gcgagaaggugaccaucga

SEQ ID NO: 947609 - RNA, 19 nt, Homo sapiens
  misc_RNA (1)...(19): siRNA sense strand
caugagggcuugcaacagu

SEQ ID NO: 947610 - RNA, 19 nt, Homo sapiens
  misc_RNA (1)...(19): siRNA sense strand
gcaaugaaacagcccaguu

SEQ ID NO: 947611 - RNA, 19 nt, Homo sapiens
  misc_RNA (1)...(19): siRNA sense strand
gcccacggcuacacauuga

SEQ ID NO: 947612 - RNA, 19 nt, Homo sapiens
  misc_RNA (1)...(19): siRNA sense strand
ggugggcagugcugaauau

SEQ ID NO: 947613 - RNA, 19 nt, Homo sapiens
  misc_RNA (1)...(19): siRNA sense strand
caagucagaggccuucuuu

SEQ ID NO: 947614 - RNA, 19 nt, Homo sapiens
  misc_RNA (1)...(19): siRNA sense strand
caaagaaggcaucaagcaa

SEQ ID NO: 947615 - RNA, 19 nt, Homo sapiens
  misc_RNA (1)...(19): siRNA sense strand
ccuggacucuuuacacaaa

SEQ ID NO: 947616 - RNA, 19 nt, Homo sapiens
  misc_RNA (1)...(19): siRNA sense strand
uggacaaccucaagaaguu

SEQ ID NO: 947617 - RNA, 19 nt, Homo sapiens
  misc_RNA (1)...(19): siRNA sense strand
gccaugccaucaacucgua

SEQ ID NO: 947618 - RNA, 19 nt, Homo sapiens
  misc_RNA (1)...(19): siRNA sense strand
gggaguaccugugcagugu

SEQ ID NO: 947619 - RNA, 19 nt, Homo sapiens
  misc_RNA (1)...(19): siRNA sense strand
gcacaacggcaacuauaca

SEQ ID NO: 947620 - RNA, 19 nt, Homo sapiens
  misc_RNA (1)...(19): siRNA sense strand
gcucaucgaggacaaagaa

SEQ ID NO: 947621 - RNA, 19 nt, Homo sapiens
  misc_RNA (1)...(19): siRNA sense strand
ucaaagcugucccuucauc

SEQ ID NO: 947622 - RNA, 19 nt, Homo sapiens
  misc_RNA (1)...(19): siRNA sense strand
caacguggccgucuucaag

SEQ ID NO: 947623 - RNA, 19 nt, Homo sapiens
  misc_RNA (1)...(19): siRNA sense strand
ggagaauagggccucuuua

SEQ ID NO: 947624 - RNA, 19 nt, Homo sapiens
  misc_RNA (1)...(19): siRNA sense strand
gaaauguugauaagcaaga

SEQ ID NO: 947625 - RNA, 19 nt, Homo sapiens
  misc_RNA (1)...(19): siRNA sense strand
cugcagggcuggaacaaug

SEQ ID NO: 947626 - RNA, 19 nt, Homo sapiens
  misc_RNA (1)...(19): siRNA sense strand
ccaccacucuggaggaugu

SEQ ID NO: 947627 - RNA, 19 nt, Homo sapiens
  misc_RNA (1)...(19): siRNA sense strand
caagucugcucaaggugaa

SEQ ID NO: 947628 - RNA, 19 nt, Homo sapiens
  misc_RNA (1)...(19): siRNA sense strand
gcaaguacaccaucuucug

SEQ ID NO: 947629 - RNA, 19 nt, Homo sapiens
  misc_RNA (1)...(19): siRNA sense strand
ucaccaagcacaaguauag

SEQ ID NO: 947630 - RNA, 19 nt, Homo sapiens
  misc_RNA (1)...(19): siRNA sense strand
gcacagcgcggaacuuggu

SEQ ID NO: 947631 - RNA, 19 nt, Homo sapiens
  misc_RNA (1)...(19): siRNA sense strand
gcagugugcucuacaucca

SEQ ID NO: 947632 - RNA, 19 nt, Homo sapiens
  misc_RNA (1)...(19): siRNA sense strand
gcauccgcauguacucuuu

SEQ ID NO: 947633 - RNA, 19 nt, Homo sapiens
  misc_RNA (1)...(19): siRNA sense strand
gauccagcccuucgaauuc

SEQ ID NO: 947634 - RNA, 19 nt, Homo sapiens
  misc_RNA (1)...(19): siRNA sense strand
ccaggacuuugccaucauu

SEQ ID NO: 947635 - RNA, 19 nt, Homo sapiens
  misc_RNA (1)...(19): siRNA sense strand
cagaaauguugauaagcaa

SEQ ID NO: 947636 - RNA, 19 nt, Homo sapiens
  misc_RNA (1)...(19): siRNA sense strand
gaguuuggcagaaauguug

SEQ ID NO: 947637 - RNA, 19 nt, Homo sapiens
  misc_RNA (1)...(19): siRNA sense strand
caccuuggaugaaagaugu

SEQ ID NO: 947638 - RNA, 19 nt, Homo sapiens
  misc_RNA (1)...(19): siRNA sense strand
ccaagaaggagcugcagaa

SEQ ID NO: 947639 - RNA, 19 nt, Homo sapiens
  misc_RNA (1)...(19): siRNA sense strand
cauguacucuuucaacaag

SEQ ID NO: 947640 - RNA, 19 nt, Homo sapiens
  misc_RNA (1)...(19): siRNA sense strand
gggacacccuuaucaacug

SEQ ID NO: 947641 - RNA, 19 nt, Homo sapiens
  misc_RNA (1)...(19): siRNA sense strand
ccaauccaguguccaggaa

SEQ ID NO: 947642 - RNA, 19 nt, Homo sapiens
  misc_RNA (1)...(19): siRNA sense strand
uggcagaaauguugauaag

SEQ ID NO: 947643 - RNA, 19 nt, Homo sapiens
  misc_RNA (1)...(19): siRNA sense strand
gggaugaugugaagaagcu

SEQ ID NO: 947644 - RNA, 19 nt, Homo sapiens
  misc_RNA (1)...(19): siRNA sense strand
ucacgggcuucgacauuga

SEQ ID NO: 947645 - RNA, 19 nt, Homo sapiens
  misc_RNA (1)...(19): siRNA sense strand
gcaccgacaucagcaaguc

SEQ ID NO: 947646 - RNA, 19 nt, Homo sapiens
  misc_RNA (1)...(19): siRNA sense strand
gacagcggcaccuacauuu

SEQ ID NO: 947647 - RNA, 19 nt, Homo sapiens
  misc_RNA (1)...(19): siRNA sense strand
cacccaaggucauguggaa

SEQ ID NO: 947648 - RNA, 19 nt, Homo sapiens
  misc_RNA (1)...(19): siRNA sense strand
gaacgcugccggcaagauc

SEQ ID NO: 947649 - RNA, 19 nt, Homo sapiens
  misc_RNA (1)...(19): siRNA sense strand
gacauugaauacaagaaca

SEQ ID NO: 947650 - RNA, 19 nt, Homo sapiens
  misc_RNA (1)...(19): siRNA sense strand
caacauccgcgucaaagca

SEQ ID NO: 947651 - RNA, 19 nt, Homo sapiens
  misc_RNA (1)...(19): siRNA sense strand
ccacaggcauccucauggu

SEQ ID NO: 947652 - RNA, 19 nt, Homo sapiens
  misc_RNA (1)...(19): siRNA sense strand
gauaagcaagaacaauaga

SEQ ID NO: 947653 - RNA, 19 nt, Homo sapiens
  misc_RNA (1)...(19): siRNA sense strand
gcauguacucuuucaacaa

SEQ ID NO: 947654 - RNA, 19 nt, Homo sapiens
  misc_RNA (1)...(19): siRNA sense strand
gcuucgacauugaauacaa

SEQ ID NO: 947655 - RNA, 19 nt, Homo sapiens
  misc_RNA (1)...(19): siRNA sense strand
gguaugccaucgccaccaa

SEQ ID NO: 947656 - RNA, 19 nt, Homo sapiens
  misc_RNA (1)...(19): siRNA sense strand
ggacaugcccauccguauc

SEQ ID NO: 947657 - RNA, 19 nt, Homo sapiens
  misc_RNA (1)...(19): siRNA sense strand
gcccaggacuuugccauca

SEQ ID NO: 947658 - RNA, 19 nt, Homo sapiens
  misc_RNA (1)...(19): siRNA sense strand
caaaggcuaucgggucauc

SEQ ID NO: 947659 - RNA, 19 nt, Homo sapiens
  misc_RNA (1)...(19): siRNA sense strand
ccacaggcaccaacgagaa

SEQ ID NO: 947660 - RNA, 19 nt, Homo sapiens
  misc_RNA (1)...(19): siRNA sense strand
ugugacagaugcugaguuc

SEQ ID NO: 947661 - RNA, 19 nt, Homo sapiens
  misc_RNA (1)...(19): siRNA sense strand
uauggcauguggcugguaa

SEQ ID NO: 947662 - RNA, 19 nt, Homo sapiens
  misc_RNA (1)...(19): siRNA sense strand
guacuggcgucuccuugca

SEQ ID NO: 947663 - RNA, 19 nt, Homo sapiens
  misc_RNA (1)...(19): siRNA sense strand
caaugaaacagcccaguuc

SEQ ID NO: 947664 - RNA, 19 nt, Homo sapiens
  misc_RNA (1)...(19): siRNA sense strand
gaggcuucgugcuacagua

SEQ ID NO: 947665 - RNA, 19 nt, Homo sapiens
  misc_RNA (1)...(19): siRNA sense strand
ugaggacucuggcuacuac

SEQ ID NO: 947666 - RNA, 19 nt, Homo sapiens
  misc_RNA (1)...(19): siRNA sense strand
caagaaguucgcccaguau

SEQ ID NO: 947667 - RNA, 19 nt, Homo sapiens
  misc_RNA (1)...(19): siRNA sense strand
gcagugaaccaagcaagga

SEQ ID NO: 947668 - RNA, 19 nt, Homo sapiens
  misc_RNA (1)...(19): siRNA sense strand
aagaggacaucggcuacua

SEQ ID NO: 947669 - RNA, 19 nt, Homo sapiens
  misc_RNA (1)...(19): siRNA sense strand
gccaggugguguuugagaa

SEQ ID NO: 947670 - RNA, 19 nt, Homo sapiens
  misc_RNA (1)...(19): siRNA sense strand
cagaggccuucuuucgaaa

SEQ ID NO: 947671 - RNA, 19 nt, Homo sapiens
  misc_RNA (1)...(19): siRNA sense strand
gcaagaacaauagaagcuu

SEQ ID NO: 947672 - RNA, 19 nt, Homo sapiens
  misc_RNA (1)...(19): siRNA sense strand
ugacaacaccuuggaugaa

SEQ ID NO: 947673 - RNA, 19 nt, Homo sapiens
  misc_RNA (1)...(19): siRNA sense strand
caaguacaccaucuucugu

SEQ ID NO: 947674 - RNA, 19 nt, Homo sapiens
  misc_RNA (1)...(19): siRNA sense strand
gcauggagaaguucaccaa

SEQ ID NO: 947675 - RNA, 19 nt, Homo sapiens
  misc_RNA (1)...(19): siRNA sense strand
aagcacaacggcaacuaua

SEQ ID NO: 947676 - RNA, 19 nt, Homo sapiens
  misc_RNA (1)...(19): siRNA sense strand
cguuguaucuugggagaaa

SEQ ID NO: 947677 - RNA, 19 nt, Homo sapiens
  misc_RNA (1)...(19): siRNA sense strand
caucacgggcuucgacauu

SEQ ID NO: 947678 - RNA, 19 nt, Homo sapiens
  misc_RNA (1)...(19): siRNA sense strand
ccagaccgcccaggacuuu

SEQ ID NO: 947679 - RNA, 19 nt, Homo sapiens
  misc_RNA (1)...(19): siRNA sense strand
caacaccuuggaugaaaga

SEQ ID NO: 947680 - RNA, 19 nt, Homo sapiens
  misc_RNA (1)...(19): siRNA sense strand
gggcugaggagcagagaga

SEQ ID NO: 947681 - RNA, 19 nt, Homo sapiens
  misc_RNA (1)...(19): siRNA sense strand
gccucuacuuuguaaauga

SEQ ID NO: 947682 - RNA, 19 nt, Homo sapiens
  misc_RNA (1)...(19): siRNA sense strand
ggaccaaggacagugaaga

SEQ ID NO: 947683 - RNA, 19 nt, Homo sapiens
  misc_RNA (1)...(19): siRNA sense strand
gugggcaucuccuacauua

SEQ ID NO: 947684 - RNA, 19 nt, Homo sapiens
  misc_RNA (1)...(19): siRNA sense strand
gaacuucugggccuagauu

SEQ ID NO: 947685 - RNA, 19 nt, Homo sapiens
  misc_RNA (1)...(19): siRNA sense strand
ccagauugauggaugaaau

SEQ ID NO: 947686 - RNA, 19 nt, Homo sapiens
  misc_RNA (1)...(19): siRNA sense strand
gaagcugccugugcauaug

SEQ ID NO: 947687 - RNA, 19 nt, Homo sapiens
  misc_RNA (1)...(19): siRNA sense strand
ucaaaugguuguccugauc

SEQ ID NO: 947688 - RNA, 19 nt, Homo sapiens
  misc_RNA (1)...(19): siRNA sense strand
caucaguuaugaggacuuu

SEQ ID NO: 947689 - RNA, 19 nt, Homo sapiens
  misc_RNA (1)...(19): siRNA sense strand
gaacagcgucugggaaagu

SEQ ID NO: 947690 - RNA, 19 nt, Homo sapiens
  misc_RNA (1)...(19): siRNA sense strand
ucucugcccuucgucaaua

SEQ ID NO: 947691 - RNA, 19 nt, Homo sapiens
  misc_RNA (1)...(19): siRNA sense strand
gagaagcugccugugcaua

SEQ ID NO: 947692 - RNA, 19 nt, Homo sapiens
  misc_RNA (1)...(19): siRNA sense strand
gggccuagauuguucaaaa

SEQ ID NO: 947693 - RNA, 19 nt, Homo sapiens
  misc_RNA (1)...(19): siRNA sense strand
gugaacagcgucugggaaa

SEQ ID NO: 947694 - RNA, 19 nt, Homo sapiens
  misc_RNA (1)...(19): siRNA sense strand
ccaccaagguauuuucaaa

SEQ ID NO: 947695 - RNA, 19 nt, Homo sapiens
  misc_RNA (1)...(19): siRNA sense strand
gacaaagaugaucaaguuu

SEQ ID NO: 947696 - RNA, 19 nt, Homo sapiens
  misc_RNA (1)...(19): siRNA sense strand
cagauugacugagauuguc

SEQ ID NO: 947697 - RNA, 19 nt, Homo sapiens
  misc_RNA (1)...(19): siRNA sense strand
cagauugauggaugaaauu

SEQ ID NO: 947698 - RNA, 19 nt, Homo sapiens
  misc_RNA (1)...(19): siRNA sense strand
cauaugggccuggugauca

SEQ ID NO: 947699 - RNA, 19 nt, Homo sapiens
  misc_RNA (1)...(19): siRNA sense strand
gucaauaugcagccuguga

SEQ ID NO: 947700 - RNA, 19 nt, Homo sapiens
  misc_RNA (1)...(19): siRNA sense strand
gaagauggaaaagcagaua

SEQ ID NO: 947701 - RNA, 19 nt, Homo sapiens
  misc_RNA (1)...(19): siRNA sense strand
aacagcgucugggaaagua

SEQ ID NO: 947702 - RNA, 19 nt, Homo sapiens
  misc_RNA (1)...(19): siRNA sense strand
gggcaucuccuacauuagc

SEQ ID NO: 947703 - RNA, 19 nt, Homo sapiens
  misc_RNA (1)...(19): siRNA sense strand
ucaauaugcagccugugaa

SEQ ID NO: 947704 - RNA, 19 nt, Homo sapiens
  misc_RNA (1)...(19): siRNA sense strand
guccugauccugauuuagu

SEQ ID NO: 947705 - RNA, 19 nt, Homo sapiens
  misc_RNA (1)...(19): siRNA sense strand
cuacgaccaccaagguauu

SEQ ID NO: 947706 - RNA, 19 nt, Homo sapiens
  misc_RNA (1)...(19): siRNA sense strand
gagcaggaacccagcuucu

SEQ ID NO: 947707 - RNA, 19 nt, Homo sapiens
  misc_RNA (1)...(19): siRNA sense strand
uccugauccugauuuagua

SEQ ID NO: 947708 - RNA, 19 nt, Homo sapiens
  misc_RNA (1)...(19): siRNA sense strand
agaagcugccugugcauau

SEQ ID NO: 947709 - RNA, 19 nt, Homo sapiens
  misc_RNA (1)...(19): siRNA sense strand
gcauaugggccuggugauc

SEQ ID NO: 947710 - RNA, 19 nt, Homo sapiens
  misc_RNA (1)...(19): siRNA sense strand
ucaaagaccugcauaguag

SEQ ID NO: 947711 - RNA, 19 nt, Homo sapiens
  misc_RNA (1)...(19): siRNA sense strand
gacacaagcuuggaaauau

SEQ ID NO: 947712 - RNA, 19 nt, Homo sapiens
  misc_RNA (1)...(19): siRNA sense strand
gaugucaccuaccuguuga

SEQ ID NO: 947713 - RNA, 19 nt, Homo sapiens
  misc_RNA (1)...(19): siRNA sense strand
agauacggcugcuucagua

SEQ ID NO: 947714 - RNA, 19 nt, Homo sapiens
  misc_RNA (1)...(19): siRNA sense strand
ggaugucaccuaccuguug

SEQ ID NO: 947715 - RNA, 19 nt, Homo sapiens
  misc_RNA (1)...(19): siRNA sense strand
guaggaauuaucuguauga

SEQ ID NO: 947716 - RNA, 19 nt, Homo sapiens
  misc_RNA (1)...(19): siRNA sense strand
agacacaagcuuggaaaua

SEQ ID NO: 947717 - RNA, 19 nt, Homo sapiens
  misc_RNA (1)...(19): siRNA sense strand
acacaagcuuggaaauaug

SEQ ID NO: 947718 - RNA, 19 nt, Homo sapiens
  misc_RNA (1)...(19): siRNA sense strand
caacguggcacuccuccuu

SEQ ID NO: 947719 - RNA, 19 nt, Homo sapiens
  misc_RNA (1)...(19): siRNA sense strand
gcccugauuugcuuuguca

SEQ ID NO: 947720 - RNA, 19 nt, Homo sapiens
  misc_RNA (1)...(19): siRNA sense strand
cagcuauccucaucuccuu

SEQ ID NO: 947721 - RNA, 19 nt, Homo sapiens
  misc_RNA (1)...(19): siRNA sense strand
ggagcccucugcagcuguu

SEQ ID NO: 947722 - RNA, 19 nt, Homo sapiens
  misc_RNA (1)...(19): siRNA sense strand
gagauacggcugcuucagu

SEQ ID NO: 947723 - RNA, 19 nt, Homo sapiens
  misc_RNA (1)...(19): siRNA sense strand
gcacuccuccuuccuaacu

SEQ ID NO: 947724 - RNA, 19 nt, Homo sapiens
  misc_RNA (1)...(19): siRNA sense strand
gguacucacugcagcuauc

SEQ ID NO: 947725 - RNA, 19 nt, Homo sapiens
  misc_RNA (1)...(19): siRNA sense strand
uuacuuggagcccugauuu

SEQ ID NO: 947726 - RNA, 19 nt, Homo sapiens
  misc_RNA (1)...(19): siRNA sense strand
ggaguugcucugaaagaug

SEQ ID NO: 947727 - RNA, 19 nt, Homo sapiens
  misc_RNA (1)...(19): siRNA sense strand
gguggucguucaugucauc

SEQ ID NO: 947728 - RNA, 19 nt, Homo sapiens
  misc_RNA (1)...(19): siRNA sense strand
ccggcaagcucacggacuu

SEQ ID NO: 947729 - RNA, 19 nt, Homo sapiens
  misc_RNA (1)...(19): siRNA sense strand
uggcacuccuccuuccuaa

SEQ ID NO: 947730 - RNA, 19 nt, Homo sapiens
  misc_RNA (1)...(19): siRNA sense strand
cauaguaggaauuaucugu

SEQ ID NO: 947731 - RNA, 19 nt, Homo sapiens
  misc_RNA (1)...(19): siRNA sense strand
uucaaagaccugcauagua

SEQ ID NO: 947732 - RNA, 19 nt, Homo sapiens
  misc_RNA (1)...(19): siRNA sense strand
uggccuggcuuuacuugga

SEQ ID NO: 947733 - RNA, 19 nt, Homo sapiens
  misc_RNA (1)...(19): siRNA sense strand
aagcuuggaaauaugguua

SEQ ID NO: 947734 - RNA, 19 nt, Homo sapiens
  misc_RNA (1)...(19): siRNA sense strand
gauacggcugcuucaguaa

SEQ ID NO: 947735 - RNA, 19 nt, Homo sapiens
  misc_RNA (1)...(19): siRNA sense strand
ugauuugcuuugucacuuc

SEQ ID NO: 947736 - RNA, 19 nt, Homo sapiens
  misc_RNA (1)...(19): siRNA sense strand
gcuauccucaucuccuuga

SEQ ID NO: 947737 - RNA, 19 nt, Homo sapiens
  misc_RNA (1)...(19): siRNA sense strand
uacggcugcuucaguaaga

SEQ ID NO: 947738 - RNA, 19 nt, Homo sapiens
  misc_RNA (1)...(19): siRNA sense strand
ggacugcagcccuguuugc

SEQ ID NO: 947739 - RNA, 19 nt, Homo sapiens
  misc_RNA (1)...(19): siRNA sense strand
uugcauguuugauguuuca

SEQ ID NO: 947740 - RNA, 19 nt, Homo sapiens
  misc_RNA (1)...(19): siRNA sense strand
gcuuacugcucuguuguca

SEQ ID NO: 947741 - RNA, 19 nt, Homo sapiens
  misc_RNA (1)...(19): siRNA sense strand
ucagacacaagcuuggaaa

SEQ ID NO: 947742 - RNA, 19 nt, Homo sapiens
  misc_RNA (1)...(19): siRNA sense strand
uuggagcccugauuugcuu

SEQ ID NO: 947743 - RNA, 19 nt, Homo sapiens
  misc_RNA (1)...(19): siRNA sense strand
ggucguucaugucaucaac

SEQ ID NO: 947744 - RNA, 19 nt, Homo sapiens
  misc_RNA (1)...(19): siRNA sense strand
uggaguugcucugaaagau

SEQ ID NO: 947745 - RNA, 19 nt, Homo sapiens
  misc_RNA (1)...(19): siRNA sense strand
cgugcuuacugcucuguug

SEQ ID NO: 947746 - RNA, 19 nt, Homo sapiens
  misc_RNA (1)...(19): siRNA sense strand
gaccugcauaguaggaauu

SEQ ID NO: 947747 - RNA, 19 nt, Homo sapiens
  misc_RNA (1)...(19): siRNA sense strand
cuuccuaacugggauguca

SEQ ID NO: 947748 - RNA, 19 nt, Homo sapiens
  misc_RNA (1)...(19): siRNA sense strand
cuuugucacuucuggaguu

SEQ ID NO: 947749 - RNA, 19 nt, Homo sapiens
  misc_RNA (1)...(19): siRNA sense strand
gauuugcuuugucacuucu

SEQ ID NO: 947750 - RNA, 19 nt, Homo sapiens
  misc_RNA (1)...(19): siRNA sense strand
cuucuggaguugcucugaa

SEQ ID NO: 947751 - RNA, 19 nt, Homo sapiens
  misc_RNA (1)...(19): siRNA sense strand
gagcccugauuugcuuugu

SEQ ID NO: 947752 - RNA, 19 nt, Homo sapiens
  misc_RNA (1)...(19): siRNA sense strand
cuaacugggaugucaccua

SEQ ID NO: 947753 - RNA, 19 nt, Homo sapiens
  misc_RNA (1)...(19): siRNA sense strand
guuucauccuucaaucaga

SEQ ID NO: 947754 - RNA, 19 nt, Homo sapiens
  misc_RNA (1)...(19): siRNA sense strand
cugauuugcuuugucacuu

SEQ ID NO: 947755 - RNA, 19 nt, Homo sapiens
  misc_RNA (1)...(19): siRNA sense strand
gaacagaagucaagacauc

SEQ ID NO: 947756 - RNA, 19 nt, Homo sapiens
  misc_RNA (1)...(19): siRNA sense strand
aaagagaccugcugauaaa

SEQ ID NO: 947757 - RNA, 19 nt, Homo sapiens
  misc_RNA (1)...(19): siRNA sense strand
gucaagacauccacaguua

SEQ ID NO: 947758 - RNA, 19 nt, Homo sapiens
  misc_RNA (1)...(19): siRNA sense strand
gcaagguccucacaacuga

SEQ ID NO: 947759 - RNA, 19 nt, Homo sapiens
  misc_RNA (1)...(19): siRNA sense strand
gaagaaagcugcccaaaag

SEQ ID NO: 947760 - RNA, 19 nt, Homo sapiens
  misc_RNA (1)...(19): siRNA sense strand
gaaggaagcugaaaagaga

SEQ ID NO: 947761 - RNA, 19 nt, Homo sapiens
  misc_RNA (1)...(19): siRNA sense strand
gcacuagguuucuugcauu

SEQ ID NO: 947762 - RNA, 19 nt, Homo sapiens
  misc_RNA (1)...(19): siRNA sense strand
ggaagcagcagccaacuaa

SEQ ID NO: 947763 - RNA, 19 nt, Homo sapiens
  misc_RNA (1)...(19): siRNA sense strand
ccaccgagauugucauaaa

SEQ ID NO: 947764 - RNA, 19 nt, Homo sapiens
  misc_RNA (1)...(19): siRNA sense strand
gauuacagauggucaagaa

SEQ ID NO: 947765 - RNA, 19 nt, Homo sapiens
  misc_RNA (1)...(19): siRNA sense strand
gaguaaagauucugcugaa

SEQ ID NO: 947766 - RNA, 19 nt, Homo sapiens
  misc_RNA (1)...(19): siRNA sense strand
gaguugauauuccaaagaa

SEQ ID NO: 947767 - RNA, 19 nt, Homo sapiens
  misc_RNA (1)...(19): siRNA sense strand
acacagucaucucccauua

SEQ ID NO: 947768 - RNA, 19 nt, Homo sapiens
  misc_RNA (1)...(19): siRNA sense strand
agacaucacugaaggaguu

SEQ ID NO: 947769 - RNA, 19 nt, Homo sapiens
  misc_RNA (1)...(19): siRNA sense strand
ucaaagauccauugguuaa

SEQ ID NO: 947770 - RNA, 19 nt, Homo sapiens
  misc_RNA (1)...(19): siRNA sense strand
uggcugaccuuuccaguuu

SEQ ID NO: 947771 - RNA, 19 nt, Homo sapiens
  misc_RNA (1)...(19): siRNA sense strand
ugucaaagauccauugguu

SEQ ID NO: 947772 - RNA, 19 nt, Homo sapiens
  misc_RNA (1)...(19): siRNA sense strand
aaucacagcucaaugcuau

SEQ ID NO: 947773 - RNA, 19 nt, Homo sapiens
  misc_RNA (1)...(19): siRNA sense strand
gucaguaacuaguggcuua

SEQ ID NO: 947774 - RNA, 19 nt, Homo sapiens
  misc_RNA (1)...(19): siRNA sense strand
gaaaagagaccugcugaua

SEQ ID NO: 947775 - RNA, 19 nt, Homo sapiens
  misc_RNA (1)...(19): siRNA sense strand
gcaaucaauuaguagaaug

SEQ ID NO: 947776 - RNA, 19 nt, Homo sapiens
  misc_RNA (1)...(19): siRNA sense strand
ggauuggccugcguuguuu

SEQ ID NO: 947777 - RNA, 19 nt, Homo sapiens
  misc_RNA (1)...(19): siRNA sense strand
gaaacuaaacugaaacaag

SEQ ID NO: 947778 - RNA, 19 nt, Homo sapiens
  misc_RNA (1)...(19): siRNA sense strand
gaauggaaauaguggaaca

SEQ ID NO: 947779 - RNA, 19 nt, Homo sapiens
  misc_RNA (1)...(19): siRNA sense strand
caagacauccacaguuauu

SEQ ID NO: 947780 - RNA, 19 nt, Homo sapiens
  misc_RNA (1)...(19): siRNA sense strand
uagcaaggauuuaccuaug

SEQ ID NO: 947781 - RNA, 19 nt, Homo sapiens
  misc_RNA (1)...(19): siRNA sense strand
ucaaugcuaugaagcgauu

SEQ ID NO: 947782 - RNA, 19 nt, Homo sapiens
  misc_RNA (1)...(19): siRNA sense strand
ggccuuagucgcucaguua

SEQ ID NO: 947783 - RNA, 19 nt, Homo sapiens
  misc_RNA (1)...(19): siRNA sense strand
aaagauccauugguuaaga

SEQ ID NO: 947784 - RNA, 19 nt, Homo sapiens
  misc_RNA (1)...(19): siRNA sense strand
caaagaaaccuagauugga

SEQ ID NO: 947785 - RNA, 19 nt, Homo sapiens
  misc_RNA (1)...(19): siRNA sense strand
caaaauagguuccaauaac

SEQ ID NO: 947786 - RNA, 19 nt, Homo sapiens
  misc_RNA (1)...(19): siRNA sense strand
gaccagugcugaugauuuu

SEQ ID NO: 947787 - RNA, 19 nt, Homo sapiens
  misc_RNA (1)...(19): siRNA sense strand
ugaaacaagagacaacuuu

SEQ ID NO: 947788 - RNA, 19 nt, Homo sapiens
  misc_RNA (1)...(19): siRNA sense strand
caacuaagugggaauggaa

SEQ ID NO: 947789 - RNA, 19 nt, Homo sapiens
  misc_RNA (1)...(19): siRNA sense strand
ugacuggucuggcaacauc

SEQ ID NO: 947790 - RNA, 19 nt, Homo sapiens
  misc_RNA (1)...(19): siRNA sense strand
cgauguaccagacaaauga

SEQ ID NO: 947791 - RNA, 19 nt, Homo sapiens
  misc_RNA (1)...(19): siRNA sense strand
gcuaugaagcgauuacaga

SEQ ID NO: 947792 - RNA, 19 nt, Homo sapiens
  misc_RNA (1)...(19): siRNA sense strand
ucaggaaauucuucuagug

SEQ ID NO: 947793 - RNA, 19 nt, Homo sapiens
  misc_RNA (1)...(19): siRNA sense strand
ggagaccagugcugaugau

SEQ ID NO: 947794 - RNA, 19 nt, Homo sapiens
  misc_RNA (1)...(19): siRNA sense strand
gggauuggccugcguuguu

SEQ ID NO: 947795 - RNA, 19 nt, Homo sapiens
  misc_RNA (1)...(19): siRNA sense strand
gguggcaucuggcaaucaa

SEQ ID NO: 947796 - RNA, 19 nt, Homo sapiens
  misc_RNA (1)...(19): siRNA sense strand
uaagagaacagaagucaag

SEQ ID NO: 947797 - RNA, 19 nt, Homo sapiens
  misc_RNA (1)...(19): siRNA sense strand
guuaagaaaccagaaacua

SEQ ID NO: 947798 - RNA, 19 nt, Homo sapiens
  misc_RNA (1)...(19): siRNA sense strand
caacuuuucuagcguuuaa

SEQ ID NO: 947799 - RNA, 19 nt, Homo sapiens
  misc_RNA (1)...(19): siRNA sense strand
gagaacagaagucaagaca

SEQ ID NO: 947800 - RNA, 19 nt, Homo sapiens
  misc_RNA (1)...(19): siRNA sense strand
ugaaggaguugauauucca

SEQ ID NO: 947801 - RNA, 19 nt, Homo sapiens
  misc_RNA (1)...(19): siRNA sense strand
ugaaaagaauggcucaaaa

SEQ ID NO: 947802 - RNA, 19 nt, Homo sapiens
  misc_RNA (1)...(19): siRNA sense strand
ggagugccauaaucucuac

SEQ ID NO: 947803 - RNA, 19 nt, Homo sapiens
  misc_RNA (1)...(19): siRNA sense strand
gaaaccagaaacacaguca

SEQ ID NO: 947804 - RNA, 19 nt, Homo sapiens
  misc_RNA (1)...(19): siRNA sense strand
cagcaaaacuacuucagaa

SEQ ID NO: 947805 - RNA, 19 nt, Homo sapiens
  misc_RNA (1)...(19): siRNA sense strand
cuuagucgcucaguuaguu

SEQ ID NO: 947806 - RNA, 19 nt, Homo sapiens
  misc_RNA (1)...(19): siRNA sense strand
accagaaacuaaacugaaa

SEQ ID NO: 947807 - RNA, 19 nt, Homo sapiens
  misc_RNA (1)...(19): siRNA sense strand
ggcaaucaauuaguagaau

SEQ ID NO: 947808 - RNA, 19 nt, Homo sapiens
  misc_RNA (1)...(19): siRNA sense strand
ccucacaacugaaaaggua

SEQ ID NO: 947809 - RNA, 19 nt, Homo sapiens
  misc_RNA (1)...(19): siRNA sense strand
ggaaauaguggaacaucag

SEQ ID NO: 947810 - RNA, 19 nt, Homo sapiens
  misc_RNA (1)...(19): siRNA sense strand
gggcauugauuccaguuac

SEQ ID NO: 947811 - RNA, 19 nt, Homo sapiens
  misc_RNA (1)...(19): siRNA sense strand
guaaagaaggaagcugaaa

SEQ ID NO: 947812 - RNA, 19 nt, Homo sapiens
  misc_RNA (1)...(19): siRNA sense strand
ggaguugauauuccaaaga

SEQ ID NO: 947813 - RNA, 19 nt, Homo sapiens
  misc_RNA (1)...(19): siRNA sense strand
uacagauggucaagaagaa

SEQ ID NO: 947814 - RNA, 19 nt, Homo sapiens
  misc_RNA (1)...(19): siRNA sense strand
gaaucacagcucaaugcua

SEQ ID NO: 947815 - RNA, 19 nt, Homo sapiens
  misc_RNA (1)...(19): siRNA sense strand
gaaaccagaaacuaaacug

SEQ ID NO: 947816 - RNA, 19 nt, Homo sapiens
  misc_RNA (1)...(19): siRNA sense strand
ccaaaguagcaaggauuua

SEQ ID NO: 947817 - RNA, 19 nt, Homo sapiens
  misc_RNA (1)...(19): siRNA sense strand
gaaagcugcccaaaagaaa

SEQ ID NO: 947818 - RNA, 19 nt, Homo sapiens
  misc_RNA (1)...(19): siRNA sense strand
ccaguuaccguccaucuca

SEQ ID NO: 947819 - RNA, 19 nt, Homo sapiens
  misc_RNA (1)...(19): siRNA sense strand
acuaguggcuuaacuggau

SEQ ID NO: 947820 - RNA, 19 nt, Homo sapiens
  misc_RNA (1)...(19): siRNA sense strand
uaacuccagcugucaaaga

SEQ ID NO: 947821 - RNA, 19 nt, Homo sapiens
  misc_RNA (1)...(19): siRNA sense strand
ugucaggagugccauaauc

SEQ ID NO: 947822 - RNA, 19 nt, Homo sapiens
  misc_RNA (1)...(19): siRNA sense strand
caaaguagcaaggauuuac

SEQ ID NO: 947823 - RNA, 19 nt, Homo sapiens
  misc_RNA (1)...(19): siRNA sense strand
gauauuccaaagaaaccua

SEQ ID NO: 947824 - RNA, 19 nt, Homo sapiens
  misc_RNA (1)...(19): siRNA sense strand
uuacagauggucaagaaga

SEQ ID NO: 947825 - RNA, 19 nt, Homo sapiens
  misc_RNA (1)...(19): siRNA sense strand
gggaauggaaauaguggaa

SEQ ID NO: 947826 - RNA, 19 nt, Homo sapiens
  misc_RNA (1)...(19): siRNA sense strand
ccaacuaagugggaaugga

SEQ ID NO: 947827 - RNA, 19 nt, Homo sapiens
  misc_RNA (1)...(19): siRNA sense strand
gaaacaagagacaacuuuu

SEQ ID NO: 947828 - RNA, 19 nt, Homo sapiens
  misc_RNA (1)...(19): siRNA sense strand
guaaagauucugcugaaaa

SEQ ID NO: 947829 - RNA, 19 nt, Homo sapiens
  misc_RNA (1)...(19): siRNA sense strand
gucaaagauccauugguua

SEQ ID NO: 947830 - RNA, 19 nt, Homo sapiens
  misc_RNA (1)...(19): siRNA sense strand
guagcaaggauuuaccuau

SEQ ID NO: 947831 - RNA, 19 nt, Homo sapiens
  misc_RNA (1)...(19): siRNA sense strand
aaaccuagauuggagaaac

SEQ ID NO: 947832 - RNA, 19 nt, Homo sapiens
  misc_RNA (1)...(19): siRNA sense strand
caacuucacaagaaucaca

SEQ ID NO: 947833 - RNA, 19 nt, Homo sapiens
  misc_RNA (1)...(19): siRNA sense strand
acauuuccauuaagcaaga

SEQ ID NO: 947834 - RNA, 19 nt, Homo sapiens
  misc_RNA (1)...(19): siRNA sense strand
cuagguuucuugcauucaa

SEQ ID NO: 947835 - RNA, 19 nt, Homo sapiens
  misc_RNA (1)...(19): siRNA sense strand
ucagaaaccaccgcagaaa

SEQ ID NO: 947836 - RNA, 19 nt, Homo sapiens
  misc_RNA (1)...(19): siRNA sense strand
gaaugucaggagugccaua

SEQ ID NO: 947837 - RNA, 19 nt, Homo sapiens
  misc_RNA (1)...(19): siRNA sense strand
acugugaacuuggaacuug

SEQ ID NO: 947838 - RNA, 19 nt, Homo sapiens
  misc_RNA (1)...(19): siRNA sense strand
gaaaccagccccugcaguu

SEQ ID NO: 947839 - RNA, 19 nt, Homo sapiens
  misc_RNA (1)...(19): siRNA sense strand
ggcaucuggcaaucaauua

SEQ ID NO: 947840 - RNA, 19 nt, Homo sapiens
  misc_RNA (1)...(19): siRNA sense strand
gaggagaccagugcugaug

SEQ ID NO: 947841 - RNA, 19 nt, Homo sapiens
  misc_RNA (1)...(19): siRNA sense strand
aaaagagaccugcugauaa

SEQ ID NO: 947842 - RNA, 19 nt, Homo sapiens
  misc_RNA (1)...(19): siRNA sense strand
ucacagcucaaugcuauga

SEQ ID NO: 947843 - RNA, 19 nt, Homo sapiens
  misc_RNA (1)...(19): siRNA sense strand
aggcccaacuucacaagaa

SEQ ID NO: 947844 - RNA, 19 nt, Homo sapiens
  misc_RNA (1)...(19): siRNA sense strand
ggucuuccuaguccaagua

SEQ ID NO: 947845 - RNA, 19 nt, Homo sapiens
  misc_RNA (1)...(19): siRNA sense strand
caacugaaaagguaaagaa

SEQ ID NO: 947846 - RNA, 19 nt, Homo sapiens
  misc_RNA (1)...(19): siRNA sense strand
caaaagaaacucaagaagu

SEQ ID NO: 947847 - RNA, 19 nt, Homo sapiens
  misc_RNA (1)...(19): siRNA sense strand
uggaaguacuaccagcaaa

SEQ ID NO: 947848 - RNA, 19 nt, Homo sapiens
  misc_RNA (1)...(19): siRNA sense strand
uggaaauaguggaacauca

SEQ ID NO: 947849 - RNA, 19 nt, Homo sapiens
  misc_RNA (1)...(19): siRNA sense strand
cagacaaggaagcgaauga

SEQ ID NO: 947850 - RNA, 19 nt, Homo sapiens
  misc_RNA (1)...(19): siRNA sense strand
agucuuccuucugguaaua

SEQ ID NO: 947851 - RNA, 19 nt, Homo sapiens
  misc_RNA (1)...(19): siRNA sense strand
cuaagugggaauggaaaua

SEQ ID NO: 947852 - RNA, 19 nt, Homo sapiens
  misc_RNA (1)...(19): siRNA sense strand
ccucuaaccuuggguaaaa

SEQ ID NO: 947853 - RNA, 19 nt, Homo sapiens
  misc_RNA (1)...(19): siRNA sense strand
uaaagauucugcugaaaag

SEQ ID NO: 947854 - RNA, 19 nt, Homo sapiens
  misc_RNA (1)...(19): siRNA sense strand
ccagacaaaugaaaagaau

SEQ ID NO: 947855 - RNA, 19 nt, Homo sapiens
  misc_RNA (1)...(19): siRNA sense strand
gaacuggauuuguuuagaa

SEQ ID NO: 947856 - RNA, 19 nt, Homo sapiens
  misc_RNA (1)...(19): siRNA sense strand
gcaagaagaugaggaagaa

SEQ ID NO: 947857 - RNA, 19 nt, Homo sapiens
  misc_RNA (1)...(19): siRNA sense strand
gaaaggcucuggaacugau

SEQ ID NO: 947858 - RNA, 19 nt, Homo sapiens
  misc_RNA (1)...(19): siRNA sense strand
agaaugaacuggauuuguu

SEQ ID NO: 947859 - RNA, 19 nt, Homo sapiens
  misc_RNA (1)...(19): siRNA sense strand
acaaguggcugauugagaa

SEQ ID NO: 947860 - RNA, 19 nt, Homo sapiens
  misc_RNA (1)...(19): siRNA sense strand
gagggagucuggugucuug

SEQ ID NO: 947861 - RNA, 19 nt, Homo sapiens
  misc_RNA (1)...(19): siRNA sense strand
ccaaguacuuccagucgaa

SEQ ID NO: 947862 - RNA, 19 nt, Homo sapiens
  misc_RNA (1)...(19): siRNA sense strand
gaaugaacuggauuuguuu

SEQ ID NO: 947863 - RNA, 19 nt, Homo sapiens
  misc_RNA (1)...(19): siRNA sense strand
ggagucuggugucuugaaa

SEQ ID NO: 947864 - RNA, 19 nt, Homo sapiens
  misc_RNA (1)...(19): siRNA sense strand
gcagugccaccguagauaa

SEQ ID NO: 947865 - RNA, 19 nt, Homo sapiens
  misc_RNA (1)...(19): siRNA sense strand
ucaacaacauuaacagugu

SEQ ID NO: 947866 - RNA, 19 nt, Homo sapiens
  misc_RNA (1)...(19): siRNA sense strand
caacuuaaaggcaagaaga

SEQ ID NO: 947867 - RNA, 19 nt, Homo sapiens
  misc_RNA (1)...(19): siRNA sense strand
caaaacaaguggcugauug

SEQ ID NO: 947868 - RNA, 19 nt, Homo sapiens
  misc_RNA (1)...(19): siRNA sense strand
gcucuggaacugauuauug

SEQ ID NO: 947869 - RNA, 19 nt, Homo sapiens
  misc_RNA (1)...(19): siRNA sense strand
gaugacccauggcgugcua

SEQ ID NO: 947870 - RNA, 19 nt, Homo sapiens
  misc_RNA (1)...(19): siRNA sense strand
guccuuguauauugagaua

SEQ ID NO: 947871 - RNA, 19 nt, Homo sapiens
  misc_RNA (1)...(19): siRNA sense strand
ggucaaagcugcgaaaccu

SEQ ID NO: 947872 - RNA, 19 nt, Homo sapiens
  misc_RNA (1)...(19): siRNA sense strand
gaaaccggcuuugcgucuu

SEQ ID NO: 947873 - RNA, 19 nt, Homo sapiens
  misc_RNA (1)...(19): siRNA sense strand
gaaucuugcuacaacuuca

SEQ ID NO: 947874 - RNA, 19 nt, Homo sapiens
  misc_RNA (1)...(19): siRNA sense strand
ggaacugauuauugacuca

SEQ ID NO: 947875 - RNA, 19 nt, Homo sapiens
  misc_RNA (1)...(19): siRNA sense strand
uagaaaggcucuggaacug

SEQ ID NO: 947876 - RNA, 19 nt, Homo sapiens
  misc_RNA (1)...(19): siRNA sense strand
ggacuucaucaacaacauu

SEQ ID NO: 947877 - RNA, 19 nt, Homo sapiens
  misc_RNA (1)...(19): siRNA sense strand
caacauuaacagugucuug

SEQ ID NO: 947878 - RNA, 19 nt, Homo sapiens
  misc_RNA (1)...(19): siRNA sense strand
gcggugaagaucugcaaua

SEQ ID NO: 947879 - RNA, 19 nt, Homo sapiens
  misc_RNA (1)...(19): siRNA sense strand
ccacaaacauauugaaccu

SEQ ID NO: 947880 - RNA, 19 nt, Homo sapiens
  misc_RNA (1)...(19): siRNA sense strand
ugaacuggauuuguuuaga

SEQ ID NO: 947881 - RNA, 19 nt, Homo sapiens
  misc_RNA (1)...(19): siRNA sense strand
agagaggagucacggaaga

SEQ ID NO: 947882 - RNA, 19 nt, Homo sapiens
  misc_RNA (1)...(19): siRNA sense strand
gacuucaucaacaacauua

SEQ ID NO: 947883 - RNA, 19 nt, Homo sapiens
  misc_RNA (1)...(19): siRNA sense strand
uccuggagauggagcaaua

SEQ ID NO: 947884 - RNA, 19 nt, Homo sapiens
  misc_RNA (1)...(19): siRNA sense strand
uuggaguccuuguauauug

SEQ ID NO: 947885 - RNA, 19 nt, Homo sapiens
  misc_RNA (1)...(19): siRNA sense strand
gagaaugaacuggauuugu

SEQ ID NO: 947886 - RNA, 19 nt, Homo sapiens
  misc_RNA (1)...(19): siRNA sense strand
gcagagaaugaacuggauu

SEQ ID NO: 947887 - RNA, 19 nt, Homo sapiens
  misc_RNA (1)...(19): siRNA sense strand
cagagaaugaacuggauuu

SEQ ID NO: 947888 - RNA, 19 nt, Homo sapiens
  misc_RNA (1)...(19): siRNA sense strand
cggugaagaucugcaauau

SEQ ID NO: 947889 - RNA, 19 nt, Homo sapiens
  misc_RNA (1)...(19): siRNA sense strand
uggaguccuuguauauuga

SEQ ID NO: 947890 - RNA, 19 nt, Homo sapiens
  misc_RNA (1)...(19): siRNA sense strand
uggaggacuucaucaacaa

SEQ ID NO: 947891 - RNA, 19 nt, Homo sapiens
  misc_RNA (1)...(19): siRNA sense strand
gaggagucacggaagauga

SEQ ID NO: 947892 - RNA, 19 nt, Homo sapiens
  misc_RNA (1)...(19): siRNA sense strand
ggcaagaagaugaggaaga

SEQ ID NO: 947893 - RNA, 19 nt, Homo sapiens
  misc_RNA (1)...(19): siRNA sense strand
cucuggaacugauuauuga

SEQ ID NO: 947894 - RNA, 19 nt, Homo sapiens
  misc_RNA (1)...(19): siRNA sense strand
gaagaugaggaagaaggaa

SEQ ID NO: 947895 - RNA, 19 nt, Homo sapiens
  misc_RNA (1)...(19): siRNA sense strand
gagauaaagagaggaguca

SEQ ID NO: 947896 - RNA, 19 nt, Homo sapiens
  misc_RNA (1)...(19): siRNA sense strand
cuuaaaggcaagaagauga

SEQ ID NO: 947897 - RNA, 19 nt, Homo sapiens
  misc_RNA (1)...(19): siRNA sense strand
uacccugcguggccaagua

SEQ ID NO: 947898 - RNA, 19 nt, Homo sapiens
  misc_RNA (1)...(19): siRNA sense strand
aaaccggcuuugcgucuuc

SEQ ID NO: 947899 - RNA, 19 nt, Homo sapiens
  misc_RNA (1)...(19): siRNA sense strand
gagagggagucuggugucu

SEQ ID NO: 947900 - RNA, 19 nt, Homo sapiens
  misc_RNA (1)...(19): siRNA sense strand
gcuacaacuucaauuucca

SEQ ID NO: 947901 - RNA, 19 nt, Homo sapiens
  misc_RNA (1)...(19): siRNA sense strand
gugccaccguagauaaguu

SEQ ID NO: 947902 - RNA, 19 nt, Homo sapiens
  misc_RNA (1)...(19): siRNA sense strand
gucuuggaguccuuguaua

SEQ ID NO: 947903 - RNA, 19 nt, Homo sapiens
  misc_RNA (1)...(19): siRNA sense strand
agucuggugucuugaaauc

SEQ ID NO: 947904 - RNA, 19 nt, Homo sapiens
  misc_RNA (1)...(19): siRNA sense strand
ugacucagaaaccggcuuu

SEQ ID NO: 947905 - RNA, 19 nt, Homo sapiens
  misc_RNA (1)...(19): siRNA sense strand
ccauuuaugcguuggugaa

SEQ ID NO: 947906 - RNA, 19 nt, Homo sapiens
  misc_RNA (1)...(19): siRNA sense strand
uuggaggacuucaucaaca

SEQ ID NO: 947907 - RNA, 19 nt, Homo sapiens
  misc_RNA (1)...(19): siRNA sense strand
caucaacaacauuaacagu

SEQ ID NO: 947908 - RNA, 19 nt, Homo sapiens
  misc_RNA (1)...(19): siRNA sense strand
ucuggugucuugaaaucga

SEQ ID NO: 947909 - RNA, 19 nt, Homo sapiens
  misc_RNA (1)...(19): siRNA sense strand
ugcgaaaccugugggauca

SEQ ID NO: 947910 - RNA, 19 nt, Homo sapiens
  misc_RNA (1)...(19): siRNA sense strand
gggagucuggugucuugaa

SEQ ID NO: 947911 - RNA, 19 nt, Homo sapiens
  misc_RNA (1)...(19): siRNA sense strand
guuggugaaucuugcuaca

SEQ ID NO: 947912 - RNA, 19 nt, Homo sapiens
  misc_RNA (1)...(19): siRNA sense strand
uuagaaaggcucuggaacu

SEQ ID NO: 947913 - RNA, 19 nt, Homo sapiens
  misc_RNA (1)...(19): siRNA sense strand
gagaggagucacggaagau

SEQ ID NO: 947914 - RNA, 19 nt, Homo sapiens
  misc_RNA (1)...(19): siRNA sense strand
uuuaugcguuggugaaucu

SEQ ID NO: 947915 - RNA, 19 nt, Homo sapiens
  misc_RNA (1)...(19): siRNA sense strand
ggugaagaucugcaauauc

SEQ ID NO: 947916 - RNA, 19 nt, Homo sapiens
  misc_RNA (1)...(19): siRNA sense strand
cgucuuccacaaacauauu

SEQ ID NO: 947917 - RNA, 19 nt, Homo sapiens
  misc_RNA (1)...(19): siRNA sense strand
cuacggauuuugcagagaa

SEQ ID NO: 947918 - RNA, 19 nt, Homo sapiens
  misc_RNA (1)...(19): siRNA sense strand
uggugaaucuugcuacaac

SEQ ID NO: 947919 - RNA, 19 nt, Homo sapiens
  misc_RNA (1)...(19): siRNA sense strand
gaacaaagauacagcagaa

SEQ ID NO: 947920 - RNA, 19 nt, Homo sapiens
  misc_RNA (1)...(19): siRNA sense strand
gaaacacuccucuacauuu

SEQ ID NO: 947921 - RNA, 19 nt, Homo sapiens
  misc_RNA (1)...(19): siRNA sense strand
gaagacggcaugacuccua

SEQ ID NO: 947922 - RNA, 19 nt, Homo sapiens
  misc_RNA (1)...(19): siRNA sense strand
gcagggagcagaaugaaug

SEQ ID NO: 947923 - RNA, 19 nt, Homo sapiens
  misc_RNA (1)...(19): siRNA sense strand
gggaaacacuccucuacau

SEQ ID NO: 947924 - RNA, 19 nt, Homo sapiens
  misc_RNA (1)...(19): siRNA sense strand
ggaaacacuccucuacauu

SEQ ID NO: 947925 - RNA, 19 nt, Homo sapiens
  misc_RNA (1)...(19): siRNA sense strand
ccaccaagcugcuagugau

SEQ ID NO: 947926 - RNA, 19 nt, Homo sapiens
  misc_RNA (1)...(19): siRNA sense strand
gaagaauuccugccuaucu

SEQ ID NO: 947927 - RNA, 19 nt, Homo sapiens
  misc_RNA (1)...(19): siRNA sense strand
ggaggaagauguggucgau

SEQ ID NO: 947928 - RNA, 19 nt, Homo sapiens
  misc_RNA (1)...(19): siRNA sense strand
caacaucuuugcccuggau

SEQ ID NO: 947929 - RNA, 19 nt, Homo sapiens
  misc_RNA (1)...(19): siRNA sense strand
gcaagagagaguuugguuu

SEQ ID NO: 947930 - RNA, 19 nt, Homo sapiens
  misc_RNA (1)...(19): siRNA sense strand
ggucuaggaaguauuguuu

SEQ ID NO: 947931 - RNA, 19 nt, Homo sapiens
  misc_RNA (1)...(19): siRNA sense strand
ggaacgugauggaaguguu

SEQ ID NO: 947932 - RNA, 19 nt, Homo sapiens
  misc_RNA (1)...(19): siRNA sense strand
ucaaagagaagcuccaguu

SEQ ID NO: 947933 - RNA, 19 nt, Homo sapiens
  misc_RNA (1)...(19): siRNA sense strand
ggagcagaaugaauguguu

SEQ ID NO: 947934 - RNA, 19 nt, Homo sapiens
  misc_RNA (1)...(19): siRNA sense strand
aagagaagcuccaguuguc

SEQ ID NO: 947935 - RNA, 19 nt, Homo sapiens
  misc_RNA (1)...(19): siRNA sense strand
gaaaacggccucaaagaug

SEQ ID NO: 947936 - RNA, 19 nt, Homo sapiens
  misc_RNA (1)...(19): siRNA sense strand
gaacuuggaagcccuagag

SEQ ID NO: 947937 - RNA, 19 nt, Homo sapiens
  misc_RNA (1)...(19): siRNA sense strand
agccugagauggagaguuu

SEQ ID NO: 947938 - RNA, 19 nt, Homo sapiens
  misc_RNA (1)...(19): siRNA sense strand
uaucuaagggcauuaaaga

SEQ ID NO: 947939 - RNA, 19 nt, Homo sapiens
  misc_RNA (1)...(19): siRNA sense strand
cuuggaagcccuagagaua

SEQ ID NO: 947940 - RNA, 19 nt, Homo sapiens
  misc_RNA (1)...(19): siRNA sense strand
ugauggaaguguucagaga

SEQ ID NO: 947941 - RNA, 19 nt, Homo sapiens
  misc_RNA (1)...(19): siRNA sense strand
ccaggaggcagaucaaaga

SEQ ID NO: 947942 - RNA, 19 nt, Homo sapiens
  misc_RNA (1)...(19): siRNA sense strand
ggauaucgaguccugaaga

SEQ ID NO: 947943 - RNA, 19 nt, Homo sapiens
  misc_RNA (1)...(19): siRNA sense strand
caaagagaagcuccaguug

SEQ ID NO: 947944 - RNA, 19 nt, Homo sapiens
  misc_RNA (1)...(19): siRNA sense strand
gagcagaaugaauguguug

SEQ ID NO: 947945 - RNA, 19 nt, Homo sapiens
  misc_RNA (1)...(19): siRNA sense strand
guucagagaggaagaggaa

SEQ ID NO: 947946 - RNA, 19 nt, Homo sapiens
  misc_RNA (1)...(19): siRNA sense strand
aagaucaaguucaagaaga

SEQ ID NO: 947947 - RNA, 19 nt, Homo sapiens
  misc_RNA (1)...(19): siRNA sense strand
ucuuugcccuggauaauga

SEQ ID NO: 947948 - RNA, 19 nt, Homo sapiens
  misc_RNA (1)...(19): siRNA sense strand
ucaaagacaaggagcauca

SEQ ID NO: 947949 - RNA, 19 nt, Homo sapiens
  misc_RNA (1)...(19): siRNA sense strand
agaucaaguucaagaagaa

SEQ ID NO: 947950 - RNA, 19 nt, Homo sapiens
  misc_RNA (1)...(19): siRNA sense strand
ucucauuccuggucaacuu

SEQ ID NO: 947951 - RNA, 19 nt, Homo sapiens
  misc_RNA (1)...(19): siRNA sense strand
aaacacuccucuacauuuu

SEQ ID NO: 947952 - RNA, 19 nt, Homo sapiens
  misc_RNA (1)...(19): siRNA sense strand
gggugcagcugaugaagag

SEQ ID NO: 947953 - RNA, 19 nt, Homo sapiens
  misc_RNA (1)...(19): siRNA sense strand
gcagaagugggcagaggaa

SEQ ID NO: 947954 - RNA, 19 nt, Homo sapiens
  misc_RNA (1)...(19): siRNA sense strand
ucaagaagaacaaagauac

SEQ ID NO: 947955 - RNA, 19 nt, Homo sapiens
  misc_RNA (1)...(19): siRNA sense strand
uggaagcccuagagauaau

SEQ ID NO: 947956 - RNA, 19 nt, Homo sapiens
  misc_RNA (1)...(19): siRNA sense strand
gccgugggaugacgaugaa

SEQ ID NO: 947957 - RNA, 19 nt, Homo sapiens
  misc_RNA (1)...(19): siRNA sense strand
caagagagaguuugguuuu

SEQ ID NO: 947958 - RNA, 19 nt, Homo sapiens
  misc_RNA (1)...(19): siRNA sense strand
ugcccuggauaaugacuua

SEQ ID NO: 947959 - RNA, 19 nt, Homo sapiens
  misc_RNA (1)...(19): siRNA sense strand
gagagaguuugguuuuaaa

SEQ ID NO: 947960 - RNA, 19 nt, Homo sapiens
  misc_RNA (1)...(19): siRNA sense strand
aagcugcuagugauaguua

SEQ ID NO: 947961 - RNA, 19 nt, Homo sapiens
  misc_RNA (1)...(19): siRNA sense strand
gcagaggaacgugauggaa

SEQ ID NO: 947962 - RNA, 19 nt, Homo sapiens
  misc_RNA (1)...(19): siRNA sense strand
ccgggacucucucuucuuc

SEQ ID NO: 947963 - RNA, 19 nt, Homo sapiens
  misc_RNA (1)...(19): siRNA sense strand
ggaaaacggccucaaagau

SEQ ID NO: 947964 - RNA, 19 nt, Homo sapiens
  misc_RNA (1)...(19): siRNA sense strand
aaagagaagcuccaguugu

SEQ ID NO: 947965 - RNA, 19 nt, Homo sapiens
  misc_RNA (1)...(19): siRNA sense strand
agaggaacgugauggaagu

SEQ ID NO: 947966 - RNA, 19 nt, Homo sapiens
  misc_RNA (1)...(19): siRNA sense strand
caagaagaacaaagauaca

SEQ ID NO: 947967 - RNA, 19 nt, Homo sapiens
  misc_RNA (1)...(19): siRNA sense strand
gagaagcaccaaaauaaga

SEQ ID NO: 947968 - RNA, 19 nt, Homo sapiens
  misc_RNA (1)...(19): siRNA sense strand
caagagagagcagauugau

SEQ ID NO: 947969 - RNA, 19 nt, Homo sapiens
  misc_RNA (1)...(19): siRNA sense strand
cucagcaccuggaagaauu

SEQ ID NO: 947970 - RNA, 19 nt, Homo sapiens
  misc_RNA (1)...(19): siRNA sense strand
ucagauagcaagagagagu

SEQ ID NO: 947971 - RNA, 19 nt, Homo sapiens
  misc_RNA (1)...(19): siRNA sense strand
gauaucgaguccugaagac

SEQ ID NO: 947972 - RNA, 19 nt, Homo sapiens
  misc_RNA (1)...(19): siRNA sense strand
ccaggucuaggaaguauug

SEQ ID NO: 947973 - RNA, 19 nt, Homo sapiens
  misc_RNA (1)...(19): siRNA sense strand
ggaaguguucagagaggaa

SEQ ID NO: 947974 - RNA, 19 nt, Homo sapiens
  misc_RNA (1)...(19): siRNA sense strand
caagaucaaguucaagaag

SEQ ID NO: 947975 - RNA, 19 nt, Homo sapiens
  misc_RNA (1)...(19): siRNA sense strand
gaccuucagagcauacaaa

SEQ ID NO: 947976 - RNA, 19 nt, Homo sapiens
  misc_RNA (1)...(19): siRNA sense strand
aaaacggccucaaagauga

SEQ ID NO: 947977 - RNA, 19 nt, Homo sapiens
  misc_RNA (1)...(19): siRNA sense strand
ccaagcugcuagugauagu

SEQ ID NO: 947978 - RNA, 19 nt, Homo sapiens
  misc_RNA (1)...(19): siRNA sense strand
gcagugugcaccaugaauc

SEQ ID NO: 947979 - RNA, 19 nt, Homo sapiens
  misc_RNA (1)...(19): siRNA sense strand
aucuaaaucuuucggauga

SEQ ID NO: 947980 - RNA, 19 nt, Homo sapiens
  misc_RNA (1)...(19): siRNA sense strand
cugcugcucugcucugaug

SEQ ID NO: 947981 - RNA, 19 nt, Homo sapiens
  misc_RNA (1)...(19): siRNA sense strand
ggagugggaggaagaugug

SEQ ID NO: 947982 - RNA, 19 nt, Homo sapiens
  misc_RNA (1)...(19): siRNA sense strand
caugacuccuacucucuug

SEQ ID NO: 947983 - RNA, 19 nt, Homo sapiens
  misc_RNA (1)...(19): siRNA sense strand
ccugauaggugugacaucu

SEQ ID NO: 947984 - RNA, 19 nt, Homo sapiens
  misc_RNA (1)...(19): siRNA sense strand
ggaugaagacggcaugacu

SEQ ID NO: 947985 - RNA, 19 nt, Homo sapiens
  misc_RNA (1)...(19): siRNA sense strand
cuaccaagcgagaucuaaa

SEQ ID NO: 947986 - RNA, 19 nt, Homo sapiens
  misc_RNA (1)...(19): siRNA sense strand
agagagaguuugguuuuaa

SEQ ID NO: 947987 - RNA, 19 nt, Homo sapiens
  misc_RNA (1)...(19): siRNA sense strand
ggacggcagugugcaccau

SEQ ID NO: 947988 - RNA, 19 nt, Homo sapiens
  misc_RNA (1)...(19): siRNA sense strand
ucagagaggaagaggaaga

SEQ ID NO: 947989 - RNA, 19 nt, Homo sapiens
  misc_RNA (1)...(19): siRNA sense strand
gggagcagaaugaaugugu

SEQ ID NO: 947990 - RNA, 19 nt, Homo sapiens
  misc_RNA (1)...(19): siRNA sense strand
gcaugacuccuacucucuu

SEQ ID NO: 947991 - RNA, 19 nt, Homo sapiens
  misc_RNA (1)...(19): siRNA sense strand
acauucgggucacuaucua

SEQ ID NO: 947992 - RNA, 19 nt, Homo sapiens
  misc_RNA (1)...(19): siRNA sense strand
gacaccagccugagaugga

SEQ ID NO: 947993 - RNA, 19 nt, Homo sapiens
  misc_RNA (1)...(19): siRNA sense strand
guccaggucuaggaaguau

SEQ ID NO: 947994 - RNA, 19 nt, Homo sapiens
  misc_RNA (1)...(19): siRNA sense strand
acaaagauacagcagaaca

SEQ ID NO: 947995 - RNA, 19 nt, Homo sapiens
  misc_RNA (1)...(19): siRNA sense strand
gggacucucucuucuucca

SEQ ID NO: 947996 - RNA, 19 nt, Homo sapiens
  misc_RNA (1)...(19): siRNA sense strand
ugaggaccuucagagcaua

SEQ ID NO: 947997 - RNA, 19 nt, Homo sapiens
  misc_RNA (1)...(19): siRNA sense strand
ucuaagggcauuaaagaca

SEQ ID NO: 947998 - RNA, 19 nt, Homo sapiens
  misc_RNA (1)...(19): siRNA sense strand
gggaaggaaggcagaagug

SEQ ID NO: 947999 - RNA, 19 nt, Homo sapiens
  misc_RNA (1)...(19): siRNA sense strand
ccagcagggagcagaauga

SEQ ID NO: 948000 - RNA, 19 nt, Homo sapiens
  misc_RNA (1)...(19): siRNA sense strand
ggucgacaccagccugaga

SEQ ID NO: 948001 - RNA, 19 nt, Homo sapiens
  misc_RNA (1)...(19): siRNA sense strand
gaauuccugccuaucuuca

SEQ ID NO: 948002 - RNA, 19 nt, Homo sapiens
  misc_RNA (1)...(19): siRNA sense strand
ggauaaugacuuacagacu

SEQ ID NO: 948003 - RNA, 19 nt, Homo sapiens
  misc_RNA (1)...(19): siRNA sense strand
gauucuagggcaucggaaa

SEQ ID NO: 948004 - RNA, 19 nt, Homo sapiens
  misc_RNA (1)...(19): siRNA sense strand
agaaggaacaggauaucga

SEQ ID NO: 948005 - RNA, 19 nt, Homo sapiens
  misc_RNA (1)...(19): siRNA sense strand
gaagugggcagaggaacgu

SEQ ID NO: 948006 - RNA, 19 nt, Homo sapiens
  misc_RNA (1)...(19): siRNA sense strand
cuaaaucuuucggaugaag

SEQ ID NO: 948007 - RNA, 19 nt, Homo sapiens
  misc_RNA (1)...(19): siRNA sense strand
guguugcucuccuggacaa

SEQ ID NO: 948008 - RNA, 19 nt, Homo sapiens
  misc_RNA (1)...(19): siRNA sense strand
ucaagaucaaguucaagaa

SEQ ID NO: 948009 - RNA, 19 nt, Homo sapiens
  misc_RNA (1)...(19): siRNA sense strand
caccaagcugcuagugaua

SEQ ID NO: 948010 - RNA, 19 nt, Homo sapiens
  misc_RNA (1)...(19): siRNA sense strand
gcuaccaagcgagaucuaa

SEQ ID NO: 948011 - RNA, 19 nt, Homo sapiens
  misc_RNA (1)...(19): siRNA sense strand
gcucugaugaggaccuuca

SEQ ID NO: 948012 - RNA, 19 nt, Homo sapiens
  misc_RNA (1)...(19): siRNA sense strand
ugaugaagagggagaggaa

SEQ ID NO: 948013 - RNA, 19 nt, Homo sapiens
  misc_RNA (1)...(19): siRNA sense strand
ucucaaucguccaggucua

SEQ ID NO: 948014 - RNA, 19 nt, Homo sapiens
  misc_RNA (1)...(19): siRNA sense strand
caggagaagcaccaaaaua

SEQ ID NO: 948015 - RNA, 19 nt, Homo sapiens
  misc_RNA (1)...(19): siRNA sense strand
ucaggggacuucaaagaga

SEQ ID NO: 948016 - RNA, 19 nt, Homo sapiens
  misc_RNA (1)...(19): siRNA sense strand
gaagaggaagacucguucu

SEQ ID NO: 948017 - RNA, 19 nt, Homo sapiens
  misc_RNA (1)...(19): siRNA sense strand
gcacauucgggucacuauc

SEQ ID NO: 948018 - RNA, 19 nt, Homo sapiens
  misc_RNA (1)...(19): siRNA sense strand
aggagaagcaccaaaauaa

SEQ ID NO: 948019 - RNA, 19 nt, Homo sapiens
  misc_RNA (1)...(19): siRNA sense strand
caaaggagcuuaucacaga

SEQ ID NO: 948020 - RNA, 19 nt, Homo sapiens
  misc_RNA (1)...(19): siRNA sense strand
gcauaugccuuguuuaaga

SEQ ID NO: 948021 - RNA, 19 nt, Homo sapiens
  misc_RNA (1)...(19): siRNA sense strand
ggaagagccugauccuuug

SEQ ID NO: 948022 - RNA, 19 nt, Homo sapiens
  misc_RNA (1)...(19): siRNA sense strand
gaagcaacauguuucauuc

SEQ ID NO: 948023 - RNA, 19 nt, Homo sapiens
  misc_RNA (1)...(19): siRNA sense strand
gaagacauuuagacaguau

SEQ ID NO: 948024 - RNA, 19 nt, Homo sapiens
  misc_RNA (1)...(19): siRNA sense strand
aaagauagacucacugaaa

SEQ ID NO: 948025 - RNA, 19 nt, Homo sapiens
  misc_RNA (1)...(19): siRNA sense strand
ggaagcaacauguuucauu

SEQ ID NO: 948026 - RNA, 19 nt, Homo sapiens
  misc_RNA (1)...(19): siRNA sense strand
uaucaacgauucaagaaga

SEQ ID NO: 948027 - RNA, 19 nt, Homo sapiens
  misc_RNA (1)...(19): siRNA sense strand
caagacaaaucuauuaguc

SEQ ID NO: 948028 - RNA, 19 nt, Homo sapiens
  misc_RNA (1)...(19): siRNA sense strand
cagcauaugccuuguuuaa

SEQ ID NO: 948029 - RNA, 19 nt, Homo sapiens
  misc_RNA (1)...(19): siRNA sense strand
gagugaaugucguuccuuu

SEQ ID NO: 948030 - RNA, 19 nt, Homo sapiens
  misc_RNA (1)...(19): siRNA sense strand
ucuaauaacuucugguguu

SEQ ID NO: 948031 - RNA, 19 nt, Homo sapiens
  misc_RNA (1)...(19): siRNA sense strand
acauaaugcuggucucuuu

SEQ ID NO: 948032 - RNA, 19 nt, Homo sapiens
  misc_RNA (1)...(19): siRNA sense strand
auacaaugcugaauccaaa

SEQ ID NO: 948033 - RNA, 19 nt, Homo sapiens
  misc_RNA (1)...(19): siRNA sense strand
gaagagacaaaggagcuua

SEQ ID NO: 948034 - RNA, 19 nt, Homo sapiens
  misc_RNA (1)...(19): siRNA sense strand
gaaaggagugaaugucguu

SEQ ID NO: 948035 - RNA, 19 nt, Homo sapiens
  misc_RNA (1)...(19): siRNA sense strand
ugaaguaucugcgcaguca

SEQ ID NO: 948036 - RNA, 19 nt, Homo sapiens
  misc_RNA (1)...(19): siRNA sense strand
cuaauaacuucugguguuu

SEQ ID NO: 948037 - RNA, 19 nt, Homo sapiens
  misc_RNA (1)...(19): siRNA sense strand
caagggaagcaacauguuu

SEQ ID NO: 948038 - RNA, 19 nt, Homo sapiens
  misc_RNA (1)...(19): siRNA sense strand
cacagcauaugccuuguuu

SEQ ID NO: 948039 - RNA, 19 nt, Homo sapiens
  misc_RNA (1)...(19): siRNA sense strand
aagaagacauuuagacagu

SEQ ID NO: 948040 - RNA, 19 nt, Homo sapiens
  misc_RNA (1)...(19): siRNA sense strand
gaauguaccacggacugua

SEQ ID NO: 948041 - RNA, 19 nt, Homo sapiens
  misc_RNA (1)...(19): siRNA sense strand
gcaagggaagcaacauguu

SEQ ID NO: 948042 - RNA, 19 nt, Homo sapiens
  misc_RNA (1)...(19): siRNA sense strand
uagacucacugaaaaguua

SEQ ID NO: 948043 - RNA, 19 nt, Homo sapiens
  misc_RNA (1)...(19): siRNA sense strand
gaguggaaaugcccucaca

SEQ ID NO: 948044 - RNA, 19 nt, Homo sapiens
  misc_RNA (1)...(19): siRNA sense strand
cauaugccuuguuuaagau

SEQ ID NO: 948045 - RNA, 19 nt, Homo sapiens
  misc_RNA (1)...(19): siRNA sense strand
gcaagacaaaucuauuagu

SEQ ID NO: 948046 - RNA, 19 nt, Homo sapiens
  misc_RNA (1)...(19): siRNA sense strand
ucaagaagacauuuagaca

SEQ ID NO: 948047 - RNA, 19 nt, Homo sapiens
  misc_RNA (1)...(19): siRNA sense strand
gaaugucguuccuuuucua

SEQ ID NO: 948048 - RNA, 19 nt, Homo sapiens
  misc_RNA (1)...(19): siRNA sense strand
agaagacauuuagacagua

SEQ ID NO: 948049 - RNA, 19 nt, Homo sapiens
  misc_RNA (1)...(19): siRNA sense strand
ggaaaggaggccauuggau

SEQ ID NO: 948050 - RNA, 19 nt, Homo sapiens
  misc_RNA (1)...(19): siRNA sense strand
ccaguguguugcaaaggaa

SEQ ID NO: 948051 - RNA, 19 nt, Homo sapiens
  misc_RNA (1)...(19): siRNA sense strand
gcucagggaacuccggaaa

SEQ ID NO: 948052 - RNA, 19 nt, Homo sapiens
  misc_RNA (1)...(19): siRNA sense strand
uaacuucugguguuugguu

SEQ ID NO: 948053 - RNA, 19 nt, Homo sapiens
  misc_RNA (1)...(19): siRNA sense strand
gacaaaggagcuuaucaca

SEQ ID NO: 948054 - RNA, 19 nt, Homo sapiens
  misc_RNA (1)...(19): siRNA sense strand
ggauggaagagacaaagga

SEQ ID NO: 948055 - RNA, 19 nt, Homo sapiens
  misc_RNA (1)...(19): siRNA sense strand
gauuccagugcaucuaaua

SEQ ID NO: 948056 - RNA, 19 nt, Homo sapiens
  misc_RNA (1)...(19): siRNA sense strand
cagugcaucuaauaacuuc

SEQ ID NO: 948057 - RNA, 19 nt, Homo sapiens
  misc_RNA (1)...(19): siRNA sense strand
ugcaacaccugcucgguau

SEQ ID NO: 948058 - RNA, 19 nt, Homo sapiens
  misc_RNA (1)...(19): siRNA sense strand
caaaggaaaggaggccauu

SEQ ID NO: 948059 - RNA, 19 nt, Homo sapiens
  misc_RNA (1)...(19): siRNA sense strand
ggaagaaacaaaagauaga

SEQ ID NO: 948060 - RNA, 19 nt, Homo sapiens
  misc_RNA (1)...(19): siRNA sense strand
cgauucaagaagacauuua

SEQ ID NO: 948061 - RNA, 19 nt, Homo sapiens
  misc_RNA (1)...(19): siRNA sense strand
gagacaaaggagcuuauca

SEQ ID NO: 948062 - RNA, 19 nt, Homo sapiens
  misc_RNA (1)...(19): siRNA sense strand
ggacaggauggaagagaca

SEQ ID NO: 948063 - RNA, 19 nt, Homo sapiens
  misc_RNA (1)...(19): siRNA sense strand
gcaacaccugcucgguaua

SEQ ID NO: 948064 - RNA, 19 nt, Homo sapiens
  misc_RNA (1)...(19): siRNA sense strand
gaggaacaucugucacugu

SEQ ID NO: 948065 - RNA, 19 nt, Homo sapiens
  misc_RNA (1)...(19): siRNA sense strand
aagauagacucacugaaaa

SEQ ID NO: 948066 - RNA, 19 nt, Homo sapiens
  misc_RNA (1)...(19): siRNA sense strand
gauucaagaagacauuuag

SEQ ID NO: 948067 - RNA, 19 nt, Homo sapiens
  misc_RNA (1)...(19): siRNA sense strand
guuacaagaaaccaaagaa

SEQ ID NO: 948068 - RNA, 19 nt, Homo sapiens
  misc_RNA (1)...(19): siRNA sense strand
caaaagauagacucacuga

SEQ ID NO: 948069 - RNA, 19 nt, Homo sapiens
  misc_RNA (1)...(19): siRNA sense strand
cgccacccgucaaggagua

SEQ ID NO: 948070 - RNA, 19 nt, Homo sapiens
  misc_RNA (1)...(19): siRNA sense strand
ucuagaacucauuggguua

SEQ ID NO: 948071 - RNA, 19 nt, Homo sapiens
  misc_RNA (1)...(19): siRNA sense strand
cccaguguguugcaaagga

SEQ ID NO: 948072 - RNA, 19 nt, Homo sapiens
  misc_RNA (1)...(19): siRNA sense strand
aauaacuucugguguuugg

SEQ ID NO: 948073 - RNA, 19 nt, Homo sapiens
  misc_RNA (1)...(19): siRNA sense strand
acauuuagacaguauggaa

SEQ ID NO: 948074 - RNA, 19 nt, Homo sapiens
  misc_RNA (1)...(19): siRNA sense strand
ccagugcaucuaauaacuu

SEQ ID NO: 948075 - RNA, 19 nt, Homo sapiens
  misc_RNA (1)...(19): siRNA sense strand
gggaggaacaucugucacu

SEQ ID NO: 948076 - RNA, 19 nt, Homo sapiens
  misc_RNA (1)...(19): siRNA sense strand
uauacaaugcugaauccaa

SEQ ID NO: 948077 - RNA, 19 nt, Homo sapiens
  misc_RNA (1)...(19): siRNA sense strand
gagcuuaucacagagaaaa

SEQ ID NO: 948078 - RNA, 19 nt, Homo sapiens
  misc_RNA (1)...(19): siRNA sense strand
ggaagagacaaaggagcuu

SEQ ID NO: 948079 - RNA, 19 nt, Homo sapiens
  misc_RNA (1)...(19): siRNA sense strand
uaaugcuggucucuuugga

SEQ ID NO: 948080 - RNA, 19 nt, Homo sapiens
  misc_RNA (1)...(19): siRNA sense strand
ucacagcauaugccuuguu

SEQ ID NO: 948081 - RNA, 19 nt, Homo sapiens
  misc_RNA (1)...(19): siRNA sense strand
caacaccugcucgguauac

SEQ ID NO: 948082 - RNA, 19 nt, Homo sapiens
  misc_RNA (1)...(19): siRNA sense strand
cauaaugcuggucucuuug

SEQ ID NO: 948083 - RNA, 19 nt, Homo sapiens
  misc_RNA (1)...(19): siRNA sense strand
ggaauguaccacggacugu

SEQ ID NO: 948084 - RNA, 19 nt, Homo sapiens
  misc_RNA (1)...(19): siRNA sense strand
cauuuagacaguauggaaa

SEQ ID NO: 948085 - RNA, 19 nt, Homo sapiens
  misc_RNA (1)...(19): siRNA sense strand
ccugauccuuugcaagaca

SEQ ID NO: 948086 - RNA, 19 nt, Homo sapiens
  misc_RNA (1)...(19): siRNA sense strand
gcuggucucuuuggacacu

SEQ ID NO: 948087 - RNA, 19 nt, Homo sapiens
  misc_RNA (1)...(19): siRNA sense strand
gaaacaaaagauagacuca

SEQ ID NO: 948088 - RNA, 19 nt, Homo sapiens
  misc_RNA (1)...(19): siRNA sense strand
gcccuggcgcaaacauuua

SEQ ID NO: 948089 - RNA, 19 nt, Homo sapiens
  misc_RNA (1)...(19): siRNA sense strand
ggcccuggcgcaaacauuu

SEQ ID NO: 948090 - RNA, 19 nt, Homo sapiens
  misc_RNA (1)...(19): siRNA sense strand
gaaggagcaucuuugaaua

SEQ ID NO: 948091 - RNA, 19 nt, Homo sapiens
  misc_RNA (1)...(19): siRNA sense strand
gaagaugacaccaaguuga

SEQ ID NO: 948092 - RNA, 19 nt, Homo sapiens
  misc_RNA (1)...(19): siRNA sense strand
ccacaguuguuuacuuuga

SEQ ID NO: 948093 - RNA, 19 nt, Homo sapiens
  misc_RNA (1)...(19): siRNA sense strand
gagacggccuucagaacaa

SEQ ID NO: 948094 - RNA, 19 nt, Homo sapiens
  misc_RNA (1)...(19): siRNA sense strand
gcauugucuuugccuauaa

SEQ ID NO: 948095 - RNA, 19 nt, Homo sapiens
  misc_RNA (1)...(19): siRNA sense strand
cgaaggagcaucuuugaau

SEQ ID NO: 948096 - RNA, 19 nt, Homo sapiens
  misc_RNA (1)...(19): siRNA sense strand
gcgaggacuuccaggauga

SEQ ID NO: 948097 - RNA, 19 nt, Homo sapiens
  misc_RNA (1)...(19): siRNA sense strand
ggacaaccacagcuauuau

SEQ ID NO: 948098 - RNA, 19 nt, Homo sapiens
  misc_RNA (1)...(19): siRNA sense strand
ggaccacguuuaucuccaa

SEQ ID NO: 948099 - RNA, 19 nt, Homo sapiens
  misc_RNA (1)...(19): siRNA sense strand
uggacacgcugccagauaa

SEQ ID NO: 948100 - RNA, 19 nt, Homo sapiens
  misc_RNA (1)...(19): siRNA sense strand
auaaagagaucccuauguc

SEQ ID NO: 948101 - RNA, 19 nt, Homo sapiens
  misc_RNA (1)...(19): siRNA sense strand
ggacagucuuugugguuca

SEQ ID NO: 948102 - RNA, 19 nt, Homo sapiens
  misc_RNA (1)...(19): siRNA sense strand
gaagacaagggcaguuuca

SEQ ID NO: 948103 - RNA, 19 nt, Homo sapiens
  misc_RNA (1)...(19): siRNA sense strand
ggagacggccuucagaaca

SEQ ID NO: 948104 - RNA, 19 nt, Homo sapiens
  misc_RNA (1)...(19): siRNA sense strand
ggucuuguccuuugauuuc

SEQ ID NO: 948105 - RNA, 19 nt, Homo sapiens
  misc_RNA (1)...(19): siRNA sense strand
gagaugcuccaguggcuuu

SEQ ID NO: 948106 - RNA, 19 nt, Homo sapiens
  misc_RNA (1)...(19): siRNA sense strand
agaguggucuuguccuuug

SEQ ID NO: 948107 - RNA, 19 nt, Homo sapiens
  misc_RNA (1)...(19): siRNA sense strand
gauggagaccucaccacua

SEQ ID NO: 948108 - RNA, 19 nt, Homo sapiens
  misc_RNA (1)...(19): siRNA sense strand
cagaagaugacaccaaguu

SEQ ID NO: 948109 - RNA, 19 nt, Homo sapiens
  misc_RNA (1)...(19): siRNA sense strand
cauccuggcuggaauuuac

SEQ ID NO: 948110 - RNA, 19 nt, Homo sapiens
  misc_RNA (1)...(19): siRNA sense strand
cuccacaguuguuuacuuu

SEQ ID NO: 948111 - RNA, 19 nt, Homo sapiens
  misc_RNA (1)...(19): siRNA sense strand
caaguugaaucccuaugca

SEQ ID NO: 948112 - RNA, 19 nt, Homo sapiens
  misc_RNA (1)...(19): siRNA sense strand
cgagaguggucuuguccuu

SEQ ID NO: 948113 - RNA, 19 nt, Homo sapiens
  misc_RNA (1)...(19): siRNA sense strand
ucggaugccuucaugauuc

SEQ ID NO: 948114 - RNA, 19 nt, Homo sapiens
  misc_RNA (1)...(19): siRNA sense strand
gcuggaauuuacaucaaug

SEQ ID NO: 948115 - RNA, 19 nt, Homo sapiens
  misc_RNA (1)...(19): siRNA sense strand
gaggacaaccacagcuauu

SEQ ID NO: 948116 - RNA, 19 nt, Homo sapiens
  misc_RNA (1)...(19): siRNA sense strand
gugaagauccacacaauac

SEQ ID NO: 948117 - RNA, 19 nt, Homo sapiens
  misc_RNA (1)...(19): siRNA sense strand
ccacagaagaugacaccaa

SEQ ID NO: 948118 - RNA, 19 nt, Homo sapiens
  misc_RNA (1)...(19): siRNA sense strand
gaagauccacacaauacuc

SEQ ID NO: 948119 - RNA, 19 nt, Homo sapiens
  misc_RNA (1)...(19): siRNA sense strand
gaggagacggccuucagaa

SEQ ID NO: 948120 - RNA, 19 nt, Homo sapiens
  misc_RNA (1)...(19): siRNA sense strand
ggaggagacggccuucaga

SEQ ID NO: 948121 - RNA, 19 nt, Homo sapiens
  misc_RNA (1)...(19): siRNA sense strand
gggaagacaagggcaguuu

SEQ ID NO: 948122 - RNA, 19 nt, Homo sapiens
  misc_RNA (1)...(19): siRNA sense strand
ggaggacaaccacagcuau

SEQ ID NO: 948123 - RNA, 19 nt, Homo sapiens
  misc_RNA (1)...(19): siRNA sense strand
cgcauugucuuugccuaua

SEQ ID NO: 948124 - RNA, 19 nt, Homo sapiens
  misc_RNA (1)...(19): siRNA sense strand
aagugaagauccacacaau

SEQ ID NO: 948125 - RNA, 19 nt, Homo sapiens
  misc_RNA (1)...(19): siRNA sense strand
gcagccacccugaccauuc

SEQ ID NO: 948126 - RNA, 19 nt, Homo sapiens
  misc_RNA (1)...(19): siRNA sense strand
gccauguccuccagagaug

SEQ ID NO: 948127 - RNA, 19 nt, Homo sapiens
  misc_RNA (1)...(19): siRNA sense strand
caagugaagauccacacaa

SEQ ID NO: 948128 - RNA, 19 nt, Homo sapiens
  misc_RNA (1)...(19): siRNA sense strand
gagaguggucuuguccuuu

SEQ ID NO: 948129 - RNA, 19 nt, Homo sapiens
  misc_RNA (1)...(19): siRNA sense strand
gcagaucaccauagcaacu

SEQ ID NO: 948130 - RNA, 19 nt, Homo sapiens
  misc_RNA (1)...(19): siRNA sense strand
gacaaccacagcuauuaug

SEQ ID NO: 948131 - RNA, 19 nt, Homo sapiens
  misc_RNA (1)...(19): siRNA sense strand
gcaugucggccguggaguu

SEQ ID NO: 948132 - RNA, 19 nt, Homo sapiens
  misc_RNA (1)...(19): siRNA sense strand
ccagcaaggucaccagcau

SEQ ID NO: 948133 - RNA, 19 nt, Homo sapiens
  misc_RNA (1)...(19): siRNA sense strand
ccuaucggaugccuucaug

SEQ ID NO: 948134 - RNA, 19 nt, Homo sapiens
  misc_RNA (1)...(19): siRNA sense strand
cauugucuuugccuauaaa

SEQ ID NO: 948135 - RNA, 19 nt, Homo sapiens
  misc_RNA (1)...(19): siRNA sense strand
ggaagacaagggcaguuuc

SEQ ID NO: 948136 - RNA, 19 nt, Homo sapiens
  misc_RNA (1)...(19): siRNA sense strand
ugacaaugggacagucuuu

SEQ ID NO: 948137 - RNA, 19 nt, Homo sapiens
  misc_RNA (1)...(19): siRNA sense strand
gcgaaggagcaucuuugaa

SEQ ID NO: 948138 - RNA, 19 nt, Homo sapiens
  misc_RNA (1)...(19): siRNA sense strand
uauaaagagaucccuaugu

SEQ ID NO: 948139 - RNA, 19 nt, Homo sapiens
  misc_RNA (1)...(19): siRNA sense strand
ccuuugauuucccuuucua

SEQ ID NO: 948140 - RNA, 19 nt, Homo sapiens
  misc_RNA (1)...(19): siRNA sense strand
uggcuggaauuuacaucaa

SEQ ID NO: 948141 - RNA, 19 nt, Homo sapiens
  misc_RNA (1)...(19): siRNA sense strand
gaugacaccaaguugaauc

SEQ ID NO: 948142 - RNA, 19 nt, Homo sapiens
  misc_RNA (1)...(19): siRNA sense strand
aagaugacaccaaguugaa

SEQ ID NO: 948143 - RNA, 19 nt, Homo sapiens
  misc_RNA (1)...(19): siRNA sense strand
ccagggugguggaggacaa

SEQ ID NO: 948144 - RNA, 19 nt, Homo sapiens
  misc_RNA (1)...(19): siRNA sense strand
cggcagaucaccauagcaa

SEQ ID NO: 948145 - RNA, 19 nt, Homo sapiens
  misc_RNA (1)...(19): siRNA sense strand
gaguggucuuguccuuuga

SEQ ID NO: 948146 - RNA, 19 nt, Homo sapiens
  misc_RNA (1)...(19): siRNA sense strand
acacaauacucuccaacac

SEQ ID NO: 948147 - RNA, 19 nt, Homo sapiens
  misc_RNA (1)...(19): siRNA sense strand
ggcgaaggagcaucuuuga

SEQ ID NO: 948148 - RNA, 19 nt, Homo sapiens
  misc_RNA (1)...(19): siRNA sense strand
acuggaggcuucaucuuca

SEQ ID NO: 948149 - RNA, 19 nt, Homo sapiens
  misc_RNA (1)...(19): siRNA sense strand
caacuggaggcuucaucuu

SEQ ID NO: 948150 - RNA, 19 nt, Homo sapiens
  misc_RNA (1)...(19): siRNA sense strand
gcaacuggaggcuucaucu

SEQ ID NO: 948151 - RNA, 19 nt, Homo sapiens
  misc_RNA (1)...(19): siRNA sense strand
ggcuggaauuuacaucaau

SEQ ID NO: 948152 - RNA, 19 nt, Homo sapiens
  misc_RNA (1)...(19): siRNA sense strand
aggaguggauggacuaugg

SEQ ID NO: 948153 - RNA, 19 nt, Homo sapiens
  misc_RNA (1)...(19): siRNA sense strand
ggagccaagugaagaucca

SEQ ID NO: 948154 - RNA, 19 nt, Homo sapiens
  misc_RNA (1)...(19): siRNA sense strand
aggacaaccacagcuauua

SEQ ID NO: 948155 - RNA, 19 nt, Homo sapiens
  misc_RNA (1)...(19): siRNA sense strand
ucgacagccucaccacaga

SEQ ID NO: 948156 - RNA, 19 nt, Homo sapiens
  misc_RNA (1)...(19): siRNA sense strand
gccgggaacuguggguaga

SEQ ID NO: 948157 - RNA, 19 nt, Homo sapiens
  misc_RNA (1)...(19): siRNA sense strand
gacaaugggacagucuuug

SEQ ID NO: 948158 - RNA, 19 nt, Homo sapiens
  misc_RNA (1)...(19): siRNA sense strand
ggccagccaugaaguuucg

SEQ ID NO: 948159 - RNA, 19 nt, Homo sapiens
  misc_RNA (1)...(19): siRNA sense strand
ccaaugcugcgcucuucuu

SEQ ID NO: 948160 - RNA, 19 nt, Homo sapiens
  misc_RNA (1)...(19): siRNA sense strand
guccuuugauuucccuuuc

SEQ ID NO: 948161 - RNA, 19 nt, Homo sapiens
  misc_RNA (1)...(19): siRNA sense strand
ggaacuguggguagaugug

SEQ ID NO: 948162 - RNA, 19 nt, Homo sapiens
  misc_RNA (1)...(19): siRNA sense strand
caucauccuggcuggaauu

SEQ ID NO: 948163 - RNA, 19 nt, Homo sapiens
  misc_RNA (1)...(19): siRNA sense strand
gccaggaguggauggacua

SEQ ID NO: 948164 - RNA, 19 nt, Homo sapiens
  misc_RNA (1)...(19): siRNA sense strand
ccuauaaagagaucccuau

SEQ ID NO: 948165 - RNA, 19 nt, Homo sapiens
  misc_RNA (1)...(19): siRNA sense strand
cggcgaaggagcaucuuug

SEQ ID NO: 948166 - RNA, 19 nt, Homo sapiens
  misc_RNA (1)...(19): siRNA sense strand
cuaugucugucccggaaau

SEQ ID NO: 948167 - RNA, 19 nt, Homo sapiens
  misc_RNA (1)...(19): siRNA sense strand
uaaagagaucccuaugucu

SEQ ID NO: 948168 - RNA, 19 nt, Homo sapiens
  misc_RNA (1)...(19): siRNA sense strand
caaugggacagucuuugug

SEQ ID NO: 948169 - RNA, 19 nt, Homo sapiens
  misc_RNA (1)...(19): siRNA sense strand
auggagaccucaccacuac

SEQ ID NO: 948170 - RNA, 19 nt, Homo sapiens
  misc_RNA (1)...(19): siRNA sense strand
uaucggaugccuucaugau

SEQ ID NO: 948171 - RNA, 19 nt, Homo sapiens
  misc_RNA (1)...(19): siRNA sense strand
gccaaccggagccaaguga

SEQ ID NO: 948172 - RNA, 19 nt, Homo sapiens
  misc_RNA (1)...(19): siRNA sense strand
guggucuuguccuuugauu

SEQ ID NO: 948173 - RNA, 19 nt, Homo sapiens
  misc_RNA (1)...(19): siRNA sense strand
cggagcaggucacgaugag

SEQ ID NO: 948174 - RNA, 19 nt, Homo sapiens
  misc_RNA (1)...(19): siRNA sense strand
agaagaugacaccaaguug

SEQ ID NO: 948175 - RNA, 19 nt, Homo sapiens
  misc_RNA (1)...(19): siRNA sense strand
cgacagccucaccacagaa

SEQ ID NO: 948176 - RNA, 19 nt, Homo sapiens
  misc_RNA (1)...(19): siRNA sense strand
acuccacaguuguuuacuu

SEQ ID NO: 948177 - RNA, 19 nt, Homo sapiens
  misc_RNA (1)...(19): siRNA sense strand
ccuccucccucuucaucga

SEQ ID NO: 948178 - RNA, 19 nt, Homo sapiens
  misc_RNA (1)...(19): siRNA sense strand
ugaauaccaccgcauagag

SEQ ID NO: 948179 - RNA, 19 nt, Homo sapiens
  misc_RNA (1)...(19): siRNA sense strand
ggagcaucuuugaauacca

SEQ ID NO: 948180 - RNA, 19 nt, Homo sapiens
  misc_RNA (1)...(19): siRNA sense strand
agugaagauccacacaaua

SEQ ID NO: 948181 - RNA, 19 nt, Homo sapiens
  misc_RNA (1)...(19): siRNA sense strand
uauuaugugucccgucucu

SEQ ID NO: 948182 - RNA, 19 nt, Homo sapiens
  misc_RNA (1)...(19): siRNA sense strand
caaguacaaugucaacgaa

SEQ ID NO: 948183 - RNA, 19 nt, Homo sapiens
  misc_RNA (1)...(19): siRNA sense strand
ggaggacaacgaugaguuu

SEQ ID NO: 948184 - RNA, 19 nt, Homo sapiens
  misc_RNA (1)...(19): siRNA sense strand
gcaaguacaaugucaacga

SEQ ID NO: 948185 - RNA, 19 nt, Homo sapiens
  misc_RNA (1)...(19): siRNA sense strand
ggacuuccugcaaacacua

SEQ ID NO: 948186 - RNA, 19 nt, Homo sapiens
  misc_RNA (1)...(19): siRNA sense strand
ucaagcugcuggugcaagu

SEQ ID NO: 948187 - RNA, 19 nt, Homo sapiens
  misc_RNA (1)...(19): siRNA sense strand
gggaggacaacgaugaguu

SEQ ID NO: 948188 - RNA, 19 nt, Homo sapiens
  misc_RNA (1)...(19): siRNA sense strand
ccaaggcagcaaugacuga

SEQ ID NO: 948189 - RNA, 19 nt, Homo sapiens
  misc_RNA (1)...(19): siRNA sense strand
aguacaaugucaacgaaga

SEQ ID NO: 948190 - RNA, 19 nt, Homo sapiens
  misc_RNA (1)...(19): siRNA sense strand
guacaaugucaacgaagau

SEQ ID NO: 948191 - RNA, 19 nt, Homo sapiens
  misc_RNA (1)...(19): siRNA sense strand
gcaaugacugaacucaagu

SEQ ID NO: 948192 - RNA, 19 nt, Homo sapiens
  misc_RNA (1)...(19): siRNA sense strand
agcaaugacugaacucaag

SEQ ID NO: 948193 - RNA, 19 nt, Homo sapiens
  misc_RNA (1)...(19): siRNA sense strand
uucauggacuuccugcaaa

SEQ ID NO: 948194 - RNA, 19 nt, Homo sapiens
  misc_RNA (1)...(19): siRNA sense strand
cagcaaugacugaacucaa

SEQ ID NO: 948195 - RNA, 19 nt, Homo sapiens
  misc_RNA (1)...(19): siRNA sense strand
cucaaguccugcagagaug

SEQ ID NO: 948196 - RNA, 19 nt, Homo sapiens
  misc_RNA (1)...(19): siRNA sense strand
gcagcaaugacugaacuca

SEQ ID NO: 948197 - RNA, 19 nt, Homo sapiens
  misc_RNA (1)...(19): siRNA sense strand
uaaugaagcuaaccagcaa

SEQ ID NO: 948198 - RNA, 19 nt, Homo sapiens
  misc_RNA (1)...(19): siRNA sense strand
aaacucgucuccuaaugaa

SEQ ID NO: 948199 - RNA, 19 nt, Homo sapiens
  misc_RNA (1)...(19): siRNA sense strand
ccacaaacucgucuccuaa

SEQ ID NO: 948200 - RNA, 19 nt, Homo sapiens
  misc_RNA (1)...(19): siRNA sense strand
caaacucgucuccuaauga

SEQ ID NO: 948201 - RNA, 19 nt, Homo sapiens
  misc_RNA (1)...(19): siRNA sense strand
cccacaaacucgucuccua

SEQ ID NO: 948202 - RNA, 19 nt, Homo sapiens
  misc_RNA (1)...(19): siRNA sense strand
acaaacucgucuccuaaug

SEQ ID NO: 948203 - RNA, 19 nt, Homo sapiens
  misc_RNA (1)...(19): siRNA sense strand
cacaaacucgucuccuaau

SEQ ID NO: 948204 - RNA, 19 nt, Homo sapiens
  misc_RNA (1)...(19): siRNA sense strand
caagaagacucauguggua

SEQ ID NO: 948205 - RNA, 19 nt, Homo sapiens
  misc_RNA (1)...(19): siRNA sense strand
ggaggcagcuaucaaauau

SEQ ID NO: 948206 - RNA, 19 nt, Homo sapiens
  misc_RNA (1)...(19): siRNA sense strand
ucaaaugacuuaaccaaga

SEQ ID NO: 948207 - RNA, 19 nt, Homo sapiens
  misc_RNA (1)...(19): siRNA sense strand
caacccaugucuaucguua

SEQ ID NO: 948208 - RNA, 19 nt, Homo sapiens
  misc_RNA (1)...(19): siRNA sense strand
caaaugacuuaaccaagaa

SEQ ID NO: 948209 - RNA, 19 nt, Homo sapiens
  misc_RNA (1)...(19): siRNA sense strand
ccagggaccuauucuguca

SEQ ID NO: 948210 - RNA, 19 nt, Homo sapiens
  misc_RNA (1)...(19): siRNA sense strand
gcaguugauucuggacaaa

SEQ ID NO: 948211 - RNA, 19 nt, Homo sapiens
  misc_RNA (1)...(19): siRNA sense strand
cauagggaauggucagaga

SEQ ID NO: 948212 - RNA, 19 nt, Homo sapiens
  misc_RNA (1)...(19): siRNA sense strand
agucgaagcugcacaugug

SEQ ID NO: 948213 - RNA, 19 nt, Homo sapiens
  misc_RNA (1)...(19): siRNA sense strand
aggcagcuaucaaauauca

SEQ ID NO: 948214 - RNA, 19 nt, Homo sapiens
  misc_RNA (1)...(19): siRNA sense strand
gcagcuaucaaauaucaga

SEQ ID NO: 948215 - RNA, 19 nt, Homo sapiens
  misc_RNA (1)...(19): siRNA sense strand
gcucaaaugacuuaaccaa

SEQ ID NO: 948216 - RNA, 19 nt, Homo sapiens
  misc_RNA (1)...(19): siRNA sense strand
caagucagugugggaaaua

SEQ ID NO: 948217 - RNA, 19 nt, Homo sapiens
  misc_RNA (1)...(19): siRNA sense strand
uaaccaagaagacucaugu

SEQ ID NO: 948218 - RNA, 19 nt, Homo sapiens
  misc_RNA (1)...(19): siRNA sense strand
gucagugugggaaauauua

SEQ ID NO: 948219 - RNA, 19 nt, Homo sapiens
  misc_RNA (1)...(19): siRNA sense strand
ggaccuauucugucacugu

SEQ ID NO: 948220 - RNA, 19 nt, Homo sapiens
  misc_RNA (1)...(19): siRNA sense strand
uggaggcagcuaucaaaua

SEQ ID NO: 948221 - RNA, 19 nt, Homo sapiens
  misc_RNA (1)...(19): siRNA sense strand
ccuuagugcuuccuucaga

SEQ ID NO: 948222 - RNA, 19 nt, Homo sapiens
  misc_RNA (1)...(19): siRNA sense strand
gaagacucaugugguagca

SEQ ID NO: 948223 - RNA, 19 nt, Homo sapiens
  misc_RNA (1)...(19): siRNA sense strand
ucaagucagugugggaaau

SEQ ID NO: 948224 - RNA, 19 nt, Homo sapiens
  misc_RNA (1)...(19): siRNA sense strand
ucacugugggcucaaauga

SEQ ID NO: 948225 - RNA, 19 nt, Homo sapiens
  misc_RNA (1)...(19): siRNA sense strand
aaggcuggcucuagaagug

SEQ ID NO: 948226 - RNA, 19 nt, Homo sapiens
  misc_RNA (1)...(19): siRNA sense strand
ucuaaggaccucuacauag

SEQ ID NO: 948227 - RNA, 19 nt, Homo sapiens
  misc_RNA (1)...(19): siRNA sense strand
cuacauagaaguauaucca

SEQ ID NO: 948228 - RNA, 19 nt, Homo sapiens
  misc_RNA (1)...(19): siRNA sense strand
gcaaggcuggcucuagaag

SEQ ID NO: 948229 - RNA, 19 nt, Homo sapiens
  misc_RNA (1)...(19): siRNA sense strand
gggcucaaaugacuuaacc

SEQ ID NO: 948230 - RNA, 19 nt, Homo sapiens
  misc_RNA (1)...(19): siRNA sense strand
gggcaacccaugucuaucg

SEQ ID NO: 948231 - RNA, 19 nt, Homo sapiens
  misc_RNA (1)...(19): siRNA sense strand
ccuggaggcagcuaucaaa

SEQ ID NO: 948232 - RNA, 19 nt, Homo sapiens
  misc_RNA (1)...(19): siRNA sense strand
ugucuaucguuaucacaga

SEQ ID NO: 948233 - RNA, 19 nt, Homo sapiens
  misc_RNA (1)...(19): siRNA sense strand
guauauccagggaccuauu

SEQ ID NO: 948234 - RNA, 19 nt, Homo sapiens
  misc_RNA (1)...(19): siRNA sense strand
uagggaauggucagagaaa

SEQ ID NO: 948235 - RNA, 19 nt, Homo sapiens
  misc_RNA (1)...(19): siRNA sense strand
gggagagagagaagagaga

SEQ ID NO: 948236 - RNA, 19 nt, Homo sapiens
  misc_RNA (1)...(19): siRNA sense strand
ugugggcucaaaugacuua

SEQ ID NO: 948237 - RNA, 19 nt, Homo sapiens
  misc_RNA (1)...(19): siRNA sense strand
cuuagugcuuccuucagaa

SEQ ID NO: 948238 - RNA, 19 nt, Homo sapiens
  misc_RNA (1)...(19): siRNA sense strand
ggaauggucagagaaaaga

SEQ ID NO: 948239 - RNA, 19 nt, Homo sapiens
  misc_RNA (1)...(19): siRNA sense strand
caagaagacucauguggua

SEQ ID NO: 948240 - RNA, 19 nt, Homo sapiens
  misc_RNA (1)...(19): siRNA sense strand
ggaggcagcuaucaaauau

SEQ ID NO: 948241 - RNA, 19 nt, Homo sapiens
  misc_RNA (1)...(19): siRNA sense strand
ucaaaugacuuaaccaaga

SEQ ID NO: 948242 - RNA, 19 nt, Homo sapiens
  misc_RNA (1)...(19): siRNA sense strand
caacccaugucuaucguua

SEQ ID NO: 948243 - RNA, 19 nt, Homo sapiens
  misc_RNA (1)...(19): siRNA sense strand
caaaugacuuaaccaagaa

SEQ ID NO: 948244 - RNA, 19 nt, Homo sapiens
  misc_RNA (1)...(19): siRNA sense strand
ccagggaccuauucuguca

SEQ ID NO: 948245 - RNA, 19 nt, Homo sapiens
  misc_RNA (1)...(19): siRNA sense strand
gcaguugauucuggacaaa

SEQ ID NO: 948246 - RNA, 19 nt, Homo sapiens
  misc_RNA (1)...(19): siRNA sense strand
cauagggaauggucagaga

SEQ ID NO: 948247 - RNA, 19 nt, Homo sapiens
  misc_RNA (1)...(19): siRNA sense strand
agucgaagcugcacaugug

SEQ ID NO: 948248 - RNA, 19 nt, Homo sapiens
  misc_RNA (1)...(19): siRNA sense strand
aggcagcuaucaaauauca

SEQ ID NO: 948249 - RNA, 19 nt, Homo sapiens
  misc_RNA (1)...(19): siRNA sense strand
gcagcuaucaaauaucaga

SEQ ID NO: 948250 - RNA, 19 nt, Homo sapiens
  misc_RNA (1)...(19): siRNA sense strand
gcucaaaugacuuaaccaa

SEQ ID NO: 948251 - RNA, 19 nt, Homo sapiens
  misc_RNA (1)...(19): siRNA sense strand
caagucagugugggaaaua

SEQ ID NO: 948252 - RNA, 19 nt, Homo sapiens
  misc_RNA (1)...(19): siRNA sense strand
uaaccaagaagacucaugu

SEQ ID NO: 948253 - RNA, 19 nt, Homo sapiens
  misc_RNA (1)...(19): siRNA sense strand
gucagugugggaaauauua

SEQ ID NO: 948254 - RNA, 19 nt, Homo sapiens
  misc_RNA (1)...(19): siRNA sense strand
ggaccuauucugucacugu

SEQ ID NO: 948255 - RNA, 19 nt, Homo sapiens
  misc_RNA (1)...(19): siRNA sense strand
uggaggcagcuaucaaaua

SEQ ID NO: 948256 - RNA, 19 nt, Homo sapiens
  misc_RNA (1)...(19): siRNA sense strand
ccuuagugcuuccuucaga

SEQ ID NO: 948257 - RNA, 19 nt, Homo sapiens
  misc_RNA (1)...(19): siRNA sense strand
gaagacucaugugguagca

SEQ ID NO: 948258 - RNA, 19 nt, Homo sapiens
  misc_RNA (1)...(19): siRNA sense strand
ucaagucagugugggaaau

SEQ ID NO: 948259 - RNA, 19 nt, Homo sapiens
  misc_RNA (1)...(19): siRNA sense strand
ucacugugggcucaaauga

SEQ ID NO: 948260 - RNA, 19 nt, Homo sapiens
  misc_RNA (1)...(19): siRNA sense strand
aaggcuggcucuagaagug

SEQ ID NO: 948261 - RNA, 19 nt, Homo sapiens
  misc_RNA (1)...(19): siRNA sense strand
ucuaaggaccucuacauag

SEQ ID NO: 948262 - RNA, 19 nt, Homo sapiens
  misc_RNA (1)...(19): siRNA sense strand
cuacauagaaguauaucca

SEQ ID NO: 948263 - RNA, 19 nt, Homo sapiens
  misc_RNA (1)...(19): siRNA sense strand
gcaaggcuggcucuagaag

SEQ ID NO: 948264 - RNA, 19 nt, Homo sapiens
  misc_RNA (1)...(19): siRNA sense strand
gggcucaaaugacuuaacc

SEQ ID NO: 948265 - RNA, 19 nt, Homo sapiens
  misc_RNA (1)...(19): siRNA sense strand
gggcaacccaugucuaucg

SEQ ID NO: 948266 - RNA, 19 nt, Homo sapiens
  misc_RNA (1)...(19): siRNA sense strand
ccuggaggcagcuaucaaa

SEQ ID NO: 948267 - RNA, 19 nt, Homo sapiens
  misc_RNA (1)...(19): siRNA sense strand
ugucuaucguuaucacaga

SEQ ID NO: 948268 - RNA, 19 nt, Homo sapiens
  misc_RNA (1)...(19): siRNA sense strand
guauauccagggaccuauu

SEQ ID NO: 948269 - RNA, 19 nt, Homo sapiens
  misc_RNA (1)...(19): siRNA sense strand
uagggaauggucagagaaa

SEQ ID NO: 948270 - RNA, 19 nt, Homo sapiens
  misc_RNA (1)...(19): siRNA sense strand
gggagagagagaagagaga

SEQ ID NO: 948271 - RNA, 19 nt, Homo sapiens
  misc_RNA (1)...(19): siRNA sense strand
ugugggcucaaaugacuua

SEQ ID NO: 948272 - RNA, 19 nt, Homo sapiens
  misc_RNA (1)...(19): siRNA sense strand
cuuagugcuuccuucagaa

SEQ ID NO: 948273 - RNA, 19 nt, Homo sapiens
  misc_RNA (1)...(19): siRNA sense strand
ggaauggucagagaaaaga

SEQ ID NO: 948274 - RNA, 19 nt, Homo sapiens
  misc_RNA (1)...(19): siRNA sense strand
gcacucagcugcuacaaug

SEQ ID NO: 948275 - RNA, 19 nt, Homo sapiens
  misc_RNA (1)...(19): siRNA sense strand
gcgaggagcccaucaagua

SEQ ID NO: 948276 - RNA, 19 nt, Homo sapiens
  misc_RNA (1)...(19): siRNA sense strand
ccacagagaacaugauuga

SEQ ID NO: 948277 - RNA, 19 nt, Homo sapiens
  misc_RNA (1)...(19): siRNA sense strand
ggaaggaaacccugaagug

SEQ ID NO: 948278 - RNA, 19 nt, Homo sapiens
  misc_RNA (1)...(19): siRNA sense strand
cagcacagcaucucguaua

SEQ ID NO: 948279 - RNA, 19 nt, Homo sapiens
  misc_RNA (1)...(19): siRNA sense strand
cagagaacaugauugacuu

SEQ ID NO: 948280 - RNA, 19 nt, Homo sapiens
  misc_RNA (1)...(19): siRNA sense strand
acacagacauguuccagau

SEQ ID NO: 948281 - RNA, 19 nt, Homo sapiens
  misc_RNA (1)...(19): siRNA sense strand
acagacauguuccagauug

SEQ ID NO: 948282 - RNA, 19 nt, Homo sapiens
  misc_RNA (1)...(19): siRNA sense strand
caagggcacucagcugcua

SEQ ID NO: 948283 - RNA, 19 nt, Homo sapiens
  misc_RNA (1)...(19): siRNA sense strand
caaguauggugaacucauc

SEQ ID NO: 948284 - RNA, 19 nt, Homo sapiens
  misc_RNA (1)...(19): siRNA sense strand
ggaaaccgaggcucagaga

SEQ ID NO: 948285 - RNA, 19 nt, Homo sapiens
  misc_RNA (1)...(19): siRNA sense strand
ggaaggaggugaggaaacc

SEQ ID NO: 948286 - RNA, 19 nt, Homo sapiens
  misc_RNA (1)...(19): siRNA sense strand
ggccacgucugcucugaga

SEQ ID NO: 948287 - RNA, 19 nt, Homo sapiens
  misc_RNA (1)...(19): siRNA sense strand
caucaaguauggugaacuc

SEQ ID NO: 948288 - RNA, 19 nt, Homo sapiens
  misc_RNA (1)...(19): siRNA sense strand
ggccuuaugugccucuaug

SEQ ID NO: 948289 - RNA, 19 nt, Homo sapiens
  misc_RNA (1)...(19): siRNA sense strand
caugauugacuucguggua

SEQ ID NO: 948290 - RNA, 19 nt, Homo sapiens
  misc_RNA (1)...(19): siRNA sense strand
gcaggacggcucucucauc

SEQ ID NO: 948291 - RNA, 19 nt, Homo sapiens
  misc_RNA (1)...(19): siRNA sense strand
ccaauggaguccuggugau

SEQ ID NO: 948292 - RNA, 19 nt, Homo sapiens
  misc_RNA (1)...(19): siRNA sense strand
ggggcaagcugguggaaaa

SEQ ID NO: 948293 - RNA, 19 nt, Homo sapiens
  misc_RNA (1)...(19): siRNA sense strand
gggaugcugugaggaagga

SEQ ID NO: 948294 - RNA, 19 nt, Homo sapiens
  misc_RNA (1)...(19): siRNA sense strand
gaggagcccaucaaguaug

SEQ ID NO: 948295 - RNA, 19 nt, Homo sapiens
  misc_RNA (1)...(19): siRNA sense strand
uggauggacugaccaccaa

SEQ ID NO: 948296 - RNA, 19 nt, Homo sapiens
  misc_RNA (1)...(19): siRNA sense strand
gagcgcgaauguccucucu

SEQ ID NO: 948297 - RNA, 19 nt, Homo sapiens
  misc_RNA (1)...(19): siRNA sense strand
ccacggcacccaugcuuuc

SEQ ID NO: 948298 - RNA, 19 nt, Homo sapiens
  misc_RNA (1)...(19): siRNA sense strand
caugauagcgacacagaca

SEQ ID NO: 948299 - RNA, 19 nt, Homo sapiens
  misc_RNA (1)...(19): siRNA sense strand
ggugaagccagacgucaug

SEQ ID NO: 948300 - RNA, 19 nt, Homo sapiens
  misc_RNA (1)...(19): siRNA sense strand
cgaggagcccaucaaguau

SEQ ID NO: 948301 - RNA, 19 nt, Homo sapiens
  misc_RNA (1)...(19): siRNA sense strand
ugaggaaggaggugaggaa

SEQ ID NO: 948302 - RNA, 19 nt, Homo sapiens
  misc_RNA (1)...(19): siRNA sense strand
gagagcgagcggccaaaug

SEQ ID NO: 948303 - RNA, 19 nt, Homo sapiens
  misc_RNA (1)...(19): siRNA sense strand
gcacagcaucucguauaca

SEQ ID NO: 948304 - RNA, 19 nt, Homo sapiens
  misc_RNA (1)...(19): siRNA sense strand
gaggaaggaggugaggaaa

SEQ ID NO: 948305 - RNA, 19 nt, Homo sapiens
  misc_RNA (1)...(19): siRNA sense strand
ggagagcgagcggccaaau

SEQ ID NO: 948306 - RNA, 19 nt, Homo sapiens
  misc_RNA (1)...(19): siRNA sense strand
gaggaaaccgaggcucaga

SEQ ID NO: 948307 - RNA, 19 nt, Homo sapiens
  misc_RNA (1)...(19): siRNA sense strand
ucuccaaggcacugaguaa

SEQ ID NO: 948308 - RNA, 19 nt, Homo sapiens
  misc_RNA (1)...(19): siRNA sense strand
augauugacuucgugguaa

SEQ ID NO: 948309 - RNA, 19 nt, Homo sapiens
  misc_RNA (1)...(19): siRNA sense strand
ggucauaguggaguauaca

SEQ ID NO: 948310 - RNA, 19 nt, Homo sapiens
  misc_RNA (1)...(19): siRNA sense strand
cacagcaucucguauacac

SEQ ID NO: 948311 - RNA, 19 nt, Homo sapiens
  misc_RNA (1)...(19): siRNA sense strand
acagagaacaugauugacu

SEQ ID NO: 948312 - RNA, 19 nt, Homo sapiens
  misc_RNA (1)...(19): siRNA sense strand
uagcgacacagacauguuc

SEQ ID NO: 948313 - RNA, 19 nt, Homo sapiens
  misc_RNA (1)...(19): siRNA sense strand
gauggacugaccaccaaug

SEQ ID NO: 948314 - RNA, 19 nt, Homo sapiens
  misc_RNA (1)...(19): siRNA sense strand
gagcaccaucucccgcuau

SEQ ID NO: 948315 - RNA, 19 nt, Homo sapiens
  misc_RNA (1)...(19): siRNA sense strand
cuaugccgcuggcuucgau

SEQ ID NO: 948316 - RNA, 19 nt, Homo sapiens
  misc_RNA (1)...(19): siRNA sense strand
ccacgucugcucugagaag

SEQ ID NO: 948317 - RNA, 19 nt, Homo sapiens
  misc_RNA (1)...(19): siRNA sense strand
auaguggaguauacacaug

SEQ ID NO: 948318 - RNA, 19 nt, Homo sapiens
  misc_RNA (1)...(19): siRNA sense strand
caauggaguccuggugaug

SEQ ID NO: 948319 - RNA, 19 nt, Homo sapiens
  misc_RNA (1)...(19): siRNA sense strand
ucucuccucucccggugaa

SEQ ID NO: 948320 - RNA, 19 nt, Homo sapiens
  misc_RNA (1)...(19): siRNA sense strand
cacaugauagcgacacaga

SEQ ID NO: 948321 - RNA, 19 nt, Homo sapiens
  misc_RNA (1)...(19): siRNA sense strand
ggacuagucuaccaagguu

SEQ ID NO: 948322 - RNA, 19 nt, Homo sapiens
  misc_RNA (1)...(19): siRNA sense strand
gcagcuaauucuagauuug

SEQ ID NO: 948323 - RNA, 19 nt, Homo sapiens
  misc_RNA (1)...(19): siRNA sense strand
gcgagaaugucaggaagaa

SEQ ID NO: 948324 - RNA, 19 nt, Homo sapiens
  misc_RNA (1)...(19): siRNA sense strand
gcaagcagagccuguuguu

SEQ ID NO: 948325 - RNA, 19 nt, Homo sapiens
  misc_RNA (1)...(19): siRNA sense strand
ccacagagcagagaucuca

SEQ ID NO: 948326 - RNA, 19 nt, Homo sapiens
  misc_RNA (1)...(19): siRNA sense strand
gagaaugucaggaagaaag

SEQ ID NO: 948327 - RNA, 19 nt, Homo sapiens
  misc_RNA (1)...(19): siRNA sense strand
caaagauuaugcgagaaug

SEQ ID NO: 948328 - RNA, 19 nt, Homo sapiens
  misc_RNA (1)...(19): siRNA sense strand
agauaaagaugcccauuuu

SEQ ID NO: 948329 - RNA, 19 nt, Homo sapiens
  misc_RNA (1)...(19): siRNA sense strand
gcucguggaaaccaagaua

SEQ ID NO: 948330 - RNA, 19 nt, Homo sapiens
  misc_RNA (1)...(19): siRNA sense strand
aagguuauuuggcagcuaa

SEQ ID NO: 948331 - RNA, 19 nt, Homo sapiens
  misc_RNA (1)...(19): siRNA sense strand
ggcagcuaauucuagauuu

SEQ ID NO: 948332 - RNA, 19 nt, Homo sapiens
  misc_RNA (1)...(19): siRNA sense strand
guggaaaccaagauaaaga

SEQ ID NO: 948333 - RNA, 19 nt, Homo sapiens
  misc_RNA (1)...(19): siRNA sense strand
ggaaaccaagauaaagaug

SEQ ID NO: 948334 - RNA, 19 nt, Homo sapiens
  misc_RNA (1)...(19): siRNA sense strand
aagauaaagaugcccauuu

SEQ ID NO: 948335 - RNA, 19 nt, Homo sapiens
  misc_RNA (1)...(19): siRNA sense strand
ucaaagauuaugcgagaau

SEQ ID NO: 948336 - RNA, 19 nt, Homo sapiens
  misc_RNA (1)...(19): siRNA sense strand
ugcacgcacugccuccuua

SEQ ID NO: 948337 - RNA, 19 nt, Homo sapiens
  misc_RNA (1)...(19): siRNA sense strand
aagcagagccuguuguuuu

SEQ ID NO: 948338 - RNA, 19 nt, Homo sapiens
  misc_RNA (1)...(19): siRNA sense strand
ugugaggaaugcaaaauaa

SEQ ID NO: 948339 - RNA, 19 nt, Homo sapiens
  misc_RNA (1)...(19): siRNA sense strand
caagauaaagaugcccauu

SEQ ID NO: 948340 - RNA, 19 nt, Homo sapiens
  misc_RNA (1)...(19): siRNA sense strand
caagguuauuuggcagcua

SEQ ID NO: 948341 - RNA, 19 nt, Homo sapiens
  misc_RNA (1)...(19): siRNA sense strand
caagcagagccuguuguuu

SEQ ID NO: 948342 - RNA, 19 nt, Homo sapiens
  misc_RNA (1)...(19): siRNA sense strand
acagagcagagaucucaaa

SEQ ID NO: 948343 - RNA, 19 nt, Homo sapiens
  misc_RNA (1)...(19): siRNA sense strand
caagcaagcagagccuguu

SEQ ID NO: 948344 - RNA, 19 nt, Homo sapiens
  misc_RNA (1)...(19): siRNA sense strand
uggcagcuaauucuagauu

SEQ ID NO: 948345 - RNA, 19 nt, Homo sapiens
  misc_RNA (1)...(19): siRNA sense strand
gaaugucaggaagaaaguu

SEQ ID NO: 948346 - RNA, 19 nt, Homo sapiens
  misc_RNA (1)...(19): siRNA sense strand
uuuggcagcuaauucuaga

SEQ ID NO: 948347 - RNA, 19 nt, Homo sapiens
  misc_RNA (1)...(19): siRNA sense strand
guuauuuggcagcuaauuc

SEQ ID NO: 948348 - RNA, 19 nt, Homo sapiens
  misc_RNA (1)...(19): siRNA sense strand
gggacuagucuaccaaggu

SEQ ID NO: 948349 - RNA, 19 nt, Homo sapiens
  misc_RNA (1)...(19): siRNA sense strand
gaacugaucuccacuccuu

SEQ ID NO: 948350 - RNA, 19 nt, Homo sapiens
  misc_RNA (1)...(19): siRNA sense strand
gaaaugaaagcucuguuua

SEQ ID NO: 948351 - RNA, 19 nt, Homo sapiens
  misc_RNA (1)...(19): siRNA sense strand
ucaaagaacugguccguuu

SEQ ID NO: 948352 - RNA, 19 nt, Homo sapiens
  misc_RNA (1)...(19): siRNA sense strand
ugaaagcucuguuuaagaa

SEQ ID NO: 948353 - RNA, 19 nt, Homo sapiens
  misc_RNA (1)...(19): siRNA sense strand
ggaacuauaucaucugaga

SEQ ID NO: 948354 - RNA, 19 nt, Homo sapiens
  misc_RNA (1)...(19): siRNA sense strand
gaauagagacaccgaaauu

SEQ ID NO: 948355 - RNA, 19 nt, Homo sapiens
  misc_RNA (1)...(19): siRNA sense strand
gcagccagaugcuuaguaa

SEQ ID NO: 948356 - RNA, 19 nt, Homo sapiens
  misc_RNA (1)...(19): siRNA sense strand
ugacagcccuggagaagaa

SEQ ID NO: 948357 - RNA, 19 nt, Homo sapiens
  misc_RNA (1)...(19): siRNA sense strand
ucacaucauuuguccauuu

SEQ ID NO: 948358 - RNA, 19 nt, Homo sapiens
  misc_RNA (1)...(19): siRNA sense strand
gaaagcagcgucuccaaga

SEQ ID NO: 948359 - RNA, 19 nt, Homo sapiens
  misc_RNA (1)...(19): siRNA sense strand
gaaagaagagacagaauag

SEQ ID NO: 948360 - RNA, 19 nt, Homo sapiens
  misc_RNA (1)...(19): siRNA sense strand
gacaggaaauccagaauca

SEQ ID NO: 948361 - RNA, 19 nt, Homo sapiens
  misc_RNA (1)...(19): siRNA sense strand
cagcagaugucaaaccauu

SEQ ID NO: 948362 - RNA, 19 nt, Homo sapiens
  misc_RNA (1)...(19): siRNA sense strand
gaacaauaugucagagaua

SEQ ID NO: 948363 - RNA, 19 nt, Homo sapiens
  misc_RNA (1)...(19): siRNA sense strand
ccagaaagauccagucaag

SEQ ID NO: 948364 - RNA, 19 nt, Homo sapiens
  misc_RNA (1)...(19): siRNA sense strand
ugaaagaagagacagaaua

SEQ ID NO: 948365 - RNA, 19 nt, Homo sapiens
  misc_RNA (1)...(19): siRNA sense strand
agauaacucuucauccaua

SEQ ID NO: 948366 - RNA, 19 nt, Homo sapiens
  misc_RNA (1)...(19): siRNA sense strand
gugagaagauacagucaaa

SEQ ID NO: 948367 - RNA, 19 nt, Homo sapiens
  misc_RNA (1)...(19): siRNA sense strand
caaccucacugaagaagau

SEQ ID NO: 948368 - RNA, 19 nt, Homo sapiens
  misc_RNA (1)...(19): siRNA sense strand
ggacuuuccugaacugcaa

SEQ ID NO: 948369 - RNA, 19 nt, Homo sapiens
  misc_RNA (1)...(19): siRNA sense strand
gagaauaguuugaaaucag

SEQ ID NO: 948370 - RNA, 19 nt, Homo sapiens
  misc_RNA (1)...(19): siRNA sense strand
gaaaaccuaugaugagaaa

SEQ ID NO: 948371 - RNA, 19 nt, Homo sapiens
  misc_RNA (1)...(19): siRNA sense strand
gcuucaaccucucaaauga

SEQ ID NO: 948372 - RNA, 19 nt, Homo sapiens
  misc_RNA (1)...(19): siRNA sense strand
gaaagaacggcaagagaga

SEQ ID NO: 948373 - RNA, 19 nt, Homo sapiens
  misc_RNA (1)...(19): siRNA sense strand
gauugaagaugccgaggaa

SEQ ID NO: 948374 - RNA, 19 nt, Homo sapiens
  misc_RNA (1)...(19): siRNA sense strand
gcuagagguucacaucauu

SEQ ID NO: 948375 - RNA, 19 nt, Homo sapiens
  misc_RNA (1)...(19): siRNA sense strand
gagccacacuacauugaaa

SEQ ID NO: 948376 - RNA, 19 nt, Homo sapiens
  misc_RNA (1)...(19): siRNA sense strand
gagcagaacauucccuuug

SEQ ID NO: 948377 - RNA, 19 nt, Homo sapiens
  misc_RNA (1)...(19): siRNA sense strand
gaaguggaugcuuguguua

SEQ ID NO: 948378 - RNA, 19 nt, Homo sapiens
  misc_RNA (1)...(19): siRNA sense strand
gacauuaucuacagaacug

SEQ ID NO: 948379 - RNA, 19 nt, Homo sapiens
  misc_RNA (1)...(19): siRNA sense strand
uaacccaaaugaaucugua

SEQ ID NO: 948380 - RNA, 19 nt, Homo sapiens
  misc_RNA (1)...(19): siRNA sense strand
caccgaaauuucaaucuaa

SEQ ID NO: 948381 - RNA, 19 nt, Homo sapiens
  misc_RNA (1)...(19): siRNA sense strand
ucaagagccuccaaggauu

SEQ ID NO: 948382 - RNA, 19 nt, Homo sapiens
  misc_RNA (1)...(19): siRNA sense strand
cgacagacauuaucuacag

SEQ ID NO: 948383 - RNA, 19 nt, Homo sapiens
  misc_RNA (1)...(19): siRNA sense strand
cacaucauuuguccauuua

SEQ ID NO: 948384 - RNA, 19 nt, Homo sapiens
  misc_RNA (1)...(19): siRNA sense strand
gcaaagcaguccuccaaac

SEQ ID NO: 948385 - RNA, 19 nt, Homo sapiens
  misc_RNA (1)...(19): siRNA sense strand
gcaguugcaucugaaagaa

SEQ ID NO: 948386 - RNA, 19 nt, Homo sapiens
  misc_RNA (1)...(19): siRNA sense strand
ugaaagggcugauggaacu

SEQ ID NO: 948387 - RNA, 19 nt, Homo sapiens
  misc_RNA (1)...(19): siRNA sense strand
ucaaacaccugaagcucaa

SEQ ID NO: 948388 - RNA, 19 nt, Homo sapiens
  misc_RNA (1)...(19): siRNA sense strand
ggacaccaauggguuaugu

SEQ ID NO: 948389 - RNA, 19 nt, Homo sapiens
  misc_RNA (1)...(19): siRNA sense strand
aaaaccagcugcaguguua

SEQ ID NO: 948390 - RNA, 19 nt, Homo sapiens
  misc_RNA (1)...(19): siRNA sense strand
aaugaagccucaagaaaga

SEQ ID NO: 948391 - RNA, 19 nt, Homo sapiens
  misc_RNA (1)...(19): siRNA sense strand
gaagagccacacuacauug

SEQ ID NO: 948392 - RNA, 19 nt, Homo sapiens
  misc_RNA (1)...(19): siRNA sense strand
cagcugcaguguuaucaaa

SEQ ID NO: 948393 - RNA, 19 nt, Homo sapiens
  misc_RNA (1)...(19): siRNA sense strand
guagugaccuugaacaaaa

SEQ ID NO: 948394 - RNA, 19 nt, Homo sapiens
  misc_RNA (1)...(19): siRNA sense strand
ucuaaagcaucacaaggua

SEQ ID NO: 948395 - RNA, 19 nt, Homo sapiens
  misc_RNA (1)...(19): siRNA sense strand
uaaagaccauugcuucauc

SEQ ID NO: 948396 - RNA, 19 nt, Homo sapiens
  misc_RNA (1)...(19): siRNA sense strand
acaccgaaauuucaaucua

SEQ ID NO: 948397 - RNA, 19 nt, Homo sapiens
  misc_RNA (1)...(19): siRNA sense strand
gauguacccuggagcuaga

SEQ ID NO: 948398 - RNA, 19 nt, Homo sapiens
  misc_RNA (1)...(19): siRNA sense strand
gcagaacauucccuuugug

SEQ ID NO: 948399 - RNA, 19 nt, Homo sapiens
  misc_RNA (1)...(19): siRNA sense strand
ugacagagcagaaaauaua

SEQ ID NO: 948400 - RNA, 19 nt, Homo sapiens
  misc_RNA (1)...(19): siRNA sense strand
aaauguaucuaccuccaaa

SEQ ID NO: 948401 - RNA, 19 nt, Homo sapiens
  misc_RNA (1)...(19): siRNA sense strand
ugagauaacucuucaucca

SEQ ID NO: 948402 - RNA, 19 nt, Homo sapiens
  misc_RNA (1)...(19): siRNA sense strand
gcuaaugccgcuaccaauu

SEQ ID NO: 948403 - RNA, 19 nt, Homo sapiens
  misc_RNA (1)...(19): siRNA sense strand
gauaacucuucauccauau

SEQ ID NO: 948404 - RNA, 19 nt, Homo sapiens
  misc_RNA (1)...(19): siRNA sense strand
ccagaugcuuaguaaagaa

SEQ ID NO: 948405 - RNA, 19 nt, Homo sapiens
  misc_RNA (1)...(19): siRNA sense strand
caggaaauccagaaucauu

SEQ ID NO: 948406 - RNA, 19 nt, Homo sapiens
  misc_RNA (1)...(19): siRNA sense strand
ccaaaugaaucuguaacug

SEQ ID NO: 948407 - RNA, 19 nt, Homo sapiens
  misc_RNA (1)...(19): siRNA sense strand
gaugacacuuugcacacaa

SEQ ID NO: 948408 - RNA, 19 nt, Homo sapiens
  misc_RNA (1)...(19): siRNA sense strand
uuaccgaccuacucaaaga

SEQ ID NO: 948409 - RNA, 19 nt, Homo sapiens
  misc_RNA (1)...(19): siRNA sense strand
agaaguggaugcuuguguu

SEQ ID NO: 948410 - RNA, 19 nt, Homo sapiens
  misc_RNA (1)...(19): siRNA sense strand
aaugaaagcucuguuuaag

SEQ ID NO: 948411 - RNA, 19 nt, Homo sapiens
  misc_RNA (1)...(19): siRNA sense strand
caggaucaguuccacaaga

SEQ ID NO: 948412 - RNA, 19 nt, Homo sapiens
  misc_RNA (1)...(19): siRNA sense strand
guuaucagcagaugucaaa

SEQ ID NO: 948413 - RNA, 19 nt, Homo sapiens
  misc_RNA (1)...(19): siRNA sense strand
gccagaugcuuaguaaaga

SEQ ID NO: 948414 - RNA, 19 nt, Homo sapiens
  misc_RNA (1)...(19): siRNA sense strand
guuaucaaagggugaaaua

SEQ ID NO: 948415 - RNA, 19 nt, Homo sapiens
  misc_RNA (1)...(19): siRNA sense strand
ugaagaugccgaggaauuu

SEQ ID NO: 948416 - RNA, 19 nt, Homo sapiens
  misc_RNA (1)...(19): siRNA sense strand
agaaaugaaagcucuguuu

SEQ ID NO: 948417 - RNA, 19 nt, Homo sapiens
  misc_RNA (1)...(19): siRNA sense strand
aagccaaccucacugaaga

SEQ ID NO: 948418 - RNA, 19 nt, Homo sapiens
  misc_RNA (1)...(19): siRNA sense strand
agaagaagcagcacucuca

SEQ ID NO: 948419 - RNA, 19 nt, Homo sapiens
  misc_RNA (1)...(19): siRNA sense strand
agaccaugcuggagaaugu

SEQ ID NO: 948420 - RNA, 19 nt, Homo sapiens
  misc_RNA (1)...(19): siRNA sense strand
acaagaccaugcuggagaa

SEQ ID NO: 948421 - RNA, 19 nt, Homo sapiens
  misc_RNA (1)...(19): siRNA sense strand
gacuaaacgucgacuugug

SEQ ID NO: 948422 - RNA, 19 nt, Homo sapiens
  misc_RNA (1)...(19): siRNA sense strand
ccauaugccuauucuccuu

SEQ ID NO: 948423 - RNA, 19 nt, Homo sapiens
  misc_RNA (1)...(19): siRNA sense strand
ugucagagauacagaagca

SEQ ID NO: 948424 - RNA, 19 nt, Homo sapiens
  misc_RNA (1)...(19): siRNA sense strand
aaagcucuguuuaagaaga

SEQ ID NO: 948425 - RNA, 19 nt, Homo sapiens
  misc_RNA (1)...(19): siRNA sense strand
cacagaauguuuacucagu

SEQ ID NO: 948426 - RNA, 19 nt, Homo sapiens
  misc_RNA (1)...(19): siRNA sense strand
caagaugguugagcugaca

SEQ ID NO: 948427 - RNA, 19 nt, Homo sapiens
  misc_RNA (1)...(19): siRNA sense strand
ggaugacacuuugcacaca

SEQ ID NO: 948428 - RNA, 19 nt, Homo sapiens
  misc_RNA (1)...(19): siRNA sense strand
gcgagggcaucaaguuauc

SEQ ID NO: 948429 - RNA, 19 nt, Homo sapiens
  misc_RNA (1)...(19): siRNA sense strand
agaacaauaugucagagau

SEQ ID NO: 948430 - RNA, 19 nt, Homo sapiens
  misc_RNA (1)...(19): siRNA sense strand
gcucccaguaucuuuauaa

SEQ ID NO: 948431 - RNA, 19 nt, Homo sapiens
  misc_RNA (1)...(19): siRNA sense strand
gaccguauguaccagaaag

SEQ ID NO: 948432 - RNA, 19 nt, Homo sapiens
  misc_RNA (1)...(19): siRNA sense strand
cacaccaccuucccuaaga

SEQ ID NO: 948433 - RNA, 19 nt, Homo sapiens
  misc_RNA (1)...(19): siRNA sense strand
gcucugcagccacauacua

SEQ ID NO: 948434 - RNA, 19 nt, Homo sapiens
  misc_RNA (1)...(19): siRNA sense strand
gguagugaccuugaacaaa

SEQ ID NO: 948435 - RNA, 19 nt, Homo sapiens
  misc_RNA (1)...(19): siRNA sense strand
ccaauucuccuucauguac

SEQ ID NO: 948436 - RNA, 19 nt, Homo sapiens
  misc_RNA (1)...(19): siRNA sense strand
cccaguaucuuuauaacca

SEQ ID NO: 948437 - RNA, 19 nt, Homo sapiens
  misc_RNA (1)...(19): siRNA sense strand
gggcgcaguuugaauaagg

SEQ ID NO: 948438 - RNA, 19 nt, Homo sapiens
  misc_RNA (1)...(19): siRNA sense strand
aaagcagcgucuccaagaa

SEQ ID NO: 948439 - RNA, 19 nt, Homo sapiens
  misc_RNA (1)...(19): siRNA sense strand
gaagccaaccucacugaag

SEQ ID NO: 948440 - RNA, 19 nt, Homo sapiens
  misc_RNA (1)...(19): siRNA sense strand
gcucaauguggcaugguua

SEQ ID NO: 948441 - RNA, 19 nt, Homo sapiens
  misc_RNA (1)...(19): siRNA sense strand
cagaauagagacaccgaaa

SEQ ID NO: 948442 - RNA, 19 nt, Homo sapiens
  misc_RNA (1)...(19): siRNA sense strand
caagagccuccaaggauug

SEQ ID NO: 948443 - RNA, 19 nt, Homo sapiens
  misc_RNA (1)...(19): siRNA sense strand
aaaugaagccucaagaaag

SEQ ID NO: 948444 - RNA, 19 nt, Homo sapiens
  misc_RNA (1)...(19): siRNA sense strand
ccaaaagucuaaagcauca

SEQ ID NO: 948445 - RNA, 19 nt, Homo sapiens
  misc_RNA (1)...(19): siRNA sense strand
gaagaaaaccuaugaugag

SEQ ID NO: 948446 - RNA, 19 nt, Homo sapiens
  misc_RNA (1)...(19): siRNA sense strand
aauaugaaguccugacagu

SEQ ID NO: 948447 - RNA, 19 nt, Homo sapiens
  misc_RNA (1)...(19): siRNA sense strand
ggaagcauacaguggaugu

SEQ ID NO: 948448 - RNA, 19 nt, Homo sapiens
  misc_RNA (1)...(19): siRNA sense strand
uaaggcaguuccugucagu

SEQ ID NO: 948449 - RNA, 19 nt, Homo sapiens
  misc_RNA (1)...(19): siRNA sense strand
gaaagaaggugaagaagaa

SEQ ID NO: 948450 - RNA, 19 nt, Homo sapiens
  misc_RNA (1)...(19): siRNA sense strand
ggaaagagcuugcuugaag

SEQ ID NO: 948451 - RNA, 19 nt, Homo sapiens
  misc_RNA (1)...(19): siRNA sense strand
gggaagagaugauauaguu

SEQ ID NO: 948452 - RNA, 19 nt, Homo sapiens
  misc_RNA (1)...(19): siRNA sense strand
gaacccaccucccaagaaa

SEQ ID NO: 948453 - RNA, 19 nt, Homo sapiens
  misc_RNA (1)...(19): siRNA sense strand
gaagaaagacauugaauuc

SEQ ID NO: 948454 - RNA, 19 nt, Homo sapiens
  misc_RNA (1)...(19): siRNA sense strand
gaaagacauugaauuccua

SEQ ID NO: 948455 - RNA, 19 nt, Homo sapiens
  misc_RNA (1)...(19): siRNA sense strand
gcaccuacauuaaagaguu

SEQ ID NO: 948456 - RNA, 19 nt, Homo sapiens
  misc_RNA (1)...(19): siRNA sense strand
ggaaggaucucuguuaguc

SEQ ID NO: 948457 - RNA, 19 nt, Homo sapiens
  misc_RNA (1)...(19): siRNA sense strand
gaaauugaaugugcucaug

SEQ ID NO: 948458 - RNA, 19 nt, Homo sapiens
  misc_RNA (1)...(19): siRNA sense strand
acaaggaguugcucaauga

SEQ ID NO: 948459 - RNA, 19 nt, Homo sapiens
  misc_RNA (1)...(19): siRNA sense strand
gagggaaggaucucuguua

SEQ ID NO: 948460 - RNA, 19 nt, Homo sapiens
  misc_RNA (1)...(19): siRNA sense strand
gcuggaaucuucaguggaa

SEQ ID NO: 948461 - RNA, 19 nt, Homo sapiens
  misc_RNA (1)...(19): siRNA sense strand
ggugaauccucauagagua

SEQ ID NO: 948462 - RNA, 19 nt, Homo sapiens
  misc_RNA (1)...(19): siRNA sense strand
gaccuacagugccuuaauu

SEQ ID NO: 948463 - RNA, 19 nt, Homo sapiens
  misc_RNA (1)...(19): siRNA sense strand
uuaaggaacuucagcagaa

SEQ ID NO: 948464 - RNA, 19 nt, Homo sapiens
  misc_RNA (1)...(19): siRNA sense strand
gcugggagauauaauaaau

SEQ ID NO: 948465 - RNA, 19 nt, Homo sapiens
  misc_RNA (1)...(19): siRNA sense strand
caaauaaagcgauacagaa

SEQ ID NO: 948466 - RNA, 19 nt, Homo sapiens
  misc_RNA (1)...(19): siRNA sense strand
cagaaacaguugaggauug

SEQ ID NO: 948467 - RNA, 19 nt, Homo sapiens
  misc_RNA (1)...(19): siRNA sense strand
gaagagaagauguagaugu

SEQ ID NO: 948468 - RNA, 19 nt, Homo sapiens
  misc_RNA (1)...(19): siRNA sense strand
caaacuccuuggauaauug

SEQ ID NO: 948469 - RNA, 19 nt, Homo sapiens
  misc_RNA (1)...(19): siRNA sense strand
gaaagagcuugcuugaagu

SEQ ID NO: 948470 - RNA, 19 nt, Homo sapiens
  misc_RNA (1)...(19): siRNA sense strand
ccacaaacuccuuggauaa

SEQ ID NO: 948471 - RNA, 19 nt, Homo sapiens
  misc_RNA (1)...(19): siRNA sense strand
gaagagaugauauaguuca

SEQ ID NO: 948472 - RNA, 19 nt, Homo sapiens
  misc_RNA (1)...(19): siRNA sense strand
gauaauugauggagaaagg

SEQ ID NO: 948473 - RNA, 19 nt, Homo sapiens
  misc_RNA (1)...(19): siRNA sense strand
gcgcuguucuugaaauuga

SEQ ID NO: 948474 - RNA, 19 nt, Homo sapiens
  misc_RNA (1)...(19): siRNA sense strand
gaacuggaagauaguauug

SEQ ID NO: 948475 - RNA, 19 nt, Homo sapiens
  misc_RNA (1)...(19): siRNA sense strand
gaucaucuguuggcaguau

SEQ ID NO: 948476 - RNA, 19 nt, Homo sapiens
  misc_RNA (1)...(19): siRNA sense strand
gaugauauaguucagcuaa

SEQ ID NO: 948477 - RNA, 19 nt, Homo sapiens
  misc_RNA (1)...(19): siRNA sense strand
ggucuuugcucacccagaa

SEQ ID NO: 948478 - RNA, 19 nt, Homo sapiens
  misc_RNA (1)...(19): siRNA sense strand
gaacuucagcagaaaauua

SEQ ID NO: 948479 - RNA, 19 nt, Homo sapiens
  misc_RNA (1)...(19): siRNA sense strand
caauugagcuggugaaucc

SEQ ID NO: 948480 - RNA, 19 nt, Homo sapiens
  misc_RNA (1)...(19): siRNA sense strand
gcccaguuguugcucaaua

SEQ ID NO: 948481 - RNA, 19 nt, Homo sapiens
  misc_RNA (1)...(19): siRNA sense strand
uagaauggcaguuaugaaa

SEQ ID NO: 948482 - RNA, 19 nt, Homo sapiens
  misc_RNA (1)...(19): siRNA sense strand
auaaagcgauacagaagaa

SEQ ID NO: 948483 - RNA, 19 nt, Homo sapiens
  misc_RNA (1)...(19): siRNA sense strand
ggcaauaggacauaugaaa

SEQ ID NO: 948484 - RNA, 19 nt, Homo sapiens
  misc_RNA (1)...(19): siRNA sense strand
uguaugcgcuguucuugaa

SEQ ID NO: 948485 - RNA, 19 nt, Homo sapiens
  misc_RNA (1)...(19): siRNA sense strand
gcucaauacugguacuugu

SEQ ID NO: 948486 - RNA, 19 nt, Homo sapiens
  misc_RNA (1)...(19): siRNA sense strand
caauaggacauaugaaaga

SEQ ID NO: 948487 - RNA, 19 nt, Homo sapiens
  misc_RNA (1)...(19): siRNA sense strand
ugaaagccuugaauaagau

SEQ ID NO: 948488 - RNA, 19 nt, Homo sapiens
  misc_RNA (1)...(19): siRNA sense strand
aaagaagccuacaaaugga

SEQ ID NO: 948489 - RNA, 19 nt, Homo sapiens
  misc_RNA (1)...(19): siRNA sense strand
acauuucacuucacaagaa

SEQ ID NO: 948490 - RNA, 19 nt, Homo sapiens
  misc_RNA (1)...(19): siRNA sense strand
ugaagugaguguggucuuu

SEQ ID NO: 948491 - RNA, 19 nt, Homo sapiens
  misc_RNA (1)...(19): siRNA sense strand
uaaagaguuuguacaugga

SEQ ID NO: 948492 - RNA, 19 nt, Homo sapiens
  misc_RNA (1)...(19): siRNA sense strand
aagagaagauguagaugug

SEQ ID NO: 948493 - RNA, 19 nt, Homo sapiens
  misc_RNA (1)...(19): siRNA sense strand
gaaaggaagcuggaaucuu

SEQ ID NO: 948494 - RNA, 19 nt, Homo sapiens
  misc_RNA (1)...(19): siRNA sense strand
guuaugaaagccuugaaua

SEQ ID NO: 948495 - RNA, 19 nt, Homo sapiens
  misc_RNA (1)...(19): siRNA sense strand
ucacuagaauggcaguuau

SEQ ID NO: 948496 - RNA, 19 nt, Homo sapiens
  misc_RNA (1)...(19): siRNA sense strand
ugcaagaacuggaagauag

SEQ ID NO: 948497 - RNA, 19 nt, Homo sapiens
  misc_RNA (1)...(19): siRNA sense strand
uagaguacauuucacuuca

SEQ ID NO: 948498 - RNA, 19 nt, Homo sapiens
  misc_RNA (1)...(19): siRNA sense strand
augaaagccuugaauaaga

SEQ ID NO: 948499 - RNA, 19 nt, Homo sapiens
  misc_RNA (1)...(19): siRNA sense strand
uaaggaacuucagcagaaa

SEQ ID NO: 948500 - RNA, 19 nt, Homo sapiens
  misc_RNA (1)...(19): siRNA sense strand
gaaagccuugaauaagaua

SEQ ID NO: 948501 - RNA, 19 nt, Homo sapiens
  misc_RNA (1)...(19): siRNA sense strand
gcugcgauaugcccagauu

SEQ ID NO: 948502 - RNA, 19 nt, Homo sapiens
  misc_RNA (1)...(19): siRNA sense strand
caccugcucuggaugacua

SEQ ID NO: 948503 - RNA, 19 nt, Homo sapiens
  misc_RNA (1)...(19): siRNA sense strand
ggacaaauaaagcgauaca

SEQ ID NO: 948504 - RNA, 19 nt, Homo sapiens
  misc_RNA (1)...(19): siRNA sense strand
gaauggcaguuaugaaagc

SEQ ID NO: 948505 - RNA, 19 nt, Homo sapiens
  misc_RNA (1)...(19): siRNA sense strand
ggagcuggauguugagucu

SEQ ID NO: 948506 - RNA, 19 nt, Homo sapiens
  misc_RNA (1)...(19): siRNA sense strand
ugaaagaaggugaagaaga

SEQ ID NO: 948507 - RNA, 19 nt, Homo sapiens
  misc_RNA (1)...(19): siRNA sense strand
gcaauaggacauaugaaag

SEQ ID NO: 948508 - RNA, 19 nt, Homo sapiens
  misc_RNA (1)...(19): siRNA sense strand
ucaugcaccuuacaaacuu

SEQ ID NO: 948509 - RNA, 19 nt, Homo sapiens
  misc_RNA (1)...(19): siRNA sense strand
acaaacuccuuggauaauu

SEQ ID NO: 948510 - RNA, 19 nt, Homo sapiens
  misc_RNA (1)...(19): siRNA sense strand
cuuacaaacuuccauacaa

SEQ ID NO: 948511 - RNA, 19 nt, Homo sapiens
  misc_RNA (1)...(19): siRNA sense strand
uguaauguaugccuaggaa

SEQ ID NO: 948512 - RNA, 19 nt, Homo sapiens
  misc_RNA (1)...(19): siRNA sense strand
cauaaaggacuuaaagauc

SEQ ID NO: 948513 - RNA, 19 nt, Homo sapiens
  misc_RNA (1)...(19): siRNA sense strand
uaugaaagaaggugaagaa

SEQ ID NO: 948514 - RNA, 19 nt, Homo sapiens
  misc_RNA (1)...(19): siRNA sense strand
uuacaaacuuccauacaag

SEQ ID NO: 948515 - RNA, 19 nt, Homo sapiens
  misc_RNA (1)...(19): siRNA sense strand
gcugggaagagaugauaua

SEQ ID NO: 948516 - RNA, 19 nt, Homo sapiens
  misc_RNA (1)...(19): siRNA sense strand
uaauguaugccuaggaauu

SEQ ID NO: 948517 - RNA, 19 nt, Homo sapiens
  misc_RNA (1)...(19): siRNA sense strand
ugacauaaaggacuuaaag

SEQ ID NO: 948518 - RNA, 19 nt, Homo sapiens
  misc_RNA (1)...(19): siRNA sense strand
gcuggugaauccucauaga

SEQ ID NO: 948519 - RNA, 19 nt, Homo sapiens
  misc_RNA (1)...(19): siRNA sense strand
ccaccacaacuaucuguaa

SEQ ID NO: 948520 - RNA, 19 nt, Homo sapiens
  misc_RNA (1)...(19): siRNA sense strand
uaaaggacuuaaagaucga

SEQ ID NO: 948521 - RNA, 19 nt, Homo sapiens
  misc_RNA (1)...(19): siRNA sense strand
acaaauaaagcgauacaga

SEQ ID NO: 948522 - RNA, 19 nt, Homo sapiens
  misc_RNA (1)...(19): siRNA sense strand
cacaagaaauuaaggaacu

SEQ ID NO: 948523 - RNA, 19 nt, Homo sapiens
  misc_RNA (1)...(19): siRNA sense strand
cgauaugcccagauuguuu

SEQ ID NO: 948524 - RNA, 19 nt, Homo sapiens
  misc_RNA (1)...(19): siRNA sense strand
ccacaacuaucuguaagag

SEQ ID NO: 948525 - RNA, 19 nt, Homo sapiens
  misc_RNA (1)...(19): siRNA sense strand
gaggcaauaggacauauga

SEQ ID NO: 948526 - RNA, 19 nt, Homo sapiens
  misc_RNA (1)...(19): siRNA sense strand
gagaggcaauaggacauau

SEQ ID NO: 948527 - RNA, 19 nt, Homo sapiens
  misc_RNA (1)...(19): siRNA sense strand
gagaaaggaagcuggaauc

SEQ ID NO: 948528 - RNA, 19 nt, Homo sapiens
  misc_RNA (1)...(19): siRNA sense strand
gcucaaugaacuacagaaa

SEQ ID NO: 948529 - RNA, 19 nt, Homo sapiens
  misc_RNA (1)...(19): siRNA sense strand
cuucaagaauucugugaga

SEQ ID NO: 948530 - RNA, 19 nt, Homo sapiens
  misc_RNA (1)...(19): siRNA sense strand
gauguugagucuguagaug

SEQ ID NO: 948531 - RNA, 19 nt, Homo sapiens
  misc_RNA (1)...(19): siRNA sense strand
gcuggcaccuacauuaaag

SEQ ID NO: 948532 - RNA, 19 nt, Homo sapiens
  misc_RNA (1)...(19): siRNA sense strand
ccucauagaguacauuuca

SEQ ID NO: 948533 - RNA, 19 nt, Homo sapiens
  misc_RNA (1)...(19): siRNA sense strand
ggagaaaggaagcuggaau

SEQ ID NO: 948534 - RNA, 19 nt, Homo sapiens
  misc_RNA (1)...(19): siRNA sense strand
ccaggaaucuaccacaaac

SEQ ID NO: 948535 - RNA, 19 nt, Homo sapiens
  misc_RNA (1)...(19): siRNA sense strand
aauaaauacuccaggaauc

SEQ ID NO: 948536 - RNA, 19 nt, Homo sapiens
  misc_RNA (1)...(19): siRNA sense strand
gagcuugcuugaagugagu

SEQ ID NO: 948537 - RNA, 19 nt, Homo sapiens
  misc_RNA (1)...(19): siRNA sense strand
uaaaagaagccuacaaaug

SEQ ID NO: 948538 - RNA, 19 nt, Homo sapiens
  misc_RNA (1)...(19): siRNA sense strand
gagaaccaagccaaacauu

SEQ ID NO: 948539 - RNA, 19 nt, Homo sapiens
  misc_RNA (1)...(19): siRNA sense strand
caggcuggcaccuacauua

SEQ ID NO: 948540 - RNA, 19 nt, Homo sapiens
  misc_RNA (1)...(19): siRNA sense strand
gagcucgcgucauucacuu

SEQ ID NO: 948541 - RNA, 19 nt, Homo sapiens
  misc_RNA (1)...(19): siRNA sense strand
acuuaaagaucgaccagaa

SEQ ID NO: 948542 - RNA, 19 nt, Homo sapiens
  misc_RNA (1)...(19): siRNA sense strand
gcauguggcccaguuguug

SEQ ID NO: 948543 - RNA, 19 nt, Homo sapiens
  misc_RNA (1)...(19): siRNA sense strand
gauaaaggaagaggauuuc

SEQ ID NO: 948544 - RNA, 19 nt, Homo sapiens
  misc_RNA (1)...(19): siRNA sense strand
gaguacauuucacuucaca

SEQ ID NO: 948545 - RNA, 19 nt, Homo sapiens
  misc_RNA (1)...(19): siRNA sense strand
aacauugggucccugauga

SEQ ID NO: 948546 - RNA, 19 nt, Homo sapiens
  misc_RNA (1)...(19): siRNA sense strand
gacauaaaggacuuaaaga

SEQ ID NO: 948547 - RNA, 19 nt, Homo sapiens
  misc_RNA (1)...(19): siRNA sense strand
uacagugccuuaauuugga

SEQ ID NO: 948548 - RNA, 19 nt, Homo sapiens
  misc_RNA (1)...(19): siRNA sense strand
uacaaggaguugcucaaug

SEQ ID NO: 948549 - RNA, 19 nt, Homo sapiens
  misc_RNA (1)...(19): siRNA sense strand
gcaagaagauguggauuaa

SEQ ID NO: 948550 - RNA, 19 nt, Homo sapiens
  misc_RNA (1)...(19): siRNA sense strand
ggaaguacaagaauccuua

SEQ ID NO: 948551 - RNA, 19 nt, Homo sapiens
  misc_RNA (1)...(19): siRNA sense strand
gcuggaagccgucuacaua

SEQ ID NO: 948552 - RNA, 19 nt, Homo sapiens
  misc_RNA (1)...(19): siRNA sense strand
guucagugcuggagaauca

SEQ ID NO: 948553 - RNA, 19 nt, Homo sapiens
  misc_RNA (1)...(19): siRNA sense strand
cugcagcuauccaugauua

SEQ ID NO: 948554 - RNA, 19 nt, Homo sapiens
  misc_RNA (1)...(19): siRNA sense strand
ccaaccagauguccauuga

SEQ ID NO: 948555 - RNA, 19 nt, Homo sapiens
  misc_RNA (1)...(19): siRNA sense strand
gacaguccauugcuucuug

SEQ ID NO: 948556 - RNA, 19 nt, Homo sapiens
  misc_RNA (1)...(19): siRNA sense strand
ggauuaagcuucggucucu

SEQ ID NO: 948557 - RNA, 19 nt, Homo sapiens
  misc_RNA (1)...(19): siRNA sense strand
ugacugacguggcagagaa

SEQ ID NO: 948558 - RNA, 19 nt, Homo sapiens
  misc_RNA (1)...(19): siRNA sense strand
guucucaacugucucaaga

SEQ ID NO: 948559 - RNA, 19 nt, Homo sapiens
  misc_RNA (1)...(19): siRNA sense strand
gaugaugagaugaacauuu

SEQ ID NO: 948560 - RNA, 19 nt, Homo sapiens
  misc_RNA (1)...(19): siRNA sense strand
agaauaagcagaaauggaa

SEQ ID NO: 948561 - RNA, 19 nt, Homo sapiens
  misc_RNA (1)...(19): siRNA sense strand
gaugcaggaugaugagaug

SEQ ID NO: 948562 - RNA, 19 nt, Homo sapiens
  misc_RNA (1)...(19): siRNA sense strand
caccaaggaugaguuugua

SEQ ID NO: 948563 - RNA, 19 nt, Homo sapiens
  misc_RNA (1)...(19): siRNA sense strand
caagauucccacuguguuu

SEQ ID NO: 948564 - RNA, 19 nt, Homo sapiens
  misc_RNA (1)...(19): siRNA sense strand
gagaauaagcagaaaugga

SEQ ID NO: 948565 - RNA, 19 nt, Homo sapiens
  misc_RNA (1)...(19): siRNA sense strand
caagaauccuuaccacaac

SEQ ID NO: 948566 - RNA, 19 nt, Homo sapiens
  misc_RNA (1)...(19): siRNA sense strand
gaucucuggugcuuugaug

SEQ ID NO: 948567 - RNA, 19 nt, Homo sapiens
  misc_RNA (1)...(19): siRNA sense strand
ugaagcaguuggagaaugg

SEQ ID NO: 948568 - RNA, 19 nt, Homo sapiens
  misc_RNA (1)...(19): siRNA sense strand
ggaccaaggcccucaugga

SEQ ID NO: 948569 - RNA, 19 nt, Homo sapiens
  misc_RNA (1)...(19): siRNA sense strand
gaagacagccuugcaacag

SEQ ID NO: 948570 - RNA, 19 nt, Homo sapiens
  misc_RNA (1)...(19): siRNA sense strand
gaugagacacggcaaaucu

SEQ ID NO: 948571 - RNA, 19 nt, Homo sapiens
  misc_RNA (1)...(19): siRNA sense strand
acaagaauccuuaccacaa

SEQ ID NO: 948572 - RNA, 19 nt, Homo sapiens
  misc_RNA (1)...(19): siRNA sense strand
cuacugcgguucucaacug

SEQ ID NO: 948573 - RNA, 19 nt, Homo sapiens
  misc_RNA (1)...(19): siRNA sense strand
ugaccgcacuuccacucua

SEQ ID NO: 948574 - RNA, 19 nt, Homo sapiens
  misc_RNA (1)...(19): siRNA sense strand
gcuccuggccaucaucuuu

SEQ ID NO: 948575 - RNA, 19 nt, Homo sapiens
  misc_RNA (1)...(19): siRNA sense strand
gcuaugggaaguacaagaa

SEQ ID NO: 948576 - RNA, 19 nt, Homo sapiens
  misc_RNA (1)...(19): siRNA sense strand
gcccugaggaccauuguuu

SEQ ID NO: 948577 - RNA, 19 nt, Homo sapiens
  misc_RNA (1)...(19): siRNA sense strand
ucaucaaccucaccaagga

SEQ ID NO: 948578 - RNA, 19 nt, Homo sapiens
  misc_RNA (1)...(19): siRNA sense strand
ugacaaggaggcagaguug

SEQ ID NO: 948579 - RNA, 19 nt, Homo sapiens
  misc_RNA (1)...(19): siRNA sense strand
acagacauguccugccauu

SEQ ID NO: 948580 - RNA, 19 nt, Homo sapiens
  misc_RNA (1)...(19): siRNA sense strand
agacauguccugccauuuc

SEQ ID NO: 948581 - RNA, 19 nt, Homo sapiens
  misc_RNA (1)...(19): siRNA sense strand
caagugaagaccaugaaga

SEQ ID NO: 948582 - RNA, 19 nt, Homo sapiens
  misc_RNA (1)...(19): siRNA sense strand
caucagccgcuucaagauu

SEQ ID NO: 948583 - RNA, 19 nt, Homo sapiens
  misc_RNA (1)...(19): siRNA sense strand
gaagauguggauuaagcuu

SEQ ID NO: 948584 - RNA, 19 nt, Homo sapiens
  misc_RNA (1)...(19): siRNA sense strand
gcuucaagauucccacugu

SEQ ID NO: 948585 - RNA, 19 nt, Homo sapiens
  misc_RNA (1)...(19): siRNA sense strand
cagaggagaagcccaaguu

SEQ ID NO: 948586 - RNA, 19 nt, Homo sapiens
  misc_RNA (1)...(19): siRNA sense strand
aagaagauguggauuaagc

SEQ ID NO: 948587 - RNA, 19 nt, Homo sapiens
  misc_RNA (1)...(19): siRNA sense strand
ucaagcgcauucaggagaa

SEQ ID NO: 948588 - RNA, 19 nt, Homo sapiens
  misc_RNA (1)...(19): siRNA sense strand
caccacaucagcucuguuu

SEQ ID NO: 948589 - RNA, 19 nt, Homo sapiens
  misc_RNA (1)...(19): siRNA sense strand
caucuuugcugcagcuauc

SEQ ID NO: 948590 - RNA, 19 nt, Homo sapiens
  misc_RNA (1)...(19): siRNA sense strand
gcuacauggugaagcaguu

SEQ ID NO: 948591 - RNA, 19 nt, Homo sapiens
  misc_RNA (1)...(19): siRNA sense strand
cagaaugugccaucgugua

SEQ ID NO: 948592 - RNA, 19 nt, Homo sapiens
  misc_RNA (1)...(19): siRNA sense strand
caacagcuggagaggauug

SEQ ID NO: 948593 - RNA, 19 nt, Homo sapiens
  misc_RNA (1)...(19): siRNA sense strand
caaggaugaguuuguagaa

SEQ ID NO: 948594 - RNA, 19 nt, Homo sapiens
  misc_RNA (1)...(19): siRNA sense strand
gcuccaugcugcugacauc

SEQ ID NO: 948595 - RNA, 19 nt, Homo sapiens
  misc_RNA (1)...(19): siRNA sense strand
caaguggcaucaccaacca

SEQ ID NO: 948596 - RNA, 19 nt, Homo sapiens
  misc_RNA (1)...(19): siRNA sense strand
gaaggaacgggcagcaagu

SEQ ID NO: 948597 - RNA, 19 nt, Homo sapiens
  misc_RNA (1)...(19): siRNA sense strand
cagcuauccaugauuauga

SEQ ID NO: 948598 - RNA, 19 nt, Homo sapiens
  misc_RNA (1)...(19): siRNA sense strand
gaugaacacaaccagaaug

SEQ ID NO: 948599 - RNA, 19 nt, Homo sapiens
  misc_RNA (1)...(19): siRNA sense strand
gauccacgcagccgauguu

SEQ ID NO: 948600 - RNA, 19 nt, Homo sapiens
  misc_RNA (1)...(19): siRNA sense strand
gauguggucagcuuucguu

SEQ ID NO: 948601 - RNA, 19 nt, Homo sapiens
  misc_RNA (1)...(19): siRNA sense strand
guucaucgacuucauugug

SEQ ID NO: 948602 - RNA, 19 nt, Homo sapiens
  misc_RNA (1)...(19): siRNA sense strand
ugcaacagcuggagaggau

SEQ ID NO: 948603 - RNA, 19 nt, Homo sapiens
  misc_RNA (1)...(19): siRNA sense strand
gugaagcaguuggagaaug

SEQ ID NO: 948604 - RNA, 19 nt, Homo sapiens
  misc_RNA (1)...(19): siRNA sense strand
cuggaucucuggugcuuug

SEQ ID NO: 948605 - RNA, 19 nt, Homo sapiens
  misc_RNA (1)...(19): siRNA sense strand
ccaaggcccugucucuacu

SEQ ID NO: 948606 - RNA, 19 nt, Homo sapiens
  misc_RNA (1)...(19): siRNA sense strand
ccaaggaugaguuuguaga

SEQ ID NO: 948607 - RNA, 19 nt, Homo sapiens
  misc_RNA (1)...(19): siRNA sense strand
agcaagaagauguggauua

SEQ ID NO: 948608 - RNA, 19 nt, Homo sapiens
  misc_RNA (1)...(19): siRNA sense strand
gcuggagaaucaccacauc

SEQ ID NO: 948609 - RNA, 19 nt, Homo sapiens
  misc_RNA (1)...(19): siRNA sense strand
gagacaggcuaugggaagu

SEQ ID NO: 948610 - RNA, 19 nt, Homo sapiens
  misc_RNA (1)...(19): siRNA sense strand
gauugaugcaggaugauga

SEQ ID NO: 948611 - RNA, 19 nt, Homo sapiens
  misc_RNA (1)...(19): siRNA sense strand
gugccaucguguacaauga

SEQ ID NO: 948612 - RNA, 19 nt, Homo sapiens
  misc_RNA (1)...(19): siRNA sense strand
gcagcuauccaugauuaug

SEQ ID NO: 948613 - RNA, 19 nt, Homo sapiens
  misc_RNA (1)...(19): siRNA sense strand
aagaugaacacaaccagaa

SEQ ID NO: 948614 - RNA, 19 nt, Homo sapiens
  misc_RNA (1)...(19): siRNA sense strand
gaccgcacuuccacucuag

SEQ ID NO: 948615 - RNA, 19 nt, Homo sapiens
  misc_RNA (1)...(19): siRNA sense strand
uccgagcccuggucauuga

SEQ ID NO: 948616 - RNA, 19 nt, Homo sapiens
  misc_RNA (1)...(19): siRNA sense strand
ggagaacauacaccucugu

SEQ ID NO: 948617 - RNA, 19 nt, Homo sapiens
  misc_RNA (1)...(19): siRNA sense strand
gaaccaggcagcagaugac

SEQ ID NO: 948618 - RNA, 19 nt, Homo sapiens
  misc_RNA (1)...(19): siRNA sense strand
uaugggaaguacaagaauc

SEQ ID NO: 948619 - RNA, 19 nt, Homo sapiens
  misc_RNA (1)...(19): siRNA sense strand
ucaggagaauaagcagaaa

SEQ ID NO: 948620 - RNA, 19 nt, Homo sapiens
  misc_RNA (1)...(19): siRNA sense strand
gguguuggccacagacaug

SEQ ID NO: 948621 - RNA, 19 nt, Homo sapiens
  misc_RNA (1)...(19): siRNA sense strand
ugagacacggcaaaucuug

SEQ ID NO: 948622 - RNA, 19 nt, Homo sapiens
  misc_RNA (1)...(19): siRNA sense strand
guggucagcuuucguucca

SEQ ID NO: 948623 - RNA, 19 nt, Homo sapiens
  misc_RNA (1)...(19): siRNA sense strand
agauaggguucaucgacuu

SEQ ID NO: 948624 - RNA, 19 nt, Homo sapiens
  misc_RNA (1)...(19): siRNA sense strand
ucaccaaggaugaguuugu

SEQ ID NO: 948625 - RNA, 19 nt, Homo sapiens
  misc_RNA (1)...(19): siRNA sense strand
gcaggaugaugagaugaac

SEQ ID NO: 948626 - RNA, 19 nt, Homo sapiens
  misc_RNA (1)...(19): siRNA sense strand
aaugugccaucguguacaa

SEQ ID NO: 948627 - RNA, 19 nt, Homo sapiens
  misc_RNA (1)...(19): siRNA sense strand
ucaacugucucaagaaccu

SEQ ID NO: 948628 - RNA, 19 nt, Homo sapiens
  misc_RNA (1)...(19): siRNA sense strand
cuggugcuuugaugucuuu

SEQ ID NO: 948629 - RNA, 19 nt, Homo sapiens
  misc_RNA (1)...(19): siRNA sense strand
cauucucugugcugacuga

SEQ ID NO: 948630 - RNA, 19 nt, Homo sapiens
  misc_RNA (1)...(19): siRNA sense strand
gcccaaggcccugucucua

SEQ ID NO: 948631 - RNA, 19 nt, Homo sapiens
  misc_RNA (1)...(19): siRNA sense strand
uccgauugaugcaggauga

SEQ ID NO: 948632 - RNA, 19 nt, Homo sapiens
  misc_RNA (1)...(19): siRNA sense strand
acauugaggagcugaagaa

SEQ ID NO: 948633 - RNA, 19 nt, Homo sapiens
  misc_RNA (1)...(19): siRNA sense strand
ucucaacugucucaagaac

SEQ ID NO: 948634 - RNA, 19 nt, Homo sapiens
  misc_RNA (1)...(19): siRNA sense strand
gagcccuggucauugagau

SEQ ID NO: 948635 - RNA, 19 nt, Homo sapiens
  misc_RNA (1)...(19): siRNA sense strand
cguguacaaugaucguuca

SEQ ID NO: 948636 - RNA, 19 nt, Homo sapiens
  misc_RNA (1)...(19): siRNA sense strand
uggcuggccuccaccuuca

SEQ ID NO: 948637 - RNA, 19 nt, Homo sapiens
  misc_RNA (1)...(19): siRNA sense strand
ucaagauucccacuguguu

SEQ ID NO: 948638 - RNA, 19 nt, Homo sapiens
  misc_RNA (1)...(19): siRNA sense strand
ugaaccaggcagcagauga

SEQ ID NO: 948639 - RNA, 19 nt, Homo sapiens
  misc_RNA (1)...(19): siRNA sense strand
gcaagugaagaccaugaag

SEQ ID NO: 948640 - RNA, 19 nt, Homo sapiens
  misc_RNA (1)...(19): siRNA sense strand
cagcaagugaagaccauga

SEQ ID NO: 948641 - RNA, 19 nt, Homo sapiens
  misc_RNA (1)...(19): siRNA sense strand
gacaggcuaugggaaguac

SEQ ID NO: 948642 - RNA, 19 nt, Homo sapiens
  misc_RNA (1)...(19): siRNA sense strand
gaaguacaagaauccuuac

SEQ ID NO: 948643 - RNA, 19 nt, Homo sapiens
  misc_RNA (1)...(19): siRNA sense strand
ugccgaagaugaacacaac

SEQ ID NO: 948644 - RNA, 19 nt, Homo sapiens
  misc_RNA (1)...(19): siRNA sense strand
gauaggguucaucgacuuc

SEQ ID NO: 948645 - RNA, 19 nt, Homo sapiens
  misc_RNA (1)...(19): siRNA sense strand
caugaagacagccuugcaa

SEQ ID NO: 948646 - RNA, 19 nt, Homo sapiens
  misc_RNA (1)...(19): siRNA sense strand
guccugccauuuccagcaa

SEQ ID NO: 948647 - RNA, 19 nt, Homo sapiens
  misc_RNA (1)...(19): siRNA sense strand
ccacauccagaccaaguca

SEQ ID NO: 948648 - RNA, 19 nt, Homo sapiens
  misc_RNA (1)...(19): siRNA sense strand
ugaagacagccuugcaaca

SEQ ID NO: 948649 - RNA, 19 nt, Homo sapiens
  misc_RNA (1)...(19): siRNA sense strand
gagaaggaguuucacuaca

SEQ ID NO: 948650 - RNA, 19 nt, Homo sapiens
  misc_RNA (1)...(19): siRNA sense strand
gaaggaguuucacuacagu

SEQ ID NO: 948651 - RNA, 19 nt, Homo sapiens
  misc_RNA (1)...(19): siRNA sense strand
acaaggacgugagcaugua

SEQ ID NO: 948652 - RNA, 19 nt, Homo sapiens
  misc_RNA (1)...(19): siRNA sense strand
ggcuggagcuggagaagga

SEQ ID NO: 948653 - RNA, 19 nt, Homo sapiens
  misc_RNA (1)...(19): siRNA sense strand
ccaggacgaaagacaaaua

SEQ ID NO: 948654 - RNA, 19 nt, Homo sapiens
  misc_RNA (1)...(19): siRNA sense strand
acaaauaucgaguggugua

SEQ ID NO: 948655 - RNA, 19 nt, Homo sapiens
  misc_RNA (1)...(19): siRNA sense strand
ggacgaaagacaaauaucg

SEQ ID NO: 948656 - RNA, 19 nt, Homo sapiens
  misc_RNA (1)...(19): siRNA sense strand
ggagaaggaguuucacuac

SEQ ID NO: 948657 - RNA, 19 nt, Homo sapiens
  misc_RNA (1)...(19): siRNA sense strand
ugagcuaccuccuggacaa

SEQ ID NO: 948658 - RNA, 19 nt, Homo sapiens
  misc_RNA (1)...(19): siRNA sense strand
ucacuacagucgcuacauc

SEQ ID NO: 948659 - RNA, 19 nt, Homo sapiens
  misc_RNA (1)...(19): siRNA sense strand
gcagagcaaaggagaggaa

SEQ ID NO: 948660 - RNA, 19 nt, Homo sapiens
  misc_RNA (1)...(19): siRNA sense strand
agaaggaguuucacuacag

SEQ ID NO: 948661 - RNA, 19 nt, Homo sapiens
  misc_RNA (1)...(19): siRNA sense strand
gacaaggacgugagcaugu

SEQ ID NO: 948662 - RNA, 19 nt, Homo sapiens
  misc_RNA (1)...(19): siRNA sense strand
gacgaaagacaaauaucga

SEQ ID NO: 948663 - RNA, 19 nt, Homo sapiens
  misc_RNA (1)...(19): siRNA sense strand
agaggaaaaucaacaagaa

SEQ ID NO: 948664 - RNA, 19 nt, Homo sapiens
  misc_RNA (1)...(19): siRNA sense strand
uggagaaggaguuucacua

SEQ ID NO: 948665 - RNA, 19 nt, Homo sapiens
  misc_RNA (1)...(19): siRNA sense strand
gcaaaggagaggaaaauca

SEQ ID NO: 948666 - RNA, 19 nt, Homo sapiens
  misc_RNA (1)...(19): siRNA sense strand
aaaccaggacgaaagacaa

SEQ ID NO: 948667 - RNA, 19 nt, Homo sapiens
  misc_RNA (1)...(19): siRNA sense strand
caaaggagaggaaaaucaa

SEQ ID NO: 948668 - RNA, 19 nt, Homo sapiens
  misc_RNA (1)...(19): siRNA sense strand
ggaaaaucaacaagaagaa

SEQ ID NO: 948669 - RNA, 19 nt, Homo sapiens
  misc_RNA (1)...(19): siRNA sense strand
uuucagaaccgcagagcaa

SEQ ID NO: 948670 - RNA, 19 nt, Homo sapiens
  misc_RNA (1)...(19): siRNA sense strand
cuucugggcugcugcaaac

SEQ ID NO: 948671 - RNA, 19 nt, Homo sapiens
  misc_RNA (1)...(19): siRNA sense strand
caggacgaaagacaaauau

SEQ ID NO: 948672 - RNA, 19 nt, Homo sapiens
  misc_RNA (1)...(19): siRNA sense strand
ggagcuggagaaggaguuu

SEQ ID NO: 948673 - RNA, 19 nt, Homo sapiens
  misc_RNA (1)...(19): siRNA sense strand
gagcaaaggagaggaaaau

SEQ ID NO: 948674 - RNA, 19 nt, Homo sapiens
  misc_RNA (1)...(19): siRNA sense strand
ccucggcagccaagugaaa

SEQ ID NO: 948675 - RNA, 19 nt, Homo sapiens
  misc_RNA (1)...(19): siRNA sense strand
gagaggaaaaucaacaaga

SEQ ID NO: 948676 - RNA, 19 nt, Homo sapiens
  misc_RNA (1)...(19): siRNA sense strand
caaaucugcugccauguua

SEQ ID NO: 948677 - RNA, 19 nt, Homo sapiens
  misc_RNA (1)...(19): siRNA sense strand
gaauaugccuuggcuguuu

SEQ ID NO: 948678 - RNA, 19 nt, Homo sapiens
  misc_RNA (1)...(19): siRNA sense strand
gaacgugccucggguacua

SEQ ID NO: 948679 - RNA, 19 nt, Homo sapiens
  misc_RNA (1)...(19): siRNA sense strand
gaagaugucucuaagaaac

SEQ ID NO: 948680 - RNA, 19 nt, Homo sapiens
  misc_RNA (1)...(19): siRNA sense strand
gcaaaggagucccuagaga

SEQ ID NO: 948681 - RNA, 19 nt, Homo sapiens
  misc_RNA (1)...(19): siRNA sense strand
gcacacuuguaguagauua

SEQ ID NO: 948682 - RNA, 19 nt, Homo sapiens
  misc_RNA (1)...(19): siRNA sense strand
gcaaggcgcucucucuuag

SEQ ID NO: 948683 - RNA, 19 nt, Homo sapiens
  misc_RNA (1)...(19): siRNA sense strand
gcagucacuuugaugauuu

SEQ ID NO: 948684 - RNA, 19 nt, Homo sapiens
  misc_RNA (1)...(19): siRNA sense strand
ggaauguggugguccauga

SEQ ID NO: 948685 - RNA, 19 nt, Homo sapiens
  misc_RNA (1)...(19): siRNA sense strand
gcaaagaagauaaaguuga

SEQ ID NO: 948686 - RNA, 19 nt, Homo sapiens
  misc_RNA (1)...(19): siRNA sense strand
gaaaccggcugucaaaguc

SEQ ID NO: 948687 - RNA, 19 nt, Homo sapiens
  misc_RNA (1)...(19): siRNA sense strand
gagagcaccuccagaacaa

SEQ ID NO: 948688 - RNA, 19 nt, Homo sapiens
  misc_RNA (1)...(19): siRNA sense strand
gugacaggauguucuauaa

SEQ ID NO: 948689 - RNA, 19 nt, Homo sapiens
  misc_RNA (1)...(19): siRNA sense strand
cgucauacuccaacuauua

SEQ ID NO: 948690 - RNA, 19 nt, Homo sapiens
  misc_RNA (1)...(19): siRNA sense strand
gcugagauguuacgcuuug

SEQ ID NO: 948691 - RNA, 19 nt, Homo sapiens
  misc_RNA (1)...(19): siRNA sense strand
uggaauggcuuucaacuuc

SEQ ID NO: 948692 - RNA, 19 nt, Homo sapiens
  misc_RNA (1)...(19): siRNA sense strand
uaagaaaccggcugucaaa

SEQ ID NO: 948693 - RNA, 19 nt, Homo sapiens
  misc_RNA (1)...(19): siRNA sense strand
guccaugacuggcuauauu

SEQ ID NO: 948694 - RNA, 19 nt, Homo sapiens
  misc_RNA (1)...(19): siRNA sense strand
caaagaagauaaaguugac

SEQ ID NO: 948695 - RNA, 19 nt, Homo sapiens
  misc_RNA (1)...(19): siRNA sense strand
caaauuuccuaccguuguu

SEQ ID NO: 948696 - RNA, 19 nt, Homo sapiens
  misc_RNA (1)...(19): siRNA sense strand
gaccacaucagaacaauau

SEQ ID NO: 948697 - RNA, 19 nt, Homo sapiens
  misc_RNA (1)...(19): siRNA sense strand
ggaauggcuuucaacuuca

SEQ ID NO: 948698 - RNA, 19 nt, Homo sapiens
  misc_RNA (1)...(19): siRNA sense strand
caaggacuuucucugguuu

SEQ ID NO: 948699 - RNA, 19 nt, Homo sapiens
  misc_RNA (1)...(19): siRNA sense strand
uagaugaacugcuugaagu

SEQ ID NO: 948700 - RNA, 19 nt, Homo sapiens
  misc_RNA (1)...(19): siRNA sense strand
gaaggcuggugcuugaguu

SEQ ID NO: 948701 - RNA, 19 nt, Homo sapiens
  misc_RNA (1)...(19): siRNA sense strand
gacaggauguucuauaagg

SEQ ID NO: 948702 - RNA, 19 nt, Homo sapiens
  misc_RNA (1)...(19): siRNA sense strand
gaaguuugcacaggucuuu

SEQ ID NO: 948703 - RNA, 19 nt, Homo sapiens
  misc_RNA (1)...(19): siRNA sense strand
gcaaauuuccuaccguugu

SEQ ID NO: 948704 - RNA, 19 nt, Homo sapiens
  misc_RNA (1)...(19): siRNA sense strand
aaggaaggcuggugcuuga

SEQ ID NO: 948705 - RNA, 19 nt, Homo sapiens
  misc_RNA (1)...(19): siRNA sense strand
gcuuucaacuucauuguca

SEQ ID NO: 948706 - RNA, 19 nt, Homo sapiens
  misc_RNA (1)...(19): siRNA sense strand
cagaggaauugaagccauu

SEQ ID NO: 948707 - RNA, 19 nt, Homo sapiens
  misc_RNA (1)...(19): siRNA sense strand
ggagaaaucaagcacuguu

SEQ ID NO: 948708 - RNA, 19 nt, Homo sapiens
  misc_RNA (1)...(19): siRNA sense strand
gcugauccguucucucuuc

SEQ ID NO: 948709 - RNA, 19 nt, Homo sapiens
  misc_RNA (1)...(19): siRNA sense strand
ggcagucacuuugaugauu

SEQ ID NO: 948710 - RNA, 19 nt, Homo sapiens
  misc_RNA (1)...(19): siRNA sense strand
gauuuggaauguucugaug

SEQ ID NO: 948711 - RNA, 19 nt, Homo sapiens
  misc_RNA (1)...(19): siRNA sense strand
ucucuuagaugaacugcuu

SEQ ID NO: 948712 - RNA, 19 nt, Homo sapiens
  misc_RNA (1)...(19): siRNA sense strand
ccagaacaaggaaagauuu

SEQ ID NO: 948713 - RNA, 19 nt, Homo sapiens
  misc_RNA (1)...(19): siRNA sense strand
ggacuugucguuacguguu

SEQ ID NO: 948714 - RNA, 19 nt, Homo sapiens
  misc_RNA (1)...(19): siRNA sense strand
cgucggcacuguccucuga

SEQ ID NO: 948715 - RNA, 19 nt, Homo sapiens
  misc_RNA (1)...(19): siRNA sense strand
uaaauucagcuaaggagaa

SEQ ID NO: 948716 - RNA, 19 nt, Homo sapiens
  misc_RNA (1)...(19): siRNA sense strand
gcuucccgguucaucauua

SEQ ID NO: 948717 - RNA, 19 nt, Homo sapiens
  misc_RNA (1)...(19): siRNA sense strand
cagcagaggcagaggaauu

SEQ ID NO: 948718 - RNA, 19 nt, Homo sapiens
  misc_RNA (1)...(19): siRNA sense strand
acaaggacuuucucugguu

SEQ ID NO: 948719 - RNA, 19 nt, Homo sapiens
  misc_RNA (1)...(19): siRNA sense strand
ggugacaggauguucuaua

SEQ ID NO: 948720 - RNA, 19 nt, Homo sapiens
  misc_RNA (1)...(19): siRNA sense strand
gcacaggucuuugguugcu

SEQ ID NO: 948721 - RNA, 19 nt, Homo sapiens
  misc_RNA (1)...(19): siRNA sense strand
ugacagcuaucccaggaau

SEQ ID NO: 948722 - RNA, 19 nt, Homo sapiens
  misc_RNA (1)...(19): siRNA sense strand
guugauagcaaagaagaua

SEQ ID NO: 948723 - RNA, 19 nt, Homo sapiens
  misc_RNA (1)...(19): siRNA sense strand
agagaaacccugcaaagga

SEQ ID NO: 948724 - RNA, 19 nt, Homo sapiens
  misc_RNA (1)...(19): siRNA sense strand
gaagaugaagaccagagaa

SEQ ID NO: 948725 - RNA, 19 nt, Homo sapiens
  misc_RNA (1)...(19): siRNA sense strand
aucaagcacuguuccaaua

SEQ ID NO: 948726 - RNA, 19 nt, Homo sapiens
  misc_RNA (1)...(19): siRNA sense strand
ccucagcacacuuguagua

SEQ ID NO: 948727 - RNA, 19 nt, Homo sapiens
  misc_RNA (1)...(19): siRNA sense strand
aaauucagcuaaggagaaa

SEQ ID NO: 948728 - RNA, 19 nt, Homo sapiens
  misc_RNA (1)...(19): siRNA sense strand
cauguuagcugucuuugcu

SEQ ID NO: 948729 - RNA, 19 nt, Homo sapiens
  misc_RNA (1)...(19): siRNA sense strand
gugcugauucucuuccuua

SEQ ID NO: 948730 - RNA, 19 nt, Homo sapiens
  misc_RNA (1)...(19): siRNA sense strand
ugaaggaaguuggcaguca

SEQ ID NO: 948731 - RNA, 19 nt, Homo sapiens
  misc_RNA (1)...(19): siRNA sense strand
ugcuguaucugcuguagua

SEQ ID NO: 948732 - RNA, 19 nt, Homo sapiens
  misc_RNA (1)...(19): siRNA sense strand
cagcacacuuguaguagau

SEQ ID NO: 948733 - RNA, 19 nt, Homo sapiens
  misc_RNA (1)...(19): siRNA sense strand
ccacaucagaacaauauau

SEQ ID NO: 948734 - RNA, 19 nt, Homo sapiens
  misc_RNA (1)...(19): siRNA sense strand
ugaaaagucagcaucauua

SEQ ID NO: 948735 - RNA, 19 nt, Homo sapiens
  misc_RNA (1)...(19): siRNA sense strand
cuugggcaauggagucuua

SEQ ID NO: 948736 - RNA, 19 nt, Homo sapiens
  misc_RNA (1)...(19): siRNA sense strand
cugauucucuuccuuacuu

SEQ ID NO: 948737 - RNA, 19 nt, Homo sapiens
  misc_RNA (1)...(19): siRNA sense strand
uaccuacagucaaccagua

SEQ ID NO: 948738 - RNA, 19 nt, Homo sapiens
  misc_RNA (1)...(19): siRNA sense strand
guacuaaauucagcuaagg

SEQ ID NO: 948739 - RNA, 19 nt, Homo sapiens
  misc_RNA (1)...(19): siRNA sense strand
ggaccacaucagaacaaua

SEQ ID NO: 948740 - RNA, 19 nt, Homo sapiens
  misc_RNA (1)...(19): siRNA sense strand
guaguagauuacauugaug

SEQ ID NO: 948741 - RNA, 19 nt, Homo sapiens
  misc_RNA (1)...(19): siRNA sense strand
ugccuuugcugagauguua

SEQ ID NO: 948742 - RNA, 19 nt, Homo sapiens
  misc_RNA (1)...(19): siRNA sense strand
ggaaucccacuguaagaug

SEQ ID NO: 948743 - RNA, 19 nt, Homo sapiens
  misc_RNA (1)...(19): siRNA sense strand
gguacuaaauucagcuaag

SEQ ID NO: 948744 - RNA, 19 nt, Homo sapiens
  misc_RNA (1)...(19): siRNA sense strand
ggcgcucucucuuagauga

SEQ ID NO: 948745 - RNA, 19 nt, Homo sapiens
  misc_RNA (1)...(19): siRNA sense strand
gguccuauguguauuuaac

SEQ ID NO: 948746 - RNA, 19 nt, Homo sapiens
  misc_RNA (1)...(19): siRNA sense strand
ggaagaugaagaccagaga

SEQ ID NO: 948747 - RNA, 19 nt, Homo sapiens
  misc_RNA (1)...(19): siRNA sense strand
gcagauucguuuuguaaug

SEQ ID NO: 948748 - RNA, 19 nt, Homo sapiens
  misc_RNA (1)...(19): siRNA sense strand
gagcagauucguuuuguaa

SEQ ID NO: 948749 - RNA, 19 nt, Homo sapiens
  misc_RNA (1)...(19): siRNA sense strand
guuuggaccugguggauca

SEQ ID NO: 948750 - RNA, 19 nt, Homo sapiens
  misc_RNA (1)...(19): siRNA sense strand
aaagucagcaucauuagau

SEQ ID NO: 948751 - RNA, 19 nt, Homo sapiens
  misc_RNA (1)...(19): siRNA sense strand
gauuauguccggccacguu

SEQ ID NO: 948752 - RNA, 19 nt, Homo sapiens
  misc_RNA (1)...(19): siRNA sense strand
gaauggcuuucaacuucau

SEQ ID NO: 948753 - RNA, 19 nt, Homo sapiens
  misc_RNA (1)...(19): siRNA sense strand
ucaaaucugcugccauguu

SEQ ID NO: 948754 - RNA, 19 nt, Homo sapiens
  misc_RNA (1)...(19): siRNA sense strand
guucugguccuauguguau

SEQ ID NO: 948755 - RNA, 19 nt, Homo sapiens
  misc_RNA (1)...(19): siRNA sense strand
ucagcacacuuguaguaga

SEQ ID NO: 948756 - RNA, 19 nt, Homo sapiens
  misc_RNA (1)...(19): siRNA sense strand
uaucuaccgugacagcuau

SEQ ID NO: 948757 - RNA, 19 nt, Homo sapiens
  misc_RNA (1)...(19): siRNA sense strand
agauuggaguucuagguuu

SEQ ID NO: 948758 - RNA, 19 nt, Homo sapiens
  misc_RNA (1)...(19): siRNA sense strand
uuaugucgcuaugaaguuu

SEQ ID NO: 948759 - RNA, 19 nt, Homo sapiens
  misc_RNA (1)...(19): siRNA sense strand
cuacagucaaccaguauuu

SEQ ID NO: 948760 - RNA, 19 nt, Homo sapiens
  misc_RNA (1)...(19): siRNA sense strand
gacuugucguuacguguuu

SEQ ID NO: 948761 - RNA, 19 nt, Homo sapiens
  misc_RNA (1)...(19): siRNA sense strand
acaggucuuugguugcuuu

SEQ ID NO: 948762 - RNA, 19 nt, Homo sapiens
  misc_RNA (1)...(19): siRNA sense strand
gauguggacuucucuuuuc

SEQ ID NO: 948763 - RNA, 19 nt, Homo sapiens
  misc_RNA (1)...(19): siRNA sense strand
gauuggaguucuagguuuu

SEQ ID NO: 948764 - RNA, 19 nt, Homo sapiens
  misc_RNA (1)...(19): siRNA sense strand
ccacguuccuggacuuguc

SEQ ID NO: 948765 - RNA, 19 nt, Homo sapiens
  misc_RNA (1)...(19): siRNA sense strand
cuucagcgcucguguucug

SEQ ID NO: 948766 - RNA, 19 nt, Homo sapiens
  misc_RNA (1)...(19): siRNA sense strand
cuaagaaaccggcugucaa

SEQ ID NO: 948767 - RNA, 19 nt, Homo sapiens
  misc_RNA (1)...(19): siRNA sense strand
ccagagaaacccugcaaag

SEQ ID NO: 948768 - RNA, 19 nt, Homo sapiens
  misc_RNA (1)...(19): siRNA sense strand
ggugcgcucucacaaccuu

SEQ ID NO: 948769 - RNA, 19 nt, Homo sapiens
  misc_RNA (1)...(19): siRNA sense strand
ugucaaugauagucggaaa

SEQ ID NO: 948770 - RNA, 19 nt, Homo sapiens
  misc_RNA (1)...(19): siRNA sense strand
ggcuauauuacuaugcuua

SEQ ID NO: 948771 - RNA, 19 nt, Homo sapiens
  misc_RNA (1)...(19): siRNA sense strand
augacuggcuauauuacua

SEQ ID NO: 948772 - RNA, 19 nt, Homo sapiens
  misc_RNA (1)...(19): siRNA sense strand
ucaaugccuuugcugagau

SEQ ID NO: 948773 - RNA, 19 nt, Homo sapiens
  misc_RNA (1)...(19): siRNA sense strand
gauccguucucucuuccau

SEQ ID NO: 948774 - RNA, 19 nt, Homo sapiens
  misc_RNA (1)...(19): siRNA sense strand
gcccuccucauucucuuua

SEQ ID NO: 948775 - RNA, 19 nt, Homo sapiens
  misc_RNA (1)...(19): siRNA sense strand
gcuguuugcuugagcuuuu

SEQ ID NO: 948776 - RNA, 19 nt, Homo sapiens
  misc_RNA (1)...(19): siRNA sense strand
gaaagcagauaauccauaa

SEQ ID NO: 948777 - RNA, 19 nt, Homo sapiens
  misc_RNA (1)...(19): siRNA sense strand
gcugugaucuugagaauuu

SEQ ID NO: 948778 - RNA, 19 nt, Homo sapiens
  misc_RNA (1)...(19): siRNA sense strand
gagaaacccuauaaaugua

SEQ ID NO: 948779 - RNA, 19 nt, Homo sapiens
  misc_RNA (1)...(19): siRNA sense strand
gagaaacccuauacaugua

SEQ ID NO: 948780 - RNA, 19 nt, Homo sapiens
  misc_RNA (1)...(19): siRNA sense strand
gguaaagccuucagcuaua

SEQ ID NO: 948781 - RNA, 19 nt, Homo sapiens
  misc_RNA (1)...(19): siRNA sense strand
gagagaagccuuauaaaug

SEQ ID NO: 948782 - RNA, 19 nt, Homo sapiens
  misc_RNA (1)...(19): siRNA sense strand
gaagagaaacccuauaaau

SEQ ID NO: 948783 - RNA, 19 nt, Homo sapiens
  misc_RNA (1)...(19): siRNA sense strand
ggaaagagccuuggaaugu

SEQ ID NO: 948784 - RNA, 19 nt, Homo sapiens
  misc_RNA (1)...(19): siRNA sense strand
gcaaauacuuucuucuugu

SEQ ID NO: 948785 - RNA, 19 nt, Homo sapiens
  misc_RNA (1)...(19): siRNA sense strand
guucauaccuuacuaaaca

SEQ ID NO: 948786 - RNA, 19 nt, Homo sapiens
  misc_RNA (1)...(19): siRNA sense strand
gagagaaaccuuauaaaug

SEQ ID NO: 948787 - RNA, 19 nt, Homo sapiens
  misc_RNA (1)...(19): siRNA sense strand
gcaaagccuucaacuauag

SEQ ID NO: 948788 - RNA, 19 nt, Homo sapiens
  misc_RNA (1)...(19): siRNA sense strand
gaagagaaaccauacaaau

SEQ ID NO: 948789 - RNA, 19 nt, Homo sapiens
  misc_RNA (1)...(19): siRNA sense strand
cuacaaaugugaagaaugu

SEQ ID NO: 948790 - RNA, 19 nt, Homo sapiens
  misc_RNA (1)...(19): siRNA sense strand
cuacaaaugugaugaaugu

SEQ ID NO: 948791 - RNA, 19 nt, Homo sapiens
  misc_RNA (1)...(19): siRNA sense strand
cuacaaaugugaagaaugu

SEQ ID NO: 948792 - RNA, 19 nt, Homo sapiens
  misc_RNA (1)...(19): siRNA sense strand
ggcaaagccuucaacuaua

SEQ ID NO: 948793 - RNA, 19 nt, Homo sapiens
  misc_RNA (1)...(19): siRNA sense strand
cuacaaaugugaagaaugu

SEQ ID NO: 948794 - RNA, 19 nt, Homo sapiens
  misc_RNA (1)...(19): siRNA sense strand
gagagaaacccuauaaaug

SEQ ID NO: 948795 - RNA, 19 nt, Homo sapiens
  misc_RNA (1)...(19): siRNA sense strand
gagaaaaccuuuacaaaug

SEQ ID NO: 948796 - RNA, 19 nt, Homo sapiens
  misc_RNA (1)...(19): siRNA sense strand
ggucauaccucacuacaca

SEQ ID NO: 948797 - RNA, 19 nt, Homo sapiens
  misc_RNA (1)...(19): siRNA sense strand
ggucauaccucacuacaca

SEQ ID NO: 948798 - RNA, 19 nt, Homo sapiens
  misc_RNA (1)...(19): siRNA sense strand
ggucauaccucacuacaca

SEQ ID NO: 948799 - RNA, 19 nt, Homo sapiens
  misc_RNA (1)...(19): siRNA sense strand
gcaaauugauacuggagaa

SEQ ID NO: 948800 - RNA, 19 nt, Homo sapiens
  misc_RNA (1)...(19): siRNA sense strand
ggagagaaaccuuauaaau

SEQ ID NO: 948801 - RNA, 19 nt, Homo sapiens
  misc_RNA (1)...(19): siRNA sense strand
gcacaucagagaagucaua

SEQ ID NO: 948802 - RNA, 19 nt, Homo sapiens
  misc_RNA (1)...(19): siRNA sense strand
gagaaacccuauaaaugga

SEQ ID NO: 948803 - RNA, 19 nt, Homo sapiens
  misc_RNA (1)...(19): siRNA sense strand
ggagagaaacccuauaaau

SEQ ID NO: 948804 - RNA, 19 nt, Homo sapiens
  misc_RNA (1)...(19): siRNA sense strand
ggagagaagccuuauaaau

SEQ ID NO: 948805 - RNA, 19 nt, Homo sapiens
  misc_RNA (1)...(19): siRNA sense strand
gaaagagccuuggaaugug

SEQ ID NO: 948806 - RNA, 19 nt, Homo sapiens
  misc_RNA (1)...(19): siRNA sense strand
gagaagccuuauaaaugua

SEQ ID NO: 948807 - RNA, 19 nt, Homo sapiens
  misc_RNA (1)...(19): siRNA sense strand
gcaggucucuacucuaaau

SEQ ID NO: 948808 - RNA, 19 nt, Homo sapiens
  misc_RNA (1)...(19): siRNA sense strand
cuaaauaguuaccgaaaug

SEQ ID NO: 948809 - RNA, 19 nt, Homo sapiens
  misc_RNA (1)...(19): siRNA sense strand
guaaagaauuugaggaagu

SEQ ID NO: 948810 - RNA, 19 nt, Homo sapiens
  misc_RNA (1)...(19): siRNA sense strand
ggggauagcuuaaaccaua

SEQ ID NO: 948811 - RNA, 19 nt, Homo sapiens
  misc_RNA (1)...(19): siRNA sense strand
ggagagagacccuacaaau

SEQ ID NO: 948812 - RNA, 19 nt, Homo sapiens
  misc_RNA (1)...(19): siRNA sense strand
ggagagagacccuacaaau

SEQ ID NO: 948813 - RNA, 19 nt, Homo sapiens
  misc_RNA (1)...(19): siRNA sense strand
gcaaagccuucaacucuag

SEQ ID NO: 948814 - RNA, 19 nt, Homo sapiens
  misc_RNA (1)...(19): siRNA sense strand
ggagagagacccuacaaau

SEQ ID NO: 948815 - RNA, 19 nt, Homo sapiens
  misc_RNA (1)...(19): siRNA sense strand
caacaucagacaacucaua

SEQ ID NO: 948816 - RNA, 19 nt, Homo sapiens
  misc_RNA (1)...(19): siRNA sense strand
agagaagccuuauaaaugu

SEQ ID NO: 948817 - RNA, 19 nt, Homo sapiens
  misc_RNA (1)...(19): siRNA sense strand
gagagaaacccuauacaug

SEQ ID NO: 948818 - RNA, 19 nt, Homo sapiens
  misc_RNA (1)...(19): siRNA sense strand
uaaagaauguggcaaaguc

SEQ ID NO: 948819 - RNA, 19 nt, Homo sapiens
  misc_RNA (1)...(19): siRNA sense strand
caauggauguuaugaugaa

SEQ ID NO: 948820 - RNA, 19 nt, Homo sapiens
  misc_RNA (1)...(19): siRNA sense strand
gagagaaaccauacaaaug

SEQ ID NO: 948821 - RNA, 19 nt, Homo sapiens
  misc_RNA (1)...(19): siRNA sense strand
cagaagaauuuguaucaga

SEQ ID NO: 948822 - RNA, 19 nt, Homo sapiens
  misc_RNA (1)...(19): siRNA sense strand
aaccauaguuugcaccuua

SEQ ID NO: 948823 - RNA, 19 nt, Homo sapiens
  misc_RNA (1)...(19): siRNA sense strand
ggagagaaaccauacaaau

SEQ ID NO: 948824 - RNA, 19 nt, Homo sapiens
  misc_RNA (1)...(19): siRNA sense strand
cacagaagcuucauuccaa

SEQ ID NO: 948825 - RNA, 19 nt, Homo sapiens
  misc_RNA (1)...(19): siRNA sense strand
ggaaccagcucagaagaau

SEQ ID NO: 948826 - RNA, 19 nt, Homo sapiens
  misc_RNA (1)...(19): siRNA sense strand
caucauugcuuaaucaaca

SEQ ID NO: 948827 - RNA, 19 nt, Homo sapiens
  misc_RNA (1)...(19): siRNA sense strand
caucaaaucuuagaaagca

SEQ ID NO: 948828 - RNA, 19 nt, Homo sapiens
  misc_RNA (1)...(19): siRNA sense strand
ccuuauaguucacaccuua

SEQ ID NO: 948829 - RNA, 19 nt, Homo sapiens
  misc_RNA (1)...(19): siRNA sense strand
gcucguucuucaaaucuua

SEQ ID NO: 948830 - RNA, 19 nt, Homo sapiens
  misc_RNA (1)...(19): siRNA sense strand
gcagauaauccauaaugaa

SEQ ID NO: 948831 - RNA, 19 nt, Homo sapiens
  misc_RNA (1)...(19): siRNA sense strand
caacaagaggaaauagaua

SEQ ID NO: 948832 - RNA, 19 nt, Homo sapiens
  misc_RNA (1)...(19): siRNA sense strand
caucagagaagucauacua

SEQ ID NO: 948833 - RNA, 19 nt, Homo sapiens
  misc_RNA (1)...(19): siRNA sense strand
ccagagacccuacaaaugu

SEQ ID NO: 948834 - RNA, 19 nt, Homo sapiens
  misc_RNA (1)...(19): siRNA sense strand
cacaauggauguuaugaug

SEQ ID NO: 948835 - RNA, 19 nt, Homo sapiens
  misc_RNA (1)...(19): siRNA sense strand
ucagagaagucauacuaga

SEQ ID NO: 948836 - RNA, 19 nt, Homo sapiens
  misc_RNA (1)...(19): siRNA sense strand
gagagagacccuacaaaug

SEQ ID NO: 948837 - RNA, 19 nt, Homo sapiens
  misc_RNA (1)...(19): siRNA sense strand
gagagagacccuacaaaug

SEQ ID NO: 948838 - RNA, 19 nt, Homo sapiens
  misc_RNA (1)...(19): siRNA sense strand
ggcaaagccuucaacucua

SEQ ID NO: 948839 - RNA, 19 nt, Homo sapiens
  misc_RNA (1)...(19): siRNA sense strand
gagagagacccuacaaaug

SEQ ID NO: 948840 - RNA, 19 nt, Homo sapiens
  misc_RNA (1)...(19): siRNA sense strand
cgacaucaucgaauucaua

SEQ ID NO: 948841 - RNA, 19 nt, Homo sapiens
  misc_RNA (1)...(19): siRNA sense strand
caaaucuuauugugcauga

SEQ ID NO: 948842 - RNA, 19 nt, Homo sapiens
  misc_RNA (1)...(19): siRNA sense strand
gaaacccuauaaauggaaa

SEQ ID NO: 948843 - RNA, 19 nt, Homo sapiens
  misc_RNA (1)...(19): siRNA sense strand
gggaaaacaucacauauau

SEQ ID NO: 948844 - RNA, 19 nt, Homo sapiens
  misc_RNA (1)...(19): siRNA sense strand
gaugaauccucuguugaaa

SEQ ID NO: 948845 - RNA, 19 nt, Homo sapiens
  misc_RNA (1)...(19): siRNA sense strand
caugggagcugugaucuug

SEQ ID NO: 948846 - RNA, 19 nt, Homo sapiens
  misc_RNA (1)...(19): siRNA sense strand
gaaacccuauacauguaaa

SEQ ID NO: 948847 - RNA, 19 nt, Homo sapiens
  misc_RNA (1)...(19): siRNA sense strand
cuaaacagcagcaaauuga

SEQ ID NO: 948848 - RNA, 19 nt, Homo sapiens
  misc_RNA (1)...(19): siRNA sense strand
gagaaaccauacaaaugug

SEQ ID NO: 948849 - RNA, 19 nt, Homo sapiens
  misc_RNA (1)...(19): siRNA sense strand
gauaauccauaaugaagag

SEQ ID NO: 948850 - RNA, 19 nt, Homo sapiens
  misc_RNA (1)...(19): siRNA sense strand
caacaucagaccauccaua

SEQ ID NO: 948851 - RNA, 19 nt, Homo sapiens
  misc_RNA (1)...(19): siRNA sense strand
aggcaggucucuacucuaa

SEQ ID NO: 948852 - RNA, 19 nt, Homo sapiens
  misc_RNA (1)...(19): siRNA sense strand
gagcugugaucuugagaau

SEQ ID NO: 948853 - RNA, 19 nt, Homo sapiens
  misc_RNA (1)...(19): siRNA sense strand
ggauguggccguagaauuc

SEQ ID NO: 948854 - RNA, 19 nt, Homo sapiens
  misc_RNA (1)...(19): siRNA sense strand
agagaaacccuauaaaugu

SEQ ID NO: 948855 - RNA, 19 nt, Homo sapiens
  misc_RNA (1)...(19): siRNA sense strand
ggucuuuacucauucauca

SEQ ID NO: 948856 - RNA, 19 nt, Homo sapiens
  misc_RNA (1)...(19): siRNA sense strand
caaauacuuucuucuugug

SEQ ID NO: 948857 - RNA, 19 nt, Homo sapiens
  misc_RNA (1)...(19): siRNA sense strand
aggaaggucuuuacucauu

SEQ ID NO: 948858 - RNA, 19 nt, Homo sapiens
  misc_RNA (1)...(19): siRNA sense strand
uggcaaagccuucaacuau

SEQ ID NO: 948859 - RNA, 19 nt, Homo sapiens
  misc_RNA (1)...(19): siRNA sense strand
guucaugccuuacucaaca

SEQ ID NO: 948860 - RNA, 19 nt, Homo sapiens
  misc_RNA (1)...(19): siRNA sense strand
aaacagcagcaaauugaua

SEQ ID NO: 948861 - RNA, 19 nt, Homo sapiens
  misc_RNA (1)...(19): siRNA sense strand
agaacagucuuacaaaugu

SEQ ID NO: 948862 - RNA, 19 nt, Homo sapiens
  misc_RNA (1)...(19): siRNA sense strand
gaaggucuuuacucauuca

SEQ ID NO: 948863 - RNA, 19 nt, Homo sapiens
  misc_RNA (1)...(19): siRNA sense strand
caucagaccauccauauca

SEQ ID NO: 948864 - RNA, 19 nt, Homo sapiens
  misc_RNA (1)...(19): siRNA sense strand
gagagacccuacaaaugug

SEQ ID NO: 948865 - RNA, 19 nt, Homo sapiens
  misc_RNA (1)...(19): siRNA sense strand
gagagacccuacaaaugug

SEQ ID NO: 948866 - RNA, 19 nt, Homo sapiens
  misc_RNA (1)...(19): siRNA sense strand
gagagacccuacaaaugug

SEQ ID NO: 948867 - RNA, 19 nt, Homo sapiens
  misc_RNA (1)...(19): siRNA sense strand
cagcaucggagaauucaua

SEQ ID NO: 948868 - RNA, 19 nt, Homo sapiens
  misc_RNA (1)...(19): siRNA sense strand
agucagucaucaaaucuua

SEQ ID NO: 948869 - RNA, 19 nt, Homo sapiens
  misc_RNA (1)...(19): siRNA sense strand
gagaagucauacuagagaa

SEQ ID NO: 948870 - RNA, 19 nt, Homo sapiens
  misc_RNA (1)...(19): siRNA sense strand
ggagagaaacccuauacau

SEQ ID NO: 948871 - RNA, 19 nt, Homo sapiens
  misc_RNA (1)...(19): siRNA sense strand
gugcaucggcgaacucaua

SEQ ID NO: 948872 - RNA, 19 nt, Homo sapiens
  misc_RNA (1)...(19): siRNA sense strand
caaaguaugugcuaaaccu

SEQ ID NO: 948873 - RNA, 19 nt, Homo sapiens
  misc_RNA (1)...(19): siRNA sense strand
aaccguaguucaugccuua

SEQ ID NO: 948874 - RNA, 19 nt, Homo sapiens
  misc_RNA (1)...(19): siRNA sense strand
caacaucagaucauuccua

SEQ ID NO: 948875 - RNA, 19 nt, Homo sapiens
  misc_RNA (1)...(19): siRNA sense strand
aaagagccuuggaauguga

SEQ ID NO: 948876 - RNA, 19 nt, Homo sapiens
  misc_RNA (1)...(19): siRNA sense strand
gaucgaagcuggaaauauu

SEQ ID NO: 948877 - RNA, 19 nt, Homo sapiens
  misc_RNA (1)...(19): siRNA sense strand
ggucaaagcuugccuuaga

SEQ ID NO: 948878 - RNA, 19 nt, Homo sapiens
  misc_RNA (1)...(19): siRNA sense strand
gacuauggauugcuaauua

SEQ ID NO: 948879 - RNA, 19 nt, Homo sapiens
  misc_RNA (1)...(19): siRNA sense strand
gaagaaaccacacaucuau

SEQ ID NO: 948880 - RNA, 19 nt, Homo sapiens
  misc_RNA (1)...(19): siRNA sense strand
caugggaacuucuugcuua

SEQ ID NO: 948881 - RNA, 19 nt, Homo sapiens
  misc_RNA (1)...(19): siRNA sense strand
gaagagaaagguuaagaaa

SEQ ID NO: 948882 - RNA, 19 nt, Homo sapiens
  misc_RNA (1)...(19): siRNA sense strand
gaaagaagagaaagguuaa

SEQ ID NO: 948883 - RNA, 19 nt, Homo sapiens
  misc_RNA (1)...(19): siRNA sense strand
ggagaaguguuugaaauug

SEQ ID NO: 948884 - RNA, 19 nt, Homo sapiens
  misc_RNA (1)...(19): siRNA sense strand
gaagaggcccgacuccaua

SEQ ID NO: 948885 - RNA, 19 nt, Homo sapiens
  misc_RNA (1)...(19): siRNA sense strand
cagcaaaccugguaucaug

SEQ ID NO: 948886 - RNA, 19 nt, Homo sapiens
  misc_RNA (1)...(19): siRNA sense strand
gaaauauccucucaguugu

SEQ ID NO: 948887 - RNA, 19 nt, Homo sapiens
  misc_RNA (1)...(19): siRNA sense strand
uaaagcacccgacgacuua

SEQ ID NO: 948888 - RNA, 19 nt, Homo sapiens
  misc_RNA (1)...(19): siRNA sense strand
gagaaguguuugaaauuga

SEQ ID NO: 948889 - RNA, 19 nt, Homo sapiens
  misc_RNA (1)...(19): siRNA sense strand
ccacacaucuauuauggaa

SEQ ID NO: 948890 - RNA, 19 nt, Homo sapiens
  misc_RNA (1)...(19): siRNA sense strand
ugaaagaagagaaagguua

SEQ ID NO: 948891 - RNA, 19 nt, Homo sapiens
  misc_RNA (1)...(19): siRNA sense strand
agaaauauccucucaguug

SEQ ID NO: 948892 - RNA, 19 nt, Homo sapiens
  misc_RNA (1)...(19): siRNA sense strand
uaagaaauauccucucagu

SEQ ID NO: 948893 - RNA, 19 nt, Homo sapiens
  misc_RNA (1)...(19): siRNA sense strand
agaaaccacacaucuauua

SEQ ID NO: 948894 - RNA, 19 nt, Homo sapiens
  misc_RNA (1)...(19): siRNA sense strand
gaaggccaccugaaagaaa

SEQ ID NO: 948895 - RNA, 19 nt, Homo sapiens
  misc_RNA (1)...(19): siRNA sense strand
uaauauaaccucuggagaa

SEQ ID NO: 948896 - RNA, 19 nt, Homo sapiens
  misc_RNA (1)...(19): siRNA sense strand
guuaagaaauauccucuca

SEQ ID NO: 948897 - RNA, 19 nt, Homo sapiens
  misc_RNA (1)...(19): siRNA sense strand
caaaggagagucugggauu

SEQ ID NO: 948898 - RNA, 19 nt, Homo sapiens
  misc_RNA (1)...(19): siRNA sense strand
caaagaagaguaucagcaa

SEQ ID NO: 948899 - RNA, 19 nt, Homo sapiens
  misc_RNA (1)...(19): siRNA sense strand
gaaagacggacuuaaagca

SEQ ID NO: 948900 - RNA, 19 nt, Homo sapiens
  misc_RNA (1)...(19): siRNA sense strand
gggcauaacacaaauguag

SEQ ID NO: 948901 - RNA, 19 nt, Homo sapiens
  misc_RNA (1)...(19): siRNA sense strand
gaucaauguuuccacagau

SEQ ID NO: 948902 - RNA, 19 nt, Homo sapiens
  misc_RNA (1)...(19): siRNA sense strand
cauagccacuugcucauau

SEQ ID NO: 948903 - RNA, 19 nt, Homo sapiens
  misc_RNA (1)...(19): siRNA sense strand
gcaaagugaugggccuaga

SEQ ID NO: 948904 - RNA, 19 nt, Homo sapiens
  misc_RNA (1)...(19): siRNA sense strand
acaagucucuccggucuuu

SEQ ID NO: 948905 - RNA, 19 nt, Homo sapiens
  misc_RNA (1)...(19): siRNA sense strand
uaucaugaaggaccaaaua

SEQ ID NO: 948906 - RNA, 19 nt, Homo sapiens
  misc_RNA (1)...(19): siRNA sense strand
gacauugccuuccaucaag

SEQ ID NO: 948907 - RNA, 19 nt, Homo sapiens
  misc_RNA (1)...(19): siRNA sense strand
gaaaccacacaucuauuau

SEQ ID NO: 948908 - RNA, 19 nt, Homo sapiens
  misc_RNA (1)...(19): siRNA sense strand
gugaugggccuagauauuu

SEQ ID NO: 948909 - RNA, 19 nt, Homo sapiens
  misc_RNA (1)...(19): siRNA sense strand
ucauggcgcuuaugggauu

SEQ ID NO: 948910 - RNA, 19 nt, Homo sapiens
  misc_RNA (1)...(19): siRNA sense strand
aaagaagaguaucagcaaa

SEQ ID NO: 948911 - RNA, 19 nt, Homo sapiens
  misc_RNA (1)...(19): siRNA sense strand
uauaaccucuggagaagug

SEQ ID NO: 948912 - RNA, 19 nt, Homo sapiens
  misc_RNA (1)...(19): siRNA sense strand
acacaucuauuauggaagu

SEQ ID NO: 948913 - RNA, 19 nt, Homo sapiens
  misc_RNA (1)...(19): siRNA sense strand
ucucuccggucuuugaaua

SEQ ID NO: 948914 - RNA, 19 nt, Homo sapiens
  misc_RNA (1)...(19): siRNA sense strand
ugaagaaaccacacaucua

SEQ ID NO: 948915 - RNA, 19 nt, Homo sapiens
  misc_RNA (1)...(19): siRNA sense strand
caacaaggaccucccagau

SEQ ID NO: 948916 - RNA, 19 nt, Homo sapiens
  misc_RNA (1)...(19): siRNA sense strand
ugacaacaccugcaaagug

SEQ ID NO: 948917 - RNA, 19 nt, Homo sapiens
  misc_RNA (1)...(19): siRNA sense strand
ggagauuccugagacaaca

SEQ ID NO: 948918 - RNA, 19 nt, Homo sapiens
  misc_RNA (1)...(19): siRNA sense strand
gcagaaguauuggcugagu

SEQ ID NO: 948919 - RNA, 19 nt, Homo sapiens
  misc_RNA (1)...(19): siRNA sense strand
gaagguggcaagacuaugg

SEQ ID NO: 948920 - RNA, 19 nt, Homo sapiens
  misc_RNA (1)...(19): siRNA sense strand
ggaagaggcccgacuccau

SEQ ID NO: 948921 - RNA, 19 nt, Homo sapiens
  misc_RNA (1)...(19): siRNA sense strand
aaagugaugggccuagaua

SEQ ID NO: 948922 - RNA, 19 nt, Homo sapiens
  misc_RNA (1)...(19): siRNA sense strand
cacaggacguuguaucaug

SEQ ID NO: 948923 - RNA, 19 nt, Homo sapiens
  misc_RNA (1)...(19): siRNA sense strand
aaaggagagucugggauuu

SEQ ID NO: 948924 - RNA, 19 nt, Homo sapiens
  misc_RNA (1)...(19): siRNA sense strand
gcaaaccugguaucaugaa

SEQ ID NO: 948925 - RNA, 19 nt, Homo sapiens
  misc_RNA (1)...(19): siRNA sense strand
gcgacaggcagaaguauug

SEQ ID NO: 948926 - RNA, 19 nt, Homo sapiens
  misc_RNA (1)...(19): siRNA sense strand
gaggucaaagcuugccuua

SEQ ID NO: 948927 - RNA, 19 nt, Homo sapiens
  misc_RNA (1)...(19): siRNA sense strand
ggaugcauuuggucgaguu

SEQ ID NO: 948928 - RNA, 19 nt, Homo sapiens
  misc_RNA (1)...(19): siRNA sense strand
gcucuggucuguuccugau

SEQ ID NO: 948929 - RNA, 19 nt, Homo sapiens
  misc_RNA (1)...(19): siRNA sense strand
caaugaaacgcuuggaaga

SEQ ID NO: 948930 - RNA, 19 nt, Homo sapiens
  misc_RNA (1)...(19): siRNA sense strand
aaauguaggagcaauugua

SEQ ID NO: 948931 - RNA, 19 nt, Homo sapiens
  misc_RNA (1)...(19): siRNA sense strand
ccacgaaggcaaagugaug

SEQ ID NO: 948932 - RNA, 19 nt, Homo sapiens
  misc_RNA (1)...(19): siRNA sense strand
gggaacuucuugcuuacug

SEQ ID NO: 948933 - RNA, 19 nt, Homo sapiens
  misc_RNA (1)...(19): siRNA sense strand
caucuauuauggaaguuug

SEQ ID NO: 948934 - RNA, 19 nt, Homo sapiens
  misc_RNA (1)...(19): siRNA sense strand
ugacauugccuuccaucaa

SEQ ID NO: 948935 - RNA, 19 nt, Homo sapiens
  misc_RNA (1)...(19): siRNA sense strand
gggaaagacggacuuaaag

SEQ ID NO: 948936 - RNA, 19 nt, Homo sapiens
  misc_RNA (1)...(19): siRNA sense strand
gacguuguaucauguucuu

SEQ ID NO: 948937 - RNA, 19 nt, Homo sapiens
  misc_RNA (1)...(19): siRNA sense strand
gaaccaguggcagauauug

SEQ ID NO: 948938 - RNA, 19 nt, Homo sapiens
  misc_RNA (1)...(19): siRNA sense strand
gcauaacacaaauguagga

SEQ ID NO: 948939 - RNA, 19 nt, Homo sapiens
  misc_RNA (1)...(19): siRNA sense strand
cuggagaaguguuugaaau

SEQ ID NO: 948940 - RNA, 19 nt, Homo sapiens
  misc_RNA (1)...(19): siRNA sense strand
uuacuggugccuaugauaa

SEQ ID NO: 948941 - RNA, 19 nt, Homo sapiens
  misc_RNA (1)...(19): siRNA sense strand
ggaccucccagaugcaaga

SEQ ID NO: 948942 - RNA, 19 nt, Homo sapiens
  misc_RNA (1)...(19): siRNA sense strand
ggagaggguccugcugaaa

SEQ ID NO: 948943 - RNA, 19 nt, Homo sapiens
  misc_RNA (1)...(19): siRNA sense strand
agaggguccugcugaaaga

SEQ ID NO: 948944 - RNA, 19 nt, Homo sapiens
  misc_RNA (1)...(19): siRNA sense strand
ccaaauccacugucuccuu

SEQ ID NO: 948945 - RNA, 19 nt, Homo sapiens
  misc_RNA (1)...(19): siRNA sense strand
gagaggguccugcugaaag

SEQ ID NO: 948946 - RNA, 19 nt, Homo sapiens
  misc_RNA (1)...(19): siRNA sense strand
uagaaggccaccugaaaga

SEQ ID NO: 948947 - RNA, 19 nt, Homo sapiens
  misc_RNA (1)...(19): siRNA sense strand
gaugaaccaguggcagaua

SEQ ID NO: 948948 - RNA, 19 nt, Homo sapiens
  misc_RNA (1)...(19): siRNA sense strand
ugcaagcucuggucuguuc

SEQ ID NO: 948949 - RNA, 19 nt, Homo sapiens
  misc_RNA (1)...(19): siRNA sense strand
gaaggaccaaauagcuuga

SEQ ID NO: 948950 - RNA, 19 nt, Homo sapiens
  misc_RNA (1)...(19): siRNA sense strand
aauauaaccucuggagaag

SEQ ID NO: 948951 - RNA, 19 nt, Homo sapiens
  misc_RNA (1)...(19): siRNA sense strand
gcauggguguguaugacau

SEQ ID NO: 948952 - RNA, 19 nt, Homo sapiens
  misc_RNA (1)...(19): siRNA sense strand
agaaguauuggcugaguuu

SEQ ID NO: 948953 - RNA, 19 nt, Homo sapiens
  misc_RNA (1)...(19): siRNA sense strand
cagaaguauuggcugaguu

SEQ ID NO: 948954 - RNA, 19 nt, Homo sapiens
  misc_RNA (1)...(19): siRNA sense strand
uggagaaguguuugaaauu

SEQ ID NO: 948955 - RNA, 19 nt, Homo sapiens
  misc_RNA (1)...(19): siRNA sense strand
acaggacguuguaucaugu

SEQ ID NO: 948956 - RNA, 19 nt, Homo sapiens
  misc_RNA (1)...(19): siRNA sense strand
ggaaagacggacuuaaagc

SEQ ID NO: 948957 - RNA, 19 nt, Homo sapiens
  misc_RNA (1)...(19): siRNA sense strand
gcagauauugaaggccaua

SEQ ID NO: 948958 - RNA, 19 nt, Homo sapiens
  misc_RNA (1)...(19): siRNA sense strand
uguaggagcaauuguauuc

SEQ ID NO: 948959 - RNA, 19 nt, Homo sapiens
  misc_RNA (1)...(19): siRNA sense strand
gcaaccuccuucacacucu

SEQ ID NO: 948960 - RNA, 19 nt, Homo sapiens
  misc_RNA (1)...(19): siRNA sense strand
gaccaaauagcuugaaggu

SEQ ID NO: 948961 - RNA, 19 nt, Homo sapiens
  misc_RNA (1)...(19): siRNA sense strand
cuaaagcacccgacgacuu

SEQ ID NO: 948962 - RNA, 19 nt, Homo sapiens
  misc_RNA (1)...(19): siRNA sense strand
ggauugcuaauuauucguu

SEQ ID NO: 948963 - RNA, 19 nt, Homo sapiens
  misc_RNA (1)...(19): siRNA sense strand
ugaugggccuagauauuuc

SEQ ID NO: 948964 - RNA, 19 nt, Homo sapiens
  misc_RNA (1)...(19): siRNA sense strand
gaaguuuggaagagaagga

SEQ ID NO: 948965 - RNA, 19 nt, Homo sapiens
  misc_RNA (1)...(19): siRNA sense strand
gcucaucagaacuuaguga

SEQ ID NO: 948966 - RNA, 19 nt, Homo sapiens
  misc_RNA (1)...(19): siRNA sense strand
cuuagaaggccaccugaaa

SEQ ID NO: 948967 - RNA, 19 nt, Homo sapiens
  misc_RNA (1)...(19): siRNA sense strand
uauggaaguuuggaagaga

SEQ ID NO: 948968 - RNA, 19 nt, Homo sapiens
  misc_RNA (1)...(19): siRNA sense strand
aaccacacaucuauuaugg

SEQ ID NO: 948969 - RNA, 19 nt, Homo sapiens
  misc_RNA (1)...(19): siRNA sense strand
gcagucagauuggggauga

SEQ ID NO: 948970 - RNA, 19 nt, Homo sapiens
  misc_RNA (1)...(19): siRNA sense strand
gccacuugcucauaugaca

SEQ ID NO: 948971 - RNA, 19 nt, Homo sapiens
  misc_RNA (1)...(19): siRNA sense strand
gauaacacagccaagaucu

SEQ ID NO: 948972 - RNA, 19 nt, Homo sapiens
  misc_RNA (1)...(19): siRNA sense strand
acacaaauguaggagcaau

SEQ ID NO: 948973 - RNA, 19 nt, Homo sapiens
  misc_RNA (1)...(19): siRNA sense strand
gaccguucauggcgcuuau

SEQ ID NO: 948974 - RNA, 19 nt, Homo sapiens
  misc_RNA (1)...(19): siRNA sense strand
aaaccacacaucuauuaug

SEQ ID NO: 948975 - RNA, 19 nt, Homo sapiens
  misc_RNA (1)...(19): siRNA sense strand
gggacuggaugcauuuggu

SEQ ID NO: 948976 - RNA, 19 nt, Homo sapiens
  misc_RNA (1)...(19): siRNA sense strand
ggauuuaacuggagaauau

SEQ ID NO: 948977 - RNA, 19 nt, Homo sapiens
  misc_RNA (1)...(19): siRNA sense strand
gcaaauacuucuauaggaa

SEQ ID NO: 948978 - RNA, 19 nt, Homo sapiens
  misc_RNA (1)...(19): siRNA sense strand
acacaagccugguauuaua

SEQ ID NO: 948979 - RNA, 19 nt, Homo sapiens
  misc_RNA (1)...(19): siRNA sense strand
gauagcaggaggcuuauua

SEQ ID NO: 948980 - RNA, 19 nt, Homo sapiens
  misc_RNA (1)...(19): siRNA sense strand
gcauagaggauuucugaua

SEQ ID NO: 948981 - RNA, 19 nt, Homo sapiens
  misc_RNA (1)...(19): siRNA sense strand
cagcaaauauuccacacua

SEQ ID NO: 948982 - RNA, 19 nt, Homo sapiens
  misc_RNA (1)...(19): siRNA sense strand
cauuacagguuuagguuua

SEQ ID NO: 948983 - RNA, 19 nt, Homo sapiens
  misc_RNA (1)...(19): siRNA sense strand
ggugauagcaggaggcuua

SEQ ID NO: 948984 - RNA, 19 nt, Homo sapiens
  misc_RNA (1)...(19): siRNA sense strand
ugauauaucugucuggaaa

SEQ ID NO: 948985 - RNA, 19 nt, Homo sapiens
  misc_RNA (1)...(19): siRNA sense strand
caacccgccuuaaccauaa

SEQ ID NO: 948986 - RNA, 19 nt, Homo sapiens
  misc_RNA (1)...(19): siRNA sense strand
gauguuaacgucaaaguuu

SEQ ID NO: 948987 - RNA, 19 nt, Homo sapiens
  misc_RNA (1)...(19): siRNA sense strand
cauagaggauuucugauau

SEQ ID NO: 948988 - RNA, 19 nt, Homo sapiens
  misc_RNA (1)...(19): siRNA sense strand
gagcaaaucuaaacauucg

SEQ ID NO: 948989 - RNA, 19 nt, Homo sapiens
  misc_RNA (1)...(19): siRNA sense strand
ccaaagcugucaccguauu

SEQ ID NO: 948990 - RNA, 19 nt, Homo sapiens
  misc_RNA (1)...(19): siRNA sense strand
gaggauuucugauauaucu

SEQ ID NO: 948991 - RNA, 19 nt, Homo sapiens
  misc_RNA (1)...(19): siRNA sense strand
gcagguaaauugguggauu

SEQ ID NO: 948992 - RNA, 19 nt, Homo sapiens
  misc_RNA (1)...(19): siRNA sense strand
ggaagauguuaacgucaaa

SEQ ID NO: 948993 - RNA, 19 nt, Homo sapiens
  misc_RNA (1)...(19): siRNA sense strand
gcaacccgccuuaaccaua

SEQ ID NO: 948994 - RNA, 19 nt, Homo sapiens
  misc_RNA (1)...(19): siRNA sense strand
gcaggaggcuuauuaugcu

SEQ ID NO: 948995 - RNA, 19 nt, Homo sapiens
  misc_RNA (1)...(19): siRNA sense strand
ccaaucaaaccacuucuaa

SEQ ID NO: 948996 - RNA, 19 nt, Homo sapiens
  misc_RNA (1)...(19): siRNA sense strand
ggcaaauacuucuauagga

SEQ ID NO: 948997 - RNA, 19 nt, Homo sapiens
  misc_RNA (1)...(19): siRNA sense strand
gggauucauuacagguuua

SEQ ID NO: 948998 - RNA, 19 nt, Homo sapiens
  misc_RNA (1)...(19): siRNA sense strand
gaguguaaccucagaaaga

SEQ ID NO: 948999 - RNA, 19 nt, Homo sapiens
  misc_RNA (1)...(19): siRNA sense strand
uaaguucauuggcuccuuu

SEQ ID NO: 949000 - RNA, 19 nt, Homo sapiens
  misc_RNA (1)...(19): siRNA sense strand
cuacacaagccugguauua

SEQ ID NO: 949001 - RNA, 19 nt, Homo sapiens
  misc_RNA (1)...(19): siRNA sense strand
guguuggccuccuuuagua

SEQ ID NO: 949002 - RNA, 19 nt, Homo sapiens
  misc_RNA (1)...(19): siRNA sense strand
ggacuacacaagccuggua

SEQ ID NO: 949003 - RNA, 19 nt, Homo sapiens
  misc_RNA (1)...(19): siRNA sense strand
ccaaggaauugaugaguac

SEQ ID NO: 949004 - RNA, 19 nt, Homo sapiens
  misc_RNA (1)...(19): siRNA sense strand
ggaagcgacccauggcaaa

SEQ ID NO: 949005 - RNA, 19 nt, Homo sapiens
  misc_RNA (1)...(19): siRNA sense strand
ucaaaugcacagaguguaa

SEQ ID NO: 949006 - RNA, 19 nt, Homo sapiens
  misc_RNA (1)...(19): siRNA sense strand
gcaguguucucuuugaaac

SEQ ID NO: 949007 - RNA, 19 nt, Homo sapiens
  misc_RNA (1)...(19): siRNA sense strand
gucauuauguuccuagguu

SEQ ID NO: 949008 - RNA, 19 nt, Homo sapiens
  misc_RNA (1)...(19): siRNA sense strand
aaacgaagaaaucaacuug

SEQ ID NO: 949009 - RNA, 19 nt, Homo sapiens
  misc_RNA (1)...(19): siRNA sense strand
aagcauagaggauuucuga

SEQ ID NO: 949010 - RNA, 19 nt, Homo sapiens
  misc_RNA (1)...(19): siRNA sense strand
cgucaaaguuucaaaugca

SEQ ID NO: 949011 - RNA, 19 nt, Homo sapiens
  misc_RNA (1)...(19): siRNA sense strand
gcagaagaccagagaaucu

SEQ ID NO: 949012 - RNA, 19 nt, Homo sapiens
  misc_RNA (1)...(19): siRNA sense strand
gcccuccucuugcagguaa

SEQ ID NO: 949013 - RNA, 19 nt, Homo sapiens
  misc_RNA (1)...(19): siRNA sense strand
cggaagauguuaacgucaa

SEQ ID NO: 949014 - RNA, 19 nt, Homo sapiens
  misc_RNA (1)...(19): siRNA sense strand
uggcaaugcuaucaacuau

SEQ ID NO: 949015 - RNA, 19 nt, Homo sapiens
  misc_RNA (1)...(19): siRNA sense strand
ccauuaugcuggcuguuau

SEQ ID NO: 949016 - RNA, 19 nt, Homo sapiens
  misc_RNA (1)...(19): siRNA sense strand
gcaaacuccaaauauauuc

SEQ ID NO: 949017 - RNA, 19 nt, Homo sapiens
  misc_RNA (1)...(19): siRNA sense strand
gcuaaagaccaaggaauug

SEQ ID NO: 949018 - RNA, 19 nt, Homo sapiens
  misc_RNA (1)...(19): siRNA sense strand
ggcuuucguugauauguuu

SEQ ID NO: 949019 - RNA, 19 nt, Homo sapiens
  misc_RNA (1)...(19): siRNA sense strand
cgaauucaguacuucuuca

SEQ ID NO: 949020 - RNA, 19 nt, Homo sapiens
  misc_RNA (1)...(19): siRNA sense strand
gaccucgaauucaguacuu

SEQ ID NO: 949021 - RNA, 19 nt, Homo sapiens
  misc_RNA (1)...(19): siRNA sense strand
guuauggcuuucguugaua

SEQ ID NO: 949022 - RNA, 19 nt, Homo sapiens
  misc_RNA (1)...(19): siRNA sense strand
uagcaguguucucuuugaa

SEQ ID NO: 949023 - RNA, 19 nt, Homo sapiens
  misc_RNA (1)...(19): siRNA sense strand
ucugaacccuugagcaaau

SEQ ID NO: 949024 - RNA, 19 nt, Homo sapiens
  misc_RNA (1)...(19): siRNA sense strand
aaacagaagaugauucaag

SEQ ID NO: 949025 - RNA, 19 nt, Homo sapiens
  misc_RNA (1)...(19): siRNA sense strand
uguuagcaguguucucuuu

SEQ ID NO: 949026 - RNA, 19 nt, Homo sapiens
  misc_RNA (1)...(19): siRNA sense strand
accaaggaauugaugagua

SEQ ID NO: 949027 - RNA, 19 nt, Homo sapiens
  misc_RNA (1)...(19): siRNA sense strand
gaaugguguuggccuccuu

SEQ ID NO: 949028 - RNA, 19 nt, Homo sapiens
  misc_RNA (1)...(19): siRNA sense strand
ccucagaaagagaaacuaa

SEQ ID NO: 949029 - RNA, 19 nt, Homo sapiens
  misc_RNA (1)...(19): siRNA sense strand
ccucgugggugcaccaaga

SEQ ID NO: 949030 - RNA, 19 nt, Homo sapiens
  misc_RNA (1)...(19): siRNA sense strand
uuauuaugcugucuuggaa

SEQ ID NO: 949031 - RNA, 19 nt, Homo sapiens
  misc_RNA (1)...(19): siRNA sense strand
ucagaaagagaaacuaaca

SEQ ID NO: 949032 - RNA, 19 nt, Homo sapiens
  misc_RNA (1)...(19): siRNA sense strand
cauguucaauggagugugu

SEQ ID NO: 949033 - RNA, 19 nt, Homo sapiens
  misc_RNA (1)...(19): siRNA sense strand
caaccugcaacccgccuua

SEQ ID NO: 949034 - RNA, 19 nt, Homo sapiens
  misc_RNA (1)...(19): siRNA sense strand
guaccucacuaugggauuc

SEQ ID NO: 949035 - RNA, 19 nt, Homo sapiens
  misc_RNA (1)...(19): siRNA sense strand
uaggccuucuguaggauua

SEQ ID NO: 949036 - RNA, 19 nt, Homo sapiens
  misc_RNA (1)...(19): siRNA sense strand
aaccauaauuggcaaauac

SEQ ID NO: 949037 - RNA, 19 nt, Homo sapiens
  misc_RNA (1)...(19): siRNA sense strand
gaugaguacucggcagcuu

SEQ ID NO: 949038 - RNA, 19 nt, Homo sapiens
  misc_RNA (1)...(19): siRNA sense strand
aaucuaaacauucggaaga

SEQ ID NO: 949039 - RNA, 19 nt, Homo sapiens
  misc_RNA (1)...(19): siRNA sense strand
gcguguggcugcucauugg

SEQ ID NO: 949040 - RNA, 19 nt, Homo sapiens
  misc_RNA (1)...(19): siRNA sense strand
uguuauggcuuucguugau

SEQ ID NO: 949041 - RNA, 19 nt, Homo sapiens
  misc_RNA (1)...(19): siRNA sense strand
ucauuauguuccuagguuu

SEQ ID NO: 949042 - RNA, 19 nt, Homo sapiens
  misc_RNA (1)...(19): siRNA sense strand
caaggcagaagaccagaga

SEQ ID NO: 949043 - RNA, 19 nt, Homo sapiens
  misc_RNA (1)...(19): siRNA sense strand
uggagugugucaccucuug

SEQ ID NO: 949044 - RNA, 19 nt, Homo sapiens
  misc_RNA (1)...(19): siRNA sense strand
ucuguaggauuaauugcaa

SEQ ID NO: 949045 - RNA, 19 nt, Homo sapiens
  misc_RNA (1)...(19): siRNA sense strand
cuaaagaccaaggaauuga

SEQ ID NO: 949046 - RNA, 19 nt, Homo sapiens
  misc_RNA (1)...(19): siRNA sense strand
uaugcuggcuguuauguac

SEQ ID NO: 949047 - RNA, 19 nt, Homo sapiens
  misc_RNA (1)...(19): siRNA sense strand
gaaauucagcaaauauucc

SEQ ID NO: 949048 - RNA, 19 nt, Homo sapiens
  misc_RNA (1)...(19): siRNA sense strand
gaaaaugcaaggcagaaga

SEQ ID NO: 949049 - RNA, 19 nt, Homo sapiens
  misc_RNA (1)...(19): siRNA sense strand
uuagcaguguucucuuuga

SEQ ID NO: 949050 - RNA, 19 nt, Homo sapiens
  misc_RNA (1)...(19): siRNA sense strand
uucaguacuucuucaguuu

SEQ ID NO: 949051 - RNA, 19 nt, Homo sapiens
  misc_RNA (1)...(19): siRNA sense strand
gguguuggccuccuuuagu

SEQ ID NO: 949052 - RNA, 19 nt, Homo sapiens
  misc_RNA (1)...(19): siRNA sense strand
aaucugaacccuugagcaa

SEQ ID NO: 949053 - RNA, 19 nt, Homo sapiens
  misc_RNA (1)...(19): siRNA sense strand
gaagcgacccauggcaaau

SEQ ID NO: 949054 - RNA, 19 nt, Homo sapiens
  misc_RNA (1)...(19): siRNA sense strand
ugggauucauuacagguuu

SEQ ID NO: 949055 - RNA, 19 nt, Homo sapiens
  misc_RNA (1)...(19): siRNA sense strand
acagugaaauagcauggau

SEQ ID NO: 949056 - RNA, 19 nt, Homo sapiens
  misc_RNA (1)...(19): siRNA sense strand
gguccuguaaguaguguuu

SEQ ID NO: 949057 - RNA, 19 nt, Homo sapiens
  misc_RNA (1)...(19): siRNA sense strand
ggauuucugauauaucugu

SEQ ID NO: 949058 - RNA, 19 nt, Homo sapiens
  misc_RNA (1)...(19): siRNA sense strand
gaugauucaagcccaaaga

SEQ ID NO: 949059 - RNA, 19 nt, Homo sapiens
  misc_RNA (1)...(19): siRNA sense strand
cauaauuggcaaauacuuc

SEQ ID NO: 949060 - RNA, 19 nt, Homo sapiens
  misc_RNA (1)...(19): siRNA sense strand
caaaacagaagaugauuca

SEQ ID NO: 949061 - RNA, 19 nt, Homo sapiens
  misc_RNA (1)...(19): siRNA sense strand
guaguguuuuggugaauaa

SEQ ID NO: 949062 - RNA, 19 nt, Homo sapiens
  misc_RNA (1)...(19): siRNA sense strand
ggcaaugcuaucaacuaua

SEQ ID NO: 949063 - RNA, 19 nt, Homo sapiens
  misc_RNA (1)...(19): siRNA sense strand
auucaguacuucuucaguu

SEQ ID NO: 949064 - RNA, 19 nt, Homo sapiens
  misc_RNA (1)...(19): siRNA sense strand
aaauaagacuggcaaaaca

SEQ ID NO: 949065 - RNA, 19 nt, Homo sapiens
  misc_RNA (1)...(19): siRNA sense strand
cuucuuggcccuccucuug

SEQ ID NO: 949066 - RNA, 19 nt, Homo sapiens
  misc_RNA (1)...(19): siRNA sense strand
cagaguguaaccucagaaa

SEQ ID NO: 949067 - RNA, 19 nt, Homo sapiens
  misc_RNA (1)...(19): siRNA sense strand
uaccuacagugaaauagca

SEQ ID NO: 949068 - RNA, 19 nt, Homo sapiens
  misc_RNA (1)...(19): siRNA sense strand
cacagaguguaaccucaga

SEQ ID NO: 949069 - RNA, 19 nt, Homo sapiens
  misc_RNA (1)...(19): siRNA sense strand
ggaguguggcccaguucuu

SEQ ID NO: 949070 - RNA, 19 nt, Homo sapiens
  misc_RNA (1)...(19): siRNA sense strand
uaaagaccaaggaauugau

SEQ ID NO: 949071 - RNA, 19 nt, Homo sapiens
  misc_RNA (1)...(19): siRNA sense strand
uuauauucuuggcuccaua

SEQ ID NO: 949072 - RNA, 19 nt, Homo sapiens
  misc_RNA (1)...(19): siRNA sense strand
gauucaagcccaaagaaaa

SEQ ID NO: 949073 - RNA, 19 nt, Homo sapiens
  misc_RNA (1)...(19): siRNA sense strand
gaaguccuguuuucuuaag

SEQ ID NO: 949074 - RNA, 19 nt, Homo sapiens
  misc_RNA (1)...(19): siRNA sense strand
guggcugguucccucauga

SEQ ID NO: 949075 - RNA, 19 nt, Homo sapiens
  misc_RNA (1)...(19): siRNA sense strand
uggcuccuuucaaucagua

SEQ ID NO: 949076 - RNA, 19 nt, Homo sapiens
  misc_RNA (1)...(19): siRNA sense strand
gaacuauacugcagauuau

SEQ ID NO: 949077 - RNA, 19 nt, Homo sapiens
  misc_RNA (1)...(19): siRNA sense strand
gaagcaagcucugcagaaa

SEQ ID NO: 949078 - RNA, 19 nt, Homo sapiens
  misc_RNA (1)...(19): siRNA sense strand
ggaacuauacugcagauua

SEQ ID NO: 949079 - RNA, 19 nt, Homo sapiens
  misc_RNA (1)...(19): siRNA sense strand
ggaccaggcuaucauauca

SEQ ID NO: 949080 - RNA, 19 nt, Homo sapiens
  misc_RNA (1)...(19): siRNA sense strand
gggaggagcuuuacuaacu

SEQ ID NO: 949081 - RNA, 19 nt, Homo sapiens
  misc_RNA (1)...(19): siRNA sense strand
ccuuauagcugcacagaaa

SEQ ID NO: 949082 - RNA, 19 nt, Homo sapiens
  misc_RNA (1)...(19): siRNA sense strand
ggaggagcuuuacuaacua

SEQ ID NO: 949083 - RNA, 19 nt, Homo sapiens
  misc_RNA (1)...(19): siRNA sense strand
agacaacacuacaaacuga

SEQ ID NO: 949084 - RNA, 19 nt, Homo sapiens
  misc_RNA (1)...(19): siRNA sense strand
ggagagaacgucauccaaa

SEQ ID NO: 949085 - RNA, 19 nt, Homo sapiens
  misc_RNA (1)...(19): siRNA sense strand
ucaggaaguuuacauugaa

SEQ ID NO: 949086 - RNA, 19 nt, Homo sapiens
  misc_RNA (1)...(19): siRNA sense strand
cagagaagauugcacaagu

SEQ ID NO: 949087 - RNA, 19 nt, Homo sapiens
  misc_RNA (1)...(19): siRNA sense strand
ccucaugugcuuugaaaua

SEQ ID NO: 949088 - RNA, 19 nt, Homo sapiens
  misc_RNA (1)...(19): siRNA sense strand
acaaauaugccaccucaaa

SEQ ID NO: 949089 - RNA, 19 nt, Homo sapiens
  misc_RNA (1)...(19): siRNA sense strand
gaagccauaagaagaaauu

SEQ ID NO: 949090 - RNA, 19 nt, Homo sapiens
  misc_RNA (1)...(19): siRNA sense strand
cggaauaucuggagcucaa

SEQ ID NO: 949091 - RNA, 19 nt, Homo sapiens
  misc_RNA (1)...(19): siRNA sense strand
uuaauauguuggcuccuua

SEQ ID NO: 949092 - RNA, 19 nt, Homo sapiens
  misc_RNA (1)...(19): siRNA sense strand
ggaaguuuacauugaauug

SEQ ID NO: 949093 - RNA, 19 nt, Homo sapiens
  misc_RNA (1)...(19): siRNA sense strand
gcagcaacaucccuaacau

SEQ ID NO: 949094 - RNA, 19 nt, Homo sapiens
  misc_RNA (1)...(19): siRNA sense strand
gagagaacgucauccaaaa

SEQ ID NO: 949095 - RNA, 19 nt, Homo sapiens
  misc_RNA (1)...(19): siRNA sense strand
cauaucauguugccuuuca

SEQ ID NO: 949096 - RNA, 19 nt, Homo sapiens
  misc_RNA (1)...(19): siRNA sense strand
agaagugguuaauauguug

SEQ ID NO: 949097 - RNA, 19 nt, Homo sapiens
  misc_RNA (1)...(19): siRNA sense strand
ggccauugcuucuaacagu

SEQ ID NO: 949098 - RNA, 19 nt, Homo sapiens
  misc_RNA (1)...(19): siRNA sense strand
ccagaagccauaagaagaa

SEQ ID NO: 949099 - RNA, 19 nt, Homo sapiens
  misc_RNA (1)...(19): siRNA sense strand
gccauugcuucuaacagua

SEQ ID NO: 949100 - RNA, 19 nt, Homo sapiens
  misc_RNA (1)...(19): siRNA sense strand
cgaauagaagugguuaaua

SEQ ID NO: 949101 - RNA, 19 nt, Homo sapiens
  misc_RNA (1)...(19): siRNA sense strand
uauuaggacuggaagagaa

SEQ ID NO: 949102 - RNA, 19 nt, Homo sapiens
  misc_RNA (1)...(19): siRNA sense strand
ucaauaaaauccaccauga

SEQ ID NO: 949103 - RNA, 19 nt, Homo sapiens
  misc_RNA (1)...(19): siRNA sense strand
gaagacaaaacuccuuaua

SEQ ID NO: 949104 - RNA, 19 nt, Homo sapiens
  misc_RNA (1)...(19): siRNA sense strand
guuaauauguuggcuccuu

SEQ ID NO: 949105 - RNA, 19 nt, Homo sapiens
  misc_RNA (1)...(19): siRNA sense strand
accaugagcugaaccaguu

SEQ ID NO: 949106 - RNA, 19 nt, Homo sapiens
  misc_RNA (1)...(19): siRNA sense strand
gcagacaacacuacaaacu

SEQ ID NO: 949107 - RNA, 19 nt, Homo sapiens
  misc_RNA (1)...(19): siRNA sense strand
caugugcuuugaaauauuc

SEQ ID NO: 949108 - RNA, 19 nt, Homo sapiens
  misc_RNA (1)...(19): siRNA sense strand
gaggaacuauacugcagau

SEQ ID NO: 949109 - RNA, 19 nt, Homo sapiens
  misc_RNA (1)...(19): siRNA sense strand
cagaagccauaagaagaaa

SEQ ID NO: 949110 - RNA, 19 nt, Homo sapiens
  misc_RNA (1)...(19): siRNA sense strand
gugcagacaacacuacaaa

SEQ ID NO: 949111 - RNA, 19 nt, Homo sapiens
  misc_RNA (1)...(19): siRNA sense strand
uauagaagcagagaagauu

SEQ ID NO: 949112 - RNA, 19 nt, Homo sapiens
  misc_RNA (1)...(19): siRNA sense strand
gaggagcuuuacuaacuag

SEQ ID NO: 949113 - RNA, 19 nt, Homo sapiens
  misc_RNA (1)...(19): siRNA sense strand
agcaagcucugcagaaaga

SEQ ID NO: 949114 - RNA, 19 nt, Homo sapiens
  misc_RNA (1)...(19): siRNA sense strand
ggacuccucaugugcuuug

SEQ ID NO: 949115 - RNA, 19 nt, Homo sapiens
  misc_RNA (1)...(19): siRNA sense strand
cagcagaaagugauggaaa

SEQ ID NO: 949116 - RNA, 19 nt, Homo sapiens
  misc_RNA (1)...(19): siRNA sense strand
gauuaugacaagaccuuaa

SEQ ID NO: 949117 - RNA, 19 nt, Homo sapiens
  misc_RNA (1)...(19): siRNA sense strand
aaaugugccuuguggaaca

SEQ ID NO: 949118 - RNA, 19 nt, Homo sapiens
  misc_RNA (1)...(19): siRNA sense strand
caaaaucccagaagccaua

SEQ ID NO: 949119 - RNA, 19 nt, Homo sapiens
  misc_RNA (1)...(19): siRNA sense strand
gauaucgugaggaacuaua

SEQ ID NO: 949120 - RNA, 19 nt, Homo sapiens
  misc_RNA (1)...(19): siRNA sense strand
cuuaugcaguguuugauau

SEQ ID NO: 949121 - RNA, 19 nt, Homo sapiens
  misc_RNA (1)...(19): siRNA sense strand
uauguuggcuccuuaugca

SEQ ID NO: 949122 - RNA, 19 nt, Homo sapiens
  misc_RNA (1)...(19): siRNA sense strand
gaaagacuuaaaccucaug

SEQ ID NO: 949123 - RNA, 19 nt, Homo sapiens
  misc_RNA (1)...(19): siRNA sense strand
auauuaugcugcacacaaa

SEQ ID NO: 949124 - RNA, 19 nt, Homo sapiens
  misc_RNA (1)...(19): siRNA sense strand
caacacuacaaacugauga

SEQ ID NO: 949125 - RNA, 19 nt, Homo sapiens
  misc_RNA (1)...(19): siRNA sense strand
ccucaaacaagcacaaguu

SEQ ID NO: 949126 - RNA, 19 nt, Homo sapiens
  misc_RNA (1)...(19): siRNA sense strand
agagaagauugcacaagug

SEQ ID NO: 949127 - RNA, 19 nt, Homo sapiens
  misc_RNA (1)...(19): siRNA sense strand
uucaggaaguuuacauuga

SEQ ID NO: 949128 - RNA, 19 nt, Homo sapiens
  misc_RNA (1)...(19): siRNA sense strand
caaagagagcacagguuga

SEQ ID NO: 949129 - RNA, 19 nt, Homo sapiens
  misc_RNA (1)...(19): siRNA sense strand
gggucaugaucuauauuga

SEQ ID NO: 949130 - RNA, 19 nt, Homo sapiens
  misc_RNA (1)...(19): siRNA sense strand
caaacaagcacaaguugac

SEQ ID NO: 949131 - RNA, 19 nt, Homo sapiens
  misc_RNA (1)...(19): siRNA sense strand
cauguugccuuucauuacu

SEQ ID NO: 949132 - RNA, 19 nt, Homo sapiens
  misc_RNA (1)...(19): siRNA sense strand
gagaagacaaaacuccuua

SEQ ID NO: 949133 - RNA, 19 nt, Homo sapiens
  misc_RNA (1)...(19): siRNA sense strand
gaacgucauccaaaacaaa

SEQ ID NO: 949134 - RNA, 19 nt, Homo sapiens
  misc_RNA (1)...(19): siRNA sense strand
caggaaguuuacauugaau

SEQ ID NO: 949135 - RNA, 19 nt, Homo sapiens
  misc_RNA (1)...(19): siRNA sense strand
gaccgaauagaagugguua

SEQ ID NO: 949136 - RNA, 19 nt, Homo sapiens
  misc_RNA (1)...(19): siRNA sense strand
gauauuaggacuggaagag

SEQ ID NO: 949137 - RNA, 19 nt, Homo sapiens
  misc_RNA (1)...(19): siRNA sense strand
aaaggcaguuauagaagca

SEQ ID NO: 949138 - RNA, 19 nt, Homo sapiens
  misc_RNA (1)...(19): siRNA sense strand
ugaagcaagcucugcagaa

SEQ ID NO: 949139 - RNA, 19 nt, Homo sapiens
  misc_RNA (1)...(19): siRNA sense strand
ugaucuauauugaccgaau

SEQ ID NO: 949140 - RNA, 19 nt, Homo sapiens
  misc_RNA (1)...(19): siRNA sense strand
ccauugcuucuaacaguaa

SEQ ID NO: 949141 - RNA, 19 nt, Homo sapiens
  misc_RNA (1)...(19): siRNA sense strand
gcagaugcugaauauuaug

SEQ ID NO: 949142 - RNA, 19 nt, Homo sapiens
  misc_RNA (1)...(19): siRNA sense strand
aaauucgguuucagcagaa

SEQ ID NO: 949143 - RNA, 19 nt, Homo sapiens
  misc_RNA (1)...(19): siRNA sense strand
cccagaagccauaagaaga

SEQ ID NO: 949144 - RNA, 19 nt, Homo sapiens
  misc_RNA (1)...(19): siRNA sense strand
uguuugauaucgugaggaa

SEQ ID NO: 949145 - RNA, 19 nt, Homo sapiens
  misc_RNA (1)...(19): siRNA sense strand
gcagagaagauugcacaag

SEQ ID NO: 949146 - RNA, 19 nt, Homo sapiens
  misc_RNA (1)...(19): siRNA sense strand
ucagauauuaggacuggaa

SEQ ID NO: 949147 - RNA, 19 nt, Homo sapiens
  misc_RNA (1)...(19): siRNA sense strand
cucaugugcuuugaaauau

SEQ ID NO: 949148 - RNA, 19 nt, Homo sapiens
  misc_RNA (1)...(19): siRNA sense strand
accaggccauugcuucuaa

SEQ ID NO: 949149 - RNA, 19 nt, Homo sapiens
  misc_RNA (1)...(19): siRNA sense strand
caaauaugccaccucaaac

SEQ ID NO: 949150 - RNA, 19 nt, Homo sapiens
  misc_RNA (1)...(19): siRNA sense strand
agagaaagcgaaagcagau

SEQ ID NO: 949151 - RNA, 19 nt, Homo sapiens
  misc_RNA (1)...(19): siRNA sense strand
guucugcagugcccacaca

SEQ ID NO: 949152 - RNA, 19 nt, Homo sapiens
  misc_RNA (1)...(19): siRNA sense strand
aaagcucacuccccucuaa

SEQ ID NO: 949153 - RNA, 19 nt, Homo sapiens
  misc_RNA (1)...(19): siRNA sense strand
aaauaugccaccucaaaca

SEQ ID NO: 949154 - RNA, 19 nt, Homo sapiens
  misc_RNA (1)...(19): siRNA sense strand
cagauuaugacaagaccuu

SEQ ID NO: 949155 - RNA, 19 nt, Homo sapiens
  misc_RNA (1)...(19): siRNA sense strand
cuccucaugugcuuugaaa

SEQ ID NO: 949156 - RNA, 19 nt, Homo sapiens
  misc_RNA (1)...(19): siRNA sense strand
aauauuaugcugcacacaa

SEQ ID NO: 949157 - RNA, 19 nt, Homo sapiens
  misc_RNA (1)...(19): siRNA sense strand
agaaagacuuaaaccucau

SEQ ID NO: 949158 - RNA, 19 nt, Homo sapiens
  misc_RNA (1)...(19): siRNA sense strand
uuacuacguucagaucugu

SEQ ID NO: 949159 - RNA, 19 nt, Homo sapiens
  misc_RNA (1)...(19): siRNA sense strand
uaucauguugccuuucauu

SEQ ID NO: 949160 - RNA, 19 nt, Homo sapiens
  misc_RNA (1)...(19): siRNA sense strand
caggcuaucauaucauguu

SEQ ID NO: 949161 - RNA, 19 nt, Homo sapiens
  misc_RNA (1)...(19): siRNA sense strand
guucguggacuccucaugu

SEQ ID NO: 949162 - RNA, 19 nt, Homo sapiens
  misc_RNA (1)...(19): siRNA sense strand
cagcaacaucccuaacaug

SEQ ID NO: 949163 - RNA, 19 nt, Homo sapiens
  misc_RNA (1)...(19): siRNA sense strand
gcaguuauagaagcagaga

SEQ ID NO: 949164 - RNA, 19 nt, Homo sapiens
  misc_RNA (1)...(19): siRNA sense strand
ccgaauagaagugguuaau

SEQ ID NO: 949165 - RNA, 19 nt, Homo sapiens
  misc_RNA (1)...(19): siRNA sense strand
aagcugagacagagaggaa

SEQ ID NO: 949166 - RNA, 19 nt, Homo sapiens
  misc_RNA (1)...(19): siRNA sense strand
agacaaaacuccuuauagc

SEQ ID NO: 949167 - RNA, 19 nt, Homo sapiens
  misc_RNA (1)...(19): siRNA sense strand
ccuuaugcaguguuugaua

SEQ ID NO: 949168 - RNA, 19 nt, Homo sapiens
  misc_RNA (1)...(19): siRNA sense strand
aauggaggcugagaagaca

SEQ ID NO: 949169 - RNA, 19 nt, Homo sapiens
  misc_RNA (1)...(19): siRNA sense strand
acaguaagaucuauuuugg

SEQ ID NO: 949170 - RNA, 19 nt, Homo sapiens
  misc_RNA (1)...(19): siRNA sense strand
cagacaacacuacaaacug

SEQ ID NO: 949171 - RNA, 19 nt, Homo sapiens
  misc_RNA (1)...(19): siRNA sense strand
guuaauggaggcugagaag

SEQ ID NO: 949172 - RNA, 19 nt, Homo sapiens
  misc_RNA (1)...(19): siRNA sense strand
cuucuaacaguaagaucua

SEQ ID NO: 949173 - RNA, 19 nt, Homo sapiens
  misc_RNA (1)...(19): siRNA sense strand
uaauggaggcugagaagac

SEQ ID NO: 949174 - RNA, 19 nt, Homo sapiens
  misc_RNA (1)...(19): siRNA sense strand
ggcagcaacaucccuaaca

SEQ ID NO: 949175 - RNA, 19 nt, Homo sapiens
  misc_RNA (1)...(19): siRNA sense strand
guggacuccucaugugcuu

SEQ ID NO: 949176 - RNA, 19 nt, Homo sapiens
  misc_RNA (1)...(19): siRNA sense strand
gcagagggaugccauuauu

SEQ ID NO: 949177 - RNA, 19 nt, Homo sapiens
  misc_RNA (1)...(19): siRNA sense strand
ggucguagcuuucaucugu

SEQ ID NO: 949178 - RNA, 19 nt, Homo sapiens
  misc_RNA (1)...(19): siRNA sense strand
gugaaugccuccucaagua

SEQ ID NO: 949179 - RNA, 19 nt, Homo sapiens
  misc_RNA (1)...(19): siRNA sense strand
gcacaccucuggcuggaaa

SEQ ID NO: 949180 - RNA, 19 nt, Homo sapiens
  misc_RNA (1)...(19): siRNA sense strand
cgaaugcacuggucuaaug

SEQ ID NO: 949181 - RNA, 19 nt, Homo sapiens
  misc_RNA (1)...(19): siRNA sense strand
gggcuuaaguggaaugauu

SEQ ID NO: 949182 - RNA, 19 nt, Homo sapiens
  misc_RNA (1)...(19): siRNA sense strand
guggaaagauugaucaguu

SEQ ID NO: 949183 - RNA, 19 nt, Homo sapiens
  misc_RNA (1)...(19): siRNA sense strand
gguagaauguccagaugaa

SEQ ID NO: 949184 - RNA, 19 nt, Homo sapiens
  misc_RNA (1)...(19): siRNA sense strand
gaacaugugauuuggaaga

SEQ ID NO: 949185 - RNA, 19 nt, Homo sapiens
  misc_RNA (1)...(19): siRNA sense strand
gcgaacaugugauuuggaa

SEQ ID NO: 949186 - RNA, 19 nt, Homo sapiens
  misc_RNA (1)...(19): siRNA sense strand
gggaugccauuauuacuug

SEQ ID NO: 949187 - RNA, 19 nt, Homo sapiens
  misc_RNA (1)...(19): siRNA sense strand
gcuggaaaguggucuauuc

SEQ ID NO: 949188 - RNA, 19 nt, Homo sapiens
  misc_RNA (1)...(19): siRNA sense strand
ggaaaagcaucacucauga

SEQ ID NO: 949189 - RNA, 19 nt, Homo sapiens
  misc_RNA (1)...(19): siRNA sense strand
aaaccgggcuuccaaagug

SEQ ID NO: 949190 - RNA, 19 nt, Homo sapiens
  misc_RNA (1)...(19): siRNA sense strand
aagcaucacucaugaagga

SEQ ID NO: 949191 - RNA, 19 nt, Homo sapiens
  misc_RNA (1)...(19): siRNA sense strand
gagaaugccaccuuucaga

SEQ ID NO: 949192 - RNA, 19 nt, Homo sapiens
  misc_RNA (1)...(19): siRNA sense strand
ugccaucgcucccaucauu

SEQ ID NO: 949193 - RNA, 19 nt, Homo sapiens
  misc_RNA (1)...(19): siRNA sense strand
gaacgcgccuuggcaucuu

SEQ ID NO: 949194 - RNA, 19 nt, Homo sapiens
  misc_RNA (1)...(19): siRNA sense strand
cgaugaagauucgaaaugu

SEQ ID NO: 949195 - RNA, 19 nt, Homo sapiens
  misc_RNA (1)...(19): siRNA sense strand
caucauugcugcugucaag

SEQ ID NO: 949196 - RNA, 19 nt, Homo sapiens
  misc_RNA (1)...(19): siRNA sense strand
caacccaucugugagaaug

SEQ ID NO: 949197 - RNA, 19 nt, Homo sapiens
  misc_RNA (1)...(19): siRNA sense strand
ccuggaagaugguuuggaa

SEQ ID NO: 949198 - RNA, 19 nt, Homo sapiens
  misc_RNA (1)...(19): siRNA sense strand
ggaagaggaagcaguggaa

SEQ ID NO: 949199 - RNA, 19 nt, Homo sapiens
  misc_RNA (1)...(19): siRNA sense strand
ccugaggaauucauaguug

SEQ ID NO: 949200 - RNA, 19 nt, Homo sapiens
  misc_RNA (1)...(19): siRNA sense strand
gcacugcaagcaugcguuu

SEQ ID NO: 949201 - RNA, 19 nt, Homo sapiens
  misc_RNA (1)...(19): siRNA sense strand
gagaaggcguucagagacu

SEQ ID NO: 949202 - RNA, 19 nt, Homo sapiens
  misc_RNA (1)...(19): siRNA sense strand
caugugauuuggaagaguu

SEQ ID NO: 949203 - RNA, 19 nt, Homo sapiens
  misc_RNA (1)...(19): siRNA sense strand
gaaggucagagcccaguga

SEQ ID NO: 949204 - RNA, 19 nt, Homo sapiens
  misc_RNA (1)...(19): siRNA sense strand
gaugaagauucgaaauguc

SEQ ID NO: 949205 - RNA, 19 nt, Homo sapiens
  misc_RNA (1)...(19): siRNA sense strand
caacaaugcccaagcugau

SEQ ID NO: 949206 - RNA, 19 nt, Homo sapiens
  misc_RNA (1)...(19): siRNA sense strand
ccacaugaaggucugcuuu

SEQ ID NO: 949207 - RNA, 19 nt, Homo sapiens
  misc_RNA (1)...(19): siRNA sense strand
ggaagaugguuuggaagag

SEQ ID NO: 949208 - RNA, 19 nt, Homo sapiens
  misc_RNA (1)...(19): siRNA sense strand
ccagagcgaucuucagacu

SEQ ID NO: 949209 - RNA, 19 nt, Homo sapiens
  misc_RNA (1)...(19): siRNA sense strand
agaagucaguacccagaaa

SEQ ID NO: 949210 - RNA, 19 nt, Homo sapiens
  misc_RNA (1)...(19): siRNA sense strand
cagagggaugccauuauua

SEQ ID NO: 949211 - RNA, 19 nt, Homo sapiens
  misc_RNA (1)...(19): siRNA sense strand
gaaaccgggcuuccaaagu

SEQ ID NO: 949212 - RNA, 19 nt, Homo sapiens
  misc_RNA (1)...(19): siRNA sense strand
gaagucaguacccagaaau

SEQ ID NO: 949213 - RNA, 19 nt, Homo sapiens
  misc_RNA (1)...(19): siRNA sense strand
caugacaguuuaccagauc

SEQ ID NO: 949214 - RNA, 19 nt, Homo sapiens
  misc_RNA (1)...(19): siRNA sense strand
uuucagagguaccaaggaa

SEQ ID NO: 949215 - RNA, 19 nt, Homo sapiens
  misc_RNA (1)...(19): siRNA sense strand
guaucuugcugcagagaga

SEQ ID NO: 949216 - RNA, 19 nt, Homo sapiens
  misc_RNA (1)...(19): siRNA sense strand
gcagguaccagcaguggau

SEQ ID NO: 949217 - RNA, 19 nt, Homo sapiens
  misc_RNA (1)...(19): siRNA sense strand
ccacccuccugauacauga

SEQ ID NO: 949218 - RNA, 19 nt, Homo sapiens
  misc_RNA (1)...(19): siRNA sense strand
ugccacacuugucaacaua

SEQ ID NO: 949219 - RNA, 19 nt, Homo sapiens
  misc_RNA (1)...(19): siRNA sense strand
gcucaaagcaaaggagaug

SEQ ID NO: 949220 - RNA, 19 nt, Homo sapiens
  misc_RNA (1)...(19): siRNA sense strand
gaagaggaagcaguggaaa

SEQ ID NO: 949221 - RNA, 19 nt, Homo sapiens
  misc_RNA (1)...(19): siRNA sense strand
gaaacuucuuggugcucaa

SEQ ID NO: 949222 - RNA, 19 nt, Homo sapiens
  misc_RNA (1)...(19): siRNA sense strand
ucauuaugcugaaccacuu

SEQ ID NO: 949223 - RNA, 19 nt, Homo sapiens
  misc_RNA (1)...(19): siRNA sense strand
guccugcaguggaaagauu

SEQ ID NO: 949224 - RNA, 19 nt, Homo sapiens
  misc_RNA (1)...(19): siRNA sense strand
cgacacgucucugcuacug

SEQ ID NO: 949225 - RNA, 19 nt, Homo sapiens
  misc_RNA (1)...(19): siRNA sense strand
ggacaacauauuccugaca

SEQ ID NO: 949226 - RNA, 19 nt, Homo sapiens
  misc_RNA (1)...(19): siRNA sense strand
caaccgguaucucuucaac

SEQ ID NO: 949227 - RNA, 19 nt, Homo sapiens
  misc_RNA (1)...(19): siRNA sense strand
gcaguggaaagauugauca

SEQ ID NO: 949228 - RNA, 19 nt, Homo sapiens
  misc_RNA (1)...(19): siRNA sense strand
aaacccagcucaaccucau

SEQ ID NO: 949229 - RNA, 19 nt, Homo sapiens
  misc_RNA (1)...(19): siRNA sense strand
gagccacaccuuccacaug

SEQ ID NO: 949230 - RNA, 19 nt, Homo sapiens
  misc_RNA (1)...(19): siRNA sense strand
caucacucaugaaggaaga

SEQ ID NO: 949231 - RNA, 19 nt, Homo sapiens
  misc_RNA (1)...(19): siRNA sense strand
ccacugaaagcccuguuug

SEQ ID NO: 949232 - RNA, 19 nt, Homo sapiens
  misc_RNA (1)...(19): siRNA sense strand
uggaaagauugaucaguuc

SEQ ID NO: 949233 - RNA, 19 nt, Homo sapiens
  misc_RNA (1)...(19): siRNA sense strand
cugaggaauucauaguuga

SEQ ID NO: 949234 - RNA, 19 nt, Homo sapiens
  misc_RNA (1)...(19): siRNA sense strand
gaaaagacacacagcacaa

SEQ ID NO: 949235 - RNA, 19 nt, Homo sapiens
  misc_RNA (1)...(19): siRNA sense strand
ggaugaaaccaugacaguu

SEQ ID NO: 949236 - RNA, 19 nt, Homo sapiens
  misc_RNA (1)...(19): siRNA sense strand
caugcaggagcacaaguua

SEQ ID NO: 949237 - RNA, 19 nt, Homo sapiens
  misc_RNA (1)...(19): siRNA sense strand
ccacacuugucaacauaag

SEQ ID NO: 949238 - RNA, 19 nt, Homo sapiens
  misc_RNA (1)...(19): siRNA sense strand
ucauucaacccaucuguga

SEQ ID NO: 949239 - RNA, 19 nt, Homo sapiens
  misc_RNA (1)...(19): siRNA sense strand
gugguagaauguccagaug

SEQ ID NO: 949240 - RNA, 19 nt, Homo sapiens
  misc_RNA (1)...(19): siRNA sense strand
gguguuagccagagaagag

SEQ ID NO: 949241 - RNA, 19 nt, Homo sapiens
  misc_RNA (1)...(19): siRNA sense strand
gaagccacccuggaagaug

SEQ ID NO: 949242 - RNA, 19 nt, Homo sapiens
  misc_RNA (1)...(19): siRNA sense strand
gggaaaagcaucacucaug

SEQ ID NO: 949243 - RNA, 19 nt, Homo sapiens
  misc_RNA (1)...(19): siRNA sense strand
ggacucuucccuggucgua

SEQ ID NO: 949244 - RNA, 19 nt, Homo sapiens
  misc_RNA (1)...(19): siRNA sense strand
ugcaggagcacaaguuaaa

SEQ ID NO: 949245 - RNA, 19 nt, Homo sapiens
  misc_RNA (1)...(19): siRNA sense strand
gugccacacuugucaacau

SEQ ID NO: 949246 - RNA, 19 nt, Homo sapiens
  misc_RNA (1)...(19): siRNA sense strand
caugaaggaagagagauuu

SEQ ID NO: 949247 - RNA, 19 nt, Homo sapiens
  misc_RNA (1)...(19): siRNA sense strand
ucguagcuuucaucuguaa

SEQ ID NO: 949248 - RNA, 19 nt, Homo sapiens
  misc_RNA (1)...(19): siRNA sense strand
ccaugacaguuuaccagau

SEQ ID NO: 949249 - RNA, 19 nt, Homo sapiens
  misc_RNA (1)...(19): siRNA sense strand
uaugauuccugccaaaugc

SEQ ID NO: 949250 - RNA, 19 nt, Homo sapiens
  misc_RNA (1)...(19): siRNA sense strand
guaugauuccugccaaaug

SEQ ID NO: 949251 - RNA, 19 nt, Homo sapiens
  misc_RNA (1)...(19): siRNA sense strand
caguaugauuccugccaaa

SEQ ID NO: 949252 - RNA, 19 nt, Homo sapiens
  misc_RNA (1)...(19): siRNA sense strand
gaaugcacuggucuaaugu

SEQ ID NO: 949253 - RNA, 19 nt, Homo sapiens
  misc_RNA (1)...(19): siRNA sense strand
gugagaaugccaccuuuca

SEQ ID NO: 949254 - RNA, 19 nt, Homo sapiens
  misc_RNA (1)...(19): siRNA sense strand
gcuguguacuccuccagau

SEQ ID NO: 949255 - RNA, 19 nt, Homo sapiens
  misc_RNA (1)...(19): siRNA sense strand
guccagagcgaucuucaga

SEQ ID NO: 949256 - RNA, 19 nt, Homo sapiens
  misc_RNA (1)...(19): siRNA sense strand
ucaccaguuuccgcuguaa

SEQ ID NO: 949257 - RNA, 19 nt, Homo sapiens
  misc_RNA (1)...(19): siRNA sense strand
ccucgaagcaaucaaaaua

SEQ ID NO: 949258 - RNA, 19 nt, Homo sapiens
  misc_RNA (1)...(19): siRNA sense strand
uggagaaggcguucagaga

SEQ ID NO: 949259 - RNA, 19 nt, Homo sapiens
  misc_RNA (1)...(19): siRNA sense strand
ccgaugaagauucgaaaug

SEQ ID NO: 949260 - RNA, 19 nt, Homo sapiens
  misc_RNA (1)...(19): siRNA sense strand
ggugaaugccuccucaagu

SEQ ID NO: 949261 - RNA, 19 nt, Homo sapiens
  misc_RNA (1)...(19): siRNA sense strand
ggagcacaaguuaaagguu

SEQ ID NO: 949262 - RNA, 19 nt, Homo sapiens
  misc_RNA (1)...(19): siRNA sense strand
uuaaagagaggaaacuucu

SEQ ID NO: 949263 - RNA, 19 nt, Homo sapiens
  misc_RNA (1)...(19): siRNA sense strand
guagaauguccagaugaaa

SEQ ID NO: 949264 - RNA, 19 nt, Homo sapiens
  misc_RNA (1)...(19): siRNA sense strand
ucugguccauugaaaggaa

SEQ ID NO: 949265 - RNA, 19 nt, Homo sapiens
  misc_RNA (1)...(19): siRNA sense strand
ggugguagaauguccagau

SEQ ID NO: 949266 - RNA, 19 nt, Homo sapiens
  misc_RNA (1)...(19): siRNA sense strand
uggaagaugguuuggaaga

SEQ ID NO: 949267 - RNA, 19 nt, Homo sapiens
  misc_RNA (1)...(19): siRNA sense strand
guugcgaacaugugauuug

SEQ ID NO: 949268 - RNA, 19 nt, Homo sapiens
  misc_RNA (1)...(19): siRNA sense strand
ucgcagggacgcaccauau

SEQ ID NO: 949269 - RNA, 19 nt, Homo sapiens
  misc_RNA (1)...(19): siRNA sense strand
gguccugaaugagaacugu

SEQ ID NO: 949270 - RNA, 19 nt, Homo sapiens
  misc_RNA (1)...(19): siRNA sense strand
gaaaagcaucacucaugaa

SEQ ID NO: 949271 - RNA, 19 nt, Homo sapiens
  misc_RNA (1)...(19): siRNA sense strand
ccuguuugcuggcgacauc

SEQ ID NO: 949272 - RNA, 19 nt, Homo sapiens
  misc_RNA (1)...(19): siRNA sense strand
gaagauucgaaaugucagu

SEQ ID NO: 949273 - RNA, 19 nt, Homo sapiens
  misc_RNA (1)...(19): siRNA sense strand
uagaauguccagaugaaag

SEQ ID NO: 949274 - RNA, 19 nt, Homo sapiens
  misc_RNA (1)...(19): siRNA sense strand
guacccagaaaucaucuuc

SEQ ID NO: 949275 - RNA, 19 nt, Homo sapiens
  misc_RNA (1)...(19): siRNA sense strand
acaugaagccacccuggaa

SEQ ID NO: 949276 - RNA, 19 nt, Homo sapiens
  misc_RNA (1)...(19): siRNA sense strand
gcagacaucuugcucauaa

SEQ ID NO: 949277 - RNA, 19 nt, Homo sapiens
  misc_RNA (1)...(19): siRNA sense strand
ggaagaaguuguuauuaca

SEQ ID NO: 949278 - RNA, 19 nt, Homo sapiens
  misc_RNA (1)...(19): siRNA sense strand
ggacagagaaggaggagaa

SEQ ID NO: 949279 - RNA, 19 nt, Homo sapiens
  misc_RNA (1)...(19): siRNA sense strand
gcucauaaacuuacaguau

SEQ ID NO: 949280 - RNA, 19 nt, Homo sapiens
  misc_RNA (1)...(19): siRNA sense strand
gcaaagcacggacagagaa

SEQ ID NO: 949281 - RNA, 19 nt, Homo sapiens
  misc_RNA (1)...(19): siRNA sense strand
ccaaaaugcuggcuuuaaa

SEQ ID NO: 949282 - RNA, 19 nt, Homo sapiens
  misc_RNA (1)...(19): siRNA sense strand
ggagugcacugagccaugu

SEQ ID NO: 949283 - RNA, 19 nt, Homo sapiens
  misc_RNA (1)...(19): siRNA sense strand
uggaagaaguuguuauuac

SEQ ID NO: 949284 - RNA, 19 nt, Homo sapiens
  misc_RNA (1)...(19): siRNA sense strand
uagcuucacucaauguuag

SEQ ID NO: 949285 - RNA, 19 nt, Homo sapiens
  misc_RNA (1)...(19): siRNA sense strand
ggaaaacuguaaaggcaaa

SEQ ID NO: 949286 - RNA, 19 nt, Homo sapiens
  misc_RNA (1)...(19): siRNA sense strand
cauggaagaaguuguuauu

SEQ ID NO: 949287 - RNA, 19 nt, Homo sapiens
  misc_RNA (1)...(19): siRNA sense strand
caaccaugcagacaucuug

SEQ ID NO: 949288 - RNA, 19 nt, Homo sapiens
  misc_RNA (1)...(19): siRNA sense strand
gcgaggugguagccuuuga

SEQ ID NO: 949289 - RNA, 19 nt, Homo sapiens
  misc_RNA (1)...(19): siRNA sense strand
caucuugcucauaaacuua

SEQ ID NO: 949290 - RNA, 19 nt, Homo sapiens
  misc_RNA (1)...(19): siRNA sense strand
gagccaggccuaugcaauc

SEQ ID NO: 949291 - RNA, 19 nt, Homo sapiens
  misc_RNA (1)...(19): siRNA sense strand
caaaagauacugcaacguu

SEQ ID NO: 949292 - RNA, 19 nt, Homo sapiens
  misc_RNA (1)...(19): siRNA sense strand
gcccaaccaugcagacauc

SEQ ID NO: 949293 - RNA, 19 nt, Homo sapiens
  misc_RNA (1)...(19): siRNA sense strand
aaacaucguagucauggaa

SEQ ID NO: 949294 - RNA, 19 nt, Homo sapiens
  misc_RNA (1)...(19): siRNA sense strand
caagaccauuaaagacugu

SEQ ID NO: 949295 - RNA, 19 nt, Homo sapiens
  misc_RNA (1)...(19): siRNA sense strand
uacaguauguuucagaagu

SEQ ID NO: 949296 - RNA, 19 nt, Homo sapiens
  misc_RNA (1)...(19): siRNA sense strand
aaucagugcuggugucucu

SEQ ID NO: 949297 - RNA, 19 nt, Homo sapiens
  misc_RNA (1)...(19): siRNA sense strand
gugcuggugucucucuaga

SEQ ID NO: 949298 - RNA, 19 nt, Homo sapiens
  misc_RNA (1)...(19): siRNA sense strand
acaucuugcucauaaacuu

SEQ ID NO: 949299 - RNA, 19 nt, Homo sapiens
  misc_RNA (1)...(19): siRNA sense strand
auuaaugaccgaacagaaa

SEQ ID NO: 949300 - RNA, 19 nt, Homo sapiens
  misc_RNA (1)...(19): siRNA sense strand
acaguauguuucagaagug

SEQ ID NO: 949301 - RNA, 19 nt, Homo sapiens
  misc_RNA (1)...(19): siRNA sense strand
ccauucacaagaccauuaa

SEQ ID NO: 949302 - RNA, 19 nt, Homo sapiens
  misc_RNA (1)...(19): siRNA sense strand
caaaaugcuggcuuuaaaa

SEQ ID NO: 949303 - RNA, 19 nt, Homo sapiens
  misc_RNA (1)...(19): siRNA sense strand
gaagaaguuguuauuacac

SEQ ID NO: 949304 - RNA, 19 nt, Homo sapiens
  misc_RNA (1)...(19): siRNA sense strand
gaccauuaaagacuguaaa

SEQ ID NO: 949305 - RNA, 19 nt, Homo sapiens
  misc_RNA (1)...(19): siRNA sense strand
ucacaagaccauuaaagac

SEQ ID NO: 949306 - RNA, 19 nt, Homo sapiens
  misc_RNA (1)...(19): siRNA sense strand
cagacaucuugcucauaaa

SEQ ID NO: 949307 - RNA, 19 nt, Homo sapiens
  misc_RNA (1)...(19): siRNA sense strand
cuuacaguauguuucagaa

SEQ ID NO: 949308 - RNA, 19 nt, Homo sapiens
  misc_RNA (1)...(19): siRNA sense strand
cuagcuucacucaauguua

SEQ ID NO: 949309 - RNA, 19 nt, Homo sapiens
  misc_RNA (1)...(19): siRNA sense strand
acugagccauguacgcaaa

SEQ ID NO: 949310 - RNA, 19 nt, Homo sapiens
  misc_RNA (1)...(19): siRNA sense strand
ccaggccuaugcaaucagu

SEQ ID NO: 949311 - RNA, 19 nt, Homo sapiens
  misc_RNA (1)...(19): siRNA sense strand
gggcgaggugguagccuuu

SEQ ID NO: 949312 - RNA, 19 nt, Homo sapiens
  misc_RNA (1)...(19): siRNA sense strand
cacaagaccauuaaagacu

SEQ ID NO: 949313 - RNA, 19 nt, Homo sapiens
  misc_RNA (1)...(19): siRNA sense strand
caucguagucauggaagaa

SEQ ID NO: 949314 - RNA, 19 nt, Homo sapiens
  misc_RNA (1)...(19): siRNA sense strand
aaagauacugcaacguuca

SEQ ID NO: 949315 - RNA, 19 nt, Homo sapiens
  misc_RNA (1)...(19): siRNA sense strand
guauguuucagaaguggaa

SEQ ID NO: 949316 - RNA, 19 nt, Homo sapiens
  misc_RNA (1)...(19): siRNA sense strand
gauacugcaacguucacaa

SEQ ID NO: 949317 - RNA, 19 nt, Homo sapiens
  misc_RNA (1)...(19): siRNA sense strand
aagcugaacuucccaaaua

SEQ ID NO: 949318 - RNA, 19 nt, Homo sapiens
  misc_RNA (1)...(19): siRNA sense strand
caacaggccuucuuucaau

SEQ ID NO: 949319 - RNA, 19 nt, Homo sapiens
  misc_RNA (1)...(19): siRNA sense strand
gaggaacugucgcugcuua

SEQ ID NO: 949320 - RNA, 19 nt, Homo sapiens
  misc_RNA (1)...(19): siRNA sense strand
ggucagggauucucauaca

SEQ ID NO: 949321 - RNA, 19 nt, Homo sapiens
  misc_RNA (1)...(19): siRNA sense strand
caagggaugugauguugga

SEQ ID NO: 949322 - RNA, 19 nt, Homo sapiens
  misc_RNA (1)...(19): siRNA sense strand
guggagaaguuuauuuaug

SEQ ID NO: 949323 - RNA, 19 nt, Homo sapiens
  misc_RNA (1)...(19): siRNA sense strand
caggagagcucaggcuuga

SEQ ID NO: 949324 - RNA, 19 nt, Homo sapiens
  misc_RNA (1)...(19): siRNA sense strand
ggguggagaaguuuauuua

SEQ ID NO: 949325 - RNA, 19 nt, Homo sapiens
  misc_RNA (1)...(19): siRNA sense strand
gcuccaagauguucaaacu

SEQ ID NO: 949326 - RNA, 19 nt, Homo sapiens
  misc_RNA (1)...(19): siRNA sense strand
gagaaccacccugauguuu

SEQ ID NO: 949327 - RNA, 19 nt, Homo sapiens
  misc_RNA (1)...(19): siRNA sense strand
gaaccacccugauguuuuc

SEQ ID NO: 949328 - RNA, 19 nt, Homo sapiens
  misc_RNA (1)...(19): siRNA sense strand
ccaaauauaaguccuucaa

SEQ ID NO: 949329 - RNA, 19 nt, Homo sapiens
  misc_RNA (1)...(19): siRNA sense strand
gcugaacuucccaaauaua

SEQ ID NO: 949330 - RNA, 19 nt, Homo sapiens
  misc_RNA (1)...(19): siRNA sense strand
gcacagcuggucagggauu

SEQ ID NO: 949331 - RNA, 19 nt, Homo sapiens
  misc_RNA (1)...(19): siRNA sense strand
gauaugagaaggccuccaa

SEQ ID NO: 949332 - RNA, 19 nt, Homo sapiens
  misc_RNA (1)...(19): siRNA sense strand
gcaaugcccuaugguggau

SEQ ID NO: 949333 - RNA, 19 nt, Homo sapiens
  misc_RNA (1)...(19): siRNA sense strand
ggagaaguuuauuuaugag

SEQ ID NO: 949334 - RNA, 19 nt, Homo sapiens
  misc_RNA (1)...(19): siRNA sense strand
ucacuguguucaagaccua

SEQ ID NO: 949335 - RNA, 19 nt, Homo sapiens
  misc_RNA (1)...(19): siRNA sense strand
agaugaggguggagaaguu

SEQ ID NO: 949336 - RNA, 19 nt, Homo sapiens
  misc_RNA (1)...(19): siRNA sense strand
ccaacaggccuucuuucaa

SEQ ID NO: 949337 - RNA, 19 nt, Homo sapiens
  misc_RNA (1)...(19): siRNA sense strand
gcaagcugaucauggaacu

SEQ ID NO: 949338 - RNA, 19 nt, Homo sapiens
  misc_RNA (1)...(19): siRNA sense strand
cccaagggaugugauguug

SEQ ID NO: 949339 - RNA, 19 nt, Homo sapiens
  misc_RNA (1)...(19): siRNA sense strand
cugaacuucccaaauauaa

SEQ ID NO: 949340 - RNA, 19 nt, Homo sapiens
  misc_RNA (1)...(19): siRNA sense strand
gaugaggguggagaaguuu

SEQ ID NO: 949341 - RNA, 19 nt, Homo sapiens
  misc_RNA (1)...(19): siRNA sense strand
gacaguauggcucugauca

SEQ ID NO: 949342 - RNA, 19 nt, Homo sapiens
  misc_RNA (1)...(19): siRNA sense strand
uaugagaaccacccugaug

SEQ ID NO: 949343 - RNA, 19 nt, Homo sapiens
  misc_RNA (1)...(19): siRNA sense strand
ggagagcucaggcuugaac

SEQ ID NO: 949344 - RNA, 19 nt, Homo sapiens
  misc_RNA (1)...(19): siRNA sense strand
gaacugucgcugcuuacca

SEQ ID NO: 949345 - RNA, 19 nt, Homo sapiens
  misc_RNA (1)...(19): siRNA sense strand
cuaauaagaagaggaaauc

SEQ ID NO: 949346 - RNA, 19 nt, Homo sapiens
  misc_RNA (1)...(19): siRNA sense strand
gguggagaaguuuauuuau

SEQ ID NO: 949347 - RNA, 19 nt, Homo sapiens
  misc_RNA (1)...(19): siRNA sense strand
ccaaacgcaugaccuucca

SEQ ID NO: 949348 - RNA, 19 nt, Homo sapiens
  misc_RNA (1)...(19): siRNA sense strand
ugagaaccacccugauguu

SEQ ID NO: 949349 - RNA, 19 nt, Homo sapiens
  misc_RNA (1)...(19): siRNA sense strand
gacuacaacguggauauug

SEQ ID NO: 949350 - RNA, 19 nt, Homo sapiens
  misc_RNA (1)...(19): siRNA sense strand
acauaucacuguguucaag

SEQ ID NO: 949351 - RNA, 19 nt, Homo sapiens
  misc_RNA (1)...(19): siRNA sense strand
ggauucucauacagcaaga

SEQ ID NO: 949352 - RNA, 19 nt, Homo sapiens
  misc_RNA (1)...(19): siRNA sense strand
guguucaagaccuauauuu

SEQ ID NO: 949353 - RNA, 19 nt, Homo sapiens
  misc_RNA (1)...(19): siRNA sense strand
ccuaauaagaagaggaaau

SEQ ID NO: 949354 - RNA, 19 nt, Homo sapiens
  misc_RNA (1)...(19): siRNA sense strand
ggagaaggaaaacauauca

SEQ ID NO: 949355 - RNA, 19 nt, Homo sapiens
  misc_RNA (1)...(19): siRNA sense strand
guucaagaccuauauuucc

SEQ ID NO: 949356 - RNA, 19 nt, Homo sapiens
  misc_RNA (1)...(19): siRNA sense strand
ccuuccagaugcccaaguu

SEQ ID NO: 949357 - RNA, 19 nt, Homo sapiens
  misc_RNA (1)...(19): siRNA sense strand
acgcaugaccuuccagaug

SEQ ID NO: 949358 - RNA, 19 nt, Homo sapiens
  misc_RNA (1)...(19): siRNA sense strand
acagcucaauggaucacuu

SEQ ID NO: 949359 - RNA, 19 nt, Homo sapiens
  misc_RNA (1)...(19): siRNA sense strand
agacuacaacguggauauu

SEQ ID NO: 949360 - RNA, 19 nt, Homo sapiens
  misc_RNA (1)...(19): siRNA sense strand
ggacaguauggcucugauc

SEQ ID NO: 949361 - RNA, 19 nt, Homo sapiens
  misc_RNA (1)...(19): siRNA sense strand
gcccuaugguggauaugag

SEQ ID NO: 949362 - RNA, 19 nt, Homo sapiens
  misc_RNA (1)...(19): siRNA sense strand
uagacuacaacguggauau

SEQ ID NO: 949363 - RNA, 19 nt, Homo sapiens
  misc_RNA (1)...(19): siRNA sense strand
ggagaaggcucaaguguac

SEQ ID NO: 949364 - RNA, 19 nt, Homo sapiens
  misc_RNA (1)...(19): siRNA sense strand
cagaagagauggcagacuu

SEQ ID NO: 949365 - RNA, 19 nt, Homo sapiens
  misc_RNA (1)...(19): siRNA sense strand
uguccaggcuccauccuua

SEQ ID NO: 949366 - RNA, 19 nt, Homo sapiens
  misc_RNA (1)...(19): siRNA sense strand
ggcgaaauaucuucauugu

SEQ ID NO: 949367 - RNA, 19 nt, Homo sapiens
  misc_RNA (1)...(19): siRNA sense strand
gggagaaggcucaagugua

SEQ ID NO: 949368 - RNA, 19 nt, Homo sapiens
  misc_RNA (1)...(19): siRNA sense strand
ggguuuaggucccagaaau

SEQ ID NO: 949369 - RNA, 19 nt, Homo sapiens
  misc_RNA (1)...(19): siRNA sense strand
gggcuaccaucuccuuuca

SEQ ID NO: 949370 - RNA, 19 nt, Homo sapiens
  misc_RNA (1)...(19): siRNA sense strand
cuaccauccugcaaacuug

SEQ ID NO: 949371 - RNA, 19 nt, Homo sapiens
  misc_RNA (1)...(19): siRNA sense strand
caggaggacucucuuacuc

SEQ ID NO: 949372 - RNA, 19 nt, Homo sapiens
  misc_RNA (1)...(19): siRNA sense strand
cauagacucugggcgaaau

SEQ ID NO: 949373 - RNA, 19 nt, Homo sapiens
  misc_RNA (1)...(19): siRNA sense strand
acagggagguagcccaguu

SEQ ID NO: 949374 - RNA, 19 nt, Homo sapiens
  misc_RNA (1)...(19): siRNA sense strand
uggcuucucugcucugugu

SEQ ID NO: 949375 - RNA, 19 nt, Homo sapiens
  misc_RNA (1)...(19): siRNA sense strand
gggcgaaauaucuucauug

SEQ ID NO: 949376 - RNA, 19 nt, Homo sapiens
  misc_RNA (1)...(19): siRNA sense strand
cuaccuggcugacauagac

SEQ ID NO: 949377 - RNA, 19 nt, Homo sapiens
  misc_RNA (1)...(19): siRNA sense strand
gcuaccaucuccuuucacu

SEQ ID NO: 949378 - RNA, 19 nt, Homo sapiens
  misc_RNA (1)...(19): siRNA sense strand
caccaaggcaccauggauu

SEQ ID NO: 949379 - RNA, 19 nt, Homo sapiens
  misc_RNA (1)...(19): siRNA sense strand
gggcuucuccaucuucaug

SEQ ID NO: 949380 - RNA, 19 nt, Homo sapiens
  misc_RNA (1)...(19): siRNA sense strand
cuuccuggcuggacucuca

SEQ ID NO: 949381 - RNA, 19 nt, Homo sapiens
  misc_RNA (1)...(19): siRNA sense strand
gagcgaggccuaggucaag

SEQ ID NO: 949382 - RNA, 19 nt, Homo sapiens
  misc_RNA (1)...(19): siRNA sense strand
uggaaacuccucccucaug

SEQ ID NO: 949383 - RNA, 19 nt, Homo sapiens
  misc_RNA (1)...(19): siRNA sense strand
acacuccucucccugucuu

SEQ ID NO: 949384 - RNA, 19 nt, Homo sapiens
  misc_RNA (1)...(19): siRNA sense strand
guuuaggucccagaaauga

SEQ ID NO: 949385 - RNA, 19 nt, Homo sapiens
  misc_RNA (1)...(19): siRNA sense strand
ccaaggcaccauggauuug

SEQ ID NO: 949386 - RNA, 19 nt, Homo sapiens
  misc_RNA (1)...(19): siRNA sense strand
gcuucuaccuggcugacau

SEQ ID NO: 949387 - RNA, 19 nt, Homo sapiens
  misc_RNA (1)...(19): siRNA sense strand
gagccaugcccugaaucua

SEQ ID NO: 949388 - RNA, 19 nt, Homo sapiens
  misc_RNA (1)...(19): siRNA sense strand
gagcuucaacgucaucaac

SEQ ID NO: 949389 - RNA, 19 nt, Homo sapiens
  misc_RNA (1)...(19): siRNA sense strand
ugggcgaaauaucuucauu

SEQ ID NO: 949390 - RNA, 19 nt, Homo sapiens
  misc_RNA (1)...(19): siRNA sense strand
ggucaagggcuaccaucuc

SEQ ID NO: 949391 - RNA, 19 nt, Homo sapiens
  misc_RNA (1)...(19): siRNA sense strand
ccagggagaaggcucaagu

SEQ ID NO: 949392 - RNA, 19 nt, Homo sapiens
  misc_RNA (1)...(19): siRNA sense strand
ucaacgucaucaacucaca

SEQ ID NO: 949393 - RNA, 19 nt, Homo sapiens
  misc_RNA (1)...(19): siRNA sense strand
gguuuaggucccagaaaug

SEQ ID NO: 949394 - RNA, 19 nt, Homo sapiens
  misc_RNA (1)...(19): siRNA sense strand
cccugaaucuagcagagaa

SEQ ID NO: 949395 - RNA, 19 nt, Homo sapiens
  misc_RNA (1)...(19): siRNA sense strand
ggagccaugcccugaaucu

SEQ ID NO: 949396 - RNA, 19 nt, Homo sapiens
  misc_RNA (1)...(19): siRNA sense strand
ugacacagcccaucuuccu

SEQ ID NO: 949397 - RNA, 19 nt, Homo sapiens
  misc_RNA (1)...(19): siRNA sense strand
guagcccaguucugcuuca

SEQ ID NO: 949398 - RNA, 19 nt, Homo sapiens
  misc_RNA (1)...(19): siRNA sense strand
gcuucaacgucaucaacuc

SEQ ID NO: 949399 - RNA, 19 nt, Homo sapiens
  misc_RNA (1)...(19): siRNA sense strand
gcuccugccaguuucaugu

SEQ ID NO: 949400 - RNA, 19 nt, Homo sapiens
  misc_RNA (1)...(19): siRNA sense strand
gcgaaauaucuucauugug

SEQ ID NO: 949401 - RNA, 19 nt, Homo sapiens
  misc_RNA (1)...(19): siRNA sense strand
ccaccaaggcaccauggau

SEQ ID NO: 949402 - RNA, 19 nt, Homo sapiens
  misc_RNA (1)...(19): siRNA sense strand
gcaaaccagugaacaccuu

SEQ ID NO: 949403 - RNA, 19 nt, Homo sapiens
  misc_RNA (1)...(19): siRNA sense strand
gaaggagagacacaucauu

SEQ ID NO: 949404 - RNA, 19 nt, Homo sapiens
  misc_RNA (1)...(19): siRNA sense strand
ugacaaacggcuccaggua

SEQ ID NO: 949405 - RNA, 19 nt, Homo sapiens
  misc_RNA (1)...(19): siRNA sense strand
cagggcaacugcuacaaga

SEQ ID NO: 949406 - RNA, 19 nt, Homo sapiens
  misc_RNA (1)...(19): siRNA sense strand
cauauggacucagacaguu

SEQ ID NO: 949407 - RNA, 19 nt, Homo sapiens
  misc_RNA (1)...(19): siRNA sense strand
gcagcuccaccuacuguaa

SEQ ID NO: 949408 - RNA, 19 nt, Homo sapiens
  misc_RNA (1)...(19): siRNA sense strand
ggcagcauauggacucaga

SEQ ID NO: 949409 - RNA, 19 nt, Homo sapiens
  misc_RNA (1)...(19): siRNA sense strand
gcauauggacucagacagu

SEQ ID NO: 949410 - RNA, 19 nt, Homo sapiens
  misc_RNA (1)...(19): siRNA sense strand
ugguagauguccagaaugu

SEQ ID NO: 949411 - RNA, 19 nt, Homo sapiens
  misc_RNA (1)...(19): siRNA sense strand
caccuacuguaaccaaaug

SEQ ID NO: 949412 - RNA, 19 nt, Homo sapiens
  misc_RNA (1)...(19): siRNA sense strand
guagauguccagaaugucu

SEQ ID NO: 949413 - RNA, 19 nt, Homo sapiens
  misc_RNA (1)...(19): siRNA sense strand
aaggagagacacaucauug

SEQ ID NO: 949414 - RNA, 19 nt, Homo sapiens
  misc_RNA (1)...(19): siRNA sense strand
gugaagggagcccauaugu

SEQ ID NO: 949415 - RNA, 19 nt, Homo sapiens
  misc_RNA (1)...(19): siRNA sense strand
ccaguccacuuugaugcuu

SEQ ID NO: 949416 - RNA, 19 nt, Homo sapiens
  misc_RNA (1)...(19): siRNA sense strand
cagcagcuccaccuacugu

SEQ ID NO: 949417 - RNA, 19 nt, Homo sapiens
  misc_RNA (1)...(19): siRNA sense strand
caaaccagugaacaccuuu

SEQ ID NO: 949418 - RNA, 19 nt, Homo sapiens
  misc_RNA (1)...(19): siRNA sense strand
gggcggugcaaaccaguga

SEQ ID NO: 949419 - RNA, 19 nt, Homo sapiens
  misc_RNA (1)...(19): siRNA sense strand
cagacugccgccugacaaa

SEQ ID NO: 949420 - RNA, 19 nt, Homo sapiens
  misc_RNA (1)...(19): siRNA sense strand
uguggaggacucuaccuaa

SEQ ID NO: 949421 - RNA, 19 nt, Homo sapiens
  misc_RNA (1)...(19): siRNA sense strand
cuacuguaaccaaaugaug

SEQ ID NO: 949422 - RNA, 19 nt, Homo sapiens
  misc_RNA (1)...(19): siRNA sense strand
ugaagggagcccauaugug

SEQ ID NO: 949423 - RNA, 19 nt, Homo sapiens
  misc_RNA (1)...(19): siRNA sense strand
cgaaggagagacacaucau

SEQ ID NO: 949424 - RNA, 19 nt, Homo sapiens
  misc_RNA (1)...(19): siRNA sense strand
uacuguaaccaaaugauga

SEQ ID NO: 949425 - RNA, 19 nt, Homo sapiens
  misc_RNA (1)...(19): siRNA sense strand
gcaaaccagugaacaccuu

SEQ ID NO: 949426 - RNA, 19 nt, Homo sapiens
  misc_RNA (1)...(19): siRNA sense strand
gaaggagagacacaucauu

SEQ ID NO: 949427 - RNA, 19 nt, Homo sapiens
  misc_RNA (1)...(19): siRNA sense strand
ugacaaacggcuccaggua

SEQ ID NO: 949428 - RNA, 19 nt, Homo sapiens
  misc_RNA (1)...(19): siRNA sense strand
cagggcaacugcuacaaga

SEQ ID NO: 949429 - RNA, 19 nt, Homo sapiens
  misc_RNA (1)...(19): siRNA sense strand
cauauggacucagacaguu

SEQ ID NO: 949430 - RNA, 19 nt, Homo sapiens
  misc_RNA (1)...(19): siRNA sense strand
gcagcuccaccuacuguaa

SEQ ID NO: 949431 - RNA, 19 nt, Homo sapiens
  misc_RNA (1)...(19): siRNA sense strand
ggcagcauauggacucaga

SEQ ID NO: 949432 - RNA, 19 nt, Homo sapiens
  misc_RNA (1)...(19): siRNA sense strand
gcauauggacucagacagu

SEQ ID NO: 949433 - RNA, 19 nt, Homo sapiens
  misc_RNA (1)...(19): siRNA sense strand
ugguagauguccagaaugu

SEQ ID NO: 949434 - RNA, 19 nt, Homo sapiens
  misc_RNA (1)...(19): siRNA sense strand
caccuacuguaaccaaaug

SEQ ID NO: 949435 - RNA, 19 nt, Homo sapiens
  misc_RNA (1)...(19): siRNA sense strand
guagauguccagaaugucu

SEQ ID NO: 949436 - RNA, 19 nt, Homo sapiens
  misc_RNA (1)...(19): siRNA sense strand
aaggagagacacaucauug

SEQ ID NO: 949437 - RNA, 19 nt, Homo sapiens
  misc_RNA (1)...(19): siRNA sense strand
gugaagggagcccauaugu

SEQ ID NO: 949438 - RNA, 19 nt, Homo sapiens
  misc_RNA (1)...(19): siRNA sense strand
ccaguccacuuugaugcuu

SEQ ID NO: 949439 - RNA, 19 nt, Homo sapiens
  misc_RNA (1)...(19): siRNA sense strand
cagcagcuccaccuacugu

SEQ ID NO: 949440 - RNA, 19 nt, Homo sapiens
  misc_RNA (1)...(19): siRNA sense strand
caaaccagugaacaccuuu

SEQ ID NO: 949441 - RNA, 19 nt, Homo sapiens
  misc_RNA (1)...(19): siRNA sense strand
gggcggugcaaaccaguga

SEQ ID NO: 949442 - RNA, 19 nt, Homo sapiens
  misc_RNA (1)...(19): siRNA sense strand
cagacugccgccugacaaa

SEQ ID NO: 949443 - RNA, 19 nt, Homo sapiens
  misc_RNA (1)...(19): siRNA sense strand
uguggaggacucuaccuaa

SEQ ID NO: 949444 - RNA, 19 nt, Homo sapiens
  misc_RNA (1)...(19): siRNA sense strand
cuacuguaaccaaaugaug

SEQ ID NO: 949445 - RNA, 19 nt, Homo sapiens
  misc_RNA (1)...(19): siRNA sense strand
ugaagggagcccauaugug

SEQ ID NO: 949446 - RNA, 19 nt, Homo sapiens
  misc_RNA (1)...(19): siRNA sense strand
cgaaggagagacacaucau

SEQ ID NO: 949447 - RNA, 19 nt, Homo sapiens
  misc_RNA (1)...(19): siRNA sense strand
uacuguaaccaaaugauga

SEQ ID NO: 949448 - RNA, 19 nt, Homo sapiens
  misc_RNA (1)...(19): siRNA sense strand
gcaaaccagugaacaccuu

SEQ ID NO: 949449 - RNA, 19 nt, Homo sapiens
  misc_RNA (1)...(19): siRNA sense strand
gaaggagagacacaucauu

SEQ ID NO: 949450 - RNA, 19 nt, Homo sapiens
  misc_RNA (1)...(19): siRNA sense strand
ugacaaacggcuccaggua

SEQ ID NO: 949451 - RNA, 19 nt, Homo sapiens
  misc_RNA (1)...(19): siRNA sense strand
cagggcaacugcuacaaga

SEQ ID NO: 949452 - RNA, 19 nt, Homo sapiens
  misc_RNA (1)...(19): siRNA sense strand
cauauggacucagacaguu

SEQ ID NO: 949453 - RNA, 19 nt, Homo sapiens
  misc_RNA (1)...(19): siRNA sense strand
gcagcuccaccuacuguaa

SEQ ID NO: 949454 - RNA, 19 nt, Homo sapiens
  misc_RNA (1)...(19): siRNA sense strand
ggcagcauauggacucaga

SEQ ID NO: 949455 - RNA, 19 nt, Homo sapiens
  misc_RNA (1)...(19): siRNA sense strand
gcauauggacucagacagu

SEQ ID NO: 949456 - RNA, 19 nt, Homo sapiens
  misc_RNA (1)...(19): siRNA sense strand
ugguagauguccagaaugu

SEQ ID NO: 949457 - RNA, 19 nt, Homo sapiens
  misc_RNA (1)...(19): siRNA sense strand
caccuacuguaaccaaaug

SEQ ID NO: 949458 - RNA, 19 nt, Homo sapiens
  misc_RNA (1)...(19): siRNA sense strand
guagauguccagaaugucu

SEQ ID NO: 949459 - RNA, 19 nt, Homo sapiens
  misc_RNA (1)...(19): siRNA sense strand
aaggagagacacaucauug

SEQ ID NO: 949460 - RNA, 19 nt, Homo sapiens
  misc_RNA (1)...(19): siRNA sense strand
gugaagggagcccauaugu

SEQ ID NO: 949461 - RNA, 19 nt, Homo sapiens
  misc_RNA (1)...(19): siRNA sense strand
ccaguccacuuugaugcuu

SEQ ID NO: 949462 - RNA, 19 nt, Homo sapiens
  misc_RNA (1)...(19): siRNA sense strand
cagcagcuccaccuacugu

SEQ ID NO: 949463 - RNA, 19 nt, Homo sapiens
  misc_RNA (1)...(19): siRNA sense strand
caaaccagugaacaccuuu

SEQ ID NO: 949464 - RNA, 19 nt, Homo sapiens
  misc_RNA (1)...(19): siRNA sense strand
gggcggugcaaaccaguga

SEQ ID NO: 949465 - RNA, 19 nt, Homo sapiens
  misc_RNA (1)...(19): siRNA sense strand
cagacugccgccugacaaa

SEQ ID NO: 949466 - RNA, 19 nt, Homo sapiens
  misc_RNA (1)...(19): siRNA sense strand
uguggaggacucuaccuaa

SEQ ID NO: 949467 - RNA, 19 nt, Homo sapiens
  misc_RNA (1)...(19): siRNA sense strand
cuacuguaaccaaaugaug

SEQ ID NO: 949468 - RNA, 19 nt, Homo sapiens
  misc_RNA (1)...(19): siRNA sense strand
ugaagggagcccauaugug

SEQ ID NO: 949469 - RNA, 19 nt, Homo sapiens
  misc_RNA (1)...(19): siRNA sense strand
cgaaggagagacacaucau

SEQ ID NO: 949470 - RNA, 19 nt, Homo sapiens
  misc_RNA (1)...(19): siRNA sense strand
uacuguaaccaaaugauga

SEQ ID NO: 949471 - RNA, 19 nt, Homo sapiens
  misc_RNA (1)...(19): siRNA sense strand
gcaaaccagugaacaccuu

SEQ ID NO: 949472 - RNA, 19 nt, Homo sapiens
  misc_RNA (1)...(19): siRNA sense strand
gaaggagagacacaucauu

SEQ ID NO: 949473 - RNA, 19 nt, Homo sapiens
  misc_RNA (1)...(19): siRNA sense strand
ugacaaacggcuccaggua

SEQ ID NO: 949474 - RNA, 19 nt, Homo sapiens
  misc_RNA (1)...(19): siRNA sense strand
cagggcaacugcuacaaga

SEQ ID NO: 949475 - RNA, 19 nt, Homo sapiens
  misc_RNA (1)...(19): siRNA sense strand
cauauggacucagacaguu

SEQ ID NO: 949476 - RNA, 19 nt, Homo sapiens
  misc_RNA (1)...(19): siRNA sense strand
gcagcuccaccuacuguaa

SEQ ID NO: 949477 - RNA, 19 nt, Homo sapiens
  misc_RNA (1)...(19): siRNA sense strand
ggcagcauauggacucaga

SEQ ID NO: 949478 - RNA, 19 nt, Homo sapiens
  misc_RNA (1)...(19): siRNA sense strand
gcauauggacucagacagu

SEQ ID NO: 949479 - RNA, 19 nt, Homo sapiens
  misc_RNA (1)...(19): siRNA sense strand
ugguagauguccagaaugu

SEQ ID NO: 949480 - RNA, 19 nt, Homo sapiens
  misc_RNA (1)...(19): siRNA sense strand
caccuacuguaaccaaaug

SEQ ID NO: 949481 - RNA, 19 nt, Homo sapiens
  misc_RNA (1)...(19): siRNA sense strand
guagauguccagaaugucu

SEQ ID NO: 949482 - RNA, 19 nt, Homo sapiens
  misc_RNA (1)...(19): siRNA sense strand
aaggagagacacaucauug

SEQ ID NO: 949483 - RNA, 19 nt, Homo sapiens
  misc_RNA (1)...(19): siRNA sense strand
gugaagggagcccauaugu

SEQ ID NO: 949484 - RNA, 19 nt, Homo sapiens
  misc_RNA (1)...(19): siRNA sense strand
ccaguccacuuugaugcuu

SEQ ID NO: 949485 - RNA, 19 nt, Homo sapiens
  misc_RNA (1)...(19): siRNA sense strand
cagcagcuccaccuacugu

SEQ ID NO: 949486 - RNA, 19 nt, Homo sapiens
  misc_RNA (1)...(19): siRNA sense strand
caaaccagugaacaccuuu

SEQ ID NO: 949487 - RNA, 19 nt, Homo sapiens
  misc_RNA (1)...(19): siRNA sense strand
gggcggugcaaaccaguga

SEQ ID NO: 949488 - RNA, 19 nt, Homo sapiens
  misc_RNA (1)...(19): siRNA sense strand
cagacugccgccugacaaa

SEQ ID NO: 949489 - RNA, 19 nt, Homo sapiens
  misc_RNA (1)...(19): siRNA sense strand
uguggaggacucuaccuaa

SEQ ID NO: 949490 - RNA, 19 nt, Homo sapiens
  misc_RNA (1)...(19): siRNA sense strand
cuacuguaaccaaaugaug

SEQ ID NO: 949491 - RNA, 19 nt, Homo sapiens
  misc_RNA (1)...(19): siRNA sense strand
ugaagggagcccauaugug

SEQ ID NO: 949492 - RNA, 19 nt, Homo sapiens
  misc_RNA (1)...(19): siRNA sense strand
cgaaggagagacacaucau

SEQ ID NO: 949493 - RNA, 19 nt, Homo sapiens
  misc_RNA (1)...(19): siRNA sense strand
uacuguaaccaaaugauga

SEQ ID NO: 949494 - RNA, 19 nt, Homo sapiens
  misc_RNA (1)...(19): siRNA sense strand
gaacagagcugaauggaaa

SEQ ID NO: 949495 - RNA, 19 nt, Homo sapiens
  misc_RNA (1)...(19): siRNA sense strand
ggaaagugcucaucaguga

SEQ ID NO: 949496 - RNA, 19 nt, Homo sapiens
  misc_RNA (1)...(19): siRNA sense strand
ggaaauugcuguucaguuc

SEQ ID NO: 949497 - RNA, 19 nt, Homo sapiens
  misc_RNA (1)...(19): siRNA sense strand
gaacaucccugaagaaugc

SEQ ID NO: 949498 - RNA, 19 nt, Homo sapiens
  misc_RNA (1)...(19): siRNA sense strand
gaacucacuuguggaauga

SEQ ID NO: 949499 - RNA, 19 nt, Homo sapiens
  misc_RNA (1)...(19): siRNA sense strand
ggaaagacccugggaauuc

SEQ ID NO: 949500 - RNA, 19 nt, Homo sapiens
  misc_RNA (1)...(19): siRNA sense strand
ggaagcagcaugugacuga

SEQ ID NO: 949501 - RNA, 19 nt, Homo sapiens
  misc_RNA (1)...(19): siRNA sense strand
ggaagggcaucuugguuau

SEQ ID NO: 949502 - RNA, 19 nt, Homo sapiens
  misc_RNA (1)...(19): siRNA sense strand
cgacaggcuugcugaauga

SEQ ID NO: 949503 - RNA, 19 nt, Homo sapiens
  misc_RNA (1)...(19): siRNA sense strand
gaugaagacuauaggguau

SEQ ID NO: 949504 - RNA, 19 nt, Homo sapiens
  misc_RNA (1)...(19): siRNA sense strand
gaaagacccugggaauucu

SEQ ID NO: 949505 - RNA, 19 nt, Homo sapiens
  misc_RNA (1)...(19): siRNA sense strand
gcagaacucacuuguggaa

SEQ ID NO: 949506 - RNA, 19 nt, Homo sapiens
  misc_RNA (1)...(19): siRNA sense strand
agacuucacuggugucaga

SEQ ID NO: 949507 - RNA, 19 nt, Homo sapiens
  misc_RNA (1)...(19): siRNA sense strand
gggaggaaauugcuguuca

SEQ ID NO: 949508 - RNA, 19 nt, Homo sapiens
  misc_RNA (1)...(19): siRNA sense strand
caucaacgcagcugagaaa

SEQ ID NO: 949509 - RNA, 19 nt, Homo sapiens
  misc_RNA (1)...(19): siRNA sense strand
caacgcagcugagaaacuc

SEQ ID NO: 949510 - RNA, 19 nt, Homo sapiens
  misc_RNA (1)...(19): siRNA sense strand
gaucuggccucucugugau

SEQ ID NO: 949511 - RNA, 19 nt, Homo sapiens
  misc_RNA (1)...(19): siRNA sense strand
gcaaaugggagcggaagaa

SEQ ID NO: 949512 - RNA, 19 nt, Homo sapiens
  misc_RNA (1)...(19): siRNA sense strand
cuaagcugcuggugaaaga

SEQ ID NO: 949513 - RNA, 19 nt, Homo sapiens
  misc_RNA (1)...(19): siRNA sense strand
gcaggcggaugugaacuug

SEQ ID NO: 949514 - RNA, 19 nt, Homo sapiens
  misc_RNA (1)...(19): siRNA sense strand
gggcugcacuggacguguu

SEQ ID NO: 949515 - RNA, 19 nt, Homo sapiens
  misc_RNA (1)...(19): siRNA sense strand
agaacucacuuguggaaug

SEQ ID NO: 949516 - RNA, 19 nt, Homo sapiens
  misc_RNA (1)...(19): siRNA sense strand
ugaacuuggugaacgcuaa

SEQ ID NO: 949517 - RNA, 19 nt, Homo sapiens
  misc_RNA (1)...(19): siRNA sense strand
acgcuaagcugcuggugaa

SEQ ID NO: 949518 - RNA, 19 nt, Homo sapiens
  misc_RNA (1)...(19): siRNA sense strand
uagcaaagaggagcugaua

SEQ ID NO: 949519 - RNA, 19 nt, Homo sapiens
  misc_RNA (1)...(19): siRNA sense strand
ugaagacuauaggguauga

SEQ ID NO: 949520 - RNA, 19 nt, Homo sapiens
  misc_RNA (1)...(19): siRNA sense strand
gaugaaggacggcaaaugg

SEQ ID NO: 949521 - RNA, 19 nt, Homo sapiens
  misc_RNA (1)...(19): siRNA sense strand
ggacugugaaggccuuauu

SEQ ID NO: 949522 - RNA, 19 nt, Homo sapiens
  misc_RNA (1)...(19): siRNA sense strand
gcaaagaggagcugauagc

SEQ ID NO: 949523 - RNA, 19 nt, Homo sapiens
  misc_RNA (1)...(19): siRNA sense strand
ggaacagagcugaauggaa

SEQ ID NO: 949524 - RNA, 19 nt, Homo sapiens
  misc_RNA (1)...(19): siRNA sense strand
aggaagggcaucuugguua

SEQ ID NO: 949525 - RNA, 19 nt, Homo sapiens
  misc_RNA (1)...(19): siRNA sense strand
gcagaaccuuagcaaagag

SEQ ID NO: 949526 - RNA, 19 nt, Homo sapiens
  misc_RNA (1)...(19): siRNA sense strand
gacccuugcugccggaaga

SEQ ID NO: 949527 - RNA, 19 nt, Homo sapiens
  misc_RNA (1)...(19): siRNA sense strand
gaagcagcaugugacugaa

SEQ ID NO: 949528 - RNA, 19 nt, Homo sapiens
  misc_RNA (1)...(19): siRNA sense strand
ggaacaucccugaagaaug

SEQ ID NO: 949529 - RNA, 19 nt, Homo sapiens
  misc_RNA (1)...(19): siRNA sense strand
ggaggaaauugcuguucag

SEQ ID NO: 949530 - RNA, 19 nt, Homo sapiens
  misc_RNA (1)...(19): siRNA sense strand
aagggcaucuugguuauga

SEQ ID NO: 949531 - RNA, 19 nt, Homo sapiens
  misc_RNA (1)...(19): siRNA sense strand
aagcagaaccuuagcaaag

SEQ ID NO: 949532 - RNA, 19 nt, Homo sapiens
  misc_RNA (1)...(19): siRNA sense strand
ugugaaggccuuauuguuc

SEQ ID NO: 949533 - RNA, 19 nt, Homo sapiens
  misc_RNA (1)...(19): siRNA sense strand
ccuuugggaugaagacuau

SEQ ID NO: 949534 - RNA, 19 nt, Homo sapiens
  misc_RNA (1)...(19): siRNA sense strand
aaugggagcggaagaaguu

SEQ ID NO: 949535 - RNA, 19 nt, Homo sapiens
  misc_RNA (1)...(19): siRNA sense strand
ccaagcaggcggaugugaa

SEQ ID NO: 949536 - RNA, 19 nt, Homo sapiens
  misc_RNA (1)...(19): siRNA sense strand
uugcaaaucugcggaaagu

SEQ ID NO: 949537 - RNA, 19 nt, Homo sapiens
  misc_RNA (1)...(19): siRNA sense strand
agcagaaccuuagcaaaga

SEQ ID NO: 949538 - RNA, 19 nt, Homo sapiens
  misc_RNA (1)...(19): siRNA sense strand
acgacaggcuugcugaaug

SEQ ID NO: 949539 - RNA, 19 nt, Homo sapiens
  misc_RNA (1)...(19): siRNA sense strand
caacaaggaagggcaucuu

SEQ ID NO: 949540 - RNA, 19 nt, Homo sapiens
  misc_RNA (1)...(19): siRNA sense strand
gcugaaugacaacaccuuu

SEQ ID NO: 949541 - RNA, 19 nt, Homo sapiens
  misc_RNA (1)...(19): siRNA sense strand
caggcuugcugaaugacaa

SEQ ID NO: 949542 - RNA, 19 nt, Homo sapiens
  misc_RNA (1)...(19): siRNA sense strand
gugaaugcccaggcccuua

SEQ ID NO: 949543 - RNA, 19 nt, Homo sapiens
  misc_RNA (1)...(19): siRNA sense strand
ccauccaggugauaacaca

SEQ ID NO: 949544 - RNA, 19 nt, Homo sapiens
  misc_RNA (1)...(19): siRNA sense strand
gagcaaggcuucggggaau

SEQ ID NO: 949545 - RNA, 19 nt, Homo sapiens
  misc_RNA (1)...(19): siRNA sense strand
caaggugaccgcugauguc

SEQ ID NO: 949546 - RNA, 19 nt, Homo sapiens
  misc_RNA (1)...(19): siRNA sense strand
cagccucagugccgcagaa

SEQ ID NO: 949547 - RNA, 19 nt, Homo sapiens
  misc_RNA (1)...(19): siRNA sense strand
gaagggcaucuugguuaug

SEQ ID NO: 949548 - RNA, 19 nt, Homo sapiens
  misc_RNA (1)...(19): siRNA sense strand
ccaaggugaccgcugaugu

SEQ ID NO: 949549 - RNA, 19 nt, Homo sapiens
  misc_RNA (1)...(19): siRNA sense strand
gaacuuggugaacgcuaag

SEQ ID NO: 949550 - RNA, 19 nt, Homo sapiens
  misc_RNA (1)...(19): siRNA sense strand
ggacguguuuacggaagag

SEQ ID NO: 949551 - RNA, 19 nt, Homo sapiens
  misc_RNA (1)...(19): siRNA sense strand
ggugauaacacagggaaca

SEQ ID NO: 949552 - RNA, 19 nt, Homo sapiens
  misc_RNA (1)...(19): siRNA sense strand
uggaaagacccugggaauu

SEQ ID NO: 949553 - RNA, 19 nt, Homo sapiens
  misc_RNA (1)...(19): siRNA sense strand
gcggaaagugcucaucagu

SEQ ID NO: 949554 - RNA, 19 nt, Homo sapiens
  misc_RNA (1)...(19): siRNA sense strand
ucuggccucucugugauuu

SEQ ID NO: 949555 - RNA, 19 nt, Homo sapiens
  misc_RNA (1)...(19): siRNA sense strand
gggaccauccaggugauaa

SEQ ID NO: 949556 - RNA, 19 nt, Homo sapiens
  misc_RNA (1)...(19): siRNA sense strand
cauugucggccuccugaaa

SEQ ID NO: 949557 - RNA, 19 nt, Homo sapiens
  misc_RNA (1)...(19): siRNA sense strand
aaagugcucaucagugaca

SEQ ID NO: 949558 - RNA, 19 nt, Homo sapiens
  misc_RNA (1)...(19): siRNA sense strand
ucaugggcaucuccuccuu

SEQ ID NO: 949559 - RNA, 19 nt, Homo sapiens
  misc_RNA (1)...(19): siRNA sense strand
aaagcagaaccuuagcaaa

SEQ ID NO: 949560 - RNA, 19 nt, Homo sapiens
  misc_RNA (1)...(19): siRNA sense strand
agaucuggccucucuguga

SEQ ID NO: 949561 - RNA, 19 nt, Homo sapiens
  misc_RNA (1)...(19): siRNA sense strand
cuacccggaugcaguccuu

SEQ ID NO: 949562 - RNA, 19 nt, Homo sapiens
  misc_RNA (1)...(19): siRNA sense strand
gggaacagagcugaaugga

SEQ ID NO: 949563 - RNA, 19 nt, Homo sapiens
  misc_RNA (1)...(19): siRNA sense strand
ggauguagauuuaccagaa

SEQ ID NO: 949564 - RNA, 19 nt, Homo sapiens
  misc_RNA (1)...(19): siRNA sense strand
ccaaaugauuccaagcaua

SEQ ID NO: 949565 - RNA, 19 nt, Homo sapiens
  misc_RNA (1)...(19): siRNA sense strand
ugaugaggauguagauuua

SEQ ID NO: 949566 - RNA, 19 nt, Homo sapiens
  misc_RNA (1)...(19): siRNA sense strand
caaaugauuccaagcauaa

SEQ ID NO: 949567 - RNA, 19 nt, Homo sapiens
  misc_RNA (1)...(19): siRNA sense strand
aaagaaagggcaaagcuua

SEQ ID NO: 949568 - RNA, 19 nt, Homo sapiens
  misc_RNA (1)...(19): siRNA sense strand
caguaaggauguuaaugua

SEQ ID NO: 949569 - RNA, 19 nt, Homo sapiens
  misc_RNA (1)...(19): siRNA sense strand
gggacuaugucuucauuga

SEQ ID NO: 949570 - RNA, 19 nt, Homo sapiens
  misc_RNA (1)...(19): siRNA sense strand
ggaaagacugggaagauga

SEQ ID NO: 949571 - RNA, 19 nt, Homo sapiens
  misc_RNA (1)...(19): siRNA sense strand
caacauggguggugaugag

SEQ ID NO: 949572 - RNA, 19 nt, Homo sapiens
  misc_RNA (1)...(19): siRNA sense strand
gaaagggcaaagcuuaauu

SEQ ID NO: 949573 - RNA, 19 nt, Homo sapiens
  misc_RNA (1)...(19): siRNA sense strand
gaagacaguaaggauguua

SEQ ID NO: 949574 - RNA, 19 nt, Homo sapiens
  misc_RNA (1)...(19): siRNA sense strand
agaaguagauggagcagau

SEQ ID NO: 949575 - RNA, 19 nt, Homo sapiens
  misc_RNA (1)...(19): siRNA sense strand
gggaagaugauucagauga

SEQ ID NO: 949576 - RNA, 19 nt, Homo sapiens
  misc_RNA (1)...(19): siRNA sense strand
gcaaagugguacgaucgaa

SEQ ID NO: 949577 - RNA, 19 nt, Homo sapiens
  misc_RNA (1)...(19): siRNA sense strand
gugaugaggauguagauuu

SEQ ID NO: 949578 - RNA, 19 nt, Homo sapiens
  misc_RNA (1)...(19): siRNA sense strand
gaugaugauucacaagaca

SEQ ID NO: 949579 - RNA, 19 nt, Homo sapiens
  misc_RNA (1)...(19): siRNA sense strand
acaagacagugaugaugaa

SEQ ID NO: 949580 - RNA, 19 nt, Homo sapiens
  misc_RNA (1)...(19): siRNA sense strand
gagcagaugaugauucaca

SEQ ID NO: 949581 - RNA, 19 nt, Homo sapiens
  misc_RNA (1)...(19): siRNA sense strand
ggacagaucaauuuuaugu

SEQ ID NO: 949582 - RNA, 19 nt, Homo sapiens
  misc_RNA (1)...(19): siRNA sense strand
gaaagacugggaagaugau

SEQ ID NO: 949583 - RNA, 19 nt, Homo sapiens
  misc_RNA (1)...(19): siRNA sense strand
guauugauccaaaugauuc

SEQ ID NO: 949584 - RNA, 19 nt, Homo sapiens
  misc_RNA (1)...(19): siRNA sense strand
aggagaaucuggccaguca

SEQ ID NO: 949585 - RNA, 19 nt, Homo sapiens
  misc_RNA (1)...(19): siRNA sense strand
agaacggacagaucaauuu

SEQ ID NO: 949586 - RNA, 19 nt, Homo sapiens
  misc_RNA (1)...(19): siRNA sense strand
uggagcagaugaugauuca

SEQ ID NO: 949587 - RNA, 19 nt, Homo sapiens
  misc_RNA (1)...(19): siRNA sense strand
gaacggacagaucaauuuu

SEQ ID NO: 949588 - RNA, 19 nt, Homo sapiens
  misc_RNA (1)...(19): siRNA sense strand
gauguagauuuaccagaag

SEQ ID NO: 949589 - RNA, 19 nt, Homo sapiens
  misc_RNA (1)...(19): siRNA sense strand
gagaaucuggccagucaug

SEQ ID NO: 949590 - RNA, 19 nt, Homo sapiens
  misc_RNA (1)...(19): siRNA sense strand
agugucgacuucaauaauu

SEQ ID NO: 949591 - RNA, 19 nt, Homo sapiens
  misc_RNA (1)...(19): siRNA sense strand
acaguaaggauguuaaugu

SEQ ID NO: 949592 - RNA, 19 nt, Homo sapiens
  misc_RNA (1)...(19): siRNA sense strand
cacaagacagugaugauga

SEQ ID NO: 949593 - RNA, 19 nt, Homo sapiens
  misc_RNA (1)...(19): siRNA sense strand
ggaggaagugauaauuuua

SEQ ID NO: 949594 - RNA, 19 nt, Homo sapiens
  misc_RNA (1)...(19): siRNA sense strand
aagggacuaugucuucauu

SEQ ID NO: 949595 - RNA, 19 nt, Homo sapiens
  misc_RNA (1)...(19): siRNA sense strand
cggaggaagugauaauuuu

SEQ ID NO: 949596 - RNA, 19 nt, Homo sapiens
  misc_RNA (1)...(19): siRNA sense strand
uggaaagacugggaagaug

SEQ ID NO: 949597 - RNA, 19 nt, Homo sapiens
  misc_RNA (1)...(19): siRNA sense strand
ccagucauggccaagguua

SEQ ID NO: 949598 - RNA, 19 nt, Homo sapiens
  misc_RNA (1)...(19): siRNA sense strand
cagaugaugauucacaaga

SEQ ID NO: 949599 - RNA, 19 nt, Homo sapiens
  misc_RNA (1)...(19): siRNA sense strand
uaaaagaacggacagauca

SEQ ID NO: 949600 - RNA, 19 nt, Homo sapiens
  misc_RNA (1)...(19): siRNA sense strand
gaacaacauggguggugau

SEQ ID NO: 949601 - RNA, 19 nt, Homo sapiens
  misc_RNA (1)...(19): siRNA sense strand
aaagggcaaagcuuaauug

SEQ ID NO: 949602 - RNA, 19 nt, Homo sapiens
  misc_RNA (1)...(19): siRNA sense strand
aagaaagggcaaagcuuaa

SEQ ID NO: 949603 - RNA, 19 nt, Homo sapiens
  misc_RNA (1)...(19): siRNA sense strand
ucacuguauugauccaaau

SEQ ID NO: 949604 - RNA, 19 nt, Homo sapiens
  misc_RNA (1)...(19): siRNA sense strand
cugggaagaugauucagau

SEQ ID NO: 949605 - RNA, 19 nt, Homo sapiens
  misc_RNA (1)...(19): siRNA sense strand
gaucgaagggacuaugucu

SEQ ID NO: 949606 - RNA, 19 nt, Homo sapiens
  misc_RNA (1)...(19): siRNA sense strand
ugaagacaguaaggauguu

SEQ ID NO: 949607 - RNA, 19 nt, Homo sapiens
  misc_RNA (1)...(19): siRNA sense strand
ucggaggaagugauaauuu

SEQ ID NO: 949608 - RNA, 19 nt, Homo sapiens
  misc_RNA (1)...(19): siRNA sense strand
aauccaaacuuacauucag

SEQ ID NO: 949609 - RNA, 19 nt, Homo sapiens
  misc_RNA (1)...(19): siRNA sense strand
guagauggagcagaugaug

SEQ ID NO: 949610 - RNA, 19 nt, Homo sapiens
  misc_RNA (1)...(19): siRNA sense strand
caagacagugaugaugaaa

SEQ ID NO: 949611 - RNA, 19 nt, Homo sapiens
  misc_RNA (1)...(19): siRNA sense strand
agacugggaagaugauuca

SEQ ID NO: 949612 - RNA, 19 nt, Homo sapiens
  misc_RNA (1)...(19): siRNA sense strand
ggguggugaugaggaugua

SEQ ID NO: 949613 - RNA, 19 nt, Homo sapiens
  misc_RNA (1)...(19): siRNA sense strand
cuuagugucgacuucaaua

SEQ ID NO: 949614 - RNA, 19 nt, Homo sapiens
  misc_RNA (1)...(19): siRNA sense strand
aagaacggacagaucaauu

SEQ ID NO: 949615 - RNA, 19 nt, Homo sapiens
  misc_RNA (1)...(19): siRNA sense strand
agauuuaccagaaguagau

SEQ ID NO: 949616 - RNA, 19 nt, Homo sapiens
  misc_RNA (1)...(19): siRNA sense strand
cauggguggugaugaggau

SEQ ID NO: 949617 - RNA, 19 nt, Homo sapiens
  misc_RNA (1)...(19): siRNA sense strand
gacaguaaggauguuaaug

SEQ ID NO: 949618 - RNA, 19 nt, Homo sapiens
  misc_RNA (1)...(19): siRNA sense strand
ggccaagguuaacaaaaga

SEQ ID NO: 949619 - RNA, 19 nt, Homo sapiens
  misc_RNA (1)...(19): siRNA sense strand
uagauggagcagaugauga

SEQ ID NO: 949620 - RNA, 19 nt, Homo sapiens
  misc_RNA (1)...(19): siRNA sense strand
gaaguagauggagcagaug

SEQ ID NO: 949621 - RNA, 19 nt, Homo sapiens
  misc_RNA (1)...(19): siRNA sense strand
aaagaacggacagaucaau

SEQ ID NO: 949622 - RNA, 19 nt, Homo sapiens
  misc_RNA (1)...(19): siRNA sense strand
ugucucggaggaagugaua

SEQ ID NO: 949623 - RNA, 19 nt, Homo sapiens
  misc_RNA (1)...(19): siRNA sense strand
agaaagggcaaagcuuaau

SEQ ID NO: 949624 - RNA, 19 nt, Homo sapiens
  misc_RNA (1)...(19): siRNA sense strand
ucaacaaccucacugcaaa

SEQ ID NO: 949625 - RNA, 19 nt, Homo sapiens
  misc_RNA (1)...(19): siRNA sense strand
uuacagcuguugccaguau

SEQ ID NO: 949626 - RNA, 19 nt, Homo sapiens
  misc_RNA (1)...(19): siRNA sense strand
gcuccaggaucguguguau

SEQ ID NO: 949627 - RNA, 19 nt, Homo sapiens
  misc_RNA (1)...(19): siRNA sense strand
ggaaaggcaucaggaagag

SEQ ID NO: 949628 - RNA, 19 nt, Homo sapiens
  misc_RNA (1)...(19): siRNA sense strand
aaaugcagcucagagauga

SEQ ID NO: 949629 - RNA, 19 nt, Homo sapiens
  misc_RNA (1)...(19): siRNA sense strand
caaaugcagcucagagaug

SEQ ID NO: 949630 - RNA, 19 nt, Homo sapiens
  misc_RNA (1)...(19): siRNA sense strand
gaaguaguaggccagaguu

SEQ ID NO: 949631 - RNA, 19 nt, Homo sapiens
  misc_RNA (1)...(19): siRNA sense strand
gcaaaugcagcucagagau

SEQ ID NO: 949632 - RNA, 19 nt, Homo sapiens
  misc_RNA (1)...(19): siRNA sense strand
gccuuuggcuccucaacaa

SEQ ID NO: 949633 - RNA, 19 nt, Homo sapiens
  misc_RNA (1)...(19): siRNA sense strand
guaauggugcucacaguuc

SEQ ID NO: 949634 - RNA, 19 nt, Homo sapiens
  misc_RNA (1)...(19): siRNA sense strand
guuuggagcugcugcaucu

SEQ ID NO: 949635 - RNA, 19 nt, Homo sapiens
  misc_RNA (1)...(19): siRNA sense strand
gauugagccucucuuacag

SEQ ID NO: 949636 - RNA, 19 nt, Homo sapiens
  misc_RNA (1)...(19): siRNA sense strand
ugauugagccucucuuaca

SEQ ID NO: 949637 - RNA, 19 nt, Homo sapiens
  misc_RNA (1)...(19): siRNA sense strand
cagaaaaggguccugcuua

SEQ ID NO: 949638 - RNA, 19 nt, Homo sapiens
  misc_RNA (1)...(19): siRNA sense strand
guuguggcagccuuauuua

SEQ ID NO: 949639 - RNA, 19 nt, Homo sapiens
  misc_RNA (1)...(19): siRNA sense strand
caucugcuguuccuguauc

SEQ ID NO: 949640 - RNA, 19 nt, Homo sapiens
  misc_RNA (1)...(19): siRNA sense strand
uggaaaggcaucaggaaga

SEQ ID NO: 949641 - RNA, 19 nt, Homo sapiens
  misc_RNA (1)...(19): siRNA sense strand
uaauggugcucacaguucu

SEQ ID NO: 949642 - RNA, 19 nt, Homo sapiens
  misc_RNA (1)...(19): siRNA sense strand
ccuggugccuucauuacau

SEQ ID NO: 949643 - RNA, 19 nt, Homo sapiens
  misc_RNA (1)...(19): siRNA sense strand
guaguaggccagaguuugg

SEQ ID NO: 949644 - RNA, 19 nt, Homo sapiens
  misc_RNA (1)...(19): siRNA sense strand
ggcaaaugcagcucagaga

SEQ ID NO: 949645 - RNA, 19 nt, Homo sapiens
  misc_RNA (1)...(19): siRNA sense strand
guugcaaccuggcccaaag

SEQ ID NO: 949646 - RNA, 19 nt, Homo sapiens
  misc_RNA (1)...(19): siRNA sense strand
cagaggcuguucaggucuu

SEQ ID NO: 949647 - RNA, 19 nt, Homo sapiens
  misc_RNA (1)...(19): siRNA sense strand
uauuuauccuucugcaguu

SEQ ID NO: 949648 - RNA, 19 nt, Homo sapiens
  misc_RNA (1)...(19): siRNA sense strand
ucugauugagccucucuua

SEQ ID NO: 949649 - RNA, 19 nt, Homo sapiens
  misc_RNA (1)...(19): siRNA sense strand
uguuguggcagccuuauuu

SEQ ID NO: 949650 - RNA, 19 nt, Homo sapiens
  misc_RNA (1)...(19): siRNA sense strand
gcguaauggugcucacagu

SEQ ID NO: 949651 - RNA, 19 nt, Homo sapiens
  misc_RNA (1)...(19): siRNA sense strand
uaacguggugagcguaaug

SEQ ID NO: 949652 - RNA, 19 nt, Homo sapiens
  misc_RNA (1)...(19): siRNA sense strand
uucugacacugaaguagua

SEQ ID NO: 949653 - RNA, 19 nt, Homo sapiens
  misc_RNA (1)...(19): siRNA sense strand
cagcagacagcucuucaag

SEQ ID NO: 949654 - RNA, 19 nt, Homo sapiens
  misc_RNA (1)...(19): siRNA sense strand
gguugcugcuguuggacuu

SEQ ID NO: 949655 - RNA, 19 nt, Homo sapiens
  misc_RNA (1)...(19): siRNA sense strand
ugcaucugcuguuccugua

SEQ ID NO: 949656 - RNA, 19 nt, Homo sapiens
  misc_RNA (1)...(19): siRNA sense strand
gcugcacacacuagccuuu

SEQ ID NO: 949657 - RNA, 19 nt, Homo sapiens
  misc_RNA (1)...(19): siRNA sense strand
ugaaguaguaggccagagu

SEQ ID NO: 949658 - RNA, 19 nt, Homo sapiens
  misc_RNA (1)...(19): siRNA sense strand
gcagccaggucagcaaucc

SEQ ID NO: 949659 - RNA, 19 nt, Homo sapiens
  misc_RNA (1)...(19): siRNA sense strand
gcaaugcucuccucuucaa

SEQ ID NO: 949660 - RNA, 19 nt, Homo sapiens
  misc_RNA (1)...(19): siRNA sense strand
gacgagaucugcugcaaga

SEQ ID NO: 949661 - RNA, 19 nt, Homo sapiens
  misc_RNA (1)...(19): siRNA sense strand
agaacaagcuuaucacugu

SEQ ID NO: 949662 - RNA, 19 nt, Homo sapiens
  misc_RNA (1)...(19): siRNA sense strand
gacccaagaucaccuauca

SEQ ID NO: 949663 - RNA, 19 nt, Homo sapiens
  misc_RNA (1)...(19): siRNA sense strand
ccaaagacaaggaggauuu

SEQ ID NO: 949664 - RNA, 19 nt, Homo sapiens
  misc_RNA (1)...(19): siRNA sense strand
ggaccucacuacacaacaa

SEQ ID NO: 949665 - RNA, 19 nt, Homo sapiens
  misc_RNA (1)...(19): siRNA sense strand
caacaaauccugcccuaca

SEQ ID NO: 949666 - RNA, 19 nt, Homo sapiens
  misc_RNA (1)...(19): siRNA sense strand
gcaucgaacacaagaagua

SEQ ID NO: 949667 - RNA, 19 nt, Homo sapiens
  misc_RNA (1)...(19): siRNA sense strand
gcacucugcccauugauga

SEQ ID NO: 949668 - RNA, 19 nt, Homo sapiens
  misc_RNA (1)...(19): siRNA sense strand
ccacagcuaugacgagauc

SEQ ID NO: 949669 - RNA, 19 nt, Homo sapiens
  misc_RNA (1)...(19): siRNA sense strand
uccagaaccugcuguacua

SEQ ID NO: 949670 - RNA, 19 nt, Homo sapiens
  misc_RNA (1)...(19): siRNA sense strand
caaggaggauuucuucaac

SEQ ID NO: 949671 - RNA, 19 nt, Homo sapiens
  misc_RNA (1)...(19): siRNA sense strand
gaaaaugaccccaacauca

SEQ ID NO: 949672 - RNA, 19 nt, Homo sapiens
  misc_RNA (1)...(19): siRNA sense strand
gggauguguuccagcuaua

SEQ ID NO: 949673 - RNA, 19 nt, Homo sapiens
  misc_RNA (1)...(19): siRNA sense strand
agccagagcugcagaacaa

SEQ ID NO: 949674 - RNA, 19 nt, Homo sapiens
  misc_RNA (1)...(19): siRNA sense strand
ucaggcgacuacagaagua

SEQ ID NO: 949675 - RNA, 19 nt, Homo sapiens
  misc_RNA (1)...(19): siRNA sense strand
ccgcaaugcucuccucuuc

SEQ ID NO: 949676 - RNA, 19 nt, Homo sapiens
  misc_RNA (1)...(19): siRNA sense strand
ggugcacucugcccauuga

SEQ ID NO: 949677 - RNA, 19 nt, Homo sapiens
  misc_RNA (1)...(19): siRNA sense strand
ccaacaccauccacuugaa

SEQ ID NO: 949678 - RNA, 19 nt, Homo sapiens
  misc_RNA (1)...(19): siRNA sense strand
aacggaagcugauccaguu

SEQ ID NO: 949679 - RNA, 19 nt, Homo sapiens
  misc_RNA (1)...(19): siRNA sense strand
gcaagacaggcaugagcua

SEQ ID NO: 949680 - RNA, 19 nt, Homo sapiens
  misc_RNA (1)...(19): siRNA sense strand
caaauccugcccuacauug

SEQ ID NO: 949681 - RNA, 19 nt, Homo sapiens
  misc_RNA (1)...(19): siRNA sense strand
gaaguuggugcccaucaug

SEQ ID NO: 949682 - RNA, 19 nt, Homo sapiens
  misc_RNA (1)...(19): siRNA sense strand
gcaagaggcaugucuaucc

SEQ ID NO: 949683 - RNA, 19 nt, Homo sapiens
  misc_RNA (1)...(19): siRNA sense strand
ucacagcuauggaaaagaa

SEQ ID NO: 949684 - RNA, 19 nt, Homo sapiens
  misc_RNA (1)...(19): siRNA sense strand
gaggagagcaagcagaagu

SEQ ID NO: 949685 - RNA, 19 nt, Homo sapiens
  misc_RNA (1)...(19): siRNA sense strand
gcgcauugcuauccagaac

SEQ ID NO: 949686 - RNA, 19 nt, Homo sapiens
  misc_RNA (1)...(19): siRNA sense strand
guacuacggcguugugaca

SEQ ID NO: 949687 - RNA, 19 nt, Homo sapiens
  misc_RNA (1)...(19): siRNA sense strand
aaagcuggcuggcuaucug

SEQ ID NO: 949688 - RNA, 19 nt, Homo sapiens
  misc_RNA (1)...(19): siRNA sense strand
agacaaggaggauuucuuc

SEQ ID NO: 949689 - RNA, 19 nt, Homo sapiens
  misc_RNA (1)...(19): siRNA sense strand
gcugcagcauguugaugaa

SEQ ID NO: 949690 - RNA, 19 nt, Homo sapiens
  misc_RNA (1)...(19): siRNA sense strand
ggagagcaagcagaaguug

SEQ ID NO: 949691 - RNA, 19 nt, Homo sapiens
  misc_RNA (1)...(19): siRNA sense strand
acaaggaggauuucuucaa

SEQ ID NO: 949692 - RNA, 19 nt, Homo sapiens
  misc_RNA (1)...(19): siRNA sense strand
guccaaguguacaucauca

SEQ ID NO: 949693 - RNA, 19 nt, Homo sapiens
  misc_RNA (1)...(19): siRNA sense strand
cgggauguguuccagcuau

SEQ ID NO: 949694 - RNA, 19 nt, Homo sapiens
  misc_RNA (1)...(19): siRNA sense strand
uaugauguaccugucuuua

SEQ ID NO: 949695 - RNA, 19 nt, Homo sapiens
  misc_RNA (1)...(19): siRNA sense strand
gcccucgagcccauuguua

SEQ ID NO: 949696 - RNA, 19 nt, Homo sapiens
  misc_RNA (1)...(19): siRNA sense strand
cgccacauccagaagauuu

SEQ ID NO: 949697 - RNA, 19 nt, Homo sapiens
  misc_RNA (1)...(19): siRNA sense strand
uauccuacgugaccaagca

SEQ ID NO: 949698 - RNA, 19 nt, Homo sapiens
  misc_RNA (1)...(19): siRNA sense strand
caagaggcaugucuauccu

SEQ ID NO: 949699 - RNA, 19 nt, Homo sapiens
  misc_RNA (1)...(19): siRNA sense strand
cuccaguacuccaauguau

SEQ ID NO: 949700 - RNA, 19 nt, Homo sapiens
  misc_RNA (1)...(19): siRNA sense strand
gcauauucuucagcgaguu

SEQ ID NO: 949701 - RNA, 19 nt, Homo sapiens
  misc_RNA (1)...(19): siRNA sense strand
caucaucugcuggaaguga

SEQ ID NO: 949702 - RNA, 19 nt, Homo sapiens
  misc_RNA (1)...(19): siRNA sense strand
ccaguacuccaauguauac

SEQ ID NO: 949703 - RNA, 19 nt, Homo sapiens
  misc_RNA (1)...(19): siRNA sense strand
gcagcuucguguccaugga

SEQ ID NO: 949704 - RNA, 19 nt, Homo sapiens
  misc_RNA (1)...(19): siRNA sense strand
gcagaacaagcuuaucacu

SEQ ID NO: 949705 - RNA, 19 nt, Homo sapiens
  misc_RNA (1)...(19): siRNA sense strand
cugaucggcuguccugugu

SEQ ID NO: 949706 - RNA, 19 nt, Homo sapiens
  misc_RNA (1)...(19): siRNA sense strand
aggcagauguggagcucaa

SEQ ID NO: 949707 - RNA, 19 nt, Homo sapiens
  misc_RNA (1)...(19): siRNA sense strand
aguucgggcuuaugaagaa

SEQ ID NO: 949708 - RNA, 19 nt, Homo sapiens
  misc_RNA (1)...(19): siRNA sense strand
gcauugcuauccagaaccu

SEQ ID NO: 949709 - RNA, 19 nt, Homo sapiens
  misc_RNA (1)...(19): siRNA sense strand
ccucgagcccauuguuaaa

SEQ ID NO: 949710 - RNA, 19 nt, Homo sapiens
  misc_RNA (1)...(19): siRNA sense strand
cgagaucugcugcaagaca

SEQ ID NO: 949711 - RNA, 19 nt, Homo sapiens
  misc_RNA (1)...(19): siRNA sense strand
cugcagaacaagcuuauca

SEQ ID NO: 949712 - RNA, 19 nt, Homo sapiens
  misc_RNA (1)...(19): siRNA sense strand
guccaacaccauccacuug

SEQ ID NO: 949713 - RNA, 19 nt, Homo sapiens
  misc_RNA (1)...(19): siRNA sense strand
aaguguacaucaucaccaa

SEQ ID NO: 949714 - RNA, 19 nt, Homo sapiens
  misc_RNA (1)...(19): siRNA sense strand
caagaaguacagccgcaau

SEQ ID NO: 949715 - RNA, 19 nt, Homo sapiens
  misc_RNA (1)...(19): siRNA sense strand
ggaggauuucuucaacuca

SEQ ID NO: 949716 - RNA, 19 nt, Homo sapiens
  misc_RNA (1)...(19): siRNA sense strand
caaagacaaggaggauuuc

SEQ ID NO: 949717 - RNA, 19 nt, Homo sapiens
  misc_RNA (1)...(19): siRNA sense strand
caacaccauccacuugaag

SEQ ID NO: 949718 - RNA, 19 nt, Homo sapiens
  misc_RNA (1)...(19): siRNA sense strand
acaaauccugcccuacauu

SEQ ID NO: 949719 - RNA, 19 nt, Homo sapiens
  misc_RNA (1)...(19): siRNA sense strand
gaccucacuacacaacaaa

SEQ ID NO: 949720 - RNA, 19 nt, Homo sapiens
  misc_RNA (1)...(19): siRNA sense strand
gaaguacagccgcaaugcu

SEQ ID NO: 949721 - RNA, 19 nt, Homo sapiens
  misc_RNA (1)...(19): siRNA sense strand
agaaguuggugcccaucau

SEQ ID NO: 949722 - RNA, 19 nt, Homo sapiens
  misc_RNA (1)...(19): siRNA sense strand
ugacaagucccugcaagag

SEQ ID NO: 949723 - RNA, 19 nt, Homo sapiens
  misc_RNA (1)...(19): siRNA sense strand
aacaaauccugcccuacau

SEQ ID NO: 949724 - RNA, 19 nt, Homo sapiens
  misc_RNA (1)...(19): siRNA sense strand
ugauguaccugucuuuacc

SEQ ID NO: 949725 - RNA, 19 nt, Homo sapiens
  misc_RNA (1)...(19): siRNA sense strand
ccaggaguaugauguaccu

SEQ ID NO: 949726 - RNA, 19 nt, Homo sapiens
  misc_RNA (1)...(19): siRNA sense strand
ggcccaggaguaugaugua

SEQ ID NO: 949727 - RNA, 19 nt, Homo sapiens
  misc_RNA (1)...(19): siRNA sense strand
uggaggagagcaagcagaa

SEQ ID NO: 949728 - RNA, 19 nt, Homo sapiens
  misc_RNA (1)...(19): siRNA sense strand
gugcaucgaacacaagaag

SEQ ID NO: 949729 - RNA, 19 nt, Homo sapiens
  misc_RNA (1)...(19): siRNA sense strand
ugguguccauccuccagua

SEQ ID NO: 949730 - RNA, 19 nt, Homo sapiens
  misc_RNA (1)...(19): siRNA sense strand
guaugauguaccugucuuu

SEQ ID NO: 949731 - RNA, 19 nt, Homo sapiens
  misc_RNA (1)...(19): siRNA sense strand
ggaccugguagaugacaag

SEQ ID NO: 949732 - RNA, 19 nt, Homo sapiens
  misc_RNA (1)...(19): siRNA sense strand
gcuaccaugagcuggauga

SEQ ID NO: 949733 - RNA, 19 nt, Homo sapiens
  misc_RNA (1)...(19): siRNA sense strand
gcagucggcugaagaauua

SEQ ID NO: 949734 - RNA, 19 nt, Homo sapiens
  misc_RNA (1)...(19): siRNA sense strand
ccaaauagauagccacauu

SEQ ID NO: 949735 - RNA, 19 nt, Homo sapiens
  misc_RNA (1)...(19): siRNA sense strand
gaauuucacucauacuuga

SEQ ID NO: 949736 - RNA, 19 nt, Homo sapiens
  misc_RNA (1)...(19): siRNA sense strand
acacagagguagaugagua

SEQ ID NO: 949737 - RNA, 19 nt, Homo sapiens
  misc_RNA (1)...(19): siRNA sense strand
ggaugacgaugaugacaaa

SEQ ID NO: 949738 - RNA, 19 nt, Homo sapiens
  misc_RNA (1)...(19): siRNA sense strand
uaacacagcagguagaauu

SEQ ID NO: 949739 - RNA, 19 nt, Homo sapiens
  misc_RNA (1)...(19): siRNA sense strand
agaauuagauugccaagga

SEQ ID NO: 949740 - RNA, 19 nt, Homo sapiens
  misc_RNA (1)...(19): siRNA sense strand
aaagaaggauguaguaaca

SEQ ID NO: 949741 - RNA, 19 nt, Homo sapiens
  misc_RNA (1)...(19): siRNA sense strand
gaggaaguuugaagaaguu

SEQ ID NO: 949742 - RNA, 19 nt, Homo sapiens
  misc_RNA (1)...(19): siRNA sense strand
gauaagugcucacaguagu

SEQ ID NO: 949743 - RNA, 19 nt, Homo sapiens
  misc_RNA (1)...(19): siRNA sense strand
cgaaagccaugcaaagaau

SEQ ID NO: 949744 - RNA, 19 nt, Homo sapiens
  misc_RNA (1)...(19): siRNA sense strand
ggugugcccugcaauaguu

SEQ ID NO: 949745 - RNA, 19 nt, Homo sapiens
  misc_RNA (1)...(19): siRNA sense strand
gagauaagugcucacagua

SEQ ID NO: 949746 - RNA, 19 nt, Homo sapiens
  misc_RNA (1)...(19): siRNA sense strand
ggaggaggaugacgaugau

SEQ ID NO: 949747 - RNA, 19 nt, Homo sapiens
  misc_RNA (1)...(19): siRNA sense strand
gacuaagaauggcacagua

SEQ ID NO: 949748 - RNA, 19 nt, Homo sapiens
  misc_RNA (1)...(19): siRNA sense strand
gcaugaagagugcaucaaa

SEQ ID NO: 949749 - RNA, 19 nt, Homo sapiens
  misc_RNA (1)...(19): siRNA sense strand
ggaggaagaagaagaggaa

SEQ ID NO: 949750 - RNA, 19 nt, Homo sapiens
  misc_RNA (1)...(19): siRNA sense strand
uggaugacauuucugauga

SEQ ID NO: 949751 - RNA, 19 nt, Homo sapiens
  misc_RNA (1)...(19): siRNA sense strand
gagaaacgacugaggacaa

SEQ ID NO: 949752 - RNA, 19 nt, Homo sapiens
  misc_RNA (1)...(19): siRNA sense strand
ggaauuucacucauacuug

SEQ ID NO: 949753 - RNA, 19 nt, Homo sapiens
  misc_RNA (1)...(19): siRNA sense strand
gaauggcacaguagaauca

SEQ ID NO: 949754 - RNA, 19 nt, Homo sapiens
  misc_RNA (1)...(19): siRNA sense strand
aggcaaggcuucacaagug

SEQ ID NO: 949755 - RNA, 19 nt, Homo sapiens
  misc_RNA (1)...(19): siRNA sense strand
ugacgaugaugacaaagga

SEQ ID NO: 949756 - RNA, 19 nt, Homo sapiens
  misc_RNA (1)...(19): siRNA sense strand
gagaggaggaggaagaaga

SEQ ID NO: 949757 - RNA, 19 nt, Homo sapiens
  misc_RNA (1)...(19): siRNA sense strand
ggaggaggaggaagaagaa

SEQ ID NO: 949758 - RNA, 19 nt, Homo sapiens
  misc_RNA (1)...(19): siRNA sense strand
agaaacgacugaggacaaa

SEQ ID NO: 949759 - RNA, 19 nt, Homo sapiens
  misc_RNA (1)...(19): siRNA sense strand
caugaagagugcaucaaau

SEQ ID NO: 949760 - RNA, 19 nt, Homo sapiens
  misc_RNA (1)...(19): siRNA sense strand
caaucacccucaaguggaa

SEQ ID NO: 949761 - RNA, 19 nt, Homo sapiens
  misc_RNA (1)...(19): siRNA sense strand
gcccugcaauaguuuauau

SEQ ID NO: 949762 - RNA, 19 nt, Homo sapiens
  misc_RNA (1)...(19): siRNA sense strand
uaaagaggaaguuugaaga

SEQ ID NO: 949763 - RNA, 19 nt, Homo sapiens
  misc_RNA (1)...(19): siRNA sense strand
cgacugaggacaaagaaug

SEQ ID NO: 949764 - RNA, 19 nt, Homo sapiens
  misc_RNA (1)...(19): siRNA sense strand
caucaaaucacccgugguu

SEQ ID NO: 949765 - RNA, 19 nt, Homo sapiens
  misc_RNA (1)...(19): siRNA sense strand
gcagcggagucacagauuc

SEQ ID NO: 949766 - RNA, 19 nt, Homo sapiens
  misc_RNA (1)...(19): siRNA sense strand
cuacaaccuuugccaacaa

SEQ ID NO: 949767 - RNA, 19 nt, Homo sapiens
  misc_RNA (1)...(19): siRNA sense strand
gucaauccauccacuucua

SEQ ID NO: 949768 - RNA, 19 nt, Homo sapiens
  misc_RNA (1)...(19): siRNA sense strand
acucuucaacucuguauua

SEQ ID NO: 949769 - RNA, 19 nt, Homo sapiens
  misc_RNA (1)...(19): siRNA sense strand
cuaaagaugacuaagaaug

SEQ ID NO: 949770 - RNA, 19 nt, Homo sapiens
  misc_RNA (1)...(19): siRNA sense strand
ggacaacacagagguagau

SEQ ID NO: 949771 - RNA, 19 nt, Homo sapiens
  misc_RNA (1)...(19): siRNA sense strand
gaugacauuucugaugaug

SEQ ID NO: 949772 - RNA, 19 nt, Homo sapiens
  misc_RNA (1)...(19): siRNA sense strand
agagguagaugaguacuuc

SEQ ID NO: 949773 - RNA, 19 nt, Homo sapiens
  misc_RNA (1)...(19): siRNA sense strand
uuccuucaguucuuuguua

SEQ ID NO: 949774 - RNA, 19 nt, Homo sapiens
  misc_RNA (1)...(19): siRNA sense strand
ccagguggaucguaugucu

SEQ ID NO: 949775 - RNA, 19 nt, Homo sapiens
  misc_RNA (1)...(19): siRNA sense strand
gaaaggccccucccaagaa

SEQ ID NO: 949776 - RNA, 19 nt, Homo sapiens
  misc_RNA (1)...(19): siRNA sense strand
cccuuucgcuggugccuua

SEQ ID NO: 949777 - RNA, 19 nt, Homo sapiens
  misc_RNA (1)...(19): siRNA sense strand
gcaccgccguucacgaaag

SEQ ID NO: 949778 - RNA, 19 nt, Homo sapiens
  misc_RNA (1)...(19): siRNA sense strand
uaaagaugacuaagaaugg

SEQ ID NO: 949779 - RNA, 19 nt, Homo sapiens
  misc_RNA (1)...(19): siRNA sense strand
ggagcaauucguugacuau

SEQ ID NO: 949780 - RNA, 19 nt, Homo sapiens
  misc_RNA (1)...(19): siRNA sense strand
agaggaaguuugaagaagu

SEQ ID NO: 949781 - RNA, 19 nt, Homo sapiens
  misc_RNA (1)...(19): siRNA sense strand
agaaggauguaguaacaca

SEQ ID NO: 949782 - RNA, 19 nt, Homo sapiens
  misc_RNA (1)...(19): siRNA sense strand
cacaguagaaucagaagaa

SEQ ID NO: 949783 - RNA, 19 nt, Homo sapiens
  misc_RNA (1)...(19): siRNA sense strand
aaagaggaaguuugaagaa

SEQ ID NO: 949784 - RNA, 19 nt, Homo sapiens
  misc_RNA (1)...(19): siRNA sense strand
ggaugacauuucugaugau

SEQ ID NO: 949785 - RNA, 19 nt, Homo sapiens
  misc_RNA (1)...(19): siRNA sense strand
ggguuugucucugcauuga

SEQ ID NO: 949786 - RNA, 19 nt, Homo sapiens
  misc_RNA (1)...(19): siRNA sense strand
ucaacucuguauuaccaaa

SEQ ID NO: 949787 - RNA, 19 nt, Homo sapiens
  misc_RNA (1)...(19): siRNA sense strand
uaagaauggcacaguagaa

SEQ ID NO: 949788 - RNA, 19 nt, Homo sapiens
  misc_RNA (1)...(19): siRNA sense strand
ggaagaagaagaggaagag

SEQ ID NO: 949789 - RNA, 19 nt, Homo sapiens
  misc_RNA (1)...(19): siRNA sense strand
cacagcagguagaauugaa

SEQ ID NO: 949790 - RNA, 19 nt, Homo sapiens
  misc_RNA (1)...(19): siRNA sense strand
ccaugcggcugcacuaaag

SEQ ID NO: 949791 - RNA, 19 nt, Homo sapiens
  misc_RNA (1)...(19): siRNA sense strand
ugacauuucugaugaugac

SEQ ID NO: 949792 - RNA, 19 nt, Homo sapiens
  misc_RNA (1)...(19): siRNA sense strand
caacacagagguagaugag

SEQ ID NO: 949793 - RNA, 19 nt, Homo sapiens
  misc_RNA (1)...(19): siRNA sense strand
guuugucucugcauugaau

SEQ ID NO: 949794 - RNA, 19 nt, Homo sapiens
  misc_RNA (1)...(19): siRNA sense strand
uuaguugugucaccgugua

SEQ ID NO: 949795 - RNA, 19 nt, Homo sapiens
  misc_RNA (1)...(19): siRNA sense strand
cuucaacucuguauuacca

SEQ ID NO: 949796 - RNA, 19 nt, Homo sapiens
  misc_RNA (1)...(19): siRNA sense strand
gcagacaguuuugagauug

SEQ ID NO: 949797 - RNA, 19 nt, Homo sapiens
  misc_RNA (1)...(19): siRNA sense strand
gaaacuugaacuggagaaa

SEQ ID NO: 949798 - RNA, 19 nt, Homo sapiens
  misc_RNA (1)...(19): siRNA sense strand
cggcugcacuaaagaagga

SEQ ID NO: 949799 - RNA, 19 nt, Homo sapiens
  misc_RNA (1)...(19): siRNA sense strand
gcgugccucuggagugaaa

SEQ ID NO: 949800 - RNA, 19 nt, Homo sapiens
  misc_RNA (1)...(19): siRNA sense strand
ggcaaggcuucacaagugu

SEQ ID NO: 949801 - RNA, 19 nt, Homo sapiens
  misc_RNA (1)...(19): siRNA sense strand
gagcauauugcaugaagag

SEQ ID NO: 949802 - RNA, 19 nt, Homo sapiens
  misc_RNA (1)...(19): siRNA sense strand
ccaagaaggguuugucucu

SEQ ID NO: 949803 - RNA, 19 nt, Homo sapiens
  misc_RNA (1)...(19): siRNA sense strand
gaaagccaugcaaagaaug

SEQ ID NO: 949804 - RNA, 19 nt, Homo sapiens
  misc_RNA (1)...(19): siRNA sense strand
cuaaagaaggauguaguaa

SEQ ID NO: 949805 - RNA, 19 nt, Homo sapiens
  misc_RNA (1)...(19): siRNA sense strand
cuucaguucuuuguuauuc

SEQ ID NO: 949806 - RNA, 19 nt, Homo sapiens
  misc_RNA (1)...(19): siRNA sense strand
gcacaguagaaucagaaga

SEQ ID NO: 949807 - RNA, 19 nt, Homo sapiens
  misc_RNA (1)...(19): siRNA sense strand
cggagcaauucguugacua

SEQ ID NO: 949808 - RNA, 19 nt, Homo sapiens
  misc_RNA (1)...(19): siRNA sense strand
caaauagauagccacauuc

SEQ ID NO: 949809 - RNA, 19 nt, Homo sapiens
  misc_RNA (1)...(19): siRNA sense strand
aaacgacugaggacaaaga

SEQ ID NO: 949810 - RNA, 19 nt, Homo sapiens
  misc_RNA (1)...(19): siRNA sense strand
uaaagaaggauguaguaac

SEQ ID NO: 949811 - RNA, 19 nt, Homo sapiens
  misc_RNA (1)...(19): siRNA sense strand
gaaaagcugaacuccuuaa

SEQ ID NO: 949812 - RNA, 19 nt, Homo sapiens
  misc_RNA (1)...(19): siRNA sense strand
gcugaacuccuuaaaacua

SEQ ID NO: 949813 - RNA, 19 nt, Homo sapiens
  misc_RNA (1)...(19): siRNA sense strand
gaagagugcaucaaaucac

SEQ ID NO: 949814 - RNA, 19 nt, Homo sapiens
  misc_RNA (1)...(19): siRNA sense strand
ugaagagugcaucaaauca

SEQ ID NO: 949815 - RNA, 19 nt, Homo sapiens
  misc_RNA (1)...(19): siRNA sense strand
ccaggaacuccaaaucaga

SEQ ID NO: 949816 - RNA, 19 nt, Homo sapiens
  misc_RNA (1)...(19): siRNA sense strand
ccucuuccuucaguucuuu

SEQ ID NO: 949817 - RNA, 19 nt, Homo sapiens
  misc_RNA (1)...(19): siRNA sense strand
ggaggaggaagaagaagag

SEQ ID NO: 949818 - RNA, 19 nt, Homo sapiens
  misc_RNA (1)...(19): siRNA sense strand
cauuucugaugaugacauu

SEQ ID NO: 949819 - RNA, 19 nt, Homo sapiens
  misc_RNA (1)...(19): siRNA sense strand
gaggcaaggcuucacaagu

SEQ ID NO: 949820 - RNA, 19 nt, Homo sapiens
  misc_RNA (1)...(19): siRNA sense strand
cacgaaagccaugcaaaga

SEQ ID NO: 949821 - RNA, 19 nt, Homo sapiens
  misc_RNA (1)...(19): siRNA sense strand
ucacgaaagccaugcaaag

SEQ ID NO: 949822 - RNA, 19 nt, Homo sapiens
  misc_RNA (1)...(19): siRNA sense strand
gcucacaguaguucuaugg

SEQ ID NO: 949823 - RNA, 19 nt, Homo sapiens
  misc_RNA (1)...(19): siRNA sense strand
gcacuaaagaaggauguag

SEQ ID NO: 949824 - RNA, 19 nt, Homo sapiens
  misc_RNA (1)...(19): siRNA sense strand
aagagcauauugcaugaag

SEQ ID NO: 949825 - RNA, 19 nt, Homo sapiens
  misc_RNA (1)...(19): siRNA sense strand
guucuuuguuauucugaug

SEQ ID NO: 949826 - RNA, 19 nt, Homo sapiens
  misc_RNA (1)...(19): siRNA sense strand
ggaggaggaggaugacgau

SEQ ID NO: 949827 - RNA, 19 nt, Homo sapiens
  misc_RNA (1)...(19): siRNA sense strand
aagaggaggaggaggauga

SEQ ID NO: 949828 - RNA, 19 nt, Homo sapiens
  misc_RNA (1)...(19): siRNA sense strand
ccaaggagaggaggaggaa

SEQ ID NO: 949829 - RNA, 19 nt, Homo sapiens
  misc_RNA (1)...(19): siRNA sense strand
ggaaguuugaagaaguuga

SEQ ID NO: 949830 - RNA, 19 nt, Homo sapiens
  misc_RNA (1)...(19): siRNA sense strand
aaaagagcauauugcauga

SEQ ID NO: 949831 - RNA, 19 nt, Homo sapiens
  misc_RNA (1)...(19): siRNA sense strand
ccauccacuucuagucauu

SEQ ID NO: 949832 - RNA, 19 nt, Homo sapiens
  misc_RNA (1)...(19): siRNA sense strand
cgggagauguugagagaac

SEQ ID NO: 949833 - RNA, 19 nt, Homo sapiens
  misc_RNA (1)...(19): siRNA sense strand
gaaagaggcugucagaaag

SEQ ID NO: 949834 - RNA, 19 nt, Homo sapiens
  misc_RNA (1)...(19): siRNA sense strand
gcaaugagaucuuaacaag

SEQ ID NO: 949835 - RNA, 19 nt, Homo sapiens
  misc_RNA (1)...(19): siRNA sense strand
guacagaaauaaacaguga

SEQ ID NO: 949836 - RNA, 19 nt, Homo sapiens
  misc_RNA (1)...(19): siRNA sense strand
caauaucccugguuucuuu

SEQ ID NO: 949837 - RNA, 19 nt, Homo sapiens
  misc_RNA (1)...(19): siRNA sense strand
ggacaugucugagagcuuu

SEQ ID NO: 949838 - RNA, 19 nt, Homo sapiens
  misc_RNA (1)...(19): siRNA sense strand
gcagugagauuuagagugu

SEQ ID NO: 949839 - RNA, 19 nt, Homo sapiens
  misc_RNA (1)...(19): siRNA sense strand
gaagaaugaugcugaaaca

SEQ ID NO: 949840 - RNA, 19 nt, Homo sapiens
  misc_RNA (1)...(19): siRNA sense strand
cagagcaacuugaaauuaa

SEQ ID NO: 949841 - RNA, 19 nt, Homo sapiens
  misc_RNA (1)...(19): siRNA sense strand
caagauggcugaaauaaaa

SEQ ID NO: 949842 - RNA, 19 nt, Homo sapiens
  misc_RNA (1)...(19): siRNA sense strand
cuacucagcuaaagacuaa

SEQ ID NO: 949843 - RNA, 19 nt, Homo sapiens
  misc_RNA (1)...(19): siRNA sense strand
gaaccagaaucagaaauga

SEQ ID NO: 949844 - RNA, 19 nt, Homo sapiens
  misc_RNA (1)...(19): siRNA sense strand
gcaaauugaugaugucaca

SEQ ID NO: 949845 - RNA, 19 nt, Homo sapiens
  misc_RNA (1)...(19): siRNA sense strand
ucacaaauguugcugaguu

SEQ ID NO: 949846 - RNA, 19 nt, Homo sapiens
  misc_RNA (1)...(19): siRNA sense strand
agaugaaggugaagaauuu

SEQ ID NO: 949847 - RNA, 19 nt, Homo sapiens
  misc_RNA (1)...(19): siRNA sense strand
ggaggcugcugucgauuaa

SEQ ID NO: 949848 - RNA, 19 nt, Homo sapiens
  misc_RNA (1)...(19): siRNA sense strand
gcaguguuaucauguauug

SEQ ID NO: 949849 - RNA, 19 nt, Homo sapiens
  misc_RNA (1)...(19): siRNA sense strand
gaaauucgagucuauacaa

SEQ ID NO: 949850 - RNA, 19 nt, Homo sapiens
  misc_RNA (1)...(19): siRNA sense strand
gcuaugaacuguugaagca

SEQ ID NO: 949851 - RNA, 19 nt, Homo sapiens
  misc_RNA (1)...(19): siRNA sense strand
ugaaagugaucaugaaguu

SEQ ID NO: 949852 - RNA, 19 nt, Homo sapiens
  misc_RNA (1)...(19): siRNA sense strand
gacaagaccaaguggauua

SEQ ID NO: 949853 - RNA, 19 nt, Homo sapiens
  misc_RNA (1)...(19): siRNA sense strand
aaucagauauggaagauga

SEQ ID NO: 949854 - RNA, 19 nt, Homo sapiens
  misc_RNA (1)...(19): siRNA sense strand
gaaacaagcuaugcagaag

SEQ ID NO: 949855 - RNA, 19 nt, Homo sapiens
  misc_RNA (1)...(19): siRNA sense strand
gauaagauuccaaauguga

SEQ ID NO: 949856 - RNA, 19 nt, Homo sapiens
  misc_RNA (1)...(19): siRNA sense strand
ugaaagaggcugucagaaa

SEQ ID NO: 949857 - RNA, 19 nt, Homo sapiens
  misc_RNA (1)...(19): siRNA sense strand
gaaauaaacagugaugaug

SEQ ID NO: 949858 - RNA, 19 nt, Homo sapiens
  misc_RNA (1)...(19): siRNA sense strand
cagaucagaugcugugaaa

SEQ ID NO: 949859 - RNA, 19 nt, Homo sapiens
  misc_RNA (1)...(19): siRNA sense strand
gcugaaacauugcagaaau

SEQ ID NO: 949860 - RNA, 19 nt, Homo sapiens
  misc_RNA (1)...(19): siRNA sense strand
uuaaagaaguccacauaga

SEQ ID NO: 949861 - RNA, 19 nt, Homo sapiens
  misc_RNA (1)...(19): siRNA sense strand
aaacagcaaugcagugaga

SEQ ID NO: 949862 - RNA, 19 nt, Homo sapiens
  misc_RNA (1)...(19): siRNA sense strand
aaggaaacacuucguauua

SEQ ID NO: 949863 - RNA, 19 nt, Homo sapiens
  misc_RNA (1)...(19): siRNA sense strand
auucauaggucaacaauug

SEQ ID NO: 949864 - RNA, 19 nt, Homo sapiens
  misc_RNA (1)...(19): siRNA sense strand
gccagagccuguaguauau

SEQ ID NO: 949865 - RNA, 19 nt, Homo sapiens
  misc_RNA (1)...(19): siRNA sense strand
aaacaaugauggcaggaaa

SEQ ID NO: 949866 - RNA, 19 nt, Homo sapiens
  misc_RNA (1)...(19): siRNA sense strand
gauugaugaugauguguuu

SEQ ID NO: 949867 - RNA, 19 nt, Homo sapiens
  misc_RNA (1)...(19): siRNA sense strand
cacaaauguugcugaguua

SEQ ID NO: 949868 - RNA, 19 nt, Homo sapiens
  misc_RNA (1)...(19): siRNA sense strand
gaaagacuacuccacauca

SEQ ID NO: 949869 - RNA, 19 nt, Homo sapiens
  misc_RNA (1)...(19): siRNA sense strand
gaaauugcuuuguauuggu

SEQ ID NO: 949870 - RNA, 19 nt, Homo sapiens
  misc_RNA (1)...(19): siRNA sense strand
ggaagaugguggccuuuua

SEQ ID NO: 949871 - RNA, 19 nt, Homo sapiens
  misc_RNA (1)...(19): siRNA sense strand
gaucagaugcugugaaaca

SEQ ID NO: 949872 - RNA, 19 nt, Homo sapiens
  misc_RNA (1)...(19): siRNA sense strand
gagugugccugcucauaaa

SEQ ID NO: 949873 - RNA, 19 nt, Homo sapiens
  misc_RNA (1)...(19): siRNA sense strand
ggacuaaucaggaaugcuu

SEQ ID NO: 949874 - RNA, 19 nt, Homo sapiens
  misc_RNA (1)...(19): siRNA sense strand
gaaacacuucguauuacua

SEQ ID NO: 949875 - RNA, 19 nt, Homo sapiens
  misc_RNA (1)...(19): siRNA sense strand
ugaagcagauguccauuuc

SEQ ID NO: 949876 - RNA, 19 nt, Homo sapiens
  misc_RNA (1)...(19): siRNA sense strand
gcccagugguuaaugcaua

SEQ ID NO: 949877 - RNA, 19 nt, Homo sapiens
  misc_RNA (1)...(19): siRNA sense strand
auuagaagaugccagaaua

SEQ ID NO: 949878 - RNA, 19 nt, Homo sapiens
  misc_RNA (1)...(19): siRNA sense strand
ggugugcccuuugugaaua

SEQ ID NO: 949879 - RNA, 19 nt, Homo sapiens
  misc_RNA (1)...(19): siRNA sense strand
gcaccaaggaugugaaaga

SEQ ID NO: 949880 - RNA, 19 nt, Homo sapiens
  misc_RNA (1)...(19): siRNA sense strand
ggagaggguaauagaauuu

SEQ ID NO: 949881 - RNA, 19 nt, Homo sapiens
  misc_RNA (1)...(19): siRNA sense strand
gaacucaguagccaucuug

SEQ ID NO: 949882 - RNA, 19 nt, Homo sapiens
  misc_RNA (1)...(19): siRNA sense strand
gccaagacuucccaagauu

SEQ ID NO: 949883 - RNA, 19 nt, Homo sapiens
  misc_RNA (1)...(19): siRNA sense strand
gacuggagcugcagaagga

SEQ ID NO: 949884 - RNA, 19 nt, Homo sapiens
  misc_RNA (1)...(19): siRNA sense strand
guauuacuauugcagguuu

SEQ ID NO: 949885 - RNA, 19 nt, Homo sapiens
  misc_RNA (1)...(19): siRNA sense strand
ggaaucaucgaaucuuuga

SEQ ID NO: 949886 - RNA, 19 nt, Homo sapiens
  misc_RNA (1)...(19): siRNA sense strand
uauggaagaugaugaggaa

SEQ ID NO: 949887 - RNA, 19 nt, Homo sapiens
  misc_RNA (1)...(19): siRNA sense strand
gaaaugaagaugagacuac

SEQ ID NO: 949888 - RNA, 19 nt, Homo sapiens
  misc_RNA (1)...(19): siRNA sense strand
ucugagagcuuuggagaaa

SEQ ID NO: 949889 - RNA, 19 nt, Homo sapiens
  misc_RNA (1)...(19): siRNA sense strand
ugaguuacuuguagauuug

SEQ ID NO: 949890 - RNA, 19 nt, Homo sapiens
  misc_RNA (1)...(19): siRNA sense strand
gaagagacugcuacagcua

SEQ ID NO: 949891 - RNA, 19 nt, Homo sapiens
  misc_RNA (1)...(19): siRNA sense strand
gaagaacacagaggugauu

SEQ ID NO: 949892 - RNA, 19 nt, Homo sapiens
  misc_RNA (1)...(19): siRNA sense strand
caauaacuccucucaguga

SEQ ID NO: 949893 - RNA, 19 nt, Homo sapiens
  misc_RNA (1)...(19): siRNA sense strand
gcaaugcagugagauuuag

SEQ ID NO: 949894 - RNA, 19 nt, Homo sapiens
  misc_RNA (1)...(19): siRNA sense strand
aaagauaggacaugucuga

SEQ ID NO: 949895 - RNA, 19 nt, Homo sapiens
  misc_RNA (1)...(19): siRNA sense strand
aaugagaucuuaacaaguc

SEQ ID NO: 949896 - RNA, 19 nt, Homo sapiens
  misc_RNA (1)...(19): siRNA sense strand
aaacagugaugaugagcaa

SEQ ID NO: 949897 - RNA, 19 nt, Homo sapiens
  misc_RNA (1)...(19): siRNA sense strand
ggaaacacuucguauuacu

SEQ ID NO: 949898 - RNA, 19 nt, Homo sapiens
  misc_RNA (1)...(19): siRNA sense strand
ucaacaggcuuaagugcaa

SEQ ID NO: 949899 - RNA, 19 nt, Homo sapiens
  misc_RNA (1)...(19): siRNA sense strand
gaaagaaagaacucaagau

SEQ ID NO: 949900 - RNA, 19 nt, Homo sapiens
  misc_RNA (1)...(19): siRNA sense strand
gagaugaaggugaagaauu

SEQ ID NO: 949901 - RNA, 19 nt, Homo sapiens
  misc_RNA (1)...(19): siRNA sense strand
gcaaacagcaaugcaguga

SEQ ID NO: 949902 - RNA, 19 nt, Homo sapiens
  misc_RNA (1)...(19): siRNA sense strand
gaagaugagacuaccaaga

SEQ ID NO: 949903 - RNA, 19 nt, Homo sapiens
  misc_RNA (1)...(19): siRNA sense strand
ccaagacuucccaagauua

SEQ ID NO: 949904 - RNA, 19 nt, Homo sapiens
  misc_RNA (1)...(19): siRNA sense strand
ggccaagacuucccaagau

SEQ ID NO: 949905 - RNA, 19 nt, Homo sapiens
  misc_RNA (1)...(19): siRNA sense strand
ucaaaacacuucauuguga

SEQ ID NO: 949906 - RNA, 19 nt, Homo sapiens
  misc_RNA (1)...(19): siRNA sense strand
cgauccagcugauguaaga

SEQ ID NO: 949907 - RNA, 19 nt, Homo sapiens
  misc_RNA (1)...(19): siRNA sense strand
agacuacuccacaucauua

SEQ ID NO: 949908 - RNA, 19 nt, Homo sapiens
  misc_RNA (1)...(19): siRNA sense strand
gaugaaugcccagugguua

SEQ ID NO: 949909 - RNA, 19 nt, Homo sapiens
  misc_RNA (1)...(19): siRNA sense strand
gaugccaccuugacuacaa

SEQ ID NO: 949910 - RNA, 19 nt, Homo sapiens
  misc_RNA (1)...(19): siRNA sense strand
caaggaaacacuucguauu

SEQ ID NO: 949911 - RNA, 19 nt, Homo sapiens
  misc_RNA (1)...(19): siRNA sense strand
gaguaaugcuccuucaaca

SEQ ID NO: 949912 - RNA, 19 nt, Homo sapiens
  misc_RNA (1)...(19): siRNA sense strand
gaacuggugggacucugua

SEQ ID NO: 949913 - RNA, 19 nt, Homo sapiens
  misc_RNA (1)...(19): siRNA sense strand
gguacaauccugugacuga

SEQ ID NO: 949914 - RNA, 19 nt, Homo sapiens
  misc_RNA (1)...(19): siRNA sense strand
ggaguucauucauuaccuu

SEQ ID NO: 949915 - RNA, 19 nt, Homo sapiens
  misc_RNA (1)...(19): siRNA sense strand
gcauuaccuuacaggauuu

SEQ ID NO: 949916 - RNA, 19 nt, Homo sapiens
  misc_RNA (1)...(19): siRNA sense strand
ggauaccagugaagaagga

SEQ ID NO: 949917 - RNA, 19 nt, Homo sapiens
  misc_RNA (1)...(19): siRNA sense strand
gcaaggaaacacuucguau

SEQ ID NO: 949918 - RNA, 19 nt, Homo sapiens
  misc_RNA (1)...(19): siRNA sense strand
gaugaugauguguuugaua

SEQ ID NO: 949919 - RNA, 19 nt, Homo sapiens
  misc_RNA (1)...(19): siRNA sense strand
caaagucuacucagcuaaa

SEQ ID NO: 949920 - RNA, 19 nt, Homo sapiens
  misc_RNA (1)...(19): siRNA sense strand
uaucaggccuuaacaguac

SEQ ID NO: 949921 - RNA, 19 nt, Homo sapiens
  misc_RNA (1)...(19): siRNA sense strand
ccaagauuaucaggccuua

SEQ ID NO: 949922 - RNA, 19 nt, Homo sapiens
  misc_RNA (1)...(19): siRNA sense strand
gaagguacagaaauaaaca

SEQ ID NO: 949923 - RNA, 19 nt, Homo sapiens
  misc_RNA (1)...(19): siRNA sense strand
aaagaaagaacucaagaug

SEQ ID NO: 949924 - RNA, 19 nt, Homo sapiens
  misc_RNA (1)...(19): siRNA sense strand
caacaaggucuuaaugaca

SEQ ID NO: 949925 - RNA, 19 nt, Homo sapiens
  misc_RNA (1)...(19): siRNA sense strand
uaugagagcuauguccauu

SEQ ID NO: 949926 - RNA, 19 nt, Homo sapiens
  misc_RNA (1)...(19): siRNA sense strand
gaaguuagacgggcagugu

SEQ ID NO: 949927 - RNA, 19 nt, Homo sapiens
  misc_RNA (1)...(19): siRNA sense strand
gaaagagacagagcaacuu

SEQ ID NO: 949928 - RNA, 19 nt, Homo sapiens
  misc_RNA (1)...(19): siRNA sense strand
caaaagaucuucugguucu

SEQ ID NO: 949929 - RNA, 19 nt, Homo sapiens
  misc_RNA (1)...(19): siRNA sense strand
uaaagucucaugaagcaaa

SEQ ID NO: 949930 - RNA, 19 nt, Homo sapiens
  misc_RNA (1)...(19): siRNA sense strand
gccagaaauucgagucuau

SEQ ID NO: 949931 - RNA, 19 nt, Homo sapiens
  misc_RNA (1)...(19): siRNA sense strand
guacaauccugugacugaa

SEQ ID NO: 949932 - RNA, 19 nt, Homo sapiens
  misc_RNA (1)...(19): siRNA sense strand
aagcagauguccauuucaa

SEQ ID NO: 949933 - RNA, 19 nt, Homo sapiens
  misc_RNA (1)...(19): siRNA sense strand
gaaggaaucucgaagaauu

SEQ ID NO: 949934 - RNA, 19 nt, Homo sapiens
  misc_RNA (1)...(19): siRNA sense strand
gagcagaaauaccagauua

SEQ ID NO: 949935 - RNA, 19 nt, Homo sapiens
  misc_RNA (1)...(19): siRNA sense strand
gaaagaagaagcuaucaua

SEQ ID NO: 949936 - RNA, 19 nt, Homo sapiens
  misc_RNA (1)...(19): siRNA sense strand
gaaagaaucucaguguuug

SEQ ID NO: 949937 - RNA, 19 nt, Homo sapiens
  misc_RNA (1)...(19): siRNA sense strand
uggaaggccuuguaaauua

SEQ ID NO: 949938 - RNA, 19 nt, Homo sapiens
  misc_RNA (1)...(19): siRNA sense strand
gaacguaucuucagagcau

SEQ ID NO: 949939 - RNA, 19 nt, Homo sapiens
  misc_RNA (1)...(19): siRNA sense strand
gcacuuggauauugauaau

SEQ ID NO: 949940 - RNA, 19 nt, Homo sapiens
  misc_RNA (1)...(19): siRNA sense strand
aaagagaaauggauuccua

SEQ ID NO: 949941 - RNA, 19 nt, Homo sapiens
  misc_RNA (1)...(19): siRNA sense strand
gcacuccuuugcagaauuu

SEQ ID NO: 949942 - RNA, 19 nt, Homo sapiens
  misc_RNA (1)...(19): siRNA sense strand
guaaggcacuuggauauug

SEQ ID NO: 949943 - RNA, 19 nt, Homo sapiens
  misc_RNA (1)...(19): siRNA sense strand
agagauagcucccaugaug

SEQ ID NO: 949944 - RNA, 19 nt, Homo sapiens
  misc_RNA (1)...(19): siRNA sense strand
gcagaaauaccagauuaua

SEQ ID NO: 949945 - RNA, 19 nt, Homo sapiens
  misc_RNA (1)...(19): siRNA sense strand
cgaauugaaugccucuaua

SEQ ID NO: 949946 - RNA, 19 nt, Homo sapiens
  misc_RNA (1)...(19): siRNA sense strand
gcuaugguguuacauguuu

SEQ ID NO: 949947 - RNA, 19 nt, Homo sapiens
  misc_RNA (1)...(19): siRNA sense strand
uaucagagguucacauaug

SEQ ID NO: 949948 - RNA, 19 nt, Homo sapiens
  misc_RNA (1)...(19): siRNA sense strand
cauagaagcucuugacaca

SEQ ID NO: 949949 - RNA, 19 nt, Homo sapiens
  misc_RNA (1)...(19): siRNA sense strand
ggaaggccuuguaaauuau

SEQ ID NO: 949950 - RNA, 19 nt, Homo sapiens
  misc_RNA (1)...(19): siRNA sense strand
gcauacacuucccaaauug

SEQ ID NO: 949951 - RNA, 19 nt, Homo sapiens
  misc_RNA (1)...(19): siRNA sense strand
ugaguucuaugauccuuua

SEQ ID NO: 949952 - RNA, 19 nt, Homo sapiens
  misc_RNA (1)...(19): siRNA sense strand
cagcggaucugcuacaguu

SEQ ID NO: 949953 - RNA, 19 nt, Homo sapiens
  misc_RNA (1)...(19): siRNA sense strand
uaagauccgcucccuaaua

SEQ ID NO: 949954 - RNA, 19 nt, Homo sapiens
  misc_RNA (1)...(19): siRNA sense strand
gaauugaaugccucuauaa

SEQ ID NO: 949955 - RNA, 19 nt, Homo sapiens
  misc_RNA (1)...(19): siRNA sense strand
cuacugagcuauaucaaca

SEQ ID NO: 949956 - RNA, 19 nt, Homo sapiens
  misc_RNA (1)...(19): siRNA sense strand
gauguuaucuacgucauug

SEQ ID NO: 949957 - RNA, 19 nt, Homo sapiens
  misc_RNA (1)...(19): siRNA sense strand
ucauagagccaguuauuaa

SEQ ID NO: 949958 - RNA, 19 nt, Homo sapiens
  misc_RNA (1)...(19): siRNA sense strand
ggagagcuaugguguuaca

SEQ ID NO: 949959 - RNA, 19 nt, Homo sapiens
  misc_RNA (1)...(19): siRNA sense strand
gaaauggauuccuauugca

SEQ ID NO: 949960 - RNA, 19 nt, Homo sapiens
  misc_RNA (1)...(19): siRNA sense strand
aaacuacaaucacagaaug

SEQ ID NO: 949961 - RNA, 19 nt, Homo sapiens
  misc_RNA (1)...(19): siRNA sense strand
ggaaauaguggguaaucuu

SEQ ID NO: 949962 - RNA, 19 nt, Homo sapiens
  misc_RNA (1)...(19): siRNA sense strand
guucaaaguuuaaggaagu

SEQ ID NO: 949963 - RNA, 19 nt, Homo sapiens
  misc_RNA (1)...(19): siRNA sense strand
gaaucucaguguuuggaaa

SEQ ID NO: 949964 - RNA, 19 nt, Homo sapiens
  misc_RNA (1)...(19): siRNA sense strand
gaaauaguggguaaucuuc

SEQ ID NO: 949965 - RNA, 19 nt, Homo sapiens
  misc_RNA (1)...(19): siRNA sense strand
ugagaaauaugauccagau

SEQ ID NO: 949966 - RNA, 19 nt, Homo sapiens
  misc_RNA (1)...(19): siRNA sense strand
gauuaaaggugugggaaau

SEQ ID NO: 949967 - RNA, 19 nt, Homo sapiens
  misc_RNA (1)...(19): siRNA sense strand
gagcuaugguguuacaugu

SEQ ID NO: 949968 - RNA, 19 nt, Homo sapiens
  misc_RNA (1)...(19): siRNA sense strand
guauauaauuggaggcuau

SEQ ID NO: 949969 - RNA, 19 nt, Homo sapiens
  misc_RNA (1)...(19): siRNA sense strand
gaaaugcuacugccugugu

SEQ ID NO: 949970 - RNA, 19 nt, Homo sapiens
  misc_RNA (1)...(19): siRNA sense strand
gagaaauggauuccuauug

SEQ ID NO: 949971 - RNA, 19 nt, Homo sapiens
  misc_RNA (1)...(19): siRNA sense strand
cuacaggacggauaacaua

SEQ ID NO: 949972 - RNA, 19 nt, Homo sapiens
  misc_RNA (1)...(19): siRNA sense strand
gacagaagguuugccaaug

SEQ ID NO: 949973 - RNA, 19 nt, Homo sapiens
  misc_RNA (1)...(19): siRNA sense strand
gaauggauguauuuauguc

SEQ ID NO: 949974 - RNA, 19 nt, Homo sapiens
  misc_RNA (1)...(19): siRNA sense strand
gagcuacaauuccgauauc

SEQ ID NO: 949975 - RNA, 19 nt, Homo sapiens
  misc_RNA (1)...(19): siRNA sense strand
agaaagaaucucaguguuu

SEQ ID NO: 949976 - RNA, 19 nt, Homo sapiens
  misc_RNA (1)...(19): siRNA sense strand
agaggaagcugcaccuaug

SEQ ID NO: 949977 - RNA, 19 nt, Homo sapiens
  misc_RNA (1)...(19): siRNA sense strand
agggagagcuaugguguua

SEQ ID NO: 949978 - RNA, 19 nt, Homo sapiens
  misc_RNA (1)...(19): siRNA sense strand
aagauccgcucccuaauau

SEQ ID NO: 949979 - RNA, 19 nt, Homo sapiens
  misc_RNA (1)...(19): siRNA sense strand
ucuauaaucuacugagcua

SEQ ID NO: 949980 - RNA, 19 nt, Homo sapiens
  misc_RNA (1)...(19): siRNA sense strand
ugauauagauccaguguac

SEQ ID NO: 949981 - RNA, 19 nt, Homo sapiens
  misc_RNA (1)...(19): siRNA sense strand
gaaaauaagcucuaucuag

SEQ ID NO: 949982 - RNA, 19 nt, Homo sapiens
  misc_RNA (1)...(19): siRNA sense strand
aauaagauccgcucccuaa

SEQ ID NO: 949983 - RNA, 19 nt, Homo sapiens
  misc_RNA (1)...(19): siRNA sense strand
cuacaguuccuuucaguaa

SEQ ID NO: 949984 - RNA, 19 nt, Homo sapiens
  misc_RNA (1)...(19): siRNA sense strand
guuuaggacccaacauuua

SEQ ID NO: 949985 - RNA, 19 nt, Homo sapiens
  misc_RNA (1)...(19): siRNA sense strand
uaucauagagccaguuauu

SEQ ID NO: 949986 - RNA, 19 nt, Homo sapiens
  misc_RNA (1)...(19): siRNA sense strand
cagaaagaaucucaguguu

SEQ ID NO: 949987 - RNA, 19 nt, Homo sapiens
  misc_RNA (1)...(19): siRNA sense strand
uaaggcacuuggauauuga

SEQ ID NO: 949988 - RNA, 19 nt, Homo sapiens
  misc_RNA (1)...(19): siRNA sense strand
guccagaacuagagaagga

SEQ ID NO: 949989 - RNA, 19 nt, Homo sapiens
  misc_RNA (1)...(19): siRNA sense strand
ggacagaagguuugccaau

SEQ ID NO: 949990 - RNA, 19 nt, Homo sapiens
  misc_RNA (1)...(19): siRNA sense strand
ugaaucccaugcauaaaga

SEQ ID NO: 949991 - RNA, 19 nt, Homo sapiens
  misc_RNA (1)...(19): siRNA sense strand
uaaguggacugcucaugau

SEQ ID NO: 949992 - RNA, 19 nt, Homo sapiens
  misc_RNA (1)...(19): siRNA sense strand
ggaaguguggcaacaagaa

SEQ ID NO: 949993 - RNA, 19 nt, Homo sapiens
  misc_RNA (1)...(19): siRNA sense strand
uagaagcucuugacacagu

SEQ ID NO: 949994 - RNA, 19 nt, Homo sapiens
  misc_RNA (1)...(19): siRNA sense strand
ucaguguccuucaggcaua

SEQ ID NO: 949995 - RNA, 19 nt, Homo sapiens
  misc_RNA (1)...(19): siRNA sense strand
ugcauacacuucccaaauu

SEQ ID NO: 949996 - RNA, 19 nt, Homo sapiens
  misc_RNA (1)...(19): siRNA sense strand
cauaugggauccuuugaca

SEQ ID NO: 949997 - RNA, 19 nt, Homo sapiens
  misc_RNA (1)...(19): siRNA sense strand
guggacugcucaugaugua

SEQ ID NO: 949998 - RNA, 19 nt, Homo sapiens
  misc_RNA (1)...(19): siRNA sense strand
uuacuggcauccuuuauca

SEQ ID NO: 949999 - RNA, 19 nt, Homo sapiens
  misc_RNA (1)...(19): siRNA sense strand
caaaaugaauggagagaga

SEQ ID NO: 950000 - RNA, 19 nt, Homo sapiens
  misc_RNA (1)...(19): siRNA sense strand
agaaauggauuccuauugc

SEQ ID NO: 950001 - RNA, 19 nt, Homo sapiens
  misc_RNA (1)...(19): siRNA sense strand
ggacugcucaugauguaga

SEQ ID NO: 950002 - RNA, 19 nt, Homo sapiens
  misc_RNA (1)...(19): siRNA sense strand
gaaugccucuauaaucuac

SEQ ID NO: 950003 - RNA, 19 nt, Homo sapiens
  misc_RNA (1)...(19): siRNA sense strand
ccagaaagaaucucagugu

SEQ ID NO: 950004 - RNA, 19 nt, Homo sapiens
  misc_RNA (1)...(19): siRNA sense strand
ccacagccacaauguauau

SEQ ID NO: 950005 - RNA, 19 nt, Homo sapiens
  misc_RNA (1)...(19): siRNA sense strand
caacauugauauagaucca

SEQ ID NO: 950006 - RNA, 19 nt, Homo sapiens
  misc_RNA (1)...(19): siRNA sense strand
caggacggauaacauagaa

SEQ ID NO: 950007 - RNA, 19 nt, Homo sapiens
  misc_RNA (1)...(19): siRNA sense strand
ucauguguguccagaacua

SEQ ID NO: 950008 - RNA, 19 nt, Homo sapiens
  misc_RNA (1)...(19): siRNA sense strand
ucagagcauugagaaauau

SEQ ID NO: 950009 - RNA, 19 nt, Homo sapiens
  misc_RNA (1)...(19): siRNA sense strand
ugauauuacucuucagugu

SEQ ID NO: 950010 - RNA, 19 nt, Homo sapiens
  misc_RNA (1)...(19): siRNA sense strand
uagauccaguguacuuaaa

SEQ ID NO: 950011 - RNA, 19 nt, Homo sapiens
  misc_RNA (1)...(19): siRNA sense strand
ucacauaugggauccuuug

SEQ ID NO: 950012 - RNA, 19 nt, Homo sapiens
  misc_RNA (1)...(19): siRNA sense strand
gaucugcuacaguuccuuu

SEQ ID NO: 950013 - RNA, 19 nt, Homo sapiens
  misc_RNA (1)...(19): siRNA sense strand
uucagagcauugagaaaua

SEQ ID NO: 950014 - RNA, 19 nt, Homo sapiens
  misc_RNA (1)...(19): siRNA sense strand
caauuccgauaucaacgaa

SEQ ID NO: 950015 - RNA, 19 nt, Homo sapiens
  misc_RNA (1)...(19): siRNA sense strand
uugaaugccucuauaaucu

SEQ ID NO: 950016 - RNA, 19 nt, Homo sapiens
  misc_RNA (1)...(19): siRNA sense strand
ucgaagaauucuauguuca

SEQ ID NO: 950017 - RNA, 19 nt, Homo sapiens
  misc_RNA (1)...(19): siRNA sense strand
ucaaagggaacguaucuuc

SEQ ID NO: 950018 - RNA, 19 nt, Homo sapiens
  misc_RNA (1)...(19): siRNA sense strand
caaacuacaaucacagaau

SEQ ID NO: 950019 - RNA, 19 nt, Homo sapiens
  misc_RNA (1)...(19): siRNA sense strand
cgaagaauucuauguucaa

SEQ ID NO: 950020 - RNA, 19 nt, Homo sapiens
  misc_RNA (1)...(19): siRNA sense strand
caaagggaacguaucuuca

SEQ ID NO: 950021 - RNA, 19 nt, Homo sapiens
  misc_RNA (1)...(19): siRNA sense strand
agaaugcuaugacccugaa

SEQ ID NO: 950022 - RNA, 19 nt, Homo sapiens
  misc_RNA (1)...(19): siRNA sense strand
gauucagggagcagaaaua

SEQ ID NO: 950023 - RNA, 19 nt, Homo sapiens
  misc_RNA (1)...(19): siRNA sense strand
cagccacaauguauauaau

SEQ ID NO: 950024 - RNA, 19 nt, Homo sapiens
  misc_RNA (1)...(19): siRNA sense strand
gaaggcuugugagcgguuu

SEQ ID NO: 950025 - RNA, 19 nt, Homo sapiens
  misc_RNA (1)...(19): siRNA sense strand
aaaaggggcuccagcagaa

SEQ ID NO: 950026 - RNA, 19 nt, Homo sapiens
  misc_RNA (1)...(19): siRNA sense strand
cagcugacaugaaagaaaa

SEQ ID NO: 950027 - RNA, 19 nt, Homo sapiens
  misc_RNA (1)...(19): siRNA sense strand
ccuugaaucccaugcauaa

SEQ ID NO: 950028 - RNA, 19 nt, Homo sapiens
  misc_RNA (1)...(19): siRNA sense strand
gauccgcucccuaauauac

SEQ ID NO: 950029 - RNA, 19 nt, Homo sapiens
  misc_RNA (1)...(19): siRNA sense strand
uuaaguggacugcucauga

SEQ ID NO: 950030 - RNA, 19 nt, Homo sapiens
  misc_RNA (1)...(19): siRNA sense strand
ucacagcugacaugaaaga

SEQ ID NO: 950031 - RNA, 19 nt, Homo sapiens
  misc_RNA (1)...(19): siRNA sense strand
ggaaagaagaagcuaucau

SEQ ID NO: 950032 - RNA, 19 nt, Homo sapiens
  misc_RNA (1)...(19): siRNA sense strand
ccaguccacauccagaaua

SEQ ID NO: 950033 - RNA, 19 nt, Homo sapiens
  misc_RNA (1)...(19): siRNA sense strand
ggaauuagcugcucucuuc

SEQ ID NO: 950034 - RNA, 19 nt, Homo sapiens
  misc_RNA (1)...(19): siRNA sense strand
gcaauaagccuguuaguuu

SEQ ID NO: 950035 - RNA, 19 nt, Homo sapiens
  misc_RNA (1)...(19): siRNA sense strand
gcacagacauugccacaga

SEQ ID NO: 950036 - RNA, 19 nt, Homo sapiens
  misc_RNA (1)...(19): siRNA sense strand
gaaaagcucuucagcaaaa

SEQ ID NO: 950037 - RNA, 19 nt, Homo sapiens
  misc_RNA (1)...(19): siRNA sense strand
ugacuuggcuguccuuaaa

SEQ ID NO: 950038 - RNA, 19 nt, Homo sapiens
  misc_RNA (1)...(19): siRNA sense strand
gguaagaacugacuaugug

SEQ ID NO: 950039 - RNA, 19 nt, Homo sapiens
  misc_RNA (1)...(19): siRNA sense strand
cuucuucucucuucuauua

SEQ ID NO: 950040 - RNA, 19 nt, Homo sapiens
  misc_RNA (1)...(19): siRNA sense strand
caucaugacucgaguaaau

SEQ ID NO: 950041 - RNA, 19 nt, Homo sapiens
  misc_RNA (1)...(19): siRNA sense strand
gacgaaagcuguggaucua

SEQ ID NO: 950042 - RNA, 19 nt, Homo sapiens
  misc_RNA (1)...(19): siRNA sense strand
gaacucaucuuagccuugu

SEQ ID NO: 950043 - RNA, 19 nt, Homo sapiens
  misc_RNA (1)...(19): siRNA sense strand
caauaagccuguuaguuuc

SEQ ID NO: 950044 - RNA, 19 nt, Homo sapiens
  misc_RNA (1)...(19): siRNA sense strand
uaaagaagcaccacgagaa

SEQ ID NO: 950045 - RNA, 19 nt, Homo sapiens
  misc_RNA (1)...(19): siRNA sense strand
caacagaagccucaaguuc

SEQ ID NO: 950046 - RNA, 19 nt, Homo sapiens
  misc_RNA (1)...(19): siRNA sense strand
gcacucagguaaauacagu

SEQ ID NO: 950047 - RNA, 19 nt, Homo sapiens
  misc_RNA (1)...(19): siRNA sense strand
ccugagaucuucuuugaug

SEQ ID NO: 950048 - RNA, 19 nt, Homo sapiens
  misc_RNA (1)...(19): siRNA sense strand
gaaaaccgcagauaaagua

SEQ ID NO: 950049 - RNA, 19 nt, Homo sapiens
  misc_RNA (1)...(19): siRNA sense strand
ggcaggaaguguuaaguga

SEQ ID NO: 950050 - RNA, 19 nt, Homo sapiens
  misc_RNA (1)...(19): siRNA sense strand
ggaaacaucagccagauca

SEQ ID NO: 950051 - RNA, 19 nt, Homo sapiens
  misc_RNA (1)...(19): siRNA sense strand
ggacagugaccugaagaua

SEQ ID NO: 950052 - RNA, 19 nt, Homo sapiens
  misc_RNA (1)...(19): siRNA sense strand
gaucaggccuucuguaagc

SEQ ID NO: 950053 - RNA, 19 nt, Homo sapiens
  misc_RNA (1)...(19): siRNA sense strand
gacagugaccugaagauaa

SEQ ID NO: 950054 - RNA, 19 nt, Homo sapiens
  misc_RNA (1)...(19): siRNA sense strand
gaagaggccacguuggauu

SEQ ID NO: 950055 - RNA, 19 nt, Homo sapiens
  misc_RNA (1)...(19): siRNA sense strand
caggaaguguuaagugauu

SEQ ID NO: 950056 - RNA, 19 nt, Homo sapiens
  misc_RNA (1)...(19): siRNA sense strand
gugaacaccuccagcaguu

SEQ ID NO: 950057 - RNA, 19 nt, Homo sapiens
  misc_RNA (1)...(19): siRNA sense strand
acagugaccugaagauaau

SEQ ID NO: 950058 - RNA, 19 nt, Homo sapiens
  misc_RNA (1)...(19): siRNA sense strand
gcaggagcguuacagguau

SEQ ID NO: 950059 - RNA, 19 nt, Homo sapiens
  misc_RNA (1)...(19): siRNA sense strand
gcaguuaugcuucaaguca

SEQ ID NO: 950060 - RNA, 19 nt, Homo sapiens
  misc_RNA (1)...(19): siRNA sense strand
gacagaacaucaucaagca

SEQ ID NO: 950061 - RNA, 19 nt, Homo sapiens
  misc_RNA (1)...(19): siRNA sense strand
gagaagaaacaauggauuc

SEQ ID NO: 950062 - RNA, 19 nt, Homo sapiens
  misc_RNA (1)...(19): siRNA sense strand
ggaaguugcuuggccaauc

SEQ ID NO: 950063 - RNA, 19 nt, Homo sapiens
  misc_RNA (1)...(19): siRNA sense strand
caacagcauuccacucaca

SEQ ID NO: 950064 - RNA, 19 nt, Homo sapiens
  misc_RNA (1)...(19): siRNA sense strand
gagcuguuccuuccaguuu

SEQ ID NO: 950065 - RNA, 19 nt, Homo sapiens
  misc_RNA (1)...(19): siRNA sense strand
gcgaaucacuccggacaug

SEQ ID NO: 950066 - RNA, 19 nt, Homo sapiens
  misc_RNA (1)...(19): siRNA sense strand
gcacaguggccucuucaga

SEQ ID NO: 950067 - RNA, 19 nt, Homo sapiens
  misc_RNA (1)...(19): siRNA sense strand
cagaaaagcucuucagcaa

SEQ ID NO: 950068 - RNA, 19 nt, Homo sapiens
  misc_RNA (1)...(19): siRNA sense strand
gaaacccucugcacauugc

SEQ ID NO: 950069 - RNA, 19 nt, Homo sapiens
  misc_RNA (1)...(19): siRNA sense strand
cuacagcuccgucuccuaa

SEQ ID NO: 950070 - RNA, 19 nt, Homo sapiens
  misc_RNA (1)...(19): siRNA sense strand
aaagaucccugugugaaau

SEQ ID NO: 950071 - RNA, 19 nt, Homo sapiens
  misc_RNA (1)...(19): siRNA sense strand
cacguuggauuuacaagaa

SEQ ID NO: 950072 - RNA, 19 nt, Homo sapiens
  misc_RNA (1)...(19): siRNA sense strand
gagaucuucuuugauguug

SEQ ID NO: 950073 - RNA, 19 nt, Homo sapiens
  misc_RNA (1)...(19): siRNA sense strand
gcgguguccuuacccagua

SEQ ID NO: 950074 - RNA, 19 nt, Homo sapiens
  misc_RNA (1)...(19): siRNA sense strand
gaccugaagauaauguuaa

SEQ ID NO: 950075 - RNA, 19 nt, Homo sapiens
  misc_RNA (1)...(19): siRNA sense strand
ggucaaguaccggcaguua

SEQ ID NO: 950076 - RNA, 19 nt, Homo sapiens
  misc_RNA (1)...(19): siRNA sense strand
gaacaccuccagcaguuuc

SEQ ID NO: 950077 - RNA, 19 nt, Homo sapiens
  misc_RNA (1)...(19): siRNA sense strand
ggagaagaaacaauggauu

SEQ ID NO: 950078 - RNA, 19 nt, Homo sapiens
  misc_RNA (1)...(19): siRNA sense strand
gaguaccuguggagaagaa

SEQ ID NO: 950079 - RNA, 19 nt, Homo sapiens
  misc_RNA (1)...(19): siRNA sense strand
ucugugaacugcuuaagga

SEQ ID NO: 950080 - RNA, 19 nt, Homo sapiens
  misc_RNA (1)...(19): siRNA sense strand
ucagguaaauacaguagug

SEQ ID NO: 950081 - RNA, 19 nt, Homo sapiens
  misc_RNA (1)...(19): siRNA sense strand
gaguguggcugaccagaag

SEQ ID NO: 950082 - RNA, 19 nt, Homo sapiens
  misc_RNA (1)...(19): siRNA sense strand
ggacaugauggccacauug

SEQ ID NO: 950083 - RNA, 19 nt, Homo sapiens
  misc_RNA (1)...(19): siRNA sense strand
ggacgaaagcuguggaucu

SEQ ID NO: 950084 - RNA, 19 nt, Homo sapiens
  misc_RNA (1)...(19): siRNA sense strand
ggucuuaagggaagugaaa

SEQ ID NO: 950085 - RNA, 19 nt, Homo sapiens
  misc_RNA (1)...(19): siRNA sense strand
gcacuggaucggcuacauu

SEQ ID NO: 950086 - RNA, 19 nt, Homo sapiens
  misc_RNA (1)...(19): siRNA sense strand
gcuuaaggacucccaguuu

SEQ ID NO: 950087 - RNA, 19 nt, Homo sapiens
  misc_RNA (1)...(19): siRNA sense strand
caggagcguuacagguaua

SEQ ID NO: 950088 - RNA, 19 nt, Homo sapiens
  misc_RNA (1)...(19): siRNA sense strand
ggaaacccucugcacauug

SEQ ID NO: 950089 - RNA, 19 nt, Homo sapiens
  misc_RNA (1)...(19): siRNA sense strand
ggagugaagaagaguuuga

SEQ ID NO: 950090 - RNA, 19 nt, Homo sapiens
  misc_RNA (1)...(19): siRNA sense strand
ggagaaagucgagcuguuc

SEQ ID NO: 950091 - RNA, 19 nt, Homo sapiens
  misc_RNA (1)...(19): siRNA sense strand
gaaauaucuuccagcuucu

SEQ ID NO: 950092 - RNA, 19 nt, Homo sapiens
  misc_RNA (1)...(19): siRNA sense strand
ggaccugacucucaaugac

SEQ ID NO: 950093 - RNA, 19 nt, Homo sapiens
  misc_RNA (1)...(19): siRNA sense strand
gcacauugcccagaagcuu

SEQ ID NO: 950094 - RNA, 19 nt, Homo sapiens
  misc_RNA (1)...(19): siRNA sense strand
gugaucagccagccaauga

SEQ ID NO: 950095 - RNA, 19 nt, Homo sapiens
  misc_RNA (1)...(19): siRNA sense strand
ccaaacaggcaacagcauu

SEQ ID NO: 950096 - RNA, 19 nt, Homo sapiens
  misc_RNA (1)...(19): siRNA sense strand
cagcucagaugccacaaca

SEQ ID NO: 950097 - RNA, 19 nt, Homo sapiens
  misc_RNA (1)...(19): siRNA sense strand
gaucuucuuugauguuguc

SEQ ID NO: 950098 - RNA, 19 nt, Homo sapiens
  misc_RNA (1)...(19): siRNA sense strand
caguuucucuccauuuguu

SEQ ID NO: 950099 - RNA, 19 nt, Homo sapiens
  misc_RNA (1)...(19): siRNA sense strand
aagaaacaauggauuccuu

SEQ ID NO: 950100 - RNA, 19 nt, Homo sapiens
  misc_RNA (1)...(19): siRNA sense strand
gaccauaugcugacagauc

SEQ ID NO: 950101 - RNA, 19 nt, Homo sapiens
  misc_RNA (1)...(19): siRNA sense strand
caccagcacucagguaaau

SEQ ID NO: 950102 - RNA, 19 nt, Homo sapiens
  misc_RNA (1)...(19): siRNA sense strand
aaggagaccucgcucaaca

SEQ ID NO: 950103 - RNA, 19 nt, Homo sapiens
  misc_RNA (1)...(19): siRNA sense strand
gcaguaucuugcuggagaa

SEQ ID NO: 950104 - RNA, 19 nt, Homo sapiens
  misc_RNA (1)...(19): siRNA sense strand
agaaacaauggauuccuua

SEQ ID NO: 950105 - RNA, 19 nt, Homo sapiens
  misc_RNA (1)...(19): siRNA sense strand
ucaaguaccggcaguuaug

SEQ ID NO: 950106 - RNA, 19 nt, Homo sapiens
  misc_RNA (1)...(19): siRNA sense strand
uggaaacccucugcacauu

SEQ ID NO: 950107 - RNA, 19 nt, Homo sapiens
  misc_RNA (1)...(19): siRNA sense strand
ccagccagcucccucaaca

SEQ ID NO: 950108 - RNA, 19 nt, Homo sapiens
  misc_RNA (1)...(19): siRNA sense strand
gccaaucccaagauaauga

SEQ ID NO: 950109 - RNA, 19 nt, Homo sapiens
  misc_RNA (1)...(19): siRNA sense strand
gacaucaugacucgaguaa

SEQ ID NO: 950110 - RNA, 19 nt, Homo sapiens
  misc_RNA (1)...(19): siRNA sense strand
aagaucaggccuucuguaa

SEQ ID NO: 950111 - RNA, 19 nt, Homo sapiens
  misc_RNA (1)...(19): siRNA sense strand
ccaaagaucaggccuucug

SEQ ID NO: 950112 - RNA, 19 nt, Homo sapiens
  misc_RNA (1)...(19): siRNA sense strand
gaaguugcuuggccaaucc

SEQ ID NO: 950113 - RNA, 19 nt, Homo sapiens
  misc_RNA (1)...(19): siRNA sense strand
gaaagucgagcuguuccuu

SEQ ID NO: 950114 - RNA, 19 nt, Homo sapiens
  misc_RNA (1)...(19): siRNA sense strand
ggcaauuccugcuaucaag

SEQ ID NO: 950115 - RNA, 19 nt, Homo sapiens
  misc_RNA (1)...(19): siRNA sense strand
cagaguaccuguggagaag

SEQ ID NO: 950116 - RNA, 19 nt, Homo sapiens
  misc_RNA (1)...(19): siRNA sense strand
uaccagcccugcaguaucu

SEQ ID NO: 950117 - RNA, 19 nt, Homo sapiens
  misc_RNA (1)...(19): siRNA sense strand
ggcaacagcauuccacuca

SEQ ID NO: 950118 - RNA, 19 nt, Homo sapiens
  misc_RNA (1)...(19): siRNA sense strand
cuuaaggacucccaguuuc

SEQ ID NO: 950119 - RNA, 19 nt, Homo sapiens
  misc_RNA (1)...(19): siRNA sense strand
agagaucugugaacugcuu

SEQ ID NO: 950120 - RNA, 19 nt, Homo sapiens
  misc_RNA (1)...(19): siRNA sense strand
guaucuugcuggagaaagu

SEQ ID NO: 950121 - RNA, 19 nt, Homo sapiens
  misc_RNA (1)...(19): siRNA sense strand
ggggagaacuuccgcuuug

SEQ ID NO: 950122 - RNA, 19 nt, Homo sapiens
  misc_RNA (1)...(19): siRNA sense strand
gaaacaauggauuccuuag

SEQ ID NO: 950123 - RNA, 19 nt, Homo sapiens
  misc_RNA (1)...(19): siRNA sense strand
uugaagaucucagcucaug

SEQ ID NO: 950124 - RNA, 19 nt, Homo sapiens
  misc_RNA (1)...(19): siRNA sense strand
ccaguuuccugaagacagu

SEQ ID NO: 950125 - RNA, 19 nt, Homo sapiens
  misc_RNA (1)...(19): siRNA sense strand
ggcaauaagccuguuaguu

SEQ ID NO: 950126 - RNA, 19 nt, Homo sapiens
  misc_RNA (1)...(19): siRNA sense strand
ccacacagaccaaaguagu

SEQ ID NO: 950127 - RNA, 19 nt, Homo sapiens
  misc_RNA (1)...(19): siRNA sense strand
caucugggaacaaugcuuu

SEQ ID NO: 950128 - RNA, 19 nt, Homo sapiens
  misc_RNA (1)...(19): siRNA sense strand
aaacaauggauuccuuaga

SEQ ID NO: 950129 - RNA, 19 nt, Homo sapiens
  misc_RNA (1)...(19): siRNA sense strand
cagccagcccugugaguaa

SEQ ID NO: 950130 - RNA, 19 nt, Homo sapiens
  misc_RNA (1)...(19): siRNA sense strand
ggacaggaggcaacacuac

SEQ ID NO: 950131 - RNA, 19 nt, Homo sapiens
  misc_RNA (1)...(19): siRNA sense strand
ccucuuccaucaccacaga

SEQ ID NO: 950132 - RNA, 19 nt, Homo sapiens
  misc_RNA (1)...(19): siRNA sense strand
caaacaggcaacagcauuc

SEQ ID NO: 950133 - RNA, 19 nt, Homo sapiens
  misc_RNA (1)...(19): siRNA sense strand
gcagagagguugcaauaaa

SEQ ID NO: 950134 - RNA, 19 nt, Homo sapiens
  misc_RNA (1)...(19): siRNA sense strand
gaaauacgaugaaaucaca

SEQ ID NO: 950135 - RNA, 19 nt, Homo sapiens
  misc_RNA (1)...(19): siRNA sense strand
ggaaugacacgacgaaaua

SEQ ID NO: 950136 - RNA, 19 nt, Homo sapiens
  misc_RNA (1)...(19): siRNA sense strand
ugaagaagaugaacucaaa

SEQ ID NO: 950137 - RNA, 19 nt, Homo sapiens
  misc_RNA (1)...(19): siRNA sense strand
gaaguuaccucucguacca

SEQ ID NO: 950138 - RNA, 19 nt, Homo sapiens
  misc_RNA (1)...(19): siRNA sense strand
gaaguuauucgaagucauu

SEQ ID NO: 950139 - RNA, 19 nt, Homo sapiens
  misc_RNA (1)...(19): siRNA sense strand
gaacugagagagagaguau

SEQ ID NO: 950140 - RNA, 19 nt, Homo sapiens
  misc_RNA (1)...(19): siRNA sense strand
gcagugaucucaacaacag

SEQ ID NO: 950141 - RNA, 19 nt, Homo sapiens
  misc_RNA (1)...(19): siRNA sense strand
gaaaucacagcuacauauu

SEQ ID NO: 950142 - RNA, 19 nt, Homo sapiens
  misc_RNA (1)...(19): siRNA sense strand
aaucacagcuacauauuug

SEQ ID NO: 950143 - RNA, 19 nt, Homo sapiens
  misc_RNA (1)...(19): siRNA sense strand
gcgguaaacucgacacguu

SEQ ID NO: 950144 - RNA, 19 nt, Homo sapiens
  misc_RNA (1)...(19): siRNA sense strand
aagaugaacucaaaccauu

SEQ ID NO: 950145 - RNA, 19 nt, Homo sapiens
  misc_RNA (1)...(19): siRNA sense strand
ggacauccauagccuucaa

SEQ ID NO: 950146 - RNA, 19 nt, Homo sapiens
  misc_RNA (1)...(19): siRNA sense strand
ggugcuaaauccaauuaaa

SEQ ID NO: 950147 - RNA, 19 nt, Homo sapiens
  misc_RNA (1)...(19): siRNA sense strand
gaugaaauacgaugaaauc

SEQ ID NO: 950148 - RNA, 19 nt, Homo sapiens
  misc_RNA (1)...(19): siRNA sense strand
ggaaugcaaguaauccuaa

SEQ ID NO: 950149 - RNA, 19 nt, Homo sapiens
  misc_RNA (1)...(19): siRNA sense strand
ggaaauccgcaaaguguug

SEQ ID NO: 950150 - RNA, 19 nt, Homo sapiens
  misc_RNA (1)...(19): siRNA sense strand
gaccagcuauuccuucugu

SEQ ID NO: 950151 - RNA, 19 nt, Homo sapiens
  misc_RNA (1)...(19): siRNA sense strand
gaccagcacugcagauagu

SEQ ID NO: 950152 - RNA, 19 nt, Homo sapiens
  misc_RNA (1)...(19): siRNA sense strand
cacaaggagucgcaaugua

SEQ ID NO: 950153 - RNA, 19 nt, Homo sapiens
  misc_RNA (1)...(19): siRNA sense strand
gaaaaccacuaguucaaug

SEQ ID NO: 950154 - RNA, 19 nt, Homo sapiens
  misc_RNA (1)...(19): siRNA sense strand
guucaauacugccaucaga

SEQ ID NO: 950155 - RNA, 19 nt, Homo sapiens
  misc_RNA (1)...(19): siRNA sense strand
ugaaaucacagcuacauau

SEQ ID NO: 950156 - RNA, 19 nt, Homo sapiens
  misc_RNA (1)...(19): siRNA sense strand
auagugaccucaaagaaga

SEQ ID NO: 950157 - RNA, 19 nt, Homo sapiens
  misc_RNA (1)...(19): siRNA sense strand
aaugggauauucacaagaa

SEQ ID NO: 950158 - RNA, 19 nt, Homo sapiens
  misc_RNA (1)...(19): siRNA sense strand
gcagagggagcgcuucuug

SEQ ID NO: 950159 - RNA, 19 nt, Homo sapiens
  misc_RNA (1)...(19): siRNA sense strand
gccaauaacugcgacuaug

SEQ ID NO: 950160 - RNA, 19 nt, Homo sapiens
  misc_RNA (1)...(19): siRNA sense strand
gacgaaauacuuauguuug

SEQ ID NO: 950161 - RNA, 19 nt, Homo sapiens
  misc_RNA (1)...(19): siRNA sense strand
cgacgaaauacuuauguuu

SEQ ID NO: 950162 - RNA, 19 nt, Homo sapiens
  misc_RNA (1)...(19): siRNA sense strand
ugacacgacgaaauacuua

SEQ ID NO: 950163 - RNA, 19 nt, Homo sapiens
  misc_RNA (1)...(19): siRNA sense strand
gauugugucugcaguucaa

SEQ ID NO: 950164 - RNA, 19 nt, Homo sapiens
  misc_RNA (1)...(19): siRNA sense strand
cgaauccgcuucccaagag

SEQ ID NO: 950165 - RNA, 19 nt, Homo sapiens
  misc_RNA (1)...(19): siRNA sense strand
gcuagugauuccaguucua

SEQ ID NO: 950166 - RNA, 19 nt, Homo sapiens
  misc_RNA (1)...(19): siRNA sense strand
gaagaugaacucaaaccau

SEQ ID NO: 950167 - RNA, 19 nt, Homo sapiens
  misc_RNA (1)...(19): siRNA sense strand
aaacagcacuauuccugau

SEQ ID NO: 950168 - RNA, 19 nt, Homo sapiens
  misc_RNA (1)...(19): siRNA sense strand
gcaaguaauccuaauaagg

SEQ ID NO: 950169 - RNA, 19 nt, Homo sapiens
  misc_RNA (1)...(19): siRNA sense strand
gaaugcaaguaauccuaau

SEQ ID NO: 950170 - RNA, 19 nt, Homo sapiens
  misc_RNA (1)...(19): siRNA sense strand
ccucaaagaagauggaauu

SEQ ID NO: 950171 - RNA, 19 nt, Homo sapiens
  misc_RNA (1)...(19): siRNA sense strand
gagcagugaucucaacaac

SEQ ID NO: 950172 - RNA, 19 nt, Homo sapiens
  misc_RNA (1)...(19): siRNA sense strand
agagggaaauacagaauuc

SEQ ID NO: 950173 - RNA, 19 nt, Homo sapiens
  misc_RNA (1)...(19): siRNA sense strand
ccaauaacugcgacuauga

SEQ ID NO: 950174 - RNA, 19 nt, Homo sapiens
  misc_RNA (1)...(19): siRNA sense strand
gcagugcuguuggaggaaa

SEQ ID NO: 950175 - RNA, 19 nt, Homo sapiens
  misc_RNA (1)...(19): siRNA sense strand
gagagagagaguauuaaga

SEQ ID NO: 950176 - RNA, 19 nt, Homo sapiens
  misc_RNA (1)...(19): siRNA sense strand
gauagugaccucaaagaag

SEQ ID NO: 950177 - RNA, 19 nt, Homo sapiens
  misc_RNA (1)...(19): siRNA sense strand
uagcagcaaucuuucacuu

SEQ ID NO: 950178 - RNA, 19 nt, Homo sapiens
  misc_RNA (1)...(19): siRNA sense strand
cuagacaucucagaccaaa

SEQ ID NO: 950179 - RNA, 19 nt, Homo sapiens
  misc_RNA (1)...(19): siRNA sense strand
ggagcucgguguagaaacu

SEQ ID NO: 950180 - RNA, 19 nt, Homo sapiens
  misc_RNA (1)...(19): siRNA sense strand
uagagcaaaucaugaagga

SEQ ID NO: 950181 - RNA, 19 nt, Homo sapiens
  misc_RNA (1)...(19): siRNA sense strand
ggcaagacauauccuuaca

SEQ ID NO: 950182 - RNA, 19 nt, Homo sapiens
  misc_RNA (1)...(19): siRNA sense strand
gagaugggcacgcggagaa

SEQ ID NO: 950183 - RNA, 19 nt, Homo sapiens
  misc_RNA (1)...(19): siRNA sense strand
ggagaugggcgucaagaag

SEQ ID NO: 950184 - RNA, 19 nt, Homo sapiens
  misc_RNA (1)...(19): siRNA sense strand
cggcgaaccgcaacauaua

SEQ ID NO: 950185 - RNA, 19 nt, Homo sapiens
  misc_RNA (1)...(19): siRNA sense strand
caacacacaguaucaguag

SEQ ID NO: 950186 - RNA, 19 nt, Homo sapiens
  misc_RNA (1)...(19): siRNA sense strand
auacuuauguuugcaguga

SEQ ID NO: 950187 - RNA, 19 nt, Homo sapiens
  misc_RNA (1)...(19): siRNA sense strand
gaaauaugacgggccagaa

SEQ ID NO: 950188 - RNA, 19 nt, Homo sapiens
  misc_RNA (1)...(19): siRNA sense strand
cacagcaucugguggaaug

SEQ ID NO: 950189 - RNA, 19 nt, Homo sapiens
  misc_RNA (1)...(19): siRNA sense strand
ugaaugaacgagacacuga

SEQ ID NO: 950190 - RNA, 19 nt, Homo sapiens
  misc_RNA (1)...(19): siRNA sense strand
ucaauacugccaucagaaa

SEQ ID NO: 950191 - RNA, 19 nt, Homo sapiens
  misc_RNA (1)...(19): siRNA sense strand
ccaugaagccacaccauug

SEQ ID NO: 950192 - RNA, 19 nt, Homo sapiens
  misc_RNA (1)...(19): siRNA sense strand
acugagagagagaguauua

SEQ ID NO: 950193 - RNA, 19 nt, Homo sapiens
  misc_RNA (1)...(19): siRNA sense strand
aggcagagagguugcaaua

SEQ ID NO: 950194 - RNA, 19 nt, Homo sapiens
  misc_RNA (1)...(19): siRNA sense strand
aaggacagguggaucaaug

SEQ ID NO: 950195 - RNA, 19 nt, Homo sapiens
  misc_RNA (1)...(19): siRNA sense strand
ccucaaggcugaaaaucua

SEQ ID NO: 950196 - RNA, 19 nt, Homo sapiens
  misc_RNA (1)...(19): siRNA sense strand
caagaaguuaccucucgua

SEQ ID NO: 950197 - RNA, 19 nt, Homo sapiens
  misc_RNA (1)...(19): siRNA sense strand
gagaugggcgucaagaagu

SEQ ID NO: 950198 - RNA, 19 nt, Homo sapiens
  misc_RNA (1)...(19): siRNA sense strand
ccagucuccucaccacaaa

SEQ ID NO: 950199 - RNA, 19 nt, Homo sapiens
  misc_RNA (1)...(19): siRNA sense strand
gaaugaacgagacacugaa

SEQ ID NO: 950200 - RNA, 19 nt, Homo sapiens
  misc_RNA (1)...(19): siRNA sense strand
acaaggagucgcaauguau

SEQ ID NO: 950201 - RNA, 19 nt, Homo sapiens
  misc_RNA (1)...(19): siRNA sense strand
gaaccgcaacauauaaugg

SEQ ID NO: 950202 - RNA, 19 nt, Homo sapiens
  misc_RNA (1)...(19): siRNA sense strand
gggaaugcaaguaauccua

SEQ ID NO: 950203 - RNA, 19 nt, Homo sapiens
  misc_RNA (1)...(19): siRNA sense strand
agcaaugaauuuacuguug

SEQ ID NO: 950204 - RNA, 19 nt, Homo sapiens
  misc_RNA (1)...(19): siRNA sense strand
ucaacacacaguaucagua

SEQ ID NO: 950205 - RNA, 19 nt, Homo sapiens
  misc_RNA (1)...(19): siRNA sense strand
guggcucacuucccuuuga

SEQ ID NO: 950206 - RNA, 19 nt, Homo sapiens
  misc_RNA (1)...(19): siRNA sense strand
ggcugaaaaucuauuguua

SEQ ID NO: 950207 - RNA, 19 nt, Homo sapiens
  misc_RNA (1)...(19): siRNA sense strand
cuaaaggaacugagagaga

SEQ ID NO: 950208 - RNA, 19 nt, Homo sapiens
  misc_RNA (1)...(19): siRNA sense strand
gggauauucacaagaagaa

SEQ ID NO: 950209 - RNA, 19 nt, Homo sapiens
  misc_RNA (1)...(19): siRNA sense strand
augccgauaugaacauuaa

SEQ ID NO: 950210 - RNA, 19 nt, Homo sapiens
  misc_RNA (1)...(19): siRNA sense strand
ccacugucccuaguaguaa

SEQ ID NO: 950211 - RNA, 19 nt, Homo sapiens
  misc_RNA (1)...(19): siRNA sense strand
ucacagcuacauauuuguu

SEQ ID NO: 950212 - RNA, 19 nt, Homo sapiens
  misc_RNA (1)...(19): siRNA sense strand
guaagaugaaauacgauga

SEQ ID NO: 950213 - RNA, 19 nt, Homo sapiens
  misc_RNA (1)...(19): siRNA sense strand
cagagagguugcaauaaaa

SEQ ID NO: 950214 - RNA, 19 nt, Homo sapiens
  misc_RNA (1)...(19): siRNA sense strand
cgaaauacuuauguuugca

SEQ ID NO: 950215 - RNA, 19 nt, Homo sapiens
  misc_RNA (1)...(19): siRNA sense strand
uaaggcggauauuccugaa

SEQ ID NO: 950216 - RNA, 19 nt, Homo sapiens
  misc_RNA (1)...(19): siRNA sense strand
gaugaaaucacagcuacau

SEQ ID NO: 950217 - RNA, 19 nt, Homo sapiens
  misc_RNA (1)...(19): siRNA sense strand
aaagugcagagaaguguuu

SEQ ID NO: 950218 - RNA, 19 nt, Homo sapiens
  misc_RNA (1)...(19): siRNA sense strand
cgggaaauccgcaaagugu

SEQ ID NO: 950219 - RNA, 19 nt, Homo sapiens
  misc_RNA (1)...(19): siRNA sense strand
ggcgaaccgcaacauauaa

SEQ ID NO: 950220 - RNA, 19 nt, Homo sapiens
  misc_RNA (1)...(19): siRNA sense strand
gcagaugaacaaccucaca

SEQ ID NO: 950221 - RNA, 19 nt, Homo sapiens
  misc_RNA (1)...(19): siRNA sense strand
gaugggcgucaagaaguua

SEQ ID NO: 950222 - RNA, 19 nt, Homo sapiens
  misc_RNA (1)...(19): siRNA sense strand
gcuccacugucccuaguag

SEQ ID NO: 950223 - RNA, 19 nt, Homo sapiens
  misc_RNA (1)...(19): siRNA sense strand
gcagauagugaccucaaag

SEQ ID NO: 950224 - RNA, 19 nt, Homo sapiens
  misc_RNA (1)...(19): siRNA sense strand
cagagaaguaagaauaaug

SEQ ID NO: 950225 - RNA, 19 nt, Homo sapiens
  misc_RNA (1)...(19): siRNA sense strand
ucaaagaagauggaauuuc

SEQ ID NO: 950226 - RNA, 19 nt, Homo sapiens
  misc_RNA (1)...(19): siRNA sense strand
gcaugaagaagaugaacuc

SEQ ID NO: 950227 - RNA, 19 nt, Homo sapiens
  misc_RNA (1)...(19): siRNA sense strand
uaagagggaaauacagaau

SEQ ID NO: 950228 - RNA, 19 nt, Homo sapiens
  misc_RNA (1)...(19): siRNA sense strand
guuauucgaagucauugaa

SEQ ID NO: 950229 - RNA, 19 nt, Homo sapiens
  misc_RNA (1)...(19): siRNA sense strand
aggcuccacuaaucucuuu

SEQ ID NO: 950230 - RNA, 19 nt, Homo sapiens
  misc_RNA (1)...(19): siRNA sense strand
ucacaucggaaacuacaga

SEQ ID NO: 950231 - RNA, 19 nt, Homo sapiens
  misc_RNA (1)...(19): siRNA sense strand
agaugggcgucaagaaguu

SEQ ID NO: 950232 - RNA, 19 nt, Homo sapiens
  misc_RNA (1)...(19): siRNA sense strand
gcgaaccgcaacauauaau

SEQ ID NO: 950233 - RNA, 19 nt, Homo sapiens
  misc_RNA (1)...(19): siRNA sense strand
gaacgaagauccacacuug

SEQ ID NO: 950234 - RNA, 19 nt, Homo sapiens
  misc_RNA (1)...(19): siRNA sense strand
uguaagagauggcaugaua

SEQ ID NO: 950235 - RNA, 19 nt, Homo sapiens
  misc_RNA (1)...(19): siRNA sense strand
caggcuacauggaguauua

SEQ ID NO: 950236 - RNA, 19 nt, Homo sapiens
  misc_RNA (1)...(19): siRNA sense strand
gcagucaacucaagcacaa

SEQ ID NO: 950237 - RNA, 19 nt, Homo sapiens
  misc_RNA (1)...(19): siRNA sense strand
cuacuucucucgaugcuaa

SEQ ID NO: 950238 - RNA, 19 nt, Homo sapiens
  misc_RNA (1)...(19): siRNA sense strand
gauccacacuugaggacua

SEQ ID NO: 950239 - RNA, 19 nt, Homo sapiens
  misc_RNA (1)...(19): siRNA sense strand
gagauggcaugauauggaa

SEQ ID NO: 950240 - RNA, 19 nt, Homo sapiens
  misc_RNA (1)...(19): siRNA sense strand
gcagugggcugggaauuuc

SEQ ID NO: 950241 - RNA, 19 nt, Homo sapiens
  misc_RNA (1)...(19): siRNA sense strand
ccagugaucucucugacuu

SEQ ID NO: 950242 - RNA, 19 nt, Homo sapiens
  misc_RNA (1)...(19): siRNA sense strand
ggcaugauauggaagugua

SEQ ID NO: 950243 - RNA, 19 nt, Homo sapiens
  misc_RNA (1)...(19): siRNA sense strand
ucaaucaguuuccaagcua

SEQ ID NO: 950244 - RNA, 19 nt, Homo sapiens
  misc_RNA (1)...(19): siRNA sense strand
gcaaggaaugccaguguaa

SEQ ID NO: 950245 - RNA, 19 nt, Homo sapiens
  misc_RNA (1)...(19): siRNA sense strand
ccacauggcagaaaugaug

SEQ ID NO: 950246 - RNA, 19 nt, Homo sapiens
  misc_RNA (1)...(19): siRNA sense strand
ccuccaaaguuuauacauu

SEQ ID NO: 950247 - RNA, 19 nt, Homo sapiens
  misc_RNA (1)...(19): siRNA sense strand
gcacaugcauaggcaagga

SEQ ID NO: 950248 - RNA, 19 nt, Homo sapiens
  misc_RNA (1)...(19): siRNA sense strand
gcaguacaauagcgucuuc

SEQ ID NO: 950249 - RNA, 19 nt, Homo sapiens
  misc_RNA (1)...(19): siRNA sense strand
gaacagcaacagaugauac

SEQ ID NO: 950250 - RNA, 19 nt, Homo sapiens
  misc_RNA (1)...(19): siRNA sense strand
uggaugaugugaccauuga

SEQ ID NO: 950251 - RNA, 19 nt, Homo sapiens
  misc_RNA (1)...(19): siRNA sense strand
cuccaaaguuuauacauug

SEQ ID NO: 950252 - RNA, 19 nt, Homo sapiens
  misc_RNA (1)...(19): siRNA sense strand
cagaugauaccaaaccuaa

SEQ ID NO: 950253 - RNA, 19 nt, Homo sapiens
  misc_RNA (1)...(19): siRNA sense strand
caucagagaguaagaagga

SEQ ID NO: 950254 - RNA, 19 nt, Homo sapiens
  misc_RNA (1)...(19): siRNA sense strand
ccacaugugcaucuaaaga

SEQ ID NO: 950255 - RNA, 19 nt, Homo sapiens
  misc_RNA (1)...(19): siRNA sense strand
uaagagauggcaugauaug

SEQ ID NO: 950256 - RNA, 19 nt, Homo sapiens
  misc_RNA (1)...(19): siRNA sense strand
ggaaugccaguguaagaga

SEQ ID NO: 950257 - RNA, 19 nt, Homo sapiens
  misc_RNA (1)...(19): siRNA sense strand
ucuacagacugcuuucaaa

SEQ ID NO: 950258 - RNA, 19 nt, Homo sapiens
  misc_RNA (1)...(19): siRNA sense strand
cagacugacucaccugaug

SEQ ID NO: 950259 - RNA, 19 nt, Homo sapiens
  misc_RNA (1)...(19): siRNA sense strand
gaaugccaguguaagagau

SEQ ID NO: 950260 - RNA, 19 nt, Homo sapiens
  misc_RNA (1)...(19): siRNA sense strand
ccaaggcucccaucagaga

SEQ ID NO: 950261 - RNA, 19 nt, Homo sapiens
  misc_RNA (1)...(19): siRNA sense strand
ggagaaggcacagguguca

SEQ ID NO: 950262 - RNA, 19 nt, Homo sapiens
  misc_RNA (1)...(19): siRNA sense strand
caaagccagugaucucucu

SEQ ID NO: 950263 - RNA, 19 nt, Homo sapiens
  misc_RNA (1)...(19): siRNA sense strand
caaucaguuuccaagcuaa

SEQ ID NO: 950264 - RNA, 19 nt, Homo sapiens
  misc_RNA (1)...(19): siRNA sense strand
guacaauagcgucuucuuc

SEQ ID NO: 950265 - RNA, 19 nt, Homo sapiens
  misc_RNA (1)...(19): siRNA sense strand
agcaacagaugauaccaaa

SEQ ID NO: 950266 - RNA, 19 nt, Homo sapiens
  misc_RNA (1)...(19): siRNA sense strand
ugucagagcaccagucaga

SEQ ID NO: 950267 - RNA, 19 nt, Homo sapiens
  misc_RNA (1)...(19): siRNA sense strand
aaccacaugugcaucuaaa

SEQ ID NO: 950268 - RNA, 19 nt, Homo sapiens
  misc_RNA (1)...(19): siRNA sense strand
gaugauaccaaaccuaaaa

SEQ ID NO: 950269 - RNA, 19 nt, Homo sapiens
  misc_RNA (1)...(19): siRNA sense strand
uuccaaggcucccaucaga

SEQ ID NO: 950270 - RNA, 19 nt, Homo sapiens
  misc_RNA (1)...(19): siRNA sense strand
agaguucagugcaggagaa

SEQ ID NO: 950271 - RNA, 19 nt, Homo sapiens
  misc_RNA (1)...(19): siRNA sense strand
guuuauacauugcaguaca

SEQ ID NO: 950272 - RNA, 19 nt, Homo sapiens
  misc_RNA (1)...(19): siRNA sense strand
gcaccagucagaacagcaa

SEQ ID NO: 950273 - RNA, 19 nt, Homo sapiens
  misc_RNA (1)...(19): siRNA sense strand
gcaggagaaagcucuacuu

SEQ ID NO: 950274 - RNA, 19 nt, Homo sapiens
  misc_RNA (1)...(19): siRNA sense strand
guaagagauggcaugauau

SEQ ID NO: 950275 - RNA, 19 nt, Homo sapiens
  misc_RNA (1)...(19): siRNA sense strand
uuucaggccugcagagugu

SEQ ID NO: 950276 - RNA, 19 nt, Homo sapiens
  misc_RNA (1)...(19): siRNA sense strand
agagauggcaugauaugga

SEQ ID NO: 950277 - RNA, 19 nt, Homo sapiens
  misc_RNA (1)...(19): siRNA sense strand
caacagaugauaccaaacc

SEQ ID NO: 950278 - RNA, 19 nt, Homo sapiens
  misc_RNA (1)...(19): siRNA sense strand
gaggaggagagucuacaga

SEQ ID NO: 950279 - RNA, 19 nt, Homo sapiens
  misc_RNA (1)...(19): siRNA sense strand
ugaucucucugacuuucaa

SEQ ID NO: 950280 - RNA, 19 nt, Homo sapiens
  misc_RNA (1)...(19): siRNA sense strand
ucagaacagcaacagauga

SEQ ID NO: 950281 - RNA, 19 nt, Homo sapiens
  misc_RNA (1)...(19): siRNA sense strand
cuucauccuccaaaguuua

SEQ ID NO: 950282 - RNA, 19 nt, Homo sapiens
  misc_RNA (1)...(19): siRNA sense strand
cuaagucuccuguccuuca

SEQ ID NO: 950283 - RNA, 19 nt, Homo sapiens
  misc_RNA (1)...(19): siRNA sense strand
ucccuuggcuccagaacga

SEQ ID NO: 950284 - RNA, 19 nt, Homo sapiens
  misc_RNA (1)...(19): siRNA sense strand
caggagaaagcucuacuuc

SEQ ID NO: 950285 - RNA, 19 nt, Homo sapiens
  misc_RNA (1)...(19): siRNA sense strand
ggaauuucauccccuaaag

SEQ ID NO: 950286 - RNA, 19 nt, Homo sapiens
  misc_RNA (1)...(19): siRNA sense strand
uggcagaaaugauguacac

SEQ ID NO: 950287 - RNA, 19 nt, Homo sapiens
  misc_RNA (1)...(19): siRNA sense strand
cagaacagcaacagaugau

SEQ ID NO: 950288 - RNA, 19 nt, Homo sapiens
  misc_RNA (1)...(19): siRNA sense strand
aaaccacaugugcaucuaa

SEQ ID NO: 950289 - RNA, 19 nt, Homo sapiens
  misc_RNA (1)...(19): siRNA sense strand
gaccauugaggaccuguca

SEQ ID NO: 950290 - RNA, 19 nt, Homo sapiens
  misc_RNA (1)...(19): siRNA sense strand
ccuucauccuccaaaguuu

SEQ ID NO: 950291 - RNA, 19 nt, Homo sapiens
  misc_RNA (1)...(19): siRNA sense strand
uguagcaucucugucuguu

SEQ ID NO: 950292 - RNA, 19 nt, Homo sapiens
  misc_RNA (1)...(19): siRNA sense strand
agaaggcacaggugucaga

SEQ ID NO: 950293 - RNA, 19 nt, Homo sapiens
  misc_RNA (1)...(19): siRNA sense strand
ucucgaugcuaaucacaca

SEQ ID NO: 950294 - RNA, 19 nt, Homo sapiens
  misc_RNA (1)...(19): siRNA sense strand
acaauagcgucuucuucca

SEQ ID NO: 950295 - RNA, 19 nt, Homo sapiens
  misc_RNA (1)...(19): siRNA sense strand
acaugugcaucuaaagaca

SEQ ID NO: 950296 - RNA, 19 nt, Homo sapiens
  misc_RNA (1)...(19): siRNA sense strand
cagcaacagaugauaccaa

SEQ ID NO: 950297 - RNA, 19 nt, Homo sapiens
  misc_RNA (1)...(19): siRNA sense strand
ggaugcaucagggucugua

SEQ ID NO: 950298 - RNA, 19 nt, Homo sapiens
  misc_RNA (1)...(19): siRNA sense strand
uaagucuccuguccuucau

SEQ ID NO: 950299 - RNA, 19 nt, Homo sapiens
  misc_RNA (1)...(19): siRNA sense strand
gugcaucuaaagacaguug

SEQ ID NO: 950300 - RNA, 19 nt, Homo sapiens
  misc_RNA (1)...(19): siRNA sense strand
aaggaaugccaguguaaga

SEQ ID NO: 950301 - RNA, 19 nt, Homo sapiens
  misc_RNA (1)...(19): siRNA sense strand
cagagaguaagaaggaaga

SEQ ID NO: 950302 - RNA, 19 nt, Homo sapiens
  misc_RNA (1)...(19): siRNA sense strand
gagaggaggagagucuaca

SEQ ID NO: 950303 - RNA, 19 nt, Homo sapiens
  misc_RNA (1)...(19): siRNA sense strand
gaacacauccucugaauac

SEQ ID NO: 950304 - RNA, 19 nt, Homo sapiens
  misc_RNA (1)...(19): siRNA sense strand
agacagacauuuagaagaa

SEQ ID NO: 950305 - RNA, 19 nt, Homo sapiens
  misc_RNA (1)...(19): siRNA sense strand
aagaagagcugaaauguca

SEQ ID NO: 950306 - RNA, 19 nt, Homo sapiens
  misc_RNA (1)...(19): siRNA sense strand
ucaagaagacagacauuua

SEQ ID NO: 950307 - RNA, 19 nt, Homo sapiens
  misc_RNA (1)...(19): siRNA sense strand
ugacaacucugcuccuuug

SEQ ID NO: 950308 - RNA, 19 nt, Homo sapiens
  misc_RNA (1)...(19): siRNA sense strand
aaacaaaguugcucuugca

SEQ ID NO: 950309 - RNA, 19 nt, Homo sapiens
  misc_RNA (1)...(19): siRNA sense strand
aggauaagcugguguacaa

SEQ ID NO: 950310 - RNA, 19 nt, Homo sapiens
  misc_RNA (1)...(19): siRNA sense strand
ggaaggauaagcuggugua

SEQ ID NO: 950311 - RNA, 19 nt, Homo sapiens
  misc_RNA (1)...(19): siRNA sense strand
gaaagcaucgcuacacauc

SEQ ID NO: 950312 - RNA, 19 nt, Homo sapiens
  misc_RNA (1)...(19): siRNA sense strand
gagaagacucuggguuaua

SEQ ID NO: 950313 - RNA, 19 nt, Homo sapiens
  misc_RNA (1)...(19): siRNA sense strand
cuacacaucagcaggaaua

SEQ ID NO: 950314 - RNA, 19 nt, Homo sapiens
  misc_RNA (1)...(19): siRNA sense strand
ggauggaaauguccuuaag

SEQ ID NO: 950315 - RNA, 19 nt, Homo sapiens
  misc_RNA (1)...(19): siRNA sense strand
gaagacagacauuuagaag

SEQ ID NO: 950316 - RNA, 19 nt, Homo sapiens
  misc_RNA (1)...(19): siRNA sense strand
ccacagaggcuggcuacua

SEQ ID NO: 950317 - RNA, 19 nt, Homo sapiens
  misc_RNA (1)...(19): siRNA sense strand
aauacuaacugcuagaaga

SEQ ID NO: 950318 - RNA, 19 nt, Homo sapiens
  misc_RNA (1)...(19): siRNA sense strand
ggaacacauccucugaaua

SEQ ID NO: 950319 - RNA, 19 nt, Homo sapiens
  misc_RNA (1)...(19): siRNA sense strand
acacagugguuucucaaug

SEQ ID NO: 950320 - RNA, 19 nt, Homo sapiens
  misc_RNA (1)...(19): siRNA sense strand
ugucaugcguggaaggaua

SEQ ID NO: 950321 - RNA, 19 nt, Homo sapiens
  misc_RNA (1)...(19): siRNA sense strand
gggaaagcaucgcuacaca

SEQ ID NO: 950322 - RNA, 19 nt, Homo sapiens
  misc_RNA (1)...(19): siRNA sense strand
uguacaaugugcuuuacua

SEQ ID NO: 950323 - RNA, 19 nt, Homo sapiens
  misc_RNA (1)...(19): siRNA sense strand
caagaagacagacauuuag

SEQ ID NO: 950324 - RNA, 19 nt, Homo sapiens
  misc_RNA (1)...(19): siRNA sense strand
gaagaagagcugaaauguc

SEQ ID NO: 950325 - RNA, 19 nt, Homo sapiens
  misc_RNA (1)...(19): siRNA sense strand
ggccugguuugcagcuuua

SEQ ID NO: 950326 - RNA, 19 nt, Homo sapiens
  misc_RNA (1)...(19): siRNA sense strand
gagaaccucuggccuugag

SEQ ID NO: 950327 - RNA, 19 nt, Homo sapiens
  misc_RNA (1)...(19): siRNA sense strand
caaugacaguggugaauac

SEQ ID NO: 950328 - RNA, 19 nt, Homo sapiens
  misc_RNA (1)...(19): siRNA sense strand
acaaugugcuuuacuaucg

SEQ ID NO: 950329 - RNA, 19 nt, Homo sapiens
  misc_RNA (1)...(19): siRNA sense strand
gauaagcugguguacaaug

SEQ ID NO: 950330 - RNA, 19 nt, Homo sapiens
  misc_RNA (1)...(19): siRNA sense strand
ccacagaggauggaaaugu

SEQ ID NO: 950331 - RNA, 19 nt, Homo sapiens
  misc_RNA (1)...(19): siRNA sense strand
gugcuuuacuaucgaaaug

SEQ ID NO: 950332 - RNA, 19 nt, Homo sapiens
  misc_RNA (1)...(19): siRNA sense strand
uaaccucaccauucugaaa

SEQ ID NO: 950333 - RNA, 19 nt, Homo sapiens
  misc_RNA (1)...(19): siRNA sense strand
ucaaugacaguggugaaua

SEQ ID NO: 950334 - RNA, 19 nt, Homo sapiens
  misc_RNA (1)...(19): siRNA sense strand
uagaagaagagcugaaaug

SEQ ID NO: 950335 - RNA, 19 nt, Homo sapiens
  misc_RNA (1)...(19): siRNA sense strand
uaccaaauacuaacugcua

SEQ ID NO: 950336 - RNA, 19 nt, Homo sapiens
  misc_RNA (1)...(19): siRNA sense strand
guacaaugugcuuuacuau

SEQ ID NO: 950337 - RNA, 19 nt, Homo sapiens
  misc_RNA (1)...(19): siRNA sense strand
cacagaggcuggcuacuac

SEQ ID NO: 950338 - RNA, 19 nt, Homo sapiens
  misc_RNA (1)...(19): siRNA sense strand
agaagacucuggguuauac

SEQ ID NO: 950339 - RNA, 19 nt, Homo sapiens
  misc_RNA (1)...(19): siRNA sense strand
gcccugaguuggagcuuca

SEQ ID NO: 950340 - RNA, 19 nt, Homo sapiens
  misc_RNA (1)...(19): siRNA sense strand
caaauacuaacugcuagaa

SEQ ID NO: 950341 - RNA, 19 nt, Homo sapiens
  misc_RNA (1)...(19): siRNA sense strand
caacuccugucugguuuca

SEQ ID NO: 950342 - RNA, 19 nt, Homo sapiens
  misc_RNA (1)...(19): siRNA sense strand
uuacuucuccuucuacaug

SEQ ID NO: 950343 - RNA, 19 nt, Homo sapiens
  misc_RNA (1)...(19): siRNA sense strand
ggaaagcaucgcuacacau

SEQ ID NO: 950344 - RNA, 19 nt, Homo sapiens
  misc_RNA (1)...(19): siRNA sense strand
gaaaccguaaccuugcauu

SEQ ID NO: 950345 - RNA, 19 nt, Homo sapiens
  misc_RNA (1)...(19): siRNA sense strand
acagacauuuagaagaaga

SEQ ID NO: 950346 - RNA, 19 nt, Homo sapiens
  misc_RNA (1)...(19): siRNA sense strand
ggucaugagaagaagguaa

SEQ ID NO: 950347 - RNA, 19 nt, Homo sapiens
  misc_RNA (1)...(19): siRNA sense strand
cacauccucugaauaccaa

SEQ ID NO: 950348 - RNA, 19 nt, Homo sapiens
  misc_RNA (1)...(19): siRNA sense strand
cacagugguuucucaaugg

SEQ ID NO: 950349 - RNA, 19 nt, Homo sapiens
  misc_RNA (1)...(19): siRNA sense strand
gaauaccaaauacuaacug

SEQ ID NO: 950350 - RNA, 19 nt, Homo sapiens
  misc_RNA (1)...(19): siRNA sense strand
gcucaggcaugggaaagca

SEQ ID NO: 950351 - RNA, 19 nt, Homo sapiens
  misc_RNA (1)...(19): siRNA sense strand
acccugagcugugaaacaa

SEQ ID NO: 950352 - RNA, 19 nt, Homo sapiens
  misc_RNA (1)...(19): siRNA sense strand
agaagacagacauuuagaa

SEQ ID NO: 950353 - RNA, 19 nt, Homo sapiens
  misc_RNA (1)...(19): siRNA sense strand
cacagaggauggaaauguc

SEQ ID NO: 950354 - RNA, 19 nt, Homo sapiens
  misc_RNA (1)...(19): siRNA sense strand
caaugugcuuuacuaucga

SEQ ID NO: 950355 - RNA, 19 nt, Homo sapiens
  misc_RNA (1)...(19): siRNA sense strand
agaagaagagcugaaaugu

SEQ ID NO: 950356 - RNA, 19 nt, Homo sapiens
  misc_RNA (1)...(19): siRNA sense strand
ggcagugggaauaauguuu

SEQ ID NO: 950357 - RNA, 19 nt, Homo sapiens
  misc_RNA (1)...(19): siRNA sense strand
gagcugugaaacaaaguug

SEQ ID NO: 950358 - RNA, 19 nt, Homo sapiens
  misc_RNA (1)...(19): siRNA sense strand
aaaccaacauaagucacaa

SEQ ID NO: 950359 - RNA, 19 nt, Homo sapiens
  misc_RNA (1)...(19): siRNA sense strand
ggaauucuaaccucaccau

SEQ ID NO: 950360 - RNA, 19 nt, Homo sapiens
  misc_RNA (1)...(19): siRNA sense strand
cagcuuuacuucuccuucu

SEQ ID NO: 950361 - RNA, 19 nt, Homo sapiens
  misc_RNA (1)...(19): siRNA sense strand
ugaaacaaaguugcucuug

SEQ ID NO: 950362 - RNA, 19 nt, Homo sapiens
  misc_RNA (1)...(19): siRNA sense strand
auaagcugguguacaaugu

SEQ ID NO: 950363 - RNA, 19 nt, Homo sapiens
  misc_RNA (1)...(19): siRNA sense strand
acuaacugcuagaagagaa

SEQ ID NO: 950364 - RNA, 19 nt, Homo sapiens
  misc_RNA (1)...(19): siRNA sense strand
ccugagcugugaaacaaag

SEQ ID NO: 950365 - RNA, 19 nt, Homo sapiens
  misc_RNA (1)...(19): siRNA sense strand
auucuaaccucaccauucu

SEQ ID NO: 950366 - RNA, 19 nt, Homo sapiens
  misc_RNA (1)...(19): siRNA sense strand
ccguaaccuugcauuguga

SEQ ID NO: 950367 - RNA, 19 nt, Homo sapiens
  misc_RNA (1)...(19): siRNA sense strand
ccaaauacuaacugcuaga

SEQ ID NO: 950368 - RNA, 19 nt, Homo sapiens
  misc_RNA (1)...(19): siRNA sense strand
aagcaucgcuacacaucag

SEQ ID NO: 950369 - RNA, 19 nt, Homo sapiens
  misc_RNA (1)...(19): siRNA sense strand
gaauucuaaccucaccauu

SEQ ID NO: 950370 - RNA, 19 nt, Homo sapiens
  misc_RNA (1)...(19): siRNA sense strand
ugaaaugucaggaacaaaa

SEQ ID NO: 950371 - RNA, 19 nt, Homo sapiens
  misc_RNA (1)...(19): siRNA sense strand
gcagugggaauaauguuuu

SEQ ID NO: 950372 - RNA, 19 nt, Homo sapiens
  misc_RNA (1)...(19): siRNA sense strand
acuccugucugguuucaug

SEQ ID NO: 950373 - RNA, 19 nt, Homo sapiens
  misc_RNA (1)...(19): siRNA sense strand
guuugcagcuuuacuucuc

SEQ ID NO: 950374 - RNA, 19 nt, Homo sapiens
  misc_RNA (1)...(19): siRNA sense strand
cacaucagcaggaauaucu

SEQ ID NO: 950375 - RNA, 19 nt, Homo sapiens
  misc_RNA (1)...(19): siRNA sense strand
gcugaaugcaucugugaca

SEQ ID NO: 950376 - RNA, 19 nt, Homo sapiens
  misc_RNA (1)...(19): siRNA sense strand
ggagaaccucuggccuuga

SEQ ID NO: 950377 - RNA, 19 nt, Homo sapiens
  misc_RNA (1)...(19): siRNA sense strand
gacagacauuuagaagaag

SEQ ID NO: 950378 - RNA, 19 nt, Homo sapiens
  misc_RNA (1)...(19): siRNA sense strand
gugcugaaugcaucuguga

SEQ ID NO: 950379 - RNA, 19 nt, Homo sapiens
  misc_RNA (1)...(19): siRNA sense strand
gguguacaaugugcuuuac

SEQ ID NO: 950380 - RNA, 19 nt, Homo sapiens
  misc_RNA (1)...(19): siRNA sense strand
aagaagacagacauuuaga

SEQ ID NO: 950381 - RNA, 19 nt, Homo sapiens
  misc_RNA (1)...(19): siRNA sense strand
ugaguuggagcuucaagug

SEQ ID NO: 950382 - RNA, 19 nt, Homo sapiens
  misc_RNA (1)...(19): siRNA sense strand
ucuacacagugguuucuca

SEQ ID NO: 950383 - RNA, 19 nt, Homo sapiens
  misc_RNA (1)...(19): siRNA sense strand
ucuaaccucaccauucuga

SEQ ID NO: 950384 - RNA, 19 nt, Homo sapiens
  misc_RNA (1)...(19): siRNA sense strand
ugaauacaggugccagaga

SEQ ID NO: 950385 - RNA, 19 nt, Homo sapiens
  misc_RNA (1)...(19): siRNA sense strand
ugaggugucaugcguggaa

SEQ ID NO: 950386 - RNA, 19 nt, Homo sapiens
  misc_RNA (1)...(19): siRNA sense strand
ccucugccagugucaauga

SEQ ID NO: 950387 - RNA, 19 nt, Homo sapiens
  misc_RNA (1)...(19): siRNA sense strand
accguaaccuugcauugug

SEQ ID NO: 950388 - RNA, 19 nt, Homo sapiens
  misc_RNA (1)...(19): siRNA sense strand
uaucuggcagugggaauaa

SEQ ID NO: 950389 - RNA, 19 nt, Homo sapiens
  misc_RNA (1)...(19): siRNA sense strand
uaagcgcagcccugaguug

SEQ ID NO: 950390 - RNA, 19 nt, Homo sapiens
  misc_RNA (1)...(19): siRNA sense strand
gcagcucuacacagugguu

SEQ ID NO: 950391 - RNA, 19 nt, Homo sapiens
  misc_RNA (1)...(19): siRNA sense strand
ccacaaaggcagugaucac

SEQ ID NO: 950392 - RNA, 19 nt, Homo sapiens
  misc_RNA (1)...(19): siRNA sense strand
gugcuuggccuccaguuac

SEQ ID NO: 950393 - RNA, 19 nt, Homo sapiens
  misc_RNA (1)...(19): siRNA sense strand
aagaggaaaccguaaccuu

SEQ ID NO: 950394 - RNA, 19 nt, Homo sapiens
  misc_RNA (1)...(19): siRNA sense strand
aaaccguaaccuugcauug

SEQ ID NO: 950395 - RNA, 19 nt, Homo sapiens
  misc_RNA (1)...(19): siRNA sense strand
gggucagcguguuccaaga

SEQ ID NO: 950396 - RNA, 19 nt, Homo sapiens
  misc_RNA (1)...(19): siRNA sense strand
guacaaguguuuauggaaa

SEQ ID NO: 950397 - RNA, 19 nt, Homo sapiens
  misc_RNA (1)...(19): siRNA sense strand
acaauggacuauagaguua

SEQ ID NO: 950398 - RNA, 19 nt, Homo sapiens
  misc_RNA (1)...(19): siRNA sense strand
agcaugagguuaucuauua

SEQ ID NO: 950399 - RNA, 19 nt, Homo sapiens
  misc_RNA (1)...(19): siRNA sense strand
gaaaacauccuccucuuua

SEQ ID NO: 950400 - RNA, 19 nt, Homo sapiens
  misc_RNA (1)...(19): siRNA sense strand
ggaaaucucaggcuaagaa

SEQ ID NO: 950401 - RNA, 19 nt, Homo sapiens
  misc_RNA (1)...(19): siRNA sense strand
aaacaacaauggacuauag

SEQ ID NO: 950402 - RNA, 19 nt, Homo sapiens
  misc_RNA (1)...(19): siRNA sense strand
gauaagaccaaacuucaaa

SEQ ID NO: 950403 - RNA, 19 nt, Homo sapiens
  misc_RNA (1)...(19): siRNA sense strand
caagagcauuguuuccuuu

SEQ ID NO: 950404 - RNA, 19 nt, Homo sapiens
  misc_RNA (1)...(19): siRNA sense strand
gcaagagcauuguuuccuu

SEQ ID NO: 950405 - RNA, 19 nt, Homo sapiens
  misc_RNA (1)...(19): siRNA sense strand
ugaaggcucuugauguuug

SEQ ID NO: 950406 - RNA, 19 nt, Homo sapiens
  misc_RNA (1)...(19): siRNA sense strand
gaaaacccauugaaguuaa

SEQ ID NO: 950407 - RNA, 19 nt, Homo sapiens
  misc_RNA (1)...(19): siRNA sense strand
cagcauuguuggaagcuua

SEQ ID NO: 950408 - RNA, 19 nt, Homo sapiens
  misc_RNA (1)...(19): siRNA sense strand
gacaguggauccaacaaug

SEQ ID NO: 950409 - RNA, 19 nt, Homo sapiens
  misc_RNA (1)...(19): siRNA sense strand
ggacuccuguucauauuag

SEQ ID NO: 950410 - RNA, 19 nt, Homo sapiens
  misc_RNA (1)...(19): siRNA sense strand
gagguuaucuauuacucuu

SEQ ID NO: 950411 - RNA, 19 nt, Homo sapiens
  misc_RNA (1)...(19): siRNA sense strand
ccgcugagcuucccaaagu

SEQ ID NO: 950412 - RNA, 19 nt, Homo sapiens
  misc_RNA (1)...(19): siRNA sense strand
gcaauaucuugaacagguu

SEQ ID NO: 950413 - RNA, 19 nt, Homo sapiens
  misc_RNA (1)...(19): siRNA sense strand
gaaacaacaauggacuaua

SEQ ID NO: 950414 - RNA, 19 nt, Homo sapiens
  misc_RNA (1)...(19): siRNA sense strand
caacugaugauuuacgauu

SEQ ID NO: 950415 - RNA, 19 nt, Homo sapiens
  misc_RNA (1)...(19): siRNA sense strand
ggagagcuuugguuacaca

SEQ ID NO: 950416 - RNA, 19 nt, Homo sapiens
  misc_RNA (1)...(19): siRNA sense strand
gagauccugugcaauuaga

SEQ ID NO: 950417 - RNA, 19 nt, Homo sapiens
  misc_RNA (1)...(19): siRNA sense strand
ugugaaggcucuugauguu

SEQ ID NO: 950418 - RNA, 19 nt, Homo sapiens
  misc_RNA (1)...(19): siRNA sense strand
guuguucucuccuggcuuu

SEQ ID NO: 950419 - RNA, 19 nt, Homo sapiens
  misc_RNA (1)...(19): siRNA sense strand
caacuccacuagcaauauc

SEQ ID NO: 950420 - RNA, 19 nt, Homo sapiens
  misc_RNA (1)...(19): siRNA sense strand
uaacaacggacuugggaaa

SEQ ID NO: 950421 - RNA, 19 nt, Homo sapiens
  misc_RNA (1)...(19): siRNA sense strand
gcgaauugaucuuuaugca

SEQ ID NO: 950422 - RNA, 19 nt, Homo sapiens
  misc_RNA (1)...(19): siRNA sense strand
ucugagaucuaaugacuuc

SEQ ID NO: 950423 - RNA, 19 nt, Homo sapiens
  misc_RNA (1)...(19): siRNA sense strand
ggaaaacccauugaaguua

SEQ ID NO: 950424 - RNA, 19 nt, Homo sapiens
  misc_RNA (1)...(19): siRNA sense strand
caaaggcauuccuguugau

SEQ ID NO: 950425 - RNA, 19 nt, Homo sapiens
  misc_RNA (1)...(19): siRNA sense strand
gguuauuggucaguuauga

SEQ ID NO: 950426 - RNA, 19 nt, Homo sapiens
  misc_RNA (1)...(19): siRNA sense strand
gagcauuguuuccuuucug

SEQ ID NO: 950427 - RNA, 19 nt, Homo sapiens
  misc_RNA (1)...(19): siRNA sense strand
aggcauuccuguugaugua

SEQ ID NO: 950428 - RNA, 19 nt, Homo sapiens
  misc_RNA (1)...(19): siRNA sense strand
caacggacuugggaaaucu

SEQ ID NO: 950429 - RNA, 19 nt, Homo sapiens
  misc_RNA (1)...(19): siRNA sense strand
ggaggcaggucggcuuuua

SEQ ID NO: 950430 - RNA, 19 nt, Homo sapiens
  misc_RNA (1)...(19): siRNA sense strand
gguuaucuauuacucuuuc

SEQ ID NO: 950431 - RNA, 19 nt, Homo sapiens
  misc_RNA (1)...(19): siRNA sense strand
aaacauccuccucuuuauu

SEQ ID NO: 950432 - RNA, 19 nt, Homo sapiens
  misc_RNA (1)...(19): siRNA sense strand
acagguuauuggucaguua

SEQ ID NO: 950433 - RNA, 19 nt, Homo sapiens
  misc_RNA (1)...(19): siRNA sense strand
aauuaugacugcuauggaa

SEQ ID NO: 950434 - RNA, 19 nt, Homo sapiens
  misc_RNA (1)...(19): siRNA sense strand
cuauagaguuaacaucuuc

SEQ ID NO: 950435 - RNA, 19 nt, Homo sapiens
  misc_RNA (1)...(19): siRNA sense strand
gagauguccuugucagcau

SEQ ID NO: 950436 - RNA, 19 nt, Homo sapiens
  misc_RNA (1)...(19): siRNA sense strand
ggauaagaccaaacuucaa

SEQ ID NO: 950437 - RNA, 19 nt, Homo sapiens
  misc_RNA (1)...(19): siRNA sense strand
gagcuuugguuacacaacu

SEQ ID NO: 950438 - RNA, 19 nt, Homo sapiens
  misc_RNA (1)...(19): siRNA sense strand
ugacauuguuucccaugga

SEQ ID NO: 950439 - RNA, 19 nt, Homo sapiens
  misc_RNA (1)...(19): siRNA sense strand
gaauaugguaacuguacaa

SEQ ID NO: 950440 - RNA, 19 nt, Homo sapiens
  misc_RNA (1)...(19): siRNA sense strand
gggacuccuguucauauua

SEQ ID NO: 950441 - RNA, 19 nt, Homo sapiens
  misc_RNA (1)...(19): siRNA sense strand
gcaagcagauggaaaaggu

SEQ ID NO: 950442 - RNA, 19 nt, Homo sapiens
  misc_RNA (1)...(19): siRNA sense strand
caaaguuuccuaugugaag

SEQ ID NO: 950443 - RNA, 19 nt, Homo sapiens
  misc_RNA (1)...(19): siRNA sense strand
uugcuucccugguggagua

SEQ ID NO: 950444 - RNA, 19 nt, Homo sapiens
  misc_RNA (1)...(19): siRNA sense strand
ggaagcuuaccaagagauu

SEQ ID NO: 950445 - RNA, 19 nt, Homo sapiens
  misc_RNA (1)...(19): siRNA sense strand
aaagaauacugugaaugga

SEQ ID NO: 950446 - RNA, 19 nt, Homo sapiens
  misc_RNA (1)...(19): siRNA sense strand
caaaaggguugaagcugaa

SEQ ID NO: 950447 - RNA, 19 nt, Homo sapiens
  misc_RNA (1)...(19): siRNA sense strand
gcaugagguuaucuauuac

SEQ ID NO: 950448 - RNA, 19 nt, Homo sapiens
  misc_RNA (1)...(19): siRNA sense strand
cagcaaagcgaauugaucu

SEQ ID NO: 950449 - RNA, 19 nt, Homo sapiens
  misc_RNA (1)...(19): siRNA sense strand
gcucuugauguuuggcuua

SEQ ID NO: 950450 - RNA, 19 nt, Homo sapiens
  misc_RNA (1)...(19): siRNA sense strand
cccaaaguuuccuauguga

SEQ ID NO: 950451 - RNA, 19 nt, Homo sapiens
  misc_RNA (1)...(19): siRNA sense strand
gcugagcuucccaaaguuu

SEQ ID NO: 950452 - RNA, 19 nt, Homo sapiens
  misc_RNA (1)...(19): siRNA sense strand
caacaauggacuauagagu

SEQ ID NO: 950453 - RNA, 19 nt, Homo sapiens
  misc_RNA (1)...(19): siRNA sense strand
gaagccuauucuaaggaaa

SEQ ID NO: 950454 - RNA, 19 nt, Homo sapiens
  misc_RNA (1)...(19): siRNA sense strand
gcagcaaagcgaauugauc

SEQ ID NO: 950455 - RNA, 19 nt, Homo sapiens
  misc_RNA (1)...(19): siRNA sense strand
cuugauguuuggcuuauug

SEQ ID NO: 950456 - RNA, 19 nt, Homo sapiens
  misc_RNA (1)...(19): siRNA sense strand
ggaaaacauccuccucuuu

SEQ ID NO: 950457 - RNA, 19 nt, Homo sapiens
  misc_RNA (1)...(19): siRNA sense strand
ugauggagauguccuuguc

SEQ ID NO: 950458 - RNA, 19 nt, Homo sapiens
  misc_RNA (1)...(19): siRNA sense strand
gaagcuuaccaagagauuu

SEQ ID NO: 950459 - RNA, 19 nt, Homo sapiens
  misc_RNA (1)...(19): siRNA sense strand
caacuggagagcuuugguu

SEQ ID NO: 950460 - RNA, 19 nt, Homo sapiens
  misc_RNA (1)...(19): siRNA sense strand
gauacacaacguugcaaga

SEQ ID NO: 950461 - RNA, 19 nt, Homo sapiens
  misc_RNA (1)...(19): siRNA sense strand
gacauuguuucccauggau

SEQ ID NO: 950462 - RNA, 19 nt, Homo sapiens
  misc_RNA (1)...(19): siRNA sense strand
caauaucuugaacagguua

SEQ ID NO: 950463 - RNA, 19 nt, Homo sapiens
  misc_RNA (1)...(19): siRNA sense strand
ucccaaaguuuccuaugug

SEQ ID NO: 950464 - RNA, 19 nt, Homo sapiens
  misc_RNA (1)...(19): siRNA sense strand
gauccugugcaauuagaaa

SEQ ID NO: 950465 - RNA, 19 nt, Homo sapiens
  misc_RNA (1)...(19): siRNA sense strand
guuacacaacugaugauuu

SEQ ID NO: 950466 - RNA, 19 nt, Homo sapiens
  misc_RNA (1)...(19): siRNA sense strand
ccacuagcaauaucuugaa

SEQ ID NO: 950467 - RNA, 19 nt, Homo sapiens
  misc_RNA (1)...(19): siRNA sense strand
cuggagagcuuugguuaca

SEQ ID NO: 950468 - RNA, 19 nt, Homo sapiens
  misc_RNA (1)...(19): siRNA sense strand
caguggauccaacaaugua

SEQ ID NO: 950469 - RNA, 19 nt, Homo sapiens
  misc_RNA (1)...(19): siRNA sense strand
caacagcagcaaagcgaau

SEQ ID NO: 950470 - RNA, 19 nt, Homo sapiens
  misc_RNA (1)...(19): siRNA sense strand
aacauccuccucuuuauuu

SEQ ID NO: 950471 - RNA, 19 nt, Homo sapiens
  misc_RNA (1)...(19): siRNA sense strand
cagcaugagguuaucuauu

SEQ ID NO: 950472 - RNA, 19 nt, Homo sapiens
  misc_RNA (1)...(19): siRNA sense strand
gaucuaaugacuucagcau

SEQ ID NO: 950473 - RNA, 19 nt, Homo sapiens
  misc_RNA (1)...(19): siRNA sense strand
uauuagcacuuugcagguu

SEQ ID NO: 950474 - RNA, 19 nt, Homo sapiens
  misc_RNA (1)...(19): siRNA sense strand
gaggaggcaggucggcuuu

SEQ ID NO: 950475 - RNA, 19 nt, Homo sapiens
  misc_RNA (1)...(19): siRNA sense strand
uacacaacguugcaagaug

SEQ ID NO: 950476 - RNA, 19 nt, Homo sapiens
  misc_RNA (1)...(19): siRNA sense strand
caggauaagaccaaacuuc

SEQ ID NO: 950477 - RNA, 19 nt, Homo sapiens
  misc_RNA (1)...(19): siRNA sense strand
cgaauugaucuuuaugcaa

SEQ ID NO: 950478 - RNA, 19 nt, Homo sapiens
  misc_RNA (1)...(19): siRNA sense strand
agaggaccuugcccgagua

SEQ ID NO: 950479 - RNA, 19 nt, Homo sapiens
  misc_RNA (1)...(19): siRNA sense strand
accaagagauuuugaacua

SEQ ID NO: 950480 - RNA, 19 nt, Homo sapiens
  misc_RNA (1)...(19): siRNA sense strand
ggagauccugugcaauuag

SEQ ID NO: 950481 - RNA, 19 nt, Homo sapiens
  misc_RNA (1)...(19): siRNA sense strand
cacaacugaugauuuacga

SEQ ID NO: 950482 - RNA, 19 nt, Homo sapiens
  misc_RNA (1)...(19): siRNA sense strand
aacaauggacuauagaguu

SEQ ID NO: 950483 - RNA, 19 nt, Homo sapiens
  misc_RNA (1)...(19): siRNA sense strand
gaacuauccaauuaugacu

SEQ ID NO: 950484 - RNA, 19 nt, Homo sapiens
  misc_RNA (1)...(19): siRNA sense strand
caagagauuuugaacuauc

SEQ ID NO: 950485 - RNA, 19 nt, Homo sapiens
  misc_RNA (1)...(19): siRNA sense strand
gcuuauugcuugccuucuc

SEQ ID NO: 950486 - RNA, 19 nt, Homo sapiens
  misc_RNA (1)...(19): siRNA sense strand
gauguuuggcuuauugcuu

SEQ ID NO: 950487 - RNA, 19 nt, Homo sapiens
  misc_RNA (1)...(19): siRNA sense strand
gaaggcucuugauguuugg

SEQ ID NO: 950488 - RNA, 19 nt, Homo sapiens
  misc_RNA (1)...(19): siRNA sense strand
ugaauaugguaacuguaca

SEQ ID NO: 950489 - RNA, 19 nt, Homo sapiens
  misc_RNA (1)...(19): siRNA sense strand
ccuuuggacuugacauugu

SEQ ID NO: 950490 - RNA, 19 nt, Homo sapiens
  misc_RNA (1)...(19): siRNA sense strand
gacuauagaguuaacaucu

SEQ ID NO: 950491 - RNA, 19 nt, Homo sapiens
  misc_RNA (1)...(19): siRNA sense strand
ggacuauagaguuaacauc

SEQ ID NO: 950492 - RNA, 19 nt, Homo sapiens
  misc_RNA (1)...(19): siRNA sense strand
acaacggacuugggaaauc

SEQ ID NO: 950493 - RNA, 19 nt, Homo sapiens
  misc_RNA (1)...(19): siRNA sense strand
gaacagguuauuggucagu

SEQ ID NO: 950494 - RNA, 19 nt, Homo sapiens
  misc_RNA (1)...(19): siRNA sense strand
aggcuaagaacaacaagaa

SEQ ID NO: 950495 - RNA, 19 nt, Homo sapiens
  misc_RNA (1)...(19): siRNA sense strand
aaucucaggcuaagaacaa

SEQ ID NO: 950496 - RNA, 19 nt, Homo sapiens
  misc_RNA (1)...(19): siRNA sense strand
ggauaaagauggcuauauu

SEQ ID NO: 950497 - RNA, 19 nt, Homo sapiens
  misc_RNA (1)...(19): siRNA sense strand
ggauggagauggaagaaua

SEQ ID NO: 950498 - RNA, 19 nt, Homo sapiens
  misc_RNA (1)...(19): siRNA sense strand
gagcagaaauugagguuug

SEQ ID NO: 950499 - RNA, 19 nt, Homo sapiens
  misc_RNA (1)...(19): siRNA sense strand
ggaagaauauccuuugaag

SEQ ID NO: 950500 - RNA, 19 nt, Homo sapiens
  misc_RNA (1)...(19): siRNA sense strand
gaagaauucugugcuguug

SEQ ID NO: 950501 - RNA, 19 nt, Homo sapiens
  misc_RNA (1)...(19): siRNA sense strand
guacagcgaguaauagaua

SEQ ID NO: 950502 - RNA, 19 nt, Homo sapiens
  misc_RNA (1)...(19): siRNA sense strand
ucugaaagauacacaguua

SEQ ID NO: 950503 - RNA, 19 nt, Homo sapiens
  misc_RNA (1)...(19): siRNA sense strand
uuaagaagcuugauuugga

SEQ ID NO: 950504 - RNA, 19 nt, Homo sapiens
  misc_RNA (1)...(19): siRNA sense strand
gagauaaggagcagaaauu

SEQ ID NO: 950505 - RNA, 19 nt, Homo sapiens
  misc_RNA (1)...(19): siRNA sense strand
caaguuauccuuuggaaau

SEQ ID NO: 950506 - RNA, 19 nt, Homo sapiens
  misc_RNA (1)...(19): siRNA sense strand
gaaagagauuuaagaagcu

SEQ ID NO: 950507 - RNA, 19 nt, Homo sapiens
  misc_RNA (1)...(19): siRNA sense strand
acaacagaauccuuuagua

SEQ ID NO: 950508 - RNA, 19 nt, Homo sapiens
  misc_RNA (1)...(19): siRNA sense strand
agaauucugugcuguugua

SEQ ID NO: 950509 - RNA, 19 nt, Homo sapiens
  misc_RNA (1)...(19): siRNA sense strand
gauacacaguuacagcaaa

SEQ ID NO: 950510 - RNA, 19 nt, Homo sapiens
  misc_RNA (1)...(19): siRNA sense strand
ucuaugacauggauaaaga

SEQ ID NO: 950511 - RNA, 19 nt, Homo sapiens
  misc_RNA (1)...(19): siRNA sense strand
gauaaggagcagaaauuga

SEQ ID NO: 950512 - RNA, 19 nt, Homo sapiens
  misc_RNA (1)...(19): siRNA sense strand
caacagaauccuuuaguac

SEQ ID NO: 950513 - RNA, 19 nt, Homo sapiens
  misc_RNA (1)...(19): siRNA sense strand
gauggaagaauauccuuug

SEQ ID NO: 950514 - RNA, 19 nt, Homo sapiens
  misc_RNA (1)...(19): siRNA sense strand
cgacacagaugggaaugga

SEQ ID NO: 950515 - RNA, 19 nt, Homo sapiens
  misc_RNA (1)...(19): siRNA sense strand
gaagaauauccuuugaaga

SEQ ID NO: 950516 - RNA, 19 nt, Homo sapiens
  misc_RNA (1)...(19): siRNA sense strand
aaagauggcuauauuucca

SEQ ID NO: 950517 - RNA, 19 nt, Homo sapiens
  misc_RNA (1)...(19): siRNA sense strand
gagguuugcuuuccguauc

SEQ ID NO: 950518 - RNA, 19 nt, Homo sapiens
  misc_RNA (1)...(19): siRNA sense strand
ggaaaugaggcaaguuauc

SEQ ID NO: 950519 - RNA, 19 nt, Homo sapiens
  misc_RNA (1)...(19): siRNA sense strand
agaugggaauggagaagua

SEQ ID NO: 950520 - RNA, 19 nt, Homo sapiens
  misc_RNA (1)...(19): siRNA sense strand
ugaugcggaugaaauuaaa

SEQ ID NO: 950521 - RNA, 19 nt, Homo sapiens
  misc_RNA (1)...(19): siRNA sense strand
ucaguucagugucaaagga

SEQ ID NO: 950522 - RNA, 19 nt, Homo sapiens
  misc_RNA (1)...(19): siRNA sense strand
ugaggcaaguuauccuuug

SEQ ID NO: 950523 - RNA, 19 nt, Homo sapiens
  misc_RNA (1)...(19): siRNA sense strand
ggagauaaggagcagaaau

SEQ ID NO: 950524 - RNA, 19 nt, Homo sapiens
  misc_RNA (1)...(19): siRNA sense strand
ggcaaguuauccuuuggaa

SEQ ID NO: 950525 - RNA, 19 nt, Homo sapiens
  misc_RNA (1)...(19): siRNA sense strand
ucaugucucugccugaguu

SEQ ID NO: 950526 - RNA, 19 nt, Homo sapiens
  misc_RNA (1)...(19): siRNA sense strand
gaaauuaaaaggcuaggaa

SEQ ID NO: 950527 - RNA, 19 nt, Homo sapiens
  misc_RNA (1)...(19): siRNA sense strand
gagggcgucucucaguuca

SEQ ID NO: 950528 - RNA, 19 nt, Homo sapiens
  misc_RNA (1)...(19): siRNA sense strand
uggccuagauauccacaaa

SEQ ID NO: 950529 - RNA, 19 nt, Homo sapiens
  misc_RNA (1)...(19): siRNA sense strand
gaaaugaggcaaguuaucc

SEQ ID NO: 950530 - RNA, 19 nt, Homo sapiens
  misc_RNA (1)...(19): siRNA sense strand
agauaaggauggagaugga

SEQ ID NO: 950531 - RNA, 19 nt, Homo sapiens
  misc_RNA (1)...(19): siRNA sense strand
gcaaguuauccuuuggaaa

SEQ ID NO: 950532 - RNA, 19 nt, Homo sapiens
  misc_RNA (1)...(19): siRNA sense strand
ugaaagauacacaguuaca

SEQ ID NO: 950533 - RNA, 19 nt, Homo sapiens
  misc_RNA (1)...(19): siRNA sense strand
agaaauugagguuugcuuu

SEQ ID NO: 950534 - RNA, 19 nt, Homo sapiens
  misc_RNA (1)...(19): siRNA sense strand
uuuaguacagcgaguaaua

SEQ ID NO: 950535 - RNA, 19 nt, Homo sapiens
  misc_RNA (1)...(19): siRNA sense strand
auacacaguuacagcaaau

SEQ ID NO: 950536 - RNA, 19 nt, Homo sapiens
  misc_RNA (1)...(19): siRNA sense strand
cuaggaaagagauuuaaga

SEQ ID NO: 950537 - RNA, 19 nt, Homo sapiens
  misc_RNA (1)...(19): siRNA sense strand
gaacucuuccagguauuga

SEQ ID NO: 950538 - RNA, 19 nt, Homo sapiens
  misc_RNA (1)...(19): siRNA sense strand
gggcgucucucaguucagu

SEQ ID NO: 950539 - RNA, 19 nt, Homo sapiens
  misc_RNA (1)...(19): siRNA sense strand
gaggcaaguuauccuuugg

SEQ ID NO: 950540 - RNA, 19 nt, Homo sapiens
  misc_RNA (1)...(19): siRNA sense strand
gauggugguagauguguga

SEQ ID NO: 950541 - RNA, 19 nt, Homo sapiens
  misc_RNA (1)...(19): siRNA sense strand
uuccagguauugaagauga

SEQ ID NO: 950542 - RNA, 19 nt, Homo sapiens
  misc_RNA (1)...(19): siRNA sense strand
gauggagauggaagaauau

SEQ ID NO: 950543 - RNA, 19 nt, Homo sapiens
  misc_RNA (1)...(19): siRNA sense strand
guuacaacagaauccuuua

SEQ ID NO: 950544 - RNA, 19 nt, Homo sapiens
  misc_RNA (1)...(19): siRNA sense strand
acagaauccuuuaguacag

SEQ ID NO: 950545 - RNA, 19 nt, Homo sapiens
  misc_RNA (1)...(19): siRNA sense strand
gggaaaugaggcaaguuau

SEQ ID NO: 950546 - RNA, 19 nt, Homo sapiens
  misc_RNA (1)...(19): siRNA sense strand
ugaagaauucugugcuguu

SEQ ID NO: 950547 - RNA, 19 nt, Homo sapiens
  misc_RNA (1)...(19): siRNA sense strand
gcagauaaggauggagaug

SEQ ID NO: 950548 - RNA, 19 nt, Homo sapiens
  misc_RNA (1)...(19): siRNA sense strand
gauauauucgacacagaug

SEQ ID NO: 950549 - RNA, 19 nt, Homo sapiens
  misc_RNA (1)...(19): siRNA sense strand
acacuuugaugcggaugaa

SEQ ID NO: 950550 - RNA, 19 nt, Homo sapiens
  misc_RNA (1)...(19): siRNA sense strand
acacaguuacagcaaauug

SEQ ID NO: 950551 - RNA, 19 nt, Homo sapiens
  misc_RNA (1)...(19): siRNA sense strand
uagauauauucgacacaga

SEQ ID NO: 950552 - RNA, 19 nt, Homo sapiens
  misc_RNA (1)...(19): siRNA sense strand
ugccugaguuacaacagaa

SEQ ID NO: 950553 - RNA, 19 nt, Homo sapiens
  misc_RNA (1)...(19): siRNA sense strand
gaaagauacacaguuacag

SEQ ID NO: 950554 - RNA, 19 nt, Homo sapiens
  misc_RNA (1)...(19): siRNA sense strand
aggcuaggaaagagauuua

SEQ ID NO: 950555 - RNA, 19 nt, Homo sapiens
  misc_RNA (1)...(19): siRNA sense strand
auaaggagcagaaauugag

SEQ ID NO: 950556 - RNA, 19 nt, Homo sapiens
  misc_RNA (1)...(19): siRNA sense strand
gagauggaagaauauccuu

SEQ ID NO: 950557 - RNA, 19 nt, Homo sapiens
  misc_RNA (1)...(19): siRNA sense strand
uugaugcggaugaaauuaa

SEQ ID NO: 950558 - RNA, 19 nt, Homo sapiens
  misc_RNA (1)...(19): siRNA sense strand
gauaaggauggagauggaa

SEQ ID NO: 950559 - RNA, 19 nt, Homo sapiens
  misc_RNA (1)...(19): siRNA sense strand
acagcgaguaauagauaua

SEQ ID NO: 950560 - RNA, 19 nt, Homo sapiens
  misc_RNA (1)...(19): siRNA sense strand
ggagauggaagaauauccu

SEQ ID NO: 950561 - RNA, 19 nt, Homo sapiens
  misc_RNA (1)...(19): siRNA sense strand
uaaggauggagauggaaga

SEQ ID NO: 950562 - RNA, 19 nt, Homo sapiens
  misc_RNA (1)...(19): siRNA sense strand
guuauccuuuggaaaugug

SEQ ID NO: 950563 - RNA, 19 nt, Homo sapiens
  misc_RNA (1)...(19): siRNA sense strand
cagcgaguaauagauauau

SEQ ID NO: 950564 - RNA, 19 nt, Homo sapiens
  misc_RNA (1)...(19): siRNA sense strand
uacagcgaguaauagauau

SEQ ID NO: 950565 - RNA, 19 nt, Homo sapiens
  misc_RNA (1)...(19): siRNA sense strand
aaaagauggugguagaugu

SEQ ID NO: 950566 - RNA, 19 nt, Homo sapiens
  misc_RNA (1)...(19): siRNA sense strand
uggaagaauauccuuugaa

SEQ ID NO: 950567 - RNA, 19 nt, Homo sapiens
  misc_RNA (1)...(19): siRNA sense strand
ccguaucuaugacauggau

SEQ ID NO: 950568 - RNA, 19 nt, Homo sapiens
  misc_RNA (1)...(19): siRNA sense strand
gcuaggaaagagauuuaag

SEQ ID NO: 950569 - RNA, 19 nt, Homo sapiens
  misc_RNA (1)...(19): siRNA sense strand
ggagcagaaauugagguuu

SEQ ID NO: 950570 - RNA, 19 nt, Homo sapiens
  misc_RNA (1)...(19): siRNA sense strand
agauaaggagcagaaauug

SEQ ID NO: 950571 - RNA, 19 nt, Homo sapiens
  misc_RNA (1)...(19): siRNA sense strand
aaagauggugguagaugug

SEQ ID NO: 950572 - RNA, 19 nt, Homo sapiens
  misc_RNA (1)...(19): siRNA sense strand
auggaagaauauccuuuga

SEQ ID NO: 950573 - RNA, 19 nt, Homo sapiens
  misc_RNA (1)...(19): siRNA sense strand
augaagagcuguccacaua

SEQ ID NO: 950574 - RNA, 19 nt, Homo sapiens
  misc_RNA (1)...(19): siRNA sense strand
gggaagguauccuccauga

SEQ ID NO: 950575 - RNA, 19 nt, Homo sapiens
  misc_RNA (1)...(19): siRNA sense strand
cagaagacaucaccaagug

SEQ ID NO: 950576 - RNA, 19 nt, Homo sapiens
  misc_RNA (1)...(19): siRNA sense strand
gaagguauccuccaugaag

SEQ ID NO: 950577 - RNA, 19 nt, Homo sapiens
  misc_RNA (1)...(19): siRNA sense strand
ggaguacugugacuucaug

SEQ ID NO: 950578 - RNA, 19 nt, Homo sapiens
  misc_RNA (1)...(19): siRNA sense strand
gagagucgguggccaagau

SEQ ID NO: 950579 - RNA, 19 nt, Homo sapiens
  misc_RNA (1)...(19): siRNA sense strand
cggaaacgcugccagauca

SEQ ID NO: 950580 - RNA, 19 nt, Homo sapiens
  misc_RNA (1)...(19): siRNA sense strand
ccacauacccggaugaagu

SEQ ID NO: 950581 - RNA, 19 nt, Homo sapiens
  misc_RNA (1)...(19): siRNA sense strand
gaggaggacacaacugauu

SEQ ID NO: 950582 - RNA, 19 nt, Homo sapiens
  misc_RNA (1)...(19): siRNA sense strand
cgaggugccugaccaguuc

SEQ ID NO: 950583 - RNA, 19 nt, Homo sapiens
  misc_RNA (1)...(19): siRNA sense strand
ccgcagcgcugaugaaagg

SEQ ID NO: 950584 - RNA, 19 nt, Homo sapiens
  misc_RNA (1)...(19): siRNA sense strand
guucaucaguggccucuuc

SEQ ID NO: 950585 - RNA, 19 nt, Homo sapiens
  misc_RNA (1)...(19): siRNA sense strand
caucagcuuuggcaaguuc

SEQ ID NO: 950586 - RNA, 19 nt, Homo sapiens
  misc_RNA (1)...(19): siRNA sense strand
ugugugggcuccugccuuu

SEQ ID NO: 950587 - RNA, 19 nt, Homo sapiens
  misc_RNA (1)...(19): siRNA sense strand
caacugauuuccccgauga

SEQ ID NO: 950588 - RNA, 19 nt, Homo sapiens
  misc_RNA (1)...(19): siRNA sense strand
gaagagcuguccacauacc

SEQ ID NO: 950589 - RNA, 19 nt, Homo sapiens
  misc_RNA (1)...(19): siRNA sense strand
cguuagggauggcaccuuu

SEQ ID NO: 950590 - RNA, 19 nt, Homo sapiens
  misc_RNA (1)...(19): siRNA sense strand
ugacaacuuugcccacauc

SEQ ID NO: 950591 - RNA, 19 nt, Homo sapiens
  misc_RNA (1)...(19): siRNA sense strand
cugcauggaugaugugugu

SEQ ID NO: 950592 - RNA, 19 nt, Homo sapiens
  misc_RNA (1)...(19): siRNA sense strand
gcuggacacauccuucuuu

SEQ ID NO: 950593 - RNA, 19 nt, Homo sapiens
  misc_RNA (1)...(19): siRNA sense strand
gccguggauugacaacuuu

SEQ ID NO: 950594 - RNA, 19 nt, Homo sapiens
  misc_RNA (1)...(19): siRNA sense strand
augaaaggccgcuccguua

SEQ ID NO: 950595 - RNA, 19 nt, Homo sapiens
  misc_RNA (1)...(19): siRNA sense strand
gcaugcagaagaucauaga

SEQ ID NO: 950596 - RNA, 19 nt, Homo sapiens
  misc_RNA (1)...(19): siRNA sense strand
gcaggugcacagcuucauu

SEQ ID NO: 950597 - RNA, 19 nt, Homo sapiens
  misc_RNA (1)...(19): siRNA sense strand
gcacggcgucgaagcuuca

SEQ ID NO: 950598 - RNA, 19 nt, Homo sapiens
  misc_RNA (1)...(19): siRNA sense strand
gcauagccaucaucuaccu

SEQ ID NO: 950599 - RNA, 19 nt, Homo sapiens
  misc_RNA (1)...(19): siRNA sense strand
gaccacaggcccuucuuca

SEQ ID NO: 950600 - RNA, 19 nt, Homo sapiens
  misc_RNA (1)...(19): siRNA sense strand
ggaggacacaacugauuuc

SEQ ID NO: 950601 - RNA, 19 nt, Homo sapiens
  misc_RNA (1)...(19): siRNA sense strand
gaaaggccgcuccguuagg

SEQ ID NO: 950602 - RNA, 19 nt, Homo sapiens
  misc_RNA (1)...(19): siRNA sense strand
guggugcucuuccucuuca

SEQ ID NO: 950603 - RNA, 19 nt, Homo sapiens
  misc_RNA (1)...(19): siRNA sense strand
ccgcauagccaucaucuac

SEQ ID NO: 950604 - RNA, 19 nt, Homo sapiens
  misc_RNA (1)...(19): siRNA sense strand
ggcuaaagcuggacauucc

SEQ ID NO: 950605 - RNA, 19 nt, Homo sapiens
  misc_RNA (1)...(19): siRNA sense strand
cagcugggcaugcagaaga

SEQ ID NO: 950606 - RNA, 19 nt, Homo sapiens
  misc_RNA (1)...(19): siRNA sense strand
ucuacgagaacgucaagua

SEQ ID NO: 950607 - RNA, 19 nt, Homo sapiens
  misc_RNA (1)...(19): siRNA sense strand
gcucuuccucuucaccuuu

SEQ ID NO: 950608 - RNA, 19 nt, Homo sapiens
  misc_RNA (1)...(19): siRNA sense strand
ggaagguauccuccaugaa

SEQ ID NO: 950609 - RNA, 19 nt, Homo sapiens
  misc_RNA (1)...(19): siRNA sense strand
agacagcccacaucucuuc

SEQ ID NO: 950610 - RNA, 19 nt, Homo sapiens
  misc_RNA (1)...(19): siRNA sense strand
caucggaggcagcgcuaaa

SEQ ID NO: 950611 - RNA, 19 nt, Homo sapiens
  misc_RNA (1)...(19): siRNA sense strand
ccucaugaguggccagaag

SEQ ID NO: 950612 - RNA, 19 nt, Homo sapiens
  misc_RNA (1)...(19): siRNA sense strand
ugacagcacccagaaaugg

SEQ ID NO: 950613 - RNA, 19 nt, Homo sapiens
  misc_RNA (1)...(19): siRNA sense strand
acugacaaguucugugaga

SEQ ID NO: 950614 - RNA, 19 nt, Homo sapiens
  misc_RNA (1)...(19): siRNA sense strand
ugccguggauugacaacuu

SEQ ID NO: 950615 - RNA, 19 nt, Homo sapiens
  misc_RNA (1)...(19): siRNA sense strand
ccagaagacaucaccaagu

SEQ ID NO: 950616 - RNA, 19 nt, Homo sapiens
  misc_RNA (1)...(19): siRNA sense strand
aagguauccuccaugaaga

SEQ ID NO: 950617 - RNA, 19 nt, Homo sapiens
  misc_RNA (1)...(19): siRNA sense strand
uacaucagcuuuggcaagu

SEQ ID NO: 950618 - RNA, 19 nt, Homo sapiens
  misc_RNA (1)...(19): siRNA sense strand
cauccuggccugccucuuc

SEQ ID NO: 950619 - RNA, 19 nt, Homo sapiens
  misc_RNA (1)...(19): siRNA sense strand
gaggcuggcggaagcagaa

SEQ ID NO: 950620 - RNA, 19 nt, Homo sapiens
  misc_RNA (1)...(19): siRNA sense strand
gggcaugcagaagaucaua

SEQ ID NO: 950621 - RNA, 19 nt, Homo sapiens
  misc_RNA (1)...(19): siRNA sense strand
gaucccagggugugugaug

SEQ ID NO: 950622 - RNA, 19 nt, Homo sapiens
  misc_RNA (1)...(19): siRNA sense strand
cuggacacauccuucuuug

SEQ ID NO: 950623 - RNA, 19 nt, Homo sapiens
  misc_RNA (1)...(19): siRNA sense strand
uggaggaggacacaacuga

SEQ ID NO: 950624 - RNA, 19 nt, Homo sapiens
  misc_RNA (1)...(19): siRNA sense strand
cacauacccggaugaaguu

SEQ ID NO: 950625 - RNA, 19 nt, Homo sapiens
  misc_RNA (1)...(19): siRNA sense strand
gaaacgcugccagaucauc

SEQ ID NO: 950626 - RNA, 19 nt, Homo sapiens
  misc_RNA (1)...(19): siRNA sense strand
ugaaaggccgcuccguuag

SEQ ID NO: 950627 - RNA, 19 nt, Homo sapiens
  misc_RNA (1)...(19): siRNA sense strand
gcacugcauggaugaugug

SEQ ID NO: 950628 - RNA, 19 nt, Homo sapiens
  misc_RNA (1)...(19): siRNA sense strand
gcuaaaggacugggagaag

SEQ ID NO: 950629 - RNA, 19 nt, Homo sapiens
  misc_RNA (1)...(19): siRNA sense strand
ggccagaagacaucaccaa

SEQ ID NO: 950630 - RNA, 19 nt, Homo sapiens
  misc_RNA (1)...(19): siRNA sense strand
ggaggaggacacaacugau

SEQ ID NO: 950631 - RNA, 19 nt, Homo sapiens
  misc_RNA (1)...(19): siRNA sense strand
aggaggacacaacugauuu

SEQ ID NO: 950632 - RNA, 19 nt, Homo sapiens
  misc_RNA (1)...(19): siRNA sense strand
gagcuggacacauccuucu

SEQ ID NO: 950633 - RNA, 19 nt, Homo sapiens
  misc_RNA (1)...(19): siRNA sense strand
ccuacuggcuuaccuucgu

SEQ ID NO: 950634 - RNA, 19 nt, Homo sapiens
  misc_RNA (1)...(19): siRNA sense strand
ccagcucccgcucagguuu

SEQ ID NO: 950635 - RNA, 19 nt, Homo sapiens
  misc_RNA (1)...(19): siRNA sense strand
cagaaauggcagcgcaaga

SEQ ID NO: 950636 - RNA, 19 nt, Homo sapiens
  misc_RNA (1)...(19): siRNA sense strand
gaguaugccagccgagaca

SEQ ID NO: 950637 - RNA, 19 nt, Homo sapiens
  misc_RNA (1)...(19): siRNA sense strand
ggccacaagagacaguuug

SEQ ID NO: 950638 - RNA, 19 nt, Homo sapiens
  misc_RNA (1)...(19): siRNA sense strand
gagugagcaaggacaguga

SEQ ID NO: 950639 - RNA, 19 nt, Homo sapiens
  misc_RNA (1)...(19): siRNA sense strand
ggccgcagcgcugaugaaa

SEQ ID NO: 950640 - RNA, 19 nt, Homo sapiens
  misc_RNA (1)...(19): siRNA sense strand
caaaugaucuccucucuau

SEQ ID NO: 950641 - RNA, 19 nt, Homo sapiens
  misc_RNA (1)...(19): siRNA sense strand
ucaaaucucuuucaccuaa

SEQ ID NO: 950642 - RNA, 19 nt, Homo sapiens
  misc_RNA (1)...(19): siRNA sense strand
gaggugccauuguucauua

SEQ ID NO: 950643 - RNA, 19 nt, Homo sapiens
  misc_RNA (1)...(19): siRNA sense strand
guacagcuguccaaagaaa

SEQ ID NO: 950644 - RNA, 19 nt, Homo sapiens
  misc_RNA (1)...(19): siRNA sense strand
agagagagcuuucuucaga

SEQ ID NO: 950645 - RNA, 19 nt, Homo sapiens
  misc_RNA (1)...(19): siRNA sense strand
ggacaggaaugauggaaca

SEQ ID NO: 950646 - RNA, 19 nt, Homo sapiens
  misc_RNA (1)...(19): siRNA sense strand
gcuacuagaugcaggaauu

SEQ ID NO: 950647 - RNA, 19 nt, Homo sapiens
  misc_RNA (1)...(19): siRNA sense strand
guaugaaacugucgaugaa

SEQ ID NO: 950648 - RNA, 19 nt, Homo sapiens
  misc_RNA (1)...(19): siRNA sense strand
ugagagaggugccauuguu

SEQ ID NO: 950649 - RNA, 19 nt, Homo sapiens
  misc_RNA (1)...(19): siRNA sense strand
ggagaucuuuagggaaaua

SEQ ID NO: 950650 - RNA, 19 nt, Homo sapiens
  misc_RNA (1)...(19): siRNA sense strand
gaccguggcugcuuacaga

SEQ ID NO: 950651 - RNA, 19 nt, Homo sapiens
  misc_RNA (1)...(19): siRNA sense strand
cgaaguacgugauggaaug

SEQ ID NO: 950652 - RNA, 19 nt, Homo sapiens
  misc_RNA (1)...(19): siRNA sense strand
gaagcauuauguuccaauu

SEQ ID NO: 950653 - RNA, 19 nt, Homo sapiens
  misc_RNA (1)...(19): siRNA sense strand
gcaucaaucuccagcaaau

SEQ ID NO: 950654 - RNA, 19 nt, Homo sapiens
  misc_RNA (1)...(19): siRNA sense strand
gauauaggauguaugaaac

SEQ ID NO: 950655 - RNA, 19 nt, Homo sapiens
  misc_RNA (1)...(19): siRNA sense strand
gaagaagccaagaagauug

SEQ ID NO: 950656 - RNA, 19 nt, Homo sapiens
  misc_RNA (1)...(19): siRNA sense strand
cgauagagguccuuuaugg

SEQ ID NO: 950657 - RNA, 19 nt, Homo sapiens
  misc_RNA (1)...(19): siRNA sense strand
ccggagaucuuuagggaaa

SEQ ID NO: 950658 - RNA, 19 nt, Homo sapiens
  misc_RNA (1)...(19): siRNA sense strand
gaugagauauaggauguau

SEQ ID NO: 950659 - RNA, 19 nt, Homo sapiens
  misc_RNA (1)...(19): siRNA sense strand
ggaaauacacagacuucaa

SEQ ID NO: 950660 - RNA, 19 nt, Homo sapiens
  misc_RNA (1)...(19): siRNA sense strand
gaaauacacagacuucaag

SEQ ID NO: 950661 - RNA, 19 nt, Homo sapiens
  misc_RNA (1)...(19): siRNA sense strand
ccaagaagauugcaaaaga

SEQ ID NO: 950662 - RNA, 19 nt, Homo sapiens
  misc_RNA (1)...(19): siRNA sense strand
ucucccagauuuagaauuu

SEQ ID NO: 950663 - RNA, 19 nt, Homo sapiens
  misc_RNA (1)...(19): siRNA sense strand
acacagacuucaagauguu

SEQ ID NO: 950664 - RNA, 19 nt, Homo sapiens
  misc_RNA (1)...(19): siRNA sense strand
aagcaggacucgccauauu

SEQ ID NO: 950665 - RNA, 19 nt, Homo sapiens
  misc_RNA (1)...(19): siRNA sense strand
gaugaaggccugacgauag

SEQ ID NO: 950666 - RNA, 19 nt, Homo sapiens
  misc_RNA (1)...(19): siRNA sense strand
gggccuuccuggaucaaua

SEQ ID NO: 950667 - RNA, 19 nt, Homo sapiens
  misc_RNA (1)...(19): siRNA sense strand
ugagauauaggauguauga

SEQ ID NO: 950668 - RNA, 19 nt, Homo sapiens
  misc_RNA (1)...(19): siRNA sense strand
aaacacagauugcaaaaga

SEQ ID NO: 950669 - RNA, 19 nt, Homo sapiens
  misc_RNA (1)...(19): siRNA sense strand
caaagaaaauccucagcua

SEQ ID NO: 950670 - RNA, 19 nt, Homo sapiens
  misc_RNA (1)...(19): siRNA sense strand
ucaagauguucucugauga

SEQ ID NO: 950671 - RNA, 19 nt, Homo sapiens
  misc_RNA (1)...(19): siRNA sense strand
accaaguacugcagaaaua

SEQ ID NO: 950672 - RNA, 19 nt, Homo sapiens
  misc_RNA (1)...(19): siRNA sense strand
ggaauuacaggauauuucu

SEQ ID NO: 950673 - RNA, 19 nt, Homo sapiens
  misc_RNA (1)...(19): siRNA sense strand
cacacaggcuuuacugcua

SEQ ID NO: 950674 - RNA, 19 nt, Homo sapiens
  misc_RNA (1)...(19): siRNA sense strand
ccucaggccuggcagaaga

SEQ ID NO: 950675 - RNA, 19 nt, Homo sapiens
  misc_RNA (1)...(19): siRNA sense strand
gcaggacucgccauauuau

SEQ ID NO: 950676 - RNA, 19 nt, Homo sapiens
  misc_RNA (1)...(19): siRNA sense strand
uaaagcaggacucgccaua

SEQ ID NO: 950677 - RNA, 19 nt, Homo sapiens
  misc_RNA (1)...(19): siRNA sense strand
ccggauacaugucccuaaa

SEQ ID NO: 950678 - RNA, 19 nt, Homo sapiens
  misc_RNA (1)...(19): siRNA sense strand
ugaagaagccaagaagauu

SEQ ID NO: 950679 - RNA, 19 nt, Homo sapiens
  misc_RNA (1)...(19): siRNA sense strand
ggguuucuuugauuucuuu

SEQ ID NO: 950680 - RNA, 19 nt, Homo sapiens
  misc_RNA (1)...(19): siRNA sense strand
ugguacagcuguccaaaga

SEQ ID NO: 950681 - RNA, 19 nt, Homo sapiens
  misc_RNA (1)...(19): siRNA sense strand
cagcaucaaucuccagcaa

SEQ ID NO: 950682 - RNA, 19 nt, Homo sapiens
  misc_RNA (1)...(19): siRNA sense strand
gacgauagagguccuuuau

SEQ ID NO: 950683 - RNA, 19 nt, Homo sapiens
  misc_RNA (1)...(19): siRNA sense strand
gauggaacauuuucgauga

SEQ ID NO: 950684 - RNA, 19 nt, Homo sapiens
  misc_RNA (1)...(19): siRNA sense strand
uaaaagaaguccccaaaag

SEQ ID NO: 950685 - RNA, 19 nt, Homo sapiens
  misc_RNA (1)...(19): siRNA sense strand
guugauggguuucuuugau

SEQ ID NO: 950686 - RNA, 19 nt, Homo sapiens
  misc_RNA (1)...(19): siRNA sense strand
aaacaaggaaacacagauu

SEQ ID NO: 950687 - RNA, 19 nt, Homo sapiens
  misc_RNA (1)...(19): siRNA sense strand
ugauggguuucuuugauuu

SEQ ID NO: 950688 - RNA, 19 nt, Homo sapiens
  misc_RNA (1)...(19): siRNA sense strand
gaacauuuucgaugagaua

SEQ ID NO: 950689 - RNA, 19 nt, Homo sapiens
  misc_RNA (1)...(19): siRNA sense strand
aagccaaguugauggguuu

SEQ ID NO: 950690 - RNA, 19 nt, Homo sapiens
  misc_RNA (1)...(19): siRNA sense strand
gcucagucucccuauauuu

SEQ ID NO: 950691 - RNA, 19 nt, Homo sapiens
  misc_RNA (1)...(19): siRNA sense strand
ucgaugagauauaggaugu

SEQ ID NO: 950692 - RNA, 19 nt, Homo sapiens
  misc_RNA (1)...(19): siRNA sense strand
ccauaccuaucauuucaug

SEQ ID NO: 950693 - RNA, 19 nt, Homo sapiens
  misc_RNA (1)...(19): siRNA sense strand
caaaucucuuucaccuaaa

SEQ ID NO: 950694 - RNA, 19 nt, Homo sapiens
  misc_RNA (1)...(19): siRNA sense strand
gaaaggaccaguguaccau

SEQ ID NO: 950695 - RNA, 19 nt, Homo sapiens
  misc_RNA (1)...(19): siRNA sense strand
caagaagauugcaaaagaa

SEQ ID NO: 950696 - RNA, 19 nt, Homo sapiens
  misc_RNA (1)...(19): siRNA sense strand
ucaaagucguagucaaauc

SEQ ID NO: 950697 - RNA, 19 nt, Homo sapiens
  misc_RNA (1)...(19): siRNA sense strand
aaacagagagagcuuucuu

SEQ ID NO: 950698 - RNA, 19 nt, Homo sapiens
  misc_RNA (1)...(19): siRNA sense strand
cuagaaccuuggaagcauu

SEQ ID NO: 950699 - RNA, 19 nt, Homo sapiens
  misc_RNA (1)...(19): siRNA sense strand
caaguugauggguuucuuu

SEQ ID NO: 950700 - RNA, 19 nt, Homo sapiens
  misc_RNA (1)...(19): siRNA sense strand
augcaggaauuacaggaua

SEQ ID NO: 950701 - RNA, 19 nt, Homo sapiens
  misc_RNA (1)...(19): siRNA sense strand
cuaaaccuuuggacaggaa

SEQ ID NO: 950702 - RNA, 19 nt, Homo sapiens
  misc_RNA (1)...(19): siRNA sense strand
gaugaagaagccaagaaga

SEQ ID NO: 950703 - RNA, 19 nt, Homo sapiens
  misc_RNA (1)...(19): siRNA sense strand
agagcuuucuucagaggua

SEQ ID NO: 950704 - RNA, 19 nt, Homo sapiens
  misc_RNA (1)...(19): siRNA sense strand
ggaccaguguaccaugagu

SEQ ID NO: 950705 - RNA, 19 nt, Homo sapiens
  misc_RNA (1)...(19): siRNA sense strand
aaugaucuccucucuauuc

SEQ ID NO: 950706 - RNA, 19 nt, Homo sapiens
  misc_RNA (1)...(19): siRNA sense strand
caaagucguagucaaaucu

SEQ ID NO: 950707 - RNA, 19 nt, Homo sapiens
  misc_RNA (1)...(19): siRNA sense strand
cagcaaacccgaaguacgu

SEQ ID NO: 950708 - RNA, 19 nt, Homo sapiens
  misc_RNA (1)...(19): siRNA sense strand
uucaagagauguuguccuu

SEQ ID NO: 950709 - RNA, 19 nt, Homo sapiens
  misc_RNA (1)...(19): siRNA sense strand
auacacagacuucaagaug

SEQ ID NO: 950710 - RNA, 19 nt, Homo sapiens
  misc_RNA (1)...(19): siRNA sense strand
uguaugaaacugucgauga

SEQ ID NO: 950711 - RNA, 19 nt, Homo sapiens
  misc_RNA (1)...(19): siRNA sense strand
ggauacaugucccuaaacc

SEQ ID NO: 950712 - RNA, 19 nt, Homo sapiens
  misc_RNA (1)...(19): siRNA sense strand
gugauggaauggaacuugu

SEQ ID NO: 950713 - RNA, 19 nt, Homo sapiens
  misc_RNA (1)...(19): siRNA sense strand
ggcuuuacugcuacuauua

SEQ ID NO: 950714 - RNA, 19 nt, Homo sapiens
  misc_RNA (1)...(19): siRNA sense strand
aaaguuaaaugggcuaagg

SEQ ID NO: 950715 - RNA, 19 nt, Homo sapiens
  misc_RNA (1)...(19): siRNA sense strand
uugauggguuucuuugauu

SEQ ID NO: 950716 - RNA, 19 nt, Homo sapiens
  misc_RNA (1)...(19): siRNA sense strand
uaaagaguugguccggaua

SEQ ID NO: 950717 - RNA, 19 nt, Homo sapiens
  misc_RNA (1)...(19): siRNA sense strand
gguccuuuauggugaugaa

SEQ ID NO: 950718 - RNA, 19 nt, Homo sapiens
  misc_RNA (1)...(19): siRNA sense strand
uaaaugggcuaaggaaaau

SEQ ID NO: 950719 - RNA, 19 nt, Homo sapiens
  misc_RNA (1)...(19): siRNA sense strand
ccaaguugauggguuucuu

SEQ ID NO: 950720 - RNA, 19 nt, Homo sapiens
  misc_RNA (1)...(19): siRNA sense strand
uucaagauguucucugaug

SEQ ID NO: 950721 - RNA, 19 nt, Homo sapiens
  misc_RNA (1)...(19): siRNA sense strand
cauuacacgauucucaaua

SEQ ID NO: 950722 - RNA, 19 nt, Homo sapiens
  misc_RNA (1)...(19): siRNA sense strand
augaaggccugacgauaga

SEQ ID NO: 950723 - RNA, 19 nt, Homo sapiens
  misc_RNA (1)...(19): siRNA sense strand
gcgacagucugguuuuaaa

SEQ ID NO: 950724 - RNA, 19 nt, Homo sapiens
  misc_RNA (1)...(19): siRNA sense strand
gcaggaauuacaggauauu

SEQ ID NO: 950725 - RNA, 19 nt, Homo sapiens
  misc_RNA (1)...(19): siRNA sense strand
uacacagacuucaagaugu

SEQ ID NO: 950726 - RNA, 19 nt, Homo sapiens
  misc_RNA (1)...(19): siRNA sense strand
acacgauucucaauaacca

SEQ ID NO: 950727 - RNA, 19 nt, Homo sapiens
  misc_RNA (1)...(19): siRNA sense strand
cgaugaaggccugacgaua

SEQ ID NO: 950728 - RNA, 19 nt, Homo sapiens
  misc_RNA (1)...(19): siRNA sense strand
caaguacugcagaaauaug

SEQ ID NO: 950729 - RNA, 19 nt, Homo sapiens
  misc_RNA (1)...(19): siRNA sense strand
gaguugguccggauacaug

SEQ ID NO: 950730 - RNA, 19 nt, Homo sapiens
  misc_RNA (1)...(19): siRNA sense strand
aaggaccaguguaccauga

SEQ ID NO: 950731 - RNA, 19 nt, Homo sapiens
  misc_RNA (1)...(19): siRNA sense strand
auacaugucccuaaaccuu

SEQ ID NO: 950732 - RNA, 19 nt, Homo sapiens
  misc_RNA (1)...(19): siRNA sense strand
ccaaguacugcagaaauau

SEQ ID NO: 950733 - RNA, 19 nt, Homo sapiens
  misc_RNA (1)...(19): siRNA sense strand
uagaaccuuggaagcauua

SEQ ID NO: 950734 - RNA, 19 nt, Homo sapiens
  misc_RNA (1)...(19): siRNA sense strand
cguggcugcuuacagauau

SEQ ID NO: 950735 - RNA, 19 nt, Homo sapiens
  misc_RNA (1)...(19): siRNA sense strand
cuacuagaugcaggaauua

SEQ ID NO: 950736 - RNA, 19 nt, Homo sapiens
  misc_RNA (1)...(19): siRNA sense strand
gauucucaauaaccauguu

SEQ ID NO: 950737 - RNA, 19 nt, Homo sapiens
  misc_RNA (1)...(19): siRNA sense strand
gagagaggugccauuguuc

SEQ ID NO: 950738 - RNA, 19 nt, Homo sapiens
  misc_RNA (1)...(19): siRNA sense strand
caaacaaggaaacacagau

SEQ ID NO: 950739 - RNA, 19 nt, Homo sapiens
  misc_RNA (1)...(19): siRNA sense strand
ccaaacaaggaaacacaga

SEQ ID NO: 950740 - RNA, 19 nt, Homo sapiens
  misc_RNA (1)...(19): siRNA sense strand
gaaaggagccugacucuua

SEQ ID NO: 950741 - RNA, 19 nt, Homo sapiens
  misc_RNA (1)...(19): siRNA sense strand
gaacaggugggauaucuua

SEQ ID NO: 950742 - RNA, 19 nt, Homo sapiens
  misc_RNA (1)...(19): siRNA sense strand
gaauauggcugcaguuugg

SEQ ID NO: 950743 - RNA, 19 nt, Homo sapiens
  misc_RNA (1)...(19): siRNA sense strand
gaacuaagaggaauucaga

SEQ ID NO: 950744 - RNA, 19 nt, Homo sapiens
  misc_RNA (1)...(19): siRNA sense strand
ggaagacauuguuguugua

SEQ ID NO: 950745 - RNA, 19 nt, Homo sapiens
  misc_RNA (1)...(19): siRNA sense strand
ucaccgauguuuacaauuu

SEQ ID NO: 950746 - RNA, 19 nt, Homo sapiens
  misc_RNA (1)...(19): siRNA sense strand
aaucacagcucaagaacua

SEQ ID NO: 950747 - RNA, 19 nt, Homo sapiens
  misc_RNA (1)...(19): siRNA sense strand
gcaguaacaucagcuauga

SEQ ID NO: 950748 - RNA, 19 nt, Homo sapiens
  misc_RNA (1)...(19): siRNA sense strand
gcagaggcauuucauaauc

SEQ ID NO: 950749 - RNA, 19 nt, Homo sapiens
  misc_RNA (1)...(19): siRNA sense strand
agacauuacugaagacuuu

SEQ ID NO: 950750 - RNA, 19 nt, Homo sapiens
  misc_RNA (1)...(19): siRNA sense strand
ggaauaaccacaaaucaga

SEQ ID NO: 950751 - RNA, 19 nt, Homo sapiens
  misc_RNA (1)...(19): siRNA sense strand
ccacaaggauucuucuaga

SEQ ID NO: 950752 - RNA, 19 nt, Homo sapiens
  misc_RNA (1)...(19): siRNA sense strand
ugaaagggauggagaacaa

SEQ ID NO: 950753 - RNA, 19 nt, Homo sapiens
  misc_RNA (1)...(19): siRNA sense strand
gaacagggaggaauucuuc

SEQ ID NO: 950754 - RNA, 19 nt, Homo sapiens
  misc_RNA (1)...(19): siRNA sense strand
ggagaaauuuuaccgaaua

SEQ ID NO: 950755 - RNA, 19 nt, Homo sapiens
  misc_RNA (1)...(19): siRNA sense strand
aaacugccaucagacauua

SEQ ID NO: 950756 - RNA, 19 nt, Homo sapiens
  misc_RNA (1)...(19): siRNA sense strand
ggaagaauuugagauuguu

SEQ ID NO: 950757 - RNA, 19 nt, Homo sapiens
  misc_RNA (1)...(19): siRNA sense strand
cagauuggcuucauaucaa

SEQ ID NO: 950758 - RNA, 19 nt, Homo sapiens
  misc_RNA (1)...(19): siRNA sense strand
gagccugacucuuaugaug

SEQ ID NO: 950759 - RNA, 19 nt, Homo sapiens
  misc_RNA (1)...(19): siRNA sense strand
ggaaucagcagaggcauuu

SEQ ID NO: 950760 - RNA, 19 nt, Homo sapiens
  misc_RNA (1)...(19): siRNA sense strand
uguauaauguguugcagua

SEQ ID NO: 950761 - RNA, 19 nt, Homo sapiens
  misc_RNA (1)...(19): siRNA sense strand
cagcagaggcauuucauaa

SEQ ID NO: 950762 - RNA, 19 nt, Homo sapiens
  misc_RNA (1)...(19): siRNA sense strand
ggcgaaugcugcaggauuu

SEQ ID NO: 950763 - RNA, 19 nt, Homo sapiens
  misc_RNA (1)...(19): siRNA sense strand
gaaauagaaacaagcaaug

SEQ ID NO: 950764 - RNA, 19 nt, Homo sapiens
  misc_RNA (1)...(19): siRNA sense strand
ucagagaggagucacaaua

SEQ ID NO: 950765 - RNA, 19 nt, Homo sapiens
  misc_RNA (1)...(19): siRNA sense strand
gaaacaagcaauggauuau

SEQ ID NO: 950766 - RNA, 19 nt, Homo sapiens
  misc_RNA (1)...(19): siRNA sense strand
ccaaugacgucuggauuau

SEQ ID NO: 950767 - RNA, 19 nt, Homo sapiens
  misc_RNA (1)...(19): siRNA sense strand
ggccaaguuucucuguaua

SEQ ID NO: 950768 - RNA, 19 nt, Homo sapiens
  misc_RNA (1)...(19): siRNA sense strand
uacagugaaugcuaugaua

SEQ ID NO: 950769 - RNA, 19 nt, Homo sapiens
  misc_RNA (1)...(19): siRNA sense strand
agaaacaagcaauggauua

SEQ ID NO: 950770 - RNA, 19 nt, Homo sapiens
  misc_RNA (1)...(19): siRNA sense strand
acucuuagcucauucaauc

SEQ ID NO: 950771 - RNA, 19 nt, Homo sapiens
  misc_RNA (1)...(19): siRNA sense strand
ggagagaucccaagguagu

SEQ ID NO: 950772 - RNA, 19 nt, Homo sapiens
  misc_RNA (1)...(19): siRNA sense strand
ugacucuuaugauggaaua

SEQ ID NO: 950773 - RNA, 19 nt, Homo sapiens
  misc_RNA (1)...(19): siRNA sense strand
aaaggagccugacucuuau

SEQ ID NO: 950774 - RNA, 19 nt, Homo sapiens
  misc_RNA (1)...(19): siRNA sense strand
cgaauaaagacucaucauu

SEQ ID NO: 950775 - RNA, 19 nt, Homo sapiens
  misc_RNA (1)...(19): siRNA sense strand
gcacugagaggaaaauuaa

SEQ ID NO: 950776 - RNA, 19 nt, Homo sapiens
  misc_RNA (1)...(19): siRNA sense strand
ggcagaagcuguuuugauu

SEQ ID NO: 950777 - RNA, 19 nt, Homo sapiens
  misc_RNA (1)...(19): siRNA sense strand
acggagagaucccaaggua

SEQ ID NO: 950778 - RNA, 19 nt, Homo sapiens
  misc_RNA (1)...(19): siRNA sense strand
gcacaggaagacauuaaug

SEQ ID NO: 950779 - RNA, 19 nt, Homo sapiens
  misc_RNA (1)...(19): siRNA sense strand
caagguagugguucaagaa

SEQ ID NO: 950780 - RNA, 19 nt, Homo sapiens
  misc_RNA (1)...(19): siRNA sense strand
guacacagauuggcuucau

SEQ ID NO: 950781 - RNA, 19 nt, Homo sapiens
  misc_RNA (1)...(19): siRNA sense strand
agacauuguuguuguacuu

SEQ ID NO: 950782 - RNA, 19 nt, Homo sapiens
  misc_RNA (1)...(19): siRNA sense strand
gcucaagaacuaagaggaa

SEQ ID NO: 950783 - RNA, 19 nt, Homo sapiens
  misc_RNA (1)...(19): siRNA sense strand
uaccaacucuuagcucauu

SEQ ID NO: 950784 - RNA, 19 nt, Homo sapiens
  misc_RNA (1)...(19): siRNA sense strand
gaucccagauauuuucaua

SEQ ID NO: 950785 - RNA, 19 nt, Homo sapiens
  misc_RNA (1)...(19): siRNA sense strand
ggauggagaacaagauaau

SEQ ID NO: 950786 - RNA, 19 nt, Homo sapiens
  misc_RNA (1)...(19): siRNA sense strand
gaucucaaccucuguacau

SEQ ID NO: 950787 - RNA, 19 nt, Homo sapiens
  misc_RNA (1)...(19): siRNA sense strand
uggaagacauuguuguugu

SEQ ID NO: 950788 - RNA, 19 nt, Homo sapiens
  misc_RNA (1)...(19): siRNA sense strand
ccaagguagugguucaaga

SEQ ID NO: 950789 - RNA, 19 nt, Homo sapiens
  misc_RNA (1)...(19): siRNA sense strand
ccaaguuucucuguauaau

SEQ ID NO: 950790 - RNA, 19 nt, Homo sapiens
  misc_RNA (1)...(19): siRNA sense strand
caggaagacauuaaugaaa

SEQ ID NO: 950791 - RNA, 19 nt, Homo sapiens
  misc_RNA (1)...(19): siRNA sense strand
uggaagaauuugagauugu

SEQ ID NO: 950792 - RNA, 19 nt, Homo sapiens
  misc_RNA (1)...(19): siRNA sense strand
aacaagcaauggauuauca

SEQ ID NO: 950793 - RNA, 19 nt, Homo sapiens
  misc_RNA (1)...(19): siRNA sense strand
uacaagaacaggugggaua

SEQ ID NO: 950794 - RNA, 19 nt, Homo sapiens
  misc_RNA (1)...(19): siRNA sense strand
caagaucucaaccucugua

SEQ ID NO: 950795 - RNA, 19 nt, Homo sapiens
  misc_RNA (1)...(19): siRNA sense strand
uucaaucucuucaguaguu

SEQ ID NO: 950796 - RNA, 19 nt, Homo sapiens
  misc_RNA (1)...(19): siRNA sense strand
uaaagacucaucauuccaa

SEQ ID NO: 950797 - RNA, 19 nt, Homo sapiens
  misc_RNA (1)...(19): siRNA sense strand
gacuguauaccgauaguuu

SEQ ID NO: 950798 - RNA, 19 nt, Homo sapiens
  misc_RNA (1)...(19): siRNA sense strand
uaacaucagcuaugaaagg

SEQ ID NO: 950799 - RNA, 19 nt, Homo sapiens
  misc_RNA (1)...(19): siRNA sense strand
guguacaacuauuugauuc

SEQ ID NO: 950800 - RNA, 19 nt, Homo sapiens
  misc_RNA (1)...(19): siRNA sense strand
cauucaaucucuucaguag

SEQ ID NO: 950801 - RNA, 19 nt, Homo sapiens
  misc_RNA (1)...(19): siRNA sense strand
aggaagacauuaaugaaag

SEQ ID NO: 950802 - RNA, 19 nt, Homo sapiens
  misc_RNA (1)...(19): siRNA sense strand
auuaucagcucucuuggaa

SEQ ID NO: 950803 - RNA, 19 nt, Homo sapiens
  misc_RNA (1)...(19): siRNA sense strand
ggaagacauuaaugaaagc

SEQ ID NO: 950804 - RNA, 19 nt, Homo sapiens
  misc_RNA (1)...(19): siRNA sense strand
gccacuuuguauaccauua

SEQ ID NO: 950805 - RNA, 19 nt, Homo sapiens
  misc_RNA (1)...(19): siRNA sense strand
gauggaauaaccacaaauc

SEQ ID NO: 950806 - RNA, 19 nt, Homo sapiens
  misc_RNA (1)...(19): siRNA sense strand
cguaaucacagcucaagaa

SEQ ID NO: 950807 - RNA, 19 nt, Homo sapiens
  misc_RNA (1)...(19): siRNA sense strand
guaggaccuugcuguuuua

SEQ ID NO: 950808 - RNA, 19 nt, Homo sapiens
  misc_RNA (1)...(19): siRNA sense strand
cagaauauggcugcaguuu

SEQ ID NO: 950809 - RNA, 19 nt, Homo sapiens
  misc_RNA (1)...(19): siRNA sense strand
ccacuuuguauaccauuaa

SEQ ID NO: 950810 - RNA, 19 nt, Homo sapiens
  misc_RNA (1)...(19): siRNA sense strand
acaggugggauaucuuaua

SEQ ID NO: 950811 - RNA, 19 nt, Homo sapiens
  misc_RNA (1)...(19): siRNA sense strand
cacaggaagacauuaauga

SEQ ID NO: 950812 - RNA, 19 nt, Homo sapiens
  misc_RNA (1)...(19): siRNA sense strand
gccaaguuucucuguauaa

SEQ ID NO: 950813 - RNA, 19 nt, Homo sapiens
  misc_RNA (1)...(19): siRNA sense strand
cagaggcauuucauaaucu

SEQ ID NO: 950814 - RNA, 19 nt, Homo sapiens
  misc_RNA (1)...(19): siRNA sense strand
cagaagcuguuuugauuga

SEQ ID NO: 950815 - RNA, 19 nt, Homo sapiens
  misc_RNA (1)...(19): siRNA sense strand
ugaaugcuguccaauacca

SEQ ID NO: 950816 - RNA, 19 nt, Homo sapiens
  misc_RNA (1)...(19): siRNA sense strand
cuucaccgauguuuacaau

SEQ ID NO: 950817 - RNA, 19 nt, Homo sapiens
  misc_RNA (1)...(19): siRNA sense strand
cgagauggccuuaauuuug

SEQ ID NO: 950818 - RNA, 19 nt, Homo sapiens
  misc_RNA (1)...(19): siRNA sense strand
gaccagaaccaagaucuca

SEQ ID NO: 950819 - RNA, 19 nt, Homo sapiens
  misc_RNA (1)...(19): siRNA sense strand
gcauguguacaacuauuug

SEQ ID NO: 950820 - RNA, 19 nt, Homo sapiens
  misc_RNA (1)...(19): siRNA sense strand
ccagauauuuucauacaug

SEQ ID NO: 950821 - RNA, 19 nt, Homo sapiens
  misc_RNA (1)...(19): siRNA sense strand
aauaaagacucaucauucc

SEQ ID NO: 950822 - RNA, 19 nt, Homo sapiens
  misc_RNA (1)...(19): siRNA sense strand
gagauggccuuaauuuugg

SEQ ID NO: 950823 - RNA, 19 nt, Homo sapiens
  misc_RNA (1)...(19): siRNA sense strand
uguccgagauggccuuaau

SEQ ID NO: 950824 - RNA, 19 nt, Homo sapiens
  misc_RNA (1)...(19): siRNA sense strand
acaggaagacauuaaugaa

SEQ ID NO: 950825 - RNA, 19 nt, Homo sapiens
  misc_RNA (1)...(19): siRNA sense strand
acacagauuggcuucauau

SEQ ID NO: 950826 - RNA, 19 nt, Homo sapiens
  misc_RNA (1)...(19): siRNA sense strand
gagaggagucacaauagca

SEQ ID NO: 950827 - RNA, 19 nt, Homo sapiens
  misc_RNA (1)...(19): siRNA sense strand
aaugacgucuggauuaugg

SEQ ID NO: 950828 - RNA, 19 nt, Homo sapiens
  misc_RNA (1)...(19): siRNA sense strand
gcgaaugcugcaggauuua

SEQ ID NO: 950829 - RNA, 19 nt, Homo sapiens
  misc_RNA (1)...(19): siRNA sense strand
caagaacuaagaggaauuc

SEQ ID NO: 950830 - RNA, 19 nt, Homo sapiens
  misc_RNA (1)...(19): siRNA sense strand
uggauuaucagcucucuug

SEQ ID NO: 950831 - RNA, 19 nt, Homo sapiens
  misc_RNA (1)...(19): siRNA sense strand
cuucuuugaucccagauau

SEQ ID NO: 950832 - RNA, 19 nt, Homo sapiens
  misc_RNA (1)...(19): siRNA sense strand
uacacagauuggcuucaua

SEQ ID NO: 950833 - RNA, 19 nt, Homo sapiens
  misc_RNA (1)...(19): siRNA sense strand
guuugaaauugaacucuca

SEQ ID NO: 950834 - RNA, 19 nt, Homo sapiens
  misc_RNA (1)...(19): siRNA sense strand
aagaacaggugggauaucu

SEQ ID NO: 950835 - RNA, 19 nt, Homo sapiens
  misc_RNA (1)...(19): siRNA sense strand
gggauggagaacaagauaa

SEQ ID NO: 950836 - RNA, 19 nt, Homo sapiens
  misc_RNA (1)...(19): siRNA sense strand
acagauuggcuucauauca

SEQ ID NO: 950837 - RNA, 19 nt, Homo sapiens
  misc_RNA (1)...(19): siRNA sense strand
guacaacuauuugauucac

SEQ ID NO: 950838 - RNA, 19 nt, Homo sapiens
  misc_RNA (1)...(19): siRNA sense strand
aguaacaucagcuaugaaa

SEQ ID NO: 950839 - RNA, 19 nt, Homo sapiens
  misc_RNA (1)...(19): siRNA sense strand
gaaugcugcaggauuuaau

SEQ ID NO: 950840 - RNA, 19 nt, Homo sapiens
  misc_RNA (1)...(19): siRNA sense strand
ggccuuaucuccuccuguu

SEQ ID NO: 950841 - RNA, 19 nt, Homo sapiens
  misc_RNA (1)...(19): siRNA sense strand
agaaaccucuggccuuauc

SEQ ID NO: 950842 - RNA, 19 nt, Homo sapiens
  misc_RNA (1)...(19): siRNA sense strand
uauacggucucugaagguu

SEQ ID NO: 950843 - RNA, 19 nt, Homo sapiens
  misc_RNA (1)...(19): siRNA sense strand
ccucaaaucggacacucaa

SEQ ID NO: 950844 - RNA, 19 nt, Homo sapiens
  misc_RNA (1)...(19): siRNA sense strand
gagaaaccucuggccuuau

SEQ ID NO: 950845 - RNA, 19 nt, Homo sapiens
  misc_RNA (1)...(19): siRNA sense strand
aggaagaggaggagacaga

SEQ ID NO: 950846 - RNA, 19 nt, Homo sapiens
  misc_RNA (1)...(19): siRNA sense strand
gagaguaccugaucaagcu

SEQ ID NO: 950847 - RNA, 19 nt, Homo sapiens
  misc_RNA (1)...(19): siRNA sense strand
gcgagaggcuggccagaau

SEQ ID NO: 950848 - RNA, 19 nt, Homo sapiens
  misc_RNA (1)...(19): siRNA sense strand
ccacaacuauggcgucuac

SEQ ID NO: 950849 - RNA, 19 nt, Homo sapiens
  misc_RNA (1)...(19): siRNA sense strand
ccagauggauggcuucucu

SEQ ID NO: 950850 - RNA, 19 nt, Homo sapiens
  misc_RNA (1)...(19): siRNA sense strand
cguaacggcuuccgcauca

SEQ ID NO: 950851 - RNA, 19 nt, Homo sapiens
  misc_RNA (1)...(19): siRNA sense strand
gcacagccgucaccuucca

SEQ ID NO: 950852 - RNA, 19 nt, Homo sapiens
  misc_RNA (1)...(19): siRNA sense strand
ugggcgagcuggaagauga

SEQ ID NO: 950853 - RNA, 19 nt, Homo sapiens
  misc_RNA (1)...(19): siRNA sense strand
cagggcgacuuuaccauug

SEQ ID NO: 950854 - RNA, 19 nt, Homo sapiens
  misc_RNA (1)...(19): siRNA sense strand
ggguggaggcggacaagua

SEQ ID NO: 950855 - RNA, 19 nt, Homo sapiens
  misc_RNA (1)...(19): siRNA sense strand
cgacagcacuuggugacau

SEQ ID NO: 950856 - RNA, 19 nt, Homo sapiens
  misc_RNA (1)...(19): siRNA sense strand
gaguggacguccugguuca

SEQ ID NO: 950857 - RNA, 19 nt, Homo sapiens
  misc_RNA (1)...(19): siRNA sense strand
ucaaggccaugcggaagaa

SEQ ID NO: 950858 - RNA, 19 nt, Homo sapiens
  misc_RNA (1)...(19): siRNA sense strand
gaggcuggccagaauguga

SEQ ID NO: 950859 - RNA, 19 nt, Homo sapiens
  misc_RNA (1)...(19): siRNA sense strand
gaaggugguggcagagugu

SEQ ID NO: 950860 - RNA, 19 nt, Homo sapiens
  misc_RNA (1)...(19): siRNA sense strand
ccagggcgacuuuaccauu

SEQ ID NO: 950861 - RNA, 19 nt, Homo sapiens
  misc_RNA (1)...(19): siRNA sense strand
gcgagcgcgugcacuugaa

SEQ ID NO: 950862 - RNA, 19 nt, Homo sapiens
  misc_RNA (1)...(19): siRNA sense strand
caagcucccugaggacugu

SEQ ID NO: 950863 - RNA, 19 nt, Homo sapiens
  misc_RNA (1)...(19): siRNA sense strand
gcgaguggacguccugguu

SEQ ID NO: 950864 - RNA, 19 nt, Homo sapiens
  misc_RNA (1)...(19): siRNA sense strand
ccaagaaauacuccugguu

SEQ ID NO: 950865 - RNA, 19 nt, Homo sapiens
  misc_RNA (1)...(19): siRNA sense strand
gacagcacuuggugacauc

SEQ ID NO: 950866 - RNA, 19 nt, Homo sapiens
  misc_RNA (1)...(19): siRNA sense strand
gcacugggccuggaaagac

SEQ ID NO: 950867 - RNA, 19 nt, Homo sapiens
  misc_RNA (1)...(19): siRNA sense strand
agccguaccuggugaaaca

SEQ ID NO: 950868 - RNA, 19 nt, Homo sapiens
  misc_RNA (1)...(19): siRNA sense strand
gagaggcuggccagaaugu

SEQ ID NO: 950869 - RNA, 19 nt, Homo sapiens
  misc_RNA (1)...(19): siRNA sense strand
gcuacguccucccagugaa

SEQ ID NO: 950870 - RNA, 19 nt, Homo sapiens
  misc_RNA (1)...(19): siRNA sense strand
gagcugguccugccuucug

SEQ ID NO: 950871 - RNA, 19 nt, Homo sapiens
  misc_RNA (1)...(19): siRNA sense strand
ggccagcucuacggacuuc

SEQ ID NO: 950872 - RNA, 19 nt, Homo sapiens
  misc_RNA (1)...(19): siRNA sense strand
gcuuugaugguuccucuga

SEQ ID NO: 950873 - RNA, 19 nt, Homo sapiens
  misc_RNA (1)...(19): siRNA sense strand
gagagaagggagauucacu

SEQ ID NO: 950874 - RNA, 19 nt, Homo sapiens
  misc_RNA (1)...(19): siRNA sense strand
gcgcaccuacggcauguuc

SEQ ID NO: 950875 - RNA, 19 nt, Homo sapiens
  misc_RNA (1)...(19): siRNA sense strand
caacuauggcgucuacacu

SEQ ID NO: 950876 - RNA, 19 nt, Homo sapiens
  misc_RNA (1)...(19): siRNA sense strand
cagccugcguggaguucaa

SEQ ID NO: 950877 - RNA, 19 nt, Homo sapiens
  misc_RNA (1)...(19): siRNA sense strand
gaagccguaccuggugaaa

SEQ ID NO: 950878 - RNA, 19 nt, Homo sapiens
  misc_RNA (1)...(19): siRNA sense strand
acuauggcgucuacacugu

SEQ ID NO: 950879 - RNA, 19 nt, Homo sapiens
  misc_RNA (1)...(19): siRNA sense strand
ccagugaccugcgcuucgu

SEQ ID NO: 950880 - RNA, 19 nt, Homo sapiens
  misc_RNA (1)...(19): siRNA sense strand
acggacuccuucgggauua

SEQ ID NO: 950881 - RNA, 19 nt, Homo sapiens
  misc_RNA (1)...(19): siRNA sense strand
ggccgcugcuuugaugguu

SEQ ID NO: 950882 - RNA, 19 nt, Homo sapiens
  misc_RNA (1)...(19): siRNA sense strand
gcgucuacacugucacuga

SEQ ID NO: 950883 - RNA, 19 nt, Homo sapiens
  misc_RNA (1)...(19): siRNA sense strand
uauggcgucuacacuguca

SEQ ID NO: 950884 - RNA, 19 nt, Homo sapiens
  misc_RNA (1)...(19): siRNA sense strand
ugaaugcccggaccacauc

SEQ ID NO: 950885 - RNA, 19 nt, Homo sapiens
  misc_RNA (1)...(19): siRNA sense strand
gaaggaggccuggauguga

SEQ ID NO: 950886 - RNA, 19 nt, Homo sapiens
  misc_RNA (1)...(19): siRNA sense strand
gcugagagcuccugugacu

SEQ ID NO: 950887 - RNA, 19 nt, Homo sapiens
  misc_RNA (1)...(19): siRNA sense strand
ggaaggaggccuggaugug

SEQ ID NO: 950888 - RNA, 19 nt, Homo sapiens
  misc_RNA (1)...(19): siRNA sense strand
cuucugcucuccucaaugu

SEQ ID NO: 950889 - RNA, 19 nt, Homo sapiens
  misc_RNA (1)...(19): siRNA sense strand
aaggaggccuggaugugaa

SEQ ID NO: 950890 - RNA, 19 nt, Homo sapiens
  misc_RNA (1)...(19): siRNA sense strand
ugagagcuccugugacugu

SEQ ID NO: 950891 - RNA, 19 nt, Homo sapiens
  misc_RNA (1)...(19): siRNA sense strand
gggaaggaggccuggaugu

SEQ ID NO: 950892 - RNA, 19 nt, Homo sapiens
  misc_RNA (1)...(19): siRNA sense strand
gauaagagaugccuucaga

SEQ ID NO: 950893 - RNA, 19 nt, Homo sapiens
  misc_RNA (1)...(19): siRNA sense strand
gcacaaguguuaucucugu

SEQ ID NO: 950894 - RNA, 19 nt, Homo sapiens
  misc_RNA (1)...(19): siRNA sense strand
gagagaccuuggaguaauu

SEQ ID NO: 950895 - RNA, 19 nt, Homo sapiens
  misc_RNA (1)...(19): siRNA sense strand
gaaauucaaacccuaguga

SEQ ID NO: 950896 - RNA, 19 nt, Homo sapiens
  misc_RNA (1)...(19): siRNA sense strand
agagaugccuucagagaaa

SEQ ID NO: 950897 - RNA, 19 nt, Homo sapiens
  misc_RNA (1)...(19): siRNA sense strand
uaaaggauccuguagaaau

SEQ ID NO: 950898 - RNA, 19 nt, Homo sapiens
  misc_RNA (1)...(19): siRNA sense strand
aaaggauccuguagaaauu

SEQ ID NO: 950899 - RNA, 19 nt, Homo sapiens
  misc_RNA (1)...(19): siRNA sense strand
uguaaaggauccuguagaa

SEQ ID NO: 950900 - RNA, 19 nt, Homo sapiens
  misc_RNA (1)...(19): siRNA sense strand
cugacaagcugaucauuga

SEQ ID NO: 950901 - RNA, 19 nt, Homo sapiens
  misc_RNA (1)...(19): siRNA sense strand
uaagagaugccuucagaga

SEQ ID NO: 950902 - RNA, 19 nt, Homo sapiens
  misc_RNA (1)...(19): siRNA sense strand
gcgcacaaguguuaucucu

SEQ ID NO: 950903 - RNA, 19 nt, Homo sapiens
  misc_RNA (1)...(19): siRNA sense strand
ugagagagagcaagcguuu

SEQ ID NO: 950904 - RNA, 19 nt, Homo sapiens
  misc_RNA (1)...(19): siRNA sense strand
ugaauaaagccaagagaga

SEQ ID NO: 950905 - RNA, 19 nt, Homo sapiens
  misc_RNA (1)...(19): siRNA sense strand
ccacauuggccaacuguau

SEQ ID NO: 950906 - RNA, 19 nt, Homo sapiens
  misc_RNA (1)...(19): siRNA sense strand
agagagaccuuggaguaau

SEQ ID NO: 950907 - RNA, 19 nt, Homo sapiens
  misc_RNA (1)...(19): siRNA sense strand
caacuguauucaacugaca

SEQ ID NO: 950908 - RNA, 19 nt, Homo sapiens
  misc_RNA (1)...(19): siRNA sense strand
guaaaggauccuguagaaa

SEQ ID NO: 950909 - RNA, 19 nt, Homo sapiens
  misc_RNA (1)...(19): siRNA sense strand
acaagcugaucauugagaa

SEQ ID NO: 950910 - RNA, 19 nt, Homo sapiens
  misc_RNA (1)...(19): siRNA sense strand
gacaagcugaucauugaga

SEQ ID NO: 950911 - RNA, 19 nt, Homo sapiens
  misc_RNA (1)...(19): siRNA sense strand
ggccaacuguauucaacug

SEQ ID NO: 950912 - RNA, 19 nt, Homo sapiens
  misc_RNA (1)...(19): siRNA sense strand
agagagagcaagcguuuca

SEQ ID NO: 950913 - RNA, 19 nt, Homo sapiens
  misc_RNA (1)...(19): siRNA sense strand
cacaaguguuaucucugua

SEQ ID NO: 950914 - RNA, 19 nt, Homo sapiens
  misc_RNA (1)...(19): siRNA sense strand
cagucgcgcacaaguguua

SEQ ID NO: 950915 - RNA, 19 nt, Homo sapiens
  misc_RNA (1)...(19): siRNA sense strand
cauugagaaucgagacaug

SEQ ID NO: 950916 - RNA, 19 nt, Homo sapiens
  misc_RNA (1)...(19): siRNA sense strand
caacugacaagcugaucau

SEQ ID NO: 950917 - RNA, 19 nt, Homo sapiens
  misc_RNA (1)...(19): siRNA sense strand
gauccuguagaaauucaaa

SEQ ID NO: 950918 - RNA, 19 nt, Homo sapiens
  misc_RNA (1)...(19): siRNA sense strand
aaauguaaaggauccugua

SEQ ID NO: 950919 - RNA, 19 nt, Homo sapiens
  misc_RNA (1)...(19): siRNA sense strand
cacauuggccaacuguauu

SEQ ID NO: 950920 - RNA, 19 nt, Homo sapiens
  misc_RNA (1)...(19): siRNA sense strand
aagagagaccuuggaguaa

SEQ ID NO: 950921 - RNA, 19 nt, Homo sapiens
  misc_RNA (1)...(19): siRNA sense strand
guuucagcgccuacaauua

SEQ ID NO: 950922 - RNA, 19 nt, Homo sapiens
  misc_RNA (1)...(19): siRNA sense strand
aagagaugccuucagagaa

SEQ ID NO: 950923 - RNA, 19 nt, Homo sapiens
  misc_RNA (1)...(19): siRNA sense strand
gucgacagguccacauugg

SEQ ID NO: 950924 - RNA, 19 nt, Homo sapiens
  misc_RNA (1)...(19): siRNA sense strand
gagacaugcccaggaccua

SEQ ID NO: 950925 - RNA, 19 nt, Homo sapiens
  misc_RNA (1)...(19): siRNA sense strand
gucaggaggauaagagaug

SEQ ID NO: 950926 - RNA, 19 nt, Homo sapiens
  misc_RNA (1)...(19): siRNA sense strand
cgccuacaauuacagaaca

SEQ ID NO: 950927 - RNA, 19 nt, Homo sapiens
  misc_RNA (1)...(19): siRNA sense strand
cauaugcugucaggaggau

SEQ ID NO: 950928 - RNA, 19 nt, Homo sapiens
  misc_RNA (1)...(19): siRNA sense strand
uaugcugucaggaggauaa

SEQ ID NO: 950929 - RNA, 19 nt, Homo sapiens
  misc_RNA (1)...(19): siRNA sense strand
gguccacauuggccaacug

SEQ ID NO: 950930 - RNA, 19 nt, Homo sapiens
  misc_RNA (1)...(19): siRNA sense strand
uuucagcgccuacaauuac

SEQ ID NO: 950931 - RNA, 19 nt, Homo sapiens
  misc_RNA (1)...(19): siRNA sense strand
gcugaucauugagaaucga

SEQ ID NO: 950932 - RNA, 19 nt, Homo sapiens
  misc_RNA (1)...(19): siRNA sense strand
ggagaaggauaucaaauuu

SEQ ID NO: 950933 - RNA, 19 nt, Homo sapiens
  misc_RNA (1)...(19): siRNA sense strand
ggaaauacuuguuacauga

SEQ ID NO: 950934 - RNA, 19 nt, Homo sapiens
  misc_RNA (1)...(19): siRNA sense strand
gagaauagauguucauaug

SEQ ID NO: 950935 - RNA, 19 nt, Homo sapiens
  misc_RNA (1)...(19): siRNA sense strand
cagcagagcuucagaauau

SEQ ID NO: 950936 - RNA, 19 nt, Homo sapiens
  misc_RNA (1)...(19): siRNA sense strand
gagaagaugugcaauaaga

SEQ ID NO: 950937 - RNA, 19 nt, Homo sapiens
  misc_RNA (1)...(19): siRNA sense strand
gacaguggcuuaauaaauu

SEQ ID NO: 950938 - RNA, 19 nt, Homo sapiens
  misc_RNA (1)...(19): siRNA sense strand
guaguaaccuugcaagauu

SEQ ID NO: 950939 - RNA, 19 nt, Homo sapiens
  misc_RNA (1)...(19): siRNA sense strand
uaagaaaccugccauuugu

SEQ ID NO: 950940 - RNA, 19 nt, Homo sapiens
  misc_RNA (1)...(19): siRNA sense strand
gcaggaugcucaagaauuc

SEQ ID NO: 950941 - RNA, 19 nt, Homo sapiens
  misc_RNA (1)...(19): siRNA sense strand
ccagaggucuuacagguuu

SEQ ID NO: 950942 - RNA, 19 nt, Homo sapiens
  misc_RNA (1)...(19): siRNA sense strand
aagacaaccucaccaaaua

SEQ ID NO: 950943 - RNA, 19 nt, Homo sapiens
  misc_RNA (1)...(19): siRNA sense strand
gggcaugucuggagaauag

SEQ ID NO: 950944 - RNA, 19 nt, Homo sapiens
  misc_RNA (1)...(19): siRNA sense strand
gaagagguuuguugucuca

SEQ ID NO: 950945 - RNA, 19 nt, Homo sapiens
  misc_RNA (1)...(19): siRNA sense strand
gaucacagcaccauacauu

SEQ ID NO: 950946 - RNA, 19 nt, Homo sapiens
  misc_RNA (1)...(19): siRNA sense strand
ccaggaaacugucaaagug

SEQ ID NO: 950947 - RNA, 19 nt, Homo sapiens
  misc_RNA (1)...(19): siRNA sense strand
cagcucaaauugugacaua

SEQ ID NO: 950948 - RNA, 19 nt, Homo sapiens
  misc_RNA (1)...(19): siRNA sense strand
ucagaaaugucaaaggauu

SEQ ID NO: 950949 - RNA, 19 nt, Homo sapiens
  misc_RNA (1)...(19): siRNA sense strand
gaagauccgcaaaccauaa

SEQ ID NO: 950950 - RNA, 19 nt, Homo sapiens
  misc_RNA (1)...(19): siRNA sense strand
gaaccaagccuccuucagu

SEQ ID NO: 950951 - RNA, 19 nt, Homo sapiens
  misc_RNA (1)...(19): siRNA sense strand
cgaaaucauuguccacauu

SEQ ID NO: 950952 - RNA, 19 nt, Homo sapiens
  misc_RNA (1)...(19): siRNA sense strand
aagagaagaugugcaauaa

SEQ ID NO: 950953 - RNA, 19 nt, Homo sapiens
  misc_RNA (1)...(19): siRNA sense strand
gaucuguccuugccaauuc

SEQ ID NO: 950954 - RNA, 19 nt, Homo sapiens
  misc_RNA (1)...(19): siRNA sense strand
gaucuucugucagucauuu

SEQ ID NO: 950955 - RNA, 19 nt, Homo sapiens
  misc_RNA (1)...(19): siRNA sense strand
guacaaaacuuuccugaga

SEQ ID NO: 950956 - RNA, 19 nt, Homo sapiens
  misc_RNA (1)...(19): siRNA sense strand
gauaagaaaccugccauuu

SEQ ID NO: 950957 - RNA, 19 nt, Homo sapiens
  misc_RNA (1)...(19): siRNA sense strand
gaagaugugcaauaagauu

SEQ ID NO: 950958 - RNA, 19 nt, Homo sapiens
  misc_RNA (1)...(19): siRNA sense strand
ggcaagcccuccuaaauca

SEQ ID NO: 950959 - RNA, 19 nt, Homo sapiens
  misc_RNA (1)...(19): siRNA sense strand
caacagugauagagcagaa

SEQ ID NO: 950960 - RNA, 19 nt, Homo sapiens
  misc_RNA (1)...(19): siRNA sense strand
gaaccuggcccuauuucaa

SEQ ID NO: 950961 - RNA, 19 nt, Homo sapiens
  misc_RNA (1)...(19): siRNA sense strand
cauaugaucuucugucagu

SEQ ID NO: 950962 - RNA, 19 nt, Homo sapiens
  misc_RNA (1)...(19): siRNA sense strand
guacuugucaggauuguaa

SEQ ID NO: 950963 - RNA, 19 nt, Homo sapiens
  misc_RNA (1)...(19): siRNA sense strand
ucacugauguccauucgaa

SEQ ID NO: 950964 - RNA, 19 nt, Homo sapiens
  misc_RNA (1)...(19): siRNA sense strand
ucaaccaucuguacauuug

SEQ ID NO: 950965 - RNA, 19 nt, Homo sapiens
  misc_RNA (1)...(19): siRNA sense strand
gaaauggagugaaguuuug

SEQ ID NO: 950966 - RNA, 19 nt, Homo sapiens
  misc_RNA (1)...(19): siRNA sense strand
ggacuagcucgaacagaua

SEQ ID NO: 950967 - RNA, 19 nt, Homo sapiens
  misc_RNA (1)...(19): siRNA sense strand
agaauuccuucgauguuua

SEQ ID NO: 950968 - RNA, 19 nt, Homo sapiens
  misc_RNA (1)...(19): siRNA sense strand
aaagagaagaugugcaaua

SEQ ID NO: 950969 - RNA, 19 nt, Homo sapiens
  misc_RNA (1)...(19): siRNA sense strand
ugucauacuugccaaauug

SEQ ID NO: 950970 - RNA, 19 nt, Homo sapiens
  misc_RNA (1)...(19): siRNA sense strand
ccacagauccuuccaucaa

SEQ ID NO: 950971 - RNA, 19 nt, Homo sapiens
  misc_RNA (1)...(19): siRNA sense strand
gaacauuugggauaaccua

SEQ ID NO: 950972 - RNA, 19 nt, Homo sapiens
  misc_RNA (1)...(19): siRNA sense strand
ugaagaagaugaacuuagg

SEQ ID NO: 950973 - RNA, 19 nt, Homo sapiens
  misc_RNA (1)...(19): siRNA sense strand
ucucgacaguggcuuaaua

SEQ ID NO: 950974 - RNA, 19 nt, Homo sapiens
  misc_RNA (1)...(19): siRNA sense strand
uaauggauuugcuucauga

SEQ ID NO: 950975 - RNA, 19 nt, Homo sapiens
  misc_RNA (1)...(19): siRNA sense strand
gcuuggaucuucagccauu

SEQ ID NO: 950976 - RNA, 19 nt, Homo sapiens
  misc_RNA (1)...(19): siRNA sense strand
gagacaaagcauuaucuaa

SEQ ID NO: 950977 - RNA, 19 nt, Homo sapiens
  misc_RNA (1)...(19): siRNA sense strand
gugacaauauguacaguug

SEQ ID NO: 950978 - RNA, 19 nt, Homo sapiens
  misc_RNA (1)...(19): siRNA sense strand
uggaauaugugaagagguu

SEQ ID NO: 950979 - RNA, 19 nt, Homo sapiens
  misc_RNA (1)...(19): siRNA sense strand
gaaagagcaagucauggaa

SEQ ID NO: 950980 - RNA, 19 nt, Homo sapiens
  misc_RNA (1)...(19): siRNA sense strand
uauagaagcggaugaagaa

SEQ ID NO: 950981 - RNA, 19 nt, Homo sapiens
  misc_RNA (1)...(19): siRNA sense strand
gacaaagcauuaucuaacu

SEQ ID NO: 950982 - RNA, 19 nt, Homo sapiens
  misc_RNA (1)...(19): siRNA sense strand
gcucaagaauuccuucgau

SEQ ID NO: 950983 - RNA, 19 nt, Homo sapiens
  misc_RNA (1)...(19): siRNA sense strand
gccgaaacaaucuaaauaa

SEQ ID NO: 950984 - RNA, 19 nt, Homo sapiens
  misc_RNA (1)...(19): siRNA sense strand
gaaaauggcucuagaugcu

SEQ ID NO: 950985 - RNA, 19 nt, Homo sapiens
  misc_RNA (1)...(19): siRNA sense strand
ggagacaaagcauuaucua

SEQ ID NO: 950986 - RNA, 19 nt, Homo sapiens
  misc_RNA (1)...(19): siRNA sense strand
ucauguugauccagauaua

SEQ ID NO: 950987 - RNA, 19 nt, Homo sapiens
  misc_RNA (1)...(19): siRNA sense strand
uaaaugugguaaugugaug

SEQ ID NO: 950988 - RNA, 19 nt, Homo sapiens
  misc_RNA (1)...(19): siRNA sense strand
ccucagaacauuugggaua

SEQ ID NO: 950989 - RNA, 19 nt, Homo sapiens
  misc_RNA (1)...(19): siRNA sense strand
gaucauguggcgaagcaua

SEQ ID NO: 950990 - RNA, 19 nt, Homo sapiens
  misc_RNA (1)...(19): siRNA sense strand
agacauauuugauggaaca

SEQ ID NO: 950991 - RNA, 19 nt, Homo sapiens
  misc_RNA (1)...(19): siRNA sense strand
acagaaguguuauuucaga

SEQ ID NO: 950992 - RNA, 19 nt, Homo sapiens
  misc_RNA (1)...(19): siRNA sense strand
uuacaugaaugcagcuuug

SEQ ID NO: 950993 - RNA, 19 nt, Homo sapiens
  misc_RNA (1)...(19): siRNA sense strand
gaucuucagccauuucuug

SEQ ID NO: 950994 - RNA, 19 nt, Homo sapiens
  misc_RNA (1)...(19): siRNA sense strand
uaagacaaccucaccaaau

SEQ ID NO: 950995 - RNA, 19 nt, Homo sapiens
  misc_RNA (1)...(19): siRNA sense strand
aaagagaggagaaggauau

SEQ ID NO: 950996 - RNA, 19 nt, Homo sapiens
  misc_RNA (1)...(19): siRNA sense strand
gaaguguuauuucagacau

SEQ ID NO: 950997 - RNA, 19 nt, Homo sapiens
  misc_RNA (1)...(19): siRNA sense strand
caauguuaauucaggauga

SEQ ID NO: 950998 - RNA, 19 nt, Homo sapiens
  misc_RNA (1)...(19): siRNA sense strand
uugaugaucuggauauaga

SEQ ID NO: 950999 - RNA, 19 nt, Homo sapiens
  misc_RNA (1)...(19): siRNA sense strand
cgacaguggcuuaauaaau

SEQ ID NO: 951000 - RNA, 19 nt, Homo sapiens
  misc_RNA (1)...(19): siRNA sense strand
gauaguccagcucaaauug

SEQ ID NO: 951001 - RNA, 19 nt, Homo sapiens
  misc_RNA (1)...(19): siRNA sense strand
gauggaacaaucauuaguu

SEQ ID NO: 951002 - RNA, 19 nt, Homo sapiens
  misc_RNA (1)...(19): siRNA sense strand
cacaagaaauacagaagug

SEQ ID NO: 951003 - RNA, 19 nt, Homo sapiens
  misc_RNA (1)...(19): siRNA sense strand
gauaggaaauuaggaacuc

SEQ ID NO: 951004 - RNA, 19 nt, Homo sapiens
  misc_RNA (1)...(19): siRNA sense strand
ggaauuuucugcagucuau

SEQ ID NO: 951005 - RNA, 19 nt, Homo sapiens
  misc_RNA (1)...(19): siRNA sense strand
gaaggcgaauuugauaaag

SEQ ID NO: 951006 - RNA, 19 nt, Homo sapiens
  misc_RNA (1)...(19): siRNA sense strand
caagaauuccuucgauguu

SEQ ID NO: 951007 - RNA, 19 nt, Homo sapiens
  misc_RNA (1)...(19): siRNA sense strand
ggaugaagaagaugaacuu

SEQ ID NO: 951008 - RNA, 19 nt, Homo sapiens
  misc_RNA (1)...(19): siRNA sense strand
ugcaggcucuuucuaauug

SEQ ID NO: 951009 - RNA, 19 nt, Homo sapiens
  misc_RNA (1)...(19): siRNA sense strand
gagaggagaaggauaucaa

SEQ ID NO: 951010 - RNA, 19 nt, Homo sapiens
  misc_RNA (1)...(19): siRNA sense strand
gcagagcuucagaauauau

SEQ ID NO: 951011 - RNA, 19 nt, Homo sapiens
  misc_RNA (1)...(19): siRNA sense strand
aagaauuccuucgauguuu

SEQ ID NO: 951012 - RNA, 19 nt, Homo sapiens
  misc_RNA (1)...(19): siRNA sense strand
uggaaauacuuguuacaug

SEQ ID NO: 951013 - RNA, 19 nt, Homo sapiens
  misc_RNA (1)...(19): siRNA sense strand
uagaaacucggucuuugua

SEQ ID NO: 951014 - RNA, 19 nt, Homo sapiens
  misc_RNA (1)...(19): siRNA sense strand
ggauaguccagcucaaauu

SEQ ID NO: 951015 - RNA, 19 nt, Homo sapiens
  misc_RNA (1)...(19): siRNA sense strand
caagaaauacagaaguguu

SEQ ID NO: 951016 - RNA, 19 nt, Homo sapiens
  misc_RNA (1)...(19): siRNA sense strand
gcacaagaaauacagaagu

SEQ ID NO: 951017 - RNA, 19 nt, Homo sapiens
  misc_RNA (1)...(19): siRNA sense strand
gaaacagucgacuuaaaca

SEQ ID NO: 951018 - RNA, 19 nt, Homo sapiens
  misc_RNA (1)...(19): siRNA sense strand
cugaaacagucgacuuaaa

SEQ ID NO: 951019 - RNA, 19 nt, Homo sapiens
  misc_RNA (1)...(19): siRNA sense strand
aaauggcucuagaugcuuu

SEQ ID NO: 951020 - RNA, 19 nt, Homo sapiens
  misc_RNA (1)...(19): siRNA sense strand
auaagaaaccugccauuug

SEQ ID NO: 951021 - RNA, 19 nt, Homo sapiens
  misc_RNA (1)...(19): siRNA sense strand
uaagauugcagucacuaaa

SEQ ID NO: 951022 - RNA, 19 nt, Homo sapiens
  misc_RNA (1)...(19): siRNA sense strand
gaugcugccucagaacauu

SEQ ID NO: 951023 - RNA, 19 nt, Homo sapiens
  misc_RNA (1)...(19): siRNA sense strand
gaaaagcugguuauauuga

SEQ ID NO: 951024 - RNA, 19 nt, Homo sapiens
  misc_RNA (1)...(19): siRNA sense strand
gugaagagguuuguugucu

SEQ ID NO: 951025 - RNA, 19 nt, Homo sapiens
  misc_RNA (1)...(19): siRNA sense strand
uugcuaagcugcauucauc

SEQ ID NO: 951026 - RNA, 19 nt, Homo sapiens
  misc_RNA (1)...(19): siRNA sense strand
ugaaagagcaagucaugga

SEQ ID NO: 951027 - RNA, 19 nt, Homo sapiens
  misc_RNA (1)...(19): siRNA sense strand
cauauuugauggaacaauc

SEQ ID NO: 951028 - RNA, 19 nt, Homo sapiens
  misc_RNA (1)...(19): siRNA sense strand
cauuugggauaaccuauau

SEQ ID NO: 951029 - RNA, 19 nt, Homo sapiens
  misc_RNA (1)...(19): siRNA sense strand
caguacccauguuucauuu

SEQ ID NO: 951030 - RNA, 19 nt, Homo sapiens
  misc_RNA (1)...(19): siRNA sense strand
ggagugaaguuuuguaaag

SEQ ID NO: 951031 - RNA, 19 nt, Homo sapiens
  misc_RNA (1)...(19): siRNA sense strand
guugagaaauggagugaag

SEQ ID NO: 951032 - RNA, 19 nt, Homo sapiens
  misc_RNA (1)...(19): siRNA sense strand
gcaaugaggugaacgauga

SEQ ID NO: 951033 - RNA, 19 nt, Homo sapiens
  misc_RNA (1)...(19): siRNA sense strand
gaggaacgcuugaaggaaa

SEQ ID NO: 951034 - RNA, 19 nt, Homo sapiens
  misc_RNA (1)...(19): siRNA sense strand
ccugugauccgcccaauua

SEQ ID NO: 951035 - RNA, 19 nt, Homo sapiens
  misc_RNA (1)...(19): siRNA sense strand
gcaagagcauguggaagga

SEQ ID NO: 951036 - RNA, 19 nt, Homo sapiens
  misc_RNA (1)...(19): siRNA sense strand
gcaagaagcagaaggaaaa

SEQ ID NO: 951037 - RNA, 19 nt, Homo sapiens
  misc_RNA (1)...(19): siRNA sense strand
uguaggcccuguuggcuuu

SEQ ID NO: 951038 - RNA, 19 nt, Homo sapiens
  misc_RNA (1)...(19): siRNA sense strand
gaagccagagaaauugaaa

SEQ ID NO: 951039 - RNA, 19 nt, Homo sapiens
  misc_RNA (1)...(19): siRNA sense strand
gguugggccugaaagagaa

SEQ ID NO: 951040 - RNA, 19 nt, Homo sapiens
  misc_RNA (1)...(19): siRNA sense strand
ugagaugaaugggaaguau

SEQ ID NO: 951041 - RNA, 19 nt, Homo sapiens
  misc_RNA (1)...(19): siRNA sense strand
gaaauugaaacggugcauu

SEQ ID NO: 951042 - RNA, 19 nt, Homo sapiens
  misc_RNA (1)...(19): siRNA sense strand
ccaauuaucgcgaccaaca

SEQ ID NO: 951043 - RNA, 19 nt, Homo sapiens
  misc_RNA (1)...(19): siRNA sense strand
gcgaggaacgcuugaagga

SEQ ID NO: 951044 - RNA, 19 nt, Homo sapiens
  misc_RNA (1)...(19): siRNA sense strand
ggagugggaugcagaugac

SEQ ID NO: 951045 - RNA, 19 nt, Homo sapiens
  misc_RNA (1)...(19): siRNA sense strand
ggaaauggaggcggagaug

SEQ ID NO: 951046 - RNA, 19 nt, Homo sapiens
  misc_RNA (1)...(19): siRNA sense strand
gaagaagcugggccugaga

SEQ ID NO: 951047 - RNA, 19 nt, Homo sapiens
  misc_RNA (1)...(19): siRNA sense strand
ggaagccagagaaauugaa

SEQ ID NO: 951048 - RNA, 19 nt, Homo sapiens
  misc_RNA (1)...(19): siRNA sense strand
ggagauggcccuguuugag

SEQ ID NO: 951049 - RNA, 19 nt, Homo sapiens
  misc_RNA (1)...(19): siRNA sense strand
ccaugaugcugccaccaau

SEQ ID NO: 951050 - RNA, 19 nt, Homo sapiens
  misc_RNA (1)...(19): siRNA sense strand
gacaagcgcacaggcaaga

SEQ ID NO: 951051 - RNA, 19 nt, Homo sapiens
  misc_RNA (1)...(19): siRNA sense strand
ggguugggccugaaagaga

SEQ ID NO: 951052 - RNA, 19 nt, Homo sapiens
  misc_RNA (1)...(19): siRNA sense strand
ccaucaagcuucgcaagag

SEQ ID NO: 951053 - RNA, 19 nt, Homo sapiens
  misc_RNA (1)...(19): siRNA sense strand
gagaugaaugggaaguaug

SEQ ID NO: 951054 - RNA, 19 nt, Homo sapiens
  misc_RNA (1)...(19): siRNA sense strand
gggaagccagagaaauuga

SEQ ID NO: 951055 - RNA, 19 nt, Homo sapiens
  misc_RNA (1)...(19): siRNA sense strand
gcccaauuaucgcgaccaa

SEQ ID NO: 951056 - RNA, 19 nt, Homo sapiens
  misc_RNA (1)...(19): siRNA sense strand
ccaaggugauccgugacaa

SEQ ID NO: 951057 - RNA, 19 nt, Homo sapiens
  misc_RNA (1)...(19): siRNA sense strand
aaauugaaacggugcauuc

SEQ ID NO: 951058 - RNA, 19 nt, Homo sapiens
  misc_RNA (1)...(19): siRNA sense strand
aggcggagauggcccuguu

SEQ ID NO: 951059 - RNA, 19 nt, Homo sapiens
  misc_RNA (1)...(19): siRNA sense strand
gaagcugggccugagauag

SEQ ID NO: 951060 - RNA, 19 nt, Homo sapiens
  misc_RNA (1)...(19): siRNA sense strand
gcggagauggcccuguuug

SEQ ID NO: 951061 - RNA, 19 nt, Homo sapiens
  misc_RNA (1)...(19): siRNA sense strand
cgaggaacgcuugaaggaa

SEQ ID NO: 951062 - RNA, 19 nt, Homo sapiens
  misc_RNA (1)...(19): siRNA sense strand
guaccuggaaucccaacug

SEQ ID NO: 951063 - RNA, 19 nt, Homo sapiens
  misc_RNA (1)...(19): siRNA sense strand
gcuacggcuucgucagcuu

SEQ ID NO: 951064 - RNA, 19 nt, Homo sapiens
  misc_RNA (1)...(19): siRNA sense strand
uuaucgcgaccaacacaua

SEQ ID NO: 951065 - RNA, 19 nt, Homo sapiens
  misc_RNA (1)...(19): siRNA sense strand
ggguggcccuccuuuugua

SEQ ID NO: 951066 - RNA, 19 nt, Homo sapiens
  misc_RNA (1)...(19): siRNA sense strand
uaaaggcccuacugaauga

SEQ ID NO: 951067 - RNA, 19 nt, Homo sapiens
  misc_RNA (1)...(19): siRNA sense strand
cugcaaaccuugaaugcua

SEQ ID NO: 951068 - RNA, 19 nt, Homo sapiens
  misc_RNA (1)...(19): siRNA sense strand
guaaaggcccuacugaaug

SEQ ID NO: 951069 - RNA, 19 nt, Homo sapiens
  misc_RNA (1)...(19): siRNA sense strand
gcagagcaccugacauuca

SEQ ID NO: 951070 - RNA, 19 nt, Homo sapiens
  misc_RNA (1)...(19): siRNA sense strand
gguaaaggcccuacugaau

SEQ ID NO: 951071 - RNA, 19 nt, Homo sapiens
  misc_RNA (1)...(19): siRNA sense strand
ggccucagcuuccucuuug

SEQ ID NO: 951072 - RNA, 19 nt, Homo sapiens
  misc_RNA (1)...(19): siRNA sense strand
ggaaugugagugaguguuu

SEQ ID NO: 951073 - RNA, 19 nt, Homo sapiens
  misc_RNA (1)...(19): siRNA sense strand
ggagaacggcgagcucuuu

SEQ ID NO: 951074 - RNA, 19 nt, Homo sapiens
  misc_RNA (1)...(19): siRNA sense strand
ggaggugacucagcgcauu

SEQ ID NO: 951075 - RNA, 19 nt, Homo sapiens
  misc_RNA (1)...(19): siRNA sense strand
ggagcugggugcugacuuc

SEQ ID NO: 951076 - RNA, 19 nt, Homo sapiens
  misc_RNA (1)...(19): siRNA sense strand
gcucaauccuuucccuuca

SEQ ID NO: 951077 - RNA, 19 nt, Homo sapiens
  misc_RNA (1)...(19): siRNA sense strand
gaacaucagcauccaccaa

SEQ ID NO: 951078 - RNA, 19 nt, Homo sapiens
  misc_RNA (1)...(19): siRNA sense strand
ggagcgcgauccacacuca

SEQ ID NO: 951079 - RNA, 19 nt, Homo sapiens
  misc_RNA (1)...(19): siRNA sense strand
gauccugugugacaugaug

SEQ ID NO: 951080 - RNA, 19 nt, Homo sapiens
  misc_RNA (1)...(19): siRNA sense strand
ccaaauacuuccguccuau

SEQ ID NO: 951081 - RNA, 19 nt, Homo sapiens
  misc_RNA (1)...(19): siRNA sense strand
caaugucaccuaccugaaa

SEQ ID NO: 951082 - RNA, 19 nt, Homo sapiens
  misc_RNA (1)...(19): siRNA sense strand
cggcagagcaccugacauu

SEQ ID NO: 951083 - RNA, 19 nt, Homo sapiens
  misc_RNA (1)...(19): siRNA sense strand
ggacaacagccgugugauc

SEQ ID NO: 951084 - RNA, 19 nt, Homo sapiens
  misc_RNA (1)...(19): siRNA sense strand
agacucagcucuuccacau

SEQ ID NO: 951085 - RNA, 19 nt, Homo sapiens
  misc_RNA (1)...(19): siRNA sense strand
gcgcacgcaugaacagaug

SEQ ID NO: 951086 - RNA, 19 nt, Homo sapiens
  misc_RNA (1)...(19): siRNA sense strand
ggagaccucagauguccua

SEQ ID NO: 951087 - RNA, 19 nt, Homo sapiens
  misc_RNA (1)...(19): siRNA sense strand
ggaagaacaucagcaucca

SEQ ID NO: 951088 - RNA, 19 nt, Homo sapiens
  misc_RNA (1)...(19): siRNA sense strand
gaaccugucgcaacuucuu

SEQ ID NO: 951089 - RNA, 19 nt, Homo sapiens
  misc_RNA (1)...(19): siRNA sense strand
gucaagaccuccaaauacu

SEQ ID NO: 951090 - RNA, 19 nt, Homo sapiens
  misc_RNA (1)...(19): siRNA sense strand
gaggagaacagcaccuuca

SEQ ID NO: 951091 - RNA, 19 nt, Homo sapiens
  misc_RNA (1)...(19): siRNA sense strand
uuaccucccugaagcugua

SEQ ID NO: 951092 - RNA, 19 nt, Homo sapiens
  misc_RNA (1)...(19): siRNA sense strand
gaaugugagugaguguuuc

SEQ ID NO: 951093 - RNA, 19 nt, Homo sapiens
  misc_RNA (1)...(19): siRNA sense strand
gaggagcaccuggauauca

SEQ ID NO: 951094 - RNA, 19 nt, Homo sapiens
  misc_RNA (1)...(19): siRNA sense strand
uggugcagcucaauccuuu

SEQ ID NO: 951095 - RNA, 19 nt, Homo sapiens
  misc_RNA (1)...(19): siRNA sense strand
ggagcuggaugguguuggu

SEQ ID NO: 951096 - RNA, 19 nt, Homo sapiens
  misc_RNA (1)...(19): siRNA sense strand
caagaccuccaaauacuuc

SEQ ID NO: 951097 - RNA, 19 nt, Homo sapiens
  misc_RNA (1)...(19): siRNA sense strand
guacguggccugggugaga

SEQ ID NO: 951098 - RNA, 19 nt, Homo sapiens
  misc_RNA (1)...(19): siRNA sense strand
cuugaaugcuacaguggua

SEQ ID NO: 951099 - RNA, 19 nt, Homo sapiens
  misc_RNA (1)...(19): siRNA sense strand
ccaaccagcgcacgcauga

SEQ ID NO: 951100 - RNA, 19 nt, Homo sapiens
  misc_RNA (1)...(19): siRNA sense strand
cagauguccuagccaaugu

SEQ ID NO: 951101 - RNA, 19 nt, Homo sapiens
  misc_RNA (1)...(19): siRNA sense strand
gaacggcgagcucuuugag

SEQ ID NO: 951102 - RNA, 19 nt, Homo sapiens
  misc_RNA (1)...(19): siRNA sense strand
ggcgagcucuuugaguuug

SEQ ID NO: 951103 - RNA, 19 nt, Homo sapiens
  misc_RNA (1)...(19): siRNA sense strand
caaccaguauaccaacaag

SEQ ID NO: 951104 - RNA, 19 nt, Homo sapiens
  misc_RNA (1)...(19): siRNA sense strand
ccaugaaccugucgcaacu

SEQ ID NO: 951105 - RNA, 19 nt, Homo sapiens
  misc_RNA (1)...(19): siRNA sense strand
gguguggucugugccuuug

SEQ ID NO: 951106 - RNA, 19 nt, Homo sapiens
  misc_RNA (1)...(19): siRNA sense strand
uugcagagccugaaaguag

SEQ ID NO: 951107 - RNA, 19 nt, Homo sapiens
  misc_RNA (1)...(19): siRNA sense strand
gagaacggcgagcucuuug

SEQ ID NO: 951108 - RNA, 19 nt, Homo sapiens
  misc_RNA (1)...(19): siRNA sense strand
ggccacagacugcaaguuc

SEQ ID NO: 951109 - RNA, 19 nt, Homo sapiens
  misc_RNA (1)...(19): siRNA sense strand
uccaaauacuuccguccua

SEQ ID NO: 951110 - RNA, 19 nt, Homo sapiens
  misc_RNA (1)...(19): siRNA sense strand
caucaucuuugccgucaag

SEQ ID NO: 951111 - RNA, 19 nt, Homo sapiens
  misc_RNA (1)...(19): siRNA sense strand
ucaauccuuucccuucaga

SEQ ID NO: 951112 - RNA, 19 nt, Homo sapiens
  misc_RNA (1)...(19): siRNA sense strand
cgucaagaccuccaaauac

SEQ ID NO: 951113 - RNA, 19 nt, Homo sapiens
  misc_RNA (1)...(19): siRNA sense strand
gccgugugauccuguguga

SEQ ID NO: 951114 - RNA, 19 nt, Homo sapiens
  misc_RNA (1)...(19): siRNA sense strand
gauaucaaccaguauacca

SEQ ID NO: 951115 - RNA, 19 nt, Homo sapiens
  misc_RNA (1)...(19): siRNA sense strand
acggcgagcucuuugaguu

SEQ ID NO: 951116 - RNA, 19 nt, Homo sapiens
  misc_RNA (1)...(19): siRNA sense strand
uggaggagcaccuggauau

SEQ ID NO: 951117 - RNA, 19 nt, Homo sapiens
  misc_RNA (1)...(19): siRNA sense strand
ccgucaagaccuccaaaua

SEQ ID NO: 951118 - RNA, 19 nt, Homo sapiens
  misc_RNA (1)...(19): siRNA sense strand
gcagagccuuguggcaaag

SEQ ID NO: 951119 - RNA, 19 nt, Homo sapiens
  misc_RNA (1)...(19): siRNA sense strand
cauccagcguggugcaaga

SEQ ID NO: 951120 - RNA, 19 nt, Homo sapiens
  misc_RNA (1)...(19): siRNA sense strand
ggaaugccuucugguucug

SEQ ID NO: 951121 - RNA, 19 nt, Homo sapiens
  misc_RNA (1)...(19): siRNA sense strand
uggaaugccuucugguucu

SEQ ID NO: 951122 - RNA, 19 nt, Homo sapiens
  misc_RNA (1)...(19): siRNA sense strand
gaaaccuucaccaggagaa

SEQ ID NO: 951123 - RNA, 19 nt, Homo sapiens
  misc_RNA (1)...(19): siRNA sense strand
gggccucagcuuccucuuu

SEQ ID NO: 951124 - RNA, 19 nt, Homo sapiens
  misc_RNA (1)...(19): siRNA sense strand
gcugauugguguggucugu

SEQ ID NO: 951125 - RNA, 19 nt, Homo sapiens
  misc_RNA (1)...(19): siRNA sense strand
ggaguugcagagccugaaa

SEQ ID NO: 951126 - RNA, 19 nt, Homo sapiens
  misc_RNA (1)...(19): siRNA sense strand
cagcauccaccaagccuau

SEQ ID NO: 951127 - RNA, 19 nt, Homo sapiens
  misc_RNA (1)...(19): siRNA sense strand
aggagcaccuggauaucaa

SEQ ID NO: 951128 - RNA, 19 nt, Homo sapiens
  misc_RNA (1)...(19): siRNA sense strand
ucagccaggugcccucugu

SEQ ID NO: 951129 - RNA, 19 nt, Homo sapiens
  misc_RNA (1)...(19): siRNA sense strand
gagugaagacagagcacaa

SEQ ID NO: 951130 - RNA, 19 nt, Homo sapiens
  misc_RNA (1)...(19): siRNA sense strand
ucagauguccuagccaaug

SEQ ID NO: 951131 - RNA, 19 nt, Homo sapiens
  misc_RNA (1)...(19): siRNA sense strand
ugcagagccugaaaguaga

SEQ ID NO: 951132 - RNA, 19 nt, Homo sapiens
  misc_RNA (1)...(19): siRNA sense strand
ucaagaccuccaaauacuu

SEQ ID NO: 951133 - RNA, 19 nt, Homo sapiens
  misc_RNA (1)...(19): siRNA sense strand
gugauccugugugacauga

SEQ ID NO: 951134 - RNA, 19 nt, Homo sapiens
  misc_RNA (1)...(19): siRNA sense strand
gaggugacucagcgcauug

SEQ ID NO: 951135 - RNA, 19 nt, Homo sapiens
  misc_RNA (1)...(19): siRNA sense strand
ccaguauaccaacaagcua

SEQ ID NO: 951136 - RNA, 19 nt, Homo sapiens
  misc_RNA (1)...(19): siRNA sense strand
caaauacuuccguccuauc

SEQ ID NO: 951137 - RNA, 19 nt, Homo sapiens
  misc_RNA (1)...(19): siRNA sense strand
gcagagcagugggcuucag

SEQ ID NO: 951138 - RNA, 19 nt, Homo sapiens
  misc_RNA (1)...(19): siRNA sense strand
agcagagccuuguggcaaa

SEQ ID NO: 951139 - RNA, 19 nt, Homo sapiens
  misc_RNA (1)...(19): siRNA sense strand
gcaaccugcugggccucaa

SEQ ID NO: 951140 - RNA, 19 nt, Homo sapiens
  misc_RNA (1)...(19): siRNA sense strand
cagagcaccugacauucac

SEQ ID NO: 951141 - RNA, 19 nt, Homo sapiens
  misc_RNA (1)...(19): siRNA sense strand
gguguuggugugagcauug

SEQ ID NO: 951142 - RNA, 19 nt, Homo sapiens
  misc_RNA (1)...(19): siRNA sense strand
ggagaacagcaccuucaac

SEQ ID NO: 951143 - RNA, 19 nt, Homo sapiens
  misc_RNA (1)...(19): siRNA sense strand
cgugugauccugugugaca

SEQ ID NO: 951144 - RNA, 19 nt, Homo sapiens
  misc_RNA (1)...(19): siRNA sense strand
uccuuucccuucagaguug

SEQ ID NO: 951145 - RNA, 19 nt, Homo sapiens
  misc_RNA (1)...(19): siRNA sense strand
cggcgagcucuuugaguuu

SEQ ID NO: 951146 - RNA, 19 nt, Homo sapiens
  misc_RNA (1)...(19): siRNA sense strand
ggccugaggaagaacauca

SEQ ID NO: 951147 - RNA, 19 nt, Homo sapiens
  misc_RNA (1)...(19): siRNA sense strand
cagaggaucucaagcuauu

SEQ ID NO: 951148 - RNA, 19 nt, Homo sapiens
  misc_RNA (1)...(19): siRNA sense strand
gaagugcaguggcaugauc

SEQ ID NO: 951149 - RNA, 19 nt, Homo sapiens
  misc_RNA (1)...(19): siRNA sense strand
ccagagaccugcagaggau

SEQ ID NO: 951150 - RNA, 19 nt, Homo sapiens
  misc_RNA (1)...(19): siRNA sense strand
ucaaggaguaugcccauua

SEQ ID NO: 951151 - RNA, 19 nt, Homo sapiens
  misc_RNA (1)...(19): siRNA sense strand
aagagugccucaaggagua

SEQ ID NO: 951152 - RNA, 19 nt, Homo sapiens
  misc_RNA (1)...(19): siRNA sense strand
ggauuugccugcagcuuuc

SEQ ID NO: 951153 - RNA, 19 nt, Homo sapiens
  misc_RNA (1)...(19): siRNA sense strand
uagcugagacuacagguaa

SEQ ID NO: 951154 - RNA, 19 nt, Homo sapiens
  misc_RNA (1)...(19): siRNA sense strand
ccugcaagaucacauauuc

SEQ ID NO: 951155 - RNA, 19 nt, Homo sapiens
  misc_RNA (1)...(19): siRNA sense strand
cgaccacccuggcacaguu

SEQ ID NO: 951156 - RNA, 19 nt, Homo sapiens
  misc_RNA (1)...(19): siRNA sense strand
ccaaagagugccucaagga

SEQ ID NO: 951157 - RNA, 19 nt, Homo sapiens
  misc_RNA (1)...(19): siRNA sense strand
caaggaguaugcccauuac

SEQ ID NO: 951158 - RNA, 19 nt, Homo sapiens
  misc_RNA (1)...(19): siRNA sense strand
caagaucacauauucuaca

SEQ ID NO: 951159 - RNA, 19 nt, Homo sapiens
  misc_RNA (1)...(19): siRNA sense strand
gcacguguauugaaauccu

SEQ ID NO: 951160 - RNA, 19 nt, Homo sapiens
  misc_RNA (1)...(19): siRNA sense strand
gcagaggaucucaagcuau

SEQ ID NO: 951161 - RNA, 19 nt, Homo sapiens
  misc_RNA (1)...(19): siRNA sense strand
gagcaccucagcacgugua

SEQ ID NO: 951162 - RNA, 19 nt, Homo sapiens
  misc_RNA (1)...(19): siRNA sense strand
guaugcccauuacuuccua

SEQ ID NO: 951163 - RNA, 19 nt, Homo sapiens
  misc_RNA (1)...(19): siRNA sense strand
gaccaaagagugccucaag

SEQ ID NO: 951164 - RNA, 19 nt, Homo sapiens
  misc_RNA (1)...(19): siRNA sense strand
caccucagcacguguauug

SEQ ID NO: 951165 - RNA, 19 nt, Homo sapiens
  misc_RNA (1)...(19): siRNA sense strand
cagcacguguauugaaauc

SEQ ID NO: 951166 - RNA, 19 nt, Homo sapiens
  misc_RNA (1)...(19): siRNA sense strand
ugcaagaucacauauucua

SEQ ID NO: 951167 - RNA, 19 nt, Homo sapiens
  misc_RNA (1)...(19): siRNA sense strand
ugcagaggaucucaagcua

SEQ ID NO: 951168 - RNA, 19 nt, Homo sapiens
  misc_RNA (1)...(19): siRNA sense strand
caaguuggagcaaauaaac

SEQ ID NO: 951169 - RNA, 19 nt, Homo sapiens
  misc_RNA (1)...(19): siRNA sense strand
gcaugcauauggccauugc

SEQ ID NO: 951170 - RNA, 19 nt, Homo sapiens
  misc_RNA (1)...(19): siRNA sense strand
gaaauccugcugguagugu

SEQ ID NO: 951171 - RNA, 19 nt, Homo sapiens
  misc_RNA (1)...(19): siRNA sense strand
gaggucacccugcaagauc

SEQ ID NO: 951172 - RNA, 19 nt, Homo sapiens
  misc_RNA (1)...(19): siRNA sense strand
cugcagcccuuggauaugu

SEQ ID NO: 951173 - RNA, 19 nt, Homo sapiens
  misc_RNA (1)...(19): siRNA sense strand
ggaccuaugcuuggccuau

SEQ ID NO: 951174 - RNA, 19 nt, Homo sapiens
  misc_RNA (1)...(19): siRNA sense strand
ccucagcacguguauugaa

SEQ ID NO: 951175 - RNA, 19 nt, Homo sapiens
  misc_RNA (1)...(19): siRNA sense strand
aaauccugcugguagugua

SEQ ID NO: 951176 - RNA, 19 nt, Homo sapiens
  misc_RNA (1)...(19): siRNA sense strand
gaccuaugcuuggccuauc

SEQ ID NO: 951177 - RNA, 19 nt, Homo sapiens
  misc_RNA (1)...(19): siRNA sense strand
cucagcacguguauugaaa

SEQ ID NO: 951178 - RNA, 19 nt, Homo sapiens
  misc_RNA (1)...(19): siRNA sense strand
gcaagaucacauauucuac

SEQ ID NO: 951179 - RNA, 19 nt, Homo sapiens
  misc_RNA (1)...(19): siRNA sense strand
uagcaugcauauggccauu

SEQ ID NO: 951180 - RNA, 19 nt, Homo sapiens
  misc_RNA (1)...(19): siRNA sense strand
ccggcugcuuugacagaua

SEQ ID NO: 951181 - RNA, 19 nt, Homo sapiens
  misc_RNA (1)...(19): siRNA sense strand
cccacuuccuggacuacua

SEQ ID NO: 951182 - RNA, 19 nt, Homo sapiens
  misc_RNA (1)...(19): siRNA sense strand
ccucccagguucaagcaau

SEQ ID NO: 951183 - RNA, 19 nt, Homo sapiens
  misc_RNA (1)...(19): siRNA sense strand
cggcugcuuugacagauag

SEQ ID NO: 951184 - RNA, 19 nt, Homo sapiens
  misc_RNA (1)...(19): siRNA sense strand
acaaauuccagccuucugu

SEQ ID NO: 951185 - RNA, 19 nt, Homo sapiens
  misc_RNA (1)...(19): siRNA sense strand
guuggggccuccaggauuu

SEQ ID NO: 951186 - RNA, 19 nt, Homo sapiens
  misc_RNA (1)...(19): siRNA sense strand
aggauuugccugcagcuuu

SEQ ID NO: 951187 - RNA, 19 nt, Homo sapiens
  misc_RNA (1)...(19): siRNA sense strand
ccgcugcagcccuuggaua

SEQ ID NO: 951188 - RNA, 19 nt, Homo sapiens
  misc_RNA (1)...(19): siRNA sense strand
aaauaaacagcacgaggau

SEQ ID NO: 951189 - RNA, 19 nt, Homo sapiens
  misc_RNA (1)...(19): siRNA sense strand
ucccuuagcaugcauaugg

SEQ ID NO: 951190 - RNA, 19 nt, Homo sapiens
  misc_RNA (1)...(19): siRNA sense strand
ucagagagcuucaugauuu

SEQ ID NO: 951191 - RNA, 19 nt, Homo sapiens
  misc_RNA (1)...(19): siRNA sense strand
ggaaagcgguuuaggguuu

SEQ ID NO: 951192 - RNA, 19 nt, Homo sapiens
  misc_RNA (1)...(19): siRNA sense strand
gaccaagaauguuccaaua

SEQ ID NO: 951193 - RNA, 19 nt, Homo sapiens
  misc_RNA (1)...(19): siRNA sense strand
ugaaguaucugccugauga

SEQ ID NO: 951194 - RNA, 19 nt, Homo sapiens
  misc_RNA (1)...(19): siRNA sense strand
ccaagaauguuccaauauu

SEQ ID NO: 951195 - RNA, 19 nt, Homo sapiens
  misc_RNA (1)...(19): siRNA sense strand
ucacacagcuguuggaaga

SEQ ID NO: 951196 - RNA, 19 nt, Homo sapiens
  misc_RNA (1)...(19): siRNA sense strand
ggacauucguucuguaaga

SEQ ID NO: 951197 - RNA, 19 nt, Homo sapiens
  misc_RNA (1)...(19): siRNA sense strand
gcagcugguuucagaauuu

SEQ ID NO: 951198 - RNA, 19 nt, Homo sapiens
  misc_RNA (1)...(19): siRNA sense strand
gaacaggaugugauuguaa

SEQ ID NO: 951199 - RNA, 19 nt, Homo sapiens
  misc_RNA (1)...(19): siRNA sense strand
gagccaagauacagauuga

SEQ ID NO: 951200 - RNA, 19 nt, Homo sapiens
  misc_RNA (1)...(19): siRNA sense strand
gauaggagguacuguguca

SEQ ID NO: 951201 - RNA, 19 nt, Homo sapiens
  misc_RNA (1)...(19): siRNA sense strand
aaagcagagugaagaaaua

SEQ ID NO: 951202 - RNA, 19 nt, Homo sapiens
  misc_RNA (1)...(19): siRNA sense strand
gcugaacucucacacuuga

SEQ ID NO: 951203 - RNA, 19 nt, Homo sapiens
  misc_RNA (1)...(19): siRNA sense strand
gaaugaagaugagauuaag

SEQ ID NO: 951204 - RNA, 19 nt, Homo sapiens
  misc_RNA (1)...(19): siRNA sense strand
aaagaacgguugaccaaga

SEQ ID NO: 951205 - RNA, 19 nt, Homo sapiens
  misc_RNA (1)...(19): siRNA sense strand
gaaggucugugguugauac

SEQ ID NO: 951206 - RNA, 19 nt, Homo sapiens
  misc_RNA (1)...(19): siRNA sense strand
gcacugccgacauugaaua

SEQ ID NO: 951207 - RNA, 19 nt, Homo sapiens
  misc_RNA (1)...(19): siRNA sense strand
caaugaagucuguauguuu

SEQ ID NO: 951208 - RNA, 19 nt, Homo sapiens
  misc_RNA (1)...(19): siRNA sense strand
ugaagaaacugcugaacuc

SEQ ID NO: 951209 - RNA, 19 nt, Homo sapiens
  misc_RNA (1)...(19): siRNA sense strand
gcuguuggaagaauuaaua

SEQ ID NO: 951210 - RNA, 19 nt, Homo sapiens
  misc_RNA (1)...(19): siRNA sense strand
uaccagaggucacuucaga

SEQ ID NO: 951211 - RNA, 19 nt, Homo sapiens
  misc_RNA (1)...(19): siRNA sense strand
ugaccaagauacagcauau

SEQ ID NO: 951212 - RNA, 19 nt, Homo sapiens
  misc_RNA (1)...(19): siRNA sense strand
ccaaugaagucuguauguu

SEQ ID NO: 951213 - RNA, 19 nt, Homo sapiens
  misc_RNA (1)...(19): siRNA sense strand
gauuguaaaugaagaugga

SEQ ID NO: 951214 - RNA, 19 nt, Homo sapiens
  misc_RNA (1)...(19): siRNA sense strand
uggaagauguuaagguuga

SEQ ID NO: 951215 - RNA, 19 nt, Homo sapiens
  misc_RNA (1)...(19): siRNA sense strand
gcaccauauuguccucuuu

SEQ ID NO: 951216 - RNA, 19 nt, Homo sapiens
  misc_RNA (1)...(19): siRNA sense strand
gagaaacucccaaugaagu

SEQ ID NO: 951217 - RNA, 19 nt, Homo sapiens
  misc_RNA (1)...(19): siRNA sense strand
ggaugugauuguaaaugaa

SEQ ID NO: 951218 - RNA, 19 nt, Homo sapiens
  misc_RNA (1)...(19): siRNA sense strand
ucagcacagucuauaaauu

SEQ ID NO: 951219 - RNA, 19 nt, Homo sapiens
  misc_RNA (1)...(19): siRNA sense strand
cagcugguuucagaauuua

SEQ ID NO: 951220 - RNA, 19 nt, Homo sapiens
  misc_RNA (1)...(19): siRNA sense strand
cagaagaauuaaucgaugu

SEQ ID NO: 951221 - RNA, 19 nt, Homo sapiens
  misc_RNA (1)...(19): siRNA sense strand
gagaaugaagaugagauua

SEQ ID NO: 951222 - RNA, 19 nt, Homo sapiens
  misc_RNA (1)...(19): siRNA sense strand
gaaugaaagauggauauug

SEQ ID NO: 951223 - RNA, 19 nt, Homo sapiens
  misc_RNA (1)...(19): siRNA sense strand
agauacagauugaugauuc

SEQ ID NO: 951224 - RNA, 19 nt, Homo sapiens
  misc_RNA (1)...(19): siRNA sense strand
agaaacugcugaacucuca

SEQ ID NO: 951225 - RNA, 19 nt, Homo sapiens
  misc_RNA (1)...(19): siRNA sense strand
gaugaacugucugagagaa

SEQ ID NO: 951226 - RNA, 19 nt, Homo sapiens
  misc_RNA (1)...(19): siRNA sense strand
cagcauauacugaccuauu

SEQ ID NO: 951227 - RNA, 19 nt, Homo sapiens
  misc_RNA (1)...(19): siRNA sense strand
gaagauggaagaaauaagc

SEQ ID NO: 951228 - RNA, 19 nt, Homo sapiens
  misc_RNA (1)...(19): siRNA sense strand
gcaaagaaagcuuaaaaga

SEQ ID NO: 951229 - RNA, 19 nt, Homo sapiens
  misc_RNA (1)...(19): siRNA sense strand
ugaaagaacgguugaccaa

SEQ ID NO: 951230 - RNA, 19 nt, Homo sapiens
  misc_RNA (1)...(19): siRNA sense strand
ucuggaagauguuaagguu

SEQ ID NO: 951231 - RNA, 19 nt, Homo sapiens
  misc_RNA (1)...(19): siRNA sense strand
ggacggaaggucugugguu

SEQ ID NO: 951232 - RNA, 19 nt, Homo sapiens
  misc_RNA (1)...(19): siRNA sense strand
caaagcagagugaagaaau

SEQ ID NO: 951233 - RNA, 19 nt, Homo sapiens
  misc_RNA (1)...(19): siRNA sense strand
cagcacagucuauaaauuc

SEQ ID NO: 951234 - RNA, 19 nt, Homo sapiens
  misc_RNA (1)...(19): siRNA sense strand
gauaccagcugucgguuuu

SEQ ID NO: 951235 - RNA, 19 nt, Homo sapiens
  misc_RNA (1)...(19): siRNA sense strand
caaugaaccuagcccaaag

SEQ ID NO: 951236 - RNA, 19 nt, Homo sapiens
  misc_RNA (1)...(19): siRNA sense strand
uauacagacuggaaccaaa

SEQ ID NO: 951237 - RNA, 19 nt, Homo sapiens
  misc_RNA (1)...(19): siRNA sense strand
cagagagcuucaugauuug

SEQ ID NO: 951238 - RNA, 19 nt, Homo sapiens
  misc_RNA (1)...(19): siRNA sense strand
caagauacagcauauacug

SEQ ID NO: 951239 - RNA, 19 nt, Homo sapiens
  misc_RNA (1)...(19): siRNA sense strand
aggaugugauuguaaauga

SEQ ID NO: 951240 - RNA, 19 nt, Homo sapiens
  misc_RNA (1)...(19): siRNA sense strand
agaacaggaugugauugua

SEQ ID NO: 951241 - RNA, 19 nt, Homo sapiens
  misc_RNA (1)...(19): siRNA sense strand
aaugaaagauggauauugc

SEQ ID NO: 951242 - RNA, 19 nt, Homo sapiens
  misc_RNA (1)...(19): siRNA sense strand
ggaaugaaagauggauauu

SEQ ID NO: 951243 - RNA, 19 nt, Homo sapiens
  misc_RNA (1)...(19): siRNA sense strand
ucucagauuucgaguguuc

SEQ ID NO: 951244 - RNA, 19 nt, Homo sapiens
  misc_RNA (1)...(19): siRNA sense strand
gauuaugguuguauguuac

SEQ ID NO: 951245 - RNA, 19 nt, Homo sapiens
  misc_RNA (1)...(19): siRNA sense strand
ccagagaggacuguuuaaa

SEQ ID NO: 951246 - RNA, 19 nt, Homo sapiens
  misc_RNA (1)...(19): siRNA sense strand
agcauauacugaccuauuu

SEQ ID NO: 951247 - RNA, 19 nt, Homo sapiens
  misc_RNA (1)...(19): siRNA sense strand
guuuagaucaugcaccaua

SEQ ID NO: 951248 - RNA, 19 nt, Homo sapiens
  misc_RNA (1)...(19): siRNA sense strand
aacaggaugugauuguaaa

SEQ ID NO: 951249 - RNA, 19 nt, Homo sapiens
  misc_RNA (1)...(19): siRNA sense strand
uggaagaaauaagcugaaa

SEQ ID NO: 951250 - RNA, 19 nt, Homo sapiens
  misc_RNA (1)...(19): siRNA sense strand
ccaagauacagauugauga

SEQ ID NO: 951251 - RNA, 19 nt, Homo sapiens
  misc_RNA (1)...(19): siRNA sense strand
cugcugaacucucacacuu

SEQ ID NO: 951252 - RNA, 19 nt, Homo sapiens
  misc_RNA (1)...(19): siRNA sense strand
cagaaaugccugccagaga

SEQ ID NO: 951253 - RNA, 19 nt, Homo sapiens
  misc_RNA (1)...(19): siRNA sense strand
ucaaugaaccuagcccaaa

SEQ ID NO: 951254 - RNA, 19 nt, Homo sapiens
  misc_RNA (1)...(19): siRNA sense strand
ugucucagauuucgagugu

SEQ ID NO: 951255 - RNA, 19 nt, Homo sapiens
  misc_RNA (1)...(19): siRNA sense strand
gccugcagcugguuucaga

SEQ ID NO: 951256 - RNA, 19 nt, Homo sapiens
  misc_RNA (1)...(19): siRNA sense strand
cgacauugaauaucuggaa

SEQ ID NO: 951257 - RNA, 19 nt, Homo sapiens
  misc_RNA (1)...(19): siRNA sense strand
caaauuagaaacgugcauu

SEQ ID NO: 951258 - RNA, 19 nt, Homo sapiens
  misc_RNA (1)...(19): siRNA sense strand
gccuugcccucuccaugua

SEQ ID NO: 951259 - RNA, 19 nt, Homo sapiens
  misc_RNA (1)...(19): siRNA sense strand
gcggacauucguucuguaa

SEQ ID NO: 951260 - RNA, 19 nt, Homo sapiens
  misc_RNA (1)...(19): siRNA sense strand
gaucaugcaccauauuguc

SEQ ID NO: 951261 - RNA, 19 nt, Homo sapiens
  misc_RNA (1)...(19): siRNA sense strand
gagcguuguuuagaucaug

SEQ ID NO: 951262 - RNA, 19 nt, Homo sapiens
  misc_RNA (1)...(19): siRNA sense strand
ggaccugcaugguguuggu

SEQ ID NO: 951263 - RNA, 19 nt, Homo sapiens
  misc_RNA (1)...(19): siRNA sense strand
auguuaagguugagaauga

SEQ ID NO: 951264 - RNA, 19 nt, Homo sapiens
  misc_RNA (1)...(19): siRNA sense strand
ugccagagaggacuguuua

SEQ ID NO: 951265 - RNA, 19 nt, Homo sapiens
  misc_RNA (1)...(19): siRNA sense strand
cauauuguccucuuugcaa

SEQ ID NO: 951266 - RNA, 19 nt, Homo sapiens
  misc_RNA (1)...(19): siRNA sense strand
gaggaaugaaagauggaua

SEQ ID NO: 951267 - RNA, 19 nt, Homo sapiens
  misc_RNA (1)...(19): siRNA sense strand
gcccaaagcagagugaaga

SEQ ID NO: 951268 - RNA, 19 nt, Homo sapiens
  misc_RNA (1)...(19): siRNA sense strand
acacagcuguuggaagaau

SEQ ID NO: 951269 - RNA, 19 nt, Homo sapiens
  misc_RNA (1)...(19): siRNA sense strand
guaucugccugaugaacug

SEQ ID NO: 951270 - RNA, 19 nt, Homo sapiens
  misc_RNA (1)...(19): siRNA sense strand
gccaagauacagauugaug

SEQ ID NO: 951271 - RNA, 19 nt, Homo sapiens
  misc_RNA (1)...(19): siRNA sense strand
caagauacagauugaugau

SEQ ID NO: 951272 - RNA, 19 nt, Homo sapiens
  misc_RNA (1)...(19): siRNA sense strand
guuggaagaauuaauagug

SEQ ID NO: 951273 - RNA, 19 nt, Homo sapiens
  misc_RNA (1)...(19): siRNA sense strand
cuuaaaccgugcucaguca

SEQ ID NO: 951274 - RNA, 19 nt, Homo sapiens
  misc_RNA (1)...(19): siRNA sense strand
auauugcacugccgacauu

SEQ ID NO: 951275 - RNA, 19 nt, Homo sapiens
  misc_RNA (1)...(19): siRNA sense strand
gaaagcgguuuaggguuuu

SEQ ID NO: 951276 - RNA, 19 nt, Homo sapiens
  misc_RNA (1)...(19): siRNA sense strand
guaaaugaagauggaagaa

SEQ ID NO: 951277 - RNA, 19 nt, Homo sapiens
  misc_RNA (1)...(19): siRNA sense strand
gagucucagucucucaaug

SEQ ID NO: 951278 - RNA, 19 nt, Homo sapiens
  misc_RNA (1)...(19): siRNA sense strand
ugagaaugaagaugagauu

SEQ ID NO: 951279 - RNA, 19 nt, Homo sapiens
  misc_RNA (1)...(19): siRNA sense strand
cuucagagccugucaaagg

SEQ ID NO: 951280 - RNA, 19 nt, Homo sapiens
  misc_RNA (1)...(19): siRNA sense strand
ggaagaauuaauagugaag

SEQ ID NO: 951281 - RNA, 19 nt, Homo sapiens
  misc_RNA (1)...(19): siRNA sense strand
agaauuaaucgaugucuca

SEQ ID NO: 951282 - RNA, 19 nt, Homo sapiens
  misc_RNA (1)...(19): siRNA sense strand
gcagauuaugguuguaugu

SEQ ID NO: 951283 - RNA, 19 nt, Homo sapiens
  misc_RNA (1)...(19): siRNA sense strand
ccaaagcagagugaagaaa

SEQ ID NO: 951284 - RNA, 19 nt, Homo sapiens
  misc_RNA (1)...(19): siRNA sense strand
ucagucagcacagucuaua

SEQ ID NO: 951285 - RNA, 19 nt, Homo sapiens
  misc_RNA (1)...(19): siRNA sense strand
ugauacaguuggaggaaag

SEQ ID NO: 951286 - RNA, 19 nt, Homo sapiens
  misc_RNA (1)...(19): siRNA sense strand
gcacagucuauaaauucaa

SEQ ID NO: 951287 - RNA, 19 nt, Homo sapiens
  misc_RNA (1)...(19): siRNA sense strand
agaaguauacagacuggaa

SEQ ID NO: 951288 - RNA, 19 nt, Homo sapiens
  misc_RNA (1)...(19): siRNA sense strand
uuaagagacagauuucgaa

SEQ ID NO: 951289 - RNA, 19 nt, Homo sapiens
  misc_RNA (1)...(19): siRNA sense strand
gaccaagauacagcauaua

SEQ ID NO: 951290 - RNA, 19 nt, Homo sapiens
  misc_RNA (1)...(19): siRNA sense strand
gaacagaccgcacauguca

SEQ ID NO: 951291 - RNA, 19 nt, Homo sapiens
  misc_RNA (1)...(19): siRNA sense strand
ggacaggccucaagaagag

SEQ ID NO: 951292 - RNA, 19 nt, Homo sapiens
  misc_RNA (1)...(19): siRNA sense strand
ggaguccuauuuccuguuu

SEQ ID NO: 951293 - RNA, 19 nt, Homo sapiens
  misc_RNA (1)...(19): siRNA sense strand
gcucgaaacuuccuauaca

SEQ ID NO: 951294 - RNA, 19 nt, Homo sapiens
  misc_RNA (1)...(19): siRNA sense strand
cuuaggaucuugcucauug

SEQ ID NO: 951295 - RNA, 19 nt, Homo sapiens
  misc_RNA (1)...(19): siRNA sense strand
caaccugaauccuggagaa

SEQ ID NO: 951296 - RNA, 19 nt, Homo sapiens
  misc_RNA (1)...(19): siRNA sense strand
cagagcccauuaagcauuu

SEQ ID NO: 951297 - RNA, 19 nt, Homo sapiens
  misc_RNA (1)...(19): siRNA sense strand
cccggaagcugccaucauu

SEQ ID NO: 951298 - RNA, 19 nt, Homo sapiens
  misc_RNA (1)...(19): siRNA sense strand
gcgaggcucucuggacuga

SEQ ID NO: 951299 - RNA, 19 nt, Homo sapiens
  misc_RNA (1)...(19): siRNA sense strand
ccuauuuccuguuuaacuu

SEQ ID NO: 951300 - RNA, 19 nt, Homo sapiens
  misc_RNA (1)...(19): siRNA sense strand
gcacaugucagagcccauu

SEQ ID NO: 951301 - RNA, 19 nt, Homo sapiens
  misc_RNA (1)...(19): siRNA sense strand
ggaagcugccaucauucua

SEQ ID NO: 951302 - RNA, 19 nt, Homo sapiens
  misc_RNA (1)...(19): siRNA sense strand
ugucagagcccauuaagca

SEQ ID NO: 951303 - RNA, 19 nt, Homo sapiens
  misc_RNA (1)...(19): siRNA sense strand
gaagcugccaucauucuag

SEQ ID NO: 951304 - RNA, 19 nt, Homo sapiens
  misc_RNA (1)...(19): siRNA sense strand
gggacaggccucaagaaga

SEQ ID NO: 951305 - RNA, 19 nt, Homo sapiens
  misc_RNA (1)...(19): siRNA sense strand
aguccuauuuccuguuuaa

SEQ ID NO: 951306 - RNA, 19 nt, Homo sapiens
  misc_RNA (1)...(19): siRNA sense strand
ucagagcccauuaagcauu

SEQ ID NO: 951307 - RNA, 19 nt, Homo sapiens
  misc_RNA (1)...(19): siRNA sense strand
ggauugcacaccugaagug

SEQ ID NO: 951308 - RNA, 19 nt, Homo sapiens
  misc_RNA (1)...(19): siRNA sense strand
ggaacagaccgcacauguc

SEQ ID NO: 951309 - RNA, 19 nt, Homo sapiens
  misc_RNA (1)...(19): siRNA sense strand
gauccuggaguccuauuuc

SEQ ID NO: 951310 - RNA, 19 nt, Homo sapiens
  misc_RNA (1)...(19): siRNA sense strand
guucagcgcccagacagaa

SEQ ID NO: 951311 - RNA, 19 nt, Homo sapiens
  misc_RNA (1)...(19): siRNA sense strand
gcuccaagcccagcaggaa

SEQ ID NO: 951312 - RNA, 19 nt, Homo sapiens
  misc_RNA (1)...(19): siRNA sense strand
gaggcucucuggacugaac

SEQ ID NO: 951313 - RNA, 19 nt, Homo sapiens
  misc_RNA (1)...(19): siRNA sense strand
ggcggauccuggaguccua

SEQ ID NO: 951314 - RNA, 19 nt, Homo sapiens
  misc_RNA (1)...(19): siRNA sense strand
cuguuuaacuucuuaggau

SEQ ID NO: 951315 - RNA, 19 nt, Homo sapiens
  misc_RNA (1)...(19): siRNA sense strand
gaggauugcacaccugaag

SEQ ID NO: 951316 - RNA, 19 nt, Homo sapiens
  misc_RNA (1)...(19): siRNA sense strand
gaguccuauuuccuguuua

SEQ ID NO: 951317 - RNA, 19 nt, Homo sapiens
  misc_RNA (1)...(19): siRNA sense strand
cucgaaacuuccuauacaa

SEQ ID NO: 951318 - RNA, 19 nt, Homo sapiens
  misc_RNA (1)...(19): siRNA sense strand
aagcccagcaggaaaggua

SEQ ID NO: 951319 - RNA, 19 nt, Homo sapiens
  misc_RNA (1)...(19): siRNA sense strand
acagaccgcacaugucaga

SEQ ID NO: 951320 - RNA, 19 nt, Homo sapiens
  misc_RNA (1)...(19): siRNA sense strand
gaagacgacaaagggacaa

SEQ ID NO: 951321 - RNA, 19 nt, Homo sapiens
  misc_RNA (1)...(19): siRNA sense strand
uuaggaucuugcucauuga

SEQ ID NO: 951322 - RNA, 19 nt, Homo sapiens
  misc_RNA (1)...(19): siRNA sense strand
ggauccuggaguccuauuu

SEQ ID NO: 951323 - RNA, 19 nt, Homo sapiens
  misc_RNA (1)...(19): siRNA sense strand
cauuaagcauuuccaucca

SEQ ID NO: 951324 - RNA, 19 nt, Homo sapiens
  misc_RNA (1)...(19): siRNA sense strand
aaacggagcugcugaagga

SEQ ID NO: 951325 - RNA, 19 nt, Homo sapiens
  misc_RNA (1)...(19): siRNA sense strand
gaagagaaccaucaugcaa

SEQ ID NO: 951326 - RNA, 19 nt, Homo sapiens
  misc_RNA (1)...(19): siRNA sense strand
ggaaaucacagaucaggaa

SEQ ID NO: 951327 - RNA, 19 nt, Homo sapiens
  misc_RNA (1)...(19): siRNA sense strand
gagauggacuggucagaca

SEQ ID NO: 951328 - RNA, 19 nt, Homo sapiens
  misc_RNA (1)...(19): siRNA sense strand
gaggugcccuucuccauca

SEQ ID NO: 951329 - RNA, 19 nt, Homo sapiens
  misc_RNA (1)...(19): siRNA sense strand
gagcugcccugcaaagagu

SEQ ID NO: 951330 - RNA, 19 nt, Homo sapiens
  misc_RNA (1)...(19): siRNA sense strand
gaaggaagccgagcucauc

SEQ ID NO: 951331 - RNA, 19 nt, Homo sapiens
  misc_RNA (1)...(19): siRNA sense strand
ccacagaggugcccuucuc

SEQ ID NO: 951332 - RNA, 19 nt, Homo sapiens
  misc_RNA (1)...(19): siRNA sense strand
ucacagcacugcgagagaa

SEQ ID NO: 951333 - RNA, 19 nt, Homo sapiens
  misc_RNA (1)...(19): siRNA sense strand
gaccaacagucucuucauc

SEQ ID NO: 951334 - RNA, 19 nt, Homo sapiens
  misc_RNA (1)...(19): siRNA sense strand
ggacuggucagacaagaug

SEQ ID NO: 951335 - RNA, 19 nt, Homo sapiens
  misc_RNA (1)...(19): siRNA sense strand
gagcucauccggaacauuc

SEQ ID NO: 951336 - RNA, 19 nt, Homo sapiens
  misc_RNA (1)...(19): siRNA sense strand
ucacagaucaggaacacaa

SEQ ID NO: 951337 - RNA, 19 nt, Homo sapiens
  misc_RNA (1)...(19): siRNA sense strand
uggaggagcugaacauguc

SEQ ID NO: 951338 - RNA, 19 nt, Homo sapiens
  misc_RNA (1)...(19): siRNA sense strand
ccaacagucucuucaucga

SEQ ID NO: 951339 - RNA, 19 nt, Homo sapiens
  misc_RNA (1)...(19): siRNA sense strand
caaggagaccugcgagaug

SEQ ID NO: 951340 - RNA, 19 nt, Homo sapiens
  misc_RNA (1)...(19): siRNA sense strand
caacguggcggcacugaag

SEQ ID NO: 951341 - RNA, 19 nt, Homo sapiens
  misc_RNA (1)...(19): siRNA sense strand
ugaagcaggccaucaagga

SEQ ID NO: 951342 - RNA, 19 nt, Homo sapiens
  misc_RNA (1)...(19): siRNA sense strand
acaagacacugcgggaaau

SEQ ID NO: 951343 - RNA, 19 nt, Homo sapiens
  misc_RNA (1)...(19): siRNA sense strand
caucaccaccugcacaaga

SEQ ID NO: 951344 - RNA, 19 nt, Homo sapiens
  misc_RNA (1)...(19): siRNA sense strand
acaugagccuggagaagga

SEQ ID NO: 951345 - RNA, 19 nt, Homo sapiens
  misc_RNA (1)...(19): siRNA sense strand
cacaagacacugcgggaaa

SEQ ID NO: 951346 - RNA, 19 nt, Homo sapiens
  misc_RNA (1)...(19): siRNA sense strand
gcacugaagcaggccauca

SEQ ID NO: 951347 - RNA, 19 nt, Homo sapiens
  misc_RNA (1)...(19): siRNA sense strand
caagauggaggccuacaac

SEQ ID NO: 951348 - RNA, 19 nt, Homo sapiens
  misc_RNA (1)...(19): siRNA sense strand
caggagcugcugaagagaa

SEQ ID NO: 951349 - RNA, 19 nt, Homo sapiens
  misc_RNA (1)...(19): siRNA sense strand
aguucaggcuguugaguga

SEQ ID NO: 951350 - RNA, 19 nt, Homo sapiens
  misc_RNA (1)...(19): siRNA sense strand
guacuccaccaccuuccaa

SEQ ID NO: 951351 - RNA, 19 nt, Homo sapiens
  misc_RNA (1)...(19): siRNA sense strand
caaguucacgcaggacaau

SEQ ID NO: 951352 - RNA, 19 nt, Homo sapiens
  misc_RNA (1)...(19): siRNA sense strand
ugcgggaaaucacagauca

SEQ ID NO: 951353 - RNA, 19 nt, Homo sapiens
  misc_RNA (1)...(19): siRNA sense strand
gcugguggacugcauccuu

SEQ ID NO: 951354 - RNA, 19 nt, Homo sapiens
  misc_RNA (1)...(19): siRNA sense strand
ggaaacggagcugcugaag

SEQ ID NO: 951355 - RNA, 19 nt, Homo sapiens
  misc_RNA (1)...(19): siRNA sense strand
ucgaggacauccacaugag

SEQ ID NO: 951356 - RNA, 19 nt, Homo sapiens
  misc_RNA (1)...(19): siRNA sense strand
gcaagcagugagccagauc

SEQ ID NO: 951357 - RNA, 19 nt, Homo sapiens
  misc_RNA (1)...(19): siRNA sense strand
uccaccaccuuccaagaga

SEQ ID NO: 951358 - RNA, 19 nt, Homo sapiens
  misc_RNA (1)...(19): siRNA sense strand
caggguuucugacuuauuu

SEQ ID NO: 951359 - RNA, 19 nt, Homo sapiens
  misc_RNA (1)...(19): siRNA sense strand
caucgacccuuacgccuuu

SEQ ID NO: 951360 - RNA, 19 nt, Homo sapiens
  misc_RNA (1)...(19): siRNA sense strand
gcgaggagcugcgcaaacu

SEQ ID NO: 951361 - RNA, 19 nt, Homo sapiens
  misc_RNA (1)...(19): siRNA sense strand
gaggagcugcgcaaacugu

SEQ ID NO: 951362 - RNA, 19 nt, Homo sapiens
  misc_RNA (1)...(19): siRNA sense strand
ucacaacucccgccaacca

SEQ ID NO: 951363 - RNA, 19 nt, Homo sapiens
  misc_RNA (1)...(19): siRNA sense strand
ccccaggguuucugacuua

SEQ ID NO: 951364 - RNA, 19 nt, Homo sapiens
  misc_RNA (1)...(19): siRNA sense strand
uggucauccuccugucuua

SEQ ID NO: 951365 - RNA, 19 nt, Homo sapiens
  misc_RNA (1)...(19): siRNA sense strand
gcacaacgugacgaacuuc

SEQ ID NO: 951366 - RNA, 19 nt, Homo sapiens
  misc_RNA (1)...(19): siRNA sense strand
ggagcugcgcaaacuguug

SEQ ID NO: 951367 - RNA, 19 nt, Homo sapiens
  misc_RNA (1)...(19): siRNA sense strand
ccuaucacguggagcucaa

SEQ ID NO: 951368 - RNA, 19 nt, Homo sapiens
  misc_RNA (1)...(19): siRNA sense strand
ugcacaacgugacgaacuu

SEQ ID NO: 951369 - RNA, 19 nt, Homo sapiens
  misc_RNA (1)...(19): siRNA sense strand
gaaaggacaguuaauguuu

SEQ ID NO: 951370 - RNA, 19 nt, Homo sapiens
  misc_RNA (1)...(19): siRNA sense strand
gcauugaagaugacuauuu

SEQ ID NO: 951371 - RNA, 19 nt, Homo sapiens
  misc_RNA (1)...(19): siRNA sense strand
gcacuuacagcgaaucuga

SEQ ID NO: 951372 - RNA, 19 nt, Homo sapiens
  misc_RNA (1)...(19): siRNA sense strand
gaagaaggcauugaagaug

SEQ ID NO: 951373 - RNA, 19 nt, Homo sapiens
  misc_RNA (1)...(19): siRNA sense strand
gagcugguacuccugguua

SEQ ID NO: 951374 - RNA, 19 nt, Homo sapiens
  misc_RNA (1)...(19): siRNA sense strand
gaaacaaugggacgcugua

SEQ ID NO: 951375 - RNA, 19 nt, Homo sapiens
  misc_RNA (1)...(19): siRNA sense strand
gacaucaguuucuggaaga

SEQ ID NO: 951376 - RNA, 19 nt, Homo sapiens
  misc_RNA (1)...(19): siRNA sense strand
aagaaggcauugaagauga

SEQ ID NO: 951377 - RNA, 19 nt, Homo sapiens
  misc_RNA (1)...(19): siRNA sense strand
cagcgaaucugagaggaaa

SEQ ID NO: 951378 - RNA, 19 nt, Homo sapiens
  misc_RNA (1)...(19): siRNA sense strand
ggaaagugaagaaggcauu

SEQ ID NO: 951379 - RNA, 19 nt, Homo sapiens
  misc_RNA (1)...(19): siRNA sense strand
gugcaucgguacaugaaga

SEQ ID NO: 951380 - RNA, 19 nt, Homo sapiens
  misc_RNA (1)...(19): siRNA sense strand
ccauugagcuguggaaagu

SEQ ID NO: 951381 - RNA, 19 nt, Homo sapiens
  misc_RNA (1)...(19): siRNA sense strand
ugaaaggacaguuaauguu

SEQ ID NO: 951382 - RNA, 19 nt, Homo sapiens
  misc_RNA (1)...(19): siRNA sense strand
ggaagaagaagaagagcau

SEQ ID NO: 951383 - RNA, 19 nt, Homo sapiens
  misc_RNA (1)...(19): siRNA sense strand
agagaaagaugcugaugag

SEQ ID NO: 951384 - RNA, 19 nt, Homo sapiens
  misc_RNA (1)...(19): siRNA sense strand
gaauuucaguuuggcacuu

SEQ ID NO: 951385 - RNA, 19 nt, Homo sapiens
  misc_RNA (1)...(19): siRNA sense strand
aaaggacaguuaauguuuc

SEQ ID NO: 951386 - RNA, 19 nt, Homo sapiens
  misc_RNA (1)...(19): siRNA sense strand
ucaaauauaagagcuggua

SEQ ID NO: 951387 - RNA, 19 nt, Homo sapiens
  misc_RNA (1)...(19): siRNA sense strand
gcaccguggucaucuuucu

SEQ ID NO: 951388 - RNA, 19 nt, Homo sapiens
  misc_RNA (1)...(19): siRNA sense strand
cgugauggcggacaacuuu

SEQ ID NO: 951389 - RNA, 19 nt, Homo sapiens
  misc_RNA (1)...(19): siRNA sense strand
guggauaaacgcagaguga

SEQ ID NO: 951390 - RNA, 19 nt, Homo sapiens
  misc_RNA (1)...(19): siRNA sense strand
ugaagaaggcauugaagau

SEQ ID NO: 951391 - RNA, 19 nt, Homo sapiens
  misc_RNA (1)...(19): siRNA sense strand
gaugacgucuuugccuuca

SEQ ID NO: 951392 - RNA, 19 nt, Homo sapiens
  misc_RNA (1)...(19): siRNA sense strand
cagagaaagaugcugauga

SEQ ID NO: 951393 - RNA, 19 nt, Homo sapiens
  misc_RNA (1)...(19): siRNA sense strand
cugaugaggugaaaggaau

SEQ ID NO: 951394 - RNA, 19 nt, Homo sapiens
  misc_RNA (1)...(19): siRNA sense strand
uugauuuccuggccuuuaa

SEQ ID NO: 951395 - RNA, 19 nt, Homo sapiens
  misc_RNA (1)...(19): siRNA sense strand
gaaagugaagaaggcauug

SEQ ID NO: 951396 - RNA, 19 nt, Homo sapiens
  misc_RNA (1)...(19): siRNA sense strand
gaagaagaagagcaugauc

SEQ ID NO: 951397 - RNA, 19 nt, Homo sapiens
  misc_RNA (1)...(19): siRNA sense strand
uaauguuucuguaccaaag

SEQ ID NO: 951398 - RNA, 19 nt, Homo sapiens
  misc_RNA (1)...(19): siRNA sense strand
ugaagucaguggcacaucu

SEQ ID NO: 951399 - RNA, 19 nt, Homo sapiens
  misc_RNA (1)...(19): siRNA sense strand
gugaagaaggcauugaaga

SEQ ID NO: 951400 - RNA, 19 nt, Homo sapiens
  misc_RNA (1)...(19): siRNA sense strand
gaauguggaagacuuugau

SEQ ID NO: 951401 - RNA, 19 nt, Homo sapiens
  misc_RNA (1)...(19): siRNA sense strand
cgacgagugcccuggauga

SEQ ID NO: 951402 - RNA, 19 nt, Homo sapiens
  misc_RNA (1)...(19): siRNA sense strand
ggucuaugccuuugguuuc

SEQ ID NO: 951403 - RNA, 19 nt, Homo sapiens
  misc_RNA (1)...(19): siRNA sense strand
uaccagcgguggcuuuauc

SEQ ID NO: 951404 - RNA, 19 nt, Homo sapiens
  misc_RNA (1)...(19): siRNA sense strand
gaugaggugaaaggaauuu

SEQ ID NO: 951405 - RNA, 19 nt, Homo sapiens
  misc_RNA (1)...(19): siRNA sense strand
gggacgacgugguguuucu

SEQ ID NO: 951406 - RNA, 19 nt, Homo sapiens
  misc_RNA (1)...(19): siRNA sense strand
aauuucaguuuggcacuua

SEQ ID NO: 951407 - RNA, 19 nt, Homo sapiens
  misc_RNA (1)...(19): siRNA sense strand
ugacgucuuugccuucauc

SEQ ID NO: 951408 - RNA, 19 nt, Homo sapiens
  misc_RNA (1)...(19): siRNA sense strand
guagauaccaacuuauacu

SEQ ID NO: 951409 - RNA, 19 nt, Homo sapiens
  misc_RNA (1)...(19): siRNA sense strand
uccaucuucucuuugauuu

SEQ ID NO: 951410 - RNA, 19 nt, Homo sapiens
  misc_RNA (1)...(19): siRNA sense strand
cguuccaucuucucuuuga

SEQ ID NO: 951411 - RNA, 19 nt, Homo sapiens
  misc_RNA (1)...(19): siRNA sense strand
guuaauguuucuguaccaa

SEQ ID NO: 951412 - RNA, 19 nt, Homo sapiens
  misc_RNA (1)...(19): siRNA sense strand
ugaaguacuugucauaccu

SEQ ID NO: 951413 - RNA, 19 nt, Homo sapiens
  misc_RNA (1)...(19): siRNA sense strand
gaugcccgaauuucaguuu

SEQ ID NO: 951414 - RNA, 19 nt, Homo sapiens
  misc_RNA (1)...(19): siRNA sense strand
gaggccugaugcccgaauu

SEQ ID NO: 951415 - RNA, 19 nt, Homo sapiens
  misc_RNA (1)...(19): siRNA sense strand
gcuuucaacaccuucauug

SEQ ID NO: 951416 - RNA, 19 nt, Homo sapiens
  misc_RNA (1)...(19): siRNA sense strand
ugaacgugauggcggacaa

SEQ ID NO: 951417 - RNA, 19 nt, Homo sapiens
  misc_RNA (1)...(19): siRNA sense strand
gcagagugaacgaguuugg

SEQ ID NO: 951418 - RNA, 19 nt, Homo sapiens
  misc_RNA (1)...(19): siRNA sense strand
gucuuugccuucaucauca

SEQ ID NO: 951419 - RNA, 19 nt, Homo sapiens
  misc_RNA (1)...(19): siRNA sense strand
gaagucaguggcacaucug

SEQ ID NO: 951420 - RNA, 19 nt, Homo sapiens
  misc_RNA (1)...(19): siRNA sense strand
cagcaccguggucaucuuu

SEQ ID NO: 951421 - RNA, 19 nt, Homo sapiens
  misc_RNA (1)...(19): siRNA sense strand
aagaagaagaagagcauga

SEQ ID NO: 951422 - RNA, 19 nt, Homo sapiens
  misc_RNA (1)...(19): siRNA sense strand
gcacaccugcugggucaug

SEQ ID NO: 951423 - RNA, 19 nt, Homo sapiens
  misc_RNA (1)...(19): siRNA sense strand
gcugaugaggugaaaggaa

SEQ ID NO: 951424 - RNA, 19 nt, Homo sapiens
  misc_RNA (1)...(19): siRNA sense strand
gaguccaaauuugaaagga

SEQ ID NO: 951425 - RNA, 19 nt, Homo sapiens
  misc_RNA (1)...(19): siRNA sense strand
auugagcuguggaaaguga

SEQ ID NO: 951426 - RNA, 19 nt, Homo sapiens
  misc_RNA (1)...(19): siRNA sense strand
ggauaaacgcagagugaac

SEQ ID NO: 951427 - RNA, 19 nt, Homo sapiens
  misc_RNA (1)...(19): siRNA sense strand
gaucgaggcggagaagaag

SEQ ID NO: 951428 - RNA, 19 nt, Homo sapiens
  misc_RNA (1)...(19): siRNA sense strand
ggaaaaccgugcauuaccu

SEQ ID NO: 951429 - RNA, 19 nt, Homo sapiens
  misc_RNA (1)...(19): siRNA sense strand
gggucuaugccuuugguuu

SEQ ID NO: 951430 - RNA, 19 nt, Homo sapiens
  misc_RNA (1)...(19): siRNA sense strand
ggccaugaaguacuuguca

SEQ ID NO: 951431 - RNA, 19 nt, Homo sapiens
  misc_RNA (1)...(19): siRNA sense strand
caucuucucuuugauuucc

SEQ ID NO: 951432 - RNA, 19 nt, Homo sapiens
  misc_RNA (1)...(19): siRNA sense strand
agcguuccaucuucucuuu

SEQ ID NO: 951433 - RNA, 19 nt, Homo sapiens
  misc_RNA (1)...(19): siRNA sense strand
gcucagcaaccgcgugaag

SEQ ID NO: 951434 - RNA, 19 nt, Homo sapiens
  misc_RNA (1)...(19): siRNA sense strand
aaaccgaggaguacgauac

SEQ ID NO: 951435 - RNA, 19 nt, Homo sapiens
  misc_RNA (1)...(19): siRNA sense strand
acuacaaguugaagucagu

SEQ ID NO: 951436 - RNA, 19 nt, Homo sapiens
  misc_RNA (1)...(19): siRNA sense strand
ucaccaugcccacgucuca

SEQ ID NO: 951437 - RNA, 19 nt, Homo sapiens
  misc_RNA (1)...(19): siRNA sense strand
ugaauguggaagacuuuga

SEQ ID NO: 951438 - RNA, 19 nt, Homo sapiens
  misc_RNA (1)...(19): siRNA sense strand
gcagaucgaggcggagaag

SEQ ID NO: 951439 - RNA, 19 nt, Homo sapiens
  misc_RNA (1)...(19): siRNA sense strand
cgucuuugccuucaucauc

SEQ ID NO: 951440 - RNA, 19 nt, Homo sapiens
  misc_RNA (1)...(19): siRNA sense strand
uugaaaggacaguuaaugu

SEQ ID NO: 951441 - RNA, 19 nt, Homo sapiens
  misc_RNA (1)...(19): siRNA sense strand
acaaugggacgcuguaugc

SEQ ID NO: 951442 - RNA, 19 nt, Homo sapiens
  misc_RNA (1)...(19): siRNA sense strand
ucagcaccguggucaucuu

SEQ ID NO: 951443 - RNA, 19 nt, Homo sapiens
  misc_RNA (1)...(19): siRNA sense strand
ccaaagaaaacgagaaaca

SEQ ID NO: 951444 - RNA, 19 nt, Homo sapiens
  misc_RNA (1)...(19): siRNA sense strand
caaagaaaacgagaaacaa

SEQ ID NO: 951445 - RNA, 19 nt, Homo sapiens
  misc_RNA (1)...(19): siRNA sense strand
gugcugagaacaacaucga

SEQ ID NO: 951446 - RNA, 19 nt, Homo sapiens
  misc_RNA (1)...(19): siRNA sense strand
ucagcaaccgcgugaagga

SEQ ID NO: 951447 - RNA, 19 nt, Homo sapiens
  misc_RNA (1)...(19): siRNA sense strand
gaaagaagauggaaagaaa

SEQ ID NO: 951448 - RNA, 19 nt, Homo sapiens
  misc_RNA (1)...(19): siRNA sense strand
ggaaggagcucuuuauuug

SEQ ID NO: 951449 - RNA, 19 nt, Homo sapiens
  misc_RNA (1)...(19): siRNA sense strand
ggaagacucucuaugauaa

SEQ ID NO: 951450 - RNA, 19 nt, Homo sapiens
  misc_RNA (1)...(19): siRNA sense strand
caaggaaacuaaugagaaa

SEQ ID NO: 951451 - RNA, 19 nt, Homo sapiens
  misc_RNA (1)...(19): siRNA sense strand
gaauacggauagccaagua

SEQ ID NO: 951452 - RNA, 19 nt, Homo sapiens
  misc_RNA (1)...(19): siRNA sense strand
gcugaaacaucgaaggaua

SEQ ID NO: 951453 - RNA, 19 nt, Homo sapiens
  misc_RNA (1)...(19): siRNA sense strand
ggagcaagauuucauguca

SEQ ID NO: 951454 - RNA, 19 nt, Homo sapiens
  misc_RNA (1)...(19): siRNA sense strand
ggaaagaaauccuggaaaa

SEQ ID NO: 951455 - RNA, 19 nt, Homo sapiens
  misc_RNA (1)...(19): siRNA sense strand
gcaaggaaacuaaugagaa

SEQ ID NO: 951456 - RNA, 19 nt, Homo sapiens
  misc_RNA (1)...(19): siRNA sense strand
ucaaguaucucugcuguga

SEQ ID NO: 951457 - RNA, 19 nt, Homo sapiens
  misc_RNA (1)...(19): siRNA sense strand
gaccaaauguucagcacuu

SEQ ID NO: 951458 - RNA, 19 nt, Homo sapiens
  misc_RNA (1)...(19): siRNA sense strand
ggagaaagaggagaaauau

SEQ ID NO: 951459 - RNA, 19 nt, Homo sapiens
  misc_RNA (1)...(19): siRNA sense strand
ccagagacaugcugaaaca

SEQ ID NO: 951460 - RNA, 19 nt, Homo sapiens
  misc_RNA (1)...(19): siRNA sense strand
cagaaggagucccaguaua

SEQ ID NO: 951461 - RNA, 19 nt, Homo sapiens
  misc_RNA (1)...(19): siRNA sense strand
ugagucaagugaagacaua

SEQ ID NO: 951462 - RNA, 19 nt, Homo sapiens
  misc_RNA (1)...(19): siRNA sense strand
gggaagacucucuaugaua

SEQ ID NO: 951463 - RNA, 19 nt, Homo sapiens
  misc_RNA (1)...(19): siRNA sense strand
ccacugguaucagccaaua

SEQ ID NO: 951464 - RNA, 19 nt, Homo sapiens
  misc_RNA (1)...(19): siRNA sense strand
uggaacaucuaucauugua

SEQ ID NO: 951465 - RNA, 19 nt, Homo sapiens
  misc_RNA (1)...(19): siRNA sense strand
uuaagaagcucgucgucaa

SEQ ID NO: 951466 - RNA, 19 nt, Homo sapiens
  misc_RNA (1)...(19): siRNA sense strand
gaaagaguccuugcagaau

SEQ ID NO: 951467 - RNA, 19 nt, Homo sapiens
  misc_RNA (1)...(19): siRNA sense strand
aaacaucgaaggauaagaa

SEQ ID NO: 951468 - RNA, 19 nt, Homo sapiens
  misc_RNA (1)...(19): siRNA sense strand
gaaggagcucuuuauuuga

SEQ ID NO: 951469 - RNA, 19 nt, Homo sapiens
  misc_RNA (1)...(19): siRNA sense strand
gaggagaaauaugcuguau

SEQ ID NO: 951470 - RNA, 19 nt, Homo sapiens
  misc_RNA (1)...(19): siRNA sense strand
ugaaggaggccaagguuaa

SEQ ID NO: 951471 - RNA, 19 nt, Homo sapiens
  misc_RNA (1)...(19): siRNA sense strand
ccaauaugaggaugacuua

SEQ ID NO: 951472 - RNA, 19 nt, Homo sapiens
  misc_RNA (1)...(19): siRNA sense strand
gaaagcaaggaaacuaaug

SEQ ID NO: 951473 - RNA, 19 nt, Homo sapiens
  misc_RNA (1)...(19): siRNA sense strand
gaugacacaagaacccuua

SEQ ID NO: 951474 - RNA, 19 nt, Homo sapiens
  misc_RNA (1)...(19): siRNA sense strand
aaggagcucuuuauuugaa

SEQ ID NO: 951475 - RNA, 19 nt, Homo sapiens
  misc_RNA (1)...(19): siRNA sense strand
gcacuuugcugggagagau

SEQ ID NO: 951476 - RNA, 19 nt, Homo sapiens
  misc_RNA (1)...(19): siRNA sense strand
gugaagacauagaccaaau

SEQ ID NO: 951477 - RNA, 19 nt, Homo sapiens
  misc_RNA (1)...(19): siRNA sense strand
gggcuucuggaauuuauua

SEQ ID NO: 951478 - RNA, 19 nt, Homo sapiens
  misc_RNA (1)...(19): siRNA sense strand
gagcugaauuuaacuacag

SEQ ID NO: 951479 - RNA, 19 nt, Homo sapiens
  misc_RNA (1)...(19): siRNA sense strand
gaacuggaaggagcucuuu

SEQ ID NO: 951480 - RNA, 19 nt, Homo sapiens
  misc_RNA (1)...(19): siRNA sense strand
agauuuagaugcucucaug

SEQ ID NO: 951481 - RNA, 19 nt, Homo sapiens
  misc_RNA (1)...(19): siRNA sense strand
gaaaaugaaugcuaagaac

SEQ ID NO: 951482 - RNA, 19 nt, Homo sapiens
  misc_RNA (1)...(19): siRNA sense strand
ggacaauccaggcacagaa

SEQ ID NO: 951483 - RNA, 19 nt, Homo sapiens
  misc_RNA (1)...(19): siRNA sense strand
cucgagaucuggcguguuu

SEQ ID NO: 951484 - RNA, 19 nt, Homo sapiens
  misc_RNA (1)...(19): siRNA sense strand
aaagaaagcaaggaaacua

SEQ ID NO: 951485 - RNA, 19 nt, Homo sapiens
  misc_RNA (1)...(19): siRNA sense strand
uaaaugaguccuuaaaugc

SEQ ID NO: 951486 - RNA, 19 nt, Homo sapiens
  misc_RNA (1)...(19): siRNA sense strand
guccuuaaaugcacuggaa

SEQ ID NO: 951487 - RNA, 19 nt, Homo sapiens
  misc_RNA (1)...(19): siRNA sense strand
agaaggagucccaguauau

SEQ ID NO: 951488 - RNA, 19 nt, Homo sapiens
  misc_RNA (1)...(19): siRNA sense strand
uguggaacaucuaucauug

SEQ ID NO: 951489 - RNA, 19 nt, Homo sapiens
  misc_RNA (1)...(19): siRNA sense strand
ucaaggugcacaugaauga

SEQ ID NO: 951490 - RNA, 19 nt, Homo sapiens
  misc_RNA (1)...(19): siRNA sense strand
aaagaguccuugcagaauc

SEQ ID NO: 951491 - RNA, 19 nt, Homo sapiens
  misc_RNA (1)...(19): siRNA sense strand
agaaagaguccuugcagaa

SEQ ID NO: 951492 - RNA, 19 nt, Homo sapiens
  misc_RNA (1)...(19): siRNA sense strand
acuggaagaccaagauuua

SEQ ID NO: 951493 - RNA, 19 nt, Homo sapiens
  misc_RNA (1)...(19): siRNA sense strand
ggaagaccaagauuuagau

SEQ ID NO: 951494 - RNA, 19 nt, Homo sapiens
  misc_RNA (1)...(19): siRNA sense strand
auaaagcgcccacugacua

SEQ ID NO: 951495 - RNA, 19 nt, Homo sapiens
  misc_RNA (1)...(19): siRNA sense strand
uggaaggagcucuuuauuu

SEQ ID NO: 951496 - RNA, 19 nt, Homo sapiens
  misc_RNA (1)...(19): siRNA sense strand
gcagcuggcccgagauguu

SEQ ID NO: 951497 - RNA, 19 nt, Homo sapiens
  misc_RNA (1)...(19): siRNA sense strand
caagagacacagaaaauaa

SEQ ID NO: 951498 - RNA, 19 nt, Homo sapiens
  misc_RNA (1)...(19): siRNA sense strand
gcacaaagucacugauggu

SEQ ID NO: 951499 - RNA, 19 nt, Homo sapiens
  misc_RNA (1)...(19): siRNA sense strand
ugucagaccucaugaaagc

SEQ ID NO: 951500 - RNA, 19 nt, Homo sapiens
  misc_RNA (1)...(19): siRNA sense strand
ggucaugggaauacggaua

SEQ ID NO: 951501 - RNA, 19 nt, Homo sapiens
  misc_RNA (1)...(19): siRNA sense strand
ucucauggcagaucuggua

SEQ ID NO: 951502 - RNA, 19 nt, Homo sapiens
  misc_RNA (1)...(19): siRNA sense strand
ucagugcuguucuccaaga

SEQ ID NO: 951503 - RNA, 19 nt, Homo sapiens
  misc_RNA (1)...(19): siRNA sense strand
uggagaaagaggagaaaua

SEQ ID NO: 951504 - RNA, 19 nt, Homo sapiens
  misc_RNA (1)...(19): siRNA sense strand
ugaaagaagauggaaagaa

SEQ ID NO: 951505 - RNA, 19 nt, Homo sapiens
  misc_RNA (1)...(19): siRNA sense strand
ugucagugcuguucuccaa

SEQ ID NO: 951506 - RNA, 19 nt, Homo sapiens
  misc_RNA (1)...(19): siRNA sense strand
gaaggagucccaguauauc

SEQ ID NO: 951507 - RNA, 19 nt, Homo sapiens
  misc_RNA (1)...(19): siRNA sense strand
ggugcagccucucuugguu

SEQ ID NO: 951508 - RNA, 19 nt, Homo sapiens
  misc_RNA (1)...(19): siRNA sense strand
caagaggcccagagacaug

SEQ ID NO: 951509 - RNA, 19 nt, Homo sapiens
  misc_RNA (1)...(19): siRNA sense strand
gcacuggaagaccaagauu

SEQ ID NO: 951510 - RNA, 19 nt, Homo sapiens
  misc_RNA (1)...(19): siRNA sense strand
gacaauccaggcacagaaa

SEQ ID NO: 951511 - RNA, 19 nt, Homo sapiens
  misc_RNA (1)...(19): siRNA sense strand
ggacucagcauaaaaugaa

SEQ ID NO: 951512 - RNA, 19 nt, Homo sapiens
  misc_RNA (1)...(19): siRNA sense strand
uuuacgggcuucuggaauu

SEQ ID NO: 951513 - RNA, 19 nt, Homo sapiens
  misc_RNA (1)...(19): siRNA sense strand
acccagagcugaauuuaac

SEQ ID NO: 951514 - RNA, 19 nt, Homo sapiens
  misc_RNA (1)...(19): siRNA sense strand
cccaguauaucaaguaucu

SEQ ID NO: 951515 - RNA, 19 nt, Homo sapiens
  misc_RNA (1)...(19): siRNA sense strand
gaagaccaagauuuagaug

SEQ ID NO: 951516 - RNA, 19 nt, Homo sapiens
  misc_RNA (1)...(19): siRNA sense strand
agaaagaggagaaauaugc

SEQ ID NO: 951517 - RNA, 19 nt, Homo sapiens
  misc_RNA (1)...(19): siRNA sense strand
gugcagccucucuugguua

SEQ ID NO: 951518 - RNA, 19 nt, Homo sapiens
  misc_RNA (1)...(19): siRNA sense strand
aaguaucucugcugugaug

SEQ ID NO: 951519 - RNA, 19 nt, Homo sapiens
  misc_RNA (1)...(19): siRNA sense strand
uuacgggcuucuggaauuu

SEQ ID NO: 951520 - RNA, 19 nt, Homo sapiens
  misc_RNA (1)...(19): siRNA sense strand
ccacccagagcugaauuua

SEQ ID NO: 951521 - RNA, 19 nt, Homo sapiens
  misc_RNA (1)...(19): siRNA sense strand
aaagcaaggaaacuaauga

SEQ ID NO: 951522 - RNA, 19 nt, Homo sapiens
  misc_RNA (1)...(19): siRNA sense strand
gagaaagaggagaaauaug

SEQ ID NO: 951523 - RNA, 19 nt, Homo sapiens
  misc_RNA (1)...(19): siRNA sense strand
ugaaaucuacccggaacua

SEQ ID NO: 951524 - RNA, 19 nt, Homo sapiens
  misc_RNA (1)...(19): siRNA sense strand
acccggaacuacaaauuga

SEQ ID NO: 951525 - RNA, 19 nt, Homo sapiens
  misc_RNA (1)...(19): siRNA sense strand
aagaaagcaaggaaacuaa

SEQ ID NO: 951526 - RNA, 19 nt, Homo sapiens
  misc_RNA (1)...(19): siRNA sense strand
accagccgauccuguguua

SEQ ID NO: 951527 - RNA, 19 nt, Homo sapiens
  misc_RNA (1)...(19): siRNA sense strand
aauauaaagcgcccacuga

SEQ ID NO: 951528 - RNA, 19 nt, Homo sapiens
  misc_RNA (1)...(19): siRNA sense strand
caaaggaaagacuaagaca

SEQ ID NO: 951529 - RNA, 19 nt, Homo sapiens
  misc_RNA (1)...(19): siRNA sense strand
cagccgauccuguguuaga

SEQ ID NO: 951530 - RNA, 19 nt, Homo sapiens
  misc_RNA (1)...(19): siRNA sense strand
gaaggaggccaagguuaag

SEQ ID NO: 951531 - RNA, 19 nt, Homo sapiens
  misc_RNA (1)...(19): siRNA sense strand
ugggaagacucucuaugau

SEQ ID NO: 951532 - RNA, 19 nt, Homo sapiens
  misc_RNA (1)...(19): siRNA sense strand
ucagaaggagucccaguau

SEQ ID NO: 951533 - RNA, 19 nt, Homo sapiens
  misc_RNA (1)...(19): siRNA sense strand
ccagagcugaauuuaacua

SEQ ID NO: 951534 - RNA, 19 nt, Homo sapiens
  misc_RNA (1)...(19): siRNA sense strand
gagauguucuggacaaccu

SEQ ID NO: 951535 - RNA, 19 nt, Homo sapiens
  misc_RNA (1)...(19): siRNA sense strand
ugaaugauaacagcacaaa

SEQ ID NO: 951536 - RNA, 19 nt, Homo sapiens
  misc_RNA (1)...(19): siRNA sense strand
acuggugucuuuaugaaau

SEQ ID NO: 951537 - RNA, 19 nt, Homo sapiens
  misc_RNA (1)...(19): siRNA sense strand
aagaguccuugcagaauca

SEQ ID NO: 951538 - RNA, 19 nt, Homo sapiens
  misc_RNA (1)...(19): siRNA sense strand
uaaagcgcccacugacuau

SEQ ID NO: 951539 - RNA, 19 nt, Homo sapiens
  misc_RNA (1)...(19): siRNA sense strand
aaggaaagacuaagacauc

SEQ ID NO: 951540 - RNA, 19 nt, Homo sapiens
  misc_RNA (1)...(19): siRNA sense strand
agaccaagauuuagaugcu

SEQ ID NO: 951541 - RNA, 19 nt, Homo sapiens
  misc_RNA (1)...(19): siRNA sense strand
ucucuacaagcaucaauuu

SEQ ID NO: 951542 - RNA, 19 nt, Homo sapiens
  misc_RNA (1)...(19): siRNA sense strand
ggacaagagacacagaaaa

SEQ ID NO: 951543 - RNA, 19 nt, Homo sapiens
  misc_RNA (1)...(19): siRNA sense strand
agcaagauuucaugucaga

SEQ ID NO: 951544 - RNA, 19 nt, Homo sapiens
  misc_RNA (1)...(19): siRNA sense strand
gcccagagacaugcugaaa

SEQ ID NO: 951545 - RNA, 19 nt, Homo sapiens
  misc_RNA (1)...(19): siRNA sense strand
ccagcccaauggacagauu

SEQ ID NO: 951546 - RNA, 19 nt, Homo sapiens
  misc_RNA (1)...(19): siRNA sense strand
gaaagaggagaaauaugcu

SEQ ID NO: 951547 - RNA, 19 nt, Homo sapiens
  misc_RNA (1)...(19): siRNA sense strand
gagaacaucuugccagaca

SEQ ID NO: 951548 - RNA, 19 nt, Homo sapiens
  misc_RNA (1)...(19): siRNA sense strand
gacaacauauggaacagaa

SEQ ID NO: 951549 - RNA, 19 nt, Homo sapiens
  misc_RNA (1)...(19): siRNA sense strand
ccaaacaaaucuguaaaga

SEQ ID NO: 951550 - RNA, 19 nt, Homo sapiens
  misc_RNA (1)...(19): siRNA sense strand
gugaaaugcugaacuacuu

SEQ ID NO: 951551 - RNA, 19 nt, Homo sapiens
  misc_RNA (1)...(19): siRNA sense strand
gcuaaugucacccuccuua

SEQ ID NO: 951552 - RNA, 19 nt, Homo sapiens
  misc_RNA (1)...(19): siRNA sense strand
ccucaaugcuucacucuug

SEQ ID NO: 951553 - RNA, 19 nt, Homo sapiens
  misc_RNA (1)...(19): siRNA sense strand
ccaaacaguucucagugaa

SEQ ID NO: 951554 - RNA, 19 nt, Homo sapiens
  misc_RNA (1)...(19): siRNA sense strand
gcucuaagcacuuuccaaa

SEQ ID NO: 951555 - RNA, 19 nt, Homo sapiens
  misc_RNA (1)...(19): siRNA sense strand
ggcaauaugugcagcucua

SEQ ID NO: 951556 - RNA, 19 nt, Homo sapiens
  misc_RNA (1)...(19): siRNA sense strand
ggaaugcacccagaucaaa

SEQ ID NO: 951557 - RNA, 19 nt, Homo sapiens
  misc_RNA (1)...(19): siRNA sense strand
gaaagaacagacagcaaga

SEQ ID NO: 951558 - RNA, 19 nt, Homo sapiens
  misc_RNA (1)...(19): siRNA sense strand
gcacuuggcucgggauuuu

SEQ ID NO: 951559 - RNA, 19 nt, Homo sapiens
  misc_RNA (1)...(19): siRNA sense strand
gagcccaccgacuuuauua

SEQ ID NO: 951560 - RNA, 19 nt, Homo sapiens
  misc_RNA (1)...(19): siRNA sense strand
ccagagacauuuaacacau

SEQ ID NO: 951561 - RNA, 19 nt, Homo sapiens
  misc_RNA (1)...(19): siRNA sense strand
uggccaagguggagugaua

SEQ ID NO: 951562 - RNA, 19 nt, Homo sapiens
  misc_RNA (1)...(19): siRNA sense strand
ucuaagcacuuuccaaaca

SEQ ID NO: 951563 - RNA, 19 nt, Homo sapiens
  misc_RNA (1)...(19): siRNA sense strand
ggccguuugucccuucuua

SEQ ID NO: 951564 - RNA, 19 nt, Homo sapiens
  misc_RNA (1)...(19): siRNA sense strand
cagagacauuuaacacauu

SEQ ID NO: 951565 - RNA, 19 nt, Homo sapiens
  misc_RNA (1)...(19): siRNA sense strand
gaccauugcugagguaaag

SEQ ID NO: 951566 - RNA, 19 nt, Homo sapiens
  misc_RNA (1)...(19): siRNA sense strand
aaacaguucucagugaaau

SEQ ID NO: 951567 - RNA, 19 nt, Homo sapiens
  misc_RNA (1)...(19): siRNA sense strand
ugacauccagagacauuua

SEQ ID NO: 951568 - RNA, 19 nt, Homo sapiens
  misc_RNA (1)...(19): siRNA sense strand
cgaccaaacaaaucuguaa

SEQ ID NO: 951569 - RNA, 19 nt, Homo sapiens
  misc_RNA (1)...(19): siRNA sense strand
caucuugccagacaacaua

SEQ ID NO: 951570 - RNA, 19 nt, Homo sapiens
  misc_RNA (1)...(19): siRNA sense strand
guccuuccauuacgaguuu

SEQ ID NO: 951571 - RNA, 19 nt, Homo sapiens
  misc_RNA (1)...(19): siRNA sense strand
gaagacggaaagcagcuaa

SEQ ID NO: 951572 - RNA, 19 nt, Homo sapiens
  misc_RNA (1)...(19): siRNA sense strand
aaacuuaccagcaggaaga

SEQ ID NO: 951573 - RNA, 19 nt, Homo sapiens
  misc_RNA (1)...(19): siRNA sense strand
caagguggagugauaagaa

SEQ ID NO: 951574 - RNA, 19 nt, Homo sapiens
  misc_RNA (1)...(19): siRNA sense strand
ccuccucuccuuuaacuua

SEQ ID NO: 951575 - RNA, 19 nt, Homo sapiens
  misc_RNA (1)...(19): siRNA sense strand
uggauaggcuuggcuuaaa

SEQ ID NO: 951576 - RNA, 19 nt, Homo sapiens
  misc_RNA (1)...(19): siRNA sense strand
caauuccacugucgccuau

SEQ ID NO: 951577 - RNA, 19 nt, Homo sapiens
  misc_RNA (1)...(19): siRNA sense strand
uuugaucacucauggcuuu

SEQ ID NO: 951578 - RNA, 19 nt, Homo sapiens
  misc_RNA (1)...(19): siRNA sense strand
uggcuacacuugugaaaca

SEQ ID NO: 951579 - RNA, 19 nt, Homo sapiens
  misc_RNA (1)...(19): siRNA sense strand
ggugaccauugcugaggua

SEQ ID NO: 951580 - RNA, 19 nt, Homo sapiens
  misc_RNA (1)...(19): siRNA sense strand
gcaguaggagaacaucuug

SEQ ID NO: 951581 - RNA, 19 nt, Homo sapiens
  misc_RNA (1)...(19): siRNA sense strand
ggauaggcuuggcuuaaac

SEQ ID NO: 951582 - RNA, 19 nt, Homo sapiens
  misc_RNA (1)...(19): siRNA sense strand
caacauauggaacagaaag

SEQ ID NO: 951583 - RNA, 19 nt, Homo sapiens
  misc_RNA (1)...(19): siRNA sense strand
gaccaaacaaaucuguaaa

SEQ ID NO: 951584 - RNA, 19 nt, Homo sapiens
  misc_RNA (1)...(19): siRNA sense strand
uccaaacaguucucaguga

SEQ ID NO: 951585 - RNA, 19 nt, Homo sapiens
  misc_RNA (1)...(19): siRNA sense strand
cagacccacuccaauucua

SEQ ID NO: 951586 - RNA, 19 nt, Homo sapiens
  misc_RNA (1)...(19): siRNA sense strand
caaacaguucucagugaaa

SEQ ID NO: 951587 - RNA, 19 nt, Homo sapiens
  misc_RNA (1)...(19): siRNA sense strand
guuugucccuucuuaguuc

SEQ ID NO: 951588 - RNA, 19 nt, Homo sapiens
  misc_RNA (1)...(19): siRNA sense strand
aguccacgaugccgagaua

SEQ ID NO: 951589 - RNA, 19 nt, Homo sapiens
  misc_RNA (1)...(19): siRNA sense strand
ggagcccaccgacuuuauu

SEQ ID NO: 951590 - RNA, 19 nt, Homo sapiens
  misc_RNA (1)...(19): siRNA sense strand
uuauuaaccugcacaaugc

SEQ ID NO: 951591 - RNA, 19 nt, Homo sapiens
  misc_RNA (1)...(19): siRNA sense strand
gcaauaugugcagcucuaa

SEQ ID NO: 951592 - RNA, 19 nt, Homo sapiens
  misc_RNA (1)...(19): siRNA sense strand
ggucaaccccacagacuua

SEQ ID NO: 951593 - RNA, 19 nt, Homo sapiens
  misc_RNA (1)...(19): siRNA sense strand
aagaacagacagcaagaaa

SEQ ID NO: 951594 - RNA, 19 nt, Homo sapiens
  misc_RNA (1)...(19): siRNA sense strand
ccagacaacauauggaaca

SEQ ID NO: 951595 - RNA, 19 nt, Homo sapiens
  misc_RNA (1)...(19): siRNA sense strand
gaacaucuugccagacaac

SEQ ID NO: 951596 - RNA, 19 nt, Homo sapiens
  misc_RNA (1)...(19): siRNA sense strand
gaaugcacccagaucaaag

SEQ ID NO: 951597 - RNA, 19 nt, Homo sapiens
  misc_RNA (1)...(19): siRNA sense strand
gaaagagggcaaaacagaa

SEQ ID NO: 951598 - RNA, 19 nt, Homo sapiens
  misc_RNA (1)...(19): siRNA sense strand
ugagagagaaauuggauag

SEQ ID NO: 951599 - RNA, 19 nt, Homo sapiens
  misc_RNA (1)...(19): siRNA sense strand
ccaaauacaaggugaccau

SEQ ID NO: 951600 - RNA, 19 nt, Homo sapiens
  misc_RNA (1)...(19): siRNA sense strand
augcugaacuacuuggaaa

SEQ ID NO: 951601 - RNA, 19 nt, Homo sapiens
  misc_RNA (1)...(19): siRNA sense strand
gacauccagagacauuuaa

SEQ ID NO: 951602 - RNA, 19 nt, Homo sapiens
  misc_RNA (1)...(19): siRNA sense strand
ccaaagcaguaggagaaca

SEQ ID NO: 951603 - RNA, 19 nt, Homo sapiens
  misc_RNA (1)...(19): siRNA sense strand
caccaccaguccuuccauu

SEQ ID NO: 951604 - RNA, 19 nt, Homo sapiens
  misc_RNA (1)...(19): siRNA sense strand
gauccuggcgaccaaacaa

SEQ ID NO: 951605 - RNA, 19 nt, Homo sapiens
  misc_RNA (1)...(19): siRNA sense strand
aggcuuggcuuaaacuuac

SEQ ID NO: 951606 - RNA, 19 nt, Homo sapiens
  misc_RNA (1)...(19): siRNA sense strand
uuuauuaaccugcacaaug

SEQ ID NO: 951607 - RNA, 19 nt, Homo sapiens
  misc_RNA (1)...(19): siRNA sense strand
acacauuucaguuugauca

SEQ ID NO: 951608 - RNA, 19 nt, Homo sapiens
  misc_RNA (1)...(19): siRNA sense strand
caaauacaaggugaccauu

SEQ ID NO: 951609 - RNA, 19 nt, Homo sapiens
  misc_RNA (1)...(19): siRNA sense strand
aaacacacuacucacaaga

SEQ ID NO: 951610 - RNA, 19 nt, Homo sapiens
  misc_RNA (1)...(19): siRNA sense strand
ggaagacggaaagcagcua

SEQ ID NO: 951611 - RNA, 19 nt, Homo sapiens
  misc_RNA (1)...(19): siRNA sense strand
uaggcuuggcuuaaacuua

SEQ ID NO: 951612 - RNA, 19 nt, Homo sapiens
  misc_RNA (1)...(19): siRNA sense strand
aauacaaggugaccauugc

SEQ ID NO: 951613 - RNA, 19 nt, Homo sapiens
  misc_RNA (1)...(19): siRNA sense strand
cagaggcugccgugaaaga

SEQ ID NO: 951614 - RNA, 19 nt, Homo sapiens
  misc_RNA (1)...(19): siRNA sense strand
ggaacagaaagaacagaca

SEQ ID NO: 951615 - RNA, 19 nt, Homo sapiens
  misc_RNA (1)...(19): siRNA sense strand
caaagcaguaggagaacau

SEQ ID NO: 951616 - RNA, 19 nt, Homo sapiens
  misc_RNA (1)...(19): siRNA sense strand
ccuacucucugaacucucu

SEQ ID NO: 951617 - RNA, 19 nt, Homo sapiens
  misc_RNA (1)...(19): siRNA sense strand
uggagucaguagccaauuc

SEQ ID NO: 951618 - RNA, 19 nt, Homo sapiens
  misc_RNA (1)...(19): siRNA sense strand
ccuccuuacuuccuugguu

SEQ ID NO: 951619 - RNA, 19 nt, Homo sapiens
  misc_RNA (1)...(19): siRNA sense strand
gacggaaagcagcuaaugu

SEQ ID NO: 951620 - RNA, 19 nt, Homo sapiens
  misc_RNA (1)...(19): siRNA sense strand
gaagagcaaaaucaaagaa

SEQ ID NO: 951621 - RNA, 19 nt, Homo sapiens
  misc_RNA (1)...(19): siRNA sense strand
gagaagagcaaaaucaaag

SEQ ID NO: 951622 - RNA, 19 nt, Homo sapiens
  misc_RNA (1)...(19): siRNA sense strand
aaauacaaggugaccauug

SEQ ID NO: 951623 - RNA, 19 nt, Homo sapiens
  misc_RNA (1)...(19): siRNA sense strand
agccaaagcaguaggagaa

SEQ ID NO: 951624 - RNA, 19 nt, Homo sapiens
  misc_RNA (1)...(19): siRNA sense strand
ggcggauucuggccaagga

SEQ ID NO: 951625 - RNA, 19 nt, Homo sapiens
  misc_RNA (1)...(19): siRNA sense strand
acacacuacucacaagaac

SEQ ID NO: 951626 - RNA, 19 nt, Homo sapiens
  misc_RNA (1)...(19): siRNA sense strand
uaagcacuuuccaaacagu

SEQ ID NO: 951627 - RNA, 19 nt, Homo sapiens
  misc_RNA (1)...(19): siRNA sense strand
ccaccgacuuuauuaaccu

SEQ ID NO: 951628 - RNA, 19 nt, Homo sapiens
  misc_RNA (1)...(19): siRNA sense strand
aaacagaaaagacagacua

SEQ ID NO: 951629 - RNA, 19 nt, Homo sapiens
  misc_RNA (1)...(19): siRNA sense strand
ugaaaugcugaacuacuug

SEQ ID NO: 951630 - RNA, 19 nt, Homo sapiens
  misc_RNA (1)...(19): siRNA sense strand
ccaccaguccuuccauuac

SEQ ID NO: 951631 - RNA, 19 nt, Homo sapiens
  misc_RNA (1)...(19): siRNA sense strand
agugugggcuuguucucaa

SEQ ID NO: 951632 - RNA, 19 nt, Homo sapiens
  misc_RNA (1)...(19): siRNA sense strand
guucuacuuccaaauacaa

SEQ ID NO: 951633 - RNA, 19 nt, Homo sapiens
  misc_RNA (1)...(19): siRNA sense strand
ugaaagagggcaaaacaga

SEQ ID NO: 951634 - RNA, 19 nt, Homo sapiens
  misc_RNA (1)...(19): siRNA sense strand
cuucaccacucgcaacagu

SEQ ID NO: 951635 - RNA, 19 nt, Homo sapiens
  misc_RNA (1)...(19): siRNA sense strand
cagaaagaacagacagcaa

SEQ ID NO: 951636 - RNA, 19 nt, Homo sapiens
  misc_RNA (1)...(19): siRNA sense strand
cuaagcacuuuccaaacag

SEQ ID NO: 951637 - RNA, 19 nt, Homo sapiens
  misc_RNA (1)...(19): siRNA sense strand
ccacuaaccaccaguacac

SEQ ID NO: 951638 - RNA, 19 nt, Homo sapiens
  misc_RNA (1)...(19): siRNA sense strand
aaagaacagacagcaagaa

SEQ ID NO: 951639 - RNA, 19 nt, Homo sapiens
  misc_RNA (1)...(19): siRNA sense strand
ggccaagguggagugauaa

SEQ ID NO: 951640 - RNA, 19 nt, Homo sapiens
  misc_RNA (1)...(19): siRNA sense strand
gacaugccaacucggagaa

SEQ ID NO: 951641 - RNA, 19 nt, Homo sapiens
  misc_RNA (1)...(19): siRNA sense strand
gcgaccaaacaaaucugua

SEQ ID NO: 951642 - RNA, 19 nt, Homo sapiens
  misc_RNA (1)...(19): siRNA sense strand
ucacccuccuuacuuccuu

SEQ ID NO: 951643 - RNA, 19 nt, Homo sapiens
  misc_RNA (1)...(19): siRNA sense strand
cuucuuaguucuacuucca

SEQ ID NO: 951644 - RNA, 19 nt, Homo sapiens
  misc_RNA (1)...(19): siRNA sense strand
cuccagacccacuccaauu

SEQ ID NO: 951645 - RNA, 19 nt, Homo sapiens
  misc_RNA (1)...(19): siRNA sense strand
gggagcccaccgacuuuau

SEQ ID NO: 951646 - RNA, 19 nt, Homo sapiens
  misc_RNA (1)...(19): siRNA sense strand
cuuugggacuccggcaaua

SEQ ID NO: 951647 - RNA, 19 nt, Homo sapiens
  misc_RNA (1)...(19): siRNA sense strand
gcgaccaguuguguuauua

SEQ ID NO: 951648 - RNA, 19 nt, Homo sapiens
  misc_RNA (1)...(19): siRNA sense strand
guggagaccuucaagaaag

SEQ ID NO: 951649 - RNA, 19 nt, Homo sapiens
  misc_RNA (1)...(19): siRNA sense strand
ggacuacaacaccagguuu

SEQ ID NO: 951650 - RNA, 19 nt, Homo sapiens
  misc_RNA (1)...(19): siRNA sense strand
gaccaguuguguuauuauc

SEQ ID NO: 951651 - RNA, 19 nt, Homo sapiens
  misc_RNA (1)...(19): siRNA sense strand
ccaagacgagcaucacguu

SEQ ID NO: 951652 - RNA, 19 nt, Homo sapiens
  misc_RNA (1)...(19): siRNA sense strand
aggaccagcucaaggagaa

SEQ ID NO: 951653 - RNA, 19 nt, Homo sapiens
  misc_RNA (1)...(19): siRNA sense strand
ccgacuaccuggcacagau

SEQ ID NO: 951654 - RNA, 19 nt, Homo sapiens
  misc_RNA (1)...(19): siRNA sense strand
uggagaccuucaagaaaga

SEQ ID NO: 951655 - RNA, 19 nt, Homo sapiens
  misc_RNA (1)...(19): siRNA sense strand
cguggagaccuucaagaaa

SEQ ID NO: 951656 - RNA, 19 nt, Homo sapiens
  misc_RNA (1)...(19): siRNA sense strand
gccugcagcuggugaugug

SEQ ID NO: 951657 - RNA, 19 nt, Homo sapiens
  misc_RNA (1)...(19): siRNA sense strand
uacgcgaccaguuguguua

SEQ ID NO: 951658 - RNA, 19 nt, Homo sapiens
  misc_RNA (1)...(19): siRNA sense strand
gaccuucaagaaagaguug

SEQ ID NO: 951659 - RNA, 19 nt, Homo sapiens
  misc_RNA (1)...(19): siRNA sense strand
cgcgaccaguuguguuauu

SEQ ID NO: 951660 - RNA, 19 nt, Homo sapiens
  misc_RNA (1)...(19): siRNA sense strand
ccaguuguguuauuaucac

SEQ ID NO: 951661 - RNA, 19 nt, Homo sapiens
  misc_RNA (1)...(19): siRNA sense strand
guacgcgaccaguuguguu

SEQ ID NO: 951662 - RNA, 19 nt, Homo sapiens
  misc_RNA (1)...(19): siRNA sense strand
caagcgcucccucaggaau

SEQ ID NO: 951663 - RNA, 19 nt, Homo sapiens
  misc_RNA (1)...(19): siRNA sense strand
ucguggagaccuucaagaa

SEQ ID NO: 951664 - RNA, 19 nt, Homo sapiens
  misc_RNA (1)...(19): siRNA sense strand
gcugaugggugcugauucu

SEQ ID NO: 951665 - RNA, 19 nt, Homo sapiens
  misc_RNA (1)...(19): siRNA sense strand
gcucugugcugccaugcaa

SEQ ID NO: 951666 - RNA, 19 nt, Homo sapiens
  misc_RNA (1)...(19): siRNA sense strand
ggccaggucuugugaaagg

SEQ ID NO: 951667 - RNA, 19 nt, Homo sapiens
  misc_RNA (1)...(19): siRNA sense strand
gucaucaccuuucccaugu

SEQ ID NO: 951668 - RNA, 19 nt, Homo sapiens
  misc_RNA (1)...(19): siRNA sense strand
cauguuccauugguuagaa

SEQ ID NO: 951669 - RNA, 19 nt, Homo sapiens
  misc_RNA (1)...(19): siRNA sense strand
ucaccggagucaaguguca

SEQ ID NO: 951670 - RNA, 19 nt, Homo sapiens
  misc_RNA (1)...(19): siRNA sense strand
caucaccuuucccauguuc

SEQ ID NO: 951671 - RNA, 19 nt, Homo sapiens
  misc_RNA (1)...(19): siRNA sense strand
agucaagugucaucaccuu

SEQ ID NO: 951672 - RNA, 19 nt, Homo sapiens
  misc_RNA (1)...(19): siRNA sense strand
ucaagugucaucaccuuuc

SEQ ID NO: 951673 - RNA, 19 nt, Homo sapiens
  misc_RNA (1)...(19): siRNA sense strand
caggucuugugaaagguaa

SEQ ID NO: 951674 - RNA, 19 nt, Homo sapiens
  misc_RNA (1)...(19): siRNA sense strand
gugcugccaugcaaauguc

SEQ ID NO: 951675 - RNA, 19 nt, Homo sapiens
  misc_RNA (1)...(19): siRNA sense strand
ccaggucuugugaaaggua

SEQ ID NO: 951676 - RNA, 19 nt, Homo sapiens
  misc_RNA (1)...(19): siRNA sense strand
ccucaucaccggagucaag

SEQ ID NO: 951677 - RNA, 19 nt, Homo sapiens
  misc_RNA (1)...(19): siRNA sense strand
ucccauguuccauugguua

SEQ ID NO: 951678 - RNA, 19 nt, Homo sapiens
  misc_RNA (1)...(19): siRNA sense strand
ggaccugucuuuacuguuu

SEQ ID NO: 951679 - RNA, 19 nt, Homo sapiens
  misc_RNA (1)...(19): siRNA sense strand
ggacuaacuuugaugaauu

SEQ ID NO: 951680 - RNA, 19 nt, Homo sapiens
  misc_RNA (1)...(19): siRNA sense strand
gaaggaaggcucaucuaua

SEQ ID NO: 951681 - RNA, 19 nt, Homo sapiens
  misc_RNA (1)...(19): siRNA sense strand
gaagaggccuguggauauu

SEQ ID NO: 951682 - RNA, 19 nt, Homo sapiens
  misc_RNA (1)...(19): siRNA sense strand
caucacagcuucuucagau

SEQ ID NO: 951683 - RNA, 19 nt, Homo sapiens
  misc_RNA (1)...(19): siRNA sense strand
acacacaggucuuauuaug

SEQ ID NO: 951684 - RNA, 19 nt, Homo sapiens
  misc_RNA (1)...(19): siRNA sense strand
gugaaagucugggauguaa

SEQ ID NO: 951685 - RNA, 19 nt, Homo sapiens
  misc_RNA (1)...(19): siRNA sense strand
caccacaucuucuugauau

SEQ ID NO: 951686 - RNA, 19 nt, Homo sapiens
  misc_RNA (1)...(19): siRNA sense strand
gaagacuaauugugucaug

SEQ ID NO: 951687 - RNA, 19 nt, Homo sapiens
  misc_RNA (1)...(19): siRNA sense strand
gagcagcgacugacuuuga

SEQ ID NO: 951688 - RNA, 19 nt, Homo sapiens
  misc_RNA (1)...(19): siRNA sense strand
gguacgcugugccaaauuu

SEQ ID NO: 951689 - RNA, 19 nt, Homo sapiens
  misc_RNA (1)...(19): siRNA sense strand
acacaggucuuauuaugga

SEQ ID NO: 951690 - RNA, 19 nt, Homo sapiens
  misc_RNA (1)...(19): siRNA sense strand
gaaagucugggauguaaga

SEQ ID NO: 951691 - RNA, 19 nt, Homo sapiens
  misc_RNA (1)...(19): siRNA sense strand
ucacagcgguggaguuaau

SEQ ID NO: 951692 - RNA, 19 nt, Homo sapiens
  misc_RNA (1)...(19): siRNA sense strand
gaugguacccuuaagauuc

SEQ ID NO: 951693 - RNA, 19 nt, Homo sapiens
  misc_RNA (1)...(19): siRNA sense strand
gauggaagacuaauugugu

SEQ ID NO: 951694 - RNA, 19 nt, Homo sapiens
  misc_RNA (1)...(19): siRNA sense strand
cugaaagacugccuugaaa

SEQ ID NO: 951695 - RNA, 19 nt, Homo sapiens
  misc_RNA (1)...(19): siRNA sense strand
ggaguuaauugcauaucau

SEQ ID NO: 951696 - RNA, 19 nt, Homo sapiens
  misc_RNA (1)...(19): siRNA sense strand
aaacagaagacaugaguga

SEQ ID NO: 951697 - RNA, 19 nt, Homo sapiens
  misc_RNA (1)...(19): siRNA sense strand
gaagacaaauccauaaaag

SEQ ID NO: 951698 - RNA, 19 nt, Homo sapiens
  misc_RNA (1)...(19): siRNA sense strand
gacuaacuuugaugaauug

SEQ ID NO: 951699 - RNA, 19 nt, Homo sapiens
  misc_RNA (1)...(19): siRNA sense strand
ugaagaggccuguggauau

SEQ ID NO: 951700 - RNA, 19 nt, Homo sapiens
  misc_RNA (1)...(19): siRNA sense strand
gcugaaagacugccuugaa

SEQ ID NO: 951701 - RNA, 19 nt, Homo sapiens
  misc_RNA (1)...(19): siRNA sense strand
gaacaaauuacuacagcau

SEQ ID NO: 951702 - RNA, 19 nt, Homo sapiens
  misc_RNA (1)...(19): siRNA sense strand
gguaaucgauuugcagauc

SEQ ID NO: 951703 - RNA, 19 nt, Homo sapiens
  misc_RNA (1)...(19): siRNA sense strand
aaggaaggcucaucuauac

SEQ ID NO: 951704 - RNA, 19 nt, Homo sapiens
  misc_RNA (1)...(19): siRNA sense strand
cuaauugugucauguagug

SEQ ID NO: 951705 - RNA, 19 nt, Homo sapiens
  misc_RNA (1)...(19): siRNA sense strand
ugcuagagcuuacagauau

SEQ ID NO: 951706 - RNA, 19 nt, Homo sapiens
  misc_RNA (1)...(19): siRNA sense strand
gcucaucuauacacuucaa

SEQ ID NO: 951707 - RNA, 19 nt, Homo sapiens
  misc_RNA (1)...(19): siRNA sense strand
guucacagcgguggaguua

SEQ ID NO: 951708 - RNA, 19 nt, Homo sapiens
  misc_RNA (1)...(19): siRNA sense strand
gauguaagagugaacaaau

SEQ ID NO: 951709 - RNA, 19 nt, Homo sapiens
  misc_RNA (1)...(19): siRNA sense strand
ggauaccuuucucaugcua

SEQ ID NO: 951710 - RNA, 19 nt, Homo sapiens
  misc_RNA (1)...(19): siRNA sense strand
gacuuuaacccuaguggua

SEQ ID NO: 951711 - RNA, 19 nt, Homo sapiens
  misc_RNA (1)...(19): siRNA sense strand
cgccagcgcuuccuguauu

SEQ ID NO: 951712 - RNA, 19 nt, Homo sapiens
  misc_RNA (1)...(19): siRNA sense strand
gacucuggauuccugauaa

SEQ ID NO: 951713 - RNA, 19 nt, Homo sapiens
  misc_RNA (1)...(19): siRNA sense strand
ugaauugcauuguaaaggu

SEQ ID NO: 951714 - RNA, 19 nt, Homo sapiens
  misc_RNA (1)...(19): siRNA sense strand
gauggccaguuucuagcua

SEQ ID NO: 951715 - RNA, 19 nt, Homo sapiens
  misc_RNA (1)...(19): siRNA sense strand
cuugaacccuuccuuaaug

SEQ ID NO: 951716 - RNA, 19 nt, Homo sapiens
  misc_RNA (1)...(19): siRNA sense strand
ucauacagcuccaguucga

SEQ ID NO: 951717 - RNA, 19 nt, Homo sapiens
  misc_RNA (1)...(19): siRNA sense strand
gacagaggauaagcugaaa

SEQ ID NO: 951718 - RNA, 19 nt, Homo sapiens
  misc_RNA (1)...(19): siRNA sense strand
ggaggacuaacuuugauga

SEQ ID NO: 951719 - RNA, 19 nt, Homo sapiens
  misc_RNA (1)...(19): siRNA sense strand
gcuacugcuucuugggaua

SEQ ID NO: 951720 - RNA, 19 nt, Homo sapiens
  misc_RNA (1)...(19): siRNA sense strand
ugacagaggauaagcugaa

SEQ ID NO: 951721 - RNA, 19 nt, Homo sapiens
  misc_RNA (1)...(19): siRNA sense strand
gugaagaggccuguggaua

SEQ ID NO: 951722 - RNA, 19 nt, Homo sapiens
  misc_RNA (1)...(19): siRNA sense strand
gaaaaucagcaaaagcuuu

SEQ ID NO: 951723 - RNA, 19 nt, Homo sapiens
  misc_RNA (1)...(19): siRNA sense strand
gaaagucaaaggagcauac

SEQ ID NO: 951724 - RNA, 19 nt, Homo sapiens
  misc_RNA (1)...(19): siRNA sense strand
uaaugucaccagaauguuu

SEQ ID NO: 951725 - RNA, 19 nt, Homo sapiens
  misc_RNA (1)...(19): siRNA sense strand
gcucauacagcuccaguuc

SEQ ID NO: 951726 - RNA, 19 nt, Homo sapiens
  misc_RNA (1)...(19): siRNA sense strand
gaacccuuccuuaauguca

SEQ ID NO: 951727 - RNA, 19 nt, Homo sapiens
  misc_RNA (1)...(19): siRNA sense strand
guugagacuguagaaauua

SEQ ID NO: 951728 - RNA, 19 nt, Homo sapiens
  misc_RNA (1)...(19): siRNA sense strand
aguugagacuguagaaauu

SEQ ID NO: 951729 - RNA, 19 nt, Homo sapiens
  misc_RNA (1)...(19): siRNA sense strand
gcugauggccaguuucuag

SEQ ID NO: 951730 - RNA, 19 nt, Homo sapiens
  misc_RNA (1)...(19): siRNA sense strand
gaaagacugccuugaaaau

SEQ ID NO: 951731 - RNA, 19 nt, Homo sapiens
  misc_RNA (1)...(19): siRNA sense strand
cagaggauaagcugaaaga

SEQ ID NO: 951732 - RNA, 19 nt, Homo sapiens
  misc_RNA (1)...(19): siRNA sense strand
cgcugugacugaugcuuua

SEQ ID NO: 951733 - RNA, 19 nt, Homo sapiens
  misc_RNA (1)...(19): siRNA sense strand
ccaccacaucuucuugaua

SEQ ID NO: 951734 - RNA, 19 nt, Homo sapiens
  misc_RNA (1)...(19): siRNA sense strand
ggguaacuaucucaucaca

SEQ ID NO: 951735 - RNA, 19 nt, Homo sapiens
  misc_RNA (1)...(19): siRNA sense strand
gaucaaacugugaaagucu

SEQ ID NO: 951736 - RNA, 19 nt, Homo sapiens
  misc_RNA (1)...(19): siRNA sense strand
ugacuuugacagaggauaa

SEQ ID NO: 951737 - RNA, 19 nt, Homo sapiens
  misc_RNA (1)...(19): siRNA sense strand
auccaaagcuugagguaau

SEQ ID NO: 951738 - RNA, 19 nt, Homo sapiens
  misc_RNA (1)...(19): siRNA sense strand
cacaucuucuugauaucua

SEQ ID NO: 951739 - RNA, 19 nt, Homo sapiens
  misc_RNA (1)...(19): siRNA sense strand
cuacagcauuaccaaguuc

SEQ ID NO: 951740 - RNA, 19 nt, Homo sapiens
  misc_RNA (1)...(19): siRNA sense strand
gaauuuaaagcucauacag

SEQ ID NO: 951741 - RNA, 19 nt, Homo sapiens
  misc_RNA (1)...(19): siRNA sense strand
gaggauaagcugaaagacu

SEQ ID NO: 951742 - RNA, 19 nt, Homo sapiens
  misc_RNA (1)...(19): siRNA sense strand
ucggguaacuaucucauca

SEQ ID NO: 951743 - RNA, 19 nt, Homo sapiens
  misc_RNA (1)...(19): siRNA sense strand
ucuggagcguuauuucaaa

SEQ ID NO: 951744 - RNA, 19 nt, Homo sapiens
  misc_RNA (1)...(19): siRNA sense strand
agacuaauugugucaugua

SEQ ID NO: 951745 - RNA, 19 nt, Homo sapiens
  misc_RNA (1)...(19): siRNA sense strand
gcuagagcuuacagauaug

SEQ ID NO: 951746 - RNA, 19 nt, Homo sapiens
  misc_RNA (1)...(19): siRNA sense strand
gaacaccacauccccauga

SEQ ID NO: 951747 - RNA, 19 nt, Homo sapiens
  misc_RNA (1)...(19): siRNA sense strand
guaaucgauuugcagaucu

SEQ ID NO: 951748 - RNA, 19 nt, Homo sapiens
  misc_RNA (1)...(19): siRNA sense strand
ggauguaagagugaacaaa

SEQ ID NO: 951749 - RNA, 19 nt, Homo sapiens
  misc_RNA (1)...(19): siRNA sense strand
ugagugaccuccccuguga

SEQ ID NO: 951750 - RNA, 19 nt, Homo sapiens
  misc_RNA (1)...(19): siRNA sense strand
gaaaacagaagacaugagu

SEQ ID NO: 951751 - RNA, 19 nt, Homo sapiens
  misc_RNA (1)...(19): siRNA sense strand
uauggaggacuaacuuuga

SEQ ID NO: 951752 - RNA, 19 nt, Homo sapiens
  misc_RNA (1)...(19): siRNA sense strand
cgguggaguuaauugcaua

SEQ ID NO: 951753 - RNA, 19 nt, Homo sapiens
  misc_RNA (1)...(19): siRNA sense strand
uggaguuaauugcauauca

SEQ ID NO: 951754 - RNA, 19 nt, Homo sapiens
  misc_RNA (1)...(19): siRNA sense strand
ggagagcuauuugcaucag

SEQ ID NO: 951755 - RNA, 19 nt, Homo sapiens
  misc_RNA (1)...(19): siRNA sense strand
gaaggcucaucuauacacu

SEQ ID NO: 951756 - RNA, 19 nt, Homo sapiens
  misc_RNA (1)...(19): siRNA sense strand
gacuaauugugucauguag

SEQ ID NO: 951757 - RNA, 19 nt, Homo sapiens
  misc_RNA (1)...(19): siRNA sense strand
aagcugcgaucaccuccuu

SEQ ID NO: 951758 - RNA, 19 nt, Homo sapiens
  misc_RNA (1)...(19): siRNA sense strand
agaaggaaggcucaucuau

SEQ ID NO: 951759 - RNA, 19 nt, Homo sapiens
  misc_RNA (1)...(19): siRNA sense strand
ugucauguagugaggauaa

SEQ ID NO: 951760 - RNA, 19 nt, Homo sapiens
  misc_RNA (1)...(19): siRNA sense strand
ucagaugguacccuuaaga

SEQ ID NO: 951761 - RNA, 19 nt, Homo sapiens
  misc_RNA (1)...(19): siRNA sense strand
cuggauuccugauaagaga

SEQ ID NO: 951762 - RNA, 19 nt, Homo sapiens
  misc_RNA (1)...(19): siRNA sense strand
ggaaggcucaucuauacac

SEQ ID NO: 951763 - RNA, 19 nt, Homo sapiens
  misc_RNA (1)...(19): siRNA sense strand
cuucucagauuccguugga

SEQ ID NO: 951764 - RNA, 19 nt, Homo sapiens
  misc_RNA (1)...(19): siRNA sense strand
gacagaaccgugagacucu

SEQ ID NO: 951765 - RNA, 19 nt, Homo sapiens
  misc_RNA (1)...(19): siRNA sense strand
aggcucaucuauacacuuc

SEQ ID NO: 951766 - RNA, 19 nt, Homo sapiens
  misc_RNA (1)...(19): siRNA sense strand
cauacgggaccugucuuua

SEQ ID NO: 951767 - RNA, 19 nt, Homo sapiens
  misc_RNA (1)...(19): siRNA sense strand
gcgguggaguuaauugcau

SEQ ID NO: 951768 - RNA, 19 nt, Homo sapiens
  misc_RNA (1)...(19): siRNA sense strand
gccuguggauauuucuuga

SEQ ID NO: 951769 - RNA, 19 nt, Homo sapiens
  misc_RNA (1)...(19): siRNA sense strand
cuucagaugguacccuuaa

SEQ ID NO: 951770 - RNA, 19 nt, Homo sapiens
  misc_RNA (1)...(19): siRNA sense strand
ccacauggaaacuuauugg

SEQ ID NO: 951771 - RNA, 19 nt, Homo sapiens
  misc_RNA (1)...(19): siRNA sense strand
gauaagagaggaaaauucu

SEQ ID NO: 951772 - RNA, 19 nt, Homo sapiens
  misc_RNA (1)...(19): siRNA sense strand
cuuaaugucaccagaaugu

SEQ ID NO: 951773 - RNA, 19 nt, Homo sapiens
  misc_RNA (1)...(19): siRNA sense strand
aggacuaacuuugaugaau

SEQ ID NO: 951774 - RNA, 19 nt, Homo sapiens
  misc_RNA (1)...(19): siRNA sense strand
acuacagcauuaccaaguu

SEQ ID NO: 951775 - RNA, 19 nt, Homo sapiens
  misc_RNA (1)...(19): siRNA sense strand
ugaucaaacugugaaaguc

SEQ ID NO: 951776 - RNA, 19 nt, Homo sapiens
  misc_RNA (1)...(19): siRNA sense strand
ucugaagacaaauccauaa

SEQ ID NO: 951777 - RNA, 19 nt, Homo sapiens
  misc_RNA (1)...(19): siRNA sense strand
gaggacuaacuuugaugaa

SEQ ID NO: 951778 - RNA, 19 nt, Homo sapiens
  misc_RNA (1)...(19): siRNA sense strand
agucagauguggaugaaug

SEQ ID NO: 951779 - RNA, 19 nt, Homo sapiens
  misc_RNA (1)...(19): siRNA sense strand
guggaugaaugcagugcua

SEQ ID NO: 951780 - RNA, 19 nt, Homo sapiens
  misc_RNA (1)...(19): siRNA sense strand
gcaccuaccgaaccaucua

SEQ ID NO: 951781 - RNA, 19 nt, Homo sapiens
  misc_RNA (1)...(19): siRNA sense strand
ugauguggcuucugguguu

SEQ ID NO: 951782 - RNA, 19 nt, Homo sapiens
  misc_RNA (1)...(19): siRNA sense strand
ccagucagauguggaugaa

SEQ ID NO: 951783 - RNA, 19 nt, Homo sapiens
  misc_RNA (1)...(19): siRNA sense strand
ggaguggacagugcaauga

SEQ ID NO: 951784 - RNA, 19 nt, Homo sapiens
  misc_RNA (1)...(19): siRNA sense strand
acagugcaaugaaggaaga

SEQ ID NO: 951785 - RNA, 19 nt, Homo sapiens
  misc_RNA (1)...(19): siRNA sense strand
ggacagugcaaugaaggaa

SEQ ID NO: 951786 - RNA, 19 nt, Homo sapiens
  misc_RNA (1)...(19): siRNA sense strand
gauguggcuucugguguug

SEQ ID NO: 951787 - RNA, 19 nt, Homo sapiens
  misc_RNA (1)...(19): siRNA sense strand
gaugaaugcagugcuagga

SEQ ID NO: 951788 - RNA, 19 nt, Homo sapiens
  misc_RNA (1)...(19): siRNA sense strand
guccugcuccugcaagaaa

SEQ ID NO: 951789 - RNA, 19 nt, Homo sapiens
  misc_RNA (1)...(19): siRNA sense strand
uaccgaaccaucuauagga

SEQ ID NO: 951790 - RNA, 19 nt, Homo sapiens
  misc_RNA (1)...(19): siRNA sense strand
gcgagcagauuuccuuccu

SEQ ID NO: 951791 - RNA, 19 nt, Homo sapiens
  misc_RNA (1)...(19): siRNA sense strand
ugagcgagcagauuuccuu

SEQ ID NO: 951792 - RNA, 19 nt, Homo sapiens
  misc_RNA (1)...(19): siRNA sense strand
gaguggacagugcaaugaa

SEQ ID NO: 951793 - RNA, 19 nt, Homo sapiens
  misc_RNA (1)...(19): siRNA sense strand
ucccugagcgagcagauuu

SEQ ID NO: 951794 - RNA, 19 nt, Homo sapiens
  misc_RNA (1)...(19): siRNA sense strand
ggccuguggagcagcaaua

SEQ ID NO: 951795 - RNA, 19 nt, Homo sapiens
  misc_RNA (1)...(19): siRNA sense strand
acacuugccagucagaugu

SEQ ID NO: 951796 - RNA, 19 nt, Homo sapiens
  misc_RNA (1)...(19): siRNA sense strand
gccagucagauguggauga

SEQ ID NO: 951797 - RNA, 19 nt, Homo sapiens
  misc_RNA (1)...(19): siRNA sense strand
aggaggugcugcugaugug

SEQ ID NO: 951798 - RNA, 19 nt, Homo sapiens
  misc_RNA (1)...(19): siRNA sense strand
guauagaucugccuaccuu

SEQ ID NO: 951799 - RNA, 19 nt, Homo sapiens
  misc_RNA (1)...(19): siRNA sense strand
gugguuaacuccuuguguu

SEQ ID NO: 951800 - RNA, 19 nt, Homo sapiens
  misc_RNA (1)...(19): siRNA sense strand
ggcauucaguguucuguau

SEQ ID NO: 951801 - RNA, 19 nt, Homo sapiens
  misc_RNA (1)...(19): siRNA sense strand
cgucagcucgguugcuuua

SEQ ID NO: 951802 - RNA, 19 nt, Homo sapiens
  misc_RNA (1)...(19): siRNA sense strand
gcauucaguguucuguaua

SEQ ID NO: 951803 - RNA, 19 nt, Homo sapiens
  misc_RNA (1)...(19): siRNA sense strand
cagcucgguugcuuuauca

SEQ ID NO: 951804 - RNA, 19 nt, Homo sapiens
  misc_RNA (1)...(19): siRNA sense strand
ucaguguucuguauagauc

SEQ ID NO: 951805 - RNA, 19 nt, Homo sapiens
  misc_RNA (1)...(19): siRNA sense strand
cacauggcauucaguguuc

SEQ ID NO: 951806 - RNA, 19 nt, Homo sapiens
  misc_RNA (1)...(19): siRNA sense strand
cugccuaccuuugugaauu

SEQ ID NO: 951807 - RNA, 19 nt, Homo sapiens
  misc_RNA (1)...(19): siRNA sense strand
gaucugccuaccuuuguga

SEQ ID NO: 951808 - RNA, 19 nt, Homo sapiens
  misc_RNA (1)...(19): siRNA sense strand
ucagcucgguugcuuuauc

SEQ ID NO: 951809 - RNA, 19 nt, Homo sapiens
  misc_RNA (1)...(19): siRNA sense strand
cgauggugguuaacuccuu

SEQ ID NO: 951810 - RNA, 19 nt, Homo sapiens
  misc_RNA (1)...(19): siRNA sense strand
cucgguugcuuuaucauga

SEQ ID NO: 951811 - RNA, 19 nt, Homo sapiens
  misc_RNA (1)...(19): siRNA sense strand
cauucaguguucuguauag

SEQ ID NO: 951812 - RNA, 19 nt, Homo sapiens
  misc_RNA (1)...(19): siRNA sense strand
ccuacugguuauucuugaa

SEQ ID NO: 951813 - RNA, 19 nt, Homo sapiens
  misc_RNA (1)...(19): siRNA sense strand
ggauuuacacauggcauuc

SEQ ID NO: 951814 - RNA, 19 nt, Homo sapiens
  misc_RNA (1)...(19): siRNA sense strand
cuaccuuugugaauucauc

SEQ ID NO: 951815 - RNA, 19 nt, Homo sapiens
  misc_RNA (1)...(19): siRNA sense strand
gcucgguugcuuuaucaug

SEQ ID NO: 951816 - RNA, 19 nt, Homo sapiens
  misc_RNA (1)...(19): siRNA sense strand
ugccuaccuuugugaauuc

SEQ ID NO: 951817 - RNA, 19 nt, Homo sapiens
  misc_RNA (1)...(19): siRNA sense strand
guuaaccccucuuccuuug

SEQ ID NO: 951818 - RNA, 19 nt, Homo sapiens
  misc_RNA (1)...(19): siRNA sense strand
ucgguugcuuuaucaugaa

SEQ ID NO: 951819 - RNA, 19 nt, Homo sapiens
  misc_RNA (1)...(19): siRNA sense strand
gaacagaauucccagauga

SEQ ID NO: 951820 - RNA, 19 nt, Homo sapiens
  misc_RNA (1)...(19): siRNA sense strand
gaacuaugcuggugccaaa

SEQ ID NO: 951821 - RNA, 19 nt, Homo sapiens
  misc_RNA (1)...(19): siRNA sense strand
ggagagagguauaacauuc

SEQ ID NO: 951822 - RNA, 19 nt, Homo sapiens
  misc_RNA (1)...(19): siRNA sense strand
gaaagaggacaugguuaua

SEQ ID NO: 951823 - RNA, 19 nt, Homo sapiens
  misc_RNA (1)...(19): siRNA sense strand
ggacaugguuauaacucau

SEQ ID NO: 951824 - RNA, 19 nt, Homo sapiens
  misc_RNA (1)...(19): siRNA sense strand
aacaacagcuuaacagaca

SEQ ID NO: 951825 - RNA, 19 nt, Homo sapiens
  misc_RNA (1)...(19): siRNA sense strand
aaagaggacaugguuauaa

SEQ ID NO: 951826 - RNA, 19 nt, Homo sapiens
  misc_RNA (1)...(19): siRNA sense strand
aaagaaagaggacaugguu

SEQ ID NO: 951827 - RNA, 19 nt, Homo sapiens
  misc_RNA (1)...(19): siRNA sense strand
ccuuuaauccuucagauaa

SEQ ID NO: 951828 - RNA, 19 nt, Homo sapiens
  misc_RNA (1)...(19): siRNA sense strand
agaaagaggacaugguuau

SEQ ID NO: 951829 - RNA, 19 nt, Homo sapiens
  misc_RNA (1)...(19): siRNA sense strand
cagcuuaacagacagaaga

SEQ ID NO: 951830 - RNA, 19 nt, Homo sapiens
  misc_RNA (1)...(19): siRNA sense strand
gacagaagaccaaggaaca

SEQ ID NO: 951831 - RNA, 19 nt, Homo sapiens
  misc_RNA (1)...(19): siRNA sense strand
gagccgccaucaccaagug

SEQ ID NO: 951832 - RNA, 19 nt, Homo sapiens
  misc_RNA (1)...(19): siRNA sense strand
gaagaccaaggaacagaau

SEQ ID NO: 951833 - RNA, 19 nt, Homo sapiens
  misc_RNA (1)...(19): siRNA sense strand
ucaggucccagguuacuuu

SEQ ID NO: 951834 - RNA, 19 nt, Homo sapiens
  misc_RNA (1)...(19): siRNA sense strand
cuaugcuggugccaaauuu

SEQ ID NO: 951835 - RNA, 19 nt, Homo sapiens
  misc_RNA (1)...(19): siRNA sense strand
gaaauguuaguaagaacca

SEQ ID NO: 951836 - RNA, 19 nt, Homo sapiens
  misc_RNA (1)...(19): siRNA sense strand
ccaacaacagcuuaacaga

SEQ ID NO: 951837 - RNA, 19 nt, Homo sapiens
  misc_RNA (1)...(19): siRNA sense strand
aagaggacaugguuauaac

SEQ ID NO: 951838 - RNA, 19 nt, Homo sapiens
  misc_RNA (1)...(19): siRNA sense strand
ccucaaucuagaaauguua

SEQ ID NO: 951839 - RNA, 19 nt, Homo sapiens
  misc_RNA (1)...(19): siRNA sense strand
caacagcuuaacagacaga

SEQ ID NO: 951840 - RNA, 19 nt, Homo sapiens
  misc_RNA (1)...(19): siRNA sense strand
caaguguucuucccaaacc

SEQ ID NO: 951841 - RNA, 19 nt, Homo sapiens
  misc_RNA (1)...(19): siRNA sense strand
uaagaaccaacaacagcuu

SEQ ID NO: 951842 - RNA, 19 nt, Homo sapiens
  misc_RNA (1)...(19): siRNA sense strand
ccuguuuccuuuaauccuu

SEQ ID NO: 951843 - RNA, 19 nt, Homo sapiens
  misc_RNA (1)...(19): siRNA sense strand
aagaaagaggacaugguua

SEQ ID NO: 951844 - RNA, 19 nt, Homo sapiens
  misc_RNA (1)...(19): siRNA sense strand
agaauucccagaugaagau

SEQ ID NO: 951845 - RNA, 19 nt, Homo sapiens
  misc_RNA (1)...(19): siRNA sense strand
cagaauucccagaugaaga

SEQ ID NO: 951846 - RNA, 19 nt, Homo sapiens
  misc_RNA (1)...(19): siRNA sense strand
aagaaccaacaacagcuua

SEQ ID NO: 951847 - RNA, 19 nt, Homo sapiens
  misc_RNA (1)...(19): siRNA sense strand
aaaguuggaauucuagcuu

SEQ ID NO: 951848 - RNA, 19 nt, Homo sapiens
  misc_RNA (1)...(19): siRNA sense strand
guggagagagguauaacau

SEQ ID NO: 951849 - RNA, 19 nt, Homo sapiens
  misc_RNA (1)...(19): siRNA sense strand
acagacagaagaccaagga

SEQ ID NO: 951850 - RNA, 19 nt, Homo sapiens
  misc_RNA (1)...(19): siRNA sense strand
cagaagaccaaggaacaga

SEQ ID NO: 951851 - RNA, 19 nt, Homo sapiens
  misc_RNA (1)...(19): siRNA sense strand
ggugguggagagagguaua

SEQ ID NO: 951852 - RNA, 19 nt, Homo sapiens
  misc_RNA (1)...(19): siRNA sense strand
agaccaaggaacagaauuc

SEQ ID NO: 951853 - RNA, 19 nt, Homo sapiens
  misc_RNA (1)...(19): siRNA sense strand
uaugcuggugccaaauuua

SEQ ID NO: 951854 - RNA, 19 nt, Homo sapiens
  misc_RNA (1)...(19): siRNA sense strand
gaggacaugguuauaacuc

SEQ ID NO: 951855 - RNA, 19 nt, Homo sapiens
  misc_RNA (1)...(19): siRNA sense strand
gaaccaacaacagcuuaac

SEQ ID NO: 951856 - RNA, 19 nt, Homo sapiens
  misc_RNA (1)...(19): siRNA sense strand
uuaguaagaaccaacaaca

SEQ ID NO: 951857 - RNA, 19 nt, Homo sapiens
  misc_RNA (1)...(19): siRNA sense strand
gagaaacccuauaaaugua

SEQ ID NO: 951858 - RNA, 19 nt, Homo sapiens
  misc_RNA (1)...(19): siRNA sense strand
guacugaucuuauugaaca

SEQ ID NO: 951859 - RNA, 19 nt, Homo sapiens
  misc_RNA (1)...(19): siRNA sense strand
agucagagcuccaaccuua

SEQ ID NO: 951860 - RNA, 19 nt, Homo sapiens
  misc_RNA (1)...(19): siRNA sense strand
gagaaagccuucagucaga

SEQ ID NO: 951861 - RNA, 19 nt, Homo sapiens
  misc_RNA (1)...(19): siRNA sense strand
gcucagaccucacuaaaca

SEQ ID NO: 951862 - RNA, 19 nt, Homo sapiens
  misc_RNA (1)...(19): siRNA sense strand
aaucagagcucaguccuua

SEQ ID NO: 951863 - RNA, 19 nt, Homo sapiens
  misc_RNA (1)...(19): siRNA sense strand
agucagagcucagaucuua

SEQ ID NO: 951864 - RNA, 19 nt, Homo sapiens
  misc_RNA (1)...(19): siRNA sense strand
gagaaaccauauccaugua

SEQ ID NO: 951865 - RNA, 19 nt, Homo sapiens
  misc_RNA (1)...(19): siRNA sense strand
gagagaaacccuauaaaug

SEQ ID NO: 951866 - RNA, 19 nt, Homo sapiens
  misc_RNA (1)...(19): siRNA sense strand
ugaaugcuguugauuauug

SEQ ID NO: 951867 - RNA, 19 nt, Homo sapiens
  misc_RNA (1)...(19): siRNA sense strand
ggagagaaacccuauaaau

SEQ ID NO: 951868 - RNA, 19 nt, Homo sapiens
  misc_RNA (1)...(19): siRNA sense strand
gggaaagccuucagucaga

SEQ ID NO: 951869 - RNA, 19 nt, Homo sapiens
  misc_RNA (1)...(19): siRNA sense strand
guucagaucuuguuaagca

SEQ ID NO: 951870 - RNA, 19 nt, Homo sapiens
  misc_RNA (1)...(19): siRNA sense strand
gaaaccauauccauguaau

SEQ ID NO: 951871 - RNA, 19 nt, Homo sapiens
  misc_RNA (1)...(19): siRNA sense strand
ggagaaacccuaccagugu

SEQ ID NO: 951872 - RNA, 19 nt, Homo sapiens
  misc_RNA (1)...(19): siRNA sense strand
gaaaccauaugcauguaau

SEQ ID NO: 951873 - RNA, 19 nt, Homo sapiens
  misc_RNA (1)...(19): siRNA sense strand
agagaaaccuuaugcaugu

SEQ ID NO: 951874 - RNA, 19 nt, Homo sapiens
  misc_RNA (1)...(19): siRNA sense strand
gaagaaaccaaauccaugu

SEQ ID NO: 951875 - RNA, 19 nt, Homo sapiens
  misc_RNA (1)...(19): siRNA sense strand
ggagaaaccauauccaugu

SEQ ID NO: 951876 - RNA, 19 nt, Homo sapiens
  misc_RNA (1)...(19): siRNA sense strand
ucucagaccucauuaaaca

SEQ ID NO: 951877 - RNA, 19 nt, Homo sapiens
  misc_RNA (1)...(19): siRNA sense strand
gaucucagaccucauuaaa

SEQ ID NO: 951878 - RNA, 19 nt, Homo sapiens
  misc_RNA (1)...(19): siRNA sense strand
gagaaaaccuuuagugugu

SEQ ID NO: 951879 - RNA, 19 nt, Homo sapiens
  misc_RNA (1)...(19): siRNA sense strand
gcacauguacugaucuuau

SEQ ID NO: 951880 - RNA, 19 nt, Homo sapiens
  misc_RNA (1)...(19): siRNA sense strand
gagaaaccauaugcaugua

SEQ ID NO: 951881 - RNA, 19 nt, Homo sapiens
  misc_RNA (1)...(19): siRNA sense strand
guucugaccuuauucuuca

SEQ ID NO: 951882 - RNA, 19 nt, Homo sapiens
  misc_RNA (1)...(19): siRNA sense strand
gagaagccuuacccaugua

SEQ ID NO: 951883 - RNA, 19 nt, Homo sapiens
  misc_RNA (1)...(19): siRNA sense strand
ugagaaacccuaugaaugu

SEQ ID NO: 951884 - RNA, 19 nt, Homo sapiens
  misc_RNA (1)...(19): siRNA sense strand
gcuccaaccuuauucuuca

SEQ ID NO: 951885 - RNA, 19 nt, Homo sapiens
  misc_RNA (1)...(19): siRNA sense strand
gcaggaaggcuuucaguca

SEQ ID NO: 951886 - RNA, 19 nt, Homo sapiens
  misc_RNA (1)...(19): siRNA sense strand
gaaaccaaauccaugugau

SEQ ID NO: 951887 - RNA, 19 nt, Homo sapiens
  misc_RNA (1)...(19): siRNA sense strand
cagagacacuguaccagaa

SEQ ID NO: 951888 - RNA, 19 nt, Homo sapiens
  misc_RNA (1)...(19): siRNA sense strand
agagaaacccuauaaaugu

SEQ ID NO: 951889 - RNA, 19 nt, Homo sapiens
  misc_RNA (1)...(19): siRNA sense strand
gggaaaaccuuuagucaga

SEQ ID NO: 951890 - RNA, 19 nt, Homo sapiens
  misc_RNA (1)...(19): siRNA sense strand
gaaugcuguugauuauuga

SEQ ID NO: 951891 - RNA, 19 nt, Homo sapiens
  misc_RNA (1)...(19): siRNA sense strand
gcucagcucuuacccuaca

SEQ ID NO: 951892 - RNA, 19 nt, Homo sapiens
  misc_RNA (1)...(19): siRNA sense strand
guucugaucucauuaacca

SEQ ID NO: 951893 - RNA, 19 nt, Homo sapiens
  misc_RNA (1)...(19): siRNA sense strand
guauaagugugaugcaugu

SEQ ID NO: 951894 - RNA, 19 nt, Homo sapiens
  misc_RNA (1)...(19): siRNA sense strand
ggaaagccuucagcacaug

SEQ ID NO: 951895 - RNA, 19 nt, Homo sapiens
  misc_RNA (1)...(19): siRNA sense strand
ucaguaggcuuucagaucu

SEQ ID NO: 951896 - RNA, 19 nt, Homo sapiens
  misc_RNA (1)...(19): siRNA sense strand
gggaaagccuucagcacau

SEQ ID NO: 951897 - RNA, 19 nt, Homo sapiens
  misc_RNA (1)...(19): siRNA sense strand
ccauauaaaugcagugagu

SEQ ID NO: 951898 - RNA, 19 nt, Homo sapiens
  misc_RNA (1)...(19): siRNA sense strand
gagaaaccuuaugcaugua

SEQ ID NO: 951899 - RNA, 19 nt, Homo sapiens
  misc_RNA (1)...(19): siRNA sense strand
gagaaacccuaugaaugug

SEQ ID NO: 951900 - RNA, 19 nt, Homo sapiens
  misc_RNA (1)...(19): siRNA sense strand
agagaagccuuacccaugu

SEQ ID NO: 951901 - RNA, 19 nt, Homo sapiens
  misc_RNA (1)...(19): siRNA sense strand
agucagugcucagcucuua

SEQ ID NO: 951902 - RNA, 19 nt, Homo sapiens
  misc_RNA (1)...(19): siRNA sense strand
cuaugaaugugaugaaugu

SEQ ID NO: 951903 - RNA, 19 nt, Homo sapiens
  misc_RNA (1)...(19): siRNA sense strand
cacauguacugaucuuauu

SEQ ID NO: 951904 - RNA, 19 nt, Homo sapiens
  misc_RNA (1)...(19): siRNA sense strand
gaaacccuaugaaugugau

SEQ ID NO: 951905 - RNA, 19 nt, Homo sapiens
  misc_RNA (1)...(19): siRNA sense strand
ggagagaaaccauaugcau

SEQ ID NO: 951906 - RNA, 19 nt, Homo sapiens
  misc_RNA (1)...(19): siRNA sense strand
ggagagaaaccuuaugcau

SEQ ID NO: 951907 - RNA, 19 nt, Homo sapiens
  misc_RNA (1)...(19): siRNA sense strand
gugagaaacccuaugaaug

SEQ ID NO: 951908 - RNA, 19 nt, Homo sapiens
  misc_RNA (1)...(19): siRNA sense strand
agccaacucucugaacuua

SEQ ID NO: 951909 - RNA, 19 nt, Homo sapiens
  misc_RNA (1)...(19): siRNA sense strand
aauacacacuggagagaaa

SEQ ID NO: 951910 - RNA, 19 nt, Homo sapiens
  misc_RNA (1)...(19): siRNA sense strand
cauguaaucagugcaauaa

SEQ ID NO: 951911 - RNA, 19 nt, Homo sapiens
  misc_RNA (1)...(19): siRNA sense strand
gauucauacuggagagaaa

SEQ ID NO: 951912 - RNA, 19 nt, Homo sapiens
  misc_RNA (1)...(19): siRNA sense strand
agucagaauucagaccuua

SEQ ID NO: 951913 - RNA, 19 nt, Homo sapiens
  misc_RNA (1)...(19): siRNA sense strand
gugaaaagccuuaucauug

SEQ ID NO: 951914 - RNA, 19 nt, Homo sapiens
  misc_RNA (1)...(19): siRNA sense strand
uuacaucagaggauucaua

SEQ ID NO: 951915 - RNA, 19 nt, Homo sapiens
  misc_RNA (1)...(19): siRNA sense strand
cagaauucagaccuuauua

SEQ ID NO: 951916 - RNA, 19 nt, Homo sapiens
  misc_RNA (1)...(19): siRNA sense strand
ggugagaaacccuaugaau

SEQ ID NO: 951917 - RNA, 19 nt, Homo sapiens
  misc_RNA (1)...(19): siRNA sense strand
ccaaauccaugugaugagu

SEQ ID NO: 951918 - RNA, 19 nt, Homo sapiens
  misc_RNA (1)...(19): siRNA sense strand
ucagagcucagaucuuauu

SEQ ID NO: 951919 - RNA, 19 nt, Homo sapiens
  misc_RNA (1)...(19): siRNA sense strand
gaaacccuaucccugugau

SEQ ID NO: 951920 - RNA, 19 nt, Homo sapiens
  misc_RNA (1)...(19): siRNA sense strand
ccauauccauguaaucagu

SEQ ID NO: 951921 - RNA, 19 nt, Homo sapiens
  misc_RNA (1)...(19): siRNA sense strand
ccauaugcauguaaucagu

SEQ ID NO: 951922 - RNA, 19 nt, Homo sapiens
  misc_RNA (1)...(19): siRNA sense strand
gagcucaguccuuauuuua

SEQ ID NO: 951923 - RNA, 19 nt, Homo sapiens
  misc_RNA (1)...(19): siRNA sense strand
ucagaucucagaccucauu

SEQ ID NO: 951924 - RNA, 19 nt, Homo sapiens
  misc_RNA (1)...(19): siRNA sense strand
caucagagaauccauacug

SEQ ID NO: 951925 - RNA, 19 nt, Homo sapiens
  misc_RNA (1)...(19): siRNA sense strand
caucagaggauucauacug

SEQ ID NO: 951926 - RNA, 19 nt, Homo sapiens
  misc_RNA (1)...(19): siRNA sense strand
ucagagcucaguccuuauu

SEQ ID NO: 951927 - RNA, 19 nt, Homo sapiens
  misc_RNA (1)...(19): siRNA sense strand
ccaacucucugaacuuacu

SEQ ID NO: 951928 - RNA, 19 nt, Homo sapiens
  misc_RNA (1)...(19): siRNA sense strand
gaccuuauucuucaucaga

SEQ ID NO: 951929 - RNA, 19 nt, Homo sapiens
  misc_RNA (1)...(19): siRNA sense strand
gaauacacacuggagagaa

SEQ ID NO: 951930 - RNA, 19 nt, Homo sapiens
  misc_RNA (1)...(19): siRNA sense strand
ccuuaugcauguagugauu

SEQ ID NO: 951931 - RNA, 19 nt, Homo sapiens
  misc_RNA (1)...(19): siRNA sense strand
ucagagcuccaaccuuauu

SEQ ID NO: 951932 - RNA, 19 nt, Homo sapiens
  misc_RNA (1)...(19): siRNA sense strand
cagcacauguacugaucuu

SEQ ID NO: 951933 - RNA, 19 nt, Homo sapiens
  misc_RNA (1)...(19): siRNA sense strand
cacuaaacaucagagagua

SEQ ID NO: 951934 - RNA, 19 nt, Homo sapiens
  misc_RNA (1)...(19): siRNA sense strand
agagaaaccauaugcaugu

SEQ ID NO: 951935 - RNA, 19 nt, Homo sapiens
  misc_RNA (1)...(19): siRNA sense strand
ucacuaaacaucagagagu

SEQ ID NO: 951936 - RNA, 19 nt, Homo sapiens
  misc_RNA (1)...(19): siRNA sense strand
caccaacucuauucaguac

SEQ ID NO: 951937 - RNA, 19 nt, Homo sapiens
  misc_RNA (1)...(19): siRNA sense strand
gggaagaaaccaaauccau

SEQ ID NO: 951938 - RNA, 19 nt, Homo sapiens
  misc_RNA (1)...(19): siRNA sense strand
ucuaaugaaugcuguugau

SEQ ID NO: 951939 - RNA, 19 nt, Homo sapiens
  misc_RNA (1)...(19): siRNA sense strand
acacuggagagaaaccuua

SEQ ID NO: 951940 - RNA, 19 nt, Homo sapiens
  misc_RNA (1)...(19): siRNA sense strand
guucagugcagcagaaguu

SEQ ID NO: 951941 - RNA, 19 nt, Homo sapiens
  misc_RNA (1)...(19): siRNA sense strand
gaaaccuuaugcauguagu

SEQ ID NO: 951942 - RNA, 19 nt, Homo sapiens
  misc_RNA (1)...(19): siRNA sense strand
ucagaauucagaccuuauu

SEQ ID NO: 951943 - RNA, 19 nt, Homo sapiens
  misc_RNA (1)...(19): siRNA sense strand
ccaacucuauucaguacca

SEQ ID NO: 951944 - RNA, 19 nt, Homo sapiens
  misc_RNA (1)...(19): siRNA sense strand
gaagacagucaaaauguga

SEQ ID NO: 951945 - RNA, 19 nt, Homo sapiens
  misc_RNA (1)...(19): siRNA sense strand
guagccaacucucugaacu

SEQ ID NO: 951946 - RNA, 19 nt, Homo sapiens
  misc_RNA (1)...(19): siRNA sense strand
gugaaaagccguauaagug

SEQ ID NO: 951947 - RNA, 19 nt, Homo sapiens
  misc_RNA (1)...(19): siRNA sense strand
ccuuaucauugcaauaguu

SEQ ID NO: 951948 - RNA, 19 nt, Homo sapiens
  misc_RNA (1)...(19): siRNA sense strand
gcaaaaguuucagucagaa

SEQ ID NO: 951949 - RNA, 19 nt, Homo sapiens
  misc_RNA (1)...(19): siRNA sense strand
ggagaagacagucaaaaug

SEQ ID NO: 951950 - RNA, 19 nt, Homo sapiens
  misc_RNA (1)...(19): siRNA sense strand
caggugagaaacccuauga

SEQ ID NO: 951951 - RNA, 19 nt, Homo sapiens
  misc_RNA (1)...(19): siRNA sense strand
ccauguaaucagugcaaua

SEQ ID NO: 951952 - RNA, 19 nt, Homo sapiens
  misc_RNA (1)...(19): siRNA sense strand
acacuggagagaagccuua

SEQ ID NO: 951953 - RNA, 19 nt, Homo sapiens
  misc_RNA (1)...(19): siRNA sense strand
gugagaaagccuucaguca

SEQ ID NO: 951954 - RNA, 19 nt, Homo sapiens
  misc_RNA (1)...(19): siRNA sense strand
acaccaacucuauucagua

SEQ ID NO: 951955 - RNA, 19 nt, Homo sapiens
  misc_RNA (1)...(19): siRNA sense strand
gucaaaaugugaugaaugu

SEQ ID NO: 951956 - RNA, 19 nt, Homo sapiens
  misc_RNA (1)...(19): siRNA sense strand
gagaauucacacuggagaa

SEQ ID NO: 951957 - RNA, 19 nt, Homo sapiens
  misc_RNA (1)...(19): siRNA sense strand
gggcuggccuggacaauua

SEQ ID NO: 951958 - RNA, 19 nt, Homo sapiens
  misc_RNA (1)...(19): siRNA sense strand
gcggaaagcugaaggagaa

SEQ ID NO: 951959 - RNA, 19 nt, Homo sapiens
  misc_RNA (1)...(19): siRNA sense strand
ggaucugcauggcauauua

SEQ ID NO: 951960 - RNA, 19 nt, Homo sapiens
  misc_RNA (1)...(19): siRNA sense strand
cacaaggaaugaacuauug

SEQ ID NO: 951961 - RNA, 19 nt, Homo sapiens
  misc_RNA (1)...(19): siRNA sense strand
gaugaaggcugcgggcauu

SEQ ID NO: 951962 - RNA, 19 nt, Homo sapiens
  misc_RNA (1)...(19): siRNA sense strand
aaucuacacucguugcaaa

SEQ ID NO: 951963 - RNA, 19 nt, Homo sapiens
  misc_RNA (1)...(19): siRNA sense strand
gaacaaccacugccauguc

SEQ ID NO: 951964 - RNA, 19 nt, Homo sapiens
  misc_RNA (1)...(19): siRNA sense strand
ccucacagaugcaauuauc

SEQ ID NO: 951965 - RNA, 19 nt, Homo sapiens
  misc_RNA (1)...(19): siRNA sense strand
gcaccaggaaucugccuuu

SEQ ID NO: 951966 - RNA, 19 nt, Homo sapiens
  misc_RNA (1)...(19): siRNA sense strand
uaaagagacacaaggaaug

SEQ ID NO: 951967 - RNA, 19 nt, Homo sapiens
  misc_RNA (1)...(19): siRNA sense strand
caucgacuauggcaucuuc

SEQ ID NO: 951968 - RNA, 19 nt, Homo sapiens
  misc_RNA (1)...(19): siRNA sense strand
ccaggaaaauuguuaaaga

SEQ ID NO: 951969 - RNA, 19 nt, Homo sapiens
  misc_RNA (1)...(19): siRNA sense strand
gaaagcugaaggagaacaa

SEQ ID NO: 951970 - RNA, 19 nt, Homo sapiens
  misc_RNA (1)...(19): siRNA sense strand
acacaaggaaugaacuauu

SEQ ID NO: 951971 - RNA, 19 nt, Homo sapiens
  misc_RNA (1)...(19): siRNA sense strand
cggcaggcuuugaggauga

SEQ ID NO: 951972 - RNA, 19 nt, Homo sapiens
  misc_RNA (1)...(19): siRNA sense strand
uggcaaggcuggaagaaac

SEQ ID NO: 951973 - RNA, 19 nt, Homo sapiens
  misc_RNA (1)...(19): siRNA sense strand
aaagagacacaaggaauga

SEQ ID NO: 951974 - RNA, 19 nt, Homo sapiens
  misc_RNA (1)...(19): siRNA sense strand
ccaggaaucugccuuuuca

SEQ ID NO: 951975 - RNA, 19 nt, Homo sapiens
  misc_RNA (1)...(19): siRNA sense strand
gcuggaagaaacauuguga

SEQ ID NO: 951976 - RNA, 19 nt, Homo sapiens
  misc_RNA (1)...(19): siRNA sense strand
gaaucugccuuuucaguuc

SEQ ID NO: 951977 - RNA, 19 nt, Homo sapiens
  misc_RNA (1)...(19): siRNA sense strand
uuaaagagacacaaggaau

SEQ ID NO: 951978 - RNA, 19 nt, Homo sapiens
  misc_RNA (1)...(19): siRNA sense strand
uaugagagcggcuacaaca

SEQ ID NO: 951979 - RNA, 19 nt, Homo sapiens
  misc_RNA (1)...(19): siRNA sense strand
gaucugcauggcauauuau

SEQ ID NO: 951980 - RNA, 19 nt, Homo sapiens
  misc_RNA (1)...(19): siRNA sense strand
gaccucacagaugcaauua

SEQ ID NO: 951981 - RNA, 19 nt, Homo sapiens
  misc_RNA (1)...(19): siRNA sense strand
ucacugaugaccucacaga

SEQ ID NO: 951982 - RNA, 19 nt, Homo sapiens
  misc_RNA (1)...(19): siRNA sense strand
ugaccucacagaugcaauu

SEQ ID NO: 951983 - RNA, 19 nt, Homo sapiens
  misc_RNA (1)...(19): siRNA sense strand
aauuaucugugccaggaaa

SEQ ID NO: 951984 - RNA, 19 nt, Homo sapiens
  misc_RNA (1)...(19): siRNA sense strand
agacacaaggaaugaacua

SEQ ID NO: 951985 - RNA, 19 nt, Homo sapiens
  misc_RNA (1)...(19): siRNA sense strand
guuaaagagacacaaggaa

SEQ ID NO: 951986 - RNA, 19 nt, Homo sapiens
  misc_RNA (1)...(19): siRNA sense strand
cuacacucguugcaaacug

SEQ ID NO: 951987 - RNA, 19 nt, Homo sapiens
  misc_RNA (1)...(19): siRNA sense strand
ggaaucugccuuuucaguu

SEQ ID NO: 951988 - RNA, 19 nt, Homo sapiens
  misc_RNA (1)...(19): siRNA sense strand
ugacggcagcaucgacuau

SEQ ID NO: 951989 - RNA, 19 nt, Homo sapiens
  misc_RNA (1)...(19): siRNA sense strand
ccaaaugucucucaaauau

SEQ ID NO: 951990 - RNA, 19 nt, Homo sapiens
  misc_RNA (1)...(19): siRNA sense strand
ggaaauagauaacgaaagu

SEQ ID NO: 951991 - RNA, 19 nt, Homo sapiens
  misc_RNA (1)...(19): siRNA sense strand
ggacgaaaguguacagaaa

SEQ ID NO: 951992 - RNA, 19 nt, Homo sapiens
  misc_RNA (1)...(19): siRNA sense strand
gaggaauggucuaauaaua

SEQ ID NO: 951993 - RNA, 19 nt, Homo sapiens
  misc_RNA (1)...(19): siRNA sense strand
gaaauaaggcacacaauga

SEQ ID NO: 951994 - RNA, 19 nt, Homo sapiens
  misc_RNA (1)...(19): siRNA sense strand
guugaaagcugucaguuaa

SEQ ID NO: 951995 - RNA, 19 nt, Homo sapiens
  misc_RNA (1)...(19): siRNA sense strand
gaagaaauguggacuuuac

SEQ ID NO: 951996 - RNA, 19 nt, Homo sapiens
  misc_RNA (1)...(19): siRNA sense strand
ggacagaguaguaucaaua

SEQ ID NO: 951997 - RNA, 19 nt, Homo sapiens
  misc_RNA (1)...(19): siRNA sense strand
gcauguaucucuuaaggaa

SEQ ID NO: 951998 - RNA, 19 nt, Homo sapiens
  misc_RNA (1)...(19): siRNA sense strand
gauaauagcuguguucaag

SEQ ID NO: 951999 - RNA, 19 nt, Homo sapiens
  misc_RNA (1)...(19): siRNA sense strand
caagauagauaccacauca

SEQ ID NO: 952000 - RNA, 19 nt, Homo sapiens
  misc_RNA (1)...(19): siRNA sense strand
caucuaauguuccauguuu

SEQ ID NO: 952001 - RNA, 19 nt, Homo sapiens
  misc_RNA (1)...(19): siRNA sense strand
ucacacaacugccuuagaa

SEQ ID NO: 952002 - RNA, 19 nt, Homo sapiens
  misc_RNA (1)...(19): siRNA sense strand
ucacacaacugccuuagaa

SEQ ID NO: 952003 - RNA, 19 nt, Homo sapiens
  misc_RNA (1)...(19): siRNA sense strand
gaaacgugauugucauuug

SEQ ID NO: 952004 - RNA, 19 nt, Homo sapiens
  misc_RNA (1)...(19): siRNA sense strand
cauaaacucugcagacaaa

SEQ ID NO: 952005 - RNA, 19 nt, Homo sapiens
  misc_RNA (1)...(19): siRNA sense strand
gaacuaaagcuucaggaaa

SEQ ID NO: 952006 - RNA, 19 nt, Homo sapiens
  misc_RNA (1)...(19): siRNA sense strand
gaacauacccgugaaagga

SEQ ID NO: 952007 - RNA, 19 nt, Homo sapiens
  misc_RNA (1)...(19): siRNA sense strand
ggagaugacuaaacuuaau

SEQ ID NO: 952008 - RNA, 19 nt, Homo sapiens
  misc_RNA (1)...(19): siRNA sense strand
caacaacucuuugcugcua

SEQ ID NO: 952009 - RNA, 19 nt, Homo sapiens
  misc_RNA (1)...(19): siRNA sense strand
uaauacagcucuagauuuc

SEQ ID NO: 952010 - RNA, 19 nt, Homo sapiens
  misc_RNA (1)...(19): siRNA sense strand
gccaugcucuuaugugaua

SEQ ID NO: 952011 - RNA, 19 nt, Homo sapiens
  misc_RNA (1)...(19): siRNA sense strand
gaacaaagacaaagauugg

SEQ ID NO: 952012 - RNA, 19 nt, Homo sapiens
  misc_RNA (1)...(19): siRNA sense strand
gaaauaaaccauagaccuu

SEQ ID NO: 952013 - RNA, 19 nt, Homo sapiens
  misc_RNA (1)...(19): siRNA sense strand
guaaggagauguucuuugg

SEQ ID NO: 952014 - RNA, 19 nt, Homo sapiens
  misc_RNA (1)...(19): siRNA sense strand
uagcaaagauucaggcauu

SEQ ID NO: 952015 - RNA, 19 nt, Homo sapiens
  misc_RNA (1)...(19): siRNA sense strand
cgagucagcuuugcagaua

SEQ ID NO: 952016 - RNA, 19 nt, Homo sapiens
  misc_RNA (1)...(19): siRNA sense strand
gauuauauguucagaggaa

SEQ ID NO: 952017 - RNA, 19 nt, Homo sapiens
  misc_RNA (1)...(19): siRNA sense strand
gcaacaagccauaauauag

SEQ ID NO: 952018 - RNA, 19 nt, Homo sapiens
  misc_RNA (1)...(19): siRNA sense strand
gaccaaaugucucucaaau

SEQ ID NO: 952019 - RNA, 19 nt, Homo sapiens
  misc_RNA (1)...(19): siRNA sense strand
gcaaugacuuuauggacuu

SEQ ID NO: 952020 - RNA, 19 nt, Homo sapiens
  misc_RNA (1)...(19): siRNA sense strand
guggagugcuuaaaucuaa

SEQ ID NO: 952021 - RNA, 19 nt, Homo sapiens
  misc_RNA (1)...(19): siRNA sense strand
gcaaaugacagccagcuaa

SEQ ID NO: 952022 - RNA, 19 nt, Homo sapiens
  misc_RNA (1)...(19): siRNA sense strand
ccacaucauuucuagcuaa

SEQ ID NO: 952023 - RNA, 19 nt, Homo sapiens
  misc_RNA (1)...(19): siRNA sense strand
gaaccuaaguccuucucaa

SEQ ID NO: 952024 - RNA, 19 nt, Homo sapiens
  misc_RNA (1)...(19): siRNA sense strand
gauauuacccagaguugua

SEQ ID NO: 952025 - RNA, 19 nt, Homo sapiens
  misc_RNA (1)...(19): siRNA sense strand
gauaaucccauaagugaaa

SEQ ID NO: 952026 - RNA, 19 nt, Homo sapiens
  misc_RNA (1)...(19): siRNA sense strand
agagagaccuguuagaaga

SEQ ID NO: 952027 - RNA, 19 nt, Homo sapiens
  misc_RNA (1)...(19): siRNA sense strand
aaagugcccuggaggauaa

SEQ ID NO: 952028 - RNA, 19 nt, Homo sapiens
  misc_RNA (1)...(19): siRNA sense strand
agagguagcugauaacaug

SEQ ID NO: 952029 - RNA, 19 nt, Homo sapiens
  misc_RNA (1)...(19): siRNA sense strand
gaaagugaccgucuaguag

SEQ ID NO: 952030 - RNA, 19 nt, Homo sapiens
  misc_RNA (1)...(19): siRNA sense strand
agacagaccuaacuuugaa

SEQ ID NO: 952031 - RNA, 19 nt, Homo sapiens
  misc_RNA (1)...(19): siRNA sense strand
gaggagaacauggacauua

SEQ ID NO: 952032 - RNA, 19 nt, Homo sapiens
  misc_RNA (1)...(19): siRNA sense strand
guuauuuccuguacugaua

SEQ ID NO: 952033 - RNA, 19 nt, Homo sapiens
  misc_RNA (1)...(19): siRNA sense strand
uaacaacaaugaacagaca

SEQ ID NO: 952034 - RNA, 19 nt, Homo sapiens
  misc_RNA (1)...(19): siRNA sense strand
gaagaaaacccuaaauuug

SEQ ID NO: 952035 - RNA, 19 nt, Homo sapiens
  misc_RNA (1)...(19): siRNA sense strand
gaaaugacagagucccaua

SEQ ID NO: 952036 - RNA, 19 nt, Homo sapiens
  misc_RNA (1)...(19): siRNA sense strand
cauauuaccagaagucaua

SEQ ID NO: 952037 - RNA, 19 nt, Homo sapiens
  misc_RNA (1)...(19): siRNA sense strand
ggaaauaaggcacacaaug

SEQ ID NO: 952038 - RNA, 19 nt, Homo sapiens
  misc_RNA (1)...(19): siRNA sense strand
uagaagaaauguggacuuu

SEQ ID NO: 952039 - RNA, 19 nt, Homo sapiens
  misc_RNA (1)...(19): siRNA sense strand
caacugccuuagaauguaa

SEQ ID NO: 952040 - RNA, 19 nt, Homo sapiens
  misc_RNA (1)...(19): siRNA sense strand
gaaagugcccuggaggaua

SEQ ID NO: 952041 - RNA, 19 nt, Homo sapiens
  misc_RNA (1)...(19): siRNA sense strand
ggaauccaaugcuuugaga

SEQ ID NO: 952042 - RNA, 19 nt, Homo sapiens
  misc_RNA (1)...(19): siRNA sense strand
caacugccuuagaauguaa

SEQ ID NO: 952043 - RNA, 19 nt, Homo sapiens
  misc_RNA (1)...(19): siRNA sense strand
gugcuuaaaucuaacugua

SEQ ID NO: 952044 - RNA, 19 nt, Homo sapiens
  misc_RNA (1)...(19): siRNA sense strand
gacggagucucauaugaaa

SEQ ID NO: 952045 - RNA, 19 nt, Homo sapiens
  misc_RNA (1)...(19): siRNA sense strand
gaaggaagaaguuauucaa

SEQ ID NO: 952046 - RNA, 19 nt, Homo sapiens
  misc_RNA (1)...(19): siRNA sense strand
cagaaggaguuuucaauua

SEQ ID NO: 952047 - RNA, 19 nt, Homo sapiens
  misc_RNA (1)...(19): siRNA sense strand
caaaugaaagucuauguug

SEQ ID NO: 952048 - RNA, 19 nt, Homo sapiens
  misc_RNA (1)...(19): siRNA sense strand
gaaguuauucaaaccagua

SEQ ID NO: 952049 - RNA, 19 nt, Homo sapiens
  misc_RNA (1)...(19): siRNA sense strand
uaauagcuguguucaagaa

SEQ ID NO: 952050 - RNA, 19 nt, Homo sapiens
  misc_RNA (1)...(19): siRNA sense strand
gcaggaacuucugaaacua

SEQ ID NO: 952051 - RNA, 19 nt, Homo sapiens
  misc_RNA (1)...(19): siRNA sense strand
ccauagaccuuuauuagag

SEQ ID NO: 952052 - RNA, 19 nt, Homo sapiens
  misc_RNA (1)...(19): siRNA sense strand
ucacgggaaucuaaaggua

SEQ ID NO: 952053 - RNA, 19 nt, Homo sapiens
  misc_RNA (1)...(19): siRNA sense strand
ccaaugcuuugagaaauaa

SEQ ID NO: 952054 - RNA, 19 nt, Homo sapiens
  misc_RNA (1)...(19): siRNA sense strand
gaucaauucuucagacucu

SEQ ID NO: 952055 - RNA, 19 nt, Homo sapiens
  misc_RNA (1)...(19): siRNA sense strand
gaaaucuauuggcuaauca

SEQ ID NO: 952056 - RNA, 19 nt, Homo sapiens
  misc_RNA (1)...(19): siRNA sense strand
gauuaaggauccacgaaau

SEQ ID NO: 952057 - RNA, 19 nt, Homo sapiens
  misc_RNA (1)...(19): siRNA sense strand
gaacagacagaccuaacuu

SEQ ID NO: 952058 - RNA, 19 nt, Homo sapiens
  misc_RNA (1)...(19): siRNA sense strand
gaacagugccucuucuaca

SEQ ID NO: 952059 - RNA, 19 nt, Homo sapiens
  misc_RNA (1)...(19): siRNA sense strand
cuaaguccuucucaauaua

SEQ ID NO: 952060 - RNA, 19 nt, Homo sapiens
  misc_RNA (1)...(19): siRNA sense strand
gaaagucuauguugaugac

SEQ ID NO: 952061 - RNA, 19 nt, Homo sapiens
  misc_RNA (1)...(19): siRNA sense strand
cacgaaaucuauuggcuaa

SEQ ID NO: 952062 - RNA, 19 nt, Homo sapiens
  misc_RNA (1)...(19): siRNA sense strand
ggaauggucuaauaauagg

SEQ ID NO: 952063 - RNA, 19 nt, Homo sapiens
  misc_RNA (1)...(19): siRNA sense strand
ggacaguucucuaugaaaa

SEQ ID NO: 952064 - RNA, 19 nt, Homo sapiens
  misc_RNA (1)...(19): siRNA sense strand
uaaagauucuccucaguca

SEQ ID NO: 952065 - RNA, 19 nt, Homo sapiens
  misc_RNA (1)...(19): siRNA sense strand
cagcagagccugucaaauc

SEQ ID NO: 952066 - RNA, 19 nt, Homo sapiens
  misc_RNA (1)...(19): siRNA sense strand
uaaucaggaugccagaaua

SEQ ID NO: 952067 - RNA, 19 nt, Homo sapiens
  misc_RNA (1)...(19): siRNA sense strand
caaaugcauguaucucuua

SEQ ID NO: 952068 - RNA, 19 nt, Homo sapiens
  misc_RNA (1)...(19): siRNA sense strand
gaaaguguacagaaaccua

SEQ ID NO: 952069 - RNA, 19 nt, Homo sapiens
  misc_RNA (1)...(19): siRNA sense strand
ccuaaguccuucucaauau

SEQ ID NO: 952070 - RNA, 19 nt, Homo sapiens
  misc_RNA (1)...(19): siRNA sense strand
gaaagcugucaguuaaaua

SEQ ID NO: 952071 - RNA, 19 nt, Homo sapiens
  misc_RNA (1)...(19): siRNA sense strand
aaaggaaacaugcaaauga

SEQ ID NO: 952072 - RNA, 19 nt, Homo sapiens
  misc_RNA (1)...(19): siRNA sense strand
gagaaagucagaaauggaa

SEQ ID NO: 952073 - RNA, 19 nt, Homo sapiens
  misc_RNA (1)...(19): siRNA sense strand
uaaagaggacuuccauuug

SEQ ID NO: 952074 - RNA, 19 nt, Homo sapiens
  misc_RNA (1)...(19): siRNA sense strand
gaaagaacagacagaccua

SEQ ID NO: 952075 - RNA, 19 nt, Homo sapiens
  misc_RNA (1)...(19): siRNA sense strand
uuacugggaugaacacauu

SEQ ID NO: 952076 - RNA, 19 nt, Homo sapiens
  misc_RNA (1)...(19): siRNA sense strand
gaaaggaaacaugcaaaug

SEQ ID NO: 952077 - RNA, 19 nt, Homo sapiens
  misc_RNA (1)...(19): siRNA sense strand
ccagagcaauuacuugaau

SEQ ID NO: 952078 - RNA, 19 nt, Homo sapiens
  misc_RNA (1)...(19): siRNA sense strand
gcucuagauuuccacagua

SEQ ID NO: 952079 - RNA, 19 nt, Homo sapiens
  misc_RNA (1)...(19): siRNA sense strand
ucaggacaguucucuauga

SEQ ID NO: 952080 - RNA, 19 nt, Homo sapiens
  misc_RNA (1)...(19): siRNA sense strand
cagccaauauucagacauu

SEQ ID NO: 952081 - RNA, 19 nt, Homo sapiens
  misc_RNA (1)...(19): siRNA sense strand
gacaucaagucacacugua

SEQ ID NO: 952082 - RNA, 19 nt, Homo sapiens
  misc_RNA (1)...(19): siRNA sense strand
ggcagaaacucacauaguc

SEQ ID NO: 952083 - RNA, 19 nt, Homo sapiens
  misc_RNA (1)...(19): siRNA sense strand
uaacaaagagccacacugu

SEQ ID NO: 952084 - RNA, 19 nt, Homo sapiens
  misc_RNA (1)...(19): siRNA sense strand
guacuaggccagaauucua

SEQ ID NO: 952085 - RNA, 19 nt, Homo sapiens
  misc_RNA (1)...(19): siRNA sense strand
gacauuaccaagagucaua

SEQ ID NO: 952086 - RNA, 19 nt, Homo sapiens
  misc_RNA (1)...(19): siRNA sense strand
ccauggaaaugaccaaaug

SEQ ID NO: 952087 - RNA, 19 nt, Homo sapiens
  misc_RNA (1)...(19): siRNA sense strand
uaacuaagcaagucauuca

SEQ ID NO: 952088 - RNA, 19 nt, Homo sapiens
  misc_RNA (1)...(19): siRNA sense strand
agugcaagcuacagaaaua

SEQ ID NO: 952089 - RNA, 19 nt, Homo sapiens
  misc_RNA (1)...(19): siRNA sense strand
ccaaaugucucucaaauau

SEQ ID NO: 952090 - RNA, 19 nt, Homo sapiens
  misc_RNA (1)...(19): siRNA sense strand
ggaaauagauaacgaaagu

SEQ ID NO: 952091 - RNA, 19 nt, Homo sapiens
  misc_RNA (1)...(19): siRNA sense strand
ggacgaaaguguacagaaa

SEQ ID NO: 952092 - RNA, 19 nt, Homo sapiens
  misc_RNA (1)...(19): siRNA sense strand
gaggaauggucuaauaaua

SEQ ID NO: 952093 - RNA, 19 nt, Homo sapiens
  misc_RNA (1)...(19): siRNA sense strand
gaaauaaggcacacaauga

SEQ ID NO: 952094 - RNA, 19 nt, Homo sapiens
  misc_RNA (1)...(19): siRNA sense strand
guugaaagcugucaguuaa

SEQ ID NO: 952095 - RNA, 19 nt, Homo sapiens
  misc_RNA (1)...(19): siRNA sense strand
gaagaaauguggacuuuac

SEQ ID NO: 952096 - RNA, 19 nt, Homo sapiens
  misc_RNA (1)...(19): siRNA sense strand
ggacagaguaguaucaaua

SEQ ID NO: 952097 - RNA, 19 nt, Homo sapiens
  misc_RNA (1)...(19): siRNA sense strand
gcauguaucucuuaaggaa

SEQ ID NO: 952098 - RNA, 19 nt, Homo sapiens
  misc_RNA (1)...(19): siRNA sense strand
gauaauagcuguguucaag

SEQ ID NO: 952099 - RNA, 19 nt, Homo sapiens
  misc_RNA (1)...(19): siRNA sense strand
caagauagauaccacauca

SEQ ID NO: 952100 - RNA, 19 nt, Homo sapiens
  misc_RNA (1)...(19): siRNA sense strand
caucuaauguuccauguuu

SEQ ID NO: 952101 - RNA, 19 nt, Homo sapiens
  misc_RNA (1)...(19): siRNA sense strand
ucacacaacugccuuagaa

SEQ ID NO: 952102 - RNA, 19 nt, Homo sapiens
  misc_RNA (1)...(19): siRNA sense strand
ucacacaacugccuuagaa

SEQ ID NO: 952103 - RNA, 19 nt, Homo sapiens
  misc_RNA (1)...(19): siRNA sense strand
gaaacgugauugucauuug

SEQ ID NO: 952104 - RNA, 19 nt, Homo sapiens
  misc_RNA (1)...(19): siRNA sense strand
cauaaacucugcagacaaa

SEQ ID NO: 952105 - RNA, 19 nt, Homo sapiens
  misc_RNA (1)...(19): siRNA sense strand
gaacuaaagcuucaggaaa

SEQ ID NO: 952106 - RNA, 19 nt, Homo sapiens
  misc_RNA (1)...(19): siRNA sense strand
gaacauacccgugaaagga

SEQ ID NO: 952107 - RNA, 19 nt, Homo sapiens
  misc_RNA (1)...(19): siRNA sense strand
ggagaugacuaaacuuaau

SEQ ID NO: 952108 - RNA, 19 nt, Homo sapiens
  misc_RNA (1)...(19): siRNA sense strand
caacaacucuuugcugcua

SEQ ID NO: 952109 - RNA, 19 nt, Homo sapiens
  misc_RNA (1)...(19): siRNA sense strand
uaauacagcucuagauuuc

SEQ ID NO: 952110 - RNA, 19 nt, Homo sapiens
  misc_RNA (1)...(19): siRNA sense strand
gccaugcucuuaugugaua

SEQ ID NO: 952111 - RNA, 19 nt, Homo sapiens
  misc_RNA (1)...(19): siRNA sense strand
gaacaaagacaaagauugg

SEQ ID NO: 952112 - RNA, 19 nt, Homo sapiens
  misc_RNA (1)...(19): siRNA sense strand
gaaauaaaccauagaccuu

SEQ ID NO: 952113 - RNA, 19 nt, Homo sapiens
  misc_RNA (1)...(19): siRNA sense strand
guaaggagauguucuuugg

SEQ ID NO: 952114 - RNA, 19 nt, Homo sapiens
  misc_RNA (1)...(19): siRNA sense strand
uagcaaagauucaggcauu

SEQ ID NO: 952115 - RNA, 19 nt, Homo sapiens
  misc_RNA (1)...(19): siRNA sense strand
cgagucagcuuugcagaua

SEQ ID NO: 952116 - RNA, 19 nt, Homo sapiens
  misc_RNA (1)...(19): siRNA sense strand
gauuauauguucagaggaa

SEQ ID NO: 952117 - RNA, 19 nt, Homo sapiens
  misc_RNA (1)...(19): siRNA sense strand
gcaacaagccauaauauag

SEQ ID NO: 952118 - RNA, 19 nt, Homo sapiens
  misc_RNA (1)...(19): siRNA sense strand
gaccaaaugucucucaaau

SEQ ID NO: 952119 - RNA, 19 nt, Homo sapiens
  misc_RNA (1)...(19): siRNA sense strand
gcaaugacuuuauggacuu

SEQ ID NO: 952120 - RNA, 19 nt, Homo sapiens
  misc_RNA (1)...(19): siRNA sense strand
guggagugcuuaaaucuaa

SEQ ID NO: 952121 - RNA, 19 nt, Homo sapiens
  misc_RNA (1)...(19): siRNA sense strand
gcaaaugacagccagcuaa

SEQ ID NO: 952122 - RNA, 19 nt, Homo sapiens
  misc_RNA (1)...(19): siRNA sense strand
ccacaucauuucuagcuaa

SEQ ID NO: 952123 - RNA, 19 nt, Homo sapiens
  misc_RNA (1)...(19): siRNA sense strand
gaaccuaaguccuucucaa

SEQ ID NO: 952124 - RNA, 19 nt, Homo sapiens
  misc_RNA (1)...(19): siRNA sense strand
gauauuacccagaguugua

SEQ ID NO: 952125 - RNA, 19 nt, Homo sapiens
  misc_RNA (1)...(19): siRNA sense strand
gauaaucccauaagugaaa

SEQ ID NO: 952126 - RNA, 19 nt, Homo sapiens
  misc_RNA (1)...(19): siRNA sense strand
agagagaccuguuagaaga

SEQ ID NO: 952127 - RNA, 19 nt, Homo sapiens
  misc_RNA (1)...(19): siRNA sense strand
aaagugcccuggaggauaa

SEQ ID NO: 952128 - RNA, 19 nt, Homo sapiens
  misc_RNA (1)...(19): siRNA sense strand
agagguagcugauaacaug

SEQ ID NO: 952129 - RNA, 19 nt, Homo sapiens
  misc_RNA (1)...(19): siRNA sense strand
gaaagugaccgucuaguag

SEQ ID NO: 952130 - RNA, 19 nt, Homo sapiens
  misc_RNA (1)...(19): siRNA sense strand
agacagaccuaacuuugaa

SEQ ID NO: 952131 - RNA, 19 nt, Homo sapiens
  misc_RNA (1)...(19): siRNA sense strand
gaggagaacauggacauua

SEQ ID NO: 952132 - RNA, 19 nt, Homo sapiens
  misc_RNA (1)...(19): siRNA sense strand
guuauuuccuguacugaua

SEQ ID NO: 952133 - RNA, 19 nt, Homo sapiens
  misc_RNA (1)...(19): siRNA sense strand
uaacaacaaugaacagaca

SEQ ID NO: 952134 - RNA, 19 nt, Homo sapiens
  misc_RNA (1)...(19): siRNA sense strand
gaagaaaacccuaaauuug

SEQ ID NO: 952135 - RNA, 19 nt, Homo sapiens
  misc_RNA (1)...(19): siRNA sense strand
gaaaugacagagucccaua

SEQ ID NO: 952136 - RNA, 19 nt, Homo sapiens
  misc_RNA (1)...(19): siRNA sense strand
cauauuaccagaagucaua

SEQ ID NO: 952137 - RNA, 19 nt, Homo sapiens
  misc_RNA (1)...(19): siRNA sense strand
ggaaauaaggcacacaaug

SEQ ID NO: 952138 - RNA, 19 nt, Homo sapiens
  misc_RNA (1)...(19): siRNA sense strand
uagaagaaauguggacuuu

SEQ ID NO: 952139 - RNA, 19 nt, Homo sapiens
  misc_RNA (1)...(19): siRNA sense strand
caacugccuuagaauguaa

SEQ ID NO: 952140 - RNA, 19 nt, Homo sapiens
  misc_RNA (1)...(19): siRNA sense strand
gaaagugcccuggaggaua

SEQ ID NO: 952141 - RNA, 19 nt, Homo sapiens
  misc_RNA (1)...(19): siRNA sense strand
ggaauccaaugcuuugaga

SEQ ID NO: 952142 - RNA, 19 nt, Homo sapiens
  misc_RNA (1)...(19): siRNA sense strand
caacugccuuagaauguaa

SEQ ID NO: 952143 - RNA, 19 nt, Homo sapiens
  misc_RNA (1)...(19): siRNA sense strand
gugcuuaaaucuaacugua

SEQ ID NO: 952144 - RNA, 19 nt, Homo sapiens
  misc_RNA (1)...(19): siRNA sense strand
gacggagucucauaugaaa

SEQ ID NO: 952145 - RNA, 19 nt, Homo sapiens
  misc_RNA (1)...(19): siRNA sense strand
gaaggaagaaguuauucaa

SEQ ID NO: 952146 - RNA, 19 nt, Homo sapiens
  misc_RNA (1)...(19): siRNA sense strand
cagaaggaguuuucaauua

SEQ ID NO: 952147 - RNA, 19 nt, Homo sapiens
  misc_RNA (1)...(19): siRNA sense strand
caaaugaaagucuauguug

SEQ ID NO: 952148 - RNA, 19 nt, Homo sapiens
  misc_RNA (1)...(19): siRNA sense strand
gaaguuauucaaaccagua

SEQ ID NO: 952149 - RNA, 19 nt, Homo sapiens
  misc_RNA (1)...(19): siRNA sense strand
uaauagcuguguucaagaa

SEQ ID NO: 952150 - RNA, 19 nt, Homo sapiens
  misc_RNA (1)...(19): siRNA sense strand
gcaggaacuucugaaacua

SEQ ID NO: 952151 - RNA, 19 nt, Homo sapiens
  misc_RNA (1)...(19): siRNA sense strand
ccauagaccuuuauuagag

SEQ ID NO: 952152 - RNA, 19 nt, Homo sapiens
  misc_RNA (1)...(19): siRNA sense strand
ucacgggaaucuaaaggua

SEQ ID NO: 952153 - RNA, 19 nt, Homo sapiens
  misc_RNA (1)...(19): siRNA sense strand
ccaaugcuuugagaaauaa

SEQ ID NO: 952154 - RNA, 19 nt, Homo sapiens
  misc_RNA (1)...(19): siRNA sense strand
gaucaauucuucagacucu

SEQ ID NO: 952155 - RNA, 19 nt, Homo sapiens
  misc_RNA (1)...(19): siRNA sense strand
gaaaucuauuggcuaauca

SEQ ID NO: 952156 - RNA, 19 nt, Homo sapiens
  misc_RNA (1)...(19): siRNA sense strand
gauuaaggauccacgaaau

SEQ ID NO: 952157 - RNA, 19 nt, Homo sapiens
  misc_RNA (1)...(19): siRNA sense strand
gaacagacagaccuaacuu

SEQ ID NO: 952158 - RNA, 19 nt, Homo sapiens
  misc_RNA (1)...(19): siRNA sense strand
gaacagugccucuucuaca

SEQ ID NO: 952159 - RNA, 19 nt, Homo sapiens
  misc_RNA (1)...(19): siRNA sense strand
cuaaguccuucucaauaua

SEQ ID NO: 952160 - RNA, 19 nt, Homo sapiens
  misc_RNA (1)...(19): siRNA sense strand
gaaagucuauguugaugac

SEQ ID NO: 952161 - RNA, 19 nt, Homo sapiens
  misc_RNA (1)...(19): siRNA sense strand
cacgaaaucuauuggcuaa

SEQ ID NO: 952162 - RNA, 19 nt, Homo sapiens
  misc_RNA (1)...(19): siRNA sense strand
ggaauggucuaauaauagg

SEQ ID NO: 952163 - RNA, 19 nt, Homo sapiens
  misc_RNA (1)...(19): siRNA sense strand
ggacaguucucuaugaaaa

SEQ ID NO: 952164 - RNA, 19 nt, Homo sapiens
  misc_RNA (1)...(19): siRNA sense strand
uaaagauucuccucaguca

SEQ ID NO: 952165 - RNA, 19 nt, Homo sapiens
  misc_RNA (1)...(19): siRNA sense strand
cagcagagccugucaaauc

SEQ ID NO: 952166 - RNA, 19 nt, Homo sapiens
  misc_RNA (1)...(19): siRNA sense strand
uaaucaggaugccagaaua

SEQ ID NO: 952167 - RNA, 19 nt, Homo sapiens
  misc_RNA (1)...(19): siRNA sense strand
caaaugcauguaucucuua

SEQ ID NO: 952168 - RNA, 19 nt, Homo sapiens
  misc_RNA (1)...(19): siRNA sense strand
gaaaguguacagaaaccua

SEQ ID NO: 952169 - RNA, 19 nt, Homo sapiens
  misc_RNA (1)...(19): siRNA sense strand
ccuaaguccuucucaauau

SEQ ID NO: 952170 - RNA, 19 nt, Homo sapiens
  misc_RNA (1)...(19): siRNA sense strand
gaaagcugucaguuaaaua

SEQ ID NO: 952171 - RNA, 19 nt, Homo sapiens
  misc_RNA (1)...(19): siRNA sense strand
aaaggaaacaugcaaauga

SEQ ID NO: 952172 - RNA, 19 nt, Homo sapiens
  misc_RNA (1)...(19): siRNA sense strand
gagaaagucagaaauggaa

SEQ ID NO: 952173 - RNA, 19 nt, Homo sapiens
  misc_RNA (1)...(19): siRNA sense strand
uaaagaggacuuccauuug

SEQ ID NO: 952174 - RNA, 19 nt, Homo sapiens
  misc_RNA (1)...(19): siRNA sense strand
gaaagaacagacagaccua

SEQ ID NO: 952175 - RNA, 19 nt, Homo sapiens
  misc_RNA (1)...(19): siRNA sense strand
uuacugggaugaacacauu

SEQ ID NO: 952176 - RNA, 19 nt, Homo sapiens
  misc_RNA (1)...(19): siRNA sense strand
gaaaggaaacaugcaaaug

SEQ ID NO: 952177 - RNA, 19 nt, Homo sapiens
  misc_RNA (1)...(19): siRNA sense strand
ccagagcaauuacuugaau

SEQ ID NO: 952178 - RNA, 19 nt, Homo sapiens
  misc_RNA (1)...(19): siRNA sense strand
gcucuagauuuccacagua

SEQ ID NO: 952179 - RNA, 19 nt, Homo sapiens
  misc_RNA (1)...(19): siRNA sense strand
ucaggacaguucucuauga

SEQ ID NO: 952180 - RNA, 19 nt, Homo sapiens
  misc_RNA (1)...(19): siRNA sense strand
cagccaauauucagacauu

SEQ ID NO: 952181 - RNA, 19 nt, Homo sapiens
  misc_RNA (1)...(19): siRNA sense strand
gacaucaagucacacugua

SEQ ID NO: 952182 - RNA, 19 nt, Homo sapiens
  misc_RNA (1)...(19): siRNA sense strand
ggcagaaacucacauaguc

SEQ ID NO: 952183 - RNA, 19 nt, Homo sapiens
  misc_RNA (1)...(19): siRNA sense strand
uaacaaagagccacacugu

SEQ ID NO: 952184 - RNA, 19 nt, Homo sapiens
  misc_RNA (1)...(19): siRNA sense strand
guacuaggccagaauucua

SEQ ID NO: 952185 - RNA, 19 nt, Homo sapiens
  misc_RNA (1)...(19): siRNA sense strand
gacauuaccaagagucaua

SEQ ID NO: 952186 - RNA, 19 nt, Homo sapiens
  misc_RNA (1)...(19): siRNA sense strand
ccauggaaaugaccaaaug

SEQ ID NO: 952187 - RNA, 19 nt, Homo sapiens
  misc_RNA (1)...(19): siRNA sense strand
uaacuaagcaagucauuca

SEQ ID NO: 952188 - RNA, 19 nt, Homo sapiens
  misc_RNA (1)...(19): siRNA sense strand
agugcaagcuacagaaaua

SEQ ID NO: 952189 - RNA, 19 nt, Homo sapiens
  misc_RNA (1)...(19): siRNA sense strand
ccaaaugucucucaaauau

SEQ ID NO: 952190 - RNA, 19 nt, Homo sapiens
  misc_RNA (1)...(19): siRNA sense strand
ggaaauagauaacgaaagu

SEQ ID NO: 952191 - RNA, 19 nt, Homo sapiens
  misc_RNA (1)...(19): siRNA sense strand
ggacgaaaguguacagaaa

SEQ ID NO: 952192 - RNA, 19 nt, Homo sapiens
  misc_RNA (1)...(19): siRNA sense strand
gaggaauggucuaauaaua

SEQ ID NO: 952193 - RNA, 19 nt, Homo sapiens
  misc_RNA (1)...(19): siRNA sense strand
gaaauaaggcacacaauga

SEQ ID NO: 952194 - RNA, 19 nt, Homo sapiens
  misc_RNA (1)...(19): siRNA sense strand
guugaaagcugucaguuaa

SEQ ID NO: 952195 - RNA, 19 nt, Homo sapiens
  misc_RNA (1)...(19): siRNA sense strand
gaagaaauguggacuuuac

SEQ ID NO: 952196 - RNA, 19 nt, Homo sapiens
  misc_RNA (1)...(19): siRNA sense strand
ggacagaguaguaucaaua

SEQ ID NO: 952197 - RNA, 19 nt, Homo sapiens
  misc_RNA (1)...(19): siRNA sense strand
gcauguaucucuuaaggaa

SEQ ID NO: 952198 - RNA, 19 nt, Homo sapiens
  misc_RNA (1)...(19): siRNA sense strand
gauaauagcuguguucaag

SEQ ID NO: 952199 - RNA, 19 nt, Homo sapiens
  misc_RNA (1)...(19): siRNA sense strand
caagauagauaccacauca

SEQ ID NO: 952200 - RNA, 19 nt, Homo sapiens
  misc_RNA (1)...(19): siRNA sense strand
caucuaauguuccauguuu

SEQ ID NO: 952201 - RNA, 19 nt, Homo sapiens
  misc_RNA (1)...(19): siRNA sense strand
ucacacaacugccuuagaa

SEQ ID NO: 952202 - RNA, 19 nt, Homo sapiens
  misc_RNA (1)...(19): siRNA sense strand
ucacacaacugccuuagaa

SEQ ID NO: 952203 - RNA, 19 nt, Homo sapiens
  misc_RNA (1)...(19): siRNA sense strand
gaaacgugauugucauuug

SEQ ID NO: 952204 - RNA, 19 nt, Homo sapiens
  misc_RNA (1)...(19): siRNA sense strand
cauaaacucugcagacaaa

SEQ ID NO: 952205 - RNA, 19 nt, Homo sapiens
  misc_RNA (1)...(19): siRNA sense strand
gaacuaaagcuucaggaaa

SEQ ID NO: 952206 - RNA, 19 nt, Homo sapiens
  misc_RNA (1)...(19): siRNA sense strand
gaacauacccgugaaagga

SEQ ID NO: 952207 - RNA, 19 nt, Homo sapiens
  misc_RNA (1)...(19): siRNA sense strand
ggagaugacuaaacuuaau

SEQ ID NO: 952208 - RNA, 19 nt, Homo sapiens
  misc_RNA (1)...(19): siRNA sense strand
caacaacucuuugcugcua

SEQ ID NO: 952209 - RNA, 19 nt, Homo sapiens
  misc_RNA (1)...(19): siRNA sense strand
uaauacagcucuagauuuc

SEQ ID NO: 952210 - RNA, 19 nt, Homo sapiens
  misc_RNA (1)...(19): siRNA sense strand
gccaugcucuuaugugaua

SEQ ID NO: 952211 - RNA, 19 nt, Homo sapiens
  misc_RNA (1)...(19): siRNA sense strand
gaacaaagacaaagauugg

SEQ ID NO: 952212 - RNA, 19 nt, Homo sapiens
  misc_RNA (1)...(19): siRNA sense strand
gaaauaaaccauagaccuu

SEQ ID NO: 952213 - RNA, 19 nt, Homo sapiens
  misc_RNA (1)...(19): siRNA sense strand
guaaggagauguucuuugg

SEQ ID NO: 952214 - RNA, 19 nt, Homo sapiens
  misc_RNA (1)...(19): siRNA sense strand
uagcaaagauucaggcauu

SEQ ID NO: 952215 - RNA, 19 nt, Homo sapiens
  misc_RNA (1)...(19): siRNA sense strand
cgagucagcuuugcagaua

SEQ ID NO: 952216 - RNA, 19 nt, Homo sapiens
  misc_RNA (1)...(19): siRNA sense strand
gauuauauguucagaggaa

SEQ ID NO: 952217 - RNA, 19 nt, Homo sapiens
  misc_RNA (1)...(19): siRNA sense strand
gcaacaagccauaauauag

SEQ ID NO: 952218 - RNA, 19 nt, Homo sapiens
  misc_RNA (1)...(19): siRNA sense strand
gaccaaaugucucucaaau

SEQ ID NO: 952219 - RNA, 19 nt, Homo sapiens
  misc_RNA (1)...(19): siRNA sense strand
gcaaugacuuuauggacuu

SEQ ID NO: 952220 - RNA, 19 nt, Homo sapiens
  misc_RNA (1)...(19): siRNA sense strand
guggagugcuuaaaucuaa

SEQ ID NO: 952221 - RNA, 19 nt, Homo sapiens
  misc_RNA (1)...(19): siRNA sense strand
gcaaaugacagccagcuaa

SEQ ID NO: 952222 - RNA, 19 nt, Homo sapiens
  misc_RNA (1)...(19): siRNA sense strand
ccacaucauuucuagcuaa

SEQ ID NO: 952223 - RNA, 19 nt, Homo sapiens
  misc_RNA (1)...(19): siRNA sense strand
gaaccuaaguccuucucaa

SEQ ID NO: 952224 - RNA, 19 nt, Homo sapiens
  misc_RNA (1)...(19): siRNA sense strand
gauauuacccagaguugua

SEQ ID NO: 952225 - RNA, 19 nt, Homo sapiens
  misc_RNA (1)...(19): siRNA sense strand
gauaaucccauaagugaaa

SEQ ID NO: 952226 - RNA, 19 nt, Homo sapiens
  misc_RNA (1)...(19): siRNA sense strand
agagagaccuguuagaaga

SEQ ID NO: 952227 - RNA, 19 nt, Homo sapiens
  misc_RNA (1)...(19): siRNA sense strand
aaagugcccuggaggauaa

SEQ ID NO: 952228 - RNA, 19 nt, Homo sapiens
  misc_RNA (1)...(19): siRNA sense strand
agagguagcugauaacaug

SEQ ID NO: 952229 - RNA, 19 nt, Homo sapiens
  misc_RNA (1)...(19): siRNA sense strand
gaaagugaccgucuaguag

SEQ ID NO: 952230 - RNA, 19 nt, Homo sapiens
  misc_RNA (1)...(19): siRNA sense strand
agacagaccuaacuuugaa

SEQ ID NO: 952231 - RNA, 19 nt, Homo sapiens
  misc_RNA (1)...(19): siRNA sense strand
gaggagaacauggacauua

SEQ ID NO: 952232 - RNA, 19 nt, Homo sapiens
  misc_RNA (1)...(19): siRNA sense strand
guuauuuccuguacugaua

SEQ ID NO: 952233 - RNA, 19 nt, Homo sapiens
  misc_RNA (1)...(19): siRNA sense strand
uaacaacaaugaacagaca

SEQ ID NO: 952234 - RNA, 19 nt, Homo sapiens
  misc_RNA (1)...(19): siRNA sense strand
gaagaaaacccuaaauuug

SEQ ID NO: 952235 - RNA, 19 nt, Homo sapiens
  misc_RNA (1)...(19): siRNA sense strand
gaaaugacagagucccaua

SEQ ID NO: 952236 - RNA, 19 nt, Homo sapiens
  misc_RNA (1)...(19): siRNA sense strand
cauauuaccagaagucaua

SEQ ID NO: 952237 - RNA, 19 nt, Homo sapiens
  misc_RNA (1)...(19): siRNA sense strand
ggaaauaaggcacacaaug

SEQ ID NO: 952238 - RNA, 19 nt, Homo sapiens
  misc_RNA (1)...(19): siRNA sense strand
uagaagaaauguggacuuu

SEQ ID NO: 952239 - RNA, 19 nt, Homo sapiens
  misc_RNA (1)...(19): siRNA sense strand
caacugccuuagaauguaa

SEQ ID NO: 952240 - RNA, 19 nt, Homo sapiens
  misc_RNA (1)...(19): siRNA sense strand
gaaagugcccuggaggaua

SEQ ID NO: 952241 - RNA, 19 nt, Homo sapiens
  misc_RNA (1)...(19): siRNA sense strand
ggaauccaaugcuuugaga

SEQ ID NO: 952242 - RNA, 19 nt, Homo sapiens
  misc_RNA (1)...(19): siRNA sense strand
caacugccuuagaauguaa

SEQ ID NO: 952243 - RNA, 19 nt, Homo sapiens
  misc_RNA (1)...(19): siRNA sense strand
gugcuuaaaucuaacugua

SEQ ID NO: 952244 - RNA, 19 nt, Homo sapiens
  misc_RNA (1)...(19): siRNA sense strand
gacggagucucauaugaaa

SEQ ID NO: 952245 - RNA, 19 nt, Homo sapiens
  misc_RNA (1)...(19): siRNA sense strand
gaaggaagaaguuauucaa

SEQ ID NO: 952246 - RNA, 19 nt, Homo sapiens
  misc_RNA (1)...(19): siRNA sense strand
cagaaggaguuuucaauua

SEQ ID NO: 952247 - RNA, 19 nt, Homo sapiens
  misc_RNA (1)...(19): siRNA sense strand
caaaugaaagucuauguug

SEQ ID NO: 952248 - RNA, 19 nt, Homo sapiens
  misc_RNA (1)...(19): siRNA sense strand
gaaguuauucaaaccagua

SEQ ID NO: 952249 - RNA, 19 nt, Homo sapiens
  misc_RNA (1)...(19): siRNA sense strand
uaauagcuguguucaagaa

SEQ ID NO: 952250 - RNA, 19 nt, Homo sapiens
  misc_RNA (1)...(19): siRNA sense strand
gcaggaacuucugaaacua

SEQ ID NO: 952251 - RNA, 19 nt, Homo sapiens
  misc_RNA (1)...(19): siRNA sense strand
ccauagaccuuuauuagag

SEQ ID NO: 952252 - RNA, 19 nt, Homo sapiens
  misc_RNA (1)...(19): siRNA sense strand
ucacgggaaucuaaaggua

SEQ ID NO: 952253 - RNA, 19 nt, Homo sapiens
  misc_RNA (1)...(19): siRNA sense strand
ccaaugcuuugagaaauaa

SEQ ID NO: 952254 - RNA, 19 nt, Homo sapiens
  misc_RNA (1)...(19): siRNA sense strand
gaucaauucuucagacucu

SEQ ID NO: 952255 - RNA, 19 nt, Homo sapiens
  misc_RNA (1)...(19): siRNA sense strand
gaaaucuauuggcuaauca

SEQ ID NO: 952256 - RNA, 19 nt, Homo sapiens
  misc_RNA (1)...(19): siRNA sense strand
gauuaaggauccacgaaau

SEQ ID NO: 952257 - RNA, 19 nt, Homo sapiens
  misc_RNA (1)...(19): siRNA sense strand
gaacagacagaccuaacuu

SEQ ID NO: 952258 - RNA, 19 nt, Homo sapiens
  misc_RNA (1)...(19): siRNA sense strand
gaacagugccucuucuaca

SEQ ID NO: 952259 - RNA, 19 nt, Homo sapiens
  misc_RNA (1)...(19): siRNA sense strand
cuaaguccuucucaauaua

SEQ ID NO: 952260 - RNA, 19 nt, Homo sapiens
  misc_RNA (1)...(19): siRNA sense strand
gaaagucuauguugaugac

SEQ ID NO: 952261 - RNA, 19 nt, Homo sapiens
  misc_RNA (1)...(19): siRNA sense strand
cacgaaaucuauuggcuaa

SEQ ID NO: 952262 - RNA, 19 nt, Homo sapiens
  misc_RNA (1)...(19): siRNA sense strand
ggaauggucuaauaauagg

SEQ ID NO: 952263 - RNA, 19 nt, Homo sapiens
  misc_RNA (1)...(19): siRNA sense strand
ggacaguucucuaugaaaa

SEQ ID NO: 952264 - RNA, 19 nt, Homo sapiens
  misc_RNA (1)...(19): siRNA sense strand
uaaagauucuccucaguca

SEQ ID NO: 952265 - RNA, 19 nt, Homo sapiens
  misc_RNA (1)...(19): siRNA sense strand
cagcagagccugucaaauc

SEQ ID NO: 952266 - RNA, 19 nt, Homo sapiens
  misc_RNA (1)...(19): siRNA sense strand
uaaucaggaugccagaaua

SEQ ID NO: 952267 - RNA, 19 nt, Homo sapiens
  misc_RNA (1)...(19): siRNA sense strand
caaaugcauguaucucuua

SEQ ID NO: 952268 - RNA, 19 nt, Homo sapiens
  misc_RNA (1)...(19): siRNA sense strand
gaaaguguacagaaaccua

SEQ ID NO: 952269 - RNA, 19 nt, Homo sapiens
  misc_RNA (1)...(19): siRNA sense strand
ccuaaguccuucucaauau

SEQ ID NO: 952270 - RNA, 19 nt, Homo sapiens
  misc_RNA (1)...(19): siRNA sense strand
gaaagcugucaguuaaaua

SEQ ID NO: 952271 - RNA, 19 nt, Homo sapiens
  misc_RNA (1)...(19): siRNA sense strand
aaaggaaacaugcaaauga

SEQ ID NO: 952272 - RNA, 19 nt, Homo sapiens
  misc_RNA (1)...(19): siRNA sense strand
gagaaagucagaaauggaa

SEQ ID NO: 952273 - RNA, 19 nt, Homo sapiens
  misc_RNA (1)...(19): siRNA sense strand
uaaagaggacuuccauuug

SEQ ID NO: 952274 - RNA, 19 nt, Homo sapiens
  misc_RNA (1)...(19): siRNA sense strand
gaaagaacagacagaccua

SEQ ID NO: 952275 - RNA, 19 nt, Homo sapiens
  misc_RNA (1)...(19): siRNA sense strand
uuacugggaugaacacauu

SEQ ID NO: 952276 - RNA, 19 nt, Homo sapiens
  misc_RNA (1)...(19): siRNA sense strand
gaaaggaaacaugcaaaug

SEQ ID NO: 952277 - RNA, 19 nt, Homo sapiens
  misc_RNA (1)...(19): siRNA sense strand
ccagagcaauuacuugaau

SEQ ID NO: 952278 - RNA, 19 nt, Homo sapiens
  misc_RNA (1)...(19): siRNA sense strand
gcucuagauuuccacagua

SEQ ID NO: 952279 - RNA, 19 nt, Homo sapiens
  misc_RNA (1)...(19): siRNA sense strand
ucaggacaguucucuauga

SEQ ID NO: 952280 - RNA, 19 nt, Homo sapiens
  misc_RNA (1)...(19): siRNA sense strand
cagccaauauucagacauu

SEQ ID NO: 952281 - RNA, 19 nt, Homo sapiens
  misc_RNA (1)...(19): siRNA sense strand
gacaucaagucacacugua

SEQ ID NO: 952282 - RNA, 19 nt, Homo sapiens
  misc_RNA (1)...(19): siRNA sense strand
ggcagaaacucacauaguc

SEQ ID NO: 952283 - RNA, 19 nt, Homo sapiens
  misc_RNA (1)...(19): siRNA sense strand
uaacaaagagccacacugu

SEQ ID NO: 952284 - RNA, 19 nt, Homo sapiens
  misc_RNA (1)...(19): siRNA sense strand
guacuaggccagaauucua

SEQ ID NO: 952285 - RNA, 19 nt, Homo sapiens
  misc_RNA (1)...(19): siRNA sense strand
gacauuaccaagagucaua

SEQ ID NO: 952286 - RNA, 19 nt, Homo sapiens
  misc_RNA (1)...(19): siRNA sense strand
ccauggaaaugaccaaaug

SEQ ID NO: 952287 - RNA, 19 nt, Homo sapiens
  misc_RNA (1)...(19): siRNA sense strand
uaacuaagcaagucauuca

SEQ ID NO: 952288 - RNA, 19 nt, Homo sapiens
  misc_RNA (1)...(19): siRNA sense strand
agugcaagcuacagaaaua

SEQ ID NO: 952289 - RNA, 19 nt, Homo sapiens
  misc_RNA (1)...(19): siRNA sense strand
ugagaaugaucaacaguua

SEQ ID NO: 952290 - RNA, 19 nt, Homo sapiens
  misc_RNA (1)...(19): siRNA sense strand
cuaaagaucuugaaguaga

SEQ ID NO: 952291 - RNA, 19 nt, Homo sapiens
  misc_RNA (1)...(19): siRNA sense strand
gaacaaugcacagaagauu

SEQ ID NO: 952292 - RNA, 19 nt, Homo sapiens
  misc_RNA (1)...(19): siRNA sense strand
gaagaagaacaacaacuug

SEQ ID NO: 952293 - RNA, 19 nt, Homo sapiens
  misc_RNA (1)...(19): siRNA sense strand
ugacugagauugugaagca

SEQ ID NO: 952294 - RNA, 19 nt, Homo sapiens
  misc_RNA (1)...(19): siRNA sense strand
agaaggagcuaaagaucuu

SEQ ID NO: 952295 - RNA, 19 nt, Homo sapiens
  misc_RNA (1)...(19): siRNA sense strand
uggacaagcugaacuuuga

SEQ ID NO: 952296 - RNA, 19 nt, Homo sapiens
  misc_RNA (1)...(19): siRNA sense strand
ccaagagacugccgaguuc

SEQ ID NO: 952297 - RNA, 19 nt, Homo sapiens
  misc_RNA (1)...(19): siRNA sense strand
uacaugagauggugaagaa

SEQ ID NO: 952298 - RNA, 19 nt, Homo sapiens
  misc_RNA (1)...(19): siRNA sense strand
uaaaagcgaucauccagua

SEQ ID NO: 952299 - RNA, 19 nt, Homo sapiens
  misc_RNA (1)...(19): siRNA sense strand
gagagucagucaaccgauu

SEQ ID NO: 952300 - RNA, 19 nt, Homo sapiens
  misc_RNA (1)...(19): siRNA sense strand
caagaaacauuggcuucaa

SEQ ID NO: 952301 - RNA, 19 nt, Homo sapiens
  misc_RNA (1)...(19): siRNA sense strand
guugagaccuugguuaaga

SEQ ID NO: 952302 - RNA, 19 nt, Homo sapiens
  misc_RNA (1)...(19): siRNA sense strand
gaugaaggcuggcuacacu

SEQ ID NO: 952303 - RNA, 19 nt, Homo sapiens
  misc_RNA (1)...(19): siRNA sense strand
cuacagaggccaucgauga

SEQ ID NO: 952304 - RNA, 19 nt, Homo sapiens
  misc_RNA (1)...(19): siRNA sense strand
caaccgauuuggaacuuau

SEQ ID NO: 952305 - RNA, 19 nt, Homo sapiens
  misc_RNA (1)...(19): siRNA sense strand
gucaauaugucaucacuca

SEQ ID NO: 952306 - RNA, 19 nt, Homo sapiens
  misc_RNA (1)...(19): siRNA sense strand
gguccaaugaugaaacuua

SEQ ID NO: 952307 - RNA, 19 nt, Homo sapiens
  misc_RNA (1)...(19): siRNA sense strand
ggagagcuagguccaauga

SEQ ID NO: 952308 - RNA, 19 nt, Homo sapiens
  misc_RNA (1)...(19): siRNA sense strand
gggagaagauacaugagau

SEQ ID NO: 952309 - RNA, 19 nt, Homo sapiens
  misc_RNA (1)...(19): siRNA sense strand
gaucaacaguuacagaaaa

SEQ ID NO: 952310 - RNA, 19 nt, Homo sapiens
  misc_RNA (1)...(19): siRNA sense strand
ugucaucacucaugccaaa

SEQ ID NO: 952311 - RNA, 19 nt, Homo sapiens
  misc_RNA (1)...(19): siRNA sense strand
guaagaauaugcuguucca

SEQ ID NO: 952312 - RNA, 19 nt, Homo sapiens
  misc_RNA (1)...(19): siRNA sense strand
gcuucaaggucaacucaaa

SEQ ID NO: 952313 - RNA, 19 nt, Homo sapiens
  misc_RNA (1)...(19): siRNA sense strand
gaaagugagacugaaacua

SEQ ID NO: 952314 - RNA, 19 nt, Homo sapiens
  misc_RNA (1)...(19): siRNA sense strand
ugaugaaacuuaagagaca

SEQ ID NO: 952315 - RNA, 19 nt, Homo sapiens
  misc_RNA (1)...(19): siRNA sense strand
guccaaugaugaaacuuaa

SEQ ID NO: 952316 - RNA, 19 nt, Homo sapiens
  misc_RNA (1)...(19): siRNA sense strand
gcauguugcugacgcugaa

SEQ ID NO: 952317 - RNA, 19 nt, Homo sapiens
  misc_RNA (1)...(19): siRNA sense strand
ggagugaugcucagucaug

SEQ ID NO: 952318 - RNA, 19 nt, Homo sapiens
  misc_RNA (1)...(19): siRNA sense strand
ugccgaggcuugucaauau

SEQ ID NO: 952319 - RNA, 19 nt, Homo sapiens
  misc_RNA (1)...(19): siRNA sense strand
gagcuagguccaaugauga

SEQ ID NO: 952320 - RNA, 19 nt, Homo sapiens
  misc_RNA (1)...(19): siRNA sense strand
agcuaaagaucuugaagua

SEQ ID NO: 952321 - RNA, 19 nt, Homo sapiens
  misc_RNA (1)...(19): siRNA sense strand
gacaacaucacguggauug

SEQ ID NO: 952322 - RNA, 19 nt, Homo sapiens
  misc_RNA (1)...(19): siRNA sense strand
ugaagaagaacaacaacuu

SEQ ID NO: 952323 - RNA, 19 nt, Homo sapiens
  misc_RNA (1)...(19): siRNA sense strand
gagaaccucuggacaagcu

SEQ ID NO: 952324 - RNA, 19 nt, Homo sapiens
  misc_RNA (1)...(19): siRNA sense strand
cccaaagacucaagaagga

SEQ ID NO: 952325 - RNA, 19 nt, Homo sapiens
  misc_RNA (1)...(19): siRNA sense strand
caucuaugguggagagcua

SEQ ID NO: 952326 - RNA, 19 nt, Homo sapiens
  misc_RNA (1)...(19): siRNA sense strand
acaaauugaucacauguac

SEQ ID NO: 952327 - RNA, 19 nt, Homo sapiens
  misc_RNA (1)...(19): siRNA sense strand
caaugaagaagaacaacaa

SEQ ID NO: 952328 - RNA, 19 nt, Homo sapiens
  misc_RNA (1)...(19): siRNA sense strand
cagcacagaugauggacau

SEQ ID NO: 952329 - RNA, 19 nt, Homo sapiens
  misc_RNA (1)...(19): siRNA sense strand
gagugaugcucagucauga

SEQ ID NO: 952330 - RNA, 19 nt, Homo sapiens
  misc_RNA (1)...(19): siRNA sense strand
ucaaagaaauccuuaucac

SEQ ID NO: 952331 - RNA, 19 nt, Homo sapiens
  misc_RNA (1)...(19): siRNA sense strand
gcaagaaacauuggcuuca

SEQ ID NO: 952332 - RNA, 19 nt, Homo sapiens
  misc_RNA (1)...(19): siRNA sense strand
gguaaaaccuacugucuuc

SEQ ID NO: 952333 - RNA, 19 nt, Homo sapiens
  misc_RNA (1)...(19): siRNA sense strand
caggagcagugacaaagga

SEQ ID NO: 952334 - RNA, 19 nt, Homo sapiens
  misc_RNA (1)...(19): siRNA sense strand
ccaaugaugaaacuuaaga

SEQ ID NO: 952335 - RNA, 19 nt, Homo sapiens
  misc_RNA (1)...(19): siRNA sense strand
agagcuagguccaaugaug

SEQ ID NO: 952336 - RNA, 19 nt, Homo sapiens
  misc_RNA (1)...(19): siRNA sense strand
gcagaacaaggauggcauu

SEQ ID NO: 952337 - RNA, 19 nt, Homo sapiens
  misc_RNA (1)...(19): siRNA sense strand
cuucuaagcuguggcaaga

SEQ ID NO: 952338 - RNA, 19 nt, Homo sapiens
  misc_RNA (1)...(19): siRNA sense strand
cgauauccaaccagaauaa

SEQ ID NO: 952339 - RNA, 19 nt, Homo sapiens
  misc_RNA (1)...(19): siRNA sense strand
caauaugucaucacucaug

SEQ ID NO: 952340 - RNA, 19 nt, Homo sapiens
  misc_RNA (1)...(19): siRNA sense strand
gcggagaaccucuggacaa

SEQ ID NO: 952341 - RNA, 19 nt, Homo sapiens
  misc_RNA (1)...(19): siRNA sense strand
agaccuugguuaagaagaa

SEQ ID NO: 952342 - RNA, 19 nt, Homo sapiens
  misc_RNA (1)...(19): siRNA sense strand
ggucuggguuuccucuaug

SEQ ID NO: 952343 - RNA, 19 nt, Homo sapiens
  misc_RNA (1)...(19): siRNA sense strand
gcucagucaugacaacauc

SEQ ID NO: 952344 - RNA, 19 nt, Homo sapiens
  misc_RNA (1)...(19): siRNA sense strand
caagaaggagcuaaagauc

SEQ ID NO: 952345 - RNA, 19 nt, Homo sapiens
  misc_RNA (1)...(19): siRNA sense strand
ugggcuaucuggaaaguga

SEQ ID NO: 952346 - RNA, 19 nt, Homo sapiens
  misc_RNA (1)...(19): siRNA sense strand
uugacuggguguaagaaua

SEQ ID NO: 952347 - RNA, 19 nt, Homo sapiens
  misc_RNA (1)...(19): siRNA sense strand
ucaagaaggagcuaaagau

SEQ ID NO: 952348 - RNA, 19 nt, Homo sapiens
  misc_RNA (1)...(19): siRNA sense strand
uccaugggcuugaagaaga

SEQ ID NO: 952349 - RNA, 19 nt, Homo sapiens
  misc_RNA (1)...(19): siRNA sense strand
ggcuaagacucucguguuc

SEQ ID NO: 952350 - RNA, 19 nt, Homo sapiens
  misc_RNA (1)...(19): siRNA sense strand
gaaggacuuuuccaucuau

SEQ ID NO: 952351 - RNA, 19 nt, Homo sapiens
  misc_RNA (1)...(19): siRNA sense strand
gagaaggacuuuuccaucu

SEQ ID NO: 952352 - RNA, 19 nt, Homo sapiens
  misc_RNA (1)...(19): siRNA sense strand
gaucuugacuggguguaag

SEQ ID NO: 952353 - RNA, 19 nt, Homo sapiens
  misc_RNA (1)...(19): siRNA sense strand
uauccaaccagaauaacua

SEQ ID NO: 952354 - RNA, 19 nt, Homo sapiens
  misc_RNA (1)...(19): siRNA sense strand
gaauuucaaccaguacuau

SEQ ID NO: 952355 - RNA, 19 nt, Homo sapiens
  misc_RNA (1)...(19): siRNA sense strand
gccagaaggcgaaucaaug

SEQ ID NO: 952356 - RNA, 19 nt, Homo sapiens
  misc_RNA (1)...(19): siRNA sense strand
gcgcagugcucaucuacac

SEQ ID NO: 952357 - RNA, 19 nt, Homo sapiens
  misc_RNA (1)...(19): siRNA sense strand
caugaacaaugcacagaag

SEQ ID NO: 952358 - RNA, 19 nt, Homo sapiens
  misc_RNA (1)...(19): siRNA sense strand
ugaaguuucugagcauguu

SEQ ID NO: 952359 - RNA, 19 nt, Homo sapiens
  misc_RNA (1)...(19): siRNA sense strand
aaagugagacugaaacuac

SEQ ID NO: 952360 - RNA, 19 nt, Homo sapiens
  misc_RNA (1)...(19): siRNA sense strand
gagcuaaagaucuugaagu

SEQ ID NO: 952361 - RNA, 19 nt, Homo sapiens
  misc_RNA (1)...(19): siRNA sense strand
agacaucccuuggcuugga

SEQ ID NO: 952362 - RNA, 19 nt, Homo sapiens
  misc_RNA (1)...(19): siRNA sense strand
gcugaagugugagaugaau

SEQ ID NO: 952363 - RNA, 19 nt, Homo sapiens
  misc_RNA (1)...(19): siRNA sense strand
ccucaaauuugggagaaga

SEQ ID NO: 952364 - RNA, 19 nt, Homo sapiens
  misc_RNA (1)...(19): siRNA sense strand
gaccaccugucgagaugga

SEQ ID NO: 952365 - RNA, 19 nt, Homo sapiens
  misc_RNA (1)...(19): siRNA sense strand
ugacuggguguaagaauau

SEQ ID NO: 952366 - RNA, 19 nt, Homo sapiens
  misc_RNA (1)...(19): siRNA sense strand
ucagucaaccgauuuggaa

SEQ ID NO: 952367 - RNA, 19 nt, Homo sapiens
  misc_RNA (1)...(19): siRNA sense strand
ucagcaaagucaagacauc

SEQ ID NO: 952368 - RNA, 19 nt, Homo sapiens
  misc_RNA (1)...(19): siRNA sense strand
ggagaagauacaugagaug

SEQ ID NO: 952369 - RNA, 19 nt, Homo sapiens
  misc_RNA (1)...(19): siRNA sense strand
ccaugggcuugaagaagaa

SEQ ID NO: 952370 - RNA, 19 nt, Homo sapiens
  misc_RNA (1)...(19): siRNA sense strand
caaagaaauccuuaucacu

SEQ ID NO: 952371 - RNA, 19 nt, Homo sapiens
  misc_RNA (1)...(19): siRNA sense strand
ucaaccgauuuggaacuua
